(19) United States
(12) Patent Application Publication
(10) Pub. No.: US 2018/0236103 A1
(43) Pub. Date: Aug. 23, 2018

(54) CRISPR/CAS-RELATED METHODS AND COMPOSITIONS FOR TREATING HEPATITIS B VIRUS

(71) Applicant: EDITAS MEDICINE, INC., Cambridge, MA (US)

(72) Inventors: Ari E. Friedland, Boston, MA (US); Penrose O'Donnell, Yarmouth, ME (US)

(73) Assignee: EDITAS MEDICINE, INC., Cambridge, MA (US)

(21) Appl. No.: 15/958,439

(22) Filed: Apr. 20, 2018

Related U.S. Application Data
(63) Continuation of application No. PCT/US2016/057810, filed on Oct. 20, 2016.
(60) Provisional application No. 62/244,724, filed on Oct. 21, 2015.
(60) Provisional application No. 62/294,834, filed on Feb. 12, 2016.

(51) Int. Cl. A61K 48/00; C12N 9/22; C12N 15/113; C12N 15/85; C12N 15/90; A61P 31/22

(52) U.S. Cl. CPC A61K 48/005; C12N 9/22; A61P 31/22; C12N 15/85; C12N 15/907; C12N 15/1131

(57) ABSTRACT

CRISPR/CAS-related genome editing systems, compositions and methods for preventing and/or treating HBV infection are disclosed.

### CROSS-REFERENCES TO RELATED APPLICATIONS

[0001] This application is a Continuation of International Patent Application No. PCT/US16/57810, filed Oct. 20, 2016, which claims priority to U.S. Provisional Application No. 62/244,724, filed Oct. 21, 2015, and U.S. Provisional Application No. 62/294,834, filed Feb. 12, 2016, the contents of each of which are hereby incorporated by reference in their entirety herein, and to each of which priority is claimed.

### SEQUENCE LISTING

[0002] The present specification makes reference to a Sequence Listing (submitted electronically as a .txt file named “084177_0170SEQ” on Apr. 20, 2018). The 084177_0170SEQ.txt file was generated on Apr. 20, 2018 and is 32,232,586 bytes in size. The entire contents of the Sequence Listing are hereby incorporated by reference.

### FIELD OF THE INVENTION

[0003] The disclosure relates to CRISPR/CAS-related methods, compositions and genome editing systems for editing of a target nucleic acid sequence, e.g., altering one or more of the hepatitis B virus (HBV) viral genes, e.g., one or more of PreC, C, X, PreS1, PreS2, S, P and/or SP gene(s), and applications thereof in connection with HBV.

### BACKGROUND

[0004] Hepatitis B is a viral disease that is a frequent cause of cirrhosis and mortality worldwide. Chronic hepatitis B affects more than 240 million individuals worldwide (Franco et al, World J. Hepatol. 2012, 4, 74; Schweitzer et. al., Lancet, 2015, 50140-6736(15)61412-X). Hepatitis B is responsible for approximately 1 million deaths every year worldwide (Hepatitis B Foundation accessed Aug. 15, 2015 at: www.hepb.org/hepb/statistics.htm). In the United States (U.S.), 1 million individuals are chronically infected with Hepatitis B (Hepatitis B Foundation, accessed Aug. 15, 2015 at: www.hepb.org/hepb/statistics.htm). 5,000 deaths per year in the U.S. are due to hepatitis B infection (Hepatitis B Foundation accessed Aug. 15, 2015 at: www.hepb.org/hepb/statistics.htm).

[0005] Certain areas of the world have high prevalence rates, including Sub-Saharan Africa, East Asia and Pacific Nations. In these areas, more than 8% of the population is chronically infected with HBV. In the U.S., 0.3% of the population is chronically infected with HBV.

[0006] Hepatitis B is caused by hepatitis B virus (HBV). HBV is transmitted through exposure to blood or bodily fluids, including through sexual contact or the sharing of needles by intravenous drug use. Infants may acquire the infection in the perinatal period from an infected mother.

[0007] Acute infection with HBV is often asymptomatic. Chronic hepatitis B (CHB) infection develops in some proportion of subjects infected, depending on age and immunologic status. Up to 90% of adults who are infected will clear the virus and not develop CHB. Approximately 10% of adults will not clear the infection and will develop chronic hepatitis B (CHB). The inverse is true for infants: up to 90% of infants infected will develop CHB and approximately 10% of those infected will clear the infection. Children who are infected with HBV are at a much higher risk of developing CHB than adults and, subsequently, severe disease sequelae. In particular, between 25% and 50% of children infected with HBV will develop CHB.

[0008] CHB causes cirrhosis and hepatocellular carcinoma (HCC) in a significant subset of subjects. Subjects with CHB have a 1-2% annual risk of developing cirrhosis, and a 2-5% annual risk of developing HCC (Liaw et al, Hepatology, 1988; 8:493-496; Fattovich et al, Gastroenterology, 2004; 127:S35-S50). Between 15% and 40% of subjects with CHB will develop cirrhosis, HCC or liver failure (Perz et al, J Hepatol, 2006; 45: 529-538). Furthermore, subjects with HBV are also at risk for developing superinfection with Hepatitis D virus (HDV). HDV requires the presence of infection with HBV, as HDV relies on HBsAg presence for assembly and infectivity. Co-infection with HDV leads to more severe disease and a higher risk of disease sequelae. Subjects have 2-3 times the risk of developing cirrhosis or hepatocellular carcinoma (HCC) and have 2-3 times the risk of dying from the disease.

[0009] Host immune defense is very important to combating HBV infection. CD4+ T-cells and CD8+ cells are responsible for recognizing and clearing the pathogen. Subjects with impaired T-cell responses, including those with HIV, those receiving immunosuppressants following organ transplants, and neonates with developing immune systems, are more likely to develop chronic hepatitis B and are therefore more likely to develop cirrhosis and/or HCC.

[0010] Interferons and antiviral therapies, including nucleoside and nucleotide inhibitors, are the approved therapies for the treatment of chronic hepatitis B. Interferons (IFNs) include interferon-alpha (IFN) and PEGylated interferon (PEG-IFN), and nucleoside and nucleotide analogues include tenofovir and entacavir. These therapies decrease viral replication rates. The World Health Organization guidelines for the treatment of Hepatitis B advise treatment with both interferons and nucleos(t)ide analogues. In the United States, first line treatment with nucleos(t)ide analogues is the generally accepted standard of care. However, in subjects with HBV-HDV co-infection, nucleos(t)ide analogues are not effective. IFN or PEG-IFN is therefore used in the setting of HBV-HDV coinfection.

[0011] Interferon therapy and antiviral therapies control HBV replication, as evidenced by decreases in HBV DNA counts in subjects on active therapy. However, the majority of subjects with CHB will not achieve a functional cure after treatment with currently available therapies. 8-10% of subjects with CHB who undergo antiviral and/or IFN-based therapy achieve a functional cure, as defined by a loss of Hepatitis B surface antigen (HBsAg) expression in the blood. In addition, there is concern that resistant HBV strains will develop following treatment with nucleos(t)ide analogues.

[0012] A vaccine against HBV is available and is recommended for health care workers and infants in the United States. The incidence of new cases in the U.S. has declined considerably since the introduction of the vaccine in the mid-1980s. In spite of the existence of a hepatitis B vaccine and the use of antiviral therapy, chronic hepatitis B rates in the U.S. have remained constant for the last 16 years. Since 1999, the prevalence of CHB in the U.S. has remained stable at 0.3% (Roberts et. al, Hepatology 2015; Aug. 6. doi: 10.1002/hep.28109). As such, CHB remains a considerable public health problem in the U.S. and worldwide and current treatment regimens do not cure the disease in the majority of subjects.

[0013] Therefore, new therapies are needed to control and treat HBV, especially CHB. Novel therapies targeting HBV genomic DNA could produce a functional cure of the disease, defined by a loss of HBs antigen positivity in serum assays. Such therapies could prevent the development of cirrhosis in subjects with CHB and may also decrease the risk of hepatocellular carcinoma in subjects with CHB.

### SUMMARY OF THE DISCLOSURE

[0014] The methods, genome editing systems, and compositions discussed herein, provide for the treatment, prevention and/or reduction of hepatitis B virus (HBV), by introducing one or more mutations in the HBV genome, or by modifying the expression of one or more HBV proteins. The HBV genome includes but is not limited to the coding sequences of the PreC, C, X, PreS1, PreS2, S, P and SP genes which encode the Hbe, Hbc, Hbx, LHBs, MHBs, SHBs, Pol and HBSP proteins, respectively.

[0015] HBV is a hepadnavirus that preferentially affects hepatocytes. Enveloped virions contain a 3.2 kB double-stranded DNA genome with four partially overlapping open reading frames (ORFs). During chronic HBV infection, HBV DNA resides in the nucleus of hepatocytes in covalently closed circular DNA (cccDNA) form. Current therapies approved for the treatment of chronic HBV do not target HBV cccDNA.

[0016] The methods, genome editing systems, and compositions discussed herein provide for treatment, prevention and/or reduction of HBV, or its symptoms, by altering (e.g., knocking out and/or knocking down) one or more of the HBV viral genes, e.g., by knocking out one or more of PreC, C, X, PreS1, PreS2, S, P and/or SP gene(s). The methods, genome editing systems, and compositions discussed herein provide for treatment, prevention and/or reduction of HBV, or its symptoms, by knocking out one or more of the HBV viral genes, e.g., by knocking out one or more of PreC, X, PreS1, PreS2, S, P and/or SP gene(s). The methods, genome editing systems, and compositions discussed herein provide for treatment, prevention and/or reduction of HBV, or its symptoms, by knocking down one or more of the HBV viral genes, e.g., by knocking down one or more of PreC, X, PreS1, PreS2, S, P and/or SP gene(s). Methods and compositions discussed herein provide for treatment, prevention and/or reduction of HBV, or its symptoms, by concomitantly knocking out one or more of the HBV viral genes and knocking down one or more of the HBV viral genes, e.g., by knocking out one or more of PreC, C, X, PreS1, PreS2, S, P and/or SP gene(s) and knocking down one or more of PreC, C, X, PreS1, PreS2, S, P and/or SP gene(s). The methods, genome editing systems, and compositions discussed herein provide for treatment, prevention and/or reduction of HBV or its symptoms, by alteration of one or more positions within HBV genomic DNA leading to its destruction and/or elimination from infected cells.

[0017] In one aspect, the methods, genome editing systems, and compositions discussed herein may be used to alter one or more of PreC, C, X, PreS1, PreS2, S, P and/or SP gene(s) to treat, prevent and/or reduce HBV by targeting the gene(s), e.g., the non-coding or coding regions, e.g., the promoter region, or a transcribed sequence of PreC, C, X, PreS1, PreS2, S, P and/or SP gene(s). In certain embodiments, coding sequence, e.g., a coding region, e.g., an early coding region, of one or more of PreC, X, PreS1, PreS2, S, P and/or SP gene(s), is targeted for alteration e.g., knockout or knockdown of expression. In certain embodiments, coding sequence, e.g., a coding region, e.g., an early coding region, of one or more of PreC, X, PreS1, PreS2, S, P and/or SP gene(s), is targeted for alteration, e.g., knockout or knockdown of expression.

[0018] In certain embodiments, coding sequence, e.g., a coding region, e.g., an early coding region, of two or more of PreC, C, X, PreS1, PreS2, S, P and/or SP gene(s), is targeted for alteration and concomitant knockout and knockdown of expression. In certain embodiments, a non-coding sequence, e.g., promoter, an enhancer, 3′UTR, and/or polyadenylation signal, of two or more of PreC, C, X, PreS1, PreS2, S, P and/or SP gene(s), is targeted for alteration and concomitant knockout and knockdown of expression.

[0019] In certain embodiments, altering (e.g., knocking out and/or knocking down) the PreC, C, X, PreS1, PreS2, S, P or SP gene refers to (1) reducing or eliminating PreC, C, X, PreS1, PreS2, S, P or SP gene expression, (2) interfering with Precore, Core, X protein, Long surface protein, middle surface protein, S protein (also known as HBs antigen and HBsAg), polymerase protein, and/or Hepatitis B spliced protein function (proteins abbreviated, respectively, as HBe, HBc, HBx, PreS1, PreS2, S, Pol, and/or HBSP), or (3) reducing or eliminating the intracellular, serum and/or intra-parenchymal levels of HBe, HBc, HBx, LHBs, MHBs, SHBs, Pol, and/or HBSP proteins.

[0020] In certain embodiments, any sequence within the HBV genome, e.g., a coding region, e.g., an early coding region, or a non-coding region, e.g., promoter, an enhancer, 3′UTR, and/or polyadenylation signal of two or more of PreC, C, X, PreS1, PreS2, S, P and/or SP gene(s) is targeted for alteration (e.g., targeted knockout or targeted knockdown).

[0021] In certain embodiments, the methods, genome editing systems and compositions provide an alteration that comprises disrupting the PreC, C, X, PreS1, PreS2, S, P and/or SP gene by the insertion or deletion of one or more nucleotides mediated by Cas9 (e.g., enzymatically active Cas9 (eaCas9), e.g., Cas9 nuclease or Cas9 nickase) as described below. This type of alteration is also referred to as “knocking out” the PreC, C, X, PreS1, PreS2, S, P and/or SP gene.

[0022] In certain embodiments, the methods, genome editing systems and compositions provide an alteration of the expression of one or more of the PreC, C, X, PreS1, PreS2, S, P and/or SP genes that does not comprise nucleotide insertion or deletion in the PreC, C, X, PreS1, PreS2, S, P and/or SP gene and is mediated by enzymatically inactive Cas9 (eiCas9) or an eiCas9-fusion protein, as described below. This type of alteration is also referred to as “knocking down” the expression of one of more of the PreC, C, X, PreS1, PreS2, S, P and/or SP gene.

[0023] Knocking out PreC, C, X, PreS1, PreS2, S, P or SP genes, individually or in combination, can reduce HBV protein expression, infectivity, replication, and/or packaging and can therefore reduce, prevent and/or treat HBV infection. Knock down of the PreC, C, X, PreS1, PreS2, S, P or SP genes, individually or in combination, can reduce HBV protein expression, infectivity, replication, and/or packaging and can therefore reduce, prevent and/or treat HBV infection. Knock down of the PreC, C, X, PreS1, PreS2, S, P or SP genes, individually or in combination, can reduce HBV protein expression, causing the reduction of HBV peptide presentation by MHC class I and II molecules and the reversal of T-cell failure, which can treat HBV infection. Concomitant knockout and knock down of the PreC, C, X PreS1, PreS2, S, P or SP genes, individually or in combination, can reduce HBV protein expression, infectivity, replication, and/or packaging and can therefore reduce, prevent and/or treat HBV infection.

[0024] Knockout, knockdown or concomitant knockout and knockdown of the expression of the PreC, C, X, PreS1, PreS2, S, P or SP gene, individually or in combination, may cause any of the following, singly or in combination: decreased HBV DNA production, decreased HBV cccDNA production, decreased viral infectivity, decreased packaging of viral particles, decreased production of production of viral proteins, e.g., HBe, HBc, HBx, LHBs, MHBs, SHBs, Pol, and/or HBSP proteins, decreased presentation of HBV peptides by MHC class I and class II molecules, reversal of T-cell exhaustion and/or T-cell failure, and/or reversal of B-cell dysfunction. Knockout, knockdown or concomitant knockout and knockdown of the PreC, C, X PreS1, PreS2, S, P or SP genes, individually or in combination, may cause a decline in viral protein production, e.g., HBs Ag, HBeAg, HBcAg, HBxAg, HB preS1Ag, HB preS2Ag, HBsAg, HBpolAg and/or HBspAg. In certain embodiments, a decline in viral protein production may cause the restoration of immune response to HBV and clearance of chronic and/or acute HBV infection.

[0025] A vigorous CD8⁺ T cell response is thought to be important in the clearance of HBV (Schmidt et. al, Emerging Microbes & Infections (2013) 2, e15; Published online 27 Mar. 2013). The development of chronic HBV infection and concomitant failure to clear HBV is thought to be due to an impaired CD8⁺ T cell response to HBV (Ferrari C, et al. J Immunol 1990; 145: 3442-3449). The ability to restore CD8⁺ T cell response to HBV is thought to lead to the clearance and resolution of chronic HBV. (Webster et al. J Virol 2004; 78: 5707-5719.)

[0026] In certain embodiments, the methods, genome editing systems and compositions induce a decline in HBV protein production, e.g., HBe, HBc, HBx, LHBs, MHBs, SHBs, Pol, and/or HBSP protein production, so that there is a corresponding decline in HBV peptide presentation, e.g., HBe-derived, HBc-derived, HBx-derived, LHBs-derived, MHBs-derived, SHBs-derived, Pol-derived, and/or HBSP-derived peptide presentation, by MHC Class I molecules. MHC Class I molecules present HBV-derived peptides on infected liver cells and antigen presenting cells. In certain embodiments, the methods, genome editing systems and compositions lead to reconstitution of functional CD8⁺ T cell-mediated toxicity against HBV-infected hepatocytes, including CD-8⁺ T-cell mediated cell killing and/or CD-8⁺ T cell-mediated interferon (IFN) secretion locally within the liver parenchyma. In certain embodiments, CD-8⁺ T cell-mediated IFN secretion locally, e.g., within the liver parenchyma and/or at or near the site of HBV infected hepatocytes, mediates cell killing and clearance of HBV-infected cells without the systemic side effects of systemic IFN therapy. In certain embodiments, CD-8⁺ T cell-mediated IFN secretion locally leads to the clearance of HBV-infected hepatocytes and to a functional cure of HBV infection. In certain embodiments, the methods, genome editing systems and compositions lead to a reconstitution of immune competence by restoring activation of T-cell mediated cytotoxicity in subjects. IFN therapy in chronic HBV infection attempts to boost the immune response to HBV infection. the methods, genome editing systems and compositions described herein induce a local IFN response to HBV infection. In certain embodiments, the methods, genome editing systems and compositions described herein are more effective and have fewer systemic side effects, e.g., fever, malaise, or muscle aches, than systemic IFN-based therapy.

[0027] In certain embodiments, the methods, genome editing systems and compositions induce a decline in certain HBV proteins, e.g., HBc, e.g., HBpol, e.g., HBx, whose expression is thought to be the cause of T-cell failure in chronic HBV (Feng et. al, J Biomed Sci. 2007 January; 14(1):43-57).

[0028] In certain embodiments, the methods, genome editing systems and compositions induce a decline in any and/or all HBV protein production, e.g., HBe, HBc, HBx, LHBs, MHBs, SHBs, Pol, and/or HBSP protein production, as a high viral load is thought to be the primary mechanism for the failure of HBV-specific CD8+ T-cell responses (Schmidt et. al, Emerging Microbes & Infections (2013) 2, e15; Published online 27 Mar. 2013).

[0029] In certain embodiments, the methods, genome editing systems and compositions induce a decline in HBV protein production, e.g., HBe, HBc, HBx, LHBs, MHBs, SHBs, Pol, and/or HBSP protein. In certain embodiments, a decline in HBV protein production gives rise to a reduction in the overwhelming presentation of antigens to the humoral (B-cell) mediated immune system. In certain embodiments, B-cell mediated antibody production is no longer overwhelmed by HBV antigen production and B-cell mediated antibody production is stoichiometrically equivalent to HBV antigen production, e.g., HBsAg production is decreased and anti-HBs antibody can mediate clearance of HBsAg. In certain embodiments, a reduction in the volume and presentation of HBV antigens, e.g., HBeAg, HBcAg, HBxAg, HBsAg, HBpolAg allows for effective humoral immunity, e.g., viral-specific neutralizing antibody production, e.g., anti-HBe Ag production, e.g., anti-HBcAg production, e.g., anti-HBxAg production, e.g., anti-HBsAg production, e.g., anti-HBpolAg production. In certain embodiments, a reduction in the presentation of HBV antigens, e.g., HBeAg, HBcAg, HBxAg, HBsAg, HBpolAg allows for B-cell mediated antibody clearance of HBV antigens and viral particles, including the Dane particle.

[0030] In certain embodiments, a reduction in viral protein production leads to the reversal of ‘immune exhaustion’, with return of functional B-cell and T-cell responses against hepatocytes infected with HBV. In certain embodiments, the methods, genome editing systems and compositions induce a decline in viral protein production that causes B and T cells to achieve clearance of hepatocytes infected with HBV. In certain embodiments, the methods, genome editing systems and compositions induce a decline in viral protein production that causes a subject to achieve a functional virologic cure of chronic HBV, which is defined by a lack of HBsAg positivity on a serum assay.

[0031] In another aspect, the methods, genome editing systems and compositions discussed herein may be used to alter one or more of PreC, C, X PreS1, PreS2, S, P and/or SP gene(s) to treat, prevent and/or reduce HBV infection by targeting the coding sequence of one or more of PreC, C, X PreS1, PreS2, S, P and/or SP gene(s). In certain embodiments, the gene(s), e.g., the coding sequence of one or more of the PreC, C, X PreS1, PreS2, S, P and/or SP gene(s), are targeted to knock out one or more of PreC, C, X PreS1, PreS2, S, P and/or SP gene(s), e.g., to eliminate expression of one or more of PreC, C, X PreS1, PreS2, S, P and/or SP gene(s), e.g., to knockout one or more copies of one or more of PreC, C, X PreS1, PreS2, S, P and/or SP gene(s), e.g., by induction of an alteration comprising a deletion or mutation in one or more of PreC, C, X PreS1, PreS2, S, P and/or SP gene(s). In certain embodiments, the methods, genome editing systems and compositions provide an alteration that comprises an insertion or deletion. As described herein, a targeted knockout approach is mediated by non-homologous end joining (NHEJ) using a CRISPR/Cas system comprising a Cas9 molecule, fusion-protein or polypeptide, e.g., an enzymatically active Cas9 (eaCas9) molecule. In certain embodiments, the Cas9 molecule, fusion-protein or polypeptide is an S. pyogenes Cas9 variant. In certain embodiments, the S. pyogenes Cas9 variant is the EQR variant. In certain embodiments, the S. pyogenes Cas9 variant is the VRER variant. In certain embodiments, the Cas9 molecule, fusion-protein or polypeptide is an S. aureus Cas9 variant. In certain embodiments, the S. aureus Cas9 variant is the KKH variant.

[0032] In certain embodiments, an early coding sequence of one or more of PreC, C, X, PreS1, PreS2, S, P and/or SP gene(s) are targeted to knockout one or more of PreC, C, X PreS1, PreS2, S, P and/or SP gene(s). In certain embodiments, targeting affects one or more copies of the PreC, C, X, PreS1, PreS2, S, P and/or SP gene(s). In certain embodiments, a targeted knockout approach reduces or eliminates expression of one or more functional PreC, C, X, PreS1, PreS2, S, P and/or SP gene product(s). In certain embodiments, the methods, genome editing systems and compositions provide an alteration that comprises an insertion or deletion.

[0033] In another aspect, the methods, genome editing systems and compositions discussed herein may be used to alter one or more of PreC, C, X, PreS1, PreS2, S, P and/or SP gene(s) to treat, prevent and/or reduce HBV by targeting non-coding sequence of the PreC, C, X, PreS1, PreS2, S, P and/or SP gene(s), e.g., promoter, an enhancer, 3′UTR, and/or polyadenylation signal. In certain embodiments, the gene(s), e.g., the non-coding sequence of one or more PreC, C, X, PreS1, PreS2, S, P and/or SP gene(s), is targeted to knockout the gene(s), e.g., to eliminate expression of the gene(s), e.g., to knockout one or more copies of the PreC, C, X, PreS1, PreS2, S, P and/or SP gene(s), e.g., by induction of an alteration comprising a deletion or mutation in the PreC, C, X, PreS1, PreS2, S, P and/or SP gene(s). In certain embodiments, the methods, genome editing systems and compositions provide an alteration that comprises an insertion or deletion. In another aspect, a transcriptional regulatory region, e.g., a promoter region (e.g., a promoter region that controls the transcription of one or more of the PreC, C, X, PreS1, PreS2, S, P or SP genes) is targeted to alter (e.g., knock down) the expression of one or more of the PreC, C, X, PreS1, PreS2, S, P and/or SP gene(s). This type of alteration of the expression is also sometimes referred to as “knocking down” the expression of one or more of the PreC, C, X, PreS1, PreS2, S, P and/or SP gene(s). In certain embodiments, a targeted knockdown approach is mediated by a CRISPR/Cas system comprising a Cas9 molecule, e.g., an enzymatically inactive Cas9 (eiCas9) molecule or an eiCas9 fusion protein (e.g., an eiCas9 fused to a transcription repressor domain or chromatin modifying protein), as described herein. In an eiCas9 fusion protein (e.g., an eiCas9 fused to a transcription repressor domain or chromatin modifying protein, one or more gRNA molecules comprising a targeting domain are configured to target an enzymatically inactive Cas9 (eiCas9) molecule or an eiCas9 fusion protein (e.g., an eiCas9 fused to a transcription repressor domain), sufficiently close to the transcriptional regulatory region, e.g., a promoter region (e.g., a promoter region that controls the transcription of one or more PreC, C, X, PreS1, PreS2, S, P or SP genes). In certain embodiments, the eiCas9 molecule, fusion-protein or polypeptide is an S. pyogenes Cas9 variant. In certain embodiments, the S. pyogenes Cas9 variant is the EQR variant. In certain embodiments, the S. pyogenes Cas9 variant is the VRER variant. In certain embodiments, the Cas9 molecule, fusion-protein or polypeptide is an S. aureus Cas9 variant. In certain embodiments, the S. aureus Cas9 variant is the KKH variant. In certain embodiments, this approach gives rise to reduction, decrease or repression of the expression of one or more of the PreC, C, X PreS1, PreS2, S, P or SP genes. In certain embodiments, a promoter region that controls the transcription of one or more PreC, C, X, PreS1, PreS2, S, P or SP genes is located within HBV cccDNA. In certain embodiments, a promoter region that controls the transcription of one or more PreC, C, X, PreS1, PreS2, S, P or SP genes is located within integrated HBV DNA.

[0034] In certain embodiments, knockdown of one or more of the PreC, C, X PreS1, PreS2, S, P and/or SP gene(s) is performed by targeting the gene(s) within HBV cccDNA and/or integrated HBV DNA. In certain embodiments, eiCas9 or an eiCas9 fusion protein is utilized to knock down one or more of the PreC, C, X PreS1, PreS2, S, P and/or SP gene(s) located within the HBV cccDNA residing in an infected hepatocyte. In certain embodiments, eiCas9 or an eiCas9 fusion protein is utilized to knock down one or more of the PreC, C, X PreS1, PreS2, S, P and/or SP gene(s) that are integrated within the human genome in an infected hepatocyte. In certain embodiments, knockdown one or more of the PreC, C, X, PreS1, PreS2, S, P and/or SP gene(s) (located on cccDNA and/or integrated HBV DNA) may decrease the production of HBV rcDNA, HBV linearized DNA, HBV RNA intermediates and/or HBV proteins, e.g., HBe, HBc, HBx, LHBs, MHBs, SHBs, Pol, and/or HBSP.

[0035] In certain embodiments, HBV protein expression, including HBsAg production, results from expression at integrated HBV DNA sites in the human genome. In certain embodiments, knockdown of HBV protein production, e.g., HBe, HBc, HBx, LHBs, MHBs, SHBs, Pol, and/or HBSP protein production, by eiCas9 or an eiCas9 fusion protein mediated knock down of HBV DNA in cccDNA form and/or HBV DNA in integrated form allows recovery of a subject's B-cell mediated antibody response to HBV. In certain embodiments, knockdown of HBV protein production, e.g., HBe, HBc, HBx, LHBs, MHBs, SHBs, Pol, and/or HBSP protein production, by eiCas9 or an eiCas9 fusion protein mediated knock down of HBV DNA in cccDNA form and/or HBV DNA in integrated form allows recovery of a subject's T-cell mediated response to HBV. The methods, genome editing systems and compositions described herein promote the recovery of B-cell and/or T-cell mediated response to HBV. In certain embodiments, the methods, genome editing systems and compositions described herein lead to the reversal of immune exhaustion in a subject. In certain embodiments, the methods, genome editing systems and compositions described herein lead to clearance of infected hepatocytes.

[0036] In certain embodiments, knockdown of HBV protein production, e.g., HBc (HB core protein), HBpol (HB polymerase protein), HBx (HB x protein) and/or HBs (HB s protein) by eiCas9 or an eiCas9 fusion protein mediated knockdown of integrated genomic HBV DNA, leads to reversal of immune exhaustion in a subject, restoration of T-cell mediated immunity and/or clearance of chronic HBV infection.

[0037] In certain embodiments, knockdown of HBc (HB core protein) production, by eiCas9 or an eiCas9 fusion protein mediated knock down of HBV cccDNA, leads to reversal of immune exhaustion in a subject, restoration of T-cell mediated immunity and/or clearance of chronic HBV infection. In certain embodiments, knockdown of HBx (HB x protein) production, by eiCas9 or an eiCas9 fusion protein mediated knock down of HBV cccDNA, leads to reversal of immune exhaustion in a subject, restoration of T-cell mediated immunity and/or clearance of chronic HBV infection. In certain embodiments, knockdown of HBpol (HB polymerase protein) production, by eiCas9 or an eiCas9 fusion protein mediated knock down of HBV cccDNA, leads to reversal of immune exhaustion in a subject, restoration of T-cell mediated immunity and/or clearance of chronic HBV infection. In certain embodiments, knockdown of HBs (HB s protein) production, by eiCas9 or an eiCas9 fusion protein mediated knock down of HBV cccDNA, leads to reversal of immune exhaustion in a subject, restoration of T-cell mediated immunity and/or clearance of chronic HBV infection.

[0038] In certain embodiments, knockdown of HB core protein production, by eiCas9 or an eiCas9 fusion protein mediated knockdown of both integrated genomic HBV DNA and HBV cccDNA, leads to reversal of immune exhaustion, restoration of T-cell mediated immunity and/or clearance of chronic HBV infection in a subject. In certain embodiments, knockdown of HB x protein production, by eiCas9 or an eiCas9 fusion protein mediated knockdown of both integrated genomic HBV DNA and HBV cccDNA, leads to reversal of immune exhaustion, restoration of T-cell mediated immunity and/or clearance of chronic HBV infection in a subject. In certain embodiments, knockdown of HB polymerase protein production, by eiCas9 or an eiCas9 fusion protein mediated knockdown of both integrated genomic HBV DNA and HBV cccDNA, leads to reversal of immune exhaustion, restoration of T-cell mediated immunity and/or clearance of chronic HBV infection in a subject.

[0039] In certain embodiments, knockdown of HBs protein production, by eiCas9 or an eiCas9 fusion protein mediated knockdown of both integrated genomic HBV DNA and HBV cccDNA, leads to reversal of immune exhaustion, restoration of T-cell mediated immunity and/or clearance of chronic HBV infection in a subject.

[0040] In certain embodiments, knockdown of one or more of HBV protein production, e.g., HBe, HBc, HBx, LHBs, MHBs, SHBs, Pol, and/or HBSP, by eiCas9 or an eiCas9 fusion protein mediated knock down of integrated genomic HBV DNA and/or HBV cccDNA, leads to reversal of immune exhaustion, restoration of T-cell mediated immunity and/or clearance of chronic HBV infection in a subject.

[0041] In certain embodiments, knockdown of one or more of the PreC, C, X PreS1, PreS2, S, P and/or SP gene(s) cures HBV infection. In certain embodiments, the knockdown of one or more of the PreC, C, X PreS1, PreS2, S, P and/or SP gene(s) provides a functional cure of the HBV infection. In certain embodiments, knockdown of one or more of the PreC, C, X PreS1, PreS2, S, P and/or SP gene(s) leads to a sustained virologic response to HBV infection. In certain embodiments, knockdown of one or more of the PreC, C, X PreS1, PreS2, S, P and/or SP gene(s) is an effective method of preventing the sequelae of chronic HBV, including fibrosis, cirrhosis, and hepatocellular carcinoma.

[0042] In certain embodiments, one or more of the PreC, C, X PreS1, PreS2, S, P and/or SP gene(s) that is known to be integrated into the subject genome is targeted for knockdown. In certain embodiments, one or more of the PreC, C, X, PreS1, PreS2, S, P and/or SP gene(s) or one or more of a region of the HBV genome, e.g., the DR1 region, e.g., the DR2 region, e.g., PreC, e.g., C, that is known not to be integrated into the subject genome, is targeted for knockout. The DR1 region is a 12 base pair direct repeat region near the 5′ end of the HBV genome. The DR2 region is a 12 base pair direct repeat region near the 3′ end of the HBV genome. The HBV genome has been demonstrated to integrate into the human genome using the DR1 and/or DR2 regions as the host-viral DNA junction (DeJean et. al, Proceedings of National Academy of Science, 1984: 81:5350-5354). A common 2 base pair deletion in each of the DR1 and DR2 regions has been identified in integrated HBV DNA. In certain embodiments, targeting of the full DR1 and/or DR2 sequence for knockout (e.g., non-deleted form), e.g., 5′ T-T-C-A-C-C-T-C-T-G-C, allows for specific knockout of a region that is known not to be integrated and/or is less commonly integrated into a subject's DNA. In certain embodiments, targeting of a partially deleted DR1 and/or DR2 sequence for knockdown, e.g., 5′ C-A-C-C-T-C-T-G-C, allows for specific knockdown of a region that is known to be integrated into a subject's DNA.

[0043] In certain embodiments, the methods, genome editing systems and compositions comprise knockdown of a region of the HBV genome, e.g., one or more of the PreC, C, X PreS1, PreS2, S, P and/or SP gene(s), that is integrated into the subject genome. In certain embodiments, the methods, genome editing systems and compositions comprise knockdown of a region of the HBV genome, e.g., one or more of the PreC, C, X PreS1, PreS2, S, P and/or SP gene(s), in a manner that targets both a region of HBV cccDNA and an integrated region of the HBV genome.

[0044] In certain embodiments, the methods, genome editing systems and compositions disclosed herein can comprise knockdown of a region of the HBV genome, e.g., the S gene, e.g., one or more of the PreC, C, X PreS1, PreS2, P and/or SP gene(s) that is integrated into the subject genome in order to decrease circulating HBV antigen levels, including but not limited to HBsAg. In a chimpanzee model, integrated DNA is implicated in the production of HBsAg and in circulating HBs antigen-emia (Wooddell et al., AASLD abstract #32, Hepatology, 2015: 222A-223A). In certain embodiments, the method comprises knockdown of a region of the HBV genome, e.g., the S gene, to induce a functional cure of HBV infection.

[0045] In certain embodiments, the methods, genome editing systems and compositions comprise knockout of a region of the HBV genome, e.g., one or more of the PreC, C, X PreS1, PreS2, S, P and/or SP gene(s), that is not integrated into the subject genome. In certain embodiments, the methods, genome editing systems and compositions comprise knockout of a region of the HBV genome, e.g., one or more of the PreC, C, X, PreS1, PreS2, S, P and/or SP gene(s), in a manner that targets both a region of HBV cccDNA and an integrated region of the HBV genome.

[0046] In certain embodiments, the methods, genome editing systems and compositions comprise concomitant 1) knockout and 2) knockdown of two distinct regions of the HBV genome, e.g., 1) knockdown of a region of the HBV genome that is integrated into the subject genome and 2) knockout of a different region of the HBV genome that is not integrated into the subject genome (e.g., on the HBV ccc DNA).

[0047] The methods, genome editing systems and compositions described herein may reduce the risk of hepatocellular carcinoma in a subject who has been exposed to HBV or who has chronic HBV. The methods, genome editing systems and compositions described herein may also reduce the risk of cirrhosis, fibrosis and end stage liver disease in a subject who has been exposed to HBV or who has chronic HBV.

[0048] In certain embodiments, the coding region of the PreC, C, X, PreS1, PreS2, S, P or SP gene, is targeted to alter the expression of the PreC, C, X, PreS1, PreS2, S, P or SP gene. In certain embodiments, a non-coding region (e.g., an enhancer region, a promoter region, 5′ UTR, 3′UTR, polyadenylation signal) of the PreC, C, X, PreS1, PreS2, S, P or SP gene is targeted to alter the expression of the PreC, C, X, PreS1, PreS2, S, P or SP gene. In certain embodiments, the promoter region of the PreC, C, X, PreS1, PreS2, S, P or SP gene is targeted to knock down the expression of one or more of the PreC, C, X, PreS1, PreS2, S, P or SP gene. A targeted knockdown approach alters, e.g., reduces or eliminates the expression of the PreC, C, X, PreS1, PreS2, S, P or SP gene. As described herein, in certain embodiments, a targeted knockdown is mediated by targeting an enzymatically inactive Cas9 (eiCas9) or an eiCas9 fused to a transcription repressor domain or chromatin modifying protein to alter transcription, e.g., to block, reduce, or decrease transcription, of the PreC, C, X, PreS1, PreS2, S, P or SP gene.

[0049] In certain embodiments, one or more gRNA molecules comprise a targeting domain configured to target an enzymatically inactive Cas9 (eiCas9) or an eiCas9 fusion protein (e.g., an eiCas9 fused to a transcription repressor domain), sufficiently close to an HBV target knockdown position to reduce, decrease or repress expression of the PreC, C, X, PreS1, PreS2, S, P or SP gene.

[0050] The presently disclosed subject matter provides a genome editing system, a composition or a vector comprising: a gRNA molecule comprising a targeting domain that is complementary with a target sequence of a Hepatitis B virus (HBV) viral gene selected from the group consisting of PreC gene, C gene, X gene, PreS1 gene, PreS2 gene, S gene, P gene and SP gene. In certain embodiments, the genome editing system, composition, or vector further comprises a Cas9 molecule. In certain embodiments, the targeting domain is configured to form a double strand break or a single strand break within about 500 bp, about 450 bp, about 400 bp, about 350 bp, about 300 bp, about 250 bp, about 200 bp, about 150 bp, about 100 bp, about 50 bp, about 25 bp, or about 10 bp of an HBV target position, thereby altering the HBV viral gene. Alteration of the HBV viral gene can include knockout of the HBV viral gene, knockdown of the HBV viral gene, or concomitant knockout and knockdown of the HBV viral gene.

[0051] In certain embodiments, the targeting domain comprises a nucleotide sequence that is identical to, or differs by no more than 1, 2, or 3 nucleotides from, a nucleotide sequence selected from SEQ ID NOS: 215-141071.

[0052] In certain embodiments, the Cas9 molecule is an S. pyogenes Cas9 molecule, and the targeting domain comprises a nucleotide sequence that is identical to, or differs by no more than 1, 2, or 3 nucleotides from, a nucleotide sequence selected from the group consisting of:

[0053] (a) SEQ ID NOS: 15389-16329;

[0054] (b) SEQ ID NOS: 31598-32518;

[0055] (c) SEQ ID NOS: 47978-48841;

[0056] (d) SEQ ID NOS: 62798-63714;

[0057] (e) SEQ ID NOS: 79221-80079;

[0058] (f) SEQ ID NOS: 94449-95356;

[0059] (g) SEQ ID NOS: 110120-111022; and

[0060] (h) SEQ ID NOS: 125842-126712.

[0061] In certain embodiments, the S. pyogenes Cas9 molecule recognizes a Protospacer Adjacent Motif (PAM) of NGG, the genome editing system, composition, or vector targets HBV genotype A (HBV-A), and the targeting domain comprises a nucleotide sequence that is identical to, or differs by no more than 1, 2, or 3 nucleotides from, a nucleotide sequence selected from SEQ ID NOS: 15389-16329.

[0062] In certain embodiments, the S. pyogenes Cas9 molecule recognizes a PAM of NGG, the genome editing system, composition, or vector targets HBV genotype B (HBV-B), and the targeting domain comprises a nucleotide sequence that is identical to, or differs by no more than 1, 2, or 3 nucleotides from, a nucleotide sequence selected from SEQ ID NOS: 31598-32518.

[0063] In certain embodiments, the S. pyogenes Cas9 molecule recognizes a PAM of NGG, the genome editing system, composition, or vector targets HBV genotype C (HBV-C), and the targeting domain comprises a nucleotide sequence that is identical to, or differs by no more than 1, 2, or 3 nucleotides from, a nucleotide sequence selected from SEQ ID NOS: 47978-48841.

[0064] In certain embodiments, the S. pyogenes Cas9 molecule recognizes a PAM of NGG, the genome editing system, composition, or vector targets HBV genotype D (HBV-D), and the targeting domain comprises a nucleotide sequence that is identical to, or differs by no more than 1, 2, or 3 nucleotides from, a nucleotide sequence selected from SEQ ID NOS: 62798-63714.

[0065] In certain embodiments, the Cas9 molecule is an S. pyogenes Cas9 EQR variant, and the targeting domain comprises a nucleotide sequence that is identical to, or differs by no more than 1, 2, or 3 nucleotides from, a nucleotide sequence selected from the group consisting of:

[0066] (a) SEQ ID NOS: 215-1565;

[0067] (b) SEQ ID NOS: 2225-3535;

[0068] (c) SEQ ID NOS: 4169-5381;

[0069] (d) SEQ ID NOS: 5977-7325;

[0070] (e) SEQ ID NOS: 7953-9213;

[0071] (f) SEQ ID NOS: 9830-11082;

[0072] (g) SEQ ID NOS: 11678-12954; and

[0073] (h) SEQ ID NOS: 13563-14791.

[0074] In certain embodiments, the S. pyogenes Cas9 EQR variant recognizes a PAM selected from the group consisting of NGAG, NGCG, NGGG, NGTG, NGAA, NGAT, and NGAC, the genome editing system, composition, or vector targets HBV genotype A (HBV-A), and the targeting domain comprises a nucleotide sequence that is identical to, or differs by no more than 1, 2, or 3 nucleotides from, a nucleotide sequence selected from SEQ ID NOS: 215-1565.

[0075] In certain embodiments, the S. pyogenes Cas9 EQR variant recognizes a PAM selected from the group consisting of NGAG, NGCG, NGGG, NGTG, NGAA, NGAT, and NGAC, the genome editing system, composition, or vector targets HBV genotype B (HBV-B), and the targeting domain comprises a nucleotide sequence that is identical to, or differs by no more than 1, 2, or 3 nucleotides from, a nucleotide sequence selected from SEQ ID NOS: 2225-3535.

[0076] In certain embodiments, the S. pyogenes Cas9 EQR variant recognizes a PAM selected from the group consisting of NGAG, NGCG, NGGG, NGTG, NGAA, NGAT, and NGAC, the genome editing system, composition, or vector targets HBV genotype C (HBV-C), and the targeting domain comprises a nucleotide sequence that is identical to, or differs by no more than 1, 2, or 3 nucleotides from, a nucleotide sequence selected from SEQ ID NOS: 4169-5381.

[0077] In certain embodiments, the S. pyogenes Cas9 EQR variant recognizes a PAM selected from the group consisting of NGAG, NGCG, NGGG, NGTG, NGAA, NGAT, and NGAC, the genome editing system, composition, or vector targets HBV genotype D (HBV-D), and the targeting domain comprises a nucleotide sequence that is identical to, or differs by no more than 1, 2, or 3 nucleotides from, a nucleotide sequence selected from SEQ ID NOS: 5977-7325.

[0078] In certain embodiments, the Cas9 molecule is an S. pyogenes Cas9 VRER variant, and the targeting domain comprises a nucleotide sequence that is identical to, or differs by no more than 1, 2, or 3 nucleotides from, a nucleotide sequence selected from the group consisting of:

[0079] (a) SEQ ID NOS: 1566-2224;

[0080] (b) SEQ ID NOS: 3536-4168;

[0081] (c) SEQ ID NOS: 5382-5976;

[0082] (d) SEQ ID NOS: 7326-7952;

[0083] (e) SEQ ID NOS: 9214-9829;

[0084] (f) SEQ ID NOS: 11083-11677;

[0085] (g) SEQ ID NOS: 12955-13562; and

[0086] (h) SEQ ID NOS: 14792-15388.

[0087] In certain embodiments, the S. pyogenes Cas9 VRER variant recognizes a PAM selected from the group consisting of NGCG, NGCA, NGCT, and NGCC, the genome editing system, composition, or vector targets HBV genotype A (HBV-A), and the targeting domain comprises a nucleotide sequence that is identical to, or differs by no more than 1, 2, or 3 nucleotides from, a nucleotide sequence selected from SEQ ID NOS: 1566-2224.

[0088] In certain embodiments, the S. pyogenes Cas9 VRER variant recognizes a PAM selected from the group consisting of NGCG, NGCA, NGCT, and NGCC, the genome editing system, composition, or vector targets HBV genotype B (HBV-B), and the targeting domain comprises a nucleotide sequence that is identical to, or differs by no more than 1, 2, or 3 nucleotides from, a nucleotide sequence selected from SEQ ID NOS: 3536-4168.

[0089] In certain embodiments, the S. pyogenes Cas9 VRER variant recognizes a PAM selected from the group consisting of NGCG, NGCA, NGCT, and NGCC, the genome editing system, composition, or vector targets HBV genotype C (HBV-C), and the targeting domain comprises a nucleotide sequence that is identical to, or differs by no more than 1, 2, or 3 nucleotides from, a nucleotide sequence selected from SEQ ID NOS: 5382-5976.

[0090] In certain embodiments, the S. pyogenes Cas9 VRER variant recognizes a PAM selected from the group consisting of NGCG, NGCA, NGCT, and NGCC, the genome editing system, composition, or vector targets HBV genotype D (HBV-D), and the targeting domain comprises a nucleotide sequence that is identical to, or differs by no more than 1, 2, or 3 nucleotides from, a nucleotide sequence selected from SEQ ID NOS: 7326-7952.

[0091] In certain embodiments, the Cas9 molecule is an S. aureus Cas9 molecule, and the targeting domain comprises a nucleotide sequence that is identical to, or differs by no more than 1, 2, or 3 nucleotides from, a nucleotide sequence selected from the group consisting of:

[0092] (a) SEQ ID NOS: 16330-19822;

[0093] (b) SEQ ID NOS: 32519-35976;

[0094] (c) SEQ ID NOS: 48842-51921;

[0095] (d) SEQ ID NOS: 63715-67224;

[0096] (e) SEQ ID NOS: 80080-83218;

[0097] (f) SEQ ID NOS: 95357-98663;

[0098] (g) SEQ ID NOS: 111023-114350; and

[0099] (h) SEQ ID NOS: 126713-129862.

[0100] In certain embodiments, the S. aureus Cas9 molecule recognizes a PAM of either NNNRRT or NNNRRV, the genome editing system, composition, or vector targets HBV genotype A (HBV-A), and the targeting domain comprises a nucleotide sequence that is identical to, or differs by no more than 1, 2, or 3 nucleotides from, a nucleotide sequence selected from SEQ ID NOS: 16330-19822.

[0101] In certain embodiments, the S. aureus Cas9 molecule recognizes a PAM of either NNNRRT or NNNRRV, the genome editing system, composition, or vector targets HBV genotype B (HBV-B), and the targeting domain comprises a nucleotide sequence that is identical to, or differs by no more than 1, 2, or 3 nucleotides from, a nucleotide sequence selected from SEQ ID NOS: 32519-35976.

[0102] In certain embodiments, the S. aureus Cas9 molecule recognizes a PAM of either NNNRRT or NNNRRV, the genome editing system, composition, or vector targets HBV genotype C (HBV-C), and the targeting domain comprises a nucleotide sequence that is identical to, or differs by no more than 1, 2, or 3 nucleotides from, a nucleotide sequence selected from SEQ ID NOS: 48842-51921.

[0103] In certain embodiments, the S. aureus Cas9 molecule recognizes a PAM of either NNNRRT or NNNRRV, the genome editing system, composition, or vector targets HBV genotype D (HBV-D), and the targeting domain comprises a nucleotide sequence that is identical to, or differs by no more than 1, 2, or 3 nucleotides from, a nucleotide sequence selected from SEQ ID NOS: 63715-67224.

[0104] In certain embodiments, the Cas9 molecule is an S. aureus Cas9 KKH variant, and the targeting domain comprises a nucleotide sequence that is identical to, or differs by no more than 1, 2, or 3 nucleotides from, a nucleotide sequence selected from the group consisting of:

[0105] (a) SEQ ID NOS: 19823-31597;

[0106] (b) SEQ ID NOS: 35977-47977;

[0107] (c) SEQ ID NOS: 51922-62797;

[0108] (d) SEQ ID NOS: 67225-79220;

[0109] (e) SEQ ID NOS: 83219-94448;

[0110] (f) SEQ ID NOS: 98664-110119;

[0111] (g) SEQ ID NOS: 114351-125841; and

[0112] (h) SEQ ID NOS: 129863-141071.

[0113] In certain embodiments, the S. aureus Cas9 KKH variant recognizes a PAM of either NNNRRT or NNNRRV, the genome editing system, composition, or vector targets HBV genotype A (HBV-A), and the targeting domain comprises a nucleotide sequence that is identical to, or differs by no more than 1, 2, or 3 nucleotides from, a nucleotide sequence selected from SEQ ID NOS: 19823-31597.

[0114] In certain embodiments, the S. aureus Cas9 KKH variant recognizes a PAM of either NNNRRT or NNNRRV, the genome editing system, composition, or vector targets HBV genotype B (HBV-B), and the targeting domain comprises a nucleotide sequence that is identical to, or differs by no more than 1, 2, or 3 nucleotides from, a nucleotide sequence selected from SEQ ID NOS: 35977-47977.

[0115] In certain embodiments, the S. aureus Cas9 KKH variant recognizes a PAM of either NNNRRT or NNNRRV, the genome editing system, composition, or vector targets HBV genotype C (HBV-C), and the targeting domain comprises a nucleotide sequence that is identical to, or differs by no more than 1, 2, or 3 nucleotides from, a nucleotide sequence selected from SEQ ID NOS: 51922-62797.

[0116] In certain embodiments, the S. aureus Cas9 KKH variant recognizes a PAM of either NNNRRT or NNNRRV, the genome editing system, composition, or vector targets HBV genotype D (HBV-D), and the targeting domain comprises a nucleotide sequence that is identical to, or differs by no more than 1, 2, or 3 nucleotides from, a nucleotide sequence selected from SEQ ID NOS: 67225-79220.

[0117] The presently disclosed subject matter further provides a gRNA molecule, e.g., an isolated or non-naturally occurring gRNA molecule, comprising a targeting domain which is complementary with a target sequence of a Hepatitis B virus (HBV) viral gene selected from the group consisting of PreC gene, C gene, X gene, PreS1 gene, PreS2 gene, S gene, P gene and SP gene.

[0118] In certain embodiments, the targeting domain of the gRNA molecule is configured to provide a cleavage event, e.g., a double strand break or a single strand break, sufficiently close to a HBV target position in the PreC, C, X, PreS1, PreS2, S, P or SP gene to allow alteration, e.g., alteration associated with NHEJ, of a HBV target position in the PreC, C, X, PreS1, PreS2, S, P or SP gene. In certain embodiments, the targeting domain is configured such that a cleavage event, e.g., a double strand or single strand break, is positioned within about 1, about 2, about 3, about 4, about 5, about 10, about 15, about 20, about 25, about 30, about 35, about 40, about 45, about 50, about 60, about 70, about 80, about 90, about 100, about 150 or about 200 nucleotides of a HBV target position. The break, e.g., a double strand or single strand break, can be positioned upstream or downstream of a HBV target position in the PreC, C, X, PreS1, PreS2, S, P or SP gene. In certain embodiments, the targeting domain of the gRNA molecule is configured to provide a cleavage event selected from a double strand break and a single strand break, within 500 (e.g., within 500, 400, 300, 250, 200, 150, 100, 80, 60, 40, 20, or 10) nucleotides of a HBV target position.

[0119] In certain embodiments, a second gRNA molecule comprising a second targeting domain is configured to provide a cleavage event, e.g., a double strand break or a single strand break, sufficiently close to the HBV target position in the PreC, C, X PreS1, PreS2, S, P or SP gene, to allow alteration, e.g., alteration associated with NHEJ, of the HBV target position in the PreC, C, X PreS1, PreS2, S, P or SP gene, either alone or in combination with the break positioned by said first gRNA molecule. In certain embodiments, the targeting domains of the first and second gRNA molecules are configured such that a cleavage event, e.g., a double strand or single strand break, is positioned, independently for each of the gRNA molecules, within about 1, about 2, about 3, about 4, about 5, about 10, about 15, about 20, about 25, about 30, about 35, about 40, about 45, about 50, about 60, about 70, about 80, about 90, about 100, about 150 or about 200 nucleotides of the target position. In certain embodiments, the breaks, e.g., double strand or single strand breaks, are positioned on both sides of a nucleotide of a HBV target position in the PreC, C, X, PreS1, PreS2, S, P or SP gene. In certain embodiments, the breaks, e.g., double strand or single strand breaks, are positioned on one side, e.g., upstream or downstream, of a nucleotide of a HBV target position in the PreC, C, X, PreS1, PreS2, S, P or SP gene. In certain embodiments, the targeting domain of the first and/or second gRNA molecule is configured to provide a cleavage event selected from a double strand break and a single strand break, within about 500 (e.g., within about 500, about 400, about 300, about 250, about 200, about 150, about 100, about 80, about 60, about 40, about 20, or about 10) nucleotides of a HBV target position.

[0120] In certain embodiments, a single strand break is accompanied by an additional single strand break, positioned by a second gRNA molecule, as discussed below. For example, the targeting domains are configured such that a cleavage event, e.g., the two single strand breaks, are positioned within about 1, about 2, about 3, about 4, about 5, about 10, about 15, about 20, about 25, about 30, about 35, about 40, about 45, about 50, about 60, about 70, about 80, about 90, about 100, about 150 or about 200 nucleotides of a HBV target position. In certain embodiments, the first and second gRNA molecules are configured such, that when guiding a Cas9 molecule, e.g., a Cas9 nickase, a single strand break will be accompanied by an additional single strand break, positioned by a second gRNA, sufficiently close to one another to result in alteration of a HBV target position in the PreC, C, X PreS1, PreS2, S, P or SP gene. In certain embodiments, the first and second gRNA molecules are configured such that a single strand break positioned by said second gRNA is within about 10, about 20, about 30, about 40, or about 50 nucleotides of the break positioned by said first gRNA molecule, e.g., when the Cas9 molecule is a nickase. In certain embodiments, the two gRNA molecules are configured to position cuts at the same position, or within a few nucleotides of one another, on different strands, e.g., essentially mimicking a double strand break.

[0121] In certain embodiments, a double strand break can be accompanied by an additional double strand break, positioned by a second gRNA molecule, as is discussed below. For example, the targeting domain of a first gRNA molecule is configured such that a double strand break is positioned upstream of a HBV target position in the PreC, C, X PreS1, PreS2, S, P or SP gene, e.g., within about 1, about 2, about 3, about 4, about 5, about 10, about 15, about 20, about 25, about 30, about 35, about 40, about 45, about 50, about 60, about 70, about 80, about 90, about 100, about 150 or about 200 nucleotides of the target position; and the targeting domain of a second gRNA molecule is configured such that a double strand break is positioned downstream of a HBV target position in the PreC, C, X PreS1, PreS2, S, P or SP gene, e.g., within about 1, about 2, about 3, about 4, about 5, about 10, about 15, about 20, about 25, about 30, about 35, about 40, about 45, about 50, about 60, about 70, about 80, about 90, about 100, about 150 or about 200 nucleotides of the target position.

[0122] In certain embodiments, a double strand break can be accompanied by two additional single strand breaks, positioned by a second gRNA molecule and a third gRNA molecule. For example, the targeting domain of a first gRNA molecule is configured such that a double strand break is positioned upstream of a HBV target position in the PreC, C, X PreS1, PreS2, S, P or SP gene, e.g., within about 1, about 2, about 3, about 4, about 5, about 10, about 15, about 20, about 25, about 30, about 35, about 40, about 45, about 50, about 60, about 70, about 80, about 90, about 100, about 150 or about 200 nucleotides of the target position; and the targeting domains of a second and third gRNA molecule are configured such that two single strand breaks are positioned downstream of a HBV target position in the PreC, C, X, PreS1, PreS2, S, P or SP gene, e.g., within about 1, about 2, about 3, about 4, about 5, about 10, about 15, about 20, about 25, about 30, about 35, about 40, about 45, about 50, about 60, about 70, about 80, about 90, about 100, about 150 or about 200 nucleotides of the target position. In certain embodiments, the targeting domain of the first, second and third gRNA molecules are configured such that a cleavage event, e.g., a double strand or single strand break, is positioned, independently for each of the gRNA molecules.

[0123] In certain embodiments, a first and second single strand breaks can be accompanied by two additional single strand breaks positioned by a third gRNA molecule and a fourth gRNA molecule. For example, the targeting domain of a first and second gRNA molecule are configured such that two single strand breaks are positioned upstream of a HBV target position in the PreC, C, X, PreS1, PreS2, S, P or SP gene, e.g., within about 1, about 2, about 3, about 4, about 5, about 10, about 15, about 20, about 25, about 30, about 35, about 40, about 45, about 50, about 60, about 70, about 80, about 90, about 100, about 150 or about 200 nucleotides of the target position; and the targeting domains of a third and fourth gRNA molecule are configured such that two single strand breaks are positioned downstream of a HBV target position in the PreC, C, X PreS1, PreS2, S, P or SP gene, e.g., within about 1, about 2, about 3, about 4, about 5, about 10, about 15, about 20, about 25, about 30, about 35, about 40, about 45, about 50, about 60, about 70, about 80, about 90, about 100, about 150 or about 200 nucleotides of the target position. In certain embodiments, the targeting domain of the first, second, third, and/or fourth gRNA molecule is configured to provide a cleavage event selected from a double strand break and a single strand break, within about 500 (e.g., within about 500, about 400, about 300, about 250, about 200, about 150, about 100, about 80, about 60, about 40, about 20, or about 10) nucleotides of a HBV target position.

[0124] In certain embodiments, when multiple gRNAs are used to generate (1) two single stranded breaks in close proximity, (2) two double stranded breaks, e.g., flanking a HBV target position (e.g., to remove a piece of DNA, e.g., to create a deletion mutation) or to create more than one indel in the gene, e.g., in a coding region, e.g., an early coding region, (3) one double stranded break and two paired nicks flanking a HBV target position (e.g., to remove a piece of DNA, e.g., to insert a deletion) or (4) four single stranded breaks, two on each side of a position, that they are targeting the same HBV target position. In certain embodiments, multiple gRNAs may be used to target more than one HBV target position in the same gene, e.g., one or more of PreC, X, PreS1, PreS2, S, P and/or SP gene(s).

[0125] In certain embodiments, the targeting domain of the first gRNA molecule and the targeting domain of the second gRNA molecules are complementary to opposite strands of the target nucleic acid molecule. In certain embodiments, the first gRNA molecule and the second gRNA molecule are configured such that the PAMs are oriented outward.

[0126] In certain embodiments, the targeting domain of a gRNA molecule is configured to avoid unwanted target chromosome elements, such as repeat elements, e.g., Alu repeats, in the target domain. The gRNA molecule may be a first, second, third and/or fourth gRNA molecule, as described herein.

[0127] In certain embodiments, the targeting domain of a gRNA molecule is configured to position a cleavage event sufficiently far from a preselected nucleotide, e.g., the nucleotide of a coding region, such that the nucleotide is not altered. In certain embodiments, the targeting domain of a gRNA molecule is configured to position an intronic cleavage event sufficiently far from an intron/exon border, or naturally occurring splice signal, to avoid alteration of the exonic sequence or unwanted splicing events. The gRNA molecule may be a first, second, third and/or fourth gRNA molecule, as described herein.

[0128] In certain embodiments, the targeting domain comprises a nucleotide sequence that is identical to, or differs by no more than 1, 2, 3, 4, or 5 nucleotides from, the nucleotide sequence selected the nucleotide sequence selected from SEQ ID NOS: 215 to 141071.

[0129] In certain embodiments, an HBV target position in the coding region, e.g., the early coding region, of the PreC, C, X, PreS1, PreS2, S, P or SP gene is targeted, e.g., for knockout. In certain embodiments, a HBV target position in the non-coding region, e.g., promoter, an enhancer, 3′UTR, and/or polyadenylation signal of the PreC, C, X, PreS1, PreS2, S, P or SP gene is targeted, e.g., for knockout. In certain embodiments, a HBV target position in a transcriptional regulatory region, e.g., a promoter region (e.g., a promoter region that controls the transcription of one or more of the PreC, C, X, PreS1, PreS2, S, P or SP genes) is targeted to alter (e.g., knock down) the expression of one or more of the PreC, C, X, PreS1, PreS2, S, P and/or SP gene(s).

[0130] In certain embodiments, when the HBV target position is the PreC, C, X, PreS1, PreS2, S, P or SP gene coding region, e.g., an early coding region, and more than one gRNA is used to position breaks, e.g., two single stranded breaks or two double stranded breaks, or a combination of single strand and double strand breaks, e.g., to create one or more indels, in the target nucleic acid sequence.

[0131] In certain embodiments, when the HBV target position is the PreC, C, X, PreS1, PreS2, S, P or SP gene non-coding region, e.g., promoter, an enhancer, 3′UTR, and/or polyadenylation signal, and more than one gRNA is used to position breaks, e.g., two single stranded breaks or two double stranded breaks, or a combination of single strand and double strand breaks, e.g., to create one or more indels, in the target nucleic acid sequence.

[0132] In certain embodiments, the gRNA is a modular gRNA or a chimeric gRNA. In certain embodiments, the targeting domain has a length of 16, 17, 18, 19, 20, 21, 22, 23, 24, 25, or 26 nucleotides in length.

[0133] A gRNA as described herein may comprise from 5′ to 3′: a targeting domain (comprising a “core domain”, and optionally a “secondary domain”); a first complementarity domain; a linking domain; a second complementarity domain; and a proximal domain. In certain embodiments, the gRNA molecule further comprises a tail domain. In certain embodiments, the proximal domain and tail domain are taken together as a single domain.

[0134] In certain embodiments, a gRNA molecule comprises a linking domain of no more than 25 nucleotides in length; a proximal and tail domain, that taken together, are at least 20, 25, 30, or 40 nucleotides in length; and a targeting domain equal to or greater than 16, 17, 18, 19, 20, 21, 22, 23, 24, 25 or 26 nucleotides in length.

[0135] A cleavage event, e.g., a double strand or single strand break, is generated by a Cas9 molecule. The Cas9 molecule may be an enzymatically active Cas9 (eaCas9) molecule, e.g., an eaCas9 molecule that forms a double strand break in a target nucleic acid or an eaCas9 molecule forms a single strand break in a target nucleic acid (e.g., a nickase molecule). In certain embodiments, the eaCas9 molecule catalyzes a double strand break.

[0136] The Cas9 molecule can a wild-type Cas9 molecule, a mutant Cas9 molecule, or a combination thereof. In certain embodiments, the mutant Cas9 molecule comprises a mutation selected from the group consisting of D10, E762, D986, H840, N854, N863, and N580. In certain embodiments, the Cas9 molecule is an S. aureus Cas9 molecule or an S. pyogenes Cas9 molecule. The S. aureus Cas9 molecule can be an S. aureus Cas9 variant. In certain embodiments, the S. aureus Cas9 variant is an S. aureus Cas9 KKH variant. The S. pyogenes Cas9 molecule can be an S. pyogenes Cas9 variant. In certain embodiments, the S. pyogenes Cas9 variant is an S. pyogenes Cas9 EQR variant or an S. pyogenes Cas9 VRER variant.

[0137] In certain embodiments, the eaCas9 molecule comprises HNH-like domain cleavage activity but has no, or no significant, RuvC-like domain cleavage activity. In certain embodiments, the eaCas9 molecule is an HNH-like domain nickase, e.g., the eaCas9 molecule comprises a mutation at D10, e.g., D10A. In certain embodiments, the eaCas9 molecule comprises RuvC-like domain cleavage activity but has no, or no significant, HNH-like domain cleavage activity. In certain embodiments, the eaCas9 molecule is a RuvC-like domain nickase, e.g., the eaCas9 molecule comprises a mutation at H840, e.g., H840A. In certain embodiments, the eaCas9 molecule is a RuvC-like domain nickase, e.g., the eaCas9 molecule comprises a mutation at N863, e.g., N863A.

[0138] In certain embodiments, a single strand break is formed in the strand of the target nucleic acid to which the targeting domain of said gRNA is complementary. In certain embodiments, a single strand break is formed in the strand of the target nucleic acid other than the strand to which the targeting domain of said gRNA is complementary.

[0139] The presently disclosed subject matter further provides a composition comprising a presently disclosed gRNA molecule as described herein. In certain embodiments, the composition is a pharmaceutical composition. In certain embodiments, certain compositions described herein, e.g., pharmaceutical compositions described herein, can be used in the treatment, prevention and/or reduction of HBV infection in a subject.

[0140] Furthermore, the presently disclosed subject matter provides a vector comprising a presently disclosed gRNA molecule as described herein. In certain embodiments, the vector is a viral vector, which can be an adeno-associated virus (AAV) vector or a lentivirus (LV) vector.

[0141] Additionally, the presently disclosed subject matter provides a cell comprising a presently disclosed genome editing system, a presently disclosed composition, or a presently disclosed vector, as described herein. In certain embodiments, the cell is a cell expressing sodium taurocholate co-transporting polypeptide (NTCP) receptor. In certain embodiments, the cell is a hepatocyte.

[0142] The presently disclosed subject matter further provides a nucleic acid composition, e.g., an isolated or non-naturally occurring nucleic acid composition, e.g., DNA, that comprises (a) a nucleotide sequence that encodes a presently disclosed gRNA molecule as described herein. The nucleic acid disclosed herein may further comprise (b) a nucleotide sequence that encodes a Cas9 (e.g., an eaCas9 or an eiCas9) molecule, or an eiCas9-fusion protein molecule. The nucleic acid composition disclosed herein may further comprise (c)(i) a nucleotide sequence that encodes a second gRNA molecule having a second targeting domain that is complementary to a second target sequence of the PreC, C, X, PreS1, PreS2, S, P or SP gene. The nucleic acid composition disclosed herein may further comprise (c)(ii) a nucleotide sequence that encodes a third gRNA molecule described herein having a third targeting domain that is complementary to a third target sequence of the PreC, C, X, PreS1, PreS2, S, P or SP gene. The nucleic acid composition disclosed herein may further comprise (c)(iii) a nucleotide sequence that encodes a fourth gRNA molecule described herein having a fourth targeting domain that is complementary to a fourth target sequence of the PreC, C, X, PreS1, PreS2, S, P or SP gene.

[0143] In certain embodiments, a nucleic acid composition encodes a second gRNA molecule comprising a targeting domain configured to provide a cleavage event, e.g., a double strand break or a single strand break, sufficiently close to a HBV target position in the PreC, C, X, PreS1, PreS2, S, P or SP gene, to allow alteration, e.g., alteration associated with NHEJ, of a HBV target position in the PreC, C, X PreS1, PreS2, S, P or SP gene, either alone or in combination with the break positioned by said first gRNA molecule.

[0144] In certain embodiments, a nucleic acid composition encodes a third gRNA molecule comprising a targeting domain configured to provide a cleavage event, e.g., a double strand break or a single strand break, sufficiently close to a HBV target position in the PreC, C, X, PreS1, PreS2, S, P or SP gene to allow alteration, e.g., alteration associated with NHEJ, of a HBV target position in the PreC, C, X PreS1, PreS2, S, P or SP gene, either alone or in combination with the break positioned by the first and/or second gRNA molecule.

[0145] In certain embodiments, a nucleic acid composition encodes a fourth gRNA molecule comprising a targeting domain configured to provide a cleavage event, e.g., a double strand break or a single strand break, sufficiently close to a HBV target position in the PreC, C, X, PreS1, PreS2, S, P or SP gene to allow alteration, e.g., alteration associated with NHEJ, of a HBV target position in the PreC, C, X PreS1, PreS2, S, P or SP gene, either alone or in combination with the break positioned by the first gRNA molecule, the second gRNA molecule and/or the third gRNA molecule.

[0146] In certain embodiments, the second gRNA is selected to target the same HBV target position as the first gRNA molecule. In certain embodiments, the third gRNA molecule and the fourth gRNA molecule are selected to target the same HBV target position as the first and second gRNA molecules.

[0147] In certain embodiments, the second, the third or the fourth gRNA molecule comprises a targeting domain comprising the nucleotide sequence selected from SEQ ID NOS: 215 to 141071.

[0148] In certain embodiments, (a) and (b) are present on one nucleic acid molecule, e.g., one vector, e.g., one viral vector. In certain embodiments, the nucleic acid molecule is an AAV vector. Exemplary AAV vectors that may be used in any of the described compositions and methods include an AAV2 vector, a modified AAV2 vector, an AAV3 vector, a modified AAV3 vector, an AAV6 vector, a modified AAV6 vector, an AAV8 vector and an AAV9 vector. In certain embodiments, the nucleic acid molecule is an LV vector.

[0149] In certain embodiments, (a) is present on a first nucleic acid molecule, e.g., a first vector, e.g., a first viral vector (e.g., a first AAV vector or a first LV vector); and (b) is present on a second nucleic acid molecule, e.g., a second vector, e.g., a second vector (e.g., a second AAV vector or a second LV vector). The first and second nucleic acid molecules may be AAV vectors. The first and second nucleic acid molecules may be LV vectors

[0150] Each of (a) and (c)(i) may be present on one nucleic acid molecule, e.g., one vector, e.g., one viral vector, e.g., the same AAV or LV vector. In certain embodiments, (a) and (c)(i) are on different vectors. For example, (a) may be present on a first nucleic acid molecule, e.g., a first vector, e.g., a first viral vector (e.g., a first AAV vector or a first LV vector); and (c)(i) may be present on a second nucleic acid molecule, e.g., a second vector, e.g., a second vector (e.g., a second AAV vector or a second LV vector).

[0151] In certain embodiments, (a), (b), and (c)(i) are present on one nucleic acid molecule, e.g., one vector, e.g., one viral vector (e.g., an AAV vector or a LV vector). In certain embodiments, one of (a), (b), and (c)(i) is encoded on a first nucleic acid molecule, e.g., a first vector, e.g., a first viral vector (e.g., a first AAV vector or a first LV vector); and a second and third of (a), (b), and (c)(i) is encoded on a second nucleic acid molecule, e.g., a second vector, e.g., a second vector (e.g., a second AAV vector or a second LV vector).

[0152] In certain embodiments, (a) is present on a first nucleic acid molecule, e.g., a first vector, e.g., a first viral vector (e.g., a first AAV vector or a first LV vector); and (b) and (c)(i) are present on a second nucleic acid molecule, e.g., a second vector, e.g., a second vector (e.g., a second AAV vector or a second LV vector).

[0153] In certain embodiments, (b) is present on a first nucleic acid molecule, e.g., a first vector, e.g., a first viral vector (e.g., a first AAV vector or a first LV vector); and (a) and (c)(i) are present on a second nucleic acid molecule, e.g., a second vector, e.g., a second vector (e.g., a second AAV vector or a second LV vector).

[0154] In certain embodiments, (c)(i) is present on a first nucleic acid molecule, e.g., a first vector, e.g., a first viral vector (e.g., a first AAV vector or a first LV vector); and (b) and (a) are present on a second nucleic acid molecule, e.g., a second vector, e.g., a second vector (e.g., a second AAV vector or a second LV vector).

[0155] In certain embodiments, each of (a), (b) and (c)(i) are present on different nucleic acid molecules, e.g., different vectors, e.g., different viral vectors (e.g., different AAV vectors or different LV vectors). For example, (a) may be on a first nucleic acid molecule, (b) on a second nucleic acid molecule, and (c)(i) on a third nucleic acid molecule (e.g., a third AAV vector or a third LV vector).

[0156] In certain embodiments, when a third and/or fourth gRNA molecule are present, (a), (b), (c)(i), (c)(ii) and (c)(iii) are present on one nucleic acid molecule, e.g., one vector, e.g., one viral vector (e.g., an AAV vector or a LV vector). In certain embodiments, each of (a), (b), (c)(i), (c)(ii) and (c)(iii) are present on the different nucleic acid molecules, e.g., different vectors, e.g., the different viral vectors (e.g., different AAV vectors or different LV vectors). In certain embodiments, (a), (b), (c)(i), (c) (ii) and (c)(iii) re present on more than one nucleic acid molecule, but fewer than five nucleic acid molecules, e.g., AAV vectors or LV vectors.

[0157] In certain embodiments, certain nucleic acid compositions described herein may comprise a promoter operably linked to the nucleotide sequence that encodes the gRNA molecule of (a), e.g., a promoter described herein. Such nucleic acid compositions may further comprise a second promoter operably linked to the sequence that encodes the second, third and/or fourth gRNA molecule of (c), e.g., a promoter described herein. The promoter and second promoter can differ from one another. In certain embodiments, the promoter and second promoter are the same.

[0158] In certain embodiments, certain nucleic acid compositions described herein may further comprise a promoter operably linked to the sequence that encodes the Cas9 molecule of (b), e.g., a promoter described herein.

[0159] The presently disclosed subject matter further provides methods of altering a HBV viral gene selected from the group consisting of PreC gene, C gene, Xgene, PreS1 gene, PreS2 gene, S gene, P gene and SP gene in a cell. In certain embodiments, the method comprises administering to said cell one of: (i) a genome editing system comprising a gRNA molecule comprising a targeting domain that is complementary with a target sequence of the HBV viral gene, and at least a Cas9 molecule; (ii) a vector comprising a polynucleotide encoding a gRNA molecule comprising a targeting domain that is complementary with a target sequence of the HBV viral gene, and a polynucleotide encoding a Cas9 molecule; or (iii) a composition comprising a gRNA molecule comprising a targeting domain that that is complementary with a target sequence of the HBV viral gene, and at least a Cas9 molecule. In certain embodiments, the alteration comprises knockout of the HBV viral gene, knockdown of the HBV viral gene, or concomitant knockout and knockdown of the HBV viral gene.

[0160] In certain embodiments, the presently disclosed subject matter provides methods of altering cells, e.g., altering the structure, e.g., altering the sequence, of a target nucleic acid of a cell, comprising contacting said cell with: (a) a gRNA that targets the PreC, C, X, PreS1, PreS2, S, P or SP gene, e.g., a gRNA as described herein; (b) a Cas9 (e.g., an eaCas9 or eiCas9) molecule or a Cas9 fusion protein; and optionally, (c) a second, third and/or fourth gRNA that targets PreC, C, X, PreS1, PreS2, S, P or SP gene, e.g., a second, third and/or fourth gRNA, as described herein. In certain embodiments, the methods disclosed herein comprise contacting said cell with (a) and (b). In certain embodiments, the methods disclosed herein comprise contacting said cell with (a), (b), and (c).

[0161] In certain embodiments, the cell is from a subject suffering from or likely to develop HBV infection. In certain embodiments, the cell is from a subject that would benefit from having a mutation at a HBV target position. In certain embodiments, the contacting step is performed in vivo.

[0162] In certain embodiments, the contacting step of the method comprises contacting the cell with a nucleic acid composition, e.g., a vector, e.g., an AAV vector or a LV vector, that expresses each of (a), (b), and (c). In certain embodiments, the contacting step of the method comprises delivering to the cell a Cas9 molecule or Cas9-fusion protein of (b) and a nucleic acid composition which encodes a gRNA of (a) and optionally, a second gRNA (c)(i) and further optionally, a third gRNA (c)(ii) and/or fourth gRNA (c)(iii).

[0163] The presently disclosed subject matter further provides methods of reducing, treating and/or preventing HBV infection in a subject. In certain embodiments, the method comprises administering to the subject one of: (i) a genome editing system comprising a gRNA molecule comprising a targeting domain that is complementary with a target sequence of a HBV viral gene selected from the group consisting of PreC gene, C gene, Xgene, PreS1 gene, PreS2 gene, S gene, P gene and SP gene, and at least a Cas9 molecule; (ii) a vector comprising a polynucleotide encoding a gRNA molecule comprising a targeting domain that is complementary with a target sequence of a HBV viral gene selected from the group consisting of PreC gene, C gene, Xgene, PreS1 gene, PreS2 gene, S gene, P gene and SP gene, and a polynucleotide encoding a Cas9 molecule; or (iii) a composition comprising a gRNA molecule comprising a targeting domain that that is complementary with a target sequence of a HBV viral gene selected from the group consisting of PreC gene, C gene, X gene, PreS1 gene, PreS2 gene, S gene, P gene and SP gene, and at least a Cas9 molecule.

[0164] In certain embodiments, disclosed herein is a method of treating a subject suffering from or likely to develop HBV, e.g., altering the structure, e.g., sequence, of a target nucleic acid of the subject, comprising contacting the subject (or a cell from the subject) with: (a) a gRNA that targets the PreC, C, X, PreS1, PreS2, S, P or SP gene, e.g., a gRNA disclosed herein; (b) a Cas9 molecule, e.g., a Cas9 molecule disclosed herein (e.g., an eaCas9 or eiCas9); and optionally, (c)(i) a second gRNA that targets the PreC, C, X, PreS1, PreS2, S, P or SP gene, e.g., a second gRNA disclosed herein, and further optionally, (c)(ii) a third gRNA, and still further optionally, (c)(iii) a fourth gRNA that target the PreC, C, X, PreS1, PreS2, S, P or SP gene, e.g., a third and fourth gRNA disclosed herein.

[0165] In certain embodiments, contacting comprises contacting with (a) and (b). In certain embodiments, contacting comprises contacting with (a), (b), and (c)(i). In certain embodiments, contacting comprises contacting with (a), (b), (c)(i) and (c)(ii). In certain embodiments, contacting comprises contacting with (a), (b), (c)(i), (c)(ii) and (c)(iii).

[0166] In certain embodiments, the method comprises acquiring knowledge of the sequence at a HBV target position in said subject. In certain embodiments, acquiring knowledge of the sequence at a HBV target position in said subject comprises sequencing one or more of the PreC, C, X, PreS1, PreS2, S, P and/or SP gene(s) or a portion of the PreC, C, X, PreS1, PreS2, S, P and/or SP gene.

[0167] In certain embodiments, the method comprises introducing a mutation at a HBV target position. In certain embodiments, the method comprises introducing a mutation at a HBV target position by NHEJ.

[0168] In certain embodiments, a cell of the subject is contacted is in vivo with (a), (b) and optionally (c)(i), further optionally (c)(ii), and still further optionally (c)(iii).

[0169] In certain embodiments, the cell of the subject is contacted in vivo by intravenous delivery of (a), (b), and optionally (c)(i), further optionally (c)(ii), and still further optionally (c)(iii).

[0170] In certain embodiments, the contacting step comprises contacting the subject with a nucleic acid composition, e.g., a vector, e.g., an AAV vector or a LV vector, described herein, e.g., a nucleic acid that encodes at least one of (a), (b), and optionally (c)(i), further optionally (c)(ii), and still further optionally (c)(iii).

[0171] In certain embodiments, the contacting step comprises delivering to said subject said Cas9 molecule of (b), as a protein or mRNA, and a nucleic acid composition which encodes (a), and optionally (c)(i), further optionally (c)(ii), and still further optionally (c)(iii).

[0172] In certain embodiments, the contacting step comprises delivering to the subject the Cas9 molecule of (b), as a protein or mRNA, the gRNA of (a), as an RNA, and optionally the second gRNA of (c)(i), further optionally said third gRNA of (c)(ii), and still further optionally said fourth gRNA of (c)(iii), as an RNA.

[0173] In certain embodiments, the contacting step comprises delivering to the subject the gRNA of (a), as an RNA, optionally said second gRNA of (c)(i), further optionally said third gRNA of (c)(ii), and still further optionally said fourth gRNA of (c)(iii), as an RNA, a nucleic acid that encodes the Cas9 molecule of (b).

[0174] When the method comprises (1) introducing a mutation at a HBV target position by NHEJ or (2) knocking down expression of one or more of the PreC, C, X, PreS1, PreS2, S, P and/or SP gene(s), e.g., by targeting the promoter region, a Cas9 molecule of (b) and at least one guide RNA, e.g., a guide RNA of (a) are included in the contacting step.

[0175] In certain embodiments, a cell of the subject is contacted is in vivo with (a), (b) and optionally (c)(i), further optionally (c)(ii), and still further optionally (c)(iii). In certain embodiments, the cell of the subject is contacted in vivo by intravenous delivery of (a), (b) and optionally (c)(i), further optionally (c)(ii), and still further optionally (c)(iii).

[0176] In certain embodiments, the contacting step comprises contacting the subject with a nucleic acid composition, e.g., a vector, e.g., an AAV vector or a LV vector, described herein, e.g., a nucleic acid that encodes at least one of (a), (b), and optionally (c)(i), further optionally (c)(ii), and still further optionally (c)(iii).

[0177] In certain embodiments, the contacting step comprises delivering to said subject said Cas9 molecule of (b), as a protein or mRNA, and a nucleic acid composition which encodes (a) and optionally (c)(i), further optionally (c)(ii), and still further optionally (c)(iii).

[0178] In certain embodiments, the contacting step comprises delivering to the subject the Cas9 molecule of (b), as a protein or mRNA, the gRNA of (a), as an RNA, and optionally the second gRNA of (c)(i), further optionally said third gRNA of (c)(ii), and still further optionally said fourth gRNA of (c)(iii), as an RNA.

[0179] In certain embodiments, the contacting step comprises delivering to the subject the gRNA of (a), as an RNA, optionally said second gRNA of (c)(i), further optionally said third gRNA of (c)(ii), and still further optionally said fourth gRNA of (c)(iii), as an RNA, and a nucleic acid that encodes the Cas9 molecule of (b).

[0180] In certain embodiments, disclosed herein is a reaction mixture comprising a gRNA molecule, a nucleic acid composition, or a composition described herein, and a cell, e.g., a cell from a subject having, or likely to develop HBV, or a subject which would benefit from a mutation at a HBV target position.

[0181] In certain embodiments, disclosed herein is a kit comprising, (a) a gRNA molecule described herein, or nucleic acid composition that encodes the gRNA, and one or more of the following: (b) a Cas9 molecule, e.g., a Cas9 molecule described herein (e.g., an eaCas9 or eiCas9), or a nucleic acid composition or mRNA that encodes the Cas9; (c)(i) a second gRNA molecule, e.g., a second gRNA molecule described herein or a nucleic acid composition that encodes (c)(i); (c)(ii) a third gRNA molecule, e.g., a second gRNA molecule described herein or a nucleic acid composition that encodes (c)(ii); (c)(iii) a fourth gRNA molecule, e.g., a second gRNA molecule described herein or a nucleic acid composition that encodes (c)(iii).

[0182] In certain embodiments, the kit comprises a nucleic acid composition, e.g., an AAV vector, that encodes one or more of (a), (b), (c)(i), (c)(ii), and (c)(iii).

[0183] In yet another aspect, disclosed herein is a gRNA molecule, e.g., a gRNA molecule described herein, for use in treating, or delaying the onset or progression of HBV infection in a subject, e.g., in accordance with a method of treating, or delaying the onset or progression of HBV infection as described herein.

[0184] In certain embodiments, the gRNA molecule is used in combination with a Cas9 molecule, e.g., a Cas9 molecule described herein (e.g., an eaCas9 or eiCas9). For example, and not by way of limitation, the Cas9 molecule, fusion-protein or polypeptide is an S. pyogenes Cas9 variant, e.g., the EQR variant or the VRER variant. In certain embodiments, the Cas9 molecule, fusion-protein or polypeptide is an S. aureus Cas9 variant, e.g., the KKH variant. Additionally or alternatively, in certain embodiments, the gRNA molecule is used in combination with a second, third and/or fourth gRNA molecule, e.g., a second, third and/or fourth gRNA molecule described herein.

[0185] In still another aspect, disclosed herein is use of a gRNA molecule, e.g., a gRNA molecule described herein, in the manufacture of a medicament for treating, or delaying the onset or progression of HBV in a subject, e.g., in accordance with a method of treating, or delaying the onset or progression of HBV as described herein.

[0186] In certain embodiments, the medicament comprises a Cas9 molecule, e.g., a Cas9 molecule described herein, e.g., the S. pyogenes Cas9 EQR variant, the S. pyogenes Cas9 VRER variant or the S. aureus KKH variant. Additionally or alternatively, in certain embodiments, the medicament comprises a second, third and/or fourth gRNA molecule, e.g., a second, third and/or fourth gRNA molecule described herein.

[0187] Other features and advantages of the subject matter disclosed herein will be apparent from the detailed description, drawings, and from the claims.

### BRIEF DESCRIPTION OF THE DRAWINGS

[0188] FIGS. 1A-1I are representations of several exemplary gRNAs. FIG. 1A depicts a modular gRNA molecule derived in part (or modeled on a sequence in part) from Streptococcus pyogenes (S. pyogenes) as a duplexed structure (SEQ ID NOs:39 and 40, respectively, in order of appearance); FIG. 1B depicts a unimolecular gRNA molecule derived in part from S. pyogenes as a duplexed structure (SEQ ID NO:41); FIG. 1C depicts a unimolecular gRNA molecule derived in part from S. pyogenes as a duplexed structure (SEQ ID NO:42); FIG. 1D depicts a unimolecular gRNA molecule derived in part from S. pyogenes as a duplexed structure (SEQ ID NO:43); FIG. 1E depicts a unimolecular gRNA molecule derived in part from S. pyogenes as a duplexed structure (SEQ ID NO:44); FIG. 1F depicts a modular gRNA molecule derived in part from Streptococcus thermophilus (S. thermophilus) as a duplexed structure (SEQ ID NOs:45 and 46, respectively, in order of appearance); and FIG. 1G depicts an alignment of modular gRNA molecules of S. pyogenes and S. thermophilus (SEQ ID NOs:39, 45, 47, and 46, respectively, in order of appearance). FIGS. 1H-1I depicts additional exemplary structures of unimolecular gRNA molecules. FIG. 1H shows an exemplary structure of a unimolecular gRNA molecule derived in part from S. pyogenes as a duplexed structure (SEQ ID NO:42). FIG. 1I shows an exemplary structure of a unimolecular gRNA molecule derived in part from S. aureus as a duplexed structure (SEQ ID NO:38).

[0189] FIGS. 2A-2G depict an alignment of Cas9 sequences (Chylinski 2013). The N-terminal RuvC-like domain is boxed and indicated with a “Y.” The other two RuvC-like domains are boxed and indicated with a “B.” The HNH-like domain is boxed and indicated by a “G.” Sm: S. mutans (SEQ ID NO:1); Sp: S. pyogenes (SEQ ID NO:2); St: S. thermophilus (SEQ ID NO:4); and Li: L. innocua (SEQ ID NO:5). “Motif” (SEQ ID NO:14) is a consensus sequence based on the four sequences. Residues conserved in all four sequences are indicated by single letter amino acid abbreviation; “*” indicates any amino acid found in the corresponding position of any of the four sequences; and “-” indicates absent.

[0190] FIGS. 3A-3B show an alignment of the N-terminal RuvC-like domain from the Cas9 molecules disclosed in Chylinski 2013 (SEQ ID NOs:52-95, 120-123). The last line of FIG. 3B identifies 4 highly conserved residues.

[0191] FIGS. 4A-4B show an alignment of the N-terminal RuvC-like domain from the Cas9 molecules disclosed in Chylinski 2013 with sequence outliers removed (SEQ ID NOs:52-123). The last line of FIG. 4B identifies 3 highly conserved residues.

[0192] FIGS. 5A-5C show an alignment of the HNH-like domain from the Cas9 molecules disclosed in Chylinski 2013 (SEQ ID NOs:124-198). The last line of FIG. 5C identifies conserved residues.

[0193] FIGS. 6A-6B show an alignment of the HNH-like domain from the Cas9 molecules disclosed in Chylinski 2013 with sequence outliers removed (SEQ ID NOs:124-141, 148, 149, 151-153, 162, 163, 166-174, 177-187, 194-198). The last line of FIG. 6B identifies 3 highly conserved residues.

[0194] FIG. 7 illustrates gRNA domain nomenclature using an exemplary gRNA sequence (SEQ ID NO:42).

[0195] FIGS. 8A and 8B provide schematic representations of the domain organization of S. pyogenes Cas9. FIG. 8A shows the organization of the Cas9 domains, including amino acid positions, in reference to the two lobes of Cas9 (recognition (REC) and nuclease (NUC) lobes). FIG. 8B shows the percent homology of each domain across 83 Cas9 orthologs.

[0196] FIG. 9 shows the plasmid map for pAF196.

[0197] FIG. 10 shows the plasmid map for pAF197.

[0198] FIG. 11 shows the plasmid map for pAF198.

[0199] FIG. 12 shows the plasmid map for pAF199.

[0200] FIG. 13 shows the plasmid map for pDRmini004.

[0201] FIG. 14 shows the reduction in GFP expression of the transfected cell population due to Cas9-mediated cleavage of the HBV target sequences in plasmids pAF196-199.

### DETAILED DESCRIPTION

[0202] For purposes of clarity of disclosure and not by way of limitation, the detailed description is divided into the following subsections:

[0203] 1. Definitions

[0204] 2. Hepatitis B virus (HBV)

[0205] 3. Methods to Treat, Prevent and/or Reduce Hepatitis B virus Infection

[0206] 4. Methods of Altering the HBV genome, including PreC, C, X, PreS1, PreS2, S, P and/or SP gene(s)

[0207] 5. Guide RNA (gRNA) Molecules

[0208] 6. Methods for Designing gRNAs

[0209] 7. Cas9 Molecules

[0210] 8. Functional Analysis of Candidate Molecules

[0211] 9. Genome Editing Approaches

[0212] 10. Target Cells

[0213] 11. Delivery, Formulations and Routes of Administration

[0214] 12. Modified Nucleosides, Nucleotides, and Nucleic Acids

### 1. Definitions

[0215] As used herein, the term “about” or “approximately” means within an acceptable error range for the particular value as determined by one of ordinary skill in the art, which can depend in part on how the value is measured or determined, i.e., the limitations of the measurement system. For example, “about” can mean within 3 or more than 3 standard deviations, per the practice in the art. Alternatively, “about” can mean a range of up to 20%, preferably up to 10%, more preferably up to 5%, and more preferably still up to 1% of a given value. Alternatively, particularly with respect to biological systems or processes, the term can mean within an order of magnitude, preferably within 5-fold, and more preferably within 2-fold, of a value.

[0216] As used herein, a “genome editing system” refers to a system that is capable of editing (e.g., modifying or altering) one or more target genes in a cell, for example by means of Cas9-mediated single or double strand breaks. Genome editing systems may comprise, in various embodiments, (a) one or more Cas9/gRNA complexes, and (b) separate Cas9 molecules and gRNAs that are capable of associating in a cell to form one or more Cas9/gRNA complexes. A genome editing system according to the present disclosure may be encoded by one or more nucleotides (e.g. RNA, DNA) comprising coding sequences for Cas9 and/or gRNAs that can associate to form a Cas9/gRNA complex, and the one or more nucleotides encoding the gene editing system may be carried by a vector as described herein.

[0217] In certain embodiments, the genome editing system targets one or more (e.g., two, three, four, five, six, seven or eight) HBV viral gene selected from the group consisting of PreC gene, C gene, X gene, PreS1 gene, PreS2 gene, S gene, P gene and SP gene.

[0218] In certain embodiments, the genome editing system that targets a PreC gene comprises a gRNA molecule comprising a targeting domain complementary to a target domain (also referred to as “target sequence”) of the PreC gene, or a polynucleotide encoding thereof, and at least one Cas9 molecule or polynucleotide(s) encoding thereof. In certain embodiments, the genome editing system further comprises a second gRNA molecule comprising a targeting domain complementary to a second target sequence in the PreC gene, or a polynucleotide encoding thereof. The genome editing system that targets a PreC gene may further comprise a third and a fourth gRNA molecules that target the PreC gene.

[0219] In certain embodiments, the genome editing system that targets a C gene comprises a gRNA molecule comprising a targeting domain complementary to a target domain (also referred to as “target sequence”) of the C gene, or a polynucleotide encoding thereof, and at least one Cas9 molecule or polynucleotide(s) encoding thereof. In certain embodiments, the genome editing system further comprises a second gRNA molecule comprising a targeting domain complementary to a second target sequence in the C gene, or a polynucleotide encoding thereof. The genome editing system that targets a C gene may further comprise a third and a fourth gRNA molecules that target the C gene.

[0220] In certain embodiments, the genome editing system that targets a X gene comprises a gRNA molecule comprising a targeting domain complementary to a target domain (also referred to as “target sequence”) of the Xgene, or a polynucleotide encoding thereof, and at least one Cas9 molecule or polynucleotide(s) encoding thereof. In certain embodiments, the genome editing system further comprises a second gRNA molecule comprising a targeting domain complementary to a second target sequence in the Xgene, or a polynucleotide encoding thereof. The genome editing system that targets a X gene may further comprise a third and a fourth gRNA molecules that target the Xgene.

[0221] In certain embodiments, the genome editing system that targets a PreS1 gene comprises a gRNA molecule comprising a targeting domain complementary to a target domain (also referred to as “target sequence”) of the PreS1 gene, or a polynucleotide encoding thereof, and at least one Cas9 molecule or polynucleotide(s) encoding thereof. In certain embodiments, the genome editing system further comprises a second gRNA molecule comprising a targeting domain complementary to a second target sequence in the PreS1 gene, or a polynucleotide encoding thereof. The genome editing system that targets a PreS1 gene may further comprise a third and a fourth gRNA molecules that target the PreS1 gene.

[0222] In certain embodiments, the genome editing system that targets a PreS2 gene comprises a gRNA molecule comprising a targeting domain complementary to a target domain (also referred to as “target sequence”) of the PreS2 gene, or a polynucleotide encoding thereof, and at least one Cas9 molecule or polynucleotide(s) encoding thereof. In certain embodiments, the genome editing system further comprises a second gRNA molecule comprising a targeting domain complementary to a second target sequence in the PreS2 gene, or a polynucleotide encoding thereof. The genome editing system that targets a PreS2 gene may further comprise a third and a fourth gRNA molecules that target the PreS2 gene.

[0223] In certain embodiments, the genome editing system that targets a S gene comprises a gRNA molecule comprising a targeting domain complementary to a target domain (also referred to as “target sequence”) of the S gene, or a polynucleotide encoding thereof, and at least one Cas9 molecule or polynucleotide(s) encoding thereof. In certain embodiments, the genome editing system further comprises a second gRNA molecule comprising a targeting domain complementary to a second target sequence in the S gene, or a polynucleotide encoding thereof. The genome editing system that targets a S gene may further comprise a third and a fourth gRNA molecules that target the S gene.

[0224] In certain embodiments, the genome editing system that targets a P gene comprises a gRNA molecule comprising a targeting domain complementary to a target domain (also referred to as “target sequence”) of the P gene, or a polynucleotide encoding thereof, and at least one Cas9 molecule or polynucleotide(s) encoding thereof. In certain embodiments, the genome editing system further comprises a second gRNA molecule comprising a targeting domain complementary to a second target sequence in the P gene, or a polynucleotide encoding thereof. The genome editing system that targets a P gene may further comprise a third and a fourth gRNA molecules that target the P gene.

[0225] In certain embodiments, the genome editing system that targets a SP gene comprises a gRNA molecule comprising a targeting domain complementary to a target domain (also referred to as “target sequence”) of the SP gene, or a polynucleotide encoding thereof, and at least one Cas9 molecule or polynucleotide(s) encoding thereof. In certain embodiments, the genome editing system further comprises a second gRNA molecule comprising a targeting domain complementary to a second target sequence in the SP gene, or a polynucleotide encoding thereof. The genome editing system that targets a SP gene may further comprise a third and a fourth gRNA molecules that target the SP gene.

[0226] In certain embodiments, the genome editing system is implemented in a cell or in an in vitro contact. In certain embodiments, the genome editing system is used in a medicament, e.g., a medicament for modifying one or more HBV viral gene selected from the group consisting of PreC gene, C gene, X gene, PreS1 gene, PreS2 gene, S gene, P gene and SP gene, or a medicament for treating HBV infection. In certain embodiments, the genome editing system is used in therapy.

[0227] “HBV target knockdown position”, as used herein, refers to a position, e.g., in the PreC, C, X, PreS1, PreS2, S, P or SP gene, which if targeted by an eiCas9 or an eiCas9 fusion described herein, results in reduction or elimination of expression of functional PreC, C, X, PreS1, PreS2, S, P or SP gene product. In certain embodiments, transcription is reduced or eliminated. In certain embodiments, the position is in the PreC, C, X PreS1, PreS2, S, P or SP promoter sequence. In certain embodiments, a position in the promoter sequence of the PreC, C, X PreS1, PreS2, S, P or SP gene is targeted by an enzymatically inactive Cas9 (eiCas9) or an eiCas9-fusion protein, as described herein.

[0228] “PreC target knockout position”, as used herein, refers to a position in the PreC gene, e.g., disrupted by insertion or deletion of one or more nucleotides, e.g., disrupted by insertion or deletion of one or more nucleotides results in reduction or elimination of expression of functional PreC gene product. In certain embodiments, the position is in the PreC gene coding region, e.g., an early coding region. In certain embodiments, the position is in the PreC gene non-coding region. In certain embodiments, the non-coding region of the PreC gene is within the coding region of another HBV gene, such as the C, X PreS1, PreS2, S, P and/or SP gene. Because of the overlapping reading frames of the HBV genome, the use of “PreC gene non-coding region” is not, in the strictest sense, a non-transcribed region, but refers to the non-coding region the PreC gene, which may be the coding region of another gene. In certain embodiments, the non-coding region of the PreC gene may be a region within the subject genome, in the case of integration of the PreC gene (along with other HBV genes) within the human genome.

[0229] “C target knockout position”, as used herein, refers to a position in the C gene, e.g., disrupted by insertion or deletion of one or more nucleotides, results in reduction or elimination of expression of functional C gene product. In certain embodiments, the position is in the C gene coding region, e.g., an early coding region. In certain embodiments, the position is in the C gene non-coding region. In certain embodiments, the non-coding region of the C gene is within the coding region of another HBV gene, such as the PreC, X PreS1, PreS2, S, P and/or SP gene. Because of the overlapping reading frames of the HBV genome, the use of “C gene non-coding region” is not, in the strictest sense, a non-transcribed region, but refers to the non-coding region the C gene, which may be the coding region of another gene. In certain embodiments, the non-coding region of the C gene may be a region within the subject genome, in the case of integration of the C gene (along with other HBV genes) within the human genome.

[0230] “X target knockout position”, as used herein, refers to a position in the Xgene, e.g., disrupted by insertion or deletion of one or more nucleotides, results in reduction or elimination of expression of functional X gene product. In certain embodiments, the position is in the Xgene coding region, e.g., an early coding region. In certain embodiments, the position is in the Xgene non-coding region. In certain embodiments, the non-coding region of the Xgene is within the coding region of another HBV gene, such as the PreC, C, PreS1, PreS2, S, P and/or SP gene. Because of the overlapping reading frames of the HBV genome, the use of “Xgene non-coding region” is not, in the strictest sense, a non-transcribed region, but refers to the non-coding region the Xgene, which may be the coding region of another gene. In certain embodiments, the non-coding region of the Xgene may be a region within the subject genome, in the case of integration of the Xgene (along with other HBV genes) within the human genome.

[0231] “PreS1 target knockout position”, as used herein, refers to a position in the PreS1 gene, e.g., disrupted by insertion or deletion of one or more nucleotides, results in reduction or elimination of expression of functional PreS1 gene product. In certain embodiments, the position is in the PreS1 gene coding region, e.g., an early coding region. In certain embodiments, the position is in the PreS1 gene non-coding region. In certain embodiments, the non-coding region of the PreS1 gene is within the coding region of another HBV gene, such as the PreC, C, X, PreS2, S, P and/or SP gene. Because of the overlapping reading frames of the HBV genome, the use of “PreS1 gene non-coding region” is not, in the strictest sense, a non-transcribed region, but refers to the non-coding region the PreS1 gene, which may be the coding region of another gene. In certain embodiments, the non-coding region of the PreS1 gene may be a region within the subject genome, in the case of integration of the PreS1 gene (along with other HBV genes) within the human genome.

[0232] “PreS2 target knockout position”, as used herein, refers to a position in the PreS2 gene, e.g., disrupted by insertion or deletion of one or more nucleotides, results in reduction or elimination of expression of functional PreS2 gene product. In certain embodiments, the position is in the PreS2 gene coding region, e.g., an early coding region. In certain embodiments, the position is in the PreS2 gene non-coding region. In certain embodiments, the non-coding region of the PreS2 gene is within the coding region of another HBV gene, such as the PreC, C, X, PreS1, S, P and/or SP gene. Because of the overlapping reading frames of the HBV genome, the use of “PreS2 gene non-coding region” is not, in the strictest sense, a non-transcribed region, but refers to the non-coding region the PreS2 gene, which may be the coding region of another gene. In certain embodiments, the non-coding region of the PreS2 gene may be a region within the subject genome, in the case of integration of the PreS2 gene (along with other HBV genes) within the human genome.

[0233] “S target knockout position”, as used herein, refers to a position in the S gene, e.g., disrupted by insertion or deletion of one or more nucleotides, results in reduction or elimination of expression of functional S gene product. In certain embodiments, the position is in the S gene coding region, e.g., an early coding region. In certain embodiments, the position is in the S gene non-coding region. In certain embodiments, the non-coding region of the S gene is within the coding region of another HBV gene, such as the PreC, C, X, PreS1, PreS2, P and/or SP gene. Because of the overlapping reading frames of the HBV genome, the use of “S gene non-coding region” is not, in the strictest sense, a non-transcribed region, but refers to the non-coding region the S gene, which may be the coding region of another gene. In certain embodiments, the non-coding region of the S gene may be a region within the subject genome, in the case of integration of the S gene (along with other HBV genes) within the human genome.

[0234] “P target knockout position”, as used herein, refers to a position in the P gene, e.g., disrupted by insertion or deletion of one or more nucleotides, results in reduction or elimination of expression of functional P gene product. In certain embodiments, the position is in the P gene coding region, e.g., an early coding region. In certain embodiments, the position is in the P gene non-coding region. In certain embodiments, the non-coding region of the P gene is within the coding region of another HBV gene, such as the PreC, C, X, PreS1, PreS2, S and/or SP gene. Because of the overlapping reading frames of the HBV genome, the use of “P gene non-coding region” is not, in the strictest sense, a non-transcribed region, but refers to the non-coding region the P gene, which may be the coding region of another gene. In certain embodiments, the non-coding region of the P gene may be a region within the subject genome, in the case of integration of the P gene (along with other HBV genes) within the human genome.

[0235] “SP target knockout position”, as used herein, refers to a position in the SP gene, e.g., disrupted by insertion or deletion of one or more nucleotides, results in reduction or elimination of expression of functional SP gene product. In certain embodiments, the position is in the SP gene coding region, e.g., an early coding region. In certain embodiments, the position is in the SP gene non-coding region. In certain embodiments, the non-coding region of the SP gene is within the coding region of another HBV gene, such as the PreC, C, X, PreS1, PreS2, S and/or P gene. Because of the overlapping reading frames of the HBV genome, the use of “SP gene non-coding region” is not, in the strictest sense, a non-transcribed region, but refers to the non-coding region the SP gene, which may be the coding region of another gene. In certain embodiments, the non-coding region of the SP gene may be a region within the subject genome, in the case of integration of the SP gene (along with other HBV genes) within the human genome.

[0236] “Domain”, as used herein, is used to describe segments of a protein or nucleic acid. Unless otherwise indicated, a domain is not required to have any specific functional property.

[0237] Calculations of homology or sequence identity between two sequences (the terms are used interchangeably herein) are performed as follows. The sequences are aligned for optimal comparison purposes (e.g., gaps can be introduced in one or both of a first and a second amino acid or nucleic acid sequence for optimal alignment and non-homologous sequences can be disregarded for comparison purposes). The optimal alignment is determined as the best score using the GAP program in the GCG software package with a Blossum 62 scoring matrix with a gap penalty of 12, a gap extend penalty of 4, and a frame shift gap penalty of 5. The amino acid residues or nucleotides at corresponding amino acid positions or nucleotide positions are then compared. When a position in the first sequence is occupied by the same amino acid residue or nucleotide as the corresponding position in the second sequence, then the molecules are identical at that position. The percent identity between the two sequences is a function of the number of identical positions shared by the sequences.

[0238] “Governing gRNA molecule”, as used herein, refers to a gRNA molecule that comprises a targeting domain that is complementary to a target domain on a nucleic acid composition that comprises a sequence that encodes a component of the CRISPR/Cas system that is introduced into a cell or subject. In certain embodiments, a governing gRNA does not target an endogenous cell or subject sequence. In certain embodiments, a governing gRNA molecule comprises a targeting domain that is complementary with a target sequence on: (a) a nucleic acid composition that encodes a Cas9 molecule; (b) a nucleic acid composition that encodes a gRNA molecule which comprises a targeting domain that targets a position in the HBV genome (e.g., PreC gene, C gene, X gene, PreS1 gene, PreS2 gene, S gene, P gene and SP gene) (a target gene gRNA); or on more than one nucleic acid that encodes a CRISPR/Cas component, e.g., both (a) and (b). In certain embodiments, a nucleic acid molecule that encodes a CRISPR/Cas component, e.g., that encodes a Cas9 molecule or a target gene gRNA, comprises more than one target domain that is complementary with a governing gRNA targeting domain. In certain embodiments, a governing gRNA molecule complexes with a Cas9 molecule and results in Cas9 mediated inactivation of the targeted nucleic acid, e.g., by cleavage or by binding to the nucleic acid, and results in cessation or reduction of the production of a CRISPR/Cas system component. In certain embodiments, the Cas9 molecule forms two complexes: a complex comprising a Cas9 molecule with a target gene gRNA, which complex will alter the PreC gene, C gene, X gene, PreS1 gene, PreS2 gene, S gene, P gene and/or SP gene; and a complex comprising a Cas9 molecule with a governing gRNA molecule, which complex will act to prevent further production of a CRISPR/Cas system component, e.g., a Cas9 molecule or a target gene gRNA molecule. In certain embodiments, a governing gRNA molecule/Cas9 molecule complex binds to or promotes cleavage of a control region sequence, e.g., a promoter, operably linked to a sequence that encodes a Cas9 molecule, a sequence that encodes a transcribed region, an exon, or an intron, for the Cas9 molecule. In certain embodiments, a governing gRNA molecule/Cas9 molecule complex binds to or promotes cleavage of a control region sequence, e.g., a promoter, operably linked to a gRNA molecule, or a sequence that encodes the gRNA molecule. In certain embodiments, the governing gRNA, e.g., a Cas9-targeting governing gRNA molecule, or a target gene gRNA-targeting governing gRNA molecule, limits the effect of the Cas9 molecule/target gene gRNA molecule complex-mediated gene targeting. In certain embodiments, a governing gRNA places temporal, level of expression, or other limits, on activity of the Cas9 molecule/target gene gRNA molecule complex. In certain embodiments, a governing gRNA reduces off-target or other unwanted activity. In certain embodiments, a governing gRNA molecule inhibits, e.g., entirely or substantially entirely inhibits, the production of a component of the Cas9 system and thereby limits, or governs, its activity.

[0239] “Modulator”, as used herein, refers to an entity, e.g., a drug, that can alter the activity (e.g., enzymatic activity, transcriptional activity, or translational activity), amount, distribution, or structure of a subject molecule or genetic sequence. In certain embodiments, modulation comprises cleavage, e.g., breaking of a covalent or non-covalent bond, or the forming of a covalent or non-covalent bond, e.g., the attachment of a moiety, to the subject molecule. In certain embodiments, a modulator alters the, three dimensional, secondary, tertiary, or quaternary structure, of a subject molecule. A modulator can increase, decrease, initiate, or eliminate a subject activity.

[0240] “Large molecule”, as used herein, refers to a molecule having a molecular weight of at least 2, 3, 5, 10, 20, 30, 40, 50, 60, 70, 80, 90, or 100 kD. Large molecules include proteins, polypeptides, nucleic acids, biologics, and carbohydrates.

[0241] “Polypeptide”, as used herein, refers to a polymer of amino acids having less than 100 amino acid residues. In certain embodiments, it has less than 50, 20, or 10 amino acid residues.

[0242] A “Cas9 molecule” or “Cas9 polypeptide” as used herein refers to a molecule or polypeptide, respectively, that can interact with a gRNA molecule and, in concert with the gRNA molecule, localize to a site comprising a target domain (also referred to as “target sequence”) and, in certain embodiments, a PAM sequence. Cas9 molecules and Cas9 polypeptides include both naturally occurring Cas9 molecules and Cas9 polypeptides and engineered, altered, or modified Cas9 molecules or Cas9 polypeptides that differ, e.g., by at least one amino acid residue, from a reference sequence, e.g., the most similar naturally occurring Cas9 molecule. In certain embodiments, the Cas9 molecule is a wild-type S. pyogenes Cas9, which recognizes a NGG PAM sequence. In certain embodiments, the Cas9 molecule is an S. pyogenes Cas9 EQR variant, which recognizes a NGAG PAM sequence, A NGCG PAM sequence, a NGGG PAM sequence, a NGTG PAM sequence, a NGAA PAM sequence, a NGAT PAM sequence or a NGAC PAM sequence. In certain embodiments, the Cas9 molecule is an S. pyogenes Cas9 VRER variant, which recognizes a NGCG PAM sequence, a NGCA PAM sequence, a NGCT PAM sequence, or a NGCC PAM sequence. In certain embodiments, the Cas9 molecule is a wild-type S. aureus Cas9, which recognizes a NNNRRT PAM sequence, or a NNNRRV PAM sequence. In certain embodiments, the Cas9 molecule is an S. aureus Cas9 KKH variant, which recognizes a NNNRRT PAM sequence or a NNNRRV PAM sequence.

[0243] A “reference molecule” as used herein refers to a molecule to which a modified or candidate molecule is compared. For example, a reference Cas9 molecule refers to a Cas9 molecule to which a modified or candidate Cas9 molecule is compared. Likewise, a reference gRNA refers to a gRNA molecule to which a modified or candidate gRNA molecule is compared. The modified or candidate molecule may be compared to the reference molecule on the basis of sequence (e.g., the modified or candidate molecule may have X % sequence identity or homology with the reference molecule) or activity (e.g., the modified or candidate molecule may have X % of the activity of the reference molecule). For example, where the reference molecule is a Cas9 molecule, a modified or candidate molecule may be characterized as having no more than 10% of the nuclease activity of the reference Cas9 molecule. Examples of reference Cas9 molecules include naturally occurring unmodified Cas9 molecules, e.g., a naturally occurring Cas9 molecule from S. pyogenes, S. aureus, or N. meningitidis. In certain embodiments, the reference Cas9 molecule is the naturally occurring Cas9 molecule having the closest sequence identity or homology with the modified or candidate Cas9 molecule to which it is being compared. In certain embodiments, the reference Cas9 molecule is a parental molecule having a naturally occurring or known sequence on which a mutation has been made to arrive at the modified or candidate Cas9 molecule.

[0244] “Replacement”, or “replaced”, as used herein with reference to a modification of a molecule does not require a process limitation but merely indicates that the replacement entity is present.

[0245] “Small molecule”, as used herein, refers to a compound having a molecular weight less than about 2 kD, e.g., less than about 2 kD, less than about 1.5 kD, less than about 1 kD, or less than about 0.75 kD.

[0246] “Subject”, as used herein, may mean either a human or non-human animal. The term includes, but is not limited to, mammals (e.g., humans, other primates, pigs, rodents (e.g., mice and rats or hamsters), rabbits, guinea pigs, cows, horses, cats, dogs, sheep, and goats). In certain embodiments, the subject is a human. In certain embodiments, the subject is poultry.

[0247] “Treat”, “treating” and “treatment”, as used herein, mean the treatment of a disease in a mammal, e.g., in a human, including (a) inhibiting the disease, i.e., arresting or preventing its development or progression; (b) relieving the disease, i.e., causing regression of the disease state; (c) relieving one or more symptoms of the disease; and (d) curing the disease.

[0248] “Prevent,” “preventing,” and “prevention” as used herein means the prevention of a disease in a mammal, e.g., in a human, including (a) avoiding or precluding the disease; (b) affecting the predisposition toward the disease; (c) preventing or delaying the onset of at least one symptom of the disease.

[0249] “X” as used herein in the context of an amino acid sequence, refers to any amino acid (e.g., any of the twenty natural amino acids) unless otherwise specified.

### 2. Hepatitis B Virus (HBV)

[0250] HBV is a hepadnavirus that preferentially affects hepatocytes. Enveloped virions contain a 3.2 kB double-stranded DNA genome with four partially overlapping open reading frames (ORFs). The ORFs encode the envelope, core, polymerase and X proteins. HBV enters hepatocytes by binding to the sodium taurocholate co-transporting polypeptide (NTCP) receptor. Inside hepatocytes, the virus uncoats and is transported into the nucleus, where the relaxed circular DNA (rcDNA) of the capsid is repaired to generate covalently closed circular DNA (cccDNA). The cccDNA is transcribed into viral pregenomic RNA (pgRNA) and viral mRNA using host RNA polymerase II. Viral pgRNA and mRNA is transported from the nucleus to the cytoplasm, where it is translated into viral proteins, including viral reverse transcriptase, HBsAg and HBeAg. In the cytoplasm, viral pgRNA is reverse transcribed by viral reverse transcriptase to generate rcDNA that is ready for packaging. The virus is then packaged and secreted from the hepatocyte.

### 3. Methods to Treat, Prevent and/or Reduce Hepatitis B Virus Infection

[0251] Methods and compositions described herein provide for a therapy, e.g., a one-time therapy, or a multi-dose therapy, that reduces, prevents and/or treats HBV infection.

[0252] The methods described herein involve targeted knockout and/or knockdown of the viral HBV genome, including HBV DNA in the form of cccDNA, HBV DNA in the form of rcDNA, linearized DNA within the nucleus and/or DNA intermediates in the cytoplasm. The method described herein involves targeted knockout and/or knock down of integrated viral HBV, including HBV DNA which has integrated into the subject's genome. Currently available methods to treat HBV do not target HBV cccDNA and have no effect on the presence of intra-nuclear DNA. Current methods to treat HBV also do not target integrated HBV DNA and have no effect on the production of viral proteins produced by integrated or ccc HBV DNA. The method described herein fulfills a need that is unmet in current approaches to the treatment of HBV. Such an approach will be effective as a stand-alone therapy or may be given concomitantly with current therapies to eliminate the virus and produce a cure or improved control of Hepatitis B.

[0253] HBV relies on viral genes, e.g., PreC, C, X PreS1, PreS2, S, P and/or SP for infection, proliferation and assembly. In certain embodiments, altering, e.g., knocking out or knocking down PreC, C, X, PreS1, PreS2, S, P or SP individually or in combination can reduce, prevent and/or treat HBV infections. In certain embodiments, altering, e.g., knocking down PreC, C, X, PreS1, PreS2, S, P or SP individually or in combination can reduce, prevent and/or treat HBV infections. As the HBV virus establishes chronic and/or latent infection in hepatocytes, local delivery that delivers a treatment in the region of chronic infection can be used. Targeting knockout and/or knock down to a discrete region or regions (e.g., hepatocytes, e.g., the liver) can reduce or eliminate latent infection by disabling the HBV virus.

[0254] Described herein are methods to reduce, prevent and/or treat HBV by knocking out or knocking down viral genes, or by causing destruction of HBV viral genomic DNA. In certain embodiments, methods described herein comprise knockout or knockdown of a HBV viral gene, e.g., HBV encoded open reading frames (ORFs), e.g., ORF C, ORF P, ORF S, or ORF X. In certain embodiments, methods described herein comprise knockout or knockdown of any region of the HBV genome, e.g., HBV encoded genes, e.g., PreC, C, X PreS1, PreS2, S, P or SP. In certain embodiments, methods described herein comprise knockout or knockdown of any one of or a combination of (e.g., any two, any three, four, five, six, seven or all of the) the genes, e.g., PreC, C, X PreS1, PreS2, S, P or SP. In certain embodiments, methods described herein comprise knockout or knockdown of one or a combination (e.g., any two, three, four, five, six, seven or all of) the HBV encoded genes, e.g., PreC, C, X PreS1, PreS2, S, or P.

[0255] When there are two alterations events (e.g., knocking down or knocking out the expression of genes, e.g., PreC, C, X, PreS1, PreS2, S, P or SP), the two alteration events may occur sequentially or simultaneously. In certain embodiments, the knocking out of a gene occurs prior to knocking down of a gene. In certain embodiments, the knockout of a gene is concurrent with the knockdown of a gene. In certain embodiments, the knockout of a gene is subsequent to the knockdown of a gene. In certain embodiments, the effect of the alterations is synergistic.

[0256] In certain embodiments, the methods described herein reduce, prevent and/or treat HBV by knocking out of at least one HBV viral gene, e.g., HBV encoded open reading frames (ORFs), e.g., ORF C, ORF P, ORF S, or ORF X. In certain embodiments, the methods described herein comprise knockout of any region of the HBV genome, e.g., HBV encoded genes, e.g PreC, C, X, PreS1, PreS2, S, P or SP. In certain embodiments, the methods described herein comprise knockout of any one of or a combination of (e.g., any two, any three, four, five, six, seven or all of the) the genes, e.g., PreC, C, X, PreS1, PreS2, S, P or SP. In certain embodiments, the methods described herein comprise knockout of any region of the HBV genome that contains the coding region of a gene that encodes an HBV protein, e.g., LHBs, MHBs, SHBs, HBe, HBc, polymerase/reverse transcriptase (pol), HBx or HBSP. In certain embodiments, the methods described herein comprise knockout of any one of or a combination of (e.g., any two, any three, four, five, six, seven or all of the) the genes that encode HBV proteins, e.g., LHBs, MHBs, SHBs, HBe, HBc, polymerase/reverse transcriptase (Pol), HBx or HBSP.

[0257] In certain embodiments, the methods described herein reduce, prevent and/or treat HBV by knocking down viral gene expression (e.g., knocking down the expression of one or more of the PreC, C, X, PreS1, PreS2, S, P or SP genes). In certain embodiments, the methods described herein comprise knockdown of the expression of one or more of the PreC, C, X, PreS1, PreS2, S, P or SP genes, e.g., knocking down HBV encoded open reading frames (ORFs): ORF C, ORF P, ORF S, ORF X. In certain embodiments, the methods described herein comprise knockdown of any region of the HBV genome, e.g., HBV encoded genes, e.g., PreC, C, X, PreS1, PreS2, S, P or SP. In certain embodiments, the methods described herein comprise knockdown of any one of or a combination of (e.g., any two, any three, four, five, six, seven or all of the) the genes, e.g., PreC, C, X, PreS1, PreS2, S, P or SP. Methods described herein comprise knocking down a HBV gene or genes residing on any form of the HBV genome in the nucleus of hepatocytes, including but not limited to knocking down of a gene or genes residing on cccDNA and/or knocking down of a gene or genes residing on integrated HBV DNA within the subject genome.

[0258] In certain embodiments, the methods described herein comprise knocking down any region of the HBV genome that contains the coding region of a gene that encodes a HBV protein, e.g., LHBs, MHBs, SHBs, HBe, HBc, polymerase/reverse transcriptase (pol), HBx or HBSP. In certain embodiments, the methods described herein comprise knocking down any one of or a combination of (e.g., any two, any three, four, five, six, seven or all of the) the genes that encode HBV proteins, e.g., LHBs, MHBs, SHBs, HBe, HBc, polymerase/reverse transcriptase (pol), HBx or HBSP.

[0259] In certain embodiments, the knockout of genes encoded on the HBV genome include, but are not limited to, those found on integrated HBV DNA and/or intra-nuclear HBV DNA, e.g., intra-nuclear cccDNA, e.g., intra-nuclear HBV relaxed circular DNA (rcDNA), e.g., intra-nuclear linearized HBV DNA, and/or those found on intra-cytoplasmic DNA, e.g., intra-cytoplasmic HBV DNA intermediates, e.g., intra-cytoplasmic plus-strand DNA, e.g., intra-cytoplasmic minus-strand DNA, prevents the transcription of genes vital to the proliferation, assembly and/or infectivity of HBV. Altering (e.g., knocking out or knocking down) the genes encoded on the HBV genome or on integrated HBV DNA may prevent the transcription of genes vital to the proliferation, assembly and/or infectivity of HBV. In certain embodiments, the methods described herein eliminate and/or decrease the levels of HBV DNA, HBV cccDNA, and/or HBV rcDNA in infected hepatocytes. In certain embodiments, the methods can described herein can be used to eliminate and/or decrease the levels of HBV DNA, HBV cccDNA, and/or HBV rcDNA in infected liver cells, kupfer cell, a sinusoidal epithelial cells, a stellate cells, renal tubular epithelial cells or lymphocytes, including but not limited to CD4⁺ T-cells and/or CD8⁺ T cells. In certain embodiments, the methods described herein prevent, cure or decrease the severity of HBV infection and/or chronic HBV. The methods described herein eliminate and/or decrease the levels of HBV proteins produced by HBV DNA, HBV cccDNA, integrated HBV DNA, and/or HBV rcDNA. In certain embodiments, the methods described herein decrease the levels of circulating HBsAg and HBeAg, permitting a reversal of ‘immune exhaustion’ in a subject and the effective mounting of an immunologic response to HBV. There is evidence that reduction in viral load and circulating viral proteins leads to a stoichiometric reversal in the ratio of HBsAg to anti-HBs, which allows anti-HBs to clear HBsAg and HBV Dane particles.

[0260] In certain embodiments, the knockout methods described herein cause the permanent destruction of HBV cccDNA in a large enough percent of hepatocytes to allow for immune reconstitution and subsequent clearance of infected hepatocytes via T- and B-cell mediated mechanisms. In certain embodiments, the knockout methods described herein are administered on a recurring basis (e.g., repeated administration) to allow for additive knock out of HBV DNA. In certain embodiments, the knockout methods described herein are administered weekly or monthly over the course of 1, 2, 3, 4, 6, 9 and/or 12 months.

[0261] HBV integration events into the genome are ubiquitous and random. The virus integrates throughout the genome at intronic, exonic and promoter regions. The risk of HCC is higher in subjects who have greater than 3 integration events per hepatocyte and in subjects in whom integration occurs more often in promoter and/or exonic regions. Furthermore, these subjects develop HCC at younger ages and without first developing cirrhosis and fibrosis (Sung et al, Nature Genetics 2012; 44(7):765-770). Subjects at high risk for developing HCC may be identified via liver biopsy and sequencing of HBV integration events and locations. The eiCas-9 mediated knockdown of HBV genes that have been integrated into the genome, particularly in subjects who are at high risk for HCC, decreases the likelihood of a subject developing HCC.

[0262] In certain embodiments, any HBV-infected hepatocyte treated with the methods described herein may undergo natural apoptosis within 1-2 years. For example, and not by way of limitation, within one to two years of treatment, partial or substantially all treated HBV-infected hepatocytes may undergo T-cell mediated cytotoxic cell death. For example, within one to two years of treatment, partial or substantially all treated HBV-infected hepatocytes may naturally apoptose, leaving new, uninfected hepatocytes to re-populate the liver. In certain embodiments, the methods described herein lead to the clearance of HBV from and the clearance of chronic HBV infection in hepatocytes. In certain embodiments, the methods described herein prevent, cure or decrease the severity of sequelae of HBV infection, including cirrhosis, end-stage liver disease and hepatocellular carcinoma.

[0263] ORF P includes the nucleotide coding sequence (CDS) P. The CDS P encodes the HBV polymerase/reverse transcriptase (Pol) protein. The HBV genome is replicated from an RNA template in the cytoplasm. Minus strand DNA is synthesized using RNA as a template, and plus strand DNA is then synthesized from the minus strand template. Pol is involved in the priming of minus-strand DNA synthesis, reverse transcriptase activity to synthesize the minus strand from RNA, and polymerase activity to synthesize plus strand DNA. Pol is also involved in capsid formation. Pol is integral to the HBV life cycle. In certain embodiments, the methods described herein knock down and/or knock out Pol expression. In certain embodiments, the knock down and/or knock out of Pol expression can lead to the clearance of HBV infection.

[0264] ORF C includes the nucleotide coding sequence (CDS) C. The CDS C encodes the capsid protein, also known as the viral core protein, as well as the HBe antigen (HBeAg). The capsid protein is involved in the structure of the viral nucleocapsid. The function of HBeAg is unknown. HBV core protein is integral to the HBV life cycle. Methods described herein knock down and/or knock out core protein expression. In certain embodiments, the knockdown and/or knockout of core protein expression can lead to the clearance of HBV infection.

[0265] ORF S includes the nucleotide coding sequence (CDS) S. The CDS S encodes the PreS1, PreS2 and S regions, which encode, respectively, the long surface protein, middle surface protein, S protein (also known as small surface protein and/or HBs antigen (HBsAg)). The long-surface protein contributes to receptor binding and initiation of infection. S protein is another viral surface glycoprotein that is present in the blood of infected subjects. HBsAg loss (meaning undetectable blood levels) indicates a functional cure of HBV infection. HBV S protein is integral to the HBV life cycle. In certain embodiments, the methods described herein knock down and/or knock out S protein expression. In certain embodiments, the knockdown and/or knockout of S protein expression can lead to the clearance of HBV infection.

[0266] ORF X includes the nucleotide coding sequence (CDS) X. The CDS X encodes the X protein, which has an unknown function.

[0267] In certain embodiments, altering (e.g., knocking out or knocking down) the expression of the genes, e.g., PreC, C, X, PreS1, PreS2, S, P or SP, individually or in combination, can reduce HBV protein expression, infectivity, replication, packaging and can therefore reduce, prevent and/or treat HBV infection.

[0268] In certain embodiments, highly conserved regions of the HBV genome are targeted in order to protect from causing viral escape. Highly conserved regions of the HBV genome are less likely to tolerate mutations, so targeting these regions will make it less likely that escape mutants will arise.

[0269] In certain embodiments, one or more regions of the HBV genome, e.g., the DR1 region or the DR2 region, that is known not to be integrated into the subject's genome is targeted for knock out. For example, and not by way of limitation, a method disclosed herein can knock out the DR1 region and/or the DR2 region. The DR1 region is a 12 base pair direct repeat region near the 5′ end of the HBV genome. The DR2 region is a 12 base pair direct repeat region near the 3′ end of the HBV genome.

[0270] In certain embodiments, altering (e.g., knocking out or knocking down) the expression of the HBV genes, e.g., PreC, C, X PreS1, PreS2, S, P or SP, individually or in combination, can make HBV more susceptible to antiviral therapy. Mutations in certain genes can render HBV and other viruses more susceptible to treatment with antivirals (Zhou et al., Journal of Virology 2014; 88(19): 11121-11129). In certain embodiments, altering (e.g., knocking out or knocking down HBV genes, e.g., PreC, C, X, PreS1, PreS2, S, P or SP, individually or in combination, may be combined with antiviral therapy to reduce, prevent and/or treat HBV infection. In certain embodiments, the compositions and methods described herein can be used in combination with another antiviral therapy, e.g., tenofovir, e.g., entecavir, e.g., another anti-HBV therapy described herein, to reduce, prevent and/or treat HBV infection. In certain embodiments, the compositions and methods described herein can be used in combination with another therapy, e.g., interferon, e.g., pegylated-interferon, e.g., PD-1 inhibition, e.g., another anti-HBV therapy, to reduce, prevent and/or treat HBV infection.

[0271] In certain embodiments, one or more of the PreC, C, X, PreS1, PreS2, S, P and/or SP gene(s) is targeted as a targeted knockout, e.g., to inhibit essential viral functions, including, e.g., viral gene transcription, viral genome replication and viral capsid formation. In certain embodiments, said approach comprises knocking out one HBV gene (e.g., PreC, C, X, PreS1, PreS2, S, P or SP gene). In certain embodiments, said approach comprises knocking out two HBV genes, e.g., two of PreC, C, X, PreS1, PreS2, S, P or SP gene(s). In certain embodiments, said approach comprises knocking out three HBV genes, e.g., three of PreC, C, X, PreS1, PreS2, S, P or SP gene(s). In certain embodiments, said approach comprises knocking out four HBV genes, e.g., four of PreC, C, X, PreS1, PreS2, S, P and SP genes. In certain embodiments, said approach comprises knocking out five HBV genes, e.g., five of PreC, C, X, PreS1, PreS2, S, P and SP genes. In certain embodiments, said approach comprises knocking out six HBV genes, e.g., six of PreC, C, X, PreS1, PreS2, S, P and SP genes. In certain embodiments, said approach comprises knocking out seven HBV genes, e.g., seven of PreC, C, X, PreS1, PreS2, S, P and SP genes. In certain embodiments, said approach comprises knocking out eight HBV genes, e.g., each of PreC, C, X, PreS1, PreS2, S, P and SP genes.

[0272] In certain embodiments, one or more of the PreC, C, X, PreS1, PreS2, S, P and/or SP gene(s) is targeted as a targeted knockdown, e.g., to inhibit essential viral functions, including, e.g., viral gene transcription, viral genome replication and viral capsid formation. In certain embodiments, said approach comprises knocking down the expression of one HBV gene (e.g., one of the PreC, C, X, PreS1, PreS2, S, P or SP gene). In certain embodiments, said approach comprises knocking down the expression of two HBV genes, e.g., two of PreC, C, X, PreS1, PreS2, S, P or SP gene(s). In certain embodiments, said approach comprises knocking down the expression of three HBV genes, e.g., three of PreC, C, X, PreS1, PreS2, S, P or SP gene(s). In certain embodiments, said approach comprises knocking down the expression of four HBV genes, e.g., four of PreC, C, X, PreS1, PreS2, S, P and SP genes. In certain embodiments, said approach comprises knocking down the expression of five HBV genes, e.g., five of PreC, C, X, PreS1, PreS2, S, P and SP genes. In certain embodiments, said approach comprises knocking down the expression of six HBV genes, e.g., six of PreC, C, X, PreS1, PreS2, S, P and SP genes. In certain embodiments, said approach comprises knocking down the expression of seven HBV genes, e.g., seven of PreC, C, X, PreS1, PreS2, S, P and SP genes. In certain embodiments, said approach comprises knocking down the expression of eight HBV genes, e.g., each of PreC, C, X, PreS1, PreS2, S, P and SP genes.

[0273] In certain embodiments, two or more of the PreC, C, X, PreS1, PreS2, S, P and/or SP gene(s) are targeted as a targeted knockout and/or knockdown, e.g., to inhibit essential viral functions, including, e.g., viral gene transcription, viral genome replication and viral capsid formation. In certain embodiments, said approach comprises knocking out the expression of one HBV gene (e.g., PreC, C, X, PreS1, PreS2, S, P or SP gene) and knocking down the expression of one HBV gene (e.g., PreC, C, X, PreS1, PreS2, S, P or SP gene) that is different from the gene targeted by the knockout approach. In certain embodiments, said approach comprises knocking out the expression of one or more HBV genes, e.g., one or more of PreC, C, X, PreS1, PreS2, S, P or SP gene(s) and knocking down the expression of one or more HBV genes, e.g., one or more of PreC, C, X, PreS1, PreS2, S, P or SP gene(s) that are different from the target gene(s) targeted by the knockout approach.

[0274] Inhibiting essential viral functions, e.g., viral gene transcription, viral genome replication and viral capsid formation, may decrease the duration and/or severity of HBV infection, including but not limited to acute, occult, latent and/or chronic infection, and/or decreases shedding of viral particles. Subjects also experience shorter duration(s) of illness, decreased risk of cirrhosis, decreased risk of hepatitis, decreased risk of end stage liver disease, decreased risk of hepatocellular carcinoma, decreased risk of transmission to sexual partners, decreased risk of transmission to the fetus in the case of pregnancy and/or the potential for full clearance of HBV (cure).

[0275] In certain embodiments, altering (e.g., knocking out or knocking down) the expression of the PreC, C, X, PreS1, PreS2, S, P or SP genes, individually or in combination, can reduce HBV protein expression. In certain embodiments, the reduction in HBV protein expression can cause the reduction of HBV peptide presentation by MEW class I and II molecules and the reversal of T-cell failure, which can treat HBV infection. In certain embodiments, a reduction in viral protein production can lead to the reversal of immune exhaustion and a return of functional B-cell and T-cell responses against hepatocytes infected with HBV.

[0276] In certain embodiments, the methods disclosed herein can cause the decline in HBe, HBc, HBx, LHBs, MHBs, SHBs, Pol, and/or HBSP protein production. For example, and not by way of limitation, the methods disclosed herein can comprise inducing a decline in certain HBV proteins, e.g., HBc, e.g., HBpol, e.g., HBx, whose expression is thought to be the cause of T-cell failure in chronic HBV (Feng et. al, J Biomed Sci. 2007 January; 14(1):43-57). In certain embodiments, the method comprises inducing a decline in any and/or all HBV protein production, e.g., HBe, HBc, HBx, LHBs, MHBs, SHBs, Pol, and/or HBSP protein production, as a high viral load is thought to be the primary mechanism for the failure of HBV-specific CD8+ T-cell responses (Schmidt et. al, Emerging Microbes & Infections (2013) 2, e15; Published online 27 Mar. 2013).

[0277] In certain embodiments, a decline in HBV protein production, e.g., a decline in HBe, HBc, HBx, LHBs, MHBs, SHBs, Pol, and/or HBSP protein production, gives rise to a reduction in the overwhelming presentation of antigens to the humoral (B-cell) mediated immune system. In certain embodiments, B-cell mediated antibody production is no longer overwhelmed by HBV antigen production and B-cell mediated antibody production is stoichiometrically equivalent to HBV antigen production, e.g., HBsAg production is decreased and anti-HBs antibody can mediate clearance of HbsAg. In certain embodiments, a reduction in the volume and presentation of HBV antigens, e.g., HBeAg, HBcAg, HBxAg, HBsAg, HBpolAg allows for effective humoral immunity, e.g., viral-specific neutralizing antibody production, e.g., anti-HBe Ag production, e.g., anti-HBcAg production, e.g., anti-HBxAg production, e.g., anti-HBsAg production, e.g., anti-HBpolAg production. In certain embodiments, a reduction in the presentation of HBV antigens, e.g., HBeAg, HBcAg, HBxAg, HBsAg, HBpolAg allows for B-cell mediated antibody clearance of HBV antigens and viral particles, including the Dane particle.

[0278] In certain embodiments, knockdown of HBV protein production, e.g., HBc (HB core protein), HBpol (HB polymerase protein), HBx (HB x protein) and/or HBs (HB s protein) leads to reversal of immune exhaustion in a subject, restoration of T-cell mediated immunity and/or clearance of chronic HBV infection. For example, and not by way of limitation, knock down of HBV protein production can be performed by eiCas9 or an eiCas9 fusion protein mediated knock down of integrated genomic HBV DNA.

[0279] In certain embodiments, knockdown of HBc (HB core protein) production, e.g., by eiCas9 or an eiCas9 fusion protein mediated knock down of HBV cccDNA, leads to reversal of immune exhaustion in a subject, restoration of T-cell mediated immunity and/or clearance of chronic HBV infection. In certain embodiments, knockdown of HBc production, by eiCas9 or an eiCas9 fusion protein mediated knock down of both integrated genomic HBV DNA and HBV cccDNA, leads to reversal of immune exhaustion, restoration of T-cell mediated immunity and/or clearance of chronic HBV infection in a subject.

[0280] In certain embodiments, knockdown of HBx (HB x protein) production, by eiCas9 or an eiCas9 fusion protein mediated knockdown of HBV cccDNA, leads to reversal of immune exhaustion in a subject, restoration of T-cell mediated immunity and/or clearance of chronic HBV infection. In certain embodiments, knockdown of HBx production, by eiCas9 or an eiCas9 fusion protein mediated knockdown of both integrated genomic HBV DNA and HBV cccDNA, leads to reversal of immune exhaustion, restoration of T-cell mediated immunity and/or clearance of chronic HBV infection in a subject.

[0281] In certain embodiments, knockdown of HBpol (HB polymerase protein) production, by eiCas9 or an eiCas9 fusion protein mediated knock down of HBV cccDNA, leads to reversal of immune exhaustion in a subject, restoration of T-cell mediated immunity and/or clearance of chronic HBV infection. In certain embodiments, knockdown of HBpol production, by eiCas9 or an eiCas9 fusion protein mediated knock down of both integrated genomic HBV DNA and HBV cccDNA, leads to reversal of immune exhaustion, restoration of T-cell mediated immunity and/or clearance of chronic HBV infection in a subject.

[0282] In certain embodiments, knockdown of HBs (HB S protein) production, by eiCas9 or an eiCas9 fusion protein mediated knock down of HBV cccDNA, leads to reversal of immune exhaustion in a subject, restoration of T-cell mediated immunity and/or clearance of chronic HBV infection.

[0283] In certain embodiments, the methods described herein eliminate and/or decrease the levels of circulating HBsAg, HBeAg and other HBV proteins (e.g., HBpreC, HBc, HBpreS1, HBpreS2, HBp, HBsp) to a degree that permits T-cell and/or B-cell recovery, including T-cell mediated cytotoxic clearance of infected hepatocytes and B-cell mediated clearance of HBsAg and/or Dane particles thereby producing a functional or virologic cure of HBV infection based on immunologic clearance of infected cells.

[0284] In certain embodiments, the knockdown methods described herein cause the continued transient knockdown of circulating HBV proteins, e.g., HBs, HBe, HBpreC, HBc, HBpreS1, HBpreS2, HBp, HBsp for long enough (e.g., 1 month, 3 months, 6 months, 1 year, 2 years) to allow for immune reconstitution and subsequent clearance of infected hepatocytes via T- and B-cell mediated mechanisms. In certain embodiments, the knockdown methods described herein are administered on a recurring basis (repeated administration) to allow for continued knockdown of circulating HBV proteins. In certain embodiments, the knock down methods described herein are administered weekly or monthly over the course of 1, 2, 3, 4, 6, 9 and/or 12 months. In certain embodiments, the knockdown methods described herein are given concomitantly with immune activating therapies such as, but not limited to, IFN and PD-1 inhibitors.

[0285] Knocking out and/or knocking down one or more copies (e.g., 1, 2, 3, 4, 5, 6, 7, 8, 9, 10, 15, 20, 25 or 50 copies) of one or more target genes (e.g., PreC, C, X, PreS1, PreS2, S, P or SP gene) may be performed prior to disease onset or after disease onset, but preferably early in the disease course.

[0286] In certain embodiments, the method comprises initiating treatment of a subject prior to disease onset. In certain embodiments, the method comprises initiating treatment of a subject after disease onset.

[0287] In certain embodiments, the method comprises initiating treatment of a subject well after disease onset, e.g., 1, 2, 3, 4, 5, 6, 7, 8, 9, 10, 12, 16, 24, 36, 48 or more months after onset of HBV infection. In certain embodiments, the method comprises initiating treatment of a subject well after disease onset, e.g., 1, 2, 3, 4, 5, 10, 15, 20, 25, 40, 50 or 60 years after onset of HBV infection. This may be effective as disease progression is slow in some cases and a subject may present well into the course of illness.

[0288] In certain embodiments, the method comprises initiating treatment of a subject in an advanced stage of disease, e.g., during immune-tolerant phase, e.g., during immune-active phase, e.g., during inactive carrier phase. In certain embodiments, the method comprises initiating treatment of a subject in the case of acute disease. In certain embodiments, the method comprises initiating treatment of a subject in the case of severe disease exacerbation, e.g., during acute hepatitis. In certain embodiments, the method comprises initiating treatment of a subject in the case of asymptomatic disease, e.g., during latent infection, e.g., during chronic infection with low ALT levels and/or low HBV DNA levels and/or absence of cirrhosis.

[0289] In certain embodiments, the method comprises initiating treatment of a subject in the case of occult hepatitis B infection (OBI), including but not limited to subjects testing negative for HBsAG and positive for HBV DNA.

[0290] In certain embodiments, the method comprises initiating treatment of a subject at risk for hepatocellular carcinoma secondary to exposure to acute HBV. In certain embodiments, the method comprises initiating treatment of a subject at risk for hepatocellular carcinoma due to chronic HBV. In certain embodiments, the method comprises initiating treatment of a subject at risk for hepatocellular carcinoma due to exposure to HBV, including but not limited to subjects with increased HBV integration events, subjects with HBV integration events in known oncogenes, subjects with HBV integration events in exonic and/or promoter regions.

[0291] Overall, initiation of treatment for subjects at all stages of disease is expected to improve healing, decrease duration of disease and be of benefit to subjects.

[0292] In certain embodiments, the method comprises initiating treatment of a subject prior to disease expression. In certain embodiments, the method comprises initiating treatment of a subject in an early stage of disease, e.g., when a subject has been exposed to HBV or is thought to have been exposed to HBV.

[0293] In certain embodiments, the method comprises initiating treatment of a subject prior to disease expression. In certain embodiments, the method comprises initiating treatment of a subject in an early stage of disease, e.g., when a subject has tested positive for HBV infection but has no signs or symptoms.

[0294] In certain embodiments, the method comprises initiating treatment of a subject at the appearance of elevated liver enzymes, e.g., elevated AST, e.g., elevated ALT.

[0295] In certain embodiments, the method comprises initiating treatment at the appearance of any of the following symptoms consistent or associated with HBV hepatitis: jaundice, nausea and vomiting, weakness, dark urine, fever, abdominal pain, loss of appetite, confusion and changes in mental status, and joint pain.

[0296] In certain embodiments, the method comprises initiating treatment of a subject at the appearance of laboratory evidence consistent with acute or chronic HBV infection, including but not limited to: presence of HBV DNA in the blood, presence of HBsAg in the blood, presence of HBeAg in the blood, presence of HBxAg in the blood, elevated HBV DNA levels in the blood, elevated HBsAg levels in the blood, elevated HBeAg levels in the blood, elevated HBxAg levels in the blood, presence of anti-HBs in the blood, presence of anti-HBc in the blood, presence of anti-HBe in the blood, presence of anti-HBx in the blood.

[0297] In certain embodiments, the method comprises initiating treatment of a subject with evidence of HBV infection on liver biopsy, including but not limited to: presence of HBV DNA, presence of HBsAg, presence of HBeAg, presence of HBxAg, presence of hepatitis delta virus.

[0298] In certain embodiments, the method comprises initiating treatment of a subject with evidence of hepatitis delta virus (HDV) infection, including but not limited to: presence of HDV DNA on blood test, presence of HDV DNA on liver biopsy.

[0299] In certain embodiments, the method comprises initiating treatment of a subject with evidence of HBV infection, including but not limited to: hepatic fibrosis on ultrasound, increased liver stiffness on Fibroscan.

[0300] In certain embodiments, the method comprises initiating treatment at the appearance of any of the following signs consistent with or associated with HBV cirrhosis: spider angioma, palmar erythema, hepatomegaly, jaundice, splenomegaly, easy bruising and bleeding, hepatic encephalopathy, or portal hypertension.

[0301] In certain embodiments, the method comprises initiating treatment in a patient with signs consistent with HBV cirrhosis and/or hepatitis on ultrasound, fibroscan, liver biopsy, blood test, CT scan and/or MRI.

[0302] In certain embodiments, the method comprises initiating treatment in utero in case of high risk of maternal-to-fetal transmission.

[0303] In certain embodiments, the method comprises initiating treatment during pregnancy in case of mother who has active HBV infection or has recent primary HBV infection or who has chronic HBV infection or who has occult HBV infection.

[0304] In certain embodiments, the method comprises initiating treatment of a subject who has received a HBV vaccine. In certain embodiments, the method comprises initiating treatment of a subject who has evidence of, who is at risk for, or who is a member of a population at risk for a “vaccine escape” mutation, including but not limited to HBV-G145R mutants.

[0305] In certain embodiments, the method comprises initiating treatment prior to organ transplantation or immediately following organ transplantation. In certain embodiments, the method comprises initiating treatment prior to hematopoietic stem cell transplantation (HSCT) or immediately following HSCT. In certain embodiments, the method comprises initiating treatment prior to chemotherapy or immediately following chemotherapy. In certain embodiments, the method comprises initiating treatment prior to or immediately following immunosuppressant therapy.

[0306] In certain embodiments, the method comprises initiating treatment in case of suspected exposure to HBV.

[0307] In certain embodiments, the method comprises initiating treatment prophylactically, especially in case of suspected exposure of infants, children or immune suppressed subjects.

[0308] In certain embodiments, the method comprises initiating treatment prophylactically, especially in case of suspected exposure of health care workers.

[0309] In certain embodiments, the method comprises initiating treatment of a subject who suffers from or is at risk of developing severe manifestations of HBV infections, e.g., neonates, infants, children, subjects with HIV, subjects who are on immunosuppressant therapy following organ transplantation, subjects who have cancer, subjects who are undergoing chemotherapy, subjects who will undergo chemotherapy, subjects who are undergoing radiation therapy, subjects who will undergo radiation therapy.

[0310] Both HIV positive subjects and post-transplant subjects may experience chronic HBV, and have a high risk of developing HBV-related cirrhosis and/or HBV-related hepatocellular carcinoma. Neonates are also at risk for chronic HBV. Inhibiting essential viral functions, e.g., viral gene transcription, viral genome replication and viral capsid formation, may provide superior protection to said populations at risk for chronic HBV infections. Subjects treated with the treatment described herein may experience lower rates of chronic HBV, lower rates of cirrhosis and lower rates of hepatocellular carcinoma, which will profoundly improve quality of life.

[0311] In certain embodiments, the method comprises initiating treatment of a subject who has tested positive for HBV. In certain embodiments, the method comprises initiating treatment of a subject who has tested positive for HDV.

[0312] In certain embodiments, a cell is manipulated by editing (e.g., introducing a mutation in) one or more target genes, e.g., PreC, C, X, PreS1, PreS2, S, P or SP gene(s). In certain embodiments, the expression of one or more target genes (e.g., one or more PreC, C, X, PreS1, PreS2, S, P or SP gene(s) described herein) is modulated, e.g., in vivo.

[0313] In certain embodiments, the method comprises delivery of gRNA by an AAV. In certain embodiments, the method comprises delivery of gRNA by a lentivirus. In certain embodiments, the method comprises delivery of gRNA by a nanoparticle, e.g., lipid nanoparticle.

[0314] In certain embodiments, the method further comprising treating the subject with a second antiviral therapy, e.g., an anti-HBV therapy described herein. In certain embodiments, the method further comprising treating the subject with a second therapy that stimulates the immune system, e.g., PEG-interferon, a PD-1 inhibitor, a vaccine. The compositions described herein can be administered concurrently with, prior to, or subsequent to, one or more additional therapies or therapeutic agents. The composition and the other therapy or therapeutic agent can be administered in any order. In certain embodiments, the effect of the two treatments is synergistic. Exemplary anti-HBV therapies include, but are not limited to, interferon, PEG-interferon, entacavir, tenofovir, a therapeutic vaccine, or an immune-stimulatory therapy, e.g., a PD-1 inhibitor.

[0315] When two or more genes (e.g., PreC, C, X PreS1, PreS2, S, P or SP) are targeted for alteration, the two or more genes (e.g., PreC, C, X, PreS1, PreS2, S, P or SP) may be altered sequentially or simultaneously. In certain embodiments, the effect of the alterations is synergistic.

### 4. Methods of Altering the HBV Genome, Including PreC, C, X, PreS1, PreS2, S, P and/or SP Gene(s)

[0316] As disclosed herein, a position in the HBV genome (e.g., any location on the HBV genome) can by altered by gene editing, e.g., using CRISPR-Cas9 mediated methods as described herein. In certain embodiments, a position in the HBV genome, e.g., a HBV target position in the PreC, C, X, PreS1, PreS2, S, P or SP gene(s), can be altered alone or in combination by gene editing, e.g., using CRISPR-Cas9 mediated methods as described herein.

[0317] The methods, genome editing systems and compositions discussed herein provide for altering a HBV genome, e.g., a target position in the HBV genome, including but not limited to a target position in one or more of the PreC, C, X PreS1, PreS2, S, P and/or SP gene(s). In certain embodiments, a HBV target position can be altered by gene editing, e.g., using CRISPR-Cas9 mediated methods to alter a position in the HBV genome, e.g., by a presently disclosed genome editing system. In certain embodiments, a HBV target position can be altered by a presently disclosed genome editing system to alter one or more of the PreC, C, X, PreS1, PreS2, S, P and/or SP gene(s).

[0318] Disclosed herein are methods, genome editing systems and compositions for altering (e.g., knocking out or knocking down) a HBV target position in the PreC, C, X, PreS1, PreS2, S, P and/or SP gene(s). Altering (e.g., knocking out or knocking down) the HBV target position is achieved, e.g., by: (1) knocking out one or more of the PreC, C, X PreS1, PreS2, S, P and/or SP gene(s): (a) insertion or deletion (e.g., NHEJ-mediated insertion or deletion) of one or more nucleotides in close proximity to or within the early coding region of the PreC, C, X, PreS1, PreS2, S, P and/or SP gene(s), or (b) deletion (e.g., NHEJ-mediated deletion) of a genomic sequence or multiple genomic sequences including at least a portion or portions of the PreC, C, X, PreS1, PreS2, S, P and/or SP gene(s), or (2) knocking down one or more of the PreC, C, X, PreS1, PreS2, S, P and/or SP gene(s) mediated by enzymatically inactive Cas9 (eiCas9) molecule or an eiCas9-fusion protein by targeting non-coding region, e.g., a promoter region, of the gene. In certain embodiments, eiCas9 or an eiCas9-fusion protein mediated knockdown of one or more of the PreC, C, X, PreS1, PreS2, S, P and/or SP gene(s) knocks down a gene or genes located on HBV cccDNA. In certain embodiments, eiCas9 or an eiCas9-fusion protein mediated knockdown of one or more of the PreC, C, X, PreS1, PreS2, S, P and/or SP gene(s) knocks down a gene or genes located on HBV rcDNA. In certain embodiments, eiCas9 or an eiCas9-fusion protein mediated knockdown of one or more of the PreC, C, X, PreS1, PreS2, S, P and/or SP gene(s) knocks down a gene or genes located on HBV linearized DNA. In certain embodiments, eiCas9 mediated or eiCas9-fusion protein mediated knockdown of one or more of the PreC, C, X, PreS1, PreS2, S, P and/or SP gene(s) knocks down a gene or genes that is located within the human genome, because the HBV genome has been integrated into a subject's genome.

[0319] All approaches give rise to altering (e.g., knocking out or knocking down) the HBV genome (e.g., one or more of the PreC, C, X, PreS1, PreS2, S, P or SP genes.)

[0320] In certain embodiments, the methods, genome editing systems and compositions described herein introduce one or more breaks near the early coding region in one or more of the PreC, C, X, PreS1, PreS2, S, P and/or SP gene(s). In certain embodiments, the methods, genome editing systems and compositions described herein introduce two or more breaks to flank at least a portion of one or more of the PreC, C, X, PreS1, PreS2, S, P and/or SP gene(s). The two or more breaks remove (e.g., delete) a genomic sequence including at least a portion of one or more of the PreC, C, X, PreS1, PreS2, S, P and/or SP gene(s). In certain embodiments, the methods, genome editing systems and compositions described herein comprise knockdown of one or more of the PreC, C, X, PreS1, PreS2, S, P and/or SP gene(s) mediated by enzymatically inactive Cas9 (eiCas9) molecule or an eiCas9-fusion protein by targeting the promoter region of HBV target knockdown position. The methods, genome editing systems and compositions described herein result in altering (e.g., knocking out or knocking down) the HBV genome (e.g., HBV cccDNA, linearized HBV DNA, HBV rcDNA and/or integrated HBV DNA), and/or altering (e.g., knocking out or knocking down) one or more of the PreC, C, X, PreS1, PreS2, S, P and/or SP gene(s).

[0321] An alteration of one or more of the PreC, C, X, PreS1, PreS2, S, P and/or SP gene(s) can be mediated by any mechanism. Exemplary mechanisms that can be associated with an alteration of one or more of the PreC, C, X, PreS1, PreS2, S, P and/or SP gene(s) include, but are not limited to, non-homologous end joining (e.g., classical or alternative), microhomology-mediated end joining (MMEJ), homology-directed repair (e.g., endogenous donor template mediated), SDSA (synthesis dependent strand annealing), single strand annealing or single strand invasion.

[0322] 4.1. Knocking Out One or More of the PreC, C, X, PreS1, PreS2, S, P and/or SP Gene(s) by Introducing an Indel or a Deletion in One or More HBV Gene(s)

[0323] In certain embodiments, the method comprises introducing an insertion or deletion of one or more nucleotides in close proximity to the HBV target knockout position (e.g., the early coding region) of the PreC, C, X PreS1, PreS2, S, P and/or SP gene(s). As described herein, in certain embodiments, the method comprises the introduction of one or more breaks (e.g., single strand breaks or double strand breaks) sufficiently close to (e.g., either 5′ or 3′ to) the early coding region of the HBV target knockout position, such that the break-induced indel could be reasonably expected to span the HBV target knockout position (e.g., the early coding region). NHEJ-mediated repair of the break(s) allows for the NHEJ-mediated introduction of an indel in close proximity to within the early coding region of the HBV target knockout position.

[0324] In certain embodiments, the method comprises introducing a deletion of a genomic sequence comprising at least a portion of one or more of the HBV gene(s) PreC, C, X PreS1, PreS2, S, P and/or SP. As described herein, in certain embodiments, the method comprises the introduction of two double stand breaks—one 5′ and the other 3′ to (i.e., flanking) the HBV target position. In certain embodiments, two gRNAs, e.g., unimolecular (or chimeric) or modular gRNA molecules, are configured to position the two double strand breaks on opposite sides of the HBV target knockout position in the PreC, C, X PreS1, PreS2, S, P and/or SP gene(s).

[0325] In certain embodiments, a single strand break is introduced (e.g., positioned by one gRNA molecule) at or in close proximity to a HBV target position in the PreC, C, X PreS1, PreS2, S, P and/or SP gene. In certain embodiments, a single gRNA molecule (e.g., with a Cas9 nickase) is used to create a single strand break at or in close proximity to the HBV target position, e.g., the gRNA is configured such that the single strand break is positioned either upstream or downstream of the HBV target position. In certain embodiments, the break is positioned to avoid unwanted target chromosome elements, such as repeat elements, e.g., an Alu repeat.

[0326] In certain embodiments, a double strand break is introduced (e.g., positioned by one gRNA molecule) at or in close proximity to a HBV target position in the PreC, C, X PreS1, PreS2, S, P and/or SP gene. In certain embodiments, a single gRNA molecule (e.g., with a Cas9 nuclease other than a Cas9 nickase) is used to create a double strand break at or in close proximity to the HBV target position, e.g., the gRNA molecule is configured such that the double strand break is positioned either upstream or downstream of a HBV target position. In certain embodiments, the break is positioned to avoid unwanted target chromosome elements, such as repeat elements, e.g., an Alu repeat.

[0327] In certain embodiments, two single strand breaks are introduced (e.g., positioned by two gRNA molecules) at or in close proximity to a HBV target position in the PreC, C, X PreS1, PreS2, S, P and/or SP gene. In certain embodiments, two gRNA molecules (e.g., with one or two Cas9 nickcases) are used to create two single strand breaks at or in close proximity to the HBV target position, e.g., the gRNAs molecules are configured such that both of the single strand breaks are positioned upstream or downstream of the HBV target position. In certain embodiments, two gRNA molecules (e.g., with two Cas9 nickcases) are used to create two single strand breaks at or in close proximity to the HBV target position, e.g., the gRNAs molecules are configured such that one single strand break is positioned upstream and a second single strand break is positioned downstream of the HBV target position. In certain embodiments, the breaks are positioned to avoid unwanted target chromosome elements, such as repeat elements, e.g., an Alu repeat.

[0328] In certain embodiments, two double strand breaks are introduced (e.g., positioned by two gRNA molecules) at or in close proximity to a HBV target position in the PreC, C, X PreS1, PreS2, S, P and/or SP gene. In certain embodiments, two gRNA molecules (e.g., with one or two Cas9 nucleases that are not Cas9 nickases) are used to create two double strand breaks to flank a HBV target position, e.g., the gRNA molecules are configured such that one double strand break is positioned upstream and a second double strand break is positioned downstream of the HBV target position. In certain embodiments, the breaks are positioned to avoid unwanted target chromosome elements, such as repeat elements, e.g., an Alu repeat.

[0329] In certain embodiments, one double strand break and two single strand breaks are introduced (e.g., positioned by three gRNA molecules) at or in close proximity to a HBV target position in the PreC, C, X, PreS1, PreS2, S, P and/or SP gene. In certain embodiments, three gRNA molecules (e.g., with a Cas9 nuclease other than a Cas9 nickase and one or two Cas9 nickases) to create one double strand break and two single strand breaks to flank a HBV target position, e.g., the gRNA molecules are configured such that the double strand break is positioned upstream or downstream of of the HBV target position, and the two single strand breaks are positioned at the opposite site, e.g., downstream or upstream, of the HBV target position. In certain embodiments, the breaks are positioned to avoid unwanted target chromosome elements, such as repeat elements, e.g., an Alu repeat.

[0330] In certain embodiments, four single strand breaks are introduced (e.g., positioned by four gRNA molecules) at or in close proximity to a HBV target position in the PreC, C, X PreS1, PreS2, S, P and/or SP gene. In certain embodiments, four gRNA molecule (e.g., with one or more Cas9 nickases are used to create four single strand breaks to flank a HBV target position in the PreC, C, X PreS1, PreS2, S, P and/or SP gene, e.g., the gRNA molecules are configured such that a first and second single strand breaks are positioned upstream of the HBV target position, and a third and a fourth single stranded breaks are positioned downstream of the HBV target position. In certain embodiments, the breaks are positioned to avoid unwanted target chromosome elements, such as repeat elements, e.g., an Alu repeat.

[0331] In certain embodiments, two or more (e.g., three or four) gRNA molecules are used with one Cas9 molecule. In certain embodiments, when two or more (e.g., three or four) gRNAs are used with two or more Cas9 molecules, at least one Cas9 molecule is from a different species than the other Cas9 molecule(s). For example, when two gRNA molecules are used with two Cas9 molecules, one Cas9 molecule can be from one species and the other Cas9 molecule can be from a different species. Both Cas9 species are used to generate a single or double-strand break, as desired.

[0332] 4.2 Knocking Out One or More PreC, C, X, PreS1, PreS2, S, P or SP Genes by Deleting (e.g., NHEJ-Mediated Deletion) a Genomic Sequence PreC, C, X, PreS1, PreS2, S, P or SP Genes or Multiple Genomic Sequences Including at Least a Portion or Portions of the PreC, C, X, PreS1, PreS2, S, P and/or SP Gene(s).

[0333] In certain embodiments, the method comprises deleting (e.g., NHEJ-mediated deletion) a genomic sequence including at least a portion of the PreC, C, X, PreS1, PreS2, S, P or SP genes or multiple genomic sequences including at least a portion or portions of the PreC, C, X PreS1, PreS2, S, P and/or SP gene(s). In certain embodiments, deleting (e.g., NHEJ-mediated deletion) a genomic sequence or multiple genomic sequences including at least a portion or portions of the PreC, C, X PreS1, PreS2, S, P and/or SP gene(s) gives rise to destruction of the genomic DNA and/or clearance of the DNA from infected cells. In certain embodiments, deleting (e.g., NHEJ-mediated deletion) a genomic sequence or multiple genomic sequences within the HBV genome gives rise to destruction of the genomic DNA which causes reduction and/or cessation of transcription of HBV RNA. In certain embodiments, deleting a genomic sequence or multiple genomic sequences within the HBV genome gives rise to destruction of the genomic DNA and the cessation of translation of HBV proteins, e.g., HBe, HBc, HBx, LHBs, MHBs, SHBs, Pol, and/or HBSP proteins. In certain embodiments, deleting (e.g., NHEJ-mediated deletion) a genomic sequence or multiple genomic sequences within the HBV genome gives rise to destruction of the genomic DNA which causes any of the following, singly or in combination: decreased HBV DNA production, decreased HBV cccDNA production, decreased viral infectivity, decreased packaging of viral particles, decreased production of production of viral proteins, e.g., HBe, HBc, HBx, LHBs, MHBs, SHBs, Pol, and/or HBSP proteins. In certain embodiments, deleting (e.g., NHEJ-mediated deletion) a genomic sequence or multiple genomic sequences within the HBV genome gives rise to destruction of the genomic DNA which causes a decline in HBsAg production to such a point that anti-HBsAg production is no longer overwhelmed by HBsAg production, such that a subject is capable of mounting a functional immune response to HBV, e.g., a subject reverses ‘immune exhaustion’, and a subject can achieve a functional virologic cure of chronic HBV.

[0334] As described herein, in certain embodiments, the method comprises the introduction two sets of breaks (e.g., a pair of double strand breaks, one double strand break or a pair of single strand breaks, or two pairs of single strand breaks) to flank a region of the PreC, C, X PreS1, PreS2, S, P or SP genes (e.g., a coding region, e.g., an early coding region, or a non-coding region, e.g., a non-coding sequence of the PreC, C, X PreS1, PreS2, S, P or SP genes, e.g., a promoter, an enhancer, an intron, a 3′UTR, and/or a polyadenylation signal). NHEJ-mediated repair of the break(s) may allow for alteration of the PreC, C, X, PreS1, PreS2, S, P or SP genes as described herein, which reduces or eliminates expression of the gene, e.g., to knock out one or both alleles of the PreC, C, X PreS1, PreS2, S, P or SP genes.

[0335] In certain embodiments, two double strand breaks are introduced (e.g., positioned by two gRNA molecules) at or in close proximity to a HBV target position in the PreC, C, X PreS1, PreS2, S, P or SP genes. In certain embodiments, two gRNA molecules (e.g., with one or two Cas9 nucleases that are not Cas9 nickases) are used to create two double strand breaks to flank a HBV target position, e.g., the gRNA molecules are configured such that one double strand break is positioned upstream and a second double strand break is positioned downstream of the HBV target position. In certain embodiments, the breaks are positioned to avoid unwanted target chromosome elements, such as repeat elements, e.g., an Alu repeat.

[0336] In certain embodiments, one double strand break and two single strand breaks are introduced (e.g., positioned by three gRNA molecules) at or in close proximity to a HBV target position in the PreC, C, X, PreS1, PreS2, S, P or SP genes. In certain embodiments, three gRNA molecules (e.g., with a Cas9 nuclease other than a Cas9 nickase and one or two Cas9 nickases) to create one double strand break and two single strand breaks to flank a HBV target position, e.g., the gRNA molecules are configured such that the double strand break is positioned upstream or downstream of the HBV target position, and the two single strand breaks are positioned at the opposite site, e.g., downstream or upstream, of the HBV target position. In certain embodiments, the breaks are positioned to avoid unwanted target chromosome elements, such as repeat elements, e.g., an Alu repeat.

[0337] In certain embodiments, four single strand breaks are introduced (e.g., positioned by four gRNA molecules) at or in close proximity to a HBV target position in the PreC, C, X PreS1, PreS2, S, P or SP genes. In certain embodiments, four gRNA molecule (e.g., with one or more Cas9 nickases are used to create four single strand breaks to flank a HBV target position in the PreC, C, X PreS1, PreS2, S, P or SP genes, e.g., the gRNA molecules are configured such that a first and second single strand breaks are positioned upstream of the HBV target position, and a third and a fourth single stranded breaks are positioned of the HBV target position. In certain embodiments, the breaks are positioned to avoid unwanted target chromosome elements, such as repeat elements, e.g., an Alu repeat.

[0338] In certain embodiments, multiple (e.g., three four, five, six, seven, eight or more) gRNA molecules are used with one or more (e.g., two, three, four or more) Cas9 molecule. In certain embodiments, when the multiple (e.g., three four, five, six, seven, eight or more) gRNAs are used with two or more Cas9 molecules, at least one Cas9 molecule is from a different species than the other Cas9 molecule(s). For example, when two gRNA molecules are used with two Cas9 molecules, one Cas9 molecule can be from one species and the other Cas9 molecule can be from a different species. Both Cas9 species are used to generate a single or double-strand break, as desired.

[0339] 4.3 Knocking Down One or More of the PreC, C, X, PreS1, PreS2, S, P and/or SP Gene(s) Mediated by an Enzymatically Inactive Cas9 (eiCas9) Molecule

[0340] A targeted knockdown approach reduces or eliminates expression of functional PreC, C, X PreS1, PreS2, S, P and/or SP genes product. As described herein, in certain embodiments, a targeted knockdown is mediated by targeting an enzymatically inactive Cas9 (eiCas9) molecule or an eiCas9 fused to a transcription repressor domain or chromatin modifying protein to PreC, C, X PreS1, PreS2, S, P and/or SP genes. For example, and not by way of limitation, one or more genes (e.g., PreC, C, X, PreS1, PreS2, S, P and/or SP) can be knocked down using the methods disclosed herein.

[0341] Methods and compositions discussed herein may be used to alter the expression of one or more of the PreC, C, X, PreS1, PreS2, S, P and SP genes to reduce, prevent and/or treat HBV infection by targeting a transcriptional regulatory region, e.g., a promoter region (e.g., a promoter region that controls the transcription of one or more of the PreC, C, X, PreS1, PreS2, S, P or SP genes). In certain embodiments, the promoter region is targeted to knock down expression of one or more of the PreC, C, X, PreS1, PreS2, S, P or SP genes. A targeted knockdown approach reduces or eliminates expression of functional PreC, C, X, PreS1, PreS2, S, P or SP genes product. As described herein, in certain embodiments, a targeted knockdown is mediated by targeting an enzymatically inactive Cas9 (eiCas9) or an eiCas9 fused to a transcription repressor domain or chromatin modifying protein to PreC, C, X, PreS1, PreS2, S, P or SP genes.

[0342] In certain embodiments, one or more eiCas9s may be used to block binding of one or more endogenous transcription factors. In certain embodiments, an eiCas9 can be fused to a chromatin modifying protein. Altering chromatin status can result in decreased expression of the target gene. One or more eiCas9s fused to one or more chromatin modifying proteins may be used to alter chromatin status.

[0343] In certain embodiments, eiCas9 mediated reduction in the expression of one or more of the PreC, C, X, PreS1, PreS2, S, P or SP genes causes the reduction and/or cessation of transcription of HBV RNA. In certain embodiments, eiCas9 mediated reduction in the expression of one or more of the PreC, C, X, PreS1, PreS2, S, P or SP genes leads to reduction and/or cessation of translation of HBV proteins, e.g., HBe, HBc, HBx, LHBs, MHBs, SHBs, Pol, and/or HBSP proteins. In certain embodiments, eiCas9 mediated reduction in the expression of one or more of the PreC, C, X, PreS1, PreS2, S, P or SP genes gives rise to any of the following, singly or in combination: decreased HBV DNA production, decreased HBV replication, decreased viral infectivity, decreased packaging of viral particles, decreased production of viral proteins, e.g., HBe, HBc, HBx, LHBs, MHBs, SHBs, Pol, and/or HBSP proteins. In certain embodiments, eiCas9 mediated reduction in the expression of one or more of the PreC, C, X, PreS1, PreS2, S, P or SP genes gives rise to a decline in HBsAg production to such a point that anti-HBsAg production in a subject is no longer overwhelmed by HBsAg production, such that a subject is capable of mounting a functional immune response to HBV, e.g., a subject reverses ‘immune exhaustion’, and a subject can achieve a functional virologic cure of chronic HBV.

[0344] In certain embodiments, knockdown of one or more of the PreC, C, X PreS1, PreS2, S, P and/or SP gene(s) cures HBV infection. In certain embodiments, knockdown of one or more of the PreC, C, X, PreS1, PreS2, S, P and/or SP gene(s) leads to a functional cure of HBV infection. In certain embodiments, knockdown of one or more of the PreC, C, X PreS1, PreS2, S, P and/or SP gene(s) leads to a sustained virologic response to HBV infection. In certain embodiments, knockdown of one or more of the PreC, C, X PreS1, PreS2, S, P and/or SP gene(s) is an effective method of preventing the sequelae of chronic HBV, including fibrosis, cirrhosis, and hepatocellular carcinoma.

[0345] In certain embodiments, a targeted knockdown approach induces a decline in HBV protein production, e.g., HBe, HBc, HBx, LHBs, MHBs, SHBs, Pol, and/or HBSP protein production. For example, and not by way of limitation, a targeted knockdown approach induces a decline in the protein production of one or more HBV protein such as HBe, HBc, HBx, LHBs, MHBs, SHBs, Pol, and/or HBSP protein. In certain embodiments, a targeted knockdown approach comprises inducing a decline in certain HBV proteins, e.g., HBc, e.g., HBpol, e.g., HBx, whose expression is thought to be the cause of T-cell failure in chronic HBV (Feng et. al, J Biomed Sci. 2007 January; 14(1):43-57). In certain embodiments a targeted knockdown approach comprises inducing a decline in any and/or all HBV protein production, e.g., HBe, HBc, HBx, LHBs, MHBs, SHBs, Pol, and/or HBSP protein production, and the restoration of a subject's immune response to HBV, as a high viral load is thought to be the primary mechanism for the failure of HBV-specific CD8+ T-cell responses (Schmidt et. al, Emerging Microbes & Infections (2013) 2, e15; Published online 27 Mar. 2013).

[0346] In certain embodiments, a targeted knockdown approach induces a decline in HBV protein production, e.g., HBe, HBc, HBx, LHBs, MHBs, SHBs, Pol, and/or HBSP protein production, so that there is a corresponding decline in HBV peptide presentation, e.g., HBe-derived, HBc-derived, HBx-derived, LHBs-derived, MHBs-derived, SHBs-derived, Pol-derived, and/or HBSP-derived peptide presentation, by MHC Class I molecules. MHC Class I molecules present HBV-derived peptides on infected liver cells and antigen presenting cells. In certain embodiments, a targeted knockdown approach leads to reconstitution of functional CD8+ T cell-mediated toxicity against HBV-infected hepatocytes, including CD-8+ T-cell mediated cell killing and/or CD-8+ T cell-mediated interferon (IFN) secretion locally within the liver parenchyma. In certain embodiments, CD-8+ T cell-mediated IFN secretion locally, e.g., within the liver parenchyma and/or at or near the site of HBV infected hepatocytes, mediates cell killing and clearance of HBV-infected cells without the systemic side effects of systemic IFN therapy. For example, and not by way of limitation, the methods described herein are more effective and have fewer systemic side effects, e.g., fever, malaise, or muscle aches, than systemic IFN-based therapy. In certain embodiments, CD-8+ T cell-mediated IFN secretion locally leads to the clearance of HBV-infected hepatocytes and to a functional cure of HBV infection. In certain embodiments, a targeted knockdown approach induces a reconstitution of immune competence by restoring activation of T-cell mediated cytotoxicity in subjects. In certain embodiments, a targeted knockdown approach comprises inducing a local IFN response to HBV infection.

[0347] In certain embodiments, the method comprises knocking down a region of the HBV genome, e.g., the S gene, e.g., one or more of the PreC, C, X, PreS1, PreS2, P and/or SP gene(s) that is integrated into the subject genome in order to decrease circulating HBV antigen levels, including but not limited to HBsAg. In a chimpanzee model, integrated DNA is implicated in the production of HBsAg and in circulating HBs antigen-emia (Wooddell et al., AASLD abstract #32, Hepatology, 2015: 222A-223A). In certain embodiments, the method comprises knocking down a region of the HBV genome, e.g., the S gene, to induce a functional cure of HBV infection.

[0348] In certain embodiments, the method comprises knockdown of a region of the HBV genome, e.g., one or more of the PreC, C, X, PreS1, PreS2, P and/or SP gene(s) that is integrated into the subject genome. In certain embodiments, the method does not comprise knocking down and/or knocking out the S gene. In certain embodiments, the method can further include analyzing the levels of HBsAg to indicate whether the method resulted in a functional cure of the HBV infection. For example, and not by way of limitation, HBsAg can be used as a marker to determine if a method disclosed herein resulted in a functional cure of the HBV infection. In certain embodiments, minimal detection of HBsAg indicates that the patient subjected to a method disclosed herein achieved a functional virologic cure of chronic HBV.

### 5. Guide RNA (gRNA) Molecules

[0349] A gRNA molecule, as that term is used herein, refers to a nucleic acid that promotes the specific targeting or homing of a gRNA molecule/Cas9 molecule complex to a target nucleic acid. gRNA molecules can be unimolecular (having a single RNA molecule) (e.g., chimeric), or modular (comprising more than one, and typically two, separate RNA molecules). The gRNA molecules provided herein comprise a targeting domain comprising, consisting of, or consisting essentially of a nucleic acid sequence fully or partially complementary to a target domain (also referred to as “target sequence”). In certain embodiments, the gRNA molecule further comprises one or more additional domains, including for example a first complementarity domain, a linking domain, a second complementarity domain, a proximal domain, a tail domain, and a 5′ extension domain. Each of these domains is discussed in detail below. In certain embodiments, one or more of the domains in the gRNA molecule comprises a nucleotide sequence identical to or sharing sequence homology with a naturally occurring sequence, e.g., from S. pyogenes, S. aureus, or S. thermophilus. In certain embodiments, one or more of the domains in the gRNA molecule comprises a nucleotide sequence identical to or sharing sequence homology with a naturally occurring sequence, e.g., from S. pyogenes or S. aureus,

[0350] Several exemplary gRNA structures are provided in FIGS. 1A-1I. With regard to the three-dimensional form, or intra- or inter-strand interactions of an active form of a gRNA, regions of high complementarity are sometimes shown as duplexes in FIGS. 1A-1I and other depictions provided herein. FIG. 7 illustrates gRNA domain nomenclature using the gRNA sequence of SEQ ID NO:42, which contains one hairpin loop in the tracrRNA-derived region. In certain embodiments, a gRNA may contain more than one (e.g., two, three, or more) hairpin loops in this region (see, e.g., FIGS. 1H-1I).

[0351] In certain embodiments, a unimolecular, or chimeric, gRNA comprises, preferably from 5′ to 3′:

[0352] a targeting domain complementary to a target domain in a HBV viral gene selected from the group consisting of PreC gene, C gene, Xgene, PreS1 gene, PreS2 gene, S gene, P gene and SP gene, e.g., a targeting domain comprising a nucleotide sequence selected from SEQ ID NOs: 215 to 141071;

[0353] a first complementarity domain;

[0354] a linking domain;

[0355] a second complementarity domain (which is complementary to the first complementarity domain);

[0356] a proximal domain; and

[0357] optionally, a tail domain.

In certain embodiments, a modular gRNA comprises:

[0358] a first strand comprising, preferably from 5′ to 3′:

[0359] a targeting domain complementary to a target domain in a HBV viral gene, e.g., a targeting domain comprising a nucleotide sequence selected from SEQ ID NOs: 215 to 141071; and

[0360] a first complementarity domain; and

[0361] a second strand, comprising, preferably from 5′ to 3′:

[0362] optionally, a 5′ extension domain;

[0363] a second complementarity domain;

[0364] a proximal domain; and

[0365] optionally, a tail domain.

[0366] 5.1 Targeting Domain

[0367] The targeting domain (sometimes referred to alternatively as the guide sequence) comprises, consists of, or consists essentially of a nucleic acid sequence that is complementary or partially complementary to a target nucleic acid sequence in a HBV viral gene selected from the group consisting of PreC gene, C gene, Xgene, PreS1 gene, PreS2 gene, S gene, P gene and SP gene. The nucleic acid sequence in a HBV viral gene selected from the group consisting of PreC gene, C gene, X gene, PreS1 gene, PreS2 gene, S gene, P gene and SP gene to which all or a portion of the targeting domain is complementary or partially complementary is referred to herein as the target domain.

[0368] Methods for selecting targeting domains are known in the art (see, e.g., Fu 2014; Sternberg 2014). Examples of suitable targeting domains for use in the methods, compositions, and kits described herein comprise nucleotide sequences set forth in SEQ ID NOs: 215 to 8407.

[0369] The strand of the target nucleic acid comprising the target domain is referred to herein as the complementary strand because it is complementary to the targeting domain sequence. Since the targeting domain is part of a gRNA molecule, it comprises the base uracil (U) rather than thymine (T); conversely, any DNA molecule encoding the gRNA molecule can comprise thymine rather than uracil. In a targeting domain/target domain pair, the uracil bases in the targeting domain will pair with the adenine bases in the target domain. In certain embodiments, the degree of complementarity between the targeting domain and target domain is sufficient to allow targeting of a Cas9 molecule to the target nucleic acid.

[0370] In certain embodiments, the targeting domain comprises a core domain and an optional secondary domain. In certain of these embodiments, the core domain is located 3′ to the secondary domain, and in certain of these embodiments the core domain is located at or near the 3′ end of the targeting domain. In certain of these embodiments, the core domain consists of or consists essentially of about 8 to about 13 nucleotides at the 3′ end of the targeting domain. In certain embodiments, only the core domain is complementary or partially complementary to the corresponding portion of the target domain, and in certain of these embodiments the core domain is fully complementary to the corresponding portion of the target domain. In certain embodiments, the secondary domain is also complementary or partially complementary to a portion of the target domain. In certain embodiments, the core domain is complementary or partially complementary to a core domain target in the target domain, while the secondary domain is complementary or partially complementary to a secondary domain target in the target domain. In certain embodiments, the core domain and secondary domain have the same degree of complementarity with their respective corresponding portions of the target domain. In certain embodiments, the degree of complementarity between the core domain and its target and the degree of complementarity between the secondary domain and its target may differ. In certain of these embodiments, the core domain may have a higher degree of complementarity for its target than the secondary domain, whereas in other embodiments the secondary domain may have a higher degree of complementarity than the core domain.

[0371] In certain embodiments, the targeting domain and/or the core domain within the targeting domain is 3 to 100, 5 to 100, 10 to 100, or 20 to 100 nucleotides in length, and in certain of these embodiments the targeting domain or core domain is 3 to 15, 3 to 20, 5 to 20, 10 to 20, 15 to 20, 5 to 50, 10 to 50, or 20 to 50 nucleotides in length. In certain embodiments, the targeting domain and/or the core domain within the targeting domain is 6, 7, 8, 9, 10, 11, 12, 13, 14, 15, 16, 17, 18, 19, 20, 21, 22, 23, 24, 25, or 26 nucleotides in length. In certain embodiments, the targeting domain and/or the core domain within the targeting domain is 6+/−2, 7+/−2, 8+/−2, 9+/−2, 10+/−2, 10+/−4, 10+/−5, 11+/−2, 12+/−2, 13+/−2, 14+/−2, 15+/−2, or 16+−2, 20+/−5, 30+/−5, 40+/−5, 50+/−5, 60+/−5, 70+/−5, 80+/−5, 90+/−5, or 100+/−5 nucleotides in length.

[0372] In certain embodiments wherein the targeting domain includes a core domain, the core domain is 3 to 20 nucleotides in length, and in certain of these embodiments the core domain 5 to 15 or 8 to 13 nucleotides in length. In certain embodiments wherein the targeting domain includes a secondary domain, the secondary domain is 0, 1, 2, 3, 4, 5, 6, 7, 8, 9, 10, 11, 12, 13, 14 or 15 nucleotides in length. In certain embodiments wherein the targeting domain comprises a core domain that is 8 to 13 nucleotides in length, the targeting domain is 26, 25, 24, 23, 22, 21, 20, 19, 18, 17, or 16 nucleotides in length, and the secondary domain is 13 to 18, 12 to 17, 11 to 16, 10 to 15, 9 to 14, 8 to 13, 7 to 12, 6 to 11, 5 to 10, 4 to 9, or 3 to 8 nucleotides in length, respectively.

[0373] In certain embodiments, the targeting domain is fully complementary to the target domain. Likewise, where the targeting domain comprises a core domain and/or a secondary domain, in certain embodiments one or both of the core domain and the secondary domain are fully complementary to the corresponding portions of the target domain. In certain embodiments, the targeting domain is partially complementary to the target domain, and in certain of these embodiments where the targeting domain comprises a core domain and/or a secondary domain, one or both of the core domain and the secondary domain are partially complementary to the corresponding portions of the target domain. In certain of these embodiments, the nucleic acid sequence of the targeting domain, or the core domain or targeting domain within the targeting domain, is at least about 80%, about 85%, about 90%, or about 95% complementary to the target domain or to the corresponding portion of the target domain. In certain embodiments, the targeting domain and/or the core or secondary domains within the targeting domain include one or more nucleotides that are not complementary with the target domain or a portion thereof, and in certain of these embodiments the targeting domain and/or the core or secondary domains within the targeting domain include 1, 2, 3, 4, 5, 6, 7, or 8 nucleotides that are not complementary with the target domain. In certain embodiments, the core domain includes 1, 2, 3, 4, or 5 nucleotides that are not complementary with the corresponding portion of the target domain. In certain embodiments wherein the targeting domain includes one or more nucleotides that are not complementary with the target domain, one or more of said non-complementary nucleotides are located within five nucleotides of the 5′ or 3′ end of the targeting domain. In certain of these embodiments, the targeting domain includes 1, 2, 3, 4, or 5 nucleotides within five nucleotides of its 5′ end, 3′ end, or both its 5′ and 3′ ends that are not complementary to the target domain. In certain embodiments wherein the targeting domain includes two or more nucleotides that are not complementary to the target domain, two or more of said non-complementary nucleotides are adjacent to one another, and in certain of these embodiments the two or more consecutive non-complementary nucleotides are located within five nucleotides of the 5′ or 3′ end of the targeting domain. In certain embodiments, the two or more consecutive non-complementary nucleotides are both located more than five nucleotides from the 5′ and 3′ ends of the targeting domain.

[0374] In certain embodiments, the targeting domain, core domain, and/or secondary domain do not comprise any modifications. In certain embodiments, the targeting domain, core domain, and/or secondary domain, or one or more nucleotides therein, have a modification, including but not limited to the modifications set forth below. In certain embodiments, one or more nucleotides of the targeting domain, core domain, and/or secondary domain may comprise a 2′ modification (e.g., a modification at the 2′ position on ribose), e.g., a 2-acetylation, e.g., a 2′ methylation. In certain embodiments, the backbone of the targeting domain can be modified with a phosphorothioate. In certain embodiments, modifications to one or more nucleotides of the targeting domain, core domain, and/or secondary domain render the targeting domain and/or the gRNA comprising the targeting domain less susceptible to degradation or more bio-compatible, e.g., less immunogenic. In certain embodiments, the targeting domain and/or the core or secondary domains include 1, 2, 3, 4, 5, 6, 7, or 8 or more modifications, and in certain of these embodiments the targeting domain and/or core or secondary domains include 1, 2, 3, or 4 modifications within five nucleotides of their respective 5′ ends and/or 1, 2, 3, or 4 modifications within five nucleotides of their respective 3′ ends. In certain embodiments, the targeting domain and/or the core or secondary domains comprise modifications at two or more consecutive nucleotides.

[0375] In certain embodiments wherein the targeting domain includes core and secondary domains, the core and secondary domains contain the same number of modifications. In certain of these embodiments, both domains are free of modifications. In other embodiments, the core domain includes more modifications than the secondary domain, or vice versa.

In certain embodiments, modifications to one or more nucleotides in the targeting domain, including in the core or secondary domains, are selected to not interfere with targeting efficacy, which can be evaluated by testing a candidate modification using a system as set forth below. gRNAs having a candidate targeting domain having a selected length, sequence, degree of complementarity, or degree of modification can be evaluated using a system as set forth below. The candidate targeting domain can be placed, either alone or with one or more other candidate changes in a gRNA molecule/Cas9 molecule system known to be functional with a selected target, and evaluated.

[0376] In certain embodiments, all of the modified nucleotides are complementary to and capable of hybridizing to corresponding nucleotides present in the target domain. In certain embodiments, 1, 2, 3, 4, 5, 6, 7 or 8 or more modified nucleotides are not complementary to or capable of hybridizing to corresponding nucleotides present in the target domain.

[0377] 5.2 First and Second Complementarity Domains

[0378] The first and second complementarity (sometimes referred to alternatively as the crRNA-derived hairpin sequence and tracrRNA-derived hairpin sequences, respectively) domains are fully or partially complementary to one another. In certain embodiments, the degree of complementarity is sufficient for the two domains to form a duplexed region under at least some physiological conditions. In certain embodiments, the degree of complementarity between the first and second complementarity domains, together with other properties of the gRNA, is sufficient to allow targeting of a Cas9 molecule to a target nucleic acid. Examples of first and second complementary domains are set forth in FIGS. 1A-1G.

[0379] In certain embodiments (see, e.g., FIGS. 1A-1B) the first and/or second complementarity domain includes one or more nucleotides that lack complementarity with the corresponding complementarity domain. In certain embodiments, the first and/or second complementarity domain includes 1, 2, 3, 4, 5, or 6 nucleotides that do not complement with the corresponding complementarity domain. For example, the second complementarity domain may contain 1, 2, 3, 4, 5, or 6 nucleotides that do not pair with corresponding nucleotides in the first complementarity domain. In certain embodiments, the nucleotides on the first or second complementarity domain that do not complement with the corresponding complementarity domain loop out from the duplex formed between the first and second complementarity domains. In certain of these embodiments, the unpaired loop-out is located on the second complementarity domain, and in certain of these embodiments the unpaired region begins 1, 2, 3, 4, 5, or 6 nucleotides from the 5′ end of the second complementarity domain.

[0380] In certain embodiments, the first complementarity domain is 5 to 30, 5 to 25, 7 to 25, 5 to 24, 5 to 23, 7 to 22, 5 to 22, 5 to 21, 5 to 20, 7 to 18, 7 to 15, 9 to 16, or 10 to 14 nucleotides in length, and in certain of these embodiments the first complementarity domain is 5, 6, 7, 8, 9, 10, 11, 12, 13, 14, 15, 16, 17, 18, 19, 20, 21, 22, 23, 24, or 25 nucleotides in length. In certain embodiments, the second complementarity domain is 5 to 27, 7 to 27, 7 to 25, 5 to 24, 5 to 23, 5 to 22, 5 to 21, 7 to 20, 5 to 20, 7 to 18, 7 to 17, 9 to 16, or 10 to 14 nucleotides in length, and in certain of these embodiments the second complementarity domain is 5, 6, 7, 8, 9, 10, 11, 12, 13, 14, 15, 16, 17, 18, 19, 20, 21, 22, 23, 24, 25, or 26 nucleotides in length. In certain embodiments, the first and second complementarity domains are each independently 6+/−2, 7+/−2, 8+/−2, 9+/−2, 10+/−2, 11+/−2, 12+/−2, 13+/−2, 14+/−2, 15+/−2, 16+/−2, 17+/−2, 18+/−2, 19+/−2, or 20+/−2, 21+/−2, 22+/−2, 23+/−2, or 24+/−2 nucleotides in length. In certain embodiments, the second complementarity domain is longer than the first complementarity domain, e.g., 2, 3, 4, 5, or 6 nucleotides longer.

[0381] In certain embodiments, the first and/or second complementarity domains each independently comprise three subdomains, which, in the 5′ to 3′ direction are: a 5′ subdomain, a central subdomain, and a 3′ subdomain. In certain embodiments, the 5′ subdomain and 3′ subdomain of the first complementarity domain are fully or partially complementary to the 3′ subdomain and 5′ subdomain, respectively, of the second complementarity domain.

In certain embodiments, the 5′ subdomain of the first complementarity domain is 4 to 9 nucleotides in length, and in certain of these embodiments the 5′ domain is 4, 5, 6, 7, 8, or 9 nucleotides in length. In certain embodiments, the 5′ subdomain of the second complementarity domain is 3 to 25, 4 to 22, 4 to 18, or 4 to 10 nucleotides in length, and in certain of these embodiments the 5′ domain is 3, 4, 5, 6, 7, 8, 9, 10, 11, 12, 13, 14, 15, 16, 17, 18, 19, 20, 21, 22, 23, 24, or 25 nucleotides in length. In certain embodiments, the central subdomain of the first complementarity domain is 1, 2, or 3 nucleotides in length. In certain embodiments, the central subdomain of the second complementarity domain is 1, 2, 3, 4, or 5 nucleotides in length. In certain embodiments, the 3′ subdomain of the first complementarity domain is 3 to 25, 4 to 22, 4 to 18, or 4 to 10 nucleotides in length, and in certain of these embodiments the 3′ subdomain is 3, 4, 5, 6, 7, 8, 9, 10, 11, 12, 13, 14, 15, 16, 17, 18, 19, 20, 21, 22, 23, 24, or 25 nucleotides in length. In certain embodiments, the 3′ subdomain of the second complementarity domain is 4 to 9, e.g., 4, 5, 6, 7, 8 or 9 nucleotides in length.

[0382] The first and/or second complementarity domains can share homology with, or be derived from, naturally occurring or reference first and/or second complementarity domain. In certain of these embodiments, the first and/or second complementarity domains have at least about 50%, about 60%, about 70%, about 80%, about 85%, about 90%, or about 95% homology with, or differ by no more than 1, 2, 3, 4, 5, or 6 nucleotides from, the naturally occurring or reference first and/or second complementarity domain. In certain of these embodiments, the first and/or second complementarity domains may have at least about 50%, about 60%, about 70%, about 80%, about 85%, about 90%, or about 95% homology with homology with a first and/or second complementarity domain from S. pyogenes or S. aureus.

[0383] In certain embodiments, the first and/or second complementarity domains do not comprise any modifications. In other embodiments, the first and/or second complementarity domains or one or more nucleotides therein have a modification, including but not limited to a modification set forth below. In certain embodiments, one or more nucleotides of the first and/or second complementarity domain may comprise a 2′ modification (e.g., a modification at the 2′ position on ribose), e.g., a 2-acetylation, e.g., a 2′ methylation. In certain embodiments, the backbone of the targeting domain can be modified with a phosphorothioate. In certain embodiments, modifications to one or more nucleotides of the first and/or second complementarity domain render the first and/or second complementarity domain and/or the gRNA comprising the first and/or second complementarity less susceptible to degradation or more bio-compatible, e.g., less immunogenic. In certain embodiments, the first and/or second complementarity domains each independently include 1, 2, 3, 4, 5, 6, 7, or 8 or more modifications, and in certain of these embodiments the first and/or second complementarity domains each independently include 1, 2, 3, or 4 modifications within five nucleotides of their respective 5′ ends, 3′ ends, or both their 5′ and 3′ ends. In certain embodiments, the first and/or second complementarity domains each independently contain no modifications within five nucleotides of their respective 5′ ends, 3′ ends, or both their 5′ and 3′ ends. In certain embodiments, one or both of the first and second complementarity domains comprise modifications at two or more consecutive nucleotides.

[0384] In certain embodiments, modifications to one or more nucleotides in the first and/or second complementarity domains are selected to not interfere with targeting efficacy, which can be evaluated by testing a candidate modification in a system as set forth below. gRNAs having a candidate first or second complementarity domain having a selected length, sequence, degree of complementarity, or degree of modification can be evaluated in a system as set forth below. The candidate complementarity domain can be placed, either alone or with one or more other candidate changes in a gRNA molecule/Cas9 molecule system known to be functional with a selected target, and evaluated.

[0385] In certain embodiments, the duplexed region formed by the first and second complementarity domains is, for example, 6, 7, 8, 9, 10, 11, 12, 13, 14, 15, 16, 17, 18, 19, 20, 21, or 22 bp in length, excluding any looped out or unpaired nucleotides.

[0386] In certain embodiments, the first and second complementarity domains, when duplexed, comprise 11 paired nucleotides (see, for e.g., gRNA of SEQ ID NO:48). In certain embodiments, the first and second complementarity domains, when duplexed, comprise 15 paired nucleotides (see, e.g., gRNA of SEQ ID NO:50). In certain embodiments, the first and second complementarity domains, when duplexed, comprise 16 paired nucleotides (see, e.g., gRNA of SEQ ID NO:51). In certain embodiments, the first and second complementarity domains, when duplexed, comprise 21 paired nucleotides (see, e.g., gRNA of SEQ ID NO:29).

In certain embodiments, one or more nucleotides are exchanged between the first and second complementarity domains to remove poly-U tracts. For example, nucleotides 23 and 48 or nucleotides 26 and 45 of the gRNA of SEQ ID NO:48 may be exchanged to generate the gRNA of SEQ ID NOs:49 or 31, respectively. Similarly, nucleotides 23 and 39 of the gRNA of SEQ ID NO:29 may be exchanged with nucleotides 50 and 68 to generate the gRNA of SEQ ID NO:30.

[0387] 5.3 Linking Domain

[0388] The linking domain is disposed between and serves to link the first and second complementarity domains in a unimolecular or chimeric gRNA. FIGS. 1B-1E provide examples of linking domains. In certain embodiments, part of the linking domain is from a crRNA-derived region, and another part is from a tracrRNA-derived region.

[0389] In certain embodiments, the linking domain links the first and second complementarity domains covalently. In certain of these embodiments, the linking domain consists of or comprises a covalent bond. In other embodiments, the linking domain links the first and second complementarity domains non-covalently. In certain embodiments, the linking domain is ten or fewer nucleotides in length, e.g., 1, 2, 3, 4, 5, 6, 7, 8, 9, or 10 nucleotides. In other embodiments, the linking domain is greater than 10 nucleotides in length, e.g., 11, 12, 13, 14, 15, 16, 17, 18, 19, 20, 21, 22, 23, 24, or 25 or more nucleotides. In certain embodiments, the linking domain is 2 to 50, 2 to 40, 2 to 30, 2 to 20, 2 to 10, 2 to 5, 10 to 100, 10 to 90, 10 to 80, 10 to 70, 10 to 60, 10 to 50, 10 to 40, 10 to 30, 10 to 20, 10 to 15, 20 to 100, 20 to 90, 20 to 80, 20 to 70, 20 to 60, 20 to 50, 20 to 40, 20 to 30, or 20 to 25 nucleotides in length. In certain embodiments, the linking domain is 10+/−5, 20+/−5, 20+/−10, 30+/−5, 30+/−10, 40+/−5, 40+/−10, 50+/−5, 50+/−10, 60+/−5, 60+/−10, 70+/−5, 70+/−10, 80+/−5, 80+/−10, 90+/−5, 90+/−10, 100+/−5, or 100+/−10 nucleotides in length.

[0390] In certain embodiments, the linking domain shares homology with, or is derived from, a naturally occurring sequence, e.g., the sequence of a tracrRNA that is 5′ to the second complementarity domain. In certain embodiments, the linking domain has at least about 50%, about 60%, about 70%, about 80%, about 90%, or about 95% homology with or differs by no more than 1, 2, 3, 4, 5, or 6 nucleotides from a linking domain disclosed herein, e.g., the linking domains of FIGS. 1B-1E.

[0391] In certain embodiments, the linking domain does not comprise any modifications. In other embodiments, the linking domain or one or more nucleotides therein have a modification, including but not limited to the modifications set forth below. In certain embodiments, one or more nucleotides of the linking domain may comprise a 2′ modification (e.g., a modification at the 2′ position on ribose), e.g., a 2-acetylation, e.g., a 2′ methylation. In certain embodiments, the backbone of the linking domain can be modified with a phosphorothioate. In certain embodiments, modifications to one or more nucleotides of the linking domain render the linking domain and/or the gRNA comprising the linking domain less susceptible to degradation or more bio-compatible, e.g., less immunogenic. In certain embodiments, the linking domain includes 1, 2, 3, 4, 5, 6, 7, or 8 or more modifications, and in certain of these embodiments the linking domain includes 1, 2, 3, or 4 modifications within five nucleotides of its 5′ and/or 3′ end. In certain embodiments, the linking domain comprises modifications at two or more consecutive nucleotides.

[0392] In certain embodiments, modifications to one or more nucleotides in the linking domain are selected to not interfere with targeting efficacy, which can be evaluated by testing a candidate modification in a system as set forth below. gRNAs having a candidate linking domain having a selected length, sequence, degree of complementarity, or degree of modification can be evaluated in a system as set forth below. The candidate linking domain can be placed, either alone or with one or more other candidate changes in a gRNA molecule/Cas9 molecule system known to be functional with a selected target, and evaluated.

[0393] In certain embodiments, the linking domain comprises a duplexed region, typically adjacent to or within 1, 2, or 3 nucleotides of the 3′ end of the first complementarity domain and/or the 5′ end of the second complementarity domain. In certain of these embodiments, the duplexed region of the linking region is 10+/−5, 15+/−5, 20+/−5, 20+/−10, or 30+/−5 bp in length. In certain embodiments, the duplexed region of the linking domain is 1, 2, 3, 4, 5, 6, 7, 8, 9, 10, 11, 12, 13, 14, or 15 bp in length. In certain embodiments, the sequences forming the duplexed region of the linking domain are fully complementarity. In other embodiments, one or both of the sequences forming the duplexed region contain one or more nucleotides (e.g., 1, 2, 3, 4, 5, 6, 7, or 8 nucleotides) that are not complementary with the other duplex sequence.

[0394] 5.4 5′ Extension Domain

[0395] In certain embodiments, a modular gRNA as disclosed herein comprises a 5′ extension domain, i.e., one or more additional nucleotides 5′ to the second complementarity domain (see, e.g., FIG. 1A). In certain embodiments, the 5′ extension domain is 2 to 10 or more, 2 to 9, 2 to 8, 2 to 7, 2 to 6, 2 to 5, or 2 to 4 nucleotides in length, and in certain of these embodiments the 5′ extension domain is 2, 3, 4, 5, 6, 7, 8, 9, or 10 or more nucleotides in length.

[0396] In certain embodiments, the 5′ extension domain nucleotides do not comprise modifications, e.g., modifications of the type provided below. However, in certain embodiments, the 5′ extension domain comprises one or more modifications, e.g., modifications that it renders it less susceptible to degradation or more bio-compatible, e.g., less immunogenic. By way of example, the backbone of the 5′ extension domain can be modified with a phosphorothioate, or other modification(s) as set forth below. In certain embodiments, a nucleotide of the 5′ extension domain can comprise a 2′ modification (e.g., a modification at the 2′ position on ribose), e.g., a 2-acetylation, e.g., a 2′ methylation, or other modification(s) as set forth below.

[0397] In certain embodiments, the 5′ extension domain can comprise as many as 1, 2, 3, 4, 5, 6, 7, or 8 modifications. In certain embodiments, the 5′ extension domain comprises as many as 1, 2, 3, or 4 modifications within 5 nucleotides of its 5′ end, e.g., in a modular gRNA molecule. In certain embodiments, the 5′ extension domain comprises as many as 1, 2, 3, or 4 modifications within 5 nucleotides of its 3′ end, e.g., in a modular gRNA molecule.

[0398] In certain embodiments, the 5′ extension domain comprises modifications at two consecutive nucleotides, e.g., two consecutive nucleotides that are within 5 nucleotides of the 5′ end of the 5′ extension domain, within 5 nucleotides of the 3′ end of the 5′ extension domain, or more than 5 nucleotides away from one or both ends of the 5′ extension domain. In certain embodiments, no two consecutive nucleotides are modified within 5 nucleotides of the 5′ end of the 5′ extension domain, within 5 nucleotides of the 3′ end of the 5′ extension domain, or within a region that is more than 5 nucleotides away from one or both ends of the 5′ extension domain. In certain embodiments, no nucleotide is modified within 5 nucleotides of the 5′ end of the 5′ extension domain, within 5 nucleotides of the 3′ end of the 5′ extension domain, or within a region that is more than 5 nucleotides away from one or both ends of the 5′ extension domain.

[0399] Modifications in the 5′ extension domain can be selected so as to not interfere with gRNA molecule efficacy, which can be evaluated by testing a candidate modification in a system as set forth below. gRNAs having a candidate 5′ extension domain having a selected length, sequence, degree of complementarity, or degree of modification, can be evaluated in a system as set forth below. The candidate 5′ extension domain can be placed, either alone, or with one or more other candidate changes in a gRNA molecule/Cas9 molecule system known to be functional with a selected target and evaluated.

[0400] In certain embodiments, the 5′ extension domain has at least about 60%, about 70%, about 80%, about 85%, about 90%, or about 95% homology with, or differs by no more than 1, 2, 3, 4, 5, or 6 nucleotides from, a reference 5′ extension domain, e.g., a naturally occurring, e.g., an S. pyogenes, S. aureus, or S. thermophilus, 5′ extension domain, or a 5′ extension domain described herein, e.g., from FIGS. 1A-1G.

[0401] 5.5 Proximal Domain

[0402] FIGS. 1A-1G provide examples of proximal domains.

[0403] In certain embodiments, the proximal domain is 5 to 20 or more nucleotides in length, e.g., 5, 6, 7, 8, 9, 10, 11, 12, 13, 14, 15, 16, 17, 18, 19, 20, 21, 22, 23, 24, 25, or 26 nucleotides in length. In certain of these embodiments, the proximal domain is 6+/−2, 7+/−2, 8+/−2, 9+/−2, 10+/−2, 11+/−2, 12+/−2, 13+/−2, 14+/−2, 14+/−2, 16+/−2, 17+/−2, 18+/−2, 19+/−2, or 20+/−2 nucleotides in length. In certain embodiments, the proximal domain is 5 to 20, 7, to 18, 9 to 16, or 10 to 14 nucleotides in length.

[0404] In certain embodiments, the proximal domain can share homology with or be derived from a naturally occurring proximal domain. In certain of these embodiments, the proximal domain has at least about 50%, about 60%, about 70%, about 80%, about 85%, about 90%, or about 95% homology with or differs by no more than 1, 2, 3, 4, 5, or 6 nucleotides from a proximal domain disclosed herein, e.g., an S. pyogenes, S. aureus, or S. thermophilus proximal domain, including those set forth in FIGS. 1A-1G.

[0405] In certain embodiments, the proximal domain does not comprise any modifications. In other embodiments, the proximal domain or one or more nucleotides therein have a modification, including but not limited to the modifications set forth in herein. In certain embodiments, one or more nucleotides of the proximal domain may comprise a 2′ modification (e.g., a modification at the 2′ position on ribose), e.g., a 2-acetylation, e.g., a 2′ methylation. In certain embodiments, the backbone of the proximal domain can be modified with a phosphorothioate. In certain embodiments, modifications to one or more nucleotides of the proximal domain render the proximal domain and/or the gRNA comprising the proximal domain less susceptible to degradation or more bio-compatible, e.g., less immunogenic. In certain embodiments, the proximal domain includes 1, 2, 3, 4, 5, 6, 7, or 8 or more modifications, and in certain of these embodiments the proximal domain includes 1, 2, 3, or 4 modifications within five nucleotides of its 5′ and/or 3′ end. In certain embodiments, the proximal domain comprises modifications at two or more consecutive nucleotides.

[0406] In certain embodiments, modifications to one or more nucleotides in the proximal domain are selected to not interfere with targeting efficacy, which can be evaluated by testing a candidate modification in a system as set forth below. gRNAs having a candidate proximal domain having a selected length, sequence, degree of complementarity, or degree of modification can be evaluated in a system as set forth below. The candidate proximal domain can be placed, either alone or with one or more other candidate changes in a gRNA molecule/Cas9 molecule system known to be functional with a selected target, and evaluated.

[0407] 5.6 Tail Domain

[0408] A broad spectrum of tail domains are suitable for use in the gRNA molecules disclosed herein. FIGS. 1A and 1C-1G provide examples of such tail domains.

[0409] In certain embodiments, the tail domain is absent. In other embodiments, the tail domain is 1 to 100 or more nucleotides in length, e.g., 1, 2, 3, 4, 5, 6, 7, 8, 9, 10, 20, 30, 40, 50, 60, 70, 80, 90, or 100 nucleotides in length. In certain embodiments, the tail domain is 1 to 5, 1 to 10, 1 to 15, 1 to 20, 1 to 50, 10 to 100, 20 to 100, 10 to 90, 20 to 90, 10 to 80, 20 to 80, 10 to 70, 20 to 70, 10 to 60, 20 to 60, 10 to 50, 20 to 50, 10 to 40, 20 to 40, 10 to 30, 20 to 30, 20 to 25, 10 to 20, or 10 to 15 nucleotides in length. In certain embodiments, the tail domain is 5+/−5, 10+/−5, 20+/−10, 20+/−5, 25+/−10, 30+/−10, 30+/−5, 40+/−10, 40+/−5, 50+/−10, 50+/−5, 60+/−10, 60+/−5, 70+/−10, 70+/−5, 80+/−10, 80+/−5, 90+/−10, 90+/−5, 100+/−10, or 100+/−5 nucleotides in length,

In certain embodiments, the tail domain can share homology with or be derived from a naturally occurring tail domain or the 5′ end of a naturally occurring tail domain. In certain of these embodiments, the proximal domain has at least about 50%, about 60%, about 70%, about 80%, about 85%, about 90%, or about 95% homology with or differs by no more than 1, 2, 3, 4, 5, or 6 nucleotides from a naturally occurring tail domain disclosed herein, e.g., an S. pyogenes, S. aureus, or S. thermophilus tail domain, including those set forth in FIGS. 1A and 1C-1G.

[0410] In certain embodiments, the tail domain includes sequences that are complementary to each other and which, under at least some physiological conditions, form a duplexed region. In certain of these embodiments, the tail domain comprises a tail duplex domain which can form a tail duplexed region. In certain embodiments, the tail duplexed region is 3, 4, 5, 6, 7, 8, 9, 10, 11, or 12 bp in length. In certain embodiments, the tail domain comprises a single stranded domain 3′ to the tail duplex domain that does not form a duplex. In certain of these embodiments, the single stranded domain is 3 to 10 nucleotides in length, e.g., 3, 4, 5, 6, 7, 8, 9, 10, or 4 to 6 nucleotides in length.

[0411] In certain embodiments, the tail domain does not comprise any modifications. In other embodiments, the tail domain or one or more nucleotides therein have a modification, including but not limited to the modifications set forth herein. In certain embodiments, one or more nucleotides of the tail domain may comprise a 2′ modification (e.g., a modification at the 2′ position on ribose), e.g., a 2-acetylation, e.g., a 2′ methylation. In certain embodiments, the backbone of the tail domain can be modified with a phosphorothioate. In certain embodiments, modifications to one or more nucleotides of the tail domain render the tail domain and/or the gRNA comprising the tail domain less susceptible to degradation or more bio-compatible, e.g., less immunogenic. In certain embodiments, the tail domain includes 1, 2, 3, 4, 5, 6, 7, or 8 or more modifications, and in certain of these embodiments the tail domain includes 1, 2, 3, or 4 modifications within five nucleotides of its 5′ and/or 3′ end. In certain embodiments, the tail domain comprises modifications at two or more consecutive nucleotides.

[0412] In certain embodiments, modifications to one or more nucleotides in the tail domain are selected to not interfere with targeting efficacy, which can be evaluated by testing a candidate modification as set forth below. gRNAs having a candidate tail domain having a selected length, sequence, degree of complementarity, or degree of modification can be evaluated using a system as set forth below. The candidate tail domain can be placed, either alone or with one or more other candidate changes in a gRNA molecule/Cas9 molecule system known to be functional with a selected target, and evaluated.

[0413] In certain embodiments, the tail domain includes nucleotides at the 3′ end that are related to the method of in vitro or in vivo transcription. When a T7 promoter is used for in vitro transcription of the gRNA, these nucleotides may be any nucleotides present before the 3′ end of the DNA template. In certain embodiments, the gRNA molecule includes a 3′ polyA tail that is prepared by in vitro transcription from a DNA template. In certain embodiments, the 5′ nucleotide of the targeting domain of the gRNA molecule is a guanine nucleotide, the DNA template comprises a T7 promoter sequence located immediately upstream of the sequence that corresponds to the targeting domain, and the 3′ nucleotide of the T7 promoter sequence is not a guanine nucleotide. In certain embodiments, the 5′ nucleotide of the targeting domain of the gRNA molecule is not a guanine nucleotide, the DNA template comprises a T7 promoter sequence located immediately upstream of the sequence that corresponds to the targeting domain, and the 3′ nucleotide of the T7 promoter sequence is a guanine nucleotide which is downstream of a nucleotide other than a guanine nucleotide.

[0414] When a U6 promoter is used for in vivo transcription, these nucleotides may be the sequence UUUUUU. When an H1 promoter is used for transcription, these nucleotides may be the sequence UUUU. When alternate pol-III promoters are used, these nucleotides may be various numbers of uracil bases depending on, e.g., the termination signal of the pol-III promoter, or they may include alternate bases.

[0415] In certain embodiments, the proximal and tail domain taken together comprise, consist of, or consist essentially of the sequence set forth in SEQ ID NOs:32, 33, 34, 35, 36, or 37.

[0416] 5.7 Exemplary Unimolecular/Chimeric gRNAs

[0417] In certain embodiments, a gRNA as disclosed herein has the structure: 5′ [targeting domain]-[first complementarity domain]-[linking domain]-[second complementarity domain]-[proximal domain]-[tail domain]-3′, wherein:

[0418] the targeting domain comprises a core domain and optionally a secondary domain, and is 10 to 50 nucleotides in length;

[0419] the first complementarity domain is 5 to 25 nucleotides in length and, in certain embodiments has at least about 50%, about 60%, about 70%, about 80%, about 85%, about 90%, or about 95% homology with a reference first complementarity domain disclosed herein;

the linking domain is 1 to 5 nucleotides in length;

[0420] the second complementarity domain is 5 to 27 nucleotides in length and, in certain embodiments has at least about 50%, about 60%, about 70%, about 80%, about 85%, about 90%, or about 95% homology with a reference second complementarity domain disclosed herein; the proximal domain is 5 to 20 nucleotides in length and, in certain embodiments has at least about 50%, about 60%, about 70%, about 80%, about 85%, about 90%, or about 95% homology with a reference proximal domain disclosed herein; and

[0421] the tail domain is absent or a nucleotide sequence is 1 to 50 nucleotides in length and, in certain embodiments has at least about 50%, about 60%, about 70%, about 80%, about 85%, about 90%, or about 95% homology with a reference tail domain disclosed herein.

[0422] In certain embodiments, a unimolecular gRNA as disclosed herein comprises, preferably from 5′ to 3′:

[0423] a targeting domain, e.g., comprising 10-50 nucleotides;

[0424] a first complementarity domain, e.g., comprising 15, 16, 17, 18, 19, 20, 21, 22, 23, 24, 25, or 26 nucleotides;

[0425] a linking domain;

[0426] a second complementarity domain;

[0427] a proximal domain; and

[0428] a tail domain,

wherein,

[0429] (a) the proximal and tail domain, when taken together, comprise at least 15, 18, 20, 25, 30, 31, 35, 40, 45, 49, 50, or 53 nucleotides;

[0430] (b) there are at least 15, 18, 20, 25, 30, 31, 35, 40, 45, 49, 50, or 53 nucleotides 3′ to the last nucleotide of the second complementarity domain; or

[0431] (c) there are at least 16, 19, 21, 26, 31, 32, 36, 41, 46, 50, 51, or 54 nucleotides 3′ to the last nucleotide of the second complementarity domain that is complementary to its corresponding nucleotide of the first complementarity domain.

[0432] In certain embodiments, the sequence from (a), (b), and/or (c) has at least about 50%, about 60%, about 70%, about 75%, about 60%, about 70%, about 80%, about 85%, about 90%, about 95%, or about 99% homology with the corresponding sequence of a naturally occurring gRNA, or with a gRNA described herein.

[0433] In certain embodiments, the proximal and tail domain, when taken together, comprise at least 15, 18, 20, 25, 30, 31, 35, 40, 45, 49, 50, or 53 nucleotides.

In certain embodiments, there are at least 15, 18, 20, 25, 30, 31, 35, 40, 45, 49, 50, or 53 nucleotides 3′ to the last nucleotide of the second complementarity domain.

[0434] In certain embodiments, there are at least 16, 19, 21, 26, 31, 32, 36, 41, 46, 50, 51, or 54 nucleotides 3′ to the last nucleotide of the second complementarity domain that are complementary to the corresponding nucleotides of the first complementarity domain.

[0435] In certain embodiments, the targeting domain consists of, consists essentially of, or comprises 16, 17, 18, 19, 20, 21, 22, 23, 24, 25, or 26 nucleotides (e.g., 16, 17, 18, 19, 20, 21, 22, 23, 24, 25, or 26 consecutive nucleotides) complementary or partially complementary to the target domain or a portion thereof, e.g., the targeting domain is 16, 17, 18, 19, 20, 21, 22, 23, 24, 25, or 26 nucleotides in length. In certain of these embodiments, the targeting domain is complementary to the target domain over the entire length of the targeting domain, the entire length of the target domain, or both.

[0436] In certain embodiments, a unimolecular or chimeric gRNA molecule disclosed herein (comprising a targeting domain, a first complementary domain, a linking domain, a second complementary domain, a proximal domain and, optionally, a tail domain) comprises the amino acid sequence set forth in SEQ ID NO:42, wherein the targeting domain is listed as 20 N's (residues 1-20) but may range in length from 16 to 26 nucleotides, and wherein the final six residues (residues 97-102) represent a termination signal for the U6 promoter buy may be absent or fewer in number. In certain embodiments, the unimolecular, or chimeric, gRNA molecule is an S. pyogenes gRNA molecule.

[0437] In certain embodiments, a unimolecular or chimeric gRNA molecule disclosed herein (comprising a targeting domain, a first complementary domain, a linking domain, a second complementary domain, a proximal domain and, optionally, a tail domain) comprises the amino acid sequence set forth in SEQ ID NO:38, wherein the targeting domain is listed as 20 Ns (residues 1-20) but may range in length from 16 to 26 nucleotides, and wherein the final six residues (residues 97-102) represent a termination signal for the U6 promoter but may be absent or fewer in number. In certain embodiments, the unimolecular or chimeric gRNA molecule is an S. aureus gRNA molecule.

[0438] The sequences and structures of exemplary chimeric gRNAs are also shown in FIGS. 1H-1I.

[0439] 5.8 Exemplary Modular gRNAs

[0440] In certain embodiments, a modular gRNA disclosed herein comprises:

[0441] a first strand comprising, preferably from 5′ to 3′;

[0442] a targeting domain, e.g., comprising 15, 16, 17, 18, 19, 20, 21, 22, 23, 24, 25, or 26 nucleotides;

[0443] a first complementarity domain; and

[0444] a second strand, comprising, preferably from 5′ to 3′:

[0445] optionally a 5′ extension domain;

[0446] a second complementarity domain;

[0447] a proximal domain; and

[0448] a tail domain,

wherein:

[0449] (a) the proximal and tail domain, when taken together, comprise at least 15, 18, 20, 25, 30, 31, 35, 40, 45, 49, 50, or 53 nucleotides;

[0450] (b) there are at least 15, 18, 20, 25, 30, 31, 35, 40, 45, 49, 50, or 53 nucleotides 3′ to the last nucleotide of the second complementarity domain; or

[0451] (c) there are at least 16, 19, 21, 26, 31, 32, 36, 41, 46, 50, 51, or 54 nucleotides 3′ to the last nucleotide of the second complementarity domain that is complementary to its corresponding nucleotide of the first complementarity domain.

[0452] In certain embodiments, the sequence from (a), (b), or (c), has at least about 50%, about 60%, about 70%, about 80%, about 85%, about 90%, about 95%, or about 99% homology with the corresponding sequence of a naturally occurring gRNA, or with a gRNA described herein.

In certain embodiments, the proximal and tail domain, when taken together, comprise at least 15, 18, 20, 25, 30, 31, 35, 40, 45, 49, 50, or 53 nucleotides.

[0453] In certain embodiments, there are at least 15, 18, 20, 25, 30, 31, 35, 40, 45, 49, 50, or 53 nucleotides 3′ to the last nucleotide of the second complementarity domain.

In certain embodiments, there are at least 16, 19, 21, 26, 31, 32, 36, 41, 46, 50, 51, or 54 nucleotides 3′ to the last nucleotide of the second complementarity domain that is complementary to its corresponding nucleotide of the first complementarity domain.

[0454] In certain embodiments, the targeting domain comprises, has, or consists of, 16, 17, 18, 19, 20, 21, 22, 23, 24, 25, or 26 nucleotides (e.g., 16, 17, 18, 19, 20, 21, 22, 23, 24, 25, or 26 consecutive nucleotides) having complementarity with the target domain, e.g., the targeting domain is 16, 17, 18, 19, 20, 21, 22, 23, 24, 25, or 26 nucleotides in length.

[0455] In certain embodiments, the targeting domain consists of, consists essentially of, or comprises 16, 17, 18, 19, 20, 21, 22, 23, 24, 25, or 26 nucleotides (e.g., 16, 17, 18, 19, 20, 21, 22, 23, 24, 25, or 26 consecutive nucleotides) complementary to the target domain or a portion thereof. In certain of these embodiments, the targeting domain is complementary to the target domain over the entire length of the targeting domain, the entire length of the target domain, or both.

[0456] In certain embodiments, the targeting domain comprises, has, or consists of, 16 nucleotides (e.g., 16 consecutive nucleotides) having complementarity with the target domain, e.g., the targeting domain is 16 nucleotides in length; and the proximal and tail domain, when taken together, comprise at least 15, 18, 20, 25, 30, 31, 35, 40, 45, 49, 50, or 53 nucleotides.

[0457] In certain embodiments, the targeting domain comprises, has, or consists of, 16 nucleotides (e.g., 16 consecutive nucleotides) having complementarity with the target domain, e.g., the targeting domain is 16 nucleotides in length; and there are at least 15, 18, 20, 25, 30, 31, 35, 40, 45, 49, 50, or 53 nucleotides 3′ to the last nucleotide of the second complementarity domain.

[0458] In certain embodiments, the targeting domain comprises, has, or consists of, 16 nucleotides (e.g., 16 consecutive nucleotides) having complementarity with the target domain, e.g., the targeting domain is 16 nucleotides in length; and there are at least 16, 19, 21, 26, 31, 32, 36, 41, 46, 50, 51, or 54 nucleotides 3′ to the last nucleotide of the second complementarity domain that is complementary to its corresponding nucleotide of the first complementarity domain.

[0459] In certain embodiments, the targeting domain has, or consists of, 17 nucleotides (e.g., 17 consecutive nucleotides) having complementarity with the target domain, e.g., the targeting domain is 17 nucleotides in length; and the proximal and tail domain, when taken together, comprise at least 15, 18, 20, 25, 30, 31, 35, 40, 45, 49, 50, or 53 nucleotides.

[0460] In certain embodiments, the targeting domain has, or consists of, 17 nucleotides (e.g., 17 consecutive nucleotides) having complementarity with the target domain, e.g., the targeting domain is 17 nucleotides in length; and there are at least 15, 18, 20, 25, 30, 31, 35, 40, 45, 49, 50, or 53 nucleotides 3′ to the last nucleotide of the second complementarity domain.

[0461] In certain embodiments, the targeting domain has, or consists of, 17 nucleotides (e.g., 17 consecutive nucleotides) having complementarity with the target domain, e.g., the targeting domain is 17 nucleotides in length; and there are at least 16, 19, 21, 26, 31, 32, 36, 41, 46, 50, 51, or 54 nucleotides 3′ to the last nucleotide of the second complementarity domain that is complementary to its corresponding nucleotide of the first complementarity domain.

[0462] In certain embodiments, the targeting domain has, or consists of, 18 nucleotides (e.g., 18 consecutive nucleotides) having complementarity with the target domain, e.g., the targeting domain is 18 nucleotides in length; and the proximal and tail domain, when taken together, comprise at least 15, 18, 20, 25, 30, 31, 35, 40, 45, 49, 50, or 53 nucleotides.

[0463] In certain embodiments, the targeting domain has, or consists of, 18 nucleotides (e.g., 18 consecutive nucleotides) having complementarity with the target domain, e.g., the targeting domain is 18 nucleotides in length; and there are at least 15, 18, 20, 25, 30, 31, 35, 40, 45, 49, 50, or 53 nucleotides 3′ to the last nucleotide of the second complementarity domain.

[0464] In certain embodiments, the targeting domain has, or consists of, 18 nucleotides (e.g., 18 consecutive nucleotides) having complementarity with the target domain, e.g., the targeting domain is 18 nucleotides in length; and there are at least 16, 19, 21, 26, 31, 32, 36, 41, 46, 50, 51, or 54 nucleotides 3′ to the last nucleotide of the second complementarity domain that is complementary to its corresponding nucleotide of the first complementarity domain.

[0465] In certain embodiments, the targeting domain comprises, has, or consists of, 19 nucleotides (e.g., 19 consecutive nucleotides) having complementarity with the target domain, e.g., the targeting domain is 19 nucleotides in length; and the proximal and tail domain, when taken together, comprise at least 15, 18, 20, 25, 30, 31, 35, 40, 45, 49, 50, or 53 nucleotides.

[0466] In certain embodiments, the targeting domain comprises, has, or consists of, 19 nucleotides (e.g., 19 consecutive nucleotides) having complementarity with the target domain, e.g., the targeting domain is 19 nucleotides in length; and there are at least 15, 18, 20, 25, 30, 31, 35, 40, 45, 49, 50, or 53 nucleotides 3′ to the last nucleotide of the second complementarity domain.

[0467] In certain embodiments, the targeting domain comprises, has, or consists of, 19 nucleotides (e.g., 19 consecutive nucleotides) having complementarity with the target domain, e.g., the targeting domain is 19 nucleotides in length; and there are at least 16, 19, 21, 26, 31, 32, 36, 41, 46, 50, 51, or 54 nucleotides 3′ to the last nucleotide of the second complementarity domain that is complementary to its corresponding nucleotide of the first complementarity domain.

[0468] In certain embodiments, the targeting domain comprises, has, or consists of, 20 nucleotides (e.g., 20 consecutive nucleotides) having complementarity with the target domain, e.g., the targeting domain is 20 nucleotides in length; and the proximal and tail domain, when taken together, comprise at least 15, 18, 20, 25, 30, 31, 35, 40, 45, 49, 50, or 53 nucleotides.

[0469] In certain embodiments, the targeting domain comprises, has, or consists of, 20 nucleotides (e.g., 20 consecutive nucleotides) having complementarity with the target domain, e.g., the targeting domain is 20 nucleotides in length; and there are at least 15, 18, 20, 25, 30, 31, 35, 40, 45, 49, 50, or 53 nucleotides 3′ to the last nucleotide of the second complementarity domain.

[0470] In certain embodiments, the targeting domain comprises, has, or consists of, 20 nucleotides (e.g., 20 consecutive nucleotides) having complementarity with the target domain, e.g., the targeting domain is 20 nucleotides in length; and there are at least 16, 19, 21, 26, 31, 32, 36, 41, 46, 50, 51, or 54 nucleotides 3′ to the last nucleotide of the second complementarity domain that is complementary to its corresponding nucleotide of the first complementarity domain.

[0471] In certain embodiments, the targeting domain comprises, has, or consists of, 21 nucleotides (e.g., 21 consecutive nucleotides) having complementarity with the target domain, e.g., the targeting domain is 21 nucleotides in length; and the proximal and tail domain, when taken together, comprise at least 15, 18, 20, 25, 30, 31, 35, 40, 45, 49, 50, or 53 nucleotides.

[0472] In certain embodiments, the targeting domain comprises, has, or consists of, 21 nucleotides (e.g., 21 consecutive nucleotides) having complementarity with the target domain, e.g., the targeting domain is 21 nucleotides in length; and there are at least 15, 18, 20, 25, 30, 31, 35, 40, 45, 49, 50, or 53 nucleotides 3′ to the last nucleotide of the second complementarity domain.

[0473] In certain embodiments, the targeting domain comprises, has, or consists of, 21 nucleotides (e.g., 21 consecutive nucleotides) having complementarity with the target domain, e.g., the targeting domain is 21 nucleotides in length; and there are at least 16, 19, 21, 26, 31, 32, 36, 41, 46, 50, 51, or 54 nucleotides 3′ to the last nucleotide of the second complementarity domain that is complementary to its corresponding nucleotide of the first complementarity domain.

[0474] In certain embodiments, the targeting domain comprises, has, or consists of, 22 nucleotides (e.g., 22 consecutive nucleotides) having complementarity with the target domain, e.g., the targeting domain is 22 nucleotides in length; and the proximal and tail domain, when taken together, comprise at least 15, 18, 20, 25, 30, 31, 35, 40, 45, 49, 50, or 53 nucleotides.

[0475] In certain embodiments, the targeting domain comprises, has, or consists of, 22 nucleotides (e.g., 22 consecutive nucleotides) having complementarity with the target domain, e.g., the targeting domain is 22 nucleotides in length; and there are at least 15, 18, 20, 25, 30, 31, 35, 40, 45, 49, 50, or 53 nucleotides 3′ to the last nucleotide of the second complementarity domain.

[0476] In certain embodiments, the targeting domain comprises, has, or consists of, 22 nucleotides (e.g., 22 consecutive nucleotides) having complementarity with the target domain, e.g., the targeting domain is 22 nucleotides in length; and there are at least 16, 19, 21, 26, 31, 32, 36, 41, 46, 50, 51, or 54 nucleotides 3′ to the last nucleotide of the second complementarity domain that is complementary to its corresponding nucleotide of the first complementarity domain.

[0477] In certain embodiments, the targeting domain comprises, has, or consists of, 23 nucleotides (e.g., 23 consecutive nucleotides) having complementarity with the target domain, e.g., the targeting domain is 23 nucleotides in length; and the proximal and tail domain, when taken together, comprise at least 15, 18, 20, 25, 30, 31, 35, 40, 45, 49, 50, or 53 nucleotides.

[0478] In certain embodiments, the targeting domain comprises, has, or consists of, 23 nucleotides (e.g., 23 consecutive nucleotides) having complementarity with the target domain, e.g., the targeting domain is 23 nucleotides in length; and there are at least 15, 18, 20, 25, 30, 31, 35, 40, 45, 49, 50, or 53 nucleotides 3′ to the last nucleotide of the second complementarity domain.

[0479] In certain embodiments, the targeting domain comprises, has, or consists of, 23 nucleotides (e.g., 23 consecutive nucleotides) having complementarity with the target domain, e.g., the targeting domain is 23 nucleotides in length; and there are at least 16, 19, 21, 26, 31, 32, 36, 41, 46, 50, 51, or 54 nucleotides 3′ to the last nucleotide of the second complementarity domain that is complementary to its corresponding nucleotide of the first complementarity domain.

[0480] In certain embodiments, the targeting domain comprises, has, or consists of, 24 nucleotides (e.g., 24 consecutive nucleotides) having complementarity with the target domain, e.g., the targeting domain is 24 nucleotides in length; and the proximal and tail domain, when taken together, comprise at least 15, 18, 20, 25, 30, 31, 35, 40, 45, 49, 50, or 53 nucleotides.

[0481] In certain embodiments, the targeting domain comprises, has, or consists of, 24 nucleotides (e.g., 24 consecutive nucleotides) having complementarity with the target domain, e.g., the targeting domain is 24 nucleotides in length; and there are at least 15, 18, 20, 25, 30, 31, 35, 40, 45, 49, 50, or 53 nucleotides 3′ to the last nucleotide of the second complementarity domain.

[0482] In certain embodiments, the targeting domain comprises, has, or consists of, 24 nucleotides (e.g., 24 consecutive nucleotides) having complementarity with the target domain, e.g., the targeting domain is 24 nucleotides in length; and there are at least 16, 19, 21, 26, 31, 32, 36, 41, 46, 50, 51, or 54 nucleotides 3′ to the last nucleotide of the second complementarity domain that is complementary to its corresponding nucleotide of the first complementarity domain.

[0483] In certain embodiments, the targeting domain comprises, has, or consists of, 25 nucleotides (e.g., 25 consecutive nucleotides) having complementarity with the target domain, e.g., the targeting domain is 25 nucleotides in length; and the proximal and tail domain, when taken together, comprise at least 15, 18, 20, 25, 30, 31, 35, 40, 45, 49, 50, or 53 nucleotides.

[0484] In certain embodiments, the targeting domain comprises, has, or consists of, 25 nucleotides (e.g., 25 consecutive nucleotides) having complementarity with the target domain, e.g., the targeting domain is 25 nucleotides in length; and there are at least 15, 18, 20, 25, 30, 31, 35, 40, 45, 49, 50, or 53 nucleotides 3′ to the last nucleotide of the second complementarity domain.

[0485] In certain embodiments, the targeting domain comprises, has, or consists of, 25 nucleotides (e.g., 25 consecutive nucleotides) having complementarity with the target domain, e.g., the targeting domain is 25 nucleotides in length; and there are at least 16, 19, 21, 26, 31, 32, 36, 41, 46, 50, 51, or 54 nucleotides 3′ to the last nucleotide of the second complementarity domain that is complementary to its corresponding nucleotide of the first complementarity domain.

[0486] In certain embodiments, the targeting domain comprises, has, or consists of, 26 nucleotides (e.g., 26 consecutive nucleotides) having complementarity with the target domain, e.g., the targeting domain is 26 nucleotides in length; and the proximal and tail domain, when taken together, comprise at least 15, 18, 20, 25, 30, 31, 35, 40, 45, 49, 50, or 53 nucleotides.

[0487] In certain embodiments, the targeting domain comprises, has, or consists of, 26 nucleotides (e.g., 26 consecutive nucleotides) having complementarity with the target domain, e.g., the targeting domain is 26 nucleotides in length; and there are at least 15, 18, 20, 25, 30, 31, 35, 40, 45, 49, 50, or 53 nucleotides 3′ to the last nucleotide of the second complementarity domain.

[0488] In certain embodiments, the targeting domain comprises, has, or consists of, 26 nucleotides (e.g., 26 consecutive nucleotides) having complementarity with the target domain, e.g., the targeting domain is 26 nucleotides in length; and there are at least 16, 19, 21, 26, 31, 32, 36, 41, 46, 50, 51, or 54 nucleotides 3′ to the last nucleotide of the second complementarity domain that is complementary to its corresponding nucleotide of the first complementarity domain.

[0489] 5.9 gRNA Delivery

[0490] In certain embodiments of the methods provided herein, the methods comprise delivery of one or more (e.g., two, three, or four) gRNA molecules as described herein. In certain of these embodiments, the gRNA molecules are delivered by intravenous injection, intramuscular injection, subcutaneous injection, or inhalation. In certain embodiments, the gRNA molecules are delivered with a Cas9 molecule in a genome editing system.

### 6. Methods for Designing gRNAs

[0491] Methods for selecting, designing, and validating targeting domains for use in the gRNAs described herein are provided. Exemplary targeting domains for incorporation into gRNAs are also provided herein.

[0492] Methods for selection and validation of target sequences as well as off-target analyses have been described previously (see, e.g., Mali 2013; Hsu 2013; Fu 2014; Heigwer 2014; Bae 2014; Xiao 2014). For example, a software tool can be used to optimize the choice of potential targeting domains corresponding to a user's target sequence, e.g., to minimize total off-target activity across the genome. Off-target activity may be other than cleavage. For each possible targeting domain choice using S. pyogenes Cas9, the tool can identify all off-target sequences (preceding either NAG or NGG PAMs) across the genome that contain up to certain number (e.g., 1, 2, 3, 4, 5, 6, 7, 8, 9, or 10) of mismatched base-pairs. The cleavage efficiency at each off-target sequence can be predicted, e.g., using an experimentally-derived weighting scheme. Each possible targeting domain is then ranked according to its total predicted off-target cleavage; the top-ranked targeting domains represent those that are likely to have the greatest on-target cleavage and the least off-target cleavage. Other functions, e.g., automated reagent design for CRISPR construction, primer design for the on-target Surveyor assay, and primer design for high-throughput detection and quantification of off-target cleavage via next-gen sequencing, can also be included in the tool. Candidate targeting domains and gRNAs comprising those targeting domains can be functionally evaluated using methods known in the art and/or as set forth herein.

[0493] HBV genomes have vast variants. The gRNAs were designed to provide maximal coverage of the conserved HBV genome. To optimize the choice of gRNA, eight different types of HBV consensus sequences (according to the database found at hbvdb.ibcp.fr/HBVdb/), e.g., HBV-A, HBV-B, HBV-C, HBV-D, HBV-E, HBV-F, HBV-G and HBV-H were selected as target sequences. The eight different types of HBV consensus sequences (e.g., HBV-A, HBV-B, HBV-C, HBV-D, HBV-E, HBV-F, HBV-G and HBV-H) represent significant genomic conservation between HBV subtypes and strain variants. The Targeting Domains discussed herein can be incorporated into the gRNAs described herein.

[0494] As a non-limiting example, guide RNAs (gRNAs) for use with an S. pyogenes Cas9, e.g., Cas9 EQR or VRER variant, or an S. aureus Cas9, e.g., Cas9 KKH variant, can be identified using a DNA sequence searching algorithm. Guide RNA design can be carried out using a custom guide RNA design software based on the public tool cas-offinder (reference: Cas-OFFinder: a fast and versatile algorithm that searches for potential off-target sites of Cas9 RNA-guided endonucleases, Bioinformatics. 2014 Feb. 17. Bae S, Park J, Kim J S. PMID: 24463181). Said custom guide RNA design software scores guides after calculating their genomewide off-target propensity. Typically matches ranging from perfect matches to 7 mismatches are considered for guides ranging in length from 17 to 24. Once the off-target sites are computationally determined, an aggregate score is calculated for each guide and summarized in a tabular output using a web-interface. In addition to identifying potential gRNA sites adjacent to PAM sequences, the software also identifies all PAM adjacent sequences that differ by 1, 2, 3 or more nucleotides from the selected gRNA sites. Genomic DNA sequence for each gene can be obtained from the UCSC Genome browser and sequences can be screened for repeat elements using the publically available RepeatMasker program. RepeatMasker searches input DNA sequences for repeated elements and regions of low complexity. The output is a detailed annotation of the repeats present in a given query sequence.

[0495] Following identification, gRNAs can be ranked into tiers based on their distance to the target site, their orthogonality and presence of a 5′ G (based on identification of close matches in the human genome containing a relevant PAM). In certain embodiments, for a wild-type S. pyogenes Cas9, the PAM may be a NGG PAM. In certain embodiments, for an S. pyogenes Cas9 EQR variant, the PAM may be a NGAG PAM, A NGCG PAM, a NGGG PAM, a NGTG PAM, a NGAA PAM, a NGAT PAM or a NGAC PAM. In certain embodiments, for an S. pyogenes Cas9 VRER variant, the PAM may be a NGCG PAM, A NGCA PAM, a NGCT PAM, or a NGCC PAM. In certain embodiments, for a wild-type S. aureus Cas9, the PAM may be a NNNRRT PAM or a NNNRRV PAM. In certain embodiments, for an S. aureus Cas9 KKH variant, the PAM may be a NNNRRT PAM or a NNNRRV PAM. Orthogonality refers to the number of sequences in the human genome that contain a minimum number of mismatches to the target sequence. A “high level of orthogonality” or “good orthogonality” may, for example, refer to 20-mer gRNAs that have no identical sequences in the human genome besides the intended target, nor any sequences that contain one or two mismatches in the target sequence. Targeting domains with good orthogonality are selected to minimize off-target DNA cleavage.

[0496] In the case of knock out approach, gRNAs were identified for both single-gRNA nuclease cleavage and for a dual-gRNA paired “nickase” strategy. Criteria for selecting gRNAs and the determination for which gRNAs can be used for the dual-gRNA paired “nickase” strategy is based on two considerations:

[0497] 1. gRNA pairs should be oriented on the DNA such that PAMs are facing out and cutting with the D10A Cas9 nickase will result in 5′ overhangs.

[0498] 2. An assumption that cleaving with dual nickase pairs will result in deletion of the entire intervening sequence at a reasonable frequency. However, cleaving with dual nickase pairs can also result in indel mutations at the site of only one of the gRNAs. Candidate pair members can be tested for how efficiently they remove the entire sequence versus causing indel mutations at the site of one gRNA.

[0499] The targeting domains discussed herein can be incorporated into the gRNAs described herein.

[0500] gRNAs designed to be used with an S. pyogenes Cas9 can be identified and ranked into 4 tiers. The targeting domain for tier 1 gRNA molecules can be selected based on (1) distance to a target site, e.g., within the HBV genome (e.g., targeting the entire HBV-A, HBV-B, HBV-C, HBV-D, HBV-E, HBV-F, HBV-G, or HBV-H sequence), (2) a high level of orthogonality and (3) the presence of 5′G and (4) wherein the PAM is NGG. The targeting domain for tier 2 gRNA molecules can be selected based on (1) distance to a target site, e.g., within the HBV genome (e.g., targeting the entire HBV-A, HBV-B, HBV-C, HBV-D, HBV-E, HBV-F, HBV-G, or HBV-H sequence), (2) a high level of orthogonality and (3) wherein the PAM is NGG. The targeting domain for tier 3 gRNA molecules can be selected based on (1) distance to a target site, e.g., within the HBV genome (e.g., targeting the entire HBV-A, HBV-B, HBV-C, HBV-D, HBV-E, HBV-F, HBV-G, or HBV-H sequence), (2) the presence of 5′G and (3) wherein the PAM is NGG. The targeting domain for tier 4 gRNA molecules can be selected based on (1) distance to a target site, e.g., within the HBV genome (e.g., targeting the entire HBV-A, HBV-B, HBV-C, HBV-D, HBV-E, HBV-F, HBV-G, or HBV-H sequence) and (2) wherein the PAM is NGG. Exemplary gRNAs (referred to by SEQ ID NO) designed to be used with an S. pyogenes Cas9 identified using this tiered-based approach with respect to knocking down the expression of one or more of HBV genes (e.g., PreC, C, X, PreS1, PreS2, S, P or SP genes) of the HBV-A, HBV-B, HBV-C, HBV-D, HBV-E, HBV-F, HBV-G, or HBV-H consensus sequences are provided in Table 1. In certain embodiments, the targeting domain hybridizes to the target domain through complementary base pairing. Any of the targeting domains set forth in the SEQ ID NOs of Table 1 can be used with an S. pyogenes eiCas9 molecule to reduce, decrease or repress the expression of one or more of the PreC, C, X PreS1, PreS2, S, P or SP genes.

TABLE 1
SEQ ID NOs of Exemplary gRNAs (S. pyogenes Cas9)

| Tier | HBV-A | HBV-B | HBV-C | HBV-D | HBV-E | HBV-F | HBV-G | HBV-H |
|---|---|---|---|---|---|---|---|---|
| 1 | 15389- | 31598- | 47978- | 62798- | 79221- | 94449- | 110120- | 125842- |
| | 15440 | 31662 | 48016 | 62855 | 79271 | 94494 | 110168 | 125890 |
| 2 | 15441- | 31663- | 48017- | 62856- | 79272- | 94495- | 110169- | 125891- |
| | 15631 | 31832 | 48127 | 62993 | 79402 | 94624 | 110314 | 125996 |
| 3 | 15632- | 31833- | 48128- | 62994- | 79403- | 94625- | 110315- | 125997- |
| | 15809 | 32002 | 48288 | 63154 | 79563 | 94790 | 110480 | 126154 |
| 4 | 15810- | 32003- | 48289- | 63155- | 79564- | 94791- | 110481- | 126155- |
| | 16329 | 32518 | 48841 | 63714 | 80079 | 95356 | 111022 | 126712 |

[0501] gRNAs designed to be used with an S. pyogenes Cas9 EQR variant can be identified and ranked into 5 tiers. The targeting domain for tier 1 gRNA molecules can be selected based on (1) distance to a target site, e.g., within the HBV genome (e.g., targeting the entire HBV-A sequence), (2) a high level of orthogonality and (3) the presence of 5′G and (4) wherein the PAM is NGAG. The targeting domain for tier 2 gRNA molecules can be selected based on (1) distance to a target site, e.g., within the HBV genome (e.g., targeting the entire HBV-A sequence), (2) a high level of orthogonality and (3) wherein the PAM is NGAG. The targeting domain for tier 3 gRNA molecules can be selected based on (1) distance to a target site, e.g., within the HBV genome (e.g., targeting the entire HBV-A, HBV-B, HBV-C, HBV-D, HBV-E, HBV-F, HBV-G, or HBV-H sequence), (2) the presence of 5′G and (3) wherein the PAM is NGAG. The targeting domain for tier 4 gRNA molecules can be selected based on (1) distance to a target site, e.g., within the HBV genome (e.g., targeting the entire HBV-A, HBV-B, HBV-C, HBV-D, HBV-E, HBV-F, HBV-G, or HBV-H sequence) and (2) wherein the PAM is NGAG. The targeting domain for tier 5 gRNA molecules can be selected based (1) distance to a target site, e.g., within the HBV genome (e.g., targeting the entire HBV-A, HBV-B, HBV-C, HBV-D, HBV-E, HBV-F, HBV-G, or HBV-H sequence) and (2) wherein the PAM is NGCG, NGGG, NGTG, NGAA, NGAT or NGAC. Exemplary gRNAs (referred to by SEQ ID NO) designed to be used with an S. pyogenes Cas9 EQR variant identified using this tiered-based approach with respect to knocking out and knocking down the expression of one or more of HBV genes (e.g., PreC, C, X, PreS1, PreS2, S, P or SP genes) of the HBV-A, HBV-B, HBV-C, HBV-D, HBV-E, HBV-F, HBV-G, or HBV-H consensus sequences are provided in Table 2. In certain embodiments, the targeting domain hybridizes to the target domain through complementary base pairing. Any of the targeting domains set forth in the SEQ ID NOs of Table 2 can be used with an S. pyogenes Cas9 EQR molecule to reduce, decrease or repress the expression of one or more of the PreC, C, X, PreS1, PreS2, S, P or SP genes. Any of the targeting domains set forth in the SEQ ID NOs of Table 2 can be used with an S. pyogenes Cas9 EQR molecule to reduce, decrease or repress the expression of one or more of the PreC, C, X, PreS1, PreS2, S, P or SP genes.

TABLE 2
SEQ ID NOs of Exemplary gRNAs (S. pyogenes Cas9 EQR variant)

| Tier | HBV-A | HBV-B | HBV-C | HBV-D | HBV-E | HBV-F | HBV-G | HBV-H |
|---|---|---|---|---|---|---|---|---|
| 1 | 215- | 2225- | 4169- | 5977- | 7953- | 9830- | 11678- | 13563- |
| | 235 | 2254 | 4181 | 6001 | 7974 | 9852 | 11700 | 13580 |
| 2 | 236- | 2255- | 4182- | 6002- | 7975- | 9853- | 11701- | 13581- |
| | 275 | 2297 | 4206 | 6043 | 8008 | 9890 | 11739 | 13615 |
| 3 | 276- | 2298- | 4207- | 6044- | 8009- | 9891- | 11740- | 13616- |
| | 326 | 2339 | 4242 | 6087 | 8056 | 9941 | 11783 | 13670 |
| 4 | 327- | 2340- | 4243- | 6088- | 8057- | 9942- | 11784- | 13671- |
| | 456 | 2456 | 4364 | 6206 | 8174 | 10056 | 11901 | 13784 |
| 5 | 457- | 2457- | 4365- | 6207- | 8175- | 10057- | 11902- | 13785- |
| | 1565 | 3535 | 5381 | 7325 | 9213 | 11082 | 12954 | 14791 |

[0502] gRNAs designed to be used with an S. pyogenes Cas9 VRER variant can be identified and ranked into 5 tiers. The targeting domain for tier 1 gRNA molecules can be selected based on (1) distance to a target site, e.g., within the HBV genome (e.g., targeting the entire HBV-A, HBV-B, HBV-C, HBV-D, HBV-E, HBV-F, HBV-G, or HBV-H sequence), (2) a high level of orthogonality and (3) the presence of 5′G and (4) wherein the PAM is NGCG. The targeting domain for tier 2 gRNA molecules can be selected based on (1) distance to a target site, e.g., within the HBV genome (e.g., targeting the entire HBV-A, HBV-B, HBV-C, HBV-D, HBV-E, HBV-F, HBV-G, or HBV-H sequence) (2) a high level of orthogonality and (3) wherein the PAM is NGCG. The targeting domain for tier 3 gRNA molecules can be selected based on (1) distance to a target site, e.g., within the HBV genome (e.g., targeting the entire HBV-A, HBV-B, HBV-C, HBV-D, HBV-E, HBV-F, HBV-G, or HBV-H sequence), (2) the presence of 5′G and (3) wherein the PAM is NGCG. The targeting domain for tier 4 gRNA molecules can be selected based on (1) distance to a target site, e.g., within the HBV genome (e.g., targeting the entire HBV-A, HBV-B, HBV-C, HBV-D, HBV-E, HBV-F, HBV-G, or HBV-H sequence) and (2) wherein the PAM is NGCG. The targeting domain for tier 5 gRNA molecules can be selected based (1) distance to a target site, e.g., within the HBV genome (e.g., targeting the entire HBV-A, HBV-B, HBV-C, HBV-D, HBV-E, HBV-F, HBV-G, or HBV-H sequence) and (2) wherein the PAM is NGCA, NGCT or NGCC. Exemplary gRNAs (referred to by SEQ ID NO) designed to be used with an S. pyogenes Cas9 VRER variant identified using this tiered-based approach with respect to knocking out and knocking down the expression of one or more of HBV genes (e.g., PreC, C, X PreS1, PreS2, S, P or SP genes) of the HBV-A, HBV-B, HBV-C, HBV-D, HBV-E, HBV-F, HBV-G, or HBV-H consensus sequences are provided in Table 3. In certain embodiments, the targeting domain hybridizes to the target domain through complementary base pairing. Any of the targeting domains set forth in the SEQ ID NOs of Table 3 can be used with an S. pyogenes Cas9 VRER variant to reduce, decrease or repress the expression of one or more of the PreC, C, X, PreS1, PreS2, S, P or SP genes.

TABLE 3
SEQ ID NOs of Exemplary gRNAs (S. pyogenes Cas9 VRER variant)

| Tier | HBV-A | HBV-B | HBV-C | HBV-D | HBV-E | HBV-F | HBV-G | HBV-H |
|---|---|---|---|---|---|---|---|---|
| 1 | 1566- | 3536- | 5382- | 7326- | 9214- | 11083- | 12955- | 14792- |
| | 1587 | 3556 | 5402 | 7346 | 9239 | 11102 | 12978 | 14809 |
| 2 | 1588- | 3557- | 5403- | 7347- | 9240- | 11103- | 12979- | 14810- |
| | 1624 | 3594 | 5433 | 7379 | 9277 | 11131 | 13012 | 14843 |
| 3 | 1625- | 3595- | 5434- | 7380- | 9278- | 11132- | 13013- | 14844- |
| | 1637 | 3603 | 5445 | 7388 | 9287 | 11136 | 13022 | 14855 |
| 4 | 1638- | 3604- | 5446- | 7389- | 9288- | 11137- | 13023- | 14856- |
| | 1661 | 3617 | 5463 | 7407 | 9315 | 11154 | 13048 | 14875 |
| 5 | 1662- | 3618- | 5464- | 7408- | 9316- | 11155- | 13049- | 14876- |
| | 2224 | 4168 | 5976 | 7952 | 9829 | 11677 | 13562 | 15388 |

[0503] gRNAs designed to be used with an S. aureus Cas9 can be identified and ranked into 4 tiers. The targeting domain for tier 1 gRNA molecules can be selected based on (1) distance to a target site, e.g., within the HBV genome (e.g., targeting the entire HBV-A, HBV-B, HBV-C, HBV-D, HBV-E, HBV-F, HBV-G, or HBV-H consensus sequence), (2) a high level of orthogonality and (3) the presence of 5′G and (4) PAM is NNNRRT. The targeting domain for tier 2 gRNA molecules can be selected based on (1) distance to a target site, e.g., within the HBV genome (e.g., targeting the entire HBV-A, HBV-B, HBV-C, HBV-D, HBV-E, HBV-F, HBV-G, or HBV-H sequence), (2) a high level of orthogonality and (3) PAM is NNNRRT. The targeting domain for tier 3 gRNA molecules can be selected based on (1) distance to a target site, e.g., within the HBV genome (e.g., targeting the entire HBV-A, HBV-B, HBV-C, HBV-D, HBV-E, HBV-F, HBV-G, or HBV-H sequence) and (2) PAM is NNNRRT. The targeting domain for tier 4 gRNA molecules can be selected based on (1) distance to a target site, e.g., within the HBV genome (e.g., targeting the entire HBV-A, HBV-B, HBV-C, HBV-D, HBV-E, HBV-F, HBV-G, or HBV-H sequence) and (2) PAM is NNNRRV. Exemplary gRNAs (referred to by SEQ ID NO) designed to be used with an S. aureus Cas9 identified using this tiered-based approach with respect to knocking down the expression of one or more of HBV genes (e.g., PreC, C, X, PreS1, PreS2, S, P or SP genes) of the HBV-A, HBV-B, HBV-C, HBV-D, HBV-E, HBV-F, HBV-G, or HBV-H consensus sequences are provided in Table 4. In certain embodiments, the targeting domain hybridizes to the target domain through complementary base pairing. Any of the targeting domains set forth in the SEQ ID NOs of Table 4 can be used with an S. aureus Cas9 molecule to reduce, decrease or repress the expression of one or more of the PreC, C, X, PreS1, PreS2, S, P or SP genes.

TABLE 4
SEQ ID NOs of Exemplary gRNAs (S. aureus Cas9)

| Tier | HBV-A | HBV-B | HBV-C | HBV-D | HBV-E | HBV-F | HBV-G | HBV-H |
|---|---|---|---|---|---|---|---|---|
| 1 | 16330- | 32519- | 48842- | 63715- | 80080- | 95357- | 111023- | 126713- |
| | 16465 | 32670 | 48938 | 63837 | 80196 | 95463 | 111153 | 126813 |
| 2 | 16466- | 32671- | 48939- | 63838- | 80197- | 95464- | 111154- | 126814- |
| | 16860 | 33102 | 49203 | 64239 | 80526 | 95766 | 111512 | 127115 |
| 3 | 16861- | 33103- | 49204- | 64240- | 80527- | 95767- | 111513- | 127116- |
| | 17036 | 33288 | 49380 | 64417 | 80733 | 95947 | 111683 | 127335 |
| 4 | 17037- | 33289- | 49381- | 64418- | 80734- | 95948- | 111684- | 127336- |
| | 19822 | 35976 | 51921 | 67224 | 83218 | 98663 | 114350 | 129862 |

[0504] gRNAs designed to be used with an S. aureus Cas9 KKH variant can be identified and ranked into 5 tiers. The targeting domain for tier 1 gRNA molecules can be selected based on (1) distance to a target site, e.g., within the HBV genome (e.g., targeting the entire HBV-A, HBV-B, HBV-C, HBV-D, HBV-E, HBV-F, HBV-G, or HBV-H consensus sequence), (2) a high level of orthogonality and (3) the presence of 5′G and (4) PAM is NNNRRT. The targeting domain for tier 2 gRNA molecules can be selected based on (1) distance to a target site, e.g., within the HBV genome (e.g., targeting the entire HBV-A, HBV-B, HBV-C, HBV-D, HBV-E, HBV-F, HBV-G, or HBV-H sequence), (2) a high level of orthogonality and (3) PAM is NNNRRT. The targeting domain for tier 3 gRNA molecules can be selected based on (1) distance to a target site, e.g., within the HBV genome (e.g., targeting the entire HBV-A, HBV-B, HBV-C, HBV-D, HBV-E, HBV-F, HBV-G, or HBV-H sequence), (2) the presence of 5′G and (3) PAM is NNNRRT. The targeting domain for tier 4 gRNA molecules can be selected based on (1) distance to a target site, e.g., within the HBV genome (e.g., targeting the entire HBV-A, HBV-B, HBV-C, HBV-D, HBV-E, HBV-F, HBV-G, or HBV-H sequence) and (2) PAM is NNNRRT. The targeting domain for tier 5 gRNA molecules can be selected based (1) distance to a target site, e.g., within the HBV genome (e.g., targeting the entire HBV-A, HBV-B, HBV-C, HBV-D, HBV-E, HBV-F, HBV-G, or HBV-H sequence) and (2) PAM is NNNRRV. Exemplary gRNAs (referred to by SEQ ID NO) designed to be used with an S. aureus Cas9 KKH variant identified using this tiered-based approach with respect to knocking out and knocking down the expression of one or more of HBV genes (e.g., PreC, C, X, PreS1, PreS2, S, P or SP genes) of the HBV-A, HBV-B, HBV-C, HBV-D, HBV-E, HBV-F, HBV-G, or HBV-H consensus sequences are provided in Table 5. In certain embodiments, the targeting domain hybridizes to the target domain through complementary base pairing. Any of the targeting domains set forth in the SEQ ID NOs of Table 5 can be used with an S. aureus Cas9 KKH molecule to reduce, decrease or repress the expression of one or more of the PreC, C, X, PreS1, PreS2, S, P or SP genes.

TABLE 5
SEQ ID NOs of Exemplary gRNAs (S. aureus Cas9 KKH variant)

| Tier | HBV-A | HBV-B | HBV-C | HBV-D | HBV-E | HBV-F | HBV-G | HBV-H |
|---|---|---|---|---|---|---|---|---|
| 1 | 19823- | 35977- | 51922- | 67225- | 83219- | 98664- | 114351- | 129863- |
| | 20028 | 36242 | 52034 | 67439 | 83379 | 98816 | 114522 | 130008 |
| 2 | 20029- | 36243- | 52035- | 67440- | 83380- | 98817- | 114523- | 130009- |
| | 20625 | 36951 | 52350 | 68040 | 83813 | 99265 | 115019 | 130409 |
| 3 | 20626- | 36952- | 52351- | 68041- | 83814- | 99266- | 115020- | 130410- |
| | 20949 | 37327 | 52720 | 68423 | 84212 | 100864 | 115407 | 130793 |
| 4 | 20950- | 37328- | 52721- | 68424- | 84213- | 100865- | 115408- | 130794- |
| | 22289 | 38594 | 53126 | 69719 | 85477 | 100867 | 116642 | 132225 |
| 5 | 22290- | 38595- | 53127- | 69720- | 85478- | 100868- | 116643- | 132226- |
| | 31597 | 47977 | 62797 | 79220 | 94448 | 110119 | 125841 | 141071 |

[0505] Any of the targeting domains in the tables described herein can be used with a Cas9 nickase molecule to generate a single strand break.

[0506] Any of the targeting domains in the tables described herein can be used with a Cas9 nuclease molecule to generate a double strand break.

[0507] When two gRNAs designed for use to target two Cas9 molecules, one Cas9 can be one species, the second Cas9 can be from a different species. Both Cas9 species are used to generate a single or double-strand break, as desired.

[0508] One or more of the gRNA molecules described herein, e.g., those comprising the targeting domains described in Tables 1-5 can be used with at least one Cas9 molecule (e.g., an S. pyogenes Cas9 molecule and/or an S. aureus Cas9 molecule) to form a single or a double stranded cleavage. In certain embodiments, dual targeting is used to create two double strand breaks (e.g., by using at least one Cas9 nuclease, e.g., an S. pyogenes Cas9 nuclease and/or an S. aureus Cas9 nuclease) or two nicks (e.g., by using at least one Cas9 nickase, e.g., an S. pyogenes Cas9 nickase and/or an S. aureus Cas9 nickase) on opposite DNA strands with two gRNA molecules. In certain embodiments, a presently disclosed composition or genome editing system comprises two gRNA molecules comprising targeting domains that are complementary to opposite DNA strands, e.g., a gRNA molecule comprising any minus strand targeting domain that can be paired with a gRNA molecule comprising a plus strand targeting domain provided that the two gRNA molecules are oriented on the DNA such that PAMs face outward. In certain embodiments, two gRNA molecules are used to target two Cas9 nucleases (e.g., two S. pyogenes Cas9 nucleases, two S. aureus Cas9 nucleases, or one S. aureus Cas9 nuclease and one S. pyogenes Cas9 nuclease) or two Cas9 nickases (e.g., two S. pyogenes Cas9 nickases, two S. aureus Cas9 nickases, or one S. aureus Cas9 nickase and one Cas9 nickase). One or more of the gRNA molecules described herein, e.g., those comprising the targeting domains described in Tables 1-5 can be used with at least one Cas9 molecule to mediate the alteration of a HBV viral gene selected from the group consisting of PreC, C, X, PreS1, PreS2, S, P and SP genes, described in Section 4.

### 7. Cas9 Molecules

[0509] Cas9 molecules of a variety of species can be used in the methods and compositions described herein. While the S. pyogenes and S. aureus Cas9 molecules are the subject of much of the disclosure herein, Cas9 molecules, derived from, or based on the Cas9 proteins of other species listed herein can be used as well. These include, for example, Cas9 molecules from Acidovorax avenae, Actinobacillus pleuropneumonias, Actinobacillus succinogenes, Actinobacillus suis, Actinomyces sp., cycliphilus denitrificans, Aminomonas paucivorans, Bacillus cereus, Bacillus smithii, Bacillus thuringiensis, Bacteroides sp., Blastopirellula marina, Bradyrhizobium sp., Brevibacillus laterosporus, Campylobacter coli, Campylobacter jejuni, Campylobacter lari, Candidatus Puniceispirillum, Clostridium cellulolyticum, Clostridium perfringens, Corynebacterium accolens, Corynebacterium diphtheria, Corynebacterium matruchotii, Dinoroseobacter shibae, Eubacterium dolichum, gamma proteobacterium, Gluconacetobacter diazotrophicus, Haemophilus parainfluenzae, Haemophilus sputorum, Helicobacter canadensis, Helicobacter cinaedi, Helicobacter mustelae, Ilyobacter polytropus, Kingella kingae, Lactobacillus crispatus, Listeria ivanovii, Listeria monocytogenes, Listeriaceae bacterium, Methylocystis sp., Methylosinus trichosporium, Mobiluncus mulieris, Neisseria bacilliformis, Neisseria cinerea, Neisseria flavescens, Neisseria lactamica, Neisseria meningitides, Neisseria sp., Neisseria wadsworthii, Nitrosomonas sp., Parvibaculum lavamentivorans, Pasteurella multocida, Phascolarctobacterium succinatutens, Ralstonia syzygii, Rhodopseudomonas palustris, Rhodovulum sp., Simonsiella muelleri, Sphingomonas sp., Sporolactobacillus vineae, Staphylococcus lugdunensis, Streptococcus sp., Subdoligranulum sp., Tistrella mobilis, Treponema sp., or Verminephrobacter eiseniae.

[0510] 7.1 Cas9 Domains

[0511] Crystal structures have been determined for two different naturally occurring bacterial Cas9 molecules (Jinek 2014) and for S. pyogenes Cas9 with a guide RNA (e.g., a synthetic fusion of crRNA and tracrRNA) (Nishimasu 2014; Anders 2014).

[0512] A naturally occurring Cas9 molecule comprises two lobes: a recognition (REC) lobe and a nuclease (NUC) lobe; each of which further comprise domains described herein. FIGS. 8A-8B provide a schematic of the organization of important Cas9 domains in the primary structure. The domain nomenclature and the numbering of the amino acid residues encompassed by each domain used throughout this disclosure is as described previously (Nishimasu 2014). The numbering of the amino acid residues is with reference to Cas9 from S. pyogenes.

[0513] The REC lobe comprises the arginine-rich bridge helix (BH), the REC1 domain, and the REC2 domain. The REC lobe does not share structural similarity with other known proteins, indicating that it is a Cas9-specific functional domain. The BH domain is a long a helix and arginine rich region and comprises amino acids 60-93 of the sequence of S. pyogenes Cas9. The REC1 domain is important for recognition of the repeat:anti-repeat duplex, e.g., of a gRNA or a tracrRNA, and is therefore critical for Cas9 activity by recognizing the target sequence. The REC1 domain comprises two REC1 motifs at amino acids 94 to 179 and 308 to 717 of the sequence of S. pyogenes Cas9. These two REC1 domains, though separated by the REC2 domain in the linear primary structure, assemble in the tertiary structure to form the REC1 domain. The REC2 domain, or parts thereof, may also play a role in the recognition of the repeat:anti-repeat duplex. The REC2 domain comprises amino acids 180-307 of the sequence of S. pyogenes Cas9.

[0514] The NUC lobe comprises the RuvC domain, the HNH domain, and the PAM-interacting (PI) domain. The RuvC domain shares structural similarity to retroviral integrase superfamily members and cleaves a single strand, e.g., the non-complementary strand of the target nucleic acid molecule. The RuvC domain is assembled from the three split RuvC motifs (RuvC I, RuvCII, and RuvCIII, which are often commonly referred to in the art as RuvCI domain, or N-terminal RuvC domain, RuvCII domain, and RuvCIII domain) at amino acids 1-59, 718-769, and 909-1098, respectively, of the sequence of S. pyogenes Cas9. Similar to the REC1 domain, the three RuvC motifs are linearly separated by other domains in the primary structure, however in the tertiary structure, the three RuvC motifs assemble and form the RuvC domain. The HNH domain shares structural similarity with HNH endonucleases and cleaves a single strand, e.g., the complementary strand of the target nucleic acid molecule. The HNH domain lies between the RuvC II-III motifs and comprises amino acids 775-908 of the sequence of S. pyogenes Cas9. The PI domain interacts with the PAM of the target nucleic acid molecule, and comprises amino acids 1099-1368 of the sequence of S. pyogenes Cas9.

[0515] 7.1.1 RuvC-Like Domain and HNH-Like Domain

[0516] In certain embodiments, a Cas9 molecule or Cas9 polypeptide comprises an HNH-like domain and a RuvC-like domain, and in certain of these embodiments cleavage activity is dependent on the RuvC-like domain and the HNH-like domain. A Cas9 molecule or Cas9 polypeptide can comprise one or more of a RuvC-like domain and an HNH-like domain. In certain embodiments, a Cas9 molecule or Cas9 polypeptide comprises a RuvC-like domain, e.g., a RuvC-like domain described below, and/or an HNH-like domain, e.g., an HNH-like domain described below.

### RuvC-Like Domains

[0517] In certain embodiments, a RuvC-like domain cleaves a single strand, e.g., the non-complementary strand of the target nucleic acid molecule. The Cas9 molecule or Cas9 polypeptide can include more than one RuvC-like domain (e.g., one, two, three or more RuvC-like domains). In certain embodiments, a RuvC-like domain is at least 5, 6, 7, 8 amino acids in length but not more than 20, 19, 18, 17, 16 or 15 amino acids in length. In certain embodiments, the Cas9 molecule or Cas9 polypeptide comprises an N-terminal RuvC-like domain of about 10 to 20 amino acids, e.g., about 15 amino acids in length.

[0518] 7.1.2 N-Terminal RuvC-Like Domains

[0519] Some naturally occurring Cas9 molecules comprise more than one RuvC-like domain with cleavage being dependent on the N-terminal RuvC-like domain. Accordingly, a Cas9 molecule or Cas9 polypeptide can comprise an N-terminal RuvC-like domain. Exemplary N-terminal RuvC-like domains are described below.

[0520] In certain embodiments, a Cas9 molecule or Cas9 polypeptide comprises an N-terminal RuvC-like domain comprising an amino acid sequence of Formula I:

(SEQ ID NO: 20)
D-X₁-G-X₂-X₃-X₄-X₅-G-X₆-X₇-X₈-X₉,

[0521] wherein,

[0522] X₁ is selected from I, V, M, L, and T (e.g., selected from I, V, and L);

[0523] X₂ is selected from T, I, V, S, N, Y, E, and L (e.g., selected from T, V, and I);

[0524] X₃ is selected from N, S, G, A, D, T, R, M, and F (e.g., A or N);

[0525] X₄ is selected from S, Y, N, and F (e.g., S);

[0526] X₅ is selected from V, I, L, C, T, and F (e.g., selected from V, I and L);

[0527] X₆ is selected from W, F, V, Y, S, and L (e.g., W);

[0528] X₇ is selected from A, S, C, V, and G (e.g., selected from A and S);

[0529] X₈ is selected from V, I, L, A, M, and H (e.g., selected from V, I, M and L); and

[0530] X₉ is selected from any amino acid or is absent (e.g., selected from T, V, I, L, A, F, S, A, Y, M, and R, or, e.g., selected from T, V, I, L, and A).

[0531] In certain embodiments, the N-terminal RuvC-like domain differs from a sequence of SEQ ID NO:20 by as many as 1 but no more than 2, 3, 4, or 5 residues.

[0532] In certain embodiments, the N-terminal RuvC-like domain is cleavage competent. In other embodiments, the N-terminal RuvC-like domain is cleavage incompetent.

[0533] In certain embodiments, a Cas9 molecule or Cas9 polypeptide comprises an N-terminal RuvC-like domain comprising an amino acid sequence of Formula II:

(SEQ ID NO: 21)
D-X₁-G-X2-X₃-S-X₅-G-X₆-X₇-X₈-X₉,,

[0534] wherein

[0535] X₁ is selected from I, V, M, L, and T (e.g., selected from I, V, and L);

[0536] X₂ is selected from T, I, V, S, N, Y, E, and L (e.g., selected from T, V, and I);

[0537] X₃ is selected from N, S, G, A, D, T, R, M and F (e.g., A or N);

[0538] X₅ is selected from V, I, L, C, T, and F (e.g., selected from V, I and L);

[0539] X₆ is selected from W, F, V, Y, S, and L (e.g., W);

[0540] X₇ is selected from A, S, C, V, and G (e.g., selected from A and S);

[0541] X₈ is selected from V, I, L, A, M, and H (e.g., selected from V, I, M and L); and

[0542] X₉ is selected from any amino acid or is absent (e.g., selected from T, V, I, L, A, F, S, A, Y, M, and R or selected from e.g., T, V, I, L, and A).

[0543] In certain embodiments, the N-terminal RuvC-like domain differs from a sequence of SEQ ID NO:21 by as many as 1 but not more than 2, 3, 4, or 5 residues.

[0544] In certain embodiments, the N-terminal RuvC-like domain comprises an amino acid sequence of Formula III:

(SEQ ID NO: 22)
D-I-G-X₂-X₃-S-V-G-W-A-X₈-X₉,

[0545] wherein

[0546] X₂ is selected from T, I, V, S, N, Y, E, and L (e.g., selected from T, V, and I);

[0547] X₃ is selected from N, S, G, A, D, T, R, M, and F (e.g., A or N);

[0548] X₈ is selected from V, I, L, A, M, and H (e.g., selected from V, I, M and L); and

[0549] X₉ is selected from any amino acid or is absent (e.g., selected from T, V, I, L, A, F, S, A, Y, M, and R or selected from e.g., T, V, I, L, and A).

[0550] In certain embodiments, the N-terminal RuvC-like domain differs from a sequence of SEQ ID NO:22 by as many as 1 but not more than, 2, 3, 4, or 5 residues.

[0551] In certain embodiments, the N-terminal RuvC-like domain comprises an amino acid sequence of Formula IV:

(SEQ ID NO: 23)
D-I-G-T-N-S-V-G-W-A-V-X,

[0552] wherein

[0553] X is a non-polar alkyl amino acid or a hydroxyl amino acid, e.g., X is selected from V, I, L, and T (e.g., the Cas9 molecule can comprise an N-terminal RuvC-like domain shown in FIGS. 2A-2G (depicted as Y)).

[0554] In certain embodiments, the N-terminal RuvC-like domain differs from a sequence of SEQ ID NO:23 by as many as 1 but not more than, 2, 3, 4, or 5 residues.

[0555] In certain embodiments, the N-terminal RuvC-like domain differs from a sequence of an N-terminal RuvC like domain disclosed herein, e.g., in FIGS. 3A-3B, as many as 1 but no more than 2, 3, 4, or 5 residues. In certain embodiments, 1, 2, 3 or all of the highly conserved residues identified in FIGS. 3A-3B are present.

[0556] In certain embodiments, the N-terminal RuvC-like domain differs from a sequence of an N-terminal RuvC-like domain disclosed herein, e.g., in FIGS. 4A-4B, as many as 1 but no more than 2, 3, 4, or 5 residues. In certain embodiments, 1, 2, or all of the highly conserved residues identified in FIGS. 4A-4B are present.

[0557] 7.1.3 Additional RuvC-Like Domains

[0558] In addition to the N-terminal RuvC-like domain, the Cas9 molecule or Cas9 polypeptide can comprise one or more additional RuvC-like domains. In certain embodiments, the Cas9 molecule or Cas9 polypeptide comprises two additional RuvC-like domains. In certain embodiments, the additional RuvC-like domain is at least 5 amino acids in length and, e.g., less than 15 amino acids in length, e.g., 5 to 10 amino acids in length, e.g., 8 amino acids in length.

[0559] An additional RuvC-like domain can comprise an amino acid sequence of Formula V:

(SEQ ID NO: 15)
I-X₁-X₂-E-X₃-A-R-E

[0560] wherein,

[0561] X₁ is V or H;

[0562] X₂ is I, L or V (e.g., I or V); and

[0563] X₃ is M or T.

[0564] In certain embodiments, the additional RuvC-like domain comprises an amino acid sequence of Formula VI:

(SEQ ID NO: 16)
I-V-X₂-E-M-A-R-E,

[0565] wherein

[0566] X₂ is I, L or V (e.g., I or V) (e.g., the Cas9 molecule or Cas9 polypeptide can comprise an additional RuvC-like domain shown in FIG. 2A-2G (depicted as B)).

[0567] An additional RuvC-like domain can comprise an amino acid sequence of Formula VII:

(SEQ ID NO: 17)
H-H-A-X₁-D-A-X₂-X₃,

[0568] wherein

[0569] X₁ is H or L;

[0570] X₂ is R or V; and

[0571] X₃ is E or V.

[0572] In certain embodiments, the additional RuvC-like domain comprises the amino acid sequence:

(SEQ ID NO: 18)
H-H-A-H-D-A-Y-L.

[0573] In certain embodiments, the additional RuvC-like domain differs from a sequence of SEQ ID NOs:15-18 by as many as 1 but not more than 2, 3, 4, or 5 residues.

[0574] In certain embodiments, the sequence flanking the N-terminal RuvC-like domain has the amino acid sequence of Formula VIII:

(SEQ ID NO: 19)
K-X₁′-Y-X₂′-X₃′-X₄′-Z-T-D-X₉′-Y,

[0575] wherein

[0576] X₁′ is selected from K and P;

[0577] X₂′ is selected from V, L, I, and F (e.g., V, I and L);

[0578] X₃′ is selected from G, A and S (e.g., G);

[0579] X₄′ is selected from L, I, V, and F (e.g., L);

[0580] X₉′ is selected from D, E, N, and Q; and

[0581] Z is an N-terminal RuvC-like domain, e.g., as described above, e.g., having 5 to 20 amino acids.

[0582] 7.1.4 HNH-Like Domains

[0583] In certain embodiments, an HNH-like domain cleaves a single stranded complementary domain, e.g., a complementary strand of a double stranded nucleic acid molecule. In certain embodiments, an HNH-like domain is at least 15, 20, or 25 amino acids in length but not more than 40, 35, or 30 amino acids in length, e.g., 20 to 35 amino acids in length, e.g., 25 to 30 amino acids in length. Exemplary HNH-like domains are described below.

[0584] In certain embodiments, a Cas9 molecule or Cas9 polypeptide comprises an HNH-like domain having an amino acid sequence of Formula IX:

(SEQ ID NO: 25)
X₁-X₂-X₃-H-X₄-X₅-P-X₆-X₇-X₈-X⁹-X¹⁰-X¹¹-X¹²-X¹³-X¹⁴-X¹⁵-N-
X¹⁶-X¹⁷-X¹⁸-X¹⁹-X₂₀-X₂₁-X₂₂-X₂₃-N,

wherein

[0585] X₁ is selected from D, E, Q and N (e.g., D and E);

[0586] X₂ is selected from L, I, R, Q, V, M, and K;

[0587] X₃ is selected from D and E;

[0588] X₄ is selected from I, V, T, A, and L (e.g., A, I and V);

[0589] X₅ is selected from V, Y, I, L, F, and W (e.g., V, I and L);

[0590] X₆ is selected from Q, H, R, K, Y, I, L, F, and W;

[0591] X₇ is selected from S, A, D, T, and K (e.g., S and A);

[0592] X₈ is selected from F, L, V, K, Y, M, I, R, A, E, D, and Q (e.g., F);

[0593] X₉ is selected from L, R, T, I, V, S, C, Y, K, F, and G;

[0594] X₁₀ is selected from K, Q, Y, T, F, L, W, M, A, E, G, and S;

[0595] X₁₁ is selected from D, S, N, R, L, and T (e.g., D);

[0596] X₁₂ is selected from D, N and S;

[0597] X₁₃ is selected from S, A, T, G, and R (e.g., S);

[0598] X₁₄ is selected from I, L, F, S, R, Y, Q, W, D, K, and H (e.g., I, L and F);

[0599] X₁₅ is selected from D, S, I, N, E, A, H, F, L, Q, M, G, Y, and V;

[0600] X₁₆ is selected from K, L, R, M, T, and F (e.g., L, R and K);

[0601] X₁₇ is selected from V, L, I, A and T;

[0602] X₁₈ is selected from L, I, V, and A (e.g., L and I);

[0603] X₁₉ is selected from T, V, C, E, S, and A (e.g., T and V);

[0604] X₂₀ is selected from R, F, T, W, E, L, N, C, K, V, S, Q, I, Y, H, and A;

[0605] X₂₁ is selected from S, P, R, K, N, A, H, Q, G, and L;

[0606] X₂₂ is selected from D, G, T, N, S, K, A, I, E, L, Q, R, and Y; and

[0607] X₂₃ is selected from K, V, A, E, Y, I, C, L, S, T, G, K, M, D, and F.

[0608] In certain embodiments, a HNH-like domain differs from a sequence of SEQ ID NO:25 by at least one but not more than, 2, 3, 4, or 5 residues.

[0609] In certain embodiments, the HNH-like domain is cleavage competent. In certain embodiments, the HNH-like domain is cleavage incompetent.

[0610] In certain embodiments, a Cas9 molecule or Cas9 polypeptide comprises an HNH-like domain comprising an amino acid sequence of Formula X:

(SEQ ID NO: 26)
X₁-X₂-X₃-H-X₄-X₅-P-X₆-S-X₈-X₉-X₁₀-D-D-S-X₁₄-X₁₅-N-K-V-
L-X₁₉-X₂₀-X₂₁-X₂₂-X₂₃-N,

[0611] wherein

[0612] X₁ is selected from D and E;

[0613] X₂ is selected from L, I, R, Q, V, M, and K;

[0614] X₃ is selected from D and E;

[0615] X₄ is selected from I, V, T, A, and L (e.g., A, I and V);

[0616] X₅ is selected from V, Y, I, L, F, and W (e.g., V, I and L);

[0617] X₆ is selected from Q, H, R, K, Y, I, L, F, and W;

[0618] X₈ is selected from F, L, V, K, Y, M, I, R, A, E, D, and Q (e.g., F);

[0619] X₉ is selected from L, R, T, I, V, S, C, Y, K, F, and G;

[0620] X₁₀ is selected from K, Q, Y, T, F, L, W, M, A, E, G, and S;

[0621] X₁₄ is selected from I, L, F, S, R, Y, Q, W, D, K and H (e.g., I, L and F);

[0622] X₁₅ is selected from D, S, I, N, E, A, H, F, L, Q, M, G, Y, and V;

[0623] X₁₉ is selected from T, V, C, E, S, and A (e.g., T and V);

[0624] X₂₀ is selected from R, F, T, W, E, L, N, C, K, V, S, Q, I, Y, H, and A;

[0625] X₂₁ is selected from S, P, R, K, N, A, H, Q, G, and L;

[0626] X₂₂ is selected from D, G, T, N, S, K, A, I, E, L, Q, R, and Y; and

[0627] X₂₃ is selected from K, V, A, E, Y, I, C, L, S, T, G, K, M, D, and F.

[0628] In certain embodiment, the HNH-like domain differs from a sequence of SEQ ID NO:26 by 1, 2, 3, 4, or 5 residues.

[0629] In certain embodiments, a Cas9 molecule or Cas9 polypeptide comprises an HNH-like domain comprising an amino acid sequence of Formula XI:

(SEQ ID NO: 27)
X₁-V-X₃-H-I-V-P-X₆-S-X₈-X₉-X₁₀-D-D-S-X₁₄-X₁₅-N-K-V-
L-T-X₂₀-X₂₁-X₂₂-X₂₃-N,

[0630] wherein

[0631] X₁ is selected from D and E;

[0632] X₃ is selected from D and E;

[0633] X₆ is selected from Q, H, R, K, Y, I, L, and W;

[0634] X₈ is selected from F, L, V, K, Y, M, I, R, A, E, D, and Q (e.g., F);

[0635] X₉ is selected from L, R, T, I, V, S, C, Y, K, F, and G;

[0636] X₁₀ is selected from K, Q, Y, T, F, L, W, M, A, E, G, and S;

[0637] X₁₄ is selected from I, L, F, S, R, Y, Q, W, D, K, and H (e.g., I, L and F);

[0638] X₁₅ is selected from D, S, I, N, E, A, H, F, L, Q, M, G, Y, and V;

[0639] X₂₀ is selected from R, F, T, W, E, L, N, C, K, V, S, Q, I, Y, H, and A;

[0640] X₂₁ is selected from S, P, R, K, N, A, H, Q, G, and L;

[0641] X₂₂ is selected from D, G, T, N, S, K, A, I, E, L, Q, R, and Y; and

[0642] X₂₃ is selected from K, V, A, E, Y, I, C, L, S, T, G, K, M, D, and F.

[0643] In certain embodiments, the HNH-like domain differs from a sequence of SEQ ID NO:27 by 1, 2, 3, 4, or 5 residues.

[0644] In certain embodiments, a Cas9 molecule or Cas9 polypeptide comprises an HNH-like domain having an amino acid sequence of Formula XII:

(SEQ ID NO: 28)
D-X₂-D-H-I-X₅-P-Q-X7-F-X₉-X₁₀-D-X₁₂-S-I-D-N-X₁₆-V-L-
X₁₉-X₂₀-S-X₂₂-X₂₃-N,

[0645] wherein

[0646] X₂ is selected from I and V;

[0647] X₅ is selected from I and V;

[0648] X₇ is selected from A and S;

[0649] X₉ is selected from I and L;

[0650] X₁₀ is selected from K and T;

[0651] X₁₂ is selected from D and N;

[0652] X₁₆ is selected from R, K, and L;

[0653] X₁₉ is selected from T and V;

[0654] X₂₀ is selected from S, and R;

[0655] X₂₂ is selected from K, D, and A; and

[0656] X₂₃ is selected from E, K, G, and N (e.g., the Cas9 molecule or Cas9 polypeptide can comprise an HNH-like domain as described herein).

[0657] In certain embodiments, the HNH-like domain differs from a sequence of SEQ ID NO:28 by as many as 1 but no more than 2, 3, 4, or 5 residues.

[0658] In certain embodiments, a Cas9 molecule or Cas9 polypeptide comprises the amino acid sequence of Formula XIII:

(SEQ ID NO: 24)
L-Y-Y-L-Q-N-G-X₁′-D-M-Y-X₂′-X₃′-X₄′-X₅′-L-D-I-X₆′-X₇′-
L-S-X₈′-Y-Z-N-R-X₉′-K-X₁₀-D-X₁₁′-V-P,

[0659] wherein

[0660] X₁′ is selected from K and R;

[0661] X₂′ is selected from V and T;

[0662] X₃′ is selected from G and D;

[0663] X₄′ is selected from E, Q and D;

[0664] X₅′ is selected from E and D;

[0665] X₆′ is selected from D, N, and H;

[0666] X₇′ is selected from Y, R, and N;

[0667] X₈′ is selected from Q, D, and N;

[0668] X₉′ is selected from G and E;

[0669] X₁₀′ is selected from S and G;

[0670] X₁₁′ is selected from D and N; and

[0671] Z is an HNH-like domain, e.g., as described above.

[0672] In certain embodiments, the Cas9 molecule or Cas9 polypeptide comprises an amino acid sequence that differs from a sequence of SEQ ID NO:24 by as many as 1 but not more than 2, 3, 4, or 5 residues.

[0673] In certain embodiments, the HNH-like domain differs from a sequence of an HNH-like domain disclosed herein, e.g., in FIGS. 5A-5C, by as many as 1 but not more than 2, 3, 4, or 5 residues. In certain embodiments, 1 or both of the highly conserved residues identified in FIGS. 5A-5C are present.

[0674] In certain embodiments, the HNH-like domain differs from a sequence of an HNH-like domain disclosed herein, e.g., in FIGS. 6A-6B, by as many as 1 but not more than 2, 3, 4, or 5 residues. In certain embodiments, 1, 2, or all 3 of the highly conserved residues identified in FIGS. 6A-6B are present.

[0675] 7.2 Cas9 Activities

[0676] In certain embodiments, the Cas9 molecule or Cas9 polypeptide is capable of cleaving a target nucleic acid molecule. Typically wild-type Cas9 molecules cleave both strands of a target nucleic acid molecule. Cas9 molecules and Cas9 polypeptides can be engineered to alter nuclease cleavage (or other properties), e.g., to provide a Cas9 molecule or Cas9 polypeptide which is a nickase, or which lacks the ability to cleave target nucleic acid. A Cas9 molecule or Cas9 polypeptide that is capable of cleaving a target nucleic acid molecule is referred to herein as an eaCas9 (an enzymatically active Cas9) molecule or eaCas9 polypeptide.

[0677] In certain embodiments, an eaCas9 molecule or eaCas9 polypeptide comprises one or more of the following enzymatic activities:

[0678] a nickase activity, i.e., the ability to cleave a single strand, e.g., the non-complementary strand or the complementary strand, of a nucleic acid molecule;

[0679] a double stranded nuclease activity, i.e., the ability to cleave both strands of a double stranded nucleic acid and create a double stranded break, which in certain embodiments is the presence of two nickase activities;

[0680] an endonuclease activity;

[0681] an exonuclease activity; and

[0682] a helicase activity, i.e., the ability to unwind the helical structure of a double stranded nucleic acid.

[0683] In certain embodiments, an enzymatically active Cas9 (“eaCas9”) molecule or eaCas9 polypeptide cleaves both DNA strands and results in a double stranded break. In certain embodiments, an eaCas9 molecule or eaCas9 polypeptide cleaves only one strand, e.g., the strand to which the gRNA hybridizes to, or the strand complementary to the strand the gRNA hybridizes with. In certain embodiments, an eaCas9 molecule or eaCas9 polypeptide comprises cleavage activity associated with an HNH domain. In certain embodiments, an eaCas9 molecule or eaCas9 polypeptide comprises cleavage activity associated with a RuvC domain. In certain embodiments, an eaCas9 molecule or eaCas9 polypeptide comprises cleavage activity associated with an HNH domain and cleavage activity associated with a RuvC domain. In certain embodiments, an eaCas9 molecule or eaCas9 polypeptide comprises an active, or cleavage competent, HNH domain and an inactive, or cleavage incompetent, RuvC domain. In certain embodiments, an eaCas9 molecule or eaCas9 polypeptide comprises an inactive, or cleavage incompetent, HNH domain and an active, or cleavage competent, RuvC domain.

[0684] In certain embodiments, the Cas9 molecules or Cas9 polypeptides have the ability to interact with a gRNA molecule, and in conjunction with the gRNA molecule localize to a core target domain, but are incapable of cleaving the target nucleic acid, or incapable of cleaving at efficient rates. Cas9 molecules having no, or no substantial, cleavage activity are referred to herein as an enzymatically inactive Cas9 (“eiCas9”) molecule or eiCas9 polypeptide. For example, an eiCas9 molecule or eiCas9 polypeptide can lack cleavage activity or have substantially less, e.g., less than 20, 10, 5, 1 or 0.1% of the cleavage activity of a reference Cas9 molecule or eiCas9 polypeptide, as measured by an assay described herein.

[0685] 7.3 Targeting and PAMs

[0686] A Cas9 molecule or Cas9 polypeptide can interact with a gRNA molecule and, in concert with the gRNA molecule, localizes to a site which comprises a target domain, and in certain embodiments, a PAM sequence. In certain embodiments, the Cas9 molecules or Cas9 polypeptides of the present disclosure (e.g., an eaCas9 or eiCas9) can be targeted using the gRNAs disclosed in WO 2015/089465, which is incorporated by reference herein in its entirety. In certain embodiments, the Cas9 molecule or Cas9 polypeptide targeted using the gRNAs disclosed in WO 2015/089465 is an S. pyogenes Cas9. In certain embodiments, the Cas9 molecule or Cas9 polypeptide targeted using the gRNAs disclosed in WO 2015/089465 is an S. aureus Cas9.

[0687] In certain embodiments, the ability of an eaCas9 molecule or eaCas9 polypeptide to interact with and cleave a target nucleic acid is PAM sequence dependent. A PAM sequence is a sequence in the target nucleic acid. In certain embodiments, cleavage of the target nucleic acid occurs upstream from the PAM sequence. eaCas9 molecules from different bacterial species can recognize different sequence motifs (e.g., PAM sequences). In certain embodiments, an eaCas9 molecule of S. pyogenes recognizes the sequence motif NGG and directs cleavage of a target nucleic acid sequence 1 to 10, e.g., 3 to 5, bp upstream from that sequence (see, e.g., Mali 2013).

[0688] In certain embodiments, the Cas9 molecule is an S. pyogenes Cas9 EQR variant or an S. pyogenes Cas9 VRER variant.

[0689] In certain embodiments, an eaCas9 molecule of an S. pyogenes Cas9 EQR variant recognizes the sequence motif of NGAG, NGCG, NGGG, NGTG, NGAA, NGAT or NGAC and directs cleavage of a target nucleic acid sequence at 1 to 10, e.g., 3 to 5, base pairs upstream from that sequence. In certain embodiments, an eaCas9 molecule of an S. pyogenes Cas9 EQR variant recognizes the sequence motif of NGAG and directs cleavage of a target nucleic acid sequence at 1 to 10, e.g., 3 to 5, base pairs upstream from that sequence. See Kleinstiver et al., NATURE 2015; 523(7561):481-5.

[0690] In certain embodiments, an eaCas9 molecule of S. pyogenes Cas9 VRER variant recognizes the sequence motif of NGCG, NGCA, NGCT PAM, or NGCC and directs cleavage of a target nucleic acid sequence at 1 to 10, e.g., 3 to 5, base pairs upstream from that sequence. In certain embodiments, an eaCas9 molecule of an S. pyogenes Cas9 VRER variant recognizes the sequence motif of NGCG and directs cleavage of a target nucleic acid sequence 1 to 10, e.g., 3 to 5, base pairs upstream from that sequence. See Kleinstiver et al., NATURE 2015; 523(7561):481-5.

[0691] In certain embodiments, an eaCas9 molecule of S. thermophilus recognizes the sequence motif NGGNG (SEQ ID NO:199) and/or NNAGAAW (W=A or T) (SEQ ID NO:200) and directs cleavage of a target nucleic acid sequence 1 to 10, e.g., 3 to 5, bp upstream from these sequences (see, e.g., Horvath 2010; Deveau 2008). In certain embodiments, an eaCas9 molecule of S. mutans recognizes the sequence motif NGG and/or NAAR (R=A or G) (SEQ ID NO:201) and directs cleavage of a target nucleic acid sequence 1 to 10, e.g., 3 to 5 bp, upstream from this sequence (see, e.g., Deveau 2008). In certain embodiments, an eaCas9 molecule of S. aureus recognizes the sequence motif NNGRR (R=A or G) (SEQ ID NO:202) and directs cleavage of a target nucleic acid sequence 1 to 10, e.g., 3 to 5, bp upstream from that sequence.

[0692] In certain embodiments, an eaCas9 molecule of S. aureus recognizes the sequence motif NNGRRN (R=A or G) (SEQ ID NO:203) and directs cleavage of a target nucleic acid sequence 1 to 10, e.g., 3 to 5, bp upstream from that sequence. In certain embodiments, an eaCas9 molecule of S. aureus recognizes the sequence motif NNGRRT (R=A or G) (SEQ ID NO:204) and directs cleavage of a target nucleic acid sequence 1 to 10, e.g., 3 to 5, bp upstream from that sequence. In certain embodiments, an eaCas9 molecule of S. aureus recognizes the sequence motif NNGRRV (R=A or G) (SEQ ID NO:205) and directs cleavage of a target nucleic acid sequence 1 to 10, e.g., 3 to 5, bp upstream from that sequence.

[0693] In certain embodiments, the Cas9 molecule is an S. aureus Cas9 KKH variant. In certain embodiments, an eaCas9 molecule of an S. aureus Cas9 KKH variant recognizes the sequence motif of NNGRRT or NNGRRV and directs cleavage of a target nucleic acid sequence at 1 to 10, e.g., 3 to 5, base pairs upstream from that sequence. In certain embodiments, an eaCas9 molecule of an S. aureus Cas9 KKH variant recognizes the sequence motif of NNGRRT and directs cleavage of a target nucleic acid sequence at 1 to 10, e.g., 3 to 5, base pairs upstream from that sequence. See Kleinstiver et al. (2015) NAT. BIOTECHNOL. doi: 10.1038/nbt.3404.

[0694] In certain embodiments, an eaCas9 molecule of Neisseria meningitidis recognizes the sequence motif NNNNGATT (SEQ ID NO: 8408) or NNNGCTT (SEQ ID NO: 8409) and directs cleavage of a target nucleic acid sequence 1 to 10, e.g., 3 to 5, base pairs upstream from that sequence. See, e.g., Hou et al., PNAS Early Edition 2013, 1-6. The ability of a Cas9 molecule to recognize a PAM sequence can be determined, e.g., using a transformation assay as described previously (Jinek 2012). In the aforementioned embodiments, N can be any nucleotide residue, e.g., any of A, G, C, or T.

[0695] As is discussed herein, Cas9 molecules can be engineered to alter the PAM specificity of the Cas9 molecule.

[0696] Exemplary naturally occurring Cas9 molecules have been described previously (see, e.g., Chylinski 2013). Such Cas9 molecules include Cas9 molecules of a cluster 1 bacterial family, cluster 2 bacterial family, cluster 3 bacterial family, cluster 4 bacterial family, cluster 5 bacterial family, cluster 6 bacterial family, a cluster 7 bacterial family, a cluster 8 bacterial family, a cluster 9 bacterial family, a cluster 10 bacterial family, a cluster 11 bacterial family, a cluster 12 bacterial family, a cluster 13 bacterial family, a cluster 14 bacterial family, a cluster 15 bacterial family, a cluster 16 bacterial family, a cluster 17 bacterial family, a cluster 18 bacterial family, a cluster 19 bacterial family, a cluster 20 bacterial family, a cluster 21 bacterial family, a cluster 22 bacterial family, a cluster 23 bacterial family, a cluster 24 bacterial family, a cluster 25 bacterial family, a cluster 26 bacterial family, a cluster 27 bacterial family, a cluster 28 bacterial family, a cluster 29 bacterial family, a cluster 30 bacterial family, a cluster 31 bacterial family, a cluster 32 bacterial family, a cluster 33 bacterial family, a cluster 34 bacterial family, a cluster 35 bacterial family, a cluster 36 bacterial family, a cluster 37 bacterial family, a cluster 38 bacterial family, a cluster 39 bacterial family, a cluster 40 bacterial family, a cluster 41 bacterial family, a cluster 42 bacterial family, a cluster 43 bacterial family, a cluster 44 bacterial family, a cluster 45 bacterial family, a cluster 46 bacterial family, a cluster 47 bacterial family, a cluster 48 bacterial family, a cluster 49 bacterial family, a cluster 50 bacterial family, a cluster 51 bacterial family, a cluster 52 bacterial family, a cluster 53 bacterial family, a cluster 54 bacterial family, a cluster 55 bacterial family, a cluster 56 bacterial family, a cluster 57 bacterial family, a cluster 58 bacterial family, a cluster 59 bacterial family, a cluster 60 bacterial family, a cluster 61 bacterial family, a cluster 62 bacterial family, a cluster 63 bacterial family, a cluster 64 bacterial family, a cluster 65 bacterial family, a cluster 66 bacterial family, a cluster 67 bacterial family, a cluster 68 bacterial family, a cluster 69 bacterial family, a cluster 70 bacterial family, a cluster 71 bacterial family, a cluster 72 bacterial family, a cluster 73 bacterial family, a cluster 74 bacterial family, a cluster 75 bacterial family, a cluster 76 bacterial family, a cluster 77 bacterial family, or a cluster 78 bacterial family.

[0697] Exemplary naturally occurring Cas9 molecules include a Cas9 molecule of a cluster 1 bacterial family. Examples include a Cas9 molecule of: S. aureus, S. pyogenes (e.g., strain SF370, MGAS10270, MGAS10750, MGAS2096, MGAS315, MGAS5005, MGAS6180, MGAS9429, NZ131 and SSI-1), S. thermophilus (e.g., strain LIVID-9), S. pseudoporcinus (e.g., strain SPIN 20026), S. mutans (e.g., strain UA159, NN2025), S. macacae (e.g., strain NCTC11558), S. gallolyticus (e.g., strain UCN34, ATCC BAA-2069), S. equines (e.g., strain ATCC 9812, MGCS 124), S. dysdalactiae (e.g., strain GGS 124), S. bovis (e.g., strain ATCC 700338), S. anginosus (e.g., strain F0211), S. agalactiae (e.g., strain NEM316, A909), Listeria monocytogenes (e.g., strain F6854), Listeria innocua (L. innocua, e.g., strain Clip11262), Enterococcus italicus (e.g., strain DSM 15952), or Enterococcus faecium (e.g., strain 1,231,408).

[0698] Additional exemplary Cas9 molecules are a Cas9 molecule of Neisseria meningitides (Hou et al., PNAS Early Edition 2013, 1-6) and an S. aureus cas9 molecule.

[0699] In certain embodiments, a Cas9 molecule or Cas9 polypeptide comprises an amino acid sequence:

[0700] having about 60%, about 65%, about 70%, about 75%, about 80%, about 85%, about 90%, about 95%, about 96%, about 97%, about 98% or about 99% homology with;

[0701] differs at no more than, about 2%, about 5%, about 10%, about 15%, about 20%, about 30%, or about 40% of the amino acid residues when compared with;

[0702] differs by at least 1, 2, 5, 10 or 20 amino acids, but by no more than 100, 80, 70, 60, 50, 40 or 30 amino acids from; or

[0703] identical to any Cas9 molecule sequence described herein, or to a naturally occurring Cas9 molecule sequence, e.g., a Cas9 molecule from a species listed herein (e.g., SEQ ID NOs:1, 2, 4-6, or 12) or described in Chylinski 2013. In certain embodiments, the Cas9 molecule or Cas9 polypeptide comprises one or more of the following activities: a nickase activity; a double stranded cleavage activity (e.g., an endonuclease and/or exonuclease activity); a helicase activity; or the ability, together with a gRNA molecule, to localize to a target nucleic acid.

[0704] In certain embodiments, a Cas9 molecule or Cas9 polypeptide comprises any of the amino acid sequence of the consensus sequence of FIGS. 2A-2G, wherein “*” indicates any amino acid found in the corresponding position in the amino acid sequence of a Cas9 molecule of S. pyogenes, S. thermophilus, S. mutans, or L. innocua, and “-” indicates absent. In certain embodiments, a Cas9 molecule or Cas9 polypeptide differs from the sequence of the consensus sequence disclosed in FIGS. 2A-2G by at least 1, but no more than 2, 3, 4, 5, 6, 7, 8, 9, or 10 amino acid residues. In certain embodiments, a Cas9 molecule or Cas9 polypeptide comprises the amino acid sequence of SEQ ID NO:2. In other embodiments, a Cas9 molecule or Cas9 polypeptide differs from the sequence of SEQ ID NO:2 by at least 1, but no more than 2, 3, 4, 5, 6, 7, 8, 9, or 10 amino acid residues.

[0705] A comparison of the sequence of a number of Cas9 molecules indicate that certain regions are conserved. These are identified below as:

[0706] region 1 (residues 1 to 180, or in the case of region 1′ residues 120 to 180)

[0707] region 2 (residues 360 to 480);

[0708] region 3 (residues 660 to 720);

[0709] region 4 (residues 817 to 900); and

[0710] region 5 (residues 900 to 960).

[0711] In certain embodiments, a Cas9 molecule or Cas9 polypeptide comprises regions 1-5, together with sufficient additional Cas9 molecule sequence to provide a biologically active molecule, e.g., a Cas9 molecule having at least one activity described herein. In certain embodiments, each of regions 1-5, independently, have about 50%, about 60%, about 70%, about 80%, about 85%, about 90%, about 95%, about 96%, about 97%, about 98% or about 99% homology with the corresponding residues of a Cas9 molecule or Cas9 polypeptide described herein, e.g., a sequence from FIGS. 2A-2G.

[0712] In certain embodiments, a Cas9 molecule or Cas9 polypeptide comprises an amino acid sequence referred to as region 1:

[0713] having about 50%, about 60%, about 70%, about 80%, about 85%, about 90%, about 95%, about 96%, about 97%, about 98% or about 99% homology with amino acids 1-180 (the numbering is according to the motif sequence in FIG. 2; 52% of residues in the four Cas9 sequences in FIGS. 2A-2G are conserved) of the amino acid sequence of Cas9 of S. pyogenes;

[0714] differs by at least 1, 2, 5, 10 or 20 amino acids but by no more than 90, 80, 70, 60, 50, 40 or 30 amino acids from amino acids 1-180 of the amino acid sequence of Cas9 of S. pyogenes, S. thermophilus, S. mutans, or Listeria innocua; or

[0715] is identical to amino acids 1-180 of the amino acid sequence of Cas9 of S. pyogenes, S. thermophilus, S. mutans, or L. innocua.

[0716] In certain embodiments, a Cas9 molecule or Cas9 polypeptide comprises an amino acid sequence referred to as region 1′:

[0717] having about 55%, about 60%, about 65%, about 70%, about 75%, about 80%, about 85%, about 90%, about 95%, about 96%, about 97%, about 98% or about 99% homology with amino acids 120-180 (55% of residues in the four Cas9 sequences in FIG. 2 are conserved) of the amino acid sequence of Cas9 of S. pyogenes, S. thermophilus, S. mutans or L. innocua;

[0718] differs by at least 1, 2, or 5 amino acids but by no more than 35, 30, 25, 20 or 10 amino acids from amino acids 120-180 of the amino acid sequence of Cas9 of S. pyogenes, S. thermophilus, S. mutans, or L. innocua; or

[0719] is identical to amino acids 120-180 of the amino acid sequence of Cas9 of S. pyogenes, S. thermophilus, S. mutans, or L. innocua.

[0720] In certain embodiments, a Cas9 molecule or Cas9 polypeptide comprises an amino acid sequence referred to as region 2:

[0721] having about 50%, about 55%, about 60%, about 65%, about 70%, about 75%, about 80%, about 85%, about 90%, about 95%, about 96%, about 97%, about 98% or about 99% homology with amino acids 360-480 (52% of residues in the four Cas9 sequences in FIG. 2 are conserved) of the amino acid sequence of Cas9 of S. pyogenes, S. thermophilus, S. mutans, or L. innocua;

[0722] differs by at least 1, 2, or 5 amino acids but by no more than 35, 30, 25, 20 or 10 amino acids from amino acids 360-480 of the amino acid sequence of Cas9 of S. pyogenes, S. thermophilus, S. mutans, or L. innocua; or

[0723] is identical to amino acids 360-480 of the amino acid sequence of Cas9 of S. pyogenes, S. thermophilus, S. mutans, or L. innocua.

[0724] In certain embodiments, a Cas9 molecule or Cas9 polypeptide comprises an amino acid sequence referred to as region 3:

[0725] having about 55%, about 60%, about 65%, about 70%, about 75%, about 80%, about 85%, about 90%, about 95%, about 96%, about 97%, about 98%, or about 99% homology with amino acids 660-720 (56% of residues in the four Cas9 sequences in FIG. 2 are conserved) of the amino acid sequence of Cas9 of S. pyogenes, S. thermophilus, S. mutans or L. innocua;

[0726] differs by at least 1, 2, or 5 amino acids but by no more than 35, 30, 25, 20 or 10 amino acids from amino acids 660-720 of the amino acid sequence of Cas9 of S. pyogenes, S. thermophilus, S. mutans or L. innocua; or

[0727] is identical to amino acids 660-720 of the amino acid sequence of Cas9 of S. pyogenes, S. thermophilus, S. mutans or L. innocua.

[0728] In certain embodiments, a Cas9 molecule or Cas9 polypeptide comprises an amino acid sequence referred to as region 4:

[0729] having about 50%, about 55%, about 60%, about 65%, about 70%, about 75%, about 80%, about 85%, about 90%, about 95%, about 96%, about 97%, about 98%, or about 99% homology with amino acids 817-900 (55% of residues in the four Cas9 sequences in FIGS. 2A-2G are conserved) of the amino acid sequence of Cas9 of S. pyogenes, S. thermophilus, S. mutans, or L. innocua;

[0730] differs by at least 1, 2, or 5 amino acids but by no more than 35, 30, 25, 20 or 10 amino acids from amino acids 817-900 of the amino acid sequence of Cas9 of S. pyogenes, S. thermophilus, S. mutans, or L. innocua; or

[0731] is identical to amino acids 817-900 of the amino acid sequence of Cas9 of S. pyogenes, S. thermophilus, S. mutans, or L. innocua.

[0732] In certain embodiments, a Cas9 molecule or Cas9 polypeptide comprises an amino acid sequence referred to as region 5:

[0733] having about 50%, about 55%, about 60%, about 65%, about 70%, about 75%, about 80%, about 85%, about 90%, about 95%, about 96%, about 97%, about 98%, or about 99% homology with amino acids 900-960 (60% of residues in the four Cas9 sequences in FIGS. 2A-2G are conserved) of the amino acid sequence of Cas9 of S. pyogenes, S. thermophilus, S. mutans, or L. innocua;

[0734] differs by at least 1, 2, or 5 amino acids but by no more than 35, 30, 25, 20 or 10 amino acids from amino acids 900-960 of the amino acid sequence of Cas9 of S. pyogenes, S. thermophilus, S. mutans, or L. innocua; or is identical to amino acids 900-960 of the amino acid sequence of Cas9 of S. pyogenes, S. thermophilus, S. mutans, or L. innocua.

[0735] 7.4 Engineered or Altered Cas9

[0736] Cas9 molecules and Cas9 polypeptides described herein can possess any of a number of properties, including nuclease activity (e.g., endonuclease and/or exonuclease activity); helicase activity; the ability to associate functionally with a gRNA molecule; and the ability to target (or localize to) a site on a nucleic acid (e.g., PAM recognition and specificity). In certain embodiments, a Cas9 molecule or Cas9 polypeptide can include all or a subset of these properties. In certain embodiments, a Cas9 molecule or Cas9 polypeptide has the ability to interact with a gRNA molecule and, in concert with the gRNA molecule, localize to a site in a nucleic acid. Other activities, e.g., PAM specificity, cleavage activity, or helicase activity can vary more widely in Cas9 molecules and Cas9 polypeptides.

[0737] Cas9 molecules include engineered Cas9 molecules and engineered Cas9 polypeptides (engineered, as used in this context, means merely that the Cas9 molecule or Cas9 polypeptide differs from a reference sequences, and implies no process or origin limitation). An engineered Cas9 molecule or Cas9 polypeptide can comprise altered enzymatic properties, e.g., altered nuclease activity, (as compared with a naturally occurring or other reference Cas9 molecule) or altered helicase activity. As discussed herein, an engineered Cas9 molecule or Cas9 polypeptide can have nickase activity (as opposed to double strand nuclease activity). In certain embodiments, an engineered Cas9 molecule or Cas9 polypeptide can have an alteration that alters its size, e.g., a deletion of amino acid sequence that reduces its size, e.g., without significant effect on one or more, or any Cas9 activity. In certain embodiments, an engineered Cas9 molecule or Cas9 polypeptide can comprise an alteration that affects PAM recognition. In certain embodiments, an engineered Cas9 molecule is altered to recognize a PAM sequence other than that recognized by the endogenous wild-type PI domain. In certain embodiments, a Cas9 molecule or Cas9 polypeptide can differ in sequence from a naturally occurring Cas9 molecule but not have significant alteration in one or more Cas9 activities.

[0738] Cas9 molecules or Cas9 polypeptides with desired properties can be made in a number of ways, e.g., by alteration of a parental, e.g., naturally occurring, Cas9 molecules or Cas9 polypeptides, to provide an altered Cas9 molecule or Cas9 polypeptide having a desired property. For example, one or more mutations or differences relative to a parental Cas9 molecule, e.g., a naturally occurring or engineered Cas9 molecule, can be introduced. Such mutations and differences comprise: substitutions (e.g., conservative substitutions or substitutions of non-essential amino acids); insertions; or deletions. In certain embodiments, a Cas9 molecule or Cas9 polypeptide can comprises one or more mutations or differences, e.g., at least 1, 2, 3, 4, 5, 10, 15, 20, 30, 40 or 50 mutations but less than 200, 100, or 80 mutations relative to a reference, e.g., a parental, Cas9 molecule.

[0739] In certain embodiments, a mutation or mutations do not have a substantial effect on a Cas9 activity, e.g. a Cas9 activity described herein. In certain embodiments, a mutation or mutations have a substantial effect on a Cas9 activity, e.g. a Cas9 activity described herein.

[0740] 7.5 Modified-Cleavage Cas9

[0741] In certain embodiments, a Cas9 molecule or Cas9 polypeptide comprises a cleavage property that differs from naturally occurring Cas9 molecules, e.g., that differs from the naturally occurring Cas9 molecule having the closest homology. For example, a Cas9 molecule or Cas9 polypeptide can differ from naturally occurring Cas9 molecules, e.g., a Cas9 molecule of S. pyogenes, as follows: its ability to modulate, e.g., decreased or increased, cleavage of a double stranded nucleic acid (endonuclease and/or exonuclease activity), e.g., as compared to a naturally occurring Cas9 molecule (e.g., a Cas9 molecule of S. pyogenes); its ability to modulate, e.g., decreased or increased, cleavage of a single strand of a nucleic acid, e.g., a non-complementary strand of a nucleic acid molecule or a complementary strand of a nucleic acid molecule (nickase activity), e.g., as compared to a naturally occurring Cas9 molecule (e.g., a Cas9 molecule of S. pyogenes); or the ability to cleave a nucleic acid molecule, e.g., a double stranded or single stranded nucleic acid molecule, can be eliminated.

[0742] In certain embodiments, an eaCas9 molecule or eaCas9 polypeptide comprises one or more of the following activities: cleavage activity associated with an N-terminal RuvC-like domain; cleavage activity associated with an HNH-like domain; cleavage activity associated with an HNH-like domain and cleavage activity associated with an N-terminal RuvC-like domain.

[0743] In certain embodiments, an eaCas9 molecule or eaCas9 polypeptide comprises an active, or cleavage competent, HNH-like domain (e.g., an HNH-like domain described herein, e.g., SEQ ID NOs:24-28) and an inactive, or cleavage incompetent, N-terminal RuvC-like domain. An exemplary inactive, or cleavage incompetent N-terminal RuvC-like domain can have a mutation of an aspartic acid in an N-terminal RuvC-like domain, e.g., an aspartic acid at position 9 of the consensus sequence disclosed in FIGS. 2A-2G or an aspartic acid at position 10 of SEQ ID NO:2, e.g., can be substituted with an alanine. In certain embodiments, the eaCas9 molecule or eaCas9 polypeptide differs from wild-type in the N-terminal RuvC-like domain and does not cleave the target nucleic acid, or cleaves with significantly less efficiency, e.g., less than about 20%, about 10%, about 5%, about 1% or about 0.1% of the cleavage activity of a reference Cas9 molecule, e.g., as measured by an assay described herein. The reference Cas9 molecule can by a naturally occurring unmodified Cas9 molecule, e.g., a naturally occurring Cas9 molecule such as a Cas9 molecule of S. pyogenes, S. aureus, or S. thermophilus. In certain embodiments, the reference Cas9 molecule is the naturally occurring Cas9 molecule having the closest sequence identity or homology.

[0744] In certain embodiments, an eaCas9 molecule or eaCas9 polypeptide comprises an inactive, or cleavage incompetent, HNH domain and an active, or cleavage competent, N-terminal RuvC-like domain (e.g., a RuvC-like domain described herein, e.g., SEQ ID NOs:15-23). Exemplary inactive, or cleavage incompetent HNH-like domains can have a mutation at one or more of: a histidine in an HNH-like domain, e.g., a histidine shown at position 856 of the consensus sequence disclosed in FIGS. 2A-2G, e.g., can be substituted with an alanine; and one or more asparagines in an HNH-like domain, e.g., an asparagine shown at position 870 of the consensus sequence disclosed in FIGS. 2A-2G and/or at position 879 of the consensus sequence disclosed in FIGS. 2A-2G, e.g., can be substituted with an alanine. In certain embodiments, the eaCas9 differs from wild-type in the HNH-like domain and does not cleave the target nucleic acid, or cleaves with significantly less efficiency, e.g., less than about 20%, about 10%, about 5%, about 1% or about 0.1% of the cleavage activity of a reference Cas9 molecule, e.g., as measured by an assay described herein. The reference Cas9 molecule can by a naturally occurring unmodified Cas9 molecule, e.g., a naturally occurring Cas9 molecule such as a Cas9 molecule of S. pyogenes, S. aureus, or S. thermophilus. In certain embodiments, the reference Cas9 molecule is the naturally occurring Cas9 molecule having the closest sequence identity or homology.

[0745] In certain embodiments, exemplary Cas9 activities comprise one or more of PAM specificity, cleavage activity, and helicase activity. A mutation(s) can be present, e.g., in: one or more RuvC domains, e.g., an N-terminal RuvC domain; an HNH domain; a region outside the RuvC domains and the HNH domain. In certain embodiments, a mutation(s) is present in a RuvC domain. In certain embodiments, a mutation(s) is present in an HNH domain. In certain embodiments, mutations are present in both a RuvC domain and an HNH domain.

[0746] Exemplary mutations that may be made in the RuvC domain with reference to the S. pyogenes Cas9 sequence include: D10A, E762A, and/or D986A. Exemplary mutations that may be made in the HNH domain with reference to the S. pyogenes Cas9 sequence include: H840A, N854A, and/or N863A. Exemplary mutations that may be made in the RuvC domain with reference to the S. aureus Cas9 sequence include: D10A (see, e.g., SEQ ID NO:10). Exemplary mutations that may be made in the HNH domain with reference to the S. aureus Cas9 sequence include: N580A (see, e.g., SEQ ID NO:11).

[0747] Whether or not a particular sequence, e.g., a substitution, may affect one or more activity, such as targeting activity, cleavage activity, etc., can be evaluated or predicted, e.g., by evaluating whether the mutation is conservative. In certain embodiments, a “non-essential” amino acid residue, as used in the context of a Cas9 molecule, is a residue that can be altered from the wild-type sequence of a Cas9 molecule, e.g., a naturally occurring Cas9 molecule, e.g., an eaCas9 molecule, without abolishing or more preferably, without substantially altering a Cas9 activity (e.g., cleavage activity), whereas changing an “essential” amino acid residue results in a substantial loss of activity (e.g., cleavage activity).

[0748] In certain embodiments, a Cas9 molecule or Cas9 polypeptide comprises a cleavage property that differs from naturally occurring Cas9 molecules, e.g., that differs from the naturally occurring Cas9 molecule having the closest homology. For example, a Cas9 molecule can differ from naturally occurring Cas9 molecules, e.g., a Cas9 molecule of S. aureus or S. pyogenes, as follows: its ability to modulate, e.g., decreased or increased, cleavage of a double stranded break (endonuclease and/or exonuclease activity), e.g., as compared to a naturally occurring Cas9 molecule (e.g., a Cas9 molecule of S. aureus or S. pyogenes); its ability to modulate, e.g., decreased or increased, cleavage of a single strand of a nucleic acid, e.g., a non-complimentary strand of a nucleic acid molecule or a complementary strand of a nucleic acid molecule (nickase activity), e.g., as compared to a naturally occurring Cas9 molecule (e.g., a Cas9 molecule of S. aureus or S. pyogenes); or the ability to cleave a nucleic acid molecule, e.g., a double stranded or single stranded nucleic acid molecule, can be eliminated. In certain embodiments, the nickase is S. aureus Cas9-derived nickase comprising the sequence of SEQ ID NO:10 (D10A) or SEQ ID NO:11 (N580A) (Friedland 2015).

[0749] In certain embodiments, the altered Cas9 molecule is an eaCas9 molecule comprising one or more of the following activities: cleavage activity associated with a RuvC domain; cleavage activity associated with an HNH domain; cleavage activity associated with an HNH domain and cleavage activity associated with a RuvC domain.

[0750] In certain embodiments, the altered Cas9 molecule or Cas9 polypeptide comprises a sequence in which:

[0751] the sequence corresponding to the fixed sequence of the consensus sequence disclosed in FIGS. 2A-2G differs at no more than about 1%, about 2%, about 3%, about 4%, about 5%, about 10%, about 15%, or about 20% of the fixed residues in the consensus sequence disclosed in FIGS. 2A-2G; and

[0752] the sequence corresponding to the residues identified by “*” in the consensus sequence disclosed in FIGS. 2A-2G differs at no more than about 1%, about 2%, about 3%, about 4%, about 5%, about 10%, about 15%, about 20%, about 25%, about 30%, about 35%, or about 40% of the “*” residues from the corresponding sequence of naturally occurring Cas9 molecule, e.g., an S. pyogenes, S. thermophilus, S. mutans, or L. innocua Cas9 molecule.

[0753] In certain embodiments, the altered Cas9 molecule or Cas9 polypeptide is an eaCas9 molecule or eaCas9 polypeptide comprising the amino acid sequence of S. pyogenes Cas9 disclosed in FIGS. 2A-2G with one or more amino acids that differ from the sequence of S. pyogenes (e.g., substitutions) at one or more residues (e.g., 2, 3, 5, 10, 15, 20, 30, 50, 70, 80, 90, 100, or 200 amino acid residues) represented by an “*” in the consensus sequence disclosed in FIGS. 2A-2G.

[0754] In certain embodiments, the altered Cas9 molecule or Cas9 polypeptide is an eaCas9 molecule or eaCas9 polypeptide comprising the amino acid sequence of S. thermophilus Cas9 disclosed in FIGS. 2A-2G with one or more amino acids that differ from the sequence of S. thermophilus (e.g., substitutions) at one or more residues (e.g., 2, 3, 5, 10, 15, 20, 30, 50, 70, 80, 90, 100, or 200 amino acid residues) represented by an “*” in the consensus sequence disclosed in FIGS. 2A-2G.

[0755] In certain embodiments, the altered Cas9 molecule or Cas9 polypeptide is an eaCas9 molecule or eaCas9 polypeptide comprising the amino acid sequence of S. mutans Cas9 disclosed in FIGS. 2A-2G with one or more amino acids that differ from the sequence of S. mutans (e.g., substitutions) at one or more residues (e.g., 2, 3, 5, 10, 15, 20, 30, 50, 70, 80, 90, 100, or 200 amino acid residues) represented by an “*” in the consensus sequence disclosed in FIGS. 2A-2G.

[0756] In certain embodiments, the altered Cas9 molecule or Cas9 polypeptide is an eaCas9 molecule or eaCas9 polypeptide comprising the amino acid sequence of L. innocua Cas9 disclosed in FIGS. 2A-2G with one or more amino acids that differ from the sequence of L. innocua (e.g., substitutions) at one or more residues (e.g., 2, 3, 5, 10, 15, 20, 30, 50, 70, 80, 90, 100, or 200 amino acid residues) represented by an “*” in the consensus sequence disclosed in FIGS. 2A-2G.

[0757] In certain embodiments, the altered Cas9 molecule or Cas9 polypeptide, e.g., an eaCas9 molecule or eaCas9 polypeptide, can be a fusion, e.g., of two of more different Cas9 molecules, e.g., of two or more naturally occurring Cas9 molecules of different species. For example, a fragment of a naturally occurring Cas9 molecule of one species can be fused to a fragment of a Cas9 molecule of a second species. As an example, a fragment of a Cas9 molecule of S. pyogenes comprising an N-terminal RuvC-like domain can be fused to a fragment of Cas9 molecule of a species other than S. pyogenes (e.g., S. thermophilus) comprising an HNH-like domain.

[0758] 7.6 Cas9 with Altered or No PAM Recognition

[0759] Naturally occurring Cas9 molecules can recognize specific PAM sequences, for example the PAM recognition sequences described above for, e.g., S. pyogenes, S. thermophilus, S. mutans, and S. aureus.

[0760] In certain embodiments, a Cas9 molecule or Cas9 polypeptide has the same PAM specificities as a naturally occurring Cas9 molecule. In certain embodiments, a Cas9 molecule or Cas9 polypeptide has a PAM specificity not associated with a naturally occurring Cas9 molecule, or a PAM specificity not associated with the naturally occurring Cas9 molecule to which it has the closest sequence homology. For example, a naturally occurring Cas9 molecule can be altered, e.g., to alter PAM recognition, e.g., to alter the PAM sequence that the Cas9 molecule or Cas9 polypeptide recognizes in order to decrease off-target sites and/or improve specificity; or eliminate a PAM recognition requirement. In certain embodiments, a Cas9 molecule or Cas9 polypeptide can be altered, e.g., to increase length of PAM recognition sequence and/or improve Cas9 specificity to high level of identity (e.g., about 98%, about 99% or about 100% match between gRNA and a PAM sequence), e.g., to decrease off-target sites and/or increase specificity. In certain embodiments, the length of the PAM recognition sequence is at least 4, 5, 6, 7, 8, 9, 10 or 15 amino acids in length. In certain embodiments, the Cas9 specificity requires at least about 90%, about 95%, about 96%, about 97%, about 98%, or about 99% homology between the gRNA and the PAM sequence. Cas9 molecules or Cas9 polypeptides that recognize different PAM sequences and/or have reduced off-target activity can be generated using directed evolution. Exemplary methods and systems that can be used for directed evolution of Cas9 molecules are described (see, e.g., Esvelt 2011). Candidate Cas9 molecules can be evaluated, e.g., by methods described below.

[0761] 7.7 Size-Optimized Cas9

[0762] Engineered Cas9 molecules and engineered Cas9 polypeptides described herein include a Cas9 molecule or Cas9 polypeptide comprising a deletion that reduces the size of the molecule while still retaining desired Cas9 properties, e.g., essentially native conformation, Cas9 nuclease activity, and/or target nucleic acid molecule recognition. Provided herein are Cas9 molecules or Cas9 polypeptides comprising one or more deletions and optionally one or more linkers, wherein a linker is disposed between the amino acid residues that flank the deletion. Methods for identifying suitable deletions in a reference Cas9 molecule, methods for generating Cas9 molecules with a deletion and a linker, and methods for using such Cas9 molecules will be apparent to one of ordinary skill in the art upon review of this document.

[0763] A Cas9 molecule, e.g., an S. aureus or S. pyogenes Cas9 molecule, having a deletion is smaller, e.g., has reduced number of amino acids, than the corresponding naturally-occurring Cas9 molecule. The smaller size of the Cas9 molecules allows increased flexibility for delivery methods, and thereby increases utility for genome editing. A Cas9 molecule can comprise one or more deletions that do not substantially affect or decrease the activity of the resultant Cas9 molecules described herein. Activities that are retained in the Cas9 molecules comprising a deletion as described herein include one or more of the following:

[0764] a nickase activity, i.e., the ability to cleave a single strand, e.g., the non-complementary strand or the complementary strand, of a nucleic acid molecule; a double stranded nuclease activity, i.e., the ability to cleave both strands of a double stranded nucleic acid and create a double stranded break, which in certain embodiments is the presence of two nickase activities;

[0765] an endonuclease activity;

[0766] an exonuclease activity;

[0767] a helicase activity, i.e., the ability to unwind the helical structure of a double stranded nucleic acid;

[0768] and recognition activity of a nucleic acid molecule, e.g., a target nucleic acid or a gRNA.

[0769] Activity of the Cas9 molecules described herein can be assessed using the activity assays described herein or in the art.

[0770] 7.8 Identifying Regions Suitable for Deletion

[0771] Suitable regions of Cas9 molecules for deletion can be identified by a variety of methods. Naturally-occurring orthologous Cas9 molecules from various bacterial species can be modeled onto the crystal structure of S. pyogenes Cas9 (Nishimasu 2014) to examine the level of conservation across the selected Cas9 orthologs with respect to the three-dimensional conformation of the protein. Less conserved or unconserved regions that are spatially located distant from regions involved in Cas9 activity, e.g., interface with the target nucleic acid molecule and/or gRNA, represent regions or domains are candidates for deletion without substantially affecting or decreasing Cas9 activity.

[0772] 7.9 Nucleic Acids Encoding Cas9 Molecules

[0773] Nucleic acids encoding the Cas9 molecules or Cas9 polypeptides, e.g., an eaCas9 molecule or eaCas9 polypeptides are provided herein. Exemplary nucleic acids encoding Cas9 molecules or Cas9 polypeptides have been described previously (see, e.g., Cong 2013; Wang 2013; Mali 2013; Jinek 2012).

[0774] In certain embodiments, a nucleic acid encoding a Cas9 molecule or Cas9 polypeptide can be a synthetic nucleic acid sequence. For example, the synthetic nucleic acid molecule can be chemically modified, e.g., as described herein. In certain embodiments, the Cas9 mRNA has one or more (e.g., all of the following properties: it is capped, polyadenylated, substituted with 5-methylcytidine and/or pseudouridine.

[0775] Additionally or alternatively, the synthetic nucleic acid sequence can be codon optimized, e.g., at least one non-common codon or less-common codon has been replaced by a common codon. For example, the synthetic nucleic acid can direct the synthesis of an optimized messenger mRNA, e.g., optimized for expression in a mammalian expression system, e.g., described herein.

[0776] Additionally or alternatively, a nucleic acid encoding a Cas9 molecule or Cas9 polypeptide may comprise a nuclear localization sequence (NLS). Nuclear localization sequences are known in the art.

[0777] An exemplary codon optimized nucleic acid sequence encoding a Cas9 molecule of S. pyogenes is set forth in SEQ ID NO:3. The corresponding amino acid sequence of an S. pyogenes Cas9 molecule is set forth in SEQ ID NO:2. In certain embodiments, the S. pyogenes Cas9 molecule is an S. pyogenes Cas9 variant. In certain embodiments, the S. pyogenes Cas9 variant is a EQR variant that has a sequence set forth in SEQ ID NO: 208. In certain embodiments, the S. pyogenes Cas9 variant is a VRER variant that has a sequence set forth in SEQ ID NO: 209.

[0778] Exemplary codon optimized nucleic acid sequences encoding an S. aureus Cas9 molecule are set forth in SEQ ID NOs:7-9, 206 and 207. In certain embodiments, the Cas9 molecule is a mutant S. aureus Cas9 molecule comprising a D10A mutation. In certain embodiments, the mutant S. aureus Cas9 molecule comprising a D10A mutation has a sequence set forth in SEQ ID NO: 10. In certain embodiments, the Cas9 molecule is a mutant S. aureus Cas9 molecule comprising a N580 mutation. In certain embodiments, the mutant S. aureus Cas9 molecule comprising a N580 mutation has a sequence set forth in SEQ ID NO: 11. An amino acid sequence of an S. aureus Cas9 molecule is set forth in SEQ ID NO:6.

[0779] If any of the above Cas9 sequences are fused with a peptide or polypeptide at the C-terminus, it is understood that the stop codon can be removed.

[0780] 7.10 Other Cas Molecules and Cas Polypeptides

[0781] Various types of Cas molecules or Cas polypeptides can be used to practice the inventions disclosed herein. In certain embodiments, Cas molecules of Type II Cas systems are used. In certain embodiments, Cas molecules of other Cas systems are used. For example, Type I or Type III Cas molecules may be used. Exemplary Cas molecules (and Cas systems) have been described previously (see, e.g., Haft 2005 and Makarova 2011). Exemplary Cas molecules (and Cas systems) are also shown in Table 6.

TABLE 6
Cas Systems

| | | | Structure | Families | |
|---|---|---|---|---|---|
| | | | of encoded | (and | |
| | System | | protein | superfamily) | |
| Gene | type or | Name from | (PDB | of encoded | Represen- |
| name^{‡} | subtype | Haft 2005^{§} | accessions) ^{¶} | protein^{#}** | tatives |
| cas1 | Type I | cas1 | 3GOD, | COG1518 | SERP2463, |
| | Type II | | 3LFX and | | SPy1047 and |
| | Type III | | 2YZS | | ygbT |
| cas2 | Type I | cas2 | 2IVY, 2I8E | COG1343 | SERP2462, |
| | Type II | | and 3EXC | and | SPy1048, |
| | Type III | | | COG3512 | SPy1723 (N- |
| | | | | | terminal |
| | | | | | domain) and |
| | | | | | ygbF |
| cas3′ | Type I^{‡‡} | cas3 | NA | COG1203 | APE1232 |
| | | | | | and ygcB |
| cas3″ | Subtype | NA | NA | COG2254 | APE1231 |
| | I-A | | | | and BH0336 |
| | Subtype | | | | |
| | I-B | | | | |
| cas4 | Subtype | cas4 and | NA | COG1468 | APE1239 |
| | I-A | csa1 | | | and BH0340 |
| | Subtype | | | | |
| | I-B | | | | |
| | Subtype | | | | |
| | I-C | | | | |
| | Subtype | | | | |
| | I-D | | | | |
| | Subtype | | | | |
| | II-B | | | | |
| cas5 | Subtype | cas5a, | 3KG4 | COG1688 | APE1234, |
| | I-A | cas5d, | | (RAMP) | BH0337, |
| | Subtype | cas5e, | | | devS and |
| | I-B | cas5h, | | | ygcI |
| | Subtype | cas5p, | | | |
| | I-C | cas5t and | | | |
| | Subtype | cmx5 | | | |
| | I-E | | | | |
| cas6 | Subtype | cas6 and | 3I4H | COG1583 | PF1131 and |
| | I-A | cmx6 | | and | slr7014 |
| | Subtype | | | COG5551 | |
| | I-B | | | (RAMP) | |
| | Subtype | | | | |
| | I-D | | | | |
| | Subtype | | | | |
| | III-A | | | | |
| | Subtype | | | | |
| | III-B | | | | |
| cas6e | Subtype | cse3 | 1WJ9 | (RAMP) | ygcH |
| | I-E | | | | |
| cas6f | Subtype | csy4 | 2XLJ | (RAMP) | y1727 |
| | I-F | | | | |
| cas7 | Subtype | csa2, csd2, | NA | COG1857 | devR and |
| | I-A | cse4, csh2, | | and | ygcJ |
| | Subtype | csp1 and | | COG3649 | |
| | I-B | cst2 | | (RAMP) | |
| | Subtype | | | | |
| | I-C | | | | |
| | Subtype | | | | |
| | I-E | | | | |
| cas8a1 | Subtype | cmx1, cst1, | NA | BH0338-like | LA3191^{§§} |
| | I-A^{‡‡} | csx8, csx13 | | | and |
| | | and | | | PG2018^{§§} |
| | | CXXC- | | | |
| | | CXXC | | | |
| cas8a2 | Subtype | csa4 and | NA | PH0918 | AF0070, |
| | I-A^{‡‡} | csx9 | | | AF1873, |
| | | | | | MJ0385, |
| | | | | | PF0637, |
| | | | | | PH0918 and |
| | | | | | SSO1401 |
| cas8b | Subtype | csh1 and | NA | BH0338-like | MTH1090 |
| | I-B^{‡‡} | TM1802 | | | and TM1802 |
| cas8c | Subtype | csd1 and | NA | BH0338-like | BH0338 |
| | I-C^{‡‡} | csp2 | | | |
| cas9 | Type | csn1 and | NA | COG3513 | FTN_0757 |
| | II^{‡‡} | csx12 | | | and SPy1046 |
| cas10 | Type | cmr2, csm1 | NA | COG1353 | MTH326, |
| | III^{‡‡} | and csx11 | | | Rv2823c^{§§} |
| | | | | | and |
| | | | | | TM1794^{§§} |
| cas10d | Subtype | csc3 | NA | COG1353 | slr7011 |
| | I-D^{‡‡} | | | | |
| csy1 | Subtype | csy1 | NA | y1724-like | y1724 |
| | I-F^{‡‡} | | | | |
| csy2 | Subtype | csy2 | NA | (RAMP) | y1725 |
| | I-F | | | | |
| csy3 | Subtype | csy3 | NA | (RAMP) | y1726 |
| | I-F | | | | |
| cse1 | Subtype | cse1 | NA | YgcL-like | ygcL |
| | I-E^{‡‡} | | | | |
| cse2 | Subtype | cse2 | 2ZCA | YgcK-like | ygcK |
| | I-E | | | | |
| csc1 | Subtype | csc1 | NA | alr1563-like | alr1563 |
| | I-D | | | (RAMP) | |
| csc2 | Subtype | csc1 and | NA | COG1337 | slr7012 |
| | I-D | csc2 | | (RAMP) | |
| csa5 | Subtype | csa5 | NA | AF1870 | AF1870, |
| | I-A | | | | MJ0380, |
| | | | | | PF0643 and |
| | | | | | SSO1398 |
| csn2 | Subtype | csn2 | NA | SPy1049- | SPy1049 |
| | II-A | | | like | |
| csm2 | Subtype | csm2 | NA | COG1421 | MTH1081 |
| | III-A^{‡‡} | | | | and |
| | | | | | SERP2460 |
| csm3 | Subtype | csc2 and | NA | COG1337 | MTH1080 |
| | III-A | csm3 | | (RAMP) | and |
| | | | | | SERP2459 |
| csm4 | Subtype | csm4 | NA | COG1567 | MTH1079 |
| | III-A | | | (RAMP) | and |
| | | | | | SERP2458 |
| csm5 | Subtype | csm5 | NA | COG1332 | MTH1078 |
| | III-A | | | (RAMP) | and |
| | | | | | SERP2457 |
| csm6 | Subtype | APE2256 | 2WTE | COG1517 | APE2256 |
| | III-A | and csm6 | | | and SSO1445 |
| cmr1 | Subtype | cmr1 | NA | COG1367 | PF1130 |
| | III-B | | | (RAMP) | |
| cmr3 | Subtype | cmr3 | NA | COG1769 | PF1128 |
| | III-B | | | (RAMP) | |
| cmr4 | Subtype | cmr4 | NA | COG1336 | PF1126 |
| | III-B | | | (RAMP) | |
| cmr5 | Subtype | cmr5 | 2ZOP and | COG3337 | MTH324 and |
| | III-B^{‡‡} | | 2OEB | | PF1125 |
| cmr6 | Subtype | cmr6 | NA | COG1604 | PF1124 |
| | III-B | | | (RAMP) | |
| csb1 | Subtype | GSU0053 | NA | (RAMP) | Balac_1306 |
| | I-U | | | | and |
| | | | | | GSU0053 |
| csb2 | Subtype | NA | NA | (RAMP) | Balac_1305 |
| | I-U^{§§} | | | | and |
| | | | | | GSU0054 |
| csb3 | Subtype | NA | NA | (RAMP) | Balac_1303^{§§} |
| | I-U | | | | |
| csx17 | Subtype | NA | NA | NA | Btus_2683 |
| | I-U | | | | |
| csx14 | Subtype | NA | NA | NA | GSU0052 |
| | I-U | | | | |
| csx10 | Subtype | csx10 | NA | (RAMP) | Caur_2274 |
| | I-U | | | | |
| csx16 | Subtype | VVA1548 | NA | NA | VVA1548 |
| | III-U | | | | |
| csaX | Subtype | csaX | NA | NA | SSO1438 |
| | III-U | | | | |
| csx3 | Subtype | csx3 | NA | NA | AF1864 |
| | III-U | | | | |
| csx1 | Subtype | csa3, csx1, | 1XMX and | COG1517 | MJ1666, |
| | III-U | csx2, | 2171 | and | NE0113, |
| | | DXTHG, | | COG4006 | PF1127 and |
| | | NE0113 | | | TM1812 |
| | | and | | | |
| | | TIGR02710 | | | |
| csx15 | Unknown | NA | NA | TTE2665 | TTE2665 |
| csf1 | Type U | csfl | NA | NA | AFE_1038 |
| csf2 | Type U | csf2 | NA | (RAMP) | AFE_1039 |
| csf3 | Type U | csf3 | NA | (RAMP) | AFE_1040 |
| csf4 | Type U | csf4 | NA | NA | AFE_1037 |

### 8. Functional Analysis of Candidate Molecules

[0782] Candidate Cas9 molecules, candidate gRNA molecules, candidate Cas9 molecule/gRNA molecule complexes, can be evaluated by art-known methods or as described herein. For example, exemplary methods for evaluating the endonuclease activity of Cas9 molecule have been described previously (Jinek 2012).

[0783] 8.1 Binding and Cleavage Assay: Testing Cas9 Endonuclease Activity

[0784] The ability of a Cas9 molecule/gRNA molecule complex to bind to and cleave a target nucleic acid can be evaluated in a plasmid cleavage assay. In this assay, synthetic or in vitro-transcribed gRNA molecule is pre-annealed prior to the reaction by heating to 95° C. and slowly cooling down to room temperature. Native or restriction digest-linearized plasmid DNA (300 ng (˜8 nM)) is incubated for 60 min at 37° C. with purified Cas9 protein molecule (50-500 nM) and gRNA (50-500 nM, 1:1) in a Cas9 plasmid cleavage buffer (20 mM HEPES pH 7.5, 150 mM KCl, 0.5 mM DTT, 0.1 mM EDTA) with or without 10 mM MgCl₂. The reactions are stopped with 5×DNA loading buffer (30% glycerol, 1.2% SDS, 250 mM EDTA), resolved by a 0.8 or 1% agarose gel electrophoresis and visualized by ethidium bromide staining. The resulting cleavage products indicate whether the Cas9 molecule cleaves both DNA strands, or only one of the two strands. For example, linear DNA products indicate the cleavage of both DNA strands. Nicked open circular products indicate that only one of the two strands is cleaved.

[0785] Alternatively, the ability of a Cas9 molecule/gRNA molecule complex to bind to and cleave a target nucleic acid can be evaluated in an oligonucleotide DNA cleavage assay. In this assay, DNA oligonucleotides (10 pmol) are radiolabeled by incubating with 5 units T4 polynucleotide kinase and ˜3-6 pmol (˜20-40 mCi) [γ-32P]-ATP in 1× T4 polynucleotide kinase reaction buffer at 37° C. for 30 min, in a 50 μL reaction. After heat inactivation (65° C. for 20 min), reactions are purified through a column to remove unincorporated label. Duplex substrates (100 nM) are generated by annealing labeled oligonucleotides with equimolar amounts of unlabeled complementary oligonucleotide at 95° C. for 3 min, followed by slow cooling to room temperature. For cleavage assays, gRNA molecules are annealed by heating to 95° C. for 30 s, followed by slow cooling to room temperature. Cas9 (500 nM final concentration) is pre-incubated with the annealed gRNA molecules (500 nM) in cleavage assay buffer (20 mM HEPES pH 7.5, 100 mM KCl, 5 mM MgCl2, 1 mM DTT, 5% glycerol) in a total volume of 9 μL. Reactions are initiated by the addition of 1 μL target DNA (10 nM) and incubated for 1 h at 37° C. Reactions are quenched by the addition of 20 μL of loading dye (5 mM EDTA, 0.025% SDS, 5% glycerol in formamide) and heated to 95° C. for 5 min. Cleavage products are resolved on 12% denaturing polyacrylamide gels containing 7 M urea and visualized by phosphorimaging. The resulting cleavage products indicate that whether the complementary strand, the non-complementary strand, or both, are cleaved.

[0786] One or both of these assays can be used to evaluate the suitability of a candidate gRNA molecule or candidate Cas9 molecule.

[0787] 8.2 Binding Assay: Testing the Binding of Cas9 Molecule to Target DNA

[0788] Exemplary methods for evaluating the binding of Cas9 molecule to target DNA have been described previously, e.g., in Jinek et al., SCIENCE 2012; 337(6096):816-821.

[0789] For example, in an electrophoretic mobility shift assay, target DNA duplexes are formed by mixing of each strand (10 nmol) in deionized water, heating to 95° C. for 3 min and slow cooling to room temperature. All DNAs are purified on 8% native gels containing 1×TBE. DNA bands are visualized by UV shadowing, excised, and eluted by soaking gel pieces in DEPC-treated H₂O. Eluted DNA is ethanol precipitated and dissolved in DEPC-treated H₂O. DNA samples are 5′ end labeled with [γ-32P]-ATP using T4 polynucleotide kinase for 30 min at 37° C. Polynucleotide kinase is heat denatured at 65° C. for 20 min, and unincorporated radiolabel is removed using a column. Binding assays are performed in buffer containing 20 mM HEPES pH 7.5, 100 mM KCl, 5 mM MgCl₂, 1 mM DTT and 10% glycerol in a total volume of 10 μL. Cas9 protein molecule is programmed with equimolar amounts of pre-annealed gRNA molecule and titrated from 100 pM to 1 μM. Radiolabeled DNA is added to a final concentration of 20 pM. Samples are incubated for 1 h at 37° C. and resolved at 4° C. on an 8% native polyacrylamide gel containing 1×TBE and 5 mM MgCl₂. Gels are dried and DNA visualized by phosphorimaging.

[0790] 8.3 Differential Scanning Flourimetry (DSF)

[0791] The thermostability of Cas9-gRNA ribonucleoprotein (RNP) complexes can be measured via DSF. This technique measures the thermostability of a protein, which can increase under favorable conditions such as the addition of a binding RNA molecule, e.g., a gRNA.

[0792] The assay is performed using two different protocols, one to test the best stoichiometric ratio of gRNA:Cas9 protein and another to determine the best solution conditions for RNP formation.

[0793] To determine the best solution to form RNP complexes, a 2 uM solution of Cas9 in water+10× SYPRO Orange® (Life Technologies cat#S-6650) and dispensed into a 384 well plate. An equimolar amount of gRNA diluted in solutions with varied pH and salt is then added. After incubating at room temperature for 10′ and brief centrifugation to remove any bubbles, a Bio-Rad CFX384™ Real-Time System C1000 Touch™ Thermal Cycler with the Bio-Rad CFX Manager software is used to run a gradient from 20° C. to 90° C. with a 1° C. increase in temperature every 10 seconds.

[0794] The second assay consists of mixing various concentrations of gRNA with 2 uM Cas9 in optimal buffer from assay 1 above and incubating at RT for 10′ in a 384 well plate. An equal volume of optimal buffer+10× SYPRO Orange® (Life Technologies cat#S-6650) is added and the plate sealed with Microseal® B adhesive (MSB-1001). Following brief centrifugation to remove any bubbles, a Bio-Rad CFX384™ Real-Time System C1000 Touch™ Thermal Cycler with the Bio-Rad CFX Manager software is used to run a gradient from 20° C. to 90° C. with a 1° increase in temperature every 10 seconds.

### 9. Genome Editing Approaches

[0795] Described herein are methods for targeted knockout of one or more copies (e.g., 1, 2, 3, 4, 5, 6, 7, 8, 9, 10 or more copies) of one or more genes in the HBV genome (e.g., PreC gene, C gene, X gene, PreS1 gene, PreS2 gene, S gene, P gene and/or SP gene), e.g., using one or more of the approaches or pathways described herein, e.g., using NHEJ.

[0796] 9.1 NHEJ Approaches for Gene Targeting

[0797] In certain embodiments of the methods provided herein, NHEJ-mediated alteration is used to target gene-specific knockouts. As described herein, nuclease-induced non-homologous end-joining (NHEJ) can be used to target gene-specific knockouts. Nuclease-induced NHEJ can also be used to remove (e.g., delete) (e.g., coding sequence, non-coding sequence, or sequence insertions) in a gene of interest.

[0798] In certain embodiments, the genomic alterations associated with the methods described herein rely on nuclease-induced NHEJ and the error-prone nature of the NHEJ repair pathway. NHEJ repairs a double-strand break in the DNA by joining together the two ends; however, generally, the original sequence is restored only if two compatible ends, exactly as they were formed by the double-strand break, are perfectly ligated. The DNA ends of the double-strand break are frequently the subject of enzymatic processing, resulting in the addition or removal of nucleotides, at one or both strands, prior to rejoining of the ends. This results in the presence of insertion and/or deletion (indel) mutations in the DNA sequence at the site of the NHEJ repair. Two-thirds of these mutations typically alter the reading frame and, therefore, produce a non-functional protein. Additionally, mutations that maintain the reading frame, but which insert or delete a significant amount of sequence, can destroy functionality of the protein. This is locus dependent as mutations in critical functional domains are likely less tolerable than mutations in non-critical regions of the protein. The indel mutations generated by NHEJ are unpredictable in nature; however, at a given break site certain indel sequences are favored and are over represented in the population, likely due to small regions of microhomology. The lengths of deletions can vary widely; they are most commonly in the 1-50 bp range, but can reach greater than 100-200 bp. Insertions tend to be shorter and often include short duplications of the sequence immediately surrounding the break site. However, it is possible to obtain large insertions, and in these cases, the inserted sequence has often been traced to other regions of the genome or to plasmid DNA present in the cells.

[0799] Because NHEJ is a mutagenic process, it can also be used to delete small sequence motifs (e.g., motifs less than or equal to 50 nucleotides in length) as long as the generation of a specific final sequence is not required. If a double-strand break is targeted near to a target sequence, the deletion mutations caused by the NHEJ repair often span, and therefore remove, the unwanted nucleotides. For the deletion of larger DNA segments, introducing two double-strand breaks, one on each side of the sequence, can result in NHEJ between the ends with removal of the entire intervening sequence. In this way, DNA segments as large as several hundred kilobases can be deleted. Both of these approaches can be used to delete specific DNA sequences; however, the error-prone nature of NHEJ may still produce indel mutations at the site of repair.

[0800] Both double strand cleaving eaCas9 molecules and single strand, or nickase, eaCas9 molecules can be used in the methods and compositions described herein to generate NHEJ-mediated indels. NHEJ-mediated indels targeted to the gene, e.g., a coding region, e.g., an early coding region of a gene of interest can be used to knockout (i.e., eliminate expression of) a gene of interest. For example, early coding region of a gene of interest includes sequence immediately following a transcription start site, within a first exon of the coding sequence, or within 500 bp of the transcription start site (e.g., less than 500, 450, 400, 350, 300, 250, 200, 150, 100 or 50 bp).

[0801] 9.1.1 Placement of Double Strand or Single Strand Breaks Relative to the Target Position

[0802] In certain embodiments, in which a gRNA and Cas9 nuclease generate a double strand break for the purpose of inducing NHEJ-mediated indels, a gRNA, e.g., a unimolecular (or chimeric) or modular gRNA molecule, is configured to position one double-strand break in close proximity to a nucleotide of the target position, e.g, an HBV target position. In certain embodiments, the cleavage site is between 0-30 bp away from the target position (e.g., less than 30, 25, 20, 15, 10, 9, 8, 7, 6, 5, 4, 3, 2 or 1 bp from the target position).

[0803] In certain embodiments, in which two gRNAs complexing with Cas9 nickases induce two single strand breaks for the purpose of inducing NHEJ-mediated indels, two gRNAs, e.g., independently, unimolecular (or chimeric) or modular gRNA, are configured to position two single-strand breaks to provide for NHEJ repair a nucleotide of the target position. In certain embodiments, the gRNAs are configured to position cuts at the same position, or within a few nucleotides of one another, on different strands, essentially mimicking a double strand break. In certain embodiments, the closer nick is between 0-30 bp away from the target position (e.g., less than 30, 25, 20, 15, 10, 9, 8, 7, 6, 5, 4, 3, 2 or 1 bp from the target position), and the two nicks are within 25-55 bp of each other (e.g., between 25 to 50, 25 to 45, 25 to 40, 25 to 35, 25 to 30, 50 to 55, 45 to 55, 40 to 55, 35 to 55, 30 to 55, 30 to 50, 35 to 50, 40 to 50, 45 to 50, 35 to 45, or 40 to 45 bp) and no more than 100 bp away from each other (e.g., no more than 90, 80, 70, 60, 50, 40, 30, 20 or 10 bp). In certain embodiments, the gRNAs are configured to place a single strand break on either side of a nucleotide of the target position.

[0804] Both double strand cleaving eaCas9 molecules and single strand, or nickase, eaCas9 molecules can be used in the methods and compositions described herein to generate breaks both sides of a target position. Double strand or paired single strand breaks may be generated on both sides of a target position to remove the nucleic acid sequence between the two cuts (e.g., the region between the two breaks in deleted). In certain embodiments, two gRNAs, e.g., independently, unimolecular (or chimeric) or modular gRNA, are configured to position a double-strand break on both sides of a target position. In an alternate embodiment, three gRNAs, e.g., independently, unimolecular (or chimeric) or modular gRNA, are configured to position a double strand break (i.e., one gRNA complexes with a cas9 nuclease) and two single strand breaks or paired single stranded breaks (i.e., two gRNAs complex with Cas9 nickases) on either side of the target position. In certain embodiments, four gRNAs, e.g., independently, unimolecular (or chimeric) or modular gRNA, are configured to generate two pairs of single stranded breaks (i.e., two pairs of two gRNAs complex with Cas9 nickases) on either side of the target position. The double strand break(s) or the closer of the two single strand nicks in a pair can ideally be within 0-500 bp of the target position (e.g., no more than 450, 400, 350, 300, 250, 200, 150, 100, 50 or 25 bp from the target position). When nickases are used, the two nicks in a pair are within 25-55 bp of each other (e.g., between 25 to 50, 25 to 45, 25 to 40, 25 to 35, 25 to 30, 50 to 55, 45 to 55, 40 to 55, 35 to 55, 30 to 55, 30 to 50, 35 to 50, 40 to 50, 45 to 50, 35 to 45, or 40 to 45 bp) and no more than 100 bp away from each other (e.g., no more than 90, 80, 70, 60, 50, 40, 30, 20, or 10 bp).

[0805] 9.2 HDR Repair, HDR-Mediated Knock-in, and Template Nucleic Acids

[0806] In certain embodiments of the methods provided herein, HDR-mediated sequence alteration is used to alter the sequence of one or more nucleotides in a HBV viral gene using an exogenously provided template nucleic acid (also referred to herein as a donor construct). In certain embodiments, HDR-mediated alteration of a HBV target position occurs by HDR with an exogenously provided donor template or template nucleic acid. For example, the donor construct or template nucleic acid provides for alteration of a HBV target position. In certain embodiments, a plasmid donor is used as a template for homologous recombination. In certain embodiments, a single stranded donor template is used as a template for alteration of the HBV target position by alternate methods of HDR (e.g., single strand annealing) between the target sequence and the donor template. Donor template-effected alteration of a HBV target position depends on cleavage by a Cas9 molecule. Cleavage by Cas9 can comprise a double strand break or two single strand breaks.

[0807] In certain embodiments, HDR-mediated sequence alteration is used to alter the sequence of one or more nucleotides in a HBV viral gene without using an exogenously provided template nucleic acid. In certain embodiments, alteration of a HBV target position occurs by HDR with endogenous genomic donor sequence. For example, the endogenous genomic donor sequence provides for alteration of the HBV target position. In certain embodiments, the endogenous genomic donor sequence is located on the same chromosome as the target sequence. In certain embodiments, the endogenous genomic donor sequence is located on a different chromosome from the target sequence. Alteration of a HBV target position by endogenous genomic donor sequence depends on cleavage by a Cas9 molecule. Cleavage by Cas9 can comprise a double strand break or two single strand breaks.

[0808] In certain embodiments of the methods provided herein, HDR-mediated alteration is used to alter a single nucleotide in a HBV viral gene. These embodiments may utilize either one double-strand break or two single-strand breaks. In certain embodiments, a single nucleotide alteration is incorporated using (1) one double-strand break, (2) two single-strand breaks, (3) two double-strand breaks with a break occurring on each side of the target position, (4) one double-strand break and two single strand breaks with the double strand break and two single strand breaks occurring on each side of the target position, (5) four single-strand breaks with a pair of single-strand breaks occurring on each side of the target position, or (6) one single-strand break.

[0809] Donor template-effected alteration of a HBV target position depends on cleavage by a Cas9 molecule. Cleavage by Cas9 can comprise a nick, a double-strand break, or two single-strand breaks, e.g., one on each strand of the target nucleic acid. After introduction of the breaks on the target nucleic acid, resection occurs at the break ends resulting in single stranded overhanging DNA regions.

[0810] In canonical HDR, a double-stranded donor template is introduced, comprising homologous sequence to the target nucleic acid that can either be directly incorporated into the target nucleic acid or used as a template to change the sequence of the target nucleic acid. After resection at the break, repair can progress by different pathways, e.g., by the double Holliday junction model (or double-strand break repair, DSBR, pathway) or the synthesis-dependent strand annealing (SDSA) pathway. In the double Holliday junction model, strand invasion by the two single stranded overhangs of the target nucleic acid to the homologous sequences in the donor template occurs, resulting in the formation of an intermediate with two Holliday junctions. The junctions migrate as new DNA is synthesized from the ends of the invading strand to fill the gap resulting from the resection. The end of the newly synthesized DNA is ligated to the resected end, and the junctions are resolved, resulting in alteration of the target nucleic acid. Crossover with the donor template may occur upon resolution of the junctions. In the SDSA pathway, only one single stranded overhang invades the donor template and new DNA is synthesized from the end of the invading strand to fill the gap resulting from resection. The newly synthesized DNA then anneals to the remaining single stranded overhang, new DNA is synthesized to fill in the gap, and the strands are ligated to produce the altered DNA duplex.

[0811] In alternative HDR, a single strand donor template, e.g., template nucleic acid, is introduced. A nick, single strand break, or double strand break at the target nucleic acid, for altering a desired target position, is mediated by a Cas9 molecule, e.g., described herein, and resection at the break occurs to reveal single stranded overhangs. Incorporation of the sequence of the template nucleic acid to alter a HBV target position typically occurs by the SDSA pathway, as described above.

[0812] Additional details on template nucleic acids are provided in Section IV entitled “Template nucleic acids” in International Application PCT/US2014/057905.

[0813] In certain embodiments, double strand cleavage is effected by a Cas9 molecule having cleavage activity associated with an HNH-like domain and cleavage activity associated with a RuvC-like domain, e.g., an N-terminal RuvC-like domain, e.g., a wild-type Cas9. Such embodiments require only a single gRNA.

[0814] In certain embodiments, one single-strand break, or nick, is effected by a Cas9 molecule having nickase activity, e.g., a Cas9 nickase as described herein (such as a D10A Cas9 nickase). A nicked target nucleic acid can be a substrate for alt-HDR.

[0815] In certain embodiments, two single-strand breaks, or nicks, are effected by a Cas9 molecule having nickase activity, e.g., cleavage activity associated with an HNH-like domain or cleavage activity associated with an N-terminal RuvC-like domain. Such embodiments usually require two gRNAs, one for placement of each single-strand break. In certain embodiments, the Cas9 molecule having nickase activity cleaves the strand to which the gRNA hybridizes, but not the strand that is complementary to the strand to which the gRNA hybridizes. In certain embodiments, the Cas9 molecule having nickase activity does not cleave the strand to which the gRNA hybridizes, but rather cleaves the strand that is complementary to the strand to which the gRNA hybridizes.

[0816] In certain embodiments, the nickase has HNH activity, e.g., a Cas9 molecule having the RuvC activity inactivated, e.g., a Cas9 molecule having a mutation at D10, e.g., the D10A mutation (see, e.g., SEQ ID NO:10). D10A inactivates RuvC; therefore, the Cas9 nickase has (only) HNH activity and can cut on the strand to which the gRNA hybridizes (e.g., the complementary strand, which does not have the NGG PAM on it). In certain embodiments, a Cas9 molecule having an H840, e.g., an H840A, mutation can be used as a nickase. H840A inactivates HNH; therefore, the Cas9 nickase has (only) RuvC activity and cuts on the non-complementary strand (e.g., the strand that has the NGG PAM and whose sequence is identical to the gRNA). In certain embodiments, a Cas9 molecule having an N863 mutation, e.g., the N863A mutation, mutation can be used as a nickase. N863A inactivates HNH therefore the Cas9 nickase has (only) RuvC activity and cuts on the non-complementary strand (the strand that has the NGG PAM and whose sequence is identical to the gRNA). In certain embodiments, a Cas9 molecule having an N580 mutation, e.g., the N580A mutation, mutation can be used as a nickase. N580A inactivates HNH therefore the Cas9 nickase has (only) RuvC activity and cuts on the non-complementary strand (the strand that has the NGG PAM and whose sequence is identical to the gRNA).

[0817] In certain embodiments, in which a nickase and two gRNAs are used to position two single strand nicks, one nick is on the + strand and one nick is on the − strand of the target nucleic acid. The PAMs can be outwardly facing. The gRNAs can be selected such that the gRNAs are separated by, from about 0-50, 0-100, or 0-200 nucleotides. In certain embodiments, there is no overlap between the target sequences that are complementary to the targeting domains of the two gRNAs. In certain embodiments, the gRNAs do not overlap and are separated by as much as 50, 100, or 200 nucleotides. In certain embodiments, the use of two gRNAs can increase specificity, e.g., by decreasing off-target binding (Ran 2013).

[0818] In certain embodiments, a single nick can be used to induce HDR, e.g., alt-HDR. In certain embodiments, a single nick can be used to increase the ratio of HR to NHEJ at a given cleavage site. In certain embodiments, a single strand break is formed in the strand of the target nucleic acid to which the targeting domain of said gRNA is complementary. In certain embodiments, a single strand break is formed in the strand of the target nucleic acid other than the strand to which the targeting domain of said gRNA is complementary.

[0819] 9.2.1 Placement of Double Strand or Single Strand Breaks Relative to the Target Position

[0820] A double strand break or single strand break in one of the strands should be sufficiently close to a HBV target position that an alteration is produced in the desired region. In certain embodiments, the distance is not more than 50, 100, 200, 300, 350 or 400 nucleotides. In certain embodiments, the break should be sufficiently close to target position such that the target position is within the region that is subject to exonuclease-mediated removal during end resection. If the distance between the HBV target position and a break is too great, the sequence desired to be altered may not be included in the end resection and, therefore, may not be altered, as donor sequence, either exogenously provided donor sequence or endogenous genomic donor sequence, in certain embodiments is only used to alter sequence within the end resection region.

[0821] In certain embodiments, the methods described herein introduce one or more breaks near a HBV target position. In certain of these embodiments, two or more breaks are introduced that flank a HBV target position. The two or more breaks remove (e.g., delete) a genomic sequence including a HBV target position. All methods described herein result in altering a HBV target position within a HBV viral gene.

[0822] In certain embodiments, the gRNA targeting domain is configured such that a cleavage event, e.g., a double strand or single strand break, is positioned within 1, 2, 3, 4, 5, 10, 15, 20, 25, 30, 35, 40, 45, 50, 60, 70, 80, 90, 100, 150, or 200 nucleotides of the region desired to be altered, e.g., a mutation. The break, e.g., a double strand or single strand break, can be positioned upstream or downstream of the region desired to be altered, e.g., a mutation. In certain embodiments, a break is positioned within the region desired to be altered, e.g., within a region defined by at least two mutant nucleotides. In certain embodiments, a break is positioned immediately adjacent to the region desired to be altered, e.g., immediately upstream or downstream of a mutation.

[0823] In certain embodiments, a single strand break is accompanied by an additional single strand break, positioned by a second gRNA molecule, as discussed below. For example, the targeting domains bind configured such that a cleavage event, e.g., the two single strand breaks, are positioned within 1, 2, 3, 4, 5, 10, 15, 20, 25, 30, 35, 40, 45, 50, 60, 70, 80, 90, 100, 150, or 200 nucleotides of a target position. In certain embodiments, the first and second gRNA molecules are configured such that, when guiding a Cas9 nickase, a single strand break can be accompanied by an additional single strand break, positioned by a second gRNA, sufficiently close to one another to result in alteration of the desired region. In certain embodiments, the first and second gRNA molecules are configured such that a single strand break positioned by said second gRNA is within 10, 20, 30, 40, or 50 nucleotides of the break positioned by said first gRNA molecule, e.g., when the Cas9 is a nickase. In certain embodiments, the two gRNA molecules are configured to position cuts at the same position, or within a few nucleotides of one another, on different strands, e.g., essentially mimicking a double strand break.

[0824] In certain embodiments in which a gRNA (unimolecular (or chimeric) or modular gRNA) and Cas9 nuclease induce a double strand break for the purpose of inducing HDR-mediated sequence alteration, the cleavage site is between 0-200 bp (e.g., 0 to 175, 0 to 150, 0 to 125, 0 to 100, 0 to 75, 0 to 50, 0 to 25, 25 to 200, 25 to 175, 25 to 150, 25 to 125, 25 to 100, 25 to 75, 25 to 50, 50 to 200, 50 to 175, 50 to 150, 50 to 125, 50 to 100, 50 to 75, 75 to 200, 75 to 175, 75 to 150, 75 to 125, 75 to 100 bp) away from the target position. In certain embodiments, the cleavage site is between 0-100 bp (e.g., 0 to 75, 0 to 50, 0 to 25, 25 to 100, 25 to 75, 25 to 50, 50 to 100, 50 to 75 or 75 to 100 bp) away from the target position.

[0825] In certain embodiments, one can promote HDR by using nickases to generate a break with overhangs. While not wishing to be bound by theory, the single stranded nature of the overhangs can enhance the cell's likelihood of repairing the break by HDR as opposed to, e.g., NHEJ. Specifically, in certain embodiments, HDR is promoted by selecting a first gRNA that targets a first nickase to a first target sequence, and a second gRNA that targets a second nickase to a second target sequence which is on the opposite DNA strand from the first target sequence and offset from the first nick.

[0826] In certain embodiments, the targeting domain of a gRNA molecule is configured to position a cleavage event sufficiently far from a preselected nucleotide that the nucleotide is not altered. In certain embodiments, the targeting domain of a gRNA molecule is configured to position an intronic cleavage event sufficiently far from an intron/exon border, or naturally occurring splice signal, to avoid alteration of the exonic sequence or unwanted splicing events. The gRNA molecule may be a first, second, third and/or fourth gRNA molecule, as described herein.

[0827] 9.3.2. Placement of a First Break and a Second Break Relative to Each Other

[0828] In certain embodiments, a double strand break can be accompanied by an additional double strand break, positioned by a second gRNA molecule, as is discussed below.

[0829] In certain embodiments, a double strand break can be accompanied by two additional single strand breaks, positioned by a second gRNA molecule and a third gRNA molecule.

[0830] In certain embodiments, a first and second single strand breaks can be accompanied by two additional single strand breaks positioned by a third gRNA molecule and a fourth gRNA molecule.

[0831] When two or more gRNAs are used to position two or more cleavage events, e.g., double strand or single strand breaks, in a target nucleic acid, the two or more cleavage events may be made by the same or different Cas9 proteins. For example, when two gRNAs are used to position two double stranded breaks, a single Cas9 nuclease may be used to create both double stranded breaks. When two or more gRNAs are used to position two or more single stranded breaks (nicks), a single Cas9 nickase may be used to create the two or more nicks. When two or more gRNAs are used to position at least one double stranded break and at least one single stranded break, two Cas9 proteins may be used, e.g., one Cas9 nuclease and one Cas9 nickase. In certain embodiments, two or more Cas9 proteins are used, and the two or more Cas9 proteins may be delivered sequentially to control specificity of a double stranded versus a single stranded break at the desired position in the target nucleic acid.

[0832] In certain embodiments, the targeting domain of the first gRNA molecule and the targeting domain of the second gRNA molecules are complementary to opposite strands of the target nucleic acid molecule. In certain embodiments, the gRNA molecule and the second gRNA molecule are configured such that the PAMs are oriented outward.

[0833] In certain embodiments, two gRNA are selected to direct Cas9-mediated cleavage at two positions that are a preselected distance from each other. In certain embodiments, the two points of cleavage are on opposite strands of the target nucleic acid. In certain embodiments, the two cleavage points form a blunt ended break, and in other embodiments, they are offset so that the DNA ends comprise one or two overhangs (e.g., one or more 5′ overhangs and/or one or more 3′ overhangs). In certain embodiments, each cleavage event is a nick. In certain embodiments, the nicks are close enough together that they form a break that is recognized by the double stranded break machinery (as opposed to being recognized by, e.g., the SSBr machinery). In certain embodiments, the nicks are far enough apart that they create an overhang that is a substrate for HDR, i.e., the placement of the breaks mimics a DNA substrate that has experienced some resection. For instance, in certain embodiments the nicks are spaced to create an overhang that is a substrate for processive resection. In certain embodiments, the two breaks are spaced within 25-65 nucleotides of each other. The two breaks may be, e.g., about 25, 30, 35, 40, 45, 50, 55, 60, or 65 nucleotides of each other. The two breaks may be, e.g., at least about 25, 30, 35, 40, 45, 50, 55, 60, or 65 nucleotides of each other. The two breaks may be, e.g., at most about 30, 35, 40, 45, 50, 55, 60, or 65 nucleotides of each other. In certain embodiments, the two breaks are about 25-30, 30-35, 35-40, 40-45, 45-50, 50-55, 55-60, or 60-65 nucleotides of each other.

[0834] In certain embodiments, the break that mimics a resected break comprises a 3′ overhang (e.g., generated by a DSB and a nick, where the nick leaves a 3′ overhang), a 5′ overhang (e.g., generated by a DSB and a nick, where the nick leaves a 5′ overhang), a 3′ and a 5′ overhang (e.g., generated by three cuts), two 3′ overhangs (e.g., generated by two nicks that are offset from each other), or two 5′ overhangs (e.g., generated by two nicks that are offset from each other).

[0835] In certain embodiments in which two gRNAs (independently, unimolecular (or chimeric) or modular gRNA) complexing with Cas9 nickases induce two single strand breaks for the purpose of inducing HDR-mediated alteration, the closer nick is between 0-200 bp (e.g., 0 to 175, 0 to 150, 0 to 125, 0 to 100, 0 to 75, 0 to 50, 0 to 25, 25 to 200, 25 to 175, 25 to 150, 25 to 125, 25 to 100, 25 to 75, 25 to 50, 50 to 200, 50 to 175, 50 to 150, 50 to 125, 50 to 100, 50 to 75, 75 to 200, 75 to 175, 75 to 150, 75 to 125, or 75 to 100 bp) away from the target position and the two nicks can ideally be within 25-65 bp of each other (e.g., 25 to 50, 25 to 45, 25 to 40, 25 to 35, 25 to 30, 30 to 55, 30 to 50, 30 to 45, 30 to 40, 30 to 35, 35 to 55, 35 to 50, 35 to 45, 35 to 40, 40 to 55, 40 to 50, 40 to 45 bp, 45 to 50 bp, 50 to 55 bp, 55 to 60 bp, or 60 to 65 bp) and no more than 100 bp away from each other (e.g., no more than 90, 80, 70, 60, 50, 40, 30, 20, 10, or 5 bp away from each other). In certain embodiments, the cleavage site is between 0-100 bp (e.g., 0 to 75, 0 to 50, 0 to 25, 25 to 100, 25 to 75, 25 to 50, 50 to 100, 50 to 75, or 75 to 100 bp) away from the target position.

[0836] In certain embodiments, two gRNAs, e.g., independently, unimolecular (or chimeric) or modular gRNA, are configured to position a double-strand break on both sides of a target position. In certain embodiments, three gRNAs, e.g., independently, unimolecular (or chimeric) or modular gRNA, are configured to position a double strand break (i.e., one gRNA complexes with a cas9 nuclease) and two single strand breaks or paired single stranded breaks (i.e., two gRNAs complex with Cas9 nickases) on either side of the target position. In certain embodiments, four gRNAs, e.g., independently, unimolecular (or chimeric) or modular gRNA, are configured to generate two pairs of single stranded breaks (i.e., two pairs of two gRNAs complex with Cas9 nickases) on either side of the target position. The double strand break(s) or the closer of the two single strand nicks in a pair can ideally be within 0-500 bp of the target position (e.g., no more than 450, 400, 350, 300, 250, 200, 150, 100, 50 or 25 bp from the target position). When nickases are used, the two nicks in a pair are, in certain embodiments, within 25-65 bp of each other (e.g., between 25 to 55, 25 to 50, 25 to 45, 25 to 40, 25 to 35, 25 to 30, 50 to 55, 45 to 55, 40 to 55, 35 to 55, 30 to 55, 30 to 50, 35 to 50, 40 to 50, 45 to 50, 35 to 45, 40 to 45 bp, 45 to 50 bp, 50 to 55 bp, 55 to 60 bp, or 60 to 65 bp) and no more than 100 bp away from each other (e.g., no more than 90, 80, 70, 60, 50, 40, 30, or 20 or 10 bp).

[0837] When two gRNAs are used to target Cas9 molecules to breaks, different combinations of Cas9 molecules are envisioned. In certain embodiments, a first gRNA is used to target a first Cas9 molecule to a first target position, and a second gRNA is used to target a second Cas9 molecule to a second target position. In certain embodiments, the first Cas9 molecule creates a nick on the first strand of the target nucleic acid, and the second Cas9 molecule creates a nick on the opposite strand, resulting in a double stranded break (e.g., a blunt ended cut or a cut with overhangs).

[0838] Different combinations of nickases can be chosen to target one single stranded break to one strand and a second single stranded break to the opposite strand. When choosing a combination, one can take into account that there are nickases having one active RuvC-like domain, and nickases having one active HNH domain. In certain embodiments, a RuvC-like domain cleaves the non-complementary strand of the target nucleic acid molecule. In certain embodiments, an HNH-like domain cleaves a single stranded complementary domain, e.g., a complementary strand of a double stranded nucleic acid molecule. Generally, if both Cas9 molecules have the same active domain (e.g., both have an active RuvC domain or both have an active HNH domain), one can choose two gRNAs that bind to opposite strands of the target. In more detail, in certain embodiments a first gRNA is complementary with a first strand of the target nucleic acid and binds a nickase having an active RuvC-like domain and causes that nickase to cleave the strand that is non-complementary to that first gRNA, i.e., a second strand of the target nucleic acid; and a second gRNA is complementary with a second strand of the target nucleic acid and binds a nickase having an active RuvC-like domain and causes that nickase to cleave the strand that is non-complementary to that second gRNA, i.e., the first strand of the target nucleic acid. Conversely, in certain embodiments, a first gRNA is complementary with a first strand of the target nucleic acid and binds a nickase having an active HNH domain and causes that nickase to cleave the strand that is complementary to that first gRNA, i.e., a first strand of the target nucleic acid; and a second gRNA is complementary with a second strand of the target nucleic acid and binds a nickase having an active HNH domain and causes that nickase to cleave the strand that is complementary to that second gRNA, i.e., the second strand of the target nucleic acid. In another arrangement, if one Cas9 molecule has an active RuvC-like domain and the other Cas9 molecule has an active HNH domain, the gRNAs for both Cas9 molecules can be complementary to the same strand of the target nucleic acid, so that the Cas9 molecule with the active RuvC-like domain can cleave the non-complementary strand and the Cas9 molecule with the HNH domain can cleave the complementary strand, resulting in a double stranded break.

[0839] 9.3.3 Homology Arms of the Donor Template

[0840] A homology arm should extend at least as far as the region in which end resection may occur, e.g., in order to allow the resected single stranded overhang to find a complementary region within the donor template. The overall length could be limited by parameters such as plasmid size or viral packaging limits. In certain embodiments, a homology arm does not extend into repeated elements, e.g., Alu repeats or LINE repeats.

[0841] Exemplary homology arm lengths include at least 50, 100, 250, 500, 750, 1000, 2000, 3000, 4000, or 5000 nucleotides. In certain embodiments, the homology arm length is 50-100, 100-250, 250-500, 500-750, 750-1000, 1000-2000, 2000-3000, 3000-4000, or 4000-5000 nucleotides.

[0842] A template nucleic acid, as that term is used herein, refers to a nucleic acid sequence which can be used in conjunction with a Cas9 molecule and a gRNA molecule to alter the structure of a HBV target position. In certain embodiments, the HBV target position can be a site between two nucleotides, e.g., adjacent nucleotides, on the target nucleic acid into which one or more nucleotides is added. Alternatively, the HBV target position may comprise one or more nucleotides that are altered by a template nucleic acid.

[0843] In certain embodiments, the target nucleic acid is modified to have some or all of the sequence of the template nucleic acid, typically at or near cleavage site(s). In certain embodiments, the template nucleic acid is single stranded. In certain embodiments, the template nucleic acid is double stranded. In certain embodiments, the template nucleic acid is DNA, e.g., double stranded DNA. In certain embodiments, the template nucleic acid is single stranded DNA. In certain embodiments, the template nucleic acid is encoded on the same vector backbone, e.g. AAV genome, plasmid DNA, as the Cas9 and gRNA. In certain embodiments, the template nucleic acid is excised from a vector backbone in vivo, e.g., it is flanked by gRNA recognition sequences. In certain embodiments, the template nucleic acid comprises endogenous genomic sequence.

[0844] In certain embodiments, the template nucleic acid alters the structure of the target position by participating in an HDR event. In certain embodiments, the template nucleic acid alters the sequence of the target position. In certain embodiments, the template nucleic acid results in the incorporation of a modified, or non-naturally occurring base into the target nucleic acid.

[0845] Typically, the template sequence undergoes a breakage mediated or catalyzed recombination with the target sequence. In certain embodiments, the template nucleic acid includes sequence that corresponds to a site on the target sequence that is cleaved by an eaCas9 mediated cleavage event.

[0846] In certain embodiments, the template nucleic acid includes sequence that corresponds to both a first site on the target sequence that is cleaved in a first Cas9 mediated event, and a second site on the target sequence that is cleaved in a second Cas9 mediated event.

[0847] A template nucleic acid typically comprises the following components:

[0848] [5′ homology arm]-[replacement sequence]-[3′ homology arm].

[0849] The homology arms provide for recombination into the chromosome, thus replacing the undesired element, e.g., a mutation or signature, with the replacement sequence. In certain embodiments, the homology arms flank the most distal cleavage sites.

[0850] In certain embodiments, the 3′ end of the 5′ homology arm is the position next to the 5′ end of the replacement sequence. In certain embodiments, the 5′ homology arm can extend at least 10, 20, 30, 40, 50, 100, 200, 300, 400, 500, 600, 700, 800, 900, 1000, 1500, 2000, 3000, 4000, or 5000 nucleotides 5′ from the 5′ end of the replacement sequence.

[0851] In certain embodiments, the 5′ end of the 3′ homology arm is the position next to the 3′ end of the replacement sequence. In certain embodiments, the 3′ homology arm can extend at least 10, 20, 30, 40, 50, 100, 200, 300, 400, 500, 600, 700, 800, 900, 1000, 1500, 2000, 3000, 4000, or 5000 nucleotides 3′ from the 3′ end of the replacement sequence.

[0852] In certain embodiments, to alter one or more nucleotides at a HBV target position, the homology arms, e.g., the 5′ and 3′ homology arms, may each comprise about 1000 bp of sequence flanking the most distal gRNAs (e.g., 1000 bp of sequence on either side of the HBV target position).

[0853] In certain embodiments, one or both homology arms may be shortened to avoid including certain sequence repeat elements, e.g., Alu repeats or LINE elements. For example, a 5′ homology arm may be shortened to avoid a sequence repeat element. In certain embodiments, a 3′ homology arm may be shortened to avoid a sequence repeat element. In certain embodiments, both the 5′ and the 3′ homology arms may be shortened to avoid including certain sequence repeat elements.

[0854] In certain embodiments, template nucleic acids for altering the sequence of a HBV target position may be designed for use as a single-stranded oligonucleotide, e.g., a single-stranded oligodeoxynucleotide (ssODN). When using a ssODN, 5′ and 3′ homology arms may range up to about 200 bp in length, e.g., at least 25, 50, 75, 100, 125, 150, 175, or 200 bp in length. Longer homology arms can also be for ssODNs as improvements in oligonucleotide synthesis continue to be made. In certain embodiments, a longer homology arm is made by a method other than chemical synthesis, e.g., by denaturing a long double stranded nucleic acid and purifying one of the strands, e.g., by affinity for a strand-specific sequence anchored to a solid substrate.

[0855] In certain embodiments, alt-HDR proceeds more efficiently when the template nucleic acid has extended homology 5′ to the nick (i.e., in the 5′ direction of the nicked strand). Accordingly, in certain embodiments, the template nucleic acid has a longer homology arm and a shorter homology arm, wherein the longer homology arm can anneal 5′ of the nick. In certain embodiments, the arm that can anneal 5′ to the nick is at least 25, 50, 75, 100, 125, 150, 175, or 200, 300, 400, 500, 600, 700, 800, 900, 1000, 1500, 2000, 3000, 4000, or 5000 nucleotides from the nick or the 5′ or 3′ end of the replacement sequence. In certain embodiments, the arm that can anneal 5′ to the nick is at least about 10%, about 20%, about 30%, about 40%, or about 50% longer than the arm that can anneal 3′ to the nick. In certain embodiments, the arm that can anneal 5′ to the nick is at least 2×, 3×, 4×, or 5× longer than the arm that can anneal 3′ to the nick. Depending on whether a ssDNA template can anneal to the intact strand or the nicked strand, the homology arm that anneals 5′ to the nick may be at the 5′ end of the ssDNA template or the 3′ end of the ssDNA template, respectively.

[0856] Similarly, in certain embodiments, the template nucleic acid has a 5′ homology arm, a replacement sequence, and a 3′ homology arm, such that the template nucleic acid has extended homology to the 5′ of the nick. For example, the 5′ homology arm and 3′ homology arm may be substantially the same length, but the replacement sequence may extend farther 5′ of the nick than 3′ of the nick. In certain embodiments, the replacement sequence extends at least about 10%, about 20%, about 30%, about 40%, about 50%, 2×, 3×, 4×, or 5× further to the 5′ end of the nick than the 3′ end of the nick.

[0857] In certain embodiments, alt-HDR proceeds more efficiently when the template nucleic acid is centered on the nick. Accordingly, in certain embodiments, the template nucleic acid has two homology arms that are essentially the same size. For instance, the first homology arm of a template nucleic acid may have a length that is within about 10%, about 9%, about 8%, about 7%, about 6%, about 5%, about 4%, about 3%, about 2%, or about 1% of the second homology arm of the template nucleic acid.

[0858] Similarly, in certain embodiments, the template nucleic acid has a 5′ homology arm, a replacement sequence, and a 3′ homology arm, such that the template nucleic acid extends substantially the same distance on either side of the nick. For example, the homology arms may have different lengths, but the replacement sequence may be selected to compensate for this. For example, the replacement sequence may extend further 5′ from the nick than it does 3′ of the nick, but the homology arm 5′ of the nick is shorter than the homology arm 3′ of the nick, to compensate. The converse is also possible, e.g., that the replacement sequence may extend further 3′ from the nick than it does 5′ of the nick, but the homology arm 3′ of the nick is shorter than the homology arm 5′ of the nick, to compensate.

[0859] 9.3.4. Template Nucleic Acids

[0860] In certain embodiments, the template nucleic acid is double stranded. In certain embodiments, the template nucleic acid is single stranded. In certain embodiments, the template nucleic acid comprises a single stranded portion and a double stranded portion. In certain embodiments, the template nucleic acid comprises about 50 to 100 bp, e.g., 55 to 95, 60 to 90, 65 to 85, or 70 to 80 bp, homology on either side of the nick and/or replacement sequence. In certain embodiments, the template nucleic acid comprises about 50, 55, 60, 65, 70, 75, 80, 85, 90, 95, or 100 bp homology 5′ of the nick or replacement sequence, 3′ of the nick or replacement sequence, or both 5′ and 3′ of the nick or replacement sequences.

[0861] In certain embodiments, the template nucleic acid comprises about 150 to 200 bp, e.g., 155 to 195, 160 to 190, 165 to 185, or 170 to 180 bp, homology 3′ of the nick and/or replacement sequence. In certain embodiments, the template nucleic acid comprises about 150, 155, 160, 165, 170, 175, 180, 185, 190, 195, or 200 bp homology 3′ of the nick or replacement sequence. In certain embodiments, the template nucleic acid comprises less than about 100, 90, 80, 70, 60, 50, 40, 30, 20, 15, or 10 bp homology 5′ of the nick or replacement sequence.

[0862] In certain embodiment, the template nucleic acid comprises about 150 to 200 bp, e.g., 155 to 195, 160 to 190, 165 to 185, or 170 to 180 bp, homology 5′ of the nick and/or replacement sequence. In certain embodiment, the template nucleic acid comprises about 150, 155, 160, 165, 170, 175, 180, 185, 190, 195, or 200 bp homology 5′ of the nick or replacement sequence. In certain embodiments, the template nucleic acid comprises less than about 100, 90, 80, 70, 60, 50, 40, 30, 20, 15, or 10 bp homology 3′ of the nick or replacement sequence.

[0863] In certain embodiments, the template nucleic acid comprises a nucleotide sequence, e.g., of one or more nucleotides, that can be added to or can template a change in the target nucleic acid. In other embodiments, the template nucleic acid comprises a nucleotide sequence that may be used to modify the target position.

[0864] The template nucleic acid may comprise a replacement sequence. In certain embodiments, the template nucleic acid comprises a 5′ homology arm. In certain embodiments, the template nucleic acid comprises a 3′ homology arm.

[0865] In certain embodiments, the template nucleic acid is linear double stranded DNA. The length may be, e.g., about 150-200 bp, e.g., about 150, 160, 170, 180, 190, or 200 bp. The length may be, e.g., at least 150, 160, 170, 180, 190, or 200 bp. In certain embodiments, the length is no greater than 150, 160, 170, 180, 190, or 200 bp. In certain embodiments, a double stranded template nucleic acid has a length of about 160 bp, e.g., about 155-165, 150-170, 140-180, 130-190, 120-200, 110-210, 100-220, 90-230, or 80-240 bp.

[0866] The template nucleic acid can be linear single stranded DNA. In certain embodiments, the template nucleic acid is (i) linear single stranded DNA that can anneal to the nicked strand of the target nucleic acid, (ii) linear single stranded DNA that can anneal to the intact strand of the target nucleic acid, (iii) linear single stranded DNA that can anneal to the plus strand of the target nucleic acid, (iv) linear single stranded DNA that can anneal to the minus strand of the target nucleic acid, or more than one of the preceding. The length may be, e.g., about 150-200 nucleotides, e.g., about 150, 160, 170, 180, 190, or 200 nucleotides. The length may be, e.g., at least 150, 160, 170, 180, 190, or 200 nucleotides. In certain embodiments, the length is no greater than 150, 160, 170, 180, 190, or 200 nucleotides. In certain embodiments, a single stranded template nucleic acid has a length of about 160 nucleotides, e.g., about 155-165, 150-170, 140-180, 130-190, 120-200, 110-210, 100-220, 90-230, or 80-240 nucleotides.

[0867] In certain embodiments, the template nucleic acid is circular double stranded DNA, e.g., a plasmid. In certain embodiments, the template nucleic acid comprises about 500 to 1000 bp of homology on either side of the replacement sequence and/or the nick. In certain embodiments, the template nucleic acid comprises about 300, 400, 500, 600, 700, 800, 900, 1000, 1500, or 2000 bp of homology 5′ of the nick or replacement sequence, 3′ of the nick or replacement sequence, or both 5′ and 3′ of the nick or replacement sequence. In certain embodiments, the template nucleic acid comprises at least 300, 400, 500, 600, 700, 800, 900, 1000, 1500, or 2000 bp of homology 5′ of the nick or replacement sequence, 3′ of the nick or replacement sequence, or both 5′ and 3′ of the nick or replacement sequence. In certain embodiments, the template nucleic acid comprises no more than 300, 400, 500, 600, 700, 800, 900, 1000, 1500, or 2000 bp of homology 5′ of the nick or replacement sequence, 3′ of the nick or replacement sequence, or both 5′ and 3′ of the nick or replacement sequence.

[0868] In certain embodiments, one or both homology arms may be shortened to avoid including certain sequence repeat elements, e.g., Alu repeats, LINE elements. For example, a 5′ homology arm may be shortened to avoid a sequence repeat element, while a 3′ homology arm may be shortened to avoid a sequence repeat element. In certain embodiments, both the 5′ and the 3′ homology arms may be shortened to avoid including certain sequence repeat elements.

[0869] In certain embodiments, the template nucleic acid is an adenovirus vector, e.g., an AAV vector, e.g., a ssDNA molecule of a length and sequence that allows it to be packaged in an AAV capsid. The vector may be, e.g., less than 5 kb and may contain an ITR sequence that promotes packaging into the capsid. The vector may be integration-deficient. In certain embodiments, the template nucleic acid comprises about 150 to 1000 nucleotides of homology on either side of the replacement sequence and/or the nick. In certain embodiments, the template nucleic acid comprises about 100, 150, 200, 300, 400, 500, 600, 700, 800, 900, 1000, 1500, or 2000 nucleotides 5′ of the nick or replacement sequence, 3′ of the nick or replacement sequence, or both 5′ and 3′ of the nick or replacement sequence. In certain embodiments, the template nucleic acid comprises at least 100, 150, 200, 300, 400, 500, 600, 700, 800, 900, 1000, 1500, or 2000 nucleotides 5′ of the nick or replacement sequence, 3′ of the nick or replacement sequence, or both 5′ and 3′ of the nick or replacement sequence. In certain embodiments, the template nucleic acid comprises at most 100, 150, 200, 300, 400, 500, 600, 700, 800, 900, 1000, 1500, or 2000 nucleotides 5′ of the nick or replacement sequence, 3′ of the nick or replacement sequence, or both 5′ and 3′ of the nick or replacement sequence.

[0870] In certain embodiments, the template nucleic acid is a lentiviral vector, e.g., an IDLV (integration deficiency lentivirus). In certain embodiments, the template nucleic acid comprises about 500 to 1000 bp of homology on either side of the replacement sequence and/or the nick. In certain embodiments, the template nucleic acid comprises about 300, 400, 500, 600, 700, 800, 900, 1000, 1500, or 2000 bp of homology 5′ of the nick or replacement sequence, 3′ of the nick or replacement sequence, or both 5′ and 3′ of the nick or replacement sequence. In certain embodiments, the template nucleic acid comprises at least 300, 400, 500, 600, 700, 800, 900, 1000, 1500, or 2000 bp of homology 5′ of the nick or replacement sequence, 3′ of the nick or replacement sequence, or both 5′ and 3′ of the nick or replacement sequence. In certain embodiments, the template nucleic acid comprises no more than 300, 400, 500, 600, 700, 800, 900, 1000, 1500, or 2000 bp of homology 5′ of the nick or replacement sequence, 3′ of the nick or replacement sequence, or both 5′ and 3′ of the nick or replacement sequence.

[0871] In certain embodiments, the template nucleic acid comprises one or more mutations, e.g., silent mutations, that prevent Cas9 from recognizing and cleaving the template nucleic acid. The template nucleic acid may comprise, e.g., at least 1, 2, 3, 4, 5, 10, 20, or 30 silent mutations relative to the corresponding sequence in the genome of the cell to be altered. In certain embodiments, the template nucleic acid comprises at most 2, 3, 4, 5, 10, 20, 30, or 50 silent mutations relative to the corresponding sequence in the genome of the cell to be altered. In certain embodiments, the cDNA comprises one or more mutations, e.g., silent mutations that prevent Cas9 from recognizing and cleaving the template nucleic acid. The template nucleic acid may comprise, e.g., at least 1, 2, 3, 4, 5, 10, 20, or 30 silent mutations relative to the corresponding sequence in the genome of the cell to be altered. In certain embodiments, the template nucleic acid comprises at most 2, 3, 4, 5, 10, 20, 30, or 50 silent mutations relative to the corresponding sequence in the genome of the cell to be altered.

[0872] In certain embodiments, the 5′ and 3′ homology arms each comprise a length of sequence flanking the nucleotides corresponding to the replacement sequence. In certain embodiments, a template nucleic acid comprises a replacement sequence flanked by a 5′ homology arm and a 3′ homology arm each independently comprising 10 or more, 20 or more, 50 or more, 100 or more, 150 or more, 200 or more, 250 or more, 300 or more, 350 or more, 400 or more, 450 or more, 500 or more, 550 or more, 600 or more, 650 or more, 700 or more, 750 or more, 800 or more, 850 or more, 900 or more, 1000 or more, 1100 or more, 1200 or more, 1300 or more, 1400 or more, 1500 or more, 1600 or more, 1700 or more, 1800 or more, 1900 or more, or 2000 or more nucleotides. In certain embodiments, a template nucleic acid comprises a replacement sequence flanked by a 5′ homology arm and a 3′ homology arm each independently comprising at least 50, 100, or 150 nucleotides, but not long enough to include a repeated element. In certain embodiments, a template nucleic acid comprises a replacement sequence flanked by a 5′ homology arm and a 3′ homology arm each independently comprising 5 to 100, 10 to 150, or 20 to 150 nucleotides. In certain embodiments, the replacement sequence optionally comprises a promoter and/or polyA signal.

[0873] 9.4 Single-Strand Annealing

[0874] Single strand annealing (SSA) is another DNA repair process that repairs a double-strand break between two repeat sequences present in a target nucleic acid. Repeat sequences utilized by the SSA pathway are generally greater than 30 nucleotides in length. Resection at the break ends occurs to reveal repeat sequences on both strands of the target nucleic acid. After resection, single strand overhangs containing the repeat sequences are coated with RPA protein to prevent the repeats sequences from inappropriate annealing, e.g., to themselves. RAD52 binds to and each of the repeat sequences on the overhangs and aligns the sequences to enable the annealing of the complementary repeat sequences. After annealing, the single-strand flaps of the overhangs are cleaved. New DNA synthesis fills in any gaps, and ligation restores the DNA duplex. As a result of the processing, the DNA sequence between the two repeats is deleted. The length of the deletion can depend on many factors including the location of the two repeats utilized, and the pathway or processivity of the resection.

[0875] In contrast to HDR pathways, SSA does not require a template nucleic acid to alter a target nucleic acid sequence. Instead, the complementary repeat sequence is utilized.

[0876] 9.5 Other DNA Repair Pathways

[0877] 9.5.1 SSBR (Single Strand Break Repair)

[0878] Single-stranded breaks (SSB) in the genome are repaired by the SSBR pathway, which is a distinct mechanism from the DSB repair mechanisms discussed above. The SSBR pathway has four major stages: SSB detection, DNA end processing, DNA gap filling, and DNA ligation. A more detailed explanation is given in Caldecott 2008, and a summary is given here.

[0879] In the first stage, when a SSB forms, PARP1 and/or PARP2 recognize the break and recruit repair machinery. The binding and activity of PARP1 at DNA breaks is transient and it seems to accelerate SSBr by promoting the focal accumulation or stability of SSBr protein complexes at the lesion. Arguably the most important of these SSBr proteins is XRCC1, which functions as a molecular scaffold that interacts with, stabilizes, and stimulates multiple enzymatic components of the SSBr process including the protein responsible for cleaning the DNA 3′ and 5′ ends. For instance, XRCC1 interacts with several proteins (DNA polymerase beta, PNK, and three nucleases, APE1, APTX, and APLF) that promote end processing. APE1 has endonuclease activity. APLF exhibits endonuclease and 3′ to 5′ exonuclease activities. APTX has endonuclease and 3′ to 5′ exonuclease activity.

[0880] This end processing is an important stage of SSBR since the 3′- and/or 5′-termini of most, if not all, SSBs are ‘damaged.’ End processing generally involves restoring a damaged 3′-end to a hydroxylated state and and/or a damaged 5′ end to a phosphate moiety, so that the ends become ligation-competent. Enzymes that can process damaged 3′ termini include PNKP, APE1, and TDP1. Enzymes that can process damaged 5′ termini include PNKP, DNA polymerase beta, and APTX. LIG3 (DNA ligase III) can also participate in end processing. Once the ends are cleaned, gap filling can occur.

[0881] At the DNA gap filling stage, the proteins typically present are PARP1, DNA polymerase beta, XRCC1, FEN1 (flap endonuclease 1), DNA polymerase delta/epsilon, PCNA, and LIG1. There are two ways of gap filling, the short patch repair and the long patch repair. Short patch repair involves the insertion of a single nucleotide that is missing. At some SSBs, “gap filling” might continue displacing two or more nucleotides (displacement of up to 12 bases have been reported). FEN1 is an endonuclease that removes the displaced 5′-residues. Multiple DNA polymerases, including Polβ, are involved in the repair of SSBs, with the choice of DNA polymerase influenced by the source and type of SSB.

[0882] In the fourth stage, a DNA ligase such as LIG1 (Ligase I) or LIG3 (Ligase III) catalyzes joining of the ends. Short patch repair uses Ligase III and long patch repair uses Ligase I.

[0883] Sometimes, SSBR is replication-coupled. This pathway can involve one or more of CtIP, MRN, ERCC1, and FEN1. Additional factors that may promote SSBR include: aPARP, PARP1, PARP2, PARG, XRCC1, DNA polymerase b, DNA polymerase d, DNA polymerase e, PCNA, LIG1, PNK, PNKP, APE1, APTX, APLF, TDP1, LIG3, FEN1, CtIP, MRN, and ERCC1.

[0884] 9.5.2 MMR (Mismatch Repair)

[0885] Cells contain three excision repair pathways: MMR, BER, and NER. The excision repair pathways have a common feature in that they typically recognize a lesion on one strand of the DNA, then exo/endonucleases remove the lesion and leave a 1-30 nucleotide gap that is sub-sequentially filled in by DNA polymerase and finally sealed with ligase. A more complete picture is given in Li, Cell Research (2008) 18:85-98, and a summary is provided here.

[0886] Mismatch repair (MMR) operates on mispaired DNA bases.

[0887] The MSH2/6 or MSH2/3 complexes both have ATPases activity that plays an important role in mismatch recognition and the initiation of repair. MSH2/6 preferentially recognizes base-base mismatches and identifies mispairs of 1 or 2 nucleotides, while MSH2/3 preferentially recognizes larger ID mispairs.

[0888] hMLH1 heterodimerizes with hPMS2 to form hMutLα which possesses an ATPase activity and is important for multiple steps of MMR. It possesses a PCNA/replication factor C (RFC)-dependent endonuclease activity which plays an important role in 3′ nick-directed MMR involving EXO1. (EXO1 is a participant in both HR and MMR.) It regulates termination of mismatch-provoked excision. Ligase I is the relevant ligase for this pathway. Additional factors that may promote MMR include: EXO1, MSH2, MSH3, MSH6, MLH1, PMS2, MLH3, DNA Pol d, RPA, HMGB1, RFC, and DNA ligase I.

[0889] 9.5.3 Base Excision Repair (BER)

[0890] The base excision repair (BER) pathway is active throughout the cell cycle; it is responsible primarily for removing small, non-helix-distorting base lesions from the genome. In contrast, the related Nucleotide Excision Repair pathway (discussed in the next section) repairs bulky helix-distorting lesions. A more detailed explanation is given in Caldecott, Nature Reviews Genetics 9, 619-631 (August 2008), and a summary is given here.

[0891] Upon DNA base damage, base excision repair (BER) is initiated and the process can be simplified into five major steps: (a) removal of the damaged DNA base; (b) incision of the subsequent a basic site; (c) clean-up of the DNA ends; (d) insertion of the desired nucleotide into the repair gap; and (e) ligation of the remaining nick in the DNA backbone. These last steps are similar to the SSBR.

[0892] In the first step, a damage-specific DNA glycosylase excises the damaged base through cleavage of the N-glycosidic bond linking the base to the sugar phosphate backbone. Then AP endonuclease-1 (APE1) or bifunctional DNA glycosylases with an associated lyase activity incised the phosphodiester backbone to create a DNA single strand break (SSB). The third step of BER involves cleaning-up of the DNA ends. The fourth step in BER is conducted by Polβ that adds a new complementary nucleotide into the repair gap and in the final step XRCC1/Ligase III seals the remaining nick in the DNA backbone. This completes the short-patch BER pathway in which the majority (˜80%) of damaged DNA bases are repaired. However, if the 5′ ends in step 3 are resistant to end processing activity, following one nucleotide insertion by Pol β there is then a polymerase switch to the replicative DNA polymerases, Pol δ/ε, which then add ˜2-8 more nucleotides into the DNA repair gap. This creates a 5′ flap structure, which is recognized and excised by flap endonuclease-1 (FEN-1) in association with the processivity factor proliferating cell nuclear antigen (PCNA). DNA ligase I then seals the remaining nick in the DNA backbone and completes long-patch BER. Additional factors that may promote the BER pathway include: DNA glycosylase, APE1, Polb, Pold, Pole, XRCC1, Ligase III, FEN-1, PCNA, RECQL4, WRN, MYH, PNKP, and APTX.

[0893] 9.5.4 Nucleotide Excision Repair (NER)

[0894] Nucleotide excision repair (NER) is an important excision mechanism that removes bulky helix-distorting lesions from DNA. Additional details about NER are given in Marteijn et al., Nature Reviews Molecular Cell Biology 15, 465-481 (2014), and a summary is given here. NER a broad pathway encompassing two smaller pathways: global genomic NER (GG-NER) and transcription coupled repair NER (TC-NER). GG-NER and TC-NER use different factors for recognizing DNA damage. However, they utilize the same machinery for lesion incision, repair, and ligation.

[0895] Once damage is recognized, the cell removes a short single-stranded DNA segment that contains the lesion. Endonucleases XPF/ERCC1 and XPG (encoded by ERCC5) remove the lesion by cutting the damaged strand on either side of the lesion, resulting in a single-strand gap of 22-30 nucleotides. Next, the cell performs DNA gap filling synthesis and ligation. Involved in this process are: PCNA, RFC, DNA Pol δ, DNA Pol ε or DNA Pol κ, and DNA ligase I or XRCC1/Ligase III. Replicating cells tend to use DNA pol ε and DNA ligase I, while non-replicating cells tend to use DNA Pol δ, DNA Pol κ, and the XRCC1/Ligase III complex to perform the ligation step.

[0896] NER can involve the following factors: XPA-G, POLH, XPF, ERCC1, XPA-G, and LIG1. Transcription-coupled NER (TC-NER) can involve the following factors: CSA, CSB, XPB, XPD, XPG, ERCC1, and TTDA. Additional factors that may promote the NER repair pathway include XPA-G, POLH, XPF, ERCC1, XPA-G, LIG1, CSA, CSB, XPA, XPB, XPC, XPD, XPF, XPG, TTDA, UVSSA, USP7, CETN2, RAD23B, UV-DDB, CAK subcomplex, RPA, and PCNA.

[0897] 9.5.5 Interstrand Crosslink (ICL)

[0898] A dedicated pathway called the ICL repair pathway repairs interstrand crosslinks. Interstrand crosslinks, or covalent crosslinks between bases in different DNA strand, can occur during replication or transcription. ICL repair involves the coordination of multiple repair processes, in particular, nucleolytic activity, translesion synthesis (TLS), and HDR. Nucleases are recruited to excise the ICL on either side of the crosslinked bases, while TLS and HDR are coordinated to repair the cut strands. ICL repair can involve the following factors: endonucleases, e.g., XPF and RAD51C, endonucleases such as RAD51, translesion polymerases, e.g., DNA polymerase zeta and Rev1), and the Fanconi anemia (FA) proteins, e.g., FancJ.

[0899] 9.5.6 Other Pathways

[0900] Several other DNA repair pathways exist in mammals.

[0901] Translesion synthesis (TLS) is a pathway for repairing a single stranded break left after a defective replication event and involves translesion polymerases, e.g., DNA polβ and Rev1.

[0902] Error-free postreplication repair (PRR) is another pathway for repairing a single stranded break left after a defective replication event.

[0903] 9.6 Targeted Knockdown

[0904] Unlike CRISPR/Cas-mediated gene knockout, which permanently eliminates expression by mutating the gene at the DNA level, CRISPR/Cas knockdown allows for temporary reduction of gene expression through the use of artificial transcription factors. Mutating key residues in both DNA cleavage domains of the Cas9 protein (e.g. the D10A and H840A mutations) results in the generation of a catalytically inactive Cas9 (eiCas9 which is also known as dead Cas9 or dCas9) molecule. A catalytically inactive Cas9 complexes with a gRNA and localizes to the DNA sequence specified by that gRNA's targeting domain, however, it does not cleave the target DNA. Fusion of the dCas9 to an effector domain, e.g., a transcription repression domain, enables recruitment of the effector to any DNA site specified by the gRNA. Although an enzymatically inactive (eiCas9) Cas9 molecule itself can block transcription when recruited to early regions in the coding sequence, more robust repression can be achieved by fusing a transcriptional repression domain (for example KRAB, SID or ERD) to the Cas9 and recruiting it to the target knockdown position, e.g., within 1000 bp of sequence 3′ of the start codon or within 500 bp of a promoter region 5′ of the start codon of a gene (e.g., a HBV viral gene). It is likely that targeting DNAseI hypersensitive sites (DHSs) of the promoter may yield more efficient gene repression or activation because these regions are more likely to be accessible to the Cas9 protein and are also more likely to harbor sites for endogenous transcription factors. Especially for gene repression, blocking the binding site of an endogenous transcription factor can aid in downregulating gene expression. In certain embodiments, one or more eiCas9 molecules may be used to block binding of one or more endogenous transcription factors. In certain embodiments, an eiCas9 molecule can be fused to a chromatin modifying protein. Altering chromatin status can result in decreased expression of the target gene. One or more eiCas9 molecules fused to one or more chromatin modifying proteins may be used to alter chromatin status.

[0905] In certain embodiments, a gRNA molecule can be targeted to a known transcription response elements (e.g., promoters, enhancers, etc.), a known upstream activating sequences (UAS), and/or sequences of unknown or known function that are suspected of being able to control expression of the target DNA.

[0906] CRISPR/Cas-mediated gene knockdown can be used to reduce expression of an unwanted allele or transcript. In certain embodiments, permanent destruction of the gene is not ideal. In these embodiments, site-specific repression may be used to temporarily reduce or eliminate expression. In certain embodiments, the off-target effects of a Cas-repressor may be less severe than those of a Cas-nuclease as a nuclease can cleave any DNA sequence and cause mutations whereas a Cas-repressor may only have an effect if it targets the promoter region of an actively transcribed gene. However, while nuclease-mediated knockout is permanent, repression may only persist as long as the Cas-repressor is present in the cells. Once the repressor is no longer present, it is likely that endogenous transcription factors and gene regulatory elements would restore expression to its natural state.

[0907] 9.7 Examples of gRNAs in Genome Editing Methods

[0908] gRNA molecules as described herein can be used with Cas9 molecules that generate a double strand break or a single strand break to alter the sequence of a target nucleic acid, e.g., a target position or target genetic signature. gRNA molecules useful in these methods are described below.

[0909] In certain embodiments, the gRNA molecule, e.g., a chimeric gRNA, is configured such that it comprises one or more of the following properties;

[0910] (a) it can position, e.g., when targeting a Cas9 molecule that makes double strand breaks, a double strand break (i) within 50, 100, 150, 200, 250, 300, 350, 400, 450, or 500 nucleotides of a target position, or (ii) sufficiently close that the target position is within the region of end resection;

[0911] (b) it has a targeting domain of at least 16 nucleotides, e.g., a targeting domain of (i) 16, (ii), 17, (iii) 18, (iv) 19, (v) 20, (vi) 21, (vii) 22, (viii) 23, (ix) 24, (x) 25, or (xi) 26 nucleotides; and

[0912] (c)(i) the proximal and tail domain, when taken together, comprise at least 15, 18, 20, 25, 30, 31, 35, 40, 45, 49, 50, or 53 nucleotides, e.g., at least 15, 18, 20, 25, 30, 31, 35, 40, 45, 49, 50, or 53 nucleotides from a naturally occurring S. pyogenes, S. aureus, or N. meningitidis tail and proximal domain, or a sequence that differs by no more than 1, 2, 3, 4, 5; 6, 7, 8, 9 or 10 nucleotides therefrom;

[0913] (c)(ii) there are at least 15, 18, 20, 25, 30, 31, 35, 40, 45, 49, 50, or 53 nucleotides 3′ to the last nucleotide of the second complementarity domain, e.g., at least 15, 18, 20, 25, 30, 31, 35, 40, 45, 49, 50, or 53 nucleotides from the corresponding sequence of a naturally occurring S. pyogenes, S. aureus, or N. meningitidis gRNA, or a sequence that differs by no more than 1, 2, 3, 4, 5; 6, 7, 8, 9 or 10 nucleotides therefrom;

[0914] (c)(iii) there are at least 16, 19, 21, 26, 31, 32, 36, 41, 46, 50, 51, or 54 nucleotides 3′ to the last nucleotide of the second complementarity domain that is complementary to its corresponding nucleotide of the first complementarity domain, e.g., at least 16, 19, 21, 26, 31, 32, 36, 41, 46, 50, 51, or 54 nucleotides from the corresponding sequence of a naturally occurring S. pyogenes, S. aureus, or N. meningitidis gRNA, or a sequence that differs by no more than 1, 2, 3, 4, 5; 6, 7, 8, 9 or 10 nucleotides therefrom;

[0915] (c)(iv) the tail domain is at least 10, 15, 20, 25, 30, 35 or 40 nucleotides in length, e.g., it comprises at least 10, 15, 20, 25, 30, 35 or 40 nucleotides from a naturally occurring S. pyogenes, S. aureus, or N. meningitidis tail domain, or a sequence that differs by no more than 1, 2, 3, 4, 5; 6, 7, 8, 9 or 10 nucleotides therefrom; or

[0916] (c)(v) the tail domain comprises 15, 20, 25, 30, 35, 40 nucleotides or all of the corresponding portions of a naturally occurring tail domain, e.g., a naturally occurring S. pyogenes, S. aureus, or N. meningitidis tail domain.

[0917] In certain embodiments, the gRNA is configured such that it comprises properties: a and b(i); a and b(ii); a and b(iii); a and b(iv); a and b(v); a and b(vi); a and b(vii); a and b(viii); a and b(ix); a and b(x); a and b(xi); a and c; a, b, and c; a(i), b(i), and c(i); a(i), b(i), and c(ii); a(i), b(ii), and c(i); a(i), b(ii), and c(ii); a(i), b(iii), and c(i); a(i), b(iii), and c(ii); a(i), b(iv), and c(i); a(i), b(iv), and c(ii); a(i), b(v), and c(i); a(i), b(v), and c(ii); a(i), b(vi), and c(i); a(i), b(vi), and c(ii); a(i), b(vii), and c(i); a(i), b(vii), and c(ii); a(i), b(viii), and c(i); a(i), b(viii), and c(ii); a(i), b(ix), and c(i); a(i), b(ix), and c(ii); a(i), b(x), and c(i); a(i), b(x), and c(ii); a(i), b(xi), or c(i); a(i), b(xi), and c(ii).

[0918] In certain embodiments, the gRNA, e.g., a chimeric gRNA, is configured such that it comprises one or more of the following properties;

[0919] (a) one or both of the gRNAs can position, e.g., when targeting a Cas9 molecule that makes single strand breaks, a single strand break within (i) 50, 100, 150, 200, 250, 300, 350, 400, 450, or 500 nucleotides of a target position, or (ii) sufficiently close that the target position is within the region of end resection;

[0920] (b) one or both have a targeting domain of at least 16 nucleotides, e.g., a targeting domain of (i) 16, (ii), 17, (iii) 18, (iv) 19, (v) 20, (vi) 21, (vii) 22, (viii) 23, (ix) 24, (x) 25, or (xi) 26 nucleotides; and (c)(i) the proximal and tail domain, when taken together, comprise at least 15, 18, 20, 25, 30, 31, 35, 40, 45, 49, 50, or 53 nucleotides, e.g., at least 15, 18, 20, 25, 30, 31, 35, 40, 45, 49, 50, or 53 nucleotides from a naturally occurring S. pyogenes, S. aureus, or N. meningitidis tail and proximal domain, or a sequence that differs by no more than 1, 2, 3, 4, 5, 6, 7, 8, 9 or 10 nucleotides therefrom;

[0921] (c)(ii) there are at least 15, 18, 20, 25, 30, 31, 35, 40, 45, 49, 50, or 53 nucleotides 3′ to the last nucleotide of the second complementarity domain, e.g., at least 15, 18, 20, 25, 30, 31, 35, 40, 45, 49, 50, or 53 nucleotides from the corresponding sequence of a naturally occurring S. pyogenes, S. aureus, or N. meningitidis gRNA, or a sequence that differs by no more than 1, 2, 3, 4, 5; 6, 7, 8, 9 or 10 nucleotides therefrom;

[0922] (c)(iii) there are at least 16, 19, 21, 26, 31, 32, 36, 41, 46, 50, 51, or 54 nucleotides 3′ to the last nucleotide of the second complementarity domain that is complementary to its corresponding nucleotide of the first complementarity domain, e.g., at least 16, 19, 21, 26, 31, 32, 36, 41, 46, 50, 51, or 54 nucleotides from the corresponding sequence of a naturally occurring S. pyogenes, S. aureus, or N. meningitidis gRNA, or a sequence that differs by no more than 1, 2, 3, 4, 5; 6, 7, 8, 9 or 10 nucleotides therefrom;

[0923] (c)(iv) the tail domain is at least 10, 15, 20, 25, 30, 35 or 40 nucleotides in length, e.g., it comprises at least 10, 15, 20, 25, 30, 35 or 40 nucleotides from a naturally occurring S. pyogenes, S. aureus, or N. meningitidis tail domain, or a sequence that differs by no more than 1, 2, 3, 4, 5; 6, 7, 8, 9 or 10 nucleotides therefrom; or

[0924] (c)(v) the tail domain comprises 15, 20, 25, 30, 35, 40 nucleotides or all of the corresponding portions of a naturally occurring tail domain, e.g., a naturally occurring S. pyogenes, S. aureus, or N. meningitidis tail domain.

[0925] In certain embodiments, the gRNA is configured such that it comprises properties: a and b(i); a and b(ii); a and b(iii); a and b(iv); a and b(v); a and b(vi); a and b(vii); a and b(viii); a and b(ix); a and b(x); a and b(xi); a and c; a, b, and c; a(i), b(i), and c(i); a(i), b(i), and c(ii); a(i), b(ii), and c(i); a(i), b(ii), and c(ii); a(i), b(iii), and c(i); a(i), b(iii), and c(ii); a(i), b(iv), and c(i); a(i), b(iv), and c(ii); a(i), b(v), and c(i); a(i), b(v), and c(ii); a(i), b(vi), and c(i); a(i), b(vi), and c(ii); a(i), b(vii), and c(i); a(i), b(vii), and c(ii); a(i), b(viii), and c(i); a(i), b(viii), and c(ii); a(i), b(ix), and c(i); a(i), b(ix), and c(ii); a(i), b(x), and c(i); a(i), b(x), and c(ii); a(i), b(xi), and c(i); a(i), b(xi), and c(ii).

[0926] In certain embodiments, the gRNA is used with a Cas9 nickase molecule having HNH activity, e.g., a Cas9 molecule having the RuvC activity inactivated, e.g., a Cas9 molecule having a mutation at D10, e.g., the D10A mutation. In certain embodiments, the gRNA is used with a Cas9 nickase molecule having RuvC activity, e.g., a Cas9 molecule having the HNH activity inactivated, e.g., a Cas9 molecule having a mutation at 840, e.g., the H840A. In certain embodiments, the gRNAs are used with a Cas9 nickase molecule having RuvC activity, e.g., a Cas9 molecule having the HNH activity inactivated, e.g., a Cas9 molecule having a mutation at N863, e.g., the N863A mutation. In certain embodiments, the gRNAs are used with a Cas9 nickase molecule having RuvC activity, e.g., a Cas9 molecule having the HNH activity inactivated, e.g., a Cas9 molecule having a mutation at N580, e.g., the N580A mutation.

[0927] In certain embodiments, a pair of gRNAs, e.g., a pair of chimeric gRNAs, comprising a first and a second gRNA, is configured such that they comprises one or more of the following properties;

[0928] (a) one or both of the gRNAs can position, e.g., when targeting a Cas9 molecule that makes single strand breaks, a single strand break within (i) 50, 100, 150, 200, 250, 300, 350, 400, 450, or 500 nucleotides of a target position, or (ii) sufficiently close that the target position is within the region of end resection;

[0929] (b) one or both have a targeting domain of at least 16 nucleotides, e.g., a targeting domain of (i) 16, (ii), 17, (iii) 18, (iv) 19, (v) 20, (vi) 21, (vii) 22, (viii) 23, (ix) 24, (x) 25, or (xi) 26 nucleotides;

[0930] (c) (i) the proximal and tail domain, when taken together, comprise at least 15, 18, 20, 25, 30, 31, 35, 40, 45, 49, 50, or 53 nucleotides, e.g., at least 15, 18, 20, 25, 30, 31, 35, 40, 45, 49, 50, or 53 nucleotides from a naturally occurring S. pyogenes, S. aureus, or N. meningitidis tail and proximal domain, or a sequence that differs by no more than 1, 2, 3, 4, 5; 6, 7, 8, 9 or 10 nucleotides therefrom;

[0931] (c)(ii) there are at least 15, 18, 20, 25, 30, 31, 35, 40, 45, 49, 50, or 53 nucleotides 3′ to the last nucleotide of the second complementarity domain, e.g., at least 15, 18, 20, 25, 30, 31, 35, 40, 45, 49, 50, or 53 nucleotides from the corresponding sequence of a naturally occurring S. pyogenes, S. aureus, or N. meningitidis gRNA, or a sequence that differs by no more than 1, 2, 3, 4, 5; 6, 7, 8, 9 or 10 nucleotides therefrom;

[0932] (c)(iii) there are at least 16, 19, 21, 26, 31, 32, 36, 41, 46, 50, 51, or 54 nucleotides 3′ to the last nucleotide of the second complementarity domain that is complementary to its corresponding nucleotide of the first complementarity domain, e.g., at least 16, 19, 21, 26, 31, 32, 36, 41, 46, 50, 51, or 54 nucleotides from the corresponding sequence of a naturally occurring S. pyogenes, S. aureus, or N. meningitidis gRNA, or a sequence that differs by no more than 1, 2, 3, 4, 5; 6, 7, 8, 9 or 10 nucleotides therefrom;

[0933] (c)(iv) the tail domain is at least 10, 15, 20, 25, 30, 35 or 40 nucleotides in length, e.g., it comprises at least 10, 15, 20, 25, 30, 35 or 40 nucleotides from a naturally occurring S. pyogenes, S. aureus, or N. meningitidis tail domain; or, or a sequence that differs by no more than 1, 2, 3, 4, 5; 6, 7, 8, 9 or 10 nucleotides therefrom; or

[0934] (c)(v) the tail domain comprises 15, 20, 25, 30, 35, 40 nucleotides or all of the corresponding portions of a naturally occurring tail domain, e.g., a naturally occurring S. pyogenes, S. aureus, or N. meningitidis tail domain;

[0935] (d) the gRNAs are configured such that, when hybridized to target nucleic acid, they are separated by 0-50, 0-100, 0-200, at least 10, at least 20, at least 30 or at least 50 nucleotides;

[0936] (e) the breaks made by the first gRNA and second gRNA are on different strands; and

[0937] (f) the PAMs are facing outwards.

[0938] In certain embodiments, one or both of the gRNAs is configured such that it comprises properties: a and b(i); a and b(ii); a and b(iii); a and b(iv); a and b(v); a and b(vi); a and b(vii); a and b(viii); a and b(ix); a and b(x); a and b(xi); a and c; a, b, and c; a(i), b(i), and c(i); a(i), b(i), and c(ii); a(i), b(i), c, and d; a(i), b(i), c, and e; a(i), b(i), c, d, and e; a(i), b(ii), and c(i); a(i), b(ii), and c(ii); a(i), b(ii), c, and d; a(i), b(ii), c, and e; a(i), b(ii), c, d, and e; a(i), b(iii), and c(i); a(i), b(iii), and c(ii); a(i), b(iii), c, and d; a(i), b(iii), c, and e; a(i), b(iii), c, d, and e; a(i), b(iv), and c(i); a(i), b(iv), and c(ii); a(i), b(iv), c, and d; a(i), b(iv), c, and e; a(i), b(iv), c, d, and e; a(i), b(v), and c(i); a(i), b(v), and c(ii); a(i), b(v), c, and d; a(i), b(v), c, and e; a(i), b(v), c, d, and e; a(i), b(vi), and c(i); a(i), b(vi), and c(ii); a(i), b(vi), c, and d; a(i), b(vi), c, and e; a(i), b(vi), c, d, and e; a(i), b(vii), and c(i); a(i), b(vii), and c(ii); a(i), b(vii), c, and d; a(i), b(vii), c, and e; a(i), b(vii), c, d, and e; a(i), b(viii), and c(i); a(i), b(viii), and c(ii); a(i), b(viii), c, and d; a(i), b(viii), c, and e; a(i), b(viii), c, d, and e; a(i), b(ix), and c(i); a(i), b(ix), and c(ii); a(i), b(ix), c, and d; a(i), b(ix), c, and e; a(i), b(ix), c, d, and e; a(i), b(x), and c(i); a(i), b(x), and c(ii); a(i), b(x), c, and d; a(i), b(x), c, and e; a(i), b(x), c, d, and e; a(i), b(xi), and c(i); a(i), b(xi), and c(ii); a(i), b(xi), c, and d; a(i), b(xi), c, and e; a(i), b(xi), c, d, and e.

[0939] In certain embodiments, the gRNAs are used with a Cas9 nickase molecule having HNH activity, e.g., a Cas9 molecule having the RuvC activity inactivated, e.g., a Cas9 molecule having a mutation at D10, e.g., the D10A mutation. In certain embodiments, the gRNAs are used with a Cas9 nickase molecule having RuvC activity, e.g., a Cas9 molecule having the HNH activity inactivated, e.g., a Cas9 molecule having a mutation at H840, e.g., the H840A mutation. In certain embodiments, the gRNAs are used with a Cas9 nickase molecule having RuvC activity, e.g., a Cas9 molecule having the HNH activity inactivated, e.g., a Cas9 molecule having a mutation at N863, e.g., the N863A mutation. In certain embodiments, the gRNAs are used with a Cas9 nickase molecule having RuvC activity, e.g., a Cas9 molecule having the HNH activity inactivated, e.g., a Cas9 molecule having a mutation at N580, e.g., the N580A mutation.

[0940] 10. Target Cells

[0941] Cas9 molecules and gRNA molecules, e.g., a Cas9 molecule/gRNA molecule complex, can be used to manipulate a cell, e.g., to edit a target nucleic acid, in a wide variety of cells.

[0942] In certain embodiments, a cell is manipulated by editing (e.g., introducing one or more mutations in) one or more forms of Hepatitis B Virus (HBV) genomic DNA, e.g., covalently closed circular HBV DNA (cccDNA), relaxed circular HBV DNA (rcDNA) or linear HBV DNA, e.g., as described herein. In certain embodiments, the expression of one or more HBV genes is modulated, e.g., in vivo. In certain embodiments, the expression of one or more HBV genes residing within integrated HBV DNA (e.g., HBV DNA that has integrated into the subject genome) is modulated, e.g., in vivo. In certain embodiments, the expression of one or more genes is modulated, e.g., ex vivo. In certain embodiments, editing (e.g., introducing one or more mutations in) the HBV genomic DNA (e.g., cccDNA, rcDNA or linear DNA) leads to partial or complete destruction of the HBV genomic DNA e.g., cccDNA, rcDNA or linear DNA), e.g., in vivo. In yet certain embodiments, editing (e.g., introducing one or more mutations in) the HBV genomic DNA (e.g., cccDNA, rcDNA or linear DNA) leads to partial or complete destruction of the HBV genomic DNA e.g., cccDNA, rcDNA or linear DNA), e.g., ex vivo.

[0943] The Cas9 and gRNA molecules, genome editing systems, compositions, or vectors described herein can be delivered to a target cell. Non-limiting examples of target cells include liver cells (including but not limited to hepatocytes, kupfer cells, sinusoidal epithelial cells, stellate cells, renal tubular epithelial cells). In certain embodiments, the target cell is a cell infected by HBV, e.g., a cell expressing sodium taurocholate co-transporting polypeptide (NTCP) receptor, e.g., a hepatocyte. In certain embodiments, the target cell is a hepatocyte.

### 11. Delivery, Formulations and Routes of Administration

[0944] The components, e.g., a Cas9 molecule, one or more gRNA molecules (e.g., a Cas9 molecule/gRNA molecule complex), and a donor template nucleic acid, or all three, can be delivered, formulated, or administered in a variety of forms, see, e.g., Tables 7 and 8. In certain embodiments, the Cas9 molecule, one or more gRNA molecules (e.g., two gRNA molecules) are present together in a genome editing system. In certain embodiments, the sequence encoding the Cas9 molecule and the sequence(s) encoding the two or more (e.g., 2, 3, 4, or more) different gRNA molecules are present on the same nucleic acid molecule, e.g., an AAV vector or a lentivirus (LV) vector. In certain embodiments, two sequences encoding the Cas9 molecules and the sequences encoding the two or more (e.g., 2, 3, 4, or more) different gRNA molecules are present on the same nucleic acid molecule, e.g., an AAV vector. When a Cas9 or gRNA component is encoded as DNA for delivery, the DNA can typically include a control region, e.g., comprising a promoter, to effect expression. Useful promoters for Cas9 molecule sequences include CMV, EFS, EF-1a, MSCV, PGK, CAG, ALB, TBG, SERPINA1, the Skeletal Alpha Actin promoter, the Muscle Creatine Kinase promoter, the Dystrophin promoter, the Alpha Myosin Heavy Chain promoter, and the Smooth Muscle Actin promoter. In certain embodiments, the promoter is a constitutive promoter. In certain embodiments, the promoter is a tissue specific promoter. Useful promoters for gRNAs include T7.H1, EF-1a, 7SK, U6, U1 and tRNA promoters. Promoters with similar or dissimilar strengths can be selected to tune the expression of components. Sequences encoding a Cas9 molecule can comprise a nuclear localization signal (NLS), e.g., an SV40 NLS. In certain embodiments, the sequence encoding a Cas9 molecule comprise at least two nuclear localization signals. In certain embodiments a promoter for a Cas9 molecule or a gRNA molecule can be, independently, inducible, tissue specific, or cell specific. Table 7 provides examples of how the components can be formulated, delivered, or administered.

TABLE 7
Elements

| | | Donor | |
|---|---|---|---|
| | | Template | |
| Cas9 | gRNA | Nucleic | |
| Molecule(s) | Molecule(s) | Acid | Comments |
| DNA | DNA | DNA | In certain embodiments, a Cas9 |
| | | | molecule (e.g., an eaCas9 or eiCas9 |
| | | | molecule) and a gRNA are transcribed |
| | | | from DNA. In certain embodiments, |
| | | | they are encoded on separate |
| | | | molecules. In certain embodiments, the |
| | | | donor template is provided as a separate |
| | | | DNA molecule. |
| DNA | DNA | | In certain embodiments, a Cas9 |
| | | | molecule (e.g., an eaCas9 or eiCas9 |
| | | | molecule) and a gRNA are transcribed |
| | | | from DNA. In certain embodiments, |
| | | | they are encoded on separate |
| | | | molecules. In certain embodiments, the |
| | | | donor template is provided on the same |
| | | | DNA molecule that encodes the gRNA. |
| DNA | | DNA | In certain embodiments, a Cas9 |
| | | | molecule (e.g., an eaCas9 or eiCas9 |
| | | | molecule) and a gRNA are transcribed |
| | | | from DNA, here from a single |
| | | | molecule. In certain embodiments, the |
| | | | donor template is provided as a separate |
| | | | DNA molecule. |
| DNA | DNA | | In certain embodiments, a Cas9 |
| | | | molecule (e.g., an eaCas9 or eiCas9 |
| | | | molecule), and a gRNA are transcribed |
| | | | from DNA. In certain embodiments, |
| | | | they are encoded on separate |
| | | | molecules. In certain embodiments, the |
| | | | donor template is provided on the same |
| | | | DNA molecule that encodes the Cas9. |
| DNA | RNA | DNA | In certain embodiments, a Cas9 |
| | | | molecule (e.g., an eaCas9 or eiCas9 |
| | | | molecule) is transcribed from DNA, and |
| | | | a gRNA is provided as in vitro |
| | | | transcribed or synthesized RNA. In |
| | | | certain embodiments, the donor |
| | | | template is provided as a separate DNA |
| | | | molecule. |
| DNA | RNA | | In certain embodiments, a Cas9 |
| | | | molecule (e.g., an eaCas9 or eiCas9 |
| | | | molecule) is transcribed from DNA, and |
| | | | a gRNA is provided as in vitro |
| | | | transcribed or synthesized RNA. In |
| | | | certain embodiments, the donor |
| | | | template is provided on the same DNA |
| | | | molecule that encodes the Cas9. |
| mRNA | RNA | DNA | In certain embodiments, a Cas9 |
| | | | molecule (e.g., an eaCas9 or eiCas9 |
| | | | molecule) is translated from in vitro |
| | | | transcribed mRNA, and a gRNA is |
| | | | provided as in vitro transcribed or |
| | | | synthesized RNA. In certain |
| | | | embodiments, the donor template is |
| | | | provided as a DNA molecule. |
| mRNA | DNA | DNA | In certain embodiments, a Cas9 |
| | | | molecule (e.g., an eaCas9 or eiCas9 |
| | | | molecule) is translated from in vitro |
| | | | transcribed mRNA, and a gRNA is |
| | | | transcribed from DNA. In certain |
| | | | embodiments, the donor template is |
| | | | provided as a separate DNA molecule. |
| mRNA | DNA | | In certain embodiments, a Cas9 |
| | | | molecule (e.g., an eaCas9 or eiCas9 |
| | | | molecule) is translated from in vitro |
| | | | transcribed mRNA, and a gRNA is |
| | | | transcribed from DNA. In certain |
| | | | embodiments, the donor template is |
| | | | provided on the same DNA molecule |
| | | | that encodes the gRNA. |
| Protein | DNA | DNA | In certain embodiments, a Cas9 |
| | | | molecule (e.g., an eaCas9 or eiCas9 |
| | | | molecule) is provided as a protein, and a |
| | | | gRNA is transcribed from DNA. In |
| | | | certain embodiments, the donor |
| | | | template is provided as a separate DNA |
| | | | molecule. |
| Protein | DNA | | In certain embodiments, a Cas9 |
| | | | molecule (e.g., an eaCas9 or eiCas9 |
| | | | molecule) is provided as a protein, and a |
| | | | gRNA is transcribed from DNA. In |
| | | | certain embodiments, the donor |
| | | | template is provided on the same DNA |
| | | | molecule that encodes the gRNA. |
| Protein | RNA | DNA | In certain embodiments (e.g., an eaCas9 |
| | | | or eiCas9 molecule) is provided as a |
| | | | protein, and a gRNA is provided as |
| | | | transcribed or synthesized RNA. This |
| | | | delivery method is referred to as “RNP |
| | | | delivery”. In certain embodiments, the |
| | | | donor template is provided as a DNA |
| | | | molecule. |

[0945] Table 8 summarizes various delivery methods for the components of a Cas system, e.g., the Cas9 molecule component and the gRNA molecule component, as described herein.

TABLE 8

| | | Delivery | | | |
|---|---|---|---|---|---|
| | | into Non- | Duration | | Type of |
| | | Dividing | of | Genome | Molecule |
| Delivery Vector/Mode | | Cells | Expression | Integration | Delivered |
| Physical (e.g., electroporation, | | YES | Transient | NO | Nucleic Acids |
| particle gun, Calcium | | | | | and Proteins |
| Phosphate transfection, cell | | | | | |
| compression or squeezing) | | | | | |
| Viral | Retrovirus | NO | Stable | YES | RNA |
| | Lentivirus | YES | Stable | YES/NO with | RNA |
| | | | | modifications | |
| | Adenovirus | YES | Transient | NO | DNA |
| | Adeno- | YES | Stable | NO | DNA |
| | Associated Virus | | | | |
| | (AAV) | | | | |
| | Vaccinia Virus | YES | Very | NO | DNA |
| | | | Transient | | |
| | Herpes Simplex | YES | Stable | NO | DNA |
| | Virus | | | | |
| Non-Viral | Cationic | YES | Transient | Depends on | Nucleic Acids |
| | Liposomes | | | what is | and Proteins |
| | | | | delivered | |
| | Polymeric | YES | Transient | Depends on | Nucleic Acids |
| | Nanoparticles | | | what is | and Proteins |
| | | | | delivered | |
| Biological | Attenuated | YES | Transient | NO | Nucleic Acids |
| Non-Viral | Bacteria | | | | |
| Delivery | Engineered | YES | Transient | NO | Nucleic Acids |
| Vehicles | Bacteriophages | | | | |
| | Mammalian | YES | Transient | NO | Nucleic Acids |
| | Virus-like | | | | |
| | Particles | | | | |
| | Biological | YES | Transient | NO | Nucleic Acids |
| | liposomes: | | | | |
| | Erythrocyte | | | | |
| | Ghosts and | | | | |
| | Exosomes | | | | |

[0946] 11.1 DNA-Based Delivery of a Cas9 Molecule and or One or More gRNA Molecule

[0947] Nucleic acid compositions encoding Cas9 molecules (e.g., eaCas9 molecules or eiCas9 molecules), gRNA molecules, a donor template nucleic acid, or any combination (e.g., two or all) thereof can be administered to subjects or delivered into cells by art-known methods or as described herein. For example, Cas9-encoding and/or gRNA-encoding DNA, as well as donor template nucleic acids can be delivered, e.g., by vectors (e.g., viral or non-viral vectors), non-vector based methods (e.g., using naked DNA or DNA complexes), or a combination thereof.

[0948] Nucleic acid compositions encoding Cas9 molecules (e.g., eaCas9 molecules or eiCas9 molecules) and/or gRNA molecules can be conjugated to molecules (e.g., N-acetylgalactosamine) promoting uptake by the target cells (e.g., the target cells described herein). Donor template molecules can likewise be conjugated to molecules (e.g., N-acetylgalactosamine) promoting uptake by the target cells (e.g., the target cells described herein).

[0949] In certain embodiments, the Cas9- and/or gRNA-encoding DNA is delivered by a vector (e.g., viral vector/virus or plasmid).

[0950] Vectors can comprise a sequence that encodes a Cas9 molecule and/or a gRNA molecule, and/or a donor template with high homology to the region (e.g., target sequence) being targeted. In certain embodiments, the donor template comprises all or part of a target sequence. Exemplary donor templates are a repair template, e.g., a gene correction template, or a gene mutation template, e.g., point mutation (e.g., single nucleotide (nt) substitution) template).

[0951] A vector can also comprise a sequence encoding a signal peptide (e.g., for nuclear localization, nucleolar localization, or mitochondrial localization), fused, e.g., to a Cas9 molecule sequence. For example, the vectors can comprise a nuclear localization sequence (e.g., from SV40) fused to the sequence encoding the Cas9 molecule.

[0952] One or more regulatory/control elements, e.g., promoters, enhancers, introns, polyadenylation signals, a Kozak consensus sequences, internal ribosome entry sites (IRES), a 2A sequence, and splice acceptor or donor can be included in the vectors. In certain embodiments, the promoter is recognized by RNA polymerase II (e.g., a CMV promoter). In other embodiments, the promoter is recognized by RNA polymerase III (e.g., a U6 promoter). In certain embodiments, the promoter is a regulated promoter (e.g., inducible promoter). In certain embodiments, the promoter is a constitutive promoter. In certain embodiments, the promoter is a tissue specific promoter. In certain embodiments, the promoter is a viral promoter. In certain embodiments, the promoter is a non-viral promoter.

[0953] In certain embodiments, the vector or delivery vehicle is a viral vector (e.g., for generation of recombinant viruses). In certain embodiments, the virus is a DNA virus (e.g., dsDNA or ssDNA virus). In certain embodiments, the virus is an RNA virus (e.g., an ssRNA virus). In certain embodiments, the virus infects dividing cells. In other embodiments, the virus infects non-dividing cells. Exemplary viral vectors/viruses include, e.g., retroviruses, lentiviruses (LV), adenovirus, adeno-associated virus (AAV), vaccinia viruses, poxviruses, and herpes simplex viruses.

[0954] In certain embodiments, the virus infects dividing cells. In other embodiments, the virus infects non-dividing cells. In certain embodiments, the virus infects both dividing and non-dividing cells. In certain embodiments, the virus can integrate into the host genome. In certain embodiments, the virus is engineered to have reduced immunity, e.g., in human. In certain embodiments, the virus is replication-competent. In other embodiments, the virus is replication-defective, e.g., having one or more coding regions for the genes necessary for additional rounds of virion replication and/or packaging replaced with other genes or deleted. In certain embodiments, the virus causes transient expression of the Cas9 molecule or molecules and/or the gRNA molecule or molecules. In other embodiments, the virus causes long-lasting, e.g., at least 1 week, 2 weeks, 1 month, 2 months, 3 months, 6 months, 9 months, 1 year, 2 years, or permanent expression, of the Cas9 molecule or molecules and/or the gRNA molecule or molecules. The packaging capacity of the viruses may vary, e.g., from at least about 4 kb to at least about 30 kb, e.g., at least about 5 kb, 10 kb, 15 kb, 20 kb, 25 kb, 30 kb, 35 kb, 40 kb, 45 kb, or 50 kb.

[0955] In certain embodiments, the viral vector recognizes a specific cell type or tissue. For example, the viral vector can be pseudotyped with a different/alternative viral envelope glycoprotein; engineered with a cell type-specific receptor (e.g., genetic modification(s) of one or more viral envelope glycoproteins to incorporate a targeting ligand such as a peptide ligand, a single chain antibody, or a growth factor); and/or engineered to have a molecular bridge with dual specificities with one end recognizing a viral glycoprotein and the other end recognizing a moiety of the target cell surface (e.g., a ligand-receptor, monoclonal antibody, avidin-biotin and chemical conjugation).

[0956] In certain embodiments, the Cas9- and/or gRNA-encoding sequence is delivered by a recombinant retrovirus. In certain embodiments, the retrovirus (e.g., Moloney murine leukemia virus) comprises a reverse transcriptase, e.g., that allows integration into the host genome. In certain embodiments, the retrovirus is replication-competent. In other embodiments, the retrovirus is replication-defective, e.g., having one of more coding regions for the genes necessary for additional rounds of virion replication and packaging replaced with other genes, or deleted.

[0957] In certain embodiments, the Cas9- and/or gRNA-encoding nucleic acid sequence is delivered by a recombinant lentivirus. In certain embodiments, the donor template nucleic acid is delivered by a recombinant retrovirus. For example, the lentivirus is replication-defective, e.g., does not comprise one or more genes required for viral replication.

[0958] In certain embodiments, the Cas9- and/or gRNA-encoding nucleic acid sequence is delivered by a recombinant adenovirus. In certain embodiments, the donor template nucleic acid is delivered by a recombinant adenovirus. In certain embodiments, the adenovirus is engineered to have reduced immunity in human.

[0959] In certain embodiments, the Cas9- and/or gRNA-encoding nucleic acid sequence is delivered by a recombinant AAV. In certain embodiments, the donor template nucleic acid is delivered by a recombinant AAV. In certain embodiments, the AAV does not incorporate its genome into that of a host cell, e.g., a target cell as describe herein. In certain embodiments, the AAV can incorporate at least part of its genome into that of a host cell, e.g., a target cell as described herein. In certain embodiments, the AAV is a self-complementary adeno-associated virus (scAAV), e.g., a scAAV that packages both strands which anneal together to form double stranded DNA. AAV serotypes that may be used in the disclosed methods, include AAV1, AAV2, modified AAV2 (e.g., modifications at Y444F, Y500F, Y730F and/or S662V), AAV3, modified AAV3 (e.g., modifications at Y705F, Y731F and/or T492V), AAV4, AAV5, AAV6, modified AAV6 (e.g., modifications at S663V and/or T492V), AAV8, AAV 8.2, AAV9, AAV rh10, and pseudotyped AAV, such as AAV2/8, AAV2/5 and AAV2/6 can also be used in the disclosed methods. In certain embodiments, an AAV capsid that can be used in the methods described herein is a capsid sequence from serotype AAV1, AAV2, AAV3, AAV4, AAV5, AAV6, AAV7, AAV8, AAV9, AAV.rh8, AAV.rh10, AAV.rh32/33, AAV.rh43, AAV.rh64R1, or AAV7m8.

[0960] In certain embodiments, the Cas9- and/or gRNA-encoding nucleic acid sequence is delivered in a re-engineered AAV capsid, e.g., with about 50% or greater, e.g., about 60% or greater, about 70% or greater, about 80% or greater, about 90% or greater, or about 95% or greater, sequence homology with a capsid sequence from serotypes AAV1, AAV2, AAV3, AAV4, AAV5, AAV6, AAV7, AAV8, AAV9, AAV.rh8, AAV.rh10, AAV.rh32/33, AAV.rh43, or AAV.rh64R1.

[0961] In certain embodiments, the Cas9- and/or gRNA-encoding nucleic acid sequence is delivered by a chimeric AAV capsid. In certain embodiments, the donor template nucleic acid is delivered by a chimeric AAV capsid. Exemplary chimeric AAV capsids include, but are not limited to, AAV9i1, AAV2i8, AAV-DJ, AAV2G9, AAV2i8G9, or AAV8G9.

[0962] In certain embodiments, the AAV is a self-complementary adeno-associated virus (scAAV), e.g., a scAAV that packages both strands which anneal together to form double stranded DNA.

[0963] In certain embodiments, the Cas9- and/or gRNA-encoding DNA is delivered by a hybrid virus, e.g., a hybrid of one or more of the viruses described herein. In certain embodiments, the hybrid virus is hybrid of an AAV (e.g., of any AAV serotype), with a Bocavirus, B19 virus, porcine AAV, goose AAV, feline AAV, canine AAV, or MVM.

[0964] A packaging cell is used to form a virus particle that is capable of infecting a target cell. Exemplary packaging cells include 293 cells, which can package adenovirus, and ψ2 or PA317 cells, which can package retrovirus. A viral vector used in gene therapy is usually generated by a producer cell line that packages a nucleic acid vector into a viral particle. The vector typically contains the minimal viral sequences required for packaging and subsequent integration into a host or target cell (if applicable), with other viral sequences being replaced by an expression cassette encoding the protein to be expressed, e.g., components for a Cas9 molecule, e.g., two Cas9 components. For example, an AAV vector used in gene therapy typically only possesses inverted terminal repeat (ITR) sequences from the AAV genome which are required for packaging and gene expression in the host or target cell. The missing viral functions can be supplied in trans by the packaging cell line and/or plasmid containing E2A, E4, and VA genes from adenovirus, and plasmid encoding Rep and Cap genes from AAV, as described in “Triple Transfection Protocol.” Henceforth, the viral DNA is packaged in a cell line, which contains a helper plasmid encoding the other AAV genes, namely rep and cap, but lacking ITR sequences. In certain embodiments, the viral DNA is packaged in a producer cell line, which contains E1A and/or E1B genes from adenovirus. The cell line is also infected with adenovirus as a helper. The helper virus (e.g., adenovirus or HSV) or helper plasmid promotes replication of the AAV vector and expression of AAV genes from the helper plasmid with ITRs. The helper plasmid is not packaged in significant amounts due to a lack of ITR sequences. Contamination with adenovirus can be reduced by, e.g., heat treatment to which adenovirus is more sensitive than AAV.

[0965] In certain embodiments, the viral vector is capable of cell type and/or tissue type recognition. For example, the viral vector can be pseudotyped with a different/alternative viral envelope glycoprotein; engineered with a cell type-specific receptor (e.g., genetic modification of the viral envelope glycoproteins to incorporate targeting ligands such as peptide ligands, single chain antibodies, growth factors); and/or engineered to have a molecular bridge with dual specificities with one end recognizing a viral glycoprotein and the other end recognizing a moiety of the target cell surface (e.g., ligand-receptor, monoclonal antibody, avidin-biotin and chemical conjugation).

[0966] In certain embodiments, the viral vector achieves cell type specific expression. For example, a tissue-specific promoter can be constructed to restrict expression of the transgene (Cas9 and gRNA) to only the target cell. The specificity of the vector can also be mediated by microRNA-dependent control of transgene expression. In certain embodiments, the viral vector has increased efficiency of fusion of the viral vector and a target cell membrane. For example, a fusion protein such as fusion-competent hemagglutin (HA) can be incorporated to increase viral uptake into cells. In certain embodiments, the viral vector has the ability of nuclear localization. For example, a virus that requires the breakdown of the nuclear envelope (during cell division) and therefore can not infect a non-diving cell can be altered to incorporate a nuclear localization peptide in the matrix protein of the virus thereby enabling the transduction of non-proliferating cells.

[0967] In certain embodiments, the Cas9- and/or gRNA-encoding nucleic acid sequence is delivered by a non-vector based method (e.g., using naked DNA or DNA complexes). For example, the DNA can be delivered, e.g., by organically modified silica or silicate (Ormosil), electroporation, transient cell compression or squeezing (e.g., as described in Lee, et al, 2012, Nano Lett 12: 6322-27), gene gun, sonoporation, magnetofection, lipid-mediated transfection, dendrimers, inorganic nanoparticles, calcium phosphates, or a combination thereof.

[0968] In certain embodiments, delivery via electroporation comprises mixing the cells with the Cas9- and/or gRNA-encoding DNA in a cartridge, chamber or cuvette and applying one or more electrical impulses of defined duration and amplitude. In certain embodiments, delivery via electroporation is performed using a system in which cells are mixed with the Cas9- and/or gRNA-encoding DNA in a vessel connected to a device (e.g., a pump) which feeds the mixture into a cartridge, chamber or cuvette wherein one or more electrical impulses of defined duration and amplitude are applied, after which the cells are delivered to a second vessel.

[0969] In certain embodiments, the Cas9- and/or gRNA-encoding nucleic acid sequence is delivered by a combination of a vector and a non-vector based method. In certain embodiments, the donor template nucleic acid is delivered by a combination of a vector and a non-vector based method. For example, virosomes combine liposomes combined with an inactivated virus (e.g., HIV or influenza virus), which can result in more efficient gene transfer, e.g., in respiratory epithelial cells than either viral or liposomal methods alone.

[0970] In certain embodiments, the delivery vehicle is a non-viral vector. In certain embodiments, the non-viral vector is an inorganic nanoparticle. Exemplary inorganic nanoparticles include, e.g., magnetic nanoparticles (e.g., Fe₃MnO₂) and silica. The outer surface of the nanoparticle can be conjugated with a positively charged polymer (e.g., polyethylenimine, polylysine, polyserine) which allows for attachment (e.g., conjugation or entrapment) of payload. In certain embodiments, the non-viral vector is an organic nanoparticle (e.g., entrapment of the payload inside the nanoparticle). Exemplary organic nanoparticles include, e.g., SNALP liposomes that contain cationic lipids together with neutral helper lipids which are coated with polyethylene glycol (PEG) and protamine and nucleic acid complex coated with lipid coating.

[0971] Exemplary lipids for gene transfer are shown below in Table 9.

TABLE 9
Lipids Used for Gene Transfer

| Lipid | Abbreviation | Feature |
|---|---|---|
| 1,2-Dioleoyl-sn-glycero-3-phosphatidylcholine | DOPC | Helper |
| 1,2-Dioleoyl-sn-glycero-3- | DOPE | Helper |
| phosphatidylethanolamine | | |
| Cholesterol | | Helper |
| N-[1-(2,3-Dioleyloxy)propyl]N,N,N- | DOTMA | Cationic |
| trimethylammonium chloride | | |
| 1,2-Dioleoyloxy-3-trimethylammonium-propane | DOTAP | Cationic |
| Dioctadecylamidoglycylspermine | DOGS | Cationic |
| N-(3-Aminopropyl)-N,N-dimethyl-2,3 - | GAP-DLRIE | Cationic |
| bis(dodecyloxy)-1-propanaminium bromide | | |
| Cetyltrimethylammonium bromide | CTAB | Cationic |
| 6-Lauroxyhexyl ornithinate | LHON | Cationic |
| 1-(2,3-Dioleoyloxypropyl)-2,4,6- | 2Oc | Cationic |
| trimethylpyridinium | | |
| 2,3-Dioleyloxy-N-[2(sperminecarboxamido- | DOSPA | Cationic |
| ethyl]-N,N-dimethyl-1-propanaminium | | |
| trifluoroacetate | | |
| 1,2-Dioleyl-3-trimethylammonium-propane | DOPA | Cationic |
| N-(2-Hydroxyethyl)-N,N-dimethyl-2,3- | MDRIE | Cationic |
| bis(tetradecyloxy)-1-propanaminium bromide | | |
| Dimyristooxypropyl dimethyl hydroxyethyl | DMRI | Cationic |
| ammonium bromide | | |
| 3β-[N-(N′,N′-Dimethylaminoethane)- | DC-Chol | Cationic |
| carbamoyl]cholesterol | | |
| Bis-guanidium-tren-cholesterol | BGTC | Cationic |
| 1,3-Diodeoxy-2-(6-carboxy-spermyl)-propylamide | DOSPER | Cationic |
| Dimethyloctadecylammonium bromide | DDAB | Cationic |
| Dioctadecylamidoglicylspermidin | DSL | Cationic |
| rac-[(2,3-Dioctadecyloxypropyl)(2-hydroxy- | CLIP-1 | Cationic |
| ethyl)]-dimethylammonium chloride | | |
| rac-[2(2,3-Dihexadecyloxypropyl- | CLIP-6 | Cationic |
| oxymethyloxy)ethyl]trimethylammonium bromide | | |
| Ethyldimyristoylphosphatidylcholine | EDMPC | Cationic |
| 1,2-Distearyloxy-N,N-dimethyl-3-aminopropane | DSDMA | Cationic |
| 1,2-Dimyristoyl-trimethylammonium propane | DMTAP | Cationic |
| O,O′-Dimyristyl-N-lysyl aspartate | DMKE | Cationic |
| 1,2-Distearoyl-sn-glycero-3-ethylphosphocholine | DSEPC | Cationic |
| N-Palmitoyl D-erythro-sphingosyl carbamoyl- | CCS | Cationic |
| spermine | | |
| N-t-Butyl-N0-tetradecyl-3- | diC14- | Cationic |
| tetradecylaminopropionamidine | amidine | |
| Octadecenolyoxy[ethyl-2-heptadecenyl-3 | DOTIM | Cationic |
| hydroxyethyl] imidazolinium chloride | | |
| N1-Cholesteryloxycarbonyl-3,7-diazanonane-1,9- | CDAN | Cationic |
| diamine | | |
| 2-(3-[Bis(3-amino-propyl)-amino]propylamino)- | RPR209120 | Cationic |
| N-ditetradecylcarbamoylme-ethyl-acetamide | | |
| 1,2-dilinoleyloxy-3-dimethylaminopropane | DLinDMA | Cationic |
| 2,2-dilinoleyl-4-dimethylaminoethyl-[1,3]- | DLin-KC2- | Cationic |
| dioxolane | DMA | |
| dilinoleyl-methyl-4-dimethylaminobutyrate | DLin-MC3- | Cationic |
| | DMA | |

[0972] Exemplary polymers for gene transfer are shown below in Table 10.

TABLE 10
Polymers Used for Gene Transfer

| Polymer | Abbreviation |
|---|---|
| Poly(ethylene)glycol | PEG |
| Polyethylenimine | PEI |
| Dithiobis(succinimidylpropionate) | DSP |
| Dimethyl-3,3′-dithiobispropionimidate | DTBP |
| Poly(ethylene imine) biscarbamate | PEIC |
| Poly(L-lysine) | PLL |
| Histidine modified PLL | |
| Poly(N-vinylpyrrolidone) | PVP |
| Poly(propylenimine) | PPI |
| Poly(amidoamine) | PAMAM |
| Poly(amido ethylenimine) | SS-PAEI |
| Triethylenetetramine | TETA |
| Poly(β-aminoester) | |
| Poly(4-hydroxy-L-proline ester) | PHP |
| Poly(allylamine) | |
| Poly(α-[4-aminobutyl]-L-glycolic acid) | PAGA |
| Poly(D,L-lactic-co-glycolic acid) | PLGA |
| Poly(N-ethyl-4-vinylpyridinium bromide) | |
| Poly(phosphazene)s | PPZ |
| Poly(phosphoester)s | PPE |
| Poly(phosphoramidate)s | PPA |
| Poly(N-2-hydroxypropylmethacrylamide) | pHPMA |
| Poly (2-(dimethylamino)ethyl methacrylate) | pDMAEMA |
| Poly(2-aminoethyl propylene phosphate) | PPE-EA |
| Chitosan | |
| Galactosylated chitosan | |
| N-Dodacylated chitosan | |
| Histone | |
| Collagen | |
| Dextran-spermine | D-SPM |

[0973] In certain embodiments, the vehicle has targeting modifications to increase target cell update of nanoparticles and liposomes, e.g., cell specific antigens, monoclonal antibodies, single chain antibodies, aptamers, polymers, sugars (e.g., N-acetylgalactosamine (GalNAc)), and cell penetrating peptides. In certain embodiments, the vehicle uses fusogenic and endosome-destabilizing peptides/polymers. In certain embodiments, the vehicle undergoes acid-triggered conformational changes (e.g., to accelerate endosomal escape of the cargo). In certain embodiments, a stimuli-cleavable polymer is used, e.g., for release in a cellular compartment. For example, disulfide-based cationic polymers that are cleaved in the reducing cellular environment can be used.

[0974] In certain embodiments, the delivery vehicle is a biological non-viral delivery vehicle. In certain embodiments, the vehicle is an attenuated bacterium (e.g., naturally or artificially engineered to be invasive but attenuated to prevent pathogenesis and expressing the transgene (e.g., Listeria monocytogenes, certain Salmonella strains, Bifidobacterium longum, and modified Escherichia coli), bacteria having nutritional and tissue-specific tropism to target specific tissues, bacteria having modified surface proteins to alter target tissue specificity). In certain embodiments, the vehicle is a genetically modified bacteriophage (e.g., engineered phages having large packaging capacity, less immunogenic, containing mammalian plasmid maintenance sequences and having incorporated targeting ligands). In certain embodiments, the vehicle is a mammalian virus-like particle. For example, modified viral particles can be generated (e.g., by purification of the “empty” particles followed by ex vivo assembly of the virus with the desired cargo). The vehicle can also be engineered to incorporate targeting ligands to alter target tissue specificity. In certain embodiments, the vehicle is a biological liposome. For example, the biological liposome is a phospholipid-based particle derived from human cells (e.g., erythrocyte ghosts, which are red blood cells broken down into spherical structures derived from the subject (e.g., tissue targeting can be achieved by attachment of various tissue or cell-specific ligands), or secretory exosomes—subject (i.e., patient) derived membrane-bound nanovesicle (30-100 nm) of endocytic origin (e.g., can be produced from various cell types and can therefore be taken up by cells without the need of for targeting ligands).

[0975] In certain embodiments, one or more nucleic acid molecules (e.g., DNA molecules) other than the components of a Cas system, e.g., the Cas9 molecule component or components and/or the gRNA molecule component or components described herein, are delivered. In certain embodiments, the nucleic acid molecule is delivered at the same time as one or more of the components of the Cas system are delivered. In certain embodiments, the nucleic acid molecule is delivered before or after (e.g., less than about 30 minutes, 1 hour, 2 hours, 3 hours, 6 hours, 9 hours, 12 hours, 1 day, 2 days, 3 days, 1 week, 2 weeks, or 4 weeks) one or more of the components of the Cas system are delivered. In certain embodiments, the nucleic acid molecule is delivered by a different means than one or more of the components of the Cas system, e.g., the Cas9 molecule component and/or the gRNA molecule component, are delivered. The nucleic acid molecule can be delivered by any of the delivery methods described herein. For example, the nucleic acid molecule can be delivered by a viral vector, e.g., an integration-deficient lentivirus, and the Cas9 molecule component or components and/or the gRNA molecule component or components can be delivered by a nanoparticle, e.g., such that the toxicity caused by nucleic acids (e.g., DNAs) can be reduced. In certain embodiments, the nucleic acid molecule encodes a therapeutic protein, e.g., a protein described herein. In certain embodiments, the nucleic acid molecule encodes an RNA molecule, e.g., an RNA molecule described herein.

[0976] 11.2 Delivery of a RNA Encoding a Cas9 Molecule

[0977] RNA encoding Cas9 molecules (e.g., eaCas9 molecules or eiCas9 molecules) and/or gRNA molecules, can be delivered into cells, e.g., target cells described herein, by art-known methods or as described herein. For example, Cas9-encoding and/or gRNA-encoding RNA can be delivered, e.g., by microinjection, electroporation, transient cell compression or squeezing (e.g., as described in Lee, et al., 2012, Nano Lett 12: 6322-27), lipid-mediated transfection, peptide-mediated delivery, or a combination thereof. Cas9-encoding and/or gRNA-encoding RNA can be conjugated to molecules to promote uptake by the target cells (e.g., target cells described herein).

[0978] In certain embodiments, delivery via electroporation comprises mixing the cells with the RNA encoding Cas9 molecules (e.g., eaCas9 molecules, eiCas9 molecules or eiCas9 fusion proteins) and/or gRNA molecules with or without donor template nucleic acid molecules, in a cartridge, chamber or cuvette and applying one or more electrical impulses of defined duration and amplitude. In certain embodiments, delivery via electroporation is performed using a system in which cells are mixed with the RNA encoding Cas9 molecules (e.g., eaCas9 molecules, eiCas9 molecules or eiCas9 fusion proteins) and/or gRNA molecules with or without donor template nucleic acid molecules, in a vessel connected to a device (e.g., a pump) which feeds the mixture into a cartridge, chamber or cuvette wherein one or more electrical impulses of defined duration and amplitude are applied, after which the cells are delivered to a second vessel. Cas9-encoding and/or gRNA-encoding RNA can be conjugated to molecules to promote uptake by the target cells (e.g., target cells described herein).

[0979] 11.3 Delivery of a Cas9 Molecule Protein

[0980] Cas9 molecules (e.g., eaCas9 molecules or eiCas9 molecules) can be delivered into cells by art-known methods or as described herein. For example, Cas9 protein molecules can be delivered, e.g., by microinjection, electroporation, transient cell compression or squeezing (e.g., as described in Lee, et al, 2012, Nano Lett 12: 6322-27), lipid-mediated transfection, peptide-mediated delivery, or a combination thereof. Delivery can be accompanied by DNA encoding a gRNA or by a gRNA. Cas9 protein can be conjugated to molecules promoting uptake by the target cells (e.g., target cells described herein).

[0981] In certain embodiments, delivery via electroporation comprises mixing the cells with the Cas9 molecules (e.g., eaCas9 molecules, eiCas9 molecules or eiCas9 fusion proteins) and/or gRNA molecules with or without donor nucleic acid, in a cartridge, chamber or cuvette and applying one or more electrical impulses of defined duration and amplitude. In certain embodiments, delivery via electroporation is performed using a system in which cells are mixed with the Cas9 molecules (e.g., eaCas9 molecules, eiCas9 molecules or eiCas9 fusion proteins) and/or gRNA molecules in a vessel connected to a device (e.g., a pump) which feeds the mixture into a cartridge, chamber or cuvette wherein one or more electrical impulses of defined duration and amplitude are applied, after which the cells are delivered to a second vessel. Cas9-encoding and/or gRNA-encoding RNA can be conjugated to molecules to promote uptake by the target cells (e.g., target cells described herein).

[0982] 11. 4 RNP Delivery of Cas9 Molecule Protein and gRNA

[0983] In certain embodiments, the Cas9 molecule and gRNA molecule are delivered to target cells via Ribonucleoprotein (RNP) delivery. In certain embodiments, the Cas9 molecule is provided as a protein, and the gRNA molecule is provided as transcribed or synthesized RNA. The gRNA molecule can be generated by chemical synthesis. In certain embodiments, the gRNA molecule forms a RNP complex with the Cas9 molecule protein under suitable condition prior to delivery to the target cells. The RNP complex can be delivered to the target cells by any suitable methods known in the art, e.g., by electroporation, lipid-mediated transfection, protein or DNA-based shuttle, mechanical force, or hydraulic force.

[0984] 11.5 Route of Administration

[0985] Systemic modes of administration include oral and parenteral routes. Parenteral routes include, by way of example, intravenous, intrarterial, intramuscular, intradermal, subcutaneous, intranasal, and intraperitoneal routes. Components administered systemically may be modified or formulated to target hepatocytes, or to target HBV-infected hepatocytes.

[0986] Local modes of administration include, by way of example, intraparenchymal delivery to the liver, intrahepatic artery infusion and infusion into the portal vein. In certain embodiments, significantly smaller amounts of the components (compared with systemic approaches) may exert an effect when administered locally (for example, directly into the liver parenchyma) compared to when administered systemically (for example, intravenously). Local modes of administration can reduce or eliminate the incidence of potentially toxic side effects that may occur when therapeutically effective amounts of a component are administered systemically.

[0987] Administration may be provided as a periodic bolus (for example, intravenously) or as continuous infusion from an internal reservoir or from an external reservoir (for example, from an intravenous bag or implantable pump). Components may be administered locally, for example, by continuous release from a sustained release drug delivery device implanted in the liver.

[0988] In addition, components may be formulated to permit release over a prolonged period of time. A release system can include a matrix of a biodegradable material or a material which releases the incorporated components by diffusion. The components can be homogeneously or heterogeneously distributed within the release system. A variety of release systems may be useful, however, the choice of the appropriate system will depend upon rate of release required by a particular application. Both non-degradable and degradable release systems can be used. Suitable release systems include polymers and polymeric matrices, non-polymeric matrices, or inorganic and organic excipients and diluents such as, but not limited to, calcium carbonate and sugar (for example, trehalose). Release systems may be natural or synthetic. However, synthetic release systems are preferred because generally they are more reliable, more reproducible and produce more defined release profiles. The release system material can be selected so that components having different molecular weights are released by diffusion through or degradation of the material.

[0989] Representative synthetic, biodegradable polymers include, for example: polyamides such as poly(amino acids) and poly(peptides); polyesters such as poly(lactic acid), poly(glycolic acid), poly(lactic-co-glycolic acid), and poly(caprolactone); poly(anhydrides); polyorthoesters; polycarbonates; and chemical derivatives thereof (substitutions, additions of chemical groups, for example, alkyl, alkylene, hydroxylations, oxidations, and other modifications routinely made by those skilled in the art), copolymers and mixtures thereof. Representative synthetic, non-degradable polymers include, for example: polyethers such as poly(ethylene oxide), poly(ethylene glycol), and poly(tetramethylene oxide); vinyl polymers-polyacrylates and polymethacrylates such as methyl, ethyl, other alkyl, hydroxyethyl methacrylate, acrylic and methacrylic acids, and others such as poly(vinyl alcohol), poly(vinyl pyrolidone), and poly(vinyl acetate); poly(urethanes); cellulose and its derivatives such as alkyl, hydroxyalkyl, ethers, esters, nitrocellulose, and various cellulose acetates; polysiloxanes; and any chemical derivatives thereof (substitutions, additions of chemical groups, for example, alkyl, alkylene, hydroxylations, oxidations, and other modifications routinely made by those skilled in the art), copolymers and mixtures thereof.

[0990] Poly(lactide-co-glycolide) microsphere can also be used. Typically the microspheres are composed of a polymer of lactic acid and glycolic acid, which are structured to form hollow spheres. The spheres can be approximately 15-30 microns in diameter and can be loaded with components described herein.

[0991] 11.6 Bi-Modal or Differential Delivery of Components

[0992] Separate delivery of the components of a Cas system, e.g., the Cas9 molecule component or components and the gRNA molecule component or components, and more particularly, delivery of the components by differing modes, can enhance performance, e.g., by improving tissue specificity and safety.

[0993] In certain embodiments, the Cas9 molecule or molecules and the gRNA molecule or molecules are delivered by different modes, or as sometimes referred to herein as differential modes. Different or differential modes, as used herein, refer modes of delivery that confer different pharmacodynamic or pharmacokinetic properties on the subject component molecule, e.g., a Cas9 molecule or molecules or gRNA molecule or molecules, template nucleic acid, or payload. For example, the modes of delivery can result in different tissue distribution, different half-life, or different temporal distribution, e.g., in a selected compartment, tissue, or organ.

[0994] Some modes of delivery, e.g., delivery by a nucleic acid vector that persists in a cell, or in progeny of a cell, e.g., by autonomous replication or insertion into cellular nucleic acid, result in more persistent expression of and presence of a component. Examples include viral, e.g., AAV or lentivirus, delivery.

[0995] By way of example, the components, e.g., a Cas9 molecule and a gRNA molecule, can be delivered by modes that differ in terms of resulting half-life or persistence of the delivered component within the body, or in a particular compartment, tissue or organ. In certain embodiments, a gRNA molecule can be delivered by such modes. The Cas9 molecule component can be delivered by a mode which results in less persistence or less exposure to the body or a particular compartment or tissue or organ. In certain embodiments, two Cas9 molecules can by delivered by modes that differ in terms of resulting half-life or persistence of the delivered component within the body, or in a particular compartment, tissue or organ. In certain embodiments, two or more gRNA molecules can by delivered by modes that differ in terms of resulting half-life or persistence of the delivered component within the body, or in a particular compartment, tissue or organ.

[0996] More generally, in certain embodiments, a first mode of delivery is used to deliver a first component and a second mode of delivery is used to deliver a second component. The first mode of delivery confers a first pharmacodynamic or pharmacokinetic property. The first pharmacodynamic property can be, e.g., distribution, persistence, or exposure, of the component, or of a nucleic acid that encodes the component, in the body, a compartment, tissue or organ. The second mode of delivery confers a second pharmacodynamic or pharmacokinetic property. The second pharmacodynamic property can be, e.g., distribution, persistence, or exposure, of the component, or of a nucleic acid that encodes the component, in the body, a compartment, tissue or organ.

[0997] In certain embodiments, the first pharmacodynamic or pharmacokinetic property, e.g., distribution, persistence or exposure, is more limited than the second pharmacodynamic or pharmacokinetic property.

[0998] In certain embodiments, the first mode of delivery is selected to optimize, e.g., minimize, a pharmacodynamic or pharmacokinetic property, e.g., distribution, persistence or exposure.

[0999] In certain embodiments, the second mode of delivery is selected to optimize, e.g., maximize, a pharmacodynamic or pharmacokinetic property, e.g., distribution, persistence or exposure.

[1000] In certain embodiments, the first mode of delivery comprises the use of a relatively persistent element, e.g., a nucleic acid, e.g., a plasmid or viral vector, e.g., an AAV or lentivirus. As such vectors are relatively persistent product transcribed from them would be relatively persistent.

[1001] In certain embodiments, the second mode of delivery comprises a relatively transient element, e.g., an RNA or protein.

[1002] In certain embodiments, the first component comprises gRNA, and the delivery mode is relatively persistent, e.g., the gRNA is transcribed from a plasmid or viral vector, e.g., an AAV or lentivirus. Transcription of these genes would be of little physiological consequence because the genes do not encode for a protein product, and the gRNAs are incapable of acting in isolation. The second component, a Cas9 molecule, is delivered in a transient manner, for example as mRNA or as protein, ensuring that the full Cas9 molecule/gRNA molecule complex is only present and active for a short period of time.

[1003] In certain embodiments, the second component, two Cas9 molecules, is delivered in a transient manner, for example as mRNA or as protein, ensuring that the full Cas9/gRNA complex is only present and active for a short period of time. In certain embodiments, the second components, two Cas9 molecules, are delivered at two separate time points, e.g. a first Cas9 molecule delivered at one time point and a second Cas9 molecule delivered at a second time point, for example as mRNA or as protein, ensuring that the full Cas9/gRNA complexes are only present and active for a short period of time. Furthermore, the components can be delivered in different molecular form or with different delivery vectors that complement one another to enhance safety and tissue specificity.

[1004] Use of differential delivery modes can enhance performance, safety and efficacy. E.g., the likelihood of an eventual off-target modification can be reduced. Delivery of immunogenic components, e.g., Cas9 molecules, by less persistent modes can reduce immunogenicity, as peptides from the bacterially-derived Cas enzyme are displayed on the surface of the cell by MHC molecules. A two-part delivery system can alleviate these drawbacks.

[1005] Differential delivery modes can be used to deliver components to different, but overlapping target regions. The formation active complex is minimized outside the overlap of the target regions. Thus, in certain embodiments, a first component, e.g., a gRNA molecule is delivered by a first delivery mode that results in a first spatial, e.g., tissue, distribution. A second component, e.g., a Cas9 molecule is delivered by a second delivery mode that results in a second spatial, e.g., tissue, distribution. Two distinct second components, e.g., two distinct Cas9 molecules, are delivered by two distinct delivery modes that result in a second and third spatial, e.g., tissue, distribution. In certain embodiments, the first mode comprises a first element selected from a liposome, nanoparticle, e.g., polymeric nanoparticle, and a nucleic acid, e.g., viral vector. The second mode comprises a second element selected from the group. The third mode comprises a second element selected from the group. In certain embodiments, the first mode of delivery comprises a first targeting element, e.g., a cell specific receptor or an antibody, and the second mode of delivery does not include that element. In embodiment, the second mode of delivery comprises a second targeting element, e.g., a second cell specific receptor or second antibody. In embodiment, the third mode of delivery comprises a second targeting element, e.g., a second cell specific receptor or second antibody.

[1006] When the Cas9 molecule or molecules are delivered in a virus delivery vector, a liposome, or polymeric nanoparticle, there is the potential for delivery to and therapeutic activity in multiple tissues, when it may be desirable to only target a single tissue. A two-part delivery system can resolve this challenge and enhance tissue specificity. If the gRNA molecule or molecules and the Cas9 molecule or molecules are packaged in separated delivery vehicles with distinct but overlapping tissue tropism, the fully functional complex is only be formed in the tissue that is targeted by both vectors.

[1007] 11. 7 Ex Vivo Delivery

[1008] In certain embodiments, each component of the genome editing system described in Table 7 are introduced into a cell which is then introduced into the subject, e.g., cells are removed from a subject, manipulated ex vivo and then introduced into the subject. Methods of introducing the components can include, e.g., any of the delivery methods described in Table 8.

### 12. Modified Nucleosides, Nucleotides, and Nucleic Acids

[1009] Modified nucleosides and modified nucleotides can be present in nucleic acids, e.g., particularly gRNA, but also other forms of RNA, e.g., mRNA, RNAi, or siRNA. As described herein, “nucleoside” is defined as a compound containing a five-carbon sugar molecule (a pentose or ribose) or derivative thereof, and an organic base, purine or pyrimidine, or a derivative thereof. As described herein, “nucleotide” is defined as a nucleoside further comprising a phosphate group.

[1010] Modified nucleosides and nucleotides can include one or more of:

[1011] (i) alteration, e.g., replacement, of one or both of the non-linking phosphate oxygens and/or of one or more of the linking phosphate oxygens in the phosphodiester backbone linkage;

[1012] (ii) alteration, e.g., replacement, of a constituent of the ribose sugar, e.g., of the 2′ hydroxyl on the ribose sugar;

[1013] (iii) wholesale replacement of the phosphate moiety with “dephospho” linkers;

[1014] (iv) modification or replacement of a naturally occurring nucleobase;

[1015] (v) replacement or modification of the ribose-phosphate backbone;

[1016] (vi) modification of the 3′ end or 5′ end of the oligonucleotide, e.g., removal, modification or replacement of a terminal phosphate group or conjugation of a moiety; and

[1017] (vii) modification of the sugar.

[1018] The modifications listed above can be combined to provide modified nucleosides and nucleotides that can have two, three, four, or more modifications. For example, a modified nucleoside or nucleotide can have a modified sugar and a modified nucleobase. In certain embodiments, every base of a gRNA is modified, e.g., all bases have a modified phosphate group, e.g., all are phosphorothioate groups. In certain embodiments, all, or substantially all, of the phosphate groups of a unimolecular or modular gRNA molecule are replaced with phosphorothioate groups.

[1019] In certain embodiments, modified nucleotides, e.g., nucleotides having modifications as described herein, can be incorporated into a nucleic acid, e.g., a “modified nucleic acid.” In certain embodiments, the modified nucleic acids comprise one, two, three or more modified nucleotides. In certain embodiments, at least 5% (e.g., at least about 5%, at least about 10%, at least about 15%, at least about 20%, at least about 25%, at least about 30%, at least about 35%, at least about 40%, at least about 45%, at least about 50%, at least about 55%, at least about 60%, at least about 65%, at least about 70%, at least about 75%, at least about 80%, at least about 85%, at least about 90%, at least about 95%, or about 100%) of the positions in a modified nucleic acid are a modified nucleotides.

[1020] Unmodified nucleic acids can be prone to degradation by, e.g., cellular nucleases. For example, nucleases can hydrolyze nucleic acid phosphodiester bonds. Accordingly, in certain embodiments, the modified nucleic acids described herein can contain one or more modified nucleosides or nucleotides, e.g., to introduce stability toward nucleases.

[1021] In certain embodiments, the modified nucleosides, modified nucleotides, and modified nucleic acids described herein can exhibit a reduced innate immune response when introduced into a population of cells, both in vivo and ex vivo. The term “innate immune response” includes a cellular response to exogenous nucleic acids, including single stranded nucleic acids, generally of viral or bacterial origin, which involves the induction of cytokine expression and release, particularly the interferons, and cell death. In certain embodiments, the modified nucleosides, modified nucleotides, and modified nucleic acids described herein can disrupt binding of a major groove interacting partner with the nucleic acid. In certain embodiments, the modified nucleosides, modified nucleotides, and modified nucleic acids described herein can exhibit a reduced innate immune response when introduced into a population of cells, both in vivo and ex vivo, and also disrupt binding of a major groove interacting partner with the nucleic acid.

[1022] 12.1 Definitions of Chemical Groups

[1023] As used herein, “alkyl” is meant to refer to a saturated hydrocarbon group which is straight-chained or branched. Example alkyl groups include methyl (Me), ethyl (Et), propyl (e.g., n-propyl and isopropyl), butyl (e.g., n-butyl, isobutyl, t-butyl), pentyl (e.g., n-pentyl, isopentyl, neopentyl), and the like. An alkyl group can contain from 1 to about 20, from 2 to about 20, from 1 to about 12, from 1 to about 8, from 1 to about 6, from 1 to about 4, or from 1 to about 3 carbon atoms.

[1024] As used herein, “aryl” refers to monocyclic or polycyclic (e.g., having 2, 3 or 4 fused rings) aromatic hydrocarbons such as, for example, phenyl, naphthyl, anthracenyl, phenanthrenyl, indanyl, indenyl, and the like. In certain embodiments, aryl groups have from 6 to about 20 carbon atoms.

[1025] As used herein, “alkenyl” refers to an aliphatic group containing at least one double bond.

[1026] As used herein, “alkynyl” refers to a straight or branched hydrocarbon chain containing 2-12 carbon atoms and characterized in having one or more triple bonds. Examples of alkynyl groups include, but are not limited to, ethynyl, propargyl, and 3-hexynyl.

[1027] As used herein, “arylalkyl” or “aralkyl” refers to an alkyl moiety in which an alkyl hydrogen atom is replaced by an aryl group. Aralkyl includes groups in which more than one hydrogen atom has been replaced by an aryl group. Examples of “arylalkyl” or “aralkyl” include benzyl, 2-phenylethyl, 3-phenylpropyl, 9-fluorenyl, benzhydryl, and trityl groups.

[1028] As used herein, “cycloalkyl” refers to a cyclic, bicyclic, tricyclic, or polycyclic non-aromatic hydrocarbon groups having 3 to 12 carbons. Examples of cycloalkyl moieties include, but are not limited to, cyclopropyl, cyclopentyl, and cyclohexyl.

[1029] As used herein, “heterocyclyl” refers to a monovalent radical of a heterocyclic ring system. Representative heterocyclyls include, without limitation, tetrahydrofuranyl, tetrahydrothienyl, pyrrolidinyl, pyrrolidonyl, piperidinyl, pyrrolinyl, piperazinyl, dioxanyl, dioxolanyl, diazepinyl, oxazepinyl, thiazepinyl, and morpholinyl.

[1030] As used herein, “heteroaryl” refers to a monovalent radical of a heteroaromatic ring system. Examples of heteroaryl moieties include, but are not limited to, imidazolyl, oxazolyl, thiazolyl, triazolyl, pyrrolyl, furanyl, indolyl, thiophenyl pyrazolyl, pyridinyl, pyrazinyl, pyridazinyl, pyrimidinyl, indolizinyl, purinyl, naphthyridinyl, quinolyl, and pteridinyl.

[1031] 12.2 Phosphate Backbone Modifications

[1032] 12.2.1 The Phosphate Group

[1033] In certain embodiments, the phosphate group of a modified nucleotide can be modified by replacing one or more of the oxygens with a different substituent. Further, the modified nucleotide, e.g., modified nucleotide present in a modified nucleic acid, can include the wholesale replacement of an unmodified phosphate moiety with a modified phosphate as described herein. In certain embodiments, the modification of the phosphate backbone can include alterations that result in either an uncharged linker or a charged linker with unsymmetrical charge distribution.

[1034] Examples of modified phosphate groups include phosphorothioate, phosphoroselenates, borano phosphates, borano phosphate esters, hydrogen phosphonates, phosphoroamidates, alkyl or aryl phosphonates and phosphotriesters. In certain embodiments, one of the non-bridging phosphate oxygen atoms in the phosphate backbone moiety can be replaced by any of the following groups: sulfur (S), selenium (Se), BR₃ (wherein R can be, e.g., hydrogen, alkyl, or aryl), C (e.g., an alkyl group, an aryl group, and the like), H, NR₂ (wherein R can be, e.g., hydrogen, alkyl, or aryl), or OR (wherein R can be, e.g., alkyl or aryl). The phosphorous atom in an unmodified phosphate group is achiral. However, replacement of one of the non-bridging oxygens with one of the above atoms or groups of atoms can render the phosphorous atom chiral; that is to say that a phosphorous atom in a phosphate group modified in this way is a stereogenic center. The stereogenic phosphorous atom can possess either the “R” configuration (herein Rp) or the “S” configuration (herein Sp).

[1035] Phosphorodithioates have both non-bridging oxygens replaced by sulfur. The phosphorus center in the phosphorodithioates is achiral which precludes the formation of oligoribonucleotide diastereomers. In certain embodiments, modifications to one or both non-bridging oxygens can also include the replacement of the non-bridging oxygens with a group independently selected from S, Se, B, C, H, N, and OR (R can be, e.g., alkyl or aryl).

[1036] The phosphate linker can also be modified by replacement of a bridging oxygen, (i.e., the oxygen that links the phosphate to the nucleoside), with nitrogen (bridged phosphoroamidates), sulfur (bridged phosphorothioates) and carbon (bridged methylenephosphonates). The replacement can occur at either linking oxygen or at both of the linking oxygens.

[1037] 12.2.2 Replacement of the Phosphate Group

[1038] The phosphate group can be replaced by non-phosphorus containing connectors. In certain embodiments, the charge phosphate group can be replaced by a neutral moiety.

[1039] Examples of moieties which can replace the phosphate group can include, without limitation, e.g., methyl phosphonate, hydroxylamino, siloxane, carbonate, carboxymethyl, carbamate, amide, thioether, ethylene oxide linker, sulfonate, sulfonamide, thioformacetal, formacetal, oxime, methyleneimino, methylenemethylimino, methylenehydrazo, methyl enedimethylhydrazo and methyleneoxymethylimino.

[1040] 12.2.3 Replacement of the Ribophosphate Backbone

[1041] Scaffolds that can mimic nucleic acids can also be constructed wherein the phosphate linker and ribose sugar are replaced by nuclease resistant nucleoside or nucleotide surrogates. In certain embodiments, the nucleobases can be tethered by a surrogate backbone. Examples can include, without limitation, the morpholino, cyclobutyl, pyrrolidine and peptide nucleic acid (PNA) nucleoside surrogates.

[1042] 12.3 Sugar Modifications

[1043] The modified nucleosides and modified nucleotides can include one or more modifications to the sugar group. For example, the 2′ hydroxyl group (OH) can be modified or replaced with a number of different “oxy” or “deoxy” substituents. In certain embodiments, modifications to the 2′ hydroxyl group can enhance the stability of the nucleic acid since the hydroxyl can no longer be deprotonated to form a 2′-alkoxide ion. The 2′-alkoxide can catalyze degradation by intramolecular nucleophilic attack on the linker phosphorus atom.

[1044] Examples of “oxy”-2′ hydroxyl group modifications can include alkoxy or aryloxy (OR, wherein “R” can be, e.g., alkyl, cycloalkyl, aryl, aralkyl, heteroaryl or a sugar); polyethyleneglycols (PEG), O(CH₂CH₂O)ₙCH₂CH₂OR wherein R can be, e.g., H or optionally substituted alkyl, and n can be an integer from 0 to 20 (e.g., from 0 to 4, from 0 to 8, from 0 to 10, from 0 to 16, from 1 to 4, from 1 to 8, from 1 to 10, from 1 to 16, from 1 to 20, from 2 to 4, from 2 to 8, from 2 to 10, from 2 to 16, from 2 to 20, from 4 to 8, from 4 to 10, from 4 to 16, and from 4 to 20). In certain embodiments, the “oxy”-2′ hydroxyl group modification can include “locked” nucleic acids (LNA) in which the 2′ hydroxyl can be connected, e.g., by a C₁₋₆ alkylene or C₁₋₆ heteroalkylene bridge, to the 4′ carbon of the same ribose sugar, where exemplary bridges can include methylene, propylene, ether, or amino bridges; O-amino (wherein amino can be, e.g., NH₂; alkylamino, dialkylamino, heterocyclyl, arylamino, diarylamino, heteroarylamino, or diheteroarylamino, ethylenediamine, or polyamino) and aminoalkoxy, O(CH₂)ₙ-amino, (wherein amino can be, e.g., NH₂; alkylamino, dialkylamino, heterocyclyl, arylamino, diarylamino, heteroarylamino, or diheteroarylamino, ethylenediamine, or polyamino). In certain embodiments, the “oxy”-2′ hydroxyl group modification can include the methoxyethyl group (MOE), (OCH₂CH₂OCH₃, e.g., a PEG derivative).

[1045] “Deoxy” modifications can include hydrogen (i.e. deoxyribose sugars, e.g., at the overhang portions of partially ds RNA); halo (e.g., bromo, chloro, fluoro, or iodo); amino (wherein amino can be, e.g., NH₂; alkylamino, dialkylamino, heterocyclyl, arylamino, diarylamino, heteroarylamino, diheteroarylamino, or amino acid); NH(CH₂CH₂NH)ₙCH₂CH₂-amino (wherein amino can be, e.g., as described herein), —NHC(O)R (wherein R can be, e.g., alkyl, cycloalkyl, aryl, aralkyl, heteroaryl or sugar), cyano; mercapto; alkyl-thio-alkyl; thioalkoxy; and alkyl, cycloalkyl, aryl, alkenyl and alkynyl, which may be optionally substituted with e.g., an amino as described herein.

[1046] The sugar group can also contain one or more carbons that possess the opposite stereochemical configuration than that of the corresponding carbon in ribose. Thus, a modified nucleic acid can include nucleotides containing e.g., arabinose, as the sugar. The nucleotide “monomer” can have an alpha linkage at the 1′ position on the sugar, e.g., alpha-nucleosides. The modified nucleic acids can also include “abasic” sugars, which lack a nucleobase at C-1′. These abasic sugars can also be further modified at one or more of the constituent sugar atoms. The modified nucleic acids can also include one or more sugars that are in the L form, e.g. L-nucleosides.

[1047] Generally, RNA includes the sugar group ribose, which is a 5-membered ring having an oxygen. Exemplary modified nucleosides and modified nucleotides can include, without limitation, replacement of the oxygen in ribose (e.g., with sulfur (S), selenium (Se), or alkylene, such as, e.g., methylene or ethylene); addition of a double bond (e.g., to replace ribose with cyclopentenyl or cyclohexenyl); ring contraction of ribose (e.g., to form a 4-membered ring of cyclobutane or oxetane); ring expansion of ribose (e.g., to form a 6- or 7-membered ring having an additional carbon or heteroatom, such as for example, anhydrohexitol, altritol, mannitol, cyclohexanyl, cyclohexenyl, and morpholino that also has a phosphoramidate backbone). In certain embodiments, the modified nucleotides can include multicyclic forms (e.g., tricyclo; and “unlocked” forms, such as glycol nucleic acid (GNA) (e.g., R-GNA or S-GNA, where ribose is replaced by glycol units attached to phosphodiester bonds), threose nucleic acid (TNA, where ribose is replaced with α-L-threofuranosyl-(3′→2′)).

[1048] 12.4 Modifications on the Nucleobase

[1049] The modified nucleosides and modified nucleotides described herein, which can be incorporated into a modified nucleic acid, can include a modified nucleobase. Examples of nucleobases include, but are not limited to, adenine (A), guanine (G), cytosine (C), and uracil (U). These nucleobases can be modified or wholly replaced to provide modified nucleosides and modified nucleotides that can be incorporated into modified nucleic acids. The nucleobase of the nucleotide can be independently selected from a purine, a pyrimidine, a purine or pyrimidine analog. In certain embodiments, the nucleobase can include, for example, naturally-occurring and synthetic derivatives of a base.

[1050] 12.4.1 Uracil

[1051] In certain embodiments, the modified nucleobase is a modified uracil. Exemplary nucleobases and nucleosides having a modified uracil include without limitation pseudouridine (w), pyridin-4-one ribonucleoside, 5-aza-uridine, 6-aza-uridine, 2-thio-5-aza-uridine, 2-thio-uridine (s2U), 4-thio-uridine (s4U), 4-thio-pseudouridine, 2-thio-pseudouridine, 5-hydroxy-uridine (ψ), 5-aminoallyl-uridine, 5-halo-uridine (e.g., 5-iodo-uridine or 5-bromo-uridine), 3-methyl-uridine (m³U), 5-methoxy-uridine (mo⁵U), uridine 5-oxyacetic acid (cmo⁵U), uridine 5-oxyacetic acid methyl ester (mcmo⁵U), 5-carboxymethyl-uridine (cm⁵U), 1-carboxymethyl-pseudouridine, 5-carboxyhydroxymethyl-uridine (chm⁵U), 5-carboxyhydroxymethyl-uridine methyl ester (mchm⁵U), 5-methoxycarbonylmethyl-uridine (mcm⁵U), 5-methoxycarbonylmethyl-2-thio-uridine (mcm⁵s2U), 5-aminomethyl-2-thio-uridine (nm⁵s2U), 5-methylaminomethyl-uridine (mnm⁵U), 5-methylaminomethyl-2-thio-uridine (mnm⁵s2U), 5-methylaminomethyl-2-seleno-uridine (mnm⁵se²U), 5-carbamoylmethyl-uridine (ncm⁵U), 5-carboxymethylaminomethyl-uridine (cmnm⁵U), 5-carboxymethylaminomethyl-2-thio-uridine (cmnm⁵s2U), 5-propynyl-uridine, 1-propynyl-pseudouridine, 5-taurinomethyl-uridine (τcm⁵U), 1-taurinomethyl-pseudouridine, 5-taurinomethyl-2-thio-uridine (τm⁵s2U), 1-taurinomethyl-4-thio-pseudouridine, 5-methyl-uridine (m⁵U, i.e., having the nucleobase deoxythymine), 1-methyl-pseudouridine (m¹ψ), 5-methyl-2-thio-uridine (m⁵s2U), 1-methyl-4-thio-pseudouridine (m¹s⁴ψ), 4-thio-1-methyl-pseudouridine, 3-methyl-pseudouridine (m³ψ), 2-thio-1-methyl-pseudouridine, 1-methyl-1-deaza-pseudouridine, 2-thio-1-methyl-1-deaza-pseudouridine, dihydrouridine (D), dihydropseudouridine, 5,6-dihydrouridine, 5-methyl-dihydrouridine (m⁵D), 2-thio-dihydrouridine, 2-thio-dihydropseudouridine, 2-methoxy-uridine, 2-methoxy-4-thio-uridine, 4-methoxy-pseudouridine, 4-methoxy-2-thio-pseudouridine, N1-methyl-pseudouridine, 3-(3-amino-3-carboxypropyl)uridine (acp³U), 1-methyl-3-(3-amino-3-carboxypropyl)pseudouridine (acp³ψ), 5-(isopentenylaminomethyl)uridine (inm⁵U), 5-(isopentenylaminomethyl)-2-thio-uridine (inm⁵s2U), α-thio-uridine, 2′-O-methyl-uridine (Um), 5,2′-O-dimethyl-uridine (m⁵Um), 2′-O-methyl-pseudouridine (ψm), 2-thio-2′-O-methyl-uridine (s2Um), 5-methoxycarbonylmethyl-2′-O-methyl-uridine (mcm ⁵Um), 5-carbamoylmethyl-2′-O-methyl-uridine (ncm ⁵Um), 5-carboxymethylaminomethyl-2′-O-methyl-uridine (cmnm ⁵Um), 3,2′-O-dimethyl-uridine (m³Um), 5-(isopentenylaminomethyl)-2′-O-methyl-uridine (inm ⁵Um), 1-thio-uridine, deoxythymidine, 2′-F-ara-uridine, 2′-F-uridine, 2′-OH-ara-uridine, 5-(2-carbomethoxyvinyl) uridine, 5-[3-(1-E-propenylamino)uridine, pyrazolo[3,4-d]pyrimidines, xanthine, and hypoxanthine.

[1052] 12.4.2 Cytosine

[1053] In certain embodiments, the modified nucleobase is a modified cytosine. Exemplary nucleobases and nucleosides having a modified cytosine include without limitation 5-aza-cytidine, 6-aza-cytidine, pseudoisocytidine, 3-methyl-cytidine (m³C), N4-acetyl-cytidine (act), 5-formyl-cytidine (f⁵C), N4-methyl-cytidine (m⁴C), 5-methyl-cytidine (m⁵C), 5-halo-cytidine (e.g., 5-iodo-cytidine), 5-hydroxymethyl-cytidine (hm⁵C), 1-methyl-pseudoisocytidine, pyrrolo-cytidine, pyrrolo-pseudoisocytidine, 2-thio-cytidine (s2C), 2-thio-5-methyl-cytidine, 4-thio-pseudoisocytidine, 4-thio-1-methyl-pseudoisocytidine, 4-thio-1-methyl-1-deaza-pseudoisocytidine, 1-methyl-1-deaza-pseudoisocytidine, zebularine, 5-aza-zebularine, 5-methyl-zebularine, 5-aza-2-thio-zebularine, 2-thio-zebularine, 2-methoxy-cytidine, 2-methoxy-5-methyl-cytidine, 4-methoxy-pseudoisocytidine, 4-methoxy-1-methyl-pseudoisocytidine, lysidine (k²C), α-thio-cytidine, 2′-O-methyl-cytidine (Cm), 5,2′-O-dimethyl-cytidine (m⁵Cm), N4-acetyl-2′-O-methyl-cytidine (ac⁴Cm), N4,2′-O-dimethyl-cytidine (m⁴Cm), 5-formyl-2′-O-methyl-cytidine (f⁵Cm), N4,N4,2′-O-trimethyl-cytidine (m⁴₂Cm), 1-thio-cytidine, 2′-F-ara-cytidine, 2′-F-cytidine, and 2′-OH-ara-cytidine.

[1054] 12.4.3 Adenine

[1055] In certain embodiments, the modified nucleobase is a modified adenine. Exemplary nucleobases and nucleosides having a modified adenine include without limitation 2-amino-purine, 2,6-diaminopurine, 2-amino-6-halo-purine (e.g., 2-amino-6-chloro-purine), 6-halo-purine (e.g., 6-chloro-purine), 2-amino-6-methyl-purine, 8-azido-adenosine, 7-deaza-adenosine, 7-deaza-8-aza-adenosine, 7-deaza-2-amino-purine, 7-deaza-8-aza-2-amino-purine, 7-deaza-2,6-diaminopurine, 7-deaza-8-aza-2,6-diaminopurine, 1-methyl-adenosine (m¹A), 2-methyl-adenosine (m²A), N6-methyl-adenosine (m⁶A), 2-methylthio-N6-methyl-adenosine (ms2 m⁶A), N6-isopentenyl-adenosine (i⁶A), 2-methylthio-N6-isopentenyl-adenosine (ms²i⁶A), N6-(cis-hydroxyisopentenyl)adenosine (io⁶A), 2-methylthio-N6-(cis-hydroxyisopentenyl)adenosine (ms2io⁶A), N6-glycinylcarbamoyl-adenosine (g⁶A), N6-threonylcarbamoyl-adenosine (t⁶A), N6-methyl-N6-threonylcarbamoyl-adenosine (m⁶t⁶A), 2-methylthio-N6-threonylcarbamoyl-adenosine (ms²g⁶A), N6,N6-dimethyl-adenosine (m⁶₂A), N6-hydroxynorvalylcarbamoyl-adenosine (hn⁶A), 2-methylthio-N6-hydroxynorvalylcarbamoyl-adenosine (ms2hn⁶A), N6-acetyl-adenosine (ac⁶A), 7-methyl-adenosine, 2-methylthio-adenosine, 2-methoxy-adenosine, α-thio-adenosine, 2′-O-methyl-adenosine (Am), N⁶,2′-O-dimethyl-adenosine (m⁶Am), N⁶-Methyl-2′-deoxyadenosine, N6,N6,2′-O-trimethyl-adenosine (m⁶₂Am), 1,2′-O-dimethyl-adenosine (m¹Am), 2′-O-ribosyladenosine (phosphate) (Ar(p)), 2-amino-N6-methyl-purine, 1-thio-adenosine, 8-azido-adenosine, 2′-F-ara-adenosine, 2′-F-adenosine, 2′-OH-ara-adenosine, and N6-(19-amino-pentaoxanonadecyl)-adenosine.

[1056] 12.4.4 Guanine

[1057] In certain embodiments, the modified nucleobase is a modified guanine. Exemplary nucleobases and nucleosides having a modified guanine include without limitation inosine (I), 1-methyl-inosine (m¹I), wyosine (imG), methylwyosine (mimG), 4-demethyl-wyosine (imG-14), isowyosine (imG2), wybutosine (yW), peroxywybutosine (o₂yW), hydroxywybutosine (OHyW), undermodified hydroxywybutosine (OHyW*), 7-deaza-guanosine, queuosine (Q), epoxyqueuosine (oQ), galactosyl-queuosine (galQ), mannosyl-queuosine (manQ), 7-cyano-7-deaza-guanosine (preQ₀), 7-aminomethyl-7-deaza-guanosine (preQ₁), archaeosine (G⁺), 7-deaza-8-aza-guanosine, 6-thio-guanosine, 6-thio-7-deaza-guanosine, 6-thio-7-deaza-8-aza-guanosine, 7-methyl-guanosine (m⁷G), 6-thio-7-methyl-guanosine, 7-methyl-inosine, 6-methoxy-guanosine, 1-methyl-guanosine (m′G), N2-methyl-guanosine (m²G), N2,N2-dimethyl-guanosine (m² ₂G), N2,7-dimethyl-guanosine (m²,7G), N2, N2,7-dimethyl-guanosine (m²,2,7G), 8-oxo-guanosine, 7-methyl-8-oxo-guanosine, 1-methyl-6-thio-guanosine, N2-methyl-6-thio-guanosine, N2,N2-dimethyl-6-thio-guanosine, α-thio-guanosine, 2′-O-methyl-guanosine (Gm), N2-methyl-2′-O-methyl-guanosine (m²Gm), N2,N2-dimethyl-2′-O-methyl-guanosine (m² 2 Gm), 1-methyl-2′-O-methyl-guanosine (m′Gm), N2,7-dimethyl-2′-O-methyl-guanosine (m²,7Gm), 2′-O-methyl-inosine (Im), 1,2′-O-dimethyl-inosine (m′Im), O⁶-phenyl-2′-deoxyinosine, 2′-O-ribosylguanosine (phosphate) (Gr(p)), 1-thio-guanosine, O⁶-methyl-guanosine, O⁶-Methyl-2′-deoxyguanosine, 2′-F-ara-guanosine, and 2′-F-guanosine.

[1058] 12.5 Exemplary Modified gRNAs

[1059] In certain embodiments, the modified nucleic acids can be modified gRNAs. It is to be understood that any of the gRNAs described herein can be modified in accordance with this section, including any gRNA that comprises a targeting domain comprising a nucleotide sequence selected from SEQ ID NOS: 208 to 141071.

[1060] The presently disclosed subject matter encompasses the realization that the improvements observed with a 5′ capped gRNA can be extended to gRNAs that have been modified in other ways to achieve the same type of structural or functional result (e.g., by the inclusion of modified nucleosides or nucleotides, or when an in vitro transcribed gRNA is modified by treatment with a phosphatase such as calf intestinal alkaline phosphatase to remove the 5′ triphosphate group). In certain embodiments, the modified gRNAs described herein may contain one or more modifications (e.g., modified nucleosides or nucleotides) which introduce stability toward nucleases (e.g., by the inclusion of modified nucleosides or nucleotides and/or a 3′ polyA tract).

[1061] Thus, in one aspect, methods, genome editing system and compositions discussed herein provide methods, genome editing system and compositions for gene editing of certain cells (e.g., ex vivo gene editing) by using gRNAs which have been modified at or near their 5′ end (e.g., within 1-10, 1-5, or 1-2 nucleotides of their 5′ end). In certain embodiments, a gRNA comprises a modification at or near its 3′ end (e.g., within 1-10, 1-5, or 1-2 nucleotides of its 3′ end). In certain embodiments, a gRNA molecule comprises both a modification at or near its 5′ end and a modification at or near its 3′ end.

[1062] In certain embodiments, the 5′ end of the gRNA molecule lacks a 5′ triphosphate group. In certain embodiments, the 5′ end of the targeting domain lacks a 5′ triphosphate group. In certain embodiments, the 5′ end of the gRNA molecule includes a 5′ cap. In certain embodiments, the 5′ end of the targeting domain includes a 5′ cap. In certain embodiments, the gRNA molecule lacks a 5′ triphosphate group. In certain embodiments, the gRNA molecule comprises a targeting domain and the 5′ end of the targeting domain lacks a 5′ triphosphate group. In certain embodiments, gRNA molecule includes a 5′ cap. In certain embodiments, the gRNA molecule comprises a targeting domain and the 5′ end of the targeting domain includes a 5′ cap.

[1063] In certain embodiments, the 5′ end of a gRNA is modified by the inclusion of a eukaryotic mRNA cap structure or cap analog (e.g., without limitation, a G(5)ppp(5)G cap analog, a m7G(5)ppp(5)G cap analog, or a 3′-O-Me-m7G(5)ppp(5)G anti reverse cap analog (ARCA)). In certain embodiments, the 5′ cap comprises a modified guanine nucleotide that is linked to the remainder of the gRNA molecule via a 5′-5′ triphosphate linkage. In certain embodiments, the 5′ cap analog comprises two optionally modified guanine nucleotides that are linked via a 5′-5′ triphosphate linkage. In certain embodiments, the 5′ end of the gRNA molecule has the chemical formula:

[chemical structure]

[1064] wherein:
[1065] each of B¹ and B^{1′} is independently

[chemical structure]

[1066] each R¹ is independently C₁₋₄ alkyl, optionally substituted by a phenyl or a 6-membered heteroaryl;
[1067] each of R², R^{2′}, and R^{3′} is independently H, F, OH, or O—C₁₋₄ alkyl;
[1068] each of X, Y, and Z is independently O or S; and
[1069] each of X′ and Y′ is independently O or CH₂.

[1070] In certain embodiments, each R¹ is independently —CH₃, —CH₂CH₃, or —CH₂C₆H₅.

[1071] In certain embodiments, R¹ is —CH₃.

[1072] In certain embodiments, B^{1′} is

[chemical structure]

[1073] In certain embodiments, each of R², R^{2′}, and R^{3′} is independently H, OH, or O—CH₃.

[1074] In certain embodiments, each of X, Y, and Z is O.

[1075] In certain embodiments, X′ and Y′ are O.

[1076] In certain embodiments, the 5′ end of the gRNA molecule has the chemical formula:

[chemical structure]

[1077] In certain embodiments, the 5′ end of the gRNA molecule has the chemical formula:

[chemical structure]

[1078] In certain embodiments, the 5′ end of the gRNA molecule has the chemical formula:

[chemical structure]

[1079] In certain embodiments, the 5′ end of the gRNA molecule has the chemical formula:

[chemical structure]

[1080] In certain embodiments, X is S, and Y and Z are O.

[1081] In certain embodiments, Y is S, and X and Z are O.

[1082] In certain embodiments, Z is S, and X and Y are O.

[1083] In certain embodiments, the phosphorothioate is the Sp diastereomer.

[1084] In certain embodiments, X′ is CH₂, and Y′ is O.

[1085] In certain embodiments, X′ is O, and Y′ is CH₂.

[1086] In certain embodiments, the 5′ cap comprises two optionally modified guanine nucleotides that are linked via an optionally modified 5′-5′ tetraphosphate linkage.

[1087] In certain embodiments, the 5′ end of the gRNA molecule has the chemical formula:

[chemical structure]

[1088] wherein:
[1089] each of B¹ and B^{1′} is independently

[chemical structure]

[1090] each R¹ is independently C₁₋₄ alkyl, optionally substituted by a phenyl or a 6-membered heteroaryl;
[1091] each of R², R^{2′}, and R^{3′} is independently H, F, OH, or O—C₁₋₄ alkyl;
[1092] each of W, X, Y, and Z is independently O or S; and
[1093] each of X′, Y′, and Z′ is independently O or CH₂.

[1094] In certain embodiments, each R¹ is independently —CH₃, —CH₂CH₃, or —CH₂C₆H₅.

[1095] In certain embodiments, R¹ is —CH₃.

[1096] In certain embodiments, B^{1′} is

[chemical structure]

[1097] In certain embodiments, each of R², R^{2′}, and R^{3′} is independently H, OH, or O—CH₃.

[1098] In certain embodiments, each of W, X, Y, and Z is O.

[1099] In certain embodiments, each of X′, Y′, and Z′ are O.

[1100] In certain embodiments, X′ is CH₂, and Y′ and Z′ are O.

[1101] In certain embodiments, Y′ is CH₂, and X′ and Z′ are O.

[1102] In certain embodiments, Z′ is CH₂, and X′ and Y′ are O.

[1103] In certain embodiments, the 5′ cap comprises two optionally modified guanine nucleotides that are linked via an optionally modified 5′-5′ pentaphosphate linkage.

[1104] In certain embodiments, the 5′ end of the gRNA molecule has the chemical formula:

[chemical structure]

[1105] wherein:
[1106] each of B¹ and B^{1′} is independently

[chemical structure]

[1107] each R¹ is independently C1-4 alkyl, optionally substituted by a phenyl or a 6-membered heteroaryl;
[1108] each of R², R^{2′}, and R^{3′} is independently H, F, OH, or O—C₁₋₄ alkyl;
[1109] each of V, W, X, Y, and Z is independently O or S; and
[1110] each of W′, X′, Y′, and Z′ is independently O or CH₂.

[1111] In certain embodiments, each R¹ is independently —CH₃, —CH₂CH₃, or —CH₂C₆H₅.

[1112] In certain embodiments, R¹ is —CH₃.

[1113] In certain embodiments, B^{1′} is

[chemical structure]

[1114] In certain embodiments, each of R², R^{2′}, and R^{3′} is independently H, OH, or O—CH₃.

[1115] In certain embodiments, each of V, W, X, Y, and Z is O.

[1116] In certain embodiments, each of W′, X′, Y′, and Z′ is O.

[1117] As used herein, the term “5′ cap” encompasses traditional mRNA 5′ cap structures but also analogs of these. For example, in addition to the 5′ cap structures that are encompassed by the chemical structures shown above, one may use, e.g., tetraphosphate analogs having a methylene-bis(phosphonate) moiety (e.g., see Rydzik, A M et al., (2009) Org Biomol Chem 7(22):4763-76), analogs having a sulfur substitution for a non-bridging oxygen (e.g., see Grudzien-Nogalska, E. et al, (2007) RNA 13(10): 1745-1755), N7-benzylated dinucleoside tetraphosphate analogs (e.g., see Grudzien, E. et al., (2004) RNA 10(9): 1479-1487), or anti-reverse cap analogs (e.g., see U.S. Pat. No. 7,074,596 and Jemielity, J. et al., (2003) RNA 9(9): 1 108-1 122 and Stepinski, J. et al., (2001) RNA 7(10):1486-1495). The present application also encompasses the use of cap analogs with halogen groups instead of OH or OMe (e.g., see U.S. Pat. No. 8,304,529); cap analogs with at least one phosphorothioate (PS) linkage (e.g., see U.S. Pat. No. 8,153,773 and Kowalska, J. et al., (2008) RNA 14(6): 1 1 19-1131); and cap analogs with at least one boranophosphate or phosphoroselenoate linkage (e.g., see U.S. Pat. No. 8,519,110); and alkynyl-derivatized 5′ cap analogs (e.g., see U.S. Pat. No. 8,969,545).

[1118] In general, the 5′ cap can be included during either chemical synthesis or in vitro transcription of the gRNA. In certain embodiments, a 5′ cap is not used and the gRNA (e.g., an in vitro transcribed gRNA) is instead modified by treatment with a phosphatase (e.g., calf intestinal alkaline phosphatase) to remove the 5′ triphosphate group.

[1119] The presently disclosed subject matter also provides for methods, genome editing system and compositions for gene editing by using gRNAs which comprise a 3′ polyA tail (also called a polyA tract herein). Such gRNAs may, for example, be prepared by adding a polyA tail to a gRNA molecule precursor using a polyadenosine polymerase following in vitro transcription of the gRNA molecule precursor. For example, in certain embodiments, a polyA tail may be added enzymatically using a polymerase such as E. coli polyA polymerase (E-PAP). gRNAs including a polyA tail may also be prepared by in vitro transcription from a DNA template. In certain embodiments, a polyA tail of defined length is encoded on a DNA template and transcribed with the gRNA via an RNA polymerase (such as T7 RNA polymerase). gRNAs with a polyA tail may also be prepared by ligating a polyA oligonucleotide to a gRNA molecule precursor following in vitro transcription using an RNA ligase or a DNA ligase with or without a splinted DNA oligonucleotide complementary to the gRNA molecule precursor and the polyA oligonucleotide. For example, in certain embodiments, a polyA tail of defined length is synthesized as a synthetic oligonucleotide and ligated on the 3′ end of the gRNA with either an RNA ligase or a DNA ligase with or without a splinted DNA oligonucleotide complementary to the guide RNA and the polyA oligonucleotide. gRNAs including the polyA tail may also be prepared synthetically, in one or several pieces that are ligated together by either an RNA ligase or a DNA ligase with or without one or more splinted DNA oligonucleotides.

[1120] In certain embodiments, the polyA tail is comprised of fewer than 50 adenine nucleotides, for example, fewer than 45 adenine nucleotides, fewer than 40 adenine nucleotides, fewer than 35 adenine nucleotides, fewer than 30 adenine nucleotides, fewer than 25 adenine nucleotides or fewer than 20 adenine nucleotides. In certain embodiments the polyA tail is comprised of between 5 and 50 adenine nucleotides, for example between 5 and 40 adenine nucleotides, between 5 and 30 adenine nucleotides, between 10 and 50 adenine nucleotides, or between 15 and 25 adenine nucleotides. In certain embodiments, the polyA tail is comprised of about 20 adenine nucleotides.

[1121] The presently disclosed subject matter also provides for methods, genome editing system and compositions for gene editing (e.g., ex vivo gene editing) by using gRNAs which include one or more modified nucleosides or nucleotides that are described herein.

[1122] While some of the exemplary modifications discussed in this section may be included at any position within the gRNA sequence, in certain embodiments, a gRNA comprises a modification at or near its 5′ end (e.g., within 1-10, 1-5, or 1-2 nucleotides of its 5′ end). In certain embodiments, a gRNA comprises a modification at or near its 3′ end (e.g., within 1-10, 1-5, or 1-2 nucleotides of its 3′ end). In certain embodiments, a gRNA comprises both a modification at or near its 5′ end and a modification at or near its 3′ end.

[1123] The presently disclosed subject matter also provides for methods, genome editing system and compositions for gene editing by using a gRNA molecule which comprises a polyA tail. In certain embodiments, a polyA tail of undefined length ranging from 1 to 1000 nucleotide is added enzymatically using a polymerase such as E. coli polyA polymerase (E-PAP). In certain embodiments, the polyA tail of a specified length (e.g., 1, 5, 10, 20, 30, 40, 50, 60, 100, or 150 nucleotides) is encoded on a DNA template and transcribed with the gRNA via an RNA polymerase (e.g., T7 RNA polymerase). In certain embodiments, a polyA tail of defined length (e.g., 1, 5, 10, 20, 30, 40, 50, 60, 100, or 150 nucleotides) is synthesized as a synthetic oligonucleotide and ligated on the 3′ end of the gRNA with either an RNA ligase or a DNA ligase with our without a splinted DNA oligonucleotide complementary to the guide RNA and the polyA oligonucleotide. In certain embodiments, the entire gRNA including a defined length of polyA tail is made synthetically, in one or several pieces, and ligated together by either an RNA ligase or a DNA ligase with or without a splinted DNA oligonucleotide.

[1124] In certain embodiments, a gRNA molecule (e.g., an in vitro transcribed gRNA) comprises a targeting domain which is complementary with a target domain from a gene expressed in a eukaryotic cell, wherein the gRNA molecule is modified at its 5′ end and comprises a 3′ polyA tail. The gRNA molecule may, for example, lack a 5′ triphosphate group (e.g., the 5′ end of the targeting domain lacks a 5′ triphosphate group). In certain embodiments, a gRNA (e.g., an in vitro transcribed gRNA) is modified by treatment with a phosphatase (e.g., calf intestinal alkaline phosphatase) to remove the 5′ triphosphate group and comprises a 3′ polyA tail as described herein. The gRNA molecule may alternatively include a 5′ cap (e.g., the 5′ end of the targeting domain includes a 5′ cap). In certain embodiments, a gRNA (e.g., an in vitro transcribed gRNA) contains both a 5′ cap structure or cap analog and a 3′ polyA tail as described herein. In certain embodiments, the 5′ cap comprises a modified guanine nucleotide that is linked to the remainder of the gRNA molecule via a 5′-5′ triphosphate linkage. In certain embodiments, the 5′ cap comprises two optionally modified guanine nucleotides that are linked via an optionally modified 5′-5′ triphosphate linkage (e.g., as described above). In certain embodiments, the polyA tail is comprised of between 5 and 50 adenine nucleotides, for example between 5 and 40 adenine nucleotides, between 5 and 30 adenine nucleotides, between 10 and 50 adenine nucleotides, between 15 and 25 adenine nucleotides, fewer than 30 adenine nucleotides, fewer than 25 adenine nucleotides or about 20 adenine nucleotides.

[1125] In certain embodiments, the presently disclosed subject matter provides for a gRNA molecule comprising a targeting domain which is complementary with a target domain from a gene expressed in a eukaryotic cell, wherein the gRNA molecule comprises a 3′ polyA tail which is comprised of fewer than 30 adenine nucleotides (e.g., fewer than 25 adenine nucleotides, between 15 and 25 adenine nucleotides, or about 20 adenine nucleotides). In certain embodiments, these gRNA molecules are further modified at their 5′ end (e.g., the gRNA molecule is modified by treatment with a phosphatase to remove the 5′ triphosphate group or modified to include a 5′ cap as described herein).

[1126] In certain embodiments, gRNAs can be modified at a 3′ terminal U ribose. In certain embodiments, the 5′ end and a 3′ terminal U ribose of the gRNA are modified (e.g., the gRNA is modified by treatment with a phosphatase to remove the 5′ triphosphate group or modified to include a 5′ cap as described herein).

[1127] For example, the two terminal hydroxyl groups of the U ribose can be oxidized to aldehyde groups and a concomitant opening of the ribose ring to afford a modified nucleoside as shown below:

[chemical structure]

[1128] wherein “U” can be an unmodified or modified uridine.

[1129] In certain embodiments, the 3′ terminal U can be modified with a 2′3′ cyclic phosphate as shown below:

[chemical structure]

[1130] wherein “U” can be an unmodified or modified uridine.

[1131] In certain embodiments, the gRNA molecules may contain 3′ nucleotides which can be stabilized against degradation, e.g., by incorporating one or more of the modified nucleotides described herein. In this embodiment, e.g., uridines can be replaced with modified uridines, e.g., 5-(2-amino)propyl uridine, and 5-bromo uridine, or with any of the modified uridines described herein; adenosines, cytidines and guanosines can be replaced with modified adenosines, cytidines and guanosines, e.g., with modifications at the 8-position, e.g., 8-bromo guanosine, or with any of the modified adenosines, cytidines or guanosines described herein.

[1132] In certain embodiments, sugar-modified ribonucleotides can be incorporated into the gRNA, e.g., wherein the 2′ OH-group is replaced by a group selected from H, —OR, —R (wherein R can be, e.g., alkyl, cycloalkyl, aryl, aralkyl, heteroaryl or sugar), halo, —SH, —SR (wherein R can be, e.g., alkyl, cycloalkyl, aryl, aralkyl, heteroaryl or sugar), amino (wherein amino can be, e.g., NH₂; alkylamino, dialkylamino, heterocyclylamino, arylamino, diarylamino, heteroarylamino, diheteroarylamino, or amino acid); or cyano (—CN). In certain embodiments, the phosphate backbone can be modified as described herein, e.g., with a phosphothioate group. In certain embodiments, one or more of the nucleotides of the gRNA can each independently be a modified or unmodified nucleotide including, but not limited to 2′-sugar modified, such as, 2′-O-methyl, 2′O-methoxyethyl, or 2′-Fluoro modified including, e.g., 2′-F or 2′-O-methyl, adenosine (A), 2′-F or 2′-O-methyl, cytidine (C), 2′-F or 2′-O-methyl, uridine (U), 2′-F or 2′-O-methyl, thymidine (T), 2′-F or 2′-O-methyl, guanosine (G), 2′-O-methoxyethyl-5-methyluridine (Teo), 2′-O-methoxyethyladenosine (Aeo), 2′-O-methoxyethyl-5-methylcytidine (m5Ceo), and any combinations thereof.

[1133] In certain embodiments, a gRNA can include “locked” nucleic acids (LNA) in which the 2′ OH-group can be connected, e.g., by a C1-6 alkylene or C1-6 heteroalkylene bridge, to the 4′ carbon of the same ribose sugar, where exemplary bridges can include methylene, propylene, ether, or amino bridges; O-amino (wherein amino can be, e.g., NH₂; alkylamino, dialkylamino, heterocyclylamino, arylamino, diarylamino, heteroarylamino, or diheteroarylamino, ethylenediamine, or polyamino) and aminoalkoxy or O(CH₂)ₙ-amino (wherein amino can be, e.g., NH₂; alkylamino, dialkylamino, heterocyclylamino, arylamino, diarylamino, heteroarylamino, or diheteroarylamino, ethylenediamine, or polyamino).

[1134] In certain embodiments, a gRNA can include a modified nucleotide which is multicyclic (e.g., tricyclo; and “unlocked” forms, such as glycol nucleic acid (GNA) (e.g., R-GNA or S-GNA, where ribose is replaced by glycol units attached to phosphodiester bonds), or threose nucleic acid (TNA, where ribose is replaced with α-L-threofuranosyl-(3′→2′)).

[1135] Generally, gRNA molecules include the sugar group ribose, which is a 5-membered ring having an oxygen. Exemplary modified gRNAs can include, without limitation, replacement of the oxygen in ribose (e.g., with sulfur (S), selenium (Se), or alkylene, such as, e.g., methylene or ethylene); addition of a double bond (e.g., to replace ribose with cyclopentenyl or cyclohexenyl); ring contraction of ribose (e.g., to form a 4-membered ring of cyclobutane or oxetane); ring expansion of ribose (e.g., to form a 6- or 7-membered ring having an additional carbon or heteroatom, such as for example, anhydrohexitol, altritol, mannitol, cyclohexanyl, cyclohexenyl, and morpholino that also has a phosphoramidate backbone). Although the majority of sugar analog alterations are localized to the 2′ position, other sites are amenable to modification, including the 4′ position. In certain embodiments, a gRNA comprises a 4′-S, 4′-Se or a 4′-C-aminomethyl-2′-O-Me modification.

[1136] In certain embodiments, deaza nucleotides, e.g., 7-deaza-adenosine, can be incorporated into the gRNA. In certain embodiments, O- and N-alkylated nucleotides, e.g., N6-methyl adenosine, can be incorporated into the gRNA. In certain embodiments, one or more or all of the nucleotides in a gRNA molecule are deoxynucleotides.

[1137] 14.6 miRNA Binding Sites

[1138] microRNAs (or miRNAs) are naturally occurring cellular 19-25 nucleotide long noncoding RNAs. They bind to nucleic acid molecules having an appropriate miRNA binding site, e.g., in the 3′ UTR of an mRNA, and down-regulate gene expression. In certain embodiments, this down regulation occurs by either reducing nucleic acid molecule stability or inhibiting translation. An RNA species disclosed herein, e.g., an mRNA encoding Cas9 can comprise an miRNA binding site, e.g., in its 3′UTR. The miRNA binding site can be selected to promote down regulation of expression is a selected cell type. By way of example, the incorporation of a binding site for miR-122, a microRNA abundant in liver, can inhibit the expression of the gene of interest in the liver.

### EXAMPLES

[1139] The following Examples are merely illustrative and are not intended to limit the scope or content of the invention in any way.

### Example 1: Evaluation of Candidate Guide RNA Molecules (gRNA Molecules)

[1140] The suitability of candidate gRNAmolecules can be evaluated as described in this example. Although described for a chimeric gRNA molecule, the approach can also be used to evaluate modular gRNA molecules.

[1141] Cloning gRNA Molecules into Vectors

[1142] For each gRNA, a pair of overlapping oligonucleotides is designed and obtained. Oligonucleotides are annealed and ligated into a digested vector backbone containing an upstream U6 promoter and the remaining sequence of a long chimeric gRNA molecule. Plasmid is sequence-verified and prepped to generate sufficient amounts of transfection-quality DNA. Alternate promoters maybe used to drive in vivo transcription (e.g., H1 promoter) or for in vitro transcription (e.g., a T7 promoter).

[1143] Cloning gRNAs in Linear dsDNA Molecule (STITCHR)

[1144] For each gRNA, a single oligonucleotide is designed and obtained. The U6 promoter and the gRNA scaffold (e.g., including everything except the targeting domain, e.g., including sequences derived from the crRNA and tracrRNA, e.g., including a first complementarity domain; a linking domain; a second complementarity domain; a proximal domain; and a tail domain) are separately PCR amplified and purified as dsDNA molecules. The gRNA-specific oligonucleotide is used in a PCR reaction to stitch together the U6 and the gRNA scaffold, linked by the targeting domain specified in the oligonucleotide. Resulting dsDNA molecule (STITCHR product) is purified for transfection. Alternate promoters may be used to drive in vivo transcription (e.g., H1 promoter) or for in vitro transcription (e.g., T7 promoter). Any gRNA scaffold may be used to create gRNAs compatible with Cas9s from any bacterial species.

[1145] Initial gRNA Screen

[1146] Each gRNA to be tested is transfected, along with a plasmid expressing Cas9 and a small amount of a GFP-expressing plasmid into human cells. In preliminary experiments, these cells can be immortalized human cell lines such as 293T, K562 or U2OS. Alternatively, primary human cells may be used. In certain embodiments, cells may be relevant to the eventual therapeutic cell target (for example, an erythroid cell). The use of primary cells similar to the potential therapeutic target cell population may provide important information on gene targeting rates in the context of endogenous chromatin and gene expression.

[1147] Transfection may be performed using lipid transfection (such as Lipofectamine or Fugene) or by electroporation (such as Lonza Nucleofection). Following transfection, GFP expression can be determined either by fluorescence microscopy or by flow cytometry to confirm consistent and high levels of transfection. These preliminary transfections can comprise different gRNAs and different targeting approaches (17-mers, 20-mers, nuclease, dual-nickase, etc.) to determine which gRNAs/combinations of gRNAs give the greatest activity.

[1148] Efficiency of cleavage with each gRNA may be assessed by measuring NHEJ-induced indel formation at the target locus by a T7E1-type assay or by sequencing. Alternatively, other mismatch-sensitive enzymes, such as Cell/Surveyor nuclease, may also be used.

[1149] For the T7E1 assay, PCR amplicons are approximately 500-700 bp with the intended cut site placed asymmetrically in the amplicon. Following amplification, purification and size-verification of PCR products, DNA is denatured and re-hybridized by heating to 95° C. and then slowly cooling. Hybridized PCR products are then digested with T7 Endonuclease I (or other mismatch-sensitive enzyme) which recognizes and cleaves non-perfectly matched DNA. If indels are present in the original template DNA, when the amplicons are denatured and re-annealed, this results in the hybridization of DNA strands harboring different indels and therefore lead to double-stranded DNA that is not perfectly matched. Digestion products may be visualized by gel electrophoresis or by capillary electrophoresis. The fraction of DNA that is cleaved (density of cleavage products divided by the density of cleaved and uncleaved) may be used to estimate a percent NHEJ using the following equation: % NHEJ=(1−(1−fraction cleaved)^{1/2}). The T7E1 assay is sensitive down to about 2-5% NHEJ.

[1150] Sequencing may be used instead of, or in addition to, the T7E1 assay. For Sanger sequencing, purified PCR amplicons are cloned into a plasmid backbone, transformed, miniprepped and sequenced with a single primer. Sanger sequencing may be used for determining the exact nature of indels after determining the NHEJ rate by T7E1.

[1151] Sequencing may also be performed using next generation sequencing techniques. When using next generation sequencing, amplicons may be 300-500 bp with the intended cut site placed asymmetrically. Following PCR, next generation sequencing adapters and barcodes (for example Illumina multiplex adapters and indexes) may be added to the ends of the amplicon, e.g., for use in high throughput sequencing (for example on an Illumina MiSeq). This method allows for detection of very low NHEJ rates.

### Example 2: Assessment of Gene Targeting by NHEJ

[1152] The gRNAs that induce the greatest levels of NHEJ in initial tests can be selected for further evaluation of gene targeting efficiency. In this case, cells are derived from disease subjects and, therefore, harbor the relevant relevant target sequences.

[1153] Following transfection (usually 2-3 days post-transfection,) genomic DNA may be isolated from a bulk population of transfected cells and PCR may be used to amplify the target region. Following PCR, gene targeting efficiency to generate the desired mutations (either knockout of a target gene or removal of a target sequence motif) may be determined by sequencing. For Sanger sequencing, PCR amplicons may be 500-700 bp long. For next generation sequencing, PCR amplicons may be 300-500 bp long. If the goal is to knockout gene function, sequencing may be used to assess what percent of viral copies have undergone NHEJ-induced indels that result in a frameshift or large deletion or insertion that would be expected to destroy gene function. If the goal is to remove a specific sequence motif, sequencing may be used to assess what percent of viral copies have undergone NHEJ-induced deletions that span this sequence.

### Example 3: Assessment of Activity of Individual gRNAs Targeting Synthetic HBV Constructs

[1154] Four plasmids containing HBV sequences were constructed as reporters to measure Cas9-mediated cleavage of target DNA. These reporter plasmids, pAF196-199, encode a Green Fluorescent Protein (GFP) driven by a CMV promoter. The target HBV sequences were inserted in frame with the GFP, at its N-terminus, with a P2A self-cleaving peptide sequence between them.

[1155] gRNAs were identified using a custom guide RNA design software based on the public tool cas-offinder (Bae et al. Bioinformatics. 2014; 30(10): 1473-1475). Each gRNA to be tested was generated as a STITCHR product and co-transfected with a plasmid expressing the S. pyogenes Cas9 EQR variant (pDRmini004) into HEK293FT cells. The pDRmini004 plasmid encodes the S. pyogenes Cas9 EQR variant with a C-terminal nuclear localization signals (NLS) and a C-terminal triple flag tag, driven by a CMV promoter. gRNA and Cas9-encoding DNA was introduced into cells along with one of the target plasmids (pAF196, pAF197, pAF198, or pAF199) by Minis TransIT-293 transfection reagent. Two days post-transfection, cells were removed from their growth plates by trypsinization, washed in PBS buffer, and analyzed with a BD Accuri Flow Cytometer.

[1156] FIGS. 9-13 show the plasmid maps for pAF196-199 and pDRmini004. The nucleotide sequences of plasmids pAF196, pAF197, pAF198, pAF199 and pDRmini004 are set forth in SEQ ID NO: 210, SEQ ID NO: 211, SEQ ID NO: 212, SEQ ID NO: 213 and SEQ ID NO: 214, respectively. FIG. 14 shows the reduction in GFP expression as measured by mean fluorescence (or relative fluorescence units, RFU) of the transfected cell population due to Cas9-mediated cleavage of the HBV target sequences in plasmids pAF196-199.

### INCORPORATION BY REFERENCE

[1157] All publications, patents, and patent applications mentioned herein are hereby incorporated by reference in their entirety as if each individual publication, patent or patent application was specifically and individually indicated to be incorporated by reference. In case of conflict, the present application, including any definitions herein, will control.

### EQUIVALENTS

[1158] Those skilled in the art will recognize, or be able to ascertain using no more than routine experimentation, many equivalents to the specific embodiments of the invention described herein.

[1159] Such equivalents are intended to be encompassed by the following claims.

What is claimed is:

1. A genome editing system comprising:
a gRNA molecule comprising a targeting domain that is complementary with a target sequence of a Hepatitis B virus (HBV) viral gene selected from the group consisting of PreC gene, C gene, X gene, PreS1 gene, PreS2 gene, S gene, P gene and SP gene; and
a Cas9 molecule.

2. The genome editing system of claim 1, wherein said targeting domain is configured to form a double strand break or a single strand break within about 500 bp, about 450 bp, about 400 bp, about 350 bp, about 300 bp, about 250 bp, about 200 bp, about 150 bp, about 100 bp, about 50 bp, about 25 bp, or about 10 bp of an HBV target position, thereby altering said HBV viral gene.

3. The genome editing system of claim 2, wherein said altering said HBV viral gene comprises knockout of said HBV viral gene, knockdown of said HBV viral gene, or concomitant knockout and knockdown of said HBV viral gene.

4. The genome editing system of claim 1, wherein said targeting domain is configured to target a coding region or a non-coding region of said HBV viral gene, wherein said non-coding region comprises a promoter region, an enhancer region, an intron, the 3′ UTR, the 5′ UTR, or a polyadenylation signal region of said HBV viral gene; and said coding region comprises an early coding region of said HBV viral gene.

5. The genome editing system of claim 1, wherein said targeting domain comprises a nucleotide sequence that is identical to, or differs by no more than 3 nucleotides from, a nucleotide sequence selected from SEQ ID NOS: 215 to 141071.

6. The genome editing system of claim 1, wherein said Cas9 molecule is an S. pyogenes Cas9 molecule, and said targeting domain comprises a nucleotide sequence that is identical to, or differs by no more than 3 nucleotides from, a nucleotide sequence selected from the group consisting of:
(a) SEQ ID NOS: 15389-16329;
(b) SEQ ID NOS: 31598-32518;
(c) SEQ ID NOS: 47978-48841;
(d) SEQ ID NOS: 62798-63714;
(e) SEQ ID NOS: 79221-80079;
(f) SEQ ID NOS: 94449-95356;
(g) SEQ ID NOS: 110120-111022; and
(h) SEQ ID NOS: 125842-126712.

7. The genome editing system of claim 6, wherein said S. pyogenes Cas9 molecule recognizes a Protospacer Adjacent Motif (PAM) of NGG, and
(a) the genome editing system targets HBV genotype A (HBV-A), and said targeting domain comprises a nucleotide sequence that is identical to, or differs by no more than 3 nucleotides from, a nucleotide sequence selected from SEQ ID NOS: 15389-16329;
(b) the genome editing system targets HBV genotype B (HBV-B), and said targeting domain comprises a nucleotide sequence that is identical to, or differs by no more than 3 nucleotides from, a nucleotide sequence selected from SEQ ID NOS: 31598-32518;
(c) the genome editing system targets HBV genotype C (HBV-C), and said targeting domain comprises a nucleotide sequence that is identical to, or differs by no more than 3 nucleotides from, a nucleotide sequence selected from SEQ ID NOS: 47978-48841; or
(d) the genome editing system targets HBV genotype D (HBV-D), and said targeting domain comprises a nucleotide sequence that is identical to, or differs by no more than 3 nucleotides from, a nucleotide sequence selected from SEQ ID NOS: 62798-63714.

8. The genome editing system of claim 1, wherein said Cas9 molecule is an S. pyogenes Cas9 EQR variant, and said targeting domain comprises a nucleotide sequence that is identical to, or differs by no more than 3 nucleotides from, a nucleotide sequence selected from the group consisting of:
(a) SEQ ID NOS: 215-1565;
(b) SEQ ID NOS: 2225-3535;
(c) SEQ ID NOS: 4169-5381;
(d) SEQ ID NOS: 5977-7325;
(e) SEQ ID NOS: 7953-9213;
(f) SEQ ID NOS: 9830-11082;
(g) SEQ ID NOS: 11678-12954; and
(h) SEQ ID NOS: 13563-14791.

9. The genome editing system of claim 8, wherein said S. pyogenes Cas9 EQR variant recognizes a PAM selected from the group consisting of NGAG, NGCG, NGGG, NGTG, NGAA, NGAT, and NGAC, and
(a) the genome editing system targets HBV genotype A (HBV-A), and said targeting domain comprises a nucleotide sequence that is identical to, or differs by no more than 3 nucleotides from, a nucleotide sequence selected from SEQ ID NOS: 215-1565;
(b) the genome editing system targets HBV genotype B (HBV-B), and said targeting domain comprises a nucleotide sequence that is identical to, or differs by no more than 3 nucleotides from, a nucleotide sequence selected from SEQ ID NOS: 2225-3535;
(c) the genome editing system targets HBV genotype C (HBV-C), and said targeting domain comprises a nucleotide sequence that is identical to, or differs by no more than 3 nucleotides from, a nucleotide sequence selected from SEQ ID NOS: 4169-5381; or
(d) the genome editing system targets HBV genotype D (HBV-D), and said targeting domain comprises a nucleotide sequence that is identical to, or differs by no more than 3 nucleotides from, a nucleotide sequence selected from SEQ ID NOS: 5977-7325.

10. The genome editing system of claim 1, wherein said Cas9 molecule is an S. pyogenes Cas9 VRER variant, and said targeting domain comprises a nucleotide sequence that is identical to, or differs by no more than 3 nucleotides from, a nucleotide sequence selected from the group consisting of:
(a) SEQ ID NOS: 1566-2224;
(b) SEQ ID NOS: 3536-4168;
(c) SEQ ID NOS: 5382-5976;
(d) SEQ ID NOS: 7326-7952;
(e) SEQ ID NOS: 9214-9829;
(f) SEQ ID NOS: 11083-11677;
(g) SEQ ID NOS: 12955-13562; and
(h) SEQ ID NOS: 14792-15388.

11. The genome editing system of claim 10, wherein said S. pyogenes Cas9 VRER variant recognizes a PAM selected from the group consisting of NGCG, NGCA, NGCT, and NGCC, and
(a) the genome editing system targets HBV genotype A (HBV-A), and said targeting domain comprises a nucleotide sequence that is identical to, or differs by no more than 3 nucleotides from, a nucleotide sequence selected from SEQ ID NOS: 1566-2224;
(b) the genome editing system targets HBV genotype B (HBV-B), and said targeting domain comprises a nucleotide sequence that is identical to, or differs by no more than 3 nucleotides from, a nucleotide sequence selected from SEQ ID NOS: 3536-4168;
(c) the genome editing system targets HBV genotype C (HBV-C), and said targeting domain comprises a nucleotide sequence that is identical to, or differs by no more than 3 nucleotides from, a nucleotide sequence selected from SEQ ID NOS: 5382-5976; or
(d) the genome editing system targets HBV genotype D (HBV-D), and said targeting domain comprises a nucleotide sequence that is identical to, or differs by no more than 3 nucleotides from, a nucleotide sequence selected from SEQ ID NOS: 7326-7952.

12. The genome editing system of claim 1, wherein said Cas9 molecule is an S. aureus Cas9 molecule, and said targeting domain comprises a nucleotide sequence that is identical to, or differs by no more than 3 nucleotides from, a nucleotide sequence selected from the group consisting of:
(a) SEQ ID NOS: 16330-19822;
(b) SEQ ID NOS: 32519-35976;
(c) SEQ ID NOS: 48842-51921;
(d) SEQ ID NOS: 63715-67224;
(e) SEQ ID NOS: 80080-83218;
(f) SEQ ID NOS: 95357-98663;
(g) SEQ ID NOS: 111023-114350; and
(h) SEQ ID NOS: 126713-129862.

13. The genome editing system of claim 12, wherein said S. aureus Cas9 molecule recognizes a PAM of either NNNRRT or NNNRRV, and
(a) the genome editing system targets HBV genotype A (HBV-A), and said targeting domain comprises a nucleotide sequence that is identical to, or differs by no more than 3 nucleotides from, a nucleotide sequence selected from SEQ ID NOS: 16330-19822;
(b) the genome editing system targets HBV genotype B (HBV-B), and said targeting domain comprises a nucleotide sequence that is identical to, or differs by no more than 3 nucleotides from, a nucleotide sequence selected from SEQ ID NOS: 32519-35976;
(c) the genome editing system targets HBV genotype C (HBV-C), and said targeting domain comprises a nucleotide sequence that is identical to, or differs by no more than 3 nucleotides from, a nucleotide sequence selected from SEQ ID NOS: 48842-51921; or
(d) the genome editing system targets HBV genotype D (HBV-D), and said targeting domain comprises a nucleotide sequence that is identical to, or differs by no more than 3 nucleotides from, a nucleotide sequence selected from SEQ ID NOS: 63715-67224.

14. The genome editing system of claim 1, wherein said Cas9 molecule is an S. aureus Cas9 KKH variant, and said targeting domain comprises a nucleotide sequence that is identical to, or differs by no more than 3 nucleotides from, a nucleotide sequence selected from the group consisting of:
(a) SEQ ID NOS: 19823-31597;
(b) SEQ ID NOS: 35977-47977;
(c) SEQ ID NOS: 51922-62797;
(d) SEQ ID NOS: 67225-79220;
(e) SEQ ID NOS: 83219-94448;
(f) SEQ ID NOS: 98664-110119;
(g) SEQ ID NOS: 114351-125841; and
(h) SEQ ID NOS: 129863-141071.

15. The genome editing system of claim 14, wherein said S. aureus Cas9 KKH variant recognizes a PAM of either NNNRRT or NNNRRV, and
(a) the genome editing system targets HBV genotype A (HBV-A), and said targeting domain comprises a nucleotide sequence that is identical to, or differs by no more than 3 nucleotides from, a nucleotide sequence selected from SEQ ID NOS: 19823-31597;
(b) the genome editing system targets HBV genotype B (HBV-B), and said targeting domain comprises a nucleotide sequence that is identical to, or differs by no more than 3 nucleotides from, a nucleotide sequence selected from SEQ ID NOS: 35977-47977;
(c) the genome editing system targets HBV genotype C (HBV-C), and said targeting domain comprises a nucleotide sequence that is identical to, or differs by no more than 3 nucleotides from, a nucleotide sequence selected from SEQ ID NOS: 51922-62797; or
(d) the genome editing system targets HBV genotype D (HBV-D), and said targeting domain comprises a nucleotide sequence that is identical to, or differs by no more than 3 nucleotides from, a nucleotide sequence selected from SEQ ID NOS: 67225-79220.

16. The genome editing system of claim 1, wherein said Cas9 molecule is selected from the group consisting of an enzymatically active Cas9 (eaCas9) molecule, an enzymatically inactive Cas9 (eiCas9) molecule, and an eiCas9 fusion protein.

17. The genome editing system of claim 1, wherein said Cas9 molecule comprises a wild-type Cas9 molecule, a mutant Cas9 molecule, or a combination thereof.

18. The genome editing system of claim 17, wherein said mutant Cas9 molecule comprises a mutation selected from the group consisting of D10, E762, D986, H840, N854, N863, and N580

19. The genome editing system of claim 1, wherein said Cas9 molecule is an S. aureus Cas9 molecule or an S. pyogenes Cas9 molecule.

20. The genome editing system of claim 19, wherein said S. aureus Cas9 molecule is an S. aureus Cas9 variant.

21. The genome editing system of claim 20, wherein said S. aureus Cas9 variant is an S. aureus Cas9 KKH variant.

22. The genome editing system of claim 19, wherein said S. pyogenes Cas9 molecule is an S. pyogenes Cas9 variant.

23. The genome editing system of claim 22, wherein said S. pyogenes Cas9 variant is an S. pyogenes Cas9 EQR variant or an S. pyogenes Cas9 VRER variant.

24. The genome editing system of claim 1, wherein said gRNA is a modular gRNA molecule or a chimeric gRNA molecule.

25. The genome editing system of claim 1, wherein said targeting domain has a length of 16, 17, 18, 19, 20, 21, 22, 23, 24, 25, or 26 nucleotides.

26. The genome editing system of claim 1, wherein said gRNA molecule comprises from 5′ to 3′:
a targeting domain;
a first complementarity domain;
a linking domain;
a second complementarity domain;
a proximal domain; and
a tail domain.

27. The genome editing system of claim 26, wherein said linking domain is no more than 25 nucleotides in length.

28. The genome editing system of claim 26, wherein said proximal and tail domain, taken together, are at least 20, at least 25, at least 30, or at least 40 nucleotides in length.

29. The genome editing system of claim 1, comprising two, three or four gRNA molecules.

30. A composition comprising a gRNA molecule comprising a targeting domain that is complementary with a target sequence of a HBV viral gene selected from the group consisting of PreC gene, C gene, X gene, PreS1 gene, PreS2 gene, S gene, P gene and SP gene.

31. A vector comprising a polynucleotide encoding a gRNA molecule comprising a targeting domain that is complementary with a target sequence of a HBV viral gene selected from the group consisting of PreC gene, C gene, Xgene, PreS1 gene, PreS2 gene, S gene, P gene and SP gene.

32. A method of altering a HBV viral gene selected from the group consisting of PreC gene, C gene, X gene, PreS1 gene, PreS2 gene, S gene, P gene and SP gene in a cell, comprising administering to said cell one of:
(i) a genome editing system comprising a gRNA molecule comprising a targeting domain that is complementary with a target sequence of said HBV viral gene, and at least a Cas9 molecule;
(ii) a vector comprising a polynucleotide encoding a gRNA molecule comprising a targeting domain that is complementary with a target sequence of said HBV viral gene, and a polynucleotide encoding a Cas9 molecule; or
(iii) a composition comprising a gRNA molecule comprising a targeting domain that that is complementary with a target sequence of said HBV viral gene, and at least a Cas9 molecule.

33. A method of treating, preventing and/or reducing HBV infection in a subject, comprising administering to the subject one of:
(i) a genome editing system comprising a gRNA molecule comprising a targeting domain that is complementary with a target sequence of a HBV viral gene, and at least a Cas9 molecule;
(ii) a vector comprising a polynucleotide encoding a gRNA molecule comprising a targeting domain that is complementary with a target sequence of a HBV viral gene, and a polynucleotide encoding a Cas9 molecule; or
(iii) a composition comprising a gRNA molecule comprising a targeting domain that that is complementary with a target sequence of a HBV viral gene, and at least a Cas9 molecule, wherein said HBV viral gene is selected from the group consisting of PreC gene, C gene, Xgene, PreS1 gene, PreS2 gene, S gene, P gene and SP gene.

34. A gRNA molecule comprising a targeting domain which is complementary with a target sequence of a HBV viral gene selected from the group consisting of PreC gene, C gene, Xgene, PreS1 gene, PreS2 gene, S gene, P gene and SP gene in a cell.

35. A cell comprising the genome editing system of claim 1.

36. A cell comprising the composition of claim 30.

37. A cell comprising the vector of claim 31.

The application's sequence listing, which the Patent Office published only in electronic form, follows.

SEQUENCE LISTING (141073 sequences)

SEQ ID NO: 1 - protein, 1345 aa, Streptococcus mutans
  misc_feature (10)..(21): N-terminal RuvC-like domain
  misc_feature (759)..(766): RuvC-like domain
  misc_feature (837)..(863): HNH-like domain
  misc_feature (982)..(989): RuvC-like domain
MKKPYSIGLDIGTNSVGWAVVTDDYKVPAKKMKVLGNTDKSHIEKNLLGALLFDSGNTAEDRRLKRTARRRYTRRRNRILYLQEIFSEEMGKVDDSFFHRLEDSFLVTEDKRGERHPIFGNLEEEVKYHENFPTIYHLRQYLADNPEKVDLRLVYLALAHIIKFRGHFLIEGKFDTRNNDVQRLFQEFLAVYDNTFENSSLQEQNVQVEEILTDKISKSAKKDRVLKLFPNEKSNGRFAEFLKLIVGNQADFKKHFELEEKAPLQFSKDTYEEELEVLLAQIGDNYAELFLSAKKLYDSILLSGILTVTDVGTKAPLSASMIQRYNEHQMDLAQLKQFIRQKLSDKYNEVFSDVSKDGYAGYIDGKTNQEAFYKYLKGLLNKIEGSGYFLDKIEREDFLRKQRTFDNGSIPHQIHLQEMRAIIRRQAEFYPFLADNQDRIEKLLTFRIPYYVGPLARGKSDFAWLSRKSADKITPWNFDEIVDKESSAEAFINRMTNYDLYLPNQKVLPKHSLLYEKFTVYNELTKVKYKTEQGKTAFFDANMKQEIFDGVFKVYRKVTKDKLMDFLEKEFDEFRIVDLTGLDKENKVFNASYGTYHDLCKILDKDFLDNSKNEKILEDIVLTLTLFEDREMIRKRLENYSDLLTKEQVKKLERRHYTGWGRLSAELIHGIRNKESRKTILDYLIDDGNSNRNFMQLINDDALSFKEEIAKAQVIGETDNLNQVVSDIAGSPAIKKGILQSLKIVDELVKIMGHQPENIVVEMARENQFTNQGRRNSQQRLKGLTDSIKEFGSQILKEHPVENSQLQNDRLFLYYLQNGRDMYTGEELDIDYLSQYDIDHIIPQAFIKDNSIDNRVLTSSKENRGKSDDVPSKDVVRKMKSYWSKLLSAKLITQRKFDNLTKAERGGLTDDDKAGFIKRQLVETRQITKHVARILDERFNTETDENNKKIRQVKIVTLKSNLVSNFRKEFELYKVREINDYHHAHDAYLNAVIGKALLGVYPQLEPEFVYGDYPHFHGHKENKATAKKFFYSNIMNFFKKDDVRTDKNGEIIWKKDEHISNIKKVLSYPQVNIVKKVEEQTGGFSKESILPKGNSDKLIPRKTKKFYWDTKKYGGFDSPIVAYSILVIADIEKGKSKKLKTVKALVGVTIMEKMTFERDPVAFLERKGYRNVQEENIIKLPKYSLFKLENGRKRLLASARELQKGNEIVLPNHLGTLLYHAKNIHKVDEPKHLDYVDKHKDEFKELLDVVSNFSKKYTLAEGNLEKIKELYAQNNGEDLKELASSFINLLTFTAIGAPATFKFFDKNIDRKRYTSTTEILNATLIHQSITGLYETRIDLNKLGGD

SEQ ID NO: 2 - protein, 1368 aa, Streptococcus pyogenes [sequence omitted]

SEQ ID NO: 3 - DNA, 4107 bp, Streptococcus pyogenes
atggataaaaagtacagcatcgggctggacatcggtacaaactcagtggggtgggccgtgattacggacgagtacaaggtaccctccaaaaaatttaaagtgctgggtaacacggacagacactctataaagaaaaatcttattggagccttgctgttcgactcaggcgagacagccgaagccacaaggttgaagcggaccgccaggaggcggtataccaggagaaagaaccgcatatgctacctgcaagaaatcttcagtaacgagatggcaaaggttgacgatagctttttccatcgcctggaagaatcctttcttgttgaggaagacaagaagcacgaacggcaccccatctttggcaatattgtcgacgaagtggcatatcacgaaaagtacccgactatctaccacctcaggaagaagctggtggactctaccgataaggcggacctcagacttatttatttggcactcgcccacatgattaaatttagaggacatttcttgatcgagggcgacctgaacccggacaacagtgacgtcgataagctgttcatccaacttgtgcagacctacaatcaactgttcgaagaaaaccctataaatgcttcaggagtcgacgctaaagcaatcctgtccgcgcgcctctcaaaatctagaagacttgagaatctgattgctcagttgcccggggaaaagaaaaatggattgtttggcaacctgatcgccctcagtctcggactgaccccaaatttcaaaagtaacttcgacctggccgaagacgctaagctccagctgtccaaggacacatacgatgacgacctcgacaatctgctggcccagattggggatcagtacgccgatctctttttggcagcaaagaacctgtccgacgccatcctgttgagcgatatcttgagagtgaacaccgaaattactaaagcaccccttagcgcatctatgatcaagcggtacgacgagcatcatcaggatctgaccctgctgaaggctcttgtgaggcaacagctccccgaaaaatacaaggaaatcttctttgaccagagcaaaaacggctacgctggctatatagatggtggggccagtcaggaggaattctataaattcatcaagcccattctcgagaaaatggacggcacagaggagttgctggtcaaacttaacagggaggacctgctgcggaagcagcggacctttgacaacgggtctatcccccaccagattcatctgggcgaactgcacgcaatcctgaggaggcaggaggatttttatccttttcttaaagataaccgcgagaaaatagaaaagattcttacattcaggatcccgtactacgtgggacctctcgcccggggcaattcacggtttgcctggatgacaaggaagtcagaggagactattacaccttggaacttcgaagaagtggtggacaagggtgcatctgcccagtctttcatcgagcggatgacaaattttgacaagaacctccctaatgagaaggtgctgcccaaacattctctgctctacgagtactttaccgtctacaatgaactgactaaagtcaagtacgtcaccgagggaatgaggaagccggcattccttagtggagaacagaagaaggcgattgtagacctgttgttcaagaccaacaggaaggtgactgtgaagcaacttaaagaagactactttaagaagatcgaatgttttgacagtgtggaaatttcaggggttgaagaccgcttcaatgcgtcattggggacttaccatgatcttctcaagatcataaaggacaaagacttcctggacaacgaagaaaatgaggatattctcgaagacatcgtcctcaccctgaccctgttcgaagacagggaaatgatagaagagcgcttgaaaacctatgcccacctcttcgacgataaagttatgaagcagctgaagcgcaggagatacacaggatggggaagattgtcaaggaagctgatcaatggaattagggataaacagagtggcaagaccatactggatttcctcaaatctgatggcttcgccaataggaacttcatgcaactgattcacgatgactctcttaccttcaaggaggacattcaaaaggctcaggtgagcgggcagggagactcccttcatgaacacatcgcgaatttggcaggttcccccgctattaaaaagggcatccttcaaactgtcaaggtggtggatgaattggtcaaggtaatgggcagacataagccagaaaatattgtgatcgagatggcccgcgaaaaccagaccacacagaagggccagaaaaatagtagagagcggatgaagaggatcgaggagggcatcaaagagctgggatctcagattctcaaagaacaccccgtagaaaacacacagctgcagaacgaaaaattgtacttgtactatctgcagaacggcagagacatgtacgtcgaccaagaacttgatattaatagactgtccgactatgacgtagaccatatcgtgccccagtccttcctgaaggacgactccattgataacaaagtcttgacaagaagcgacaagaacaggggtaaaagtgataatgtgcctagcgaggaggtggtgaaaaaaatgaagaactactggcgacagctgcttaatgcaaagctcattacacaacggaagttcgataatctgacgaaagcagagagaggtggcttgtctgagttggacaaggcagggtttattaagcggcagctggtggaaactaggcagatcacaaagcacgtggcgcagattttggacagccggatgaacacaaaatacgacgaaaatgataaactgatacgagaggtcaaagttatcacgctgaaaagcaagctggtgtccgattttcggaaagacttccagttctacaaagttcgcgagattaataactaccatcatgctcacgatgcgtacctgaacgctgttgtcgggaccgccttgataaagaagtacccaaagctggaatccgagttcgtatacggggattacaaagtgtacgatgtgaggaaaatgatagccaagtccgagcaggagattggaaaggccacagctaagtacttcttttattctaacatcatgaatttttttaagacggaaattaccctggccaacggagagatcagaaagcggccccttatagagacaaatggtgaaacaggtgaaatcgtctgggataagggcagggatttcgctactgtgaggaaggtgctgagtatgccacaggtaaatatcgtgaaaaaaaccgaagtacagaccggaggattttccaaggaaagcattttgcctaaaagaaactcagacaagctcatcgcccgcaagaaagattgggaccctaagaaatacgggggatttgactcacccaccgtagcctattctgtgctggtggtagctaaggtggaaaaaggaaagtctaagaagctgaagtccgtgaaggaactcttgggaatcactatcatggaaagatcatcctttgaaaagaaccctatcgatttcctggaggctaagggttacaaggaggtcaagaaagacctcatcattaaactgccaaaatactctctcttcgagctggaaaatggcaggaagagaatgttggccagcgccggagagctgcaaaagggaaacgagcttgctctgccctccaaatatgttaattttctctatctcgcttcccactatgaaaagctgaaagggtctcccgaagataacgagcagaagcagctgttcgtcgaacagcacaagcactatctggatgaaataatcgaacaaataagcgagttcagcaaaagggttatcctggcggatgctaatttggacaaagtactgtctgcttataacaagcaccgggataagcctattagggaacaagccgagaatataattcacctctttacactcacgaatctcggagcccccgccgccttcaaatactttgatacgactatcgaccggaaacggtataccagtaccaaagaggtcctcgatgccaccctcatccaccagtcaattactggcctgtacgaaacacggatcgacctctctcaactgggcggcgactag

SEQ ID NO: 4 - protein, 1388 aa, Streptococcus thermophilus
  misc_feature (10)..(21): N-terminal RuvC-like domain
  misc_feature (760)..(767): RuvC-like domain
  misc_feature (844)..(870): HNH-like domain
  misc_feature (989)..(996): RuvC-like domain
MTKPYSIGLDIGTNSVGWAVTTDNYKVPSKKMKVLGNTSKKYIKKNLLGVLLFDSGITAEGRRLKRTARRRYTRRRNRILYLQEIFSTEMATLDDAFFQRLDDSFLVPDDKRDSKYPIFGNLVEEKAYHDEFPTIYHLRKYLADSTKKADLRLVYLALAHMIKYRGHFLIEGEFNSKNNDIQKNFQDFLDTYNAIFESDLSLENSKQLEEIVKDKISKLEKKDRILKLFPGEKNSGIFSEFLKLIVGNQADFRKCFNLDEKASLHFSKESYDEDLETLLGYIGDDYSDVFLKAKKLYDAILLSGFLTVTDNETEAPLSSAMIKRYNEHKEDLALLKEYIRNISLKTYNEVFKDDTKNGYAGYIDGKTNQEDFYVYLKKLLAEFEGADYFLEKIDREDFLRKQRTFDNGSIPYQIHLQEMRAILDKQAKFYPFLAKNKERIEKILTFRIPYYVGPLARGNSDFAWSIRKRNEKITPWNFEDVIDKESSAEAFINRMTSFDLYLPEEKVLPKHSLLYETFNVYNELTKVRFIAESMRDYQFLDSKQKKDIVRLYFKDKRKVTDKDIIEYLHAIYGYDGIELKGIEKQFNSSLSTYHDLLNIINDKEFLDDSSNEAIIEEIIHTLTIFEDREMIKQRLSKFENIFDKSVLKKLSRRHYTGWGKLSAKLINGIRDEKSGNTILDYLIDDGISNRNFMQLIHDDALSFKKKIQKAQIIGDEDKGNIKEVVKSLPGSPAIKKGILQSIKIVDELVKVMGGRKPESIVVEMARENQYTNQGKSNSQQRLKRLEKSLKELGSKILKENIPAKLSKIDNNALQNDRLYLYYLQNGKDMYTGDDLDIDRLSNYDIDHIIPQAFLKDNSIDNKVLVSSASNRGKSDDVPSLEVVKKRKTFWYQLLKSKLISQRKFDNLTKAERGGLSPEDKAGFIQRQLVETRQITKHVARLLDEKFNNKKDENNRAVRTVKIITLKSTLVSQFRKDFELYKVREINDFHHAHDAYLNAVVASALLKKYPKLEPEFVYGDYPKYNSFRERKSATEKVYFYSNIMNIFKKSISLADGRVIERPLIEVNEETGESVWNKESDLATVRRVLSYPQVNVVKKVEEQNHGLDRGKPKGLFNANLSSKPKPNSNENLVGAKEYLDPKKYGGYAGISNSFTVLVKGTIEKGAKKKITNVLEFQGISILDRINYRKDKLNFLLEKGYKDIELIIELPKYSLFELSDGSRRMLASILSTNNKRGEIHKGNQIFLSQKFVKLLYHAKRISNTINENHRKYVENHKKEFEELFYYILEFNENYVGAKKNGKLLNSAFQSWQNHSIDELCSSFIGPTGSERKGLFELTSRGSAADFEFLGVKIPRYRDYTPSSLLKDATLIHQSVTGLYETRIDLAKLGEG

SEQ ID NO: 5 - protein, 1334 aa, Listeria innocua
  misc_feature (10)..(21): N-terminal RuvC-like domain
  misc_feature (762)..(769): RuvC-like domain
  misc_feature (840)..(866): HNH-like domain
  misc_feature (985)..(992): RuvC-like domain
MKKPYTIGLDIGTNSVGWAVLTDQYDLVKRKMKIAGDSEKKQIKKNFWGVRLFDEGQTAADRRMARTARRRIERRRNRISYLQGIFAEEMSKTDANFFCRLSDSFYVDNEKRNSRHPFFATIEEEVEYHKNYPTIYHLREELVNSSEKADLRLVYLALAHIIKYRGNFLIEGALDTQNTSVDGIYKQFIQTYNQVFASGIEDGSLKKLEDNKDVAKILVEKVTRKEKLERILKLYPGEKSAGMFAQFISLIVGSKGNFQKPFDLIEKSDIECAKDSYEEDLESLLALIGDEYAELFVAAKNAYSAVVLSSIITVAETETNAKLSASMIERFDTHEEDLGELKAFIKLHLPKHYEEIFSNTEKHGYAGYIDGKTKQADFYKYMKMTLENIEGADYFIAKIEKENFLRKQRTFDNGAIPHQLHLEELEAILHQQAKYYPFLKENYDKIKSLVTFRIPYFVGPLANGQSEFAWLTRKADGEIRPWNIEEKVDFGKSAVDFIEKMTNKDTYLPKENVLPKHSLCYQKYLVYNELTKVRYINDQGKTSYFSGQEKEQIFNDLFKQKRKVKKKDLELFLRNMSHVESPTIEGLEDSFNSSYSTYHDLLKVGIKQEILDNPVNTEMLENIVKILTVFEDKRMIKEQLQQFSDVLDGVVLKKLERRHYTGWGRLSAKLLMGIRDKQSHLTILDYLMNDDGLNRNLMQLINDSNLSFKSIIEKEQVTTADKDIQSIVADLAGSPAIKKGILQSLKIVDELVSVMGYPPQTIVVEMARENQTTGKGKNNSRPRYKSLEKAIKEFGSQILKEHPTDNQELRNNRLYLYYLQNGKDMYTGQDLDIHNLSNYDIDHIVPQSFITDNSIDNLVLTSSAGNREKGDDVPPLEIVRKRKVFWEKLYQGNLMSKRKFDYLTKAERGGLTEADKARFIHRQLVETRQITKNVANILHQRFNYEKDDHGNTMKQVRIVTLKSALVSQFRKQFQLYKVRDVNDYHHAHDAYLNGVVANTLLKVYPQLEPEFVYGDYHQFDWFKANKATAKKQFYTNIMLFFAQKDRIIDENGEILWDKKYLDTVKKVMSYRQMNIVKKTEIQKGEFSKATIKPKGNSSKLIPRKTNWDPMKYGGLDSPNMAYAVVIEYAKGKNKLVFEKKIIRVTIMERKAFEKDEKAFLEEQGYRQPKVLAKLPKYTLYECEEGRRRMLASANEAQKGNQQVLPNHLVTLLHHAANCEVSDGKSLDYIESNREMFAELLAHVSEFAKRYTLAEANLNKINQLFEQNKEGDIKAIAQSFVDLMAFNAMGAPASFKFFETTIERKRYNNLKELLNSTIIYQSITGLYESRKRLDD

SEQ ID NO: 6 - protein, 1053 aa, Staphylococcus aureus
MKRNYILGLDIGITSVGYGIIDYETRDVIDAGVRLFKEANVENNEGRRSKRGARRLKRRRRHRIQRVKKLLFDYNLLTDHSELSGINPYEARVKGLSQKLSEEEFSAALLHLAKRRGVHNVNEVEEDTGNELSTKEQISRNSKALEEKYVAELQLERLKKDGEVRGSINRFKTSDYVKEAKQLLKVQKAYHQLDQSFIDTYIDLLETRRTYYEGPGEGSPFGWKDIKEWYEMLMGHCTYFPEELRSVKYAYNADLYNALNDLNNLVITRDENEKLEYYEKFQIIENVFKQKKKPTLKQIAKEILVNEEDIKGYRVTSTGKPEFTNLKVYHDIKDITARKEIIENAELLDQIAKILTIYQSSEDIQEELTNLNSELTQEEIEQISNLKGYTGTHNLSLKAINLILDELWHTNDNQIAIFNRLKLVPKKVDLSQQKEIPTTLVDDFILSPVVKRSFIQSIKVINAIIKKYGLPNDIIIELAREKNSKDAQKMINEMQKRNRQTNERIEEIIRTTGKENAKYLIEKIKLHDMQEGKCLYSLEAIPLEDLLNNPFNYEVDHIIPRSVSFDNSFNNKVLVKQEENSKKGNRTPFQYLSSSDSKISYETFKKHILNLAKGKGRISKTKKEYLLEERDINRFSVQKDFINRNLVDTRYATRGLMNLLRSYFRVNNLDVKVKSINGGFTSFLRRKWKFKKERNKGYKHHAEDALIIANADFIFKEWKKLDKAKKVMENQMFEEKQAESMPEIETEQEYKEIFITPHQIKHIKDFKDYKYSHRVDKKPNRELINDTLYSTRKDDKGNTLIVNNLNGLYDKDNDKLKKLINKSPEKLLMYHHDPQTYQKLKLIMEQYGDEKNPLYKYYEETGNYLTKYSKKDNGPVIKKIKYYGNKLNAHLDITDDYPNSRNKVVKLSLKPYRFDVYLDNGVYKFVTVKNLDVIKKENYYEVNSKCYEEAKKLKKISNQAEFIASFYNNDLIKINGELYRVIGVNNDLLNRIEVNMIDITYREYLENMNDKRPPRIIKTIASKTQSIKKYSTDILGNLYEVKSKKHPQIIKKG

SEQ ID NO: 7 - DNA, 3159 bp, Staphylococcus aureus
atgaaaaggaactacattctggggctggacatcgggattacaagcgtggggtatgggattattgactatgaaacaagggacgtgatcgacgcaggcgtcagactgttcaaggaggccaacgtggaaaacaatgagggacggagaagcaagaggggagccaggcgcctgaaacgacggagaaggcacagaatccagagggtgaagaaactgctgttcgattacaacctgctgaccgaccattctgagctgagtggaattaatccttatgaagccagggtgaaaggcctgagtcagaagctgtcagaggaagagttttccgcagctctgctgcacctggctaagcgccgaggagtgcataacgtcaatgaggtggaagaggacaccggcaacgagctgtctacaaaggaacagatctcacgcaatagcaaagctctggaagagaagtatgtcgcagagctgcagctggaacggctgaagaaagatggcgaggtgagagggtcaattaataggttcaagacaagcgactacgtcaaagaagccaagcagctgctgaaagtgcagaaggcttaccaccagctggatcagagcttcatcgatacttatatcgacctgctggagactcggagaacctactatgagggaccaggagaagggagccccttcggatggaaagacatcaaggaatggtacgagatgctgatgggacattgcacctattttccagaagagctgagaagcgtcaagtacgcttataacgcagatctgtacaacgccctgaatgacctgaacaacctggtcatcaccagggatgaaaacgagaaactggaatactatgagaagttccagatcatcgaaaacgtgtttaagcagaagaaaaagcctacactgaaacagattgctaaggagatcctggtcaacgaagaggacatcaagggctaccgggtgacaagcactggaaaaccagagttcaccaatctgaaagtgtatcacgatattaaggacatcacagcacggaaagaaatcattgagaacgccgaactgctggatcagattgctaagatcctgactatctaccagagctccgaggacatccaggaagagctgactaacctgaacagcgagctgacccaggaagagatcgaacagattagtaatctgaaggggtacaccggaacacacaacctgtccctgaaagctatcaatctgattctggatgagctgtggcatacaaacgacaatcagattgcaatctttaaccggctgaagctggtcccaaaaaaggtggacctgagtcagcagaaagagatcccaaccacactggtggacgatttcattctgtcacccgtggtcaagcggagcttcatccagagcatcaaagtgatcaacgccatcatcaagaagtacggcctgcccaatgatatcattatcgagctggctagggagaagaacagcaaggacgcacagaagatgatcaatgagatgcagaaacgaaaccggcagaccaatgaacgcattgaagagattatccgaactaccgggaaagagaacgcaaagtacctgattgaaaaaatcaagctgcacgatatgcaggagggaaagtgtctgtattctctggaggccatccccctggaggacctgctgaacaatccattcaactacgaggtcgatcatattatccccagaagcgtgtccttcgacaattcctttaacaacaaggtgctggtcaagcaggaagagaactctaaaaagggcaataggactcctttccagtacctgtctagttcagattccaagatctcttacgaaacctttaaaaagcacattctgaatctggccaaaggaaagggccgcatcagcaagaccaaaaaggagtacctgctggaagagcgggacatcaacagattctccgtccagaaggattttattaaccggaatctggtggacacaagatacgctactcgcggcctgatgaatctgctgcgatcctatttccgggtgaacaatctggatgtgaaagtcaagtccatcaacggcgggttcacatcttttctgaggcgcaaatggaagtttaaaaaggagcgcaacaaagggtacaagcaccatgccgaagatgctctgattatcgcaaatgccgacttcatctttaaggagtggaaaaagctggacaaagccaagaaagtgatggagaaccagatgttcgaagagaagcaggccgaatctatgcccgaaatcgagacagaacaggagtacaaggagattttcatcactcctcaccagatcaagcatatcaaggatttcaaggactacaagtactctcaccgggtggataaaaagcccaacagagagctgatcaatgacaccctgtatagtacaagaaaagacgataaggggaataccctgattgtgaacaatctgaacggactgtacgacaaagataatgacaagctgaaaaagctgatcaacaaaagtcccgagaagctgctgatgtaccaccatgatcctcagacatatcagaaactgaagctgattatggagcagtacggcgacgagaagaacccactgtataagtactatgaagagactgggaactacctgaccaagtatagcaaaaaggataatggccccgtgatcaagaagatcaagtactatgggaacaagctgaatgcccatctggacatcacagacgattaccctaacagtcgcaacaaggtggtcaagctgtcactgaagccatacagattcgatgtctatctggacaacggcgtgtataaatttgtgactgtcaagaatctggatgtcatcaaaaaggagaactactatgaagtgaatagcaagtgctacgaagaggctaaaaagctgaaaaagattagcaaccaggcagagttcatcgcctccttttacaacaacgacctgattaagatcaatggcgaactgtatagggtcatcggggtgaacaatgatctgctgaaccgcattgaagtgaatatgattgacatcacttaccgagagtatctggaaaacatgaatgataagcgcccccctcgaattatcaaaacaattgcctctaagactcagagtatcaaaaagtactcaaccgacattctgggaaacctgtatgaggtgaagagcaaaaagcaccctcagattatcaaaaagggc

SEQ ID NO: 8 - DNA, 3159 bp, Staphylococcus aureus
atgaagcggaactacatcctgggcctggacatcggcatcaccagcgtgggctacggcatcatcgactacgagacacgggacgtgatcgatgccggcgtgcggctgttcaaagaggccaacgtggaaaacaacgagggcaggcggagcaagagaggcgccagaaggctgaagcggcggaggcggcatagaatccagagagtgaagaagctgctgttcgactacaacctgctgaccgaccacagcgagctgagcggcatcaacccctacgaggccagagtgaagggcctgagccagaagctgagcgaggaagagttctctgccgccctgctgcacctggccaagagaagaggcgtgcacaacgtgaacgaggtggaagaggacaccggcaacgagctgtccaccaaagagcagatcagccggaacagcaaggccctggaagagaaatacgtggccgaactgcagctggaacggctgaagaaagacggcgaagtgcggggcagcatcaacagattcaagaccagcgactacgtgaaagaagccaaacagctgctgaaggtgcagaaggcctaccaccagctggaccagagcttcatcgacacctacatcgacctgctggaaacccggcggacctactatgagggacctggcgagggcagccccttcggctggaaggacatcaaagaatggtacgagatgctgatgggccactgcacctacttccccgaggaactgcggagcgtgaagtacgcctacaacgccgacctgtacaacgccctgaacgacctgaacaatctcgtgatcaccagggacgagaacgagaagctggaatattacgagaagttccagatcatcgagaacgtgttcaagcagaagaagaagcccaccctgaagcagatcgccaaagaaatcctcgtgaacgaagaggatattaagggctacagagtgaccagcaccggcaagcccgagttcaccaacctgaaggtgtaccacgacatcaaggacattaccgcccggaaagagattattgagaacgccgagctgctggatcagattgccaagatcctgaccatctaccagagcagcgaggacatccaggaagaactgaccaatctgaactccgagctgacccaggaagagatcgagcagatctctaatctgaagggctataccggcacccacaacctgagcctgaaggccatcaacctgatcctggacgagctgtggcacaccaacgacaaccagatcgctatcttcaaccggctgaagctggtgcccaagaaggtggacctgtcccagcagaaagagatccccaccaccctggtggacgacttcatcctgagccccgtcgtgaagagaagcttcatccagagcatcaaagtgatcaacgccatcatcaagaagtacggcctgcccaacgacatcattatcgagctggcccgcgagaagaactccaaggacgcccagaaaatgatcaacgagatgcagaagcggaaccggcagaccaacgagcggatcgaggaaatcatccggaccaccggcaaagagaacgccaagtacctgatcgagaagatcaagctgcacgacatgcaggaaggcaagtgcctgtacagcctggaagccatccctctggaagatctgctgaacaaccccttcaactatgaggtggaccacatcatccccagaagcgtgtccttcgacaacagcttcaacaacaaggtgctcgtgaagcaggaagaaaacagcaagaagggcaaccggaccccattccagtacctgagcagcagcgacagcaagatcagctacgaaaccttcaagaagcacatcctgaatctggccaagggcaagggcagaatcagcaagaccaagaaagagtatctgctggaagaacgggacatcaacaggttctccgtgcagaaagacttcatcaaccggaacctggtggataccagatacgccaccagaggcctgatgaacctgctgcggagctacttcagagtgaacaacctggacgtgaaagtgaagtccatcaatggcggcttcaccagctttctgcggcggaagtggaagtttaagaaagagcggaacaaggggtacaagcaccacgccgaggacgccctgatcattgccaacgccgatttcatcttcaaagagtggaagaaactggacaaggccaaaaaagtgatggaaaaccagatgttcgaggaaaagcaggccgagagcatgcccgagatcgaaaccgagcaggagtacaaagagatcttcatcaccccccaccagatcaagcacattaaggacttcaaggactacaagtacagccaccgggtggacaagaagcctaatagagagctgattaacgacaccctgtactccacccggaaggacgacaagggcaacaccctgatcgtgaacaatctgaacggcctgtacgacaaggacaatgacaagctgaaaaagctgatcaacaagagccccgaaaagctgctgatgtaccaccacgacccccagacctaccagaaactgaagctgattatggaacagtacggcgacgagaagaatcccctgtacaagtactacgaggaaaccgggaactacctgaccaagtactccaaaaaggacaacggccccgtgatcaagaagattaagtattacggcaacaaactgaacgcccatctggacatcaccgacgactaccccaacagcagaaacaaggtcgtgaagctgtccctgaagccctacagattcgacgtgtacctggacaatggcgtgtacaagttcgtgaccgtgaagaatctggatgtgatcaaaaaagaaaactactacgaagtgaatagcaagtgctatgaggaagctaagaagctgaagaagatcagcaaccaggccgagtttatcgcctccttctacaacaacgatctgatcaagatcaacggcgagctgtatagagtgatcggcgtgaacaacgacctgctgaaccggatcgaagtgaacatgatcgacatcacctaccgcgagtacctggaaaacatgaacgacaagaggccccccaggatcattaagacaatcgcctccaagacccagagcattaagaagtacagcacagacattctgggcaacctgtatgaagtgaaatctaagaagcaccctcagatcatcaaaaagggc

SEQ ID NO: 9 - DNA, 3159 bp, Staphylococcus aureus
atgaagcgcaactacatcctcggactggacatcggcattacctccgtgggatacggcatcatcgattacgaaactagggatgtgatcgacgctggagtcaggctgttcaaagaggcgaacgtggagaacaacgaggggcggcgctcaaagaggggggcccgccggctgaagcgccgccgcagacatagaatccagcgcgtgaagaagctgctgttcgactacaaccttctgaccgaccactccgaactttccggcatcaacccatatgaggctagagtgaagggattgtcccaaaagctgtccgaggaagagttctccgccgcgttgctccacctcgccaagcgcaggggagtgcacaatgtgaacgaagtggaagaagataccggaaacgagctgtccaccaaggagcagatcagccggaactccaaggccctggaagagaaatacgtggcggaactgcaactggagcggctgaagaaagacggagaagtgcgcggctcgatcaaccgcttcaagacctcggactacgtgaaggaggccaagcagctcctgaaagtgcaaaaggcctatcaccaacttgaccagtcctttatcgatacctacatcgatctgctcgagactcggcggacttactacgagggtccaggggagggctccccatttggttggaaggatattaaggagtggtacgaaatgctgatgggacactgcacatacttccctgaggagctgcggagcgtgaaatacgcatacaacgcagacctgtacaacgcgctgaacgacctgaacaatctcgtgatcacccgggacgagaacgaaaagctcgagtattacgaaaagttccagattattgagaacgtgttcaaacagaagaagaagccgacactgaagcagattgccaaggaaatcctcgtgaacgaagaggacatcaagggctatcgagtgacctcaacgggaaagccggagttcaccaatctgaaggtctaccacgacatcaaagacattaccgcccggaaggagatcattgagaacgcggagctgttggaccagattgcgaagattctgaccatctaccaatcctccgaggatattcaggaagaactcaccaacctcaacagcgaactgacccaggaggagatagagcaaatctccaacctgaagggctacaccggaactcataacctgagcctgaaggccatcaacttgatcctggacgagctgtggcacaccaacgataaccagatcgctattttcaatcggctgaagctggtccccaagaaagtggacctctcacaacaaaaggagatccctactacccttgtggacgatttcattctgtcccccgtggtcaagagaagcttcatacagtcaatcaaagtgatcaatgccattatcaagaaatacggtctgcccaacgacattatcattgagctcgcccgcgagaagaactcgaaggacgcccagaagatgattaacgaaatgcagaagaggaaccgacagactaacgaacggatcgaagaaatcatccggaccaccgggaaggaaaacgcgaagtacctgatcgaaaagatcaagctccatgacatgcaggaaggaaagtgtctgtactcgctggaggccattccgctggaggacttgctgaacaacccttttaactacgaagtggatcatatcattccgaggagcgtgtcattcgacaattccttcaacaacaaggtcctcgtgaagcaggaggaaaactcgaagaagggaaaccgcacgccgttccagtacctgagcagcagcgactccaagatttcctacgaaaccttcaagaagcacatcctcaacctggcaaaggggaagggtcgcatctccaagaccaagaaggaatatctgctggaagaaagagacatcaacagattctccgtgcaaaaggacttcatcaaccgcaacctcgtggatactagatacgctactcggggtctgatgaacctcctgagaagctactttagagtgaacaatctggacgtgaaggtcaagtcgattaacggaggtttcacctccttcctgcggcgcaagtggaagttcaagaaggaacggaacaagggctacaagcaccacgccgaggacgccctgatcattgccaacgccgacttcatcttcaaagaatggaagaaacttgacaaggctaagaaggtcatggaaaaccagatgttcgaagaaaagcaggccgagtctatgcctgaaatcgagactgaacaggagtacaaggaaatctttattacgccacaccagatcaaacacatcaaggatttcaaggattacaagtactcacatcgcgtggacaaaaagccgaacagggaactgatcaacgacaccctctactccacccggaaggatgacaaagggaataccctcatcgtcaacaaccttaacggcctgtacgacaaggacaacgataagctgaagaagctcattaacaagtcgcccgaaaagttgctgatgtaccaccacgaccctcagacttaccagaagctcaagctgatcatggagcagtatggggacgagaaaaacccgttgtacaagtactacgaagaaactgggaattatctgactaagtactccaagaaagataacggccccgtgattaagaagattaagtactacggcaacaagctgaacgcccatctggacatcaccgatgactaccctaattcccgcaacaaggtcgtcaagctgagcctcaagccctaccggtttgatgtgtaccttgacaatggagtgtacaagttcgtgactgtgaagaaccttgacgtgatcaagaaggagaactactacgaagtcaactccaagtgctacgaggaagcaaagaagttgaagaagatctcgaaccaggccgagttcattgcctccttctataacaacgacctgattaagatcaacggcgaactgtaccgcgtcattggcgtgaacaacgatctcctgaaccgcatcgaagtgaacatgatcgacatcacttaccgggaatacctggagaatatgaacgacaagcgcccgccccggatcattaagactatcgcctcaaagacccagtcgatcaagaagtacagcaccgacatcctgggcaacctgtacgaggtcaaatcgaagaagcacccccagatcatcaagaaggga

SEQ ID NO: 10 - DNA, 3159 bp, Staphylococcus aureus
atgaaaaggaactacattctggggctggccatcgggattacaagcgtggggtatgggattattgactatgaaacaagggacgtgatcgacgcaggcgtcagactgttcaaggaggccaacgtggaaaacaatgagggacggagaagcaagaggggagccaggcgcctgaaacgacggagaaggcacagaatccagagggtgaagaaactgctgttcgattacaacctgctgaccgaccattctgagctgagtggaattaatccttatgaagccagggtgaaaggcctgagtcagaagctgtcagaggaagagttttccgcagctctgctgcacctggctaagcgccgaggagtgcataacgtcaatgaggtggaagaggacaccggcaacgagctgtctacaaaggaacagatctcacgcaatagcaaagctctggaagagaagtatgtcgcagagctgcagctggaacggctgaagaaagatggcgaggtgagagggtcaattaataggttcaagacaagcgactacgtcaaagaagccaagcagctgctgaaagtgcagaaggcttaccaccagctggatcagagcttcatcgatacttatatcgacctgctggagactcggagaacctactatgagggaccaggagaagggagccccttcggatggaaagacatcaaggaatggtacgagatgctgatgggacattgcacctattttccagaagagctgagaagcgtcaagtacgcttataacgcagatctgtacaacgccctgaatgacctgaacaacctggtcatcaccagggatgaaaacgagaaactggaatactatgagaagttccagatcatcgaaaacgtgtttaagcagaagaaaaagcctacactgaaacagattgctaaggagatcctggtcaacgaagaggacatcaagggctaccgggtgacaagcactggaaaaccagagttcaccaatctgaaagtgtatcacgatattaaggacatcacagcacggaaagaaatcattgagaacgccgaactgctggatcagattgctaagatcctgactatctaccagagctccgaggacatccaggaagagctgactaacctgaacagcgagctgacccaggaagagatcgaacagattagtaatctgaaggggtacaccggaacacacaacctgtccctgaaagctatcaatctgattctggatgagctgtggcatacaaacgacaatcagattgcaatctttaaccggctgaagctggtcccaaaaaaggtggacctgagtcagcagaaagagatcccaaccacactggtggacgatttcattctgtcacccgtggtcaagcggagcttcatccagagcatcaaagtgatcaacgccatcatcaagaagtacggcctgcccaatgatatcattatcgagctggctagggagaagaacagcaaggacgcacagaagatgatcaatgagatgcagaaacgaaaccggcagaccaatgaacgcattgaagagattatccgaactaccgggaaagagaacgcaaagtacctgattgaaaaaatcaagctgcacgatatgcaggagggaaagtgtctgtattctctggaggccatccccctggaggacctgctgaacaatccattcaactacgaggtcgatcatattatccccagaagcgtgtccttcgacaattcctttaacaacaaggtgctggtcaagcaggaagagaactctaaaaagggcaataggactcctttccagtacctgtctagttcagattccaagatctcttacgaaacctttaaaaagcacattctgaatctggccaaaggaaagggccgcatcagcaagaccaaaaaggagtacctgctggaagagcgggacatcaacagattctccgtccagaaggattttattaaccggaatctggtggacacaagatacgctactcgcggcctgatgaatctgctgcgatcctatttccgggtgaacaatctggatgtgaaagtcaagtccatcaacggcgggttcacatcttttctgaggcgcaaatggaagtttaaaaaggagcgcaacaaagggtacaagcaccatgccgaagatgctctgattatcgcaaatgccgacttcatctttaaggagtggaaaaagctggacaaagccaagaaagtgatggagaaccagatgttcgaagagaagcaggccgaatctatgcccgaaatcgagacagaacaggagtacaaggagattttcatcactcctcaccagatcaagcatatcaaggatttcaaggactacaagtactctcaccgggtggataaaaagcccaacagagagctgatcaatgacaccctgtatagtacaagaaaagacgataaggggaataccctgattgtgaacaatctgaacggactgtacgacaaagataatgacaagctgaaaaagctgatcaacaaaagtcccgagaagctgctgatgtaccaccatgatcctcagacatatcagaaactgaagctgattatggagcagtacggcgacgagaagaacccactgtataagtactatgaagagactgggaactacctgaccaagtatagcaaaaaggataatggccccgtgatcaagaagatcaagtactatgggaacaagctgaatgcccatctggacatcacagacgattaccctaacagtcgcaacaaggtggtcaagctgtcactgaagccatacagattcgatgtctatctggacaacggcgtgtataaatttgtgactgtcaagaatctggatgtcatcaaaaaggagaactactatgaagtgaatagcaagtgctacgaagaggctaaaaagctgaaaaagattagcaaccaggcagagttcatcgcctccttttacaacaacgacctgattaagatcaatggcgaactgtatagggtcatcggggtgaacaatgatctgctgaaccgcattgaagtgaatatgattgacatcacttaccgagagtatctggaaaacatgaatgataagcgcccccctcgaattatcaaaacaattgcctctaagactcagagtatcaaaaagtactcaaccgacattctgggaaacctgtatgaggtgaagagcaaaaagcaccctcagattatcaaaaagggc

SEQ ID NO: 11 - DNA, 3159 bp, Staphylococcus aureus
atgaaaaggaactacattctggggctggacatcgggattacaagcgtggggtatgggattattgactatgaaacaagggacgtgatcgacgcaggcgtcagactgttcaaggaggccaacgtggaaaacaatgagggacggagaagcaagaggggagccaggcgcctgaaacgacggagaaggcacagaatccagagggtgaagaaactgctgttcgattacaacctgctgaccgaccattctgagctgagtggaattaatccttatgaagccagggtgaaaggcctgagtcagaagctgtcagaggaagagttttccgcagctctgctgcacctggctaagcgccgaggagtgcataacgtcaatgaggtggaagaggacaccggcaacgagctgtctacaaaggaacagatctcacgcaatagcaaagctctggaagagaagtatgtcgcagagctgcagctggaacggctgaagaaagatggcgaggtgagagggtcaattaataggttcaagacaagcgactacgtcaaagaagccaagcagctgctgaaagtgcagaaggcttaccaccagctggatcagagcttcatcgatacttatatcgacctgctggagactcggagaacctactatgagggaccaggagaagggagccccttcggatggaaagacatcaaggaatggtacgagatgctgatgggacattgcacctattttccagaagagctgagaagcgtcaagtacgcttataacgcagatctgtacaacgccctgaatgacctgaacaacctggtcatcaccagggatgaaaacgagaaactggaatactatgagaagttccagatcatcgaaaacgtgtttaagcagaagaaaaagcctacactgaaacagattgctaaggagatcctggtcaacgaagaggacatcaagggctaccgggtgacaagcactggaaaaccagagttcaccaatctgaaagtgtatcacgatattaaggacatcacagcacggaaagaaatcattgagaacgccgaactgctggatcagattgctaagatcctgactatctaccagagctccgaggacatccaggaagagctgactaacctgaacagcgagctgacccaggaagagatcgaacagattagtaatctgaaggggtacaccggaacacacaacctgtccctgaaagctatcaatctgattctggatgagctgtggcatacaaacgacaatcagattgcaatctttaaccggctgaagctggtcccaaaaaaggtggacctgagtcagcagaaagagatcccaaccacactggtggacgatttcattctgtcacccgtggtcaagcggagcttcatccagagcatcaaagtgatcaacgccatcatcaagaagtacggcctgcccaatgatatcattatcgagctggctagggagaagaacagcaaggacgcacagaagatgatcaatgagatgcagaaacgaaaccggcagaccaatgaacgcattgaagagattatccgaactaccgggaaagagaacgcaaagtacctgattgaaaaaatcaagctgcacgatatgcaggagggaaagtgtctgtattctctggaggccatccccctggaggacctgctgaacaatccattcaactacgaggtcgatcatattatccccagaagcgtgtccttcgacaattcctttaacaacaaggtgctggtcaagcaggaagaggcctctaaaaagggcaataggactcctttccagtacctgtctagttcagattccaagatctcttacgaaacctttaaaaagcacattctgaatctggccaaaggaaagggccgcatcagcaagaccaaaaaggagtacctgctggaagagcgggacatcaacagattctccgtccagaaggattttattaaccggaatctggtggacacaagatacgctactcgcggcctgatgaatctgctgcgatcctatttccgggtgaacaatctggatgtgaaagtcaagtccatcaacggcgggttcacatcttttctgaggcgcaaatggaagtttaaaaaggagcgcaacaaagggtacaagcaccatgccgaagatgctctgattatcgcaaatgccgacttcatctttaaggagtggaaaaagctggacaaagccaagaaagtgatggagaaccagatgttcgaagagaagcaggccgaatctatgcccgaaatcgagacagaacaggagtacaaggagattttcatcactcctcaccagatcaagcatatcaaggatttcaaggactacaagtactctcaccgggtggataaaaagcccaacagagagctgatcaatgacaccctgtatagtacaagaaaagacgataaggggaataccctgattgtgaacaatctgaacggactgtacgacaaagataatgacaagctgaaaaagctgatcaacaaaagtcccgagaagctgctgatgtaccaccatgatcctcagacatatcagaaactgaagctgattatggagcagtacggcgacgagaagaacccactgtataagtactatgaagagactgggaactacctgaccaagtatagcaaaaaggataatggccccgtgatcaagaagatcaagtactatgggaacaagctgaatgcccatctggacatcacagacgattaccctaacagtcgcaacaaggtggtcaagctgtcactgaagccatacagattcgatgtctatctggacaacggcgtgtataaatttgtgactgtcaagaatctggatgtcatcaaaaaggagaactactatgaagtgaatagcaagtgctacgaagaggctaaaaagctgaaaaagattagcaaccaggcagagttcatcgcctccttttacaacaacgacctgattaagatcaatggcgaactgtatagggtcatcggggtgaacaatgatctgctgaaccgcattgaagtgaatatgattgacatcacttaccgagagtatctggaaaacatgaatgataagcgcccccctcgaattatcaaaacaattgcctctaagactcagagtatcaaaaagtactcaaccgacattctgggaaacctgtatgaggtgaagagcaaaaagcaccctcagattatcaaaaagggc

SEQ ID NO: 12 - protein, 1082 aa, Neisseria meningitidis
MAAFKPNPINYILGLDIGIASVGWAMVEIDEDENPICLIDLGVRVFERAEVPKTGDSLAMARRLARSVRRLTRRRAHRLLRARRLLKREGVLQAADFDENGLIKSLPNTPWQLRAAALDRKLTPLEWSAVLLHLIKHRGYLSQRKNEGETADKELGALLKGVADNAHALQTGDFRTPAELALNKFEKESGHIRNQRGDYSHTFSRKDLQAELILLFEKQKEFGNPHVSGGLKEGIETLLMTQRPALSGDAVQKMLGHCTFEPAEPKAAKNTYTAERFIWLTKLNNLRILEQGSERPLTDTERATLMDEPYRKSKLTYAQARKLLGLEDTAFFKGLRYGKDNAEASTLMEMKAYHAISRALEKEGLKDKKSPLNLSPELQDEIGTAFSLFKTDEDITGRLKDRIQPEILEALLKHISFDKFVQISLKALRRIVPLMEQGKRYDEACAEIYGDHYGKKNTEEKIYLPPIPADEIRNPVVLRALSQARKVINGVVRRYGSPARIHIETAREVGKSFKDRKEIEKRQEENRKDREKAAAKFREYFPNFVGEPKSKDILKLRLYEQQHGKCLYSGKEINLGRLNEKGYVEIDHALPFSRTWDDSFNNKVLVLGSENQNKGNQTPYEYFNGKDNSREWQEFKARVETSRFPRSKKQRILLQKFDEDGFKERNLNDTRYVNRFLCQFVADRMRLTGKGKKRVFASNGQITNLLRGFWGLRKVRAENDRHHALDAVVVACSTVAMQQKITRFVRYKEMNAFDGKTIDKETGEVLHQKTHFPQPWEFFAQEVMIRVFGKPDGKPEFEEADTPEKLRTLLAEKLSSRPEAVHEYVTPLFVSRAPNRKMSGQGHMETVKSAKRLDEGVSVLRVPLTQLKLKDLEKMVNREREPKLYEALKARLEAHKDDPAKAFAEPFYKYDKAGNRTQQVKAVRVEQVQKTGVWVRNHNGIADNATMVRVDVFEKGDKYYLVPIYSWQVAKGILPDRAVVQGKDEEDWQLIDDSFNFKFSLHPNDLVEVITKKARMFGYFASCHRGTGNINIRIHDLDHKIGKNGILEGIGVKTALSFQKYQIDELGKEIRPCRLKKRPPVR

SEQ ID NO: 13 - DNA, 3249 bp, Neisseria meningitidis
  misc_feature (1)..(3249): Exemplary codon optimized Cas9
atggccgccttcaagcccaaccccatcaactacatcctgggcctggacatcggcatcgccagcgtgggctgggccatggtggagatcgacgaggacgagaaccccatctgcctgatcgacctgggtgtgcgcgtgttcgagcgcgctgaggtgcccaagactggtgacagtctggctatggctcgccggcttgctcgctctgttcggcgccttactcgccggcgcgctcaccgccttctgcgcgctcgccgcctgctgaagcgcgagggtgtgctgcaggctgccgacttcgacgagaacggcctgatcaagagcctgcccaacactccttggcagctgcgcgctgccgctctggaccgcaagctgactcctctggagtggagcgccgtgctgctgcacctgatcaagcaccgcggctacctgagccagcgcaagaacgagggcgagaccgccgacaaggagctgggtgctctgctgaagggcgtggccgacaacgcccacgccctgcagactggtgacttccgcactcctgctgagctggccctgaacaagttcgagaaggagagcggccacatccgcaaccagcgcggcgactacagccacaccttcagccgcaaggacctgcaggccgagctgatcctgctgttcgagaagcagaaggagttcggcaacccccacgtgagcggcggcctgaaggagggcatcgagaccctgctgatgacccagcgccccgccctgagcggcgacgccgtgcagaagatgctgggccactgcaccttcgagccagccgagcccaaggccgccaagaacacctacaccgccgagcgcttcatctggctgaccaagctgaacaacctgcgcatcctggagcagggcagcgagcgccccctgaccgacaccgagcgcgccaccctgatggacgagccctaccgcaagagcaagctgacctacgcccaggcccgcaagctgctgggtctggaggacaccgccttcttcaagggcctgcgctacggcaaggacaacgccgaggccagcaccctgatggagatgaaggcctaccacgccatcagccgcgccctggagaaggagggcctgaaggacaagaagagtcctctgaacctgagccccgagctgcaggacgagatcggcaccgccttcagcctgttcaagaccgacgaggacatcaccggccgcctgaaggaccgcatccagcccgagatcctggaggccctgctgaagcacatcagcttcgacaagttcgtgcagatcagcctgaaggccctgcgccgcatcgtgcccctgatggagcagggcaagcgctacgacgaggcctgcgccgagatctacggcgaccactacggcaagaagaacaccgaggagaagatctacctgcctcctatccccgccgacgagatccgcaaccccgtggtgctgcgcgccctgagccaggcccgcaaggtgatcaacggcgtggtgcgccgctacggcagccccgcccgcatccacatcgagaccgcccgcgaggtgggcaagagcttcaaggaccgcaaggagatcgagaagcgccaggaggagaaccgcaaggaccgcgagaaggccgccgccaagttccgcgagtacttccccaacttcgtgggcgagcccaagagcaaggacatcctgaagctgcgcctgtacgagcagcagcacggcaagtgcctgtacagcggcaaggagatcaacctgggccgcctgaacgagaagggctacgtggagatcgaccacgccctgcccttcagccgcacctgggacgacagcttcaacaacaaggtgctggtgctgggcagcgagaaccagaacaagggcaaccagaccccctacgagtacttcaacggcaaggacaacagccgcgagtggcaggagttcaaggcccgcgtggagaccagccgcttcccccgcagcaagaagcagcgcatcctgctgcagaagttcgacgaggacggcttcaaggagcgcaacctgaacgacacccgctacgtgaaccgcttcctgtgccagttcgtggccgaccgcatgcgcctgaccggcaagggcaagaagcgcgtgttcgccagcaacggccagatcaccaacctgctgcgcggcttctggggcctgcgcaaggtgcgcgccgagaacgaccgccaccacgccctggacgccgtggtggtggcctgcagcaccgtggccatgcagcagaagatcacccgcttcgtgcgctacaaggagatgaacgccttcgacggtaaaaccatcgacaaggagaccggcgaggtgctgcaccagaagacccacttcccccagccctgggagttcttcgcccaggaggtgatgatccgcgtgttcggcaagcccgacggcaagcccgagttcgaggaggccgacacccccgagaagctgcgcaccctgctggccgagaagctgagcagccgccctgaggccgtgcacgagtacgtgactcctctgttcgtgagccgcgcccccaaccgcaagatgagcggtcagggtcacatggagaccgtgaagagcgccaagcgcctggacgagggcgtgagcgtgctgcgcgtgcccctgacccagctgaagctgaaggacctggagaagatggtgaaccgcgagcgcgagcccaagctgtacgaggccctgaaggcccgcctggaggcccacaaggacgaccccgccaaggccttcgccgagcccttctacaagtacgacaaggccggcaaccgcacccagcaggtgaaggccgtgcgcgtggagcaggtgcagaagaccggcgtgtgggtgcgcaaccacaacggcatcgccgacaacgccaccatggtgcgcgtggacgtgttcgagaagggcgacaagtactacctggtgcccatctacagctggcaggtggccaagggcatcctgcccgaccgcgccgtggtgcagggcaaggacgaggaggactggcagctgatcgacgacagcttcaacttcaagttcagcctgcaccccaacgacctggtggaggtgatcaccaagaaggcccgcatgttcggctacttcgccagctgccaccgcggcaccggcaacatcaacatccgcatccacgacctggaccacaagatcggcaagaacggcatcctggagggcatcggcgtgaagaccgccctgagcttccagaagtaccagatcgacgagctgggcaaggagatccgcccctgccgcctgaagaagcgccctcctgtgcgctaa

SEQ ID NO: 14 - protein, 859 aa, Artificial Sequence
  Synthetic Cas9 consensus sequence derived from Sm, Sp, St, and Li Cas9 sequences
  misc_feature (4)..(4): Xaa can be any naturally occurring amino acid
  misc_feature (8)..(18): N-terminal RuvC-like domain
  misc_feature (21)..(21): Xaa can be any naturally occurring amino acid
  misc_feature (23)..(23): Xaa can be any naturally occurring amino acid
  misc_feature (24)..(24): Xaa can be any naturally occurring amino acid
  misc_feature (26)..(26): Xaa can be any naturally occurring amino acid
  misc_feature (29)..(31): Each Xaa can independently be any naturally occurring amino acid
  misc_feature (33)..(33): Xaa can be any naturally occurring amino acid
  misc_feature (36)..(36): Xaa can be any naturally occurring amino acid
  misc_feature (45)..(45): Xaa can be any naturally occurring amino acid
  misc_feature (54)..(54): Xaa can be any naturally occurring amino acid
  misc_feature (63)..(63): Xaa can be any naturally occurring amino acid
  misc_feature (71)..(71): Xaa can be any naturally occurring amino acid
  misc_feature (75)..(75): Xaa can be any naturally occurring amino acid
  misc_feature (76)..(76): Xaa can be any naturally occurring amino acid
  misc_feature (78)..(80): Each Xaa can independently be any naturally occurring amino acid
  misc_feature (82)..(82): Xaa can be any naturally occurring amino acid
  misc_feature (84)..(84): Xaa can be any naturally occurring amino acid
  misc_feature (85)..(85): Xaa can be any naturally occurring amino acid
  misc_feature (89)..(89): Xaa can be any naturally occurring amino acid
  misc_feature (90)..(90): Xaa can be any naturally occurring amino acid
  misc_feature (98)..(98): Xaa can be any naturally occurring amino acid
  misc_feature (100)..(100): Xaa can be any naturally occurring amino acid
  misc_feature (106)..(106): Xaa can be any naturally occurring amino acid
  misc_feature (113)..(113): Xaa can be any naturally occurring amino acid
  misc_feature (116)..(116): Xaa can be any naturally occurring amino acid
  misc_feature (125)..(125): Xaa can be any naturally occurring amino acid
  misc_feature (126)..(126): Xaa can be any naturally occurring amino acid
  misc_feature (128)..(133): Each Xaa can independently be any naturally occurring amino acid
  misc_feature (135)..(135): Xaa can be any naturally occurring amino acid
  misc_feature (137)..(137): Xaa can be any naturally occurring amino acid
  misc_feature (139)..(147): Each Xaa can independently be any naturally occurring amino acid
  misc_feature (153)..(155): Each Xaa can independently be any naturally occurring amino acid
  misc_feature (157)..(157): Xaa can be any naturally occurring amino acid
  misc_feature (159)..(159): Xaa can be any naturally occurring amino acid
  misc_feature (161)..(161): Xaa can be any naturally occurring amino acid
  misc_feature (163)..(163): Xaa can be any naturally occurring amino acid
  misc_feature (166)..(168): Each Xaa can independently be any naturally occurring amino acid
  misc_feature (170)..(170): Xaa can be any naturally occurring amino acid
  misc_feature (171)..(171): Xaa can be any naturally occurring amino acid
  misc_feature (173)..(175): Each Xaa can independently be any naturally occurring amino acid
  misc_feature (177)..(177): Xaa can be any naturally occurring amino acid
  misc_feature (183)..(183): Xaa can be any naturally occurring amino acid
  misc_feature (185)..(187): Each Xaa can independently be any naturally occurring amino acid
  misc_feature (189)..(189): Xaa can be any naturally occurring amino acid
  misc_feature (192)..(195): Each Xaa can independently be any naturally occurring amino acid
  misc_feature (198)..(198): Xaa can be any naturally occurring amino acid
  misc_feature (199)..(199): Xaa can be any naturally occurring amino acid
  misc_feature (202)..(202): Xaa can be any naturally occurring amino acid
  misc_feature (206)..(206): Xaa can be any naturally occurring amino acid
  misc_feature (207)..(207): Xaa can be any naturally occurring amino acid
  misc_feature (210)..(210): Xaa can be any naturally occurring amino acid
  misc_feature (212)..(212): Xaa can be any naturally occurring amino acid
  misc_feature (213)..(213): Xaa can be any naturally occurring amino acid
  misc_feature (219)..(219): Xaa can be any naturally occurring amino acid
  misc_feature (220)..(220): Xaa can be any naturally occurring amino acid
  misc_feature (222)..(222): Xaa can be any naturally occurring amino acid
  misc_feature (224)..(224): Xaa can be any naturally occurring amino acid
  misc_feature (226)..(226): Xaa can be any naturally occurring amino acid
  misc_feature (236)..(236): Xaa can be any naturally occurring amino acid
  misc_feature (240)..(240): Xaa can be any naturally occurring amino acid
  misc_feature (241)..(241): Xaa can be any naturally occurring amino acid
  misc_feature (244)..(246): Each Xaa can independently be any naturally occurring amino acid
  misc_feature (248)..(248): Xaa can be any naturally occurring amino acid
  misc_feature (249)..(249): Xaa can be any naturally occurring amino acid
  misc_feature (250)..(250): Xaa can be any naturally occurring amino acid
  misc_feature (252)..(254): Each Xaa can independently be any naturally occurring amino acid
  misc_feature (256)..(256): Xaa can be any naturally occurring amino acid
  misc_feature (257)..(257): Xaa can be any naturally occurring amino acid
  misc_feature (268)..(268): Xaa can be any naturally occurring amino acid
  misc_feature (271)..(271): Xaa can be any naturally occurring amino acid
  misc_feature (273)..(273): Xaa can be any naturally occurring amino acid
  misc_feature (277)..(277): Xaa can be any naturally occurring amino acid
  misc_feature (280)..(280): Xaa can be any naturally occurring amino acid
  misc_feature (281)..(281): Xaa can be any naturally occurring amino acid
  misc_feature (283)..(283): Xaa can be any naturally occurring amino acid
  misc_feature (289)..(289): Xaa can be any naturally occurring amino acid
  misc_feature (290)..(290): Xaa can be any naturally occurring amino acid
  misc_feature (292)..(294): Each Xaa can independently be any naturally occurring amino acid
  misc_feature (301)..(301): Xaa can be any naturally occurring amino acid
  misc_feature (308)..(308): Xaa can be any naturally occurring amino acid
  misc_feature (319)..(322): Each Xaa can independently be any naturally occurring amino acid
  misc_feature (328)..(328): Xaa can be any naturally occurring amino acid
  misc_feature (329)..(329): Xaa can be any naturally occurring amino acid
  misc_feature (335)..(337): Each Xaa can independently be any naturally occurring amino acid
  misc_feature (346)..(346): Xaa can be any naturally occurring amino acid
  misc_feature (347)..(347): Xaa can be any naturally occurring amino acid
  misc_feature (356)..(361): Each Xaa can independently be any naturally occurring amino acid
  misc_feature (363)..(363): Xaa can be any naturally occurring amino acid
  misc_feature (370)..(373): Each Xaa can independently be any naturally occurring amino acid
  misc_feature (375)..(375): Xaa can be any naturally occurring amino acid
  misc_feature (376)..(376): Xaa can be any naturally occurring amino acid
  misc_feature (379)..(379): Xaa can be any naturally occurring amino acid
  misc_feature (386)..(390): Each Xaa can independently be any naturally occurring amino acid
  misc_feature (393)..(393): Xaa can be any naturally occurring amino acid
  misc_feature (395)..(395): Xaa can be any naturally occurring amino acid
  misc_feature (396)..(396): Xaa can be any naturally occurring amino acid
  misc_feature (398)..(398): Xaa can be any naturally occurring amino acid
  misc_feature (400)..(400): Xaa can be any naturally occurring amino acid
  misc_feature (403)..(403): Xaa can be any naturally occurring amino acid
  misc_feature (407)..(407): Xaa can be any naturally occurring amino acid
  misc_feature (410)..(410): Xaa can be any naturally occurring amino acid
  misc_feature (411)..(411): Xaa can be any naturally occurring amino acid
  misc_feature (413)..(416): Each Xaa can independently be any naturally occurring amino acid
  misc_feature (418)..(418): Xaa can be any naturally occurring amino acid
  misc_feature (422)..(422): Xaa can be any naturally occurring amino acid
  misc_feature (428)..(428): Xaa can be any naturally occurring amino acid
  misc_feature (431)..(431): Xaa can be any naturally occurring amino acid
  misc_feature (433)..(433): Xaa can be any naturally occurring amino acid
  misc_feature (437)..(439): Each Xaa can independently be any naturally occurring amino acid
  misc_feature (445)..(445): Xaa can be any naturally occurring amino acid
  misc_feature (451)..(451): Xaa can be any naturally occurring amino acid
  misc_feature (456)..(456): Xaa can be any naturally occurring amino acid
  misc_feature (459)..(459): Xaa can be any naturally occurring amino acid
  misc_feature (465)..(469): Each Xaa can independently be any naturally occurring amino acid
  misc_feature (481)..(481): Xaa can be any naturally occurring amino acid
  misc_feature (482)..(482): Xaa can be any naturally occurring amino acid
  misc_feature (484)..(484): Xaa can be any naturally occurring amino acid
  misc_feature (490)..(490): Xaa can be any naturally occurring amino acid
  misc_feature (494)..(494): Xaa can be any naturally occurring amino acid
  misc_feature (495)..(502): RuvC-like domain
  misc_feature (497)..(497): Xaa can be any naturally occurring amino acid
  misc_feature (506)..(506): Xaa can be any naturally occurring amino acid
  misc_feature (510)..(510): Xaa can be any naturally occurring amino acid
  misc_feature (513)..(513): Xaa can be any naturally occurring amino acid
  misc_feature (514)..(514): Xaa can be any naturally occurring amino acid
  misc_feature (517)..(517): Xaa can be any naturally occurring amino acid
  misc_feature (520)..(520): Xaa can be any naturally occurring amino acid
  misc_feature (525)..(525): Xaa can be any naturally occurring amino acid
  misc_feature (526)..(526): Xaa can be any naturally occurring amino acid
  misc_feature (529)..(529): Xaa can be any naturally occurring amino acid
  misc_feature (531)..(531): Xaa can be any naturally occurring amino acid
  misc_feature (532)..(532): Xaa can be any naturally occurring amino acid
  misc_feature (534)..(534): Xaa can be any naturally occurring amino acid
  misc_feature (542)..(542): Xaa can be any naturally occurring amino acid
  misc_feature (546)..(546): Xaa can be any naturally occurring amino acid
  misc_feature (547)..(547): Xaa can be any naturally occurring amino acid
  misc_feature (553)..(553): Xaa can be any naturally occurring amino acid
  misc_feature (555)..(575): HNH-like domain
  misc_feature (556)..(556): Xaa can be any naturally occurring amino acid
  misc_feature (560)..(560): Xaa can be any naturally occurring amino acid
  misc_feature (563)..(563): Xaa can be any naturally occurring amino acid
  misc_feature (565)..(565): Xaa can be any naturally occurring amino acid
  misc_feature (567)..(567): Xaa can be any naturally occurring amino acid
  misc_feature (579)..(579): Xaa can be any naturally occurring amino acid
  misc_feature (582)..(582): Xaa can be any naturally occurring amino acid
  misc_feature (583)..(583): Xaa can be any naturally occurring amino acid
  misc_feature (585)..(585): Xaa can be any naturally occurring amino acid
  misc_feature (588)..(588): Xaa can be any naturally occurring amino acid
  misc_feature (590)..(590): Xaa can be any naturally occurring amino acid
  misc_feature (592)..(592): Xaa can be any naturally occurring amino acid
  misc_feature (594)..(596): Each Xaa can independently be any naturally occurring amino acid
  misc_feature (610)..(610): Xaa can be any naturally occurring amino acid
  misc_feature (616)..(616): Xaa can be any naturally occurring amino acid
  misc_feature (628)..(628): Xaa can be any naturally occurring amino acid
  misc_feature (631)..(631): Xaa can be any naturally occurring amino acid
  misc_feature (633)..(633): Xaa can be any naturally occurring amino acid
  misc_feature (634)..(634): Xaa can be any naturally occurring amino acid
  misc_feature (636)..(636): Xaa can be any naturally occurring amino acid
  misc_feature (638)..(641): Each Xaa can independently be any naturally occurring amino acid
  misc_feature (643)..(645): Each Xaa can independently be any naturally occurring amino acid
  misc_feature (653)..(653): Xaa can be any naturally occurring amino acid
  misc_feature (657)..(657): Xaa can be any naturally occurring amino acid
  misc_feature (659)..(659): Xaa can be any naturally occurring amino acid
  misc_feature (660)..(660): Xaa can be any naturally occurring amino acid
  misc_feature (665)..(665): Xaa can be any naturally occurring amino acid
  misc_feature (666)..(666): Xaa can be any naturally occurring amino acid
  misc_feature (668)..(668): Xaa can be any naturally occurring amino acid
  misc_feature (669)..(669): Xaa can be any naturally occurring amino acid
  misc_feature (670)..(677): RuvC-like domain
  misc_feature (680)..(680): Xaa can be any naturally occurring amino acid
  misc_feature (681)..(681): Xaa can be any naturally occurring amino acid
  misc_feature (683)..(683): Xaa can be any naturally occurring amino acid
  misc_feature (686)..(686): Xaa can be any naturally occurring amino acid
  misc_feature (696)..(696): Xaa can be any naturally occurring amino acid
  misc_feature (697)..(697): Xaa can be any naturally occurring amino acid
  misc_feature (704)..(704): Xaa can be any naturally occurring amino acid
  misc_feature (708)..(708): Xaa can be any naturally occurring amino acid
  misc_feature (710)..(710): Xaa can be any naturally occurring amino acid
  misc_feature (711)..(711): Xaa can be any naturally occurring amino acid
  misc_feature (714)..(714): Xaa can be any naturally occurring amino acid
  misc_feature (717)..(720): Each Xaa can independently be any naturally occurring amino acid
  misc_feature (722)..(722): Xaa can be any naturally occurring amino acid
  misc_feature (725)..(725): Xaa can be any naturally occurring amino acid
  misc_feature (727)..(727): Xaa can be any naturally occurring amino acid
  misc_feature (733)..(735): Each Xaa can independently be any naturally occurring amino acid
  misc_feature (740)..(740): Xaa can be any naturally occurring amino acid
  misc_feature (742)..(742): Xaa can be any naturally occurring amino acid
  misc_feature (749)..(754): Each Xaa can independently be any naturally occurring amino acid
  misc_feature (758)..(761): Each Xaa can independently be any naturally occurring amino acid
  misc_feature (763)..(768): Each Xaa can independently be any naturally occurring amino acid
  misc_feature (771)..(771): Xaa can be any naturally occurring amino acid
  misc_feature (774)..(777): Each Xaa can independently be any naturally occurring amino acid
  misc_feature (782)..(782): Xaa can be any naturally occurring amino acid
  misc_feature (784)..(786): Each Xaa can independently be any naturally occurring amino acid
  misc_feature (788)..(788): Xaa can be any naturally occurring amino acid
  misc_feature (790)..(790): Xaa can be any naturally occurring amino acid
  misc_feature (795)..(795): Xaa can be any naturally occurring amino acid
  misc_feature (799)..(799): Xaa can be any naturally occurring amino acid
  misc_feature (801)..(801): Xaa can be any naturally occurring amino acid
  misc_feature (802)..(802): Xaa can be any naturally occurring amino acid
  misc_feature (804)..(804): Xaa can be any naturally occurring amino acid
  misc_feature (806)..(813): Each Xaa can independently be any naturally occurring amino acid
  misc_feature (815)..(818): Each Xaa can independently be any naturally occurring amino acid
  misc_feature (820)..(820): Xaa can be any naturally occurring amino acid
  misc_feature (823)..(827): Each Xaa can independently be any naturally occurring amino acid
  misc_feature (829)..(829): Xaa can be any naturally occurring amino acid
  misc_feature (830)..(830): Xaa can be any naturally occurring amino acid
  misc_feature (832)..(832): Xaa can be any naturally occurring amino acid
  misc_feature (835)..(837): Each Xaa can independently be any naturally occurring amino acid
  misc_feature (842)..(844): Each Xaa can independently be any naturally occurring amino acid
  misc_feature (846)..(846): Xaa can be any naturally occurring amino acid
  misc_feature (848)..(848): Xaa can be any naturally occurring amino acid
  misc_feature (851)..(851): Xaa can be any naturally occurring amino acid
  misc_feature (857)..(857): Xaa can be any naturally occurring amino acid
  misc_feature (857)..(857): Xaa can be any naturally occurring amino acid
MKYXIGLDIGTNSVGWAVTDXYXXKXKGXXXIXKNXGLFDGTARXRTARRRRRXNRIYLQIFXEMDFFRLXSFVXXKXXXPXFXXEYHXXPTIYHLRXLXKDLRLXYLALAHXIKXRGNFLIEGXXNXXXXXXYXFXIXXXXXXXXXPEKGFXXXLXGXFXFXLEXXXKXXYXXXLXLLIGDXYXXXFXAKXXXXLSXXVTXALSXXMIXRXXHDLLKXXYXEXFXKGYAGYIDGXQFYXXKLXXXGXXXKXXXEXXLRKQRTFDNGXIPXQXHLEXAIXXQXYPFLNXXIXXXTFRIPYXVGPLAGXSFAWRKIPWNXXXXDSAFIXXMTDLPXXXVLPKHSLYXXVYNELTKVXXXXXXKXIFKRKVXXXXGXXFNXSTYHDLXXXXXLDXNXXEXIXLTXFEDXMIXXLXXXXKXLRRXYTGWGXLSXLXGIRXXXSTILDXLDNRNXMQLIXDLXFKIKQXXXXXGSPAIKKGILQXXKXVDELVXMGPXIVXEMARENQTXGNSXRKXXKEXGSXILKEXXNLXNXXLXLYYLQNGXDMYXXLDILSXYDXDHIXPQXFXDXSIDNVLSNRKDXVPXXVXKKXWXLXLXXXRKFDLTKAERGGLXDKAFIXRQLVETRQITKXVAXLXXNXDXXXXVXXXTLKSLVSXFRKXFXXLYKVXXNXXHHAHDAYLNVXXLXYPXLEEFVYGDYXXKATKFYXNIMXFXXGEXWKXXXXVXMQXNXVKKEQXXXPKNSXLXKDKYGGXXXXXXKGKXXXXIXXXXXXFLXGYXXXXLPKYXLXXXGXRXLASEXKGNXLXXLXAXXXXXXXXEXXXXFXANXXXXXLXXGXAFXXXIRRYXXXTXIXQSXTGLYEXRL

SEQ ID NO: 15 - protein, 8 aa, Artificial Sequence
  RuvC-like domain
  VARIANT (2)..(2): Xaa is Val or His
  VARIANT (3)..(3): Xaa is Ile, Leu, or Val
  VARIANT (5)..(5): Xaa is Met or Thr
IXXEXARE

SEQ ID NO: 16 - protein, 8 aa, Artificial Sequence
  RuvC-like domain
  VARIANT (3)..(3): Xaa is Ile, Leu, or Val
IVXEMARE

SEQ ID NO: 17 - protein, 8 aa, Artificial Sequence
  RuvC-like domain
  VARIANT (4)..(4): Xaa is His or Leu
  VARIANT (7)..(7): Xaa is Arg or Val
  VARIANT (8)..(8): Xaa is Glu or Val
HHAXDAXX

SEQ ID NO: 18 - protein, 8 aa, Artificial Sequence
  RuvC-like domain
HHAHDAYL

SEQ ID NO: 19 - protein, 30 aa, Artificial Sequence
  N-terminal RuvC-like domain
  VARIANT (2)..(2): Xaa is Lys or Pro
  VARIANT (4)..(4): Xaa is Val, Leu, Ile, or Phe
  VARIANT (5)..(5): Xaa is Gly, Ala, or Ser
  VARIANT (6)..(6): Xaa is Leu, Ile, Val, or Phe
  MOD_RES (7)..(26): N-terminal RuvC-like domain, each Xaa can be any amino acid or absent, region may encompass 5-20 residues
  VARIANT (29)..(29): Xaa is Asp, Glu, Asn, or Gln
KXYXXXXXXXXXXXXXXXXXXXXXXXTDXY

SEQ ID NO: 20 - protein, 12 aa, Artificial Sequence
  N-terminal RuvC-like domain
  VARIANT (2)..(2): Xaa is Ile, Val, Met, Leu, or Thr
  VARIANT (4)..(4): Xaa is Thr, Ile, Val, Ser, Asn, Tyr, Glu, or Leu
  VARIANT (5)..(5): Xaa is Asn, Ser, Gly, Ala, Asp, Thr, Arg, Met, or Phe
  VARIANT (6)..(6): Xaa is Ser, Tyr, Asn, or Phe
  VARIANT (7)..(7): Xaa is Val, Ile, Leu, Cys, Thr, or Phe
  VARIANT (9)..(9): Xaa is Trp, Phe, Val, Tyr, Ser, or Leu
  VARIANT (10)..(10): Xaa is Ala, Ser, Cys, Val, or Gly
  VARIANT (11)..(11): Xaa is Val, Ile, Leu, Ala, Met, or His
  VARIANT (12)..(12): Any amino acid or absent
DXGXXXXGXXXX

SEQ ID NO: 21 - protein, 12 aa, Artificial Sequence
  N-terminal RuvC-like domain
  VARIANT (2)..(2): Xaa is Ile, Val, Met, Leu, or Thr
  VARIANT (4)..(4): Xaa is Thr, Ile, Val, Ser, Asn, Tyr, Glu, or Leu
  VARIANT (5)..(5): Xaa is Asn, Ser, Gly, Ala, Asp, Thr, Arg, Met, or Phe
  VARIANT (7)..(7): Xaa is Val, Ile, Leu, Cys, Thr, or Phe
  VARIANT (9)..(9): Xaa is Trp, Phe, Val, Tyr, Ser, or Leu
  VARIANT (10)..(10): Xaa is Ala, Ser, Cys, Val, or Gly
  VARIANT (11)..(11): Xaa is Val, Ile, Leu, Ala, Met, or His
  VARIANT (12)..(12): Any amino acid or absent
DXGXXSXGXXXX

SEQ ID NO: 22 - protein, 12 aa, Artificial Sequence
  N-terminal RuvC-like domain
  VARIANT (4)..(4): Xaa is Thr, Ile, Val, Ser, Asn, Tyr, Glu, or Leu
  VARIANT (5)..(5): Xaa is Asn, Ser, Gly, Ala, Asp, Thr, Arg, Met, or Phe
  VARIANT (11)..(11): Xaa is Val, Ile, Leu, Ala, Met, or His
  VARIANT (12)..(12): Any amino acid or absent
DIGXXSVGWAXX

SEQ ID NO: 23 - protein, 12 aa, Artificial Sequence
  N-terminal RuvC-like domain
  MOD_RES (12)..(12): Any non-polar alkyl amino acid or a hydroxyl amino acid
DIGTNSVGWAVX

SEQ ID NO: 24 - protein, 73 aa, Artificial Sequence
  HNH-like domain
  VARIANT (8)..(8): Xaa is Lys or Arg
  VARIANT (12)..(12): Xaa is Val or Thr
  VARIANT (13)..(13): Xaa is Gly or Asp
  VARIANT (14)..(14): Xaa is Glu, Gln, or Asp
  VARIANT (15)..(15): Xaa is Glu or Asp
  VARIANT (19)..(19): Xaa is Asp, Asn, or His
  VARIANT (20)..(20): Xaa is Tyr, Arg, or Asn
  VARIANT (23)..(23): Xaa is Gln, Asp, or Asn
  MOD_RES (25)..(64): HNH-like domain, each Xaa can be any amino acid or absent, region may encompass 15-40 residues
  VARIANT (67)..(67): Xaa is Gly or Glu
  VARIANT (69)..(69): Xaa is Ser or Gly
  VARIANT (71)..(71): Xaa is Asp or Asn
LYYLQNGXDMYXXXXLDIXXLSXYXXXXXXXXXXXXXXXXXXXXXXXXXXXXXXXXXXXXXXXXNRXKXDXVP

SEQ ID NO: 25 - protein, 27 aa, Artificial Sequence
  HNH-like domain
  VARIANT (1)..(1): Xaa is Asp, Glu, Gln, or Asn
  VARIANT (2)..(2): Xaa is Leu, Ile, Arg, Gln, Val, Met, or Lys
  VARIANT (3)..(3): Xaa is Asp or Glu
  VARIANT (5)..(5): Xaa is Ile, Val, Thr, Ala, or Leu
  VARIANT (6)..(6): Xaa is Val, Tyr, Ile, Leu, Phe, or Trp
  VARIANT (8)..(8): Xaa is Gln, His, Arg, Lys, Tyr, Ile, Leu, Phe, or Trp
  VARIANT (9)..(9): Xaa is Ser, Ala, Asp, Thr, or Lys
  VARIANT (10)..(10): Xaa is Phe, Leu, Val, Lys, Tyr, Met, Ile, Arg, Ala, Glu, Asp, or Gln
  VARIANT (11)..(11): Xaa is Leu, Arg, Thr, Ile, Val, Ser, Cys, Tyr, Lys, Phe, or Gly
  VARIANT (12)..(12): Xaa is Lys, Gln, Tyr, Thr, Phe, Leu, Trp, Met, Ala, Glu, Gly, or Ser
  VARIANT (13)..(13): Xaa is Asp, Ser, Asn, Arg, Leu, or Thr
  VARIANT (14)..(14): Xaa is Asp, Asn, or Ser
  VARIANT (15)..(15): Xaa is Ser, Ala, Thr, Gly, or Arg
  VARIANT (16)..(16): Xaa is Ile, Leu, Phe, Ser, Arg, Tyr, Gln, Trp, Asp, Lys, or His
  VARIANT (17)..(17): Xaa is Asp, Ser, Ile, Asn, Glu, Ala, His, Phe, Leu, Gln, Met, Gly, Tyr, or Val
  VARIANT (19)..(19): Xaa is Lys, Leu, Arg, Met, Thr, or Phe
  VARIANT (20)..(20): Xaa is Val, Leu, Ile, Ala, or Thr
  VARIANT (21)..(21): Xaa is Leu, Ile, Val, or Ala
  VARIANT (22)..(22): Xaa is Thr, Val, Cys, Glu, Ser, or Ala
  VARIANT (23)..(23): Xaa is Arg, Phe, Thr, Trp, Glu, Leu, Asn, Cys, Lys, Val, Ser, Gln, Ile, Tyr, His, or Ala
  VARIANT (24)..(24): Xaa is Ser, Pro, Arg, Lys, Asn, Ala, His, Gln, Gly, or Leu
  VARIANT (25)..(25): Xaa is Asp, Gly, Thr, Asn, Ser, Lys, Ala, Ile, Glu, Leu, Gln, Arg, or Tyr
  VARIANT (26)..(26): Xaa is Lys, Val, Ala, Glu, Tyr, Ile, Cys, Leu, Ser, Thr, Gly, Lys, Met, Asp, or Phe
XXXHXXPXXXXXXXXXXNXXXXXXXXN

SEQ ID NO: 26 - protein, 27 aa, Artificial Sequence
  HNH-like domain
  VARIANT (1)..(1): Xaa is Asp or Glu
  VARIANT (2)..(2): Xaa is Leu, Ile, Arg, Gln, Val, Met, or Lys
  VARIANT (3)..(3): Xaa is Asp or Glu
  VARIANT (5)..(5): Xaa is Ile, Val, Thr, Ala, or Leu
  VARIANT (6)..(6): Xaa is Val, Tyr, Ile, Leu, Phe, or Trp
  VARIANT (8)..(8): Xaa is Gln, His, Arg, Lys, Tyr, Ile, Leu, Phe, or Trp
  VARIANT (10)..(10): Xaa is Phe, Leu, Val, Lys, Tyr, Met, Ile, Arg, Ala, Glu, Asp, or Gln
  VARIANT (11)..(11): Xaa is Leu, Arg, Thr, Ile, Val, Ser, Cys, Tyr, Lys, Phe, or Gly
  VARIANT (12)..(12): Xaa is Lys, Gln, Tyr, Thr, Phe, Leu, Trp, Met, Ala, Glu, Gly, or Ser
  VARIANT (16)..(16): Xaa is Ile, Leu, Phe, Ser, Arg, Tyr, Gln, Trp, Asp, Lys, or His
  VARIANT (17)..(17): Xaa is Asp, Ser, Ile, Asn, Glu, Ala, His, Phe, Leu, Gln, Met, Gly, Tyr, or Val
  VARIANT (22)..(22): Xaa is Thr, Val, Cys, Glu, Ser, or Ala
  VARIANT (23)..(23): Xaa is Arg, Phe, Thr, Trp, Glu, Leu, Asn, Cys, Lys, Val, Ser, Gln, Ile, Tyr, His, or Ala
  VARIANT (24)..(24): Xaa is Ser, Pro, Arg, Lys, Asn, Ala, His, Gln, Gly, or Leu
  VARIANT (25)..(25): Xaa is Asp, Gly, Thr, Asn, Ser, Lys, Ala, Ile, Glu, Leu, Gln, Arg, or Tyr
  VARIANT (26)..(26): Xaa is Lys, Val, Ala, Glu, Tyr, Ile, Cys, Leu, Ser, Thr, Gly, Lys, Met, Asp, or Phe
XXXHXXPXSXXXDDSXXNKVLXXXXXN

SEQ ID NO: 27 - protein, 27 aa, Artificial Sequence
  HNH-like domain
  VARIANT (1)..(1): Xaa is Asp or Glu
  VARIANT (3)..(3): Xaa is Asp or Glu
  VARIANT (8)..(8): Xaa is Gln, His, Arg, Lys, Tyr, Ile, Leu, or Trp
  VARIANT (10)..(10): Xaa is Phe, Leu, Val, Lys, Tyr, Met, Ile, Arg, Ala, Glu, Asp, or Gln
  VARIANT (11)..(11): Xaa is Leu, Arg, Thr, Ile, Val, Ser, Cys, Tyr, Lys, Phe, or Gly
  VARIANT (12)..(12): Xaa is Lys, Gln, Tyr, Thr, Phe, Leu, Trp, Met, Ala, Glu, Gly, or Ser
  VARIANT (16)..(16): Xaa is Ile, Leu, Phe, Ser, Arg, Tyr, Gln, Trp, Asp, Lys, or His
  VARIANT (17)..(17): Xaa is Asp, Ser, Ile, Asn, Glu, Ala, His, Phe, Leu, Gln, Met, Gly, Tyr, or Val
  VARIANT (23)..(23): Xaa is Arg, Phe, Thr, Trp, Glu, Leu, Asn, Cys, Lys, Val, Ser, Gln, Ile, Tyr, His, or Ala
  VARIANT (24)..(24): Xaa is Ser, Pro, Arg, Lys, Asn, Ala, His, Gln, Gly, or Leu
  VARIANT (25)..(25): Xaa is Asp, Gly, Thr, Asn, Ser, Lys, Ala, Ile, Glu, Leu, Gln, Arg, or Tyr
  VARIANT (26)..(26): Xaa is Lys, Val, Ala, Glu, Tyr, Ile, Cys, Leu, Ser, Thr, Gly, Lys, Met, Asp, or Phe
XVXHIVPXSXXXDDSXXNKVLTXXXXN

SEQ ID NO: 28 - protein, 27 aa, Artificial Sequence
  HNH-like domain
  VARIANT (2)..(2): Xaa is Ile or Val
  VARIANT (6)..(6): Xaa is Ile or Val
  VARIANT (9)..(9): Xaa is Ala or Ser
  VARIANT (11)..(11): Xaa is Ile or Leu
  VARIANT (12)..(12): Xaa is Lys or Thr
  VARIANT (14)..(14): Xaa is Asp or Asn
  VARIANT (19)..(19): Xaa is Arg, Lys, or Leu
  VARIANT (22)..(22): Xaa is Thr or Val
  VARIANT (23)..(23): Xaa is Ser or Arg
  VARIANT (25)..(25): Xaa is Lys, Asp, or Ala
  VARIANT (26)..(26): Xaa is Glu, Lys, Gly, or Asn
DXDHIXPQXFXXDXSIDNXVLXXSXXN

SEQ ID NO: 29 - RNA, 116 nt, Artificial Sequence
  gRNA
  misc_feature (1)..(20): a, c, u, g, unknown or other
  misc_feature (1)..(20): targeting region
  misc_feature (21)..(42): first complementarity domain
  misc_feature (43)..(46): linking domain
  misc_feature (47)..(70): second complementarity domain
nnnnnnnnnnnnnnnnnnnnguuuuagagcuaugcuguuuuggaaacaaaacagcauagcaaguuaaaauaaggcuaguccguuaucaacuugaaaaaguggcaccgagucggugc

SEQ ID NO: 30 - RNA, 116 nt, Artificial Sequence
  gRNA
  misc_feature (1)..(20): a, c, u, g, unknown or other
  misc_feature (1)..(20): targeting region
  misc_feature (21)..(42): first complementarity domain
  misc_feature (43)..(46): linking domain
  misc_feature (47)..(70): second complementarity domain
nnnnnnnnnnnnnnnnnnnnguauuagagcuaugcuguauuggaaacaauacagcauagcaaguuaauauaaggcuaguccguuaucaacuugaaaaaguggcaccgagucggugc

SEQ ID NO: 31 - RNA, 96 nt, Artificial Sequence
  gRNA
  misc_feature (1)..(20): a, c, u, g, unknown or other
  misc_feature (1)..(20): targeting domain
  misc_feature (21)..(32): first complementarity domain
  misc_feature (33)..(36): linking domain
  misc_feature (37)..(50): second complementarity domain
  misc_feature (51)..(62): proximal domain
nnnnnnnnnnnnnnnnnnnnguuuaagagcuagaaauagcaaguuuaaauaaggcuaguccguuaucaacuugaaaaaguggcaccgagucggugc

SEQ ID NO: 32 - RNA, 47 nt, Artificial Sequence
  gRNA proximal and tail domains derived from S. pyogenes
aaggcuaguccguuaucaacuugaaaaaguggcaccgagucggugcu

SEQ ID NO: 33 - RNA, 49 nt, Artificial Sequence
  gRNA proximal and tail domains
aaggcuaguccguuaucaacuugaaaaaguggcaccgagucgguggugc

SEQ ID NO: 34 - RNA, 51 nt, Artificial Sequence
  gRNA proximal and tail domains
aaggcuaguccguuaucaacuugaaaaaguggcaccgagucggugcggauc

SEQ ID NO: 35 - RNA, 31 nt, Artificial Sequence
  gRNA proximal and tail domains
aaggcuaguccguuaucaacuugaaaaagug

SEQ ID NO: 36 - RNA, 18 nt, Artificial Sequence
  gRNA proximal and tail domains
aaggcuaguccguuauca

SEQ ID NO: 37 - RNA, 12 nt, Artificial Sequence
  gRNA proximal and tail domains
aaggcuaguccg

SEQ ID NO: 38 - RNA, 102 nt, Artificial Sequence
  Unimolecular gRNA derived from S. aureus
  misc_feature (1)..(20): n is a, c, g, or u
  misc_feature (1)..(20): Targeting domain
nnnnnnnnnnnnnnnnnnnnguuuuaguacucuggaaacagaaucuacuaaaacaaggcaaaaugccguguuuaucucgucaacuuguuggcgagauuuuuu

SEQ ID NO: 39 - RNA, 42 nt, Artificial
  Modular gRNA derived from S. pyogenes
  misc_feature (1)..(20): a, c, u, g, unknown or other
  misc_feature (1)..(20): Targeting domain
  misc_feature (21)..(42): First complementarity domain
nnnnnnnnnnnnnnnnnnnnguuuuagagcuaugcuguuuug

SEQ ID NO: 40 - RNA, 85 nt, Artificial Sequence
  Modular gRNA derived from S. pyogenes
  misc_feature (1)..(9): 5' extension domain
  misc_feature (10)..(33): Second complementarity domain
  misc_feature (34)..(45): Proximal domain
  misc_feature (46)..(85): Tail domain
ggaaccauucaaaacagcauagcaaguuaaaauaaggcuaguccguuaucaacuugaaaaaguggcaccgagucggugcuuuuuu

SEQ ID NO: 41 - RNA, 62 nt, Artificial Sequence
  Unimolecular gRNA derived from S. pyogenes
  misc_feature (1)..(20): a, c, u, g, unknown or other
  misc_feature (1)..(20): Targeting domain
  misc_feature (21)..(32): First complementarity domain
  misc_feature (33)..(36): Linking domain
  misc_feature (37)..(50): Second complementarity domain
  misc_feature (51)..(62): Proximal domain
nnnnnnnnnnnnnnnnnnnnguuuuagagcuagaaauagcaaguuaaaauaaggcuaguccg

SEQ ID NO: 42 - RNA, 102 nt, Artificial Sequence
  Unimolecular gRNA derived from S. pyogenes
  misc_feature (1)..(20): a, c, u, g, unknown or other
  misc_feature (1)..(20): Targeting domain
  misc_feature (21)..(32): First complementarity domain
  misc_feature (33)..(36): Linking domain
  misc_feature (37)..(50): Second complementarity domain
  misc_feature (51)..(62): Proximal domain
  misc_feature (63)..(102): Tail domain
nnnnnnnnnnnnnnnnnnnnguuuuagagcuagaaauagcaaguuaaaauaaggcuaguccguuaucaacuugaaaaaguggcaccgagucggugcuuuuuu

SEQ ID NO: 43 - RNA, 75 nt, Artificial Sequence
  Unimolecular gRNA derived from S. pyogenes
  misc_feature (1)..(20): Targeting domain
  misc_feature (1)..(20): a, c, u, g, unknown or other
  misc_feature (21)..(36): First complementarity domain
  misc_feature (37)..(40): Linking domain
  misc_feature (41)..(58): Second complementarity domain
  misc_feature (59)..(70): Proximal domain
  misc_feature (71)..(75): Tail domain
nnnnnnnnnnnnnnnnnnnnguuuuagagcuaugcugaaaagcauagcaaguuaaaauaaggcuaguccguuauc

SEQ ID NO: 44 - RNA, 87 nt, Artificial Sequence
  Unimolecular gRNA derived from S. pyogenes
  misc_feature (1)..(20): a, c, u, g, unknown or other
  misc_feature (1)..(20): Targeting domain
  misc_feature (21)..(32): First complementarity domain
  misc_feature (43)..(46): Linking domain
  misc_feature (57)..(70): Second complementarity domain
  misc_feature (71)..(82): Proximal domain
  misc_feature (83)..(87): Tail domain
nnnnnnnnnnnnnnnnnnnnguuuuagagcuaugcuguuuuggaaacaaaacagcauagcaaguuaaaauaaggcuaguccguuauc

SEQ ID NO: 45 - RNA, 42 nt, Artificial Sequence
  Modular gRNA derived from S. thermophilus
  misc_feature (1)..(20): a, c, u, g, unknown or other
  misc_feature (1)..(20): Targeting domain
  misc_feature (21)..(42): First complementarity domain
nnnnnnnnnnnnnnnnnnnnguuuuagagcuguguuguuucg

SEQ ID NO: 46 - RNA, 78 nt, Artificial Sequence
  Modular gRNA derived from S. thermophilus
  misc_feature (1)..(3): 5' extension domain
  misc_feature (4)..(27): Second complementarity domain
  misc_feature (28)..(40): Proximal domain
  misc_feature (41)..(78): Tail domain
gggcgaaacaacacagcgaguuaaaauaaggcuuaguccguacucaacuugaaaagguggcaccgauucgguguuuuu

SEQ ID NO: 47 - RNA, 85 nt, Artificial Sequence
  Modular gRNA derived from S. pyogenes
gaaccauucaaaacagcauagcaaguuaaaauaaggcuaguccguuaucaacuugaaaaaguggcaccgagucggugcuuuuuuu

SEQ ID NO: 48 - RNA, 96 nt, Artificial Sequence
  gRNA from S. pyogenes
  misc_feature (1)..(20): n is a, c, g, or u
  misc_feature (1)..(20): Targeting domain
nnnnnnnnnnnnnnnnnnnnguuuuagagcuagaaauagcaaguuaaaauaaggcuaguccguuaucaacuugaaaaaguggcaccgagucggugc

SEQ ID NO: 49 - RNA, 96 nt, Artificial Sequence
  gRNA
  misc_feature (1)..(20): n is a, c, g, or u
  misc_feature (1)..(20): Targeting domain
  misc_feature (21)..(32): First complementarity domain
  misc_feature (33)..(36): Linking domain
  misc_feature (37)..(50): Second complementarity domain
  misc_feature (51)..(62): Proximal domain
nnnnnnnnnnnnnnnnnnnnguauuagagcuagaaauagcaaguuaauauaaggcuaguccguuaucaacuugaaaaaguggcaccgagucggugc

SEQ ID NO: 50 - RNA, 104 nt, Artificial Sequence
  gRNA
  misc_feature (1)..(20): n is a, c, g, or u
  misc_feature (1)..(20): Targeting domain
  misc_feature (21)..(36): First complementarity domain
  misc_feature (37)..(40): Linking domain
  misc_feature (41)..(58): Second complementarity domain
nnnnnnnnnnnnnnnnnnnnguuuuagagcuaugcugaaaagcauagcaaguuaaaauaaggcuaguccguuaucaacuugaaaaaguggcaccgagucggugc

SEQ ID NO: 51 - RNA, 106 nt, Artificial Sequence
  gRNA
  misc_feature (1)..(20): n is a, c, g, or u
  misc_feature (1)..(20): Targeting domain
  misc_feature (21)..(37): First complementarity domain
  misc_feature (38)..(41): Linking domain
  misc_feature (42)..(60): Second complementarity domain
nnnnnnnnnnnnnnnnnnnnguuuuagagcuaugcuggaaacagcauagcaaguuaaaauaaggcuaguccguuaucaacuugaaaaaguggcaccgagucggugc

SEQ ID NO: 52 - protein, 12 aa, Peptoniphilus duerdenii
DIGTASVGWAVT

SEQ ID NO: 53 - protein, 12 aa, Treponema denticola
DVGTGSVGWAVT

SEQ ID NO: 54 - protein, 12 aa, S. mutans
DIGTNSVGWAVV

SEQ ID NO: 55 - protein, 12 aa, S. pyogenes
DIGTNSVGWAVI

SEQ ID NO: 56 - protein, 12 aa, L. innocua
DIGTNSVGWAVL

SEQ ID NO: 57 - protein, 12 aa, Flavobacterium branchiophilum FL-15
DLGTNSIGWAVV

SEQ ID NO: 58 - protein, 11 aa, Artificial Sequence
  N-terminal RuvC-like domain
DLGTNSIGWAI

SEQ ID NO: 59 - protein, 12 aa, Bacteroides fragilis, NCTC 9343
DLGTNSIGWALV

SEQ ID NO: 60 - protein, 12 aa, Fusobacterium nucleatum
DIGTNSVGWCVT

SEQ ID NO: 61 - protein, 12 aa, Acidaminococcus sp. D21
DIGTNSVGYAVT

SEQ ID NO: 62 - protein, 12 aa, Coprococcus catus GD-7
DMGTGSLGWAVT

SEQ ID NO: 63 - protein, 12 aa, Oenococcus kitaharae DSM 17330
DIGTSSVGWAAI

SEQ ID NO: 64 - protein, 12 aa, Catenibacterium mitsuokai DSM 15897
DLGTGSVGWAVV

SEQ ID NO: 65 - protein, 12 aa, Mycoplasma gallisepticum str. F
DLGVGSVGWAIV

SEQ ID NO: 66 - protein, 12 aa, Mycoplasma ovipneumoniae SC01
DLGIASIGWAII

SEQ ID NO: 67 - protein, 12 aa, Mycoplasma canis PG 14
DLGIASVGWAIV

SEQ ID NO: 68 - protein, 12 aa, Mycoplasma synoviae 53
DLGVASVGWSIV

SEQ ID NO: 69 - protein, 12 aa, Eubacterium rectale
DIGIASVGWAIL

SEQ ID NO: 70 - protein, 12 aa, Enterococcus faecalis TX0012
DLGISSVGWSVI

SEQ ID NO: 71 - protein, 12 aa, Ilyobacter polytropus DSM 2926
DIGIASVGWSVI

SEQ ID NO: 72 - protein, 12 aa, Ruminococcus albus 8
DVGIGSIGWAVI

SEQ ID NO: 73 - protein, 12 aa, Elusimicrobium minutum Pei191
DLGVGSIGFAIV

SEQ ID NO: 74 - protein, 12 aa, Akkermansia muciniphila
DIGYASIGWAVI

SEQ ID NO: 75 - protein, 12 aa, Artificial Sequence
  N-terminal RuvC-like domain
DTGTNSLGWAIV

SEQ ID NO: 76 - protein, 12 aa, Cand. Puniceispirillum marinum
DLGTNSIGWCLL

SEQ ID NO: 77 - protein, 12 aa, Rhodospirillum rubrum
DIGTDSLGWAVF

SEQ ID NO: 78 - protein, 12 aa, Lactobacillus rhamnosus GG
DIGSNSIGFAVV

SEQ ID NO: 79 - protein, 12 aa, Sphaerochaeta globus str. Buddy
DLGVGSIGVAVA

SEQ ID NO: 80 - protein, 12 aa, Artificial Sequence
  N-terminal RuvC-like domain
DLGIASCGWGVV

SEQ ID NO: 81 - protein, 12 aa, Mycoplasma mobile 163K
DLGIASVGWCLT

SEQ ID NO: 82 - protein, 12 aa, Streptococcus thermophilus LMD-9
DIGIGSVGVGIL

SEQ ID NO: 83 - protein, 12 aa, Staphylococcus lugdunensis M23590
DIGITSVGYGLI

SEQ ID NO: 84 - protein, 12 aa, Eubacterium dolichum DSM 3991
DIGITSVGFGII

SEQ ID NO: 85 - protein, 12 aa, Lactobacillus coryniformis KCTC 3535
DVGITSTGYAVL

SEQ ID NO: 86 - protein, 12 aa, Nitratifractor salsuginis DSM 16511
DLGITSFGYAIL

SEQ ID NO: 87 - protein, 12 aa, Bifidobacterium bifidum S17
DIGNASVGWSAF

SEQ ID NO: 88 - protein, 12 aa, Artificial Sequence
  N-terminal RuvC-like domain
DVGTNSCGWVAM

SEQ ID NO: 89 - protein, 12 aa, Acidothermus cellulolyticus 11B
DVGERSIGLAAV

SEQ ID NO: 90 - protein, 12 aa, Bifidobacterium longum DJO10A
DVGLNSVGLAAV

SEQ ID NO: 91 - protein, 12 aa, Artificial Sequence
  N-terminal RuvC-like domain
DVGLMSVGLAAI

SEQ ID NO: 92 - protein, 12 aa, Artificial Sequence
  N-terminal RuvC-like domain
DVGTFSVGLAAI

SEQ ID NO: 93 - protein, 12 aa, Staphylococcus pseudintermedius ED99
DIGTGSVGYACM

SEQ ID NO: 94 - protein, 12 aa, Artificial Sequence
  N-terminal RuvC-like domain
DLGTTSIGFAHI

SEQ ID NO: 95 - protein, 12 aa, Artificial Sequence
  N-terminal RuvC-like domain
DLGTNSIGSSVR

SEQ ID NO: 96 - protein, 12 aa, Artificial Sequence
  N-terminal RuvC-like domain
DIGTNSIGWAVI

SEQ ID NO: 97 - protein, 12 aa, Pasteurella multocida str. Pm70
DLGIASVGWAVV

SEQ ID NO: 98 - protein, 12 aa, Artificial Sequence
  N-terminal RuvC-like domain
DIGIASVGWAVL

SEQ ID NO: 99 - protein, 12 aa, Helicobacter mustelae 12198
DIGIASIGWAVI

SEQ ID NO: 100 - protein, 12 aa, Artificial Sequence
  N-terminal RuvC-like domain
DIGIASVGWAII

SEQ ID NO: 101 - protein, 12 aa, Clostridium cellulolyticum H10
DVGIASVGWAVI

SEQ ID NO: 102 - protein, 11 aa, Artificial Sequence
  N-terminal RuvC-like domain
DIGIASVGWAL

SEQ ID NO: 103 - protein, 12 aa, Neisseria meningitidis
DIGIASVGWAMV

SEQ ID NO: 104 - protein, 12 aa, Artificial Sequence
  N-terminal RuvC-like domain
DIGITSVGWAVI

SEQ ID NO: 105 - protein, 12 aa, Wolinella succinogenes DSM 1740
DLGISSLGWAIV

SEQ ID NO: 106 - protein, 12 aa, Azospirillum sp. B510
DLGTNSIGWGLL

SEQ ID NO: 107 - protein, 12 aa, Artificial Sequence
  N-terminal RuvC-like domain
DLGSTSLGWAIF

SEQ ID NO: 108 - protein, 12 aa, Campylobacter jejuni, NCTC 11168
DIGISSIGWAFS

SEQ ID NO: 109 - protein, 12 aa, Parvibaculum lavamentivorans DS-1
DIGTTSIGFSVI

SEQ ID NO: 110 - protein, 12 aa, Dinoroseobacter shibae DFL 12
DIGTSSIGWWLY

SEQ ID NO: 111 - protein, 12 aa, Nitrobacter hamburgensis X14
DLGSNSLGWFVT

SEQ ID NO: 112 - protein, 12 aa, Bradyrhizobium sp. BTAi1
DLGANSLGWFVV

SEQ ID NO: 113 - protein, 15 aa, Artificial Sequence
  N-terminal RuvC-like domain
DIGLRIGITSCGWSI

SEQ ID NO: 114 - protein, 12 aa, Artificial Sequence
  N-terminal RuvC-like domain
DMGAKYTGVFYA

SEQ ID NO: 115 - protein, 12 aa, Wolinella succinogenes DSM 1740
DLGGKNTGFFSF

SEQ ID NO: 116 - protein, 12 aa, Artificial Sequence
  N-terminal RuvC-like domain
DLGVKNTGVFSA

SEQ ID NO: 117 - protein, 12 aa, Artificial Sequence
  N-terminal RuvC-like domain
DLGAKFTGVALY

SEQ ID NO: 118 - protein, 12 aa, Legionella pneumophila str. Paris
DLGGKFTGVCLS

SEQ ID NO: 119 - protein, 12 aa, Artificial Sequence
  N-terminal RuvC-like domain
DLGGTYTGTFIT

SEQ ID NO: 120 - protein, 12 aa, S. thermophilus
DIGTNSVGWAVT

SEQ ID NO: 121 - protein, 12 aa, Eubacterium yurii
DVGTNSVGWAVT

SEQ ID NO: 122 - protein, 12 aa, Artificial Sequence
  N-terminal RuvC-like domain
DMGTNSVGWAVT

SEQ ID NO: 123 - protein, 12 aa, Solobacterium moorei F0204
DVGTSSVGWAVT

SEQ ID NO: 124 - protein, 27 aa, Treponema denticola
DIDHIYPQSKIKDDSISNRVLVCSSCN

SEQ ID NO: 125 - protein, 27 aa, Coprococcus catus GD-7
DIDHIYPQSKTMDDSLNNRVLVKKNYN

SEQ ID NO: 126 - protein, 27 aa, Peptoniphilus duerdenii
DQDHIYPKSKIYDDSLENRVLVKKNLN

SEQ ID NO: 127 - protein, 27 aa, Catenibacterium mitsuokai DSM 15897
QIDHIVPQSLVKDDSFDNRVLVVPSEN

SEQ ID NO: 128 - protein, 27 aa, S. mutans
DIDHIIPQAFIKDNSIDNRVLTSSKEN

SEQ ID NO: 129 - protein, 27 aa, S. thermophilus
DIDHIIPQAFLKDNSIDNKVLVSSASN

SEQ ID NO: 130 - protein, 27 aa, Oenococcus kitaharae DSM 17330
DIDHIIPQAYTKDNSLDNRVLVSNITN

SEQ ID NO: 131 - protein, 27 aa, L. inocua
DIDHIVPQSFITDNSIDNLVLTSSAGN

SEQ ID NO: 132 - protein, 27 aa, S. pyogenes
DVDHIVPQSFLKDDSIDNKVLTRSDKN

SEQ ID NO: 133 - protein, 27 aa, Acidaminococcus sp. D21
NIDHIYPQSMVKDDSLDNKVLVQSEIN

SEQ ID NO: 134 - protein, 27 aa, Lactobacillus rhamnosus GG
DIDHILPQSLIKDDSLDNRVLVNATIN

SEQ ID NO: 135 - protein, 27 aa, Artificial Sequence
  HNH-LIKE domain
DIDHILPQSFIKDDSLENRVLVKKAVN

SEQ ID NO: 136 - protein, 27 aa, Staphylococcus pseudintermedius ED99
EVDHIFPRSFIKDDSIDNKVLVIKKMN

SEQ ID NO: 137 - protein, 27 aa, Artificial Sequence
  HNH-LIKE domain
EVDHIIPRSYIKDDSFENKVLVYREEN

SEQ ID NO: 138 - protein, 27 aa, Bifidobacterium bifidum S17
DIDHIIPQAVTQNDSIDNRVLVARAEN

SEQ ID NO: 139 - protein, 27 aa, Mycoplasma gallisepticum str. F
EIDHIIPYSISFDDSSSNKLLVLAESN

SEQ ID NO: 140 - protein, 27 aa, Mycoplasma canis PG 14
EIDHIIPYSLCFDDSSANKVLVHKQSN

SEQ ID NO: 141 - protein, 27 aa, Ilyobacter polytropus DSM 2926
DIDHIIPYSRSMDDSYSNKVLVLSGEN

SEQ ID NO: 142 - protein, 27 aa, Artificial Sequence
  HNH-LIKE domain
DIDHIIPYSKSMDDSFNNKVLCLAEEN

SEQ ID NO: 143 - protein, 27 aa, Campylobacter jejuni
EIDHIYPYSRSFDDSYMNKVLVFTKQN

SEQ ID NO: 144 - protein, 27 aa, Clostridium cellulolyticum H10
QIDHIYPYSRSMDDSYMNKVLVLTDEN

SEQ ID NO: 145 - protein, 27 aa, Artificial Sequence
  HNH-LIKE domain
EIDHIIPFSRSFDDSLSNKILVLGSEN

SEQ ID NO: 146 - protein, 27 aa, N. meningitides
EIDHALPFSRTWDDSFNNKVLVLGSEN

SEQ ID NO: 147 - protein, 27 aa, Pasteurella multocida str. Pm70
EIDHALPFSRTWDDSFNNKVLVLASEN

SEQ ID NO: 148 - protein, 27 aa, Enterococcus faecalis TX0012
EIDHIIPISISLDDSINNKVLVLSKAN

SEQ ID NO: 149 - protein, 27 aa, Eubacterium dolichum DSM 3991
EVDHIIPISISLDDSITNKVLVTHREN

SEQ ID NO: 150 - protein, 27 aa, Artificial Sequence
  HNH-LIKE domain
QVDHALPYSRSYDDSKNNKVLVLTHEN

SEQ ID NO: 151 - protein, 27 aa, Streptococcus thermophilus LMD-9
EVDHILPLSITFDDSLANKVLVYATAN

SEQ ID NO: 152 - protein, 27 aa, Eubacterium rectale
EIDHIIPRSISFDDARSNKVLVYRSEN

SEQ ID NO: 153 - protein, 27 aa, Staphylococcus lugdunensis M23590
EVDHIIPRSVSFDNSYHNKVLVKQSEN

SEQ ID NO: 154 - protein, 27 aa, Artificial Sequence
  HNH-LIKE domain
DIDHILPYSITFDDSFRNKVLVTSQEN

SEQ ID NO: 155 - protein, 27 aa, Wolinella succinogenes DSM 1740
EIDHILPRSRSADDSFANKVLCLARAN

SEQ ID NO: 156 - protein, 27 aa, Cand. Puniceispirillum marinum
EIEHLLPFSLTLDDSMANKTVCFRQAN

SEQ ID NO: 157 - protein, 27 aa, Azospirillum sp. B510
DIDHILPFSVSLDDSAANKVVCLREAN

SEQ ID NO: 158 - protein, 27 aa, Bradyrhizobium sp. BTAi1
DIDHLIPFSISWDDSAANKVVCMRYAN

SEQ ID NO: 159 - protein, 27 aa, Nitrobacter hamburgensis X14
DIDHILPVAMTLDDSPANKIICMRYAN

SEQ ID NO: 160 - protein, 27 aa, Artificial Sequence
  HNH-LIKE domain
DVDHILPYSRTLDDSFPNRTLCLREAN

SEQ ID NO: 161 - protein, 27 aa, Artificial Sequence
  HNH-LIKE domain
EIEHILPFSRTLDDSLNNRTVAMRRAN

SEQ ID NO: 162 - protein, 27 aa, Lactobacillus coryniformis KCTC 3535
EVDHIIPYSISWDDSYTNKVLTSAKCN

SEQ ID NO: 163 - protein, 27 aa, Artificial Sequence
  HNH-LIKE domain
QVDHILPWSRFGDDSYLNKTLCTARSN

SEQ ID NO: 164 - protein, 27 aa, Ralstonia syzygii R24
QVDHILPFSKTLDDSFANKVLAQHDAN

SEQ ID NO: 165 - protein, 27 aa, Helicobacter mustelae 12198
QIDHAFPLSRSLDDSQSNKVLCLTSSN

SEQ ID NO: 166 - protein, 27 aa, Mycoplasma mobile 163K
DIDHIVPRSISFDDSFSNLVIVNKLDN

SEQ ID NO: 167 - protein, 27 aa, Mycoplasma ovipneumoniae SC01
EIEHIIPYSMSYDNSQANKILTEKAEN

SEQ ID NO: 168 - protein, 27 aa, Mycoplasma synoviae 53
EIDHVIPYSKSADDSWFNKLLVKKSTN

SEQ ID NO: 169 - protein, 27 aa, Aminomonas paucivorans DSM 12260
EMDHILPYSRSLDNGWHNRVLVHGKDN

SEQ ID NO: 170 - protein, 27 aa, Ruminococcus albus 8
EVDHIVPYSLILDNTINNKALVYAEEN

SEQ ID NO: 171 - protein, 27 aa, Artificial Sequence
  HNH-LIKE domain
EIEHVIPQSLYFDDSFSNKVICEAEVN

SEQ ID NO: 172 - protein, 27 aa, Bacteroides fragilis, NCTC 9343
DIEHIIPQARLFDDSFSNKTLEARSVN

SEQ ID NO: 173 - protein, 27 aa, Artificial Sequence
  HNH-LIKE domain
EIEHIVPKARVFDDSFSNKTLTFHRIN

SEQ ID NO: 174 - protein, 28 aa, Finegoldia magna
DKDHIIPQSMKKDDSIINNLVLVNKNAN

SEQ ID NO: 175 - protein, 27 aa, Parvibaculum lavamentivorans DS-1
EVEHIWPRSRSFDNSPRNKTLCRKDVN

SEQ ID NO: 176 - protein, 27 aa, Artificial Sequence
  HNH-LIKE domain
IVNHIIPYNRSFDDTYHNRVLTLTETK

SEQ ID NO: 177 - protein, 27 aa, Artificial Sequence
  HNH-LIKE domain
DMEHTIPKSISFDNSDQNLTLCESYYN

SEQ ID NO: 178 - protein, 27 aa, Artificial Sequence
  HNH-LIKE domain
DIEHTIPRSAGGDSTKMNLTLCSSRFN

SEQ ID NO: 179 - protein, 27 aa, Artificial Sequence
  HNH-LIKE domain
DIEHTIPRSISQDNSQMNKTLCSLKFN

SEQ ID NO: 180 - protein, 27 aa, Rhodospirillum rubrum
DIDHVIPLARGGRDSLDNMVLCQSDAN

SEQ ID NO: 181 - protein, 27 aa, Elusimicrobium minutum Pei191
DIEHLFPIAESEDNGRNNLVISHSACN

SEQ ID NO: 182 - protein, 27 aa, Sphaerochaeta globus str. Buddy
DVDHIFPRDDTADNSYGNKVVAHRQCN

SEQ ID NO: 183 - protein, 27 aa, Nitratifractor salsuginis DSM 16511
DIEHIVPQSLGGLSTDYNTIVTLKSVN

SEQ ID NO: 184 - protein, 27 aa, Acidothermus cellulolyticus 11B
ELDHIVPRTDGGSNRHENLAITCGACN

SEQ ID NO: 185 - protein, 28 aa, Bifidobacterium longum DJO10A
EMDHIVPRKGVGSTNTRTNFAAVCAECN

SEQ ID NO: 186 - protein, 28 aa, Artificial Sequence
  HNH-LIKE domain
EMDHIVPRKGVGSTNTRVNLAAACAACN

SEQ ID NO: 187 - protein, 28 aa, Artificial Sequence
  HNH-LIKE domain
EMDHIVPRAGQGSTNTRENLVAVCHRCN

SEQ ID NO: 188 - protein, 33 aa, Artificial Sequence
  HNH-LIKE domain
EIDHILPRSLIKDARGIVFNAEPNLIYASSRGN

SEQ ID NO: 189 - protein, 33 aa, Artificial Sequence
  HNH-LIKE domain
EIDHIIPRSLTGRTKKTVFNSEANLIYCSSKGN

SEQ ID NO: 190 - protein, 33 aa, Artificial Sequence
  HNH-LIKE domain
EIDHIIPRSLTLKKSESIYNSEVNLIFVSAQGN

SEQ ID NO: 191 - protein, 33 aa, Legionella pneumophila str. Paris
EIDHIYPRSLSKKHFGVIFNSEVNLIYCSSQGN

SEQ ID NO: 192 - protein, 33 aa, Wolinella succinogenes DSM 1740
EIDHILPRSHTLKIYGTVFNPEGNLIYVHQKCN

SEQ ID NO: 193 - protein, 30 aa, Artificial Sequence
  HNH-LIKE domain
ELDHIIPRSHKKYGTLNDEANLICVTRGDN

SEQ ID NO: 194 - protein, 27 aa, Akkermansia muciniphila
ELEHIVPHSFRQSNALSSLVLTWPGVN

SEQ ID NO: 195 - protein, 27 aa, Solobacterium moorei F0204
DIDHIYPRSKIKDDSITNRVLVEKDIN

SEQ ID NO: 196 - protein, 28 aa, Veillonella atypica ACS-134-V-Col7a
YDIDHIYPRSLTKDDSFDNLVLCERTAN

SEQ ID NO: 197 - protein, 28 aa, Fusobacterium nucleatum
DIDHIYPRSKVIKDDSFDNLVLVLKNEN

SEQ ID NO: 198 - protein, 27 aa, Filifactor alocis
DRDHIYPQSKIKDDSIDNLVLVNKTYN

SEQ ID NO: 199 - DNA, 5 bp, S. thermophilus
  misc_feature (1)..(1): n is a, c, g, or t
  misc_feature (4)..(4): n is a, c, g, or t
nggng

SEQ ID NO: 200 - DNA, 7 bp, S. thermophilus
  misc_feature (1)..(2): n is a, c, g, or t
nnagaaw

SEQ ID NO: 201 - DNA, 4 bp, S. mutans
  misc_feature (1)..(1): n is a, c, g, or t
naar

SEQ ID NO: 202 - DNA, 5 bp, S. aureus
  misc_feature (1)..(2): n is a, c, g, or t
nngrr

SEQ ID NO: 203 - DNA, 6 bp, S. aureus
  misc_feature (1)..(2): n is a, c, g, or t
  misc_feature (6)..(6): n is a, c, g, or t
nngrrn

SEQ ID NO: 204 - DNA, 6 bp, Artificial Sequence
  Synthetic
  misc_feature (1)..(2): n is a, c, g, or t
nngrrt

SEQ ID NO: 205 - DNA, 6 bp, Artificial Sequence
  Synthetic
  misc_feature (1)..(2): n is a, c, g, or t
nngrrv

SEQ ID NO: 206 - DNA, 3255 bp, Staphylococcus aureus
atggccccaaagaagaagcggaaggtcggtatccacggagtcccagcagccaagcggaactacatcctgggcctggacatcggcatcaccagcgtgggctacggcatcatcgactacgagacacgggacgtgatcgatgccggcgtgcggctgttcaaagaggccaacgtggaaaacaacgagggcaggcggagcaagagaggcgccagaaggctgaagcggcggaggcggcatagaatccagagagtgaagaagctgctgttcgactacaacctgctgaccgaccacagcgagctgagcggcatcaacccctacgaggccagagtgaagggcctgagccagaagctgagcgaggaagagttctctgccgccctgctgcacctggccaagagaagaggcgtgcacaacgtgaacgaggtggaagaggacaccggcaacgagctgtccaccagagagcagatcagccggaacagcaaggccctggaagagaaatacgtggccgaactgcagctggaacggctgaagaaagacggcgaagtgcggggcagcatcaacagattcaagaccagcgactacgtgaaagaagccaaacagctgctgaaggtgcagaaggcctaccaccagctggaccagagcttcatcgacacctacatcgacctgctggaaacccggcggacctactatgagggacctggcgagggcagccccttcggctggaaggacatcaaagaatggtacgagatgctgatgggccactgcacctacttccccgaggaactgcggagcgtgaagtacgcctacaacgccgacctgtacaacgccctgaacgacctgaacaatctcgtgatcaccagggacgagaacgagaagctggaatattacgagaagttccagatcatcgagaacgtgttcaagcagaagaagaagcccaccctgaagcagatcgccaaagaaatcctcgtgaacgaagaggatattaagggctacagagtgaccagcaccggcaagcccgagttcaccaacctgaaggtgtaccacgacatcaaggacattaccgcccggaaagagattattgagaacgccgagctgctggatcagattgccaagatcctgaccatctaccagagcagcgaggacatccaggaagaactgaccaatctgaactccgagctgacccaggaagagatcgagcagatctctaatctgaagggctataccggcacccacaacctgagcctgaaggccatcaacctgatcctggacgagctgtggcacaccaacgacaaccagatcgctatcttcaaccggctgaagctggtgcccaagaaggtggacctgtcccagcagaaagagatccccaccaccctggtggacgacttcatcctgagccccgtcgtgaagagaagcttcatccagagcatcaaagtgatcaacgccatcatcaagaagtacggcctgcccaacgacatcattatcgagctggcccgcgagaagaactccaaggacgcccagaaaatgatcaacgagatgcagaagcggaaccggcagaccaacgagcggatcgaggaaatcatccggaccaccggcaaagagaacgccaagtacctgatcgagaagatcaagctgcacgacatgcaggaaggcaagtgcctgtacagcctggaagccatccctctggaagatctgctgaacaaccccttcaactatgaggtggaccacatcatccccagaagcgtgtccttcgacaacagcttcaacaacaaggtgctcgtgaagcaggaagaaaacagcaagaagggcaaccggaccccattccagtacctgagcagcagcgacagcaagatcagctacgaaaccttcaagaagcacatcctgaatctggccaagggcaagggcagaatcagcaagaccaagaaagagtatctgctggaagaacgggacatcaacaggttctccgtgcagaaagacttcatcaaccggaacctggtggataccagatacgccaccagaggcctgatgaacctgctgcggagctacttcagagtgaacaacctggacgtgaaagtgaagtccatcaatggcggcttcaccagctttctgcggcggaagtggaagtttaagaaagagcggaacaaggggtacaagcaccacgccgaggacgccctgatcattgccaacgccgatttcatcttcaaagagtggaagaaactggacaaggccaaaaaagtgatggaaaaccagatgttcgaggaaaggcaggccgagagcatgcccgagatcgaaaccgagcaggagtacaaagagatcttcatcaccccccaccagatcaagcacattaaggacttcaaggactacaagtacagccaccgggtggacaagaagcctaatagagagctgattaacgacaccctgtactccacccggaaggacgacaagggcaacaccctgatcgtgaacaatctgaacggcctgtacgacaaggacaatgacaagctgaaaaagctgatcaacaagagccccgaaaagctgctgatgtaccaccacgacccccagacctaccagaaactgaagctgattatggaacagtacggcgacgagaagaatcccctgtacaagtactacgaggaaaccgggaactacctgaccaagtactccaaaaaggacaacggccccgtgatcaagaagattaagtattacggcaacaaactgaacgcccatctggacatcaccgacgactaccccaacagcagaaacaaggtcgtgaagctgtccctgaagccctacagattcgacgtgtacctggacaatggcgtgtacaagttcgtgaccgtgaagaatctggatgtgatcaaaaaagaaaactactacgaagtgaatagcaagtgctatgaggaagctaagaagctgaagaagatcagcaaccaggccgagtttatcgcctccttctacaacaacgatctgatcaagatcaacggcgagctgtatagagtgatcggcgtgaacaacgacctgctgaaccggatcgaagtgaacatgatcgacatcacctaccgcgagtacctggaaaacatgaacgacaagaggccccccaggatcattaagacaatcgcctccaagacccagagcattaagaagtacagcacagacattctgggcaacctgtatgaagtgaaatctaagaagcaccctcagatcatcaaaaagggcaaaaggccggcggccacgaaaaaggccggccaggcaaaaaagaaaaag

SEQ ID NO: 207 - DNA, 3242 bp, Staphylococcus aureus
accggtgccaccatgtacccatacgatgttccagattacgcttcgccgaagaaaaagcgcaaggtcgaagcgtccatgaaaaggaactacattctggggctggacatcgggattacaagcgtggggtatgggattattgactatgaaacaagggacgtgatcgacgcaggcgtcagactgttcaaggaggccaacgtggaaaacaatgagggacggagaagcaagaggggagccaggcgcctgaaacgacggagaaggcacagaatccagagggtgaagaaactgctgttcgattacaacctgctgaccgaccattctgagctgagtggaattaatccttatgaagccagggtgaaaggcctgagtcagaagctgtcagaggaagagttttccgcagctctgctgcacctggctaagcgccgaggagtgcataacgtcaatgaggtggaagaggacaccggcaacgagctgtctacaaaggaacagatctcacgcaatagcaaagctctggaagagaagtatgtcgcagagctgcagctggaacggctgaagaaagatggcgaggtgagagggtcaattaataggttcaagacaagcgactacgtcaaagaagccaagcagctgctgaaagtgcagaaggcttaccaccagctggatcagagcttcatcgatacttatatcgacctgctggagactcggagaacctactatgagggaccaggagaagggagccccttcggatggaaagacatcaaggaatggtacgagatgctgatgggacattgcacctattttccagaagagctgagaagcgtcaagtacgcttataacgcagatcttacaacgccctgaatgacctgaacaacctggtcatcaccagggatgaaaacgagaaactggaatactatgagaagttccagatcatcgaaaacgtgtttaagcagaagaaaaagcctacactgaaacagattgctaaggagatcctggtcaacgaagaggacatcaagggctaccgggtgacaagcactggaaaaccagagttcaccaatctgaaagtgtatcacgatattaaggacatcacagcacggaaagaaatcattgagaacgccgaactgctggatcagattgctaagatcctgactatctaccagagctccgaggacatccaggaagagctgactaacctgaacagcgagctgacccaggaagagatcgaacagattagtaatctgaaggggtacaccggaacacacaacctgtccctgaaagctatcaatctgattctggatgagctgtggcatacaaacgacaatcagattgcaatctttaaccggctgaagctggtcccaaaaaaggtggacctgagtcagcagaaagagatcccaaccacactggtggacgatttcattctgtcacccgtggtcaagcggagcttcatccagagcatcaaagtgatcaacgccatcatcaagaagtacggcctgcccaatgatatcattatcgagctggctagggagaagaacagcaaggacgcacagaagatgatcaatgagatgcagaaacgaaaccggcagaccaatgaacgcattgaagagattatccgaactaccgggaaagagaacgcaaagtacctgattgaaaaaatcaagctgcacgatatgcaggagggaaagtgtctgtattctctggaggccatccccctggaggacctgctgaacaatccattcaactacgaggtcgatcatattatccccagaagcgtgtccttcgacaattcctttaacaacaaggtgctggtcaagcaggaagagaactctaaaaagggcaataggactcctttccagtacctgtctagttcagattccaagatctcttacgaaacctttaaaaagcacattctgaatctggccaaaggaaagggccgcatcagcaagaccaaaaaggagtacctgctggaagagcgggacatcaacagattctccgtccagaaggattttattaaccggaatctggtggacacaagatacgctactcgcggcctgatgaatctgctgcgatcctatttccgggtgaacaatctggatgtgaaagtcaagtccatcaacggcgggttcacatcttttctgaggcgcaaatggaagtttaaaaaggagcgcaacaaagggtacaagcaccatgccgaagatgctctgattatcgcaaatgccgacttcatctttaaggagtggaaaaagctggacaaagccaagaaagtgatggagaaccagatgttcgaagagaagcaggccgaatctatgcccgaaatcgagacagaacaggagtacaaggagattttcatcactcctcaccagatcaagcatatcaaggatttcaaggactacaagtactctcaccgggtggataaaaagcccaacagagagctgatcaatgacaccctgtatagtacaagaaaagacgataaggggaataccctgattgtgaacaatctgaacggactgtacgacaaagataatgacaagctgaaaaagctgatcaacaaaagtcccgagaagctgctgatgtaccaccatgatcctcagacatatcagaaactgaagctgattatggagcagtacggcgacgagaagaacccactgtataagtactatgaagagactgggaactacctgaccaagtatagcaaaaaggataatggccccgtgatcaagaagatcaagtactatgggaacaagctgaatgcccatctggacatcacagacgattaccctaacagtcgcaacaaggtggtcaagctgtcactgaagccatacagattcgatgtctatctggacaacggcgtgtataaatttgtgactgtcaagaatctggatgtcatcaaaaaggagaactactatgaagtgaatagcaagtgctacgaagaggctaaaaagctgaaaaagattagcaaccaggcagagttcatcgcctccttttacaacaacgacctgattaagatcaatggcgaactgtatagggtcatcggggtgaacaatgatctgctgaaccgcattgaagtgaatatgattgacatcacttaccgagagtatctggaaaacatgaatgataagcgcccccctcgaattatcaaaacaattgcctctaagactcagagtatcaaaaagtactcaaccgacattctgggaaacctgtatgaggtgaagagcaaaaagcaccctcagattatcaaaaagggctaagaattc

SEQ ID NO: 208 - protein, 1368 aa, Streptococcus pyogenes
  misc_feature: S. pyogenes Cas9 variant: EQR variant
MDKKYSIGLDIGTNSVGWAVITDEYKVPSKKFKVLGNTDRHSIKKNLIGALLFDSGETAEATRLKRTARRRYTRRKNRICYLQEIFSNEMAKVDDSFFHRLEESFLVEEDKKHERHPIFGNIVDEVAYHEKYPTIYHLRKKLVDSTDKADLRLIYLALAHMIKFRGHFLIEGDLNPDNSDVDKLFIQLVQTYNQLFEENPINASGVDAKAILSARLSKSRRLENLIAQLPGEKKNGLFGNLIALSLGLTPNFKSNFDLAEDAKLQLSKDTYDDDLDNLLAQIGDQYADLFLAAKNLSDAILLSDILRVNTEITKAPLSASMIKRYDEHHQDLTLLKALVRQQLPEKYKEIFFDQSKNGYAGYIDGGASQEEFYKFIKPILEKMDGTEELLVKLNREDLLRKQRTFDNGSIPHQIHLGELHAILRRQEDFYPFLKDNREKIEKILTFRIPYYVGPLARGNSRFAWMTRKSEETITPWNFEEVVDKGASAQSFIERMTNFDKNLPNEKVLPKHSLLYEYFTVYNELTKVKYVTEGMRKPAFLSGEQKKAIVDLLFKTNRKVTVKQLKEDYFKKIECFDSVEISGVEDRFNASLGTYHDLLKIIKDKDFLDNEENEDILEDIVLTLTLFEDREMIEERLKTYAHLFDDKVMKQLKRRRYTGWGRLSRKLINGIRDKQSGKTILDFLKSDGFANRNFMQLIHDDSLTFKEDIQKAQVSGQGDSLHEHIANLAGSPAIKKGILQTVKVVDELVKVMGRHKPENIVIEMARENQTTQKGQKNSRERMKRIEEGIKELGSQILKEHPVENTQLQNEKLYLYYLQNGRDMYVDQELDINRLSDYDVDHIVPQSFLKDDSIDNKVLTRSDKNRGKSDNVPSEEVVKKMKNYWRQLLNAKLITQRKFDNLTKAERGGLSELDKAGFIKRQLVETRQITKHVAQILDSRMNTKYDENDKLIREVKVITLKSKLVSDFRKDFQFYKVREINNYHHAHDAYLNAVVGTALIKKYPKLESEFVYGDYKVYDVRKMIAKSEQEIGKATAKYFFYSNIMNFFKTEITLANGEIRKRPLIETNGETGEIVWDKGRDFATVRKVLSMPQVNIVKKTEVQTGGFSKESILPKRNSDKLIARKKDWDPKKYGGFESPTVAYSVLVVAKVEKGKSKKLKSVKELLGITIMERSSFEKNPIDFLEAKGYKEVKKDLIIKLPKYSLFELENGRKRMLASAGELQKGNELALPSKYVNFLYLASHYEKLKGSPEDNEQKQLFVEQHKHYLDEIIEQISEFSKRVILADANLDKVLSAYNKHRDKPIREQAENIIHLFTLTNLGAPAAFKYFDTTIDRKQYRSTKEVLDATLIHQSITGLYETRIDLSQLGGD

SEQ ID NO: 209 - protein, 1368 aa, Streptococcus pyogenes
  misc_feature: S. pyogenes Cas9 variant: VRER variant
MDKKYSIGLDIGTNSVGWAVITDEYKVPSKKFKVLGNTDRHSIKKNLIGALLFDSGETAEATRLKRTARRRYTRRKNRICYLQEIFSNEMAKVDDSFFHRLEESFLVEEDKKHERHPIFGNIVDEVAYHEKYPTIYHLRKKLVDSTDKADLRLIYLALAHMIKFRGHFLIEGDLNPDNSDVDKLFIQLVQTYNQLFEENPINASGVDAKAILSARLSKSRRLENLIAQLPGEKKNGLFGNLIALSLGLTPNFKSNFDLAEDAKLQLSKDTYDDDLDNLLAQIGDQYADLFLAAKNLSDAILLSDILRVNTEITKAPLSASMIKRYDEHHQDLTLLKALVRQQLPEKYKEIFFDQSKNGYAGYIDGGASQEEFYKFIKPILEKMDGTEELLVKLNREDLLRKQRTFDNGSIPHQIHLGELHAILRRQEDFYPFLKDNREKIEKILTFRIPYYVGPLARGNSRFAWMTRKSEETITPWNFEEVVDKGASAQSFIERMTNFDKNLPNEKVLPKHSLLYEYFTVYNELTKVKYVTEGMRKPAFLSGEQKKAIVDLLFKTNRKVTVKQLKEDYFKKIECFDSVEISGVEDRFNASLGTYHDLLKIIKDKDFLDNEENEDILEDIVLTLTLFEDREMIEERLKTYAHLFDDKVMKQLKRRRYTGWGRLSRKLINGIRDKQSGKTILDFLKSDGFANRNFMQLIHDDSLTFKEDIQKAQVSGQGDSLHEHIANLAGSPAIKKGILQTVKVVDELVKVMGRHKPENIVIEMARENQTTQKGQKNSRERMKRIEEGIKELGSQILKEHPVENTQLQNEKLYLYYLQNGRDMYVDQELDINRLSDYDVDHIVPQSFLKDDSIDNKVLTRSDKNRGKSDNVPSEEVVKKMKNYWRQLLNAKLITQRKFDNLTKAERGGLSELDKAGFIKRQLVETRQITKHVAQILDSRMNTKYDENDKLIREVKVITLKSKLVSDFRKDFQFYKVREINNYHHAHDAYLNAVVGTALIKKYPKLESEFVYGDYKVYDVRKMIAKSEQEIGKATAKYFFYSNIMNFFKTEITLANGEIRKRPLIETNGETGEIVWDKGRDFATVRKVLSMPQVNIVKKTEVQTGGFSKESILPKRNSDKLIARKKDWDPKKYGGFVSPTVAYSVLVVAKVEKGKSKKLKSVKELLGITIMERSSFEKNPIDFLEAKGYKEVKKDLIIKLPKYSLFELENGRKRMLASARELQKGNELALPSKYVNFLYLASHYEKLKGSPEDNEQKQLFVEQHKHYLDEIIEQISEFSKRVILADANLDKVLSAYNKHRDKPIREQAENIIHLFTLTNLGAPAAFKYFDTTIDRKEYRSTKEVLDATLIHQSITGLYETRIDLSQLGGD

SEQ ID NO: 210 - DNA, 5236 bp, Artificial Sequence
  Synthetic
atatgccaagtacgccccctattgacgtcaatgacggtaaatggcccgcctggcattatgcccagtacatgaccttatgggactttcctacttggcagtacatctacgtattagtcatcgctattaccatggtgatgcggttttggcagtacatcaatgggcgtggatagcggtttgactcacggggatttccaagtctccaccccattgacgtcaatgggagtttgttttggcaccaaaatcaacgggactttccaaaatgtcgtaacaactccgccccattgacgcaaatgggcggtaggcgtgtacggtgggaggtctatataagcagagctggtttagtgaaccgtcagatccgctagagatccgcggccgctaatacgactcactatagggagagccgccaccatgctgttcaccagcaccatgcaactttttcccctctgcctaatcatctcatgttcatgtcctactgttcaagcctccaagctgtgccttgggtggctttggggcatggacattgacccgtataaagaatttggagcttctgtggagttactctcttttttgccttctgacttctttccttctattcgagatctcctcgacaccgcctctgctctgtatcgggaggccttagagtctccggaacattgttcacctcaccatacagcactcaggcaagctattctgtgttggggtgagttgatgaatctggccacctgggtgggaagtaatttggaagacccagcatccagggaattagtagtcagctatgtcaatgctgtccttgagtatttggtgtcttttggagtgtggattcgcactcctcccgcttacagaccaccaaatgcccctatcttatcaacacttccggaaagacgacgaggcaggtcccctagaagaagaactccctcgcctcgcagacgaaggtctcaatcgccgcgtcgcagaagatctcaatctcgggaatctcaatgttatatcccttggactcataaggtgggaaactttactgggctttattcttctactgtacctgtctttaatcctgattggaaaactccctcctttcctcacattcatttacaggactatcctaaccttaccaaatatttgcccttggacaaaggcattaaaccgtattatcctgaatatgcagttaatcattacttcaaaactaggcattatttacatactctgtggaaggctggcattctatataagagagaaactacacgcagcgcctcattttgtgggtcaccatattcttgggaacaagagctacagcatgggaggttggtcttccaaacctcgacaaggcatggggacgggtaccggaagcggagctaccaacttcagcctactcaagcaggcaggagacgtcgaggagaacccaggacccagcggccgcggtaccgtcagcaagggcgaggagctgttcaccggggtggtgcccatcctggtcgagctggacggcgacgtaaacggccacaagttcagcgtgtccggcgagggcgagggcgatgccacctacggcaagctgaccctgaagttcatctgcaccaccggcaagctgcccgtgccctggcccaccctcgtgaccaccctgacctacggcgtgcagtgcttcagccgctaccccgaccacatgaagcagcacgacttcttcaagtccgccatgcccgaaggctacgtccaggagcgcaccatcttcttcaaggacgacggcaactacaagacccgcgccgaggtgaagttcgagggcgacaccctggtgaaccgcatcgagctgaagggcatcgacttcaaggaggacggcaacatcctggggcacaagctggagtacaactacaacagccacaacgtctatatcatggccgacaagcagaagaacggcatcaaggtgaacttcaagatccgccacaacatcgaggacggcagcgtgcagctcgccgaccactaccagcagaacacccccatcggcgacggccccgtgctgctgcccgacaaccactacctgagcacccagtccgccctgagcaaagaccccaacgagaagcgcgatcacatggtcctgctggagttcgtgaccgccgccgggatcactctcggcatggacgagctgtacaagggatcccccaagaagaagaggaaagtctcgagcgactacaaagaccatgacggtgattataaagatcatgacatcgattacaaggatgacgatgacaaggctgcaggatgaccggtcatcatcaccatcaccattgagtttaaacccgctgatcagcctcgactgtgccttctagttgccagccatctgttgtttgcccctcccccgtgccttccttgaccctggaaggtgccactcccactgtcctttcctaataaaatgaggaaattgcatcgcattgtctgagtaggtgtcattctattctggggggtggggtggggcaggacagcaagggggaggattgggaagacaatagcaggcatgctggggatgcggtgggctctatggcttctgaggcggaaagaaccagctggggctcgataccgtcgacctctagctagagcttggcgtaatcatggtcatagctgtttcctgtgtgaaattgttatccgctcacaattccacacaacatacgagccggaagcataaagtgtaaagcctagggtgcctaatgagtgagctaactcacattaattgcgttgcgctcactgcccgctttccagtcgggaaacctgtcgtgccagctgcattaatgaatcggccaacgcgcggggagaggcggtttgcgtattgggcgctcttccgcttcctcgctcactgactcgctgcgctcggtcgttcggctgcggcgagcggtatcagctcactcaaaggcggtaatacggttatccacagaatcaggggataacgcaggaaagaacatgtgagcaaaaggccagcaaaaggccaggaaccgtaaaaaggccgcgttgctggcgtttttccataggctccgcccccctgacgagcatcacaaaaatcgacgctcaagtcagaggtggcgaaacccgacaggactataaagataccaggcgtttccccctggaagctccctcgtgcgctctcctgttccgaccctgccgcttaccggatacctgtccgcctttctcccttcgggaagcgtggcgctttctcaatgctcacgctgtaggtatctcagttcggtgtaggtcgttcgctccaagctgggctgtgtgcacgaaccccccgttcagcccgaccgctgcgccttatccggtaactatcgtcttgagtccaacccggtaagacacgacttatcgccactggcagcagccactggtaacaggattagcagagcgaggtatgtaggcggtgctacagagttcttgaagtggtggcctaactacggctacactagaaggacagtatttggtatctgcgctctgctgaagccagttaccttcggaaaaagagttggtagctcttgatccggcaaacaaaccaccgctggtagcggtggtttttttgtttgcaagcagcagattacgcgcagaaaaaaaggatctcaagaagatcctttgatcttttctacggggtctgacgctcagtggaacgaaaactcacgttaagggattttggtcatgagattatcaaaaaggatcttcacctagatccttttaaattaaaaatgaagttttaaatcaatctaaagtatatatgagtaaacttggtctgacagttaccaatgcttaatcagtgaggcacctatctcagcgatctgtctatttcgttcatccatagttgcctgactccccgtcgtgtagataactacgatacgggagggcttaccatctggccccagtgctgcaatgataccgcgagacccacgctcaccggctccagatttatcagcaataaaccagccagccggaagggccgagcgcagaagtggtcctgcaactttatccgcctccatccagtctattaattgttgccgggaagctagagtaagtagttcgccagttaatagtttgcgcaacgttgttgccattgctacaggcatcgtggtgtcacgctcgtcgtttggtatggcttcattcagctccggttcccaacgatcaaggcgagttacatgatcccccatgttgtgcaaaaaagcggttagctccttcggtcctccgatcgttgtcagaagtaagttggccgcagtgttatcactcatggttatggcagcactgcataattctcttactgtcatgccatccgtaagatgcttttctgtgactggtgagtactcaaccaagtcattctgagaatagtgtatgcggcgaccgagttgctcttgcccggcgtcaatacgggataataccgcgccacatagcagaactttaaaagtgctcatcattggaaaacgttcttcggggcgaaaactctcaaggatcttaccgctgttgagatccagttcgatgtaacccactcgtgcacccaactgatcttcagcatcttttactttcaccagcgtttctgggtgagcaaaaacaggaaggcaaaatgccgcaaaaaagggaataagggcgacacggaaatgttgaatactcatactcttcctttttcaatattattgaagcatttatcagggttattgtctcatgagcggatacatatttgaatgtatttagaaaaataaacaaataggggttccgcgcacatttccccgaaaagtgccacctgacgtcgacggatcgggagatcgatctcccgatcccctagggtcgactctcagtacaatctgctctgatgccgcatagttaagccagtatctgctccctgcttgtgtgttggaggtcgctgagtagtgcgcgagcaaaatttaagctacaacaaggcaaggcttgaccgacaattgcatgaagaatctgcttagggttaggcgttttgcgctgcttcgcgatgtacgggccagatatacgcgttgacattgattattgactagttattaatagtaatcaattacggggtcattagttcatagcccatatatggagttccgcgttacataacttacggtaaatggcccgcctggctgaccgcccaacgacccccgcccattgacgtcaataatgacgtatgttcccatagtaacgccaatagggactttccattgacgtcaatgggtggactatttacggtaaactgcccacttggcagtacatcaagtgtatc

SEQ ID NO: 211 - DNA, 4944 bp, Artificial Sequence
  Synthetic
atatgccaagtacgccccctattgacgtcaatgacggtaaatggcccgcctggcattatgcccagtacatgaccttatgggactttcctacttggcagtacatctacgtattagtcatcgctattaccatggtgatgcggttttggcagtacatcaatgggcgtggatagcggtttgactcacggggatttccaagtctccaccccattgacgtcaatgggagtttgttttggcaccaaaatcaacgggactttccaaaatgtcgtaacaactccgccccattgacgcaaatgggcggtaggcgtgtacggtgggaggtctatataagcagagctggtttagtgaaccgtcagatccgctagagatccgcggccgctaatacgactcactatagggagagccgccaccatgctttctgttcccaatcctctgggattctttcccgatcaccagttggaccctgcgttcggagccaactcaaacaatccagattgggacttcaaccccaacaaggatcactggccagaggcaaatcaggtaggagcgggagcatttggtccagggttcaccccaccacacggaggccttttggggtggagccctcaggctcagggcatattgacaacactgccagcagcacctcctcctgcctccaccaatcggcagtcaggaagacagcctactcccatctctccacctctaagagacagtcatcctcaggccatgcagtggaactccacaacattccaccaagctctgctagatcccagagtgaggggcctatattttcctgctggtggctccagttccggaacagtaaaccctgttccgactactgcctcacccatatcgtcaatcttctcgaggactggggaccctgcaccgaacatggagagcacaacatcaggattcctaggacccctgctcgtgttacaggcggggtttttcttgttgacaagaatcctcacaataccacagagtctagactcgtggtggacttctctcaattttctagggggagcacccacgtgtcctggccaaggtaccggaagcggagctaccaacttcagcctactcaagcaggcaggagacgtcgaggagaacccaggacccagcggccgcggtaccgtcagcaagggcgaggagctgttcaccggggtggtgcccatcctggtcgagctggacggcgacgtaaacggccacaagttcagcgtgtccggcgagggcgagggcgatgccacctacggcaagctgaccctgaagttcatctgcaccaccggcaagctgcccgtgccctggcccaccctcgtgaccaccctgacctacggcgtgcagtgcttcagccgctaccccgaccacatgaagcagcacgacttcttcaagtccgccatgcccgaaggctacgtccaggagcgcaccatcttcttcaaggacgacggcaactacaagacccgcgccgaggtgaagttcgagggcgacaccctggtgaaccgcatcgagctgaagggcatcgacttcaaggaggacggcaacatcctggggcacaagctggagtacaactacaacagccacaacgtctatatcatggccgacaagcagaagaacggcatcaaggtgaacttcaagatccgccacaacatcgaggacggcagcgtgcagctcgccgaccactaccagcagaacacccccatcggcgacggccccgtgctgctgcccgacaaccactacctgagcacccagtccgccctgagcaaagaccccaacgagaagcgcgatcacatggtcctgctggagttcgtgaccgccgccgggatcactctcggcatggacgagctgtacaagggatcccccaagaagaagaggaaagtctcgagcgactacaaagaccatgacggtgattataaagatcatgacatcgattacaaggatgacgatgacaaggctgcaggatgaccggtcatcatcaccatcaccattgagtttaaacccgctgatcagcctcgactgtgccttctagttgccagccatctgttgtttgcccctcccccgtgccttccttgaccctggaaggtgccactcccactgtcctttcctaataaaatgaggaaattgcatcgcattgtctgagtaggtgtcattctattctggggggtggggtggggcaggacagcaagggggaggattgggaagacaatagcaggcatgctggggatgcggtgggctctatggcttctgaggcggaaagaaccagctggggctcgataccgtcgacctctagctagagcttggcgtaatcatggtcatagctgtttcctgtgtgaaattgttatccgctcacaattccacacaacatacgagccggaagcataaagtgtaaagcctagggtgcctaatgagtgagctaactcacattaattgcgttgcgctcactgcccgctttccagtcgggaaacctgtcgtgccagctgcattaatgaatcggccaacgcgcggggagaggcggtttgcgtattgggcgctcttccgcttcctcgctcactgactcgctgcgctcggtcgttcggctgcggcgagcggtatcagctcactcaaaggcggtaatacggttatccacagaatcaggggataacgcaggaaagaacatgtgagcaaaaggccagcaaaaggccaggaaccgtaaaaaggccgcgttgctggcgtttttccataggctccgcccccctgacgagcatcacaaaaatcgacgctcaagtcagaggtggcgaaacccgacaggactataaagataccaggcgtttccccctggaagctccctcgtgcgctctcctgttccgaccctgccgcttaccggatacctgtccgcctttctcccttcgggaagcgtggcgctttctcaatgctcacgctgtaggtatctcagttcggtgtaggtcgttcgctccaagctgggctgtgtgcacgaaccccccgttcagcccgaccgctgcgccttatccggtaactatcgtcttgagtccaacccggtaagacacgacttatcgccactggcagcagccactggtaacaggattagcagagcgaggtatgtaggcggtgctacagagttcttgaagtggtggcctaactacggctacactagaaggacagtatttggtatctgcgctctgctgaagccagttaccttcggaaaaagagttggtagctcttgatccggcaaacaaaccaccgctggtagcggtggtttttttgtttgcaagcagcagattacgcgcagaaaaaaaggatctcaagaagatcctttgatcttttctacggggtctgacgctcagtggaacgaaaactcacgttaagggattttggtcatgagattatcaaaaaggatcttcacctagatccttttaaattaaaaatgaagttttaaatcaatctaaagtatatatgagtaaacttggtctgacagttaccaatgcttaatcagtgaggcacctatctcagcgatctgtctatttcgttcatccatagttgcctgactccccgtcgtgtagataactacgatacgggagggcttaccatctggccccagtgctgcaatgataccgcgagacccacgctcaccggctccagatttatcagcaataaaccagccagccggaagggccgagcgcagaagtggtcctgcaactttatccgcctccatccagtctattaattgttgccgggaagctagagtaagtagttcgccagttaatagtttgcgcaacgttgttgccattgctacaggcatcgtggtgtcacgctcgtcgtttggtatggcttcattcagctccggttcccaacgatcaaggcgagttacatgatcccccatgttgtgcaaaaaagcggttagctccttcggtcctccgatcgttgtcagaagtaagttggccgcagtgttatcactcatggttatggcagcactgcataattctcttactgtcatgccatccgtaagatgcttttctgtgactggtgagtactcaaccaagtcattctgagaatagtgtatgcggcgaccgagttgctcttgcccggcgtcaatacgggataataccgcgccacatagcagaactttaaaagtgctcatcattggaaaacgttcttcggggcgaaaactctcaaggatcttaccgctgttgagatccagttcgatgtaacccactcgtgcacccaactgatcttcagcatcttttactttcaccagcgtttctgggtgagcaaaaacaggaaggcaaaatgccgcaaaaaagggaataagggcgacacggaaatgttgaatactcatactcttcctttttcaatattattgaagcatttatcagggttattgtctcatgagcggatacatatttgaatgtatttagaaaaataaacaaataggggttccgcgcacatttccccgaaaagtgccacctgacgtcgacggatcgggagatcgatctcccgatcccctagggtcgactctcagtacaatctgctctgatgccgcatagttaagccagtatctgctccctgcttgtgtgttggaggtcgctgagtagtgcgcgagcaaaatttaagctacaacaaggcaaggcttgaccgacaattgcatgaagaatctgcttagggttaggcgttttgcgctgcttcgcgatgtacgggccagatatacgcgttgacattgattattgactagttattaatagtaatcaattacggggtcattagttcatagcccatatatggagttccgcgttacataacttacggtaaatggcccgcctggctgaccgcccaacgacccccgcccattgacgtcaataatgacgtatgttcccatagtaacgccaatagggactttccattgacgtcaatgggtggactatttacggtaaactgcccacttggcagtacatcaagtgtatc

SEQ ID NO: 212 - DNA, 5091 bp, Artificial Sequence
  Synthetic
atatgccaagtacgccccctattgacgtcaatgacggtaaatggcccgcctggcattatgcccagtacatgaccttatgggactttcctacttggcagtacatctacgtattagtcatcgctattaccatggtgatgcggttttggcagtacatcaatgggcgtggatagcggtttgactcacggggatttccaagtctccaccccattgacgtcaatgggagtttgttttggcaccaaaatcaacgggactttccaaaatgtcgtaacaactccgccccattgacgcaaatgggcggtaggcgtgtacggtgggaggtctatataagcagagctggtttagtgaaccgtcagatccgctagagatccgcggccgctaatacgactcactatagggagagccgccaccatgacccacgtgtcctggccaaaattcgcagtccccaacctccaatcactcaccaacctcttgtcctccaacttgtcctggctatcgctggatgtgtctgcggcgttttatcatattcctcttcatcctgctgctatgcctcatcttcttgttggttcttctggactaccaaggtatgttgcccgtttgtcctctacttccaggaacatcaactaccagcacgggaccatgcagaacctgcacgattcctgctcaaggaacctctatgtttccctcttgttgctgtacaaaaccttcggacggaaactgcacttgtattcccatcccatcatcctgggctttcgcaagattcctatgggagtgggcctcagtccgtttctcctggctcagtttactagtgccatttgttcagtggttcgtagggctttcccccactgtttggctttcagctatatggatgatgtggtattgggggccaagtctgtacaacatcttgagtccctttttacctctattaccaatttgaaccctaataaaaccaaacgttggggctactcccttaacttcatgggatatgtaattggaagttggggtactttaccgcaggaacatattgtacaaaaactcaagcaatgttttcgaaaattgcctgtaaatagacctattgattggaaagtatgtcaaagaattgtgggtcttttgggctttgctgccccttttacacaatgtggctatcctgccttgatgcctttatatgcatgtatacaatctaagcaggctggtaccggaagcggagctaccaacttcagcctactcaagcaggcaggagacgtcgaggagaacccaggacccagcggccgcggtaccgtgagcaagggcgaggagctgttcaccggggtggtgcccatcctggtcgagctggacggcgacgtaaacggccacaagttcagcgtgtccggcgagggcgagggcgatgccacctacggcaagctgaccctgaagttcatctgcaccaccggcaagctgcccgtgccctggcccaccctcgtgaccaccctgacctacggcgtgcagtgcttcagccgctaccccgaccacatgaagcagcacgacttcttcaagtccgccatgcccgaaggctacgtccaggagcgcaccatcttcttcaaggacgacggcaactacaagacccgcgccgaggtgaagttcgagggcgacaccctggtgaaccgcatcgagctgaagggcatcgacttcaaggaggacggcaacatcctggggcacaagctggagtacaactacaacagccacaacgtctatatcatggccgacaagcagaagaacggcatcaaggtgaacttcaagatccgccacaacatcgaggacggcagcgtgcagctcgccgaccactaccagcagaacacccccatcggcgacggccccgtgctgctgcccgacaaccactacctgagcacccagtccgccctgagcaaagaccccaacgagaagcgcgatcacatggtcctgctggagttcgtgaccgccgccgggatcactctcggcatggacgagctgtacaagggatcccccaagaagaagaggaaagtctcgagcgactacaaagaccatgacggtgattataaagatcatgacatcgattacaaggatgacgatgacaaggctgcaggatgaccggtcatcatcaccatcaccattgagtttaaacccgctgatcagcctcgactgtgccttctagttgccagccatctgttgtttgcccctcccccgtgccttccttgaccctggaaggtgccactcccactgtcctttcctaataaaatgaggaaattgcatcgcattgtctgagtaggtgtcattctattctggggggtggggtggggcaggacagcaagggggaggattgggaagacaatagcaggcatgctggggatgcggtgggctctatggcttctgaggcggaaagaaccagctggggctcgataccgtcgacctctagctagagcttggcgtaatcatggtcatagctgtttcctgtgtgaaattgttatccgctcacaattccacacaacatacgagccggaagcataaagtgtaaagcctagggtgcctaatgagtgagctaactcacattaattgcgttgcgctcactgcccgctttccagtcgggaaacctgtcgtgccagctgcattaatgaatcggccaacgcgcggggagaggcggtttgcgtattgggcgctcttccgcttcctcgctcactgactcgctgcgctcggtcgttcggctgcggcgagcggtatcagctcactcaaaggcggtaatacggttatccacagaatcaggggataacgcaggaaagaacatgtgagcaaaaggccagcaaaaggccaggaaccgtaaaaaggccgcgttgctggcgtttttccataggctccgcccccctgacgagcatcacaaaaatcgacgctcaagtcagaggtggcgaaacccgacaggactataaagataccaggcgtttccccctggaagctccctcgtgcgctctcctgttccgaccctgccgcttaccggatacctgtccgcctttctcccttcgggaagcgtggcgctttctcaatgctcacgctgtaggtatctcagttcggtgtaggtcgttcgctccaagctgggctgtgtgcacgaaccccccgttcagcccgaccgctgcgccttatccggtaactatcgtcttgagtccaacccggtaagacacgacttatcgccactggcagcagccactggtaacaggattagcagagcgaggtatgtaggcggtgctacagagttcttgaagtggtggcctaactacggctacactagaaggacagtatttggtatctgcgctctgctgaagccagttaccttcggaaaaagagttggtagctcttgatccggcaaacaaaccaccgctggtagcggtggtttttttgtttgcaagcagcagattacgcgcagaaaaaaaggatctcaagaagatcctttgatcttttctacggggtctgacgctcagtggaacgaaaactcacgttaagggattttggtcatgagattatcaaaaaggatcttcacctagatccttttaaattaaaaatgaagttttaaatcaatctaaagtatatatgagtaaacttggtctgacagttaccaatgcttaatcagtgaggcacctatctcagcgatctgtctatttcgttcatccatagttgcctgactccccgtcgtgtagataactacgatacgggagggcttaccatctggccccagtgctgcaatgataccgcgagacccacgctcaccggctccagatttatcagcaataaaccagccagccggaagggccgagcgcagaagtggtcctgcaactttatccgcctccatccagtctattaattgttgccgggaagctagagtaagtagttcgccagttaatagtttgcgcaacgttgttgccattgctacaggcatcgtggtgtcacgctcgtcgtttggtatggcttcattcagctccggttcccaacgatcaaggcgagttacatgatcccccatgttgtgcaaaaaagcggttagctccttcggtcctccgatcgttgtcagaagtaagttggccgcagtgttatcactcatggttatggcagcactgcataattctcttactgtcatgccatccgtaagatgcttttctgtgactggtgagtactcaaccaagtcattctgagaatagtgtatgcggcgaccgagttgctcttgcccggcgtcaatacgggataataccgcgccacatagcagaactttaaaagtgctcatcattggaaaacgttcttcggggcgaaaactctcaaggatcttaccgctgttgagatccagttcgatgtaacccactcgtgcacccaactgatcttcagcatcttttactttcaccagcgtttctgggtgagcaaaaacaggaaggcaaaatgccgcaaaaaagggaataagggcgacacggaaatgttgaatactcatactcttcctttttcaatattattgaagcatttatcagggttattgtctcatgagcggatacatatttgaatgtatttagaaaaataaacaaataggggttccgcgcacatttccccgaaaagtgccacctgacgtcgacggatcgggagatcgatctcccgatcccctagggtcgactctcagtacaatctgctctgatgccgcatagttaagccagtatctgctccctgcttgtgtgttggaggtcgctgagtagtgcgcgagcaaaatttaagctacaacaaggcaaggcttgaccgacaattgcatgaagaatctgcttagggttaggcgttttgcgctgcttcgcgatgtacgggccagatatacgcgttgacattgattattgactagttattaatagtaatcaattacggggtcattagttcatagcccatatatggagttccgcgttacataacttacggtaaatggcccgcctggctgaccgcccaacgacccccgcccattgacgtcaataatgacgtatgttcccatagtaacgccaatagggactttccattgacgtcaatgggtggactatttacggtaaactgcccacttggcagtacatcaagtgtatc

SEQ ID NO: 213 - DNA, 4978 bp, Artificial Sequence
  Synthetic
atatgccaagtacgccccctattgacgtcaatgacggtaaatggcccgcctggcattatgcccagtacatgaccttatgggactttcctacttggcagtacatctacgtattagtcatcgctattaccatggtgatgcggttttggcagtacatcaatgggcgtggatagcggtttgactcacggggatttccaagtctccaccccattgacgtcaatgggagtttgttttggcaccaaaatcaacgggactttccaaaatgtcgtaacaactccgccccattgacgcaaatgggcggtaggcgtgtacggtgggaggtctatataagcagagctggtttagtgaaccgtcagatccgctagagatccgcggccgctaatacgactcactatagggagagccgccaccatgcaatatctaaacctttaccccgttgcccggcaacggtcaggtctctgccaagtgtttgctgacgcaacccccacgggttggggcttggccataggccatcggcgcatgcgtggaacctttgtggctcctctgccgatccatactgcggaactcctagcagcttgttttgctcgcagccggtctggagcgaaacttatcggaaccgacaactcagttgtcctctctcggaaatacacctcctttccatggctgctaggctgtgctgccaactggatcctgcgcgggacgtcctttgtctacgtcccgtcggcgctgaatcccgcggacgacccgtctcggggccgtttgggcctctaccgtccccttcttcatctgccgttccggccgaccacggggcgcacctctctttacgcggtctccccgtctgtgccttctcatctgccggaccgtgtgcacttcgcttcacctctgcacgtagcatggagaccgaccaccgtgaacgcccaccaggtcttgcccaaggtcttacacaagaggactcttggactctcagcaatgtcaacgaccgaccttgaggcatacttcaaagactgtttgtttaaagactgggaggagttgggggaggagattaggttaaaggtctttgtactaggaggctgtaggcggtaccggaagcggagctaccaacttcagcctactcaagcaggcaggagacgtcgaggagaacccaggacccagcggccgcggtaccgtgagcaagggcgaggagctgttcaccggggtggtgcccatcctggtcgagctggacggcgacgtaaacggccacaagttcagcgtgtccggcgagggcgagggcgatgccacctacggcaagctgaccctgaagttcatctgcaccaccggcaagctgcccgtgccctggcccaccctcgtgaccaccctgacctacggcgtgcagtgcttcagccgctaccccgaccacatgaagcagcacgacttcttcaagtccgccatgcccgaaggctacgtccaggagcgcaccatcttcttcaaggacgacggcaactacaagacccgcgccgaggtgaagttcgagggcgacaccctggtgaaccgcatcgagctgaagggcatcgacttcaaggaggacggcaacatcctggggcacaagctggagtacaactacaacagccacaacgtctatatcatggccgacaagcagaagaacggcatcaaggtgaacttcaagatccgccacaacatcgaggacggcagcgtgcagctcgccgaccactaccagcagaacacccccatcggcgacggccccgtgctgctgcccgacaaccactacctgagcacccagtccgccctgagcaaagaccccaacgagaagcgcgatcacatggtcctgctggagttcgtgaccgccgccgggatcactctcggcatggacgagctgtacaagggatcccccaagaagaagaggaaagtctcgagcgactacaaagaccatgacggtgattataaagatcatgacatcgattacaaggatgacgatgacaaggctgcaggatgaccggtcatcatcaccatcaccattgagtttaaacccgctgatcagcctcgactgtgccttctagttgccagccatctgttgtttgcccctcccccgtgccttccttgaccctggaaggtgccactcccactgtcctttcctaataaaatgaggaaattgcatcgcattgtctgagtaggtgtcattctattctggggggtggggtggggcaggacagcaagggggaggattgggaagacaatagcaggcatgctggggatgcggtgggctctatggcttctgaggcggaaagaaccagctggggctcgataccgtcgacctctagctagagcttggcgtaatcatggtcatagctgtttcctgtgtgaaattgttatccgctcacaattccacacaacatacgagccggaagcataaagtgtaaagcctagggtgcctaatgagtgagctaactcacattaattgcgttgcgctcactgcccgctttccagtcgggaaacctgtcgtgccagctgcattaatgaatcggccaacgcgcggggagaggcggtttgcgtattgggcgctcttccgcttcctcgctcactgactcgctgcgctcggtcgttcggctgcggcgagcggtatcagctcactcaaaggcggtaatacggttatccacagaatcaggggataacgcaggaaagaacatgtgagcaaaaggccagcaaaaggccaggaaccgtaaaaaggccgcgttgctggcgtttttccataggctccgcccccctgacgagcatcacaaaaatcgacgctcaagtcagaggtggcgaaacccgacaggactataaagataccaggcgtttccccctggaagctccctcgtgcgctctcctgttccgaccctgccgcttaccggatacctgtccgcctttctcccttcgggaagcgtggcgctttctcaatgctcacgctgtaggtatctcagttcggtgtaggtcgttcgctccaagctgggctgtgtgcacgaaccccccgttcagcccgaccgctgcgccttatccggtaactatcgtcttgagtccaacccggtaagacacgacttatcgccactggcagcagccactggtaacaggattagcagagcgaggtatgtaggcggtgctacagagttcttgaagtggtggcctaactacggctacactagaaggacagtatttggtatctgcgctctgctgaagccagttaccttcggaaaaagagttggtagctcttgatccggcaaacaaaccaccgctggtagcggtggtttttttgtttgcaagcagcagattacgcgcagaaaaaaaggatctcaagaagatcctttgatcttttctacggggtctgacgctcagtggaacgaaaactcacgttaagggattttggtcatgagattatcaaaaaggatcttcacctagatccttttaaattaaaaatgaagttttaaatcaatctaaagtatatatgagtaaacttggtctgacagttaccaatgcttaatcagtgaggcacctatctcagcgatctgtctatttcgttcatccatagttgcctgactccccgtcgtgtagataactacgatacgggagggcttaccatctggccccagtgctgcaatgataccgcgagacccacgctcaccggctccagatttatcagcaataaaccagccagccggaagggccgagcgcagaagtggtcctgcaactttatccgcctccatccagtctattaattgttgccgggaagctagagtaagtagttcgccagttaatagtttgcgcaacgttgttgccattgctacaggcatcgtggtgtcacgctcgtcgtttggtatggcttcattcagctccggttcccaacgatcaaggcgagttacatgatcccccatgttgtgcaaaaaagcggttagctccttcggtcctccgatcgttgtcagaagtaagttggccgcagtgttatcactcatggttatggcagcactgcataattctcttactgtcatgccatccgtaagatgcttttctgtgactggtgagtactcaaccaagtcattctgagaatagtgtatgcggcgaccgagttgctcttgcccggcgtcaatacgggataataccgcgccacatagcagaactttaaaagtgctcatcattggaaaacgttcttcggggcgaaaactctcaaggatcttaccgctgttgagatccagttcgatgtaacccactcgtgcacccaactgatcttcagcatcttttactttcaccagcgtttctgggtgagcaaaaacaggaaggcaaaatgccgcaaaaaagggaataagggcgacacggaaatgttgaatactcatactcttcctttttcaatattattgaagcatttatcagggttattgtctcatgagcggatacatatttgaatgtatttagaaaaataaacaaataggggttccgcgcacatttccccgaaaagtgccacctgacgtcgacggatcgggagatcgatctcccgatcccctagggtcgactctcagtacaatctgctctgatgccgcatagttaagccagtatctgctccctgcttgtgtgttggaggtcgctgagtagtgcgcgagcaaaatttaagctacaacaaggcaaggcttgaccgacaattgcatgaagaatctgcttagggttaggcgttttgcgctgcttcgcgatgtacgggccagatatacgcgttgacattgattattgactagttattaatagtaatcaattacggggtcattagttcatagcccatatatggagttccgcgttacataacttacggtaaatggcccgcctggctgaccgcccaacgacccccgcccattgacgtcaataatgacgtatgttcccatagtaacgccaatagggactttccattgacgtcaatgggtggactatttacggtaaactgcccacttggcagtacatcaagtgtatc

SEQ ID NO: 214 - DNA, 7614 bp, Artificial Sequence
  Synthetic
atatgccaagtacgccccctattgacgtcaatgacggtaaatggcccgcctggcattatgcccagtacatgaccttatgggactttcctacttggcagtacatctacgtattagtcatcgctattaccatggtgatgcggttttggcagtacatcaatgggcgtggatagcggtttgactcacggggatttccaagtctccaccccattgacgtcaatgggagtttgttttggcaccaaaatcaacgggactttccaaaatgtcgtaacaactccgccccattgacgcaaatgggcggtaggcgtgtacggtgggaggtctatataagcagagctggtttagtgaaccgtcagatccgctagagatccgcggccgctaatacgactcactatagggagagccgccaccatggataaaaagtattctattggtttagacatcggcactaattccgttggatgggctgtcataaccgatgaatacaaagtaccttcaaagaaatttaaggtgttggggaacacagaccgtcattcgattaaaaagaatcttatcggtgccctcctattcgatagtggcgaaacggcagaggcgactcgcctgaaacgaaccgctcggagaaggtatacacgtcgcaagaaccgaatatgttacttacaagaaatttttagcaatgagatggccaaagttgacgattctttctttcaccgtttggaagagtccttccttgtcgaagaggacaagaaacatgaacggcaccccatctttggaaacatagtagatgaggtggcatatcatgaaaagtacccaacgatttatcacctcagaaaaaagctagttgactcaactgataaagcggacctgaggttaatctacttggctcttgcccatatgataaagttccgtgggcactttctcattgagggtgatctaaatccggacaactcggatgtcgacaaactgttcatccagttagtacaaacctataatcagttgtttgaagagaaccctataaatgcaagtggcgtggatgcgaaggctattcttagcgcccgcctctctaaatcccgacggctagaaaacctgatcgcacaattacccggagagaagaaaaatgggttgttcggtaaccttatagcgctctcactaggcctgacaccaaattttaagtcgaacttcgacttagctgaagatgccaaattgcagcttagtaaggacacgtacgatgacgatctcgacaatctactggcacaaattggagatcagtatgcggacttatttttggctgccaaaaaccttagcgatgcaatcctcctatctgacatactgagagttaatactgagattaccaaggcgccgttatccgcttcaatgatcaaaaggtacgatgaacatcaccaagacttgacacttctcaaggccctagtccgtcagcaactgcctgagaaatataaggaaatattctttgatcagtcgaaaaacgggtacgcaggttatattgacggcggagcgagtcaagaggaattctacaagtttatcaaacccatattagagaagatggatgggacggaagagttgcttgtaaaactcaatcgcgaagatctactgcgaaagcagcggactttcgacaacggtagcattccacatcaaatccacttaggcgaattgcatgctatacttagaaggcaggaggatttttatccgttcctcaaagacaatcgtgaaaagattgagaaaatcctaacctttcgcataccttactatgtgggacccctggcccgagggaactctcggttcgcatggatgacaagaaagtccgaagaaacgattactccatggaattttgaggaagttgtcgataaaggtgcgtcagctcaatcgttcatcgagaggatgaccaactttgacaagaatttaccgaacgaaaaagtattgcctaagcacagtttactttacgagtatttcacagtgtacaatgaactcacgaaagttaagtatgtcactgagggcatgcgtaaacccgcctttctaagcggagaacagaagaaagcaatagtagatctgttattcaagaccaaccgcaaagtgacagttaagcaattgaaagaggactactttaagaaaattgaatgcttcgattctgtcgagatctccggggtagaagatcgatttaatgcgtcacttggtacgtatcatgacctcctaaagataattaaagataaggacttcctggataacgaagagaatgaagatatcttagaagatatagtgttgactcttaccctctttgaagatcgggaaatgattgaggaaagactaaaaacatacgctcacctgttcgacgataaggttatgaaacagttaaagaggcgtcgctatacgggctggggacgattgtcgcggaaacttatcaacgggataagagacaagcaaagtggtaaaactattctcgattttctaaagagcgacggcttcgccaataggaactttatgcagctgatccatgatgactctttaaccttcaaagaggatatacaaaaggcacaggtttccggacaaggggactcattgcacgaacatattgcgaatcttgctggttcgccagccatcaaaaagggcatactccagacagtcaaagtagtggatgagctagttaaggtcatgggacgtcacaaaccggaaaacattgtaatcgagatggcacgcgaaaatcaaacgactcagaaggggcaaaaaaacagtcgagagcggatgaagagaatagaagagggtattaaagaactgggcagccagatcttaaaggagcatcctgtggaaaatacccaattgcagaacgagaaactttacctctattacctacaaaatggaagggacatgtatgttgatcaggaactggacataaaccgtttatctgattacgacgtcgatcacattgtaccccaatcctttttgaaggacgattcaatcgacaataaagtgcttacacgctcggataagaaccgagggaaaagtgacaatgttccaagcgaggaagtcgtaaagaaaatgaagaactattggcggcagctcctaaatgcgaaactgataacgcaaagaaagttcgataacttaactaaagctgagaggggtggcttgtctgaacttgacaaggccggatttattaaacgtcagctcgtggaaacccgccaaatcacaaagcatgttgcacagatactagattcccgaatgaatacgaaatacgacgagaacgataagctgattcgggaagtcaaagtaatcactttaaagtcaaaattggtgtcggacttcagaaaggattttcaattctataaagttagggagataaataactaccaccatgcgcacgacgcttatcttaatgccgtcgtagggaccgcactcattaagaaatacccgaagctagaaagtgagtttgtgtatggtgattacaaagtttatgacgtccgtaagatgatcgcgaaaagcgaacaggagataggcaaggctacagccaaatacttcttttattctaacattatgaatttctttaagacggaaatcactctggcaaacggagagatacgcaaacgacctttaattgaaaccaatggggagacaggtgaaatcgtatgggataagggccgggacttcgcgacggtgagaaaagttttgtccatgccccaagtcaacatagtaaagaaaactgaggtgcagaccggagggttttcaaaggaatcgattcttccaaaaaggaatagtgataagctcatcgctcgtaaaaaggactgggacccgaaaaagtacggtggcttcgagagccctacagttgcctattctgtcctagtagtggcaaaagttgagaagggaaaatccaagaaactgaagtcagtcaaagaattattggggataacgattatggagcgctcgtcttttgaaaagaaccccatcgacttccttgaggcgaaaggttacaaggaagtaaaaaaggatctcataattaaactaccaaagtatagtctgtttgagttagaaaatggccgaaaacggatgttggctagcgccggagagcttcaaaaggggaacgaactcgcactaccgtctaaatacgtgaatttcctgtatttagcgtcccattacgagaagttgaaaggttcacctgaagataacgaacagaagcaactttttgttgagcagcacaaacattatctcgacgaaatcatagagcaaatttcggaattcagtaagagagtcatcctagctgatgccaatctggacaaagtattaagcgcatacaacaagcacagggataaacccatacgtgagcaggcggaaaatattatccatttgtttactcttaccaacctcggcgctccagccgcattcaagtattttgacacaacgatagatcgcaaacagtacagatctaccaaggaggtgctagacgcgacactgattcaccaatccatcacgggattatatgaaactcggatagatttgtcacagcttgggggtgacggatcccccaagaagaagaggaaagtctcgagcgactacaaagaccatgacggtgattataaagatcatgacatcgattacaaggatgacgatgacaaggctgcaggatgaccggtcatcatcaccatcaccattgagtttaaacccgctgatcagcctcgactgtgccttctagttgccagccatctgttgtttgcccctcccccgtgccttccttgaccctggaaggtgccactcccactgtcctttcctaataaaatgaggaaattgcatcgcattgtctgagtaggtgtcattctattctggggggtggggtggggcaggacagcaagggggaggattgggaagacaatagcaggcatgctggggatgcggtgggctctatggcttctgaggcggaaagaaccagctggggctcgataccgtcgacctctagctagagcttggcgtaatcatggtcatagctgtttcctgtgtgaaattgttatccgctcacaattccacacaacatacgagccggaagcataaagtgtaaagcctagggtgcctaatgagtgagctaactcacattaattgcgttgcgctcactgcccgctttccagtcgggaaacctgtcgtgccagctgcattaatgaatcggccaacgcgcggggagaggcggtttgcgtattgggcgctcttccgcttcctcgctcactgactcgctgcgctcggtcgttcggctgcggcgagcggtatcagctcactcaaaggcggtaatacggttatccacagaatcaggggataacgcaggaaagaacatgtgagcaaaaggccagcaaaaggccaggaaccgtaaaaaggccgcgttgctggcgtttttccataggctccgcccccctgacgagcatcacaaaaatcgacgctcaagtcagaggtggcgaaacccgacaggactataaagataccaggcgtttccccctggaagctccctcgtgcgctctcctgttccgaccctgccgcttaccggatacctgtccgcctttctcccttcgggaagcgtggcgctttctcaatgctcacgctgtaggtatctcagttcggtgtaggtcgttcgctccaagctgggctgtgtgcacgaaccccccgttcagcccgaccgctgcgccttatccggtaactatcgtcttgagtccaacccggtaagacacgacttatcgccactggcagcagccactggtaacaggattagcagagcgaggtatgtaggcggtgctacagagttcttgaagtggtggcctaactacggctacactagaaggacagtatttggtatctgcgctctgctgaagccagttaccttcggaaaaagagttggtagctcttgatccggcaaacaaaccaccgctggtagcggtggtttttttgtttgcaagcagcagattacgcgcagaaaaaaaggatctcaagaagatcctttgatcttttctacggggtctgacgctcagtggaacgaaaactcacgttaagggattttggtcatgagattatcaaaaaggatcttcacctagatccttttaaattaaaaatgaagttttaaatcaatctaaagtatatatgagtaaacttggtctgacagttaccaatgcttaatcagtgaggcacctatctcagcgatctgtctatttcgttcatccatagttgcctgactccccgtcgtgtagataactacgatacgggagggcttaccatctggccccagtgctgcaatgataccgcgagacccacgctcaccggctccagatttatcagcaataaaccagccagccggaagggccgagcgcagaagtggtcctgcaactttatccgcctccatccagtctattaattgttgccgggaagctagagtaagtagttcgccagttaatagtttgcgcaacgttgttgccattgctacaggcatcgtggtgtcacgctcgtcgtttggtatggcttcattcagctccggttcccaacgatcaaggcgagttacatgatcccccatgttgtgcaaaaaagcggttagctccttcggtcctccgatcgttgtcagaagtaagttggccgcagtgttatcactcatggttatggcagcactgcataattctcttactgtcatgccatccgtaagatgcttttctgtgactggtgagtactcaaccaagtcattctgagaatagtgtatgcggcgaccgagttgctcttgcccggcgtcaatacgggataataccgcgccacatagcagaactttaaaagtgctcatcattggaaaacgttcttcggggcgaaaactctcaaggatcttaccgctgttgagatccagttcgatgtaacccactcgtgcacccaactgatcttcagcatcttttactttcaccagcgtttctgggtgagcaaaaacaggaaggcaaaatgccgcaaaaaagggaataagggcgacacggaaatgttgaatactcatactcttcctttttcaatattattgaagcatttatcagggttattgtctcatgagcggatacatatttgaatgtatttagaaaaataaacaaataggggttccgcgcacatttccccgaaaagtgccacctgacgtcgacggatcgggagatcgatctcccgatcccctagggtcgactctcagtacaatctgctctgatgccgcatagttaagccagtatctgctccctgcttgtgtgttggaggtcgctgagtagtgcgcgagcaaaatttaagctacaacaaggcaaggcttgaccgacaattgcatgaagaatctgcttagggttaggcgttttgcgctgcttcgcgatgtacgggccagatatacgcgttgacattgattattgactagttattaatagtaatcaattacggggtcattagttcatagcccatatatggagttccgcgttacataacttacggtaaatggcccgcctggctgaccgcccaacgacccccgcccattgacgtcaataatgacgtatgttcccatagtaacgccaatagggactttccattgacgtcaatgggtggactatttacggtaaactgcccacttggcagtacatcaagtgtatc

SEQ ID NO: 215 - RNA, 17 nt, Artificial Sequence
  Synthetic
gcggggaguccgcguaa

SEQ ID NO: 216 - RNA, 17 nt, Artificial Sequence
  Synthetic
gccaacaaccuuacaua

SEQ ID NO: 217 - RNA, 17 nt, Artificial Sequence
  Synthetic
gucuccaugcgacgugc

SEQ ID NO: 218 - RNA, 17 nt, Artificial Sequence
  Synthetic
ggggaguccgcguaaag

SEQ ID NO: 219 - RNA, 17 nt, Artificial Sequence
  Synthetic
gauagccaggacaaguu

SEQ ID NO: 220 - RNA, 20 nt, Artificial Sequence
  Synthetic
gaauauggugacccacaaaa

SEQ ID NO: 221 - RNA, 20 nt, Artificial Sequence
  Synthetic
gaaacacaccgccuguaaca

SEQ ID NO: 222 - RNA, 20 nt, Artificial Sequence
  Synthetic
  misc_feature (16)..(16): n is a, c, g, or u
gcgagcgaaacaagcngcua

SEQ ID NO: 223 - RNA, 20 nt, Artificial Sequence
  Synthetic
gguuaaaggucuuuguauua

SEQ ID NO: 224 - RNA, 20 nt, Artificial Sequence
  Synthetic
gguggucuggaaagaauccc

SEQ ID NO: 225 - RNA, 20 nt, Artificial Sequence
  Synthetic
guuccgcaguauggaucggc

SEQ ID NO: 226 - RNA, 20 nt, Artificial Sequence
  Synthetic
guggucuccaugcgacgugc

SEQ ID NO: 227 - RNA, 20 nt, Artificial Sequence
  Synthetic
ggcaaaggccuggccguugc

SEQ ID NO: 228 - RNA, 20 nt, Artificial Sequence
  Synthetic
ggcggggaguccgcguaaag

SEQ ID NO: 229 - RNA, 20 nt, Artificial Sequence
  Synthetic
gcuuucggaaaauaccuaug

SEQ ID NO: 230 - RNA, 20 nt, Artificial Sequence
  Synthetic
  misc_feature (2)..(2): n is a, c, g, or u
gngauugagaucuucgucug

SEQ ID NO: 231 - RNA, 20 nt, Artificial Sequence
  Synthetic
gugguaccccuagaaaauug

SEQ ID NO: 232 - RNA, 20 nt, Artificial Sequence
  Synthetic
gggugguaccccuagaaaau

SEQ ID NO: 233 - RNA, 20 nt, Artificial Sequence
  Synthetic
  misc_feature (15)..(15): n is a, c, g, or u
guuucgcucgcagcnggucu

SEQ ID NO: 234 - RNA, 20 nt, Artificial Sequence
  Synthetic
gaugugugucccuuagaggu

SEQ ID NO: 235 - RNA, 20 nt, Artificial Sequence
  Synthetic
guagagggcugaagcggugu

SEQ ID NO: 236 - RNA, 17 nt, Artificial Sequence
  Synthetic
acacaccgccuguaaca

SEQ ID NO: 237 - RNA, 17 nt, Artificial Sequence
  Synthetic
caguauggaucggcaga

SEQ ID NO: 238 - RNA, 17 nt, Artificial Sequence
  Synthetic
cacgagaagggguccua

SEQ ID NO: 239 - RNA, 17 nt, Artificial Sequence
  Synthetic
ccgcuucagcccucuac

SEQ ID NO: 240 - RNA, 17 nt, Artificial Sequence
  Synthetic
ccgcaguauggaucggc

SEQ ID NO: 241 - RNA, 17 nt, Artificial Sequence
  Synthetic
aaaggccuggccguugc

SEQ ID NO: 242 - RNA, 17 nt, Artificial Sequence
  Synthetic
uucgucugcgaggcgag

SEQ ID NO: 243 - RNA, 17 nt, Artificial Sequence
  Synthetic
aagcacuguuggauccg

SEQ ID NO: 244 - RNA, 17 nt, Artificial Sequence
  Synthetic
auugagaucuucgucug

SEQ ID NO: 245 - RNA, 17 nt, Artificial Sequence
  Synthetic
accucugcacgucgcau

SEQ ID NO: 246 - RNA, 17 nt, Artificial Sequence
  Synthetic
  misc_feature (14)..(14): n is a, c, g, or u
uucugcgacgcggngau

SEQ ID NO: 247 - RNA, 17 nt, Artificial Sequence
  Synthetic
augccccuucucgccgu

SEQ ID NO: 248 - RNA, 17 nt, Artificial Sequence
  Synthetic
uucuaaggcaucucggu

SEQ ID NO: 249 - RNA, 20 nt, Artificial Sequence
  Synthetic
caggcggggaguccgcguaa

SEQ ID NO: 250 - RNA, 20 nt, Artificial Sequence
  Synthetic
ugcacuaguaaacugagcca

SEQ ID NO: 251 - RNA, 20 nt, Artificial Sequence
  Synthetic
uugaccggggcgaaagucca

SEQ ID NO: 252 - RNA, 20 nt, Artificial Sequence
  Synthetic
accuccgauugguggaagca

SEQ ID NO: 253 - RNA, 20 nt, Artificial Sequence
  Synthetic
agugcacacgggccggcaga

SEQ ID NO: 254 - RNA, 20 nt, Artificial Sequence
  Synthetic
ccgcaguauggaucggcaga

SEQ ID NO: 255 - RNA, 20 nt, Artificial Sequence
  Synthetic
cuugccaacaaccuuacaua

SEQ ID NO: 256 - RNA, 20 nt, Artificial Sequence
  Synthetic
uaacacgagaagggguccua

SEQ ID NO: 257 - RNA, 20 nt, Artificial Sequence
  Synthetic
cgguaaaguuucccaccuua

SEQ ID NO: 258 - RNA, 20 nt, Artificial Sequence
  Synthetic
acaccgcuucagcccucuac

SEQ ID NO: 259 - RNA, 20 nt, Artificial Sequence
  Synthetic
uuuuaugcacaauauguucc

SEQ ID NO: 260 - RNA, 20 nt, Artificial Sequence
  Synthetic
  misc_feature (15)..(16): n is a, c, g, or u
cgucggccggaacgnnaggc

SEQ ID NO: 261 - RNA, 20 nt, Artificial Sequence
  Synthetic
ccaccaagcacuguuggauc

SEQ ID NO: 262 - RNA, 20 nt, Artificial Sequence
  Synthetic
aggcaggaauucuauauaag

SEQ ID NO: 263 - RNA, 20 nt, Artificial Sequence
  Synthetic
aucuucgucugcgaggcgag

SEQ ID NO: 264 - RNA, 20 nt, Artificial Sequence
  Synthetic
ugagaucuucgucugcgagg

SEQ ID NO: 265 - RNA, 20 nt, Artificial Sequence
  Synthetic
ugugugucccuuagaggugg

SEQ ID NO: 266 - RNA, 20 nt, Artificial Sequence
  Synthetic
agaaaggccuuguaaguugg

SEQ ID NO: 267 - RNA, 20 nt, Artificial Sequence
  Synthetic
uacaggcauacaagggcaug

SEQ ID NO: 268 - RNA, 20 nt, Artificial Sequence
  Synthetic
ucgagaagauugaugaugug

SEQ ID NO: 269 - RNA, 20 nt, Artificial Sequence
  Synthetic
uucaccucugcacgucgcau

SEQ ID NO: 270 - RNA, 20 nt, Artificial Sequence
  Synthetic
ccccggucaacgaccuggau

SEQ ID NO: 271 - RNA, 20 nt, Artificial Sequence
  Synthetic
  misc_feature (17)..(17): n is a, c, g, or u
aucuucugcgacgcggngau

SEQ ID NO: 272 - RNA, 20 nt, Artificial Sequence
  Synthetic
agggaaacauagagguuccu

SEQ ID NO: 273 - RNA, 20 nt, Artificial Sequence
  Synthetic
aauacuaacauugggaagcu

SEQ ID NO: 274 - RNA, 20 nt, Artificial Sequence
  Synthetic
cccaugccccuucucgccgu

SEQ ID NO: 275 - RNA, 20 nt, Artificial Sequence
  Synthetic
ugauucuaaggcaucucggu

SEQ ID NO: 276 - RNA, 17 nt, Artificial Sequence
  Synthetic
gaaugucaggaaaagaa

SEQ ID NO: 277 - RNA, 17 nt, Artificial Sequence
  Synthetic
ggacaaguuggaggaca

SEQ ID NO: 278 - RNA, 17 nt, Artificial Sequence
  Synthetic
gguuugguacagcagca

SEQ ID NO: 279 - RNA, 17 nt, Artificial Sequence
  Synthetic
gcacacgggccggcaga

SEQ ID NO: 280 - RNA, 17 nt, Artificial Sequence
  Synthetic
guauuuaaggacuggga

SEQ ID NO: 281 - RNA, 17 nt, Artificial Sequence
  Synthetic
gcauagcagcaggauga

SEQ ID NO: 282 - RNA, 17 nt, Artificial Sequence
  Synthetic
ggcaggaauucuauaua

SEQ ID NO: 283 - RNA, 17 nt, Artificial Sequence
  Synthetic
  misc_feature (6)..(6): n is a, c, g, or u
guucanguauuguuuac

SEQ ID NO: 284 - RNA, 17 nt, Artificial Sequence
  Synthetic
ggucuggaaagaauccc

SEQ ID NO: 285 - RNA, 17 nt, Artificial Sequence
  Synthetic
gcacaaaauagcuugcc

SEQ ID NO: 286 - RNA, 17 nt, Artificial Sequence
  Synthetic
  misc_feature (10)..(10): n is a, c, g, or u
gcggagaagngggcggc

SEQ ID NO: 287 - RNA, 17 nt, Artificial Sequence
  Synthetic
ggaaggagguguacuuc

SEQ ID NO: 288 - RNA, 17 nt, Artificial Sequence
  Synthetic
gaucuucgucugcgagg

SEQ ID NO: 289 - RNA, 17 nt, Artificial Sequence
  Synthetic
gacugggaggagucggg

SEQ ID NO: 290 - RNA, 17 nt, Artificial Sequence
  Synthetic
gcuauuuugugcugggg

SEQ ID NO: 291 - RNA, 17 nt, Artificial Sequence
  Synthetic
gugucccuuagaggugg

SEQ ID NO: 292 - RNA, 17 nt, Artificial Sequence
  Synthetic
ggagguggaucuggugg

SEQ ID NO: 293 - RNA, 17 nt, Artificial Sequence
  Synthetic
gucagaaggcaaaaaug

SEQ ID NO: 294 - RNA, 17 nt, Artificial Sequence
  Synthetic
guaccccuagaaaauug

SEQ ID NO: 295 - RNA, 17 nt, Artificial Sequence
  Synthetic
gccccuucucgccguug

SEQ ID NO: 296 - RNA, 17 nt, Artificial Sequence
  Synthetic
  misc_feature (8)..(8): n is a, c, g, or u
gacccugnuaugaacau

SEQ ID NO: 297 - RNA, 17 nt, Artificial Sequence
  Synthetic
gagcaggauaaccacau

SEQ ID NO: 298 - RNA, 17 nt, Artificial Sequence
  Synthetic
gaaacauagagguuccu

SEQ ID NO: 299 - RNA, 17 nt, Artificial Sequence
  Synthetic
  misc_feature (15)..(15): n is a, c, g, or u
ggaagagaaacuguncu

SEQ ID NO: 300 - RNA, 17 nt, Artificial Sequence
  Synthetic
ggagucgggggaggagu

SEQ ID NO: 301 - RNA, 17 nt, Artificial Sequence
  Synthetic
  misc_feature (8)..(8): n is a, c, g, or u
guggucunuaagcaggu

SEQ ID NO: 302 - RNA, 17 nt, Artificial Sequence
  Synthetic
gugugucccuuagaggu

SEQ ID NO: 303 - RNA, 17 nt, Artificial Sequence
  Synthetic
gaauuuggagcuucugu

SEQ ID NO: 304 - RNA, 17 nt, Artificial Sequence
  Synthetic
gagggcugaagcggugu

SEQ ID NO: 305 - RNA, 17 nt, Artificial Sequence
  Synthetic
gcuugguggaacugugu

SEQ ID NO: 306 - RNA, 17 nt, Artificial Sequence
  Synthetic
gagguugguaagugauu

SEQ ID NO: 307 - RNA, 17 nt, Artificial Sequence
  Synthetic
guggaugugugucccuu

SEQ ID NO: 308 - RNA, 20 nt, Artificial Sequence
  Synthetic
ggcagagccccaagcgacca

SEQ ID NO: 309 - RNA, 20 nt, Artificial Sequence
  Synthetic
gaagguuugguacagcagca

SEQ ID NO: 310 - RNA, 20 nt, Artificial Sequence
  Synthetic
gacugggaggagucggggga

SEQ ID NO: 311 - RNA, 20 nt, Artificial Sequence
  Synthetic
gaggcauagcagcaggauga

SEQ ID NO: 312 - RNA, 20 nt, Artificial Sequence
  Synthetic
gaaggcaggaauucuauaua

SEQ ID NO: 313 - RNA, 20 nt, Artificial Sequence
  Synthetic
ggccaauggcaaacaaggua

SEQ ID NO: 314 - RNA, 20 nt, Artificial Sequence
  Synthetic
  misc_feature (9)..(9): n is a, c, g, or u
gguauuaanccuuacuaucc

SEQ ID NO: 315 - RNA, 20 nt, Artificial Sequence
  Synthetic
gagaagauugaugaugugag

SEQ ID NO: 316 - RNA, 20 nt, Artificial Sequence
  Synthetic
gggagcaccucucucaacgg

SEQ ID NO: 317 - RNA, 20 nt, Artificial Sequence
  Synthetic
gcaggagguggaucuggugg

SEQ ID NO: 318 - RNA, 20 nt, Artificial Sequence
  Synthetic
gaagucagaaggcaaaaaug

SEQ ID NO: 319 - RNA, 20 nt, Artificial Sequence
  Synthetic
ggaacaagagcuacagcaug

SEQ ID NO: 320 - RNA, 20 nt, Artificial Sequence
  Synthetic
gacuguguauuuaaggacug

SEQ ID NO: 321 - RNA, 20 nt, Artificial Sequence
  Synthetic
  misc_feature (12)..(12): n is a, c, g, or u
gucuagacucunugguauug

SEQ ID NO: 322 - RNA, 20 nt, Artificial Sequence
  Synthetic
  misc_feature (11)..(11): n is a, c, g, or u
ggggacccugnuaugaacau

SEQ ID NO: 323 - RNA, 20 nt, Artificial Sequence
  Synthetic
ggguucuguguuucugaacu

SEQ ID NO: 324 - RNA, 20 nt, Artificial Sequence
  Synthetic
gccaaaucugugcagcaucu

SEQ ID NO: 325 - RNA, 20 nt, Artificial Sequence
  Synthetic
ggaggagucgggggaggagu

SEQ ID NO: 326 - RNA, 20 nt, Artificial Sequence
  Synthetic
  misc_feature (17)..(17): n is a, c, g, or u
ggauugaaaacagguanagu

SEQ ID NO: 327 - RNA, 17 nt, Artificial Sequence
  Synthetic
aagucagaaggcaaaaa

SEQ ID NO: 328 - RNA, 17 nt, Artificial Sequence
  Synthetic
uauggugacccacaaaa

SEQ ID NO: 329 - RNA, 17 nt, Artificial Sequence
  Synthetic
  misc_feature (9)..(9): n is a, c, g, or u
acucacuanaaaugaaa

SEQ ID NO: 330 - RNA, 17 nt, Artificial Sequence
  Synthetic
cuacuguuguuagacaa

SEQ ID NO: 331 - RNA, 17 nt, Artificial Sequence
  Synthetic
ccuagcagccaugggaa

SEQ ID NO: 332 - RNA, 17 nt, Artificial Sequence
  Synthetic
ccauauuccugggaaca

SEQ ID NO: 333 - RNA, 17 nt, Artificial Sequence
  Synthetic
uugagagaaguccacca

SEQ ID NO: 334 - RNA, 17 nt, Artificial Sequence
  Synthetic
agagccccaagcgacca

SEQ ID NO: 335 - RNA, 17 nt, Artificial Sequence
  Synthetic
acuaguaaacugagcca

SEQ ID NO: 336 - RNA, 17 nt, Artificial Sequence
  Synthetic
accggggcgaaagucca

SEQ ID NO: 337 - RNA, 17 nt, Artificial Sequence
  Synthetic
uccgauugguggaagca

SEQ ID NO: 338 - RNA, 17 nt, Artificial Sequence
  Synthetic
uagagguuccuugagca

SEQ ID NO: 339 - RNA, 17 nt, Artificial Sequence
  Synthetic
acaggcauacaagggca

SEQ ID NO: 340 - RNA, 17 nt, Artificial Sequence
  Synthetic
aagaaccaacaagaaga

SEQ ID NO: 341 - RNA, 17 nt, Artificial Sequence
  Synthetic
  misc_feature (11)..(11): n is a, c, g, or u
aaaacagguanaguaga

SEQ ID NO: 342 - RNA, 17 nt, Artificial Sequence
  Synthetic
ugggaggagucggggga

SEQ ID NO: 343 - RNA, 17 nt, Artificial Sequence
  Synthetic
  misc_feature (2)..(2): n is a, c, g, or u
cnugccuuacauuugga

SEQ ID NO: 344 - RNA, 17 nt, Artificial Sequence
  Synthetic
  misc_feature (13)..(13): n is a, c, g, or u
agcgaaacaagcngcua

SEQ ID NO: 345 - RNA, 17 nt, Artificial Sequence
  Synthetic
caauggcaaacaaggua

SEQ ID NO: 346 - RNA, 17 nt, Artificial Sequence
  Synthetic
uaaaggucuuuguauua

SEQ ID NO: 347 - RNA, 17 nt, Artificial Sequence
  Synthetic
uaaaguuucccaccuua

SEQ ID NO: 348 - RNA, 17 nt, Artificial Sequence
  Synthetic
aaauugcacuaguaaac

SEQ ID NO: 349 - RNA, 17 nt, Artificial Sequence
  Synthetic
uuccgagaaaggacaac

SEQ ID NO: 350 - RNA, 17 nt, Artificial Sequence
  Synthetic
  misc_feature (2)..(2): n is a, c, g, or u
unagaaugcccugugcc

SEQ ID NO: 351 - RNA, 17 nt, Artificial Sequence
  Synthetic
  misc_feature (6)..(6): n is a, c, g, or u
auuaanccuuacuaucc

SEQ ID NO: 352 - RNA, 17 nt, Artificial Sequence
  Synthetic
auccuaucaacacuucc

SEQ ID NO: 353 - RNA, 17 nt, Artificial Sequence
  Synthetic
uaugcacaauauguucc

SEQ ID NO: 354 - RNA, 17 nt, Artificial Sequence
  Synthetic
  misc_feature (12)..(13): n is a, c, g, or u
cggccggaacgnnaggc

SEQ ID NO: 355 - RNA, 17 nt, Artificial Sequence
  Synthetic
acaaaagaugauuaggc

SEQ ID NO: 356 - RNA, 17 nt, Artificial Sequence
  Synthetic
agccaagagaaacgggc

SEQ ID NO: 357 - RNA, 17 nt, Artificial Sequence
  Synthetic
uccugcuuccaccaauc

SEQ ID NO: 358 - RNA, 17 nt, Artificial Sequence
  Synthetic
ccaagcacuguuggauc

SEQ ID NO: 359 - RNA, 17 nt, Artificial Sequence
  Synthetic
ugagagaggcaauaguc

SEQ ID NO: 360 - RNA, 17 nt, Artificial Sequence
  Synthetic
aguuggauccacuauuc

SEQ ID NO: 361 - RNA, 17 nt, Artificial Sequence
  Synthetic
caggaauucuauauaag

SEQ ID NO: 362 - RNA, 17 nt, Artificial Sequence
  Synthetic
aagauugaugaugugag

SEQ ID NO: 363 - RNA, 17 nt, Artificial Sequence
  Synthetic
cccuucucgccguugag

SEQ ID NO: 364 - RNA, 17 nt, Artificial Sequence
  Synthetic
  misc_feature (14)..(14): n is a, c, g, or u
ucuccuuucauuunuag

SEQ ID NO: 365 - RNA, 17 nt, Artificial Sequence
  Synthetic
agccccaagcgaccacg

SEQ ID NO: 366 - RNA, 17 nt, Artificial Sequence
  Synthetic
agcaccucucucaacgg

SEQ ID NO: 367 - RNA, 17 nt, Artificial Sequence
  Synthetic
ugagaaggcacaggcgg

SEQ ID NO: 368 - RNA, 17 nt, Artificial Sequence
  Synthetic
aaggccuuguaaguugg

SEQ ID NO: 369 - RNA, 17 nt, Artificial Sequence
  Synthetic
acaagagcuacagcaug

SEQ ID NO: 370 - RNA, 17 nt, Artificial Sequence
  Synthetic
aggcauacaagggcaug

SEQ ID NO: 371 - RNA, 17 nt, Artificial Sequence
  Synthetic
cgagaagauugaugaug

SEQ ID NO: 372 - RNA, 17 nt, Artificial Sequence
  Synthetic
uucggaaaauaccuaug

SEQ ID NO: 373 - RNA, 17 nt, Artificial Sequence
  Synthetic
uguguauuuaaggacug

SEQ ID NO: 374 - RNA, 17 nt, Artificial Sequence
  Synthetic
acaaaauagcuugccug

SEQ ID NO: 375 - RNA, 17 nt, Artificial Sequence
  Synthetic
  misc_feature (13)..(13): n is a, c, g, or u
ccgcuccagaccngcug

SEQ ID NO: 376 - RNA, 17 nt, Artificial Sequence
  Synthetic
caaacaagguaggagug

SEQ ID NO: 377 - RNA, 17 nt, Artificial Sequence
  Synthetic
agaagauugaugaugug

SEQ ID NO: 378 - RNA, 17 nt, Artificial Sequence
  Synthetic
  misc_feature (13)..(13): n is a, c, g, or u
uauggguuauaunauug

SEQ ID NO: 379 - RNA, 17 nt, Artificial Sequence
  Synthetic
  misc_feature (9)..(9): n is a, c, g, or u
uagacucunugguauug

SEQ ID NO: 380 - RNA, 17 nt, Artificial Sequence
  Synthetic
  misc_feature (17)..(17): n is a, c, g, or u
aauccucacaauaccan

SEQ ID NO: 381 - RNA, 17 nt, Artificial Sequence
  Synthetic
  misc_feature (17)..(17): n is a, c, g, or u
uagaggauccugcagcn

SEQ ID NO: 382 - RNA, 17 nt, Artificial Sequence
  Synthetic
ugguaccccuagaaaau

SEQ ID NO: 383 - RNA, 17 nt, Artificial Sequence
  Synthetic
cagcaggagggaaacau

SEQ ID NO: 384 - RNA, 17 nt, Artificial Sequence
  Synthetic
auugggaagcuggagau

SEQ ID NO: 385 - RNA, 17 nt, Artificial Sequence
  Synthetic
cggucaacgaccuggau

SEQ ID NO: 386 - RNA, 17 nt, Artificial Sequence
  Synthetic
uucuguguuucugaacu

SEQ ID NO: 387 - RNA, 17 nt, Artificial Sequence
  Synthetic
acuaacauugggaagcu

SEQ ID NO: 388 - RNA, 17 nt, Artificial Sequence
  Synthetic
aaaucugugcagcaucu

SEQ ID NO: 389 - RNA, 17 nt, Artificial Sequence
  Synthetic
  misc_feature (12)..(12): n is a, c, g, or u
ucgcucgcagcnggucu

SEQ ID NO: 390 - RNA, 17 nt, Artificial Sequence
  Synthetic
uuguagauccuggaagu

SEQ ID NO: 391 - RNA, 17 nt, Artificial Sequence
  Synthetic
  misc_feature (14)..(14): n is a, c, g, or u
uugaaaacagguanagu

SEQ ID NO: 392 - RNA, 17 nt, Artificial Sequence
  Synthetic
cgguggccuucuggggu

SEQ ID NO: 393 - RNA, 17 nt, Artificial Sequence
  Synthetic
cacccaaggcacagcuu

SEQ ID NO: 394 - RNA, 17 nt, Artificial Sequence
  Synthetic
  misc_feature (1)..(1): n is a, c, g, or u
ncaggguccccagucuu

SEQ ID NO: 395 - RNA, 17 nt, Artificial Sequence
  Synthetic
acccuuauaaagaauuu

SEQ ID NO: 396 - RNA, 17 nt, Artificial Sequence
  Synthetic
ugggugggcaauaauuu

SEQ ID NO: 397 - RNA, 17 nt, Artificial Sequence
  Synthetic
aguauuuggugucuuuu

SEQ ID NO: 398 - RNA, 20 nt, Artificial Sequence
  Synthetic
aagaagucagaaggcaaaaa

SEQ ID NO: 399 - RNA, 20 nt, Artificial Sequence
  Synthetic
  misc_feature (12)..(12): n is a, c, g, or u
cccacucacuanaaaugaaa

SEQ ID NO: 400 - RNA, 20 nt, Artificial Sequence
  Synthetic
agacuacuguuguuagacaa

SEQ ID NO: 401 - RNA, 20 nt, Artificial Sequence
  Synthetic
agugaaugucaggaaaagaa

SEQ ID NO: 402 - RNA, 20 nt, Artificial Sequence
  Synthetic
  misc_feature (3)..(3): n is a, c, g, or u
canccuagcagccaugggaa

SEQ ID NO: 403 - RNA, 20 nt, Artificial Sequence
  Synthetic
ucaccauauuccugggaaca

SEQ ID NO: 404 - RNA, 20 nt, Artificial Sequence
  Synthetic
ccaggacaaguuggaggaca

SEQ ID NO: 405 - RNA, 20 nt, Artificial Sequence
  Synthetic
aaauugagagaaguccacca

SEQ ID NO: 406 - RNA, 20 nt, Artificial Sequence
  Synthetic
acauagagguuccuugagca

SEQ ID NO: 407 - RNA, 20 nt, Artificial Sequence
  Synthetic
aauacaggcauacaagggca

SEQ ID NO: 408 - RNA, 20 nt, Artificial Sequence
  Synthetic
cagaagaaccaacaagaaga

SEQ ID NO: 409 - RNA, 20 nt, Artificial Sequence
  Synthetic
  misc_feature (14)..(14): n is a, c, g, or u
uugaaaacagguanaguaga

SEQ ID NO: 410 - RNA, 20 nt, Artificial Sequence
  Synthetic
uguguauuuaaggacuggga

SEQ ID NO: 411 - RNA, 20 nt, Artificial Sequence
  Synthetic
  misc_feature (5)..(5): n is a, c, g, or u
uuucnugccuuacauuugga

SEQ ID NO: 412 - RNA, 20 nt, Artificial Sequence
  Synthetic
aacaaauugcacuaguaaac

SEQ ID NO: 413 - RNA, 20 nt, Artificial Sequence
  Synthetic
uacuuccgagaaaggacaac

SEQ ID NO: 414 - RNA, 20 nt, Artificial Sequence
  Synthetic
  misc_feature (9)..(9): n is a, c, g, or u
aagguucanguauuguuuac

SEQ ID NO: 415 - RNA, 20 nt, Artificial Sequence
  Synthetic
  misc_feature (5)..(5): n is a, c, g, or u
uugunagaaugcccugugcc

SEQ ID NO: 416 - RNA, 20 nt, Artificial Sequence
  Synthetic
ccagcacaaaauagcuugcc

SEQ ID NO: 417 - RNA, 20 nt, Artificial Sequence
  Synthetic
ccuauccuaucaacacuucc

SEQ ID NO: 418 - RNA, 20 nt, Artificial Sequence
  Synthetic
ugaacaaaagaugauuaggc

SEQ ID NO: 419 - RNA, 20 nt, Artificial Sequence
  Synthetic
  misc_feature (1)..(1): n is a, c, g, or u
  misc_feature (13)..(13): n is a, c, g, or u
naggcggagaagngggcggc

SEQ ID NO: 420 - RNA, 20 nt, Artificial Sequence
  Synthetic
cugagccaagagaaacgggc

SEQ ID NO: 421 - RNA, 20 nt, Artificial Sequence
  Synthetic
accuccugcuuccaccaauc

SEQ ID NO: 422 - RNA, 20 nt, Artificial Sequence
  Synthetic
augugagagaggcaauaguc

SEQ ID NO: 423 - RNA, 20 nt, Artificial Sequence
  Synthetic
accaguuggauccacuauuc

SEQ ID NO: 424 - RNA, 20 nt, Artificial Sequence
  Synthetic
augggaaggagguguacuuc

SEQ ID NO: 425 - RNA, 20 nt, Artificial Sequence
  Synthetic
ugccccuucucgccguugag

SEQ ID NO: 426 - RNA, 20 nt, Artificial Sequence
  Synthetic
  misc_feature (17)..(17): n is a, c, g, or u
ucgucuccuuucauuunuag

SEQ ID NO: 427 - RNA, 20 nt, Artificial Sequence
  Synthetic
cagagccccaagcgaccacg

SEQ ID NO: 428 - RNA, 20 nt, Artificial Sequence
  Synthetic
accaagcacuguuggauccg

SEQ ID NO: 429 - RNA, 20 nt, Artificial Sequence
  Synthetic
agaugagaaggcacaggcgg

SEQ ID NO: 430 - RNA, 20 nt, Artificial Sequence
  Synthetic
aaggacugggaggagucggg

SEQ ID NO: 431 - RNA, 20 nt, Artificial Sequence
  Synthetic
caagcuauuuugugcugggg

SEQ ID NO: 432 - RNA, 20 nt, Artificial Sequence
  Synthetic
cuucgagaagauugaugaug

SEQ ID NO: 433 - RNA, 20 nt, Artificial Sequence
  Synthetic
agcacaaaauagcuugccug

SEQ ID NO: 434 - RNA, 20 nt, Artificial Sequence
  Synthetic
  misc_feature (1)..(1): n is a, c, g, or u
  misc_feature (16)..(16): n is a, c, g, or u
nguccgcuccagaccngcug

SEQ ID NO: 435 - RNA, 20 nt, Artificial Sequence
  Synthetic
uggcaaacaagguaggagug

SEQ ID NO: 436 - RNA, 20 nt, Artificial Sequence
  Synthetic
  misc_feature (16)..(16): n is a, c, g, or u
cuuuauggguuauaunauug

SEQ ID NO: 437 - RNA, 20 nt, Artificial Sequence
  Synthetic
caugccccuucucgccguug

SEQ ID NO: 438 - RNA, 20 nt, Artificial Sequence
  Synthetic
  misc_feature (20)..(20): n is a, c, g, or u
aaaaauccucacaauaccan

SEQ ID NO: 439 - RNA, 20 nt, Artificial Sequence
  Synthetic
  misc_feature (20)..(20): n is a, c, g, or u
auuuagaggauccugcagcn

SEQ ID NO: 440 - RNA, 20 nt, Artificial Sequence
  Synthetic
cagcagcaggagggaaacau

SEQ ID NO: 441 - RNA, 20 nt, Artificial Sequence
  Synthetic
ugagagcaggauaaccacau

SEQ ID NO: 442 - RNA, 20 nt, Artificial Sequence
  Synthetic
aacauugggaagcuggagau

SEQ ID NO: 443 - RNA, 20 nt, Artificial Sequence
  Synthetic
  misc_feature (18)..(18): n is a, c, g, or u
uuuggaagagaaacuguncu

SEQ ID NO: 444 - RNA, 20 nt, Artificial Sequence
  Synthetic
ugguuguagauccuggaagu

SEQ ID NO: 445 - RNA, 20 nt, Artificial Sequence
  Synthetic
  misc_feature (11)..(11): n is a, c, g, or u
uugguggucunuaagcaggu

SEQ ID NO: 446 - RNA, 20 nt, Artificial Sequence
  Synthetic
acacgguggccuucuggggu

SEQ ID NO: 447 - RNA, 20 nt, Artificial Sequence
  Synthetic
aaagaauuuggagcuucugu

SEQ ID NO: 448 - RNA, 20 nt, Artificial Sequence
  Synthetic
agugcuugguggaacugugu

SEQ ID NO: 449 - RNA, 20 nt, Artificial Sequence
  Synthetic
caggagguugguaagugauu

SEQ ID NO: 450 - RNA, 20 nt, Artificial Sequence
  Synthetic
ccuguggaugugugucccuu

SEQ ID NO: 451 - RNA, 20 nt, Artificial Sequence
  Synthetic
agccacccaaggcacagcuu

SEQ ID NO: 452 - RNA, 20 nt, Artificial Sequence
  Synthetic
  misc_feature (4)..(4): n is a, c, g, or u
auancaggguccccagucuu

SEQ ID NO: 453 - RNA, 20 nt, Artificial Sequence
  Synthetic
aacgauagccaggacaaguu

SEQ ID NO: 454 - RNA, 20 nt, Artificial Sequence
  Synthetic
uugacccuuauaaagaauuu

SEQ ID NO: 455 - RNA, 20 nt, Artificial Sequence
  Synthetic
uccugggugggcaauaauuu

SEQ ID NO: 456 - RNA, 20 nt, Artificial Sequence
  Synthetic
uugaguauuuggugucuuuu

SEQ ID NO: 457 - RNA, 17 nt, Artificial Sequence
  Synthetic
  misc_feature (6)..(6): n is a, c, g, or u
aagaunugauacaaaaa

SEQ ID NO: 458 - RNA, 17 nt, Artificial Sequence
  Synthetic
aaccacauugaguaaaa

SEQ ID NO: 459 - RNA, 17 nt, Artificial Sequence
  Synthetic
agugggacaugaacaaa

SEQ ID NO: 460 - RNA, 17 nt, Artificial Sequence
  Synthetic
gacgggacguagacaaa

SEQ ID NO: 461 - RNA, 17 nt, Artificial Sequence
  Synthetic
gggcugcaaagcccaaa

SEQ ID NO: 462 - RNA, 17 nt, Artificial Sequence
  Synthetic
  misc_feature (3)..(3): n is a, c, g, or u
cgnauccacacuccaaa

SEQ ID NO: 463 - RNA, 17 nt, Artificial Sequence
  Synthetic
aacugagccaagagaaa

SEQ ID NO: 464 - RNA, 17 nt, Artificial Sequence
  Synthetic
gguguacuuccgagaaa

SEQ ID NO: 465 - RNA, 17 nt, Artificial Sequence
  Synthetic
aagugaaugucaggaaa

SEQ ID NO: 466 - RNA, 17 nt, Artificial Sequence
  Synthetic
  misc_feature (14)..(14): n is a, c, g, or u
ggcccacucacuanaaa

SEQ ID NO: 467 - RNA, 17 nt, Artificial Sequence
  Synthetic
uaaccacauugaguaaa

SEQ ID NO: 468 - RNA, 17 nt, Artificial Sequence
  Synthetic
gacuucaacacaaacaa

SEQ ID NO: 469 - RNA, 17 nt, Artificial Sequence
  Synthetic
acagccuccuaauacaa

SEQ ID NO: 470 - RNA, 17 nt, Artificial Sequence
  Synthetic
gccgcagacacauccaa

SEQ ID NO: 471 - RNA, 17 nt, Artificial Sequence
  Synthetic
uuaauaccuuuauccaa

SEQ ID NO: 472 - RNA, 17 nt, Artificial Sequence
  Synthetic
ccaccuuaugaguccaa

SEQ ID NO: 473 - RNA, 17 nt, Artificial Sequence
  Synthetic
uggccguugccgagcaa

SEQ ID NO: 474 - RNA, 17 nt, Artificial Sequence
  Synthetic
auugugcauaaaaucaa

SEQ ID NO: 475 - RNA, 17 nt, Artificial Sequence
  Synthetic
acaaaccuuccaaucaa

SEQ ID NO: 476 - RNA, 17 nt, Artificial Sequence
  Synthetic
auugaggaauacaucaa

SEQ ID NO: 477 - RNA, 17 nt, Artificial Sequence
  Synthetic
cagccccuuuuacucaa

SEQ ID NO: 478 - RNA, 17 nt, Artificial Sequence
  Synthetic
gcaccacucuugcucaa

SEQ ID NO: 479 - RNA, 17 nt, Artificial Sequence
  Synthetic
acuuucgccccggucaa

SEQ ID NO: 480 - RNA, 17 nt, Artificial Sequence
  Synthetic
ccuuacuauccagagaa

SEQ ID NO: 481 - RNA, 17 nt, Artificial Sequence
  Synthetic
cgccuguaacacgagaa

SEQ ID NO: 482 - RNA, 17 nt, Artificial Sequence
  Synthetic
ucucucaacggcgagaa

SEQ ID NO: 483 - RNA, 17 nt, Artificial Sequence
  Synthetic
caacugguggucuggaa

SEQ ID NO: 484 - RNA, 17 nt, Artificial Sequence
  Synthetic
  misc_feature (4)..(4): n is a, c, g, or u
aaunauauaacccauaa

SEQ ID NO: 485 - RNA, 17 nt, Artificial Sequence
  Synthetic
auuccuuggacucauaa

SEQ ID NO: 486 - RNA, 17 nt, Artificial Sequence
  Synthetic
ugguaacagcgguauaa

SEQ ID NO: 487 - RNA, 17 nt, Artificial Sequence
  Synthetic
gacauugacccuuauaa

SEQ ID NO: 488 - RNA, 17 nt, Artificial Sequence
  Synthetic
  misc_feature (11)..(11): n is a, c, g, or u
gucuaguuuunaaguaa

SEQ ID NO: 489 - RNA, 17 nt, Artificial Sequence
  Synthetic
guuggauccgagaguaa

SEQ ID NO: 490 - RNA, 17 nt, Artificial Sequence
  Synthetic
  misc_feature (4)..(4): n is a, c, g, or u
guanaguagaggaguaa

SEQ ID NO: 491 - RNA, 17 nt, Artificial Sequence
  Synthetic
aaagacuguguauuuaa

SEQ ID NO: 492 - RNA, 17 nt, Artificial Sequence
  Synthetic
guccagaagaaccaaca

SEQ ID NO: 493 - RNA, 17 nt, Artificial Sequence
  Synthetic
gaggauuuuugucaaca

SEQ ID NO: 494 - RNA, 17 nt, Artificial Sequence
  Synthetic
uggaaguagaggacaca

SEQ ID NO: 495 - RNA, 17 nt, Artificial Sequence
  Synthetic
gcagaugagaaggcaca

SEQ ID NO: 496 - RNA, 17 nt, Artificial Sequence
  Synthetic
gugaagcgaagugcaca

SEQ ID NO: 497 - RNA, 17 nt, Artificial Sequence
  Synthetic
gcuugaacagugggaca

SEQ ID NO: 498 - RNA, 17 nt, Artificial Sequence
  Synthetic
gaugggaugggaauaca

SEQ ID NO: 499 - RNA, 17 nt, Artificial Sequence
  Synthetic
gguaauacaggcauaca

SEQ ID NO: 500 - RNA, 17 nt, Artificial Sequence
  Synthetic
ccccuucucguguuaca

SEQ ID NO: 501 - RNA, 17 nt, Artificial Sequence
  Synthetic
aaauuauugcccaccca

SEQ ID NO: 502 - RNA, 17 nt, Artificial Sequence
  Synthetic
  misc_feature (1)..(1): n is a, c, g, or u
ngggcggcagagcccca

SEQ ID NO: 503 - RNA, 17 nt, Artificial Sequence
  Synthetic
uauuuuccgaaagccca

SEQ ID NO: 504 - RNA, 17 nt, Artificial Sequence
  Synthetic
uguagcucuuguuccca

SEQ ID NO: 505 - RNA, 17 nt, Artificial Sequence
  Synthetic
  misc_feature (6)..(6): n is a, c, g, or u
gcacanccuagcagcca

SEQ ID NO: 506 - RNA, 17 nt, Artificial Sequence
  Synthetic
acauccaacgauagcca

SEQ ID NO: 507 - RNA, 17 nt, Artificial Sequence
  Synthetic
acugcgaauuuuggcca

SEQ ID NO: 508 - RNA, 17 nt, Artificial Sequence
  Synthetic
cggccaggccuuugcca

SEQ ID NO: 509 - RNA, 17 nt, Artificial Sequence
  Synthetic
guucacgguggucucca

SEQ ID NO: 510 - RNA, 17 nt, Artificial Sequence
  Synthetic
uguguccucuacuucca

SEQ ID NO: 511 - RNA, 17 nt, Artificial Sequence
  Synthetic
  misc_feature (11)..(11): n is a, c, g, or u
uugguggucunuaagca

SEQ ID NO: 512 - RNA, 17 nt, Artificial Sequence
  Synthetic
gaacaagagcuacagca

SEQ ID NO: 513 - RNA, 17 nt, Artificial Sequence
  Synthetic
aucuacaaccaccagca

SEQ ID NO: 514 - RNA, 17 nt, Artificial Sequence
  Synthetic
aacuggagccaccagca

SEQ ID NO: 515 - RNA, 17 nt, Artificial Sequence
  Synthetic
gaugaggcauagcagca

SEQ ID NO: 516 - RNA, 17 nt, Artificial Sequence
  Synthetic
acaagggcaugagagca

SEQ ID NO: 517 - RNA, 17 nt, Artificial Sequence
  Synthetic
gagaggggucguccgca

SEQ ID NO: 518 - RNA, 17 nt, Artificial Sequence
  Synthetic
gauuggccaucagcgca

SEQ ID NO: 519 - RNA, 17 nt, Artificial Sequence
  Synthetic
aaaggacgucccgcgca

SEQ ID NO: 520 - RNA, 17 nt, Artificial Sequence
  Synthetic
cacaaagguuccgcgca

SEQ ID NO: 521 - RNA, 17 nt, Artificial Sequence
  Synthetic
auacuuuguggaaggca

SEQ ID NO: 522 - RNA, 17 nt, Artificial Sequence
  Synthetic
cuuccaaauguaaggca

SEQ ID NO: 523 - RNA, 17 nt, Artificial Sequence
  Synthetic
aacggcgagaaggggca

SEQ ID NO: 524 - RNA, 17 nt, Artificial Sequence
  Synthetic
  misc_feature (6)..(6): n is a, c, g, or u
uaucanaucuugaugca

SEQ ID NO: 525 - RNA, 17 nt, Artificial Sequence
  Synthetic
  misc_feature (11)..(11): n is a, c, g, or u
cuagaucucungcugca

SEQ ID NO: 526 - RNA, 17 nt, Artificial Sequence
  Synthetic
uggagaacaucacauca

SEQ ID NO: 527 - RNA, 17 nt, Artificial Sequence
  Synthetic
gacauucacuugcauca

SEQ ID NO: 528 - RNA, 17 nt, Artificial Sequence
  Synthetic
cgguauaaagggacuca

SEQ ID NO: 529 - RNA, 17 nt, Artificial Sequence
  Synthetic
  misc_feature (9)..(9): n is a, c, g, or u
ugggggacnuugccuca

SEQ ID NO: 530 - RNA, 17 nt, Artificial Sequence
  Synthetic
aaggaguuaaccaguca

SEQ ID NO: 531 - RNA, 17 nt, Artificial Sequence
  Synthetic
ccaccaaucggagguca

SEQ ID NO: 532 - RNA, 17 nt, Artificial Sequence
  Synthetic
gaugcaagugaauguca

SEQ ID NO: 533 - RNA, 17 nt, Artificial Sequence
  Synthetic
aucaaugggucuauuca

SEQ ID NO: 534 - RNA, 17 nt, Artificial Sequence
  Synthetic
gggacaugaacaaaaga

SEQ ID NO: 535 - RNA, 17 nt, Artificial Sequence
  Synthetic
cagaagaaccaacaaga

SEQ ID NO: 536 - RNA, 17 nt, Artificial Sequence
  Synthetic
uuuccgaaagcccaaga

SEQ ID NO: 537 - RNA, 17 nt, Artificial Sequence
  Synthetic
gcagggccccuagaaga

SEQ ID NO: 538 - RNA, 17 nt, Artificial Sequence
  Synthetic
caggaugaagaggaaga

SEQ ID NO: 539 - RNA, 17 nt, Artificial Sequence
  Synthetic
uagcagcaggaugaaga

SEQ ID NO: 540 - RNA, 17 nt, Artificial Sequence
  Synthetic
aacaaccuuacauaaga

SEQ ID NO: 541 - RNA, 17 nt, Artificial Sequence
  Synthetic
aguaggucccggacaga

SEQ ID NO: 542 - RNA, 17 nt, Artificial Sequence
  Synthetic
cuggaaagaaucccaga

SEQ ID NO: 543 - RNA, 17 nt, Artificial Sequence
  Synthetic
uaccuugauaguccaga

SEQ ID NO: 544 - RNA, 17 nt, Artificial Sequence
  Synthetic
cucccucgccucgcaga

SEQ ID NO: 545 - RNA, 17 nt, Artificial Sequence
  Synthetic
  misc_feature (5)..(5): n is a, c, g, or u
aaucnccgcgucgcaga

SEQ ID NO: 546 - RNA, 17 nt, Artificial Sequence
  Synthetic
aaagaugauuaggcaga

SEQ ID NO: 547 - RNA, 17 nt, Artificial Sequence
  Synthetic
uccaugcgacgugcaga

SEQ ID NO: 548 - RNA, 17 nt, Artificial Sequence
  Synthetic
gaguccgcguaaagaga

SEQ ID NO: 549 - RNA, 17 nt, Artificial Sequence
  Synthetic
uucucgccguugagaga

SEQ ID NO: 550 - RNA, 17 nt, Artificial Sequence
  Synthetic
ccgccuguaacacgaga

SEQ ID NO: 551 - RNA, 17 nt, Artificial Sequence
  Synthetic
cccaagcgaccacgaga

SEQ ID NO: 552 - RNA, 17 nt, Artificial Sequence
  Synthetic
cucucucaacggcgaga

SEQ ID NO: 553 - RNA, 17 nt, Artificial Sequence
  Synthetic
guccccagucuucgaga

SEQ ID NO: 554 - RNA, 17 nt, Artificial Sequence
  Synthetic
  misc_feature (4)..(4): n is a, c, g, or u
cuanaaaugaaaggaga

SEQ ID NO: 555 - RNA, 17 nt, Artificial Sequence
  Synthetic
gaggcagggccccuaga

SEQ ID NO: 556 - RNA, 17 nt, Artificial Sequence
  Synthetic
uagauccuggaaguaga

SEQ ID NO: 557 - RNA, 17 nt, Artificial Sequence
  Synthetic
gaugugugucccuuaga

SEQ ID NO: 558 - RNA, 17 nt, Artificial Sequence
  Synthetic
gugggcaauaauuuaga

SEQ ID NO: 559 - RNA, 17 nt, Artificial Sequence
  Synthetic
ccucgccucgcagacga

SEQ ID NO: 560 - RNA, 17 nt, Artificial Sequence
  Synthetic
  misc_feature (1)..(2): n is a, c, g, or u
nncguuccggccgacga

SEQ ID NO: 561 - RNA, 17 nt, Artificial Sequence
  Synthetic
gcaggauucagcgccga

SEQ ID NO: 562 - RNA, 17 nt, Artificial Sequence
  Synthetic
  misc_feature (4)..(5): n is a, c, g, or u
ccunncguuccggccga

SEQ ID NO: 563 - RNA, 17 nt, Artificial Sequence
  Synthetic
gugcagaggugaagcga

SEQ ID NO: 564 - RNA, 17 nt, Artificial Sequence
  Synthetic
cgguggucuccaugcga

SEQ ID NO: 565 - RNA, 17 nt, Artificial Sequence
  Synthetic
gagaucuucgucugcga

SEQ ID NO: 566 - RNA, 17 nt, Artificial Sequence
  Synthetic
auugagaucuucugcga

SEQ ID NO: 567 - RNA, 17 nt, Artificial Sequence
  Synthetic
aucaucaaucuucucga

SEQ ID NO: 568 - RNA, 17 nt, Artificial Sequence
  Synthetic
agcagccaugggaagga

SEQ ID NO: 569 - RNA, 17 nt, Artificial Sequence
  Synthetic
gauugguggaagcagga

SEQ ID NO: 570 - RNA, 17 nt, Artificial Sequence
  Synthetic
gaggcauagcagcagga

SEQ ID NO: 571 - RNA, 17 nt, Artificial Sequence
  Synthetic
ccaaucggaggucagga

SEQ ID NO: 572 - RNA, 17 nt, Artificial Sequence
  Synthetic
cagcaggaugaagagga

SEQ ID NO: 573 - RNA, 17 nt, Artificial Sequence
  Synthetic
caacaguagucuccgga

SEQ ID NO: 574 - RNA, 17 nt, Artificial Sequence
  Synthetic
gcgcugaauccugcgga

SEQ ID NO: 575 - RNA, 17 nt, Artificial Sequence
  Synthetic
gucccggacagacggga

SEQ ID NO: 576 - RNA, 17 nt, Artificial Sequence
  Synthetic
agcccaagaugauggga

SEQ ID NO: 577 - RNA, 17 nt, Artificial Sequence
  Synthetic
gcuuuuaguuauaugga

SEQ ID NO: 578 - RNA, 17 nt, Artificial Sequence
  Synthetic
acugcauggccugugga

SEQ ID NO: 579 - RNA, 17 nt, Artificial Sequence
  Synthetic
agccaggacaaguugga

SEQ ID NO: 580 - RNA, 17 nt, Artificial Sequence
  Synthetic
uccuggcuaucguugga

SEQ ID NO: 581 - RNA, 17 nt, Artificial Sequence
  Synthetic
ggugacccacaaaauga

SEQ ID NO: 582 - RNA, 17 nt, Artificial Sequence
  Synthetic
ccgaaagcccaagauga

SEQ ID NO: 583 - RNA, 17 nt, Artificial Sequence
  Synthetic
uucgagaagauugauga

SEQ ID NO: 584 - RNA, 17 nt, Artificial Sequence
  Synthetic
gguccuaggaguccuga

SEQ ID NO: 585 - RNA, 17 nt, Artificial Sequence
  Synthetic
ucucgguagagggcuga

SEQ ID NO: 586 - RNA, 17 nt, Artificial Sequence
  Synthetic
gcgacgugcagagguga

SEQ ID NO: 587 - RNA, 17 nt, Artificial Sequence
  Synthetic
  misc_feature (6)..(6): n is a, c, g, or u
acucunugguauuguga

SEQ ID NO: 588 - RNA, 17 nt, Artificial Sequence
  Synthetic
gucuucgagaagauuga

SEQ ID NO: 589 - RNA, 17 nt, Artificial Sequence
  Synthetic
ucaacgaccuggauuga

SEQ ID NO: 590 - RNA, 17 nt, Artificial Sequence
  Synthetic
gugcuggggugaguuga

SEQ ID NO: 591 - RNA, 17 nt, Artificial Sequence
  Synthetic
  misc_feature (16)..(16): n is a, c, g, or u
uuaugucaauacuaana

SEQ ID NO: 592 - RNA, 17 nt, Artificial Sequence
  Synthetic
  misc_feature (12)..(12): n is a, c, g, or u
  misc_feature (16)..(16): n is a, c, g, or u
uuguuggcaagnuccna

SEQ ID NO: 593 - RNA, 17 nt, Artificial Sequence
  Synthetic
  misc_feature (15)..(16): n is a, c, g, or u
cgucggccggaacgnna

SEQ ID NO: 594 - RNA, 17 nt, Artificial Sequence
  Synthetic
gaaguguugauaggaua

SEQ ID NO: 595 - RNA, 17 nt, Artificial Sequence
  Synthetic
cuccggaaguguugaua

SEQ ID NO: 596 - RNA, 17 nt, Artificial Sequence
  Synthetic
gcuccaaauucuuuaua

SEQ ID NO: 597 - RNA, 17 nt, Artificial Sequence
  Synthetic
cuuucggaaaauaccua

SEQ ID NO: 598 - RNA, 17 nt, Artificial Sequence
  Synthetic
ucacaucaggacuccua

SEQ ID NO: 599 - RNA, 17 nt, Artificial Sequence
  Synthetic
cacaaaaugaggcgcua

SEQ ID NO: 600 - RNA, 17 nt, Artificial Sequence
  Synthetic
cagucucuccaccucua

SEQ ID NO: 601 - RNA, 17 nt, Artificial Sequence
  Synthetic
agggaguucuucuucua

SEQ ID NO: 602 - RNA, 17 nt, Artificial Sequence
  Synthetic
cuucucucaauuuucua

SEQ ID NO: 603 - RNA, 17 nt, Artificial Sequence
  Synthetic
uguuggauccgagagua

SEQ ID NO: 604 - RNA, 17 nt, Artificial Sequence
  Synthetic
aggacaggagguuggua

SEQ ID NO: 605 - RNA, 17 nt, Artificial Sequence
  Synthetic
  misc_feature (15)..(15): n is a, c, g, or u
gacuggggacccugnua

SEQ ID NO: 606 - RNA, 17 nt, Artificial Sequence
  Synthetic
  misc_feature (8)..(8): n is a, c, g, or u
  misc_feature (10)..(10): n is a, c, g, or u
uuauuccnuncacuuua

SEQ ID NO: 607 - RNA, 17 nt, Artificial Sequence
  Synthetic
ggucgcaccucucuuua

SEQ ID NO: 608 - RNA, 17 nt, Artificial Sequence
  Synthetic
uuacucucggauccaac

SEQ ID NO: 609 - RNA, 17 nt, Artificial Sequence
  Synthetic
ggccguugccgagcaac

SEQ ID NO: 610 - RNA, 17 nt, Artificial Sequence
  Synthetic
ggagcaccucucucaac

SEQ ID NO: 611 - RNA, 17 nt, Artificial Sequence
  Synthetic
acagugcuugguggaac

SEQ ID NO: 612 - RNA, 17 nt, Artificial Sequence
  Synthetic
gcauggugcuggugaac

SEQ ID NO: 613 - RNA, 17 nt, Artificial Sequence
  Synthetic
agcuuggaggcuugaac

SEQ ID NO: 614 - RNA, 17 nt, Artificial Sequence
  Synthetic
aacaaaaaauugguaac

SEQ ID NO: 615 - RNA, 17 nt, Artificial Sequence
  Synthetic
cuccaguucagaaacac

SEQ ID NO: 616 - RNA, 17 nt, Artificial Sequence
  Synthetic
gguucacacccccacac

SEQ ID NO: 617 - RNA, 17 nt, Artificial Sequence
  Synthetic
aaagcccuacgcaccac

SEQ ID NO: 618 - RNA, 17 nt, Artificial Sequence
  Synthetic
cgucgcauggagaccac

SEQ ID NO: 619 - RNA, 17 nt, Artificial Sequence
  Synthetic
uucaaauggaugcccac

SEQ ID NO: 620 - RNA, 17 nt, Artificial Sequence
  Synthetic
ccaccccagaaggccac

SEQ ID NO: 621 - RNA, 17 nt, Artificial Sequence
  Synthetic
aaugagaguaacuccac

SEQ ID NO: 622 - RNA, 17 nt, Artificial Sequence
  Synthetic
guggagcccucaggcac

SEQ ID NO: 623 - RNA, 17 nt, Artificial Sequence
  Synthetic
  misc_feature (7)..(7): n is a, c, g, or u
gcggacnuuaucggcac

SEQ ID NO: 624 - RNA, 17 nt, Artificial Sequence
  Synthetic
cccagaggauugggcac

SEQ ID NO: 625 - RNA, 17 nt, Artificial Sequence
  Synthetic
gacucaagaugcugcac

SEQ ID NO: 626 - RNA, 17 nt, Artificial Sequence
  Synthetic
  misc_feature (1)..(1): n is a, c, g, or u
  misc_feature (5)..(5): n is a, c, g, or u
nuccnaggggcguucac

SEQ ID NO: 627 - RNA, 17 nt, Artificial Sequence
  Synthetic
aggaauacaucaaagac

SEQ ID NO: 628 - RNA, 17 nt, Artificial Sequence
  Synthetic
ucaaucuucucgaagac

SEQ ID NO: 629 - RNA, 17 nt, Artificial Sequence
  Synthetic
auaacuaaaagccagac

SEQ ID NO: 630 - RNA, 17 nt, Artificial Sequence
  Synthetic
cuuagagguggagagac

SEQ ID NO: 631 - RNA, 17 nt, Artificial Sequence
  Synthetic
acuguguauuuaaggac

SEQ ID NO: 632 - RNA, 17 nt, Artificial Sequence
  Synthetic
ucgaguaggucccggac

SEQ ID NO: 633 - RNA, 17 nt, Artificial Sequence
  Synthetic
guaccaaaccuucggac

SEQ ID NO: 634 - RNA, 17 nt, Artificial Sequence
  Synthetic
gauuggagauuggggac

SEQ ID NO: 635 - RNA, 17 nt, Artificial Sequence
  Synthetic
gagaaggggcaugggac

SEQ ID NO: 636 - RNA, 17 nt, Artificial Sequence
  Synthetic
gggugugaacccuggac

SEQ ID NO: 637 - RNA, 17 nt, Artificial Sequence
  Synthetic
caauccaggucguugac

SEQ ID NO: 638 - RNA, 17 nt, Artificial Sequence
  Synthetic
ccucugccgauccauac

SEQ ID NO: 639 - RNA, 17 nt, Artificial Sequence
  Synthetic
auuuuggccaggacacc

SEQ ID NO: 640 - RNA, 17 nt, Artificial Sequence
  Synthetic
uuucuagggguaccacc

SEQ ID NO: 641 - RNA, 17 nt, Artificial Sequence
  Synthetic
  misc_feature (3)..(3): n is a, c, g, or u
cunacaaccucgccacc

SEQ ID NO: 642 - RNA, 17 nt, Artificial Sequence
  Synthetic
gaugccuuagaaucacc

SEQ ID NO: 643 - RNA, 17 nt, Artificial Sequence
  Synthetic
aauccaggucguugacc

SEQ ID NO: 644 - RNA, 17 nt, Artificial Sequence
  Synthetic
ccugagggcuccacccc

SEQ ID NO: 645 - RNA, 17 nt, Artificial Sequence
  Synthetic
aaccucaacuccucccc

SEQ ID NO: 646 - RNA, 17 nt, Artificial Sequence
  Synthetic
  misc_feature (8)..(8): n is a, c, g, or u
agguugunagaaugccc

SEQ ID NO: 647 - RNA, 17 nt, Artificial Sequence
  Synthetic
ggugucgaguagguccc

SEQ ID NO: 648 - RNA, 17 nt, Artificial Sequence
  Synthetic
ccauauaacuaaaagcc

SEQ ID NO: 649 - RNA, 17 nt, Artificial Sequence
  Synthetic
aucgccaagccccagcc

SEQ ID NO: 650 - RNA, 17 nt, Artificial Sequence
  Synthetic
uacgcggacuccccgcc

SEQ ID NO: 651 - RNA, 17 nt, Artificial Sequence
  Synthetic
cuucucaucugccggcc

SEQ ID NO: 652 - RNA, 17 nt, Artificial Sequence
  Synthetic
gcgacccgucgucggcc

SEQ ID NO: 653 - RNA, 17 nt, Artificial Sequence
  Synthetic
uaucaagguauguugcc

SEQ ID NO: 654 - RNA, 17 nt, Artificial Sequence
  Synthetic
  misc_feature (1)..(1): n is a, c, g, or u
nuaccuguuuucaaucc

SEQ ID NO: 655 - RNA, 17 nt, Artificial Sequence
  Synthetic
ccgucggcgcugaaucc

SEQ ID NO: 656 - RNA, 17 nt, Artificial Sequence
  Synthetic
ugcugccaacuggaucc

SEQ ID NO: 657 - RNA, 17 nt, Artificial Sequence
  Synthetic
  misc_feature (8)..(8): n is a, c, g, or u
ccgauaanguccgcucc

SEQ ID NO: 658 - RNA, 17 nt, Artificial Sequence
  Synthetic
uaacaacaguagucucc

SEQ ID NO: 659 - RNA, 17 nt, Artificial Sequence
  Synthetic
gcaaauuccagcagucc

SEQ ID NO: 660 - RNA, 17 nt, Artificial Sequence
  Synthetic
agggguccuaggagucc

SEQ ID NO: 661 - RNA, 17 nt, Artificial Sequence
  Synthetic
acauaccuugauagucc

SEQ ID NO: 662 - RNA, 17 nt, Artificial Sequence
  Synthetic
guagacaaaggacgucc

SEQ ID NO: 663 - RNA, 17 nt, Artificial Sequence
  Synthetic
gugggaggcuucggucc

SEQ ID NO: 664 - RNA, 17 nt, Artificial Sequence
  Synthetic
cagguuuugcagggucc

SEQ ID NO: 665 - RNA, 17 nt, Artificial Sequence
  Synthetic
gugggucaccauauucc

SEQ ID NO: 666 - RNA, 17 nt, Artificial Sequence
  Synthetic
ugcuuucgcaaacuucc

SEQ ID NO: 667 - RNA, 17 nt, Artificial Sequence
  Synthetic
  misc_feature (8)..(8): n is a, c, g, or u
ugaugacnuuggcuucc

SEQ ID NO: 668 - RNA, 17 nt, Artificial Sequence
  Synthetic
gggguuggcuuucuucc

SEQ ID NO: 669 - RNA, 17 nt, Artificial Sequence
  Synthetic
ccucugggauucuuucc

SEQ ID NO: 670 - RNA, 17 nt, Artificial Sequence
  Synthetic
uuaacuccuucuuuucc

SEQ ID NO: 671 - RNA, 17 nt, Artificial Sequence
  Synthetic
uguucaagccuccaagc

SEQ ID NO: 672 - RNA, 17 nt, Artificial Sequence
  Synthetic
cgguagagggcugaagc

SEQ ID NO: 673 - RNA, 17 nt, Artificial Sequence
  Synthetic
gaggcaauagucggagc

SEQ ID NO: 674 - RNA, 17 nt, Artificial Sequence
  Synthetic
  misc_feature (7)..(7): n is a, c, g, or u
cgcagcnggucuggagc

SEQ ID NO: 675 - RNA, 17 nt, Artificial Sequence
  Synthetic
caccauuuuguuuuagc

SEQ ID NO: 676 - RNA, 17 nt, Artificial Sequence
  Synthetic
cgcaccucucuuuacgc

SEQ ID NO: 677 - RNA, 17 nt, Artificial Sequence
  Synthetic
agaugauaaaacgccgc

SEQ ID NO: 678 - RNA, 17 nt, Artificial Sequence
  Synthetic
uccgcaggauucagcgc

SEQ ID NO: 679 - RNA, 17 nt, Artificial Sequence
  Synthetic
cuacgucccgucggcgc

SEQ ID NO: 680 - RNA, 17 nt, Artificial Sequence
  Synthetic
gccaucagcgcaugcgc

SEQ ID NO: 681 - RNA, 17 nt, Artificial Sequence
  Synthetic
agguuccgcgcaugcgc

SEQ ID NO: 682 - RNA, 17 nt, Artificial Sequence
  Synthetic
gaacucccucgccucgc

SEQ ID NO: 683 - RNA, 17 nt, Artificial Sequence
  Synthetic
  misc_feature (8)..(8): n is a, c, g, or u
cucaaucnccgcgucgc

SEQ ID NO: 684 - RNA, 17 nt, Artificial Sequence
  Synthetic
gaugagaaggcacaggc

SEQ ID NO: 685 - RNA, 17 nt, Artificial Sequence
  Synthetic
cuucucguguuacaggc

SEQ ID NO: 686 - RNA, 17 nt, Artificial Sequence
  Synthetic
uuguuagacaacgaggc

SEQ ID NO: 687 - RNA, 17 nt, Artificial Sequence
  Synthetic
agugcacacgggccggc

SEQ ID NO: 688 - RNA, 17 nt, Artificial Sequence
  Synthetic
  misc_feature (7)..(8): n is a, c, g, or u
ccgccunncguuccggc

SEQ ID NO: 689 - RNA, 17 nt, Artificial Sequence
  Synthetic
gcaucucgguagagggc

SEQ ID NO: 690 - RNA, 17 nt, Artificial Sequence
  Synthetic
acgcaacccccacuggc

SEQ ID NO: 691 - RNA, 17 nt, Artificial Sequence
  Synthetic
  misc_feature (15)..(15): n is a, c, g, or u
guccgcuccagaccngc

SEQ ID NO: 692 - RNA, 17 nt, Artificial Sequence
  Synthetic
acauccacaggccaugc

SEQ ID NO: 693 - RNA, 17 nt, Artificial Sequence
  Synthetic
cugccgauccauacugc

SEQ ID NO: 694 - RNA, 17 nt, Artificial Sequence
  Synthetic
ucggcgcugaauccugc

SEQ ID NO: 695 - RNA, 17 nt, Artificial Sequence
  Synthetic
cuuuguggcuccucugc

SEQ ID NO: 696 - RNA, 17 nt, Artificial Sequence
  Synthetic
ucguuggaugugucugc

SEQ ID NO: 697 - RNA, 17 nt, Artificial Sequence
  Synthetic
  misc_feature (4)..(4): n is a, c, g, or u
aacngaguugucagugc

SEQ ID NO: 698 - RNA, 17 nt, Artificial Sequence
  Synthetic
ggcaagcuauuuugugc

SEQ ID NO: 699 - RNA, 17 nt, Artificial Sequence
  Synthetic
cuuugccaaguguuugc

SEQ ID NO: 700 - RNA, 17 nt, Artificial Sequence
  Synthetic
aguggugcagguuuugc

SEQ ID NO: 701 - RNA, 17 nt, Artificial Sequence
  Synthetic
  misc_feature (16)..(16): n is a, c, g, or u
uucuccauguucauanc

SEQ ID NO: 702 - RNA, 17 nt, Artificial Sequence
  Synthetic
  misc_feature (16)..(16): n is a, c, g, or u
acgaagaucucaaucnc

SEQ ID NO: 703 - RNA, 17 nt, Artificial Sequence
  Synthetic
guauugggggccaaauc

SEQ ID NO: 704 - RNA, 17 nt, Artificial Sequence
  Synthetic
cuuggcgauuggccauc

SEQ ID NO: 705 - RNA, 17 nt, Artificial Sequence
  Synthetic
accaauuuuuuguuauc

SEQ ID NO: 706 - RNA, 17 nt, Artificial Sequence
  Synthetic
gcuuucuuccugaccuc

SEQ ID NO: 707 - RNA, 17 nt, Artificial Sequence
  Synthetic
uucugugcccaauccuc

SEQ ID NO: 708 - RNA, 17 nt, Artificial Sequence
  Synthetic
aacacagaacccugcuc

SEQ ID NO: 709 - RNA, 17 nt, Artificial Sequence
  Synthetic
acugcuggaauuugcuc

SEQ ID NO: 710 - RNA, 17 nt, Artificial Sequence
  Synthetic
  misc_feature (5)..(5): n is a, c, g, or u
acagnccccuuacucuc

SEQ ID NO: 711 - RNA, 17 nt, Artificial Sequence
  Synthetic
  misc_feature (4)..(4): n is a, c, g, or u
cucnguuguccuuucuc

SEQ ID NO: 712 - RNA, 17 nt, Artificial Sequence
  Synthetic
acagacgggaagaaguc

SEQ ID NO: 713 - RNA, 17 nt, Artificial Sequence
  Synthetic
aaggacugggaggaguc

SEQ ID NO: 714 - RNA, 17 nt, Artificial Sequence
  Synthetic
ggcacaggcggggaguc

SEQ ID NO: 715 - RNA, 17 nt, Artificial Sequence
  Synthetic
uuugucuacgucccguc

SEQ ID NO: 716 - RNA, 17 nt, Artificial Sequence
  Synthetic
caggugcaauuuccguc

SEQ ID NO: 717 - RNA, 17 nt, Artificial Sequence
  Synthetic
  misc_feature (1)..(1): n is a, c, g, or u
ngauugagaucuucguc

SEQ ID NO: 718 - RNA, 17 nt, Artificial Sequence
  Synthetic
acuucuucccgucuguc

SEQ ID NO: 719 - RNA, 17 nt, Artificial Sequence
  Synthetic
cuaucguuggauguguc

SEQ ID NO: 720 - RNA, 17 nt, Artificial Sequence
  Synthetic
  misc_feature (9)..(9): n is a, c, g, or u
aggacaacngaguuguc

SEQ ID NO: 721 - RNA, 17 nt, Artificial Sequence
  Synthetic
ggucguccgcaggauuc

SEQ ID NO: 722 - RNA, 17 nt, Artificial Sequence
  Synthetic
ugcuguaccaaaccuuc

SEQ ID NO: 723 - RNA, 17 nt, Artificial Sequence
  Synthetic
cccacacgguggccuuc

SEQ ID NO: 724 - RNA, 17 nt, Artificial Sequence
  Synthetic
cucucauuuuugccuuc

SEQ ID NO: 725 - RNA, 17 nt, Artificial Sequence
  Synthetic
aaagaauuuggagcuuc

SEQ ID NO: 726 - RNA, 17 nt, Artificial Sequence
  Synthetic
uggagauugagaucuuc

SEQ ID NO: 727 - RNA, 17 nt, Artificial Sequence
  Synthetic
gcugguggcuccaguuc

SEQ ID NO: 728 - RNA, 17 nt, Artificial Sequence
  Synthetic
aggagccacaaagguuc

SEQ ID NO: 729 - RNA, 17 nt, Artificial Sequence
  Synthetic
uagucggagcaggguuc

SEQ ID NO: 730 - RNA, 17 nt, Artificial Sequence
  Synthetic
acuagugcaauuuguuc

SEQ ID NO: 731 - RNA, 17 nt, Artificial Sequence
  Synthetic
caucaucuugggcuuuc

SEQ ID NO: 732 - RNA, 17 nt, Artificial Sequence
  Synthetic
  misc_feature (12)..(12): n is a, c, g, or u
augggacagaancuuuc

SEQ ID NO: 733 - RNA, 17 nt, Artificial Sequence
  Synthetic
gcaggguucuguguuuc

SEQ ID NO: 734 - RNA, 17 nt, Artificial Sequence
  Synthetic
cucccauagguauuuuc

SEQ ID NO: 735 - RNA, 17 nt, Artificial Sequence
  Synthetic
aauaccuuuauccaaag

SEQ ID NO: 736 - RNA, 17 nt, Artificial Sequence
  Synthetic
guaacagcgguauaaag

SEQ ID NO: 737 - RNA, 17 nt, Artificial Sequence
  Synthetic
ggcggcagagccccaag

SEQ ID NO: 738 - RNA, 17 nt, Artificial Sequence
  Synthetic
uaguaaacugagccaag

SEQ ID NO: 739 - RNA, 17 nt, Artificial Sequence
  Synthetic
gagguuccuugagcaag

SEQ ID NO: 740 - RNA, 17 nt, Artificial Sequence
  Synthetic
  misc_feature (4)..(4): n is a, c, g, or u
ucanaucuugaugcaag

SEQ ID NO: 741 - RNA, 17 nt, Artificial Sequence
  Synthetic
  misc_feature (5)..(6): n is a, c, g, or u
aacgnnaggcggagaag

SEQ ID NO: 742 - RNA, 17 nt, Artificial Sequence
  Synthetic
ugccuuacauuuggaag

SEQ ID NO: 743 - RNA, 17 nt, Artificial Sequence
  Synthetic
gacgugcagaggugaag

SEQ ID NO: 744 - RNA, 17 nt, Artificial Sequence
  Synthetic
gucucuccaccucuaag

SEQ ID NO: 745 - RNA, 17 nt, Artificial Sequence
  Synthetic
gacaggagguugguaag

SEQ ID NO: 746 - RNA, 17 nt, Artificial Sequence
  Synthetic
cuuggaggcuugaacag

SEQ ID NO: 747 - RNA, 17 nt, Artificial Sequence
  Synthetic
aacuaaaagccagacag

SEQ ID NO: 748 - RNA, 17 nt, Artificial Sequence
  Synthetic
  misc_feature (4)..(4): n is a, c, g, or u
ucanguauuguuuacag

SEQ ID NO: 749 - RNA, 17 nt, Artificial Sequence
  Synthetic
cgccaagccccagccag

SEQ ID NO: 750 - RNA, 17 nt, Artificial Sequence
  Synthetic
  misc_feature (4)..(4): n is a, c, g, or u
uaanccuuacuauccag

SEQ ID NO: 751 - RNA, 17 nt, Artificial Sequence
  Synthetic
ggaauucuauauaagag

SEQ ID NO: 752 - RNA, 17 nt, Artificial Sequence
  Synthetic
ccccaagcgaccacgag

SEQ ID NO: 753 - RNA, 17 nt, Artificial Sequence
  Synthetic
  misc_feature (9)..(9): n is a, c, g, or u
uccagaccngcugcgag

SEQ ID NO: 754 - RNA, 17 nt, Artificial Sequence
  Synthetic
ugguacagcagcaggag

SEQ ID NO: 755 - RNA, 17 nt, Artificial Sequence
  Synthetic
ggcaaacaagguaggag

SEQ ID NO: 756 - RNA, 17 nt, Artificial Sequence
  Synthetic
gaaaauaccuaugggag

SEQ ID NO: 757 - RNA, 17 nt, Artificial Sequence
  Synthetic
  misc_feature (4)..(4): n is a, c, g, or u
ucunuaagcagguggag

SEQ ID NO: 758 - RNA, 17 nt, Artificial Sequence
  Synthetic
gucccuuagagguggag

SEQ ID NO: 759 - RNA, 17 nt, Artificial Sequence
  Synthetic
uuuggugucuuuuggag

SEQ ID NO: 760 - RNA, 17 nt, Artificial Sequence
  Synthetic
  misc_feature (10)..(10): n is a, c, g, or u
cuuucauuunuagugag

SEQ ID NO: 761 - RNA, 17 nt, Artificial Sequence
  Synthetic
accccuagaaaauugag

SEQ ID NO: 762 - RNA, 17 nt, Artificial Sequence
  Synthetic
  misc_feature (15)..(15): n is a, c, g, or u
gaggauccugcagcnag

SEQ ID NO: 763 - RNA, 17 nt, Artificial Sequence
  Synthetic
cuaaggcaucucgguag

SEQ ID NO: 764 - RNA, 17 nt, Artificial Sequence
  Synthetic
acaccgccuguaacacg

SEQ ID NO: 765 - RNA, 17 nt, Artificial Sequence
  Synthetic
cuacaaccaccagcacg

SEQ ID NO: 766 - RNA, 17 nt, Artificial Sequence
  Synthetic
caaugggucuauucacg

SEQ ID NO: 767 - RNA, 17 nt, Artificial Sequence
  Synthetic
uaggucccggacagacg

SEQ ID NO: 768 - RNA, 17 nt, Artificial Sequence
  Synthetic
aggauucagcgccgacg

SEQ ID NO: 769 - RNA, 17 nt, Artificial Sequence
  Synthetic
ucgcauggagaccaccg

SEQ ID NO: 770 - RNA, 17 nt, Artificial Sequence
  Synthetic
accccagaaggccaccg

SEQ ID NO: 771 - RNA, 17 nt, Artificial Sequence
  Synthetic
gcuucagcccucuaccg

SEQ ID NO: 772 - RNA, 17 nt, Artificial Sequence
  Synthetic
uuuggccaggacacccg

SEQ ID NO: 773 - RNA, 17 nt, Artificial Sequence
  Synthetic
ucuagggguaccacccg

SEQ ID NO: 774 - RNA, 17 nt, Artificial Sequence
  Synthetic
ucucaucugccggcccg

SEQ ID NO: 775 - RNA, 17 nt, Artificial Sequence
  Synthetic
ucaagguauguugcccg

SEQ ID NO: 776 - RNA, 17 nt, Artificial Sequence
  Synthetic
cuuucgcaaacuucccg

SEQ ID NO: 777 - RNA, 17 nt, Artificial Sequence
  Synthetic
uucuucccgucuguccg

SEQ ID NO: 778 - RNA, 17 nt, Artificial Sequence
  Synthetic
aaggagguguacuuccg

SEQ ID NO: 779 - RNA, 17 nt, Artificial Sequence
  Synthetic
caacuggauccugcgcg

SEQ ID NO: 780 - RNA, 17 nt, Artificial Sequence
  Synthetic
ucuucgucugcgaggcg

SEQ ID NO: 781 - RNA, 17 nt, Artificial Sequence
  Synthetic
caccucucucaacggcg

SEQ ID NO: 782 - RNA, 17 nt, Artificial Sequence
  Synthetic
ggccuuguaaguuggcg

SEQ ID NO: 783 - RNA, 17 nt, Artificial Sequence
  Synthetic
gccaacuggauccugcg

SEQ ID NO: 784 - RNA, 17 nt, Artificial Sequence
  Synthetic
  misc_feature (11)..(11): n is a, c, g, or u
gcuccagaccngcugcg

SEQ ID NO: 785 - RNA, 17 nt, Artificial Sequence
  Synthetic
uguugaagucccaaucg

SEQ ID NO: 786 - RNA, 17 nt, Artificial Sequence
  Synthetic
aggacugggaggagucg

SEQ ID NO: 787 - RNA, 17 nt, Artificial Sequence
  Synthetic
aggguccccagucuucg

SEQ ID NO: 788 - RNA, 17 nt, Artificial Sequence
  Synthetic
  misc_feature (7)..(7): n is a, c, g, or u
ucacuanaaaugaaagg

SEQ ID NO: 789 - RNA, 17 nt, Artificial Sequence
  Synthetic
uccuuggacucauaagg

SEQ ID NO: 790 - RNA, 17 nt, Artificial Sequence
  Synthetic
agaugagaaggcacagg

SEQ ID NO: 791 - RNA, 17 nt, Artificial Sequence
  Synthetic
uuugguacagcagcagg

SEQ ID NO: 792 - RNA, 17 nt, Artificial Sequence
  Synthetic
agaugauuaggcagagg

SEQ ID NO: 793 - RNA, 17 nt, Artificial Sequence
  Synthetic
caugcgacgugcagagg

SEQ ID NO: 794 - RNA, 17 nt, Artificial Sequence
  Synthetic
guccgcguaaagagagg

SEQ ID NO: 795 - RNA, 17 nt, Artificial Sequence
  Synthetic
  misc_feature (10)..(10): n is a, c, g, or u
  misc_feature (14)..(14): n is a, c, g, or u
guuggcaagnuccnagg

SEQ ID NO: 796 - RNA, 17 nt, Artificial Sequence
  Synthetic
auggcaaacaagguagg

SEQ ID NO: 797 - RNA, 17 nt, Artificial Sequence
  Synthetic
uccaggucguugaccgg

SEQ ID NO: 798 - RNA, 17 nt, Artificial Sequence
  Synthetic
ccuaucaacacuuccgg

SEQ ID NO: 799 - RNA, 17 nt, Artificial Sequence
  Synthetic
gaucuucugcgacgcgg

SEQ ID NO: 800 - RNA, 17 nt, Artificial Sequence
  Synthetic
ucucguguuacaggcgg

SEQ ID NO: 801 - RNA, 17 nt, Artificial Sequence
  Synthetic
  misc_feature (10)..(11): n is a, c, g, or u
gccggaacgnnaggcgg

SEQ ID NO: 802 - RNA, 17 nt, Artificial Sequence
  Synthetic
caggucguugaccgggg

SEQ ID NO: 803 - RNA, 17 nt, Artificial Sequence
  Synthetic
aggccaccguguggggg

SEQ ID NO: 804 - RNA, 17 nt, Artificial Sequence
  Synthetic
cggaaaauaccuauggg

SEQ ID NO: 805 - RNA, 17 nt, Artificial Sequence
  Synthetic
  misc_feature (4)..(4): n is a, c, g, or u
gacnuuggcuuccuggg

SEQ ID NO: 806 - RNA, 17 nt, Artificial Sequence
  Synthetic
aaaagccagacaguggg

SEQ ID NO: 807 - RNA, 17 nt, Artificial Sequence
  Synthetic
gaaggccaccguguggg

SEQ ID NO: 808 - RNA, 17 nt, Artificial Sequence
  Synthetic
  misc_feature (4)..(4): n is a, c, g, or u
uaunauugggaguuggg

SEQ ID NO: 809 - RNA, 17 nt, Artificial Sequence
  Synthetic
  misc_feature (9)..(9): n is a, c, g, or u
agagcagunugguuggg

SEQ ID NO: 810 - RNA, 17 nt, Artificial Sequence
  Synthetic
  misc_feature (15)..(15): n is a, c, g, or u
ggggugcaauguucngg

SEQ ID NO: 811 - RNA, 17 nt, Artificial Sequence
  Synthetic
cagcuaaaacaaaaugg

SEQ ID NO: 812 - RNA, 17 nt, Artificial Sequence
  Synthetic
  misc_feature (6)..(6): n is a, c, g, or u
cccugnuaugaacaugg

SEQ ID NO: 813 - RNA, 17 nt, Artificial Sequence
  Synthetic
cucugcacgucgcaugg

SEQ ID NO: 814 - RNA, 17 nt, Artificial Sequence
  Synthetic
uguucccaggaauaugg

SEQ ID NO: 815 - RNA, 17 nt, Artificial Sequence
  Synthetic
aucuucucgaagacugg

SEQ ID NO: 816 - RNA, 17 nt, Artificial Sequence
  Synthetic
uaacauugggaagcugg

SEQ ID NO: 817 - RNA, 17 nt, Artificial Sequence
  Synthetic
aaguugcauggugcugg

SEQ ID NO: 818 - RNA, 17 nt, Artificial Sequence
  Synthetic
aagcuauuuugugcugg

SEQ ID NO: 819 - RNA, 17 nt, Artificial Sequence
  Synthetic
  misc_feature (10)..(10): n is a, c, g, or u
gcucgcagcnggucugg

SEQ ID NO: 820 - RNA, 17 nt, Artificial Sequence
  Synthetic
acacgguggccuucugg

SEQ ID NO: 821 - RNA, 17 nt, Artificial Sequence
  Synthetic
ugcaauuuguucagugg

SEQ ID NO: 822 - RNA, 17 nt, Artificial Sequence
  Synthetic
  misc_feature (6)..(6): n is a, c, g, or u
ggucunuaagcaggugg

SEQ ID NO: 823 - RNA, 17 nt, Artificial Sequence
  Synthetic
aagugauuggagauugg

SEQ ID NO: 824 - RNA, 17 nt, Artificial Sequence
  Synthetic
gguugguaagugauugg

SEQ ID NO: 825 - RNA, 17 nt, Artificial Sequence
  Synthetic
cacuggcuggggcuugg

SEQ ID NO: 826 - RNA, 17 nt, Artificial Sequence
  Synthetic
uauuuggugucuuuugg

SEQ ID NO: 827 - RNA, 17 nt, Artificial Sequence
  Synthetic
  misc_feature (3)..(4): n is a, c, g, or u
  misc_feature (16)..(16): n is a, c, g, or u
cgnnaggcggagaagng

SEQ ID NO: 828 - RNA, 17 nt, Artificial Sequence
  Synthetic
  misc_feature (4)..(4): n is a, c, g, or u
gaunugauacaaaaaug

SEQ ID NO: 829 - RNA, 17 nt, Artificial Sequence
  Synthetic
  misc_feature (4)..(4): n is a, c, g, or u
acanccuagcagccaug

SEQ ID NO: 830 - RNA, 17 nt, Artificial Sequence
  Synthetic
ucacgguggucuccaug

SEQ ID NO: 831 - RNA, 17 nt, Artificial Sequence
  Synthetic
uuggccaucagcgcaug

SEQ ID NO: 832 - RNA, 17 nt, Artificial Sequence
  Synthetic
cggcgagaaggggcaug

SEQ ID NO: 833 - RNA, 17 nt, Artificial Sequence
  Synthetic
acacgggccggcagaug

SEQ ID NO: 834 - RNA, 17 nt, Artificial Sequence
  Synthetic
cccaagaugaugggaug

SEQ ID NO: 835 - RNA, 17 nt, Artificial Sequence
  Synthetic
ugcauggccuguggaug

SEQ ID NO: 836 - RNA, 17 nt, Artificial Sequence
  Synthetic
gaaagcccaagaugaug

SEQ ID NO: 837 - RNA, 17 nt, Artificial Sequence
  Synthetic
uccuaggaguccugaug

SEQ ID NO: 838 - RNA, 17 nt, Artificial Sequence
  Synthetic
caaaaugaggcgcuaug

SEQ ID NO: 839 - RNA, 17 nt, Artificial Sequence
  Synthetic
uuggagauuggggacug

SEQ ID NO: 840 - RNA, 17 nt, Artificial Sequence
  Synthetic
agaaugcccugugccug

SEQ ID NO: 841 - RNA, 17 nt, Artificial Sequence
  Synthetic
cugccaacuggauccug

SEQ ID NO: 842 - RNA, 17 nt, Artificial Sequence
  Synthetic
gggucaccauauuccug

SEQ ID NO: 843 - RNA, 17 nt, Artificial Sequence
  Synthetic
  misc_feature (6)..(6): n is a, c, g, or u
augacnuuggcuuccug

SEQ ID NO: 844 - RNA, 17 nt, Artificial Sequence
  Synthetic
caauuuuuuguuaucug

SEQ ID NO: 845 - RNA, 17 nt, Artificial Sequence
  Synthetic
cugugcccaauccucug

SEQ ID NO: 846 - RNA, 17 nt, Artificial Sequence
  Synthetic
gagauugagaucuucug

SEQ ID NO: 847 - RNA, 17 nt, Artificial Sequence
  Synthetic
uggaggcuugaacagug

SEQ ID NO: 848 - RNA, 17 nt, Artificial Sequence
  Synthetic
cuaaaagccagacagug

SEQ ID NO: 849 - RNA, 17 nt, Artificial Sequence
  Synthetic
ccaagccccagccagug

SEQ ID NO: 850 - RNA, 17 nt, Artificial Sequence
  Synthetic
  misc_feature (12)..(12): n is a, c, g, or u
uccuuucauuunuagug

SEQ ID NO: 851 - RNA, 17 nt, Artificial Sequence
  Synthetic
cccagaaggccaccgug

SEQ ID NO: 852 - RNA, 17 nt, Artificial Sequence
  Synthetic
cuuggacucauaaggug

SEQ ID NO: 853 - RNA, 17 nt, Artificial Sequence
  Synthetic
ccgcguaaagagaggug

SEQ ID NO: 854 - RNA, 17 nt, Artificial Sequence
  Synthetic
gccaccgugugggggug

SEQ ID NO: 855 - RNA, 17 nt, Artificial Sequence
  Synthetic
cagaaggccaccgugug

SEQ ID NO: 856 - RNA, 17 nt, Artificial Sequence
  Synthetic
aaggaauacuaacauug

SEQ ID NO: 857 - RNA, 17 nt, Artificial Sequence
  Synthetic
ugggaagcuggagauug

SEQ ID NO: 858 - RNA, 17 nt, Artificial Sequence
  Synthetic
uccagcagucccgauug

SEQ ID NO: 859 - RNA, 17 nt, Artificial Sequence
  Synthetic
  misc_feature (12)..(12): n is a, c, g, or u
cugcgacgcggngauug

SEQ ID NO: 860 - RNA, 17 nt, Artificial Sequence
  Synthetic
  misc_feature (13)..(13): n is a, c, g, or u
gguuugucaacgnauug

SEQ ID NO: 861 - RNA, 17 nt, Artificial Sequence
  Synthetic
  misc_feature (9)..(9): n is a, c, g, or u
uggaugaunugguauug

SEQ ID NO: 862 - RNA, 17 nt, Artificial Sequence
  Synthetic
cuccaagcugugccuug

SEQ ID NO: 863 - RNA, 17 nt, Artificial Sequence
  Synthetic
  misc_feature (6)..(6): n is a, c, g, or u
uauaunauugggaguug

SEQ ID NO: 864 - RNA, 17 nt, Artificial Sequence
  Synthetic
  misc_feature (11)..(11): n is a, c, g, or u
ugagagcagunugguug

SEQ ID NO: 865 - RNA, 17 nt, Artificial Sequence
  Synthetic
aguauuuaguaacuuug

SEQ ID NO: 866 - RNA, 17 nt, Artificial Sequence
  Synthetic
uauucacgggaaguuug

SEQ ID NO: 867 - RNA, 17 nt, Artificial Sequence
  Synthetic
cauagcgccucauuuug

SEQ ID NO: 868 - RNA, 17 nt, Artificial Sequence
  Synthetic
  misc_feature (15)..(15): n is a, c, g, or u
  misc_feature (17)..(17): n is a, c, g, or u
uaacccauaaagugnan

SEQ ID NO: 869 - RNA, 17 nt, Artificial Sequence
  Synthetic
  misc_feature (17)..(17): n is a, c, g, or u
gcacuccaccugcuuan

SEQ ID NO: 870 - RNA, 17 nt, Artificial Sequence
  Synthetic
  misc_feature (17)..(17): n is a, c, g, or u
ucucuguaaacaauacn

SEQ ID NO: 871 - RNA, 17 nt, Artificial Sequence
  Synthetic
  misc_feature (13)..(13): n is a, c, g, or u
  misc_feature (17)..(17): n is a, c, g, or u
guuguuggcaagnuccn

SEQ ID NO: 872 - RNA, 17 nt, Artificial Sequence
  Synthetic
  misc_feature (17)..(17): n is a, c, g, or u
ugggggugcaauguucn

SEQ ID NO: 873 - RNA, 17 nt, Artificial Sequence
  Synthetic
  misc_feature (17)..(17): n is a, c, g, or u
ucccauggcugcuaggn

SEQ ID NO: 874 - RNA, 17 nt, Artificial Sequence
  Synthetic
  misc_feature (11)..(11): n is a, c, g, or u
  misc_feature (17)..(17): n is a, c, g, or u
auguaaggcangaaaun

SEQ ID NO: 875 - RNA, 17 nt, Artificial Sequence
  Synthetic
  misc_feature (17)..(17): n is a, c, g, or u
ucacuugcaucaagaun

SEQ ID NO: 876 - RNA, 17 nt, Artificial Sequence
  Synthetic
  misc_feature (17)..(17): n is a, c, g, or u
caccgugaacgccccun

SEQ ID NO: 877 - RNA, 17 nt, Artificial Sequence
  Synthetic
  misc_feature (17)..(17): n is a, c, g, or u
cugguggcgagguugun

SEQ ID NO: 878 - RNA, 17 nt, Artificial Sequence
  Synthetic
cacagcuaaaacaaaau

SEQ ID NO: 879 - RNA, 17 nt, Artificial Sequence
  Synthetic
uuuagcuguguucaaau

SEQ ID NO: 880 - RNA, 17 nt, Artificial Sequence
  Synthetic
uguguugaagucccaau

SEQ ID NO: 881 - RNA, 17 nt, Artificial Sequence
  Synthetic
uggaauuugcucugaau

SEQ ID NO: 882 - RNA, 17 nt, Artificial Sequence
  Synthetic
gcaaacuucccgugaau

SEQ ID NO: 883 - RNA, 17 nt, Artificial Sequence
  Synthetic
ccaaggaauacuaacau

SEQ ID NO: 884 - RNA, 17 nt, Artificial Sequence
  Synthetic
agagagaauccacacau

SEQ ID NO: 885 - RNA, 17 nt, Artificial Sequence
  Synthetic
cuuuggggcauggacau

SEQ ID NO: 886 - RNA, 17 nt, Artificial Sequence
  Synthetic
cccgugaauagacccau

SEQ ID NO: 887 - RNA, 17 nt, Artificial Sequence
  Synthetic
ggguggcuuuggggcau

SEQ ID NO: 888 - RNA, 17 nt, Artificial Sequence
  Synthetic
aggugaaaaaguugcau

SEQ ID NO: 889 - RNA, 17 nt, Artificial Sequence
  Synthetic
ccagucuucgagaagau

SEQ ID NO: 890 - RNA, 17 nt, Artificial Sequence
  Synthetic
gguaagugauuggagau

SEQ ID NO: 891 - RNA, 17 nt, Artificial Sequence
  Synthetic
aaaugaaaggagacgau

SEQ ID NO: 892 - RNA, 17 nt, Artificial Sequence
  Synthetic
auuccagcagucccgau

SEQ ID NO: 893 - RNA, 17 nt, Artificial Sequence
  Synthetic
aguuaaccagucaggau

SEQ ID NO: 894 - RNA, 17 nt, Artificial Sequence
  Synthetic
aaagaaucccagaggau

SEQ ID NO: 895 - RNA, 17 nt, Artificial Sequence
  Synthetic
ggaaguguugauaggau

SEQ ID NO: 896 - RNA, 17 nt, Artificial Sequence
  Synthetic
  misc_feature (15)..(15): n is a, c, g, or u
aagguuugucaacgnau

SEQ ID NO: 897 - RNA, 17 nt, Artificial Sequence
  Synthetic
  misc_feature (15)..(15): n is a, c, g, or u
uuuauggguuauaunau

SEQ ID NO: 898 - RNA, 17 nt, Artificial Sequence
  Synthetic
cuuguucccaggaauau

SEQ ID NO: 899 - RNA, 17 nt, Artificial Sequence
  Synthetic
uugccucaggaacauau

SEQ ID NO: 900 - RNA, 17 nt, Artificial Sequence
  Synthetic
uggauucucucuuauau

SEQ ID NO: 901 - RNA, 17 nt, Artificial Sequence
  Synthetic
cuggcuuuuaguuauau

SEQ ID NO: 902 - RNA, 17 nt, Artificial Sequence
  Synthetic
uaggaguuccgcaguau

SEQ ID NO: 903 - RNA, 17 nt, Artificial Sequence
  Synthetic
  misc_feature (4)..(4): n is a, c, g, or u
  misc_feature (10)..(10): n is a, c, g, or u
uagncccaunuuaguau

SEQ ID NO: 904 - RNA, 17 nt, Artificial Sequence
  Synthetic
  misc_feature (11)..(11): n is a, c, g, or u
uauggaugaunugguau

SEQ ID NO: 905 - RNA, 17 nt, Artificial Sequence
  Synthetic
  misc_feature (11)..(11): n is a, c, g, or u
ucuagacucunugguau

SEQ ID NO: 906 - RNA, 17 nt, Artificial Sequence
  Synthetic
  misc_feature (11)..(11): n is a, c, g, or u
aucauuacuunaaaacu

SEQ ID NO: 907 - RNA, 17 nt, Artificial Sequence
  Synthetic
  misc_feature (4)..(4): n is a, c, g, or u
aggnugugcugccaacu

SEQ ID NO: 908 - RNA, 17 nt, Artificial Sequence
  Synthetic
gaauaguggauccaacu

SEQ ID NO: 909 - RNA, 17 nt, Artificial Sequence
  Synthetic
caaucuucucgaagacu

SEQ ID NO: 910 - RNA, 17 nt, Artificial Sequence
  Synthetic
uuagagguggagagacu

SEQ ID NO: 911 - RNA, 17 nt, Artificial Sequence
  Synthetic
  misc_feature (5)..(5): n is a, c, g, or u
accanagagucuagacu

SEQ ID NO: 912 - RNA, 17 nt, Artificial Sequence
  Synthetic
ugacauaauuaacuacu

SEQ ID NO: 913 - RNA, 17 nt, Artificial Sequence
  Synthetic
ucuguccgggaccuacu

SEQ ID NO: 914 - RNA, 17 nt, Artificial Sequence
  Synthetic
ucuuggcucaguuuacu

SEQ ID NO: 915 - RNA, 17 nt, Artificial Sequence
  Synthetic
gccccggucaacgaccu

SEQ ID NO: 916 - RNA, 17 nt, Artificial Sequence
  Synthetic
acacgggcaacauaccu

SEQ ID NO: 917 - RNA, 17 nt, Artificial Sequence
  Synthetic
gugggggugugaacccu

SEQ ID NO: 918 - RNA, 17 nt, Artificial Sequence
  Synthetic
acccgggugguaccccu

SEQ ID NO: 919 - RNA, 17 nt, Artificial Sequence
  Synthetic
aacgaggcagggccccu

SEQ ID NO: 920 - RNA, 17 nt, Artificial Sequence
  Synthetic
gccuccaagcugugccu

SEQ ID NO: 921 - RNA, 17 nt, Artificial Sequence
  Synthetic
uggugguuguagauccu

SEQ ID NO: 922 - RNA, 17 nt, Artificial Sequence
  Synthetic
ccccucucguggucgcu

SEQ ID NO: 923 - RNA, 17 nt, Artificial Sequence
  Synthetic
ggcacagcuuggaggcu

SEQ ID NO: 924 - RNA, 17 nt, Artificial Sequence
  Synthetic
cgcaacccccacuggcu

SEQ ID NO: 925 - RNA, 17 nt, Artificial Sequence
  Synthetic
ucccaaucgggacugcu

SEQ ID NO: 926 - RNA, 17 nt, Artificial Sequence
  Synthetic
  misc_feature (2)..(2): n is a, c, g, or u
gncuguauuuuccugcu

SEQ ID NO: 927 - RNA, 17 nt, Artificial Sequence
  Synthetic
uugcagggucccgugcu

SEQ ID NO: 928 - RNA, 17 nt, Artificial Sequence
  Synthetic
aaaaguugcauggugcu

SEQ ID NO: 929 - RNA, 17 nt, Artificial Sequence
  Synthetic
gcaagcuauuuugugcu

SEQ ID NO: 930 - RNA, 17 nt, Artificial Sequence
  Synthetic
uucccaucccaucaucu

SEQ ID NO: 931 - RNA, 17 nt, Artificial Sequence
  Synthetic
aagcaggagguggaucu

SEQ ID NO: 932 - RNA, 17 nt, Artificial Sequence
  Synthetic
  misc_feature (13)..(13): n is a, c, g, or u
auuuuuguaucanaucu

SEQ ID NO: 933 - RNA, 17 nt, Artificial Sequence
  Synthetic
cugcggacgaccccucu

SEQ ID NO: 934 - RNA, 17 nt, Artificial Sequence
  Synthetic
gauuaaccacauucucu

SEQ ID NO: 935 - RNA, 17 nt, Artificial Sequence
  Synthetic
  misc_feature (10)..(10): n is a, c, g, or u
acaauaccanagagucu

SEQ ID NO: 936 - RNA, 17 nt, Artificial Sequence
  Synthetic
aaguccaccacgagucu

SEQ ID NO: 937 - RNA, 17 nt, Artificial Sequence
  Synthetic
gauccaacugguggucu

SEQ ID NO: 938 - RNA, 17 nt, Artificial Sequence
  Synthetic
cuccuaggaccccuucu

SEQ ID NO: 939 - RNA, 17 nt, Artificial Sequence
  Synthetic
ccacacgguggccuucu

SEQ ID NO: 940 - RNA, 17 nt, Artificial Sequence
  Synthetic
cacaucaucaaucuucu

SEQ ID NO: 941 - RNA, 17 nt, Artificial Sequence
  Synthetic
gagggaguucuucuucu

SEQ ID NO: 942 - RNA, 17 nt, Artificial Sequence
  Synthetic
uucuuguugguucuucu

SEQ ID NO: 943 - RNA, 17 nt, Artificial Sequence
  Synthetic
acuucucucaauuuucu

SEQ ID NO: 944 - RNA, 17 nt, Artificial Sequence
  Synthetic
acuaaaagccagacagu

SEQ ID NO: 945 - RNA, 17 nt, Artificial Sequence
  Synthetic
gccaagccccagccagu

SEQ ID NO: 946 - RNA, 17 nt, Artificial Sequence
  Synthetic
uccacaggccaugcagu

SEQ ID NO: 947 - RNA, 17 nt, Artificial Sequence
  Synthetic
agugcaauuuguucagu

SEQ ID NO: 948 - RNA, 17 nt, Artificial Sequence
  Synthetic
guuccuugagcaagagu

SEQ ID NO: 949 - RNA, 17 nt, Artificial Sequence
  Synthetic
uaaggacugggaggagu

SEQ ID NO: 950 - RNA, 17 nt, Artificial Sequence
  Synthetic
  misc_feature (8)..(8): n is a, c, g, or u
guuauaunauugggagu

SEQ ID NO: 951 - RNA, 17 nt, Artificial Sequence
  Synthetic
uuugugcuggggugagu

SEQ ID NO: 952 - RNA, 17 nt, Artificial Sequence
  Synthetic
aauuugcucugaauagu

SEQ ID NO: 953 - RNA, 17 nt, Artificial Sequence
  Synthetic
cagcgccgacgggacgu

SEQ ID NO: 954 - RNA, 17 nt, Artificial Sequence
  Synthetic
uuuguucaguggugcgu

SEQ ID NO: 955 - RNA, 17 nt, Artificial Sequence
  Synthetic
  misc_feature (14)..(14): n is a, c, g, or u
aaagacccacaauncgu

SEQ ID NO: 956 - RNA, 17 nt, Artificial Sequence
  Synthetic
  misc_feature (2)..(2): n is a, c, g, or u
anagagucuagacucgu

SEQ ID NO: 957 - RNA, 17 nt, Artificial Sequence
  Synthetic
uccucaauccaggucgu

SEQ ID NO: 958 - RNA, 17 nt, Artificial Sequence
  Synthetic
ugguggaagcaggaggu

SEQ ID NO: 959 - RNA, 17 nt, Artificial Sequence
  Synthetic
ccccagccagugggggu

SEQ ID NO: 960 - RNA, 17 nt, Artificial Sequence
  Synthetic
agcuaaaacaaaauggu

SEQ ID NO: 961 - RNA, 17 nt, Artificial Sequence
  Synthetic
caggagguggaucuggu

SEQ ID NO: 962 - RNA, 17 nt, Artificial Sequence
  Synthetic
gagucuagacucguggu

SEQ ID NO: 963 - RNA, 17 nt, Artificial Sequence
  Synthetic
  misc_feature (13)..(13): n is a, c, g, or u
ccugagagcagunuggu

SEQ ID NO: 964 - RNA, 17 nt, Artificial Sequence
  Synthetic
ccugaccuccgauuggu

SEQ ID NO: 965 - RNA, 17 nt, Artificial Sequence
  Synthetic
auccaacagugcuuggu

SEQ ID NO: 966 - RNA, 17 nt, Artificial Sequence
  Synthetic
uccacugcauggccugu

SEQ ID NO: 967 - RNA, 17 nt, Artificial Sequence
  Synthetic
guagucuccggaagugu

SEQ ID NO: 968 - RNA, 17 nt, Artificial Sequence
  Synthetic
ggugucuuuuggagugu

SEQ ID NO: 969 - RNA, 17 nt, Artificial Sequence
  Synthetic
ccagaaggccaccgugu

SEQ ID NO: 970 - RNA, 17 nt, Artificial Sequence
  Synthetic
aaugaggcgcuaugugu

SEQ ID NO: 971 - RNA, 17 nt, Artificial Sequence
  Synthetic
auuguccuuguuugugu

SEQ ID NO: 972 - RNA, 17 nt, Artificial Sequence
  Synthetic
ggcgguguguuucuugu

SEQ ID NO: 973 - RNA, 17 nt, Artificial Sequence
  Synthetic
cccgugcuggugguugu

SEQ ID NO: 974 - RNA, 17 nt, Artificial Sequence
  Synthetic
  misc_feature (1)..(1): n is a, c, g, or u
nuauuuacauacuuugu

SEQ ID NO: 975 - RNA, 17 nt, Artificial Sequence
  Synthetic
  misc_feature (16)..(16): n is a, c, g, or u
cgucuccuuucauuunu

SEQ ID NO: 976 - RNA, 17 nt, Artificial Sequence
  Synthetic
  misc_feature (2)..(2): n is a, c, g, or u
  misc_feature (8)..(8): n is a, c, g, or u
anaugggncuaaaaauu

SEQ ID NO: 977 - RNA, 17 nt, Artificial Sequence
  Synthetic
aucugugggcauccauu

SEQ ID NO: 978 - RNA, 17 nt, Artificial Sequence
  Synthetic
guaagugauuggagauu

SEQ ID NO: 979 - RNA, 17 nt, Artificial Sequence
  Synthetic
cuuccugaccuccgauu

SEQ ID NO: 980 - RNA, 17 nt, Artificial Sequence
  Synthetic
gaauagacccauugauu

SEQ ID NO: 981 - RNA, 17 nt, Artificial Sequence
  Synthetic
  misc_feature (10)..(10): n is a, c, g, or u
auggaugaunugguauu

SEQ ID NO: 982 - RNA, 17 nt, Artificial Sequence
  Synthetic
gaaguauuuaguaacuu

SEQ ID NO: 983 - RNA, 17 nt, Artificial Sequence
  Synthetic
  misc_feature (4)..(4): n is a, c, g, or u
acanuauuuacauacuu

SEQ ID NO: 984 - RNA, 17 nt, Artificial Sequence
  Synthetic
cgcaugcgcggaaccuu

SEQ ID NO: 985 - RNA, 17 nt, Artificial Sequence
  Synthetic
cucuaccgagaugccuu

SEQ ID NO: 986 - RNA, 17 nt, Artificial Sequence
  Synthetic
caauguuaguauuccuu

SEQ ID NO: 987 - RNA, 17 nt, Artificial Sequence
  Synthetic
cccucucguggucgcuu

SEQ ID NO: 988 - RNA, 17 nt, Artificial Sequence
  Synthetic
cccacuggcuggggcuu

SEQ ID NO: 989 - RNA, 17 nt, Artificial Sequence
  Synthetic
ugugccuuggguggcuu

SEQ ID NO: 990 - RNA, 17 nt, Artificial Sequence
  Synthetic
aaaacaaaagccugcuu

SEQ ID NO: 991 - RNA, 17 nt, Artificial Sequence
  Synthetic
cggauccaacagugcuu

SEQ ID NO: 992 - RNA, 17 nt, Artificial Sequence
  Synthetic
uuugcgaaagcaaucuu

SEQ ID NO: 993 - RNA, 17 nt, Artificial Sequence
  Synthetic
uacauaagaggacucuu

SEQ ID NO: 994 - RNA, 17 nt, Artificial Sequence
  Synthetic
cuuaaauacacagucuu

SEQ ID NO: 995 - RNA, 17 nt, Artificial Sequence
  Synthetic
ucuauucacgggaaguu

SEQ ID NO: 996 - RNA, 17 nt, Artificial Sequence
  Synthetic
gaaaggccuuguaaguu

SEQ ID NO: 997 - RNA, 17 nt, Artificial Sequence
  Synthetic
uuuccagaccaccaguu

SEQ ID NO: 998 - RNA, 17 nt, Artificial Sequence
  Synthetic
  misc_feature (7)..(7): n is a, c, g, or u
uuauaunauugggaguu

SEQ ID NO: 999 - RNA, 17 nt, Artificial Sequence
  Synthetic
uuguccuggcuaucguu

SEQ ID NO: 1000 - RNA, 17 nt, Artificial Sequence
  Synthetic
  misc_feature (12)..(12): n is a, c, g, or u
cugagagcagunugguu

SEQ ID NO: 1001 - RNA, 17 nt, Artificial Sequence
  Synthetic
uuccaccaagcacuguu

SEQ ID NO: 1002 - RNA, 17 nt, Artificial Sequence
  Synthetic
ggccaauuguccuuguu

SEQ ID NO: 1003 - RNA, 17 nt, Artificial Sequence
  Synthetic
cggagacuacuguuguu

SEQ ID NO: 1004 - RNA, 17 nt, Artificial Sequence
  Synthetic
  misc_feature (5)..(5): n is a, c, g, or u
uuucnugccuuacauuu

SEQ ID NO: 1005 - RNA, 17 nt, Artificial Sequence
  Synthetic
auaggauaggggcauuu

SEQ ID NO: 1006 - RNA, 17 nt, Artificial Sequence
  Synthetic
cacauagcgccucauuu

SEQ ID NO: 1007 - RNA, 17 nt, Artificial Sequence
  Synthetic
ucucaggcaagcuauuu

SEQ ID NO: 1008 - RNA, 17 nt, Artificial Sequence
  Synthetic
  misc_feature (6)..(6): n is a, c, g, or u
acuguncuugaguauuu

SEQ ID NO: 1009 - RNA, 17 nt, Artificial Sequence
  Synthetic
acuaaauacuucccuuu

SEQ ID NO: 1010 - RNA, 17 nt, Artificial Sequence
  Synthetic
gugccuuggguggcuuu

SEQ ID NO: 1011 - RNA, 17 nt, Artificial Sequence
  Synthetic
  misc_feature (4)..(4): n is a, c, g, or u
acgnauugugggucuuu

SEQ ID NO: 1012 - RNA, 20 nt, Artificial Sequence
  Synthetic
  misc_feature (9)..(9): n is a, c, g, or u
aucaagaunugauacaaaaa

SEQ ID NO: 1013 - RNA, 20 nt, Artificial Sequence
  Synthetic
gauaaccacauugaguaaaa

SEQ ID NO: 1014 - RNA, 20 nt, Artificial Sequence
  Synthetic
aacagugggacaugaacaaa

SEQ ID NO: 1015 - RNA, 20 nt, Artificial Sequence
  Synthetic
gccgacgggacguagacaaa

SEQ ID NO: 1016 - RNA, 20 nt, Artificial Sequence
  Synthetic
aaggggcugcaaagcccaaa

SEQ ID NO: 1017 - RNA, 20 nt, Artificial Sequence
  Synthetic
  misc_feature (6)..(6): n is a, c, g, or u
gugcgnauccacacuccaaa

SEQ ID NO: 1018 - RNA, 20 nt, Artificial Sequence
  Synthetic
guaaacugagccaagagaaa

SEQ ID NO: 1019 - RNA, 20 nt, Artificial Sequence
  Synthetic
ggagguguacuuccgagaaa

SEQ ID NO: 1020 - RNA, 20 nt, Artificial Sequence
  Synthetic
ugcaagugaaugucaggaaa

SEQ ID NO: 1021 - RNA, 20 nt, Artificial Sequence
  Synthetic
  misc_feature (3)..(3): n is a, c, g, or u
  misc_feature (17)..(17): n is a, c, g, or u
gunggcccacucacuanaaa

SEQ ID NO: 1022 - RNA, 20 nt, Artificial Sequence
  Synthetic
ggauaaccacauugaguaaa

SEQ ID NO: 1023 - RNA, 20 nt, Artificial Sequence
  Synthetic
ugggacuucaacacaaacaa

SEQ ID NO: 1024 - RNA, 20 nt, Artificial Sequence
  Synthetic
ccuacagccuccuaauacaa

SEQ ID NO: 1025 - RNA, 20 nt, Artificial Sequence
  Synthetic
aacgccgcagacacauccaa

SEQ ID NO: 1026 - RNA, 20 nt, Artificial Sequence
  Synthetic
  misc_feature (3)..(3): n is a, c, g, or u
ggnuuaauaccuuuauccaa

SEQ ID NO: 1027 - RNA, 20 nt, Artificial Sequence
  Synthetic
uucccaccuuaugaguccaa

SEQ ID NO: 1028 - RNA, 20 nt, Artificial Sequence
  Synthetic
gccuggccguugccgagcaa

SEQ ID NO: 1029 - RNA, 20 nt, Artificial Sequence
  Synthetic
cauauugugcauaaaaucaa

SEQ ID NO: 1030 - RNA, 20 nt, Artificial Sequence
  Synthetic
uugacaaaccuuccaaucaa

SEQ ID NO: 1031 - RNA, 20 nt, Artificial Sequence
  Synthetic
uggauugaggaauacaucaa

SEQ ID NO: 1032 - RNA, 20 nt, Artificial Sequence
  Synthetic
uugcagccccuuuuacucaa

SEQ ID NO: 1033 - RNA, 20 nt, Artificial Sequence
  Synthetic
ccugcaccacucuugcucaa

SEQ ID NO: 1034 - RNA, 20 nt, Artificial Sequence
  Synthetic
uggacuuucgccccggucaa

SEQ ID NO: 1035 - RNA, 20 nt, Artificial Sequence
  Synthetic
  misc_feature (3)..(3): n is a, c, g, or u
aanccuuacuauccagagaa

SEQ ID NO: 1036 - RNA, 20 nt, Artificial Sequence
  Synthetic
caccgccuguaacacgagaa

SEQ ID NO: 1037 - RNA, 20 nt, Artificial Sequence
  Synthetic
accucucucaacggcgagaa

SEQ ID NO: 1038 - RNA, 20 nt, Artificial Sequence
  Synthetic
auccaacugguggucuggaa

SEQ ID NO: 1039 - RNA, 20 nt, Artificial Sequence
  Synthetic
  misc_feature (7)..(7): n is a, c, g, or u
cccaaunauauaacccauaa

SEQ ID NO: 1040 - RNA, 20 nt, Artificial Sequence
  Synthetic
aguauuccuuggacucauaa

SEQ ID NO: 1041 - RNA, 20 nt, Artificial Sequence
  Synthetic
aauugguaacagcgguauaa

SEQ ID NO: 1042 - RNA, 20 nt, Artificial Sequence
  Synthetic
auggacauugacccuuauaa

SEQ ID NO: 1043 - RNA, 20 nt, Artificial Sequence
  Synthetic
  misc_feature (2)..(2): n is a, c, g, or u
  misc_feature (14)..(14): n is a, c, g, or u
anugucuaguuuunaaguaa

SEQ ID NO: 1044 - RNA, 20 nt, Artificial Sequence
  Synthetic
acuguuggauccgagaguaa

SEQ ID NO: 1045 - RNA, 20 nt, Artificial Sequence
  Synthetic
  misc_feature (7)..(7): n is a, c, g, or u
cagguanaguagaggaguaa

SEQ ID NO: 1046 - RNA, 20 nt, Artificial Sequence
  Synthetic
aucaaagacuguguauuuaa

SEQ ID NO: 1047 - RNA, 20 nt, Artificial Sequence
  Synthetic
auaguccagaagaaccaaca

SEQ ID NO: 1048 - RNA, 20 nt, Artificial Sequence
  Synthetic
ugugaggauuuuugucaaca

SEQ ID NO: 1049 - RNA, 20 nt, Artificial Sequence
  Synthetic
uccuggaaguagaggacaca

SEQ ID NO: 1050 - RNA, 20 nt, Artificial Sequence
  Synthetic
ccggcagaugagaaggcaca

SEQ ID NO: 1051 - RNA, 20 nt, Artificial Sequence
  Synthetic
gaggugaagcgaagugcaca

SEQ ID NO: 1052 - RNA, 20 nt, Artificial Sequence
  Synthetic
gaggcuugaacagugggaca

SEQ ID NO: 1053 - RNA, 20 nt, Artificial Sequence
  Synthetic
gaugaugggaugggaauaca

SEQ ID NO: 1054 - RNA, 20 nt, Artificial Sequence
  Synthetic
agcgguaauacaggcauaca

SEQ ID NO: 1055 - RNA, 20 nt, Artificial Sequence
  Synthetic
ggaccccuucucguguuaca

SEQ ID NO: 1056 - RNA, 20 nt, Artificial Sequence
  Synthetic
ucuaaauuauugcccaccca

SEQ ID NO: 1057 - RNA, 20 nt, Artificial Sequence
  Synthetic
  misc_feature (4)..(4): n is a, c, g, or u
aagngggcggcagagcccca

SEQ ID NO: 1058 - RNA, 20 nt, Artificial Sequence
  Synthetic
agguauuuuccgaaagccca

SEQ ID NO: 1059 - RNA, 20 nt, Artificial Sequence
  Synthetic
ugcuguagcucuuguuccca

SEQ ID NO: 1060 - RNA, 20 nt, Artificial Sequence
  Synthetic
  misc_feature (9)..(9): n is a, c, g, or u
gcagcacanccuagcagcca

SEQ ID NO: 1061 - RNA, 20 nt, Artificial Sequence
  Synthetic
gacacauccaacgauagcca

SEQ ID NO: 1062 - RNA, 20 nt, Artificial Sequence
  Synthetic
gggacugcgaauuuuggcca

SEQ ID NO: 1063 - RNA, 20 nt, Artificial Sequence
  Synthetic
caacggccaggccuuugcca

SEQ ID NO: 1064 - RNA, 20 nt, Artificial Sequence
  Synthetic
ggcguucacgguggucucca

SEQ ID NO: 1065 - RNA, 20 nt, Artificial Sequence
  Synthetic
ccguguguccucuacuucca

SEQ ID NO: 1066 - RNA, 20 nt, Artificial Sequence
  Synthetic
  misc_feature (14)..(14): n is a, c, g, or u
cauuugguggucunuaagca

SEQ ID NO: 1067 - RNA, 20 nt, Artificial Sequence
  Synthetic
ugggaacaagagcuacagca

SEQ ID NO: 1068 - RNA, 20 nt, Artificial Sequence
  Synthetic
aggaucuacaaccaccagca

SEQ ID NO: 1069 - RNA, 20 nt, Artificial Sequence
  Synthetic
cugaacuggagccaccagca

SEQ ID NO: 1070 - RNA, 20 nt, Artificial Sequence
  Synthetic
gaagaugaggcauagcagca

SEQ ID NO: 1071 - RNA, 20 nt, Artificial Sequence
  Synthetic
cauacaagggcaugagagca

SEQ ID NO: 1072 - RNA, 20 nt, Artificial Sequence
  Synthetic
cacgagaggggucguccgca

SEQ ID NO: 1073 - RNA, 20 nt, Artificial Sequence
  Synthetic
ggcgauuggccaucagcgca

SEQ ID NO: 1074 - RNA, 20 nt, Artificial Sequence
  Synthetic
gacaaaggacgucccgcgca

SEQ ID NO: 1075 - RNA, 20 nt, Artificial Sequence
  Synthetic
agccacaaagguuccgcgca

SEQ ID NO: 1076 - RNA, 20 nt, Artificial Sequence
  Synthetic
uacauacuuuguggaaggca

SEQ ID NO: 1077 - RNA, 20 nt, Artificial Sequence
  Synthetic
ucucuuccaaauguaaggca

SEQ ID NO: 1078 - RNA, 20 nt, Artificial Sequence
  Synthetic
cucaacggcgagaaggggca

SEQ ID NO: 1079 - RNA, 20 nt, Artificial Sequence
  Synthetic
  misc_feature (9)..(9): n is a, c, g, or u
uuguaucanaucuugaugca

SEQ ID NO: 1080 - RNA, 20 nt, Artificial Sequence
  Synthetic
  misc_feature (14)..(14): n is a, c, g, or u
cuacuagaucucungcugca

SEQ ID NO: 1081 - RNA, 20 nt, Artificial Sequence
  Synthetic
acauggagaacaucacauca

SEQ ID NO: 1082 - RNA, 20 nt, Artificial Sequence
  Synthetic
ccugacauucacuugcauca

SEQ ID NO: 1083 - RNA, 20 nt, Artificial Sequence
  Synthetic
cagcgguauaaagggacuca

SEQ ID NO: 1084 - RNA, 20 nt, Artificial Sequence
  Synthetic
  misc_feature (12)..(12): n is a, c, g, or u
aguugggggacnuugccuca

SEQ ID NO: 1085 - RNA, 20 nt, Artificial Sequence
  Synthetic
aagaaggaguuaaccaguca

SEQ ID NO: 1086 - RNA, 20 nt, Artificial Sequence
  Synthetic
cuuccaccaaucggagguca

SEQ ID NO: 1087 - RNA, 20 nt, Artificial Sequence
  Synthetic
cuugaugcaagugaauguca

SEQ ID NO: 1088 - RNA, 20 nt, Artificial Sequence
  Synthetic
ccaaucaaugggucuauuca

SEQ ID NO: 1089 - RNA, 20 nt, Artificial Sequence
  Synthetic
agugggacaugaacaaaaga

SEQ ID NO: 1090 - RNA, 20 nt, Artificial Sequence
  Synthetic
guccagaagaaccaacaaga

SEQ ID NO: 1091 - RNA, 20 nt, Artificial Sequence
  Synthetic
uauuuuccgaaagcccaaga

SEQ ID NO: 1092 - RNA, 20 nt, Artificial Sequence
  Synthetic
gaggcagggccccuagaaga

SEQ ID NO: 1093 - RNA, 20 nt, Artificial Sequence
  Synthetic
cagcaggaugaagaggaaga

SEQ ID NO: 1094 - RNA, 20 nt, Artificial Sequence
  Synthetic
gcauagcagcaggaugaaga

SEQ ID NO: 1095 - RNA, 20 nt, Artificial Sequence
  Synthetic
gccaacaaccuuacauaaga

SEQ ID NO: 1096 - RNA, 20 nt, Artificial Sequence
  Synthetic
ucgaguaggucccggacaga

SEQ ID NO: 1097 - RNA, 20 nt, Artificial Sequence
  Synthetic
ggucuggaaagaaucccaga

SEQ ID NO: 1098 - RNA, 20 nt, Artificial Sequence
  Synthetic
acauaccuugauaguccaga

SEQ ID NO: 1099 - RNA, 20 nt, Artificial Sequence
  Synthetic
gaacucccucgccucgcaga

SEQ ID NO: 1100 - RNA, 20 nt, Artificial Sequence
  Synthetic
  misc_feature (8)..(8): n is a, c, g, or u
cucaaucnccgcgucgcaga

SEQ ID NO: 1101 - RNA, 20 nt, Artificial Sequence
  Synthetic
acaaaagaugauuaggcaga

SEQ ID NO: 1102 - RNA, 20 nt, Artificial Sequence
  Synthetic
gucuccaugcgacgugcaga

SEQ ID NO: 1103 - RNA, 20 nt, Artificial Sequence
  Synthetic
ggggaguccgcguaaagaga

SEQ ID NO: 1104 - RNA, 20 nt, Artificial Sequence
  Synthetic
cccuucucgccguugagaga

SEQ ID NO: 1105 - RNA, 20 nt, Artificial Sequence
  Synthetic
acaccgccuguaacacgaga

SEQ ID NO: 1106 - RNA, 20 nt, Artificial Sequence
  Synthetic
agccccaagcgaccacgaga

SEQ ID NO: 1107 - RNA, 20 nt, Artificial Sequence
  Synthetic
caccucucucaacggcgaga

SEQ ID NO: 1108 - RNA, 20 nt, Artificial Sequence
  Synthetic
aggguccccagucuucgaga

SEQ ID NO: 1109 - RNA, 20 nt, Artificial Sequence
  Synthetic
  misc_feature (7)..(7): n is a, c, g, or u
ucacuanaaaugaaaggaga

SEQ ID NO: 1110 - RNA, 20 nt, Artificial Sequence
  Synthetic
aacgaggcagggccccuaga

SEQ ID NO: 1111 - RNA, 20 nt, Artificial Sequence
  Synthetic
uuguagauccuggaaguaga

SEQ ID NO: 1112 - RNA, 20 nt, Artificial Sequence
  Synthetic
guggaugugugucccuuaga

SEQ ID NO: 1113 - RNA, 20 nt, Artificial Sequence
  Synthetic
ugggugggcaauaauuuaga

SEQ ID NO: 1114 - RNA, 20 nt, Artificial Sequence
  Synthetic
cucccucgccucgcagacga

SEQ ID NO: 1115 - RNA, 20 nt, Artificial Sequence
  Synthetic
  misc_feature (4)..(5): n is a, c, g, or u
ccunncguuccggccgacga

SEQ ID NO: 1116 - RNA, 20 nt, Artificial Sequence
  Synthetic
uccgcaggauucagcgccga

SEQ ID NO: 1117 - RNA, 20 nt, Artificial Sequence
  Synthetic
  misc_feature (7)..(8): n is a, c, g, or u
ccgccunncguuccggccga

SEQ ID NO: 1118 - RNA, 20 nt, Artificial Sequence
  Synthetic
gacgugcagaggugaagcga

SEQ ID NO: 1119 - RNA, 20 nt, Artificial Sequence
  Synthetic
ucacgguggucuccaugcga

SEQ ID NO: 1120 - RNA, 20 nt, Artificial Sequence
  Synthetic
auugagaucuucgucugcga

SEQ ID NO: 1121 - RNA, 20 nt, Artificial Sequence
  Synthetic
gagauugagaucuucugcga

SEQ ID NO: 1122 - RNA, 20 nt, Artificial Sequence
  Synthetic
cacaucaucaaucuucucga

SEQ ID NO: 1123 - RNA, 20 nt, Artificial Sequence
  Synthetic
ccuagcagccaugggaagga

SEQ ID NO: 1124 - RNA, 20 nt, Artificial Sequence
  Synthetic
uccgauugguggaagcagga

SEQ ID NO: 1125 - RNA, 20 nt, Artificial Sequence
  Synthetic
gaugaggcauagcagcagga

SEQ ID NO: 1126 - RNA, 20 nt, Artificial Sequence
  Synthetic
ccaccaaucggaggucagga

SEQ ID NO: 1127 - RNA, 20 nt, Artificial Sequence
  Synthetic
uagcagcaggaugaagagga

SEQ ID NO: 1128 - RNA, 20 nt, Artificial Sequence
  Synthetic
uaacaacaguagucuccgga

SEQ ID NO: 1129 - RNA, 20 nt, Artificial Sequence
  Synthetic
ucggcgcugaauccugcgga

SEQ ID NO: 1130 - RNA, 20 nt, Artificial Sequence
  Synthetic
uaggucccggacagacggga

SEQ ID NO: 1131 - RNA, 20 nt, Artificial Sequence
  Synthetic
gaaagcccaagaugauggga

SEQ ID NO: 1132 - RNA, 20 nt, Artificial Sequence
  Synthetic
cuggcuuuuaguuauaugga

SEQ ID NO: 1133 - RNA, 20 nt, Artificial Sequence
  Synthetic
uccacugcauggccugugga

SEQ ID NO: 1134 - RNA, 20 nt, Artificial Sequence
  Synthetic
gauagccaggacaaguugga

SEQ ID NO: 1135 - RNA, 20 nt, Artificial Sequence
  Synthetic
uuguccuggcuaucguugga

SEQ ID NO: 1136 - RNA, 20 nt, Artificial Sequence
  Synthetic
uauggugacccacaaaauga

SEQ ID NO: 1137 - RNA, 20 nt, Artificial Sequence
  Synthetic
uuuccgaaagcccaagauga

SEQ ID NO: 1138 - RNA, 20 nt, Artificial Sequence
  Synthetic
gucuucgagaagauugauga

SEQ ID NO: 1139 - RNA, 20 nt, Artificial Sequence
  Synthetic
agggguccuaggaguccuga

SEQ ID NO: 1140 - RNA, 20 nt, Artificial Sequence
  Synthetic
gcaucucgguagagggcuga

SEQ ID NO: 1141 - RNA, 20 nt, Artificial Sequence
  Synthetic
caugcgacgugcagagguga

SEQ ID NO: 1142 - RNA, 20 nt, Artificial Sequence
  Synthetic
  misc_feature (9)..(9): n is a, c, g, or u
uagacucunugguauuguga

SEQ ID NO: 1143 - RNA, 20 nt, Artificial Sequence
  Synthetic
ccagucuucgagaagauuga

SEQ ID NO: 1144 - RNA, 20 nt, Artificial Sequence
  Synthetic
cggucaacgaccuggauuga

SEQ ID NO: 1145 - RNA, 20 nt, Artificial Sequence
  Synthetic
uuugugcuggggugaguuga

SEQ ID NO: 1146 - RNA, 20 nt, Artificial Sequence
  Synthetic
  misc_feature (19)..(19): n is a, c, g, or u
uaauuaugucaauacuaana

SEQ ID NO: 1147 - RNA, 20 nt, Artificial Sequence
  Synthetic
  misc_feature (15)..(15): n is a, c, g, or u
  misc_feature (19)..(19): n is a, c, g, or u
agguuguuggcaagnuccna

SEQ ID NO: 1148 - RNA, 20 nt, Artificial Sequence
  Synthetic
  misc_feature (18)..(19): n is a, c, g, or u
cgucgucggccggaacgnna

SEQ ID NO: 1149 - RNA, 20 nt, Artificial Sequence
  Synthetic
ccggaaguguugauaggaua

SEQ ID NO: 1150 - RNA, 20 nt, Artificial Sequence
  Synthetic
agucuccggaaguguugaua

SEQ ID NO: 1151 - RNA, 20 nt, Artificial Sequence
  Synthetic
gaagcuccaaauucuuuaua

SEQ ID NO: 1152 - RNA, 20 nt, Artificial Sequence
  Synthetic
gggcuuucggaaaauaccua

SEQ ID NO: 1153 - RNA, 20 nt, Artificial Sequence
  Synthetic
acaucacaucaggacuccua

SEQ ID NO: 1154 - RNA, 20 nt, Artificial Sequence
  Synthetic
acccacaaaaugaggcgcua

SEQ ID NO: 1155 - RNA, 20 nt, Artificial Sequence
  Synthetic
ccccagucucuccaccucua

SEQ ID NO: 1156 - RNA, 20 nt, Artificial Sequence
  Synthetic
gcgagggaguucuucuucua

SEQ ID NO: 1157 - RNA, 20 nt, Artificial Sequence
  Synthetic
ggacuucucucaauuuucua

SEQ ID NO: 1158 - RNA, 20 nt, Artificial Sequence
  Synthetic
cacuguuggauccgagagua

SEQ ID NO: 1159 - RNA, 20 nt, Artificial Sequence
  Synthetic
uggaggacaggagguuggua

SEQ ID NO: 1160 - RNA, 20 nt, Artificial Sequence
  Synthetic
  misc_feature (18)..(18): n is a, c, g, or u
gaagacuggggacccugnua

SEQ ID NO: 1161 - RNA, 20 nt, Artificial Sequence
  Synthetic
  misc_feature (11)..(11): n is a, c, g, or u
  misc_feature (13)..(13): n is a, c, g, or u
ggguuauuccnuncacuuua

SEQ ID NO: 1162 - RNA, 20 nt, Artificial Sequence
  Synthetic
acgggucgcaccucucuuua

SEQ ID NO: 1163 - RNA, 20 nt, Artificial Sequence
  Synthetic
cccuuacucucggauccaac

SEQ ID NO: 1164 - RNA, 20 nt, Artificial Sequence
  Synthetic
ccuggccguugccgagcaac

SEQ ID NO: 1165 - RNA, 20 nt, Artificial Sequence
  Synthetic
augggagcaccucucucaac

SEQ ID NO: 1166 - RNA, 20 nt, Artificial Sequence
  Synthetic
ccaacagugcuugguggaac

SEQ ID NO: 1167 - RNA, 20 nt, Artificial Sequence
  Synthetic
guugcauggugcuggugaac

SEQ ID NO: 1168 - RNA, 20 nt, Artificial Sequence
  Synthetic
cacagcuuggaggcuugaac

SEQ ID NO: 1169 - RNA, 20 nt, Artificial Sequence
  Synthetic
gauaacaaaaaauugguaac

SEQ ID NO: 1170 - RNA, 20 nt, Artificial Sequence
  Synthetic
uggcuccaguucagaaacac

SEQ ID NO: 1171 - RNA, 20 nt, Artificial Sequence
  Synthetic
caggguucacacccccacac

SEQ ID NO: 1172 - RNA, 20 nt, Artificial Sequence
  Synthetic
gggaaagcccuacgcaccac

SEQ ID NO: 1173 - RNA, 20 nt, Artificial Sequence
  Synthetic
gcacgucgcauggagaccac

SEQ ID NO: 1174 - RNA, 20 nt, Artificial Sequence
  Synthetic
guguucaaauggaugcccac

SEQ ID NO: 1175 - RNA, 20 nt, Artificial Sequence
  Synthetic
gcuccaccccagaaggccac

SEQ ID NO: 1176 - RNA, 20 nt, Artificial Sequence
  Synthetic
aaaaaugagaguaacuccac

SEQ ID NO: 1177 - RNA, 20 nt, Artificial Sequence
  Synthetic
gggguggagcccucaggcac

SEQ ID NO: 1178 - RNA, 20 nt, Artificial Sequence
  Synthetic
  misc_feature (10)..(10): n is a, c, g, or u
ggagcggacnuuaucggcac

SEQ ID NO: 1179 - RNA, 20 nt, Artificial Sequence
  Synthetic
aaucccagaggauugggcac

SEQ ID NO: 1180 - RNA, 20 nt, Artificial Sequence
  Synthetic
agggacucaagaugcugcac

SEQ ID NO: 1181 - RNA, 20 nt, Artificial Sequence
  Synthetic
  misc_feature (4)..(4): n is a, c, g, or u
  misc_feature (8)..(8): n is a, c, g, or u
aagnuccnaggggcguucac

SEQ ID NO: 1182 - RNA, 20 nt, Artificial Sequence
  Synthetic
uugaggaauacaucaaagac

SEQ ID NO: 1183 - RNA, 20 nt, Artificial Sequence
  Synthetic
ucaucaaucuucucgaagac

SEQ ID NO: 1184 - RNA, 20 nt, Artificial Sequence
  Synthetic
cauauaacuaaaagccagac

SEQ ID NO: 1185 - RNA, 20 nt, Artificial Sequence
  Synthetic
ucccuuagagguggagagac

SEQ ID NO: 1186 - RNA, 20 nt, Artificial Sequence
  Synthetic
aagacuguguauuuaaggac

SEQ ID NO: 1187 - RNA, 20 nt, Artificial Sequence
  Synthetic
gugucgaguaggucccggac

SEQ ID NO: 1188 - RNA, 20 nt, Artificial Sequence
  Synthetic
gcuguaccaaaccuucggac

SEQ ID NO: 1189 - RNA, 20 nt, Artificial Sequence
  Synthetic
agugauuggagauuggggac

SEQ ID NO: 1190 - RNA, 20 nt, Artificial Sequence
  Synthetic
ggcgagaaggggcaugggac

SEQ ID NO: 1191 - RNA, 20 nt, Artificial Sequence
  Synthetic
ugggggugugaacccuggac

SEQ ID NO: 1192 - RNA, 20 nt, Artificial Sequence
  Synthetic
ccucaauccaggucguugac

SEQ ID NO: 1193 - RNA, 20 nt, Artificial Sequence
  Synthetic
gcuccucugccgauccauac

SEQ ID NO: 1194 - RNA, 20 nt, Artificial Sequence
  Synthetic
cgaauuuuggccaggacacc

SEQ ID NO: 1195 - RNA, 20 nt, Artificial Sequence
  Synthetic
aauuuucuagggguaccacc

SEQ ID NO: 1196 - RNA, 20 nt, Artificial Sequence
  Synthetic
  misc_feature (6)..(6): n is a, c, g, or u
auucunacaaccucgccacc

SEQ ID NO: 1197 - RNA, 20 nt, Artificial Sequence
  Synthetic
cgagaugccuuagaaucacc

SEQ ID NO: 1198 - RNA, 20 nt, Artificial Sequence
  Synthetic
cucaauccaggucguugacc

SEQ ID NO: 1199 - RNA, 20 nt, Artificial Sequence
  Synthetic
gugccugagggcuccacccc

SEQ ID NO: 1200 - RNA, 20 nt, Artificial Sequence
  Synthetic
uuuaaccucaacuccucccc

SEQ ID NO: 1201 - RNA, 20 nt, Artificial Sequence
  Synthetic
  misc_feature (11)..(11): n is a, c, g, or u
gcgagguugunagaaugccc

SEQ ID NO: 1202 - RNA, 20 nt, Artificial Sequence
  Synthetic
agcggugucgaguagguccc

SEQ ID NO: 1203 - RNA, 20 nt, Artificial Sequence
  Synthetic
cauccauauaacuaaaagcc

SEQ ID NO: 1204 - RNA, 20 nt, Artificial Sequence
  Synthetic
ccaaucgccaagccccagcc

SEQ ID NO: 1205 - RNA, 20 nt, Artificial Sequence
  Synthetic
cuuuacgcggacuccccgcc

SEQ ID NO: 1206 - RNA, 20 nt, Artificial Sequence
  Synthetic
ugccuucucaucugccggcc

SEQ ID NO: 1207 - RNA, 20 nt, Artificial Sequence
  Synthetic
ggugcgacccgucgucggcc

SEQ ID NO: 1208 - RNA, 20 nt, Artificial Sequence
  Synthetic
gacuaucaagguauguugcc

SEQ ID NO: 1209 - RNA, 20 nt, Artificial Sequence
  Synthetic
  misc_feature (4)..(4): n is a, c, g, or u
acunuaccuguuuucaaucc

SEQ ID NO: 1210 - RNA, 20 nt, Artificial Sequence
  Synthetic
gucccgucggcgcugaaucc

SEQ ID NO: 1211 - RNA, 20 nt, Artificial Sequence
  Synthetic
  misc_feature (1)..(1): n is a, c, g, or u
nugugcugccaacuggaucc

SEQ ID NO: 1212 - RNA, 20 nt, Artificial Sequence
  Synthetic
  misc_feature (11)..(11): n is a, c, g, or u
gugccgauaanguccgcucc

SEQ ID NO: 1213 - RNA, 20 nt, Artificial Sequence
  Synthetic
gucuaacaacaguagucucc

SEQ ID NO: 1214 - RNA, 20 nt, Artificial Sequence
  Synthetic
agagcaaauuccagcagucc

SEQ ID NO: 1215 - RNA, 20 nt, Artificial Sequence
  Synthetic
agaagggguccuaggagucc

SEQ ID NO: 1216 - RNA, 20 nt, Artificial Sequence
  Synthetic
gcaacauaccuugauagucc

SEQ ID NO: 1217 - RNA, 20 nt, Artificial Sequence
  Synthetic
gacguagacaaaggacgucc

SEQ ID NO: 1218 - RNA, 20 nt, Artificial Sequence
  Synthetic
ggagugggaggcuucggucc

SEQ ID NO: 1219 - RNA, 20 nt, Artificial Sequence
  Synthetic
gugcagguuuugcagggucc

SEQ ID NO: 1220 - RNA, 20 nt, Artificial Sequence
  Synthetic
uuugugggucaccauauucc

SEQ ID NO: 1221 - RNA, 20 nt, Artificial Sequence
  Synthetic
gauugcuuucgcaaacuucc

SEQ ID NO: 1222 - RNA, 20 nt, Artificial Sequence
  Synthetic
  misc_feature (11)..(11): n is a, c, g, or u
aguugaugacnuuggcuucc

SEQ ID NO: 1223 - RNA, 20 nt, Artificial Sequence
  Synthetic
acugggguuggcuuucuucc

SEQ ID NO: 1224 - RNA, 20 nt, Artificial Sequence
  Synthetic
aauccucugggauucuuucc

SEQ ID NO: 1225 - RNA, 20 nt, Artificial Sequence
  Synthetic
ugguuaacuccuucuuuucc

SEQ ID NO: 1226 - RNA, 20 nt, Artificial Sequence
  Synthetic
cacuguucaagccuccaagc

SEQ ID NO: 1227 - RNA, 20 nt, Artificial Sequence
  Synthetic
ucucgguagagggcugaagc

SEQ ID NO: 1228 - RNA, 20 nt, Artificial Sequence
  Synthetic
agagaggcaauagucggagc

SEQ ID NO: 1229 - RNA, 20 nt, Artificial Sequence
  Synthetic
  misc_feature (10)..(10): n is a, c, g, or u
gcucgcagcnggucuggagc

SEQ ID NO: 1230 - RNA, 20 nt, Artificial Sequence
  Synthetic
ccccaccauuuuguuuuagc

SEQ ID NO: 1231 - RNA, 20 nt, Artificial Sequence
  Synthetic
ggucgcaccucucuuuacgc

SEQ ID NO: 1232 - RNA, 20 nt, Artificial Sequence
  Synthetic
ggaagaugauaaaacgccgc

SEQ ID NO: 1233 - RNA, 20 nt, Artificial Sequence
  Synthetic
ucguccgcaggauucagcgc

SEQ ID NO: 1234 - RNA, 20 nt, Artificial Sequence
  Synthetic
ugucuacgucccgucggcgc

SEQ ID NO: 1235 - RNA, 20 nt, Artificial Sequence
  Synthetic
uuggccaucagcgcaugcgc

SEQ ID NO: 1236 - RNA, 20 nt, Artificial Sequence
  Synthetic
caaagguuccgcgcaugcgc

SEQ ID NO: 1237 - RNA, 20 nt, Artificial Sequence
  Synthetic
gaagaacucccucgccucgc

SEQ ID NO: 1238 - RNA, 20 nt, Artificial Sequence
  Synthetic
  misc_feature (11)..(11): n is a, c, g, or u
gaucucaaucnccgcgucgc

SEQ ID NO: 1239 - RNA, 20 nt, Artificial Sequence
  Synthetic
gcagaugagaaggcacaggc

SEQ ID NO: 1240 - RNA, 20 nt, Artificial Sequence
  Synthetic
ccccuucucguguuacaggc

SEQ ID NO: 1241 - RNA, 20 nt, Artificial Sequence
  Synthetic
cuguuguuagacaacgaggc

SEQ ID NO: 1242 - RNA, 20 nt, Artificial Sequence
  Synthetic
cgaagugcacacgggccggc

SEQ ID NO: 1243 - RNA, 20 nt, Artificial Sequence
  Synthetic
  misc_feature (10)..(11): n is a, c, g, or u
ucuccgccunncguuccggc

SEQ ID NO: 1244 - RNA, 20 nt, Artificial Sequence
  Synthetic
aaggcaucucgguagagggc

SEQ ID NO: 1245 - RNA, 20 nt, Artificial Sequence
  Synthetic
cugacgcaacccccacuggc

SEQ ID NO: 1246 - RNA, 20 nt, Artificial Sequence
  Synthetic
  misc_feature (3)..(3): n is a, c, g, or u
  misc_feature (18)..(18): n is a, c, g, or u
aanguccgcuccagaccngc

SEQ ID NO: 1247 - RNA, 20 nt, Artificial Sequence
  Synthetic
cacacauccacaggccaugc

SEQ ID NO: 1248 - RNA, 20 nt, Artificial Sequence
  Synthetic
ccucugccgauccauacugc

SEQ ID NO: 1249 - RNA, 20 nt, Artificial Sequence
  Synthetic
ccgucggcgcugaauccugc

SEQ ID NO: 1250 - RNA, 20 nt, Artificial Sequence
  Synthetic
aaccuuuguggcuccucugc

SEQ ID NO: 1251 - RNA, 20 nt, Artificial Sequence
  Synthetic
cuaucguuggaugugucugc

SEQ ID NO: 1252 - RNA, 20 nt, Artificial Sequence
  Synthetic
  misc_feature (7)..(7): n is a, c, g, or u
gacaacngaguugucagugc

SEQ ID NO: 1253 - RNA, 20 nt, Artificial Sequence
  Synthetic
ucaggcaagcuauuuugugc

SEQ ID NO: 1254 - RNA, 20 nt, Artificial Sequence
  Synthetic
ggccuuugccaaguguuugc

SEQ ID NO: 1255 - RNA, 20 nt, Artificial Sequence
  Synthetic
aagaguggugcagguuuugc

SEQ ID NO: 1256 - RNA, 20 nt, Artificial Sequence
  Synthetic
  misc_feature (19)..(19): n is a, c, g, or u
auguucuccauguucauanc

SEQ ID NO: 1257 - RNA, 20 nt, Artificial Sequence
  Synthetic
  misc_feature (19)..(19): n is a, c, g, or u
cagacgaagaucucaaucnc

SEQ ID NO: 1258 - RNA, 20 nt, Artificial Sequence
  Synthetic
  misc_feature (1)..(1): n is a, c, g, or u
nugguauugggggccaaauc

SEQ ID NO: 1259 - RNA, 20 nt, Artificial Sequence
  Synthetic
gggcuuggcgauuggccauc

SEQ ID NO: 1260 - RNA, 20 nt, Artificial Sequence
  Synthetic
guuaccaauuuuuuguuauc

SEQ ID NO: 1261 - RNA, 20 nt, Artificial Sequence
  Synthetic
uuggcuuucuuccugaccuc

SEQ ID NO: 1262 - RNA, 20 nt, Artificial Sequence
  Synthetic
  misc_feature (1)..(1): n is a, c, g, or u
ncuuucugugcccaauccuc

SEQ ID NO: 1263 - RNA, 20 nt, Artificial Sequence
  Synthetic
agaaacacagaacccugcuc

SEQ ID NO: 1264 - RNA, 20 nt, Artificial Sequence
  Synthetic
gggacugcuggaauuugcuc

SEQ ID NO: 1265 - RNA, 20 nt, Artificial Sequence
  Synthetic
  misc_feature (8)..(8): n is a, c, g, or u
aauacagnccccuuacucuc

SEQ ID NO: 1266 - RNA, 20 nt, Artificial Sequence
  Synthetic
  misc_feature (7)..(7): n is a, c, g, or u
caacucnguuguccuuucuc

SEQ ID NO: 1267 - RNA, 20 nt, Artificial Sequence
  Synthetic
cggacagacgggaagaaguc

SEQ ID NO: 1268 - RNA, 20 nt, Artificial Sequence
  Synthetic
uuuaaggacugggaggaguc

SEQ ID NO: 1269 - RNA, 20 nt, Artificial Sequence
  Synthetic
gaaggcacaggcggggaguc

SEQ ID NO: 1270 - RNA, 20 nt, Artificial Sequence
  Synthetic
uccuuugucuacgucccguc

SEQ ID NO: 1271 - RNA, 20 nt, Artificial Sequence
  Synthetic
auacaggugcaauuuccguc

SEQ ID NO: 1272 - RNA, 20 nt, Artificial Sequence
  Synthetic
  misc_feature (4)..(4): n is a, c, g, or u
cggngauugagaucuucguc

SEQ ID NO: 1273 - RNA, 20 nt, Artificial Sequence
  Synthetic
cugacuucuucccgucuguc

SEQ ID NO: 1274 - RNA, 20 nt, Artificial Sequence
  Synthetic
uggcuaucguuggauguguc

SEQ ID NO: 1275 - RNA, 20 nt, Artificial Sequence
  Synthetic
  misc_feature (12)..(12): n is a, c, g, or u
gaaaggacaacngaguuguc

SEQ ID NO: 1276 - RNA, 20 nt, Artificial Sequence
  Synthetic
aggggucguccgcaggauuc

SEQ ID NO: 1277 - RNA, 20 nt, Artificial Sequence
  Synthetic
ugcugcuguaccaaaccuuc

SEQ ID NO: 1278 - RNA, 20 nt, Artificial Sequence
  Synthetic
acccccacacgguggccuuc

SEQ ID NO: 1279 - RNA, 20 nt, Artificial Sequence
  Synthetic
uuacucucauuuuugccuuc

SEQ ID NO: 1280 - RNA, 20 nt, Artificial Sequence
  Synthetic
uauaaagaauuuggagcuuc

SEQ ID NO: 1281 - RNA, 20 nt, Artificial Sequence
  Synthetic
agcuggagauugagaucuuc

SEQ ID NO: 1282 - RNA, 20 nt, Artificial Sequence
  Synthetic
ccugcugguggcuccaguuc

SEQ ID NO: 1283 - RNA, 20 nt, Artificial Sequence
  Synthetic
cagaggagccacaaagguuc

SEQ ID NO: 1284 - RNA, 20 nt, Artificial Sequence
  Synthetic
caauagucggagcaggguuc

SEQ ID NO: 1285 - RNA, 20 nt, Artificial Sequence
  Synthetic
uuuacuagugcaauuuguuc

SEQ ID NO: 1286 - RNA, 20 nt, Artificial Sequence
  Synthetic
ucccaucaucuugggcuuuc

SEQ ID NO: 1287 - RNA, 20 nt, Artificial Sequence
  Synthetic
  misc_feature (15)..(15): n is a, c, g, or u
ggcaugggacagaancuuuc

SEQ ID NO: 1288 - RNA, 20 nt, Artificial Sequence
  Synthetic
ggagcaggguucuguguuuc

SEQ ID NO: 1289 - RNA, 20 nt, Artificial Sequence
  Synthetic
ccacucccauagguauuuuc

SEQ ID NO: 1290 - RNA, 20 nt, Artificial Sequence
  Synthetic
  misc_feature (1)..(1): n is a, c, g, or u
nuuaauaccuuuauccaaag

SEQ ID NO: 1291 - RNA, 20 nt, Artificial Sequence
  Synthetic
uugguaacagcgguauaaag

SEQ ID NO: 1292 - RNA, 20 nt, Artificial Sequence
  Synthetic
  misc_feature (2)..(2): n is a, c, g, or u
gngggcggcagagccccaag

SEQ ID NO: 1293 - RNA, 20 nt, Artificial Sequence
  Synthetic
cacuaguaaacugagccaag

SEQ ID NO: 1294 - RNA, 20 nt, Artificial Sequence
  Synthetic
auagagguuccuugagcaag

SEQ ID NO: 1295 - RNA, 20 nt, Artificial Sequence
  Synthetic
  misc_feature (7)..(7): n is a, c, g, or u
guaucanaucuugaugcaag

SEQ ID NO: 1296 - RNA, 20 nt, Artificial Sequence
  Synthetic
  misc_feature (8)..(9): n is a, c, g, or u
cggaacgnnaggcggagaag

SEQ ID NO: 1297 - RNA, 20 nt, Artificial Sequence
  Synthetic
  misc_feature (3)..(3): n is a, c, g, or u
ucnugccuuacauuuggaag

SEQ ID NO: 1298 - RNA, 20 nt, Artificial Sequence
  Synthetic
ugcgacgugcagaggugaag

SEQ ID NO: 1299 - RNA, 20 nt, Artificial Sequence
  Synthetic
ccagucucuccaccucuaag

SEQ ID NO: 1300 - RNA, 20 nt, Artificial Sequence
  Synthetic
gaggacaggagguugguaag

SEQ ID NO: 1301 - RNA, 20 nt, Artificial Sequence
  Synthetic
cagcuuggaggcuugaacag

SEQ ID NO: 1302 - RNA, 20 nt, Artificial Sequence
  Synthetic
uauaacuaaaagccagacag

SEQ ID NO: 1303 - RNA, 20 nt, Artificial Sequence
  Synthetic
  misc_feature (7)..(7): n is a, c, g, or u
gguucanguauuguuuacag

SEQ ID NO: 1304 - RNA, 20 nt, Artificial Sequence
  Synthetic
aaucgccaagccccagccag

SEQ ID NO: 1305 - RNA, 20 nt, Artificial Sequence
  Synthetic
  misc_feature (7)..(7): n is a, c, g, or u
uauuaanccuuacuauccag

SEQ ID NO: 1306 - RNA, 20 nt, Artificial Sequence
  Synthetic
gcaggaauucuauauaagag

SEQ ID NO: 1307 - RNA, 20 nt, Artificial Sequence
  Synthetic
gagccccaagcgaccacgag

SEQ ID NO: 1308 - RNA, 20 nt, Artificial Sequence
  Synthetic
  misc_feature (12)..(12): n is a, c, g, or u
cgcuccagaccngcugcgag

SEQ ID NO: 1309 - RNA, 20 nt, Artificial Sequence
  Synthetic
guuugguacagcagcaggag

SEQ ID NO: 1310 - RNA, 20 nt, Artificial Sequence
  Synthetic
aauggcaaacaagguaggag

SEQ ID NO: 1311 - RNA, 20 nt, Artificial Sequence
  Synthetic
ucggaaaauaccuaugggag

SEQ ID NO: 1312 - RNA, 20 nt, Artificial Sequence
  Synthetic
  misc_feature (7)..(7): n is a, c, g, or u
uggucunuaagcagguggag

SEQ ID NO: 1313 - RNA, 20 nt, Artificial Sequence
  Synthetic
ugugucccuuagagguggag

SEQ ID NO: 1314 - RNA, 20 nt, Artificial Sequence
  Synthetic
guauuuggugucuuuuggag

SEQ ID NO: 1315 - RNA, 20 nt, Artificial Sequence
  Synthetic
  misc_feature (13)..(13): n is a, c, g, or u
cuccuuucauuunuagugag

SEQ ID NO: 1316 - RNA, 20 nt, Artificial Sequence
  Synthetic
gguaccccuagaaaauugag

SEQ ID NO: 1317 - RNA, 20 nt, Artificial Sequence
  Synthetic
  misc_feature (18)..(18): n is a, c, g, or u
uuagaggauccugcagcnag

SEQ ID NO: 1318 - RNA, 20 nt, Artificial Sequence
  Synthetic
auucuaaggcaucucgguag

SEQ ID NO: 1319 - RNA, 20 nt, Artificial Sequence
  Synthetic
aacacaccgccuguaacacg

SEQ ID NO: 1320 - RNA, 20 nt, Artificial Sequence
  Synthetic
gaucuacaaccaccagcacg

SEQ ID NO: 1321 - RNA, 20 nt, Artificial Sequence
  Synthetic
aaucaaugggucuauucacg

SEQ ID NO: 1322 - RNA, 20 nt, Artificial Sequence
  Synthetic
gaguaggucccggacagacg

SEQ ID NO: 1323 - RNA, 20 nt, Artificial Sequence
  Synthetic
cgcaggauucagcgccgacg

SEQ ID NO: 1324 - RNA, 20 nt, Artificial Sequence
  Synthetic
acgucgcauggagaccaccg

SEQ ID NO: 1325 - RNA, 20 nt, Artificial Sequence
  Synthetic
uccaccccagaaggccaccg

SEQ ID NO: 1326 - RNA, 20 nt, Artificial Sequence
  Synthetic
accgcuucagcccucuaccg

SEQ ID NO: 1327 - RNA, 20 nt, Artificial Sequence
  Synthetic
aauuuuggccaggacacccg

SEQ ID NO: 1328 - RNA, 20 nt, Artificial Sequence
  Synthetic
uuuucuagggguaccacccg

SEQ ID NO: 1329 - RNA, 20 nt, Artificial Sequence
  Synthetic
ccuucucaucugccggcccg

SEQ ID NO: 1330 - RNA, 20 nt, Artificial Sequence
  Synthetic
cuaucaagguauguugcccg

SEQ ID NO: 1331 - RNA, 20 nt, Artificial Sequence
  Synthetic
uugcuuucgcaaacuucccg

SEQ ID NO: 1332 - RNA, 20 nt, Artificial Sequence
  Synthetic
gacuucuucccgucuguccg

SEQ ID NO: 1333 - RNA, 20 nt, Artificial Sequence
  Synthetic
gggaaggagguguacuuccg

SEQ ID NO: 1334 - RNA, 20 nt, Artificial Sequence
  Synthetic
ugccaacuggauccugcgcg

SEQ ID NO: 1335 - RNA, 20 nt, Artificial Sequence
  Synthetic
agaucuucgucugcgaggcg

SEQ ID NO: 1336 - RNA, 20 nt, Artificial Sequence
  Synthetic
gagcaccucucucaacggcg

SEQ ID NO: 1337 - RNA, 20 nt, Artificial Sequence
  Synthetic
aaaggccuuguaaguuggcg

SEQ ID NO: 1338 - RNA, 20 nt, Artificial Sequence
  Synthetic
gcugccaacuggauccugcg

SEQ ID NO: 1339 - RNA, 20 nt, Artificial Sequence
  Synthetic
  misc_feature (14)..(14): n is a, c, g, or u
uccgcuccagaccngcugcg

SEQ ID NO: 1340 - RNA, 20 nt, Artificial Sequence
  Synthetic
uuguguugaagucccaaucg

SEQ ID NO: 1341 - RNA, 20 nt, Artificial Sequence
  Synthetic
uuaaggacugggaggagucg

SEQ ID NO: 1342 - RNA, 20 nt, Artificial Sequence
  Synthetic
  misc_feature (2)..(2): n is a, c, g, or u
ancaggguccccagucuucg

SEQ ID NO: 1343 - RNA, 20 nt, Artificial Sequence
  Synthetic
  misc_feature (10)..(10): n is a, c, g, or u
cacucacuanaaaugaaagg

SEQ ID NO: 1344 - RNA, 20 nt, Artificial Sequence
  Synthetic
uauuccuuggacucauaagg

SEQ ID NO: 1345 - RNA, 20 nt, Artificial Sequence
  Synthetic
ggcagaugagaaggcacagg

SEQ ID NO: 1346 - RNA, 20 nt, Artificial Sequence
  Synthetic
agguuugguacagcagcagg

SEQ ID NO: 1347 - RNA, 20 nt, Artificial Sequence
  Synthetic
aaaagaugauuaggcagagg

SEQ ID NO: 1348 - RNA, 20 nt, Artificial Sequence
  Synthetic
cuccaugcgacgugcagagg

SEQ ID NO: 1349 - RNA, 20 nt, Artificial Sequence
  Synthetic
ggaguccgcguaaagagagg

SEQ ID NO: 1350 - RNA, 20 nt, Artificial Sequence
  Synthetic
  misc_feature (13)..(13): n is a, c, g, or u
  misc_feature (17)..(17): n is a, c, g, or u
guuguuggcaagnuccnagg

SEQ ID NO: 1351 - RNA, 20 nt, Artificial Sequence
  Synthetic
ccaauggcaaacaagguagg

SEQ ID NO: 1352 - RNA, 20 nt, Artificial Sequence
  Synthetic
caauccaggucguugaccgg

SEQ ID NO: 1353 - RNA, 20 nt, Artificial Sequence
  Synthetic
uauccuaucaacacuuccgg

SEQ ID NO: 1354 - RNA, 20 nt, Artificial Sequence
  Synthetic
ugagaucuucugcgacgcgg

SEQ ID NO: 1355 - RNA, 20 nt, Artificial Sequence
  Synthetic
ccuucucguguuacaggcgg

SEQ ID NO: 1356 - RNA, 20 nt, Artificial Sequence
  Synthetic
  misc_feature (13)..(14): n is a, c, g, or u
ucggccggaacgnnaggcgg

SEQ ID NO: 1357 - RNA, 20 nt, Artificial Sequence
  Synthetic
auccaggucguugaccgggg

SEQ ID NO: 1358 - RNA, 20 nt, Artificial Sequence
  Synthetic
agaaggccaccguguggggg

SEQ ID NO: 1359 - RNA, 20 nt, Artificial Sequence
  Synthetic
uuucggaaaauaccuauggg

SEQ ID NO: 1360 - RNA, 20 nt, Artificial Sequence
  Synthetic
  misc_feature (7)..(7): n is a, c, g, or u
gaugacnuuggcuuccuggg

SEQ ID NO: 1361 - RNA, 20 nt, Artificial Sequence
  Synthetic
acuaaaagccagacaguggg

SEQ ID NO: 1362 - RNA, 20 nt, Artificial Sequence
  Synthetic
ccagaaggccaccguguggg

SEQ ID NO: 1363 - RNA, 20 nt, Artificial Sequence
  Synthetic
  misc_feature (7)..(7): n is a, c, g, or u
uuauaunauugggaguuggg

SEQ ID NO: 1364 - RNA, 20 nt, Artificial Sequence
  Synthetic
  misc_feature (12)..(12): n is a, c, g, or u
cugagagcagunugguuggg

SEQ ID NO: 1365 - RNA, 20 nt, Artificial Sequence
  Synthetic
  misc_feature (18)..(18): n is a, c, g, or u
uugggggugcaauguucngg

SEQ ID NO: 1366 - RNA, 20 nt, Artificial Sequence
  Synthetic
acacagcuaaaacaaaaugg

SEQ ID NO: 1367 - RNA, 20 nt, Artificial Sequence
  Synthetic
  misc_feature (9)..(9): n is a, c, g, or u
ggacccugnuaugaacaugg

SEQ ID NO: 1368 - RNA, 20 nt, Artificial Sequence
  Synthetic
caccucugcacgucgcaugg

SEQ ID NO: 1369 - RNA, 20 nt, Artificial Sequence
  Synthetic
ucuuguucccaggaauaugg

SEQ ID NO: 1370 - RNA, 20 nt, Artificial Sequence
  Synthetic
ucaaucuucucgaagacugg

SEQ ID NO: 1371 - RNA, 20 nt, Artificial Sequence
  Synthetic
uacuaacauugggaagcugg

SEQ ID NO: 1372 - RNA, 20 nt, Artificial Sequence
  Synthetic
aaaaaguugcauggugcugg

SEQ ID NO: 1373 - RNA, 20 nt, Artificial Sequence
  Synthetic
ggcaagcuauuuugugcugg

SEQ ID NO: 1374 - RNA, 20 nt, Artificial Sequence
  Synthetic
  misc_feature (13)..(13): n is a, c, g, or u
uucgcucgcagcnggucugg

SEQ ID NO: 1375 - RNA, 20 nt, Artificial Sequence
  Synthetic
cccacacgguggccuucugg

SEQ ID NO: 1376 - RNA, 20 nt, Artificial Sequence
  Synthetic
uagugcaauuuguucagugg

SEQ ID NO: 1377 - RNA, 20 nt, Artificial Sequence
  Synthetic
  misc_feature (9)..(9): n is a, c, g, or u
gguggucunuaagcaggugg

SEQ ID NO: 1378 - RNA, 20 nt, Artificial Sequence
  Synthetic
gguaagugauuggagauugg

SEQ ID NO: 1379 - RNA, 20 nt, Artificial Sequence
  Synthetic
ggagguugguaagugauugg

SEQ ID NO: 1380 - RNA, 20 nt, Artificial Sequence
  Synthetic
ccccacuggcuggggcuugg

SEQ ID NO: 1381 - RNA, 20 nt, Artificial Sequence
  Synthetic
gaguauuuggugucuuuugg

SEQ ID NO: 1382 - RNA, 20 nt, Artificial Sequence
  Synthetic
  misc_feature (6)..(7): n is a, c, g, or u
  misc_feature (19)..(19): n is a, c, g, or u
gaacgnnaggcggagaagng

SEQ ID NO: 1383 - RNA, 20 nt, Artificial Sequence
  Synthetic
  misc_feature (7)..(7): n is a, c, g, or u
caagaunugauacaaaaaug

SEQ ID NO: 1384 - RNA, 20 nt, Artificial Sequence
  Synthetic
  misc_feature (7)..(7): n is a, c, g, or u
agcacanccuagcagccaug

SEQ ID NO: 1385 - RNA, 20 nt, Artificial Sequence
  Synthetic
cguucacgguggucuccaug

SEQ ID NO: 1386 - RNA, 20 nt, Artificial Sequence
  Synthetic
cgauuggccaucagcgcaug

SEQ ID NO: 1387 - RNA, 20 nt, Artificial Sequence
  Synthetic
caacggcgagaaggggcaug

SEQ ID NO: 1388 - RNA, 20 nt, Artificial Sequence
  Synthetic
ugcacacgggccggcagaug

SEQ ID NO: 1389 - RNA, 20 nt, Artificial Sequence
  Synthetic
aagcccaagaugaugggaug

SEQ ID NO: 1390 - RNA, 20 nt, Artificial Sequence
  Synthetic
cacugcauggccuguggaug

SEQ ID NO: 1391 - RNA, 20 nt, Artificial Sequence
  Synthetic
uccgaaagcccaagaugaug

SEQ ID NO: 1392 - RNA, 20 nt, Artificial Sequence
  Synthetic
ggguccuaggaguccugaug

SEQ ID NO: 1393 - RNA, 20 nt, Artificial Sequence
  Synthetic
ccacaaaaugaggcgcuaug

SEQ ID NO: 1394 - RNA, 20 nt, Artificial Sequence
  Synthetic
ugauuggagauuggggacug

SEQ ID NO: 1395 - RNA, 20 nt, Artificial Sequence
  Synthetic
  misc_feature (3)..(3): n is a, c, g, or u
gunagaaugcccugugccug

SEQ ID NO: 1396 - RNA, 20 nt, Artificial Sequence
  Synthetic
gugcugccaacuggauccug

SEQ ID NO: 1397 - RNA, 20 nt, Artificial Sequence
  Synthetic
ugugggucaccauauuccug

SEQ ID NO: 1398 - RNA, 20 nt, Artificial Sequence
  Synthetic
  misc_feature (9)..(9): n is a, c, g, or u
uugaugacnuuggcuuccug

SEQ ID NO: 1399 - RNA, 20 nt, Artificial Sequence
  Synthetic
uaccaauuuuuuguuaucug

SEQ ID NO: 1400 - RNA, 20 nt, Artificial Sequence
  Synthetic
uuucugugcccaauccucug

SEQ ID NO: 1401 - RNA, 20 nt, Artificial Sequence
  Synthetic
cuggagauugagaucuucug

SEQ ID NO: 1402 - RNA, 20 nt, Artificial Sequence
  Synthetic
gcuuggaggcuugaacagug

SEQ ID NO: 1403 - RNA, 20 nt, Artificial Sequence
  Synthetic
uaacuaaaagccagacagug

SEQ ID NO: 1404 - RNA, 20 nt, Artificial Sequence
  Synthetic
ucgccaagccccagccagug

SEQ ID NO: 1405 - RNA, 20 nt, Artificial Sequence
  Synthetic
  misc_feature (15)..(15): n is a, c, g, or u
gucuccuuucauuunuagug

SEQ ID NO: 1406 - RNA, 20 nt, Artificial Sequence
  Synthetic
caccccagaaggccaccgug

SEQ ID NO: 1407 - RNA, 20 nt, Artificial Sequence
  Synthetic
uuccuuggacucauaaggug

SEQ ID NO: 1408 - RNA, 20 nt, Artificial Sequence
  Synthetic
aguccgcguaaagagaggug

SEQ ID NO: 1409 - RNA, 20 nt, Artificial Sequence
  Synthetic
aaggccaccgugugggggug

SEQ ID NO: 1410 - RNA, 20 nt, Artificial Sequence
  Synthetic
ccccagaaggccaccgugug

SEQ ID NO: 1411 - RNA, 20 nt, Artificial Sequence
  Synthetic
uccaaggaauacuaacauug

SEQ ID NO: 1412 - RNA, 20 nt, Artificial Sequence
  Synthetic
cauugggaagcuggagauug

SEQ ID NO: 1413 - RNA, 20 nt, Artificial Sequence
  Synthetic
aauuccagcagucccgauug

SEQ ID NO: 1414 - RNA, 20 nt, Artificial Sequence
  Synthetic
  misc_feature (15)..(15): n is a, c, g, or u
cuucugcgacgcggngauug

SEQ ID NO: 1415 - RNA, 20 nt, Artificial Sequence
  Synthetic
  misc_feature (16)..(16): n is a, c, g, or u
gaagguuugucaacgnauug

SEQ ID NO: 1416 - RNA, 20 nt, Artificial Sequence
  Synthetic
  misc_feature (12)..(12): n is a, c, g, or u
auauggaugaunugguauug

SEQ ID NO: 1417 - RNA, 20 nt, Artificial Sequence
  Synthetic
agccuccaagcugugccuug

SEQ ID NO: 1418 - RNA, 20 nt, Artificial Sequence
  Synthetic
  misc_feature (9)..(9): n is a, c, g, or u
gguuauaunauugggaguug

SEQ ID NO: 1419 - RNA, 20 nt, Artificial Sequence
  Synthetic
  misc_feature (14)..(14): n is a, c, g, or u
gccugagagcagunugguug

SEQ ID NO: 1420 - RNA, 20 nt, Artificial Sequence
  Synthetic
ggaaguauuuaguaacuuug

SEQ ID NO: 1421 - RNA, 20 nt, Artificial Sequence
  Synthetic
gucuauucacgggaaguuug

SEQ ID NO: 1422 - RNA, 20 nt, Artificial Sequence
  Synthetic
acacauagcgccucauuuug

SEQ ID NO: 1423 - RNA, 20 nt, Artificial Sequence
  Synthetic
  misc_feature (18)..(18): n is a, c, g, or u
  misc_feature (20)..(20): n is a, c, g, or u
auauaacccauaaagugnan

SEQ ID NO: 1424 - RNA, 20 nt, Artificial Sequence
  Synthetic
  misc_feature (2)..(2): n is a, c, g, or u
  misc_feature (20)..(20): n is a, c, g, or u
uncgcacuccaccugcuuan

SEQ ID NO: 1425 - RNA, 20 nt, Artificial Sequence
  Synthetic
  misc_feature (20)..(20): n is a, c, g, or u
cuuucucuguaaacaauacn

SEQ ID NO: 1426 - RNA, 20 nt, Artificial Sequence
  Synthetic
  misc_feature (16)..(16): n is a, c, g, or u
  misc_feature (20)..(20): n is a, c, g, or u
aagguuguuggcaagnuccn

SEQ ID NO: 1427 - RNA, 20 nt, Artificial Sequence
  Synthetic
  misc_feature (20)..(20): n is a, c, g, or u
gguugggggugcaauguucn

SEQ ID NO: 1428 - RNA, 20 nt, Artificial Sequence
  Synthetic
  misc_feature (20)..(20): n is a, c, g, or u
ccuucccauggcugcuaggn

SEQ ID NO: 1429 - RNA, 20 nt, Artificial Sequence
  Synthetic
  misc_feature (14)..(14): n is a, c, g, or u
  misc_feature (20)..(20): n is a, c, g, or u
caaauguaaggcangaaaun

SEQ ID NO: 1430 - RNA, 20 nt, Artificial Sequence
  Synthetic
  misc_feature (20)..(20): n is a, c, g, or u
cauucacuugcaucaagaun

SEQ ID NO: 1431 - RNA, 20 nt, Artificial Sequence
  Synthetic
  misc_feature (20)..(20): n is a, c, g, or u
gaccaccgugaacgccccun

SEQ ID NO: 1432 - RNA, 20 nt, Artificial Sequence
  Synthetic
  misc_feature (20)..(20): n is a, c, g, or u
gaucugguggcgagguugun

SEQ ID NO: 1433 - RNA, 20 nt, Artificial Sequence
  Synthetic
gaacacagcuaaaacaaaau

SEQ ID NO: 1434 - RNA, 20 nt, Artificial Sequence
  Synthetic
uguuuuagcuguguucaaau

SEQ ID NO: 1435 - RNA, 20 nt, Artificial Sequence
  Synthetic
guuuguguugaagucccaau

SEQ ID NO: 1436 - RNA, 20 nt, Artificial Sequence
  Synthetic
ugcuggaauuugcucugaau

SEQ ID NO: 1437 - RNA, 20 nt, Artificial Sequence
  Synthetic
uucgcaaacuucccgugaau

SEQ ID NO: 1438 - RNA, 20 nt, Artificial Sequence
  Synthetic
aguccaaggaauacuaacau

SEQ ID NO: 1439 - RNA, 20 nt, Artificial Sequence
  Synthetic
auaagagagaauccacacau

SEQ ID NO: 1440 - RNA, 20 nt, Artificial Sequence
  Synthetic
uggcuuuggggcauggacau

SEQ ID NO: 1441 - RNA, 20 nt, Artificial Sequence
  Synthetic
cuucccgugaauagacccau

SEQ ID NO: 1442 - RNA, 20 nt, Artificial Sequence
  Synthetic
cuuggguggcuuuggggcau

SEQ ID NO: 1443 - RNA, 20 nt, Artificial Sequence
  Synthetic
cagaggugaaaaaguugcau

SEQ ID NO: 1444 - RNA, 20 nt, Artificial Sequence
  Synthetic
uccccagucuucgagaagau

SEQ ID NO: 1445 - RNA, 20 nt, Artificial Sequence
  Synthetic
guugguaagugauuggagau

SEQ ID NO: 1446 - RNA, 20 nt, Artificial Sequence
  Synthetic
  misc_feature (3)..(3): n is a, c, g, or u
uanaaaugaaaggagacgau

SEQ ID NO: 1447 - RNA, 20 nt, Artificial Sequence
  Synthetic
caaauuccagcagucccgau

SEQ ID NO: 1448 - RNA, 20 nt, Artificial Sequence
  Synthetic
aggaguuaaccagucaggau

SEQ ID NO: 1449 - RNA, 20 nt, Artificial Sequence
  Synthetic
uggaaagaaucccagaggau

SEQ ID NO: 1450 - RNA, 20 nt, Artificial Sequence
  Synthetic
uccggaaguguugauaggau

SEQ ID NO: 1451 - RNA, 20 nt, Artificial Sequence
  Synthetic
  misc_feature (18)..(18): n is a, c, g, or u
uggaagguuugucaacgnau

SEQ ID NO: 1452 - RNA, 20 nt, Artificial Sequence
  Synthetic
  misc_feature (18)..(18): n is a, c, g, or u
cacuuuauggguuauaunau

SEQ ID NO: 1453 - RNA, 20 nt, Artificial Sequence
  Synthetic
gcucuuguucccaggaauau

SEQ ID NO: 1454 - RNA, 20 nt, Artificial Sequence
  Synthetic
  misc_feature (3)..(3): n is a, c, g, or u
acnuugccucaggaacauau

SEQ ID NO: 1455 - RNA, 20 nt, Artificial Sequence
  Synthetic
guguggauucucucuuauau

SEQ ID NO: 1456 - RNA, 20 nt, Artificial Sequence
  Synthetic
ugucuggcuuuuaguuauau

SEQ ID NO: 1457 - RNA, 20 nt, Artificial Sequence
  Synthetic
  misc_feature (1)..(1): n is a, c, g, or u
ngcuaggaguuccgcaguau

SEQ ID NO: 1458 - RNA, 20 nt, Artificial Sequence
  Synthetic
  misc_feature (7)..(7): n is a, c, g, or u
  misc_feature (13)..(13): n is a, c, g, or u
uuuuagncccaunuuaguau

SEQ ID NO: 1459 - RNA, 20 nt, Artificial Sequence
  Synthetic
  misc_feature (14)..(14): n is a, c, g, or u
uuauauggaugaunugguau

SEQ ID NO: 1460 - RNA, 20 nt, Artificial Sequence
  Synthetic
  misc_feature (14)..(14): n is a, c, g, or u
gagucuagacucunugguau

SEQ ID NO: 1461 - RNA, 20 nt, Artificial Sequence
  Synthetic
  misc_feature (14)..(14): n is a, c, g, or u
uuaaucauuacuunaaaacu

SEQ ID NO: 1462 - RNA, 20 nt, Artificial Sequence
  Synthetic
  misc_feature (7)..(7): n is a, c, g, or u
gcuaggnugugcugccaacu

SEQ ID NO: 1463 - RNA, 20 nt, Artificial Sequence
  Synthetic
ucugaauaguggauccaacu

SEQ ID NO: 1464 - RNA, 20 nt, Artificial Sequence
  Synthetic
caucaaucuucucgaagacu

SEQ ID NO: 1465 - RNA, 20 nt, Artificial Sequence
  Synthetic
cccuuagagguggagagacu

SEQ ID NO: 1466 - RNA, 20 nt, Artificial Sequence
  Synthetic
  misc_feature (8)..(8): n is a, c, g, or u
aauaccanagagucuagacu

SEQ ID NO: 1467 - RNA, 20 nt, Artificial Sequence
  Synthetic
uauugacauaauuaacuacu

SEQ ID NO: 1468 - RNA, 20 nt, Artificial Sequence
  Synthetic
ccgucuguccgggaccuacu

SEQ ID NO: 1469 - RNA, 20 nt, Artificial Sequence
  Synthetic
uucucuuggcucaguuuacu

SEQ ID NO: 1470 - RNA, 20 nt, Artificial Sequence
  Synthetic
uucgccccggucaacgaccu

SEQ ID NO: 1471 - RNA, 20 nt, Artificial Sequence
  Synthetic
gacacacgggcaacauaccu

SEQ ID NO: 1472 - RNA, 20 nt, Artificial Sequence
  Synthetic
cgugugggggugugaacccu

SEQ ID NO: 1473 - RNA, 20 nt, Artificial Sequence
  Synthetic
gacacccgggugguaccccu

SEQ ID NO: 1474 - RNA, 20 nt, Artificial Sequence
  Synthetic
gacaacgaggcagggccccu

SEQ ID NO: 1475 - RNA, 20 nt, Artificial Sequence
  Synthetic
caagccuccaagcugugccu

SEQ ID NO: 1476 - RNA, 20 nt, Artificial Sequence
  Synthetic
ugcuggugguuguagauccu

SEQ ID NO: 1477 - RNA, 20 nt, Artificial Sequence
  Synthetic
cgaccccucucguggucgcu

SEQ ID NO: 1478 - RNA, 20 nt, Artificial Sequence
  Synthetic
caaggcacagcuuggaggcu

SEQ ID NO: 1479 - RNA, 20 nt, Artificial Sequence
  Synthetic
ugacgcaacccccacuggcu

SEQ ID NO: 1480 - RNA, 20 nt, Artificial Sequence
  Synthetic
aagucccaaucgggacugcu

SEQ ID NO: 1481 - RNA, 20 nt, Artificial Sequence
  Synthetic
  misc_feature (5)..(5): n is a, c, g, or u
ggggncuguauuuuccugcu

SEQ ID NO: 1482 - RNA, 20 nt, Artificial Sequence
  Synthetic
guuuugcagggucccgugcu

SEQ ID NO: 1483 - RNA, 20 nt, Artificial Sequence
  Synthetic
ugaaaaaguugcauggugcu

SEQ ID NO: 1484 - RNA, 20 nt, Artificial Sequence
  Synthetic
caggcaagcuauuuugugcu

SEQ ID NO: 1485 - RNA, 20 nt, Artificial Sequence
  Synthetic
guauucccaucccaucaucu

SEQ ID NO: 1486 - RNA, 20 nt, Artificial Sequence
  Synthetic
uggaagcaggagguggaucu

SEQ ID NO: 1487 - RNA, 20 nt, Artificial Sequence
  Synthetic
  misc_feature (16)..(16): n is a, c, g, or u
cacauuuuuguaucanaucu

SEQ ID NO: 1488 - RNA, 20 nt, Artificial Sequence
  Synthetic
auccugcggacgaccccucu

SEQ ID NO: 1489 - RNA, 20 nt, Artificial Sequence
  Synthetic
aaugauuaaccacauucucu

SEQ ID NO: 1490 - RNA, 20 nt, Artificial Sequence
  Synthetic
  misc_feature (13)..(13): n is a, c, g, or u
cucacaauaccanagagucu

SEQ ID NO: 1491 - RNA, 20 nt, Artificial Sequence
  Synthetic
gagaaguccaccacgagucu

SEQ ID NO: 1492 - RNA, 20 nt, Artificial Sequence
  Synthetic
guggauccaacugguggucu

SEQ ID NO: 1493 - RNA, 20 nt, Artificial Sequence
  Synthetic
ggacuccuaggaccccuucu

SEQ ID NO: 1494 - RNA, 20 nt, Artificial Sequence
  Synthetic
cccccacacgguggccuucu

SEQ ID NO: 1495 - RNA, 20 nt, Artificial Sequence
  Synthetic
ucucacaucaucaaucuucu

SEQ ID NO: 1496 - RNA, 20 nt, Artificial Sequence
  Synthetic
ggcgagggaguucuucuucu

SEQ ID NO: 1497 - RNA, 20 nt, Artificial Sequence
  Synthetic
aucuucuuguugguucuucu

SEQ ID NO: 1498 - RNA, 20 nt, Artificial Sequence
  Synthetic
uggacuucucucaauuuucu

SEQ ID NO: 1499 - RNA, 20 nt, Artificial Sequence
  Synthetic
auaacuaaaagccagacagu

SEQ ID NO: 1500 - RNA, 20 nt, Artificial Sequence
  Synthetic
aucgccaagccccagccagu

SEQ ID NO: 1501 - RNA, 20 nt, Artificial Sequence
  Synthetic
acauccacaggccaugcagu

SEQ ID NO: 1502 - RNA, 20 nt, Artificial Sequence
  Synthetic
acuagugcaauuuguucagu

SEQ ID NO: 1503 - RNA, 20 nt, Artificial Sequence
  Synthetic
gagguuccuugagcaagagu

SEQ ID NO: 1504 - RNA, 20 nt, Artificial Sequence
  Synthetic
auuuaaggacugggaggagu

SEQ ID NO: 1505 - RNA, 20 nt, Artificial Sequence
  Synthetic
  misc_feature (11)..(11): n is a, c, g, or u
uggguuauaunauugggagu

SEQ ID NO: 1506 - RNA, 20 nt, Artificial Sequence
  Synthetic
uauuuugugcuggggugagu

SEQ ID NO: 1507 - RNA, 20 nt, Artificial Sequence
  Synthetic
uggaauuugcucugaauagu

SEQ ID NO: 1508 - RNA, 20 nt, Artificial Sequence
  Synthetic
auucagcgccgacgggacgu

SEQ ID NO: 1509 - RNA, 20 nt, Artificial Sequence
  Synthetic
caauuuguucaguggugcgu

SEQ ID NO: 1510 - RNA, 20 nt, Artificial Sequence
  Synthetic
  misc_feature (17)..(17): n is a, c, g, or u
ccaaaagacccacaauncgu

SEQ ID NO: 1511 - RNA, 20 nt, Artificial Sequence
  Synthetic
  misc_feature (5)..(5): n is a, c, g, or u
accanagagucuagacucgu

SEQ ID NO: 1512 - RNA, 20 nt, Artificial Sequence
  Synthetic
uauuccucaauccaggucgu

SEQ ID NO: 1513 - RNA, 20 nt, Artificial Sequence
  Synthetic
gauugguggaagcaggaggu

SEQ ID NO: 1514 - RNA, 20 nt, Artificial Sequence
  Synthetic
aagccccagccagugggggu

SEQ ID NO: 1515 - RNA, 20 nt, Artificial Sequence
  Synthetic
cacagcuaaaacaaaauggu

SEQ ID NO: 1516 - RNA, 20 nt, Artificial Sequence
  Synthetic
aagcaggagguggaucuggu

SEQ ID NO: 1517 - RNA, 20 nt, Artificial Sequence
  Synthetic
  misc_feature (2)..(2): n is a, c, g, or u
anagagucuagacucguggu

SEQ ID NO: 1518 - RNA, 20 nt, Artificial Sequence
  Synthetic
  misc_feature (16)..(16): n is a, c, g, or u
uugccugagagcagunuggu

SEQ ID NO: 1519 - RNA, 20 nt, Artificial Sequence
  Synthetic
cuuccugaccuccgauuggu

SEQ ID NO: 1520 - RNA, 20 nt, Artificial Sequence
  Synthetic
cggauccaacagugcuuggu

SEQ ID NO: 1521 - RNA, 20 nt, Artificial Sequence
  Synthetic
acaguagucuccggaagugu

SEQ ID NO: 1522 - RNA, 20 nt, Artificial Sequence
  Synthetic
uuuggugucuuuuggagugu

SEQ ID NO: 1523 - RNA, 20 nt, Artificial Sequence
  Synthetic
accccagaaggccaccgugu

SEQ ID NO: 1524 - RNA, 20 nt, Artificial Sequence
  Synthetic
caaaaugaggcgcuaugugu

SEQ ID NO: 1525 - RNA, 20 nt, Artificial Sequence
  Synthetic
ccaauuguccuuguuugugu

SEQ ID NO: 1526 - RNA, 20 nt, Artificial Sequence
  Synthetic
acaggcgguguguuucuugu

SEQ ID NO: 1527 - RNA, 20 nt, Artificial Sequence
  Synthetic
ggucccgugcuggugguugu

SEQ ID NO: 1528 - RNA, 20 nt, Artificial Sequence
  Synthetic
  misc_feature (4)..(4): n is a, c, g, or u
acanuauuuacauacuuugu

SEQ ID NO: 1529 - RNA, 20 nt, Artificial Sequence
  Synthetic
  misc_feature (19)..(19): n is a, c, g, or u
aaucgucuccuuucauuunu

SEQ ID NO: 1530 - RNA, 20 nt, Artificial Sequence
  Synthetic
  misc_feature (5)..(5): n is a, c, g, or u
  misc_feature (11)..(11): n is a, c, g, or u
cuaanaugggncuaaaaauu

SEQ ID NO: 1531 - RNA, 20 nt, Artificial Sequence
  Synthetic
guuaucugugggcauccauu

SEQ ID NO: 1532 - RNA, 20 nt, Artificial Sequence
  Synthetic
uugguaagugauuggagauu

SEQ ID NO: 1533 - RNA, 20 nt, Artificial Sequence
  Synthetic
uuucuuccugaccuccgauu

SEQ ID NO: 1534 - RNA, 20 nt, Artificial Sequence
  Synthetic
cgugaauagacccauugauu

SEQ ID NO: 1535 - RNA, 20 nt, Artificial Sequence
  Synthetic
  misc_feature (13)..(13): n is a, c, g, or u
uauauggaugaunugguauu

SEQ ID NO: 1536 - RNA, 20 nt, Artificial Sequence
  Synthetic
agggaaguauuuaguaacuu

SEQ ID NO: 1537 - RNA, 20 nt, Artificial Sequence
  Synthetic
  misc_feature (7)..(7): n is a, c, g, or u
uagacanuauuuacauacuu

SEQ ID NO: 1538 - RNA, 20 nt, Artificial Sequence
  Synthetic
cagcgcaugcgcggaaccuu

SEQ ID NO: 1539 - RNA, 20 nt, Artificial Sequence
  Synthetic
gcccucuaccgagaugccuu

SEQ ID NO: 1540 - RNA, 20 nt, Artificial Sequence
  Synthetic
ucccaauguuaguauuccuu

SEQ ID NO: 1541 - RNA, 20 nt, Artificial Sequence
  Synthetic
gaccccucucguggucgcuu

SEQ ID NO: 1542 - RNA, 20 nt, Artificial Sequence
  Synthetic
acccccacuggcuggggcuu

SEQ ID NO: 1543 - RNA, 20 nt, Artificial Sequence
  Synthetic
agcugugccuuggguggcuu

SEQ ID NO: 1544 - RNA, 20 nt, Artificial Sequence
  Synthetic
gagaaaacaaaagccugcuu

SEQ ID NO: 1545 - RNA, 20 nt, Artificial Sequence
  Synthetic
ucucggauccaacagugcuu

SEQ ID NO: 1546 - RNA, 20 nt, Artificial Sequence
  Synthetic
aaguuugcgaaagcaaucuu

SEQ ID NO: 1547 - RNA, 20 nt, Artificial Sequence
  Synthetic
ccuuacauaagaggacucuu

SEQ ID NO: 1548 - RNA, 20 nt, Artificial Sequence
  Synthetic
guccuuaaauacacagucuu

SEQ ID NO: 1549 - RNA, 20 nt, Artificial Sequence
  Synthetic
gggucuauucacgggaaguu

SEQ ID NO: 1550 - RNA, 20 nt, Artificial Sequence
  Synthetic
agagaaaggccuuguaaguu

SEQ ID NO: 1551 - RNA, 20 nt, Artificial Sequence
  Synthetic
uucuuuccagaccaccaguu

SEQ ID NO: 1552 - RNA, 20 nt, Artificial Sequence
  Synthetic
  misc_feature (10)..(10): n is a, c, g, or u
ggguuauaunauugggaguu

SEQ ID NO: 1553 - RNA, 20 nt, Artificial Sequence
  Synthetic
aacuuguccuggcuaucguu

SEQ ID NO: 1554 - RNA, 20 nt, Artificial Sequence
  Synthetic
  misc_feature (15)..(15): n is a, c, g, or u
ugccugagagcagunugguu

SEQ ID NO: 1555 - RNA, 20 nt, Artificial Sequence
  Synthetic
caguuccaccaagcacuguu

SEQ ID NO: 1556 - RNA, 20 nt, Artificial Sequence
  Synthetic
auuggccaauuguccuuguu

SEQ ID NO: 1557 - RNA, 20 nt, Artificial Sequence
  Synthetic
uuccggagacuacuguuguu

SEQ ID NO: 1558 - RNA, 20 nt, Artificial Sequence
  Synthetic
  misc_feature (2)..(2): n is a, c, g, or u
  misc_feature (8)..(8): n is a, c, g, or u
anauuucnugccuuacauuu

SEQ ID NO: 1559 - RNA, 20 nt, Artificial Sequence
  Synthetic
uugauaggauaggggcauuu

SEQ ID NO: 1560 - RNA, 20 nt, Artificial Sequence
  Synthetic
ccacacauagcgccucauuu

SEQ ID NO: 1561 - RNA, 20 nt, Artificial Sequence
  Synthetic
ugcucucaggcaagcuauuu

SEQ ID NO: 1562 - RNA, 20 nt, Artificial Sequence
  Synthetic
  misc_feature (9)..(9): n is a, c, g, or u
gaaacuguncuugaguauuu

SEQ ID NO: 1563 - RNA, 20 nt, Artificial Sequence
  Synthetic
guuacuaaauacuucccuuu

SEQ ID NO: 1564 - RNA, 20 nt, Artificial Sequence
  Synthetic
gcugugccuuggguggcuuu

SEQ ID NO: 1565 - RNA, 20 nt, Artificial Sequence
  Synthetic
  misc_feature (7)..(7): n is a, c, g, or u
ucaacgnauugugggucuuu

SEQ ID NO: 1566 - RNA, 17 nt, Artificial Sequence
  Synthetic
gauuggccaucagcgca

SEQ ID NO: 1567 - RNA, 17 nt, Artificial Sequence
  Synthetic
gagaucuucgucugcga

SEQ ID NO: 1568 - RNA, 17 nt, Artificial Sequence
  Synthetic
gcgacgugcagagguga

SEQ ID NO: 1569 - RNA, 17 nt, Artificial Sequence
  Synthetic
ggucgcaccucucuuua

SEQ ID NO: 1570 - RNA, 17 nt, Artificial Sequence
  Synthetic
ggagcaccucucucaac

SEQ ID NO: 1571 - RNA, 17 nt, Artificial Sequence
  Synthetic
gauuggagauuggggac

SEQ ID NO: 1572 - RNA, 17 nt, Artificial Sequence
  Synthetic
guagacaaaggacgucc

SEQ ID NO: 1573 - RNA, 17 nt, Artificial Sequence
  Synthetic
ggucguccgcaggauuc

SEQ ID NO: 1574 - RNA, 17 nt, Artificial Sequence
  Synthetic
guccgcguaaagagagg

SEQ ID NO: 1575 - RNA, 17 nt, Artificial Sequence
  Synthetic
gaaaggccuuguaaguu

SEQ ID NO: 1576 - RNA, 20 nt, Artificial Sequence
  Synthetic
ggaccccuucucguguuaca

SEQ ID NO: 1577 - RNA, 20 nt, Artificial Sequence
  Synthetic
ggcguucacgguggucucca

SEQ ID NO: 1578 - RNA, 20 nt, Artificial Sequence
  Synthetic
ggcgauuggccaucagcgca

SEQ ID NO: 1579 - RNA, 20 nt, Artificial Sequence
  Synthetic
gagauugagaucuucugcga

SEQ ID NO: 1580 - RNA, 20 nt, Artificial Sequence
  Synthetic
gcaucucgguagagggcuga

SEQ ID NO: 1581 - RNA, 20 nt, Artificial Sequence
  Synthetic
gcuccucugccgauccauac

SEQ ID NO: 1582 - RNA, 20 nt, Artificial Sequence
  Synthetic
gucccgucggcgcugaaucc

SEQ ID NO: 1583 - RNA, 20 nt, Artificial Sequence
  Synthetic
gacguagacaaaggacgucc

SEQ ID NO: 1584 - RNA, 20 nt, Artificial Sequence
  Synthetic
gggcuuggcgauuggccauc

SEQ ID NO: 1585 - RNA, 20 nt, Artificial Sequence
  Synthetic
ggaguccgcguaaagagagg

SEQ ID NO: 1586 - RNA, 20 nt, Artificial Sequence
  Synthetic
gugcugccaacuggauccug

SEQ ID NO: 1587 - RNA, 20 nt, Artificial Sequence
  Synthetic
gggucuauucacgggaaguu

SEQ ID NO: 1588 - RNA, 17 nt, Artificial Sequence
  Synthetic
cacaaagguuccgcgca

SEQ ID NO: 1589 - RNA, 17 nt, Artificial Sequence
  Synthetic
auugagaucuucugcga

SEQ ID NO: 1590 - RNA, 17 nt, Artificial Sequence
  Synthetic
ucucgguagagggcuga

SEQ ID NO: 1591 - RNA, 17 nt, Artificial Sequence
  Synthetic
  misc_feature (15)..(16): n is a, c, g, or u
cgucggccggaacgnna

SEQ ID NO: 1592 - RNA, 17 nt, Artificial Sequence
  Synthetic
ccucugccgauccauac

SEQ ID NO: 1593 - RNA, 17 nt, Artificial Sequence
  Synthetic
ccgucggcgcugaaucc

SEQ ID NO: 1594 - RNA, 17 nt, Artificial Sequence
  Synthetic
cuuggcgauuggccauc

SEQ ID NO: 1595 - RNA, 17 nt, Artificial Sequence
  Synthetic
uuugucuacgucccguc

SEQ ID NO: 1596 - RNA, 17 nt, Artificial Sequence
  Synthetic
  misc_feature (1)..(1): n is a, c, g, or u
ngauugagaucuucguc

SEQ ID NO: 1597 - RNA, 17 nt, Artificial Sequence
  Synthetic
cuaucguuggauguguc

SEQ ID NO: 1598 - RNA, 17 nt, Artificial Sequence
  Synthetic
uggagauugagaucuuc

SEQ ID NO: 1599 - RNA, 17 nt, Artificial Sequence
  Synthetic
aggagccacaaagguuc

SEQ ID NO: 1600 - RNA, 17 nt, Artificial Sequence
  Synthetic
ugcaauuuguucagugg

SEQ ID NO: 1601 - RNA, 17 nt, Artificial Sequence
  Synthetic
uuggccaucagcgcaug

SEQ ID NO: 1602 - RNA, 17 nt, Artificial Sequence
  Synthetic
ucuauucacgggaaguu

SEQ ID NO: 1603 - RNA, 20 nt, Artificial Sequence
  Synthetic
ccggcagaugagaaggcaca

SEQ ID NO: 1604 - RNA, 20 nt, Artificial Sequence
  Synthetic
agccacaaagguuccgcgca

SEQ ID NO: 1605 - RNA, 20 nt, Artificial Sequence
  Synthetic
auugagaucuucgucugcga

SEQ ID NO: 1606 - RNA, 20 nt, Artificial Sequence
  Synthetic
caugcgacgugcagagguga

SEQ ID NO: 1607 - RNA, 20 nt, Artificial Sequence
  Synthetic
  misc_feature (18)..(19): n is a, c, g, or u
cgucgucggccggaacgnna

SEQ ID NO: 1608 - RNA, 20 nt, Artificial Sequence
  Synthetic
acgggucgcaccucucuuua

SEQ ID NO: 1609 - RNA, 20 nt, Artificial Sequence
  Synthetic
augggagcaccucucucaac

SEQ ID NO: 1610 - RNA, 20 nt, Artificial Sequence
  Synthetic
agugauuggagauuggggac

SEQ ID NO: 1611 - RNA, 20 nt, Artificial Sequence
  Synthetic
  misc_feature (1)..(1): n is a, c, g, or u
nugugcugccaacuggaucc

SEQ ID NO: 1612 - RNA, 20 nt, Artificial Sequence
  Synthetic
cuaucguuggaugugucugc

SEQ ID NO: 1613 - RNA, 20 nt, Artificial Sequence
  Synthetic
  misc_feature (19)..(19): n is a, c, g, or u
cagacgaagaucucaaucnc

SEQ ID NO: 1614 - RNA, 20 nt, Artificial Sequence
  Synthetic
uccuuugucuacgucccguc

SEQ ID NO: 1615 - RNA, 20 nt, Artificial Sequence
  Synthetic
  misc_feature (4)..(4): n is a, c, g, or u
cggngauugagaucuucguc

SEQ ID NO: 1616 - RNA, 20 nt, Artificial Sequence
  Synthetic
uggcuaucguuggauguguc

SEQ ID NO: 1617 - RNA, 20 nt, Artificial Sequence
  Synthetic
aggggucguccgcaggauuc

SEQ ID NO: 1618 - RNA, 20 nt, Artificial Sequence
  Synthetic
agcuggagauugagaucuuc

SEQ ID NO: 1619 - RNA, 20 nt, Artificial Sequence
  Synthetic
cagaggagccacaaagguuc

SEQ ID NO: 1620 - RNA, 20 nt, Artificial Sequence
  Synthetic
caauccaggucguugaccgg

SEQ ID NO: 1621 - RNA, 20 nt, Artificial Sequence
  Synthetic
  misc_feature (13)..(13): n is a, c, g, or u
uucgcucgcagcnggucugg

SEQ ID NO: 1622 - RNA, 20 nt, Artificial Sequence
  Synthetic
uagugcaauuuguucagugg

SEQ ID NO: 1623 - RNA, 20 nt, Artificial Sequence
  Synthetic
cgauuggccaucagcgcaug

SEQ ID NO: 1624 - RNA, 20 nt, Artificial Sequence
  Synthetic
agagaaaggccuuguaaguu

SEQ ID NO: 1625 - RNA, 17 nt, Artificial Sequence
  Synthetic
gcagaugagaaggcaca

SEQ ID NO: 1626 - RNA, 17 nt, Artificial Sequence
  Synthetic
guucacgguggucucca

SEQ ID NO: 1627 - RNA, 17 nt, Artificial Sequence
  Synthetic
ggugacccacaaaauga

SEQ ID NO: 1628 - RNA, 17 nt, Artificial Sequence
  Synthetic
  misc_feature (15)..(15): n is a, c, g, or u
guccgcuccagaccngc

SEQ ID NO: 1629 - RNA, 17 nt, Artificial Sequence
  Synthetic
ggcacaggcggggaguc

SEQ ID NO: 1630 - RNA, 17 nt, Artificial Sequence
  Synthetic
  misc_feature (11)..(11): n is a, c, g, or u
gcuccagaccngcugcg

SEQ ID NO: 1631 - RNA, 17 nt, Artificial Sequence
  Synthetic
  misc_feature (10)..(10): n is a, c, g, or u
  misc_feature (14)..(14): n is a, c, g, or u
guuggcaagnuccnagg

SEQ ID NO: 1632 - RNA, 17 nt, Artificial Sequence
  Synthetic
  misc_feature (10)..(10): n is a, c, g, or u
gcucgcagcnggucugg

SEQ ID NO: 1633 - RNA, 20 nt, Artificial Sequence
  Synthetic
gauaacaaaaaauugguaac

SEQ ID NO: 1634 - RNA, 20 nt, Artificial Sequence
  Synthetic
gaaggcacaggcggggaguc

SEQ ID NO: 1635 - RNA, 20 nt, Artificial Sequence
  Synthetic
  misc_feature (13)..(13): n is a, c, g, or u
  misc_feature (17)..(17): n is a, c, g, or u
guuguuggcaagnuccnagg

SEQ ID NO: 1636 - RNA, 20 nt, Artificial Sequence
  Synthetic
  misc_feature (6)..(7): n is a, c, g, or u
  misc_feature (19)..(19): n is a, c, g, or u
gaacgnnaggcggagaagng

SEQ ID NO: 1637 - RNA, 20 nt, Artificial Sequence
  Synthetic
gagaaaacaaaagccugcuu

SEQ ID NO: 1638 - RNA, 17 nt, Artificial Sequence
  Synthetic
ccccuucucguguuaca

SEQ ID NO: 1639 - RNA, 17 nt, Artificial Sequence
  Synthetic
  misc_feature (1)..(1): n is a, c, g, or u
ngggcggcagagcccca

SEQ ID NO: 1640 - RNA, 17 nt, Artificial Sequence
  Synthetic
aacaaaaaauugguaac

SEQ ID NO: 1641 - RNA, 17 nt, Artificial Sequence
  Synthetic
ugcugccaacuggaucc

SEQ ID NO: 1642 - RNA, 17 nt, Artificial Sequence
  Synthetic
ucguuggaugugucugc

SEQ ID NO: 1643 - RNA, 17 nt, Artificial Sequence
  Synthetic
  misc_feature (16)..(16): n is a, c, g, or u
acgaagaucucaaucnc

SEQ ID NO: 1644 - RNA, 17 nt, Artificial Sequence
  Synthetic
  misc_feature (4)..(4): n is a, c, g, or u
ucunuaagcagguggag

SEQ ID NO: 1645 - RNA, 17 nt, Artificial Sequence
  Synthetic
uccaggucguugaccgg

SEQ ID NO: 1646 - RNA, 17 nt, Artificial Sequence
  Synthetic
  misc_feature (3)..(4): n is a, c, g, or u
  misc_feature (16)..(16): n is a, c, g, or u
cgnnaggcggagaagng

SEQ ID NO: 1647 - RNA, 17 nt, Artificial Sequence
  Synthetic
cugccaacuggauccug

SEQ ID NO: 1648 - RNA, 17 nt, Artificial Sequence
  Synthetic
agagagaauccacacau

SEQ ID NO: 1649 - RNA, 17 nt, Artificial Sequence
  Synthetic
ccccagccagugggggu

SEQ ID NO: 1650 - RNA, 17 nt, Artificial Sequence
  Synthetic
caggagguggaucuggu

SEQ ID NO: 1651 - RNA, 17 nt, Artificial Sequence
  Synthetic
cccacuggcuggggcuu

SEQ ID NO: 1652 - RNA, 17 nt, Artificial Sequence
  Synthetic
aaaacaaaagccugcuu

SEQ ID NO: 1653 - RNA, 20 nt, Artificial Sequence
  Synthetic
  misc_feature (4)..(4): n is a, c, g, or u
aagngggcggcagagcccca

SEQ ID NO: 1654 - RNA, 20 nt, Artificial Sequence
  Synthetic
uauggugacccacaaaauga

SEQ ID NO: 1655 - RNA, 20 nt, Artificial Sequence
  Synthetic
  misc_feature (3)..(3): n is a, c, g, or u
  misc_feature (18)..(18): n is a, c, g, or u
aanguccgcuccagaccngc

SEQ ID NO: 1656 - RNA, 20 nt, Artificial Sequence
  Synthetic
  misc_feature (7)..(7): n is a, c, g, or u
uggucunuaagcagguggag

SEQ ID NO: 1657 - RNA, 20 nt, Artificial Sequence
  Synthetic
  misc_feature (14)..(14): n is a, c, g, or u
uccgcuccagaccngcugcg

SEQ ID NO: 1658 - RNA, 20 nt, Artificial Sequence
  Synthetic
auaagagagaauccacacau

SEQ ID NO: 1659 - RNA, 20 nt, Artificial Sequence
  Synthetic
aagccccagccagugggggu

SEQ ID NO: 1660 - RNA, 20 nt, Artificial Sequence
  Synthetic
aagcaggagguggaucuggu

SEQ ID NO: 1661 - RNA, 20 nt, Artificial Sequence
  Synthetic
acccccacuggcuggggcuu

SEQ ID NO: 1662 - RNA, 17 nt, Artificial Sequence
  Synthetic
agaggaagaugauaaaa

SEQ ID NO: 1663 - RNA, 17 nt, Artificial Sequence
  Synthetic
guuggcgagaaaacaaa

SEQ ID NO: 1664 - RNA, 17 nt, Artificial Sequence
  Synthetic
  misc_feature (6)..(6): n is a, c, g, or u
gcuuanagaccaccaaa

SEQ ID NO: 1665 - RNA, 17 nt, Artificial Sequence
  Synthetic
agcaaacacuuggcaaa

SEQ ID NO: 1666 - RNA, 17 nt, Artificial Sequence
  Synthetic
uauuguuuacagagaaa

SEQ ID NO: 1667 - RNA, 17 nt, Artificial Sequence
  Synthetic
ucauccauauaacuaaa

SEQ ID NO: 1668 - RNA, 17 nt, Artificial Sequence
  Synthetic
uucucgccaacuuacaa

SEQ ID NO: 1669 - RNA, 17 nt, Artificial Sequence
  Synthetic
gccccaaagccacccaa

SEQ ID NO: 1670 - RNA, 17 nt, Artificial Sequence
  Synthetic
caauguccaugccccaa

SEQ ID NO: 1671 - RNA, 17 nt, Artificial Sequence
  Synthetic
aguaaaaggggcugcaa

SEQ ID NO: 1672 - RNA, 17 nt, Artificial Sequence
  Synthetic
ucggaggucaggaagaa

SEQ ID NO: 1673 - RNA, 17 nt, Artificial Sequence
  Synthetic
agggcuccaccccagaa

SEQ ID NO: 1674 - RNA, 17 nt, Artificial Sequence
  Synthetic
acgggaagaagucagaa

SEQ ID NO: 1675 - RNA, 17 nt, Artificial Sequence
  Synthetic
gggccggcagaugagaa

SEQ ID NO: 1676 - RNA, 17 nt, Artificial Sequence
  Synthetic
  misc_feature (13)..(13): n is a, c, g, or u
uggcgagguugunagaa

SEQ ID NO: 1677 - RNA, 17 nt, Artificial Sequence
  Synthetic
cauagguauuuuccgaa

SEQ ID NO: 1678 - RNA, 17 nt, Artificial Sequence
  Synthetic
cacgggaaguuugcgaa

SEQ ID NO: 1679 - RNA, 17 nt, Artificial Sequence
  Synthetic
gccagacagugggggaa

SEQ ID NO: 1680 - RNA, 17 nt, Artificial Sequence
  Synthetic
uuacauacuuuguggaa

SEQ ID NO: 1681 - RNA, 17 nt, Artificial Sequence
  Synthetic
auggagaccaccgugaa

SEQ ID NO: 1682 - RNA, 17 nt, Artificial Sequence
  Synthetic
  misc_feature (6)..(6): n is a, c, g, or u
uguucnggugauucuaa

SEQ ID NO: 1683 - RNA, 17 nt, Artificial Sequence
  Synthetic
uucucuuccaaauguaa

SEQ ID NO: 1684 - RNA, 17 nt, Artificial Sequence
  Synthetic
  misc_feature (2)..(2): n is a, c, g, or u
cngcugcgagcgaaaca

SEQ ID NO: 1685 - RNA, 17 nt, Artificial Sequence
  Synthetic
agggacacacauccaca

SEQ ID NO: 1686 - RNA, 17 nt, Artificial Sequence
  Synthetic
ugcuuagcgguaauaca

SEQ ID NO: 1687 - RNA, 17 nt, Artificial Sequence
  Synthetic
ucaacacaguuccacca

SEQ ID NO: 1688 - RNA, 17 nt, Artificial Sequence
  Synthetic
ucuguucaccagcacca

SEQ ID NO: 1689 - RNA, 17 nt, Artificial Sequence
  Synthetic
ugagagaggugcuccca

SEQ ID NO: 1690 - RNA, 17 nt, Artificial Sequence
  Synthetic
  misc_feature (7)..(7): n is a, c, g, or u
agaaagnuucuguccca

SEQ ID NO: 1691 - RNA, 17 nt, Artificial Sequence
  Synthetic
cugauggccaaucgcca

SEQ ID NO: 1692 - RNA, 17 nt, Artificial Sequence
  Synthetic
cacacauccacaggcca

SEQ ID NO: 1693 - RNA, 17 nt, Artificial Sequence
  Synthetic
uugcucggcaacggcca

SEQ ID NO: 1694 - RNA, 17 nt, Artificial Sequence
  Synthetic
cacuguucaagccucca

SEQ ID NO: 1695 - RNA, 17 nt, Artificial Sequence
  Synthetic
auaagggucaaugucca

SEQ ID NO: 1696 - RNA, 17 nt, Artificial Sequence
  Synthetic
uguauuaccgcuaagca

SEQ ID NO: 1697 - RNA, 17 nt, Artificial Sequence
  Synthetic
  misc_feature (3)..(3): n is a, c, g, or u
canacugcucucaggca

SEQ ID NO: 1698 - RNA, 17 nt, Artificial Sequence
  Synthetic
cugggguggagcccuca

SEQ ID NO: 1699 - RNA, 17 nt, Artificial Sequence
  Synthetic
  misc_feature (7)..(7): n is a, c, g, or u
caaccanacugcucuca

SEQ ID NO: 1700 - RNA, 17 nt, Artificial Sequence
  Synthetic
ugguuauccugcucuca

SEQ ID NO: 1701 - RNA, 17 nt, Artificial Sequence
  Synthetic
ucaugucccacuguuca

SEQ ID NO: 1702 - RNA, 17 nt, Artificial Sequence
  Synthetic
uauaaagggacucaaga

SEQ ID NO: 1703 - RNA, 17 nt, Artificial Sequence
  Synthetic
gagaguaacuccacaga

SEQ ID NO: 1704 - RNA, 17 nt, Artificial Sequence
  Synthetic
auugaugaugugagaga

SEQ ID NO: 1705 - RNA, 17 nt, Artificial Sequence
  Synthetic
ucagcccucuaccgaga

SEQ ID NO: 1706 - RNA, 17 nt, Artificial Sequence
  Synthetic
cuguuguuagacaacga

SEQ ID NO: 1707 - RNA, 17 nt, Artificial Sequence
  Synthetic
ugugaacccuggaccga

SEQ ID NO: 1708 - RNA, 17 nt, Artificial Sequence
  Synthetic
uuauugcccacccagga

SEQ ID NO: 1709 - RNA, 17 nt, Artificial Sequence
  Synthetic
aggucuuuguauuagga

SEQ ID NO: 1710 - RNA, 17 nt, Artificial Sequence
  Synthetic
acaagguaggaguggga

SEQ ID NO: 1711 - RNA, 17 nt, Artificial Sequence
  Synthetic
gaauacuaacauuggga

SEQ ID NO: 1712 - RNA, 17 nt, Artificial Sequence
  Synthetic
agcuguguucaaaugga

SEQ ID NO: 1713 - RNA, 17 nt, Artificial Sequence
  Synthetic
gaccuccgauuggugga

SEQ ID NO: 1714 - RNA, 17 nt, Artificial Sequence
  Synthetic
ccaaggcacagcuugga

SEQ ID NO: 1715 - RNA, 17 nt, Artificial Sequence
  Synthetic
aaccaacaagaagauga

SEQ ID NO: 1716 - RNA, 17 nt, Artificial Sequence
  Synthetic
gcacaauauguuccuga

SEQ ID NO: 1717 - RNA, 17 nt, Artificial Sequence
  Synthetic
caagagaaacgggcuga

SEQ ID NO: 1718 - RNA, 17 nt, Artificial Sequence
  Synthetic
ugccaaguguuugcuga

SEQ ID NO: 1719 - RNA, 17 nt, Artificial Sequence
  Synthetic
  misc_feature (10)..(10): n is a, c, g, or u
uuuguaucanaucuuga

SEQ ID NO: 1720 - RNA, 17 nt, Artificial Sequence
  Synthetic
agugggggaaagcccua

SEQ ID NO: 1721 - RNA, 17 nt, Artificial Sequence
  Synthetic
ugccuguauuaccgcua

SEQ ID NO: 1722 - RNA, 17 nt, Artificial Sequence
  Synthetic
ucuucauccugcugcua

SEQ ID NO: 1723 - RNA, 17 nt, Artificial Sequence
  Synthetic
uguauuaggaggcugua

SEQ ID NO: 1724 - RNA, 17 nt, Artificial Sequence
  Synthetic
gcucucaugcccuugua

SEQ ID NO: 1725 - RNA, 17 nt, Artificial Sequence
  Synthetic
  misc_feature (15)..(15): n is a, c, g, or u
gcauuugguggucunua

SEQ ID NO: 1726 - RNA, 17 nt, Artificial Sequence
  Synthetic
  misc_feature (11)..(11): n is a, c, g, or u
acgauugaaanuaauua

SEQ ID NO: 1727 - RNA, 17 nt, Artificial Sequence
  Synthetic
ugaacaaaagaugauua

SEQ ID NO: 1728 - RNA, 17 nt, Artificial Sequence
  Synthetic
gugaacagaccaauuua

SEQ ID NO: 1729 - RNA, 17 nt, Artificial Sequence
  Synthetic
agcaaucuuugauuuua

SEQ ID NO: 1730 - RNA, 17 nt, Artificial Sequence
  Synthetic
ccccguugcucggcaac

SEQ ID NO: 1731 - RNA, 17 nt, Artificial Sequence
  Synthetic
ggcauccauuugaacac

SEQ ID NO: 1732 - RNA, 17 nt, Artificial Sequence
  Synthetic
gucaacaagaaacacac

SEQ ID NO: 1733 - RNA, 17 nt, Artificial Sequence
  Synthetic
cgggaccuacucgacac

SEQ ID NO: 1734 - RNA, 17 nt, Artificial Sequence
  Synthetic
aaagccacccaaggcac

SEQ ID NO: 1735 - RNA, 17 nt, Artificial Sequence
  Synthetic
gaagucccaaucgggac

SEQ ID NO: 1736 - RNA, 17 nt, Artificial Sequence
  Synthetic
  misc_feature (15)..(15): n is a, c, g, or u
ugcacccccaaccanac

SEQ ID NO: 1737 - RNA, 17 nt, Artificial Sequence
  Synthetic
cuugagucccuuuauac

SEQ ID NO: 1738 - RNA, 17 nt, Artificial Sequence
  Synthetic
gaccaauuuaugccuac

SEQ ID NO: 1739 - RNA, 17 nt, Artificial Sequence
  Synthetic
cugggaacaagagcuac

SEQ ID NO: 1740 - RNA, 17 nt, Artificial Sequence
  Synthetic
guccgaagguuugguac

SEQ ID NO: 1741 - RNA, 17 nt, Artificial Sequence
  Synthetic
uuguaugccuguauuac

SEQ ID NO: 1742 - RNA, 17 nt, Artificial Sequence
  Synthetic
cgggacccugcaaaacc

SEQ ID NO: 1743 - RNA, 17 nt, Artificial Sequence
  Synthetic
caggaucuacaaccacc

SEQ ID NO: 1744 - RNA, 17 nt, Artificial Sequence
  Synthetic
ucugaacuggagccacc

SEQ ID NO: 1745 - RNA, 17 nt, Artificial Sequence
  Synthetic
  misc_feature (6)..(6): n is a, c, g, or u
uggauncgcacuccacc

SEQ ID NO: 1746 - RNA, 17 nt, Artificial Sequence
  Synthetic
aaauuggucuguucacc

SEQ ID NO: 1747 - RNA, 17 nt, Artificial Sequence
  Synthetic
  misc_feature (3)..(3): n is a, c, g, or u
aanguccgcuccagacc

SEQ ID NO: 1748 - RNA, 17 nt, Artificial Sequence
  Synthetic
ucagaaacacagaaccc

SEQ ID NO: 1749 - RNA, 17 nt, Artificial Sequence
  Synthetic
ccaccagcacgggaccc

SEQ ID NO: 1750 - RNA, 17 nt, Artificial Sequence
  Synthetic
  misc_feature (1)..(1): n is a, c, g, or u
ngucaucaacucacccc

SEQ ID NO: 1751 - RNA, 17 nt, Artificial Sequence
  Synthetic
gccaaucgccaagcccc

SEQ ID NO: 1752 - RNA, 17 nt, Artificial Sequence
  Synthetic
ucuucuucuaggggccc

SEQ ID NO: 1753 - RNA, 17 nt, Artificial Sequence
  Synthetic
ucuuuacgcggacuccc

SEQ ID NO: 1754 - RNA, 17 nt, Artificial Sequence
  Synthetic
gcgagaaaacaaaagcc

SEQ ID NO: 1755 - RNA, 17 nt, Artificial Sequence
  Synthetic
cgaagugcacacgggcc

SEQ ID NO: 1756 - RNA, 17 nt, Artificial Sequence
  Synthetic
  misc_feature (7)..(7): n is a, c, g, or u
uugaaanuaauuaugcc

SEQ ID NO: 1757 - RNA, 17 nt, Artificial Sequence
  Synthetic
gugccuucucaucugcc

SEQ ID NO: 1758 - RNA, 17 nt, Artificial Sequence
  Synthetic
caucuuccucuucaucc

SEQ ID NO: 1759 - RNA, 17 nt, Artificial Sequence
  Synthetic
aauaauuuagaggaucc

SEQ ID NO: 1760 - RNA, 17 nt, Artificial Sequence
  Synthetic
acucaaugugguuaucc

SEQ ID NO: 1761 - RNA, 17 nt, Artificial Sequence
  Synthetic
ccaccagauccaccucc

SEQ ID NO: 1762 - RNA, 17 nt, Artificial Sequence
  Synthetic
ccucuauguuucccucc

SEQ ID NO: 1763 - RNA, 17 nt, Artificial Sequence
  Synthetic
agaagaucucaaucucc

SEQ ID NO: 1764 - RNA, 17 nt, Artificial Sequence
  Synthetic
uauucagagcaaauucc

SEQ ID NO: 1765 - RNA, 17 nt, Artificial Sequence
  Synthetic
cucuuauauagaauucc

SEQ ID NO: 1766 - RNA, 17 nt, Artificial Sequence
  Synthetic
  misc_feature (10)..(11): n is a, c, g, or u
ucuccgccunncguucc

SEQ ID NO: 1767 - RNA, 17 nt, Artificial Sequence
  Synthetic
  misc_feature (6)..(6): n is a, c, g, or u
aggggncuguauuuucc

SEQ ID NO: 1768 - RNA, 17 nt, Artificial Sequence
  Synthetic
cugcgagcgaaacaagc

SEQ ID NO: 1769 - RNA, 17 nt, Artificial Sequence
  Synthetic
cgaagguuugguacagc

SEQ ID NO: 1770 - RNA, 17 nt, Artificial Sequence
  Synthetic
agaagaugaggcauagc

SEQ ID NO: 1771 - RNA, 17 nt, Artificial Sequence
  Synthetic
  misc_feature (11)..(11): n is a, c, g, or u
uggcagcacanccuagc

SEQ ID NO: 1772 - RNA, 17 nt, Artificial Sequence
  Synthetic
acugcggaacuccuagc

SEQ ID NO: 1773 - RNA, 17 nt, Artificial Sequence
  Synthetic
ggaagaugauaaaacgc

SEQ ID NO: 1774 - RNA, 17 nt, Artificial Sequence
  Synthetic
  misc_feature (2)..(2): n is a, c, g, or u
cngcuuguuucgcucgc

SEQ ID NO: 1775 - RNA, 17 nt, Artificial Sequence
  Synthetic
cauugaguaaaaggggc

SEQ ID NO: 1776 - RNA, 17 nt, Artificial Sequence
  Synthetic
  misc_feature (1)..(1): n is a, c, g, or u
  misc_feature (13)..(13): n is a, c, g, or u
naggcggagaagngggc

SEQ ID NO: 1777 - RNA, 17 nt, Artificial Sequence
  Synthetic
caccuccuucccauggc

SEQ ID NO: 1778 - RNA, 17 nt, Artificial Sequence
  Synthetic
cgcaggauccaguuggc

SEQ ID NO: 1779 - RNA, 17 nt, Artificial Sequence
  Synthetic
  misc_feature (15)..(15): n is a, c, g, or u
acuacuagaucucungc

SEQ ID NO: 1780 - RNA, 17 nt, Artificial Sequence
  Synthetic
aaagggacucaagaugc

SEQ ID NO: 1781 - RNA, 17 nt, Artificial Sequence
  Synthetic
cuuccucuucauccugc

SEQ ID NO: 1782 - RNA, 17 nt, Artificial Sequence
  Synthetic
aauuuagaggauccugc

SEQ ID NO: 1783 - RNA, 17 nt, Artificial Sequence
  Synthetic
cuauguuucccuccugc

SEQ ID NO: 1784 - RNA, 17 nt, Artificial Sequence
  Synthetic
gucgcuuggggcucugc

SEQ ID NO: 1785 - RNA, 17 nt, Artificial Sequence
  Synthetic
gggggccaaaucugugc

SEQ ID NO: 1786 - RNA, 17 nt, Artificial Sequence
  Synthetic
  misc_feature (12)..(12): n is a, c, g, or u
uggcugcuaggnugugc

SEQ ID NO: 1787 - RNA, 17 nt, Artificial Sequence
  Synthetic
ggucuuuugggcuuugc

SEQ ID NO: 1788 - RNA, 17 nt, Artificial Sequence
  Synthetic
gccugugccuucucauc

SEQ ID NO: 1789 - RNA, 17 nt, Artificial Sequence
  Synthetic
guuccgcaguauggauc

SEQ ID NO: 1790 - RNA, 17 nt, Artificial Sequence
  Synthetic
  misc_feature (12)..(12): n is a, c, g, or u
cuggagcggacnuuauc

SEQ ID NO: 1791 - RNA, 17 nt, Artificial Sequence
  Synthetic
gcacuucgcuucaccuc

SEQ ID NO: 1792 - RNA, 17 nt, Artificial Sequence
  Synthetic
ugcaacuuuuucaccuc

SEQ ID NO: 1793 - RNA, 17 nt, Artificial Sequence
  Synthetic
cuaugggagugggccuc

SEQ ID NO: 1794 - RNA, 17 nt, Artificial Sequence
  Synthetic
aaccuuuguggcuccuc

SEQ ID NO: 1795 - RNA, 17 nt, Artificial Sequence
  Synthetic
guggucgcuuggggcuc

SEQ ID NO: 1796 - RNA, 17 nt, Artificial Sequence
  Synthetic
ccuuuaccccguugcuc

SEQ ID NO: 1797 - RNA, 17 nt, Artificial Sequence
  Synthetic
  misc_feature (11)..(11): n is a, c, g, or u
ucugccgcccncuucuc

SEQ ID NO: 1798 - RNA, 17 nt, Artificial Sequence
  Synthetic
ccaguggggguugcguc

SEQ ID NO: 1799 - RNA, 17 nt, Artificial Sequence
  Synthetic
aggugcgacccgucguc

SEQ ID NO: 1800 - RNA, 17 nt, Artificial Sequence
  Synthetic
ccacgagaggggucguc

SEQ ID NO: 1801 - RNA, 17 nt, Artificial Sequence
  Synthetic
  misc_feature (14)..(14): n is a, c, g, or u
ucagugccgauaanguc

SEQ ID NO: 1802 - RNA, 17 nt, Artificial Sequence
  Synthetic
cuacucgacaccgcuuc

SEQ ID NO: 1803 - RNA, 17 nt, Artificial Sequence
  Synthetic
  misc_feature (6)..(6): n is a, c, g, or u
caagcngcuaggaguuc

SEQ ID NO: 1804 - RNA, 17 nt, Artificial Sequence
  Synthetic
auauuccugggaacaag

SEQ ID NO: 1805 - RNA, 17 nt, Artificial Sequence
  Synthetic
uaauacaggcauacaag

SEQ ID NO: 1806 - RNA, 17 nt, Artificial Sequence
  Synthetic
gcagaggugaagcgaag

SEQ ID NO: 1807 - RNA, 17 nt, Artificial Sequence
  Synthetic
acucucggauccaacag

SEQ ID NO: 1808 - RNA, 17 nt, Artificial Sequence
  Synthetic
ggagcccucaggcacag

SEQ ID NO: 1809 - RNA, 17 nt, Artificial Sequence
  Synthetic
guuagacaacgaggcag

SEQ ID NO: 1810 - RNA, 17 nt, Artificial Sequence
  Synthetic
  misc_feature (8)..(8): n is a, c, g, or u
ggagaagngggcggcag

SEQ ID NO: 1811 - RNA, 17 nt, Artificial Sequence
  Synthetic
uggcgauuggccaucag

SEQ ID NO: 1812 - RNA, 17 nt, Artificial Sequence
  Synthetic
  misc_feature (7)..(7): n is a, c, g, or u
gacaacngaguugucag

SEQ ID NO: 1813 - RNA, 17 nt, Artificial Sequence
  Synthetic
ucguccgcaggauucag

SEQ ID NO: 1814 - RNA, 17 nt, Artificial Sequence
  Synthetic
uuggauccacuauucag

SEQ ID NO: 1815 - RNA, 17 nt, Artificial Sequence
  Synthetic
aaggcaucucgguagag

SEQ ID NO: 1816 - RNA, 17 nt, Artificial Sequence
  Synthetic
gcauacaagggcaugag

SEQ ID NO: 1817 - RNA, 17 nt, Artificial Sequence
  Synthetic
aaugcccugugccugag

SEQ ID NO: 1818 - RNA, 17 nt, Artificial Sequence
  Synthetic
aaaauagcuugccugag

SEQ ID NO: 1819 - RNA, 17 nt, Artificial Sequence
  Synthetic
agagaauccacacauag

SEQ ID NO: 1820 - RNA, 17 nt, Artificial Sequence
  Synthetic
uuggcucaguuuacuag

SEQ ID NO: 1821 - RNA, 17 nt, Artificial Sequence
  Synthetic
uguucaguggugcguag

SEQ ID NO: 1822 - RNA, 17 nt, Artificial Sequence
  Synthetic
cugagccaagagaaacg

SEQ ID NO: 1823 - RNA, 17 nt, Artificial Sequence
  Synthetic
gaaguagaggacacacg

SEQ ID NO: 1824 - RNA, 17 nt, Artificial Sequence
  Synthetic
gaagcgaagugcacacg

SEQ ID NO: 1825 - RNA, 17 nt, Artificial Sequence
  Synthetic
guggucuccaugcgacg

SEQ ID NO: 1826 - RNA, 17 nt, Artificial Sequence
  Synthetic
agacaaaggacgucccg

SEQ ID NO: 1827 - RNA, 17 nt, Artificial Sequence
  Synthetic
gguuuugcagggucccg

SEQ ID NO: 1828 - RNA, 17 nt, Artificial Sequence
  Synthetic
aggccuggccguugccg

SEQ ID NO: 1829 - RNA, 17 nt, Artificial Sequence
  Synthetic
gagccacaaagguuccg

SEQ ID NO: 1830 - RNA, 17 nt, Artificial Sequence
  Synthetic
ccacauugaguaaaagg

SEQ ID NO: 1831 - RNA, 17 nt, Artificial Sequence
  Synthetic
ucucaacggcgagaagg

SEQ ID NO: 1832 - RNA, 17 nt, Artificial Sequence
  Synthetic
ugggaugggaauacagg

SEQ ID NO: 1833 - RNA, 17 nt, Artificial Sequence
  Synthetic
guauggaucggcagagg

SEQ ID NO: 1834 - RNA, 17 nt, Artificial Sequence
  Synthetic
cucgccguugagagagg

SEQ ID NO: 1835 - RNA, 17 nt, Artificial Sequence
  Synthetic
ugacccacaaaaugagg

SEQ ID NO: 1836 - RNA, 17 nt, Artificial Sequence
  Synthetic
aguguugauaggauagg

SEQ ID NO: 1837 - RNA, 17 nt, Artificial Sequence
  Synthetic
ggaguucuucuucuagg

SEQ ID NO: 1838 - RNA, 17 nt, Artificial Sequence
  Synthetic
agagaggcaauagucgg

SEQ ID NO: 1839 - RNA, 17 nt, Artificial Sequence
  Synthetic
ugucuacgucccgucgg

SEQ ID NO: 1840 - RNA, 17 nt, Artificial Sequence
  Synthetic
  misc_feature (7)..(7): n is a, c, g, or u
agcagunugguuggggg

SEQ ID NO: 1841 - RNA, 17 nt, Artificial Sequence
  Synthetic
aagagcuacagcauggg

SEQ ID NO: 1842 - RNA, 17 nt, Artificial Sequence
  Synthetic
  misc_feature (7)..(7): n is a, c, g, or u
gaugaunugguauuggg

SEQ ID NO: 1843 - RNA, 17 nt, Artificial Sequence
  Synthetic
gugaaaaaguugcaugg

SEQ ID NO: 1844 - RNA, 17 nt, Artificial Sequence
  Synthetic
cuguguuucugaacugg

SEQ ID NO: 1845 - RNA, 17 nt, Artificial Sequence
  Synthetic
caacccccacuggcugg

SEQ ID NO: 1846 - RNA, 17 nt, Artificial Sequence
  Synthetic
uccuugagcaagagugg

SEQ ID NO: 1847 - RNA, 17 nt, Artificial Sequence
  Synthetic
guggccuucuggggugg

SEQ ID NO: 1848 - RNA, 17 nt, Artificial Sequence
  Synthetic
cucucguggucgcuugg

SEQ ID NO: 1849 - RNA, 17 nt, Artificial Sequence
  Synthetic
ccuuauaaagaauuugg

SEQ ID NO: 1850 - RNA, 17 nt, Artificial Sequence
  Synthetic
gccuuggguggcuuugg

SEQ ID NO: 1851 - RNA, 17 nt, Artificial Sequence
  Synthetic
caaagguuccgcgcaug

SEQ ID NO: 1852 - RNA, 17 nt, Artificial Sequence
  Synthetic
auugcacuaguaaacug

SEQ ID NO: 1853 - RNA, 17 nt, Artificial Sequence
  Synthetic
  misc_feature (6)..(6): n is a, c, g, or u
guugunagaaugcccug

SEQ ID NO: 1854 - RNA, 17 nt, Artificial Sequence
  Synthetic
cgcggacuccccgccug

SEQ ID NO: 1855 - RNA, 17 nt, Artificial Sequence
  Synthetic
uucaagccuccaagcug

SEQ ID NO: 1856 - RNA, 17 nt, Artificial Sequence
  Synthetic
auugggggccaaaucug

SEQ ID NO: 1857 - RNA, 17 nt, Artificial Sequence
  Synthetic
  misc_feature (10)..(10): n is a, c, g, or u
gggacagaancuuucug

SEQ ID NO: 1858 - RNA, 17 nt, Artificial Sequence
  Synthetic
aaauaccuaugggagug

SEQ ID NO: 1859 - RNA, 17 nt, Artificial Sequence
  Synthetic
  misc_feature (8)..(8): n is a, c, g, or u
uucauuunuagugagug

SEQ ID NO: 1860 - RNA, 17 nt, Artificial Sequence
  Synthetic
ucaucugccggcccgug

SEQ ID NO: 1861 - RNA, 17 nt, Artificial Sequence
  Synthetic
  misc_feature (2)..(2): n is a, c, g, or u
cnuuggcuuccugggug

SEQ ID NO: 1862 - RNA, 17 nt, Artificial Sequence
  Synthetic
auuuuuuguuaucugug

SEQ ID NO: 1863 - RNA, 17 nt, Artificial Sequence
  Synthetic
  misc_feature (15)..(15): n is a, c, g, or u
ccauggcugcuaggnug

SEQ ID NO: 1864 - RNA, 17 nt, Artificial Sequence
  Synthetic
agaaucccagaggauug

SEQ ID NO: 1865 - RNA, 17 nt, Artificial Sequence
  Synthetic
gccucaggaacauauug

SEQ ID NO: 1866 - RNA, 17 nt, Artificial Sequence
  Synthetic
aacauagagguuccuug

SEQ ID NO: 1867 - RNA, 17 nt, Artificial Sequence
  Synthetic
cccaucccaucaucuug

SEQ ID NO: 1868 - RNA, 17 nt, Artificial Sequence
  Synthetic
ucaggcaagcuauuuug

SEQ ID NO: 1869 - RNA, 17 nt, Artificial Sequence
  Synthetic
  misc_feature (2)..(2): n is a, c, g, or u
gnauugugggucuuuug

SEQ ID NO: 1870 - RNA, 17 nt, Artificial Sequence
  Synthetic
  misc_feature (11)..(11): n is a, c, g, or u
  misc_feature (17)..(17): n is a, c, g, or u
uaugguuucanauuucn

SEQ ID NO: 1871 - RNA, 17 nt, Artificial Sequence
  Synthetic
  misc_feature (17)..(17): n is a, c, g, or u
cuuuuggaguguggaun

SEQ ID NO: 1872 - RNA, 17 nt, Artificial Sequence
  Synthetic
  misc_feature (17)..(17): n is a, c, g, or u
aaugugaacaauuugun

SEQ ID NO: 1873 - RNA, 17 nt, Artificial Sequence
  Synthetic
ucaccccagcacaaaau

SEQ ID NO: 1874 - RNA, 17 nt, Artificial Sequence
  Synthetic
cgcaccacugaacaaau

SEQ ID NO: 1875 - RNA, 17 nt, Artificial Sequence
  Synthetic
aaccuucggacggaaau

SEQ ID NO: 1876 - RNA, 17 nt, Artificial Sequence
  Synthetic
augcgcugauggccaau

SEQ ID NO: 1877 - RNA, 17 nt, Artificial Sequence
  Synthetic
aaggacaauuggccaau

SEQ ID NO: 1878 - RNA, 17 nt, Artificial Sequence
  Synthetic
  misc_feature (11)..(11): n is a, c, g, or u
uagaaucaccngaacau

SEQ ID NO: 1879 - RNA, 17 nt, Artificial Sequence
  Synthetic
guacaccuccuucccau

SEQ ID NO: 1880 - RNA, 17 nt, Artificial Sequence
  Synthetic
acaagaagaugaggcau

SEQ ID NO: 1881 - RNA, 17 nt, Artificial Sequence
  Synthetic
ugcauaaaaucaaagau

SEQ ID NO: 1882 - RNA, 17 nt, Artificial Sequence
  Synthetic
cagacacauccaacgau

SEQ ID NO: 1883 - RNA, 17 nt, Artificial Sequence
  Synthetic
uccgcgcaugcgcugau

SEQ ID NO: 1884 - RNA, 17 nt, Artificial Sequence
  Synthetic
aacccugcuccgacuau

SEQ ID NO: 1885 - RNA, 17 nt, Artificial Sequence
  Synthetic
aggauccucuaaauuau

SEQ ID NO: 1886 - RNA, 17 nt, Artificial Sequence
  Synthetic
cugacgcaacccccacu

SEQ ID NO: 1887 - RNA, 17 nt, Artificial Sequence
  Synthetic
uuuuccugacauucacu

SEQ ID NO: 1888 - RNA, 17 nt, Artificial Sequence
  Synthetic
acuuugggauaaaaccu

SEQ ID NO: 1889 - RNA, 17 nt, Artificial Sequence
  Synthetic
  misc_feature (10)..(10): n is a, c, g, or u
gggcauucunacaaccu

SEQ ID NO: 1890 - RNA, 17 nt, Artificial Sequence
  Synthetic
uagaagaagaacucccu

SEQ ID NO: 1891 - RNA, 17 nt, Artificial Sequence
  Synthetic
gaagaacucccucgccu

SEQ ID NO: 1892 - RNA, 17 nt, Artificial Sequence
  Synthetic
acacuuggcaaaggccu

SEQ ID NO: 1893 - RNA, 17 nt, Artificial Sequence
  Synthetic
  misc_feature (14)..(14): n is a, c, g, or u
aguuggcagcacanccu

SEQ ID NO: 1894 - RNA, 17 nt, Artificial Sequence
  Synthetic
cauacugcggaacuccu

SEQ ID NO: 1895 - RNA, 17 nt, Artificial Sequence
  Synthetic
uaccacccggguguccu

SEQ ID NO: 1896 - RNA, 17 nt, Artificial Sequence
  Synthetic
guccuccaacuuguccu

SEQ ID NO: 1897 - RNA, 17 nt, Artificial Sequence
  Synthetic
cccagcacaaaauagcu

SEQ ID NO: 1898 - RNA, 17 nt, Artificial Sequence
  Synthetic
ugggauaaaaccuagcu

SEQ ID NO: 1899 - RNA, 17 nt, Artificial Sequence
  Synthetic
  misc_feature (5)..(5): n is a, c, g, or u
uagcngcuuguuucgcu

SEQ ID NO: 1900 - RNA, 17 nt, Artificial Sequence
  Synthetic
  misc_feature (11)..(11): n is a, c, g, or u
  misc_feature (15)..(15): n is a, c, g, or u
gaacgccccunggancu

SEQ ID NO: 1901 - RNA, 17 nt, Artificial Sequence
  Synthetic
aaaaccugcaccacucu

SEQ ID NO: 1902 - RNA, 17 nt, Artificial Sequence
  Synthetic
uuaacuacuagaucucu

SEQ ID NO: 1903 - RNA, 17 nt, Artificial Sequence
  Synthetic
gcuuucccccacugucu

SEQ ID NO: 1904 - RNA, 17 nt, Artificial Sequence
  Synthetic
ugucccaugccccuucu

SEQ ID NO: 1905 - RNA, 17 nt, Artificial Sequence
  Synthetic
gcaggcuuuuguuuucu

SEQ ID NO: 1906 - RNA, 17 nt, Artificial Sequence
  Synthetic
ggcagaggugaaaaagu

SEQ ID NO: 1907 - RNA, 17 nt, Artificial Sequence
  Synthetic
gcuucaccucugcacgu

SEQ ID NO: 1908 - RNA, 17 nt, Artificial Sequence
  Synthetic
  misc_feature (1)..(1): n is a, c, g, or u
nugaaccuuuaccccgu

SEQ ID NO: 1909 - RNA, 17 nt, Artificial Sequence
  Synthetic
ggcaaaggccuggccgu

SEQ ID NO: 1910 - RNA, 17 nt, Artificial Sequence
  Synthetic
  misc_feature (11)..(11): n is a, c, g, or u
gaucucaaucnccgcgu

SEQ ID NO: 1911 - RNA, 17 nt, Artificial Sequence
  Synthetic
ucacacccccacacggu

SEQ ID NO: 1912 - RNA, 17 nt, Artificial Sequence
  Synthetic
uccggccgacgacgggu

SEQ ID NO: 1913 - RNA, 17 nt, Artificial Sequence
  Synthetic
caagcugugccuugggu

SEQ ID NO: 1914 - RNA, 17 nt, Artificial Sequence
  Synthetic
uguauuuuccugcuggu

SEQ ID NO: 1915 - RNA, 17 nt, Artificial Sequence
  Synthetic
acgaccccucucguggu

SEQ ID NO: 1916 - RNA, 17 nt, Artificial Sequence
  Synthetic
ggacuaucaagguaugu

SEQ ID NO: 1917 - RNA, 17 nt, Artificial Sequence
  Synthetic
aggugcucccaugcugu

SEQ ID NO: 1918 - RNA, 17 nt, Artificial Sequence
  Synthetic
augcgcggaaccuuugu

SEQ ID NO: 1919 - RNA, 17 nt, Artificial Sequence
  Synthetic
  misc_feature (16)..(16): n is a, c, g, or u
ugggaguugggggacnu

SEQ ID NO: 1920 - RNA, 17 nt, Artificial Sequence
  Synthetic
guguccuggccaaaauu

SEQ ID NO: 1921 - RNA, 17 nt, Artificial Sequence
  Synthetic
cacaaacaaggacaauu

SEQ ID NO: 1922 - RNA, 17 nt, Artificial Sequence
  Synthetic
ucgggacugcuggaauu

SEQ ID NO: 1923 - RNA, 17 nt, Artificial Sequence
  Synthetic
cuaccuuguuugccauu

SEQ ID NO: 1924 - RNA, 17 nt, Artificial Sequence
  Synthetic
gcuggggcuuggcgauu

SEQ ID NO: 1925 - RNA, 17 nt, Artificial Sequence
  Synthetic
ugcgucagcaaacacuu

SEQ ID NO: 1926 - RNA, 17 nt, Artificial Sequence
  Synthetic
ccggcccgugugcacuu

SEQ ID NO: 1927 - RNA, 17 nt, Artificial Sequence
  Synthetic
ggcaacggccaggccuu

SEQ ID NO: 1928 - RNA, 17 nt, Artificial Sequence
  Synthetic
gugggucuuuugggcuu

SEQ ID NO: 1929 - RNA, 17 nt, Artificial Sequence
  Synthetic
cucagcccguuucucuu

SEQ ID NO: 1930 - RNA, 17 nt, Artificial Sequence
  Synthetic
ccgcgcaggauccaguu

SEQ ID NO: 1931 - RNA, 17 nt, Artificial Sequence
  Synthetic
guggagagacugggguu

SEQ ID NO: 1932 - RNA, 17 nt, Artificial Sequence
  Synthetic
ggccuuugccaaguguu

SEQ ID NO: 1933 - RNA, 17 nt, Artificial Sequence
  Synthetic
cccacuccuaccuuguu

SEQ ID NO: 1934 - RNA, 17 nt, Artificial Sequence
  Synthetic
ucuuauguaagguuguu

SEQ ID NO: 1935 - RNA, 17 nt, Artificial Sequence
  Synthetic
  misc_feature (15)..(15): n is a, c, g, or u
ggugaguugaugacnuu

SEQ ID NO: 1936 - RNA, 17 nt, Artificial Sequence
  Synthetic
agaugcugcacagauuu

SEQ ID NO: 1937 - RNA, 17 nt, Artificial Sequence
  Synthetic
gaggacucuuggacuuu

SEQ ID NO: 1938 - RNA, 17 nt, Artificial Sequence
  Synthetic
aaaucaaagauugcuuu

SEQ ID NO: 1939 - RNA, 17 nt, Artificial Sequence
  Synthetic
aagaguggugcagguuu

SEQ ID NO: 1940 - RNA, 17 nt, Artificial Sequence
  Synthetic
  misc_feature (9)..(9): n is a, c, g, or u
cuccuagcngcuuguuu

SEQ ID NO: 1941 - RNA, 17 nt, Artificial Sequence
  Synthetic
uggggacugcgaauuuu

SEQ ID NO: 1942 - RNA, 17 nt, Artificial Sequence
  Synthetic
ggaguuacucucauuuu

SEQ ID NO: 1943 - RNA, 17 nt, Artificial Sequence
  Synthetic
ccccaccauuuuguuuu

SEQ ID NO: 1944 - RNA, 20 nt, Artificial Sequence
  Synthetic
ugaagaggaagaugauaaaa

SEQ ID NO: 1945 - RNA, 20 nt, Artificial Sequence
  Synthetic
uaaguuggcgagaaaacaaa

SEQ ID NO: 1946 - RNA, 20 nt, Artificial Sequence
  Synthetic
  misc_feature (9)..(9): n is a, c, g, or u
ccugcuuanagaccaccaaa

SEQ ID NO: 1947 - RNA, 20 nt, Artificial Sequence
  Synthetic
gucagcaaacacuuggcaaa

SEQ ID NO: 1948 - RNA, 20 nt, Artificial Sequence
  Synthetic
  misc_feature (2)..(2): n is a, c, g, or u
anguauuguuuacagagaaa

SEQ ID NO: 1949 - RNA, 20 nt, Artificial Sequence
  Synthetic
  misc_feature (2)..(2): n is a, c, g, or u
anaucauccauauaacuaaa

SEQ ID NO: 1950 - RNA, 20 nt, Artificial Sequence
  Synthetic
guuuucucgccaacuuacaa

SEQ ID NO: 1951 - RNA, 20 nt, Artificial Sequence
  Synthetic
caugccccaaagccacccaa

SEQ ID NO: 1952 - RNA, 20 nt, Artificial Sequence
  Synthetic
ggucaauguccaugccccaa

SEQ ID NO: 1953 - RNA, 20 nt, Artificial Sequence
  Synthetic
uugaguaaaaggggcugcaa

SEQ ID NO: 1954 - RNA, 20 nt, Artificial Sequence
  Synthetic
caaucggaggucaggaagaa

SEQ ID NO: 1955 - RNA, 20 nt, Artificial Sequence
  Synthetic
cugagggcuccaccccagaa

SEQ ID NO: 1956 - RNA, 20 nt, Artificial Sequence
  Synthetic
cagacgggaagaagucagaa

SEQ ID NO: 1957 - RNA, 20 nt, Artificial Sequence
  Synthetic
cacgggccggcagaugagaa

SEQ ID NO: 1958 - RNA, 20 nt, Artificial Sequence
  Synthetic
  misc_feature (16)..(16): n is a, c, g, or u
ugguggcgagguugunagaa

SEQ ID NO: 1959 - RNA, 20 nt, Artificial Sequence
  Synthetic
ucccauagguauuuuccgaa

SEQ ID NO: 1960 - RNA, 20 nt, Artificial Sequence
  Synthetic
auucacgggaaguuugcgaa

SEQ ID NO: 1961 - RNA, 20 nt, Artificial Sequence
  Synthetic
aaagccagacagugggggaa

SEQ ID NO: 1962 - RNA, 20 nt, Artificial Sequence
  Synthetic
uauuuacauacuuuguggaa

SEQ ID NO: 1963 - RNA, 20 nt, Artificial Sequence
  Synthetic
cgcauggagaccaccgugaa

SEQ ID NO: 1964 - RNA, 20 nt, Artificial Sequence
  Synthetic
  misc_feature (9)..(9): n is a, c, g, or u
caauguucnggugauucuaa

SEQ ID NO: 1965 - RNA, 20 nt, Artificial Sequence
  Synthetic
aguuucucuuccaaauguaa

SEQ ID NO: 1966 - RNA, 20 nt, Artificial Sequence
  Synthetic
  misc_feature (5)..(5): n is a, c, g, or u
gaccngcugcgagcgaaaca

SEQ ID NO: 1967 - RNA, 20 nt, Artificial Sequence
  Synthetic
cuaagggacacacauccaca

SEQ ID NO: 1968 - RNA, 20 nt, Artificial Sequence
  Synthetic
gccugcuuagcgguaauaca

SEQ ID NO: 1969 - RNA, 20 nt, Artificial Sequence
  Synthetic
uggucuguucaccagcacca

SEQ ID NO: 1970 - RNA, 20 nt, Artificial Sequence
  Synthetic
cguugagagaggugcuccca

SEQ ID NO: 1971 - RNA, 20 nt, Artificial Sequence
  Synthetic
  misc_feature (10)..(10): n is a, c, g, or u
cacagaaagnuucuguccca

SEQ ID NO: 1972 - RNA, 20 nt, Artificial Sequence
  Synthetic
gcgcugauggccaaucgcca

SEQ ID NO: 1973 - RNA, 20 nt, Artificial Sequence
  Synthetic
ggacacacauccacaggcca

SEQ ID NO: 1974 - RNA, 20 nt, Artificial Sequence
  Synthetic
ccguugcucggcaacggcca

SEQ ID NO: 1975 - RNA, 20 nt, Artificial Sequence
  Synthetic
ucccacuguucaagccucca

SEQ ID NO: 1976 - RNA, 20 nt, Artificial Sequence
  Synthetic
uuuauaagggucaaugucca

SEQ ID NO: 1977 - RNA, 20 nt, Artificial Sequence
  Synthetic
gccuguauuaccgcuaagca

SEQ ID NO: 1978 - RNA, 20 nt, Artificial Sequence
  Synthetic
  misc_feature (6)..(6): n is a, c, g, or u
aaccanacugcucucaggca

SEQ ID NO: 1979 - RNA, 20 nt, Artificial Sequence
  Synthetic
cuucugggguggagcccuca

SEQ ID NO: 1980 - RNA, 20 nt, Artificial Sequence
  Synthetic
  misc_feature (10)..(10): n is a, c, g, or u
ccccaaccanacugcucuca

SEQ ID NO: 1981 - RNA, 20 nt, Artificial Sequence
  Synthetic
augugguuauccugcucuca

SEQ ID NO: 1982 - RNA, 20 nt, Artificial Sequence
  Synthetic
uguucaugucccacuguuca

SEQ ID NO: 1983 - RNA, 20 nt, Artificial Sequence
  Synthetic
cgguauaaagggacucaaga

SEQ ID NO: 1984 - RNA, 20 nt, Artificial Sequence
  Synthetic
aaugagaguaacuccacaga

SEQ ID NO: 1985 - RNA, 20 nt, Artificial Sequence
  Synthetic
aagauugaugaugugagaga

SEQ ID NO: 1986 - RNA, 20 nt, Artificial Sequence
  Synthetic
gcuucagcccucuaccgaga

SEQ ID NO: 1987 - RNA, 20 nt, Artificial Sequence
  Synthetic
cuacuguuguuagacaacga

SEQ ID NO: 1988 - RNA, 20 nt, Artificial Sequence
  Synthetic
gggugugaacccuggaccga

SEQ ID NO: 1989 - RNA, 20 nt, Artificial Sequence
  Synthetic
aaauuauugcccacccagga

SEQ ID NO: 1990 - RNA, 20 nt, Artificial Sequence
  Synthetic
uaaaggucuuuguauuagga

SEQ ID NO: 1991 - RNA, 20 nt, Artificial Sequence
  Synthetic
caaacaagguaggaguggga

SEQ ID NO: 1992 - RNA, 20 nt, Artificial Sequence
  Synthetic
aaggaauacuaacauuggga

SEQ ID NO: 1993 - RNA, 20 nt, Artificial Sequence
  Synthetic
uuuagcuguguucaaaugga

SEQ ID NO: 1994 - RNA, 20 nt, Artificial Sequence
  Synthetic
ccugaccuccgauuggugga

SEQ ID NO: 1995 - RNA, 20 nt, Artificial Sequence
  Synthetic
cacccaaggcacagcuugga

SEQ ID NO: 1996 - RNA, 20 nt, Artificial Sequence
  Synthetic
aagaaccaacaagaagauga

SEQ ID NO: 1997 - RNA, 20 nt, Artificial Sequence
  Synthetic
uaugcacaauauguuccuga

SEQ ID NO: 1998 - RNA, 20 nt, Artificial Sequence
  Synthetic
agccaagagaaacgggcuga

SEQ ID NO: 1999 - RNA, 20 nt, Artificial Sequence
  Synthetic
cuuugccaaguguuugcuga

SEQ ID NO: 2000 - RNA, 20 nt, Artificial Sequence
  Synthetic
  misc_feature (13)..(13): n is a, c, g, or u
auuuuuguaucanaucuuga

SEQ ID NO: 2001 - RNA, 20 nt, Artificial Sequence
  Synthetic
gacagugggggaaagcccua

SEQ ID NO: 2002 - RNA, 20 nt, Artificial Sequence
  Synthetic
guaugccuguauuaccgcua

SEQ ID NO: 2003 - RNA, 20 nt, Artificial Sequence
  Synthetic
uccucuucauccugcugcua

SEQ ID NO: 2004 - RNA, 20 nt, Artificial Sequence
  Synthetic
cuuuguauuaggaggcugua

SEQ ID NO: 2005 - RNA, 20 nt, Artificial Sequence
  Synthetic
ccugcucucaugcccuugua

SEQ ID NO: 2006 - RNA, 20 nt, Artificial Sequence
  Synthetic
  misc_feature (18)..(18): n is a, c, g, or u
ggggcauuugguggucunua

SEQ ID NO: 2007 - RNA, 20 nt, Artificial Sequence
  Synthetic
  misc_feature (14)..(14): n is a, c, g, or u
gagacgauugaaanuaauua

SEQ ID NO: 2008 - RNA, 20 nt, Artificial Sequence
  Synthetic
acaugaacaaaagaugauua

SEQ ID NO: 2009 - RNA, 20 nt, Artificial Sequence
  Synthetic
cuggugaacagaccaauuua

SEQ ID NO: 2010 - RNA, 20 nt, Artificial Sequence
  Synthetic
gaaagcaaucuuugauuuua

SEQ ID NO: 2011 - RNA, 20 nt, Artificial Sequence
  Synthetic
uuaccccguugcucggcaac

SEQ ID NO: 2012 - RNA, 20 nt, Artificial Sequence
  Synthetic
gugggcauccauuugaacac

SEQ ID NO: 2013 - RNA, 20 nt, Artificial Sequence
  Synthetic
uuugucaacaagaaacacac

SEQ ID NO: 2014 - RNA, 20 nt, Artificial Sequence
  Synthetic
guccgggaccuacucgacac

SEQ ID NO: 2015 - RNA, 20 nt, Artificial Sequence
  Synthetic
cccaaagccacccaaggcac

SEQ ID NO: 2016 - RNA, 20 nt, Artificial Sequence
  Synthetic
guugaagucccaaucgggac

SEQ ID NO: 2017 - RNA, 20 nt, Artificial Sequence
  Synthetic
  misc_feature (18)..(18): n is a, c, g, or u
cauugcacccccaaccanac

SEQ ID NO: 2018 - RNA, 20 nt, Artificial Sequence
  Synthetic
caucuugagucccuuuauac

SEQ ID NO: 2019 - RNA, 20 nt, Artificial Sequence
  Synthetic
acagaccaauuuaugccuac

SEQ ID NO: 2020 - RNA, 20 nt, Artificial Sequence
  Synthetic
uuccugggaacaagagcuac

SEQ ID NO: 2021 - RNA, 20 nt, Artificial Sequence
  Synthetic
uccguccgaagguuugguac

SEQ ID NO: 2022 - RNA, 20 nt, Artificial Sequence
  Synthetic
cccuuguaugccuguauuac

SEQ ID NO: 2023 - RNA, 20 nt, Artificial Sequence
  Synthetic
gcacgggacccugcaaaacc

SEQ ID NO: 2024 - RNA, 20 nt, Artificial Sequence
  Synthetic
uuccaggaucuacaaccacc

SEQ ID NO: 2025 - RNA, 20 nt, Artificial Sequence
  Synthetic
guuucugaacuggagccacc

SEQ ID NO: 2026 - RNA, 20 nt, Artificial Sequence
  Synthetic
  misc_feature (9)..(9): n is a, c, g, or u
guguggauncgcacuccacc

SEQ ID NO: 2027 - RNA, 20 nt, Artificial Sequence
  Synthetic
cauaaauuggucuguucacc

SEQ ID NO: 2028 - RNA, 20 nt, Artificial Sequence
  Synthetic
  misc_feature (6)..(6): n is a, c, g, or u
gauaanguccgcuccagacc

SEQ ID NO: 2029 - RNA, 20 nt, Artificial Sequence
  Synthetic
aguucagaaacacagaaccc

SEQ ID NO: 2030 - RNA, 20 nt, Artificial Sequence
  Synthetic
caaccaccagcacgggaccc

SEQ ID NO: 2031 - RNA, 20 nt, Artificial Sequence
  Synthetic
  misc_feature (4)..(4): n is a, c, g, or u
caangucaucaacucacccc

SEQ ID NO: 2032 - RNA, 20 nt, Artificial Sequence
  Synthetic
auggccaaucgccaagcccc

SEQ ID NO: 2033 - RNA, 20 nt, Artificial Sequence
  Synthetic
aguucuucuucuaggggccc

SEQ ID NO: 2034 - RNA, 20 nt, Artificial Sequence
  Synthetic
cucucuuuacgcggacuccc

SEQ ID NO: 2035 - RNA, 20 nt, Artificial Sequence
  Synthetic
uuggcgagaaaacaaaagcc

SEQ ID NO: 2036 - RNA, 20 nt, Artificial Sequence
  Synthetic
aagcgaagugcacacgggcc

SEQ ID NO: 2037 - RNA, 20 nt, Artificial Sequence
  Synthetic
  misc_feature (10)..(10): n is a, c, g, or u
cgauugaaanuaauuaugcc

SEQ ID NO: 2038 - RNA, 20 nt, Artificial Sequence
  Synthetic
ccugugccuucucaucugcc

SEQ ID NO: 2039 - RNA, 20 nt, Artificial Sequence
  Synthetic
uaucaucuuccucuucaucc

SEQ ID NO: 2040 - RNA, 20 nt, Artificial Sequence
  Synthetic
ggcaauaauuuagaggaucc

SEQ ID NO: 2041 - RNA, 20 nt, Artificial Sequence
  Synthetic
uuuacucaaugugguuaucc

SEQ ID NO: 2042 - RNA, 20 nt, Artificial Sequence
  Synthetic
ucgccaccagauccaccucc

SEQ ID NO: 2043 - RNA, 20 nt, Artificial Sequence
  Synthetic
gaaccucuauguuucccucc

SEQ ID NO: 2044 - RNA, 20 nt, Artificial Sequence
  Synthetic
cgcagaagaucucaaucucc

SEQ ID NO: 2045 - RNA, 20 nt, Artificial Sequence
  Synthetic
cacuauucagagcaaauucc

SEQ ID NO: 2046 - RNA, 20 nt, Artificial Sequence
  Synthetic
ucucucuuauauagaauucc

SEQ ID NO: 2047 - RNA, 20 nt, Artificial Sequence
  Synthetic
  misc_feature (1)..(1): n is a, c, g, or u
  misc_feature (13)..(14): n is a, c, g, or u
ncuucuccgccunncguucc

SEQ ID NO: 2048 - RNA, 20 nt, Artificial Sequence
  Synthetic
  misc_feature (9)..(9): n is a, c, g, or u
guaaggggncuguauuuucc

SEQ ID NO: 2049 - RNA, 20 nt, Artificial Sequence
  Synthetic
  misc_feature (2)..(2): n is a, c, g, or u
cngcugcgagcgaaacaagc

SEQ ID NO: 2050 - RNA, 20 nt, Artificial Sequence
  Synthetic
guccgaagguuugguacagc

SEQ ID NO: 2051 - RNA, 20 nt, Artificial Sequence
  Synthetic
acaagaagaugaggcauagc

SEQ ID NO: 2052 - RNA, 20 nt, Artificial Sequence
  Synthetic
  misc_feature (14)..(14): n is a, c, g, or u
aguuggcagcacanccuagc

SEQ ID NO: 2053 - RNA, 20 nt, Artificial Sequence
  Synthetic
cauacugcggaacuccuagc

SEQ ID NO: 2054 - RNA, 20 nt, Artificial Sequence
  Synthetic
agaggaagaugauaaaacgc

SEQ ID NO: 2055 - RNA, 20 nt, Artificial Sequence
  Synthetic
  misc_feature (5)..(5): n is a, c, g, or u
uagcngcuuguuucgcucgc

SEQ ID NO: 2056 - RNA, 20 nt, Artificial Sequence
  Synthetic
ccacauugaguaaaaggggc

SEQ ID NO: 2057 - RNA, 20 nt, Artificial Sequence
  Synthetic
  misc_feature (3)..(4): n is a, c, g, or u
  misc_feature (16)..(16): n is a, c, g, or u
cgnnaggcggagaagngggc

SEQ ID NO: 2058 - RNA, 20 nt, Artificial Sequence
  Synthetic
guacaccuccuucccauggc

SEQ ID NO: 2059 - RNA, 20 nt, Artificial Sequence
  Synthetic
ccgcgcaggauccaguuggc

SEQ ID NO: 2060 - RNA, 20 nt, Artificial Sequence
  Synthetic
  misc_feature (18)..(18): n is a, c, g, or u
uuaacuacuagaucucungc

SEQ ID NO: 2061 - RNA, 20 nt, Artificial Sequence
  Synthetic
uauaaagggacucaagaugc

SEQ ID NO: 2062 - RNA, 20 nt, Artificial Sequence
  Synthetic
caucuuccucuucauccugc

SEQ ID NO: 2063 - RNA, 20 nt, Artificial Sequence
  Synthetic
aauaauuuagaggauccugc

SEQ ID NO: 2064 - RNA, 20 nt, Artificial Sequence
  Synthetic
ccucuauguuucccuccugc

SEQ ID NO: 2065 - RNA, 20 nt, Artificial Sequence
  Synthetic
guggucgcuuggggcucugc

SEQ ID NO: 2066 - RNA, 20 nt, Artificial Sequence
  Synthetic
auugggggccaaaucugugc

SEQ ID NO: 2067 - RNA, 20 nt, Artificial Sequence
  Synthetic
  misc_feature (15)..(15): n is a, c, g, or u
ccauggcugcuaggnugugc

SEQ ID NO: 2068 - RNA, 20 nt, Artificial Sequence
  Synthetic
gugggucuuuugggcuuugc

SEQ ID NO: 2069 - RNA, 20 nt, Artificial Sequence
  Synthetic
cccgccugugccuucucauc

SEQ ID NO: 2070 - RNA, 20 nt, Artificial Sequence
  Synthetic
ggaguuccgcaguauggauc

SEQ ID NO: 2071 - RNA, 20 nt, Artificial Sequence
  Synthetic
  misc_feature (15)..(15): n is a, c, g, or u
ggucuggagcggacnuuauc

SEQ ID NO: 2072 - RNA, 20 nt, Artificial Sequence
  Synthetic
ugugcacuucgcuucaccuc

SEQ ID NO: 2073 - RNA, 20 nt, Artificial Sequence
  Synthetic
ccaugcaacuuuuucaccuc

SEQ ID NO: 2074 - RNA, 20 nt, Artificial Sequence
  Synthetic
uaccuaugggagugggccuc

SEQ ID NO: 2075 - RNA, 20 nt, Artificial Sequence
  Synthetic
cggaaccuuuguggcuccuc

SEQ ID NO: 2076 - RNA, 20 nt, Artificial Sequence
  Synthetic
cucguggucgcuuggggcuc

SEQ ID NO: 2077 - RNA, 20 nt, Artificial Sequence
  Synthetic
gaaccuuuaccccguugcuc

SEQ ID NO: 2078 - RNA, 20 nt, Artificial Sequence
  Synthetic
  misc_feature (14)..(14): n is a, c, g, or u
ggcucugccgcccncuucuc

SEQ ID NO: 2079 - RNA, 20 nt, Artificial Sequence
  Synthetic
cagccaguggggguugcguc

SEQ ID NO: 2080 - RNA, 20 nt, Artificial Sequence
  Synthetic
gagaggugcgacccgucguc

SEQ ID NO: 2081 - RNA, 20 nt, Artificial Sequence
  Synthetic
cgaccacgagaggggucguc

SEQ ID NO: 2082 - RNA, 20 nt, Artificial Sequence
  Synthetic
  misc_feature (17)..(17): n is a, c, g, or u
uugucagugccgauaanguc

SEQ ID NO: 2083 - RNA, 20 nt, Artificial Sequence
  Synthetic
gaccuacucgacaccgcuuc

SEQ ID NO: 2084 - RNA, 20 nt, Artificial Sequence
  Synthetic
  misc_feature (9)..(9): n is a, c, g, or u
aaacaagcngcuaggaguuc

SEQ ID NO: 2085 - RNA, 20 nt, Artificial Sequence
  Synthetic
accauauuccugggaacaag

SEQ ID NO: 2086 - RNA, 20 nt, Artificial Sequence
  Synthetic
cgguaauacaggcauacaag

SEQ ID NO: 2087 - RNA, 20 nt, Artificial Sequence
  Synthetic
cgugcagaggugaagcgaag

SEQ ID NO: 2088 - RNA, 20 nt, Artificial Sequence
  Synthetic
cuuacucucggauccaacag

SEQ ID NO: 2089 - RNA, 20 nt, Artificial Sequence
  Synthetic
gguggagcccucaggcacag

SEQ ID NO: 2090 - RNA, 20 nt, Artificial Sequence
  Synthetic
guuguuagacaacgaggcag

SEQ ID NO: 2091 - RNA, 20 nt, Artificial Sequence
  Synthetic
  misc_feature (11)..(11): n is a, c, g, or u
ggcggagaagngggcggcag

SEQ ID NO: 2092 - RNA, 20 nt, Artificial Sequence
  Synthetic
gcuuggcgauuggccaucag

SEQ ID NO: 2093 - RNA, 20 nt, Artificial Sequence
  Synthetic
  misc_feature (10)..(10): n is a, c, g, or u
aaggacaacngaguugucag

SEQ ID NO: 2094 - RNA, 20 nt, Artificial Sequence
  Synthetic
gggucguccgcaggauucag

SEQ ID NO: 2095 - RNA, 20 nt, Artificial Sequence
  Synthetic
caguuggauccacuauucag

SEQ ID NO: 2096 - RNA, 20 nt, Artificial Sequence
  Synthetic
ucuaaggcaucucgguagag

SEQ ID NO: 2097 - RNA, 20 nt, Artificial Sequence
  Synthetic
caggcauacaagggcaugag

SEQ ID NO: 2098 - RNA, 20 nt, Artificial Sequence
  Synthetic
  misc_feature (1)..(1): n is a, c, g, or u
nagaaugcccugugccugag

SEQ ID NO: 2099 - RNA, 20 nt, Artificial Sequence
  Synthetic
cacaaaauagcuugccugag

SEQ ID NO: 2100 - RNA, 20 nt, Artificial Sequence
  Synthetic
aagagagaauccacacauag

SEQ ID NO: 2101 - RNA, 20 nt, Artificial Sequence
  Synthetic
cucuuggcucaguuuacuag

SEQ ID NO: 2102 - RNA, 20 nt, Artificial Sequence
  Synthetic
auuuguucaguggugcguag

SEQ ID NO: 2103 - RNA, 20 nt, Artificial Sequence
  Synthetic
aaacugagccaagagaaacg

SEQ ID NO: 2104 - RNA, 20 nt, Artificial Sequence
  Synthetic
cuggaaguagaggacacacg

SEQ ID NO: 2105 - RNA, 20 nt, Artificial Sequence
  Synthetic
ggugaagcgaagugcacacg

SEQ ID NO: 2106 - RNA, 20 nt, Artificial Sequence
  Synthetic
acgguggucuccaugcgacg

SEQ ID NO: 2107 - RNA, 20 nt, Artificial Sequence
  Synthetic
cguagacaaaggacgucccg

SEQ ID NO: 2108 - RNA, 20 nt, Artificial Sequence
  Synthetic
gcagguuuugcagggucccg

SEQ ID NO: 2109 - RNA, 20 nt, Artificial Sequence
  Synthetic
caaaggccuggccguugccg

SEQ ID NO: 2110 - RNA, 20 nt, Artificial Sequence
  Synthetic
gaggagccacaaagguuccg

SEQ ID NO: 2111 - RNA, 20 nt, Artificial Sequence
  Synthetic
uaaccacauugaguaaaagg

SEQ ID NO: 2112 - RNA, 20 nt, Artificial Sequence
  Synthetic
cucucucaacggcgagaagg

SEQ ID NO: 2113 - RNA, 20 nt, Artificial Sequence
  Synthetic
ugaugggaugggaauacagg

SEQ ID NO: 2114 - RNA, 20 nt, Artificial Sequence
  Synthetic
gcaguauggaucggcagagg

SEQ ID NO: 2115 - RNA, 20 nt, Artificial Sequence
  Synthetic
cuucucgccguugagagagg

SEQ ID NO: 2116 - RNA, 20 nt, Artificial Sequence
  Synthetic
uggugacccacaaaaugagg

SEQ ID NO: 2117 - RNA, 20 nt, Artificial Sequence
  Synthetic
ggaaguguugauaggauagg

SEQ ID NO: 2118 - RNA, 20 nt, Artificial Sequence
  Synthetic
gagggaguucuucuucuagg

SEQ ID NO: 2119 - RNA, 20 nt, Artificial Sequence
  Synthetic
gugagagaggcaauagucgg

SEQ ID NO: 2120 - RNA, 20 nt, Artificial Sequence
  Synthetic
cuuugucuacgucccgucgg

SEQ ID NO: 2121 - RNA, 20 nt, Artificial Sequence
  Synthetic
  misc_feature (10)..(10): n is a, c, g, or u
gagagcagunugguuggggg

SEQ ID NO: 2122 - RNA, 20 nt, Artificial Sequence
  Synthetic
aacaagagcuacagcauggg

SEQ ID NO: 2123 - RNA, 20 nt, Artificial Sequence
  Synthetic
  misc_feature (10)..(10): n is a, c, g, or u
auggaugaunugguauuggg

SEQ ID NO: 2124 - RNA, 20 nt, Artificial Sequence
  Synthetic
gaggugaaaaaguugcaugg

SEQ ID NO: 2125 - RNA, 20 nt, Artificial Sequence
  Synthetic
guucuguguuucugaacugg

SEQ ID NO: 2126 - RNA, 20 nt, Artificial Sequence
  Synthetic
acgcaacccccacuggcugg

SEQ ID NO: 2127 - RNA, 20 nt, Artificial Sequence
  Synthetic
gguuccuugagcaagagugg

SEQ ID NO: 2128 - RNA, 20 nt, Artificial Sequence
  Synthetic
acgguggccuucuggggugg

SEQ ID NO: 2129 - RNA, 20 nt, Artificial Sequence
  Synthetic
ccccucucguggucgcuugg

SEQ ID NO: 2130 - RNA, 20 nt, Artificial Sequence
  Synthetic
gacccuuauaaagaauuugg

SEQ ID NO: 2131 - RNA, 20 nt, Artificial Sequence
  Synthetic
ugugccuuggguggcuuugg

SEQ ID NO: 2132 - RNA, 20 nt, Artificial Sequence
  Synthetic
ccacaaagguuccgcgcaug

SEQ ID NO: 2133 - RNA, 20 nt, Artificial Sequence
  Synthetic
caaauugcacuaguaaacug

SEQ ID NO: 2134 - RNA, 20 nt, Artificial Sequence
  Synthetic
  misc_feature (9)..(9): n is a, c, g, or u
gagguugunagaaugcccug

SEQ ID NO: 2135 - RNA, 20 nt, Artificial Sequence
  Synthetic
uuacgcggacuccccgccug

SEQ ID NO: 2136 - RNA, 20 nt, Artificial Sequence
  Synthetic
cuguucaagccuccaagcug

SEQ ID NO: 2137 - RNA, 20 nt, Artificial Sequence
  Synthetic
gguauugggggccaaaucug

SEQ ID NO: 2138 - RNA, 20 nt, Artificial Sequence
  Synthetic
  misc_feature (13)..(13): n is a, c, g, or u
caugggacagaancuuucug

SEQ ID NO: 2139 - RNA, 20 nt, Artificial Sequence
  Synthetic
ggaaaauaccuaugggagug

SEQ ID NO: 2140 - RNA, 20 nt, Artificial Sequence
  Synthetic
  misc_feature (11)..(11): n is a, c, g, or u
ccuuucauuunuagugagug

SEQ ID NO: 2141 - RNA, 20 nt, Artificial Sequence
  Synthetic
uucucaucugccggcccgug

SEQ ID NO: 2142 - RNA, 20 nt, Artificial Sequence
  Synthetic
  misc_feature (5)..(5): n is a, c, g, or u
ugacnuuggcuuccugggug

SEQ ID NO: 2143 - RNA, 20 nt, Artificial Sequence
  Synthetic
ccaauuuuuuguuaucugug

SEQ ID NO: 2144 - RNA, 20 nt, Artificial Sequence
  Synthetic
  misc_feature (18)..(18): n is a, c, g, or u
uucccauggcugcuaggnug

SEQ ID NO: 2145 - RNA, 20 nt, Artificial Sequence
  Synthetic
gaaagaaucccagaggauug

SEQ ID NO: 2146 - RNA, 20 nt, Artificial Sequence
  Synthetic
  misc_feature (1)..(1): n is a, c, g, or u
nuugccucaggaacauauug

SEQ ID NO: 2147 - RNA, 20 nt, Artificial Sequence
  Synthetic
ggaaacauagagguuccuug

SEQ ID NO: 2148 - RNA, 20 nt, Artificial Sequence
  Synthetic
auucccaucccaucaucuug

SEQ ID NO: 2149 - RNA, 20 nt, Artificial Sequence
  Synthetic
cucucaggcaagcuauuuug

SEQ ID NO: 2150 - RNA, 20 nt, Artificial Sequence
  Synthetic
  misc_feature (5)..(5): n is a, c, g, or u
aacgnauugugggucuuuug

SEQ ID NO: 2151 - RNA, 20 nt, Artificial Sequence
  Synthetic
  misc_feature (14)..(14): n is a, c, g, or u
  misc_feature (20)..(20): n is a, c, g, or u
uauuaugguuucanauuucn

SEQ ID NO: 2152 - RNA, 20 nt, Artificial Sequence
  Synthetic
  misc_feature (20)..(20): n is a, c, g, or u
ugucuuuuggaguguggaun

SEQ ID NO: 2153 - RNA, 20 nt, Artificial Sequence
  Synthetic
  misc_feature (20)..(20): n is a, c, g, or u
aaaaaugugaacaauuugun

SEQ ID NO: 2154 - RNA, 20 nt, Artificial Sequence
  Synthetic
aacucaccccagcacaaaau

SEQ ID NO: 2155 - RNA, 20 nt, Artificial Sequence
  Synthetic
cuacgcaccacugaacaaau

SEQ ID NO: 2156 - RNA, 20 nt, Artificial Sequence
  Synthetic
ccaaaccuucggacggaaau

SEQ ID NO: 2157 - RNA, 20 nt, Artificial Sequence
  Synthetic
cgcaugcgcugauggccaau

SEQ ID NO: 2158 - RNA, 20 nt, Artificial Sequence
  Synthetic
aacaaggacaauuggccaau

SEQ ID NO: 2159 - RNA, 20 nt, Artificial Sequence
  Synthetic
  misc_feature (14)..(14): n is a, c, g, or u
ccuuagaaucaccngaacau

SEQ ID NO: 2160 - RNA, 20 nt, Artificial Sequence
  Synthetic
gaaguacaccuccuucccau

SEQ ID NO: 2161 - RNA, 20 nt, Artificial Sequence
  Synthetic
ccaacaagaagaugaggcau

SEQ ID NO: 2162 - RNA, 20 nt, Artificial Sequence
  Synthetic
uugugcauaaaaucaaagau

SEQ ID NO: 2163 - RNA, 20 nt, Artificial Sequence
  Synthetic
ccgcagacacauccaacgau

SEQ ID NO: 2164 - RNA, 20 nt, Artificial Sequence
  Synthetic
gguuccgcgcaugcgcugau

SEQ ID NO: 2165 - RNA, 20 nt, Artificial Sequence
  Synthetic
cagaacccugcuccgacuau

SEQ ID NO: 2166 - RNA, 20 nt, Artificial Sequence
  Synthetic
ugcaggauccucuaaauuau

SEQ ID NO: 2167 - RNA, 20 nt, Artificial Sequence
  Synthetic
uugcugacgcaacccccacu

SEQ ID NO: 2168 - RNA, 20 nt, Artificial Sequence
  Synthetic
uucuuuuccugacauucacu

SEQ ID NO: 2169 - RNA, 20 nt, Artificial Sequence
  Synthetic
guaacuuugggauaaaaccu

SEQ ID NO: 2170 - RNA, 20 nt, Artificial Sequence
  Synthetic
  misc_feature (13)..(13): n is a, c, g, or u
acagggcauucunacaaccu

SEQ ID NO: 2171 - RNA, 20 nt, Artificial Sequence
  Synthetic
cccuagaagaagaacucccu

SEQ ID NO: 2172 - RNA, 20 nt, Artificial Sequence
  Synthetic
gaagaagaacucccucgccu

SEQ ID NO: 2173 - RNA, 20 nt, Artificial Sequence
  Synthetic
caaacacuuggcaaaggccu

SEQ ID NO: 2174 - RNA, 20 nt, Artificial Sequence
  Synthetic
  misc_feature (17)..(17): n is a, c, g, or u
uccaguuggcagcacanccu

SEQ ID NO: 2175 - RNA, 20 nt, Artificial Sequence
  Synthetic
auccauacugcggaacuccu

SEQ ID NO: 2176 - RNA, 20 nt, Artificial Sequence
  Synthetic
ggguaccacccggguguccu

SEQ ID NO: 2177 - RNA, 20 nt, Artificial Sequence
  Synthetic
ccuguccuccaacuuguccu

SEQ ID NO: 2178 - RNA, 20 nt, Artificial Sequence
  Synthetic
caccccagcacaaaauagcu

SEQ ID NO: 2179 - RNA, 20 nt, Artificial Sequence
  Synthetic
cuuugggauaaaaccuagcu

SEQ ID NO: 2180 - RNA, 20 nt, Artificial Sequence
  Synthetic
  misc_feature (8)..(8): n is a, c, g, or u
uccuagcngcuuguuucgcu

SEQ ID NO: 2181 - RNA, 20 nt, Artificial Sequence
  Synthetic
  misc_feature (14)..(14): n is a, c, g, or u
  misc_feature (18)..(18): n is a, c, g, or u
cgugaacgccccunggancu

SEQ ID NO: 2182 - RNA, 20 nt, Artificial Sequence
  Synthetic
ugcaaaaccugcaccacucu

SEQ ID NO: 2183 - RNA, 20 nt, Artificial Sequence
  Synthetic
uaauuaacuacuagaucucu

SEQ ID NO: 2184 - RNA, 20 nt, Artificial Sequence
  Synthetic
agggcuuucccccacugucu

SEQ ID NO: 2185 - RNA, 20 nt, Artificial Sequence
  Synthetic
uucugucccaugccccuucu

SEQ ID NO: 2186 - RNA, 20 nt, Artificial Sequence
  Synthetic
uaagcaggcuuuuguuuucu

SEQ ID NO: 2187 - RNA, 20 nt, Artificial Sequence
  Synthetic
uuaggcagaggugaaaaagu

SEQ ID NO: 2188 - RNA, 20 nt, Artificial Sequence
  Synthetic
uucgcuucaccucugcacgu

SEQ ID NO: 2189 - RNA, 20 nt, Artificial Sequence
  Synthetic
  misc_feature (4)..(4): n is a, c, g, or u
uacnugaaccuuuaccccgu

SEQ ID NO: 2190 - RNA, 20 nt, Artificial Sequence
  Synthetic
cuuggcaaaggccuggccgu

SEQ ID NO: 2191 - RNA, 20 nt, Artificial Sequence
  Synthetic
  misc_feature (14)..(14): n is a, c, g, or u
gaagaucucaaucnccgcgu

SEQ ID NO: 2192 - RNA, 20 nt, Artificial Sequence
  Synthetic
gguucacacccccacacggu

SEQ ID NO: 2193 - RNA, 20 nt, Artificial Sequence
  Synthetic
cguuccggccgacgacgggu

SEQ ID NO: 2194 - RNA, 20 nt, Artificial Sequence
  Synthetic
cuccaagcugugccuugggu

SEQ ID NO: 2195 - RNA, 20 nt, Artificial Sequence
  Synthetic
  misc_feature (2)..(2): n is a, c, g, or u
gncuguauuuuccugcuggu

SEQ ID NO: 2196 - RNA, 20 nt, Artificial Sequence
  Synthetic
cggacgaccccucucguggu

SEQ ID NO: 2197 - RNA, 20 nt, Artificial Sequence
  Synthetic
ucuggacuaucaagguaugu

SEQ ID NO: 2198 - RNA, 20 nt, Artificial Sequence
  Synthetic
gagaggugcucccaugcugu

SEQ ID NO: 2199 - RNA, 20 nt, Artificial Sequence
  Synthetic
cgcaugcgcggaaccuuugu

SEQ ID NO: 2200 - RNA, 20 nt, Artificial Sequence
  Synthetic
  misc_feature (1)..(1): n is a, c, g, or u
  misc_feature (19)..(19): n is a, c, g, or u
nauugggaguugggggacnu

SEQ ID NO: 2201 - RNA, 20 nt, Artificial Sequence
  Synthetic
cggguguccuggccaaaauu

SEQ ID NO: 2202 - RNA, 20 nt, Artificial Sequence
  Synthetic
caacacaaacaaggacaauu

SEQ ID NO: 2203 - RNA, 20 nt, Artificial Sequence
  Synthetic
caaucgggacugcuggaauu

SEQ ID NO: 2204 - RNA, 20 nt, Artificial Sequence
  Synthetic
cuccuaccuuguuugccauu

SEQ ID NO: 2205 - RNA, 20 nt, Artificial Sequence
  Synthetic
cuggcuggggcuuggcgauu

SEQ ID NO: 2206 - RNA, 20 nt, Artificial Sequence
  Synthetic
gguugcgucagcaaacacuu

SEQ ID NO: 2207 - RNA, 20 nt, Artificial Sequence
  Synthetic
cugccggcccgugugcacuu

SEQ ID NO: 2208 - RNA, 20 nt, Artificial Sequence
  Synthetic
cucggcaacggccaggccuu

SEQ ID NO: 2209 - RNA, 20 nt, Artificial Sequence
  Synthetic
auugugggucuuuugggcuu

SEQ ID NO: 2210 - RNA, 20 nt, Artificial Sequence
  Synthetic
ggccucagcccguuucucuu

SEQ ID NO: 2211 - RNA, 20 nt, Artificial Sequence
  Synthetic
gucccgcgcaggauccaguu

SEQ ID NO: 2212 - RNA, 20 nt, Artificial Sequence
  Synthetic
gagguggagagacugggguu

SEQ ID NO: 2213 - RNA, 20 nt, Artificial Sequence
  Synthetic
ccaggccuuugccaaguguu

SEQ ID NO: 2214 - RNA, 20 nt, Artificial Sequence
  Synthetic
ccucccacuccuaccuuguu

SEQ ID NO: 2215 - RNA, 20 nt, Artificial Sequence
  Synthetic
uccucuuauguaagguuguu

SEQ ID NO: 2216 - RNA, 20 nt, Artificial Sequence
  Synthetic
  misc_feature (18)..(18): n is a, c, g, or u
uggggugaguugaugacnuu

SEQ ID NO: 2217 - RNA, 20 nt, Artificial Sequence
  Synthetic
ucaagaugcugcacagauuu

SEQ ID NO: 2218 - RNA, 20 nt, Artificial Sequence
  Synthetic
uaagaggacucuuggacuuu

SEQ ID NO: 2219 - RNA, 20 nt, Artificial Sequence
  Synthetic
auaaaaucaaagauugcuuu

SEQ ID NO: 2220 - RNA, 20 nt, Artificial Sequence
  Synthetic
agcaagaguggugcagguuu

SEQ ID NO: 2221 - RNA, 20 nt, Artificial Sequence
  Synthetic
  misc_feature (12)..(12): n is a, c, g, or u
gaacuccuagcngcuuguuu

SEQ ID NO: 2222 - RNA, 20 nt, Artificial Sequence
  Synthetic
gauuggggacugcgaauuuu

SEQ ID NO: 2223 - RNA, 20 nt, Artificial Sequence
  Synthetic
uguggaguuacucucauuuu

SEQ ID NO: 2224 - RNA, 20 nt, Artificial Sequence
  Synthetic
uaaccccaccauuuuguuuu

SEQ ID NO: 2225 - RNA, 17 nt, Artificial Sequence
  Synthetic
gacgauugguggaggca

SEQ ID NO: 2226 - RNA, 17 nt, Artificial Sequence
  Synthetic
gcacacgguccggcaga

SEQ ID NO: 2227 - RNA, 17 nt, Artificial Sequence
  Synthetic
ggcggguauucuauaua

SEQ ID NO: 2228 - RNA, 17 nt, Artificial Sequence
  Synthetic
guuuccauguaacgugc

SEQ ID NO: 2229 - RNA, 17 nt, Artificial Sequence
  Synthetic
gguucuuuccccacucg

SEQ ID NO: 2230 - RNA, 17 nt, Artificial Sequence
  Synthetic
gacccugcaccgaacau

SEQ ID NO: 2231 - RNA, 17 nt, Artificial Sequence
  Synthetic
ggucccguacugguggu

SEQ ID NO: 2232 - RNA, 17 nt, Artificial Sequence
  Synthetic
gcgagggaguucuucuu

SEQ ID NO: 2233 - RNA, 17 nt, Artificial Sequence
  Synthetic
gauagccaggacaaguu

SEQ ID NO: 2234 - RNA, 20 nt, Artificial Sequence
  Synthetic
gugggcccucucacaguaaa

SEQ ID NO: 2235 - RNA, 20 nt, Artificial Sequence
  Synthetic
gacagaauugucagucccaa

SEQ ID NO: 2236 - RNA, 20 nt, Artificial Sequence
  Synthetic
gaaaaaccccgccuguaaca

SEQ ID NO: 2237 - RNA, 20 nt, Artificial Sequence
  Synthetic
ggcacuaguaaacugagcca

SEQ ID NO: 2238 - RNA, 20 nt, Artificial Sequence
  Synthetic
gaaggcggguauucuauaua

SEQ ID NO: 2239 - RNA, 20 nt, Artificial Sequence
  Synthetic
gguuaaugaccuuuguauua

SEQ ID NO: 2240 - RNA, 20 nt, Artificial Sequence
  Synthetic
ggucggcaggaacggcagac

SEQ ID NO: 2241 - RNA, 20 nt, Artificial Sequence
  Synthetic
gcaaaguuguuagugugccc

SEQ ID NO: 2242 - RNA, 20 nt, Artificial Sequence
  Synthetic
guuccgcaguauggaucggc

SEQ ID NO: 2243 - RNA, 20 nt, Artificial Sequence
  Synthetic
gcgguuuccauguaacgugc

SEQ ID NO: 2244 - RNA, 20 nt, Artificial Sequence
  Synthetic
gacggggagaccgcguaaag

SEQ ID NO: 2245 - RNA, 20 nt, Artificial Sequence
  Synthetic
gcuuucgcaaaauaccuaug

SEQ ID NO: 2246 - RNA, 20 nt, Artificial Sequence
  Synthetic
guuuugcuccagaccggcug

SEQ ID NO: 2247 - RNA, 20 nt, Artificial Sequence
  Synthetic
gcgauugagaucuucgucug

SEQ ID NO: 2248 - RNA, 20 nt, Artificial Sequence
  Synthetic
gagaagauugacgagaugug

SEQ ID NO: 2249 - RNA, 20 nt, Artificial Sequence
  Synthetic
gucuagacucugcgguauug

SEQ ID NO: 2250 - RNA, 20 nt, Artificial Sequence
  Synthetic
ggggacccugcaccgaacau

SEQ ID NO: 2251 - RNA, 20 nt, Artificial Sequence
  Synthetic
gccaaaucuguacaacaucu

SEQ ID NO: 2252 - RNA, 20 nt, Artificial Sequence
  Synthetic
guuuugcucgcagccggucu

SEQ ID NO: 2253 - RNA, 20 nt, Artificial Sequence
  Synthetic
guacaaagcugaagcggugu

SEQ ID NO: 2254 - RNA, 20 nt, Artificial Sequence
  Synthetic
gcuuuguaccgggaauccuu

SEQ ID NO: 2255 - RNA, 17 nt, Artificial Sequence
  Synthetic
acggggagaccgcguaa

SEQ ID NO: 2256 - RNA, 17 nt, Artificial Sequence
  Synthetic
aaaccccgccuguaaca

SEQ ID NO: 2257 - RNA, 17 nt, Artificial Sequence
  Synthetic
caguauggaucggcaga

SEQ ID NO: 2258 - RNA, 17 nt, Artificial Sequence
  Synthetic
cuacuguuguuagacga

SEQ ID NO: 2259 - RNA, 17 nt, Artificial Sequence
  Synthetic
cggcaggaacggcagac

SEQ ID NO: 2260 - RNA, 17 nt, Artificial Sequence
  Synthetic
aaguuguuagugugccc

SEQ ID NO: 2261 - RNA, 17 nt, Artificial Sequence
  Synthetic
ccgcaguauggaucggc

SEQ ID NO: 2262 - RNA, 17 nt, Artificial Sequence
  Synthetic
ugaggcgaacaaugauc

SEQ ID NO: 2263 - RNA, 17 nt, Artificial Sequence
  Synthetic
uucgucugcgaggcgag

SEQ ID NO: 2264 - RNA, 17 nt, Artificial Sequence
  Synthetic
agccccaaacggccccg

SEQ ID NO: 2265 - RNA, 17 nt, Artificial Sequence
  Synthetic
aaggccuuauaaguugg

SEQ ID NO: 2266 - RNA, 17 nt, Artificial Sequence
  Synthetic
uugcuccagaccggcug

SEQ ID NO: 2267 - RNA, 17 nt, Artificial Sequence
  Synthetic
auugagaucuucgucug

SEQ ID NO: 2268 - RNA, 17 nt, Artificial Sequence
  Synthetic
uucugcgacgcggcgau

SEQ ID NO: 2269 - RNA, 17 nt, Artificial Sequence
  Synthetic
ucuuggacggucccucu

SEQ ID NO: 2270 - RNA, 17 nt, Artificial Sequence
  Synthetic
uugcucgcagccggucu

SEQ ID NO: 2271 - RNA, 17 nt, Artificial Sequence
  Synthetic
caaagcugaagcggugu

SEQ ID NO: 2272 - RNA, 17 nt, Artificial Sequence
  Synthetic
uuguaccgggaauccuu

SEQ ID NO: 2273 - RNA, 20 nt, Artificial Sequence
  Synthetic
cagacggggagaccgcguaa

SEQ ID NO: 2274 - RNA, 20 nt, Artificial Sequence
  Synthetic
acauagaguugccuugagca

SEQ ID NO: 2275 - RNA, 20 nt, Artificial Sequence
  Synthetic
agugcacacgguccggcaga

SEQ ID NO: 2276 - RNA, 20 nt, Artificial Sequence
  Synthetic
ccgcaguauggaucggcaga

SEQ ID NO: 2277 - RNA, 20 nt, Artificial Sequence
  Synthetic
ccggguucaccccuccacac

SEQ ID NO: 2278 - RNA, 20 nt, Artificial Sequence
  Synthetic
uggucgaggauccuggaauc

SEQ ID NO: 2279 - RNA, 20 nt, Artificial Sequence
  Synthetic
uggugaggcgaacaaugauc

SEQ ID NO: 2280 - RNA, 20 nt, Artificial Sequence
  Synthetic
aggcggguauucuauauaag

SEQ ID NO: 2281 - RNA, 20 nt, Artificial Sequence
  Synthetic
aucaauuggccuguuaacag

SEQ ID NO: 2282 - RNA, 20 nt, Artificial Sequence
  Synthetic
aucuucgucugcgaggcgag

SEQ ID NO: 2283 - RNA, 20 nt, Artificial Sequence
  Synthetic
cagagccccaaacggccccg

SEQ ID NO: 2284 - RNA, 20 nt, Artificial Sequence
  Synthetic
ugagaucuucgucugcgagg

SEQ ID NO: 2285 - RNA, 20 nt, Artificial Sequence
  Synthetic
cuugccugagugcuguaugg

SEQ ID NO: 2286 - RNA, 20 nt, Artificial Sequence
  Synthetic
ugacugucucuuaguggugg

SEQ ID NO: 2287 - RNA, 20 nt, Artificial Sequence
  Synthetic
agaaaggccuuauaaguugg

SEQ ID NO: 2288 - RNA, 20 nt, Artificial Sequence
  Synthetic
cucuuagugguggagagaug

SEQ ID NO: 2289 - RNA, 20 nt, Artificial Sequence
  Synthetic
uggagaagauugacgagaug

SEQ ID NO: 2290 - RNA, 20 nt, Artificial Sequence
  Synthetic
aucuucugcgacgcggcgau

SEQ ID NO: 2291 - RNA, 20 nt, Artificial Sequence
  Synthetic
aauacuaacauugggaagcu

SEQ ID NO: 2292 - RNA, 20 nt, Artificial Sequence
  Synthetic
cuuucuuggacggucccucu

SEQ ID NO: 2293 - RNA, 20 nt, Artificial Sequence
  Synthetic
cagggucccguacugguggu

SEQ ID NO: 2294 - RNA, 20 nt, Artificial Sequence
  Synthetic
cucccugacugacgauuggu

SEQ ID NO: 2295 - RNA, 20 nt, Artificial Sequence
  Synthetic
accccaaaaggccuccgugu

SEQ ID NO: 2296 - RNA, 20 nt, Artificial Sequence
  Synthetic
agcgauagccaggacaaguu

SEQ ID NO: 2297 - RNA, 20 nt, Artificial Sequence
  Synthetic
aggccaacaagguaggaguu

SEQ ID NO: 2298 - RNA, 17 nt, Artificial Sequence
  Synthetic
ggcccucucacaguaaa

SEQ ID NO: 2299 - RNA, 17 nt, Artificial Sequence
  Synthetic
ggauauuuggaaaagaa

SEQ ID NO: 2300 - RNA, 17 nt, Artificial Sequence
  Synthetic
gguuuuguacagcaaca

SEQ ID NO: 2301 - RNA, 17 nt, Artificial Sequence
  Synthetic
ggacaaguuggaggaca

SEQ ID NO: 2302 - RNA, 17 nt, Artificial Sequence
  Synthetic
guggucuauaagcagga

SEQ ID NO: 2303 - RNA, 17 nt, Artificial Sequence
  Synthetic
gcauagcagcaggauga

SEQ ID NO: 2304 - RNA, 17 nt, Artificial Sequence
  Synthetic
  misc_feature (6)..(6): n is a, c, g, or u
gccaangcaguuauaua

SEQ ID NO: 2305 - RNA, 17 nt, Artificial Sequence
  Synthetic
gguucaccccuccacac

SEQ ID NO: 2306 - RNA, 17 nt, Artificial Sequence
  Synthetic
guucauguauuguuuac

SEQ ID NO: 2307 - RNA, 17 nt, Artificial Sequence
  Synthetic
  misc_feature (7)..(7): n is a, c, g, or u
gcacagnauugcuugcc

SEQ ID NO: 2308 - RNA, 17 nt, Artificial Sequence
  Synthetic
gaaaggauguauauuuc

SEQ ID NO: 2309 - RNA, 17 nt, Artificial Sequence
  Synthetic
ggggagaccgcguaaag

SEQ ID NO: 2310 - RNA, 17 nt, Artificial Sequence
  Synthetic
gucagaaggcaaaaacg

SEQ ID NO: 2311 - RNA, 17 nt, Artificial Sequence
  Synthetic
gaucuucgucugcgagg

SEQ ID NO: 2312 - RNA, 17 nt, Artificial Sequence
  Synthetic
  misc_feature (6)..(6): n is a, c, g, or u
gcaauncugugcugggg

SEQ ID NO: 2313 - RNA, 17 nt, Artificial Sequence
  Synthetic
gccugagugcuguaugg

SEQ ID NO: 2314 - RNA, 17 nt, Artificial Sequence
  Synthetic
ggaggacaggagauugg

SEQ ID NO: 2315 - RNA, 17 nt, Artificial Sequence
  Synthetic
guuucucauuuacugug

SEQ ID NO: 2316 - RNA, 17 nt, Artificial Sequence
  Synthetic
gauacauagaguugccu

SEQ ID NO: 2317 - RNA, 17 nt, Artificial Sequence
  Synthetic
gcaggguccccaauccu

SEQ ID NO: 2318 - RNA, 17 nt, Artificial Sequence
  Synthetic
gaucgggaaggaauccu

SEQ ID NO: 2319 - RNA, 17 nt, Artificial Sequence
  Synthetic
gggagagaaaccguucu

SEQ ID NO: 2320 - RNA, 17 nt, Artificial Sequence
  Synthetic
gacugucucuuaguggu

SEQ ID NO: 2321 - RNA, 17 nt, Artificial Sequence
  Synthetic
gaauuuggagcuacugu

SEQ ID NO: 2322 - RNA, 17 nt, Artificial Sequence
  Synthetic
gcuugguggaaugcugu

SEQ ID NO: 2323 - RNA, 17 nt, Artificial Sequence
  Synthetic
gagauuggugagugauu

SEQ ID NO: 2324 - RNA, 20 nt, Artificial Sequence
  Synthetic
gguaaccacauuggguaaaa

SEQ ID NO: 2325 - RNA, 20 nt, Artificial Sequence
  Synthetic
gagugggaagaauuaggcaa

SEQ ID NO: 2326 - RNA, 20 nt, Artificial Sequence
  Synthetic
gaagguuuuguacagcaaca

SEQ ID NO: 2327 - RNA, 20 nt, Artificial Sequence
  Synthetic
gaggcauagcagcaggauga

SEQ ID NO: 2328 - RNA, 20 nt, Artificial Sequence
  Synthetic
gcgagcaaaacaagcagcua

SEQ ID NO: 2329 - RNA, 20 nt, Artificial Sequence
  Synthetic
ggccagaggccaacaaggua

SEQ ID NO: 2330 - RNA, 20 nt, Artificial Sequence
  Synthetic
guuggaggacaggagauugg

SEQ ID NO: 2331 - RNA, 20 nt, Artificial Sequence
  Synthetic
gcacucccccuagaaaauug

SEQ ID NO: 2332 - RNA, 20 nt, Artificial Sequence
  Synthetic
gggcacucccccuagaaaau

SEQ ID NO: 2333 - RNA, 20 nt, Artificial Sequence
  Synthetic
ggguucacuaucccugaacu

SEQ ID NO: 2334 - RNA, 20 nt, Artificial Sequence
  Synthetic
ggaaagguucuuuccccacu

SEQ ID NO: 2335 - RNA, 20 nt, Artificial Sequence
  Synthetic
ggugcaggguccccaauccu

SEQ ID NO: 2336 - RNA, 20 nt, Artificial Sequence
  Synthetic
ggugaucgggaaggaauccu

SEQ ID NO: 2337 - RNA, 20 nt, Artificial Sequence
  Synthetic
gaugacugucucuuaguggu

SEQ ID NO: 2338 - RNA, 20 nt, Artificial Sequence
  Synthetic
  misc_feature (19)..(19): n is a, c, g, or u
guuaugucaacaaccgggnu

SEQ ID NO: 2339 - RNA, 20 nt, Artificial Sequence
  Synthetic
gaggcgagggaguucuucuu

SEQ ID NO: 2340 - RNA, 17 nt, Artificial Sequence
  Synthetic
aagucagaaggcaaaaa

SEQ ID NO: 2341 - RNA, 17 nt, Artificial Sequence
  Synthetic
aaccacauuggguaaaa

SEQ ID NO: 2342 - RNA, 17 nt, Artificial Sequence
  Synthetic
agaauugucagucccaa

SEQ ID NO: 2343 - RNA, 17 nt, Artificial Sequence
  Synthetic
ugggaagaauuaggcaa

SEQ ID NO: 2344 - RNA, 17 nt, Artificial Sequence
  Synthetic
  misc_feature (6)..(6): n is a, c, g, or u
acagunggacaugaaca

SEQ ID NO: 2345 - RNA, 17 nt, Artificial Sequence
  Synthetic
uugagagaaguccacca

SEQ ID NO: 2346 - RNA, 17 nt, Artificial Sequence
  Synthetic
acuaguaaacugagcca

SEQ ID NO: 2347 - RNA, 17 nt, Artificial Sequence
  Synthetic
acauaacaaacagucca

SEQ ID NO: 2348 - RNA, 17 nt, Artificial Sequence
  Synthetic
uugguggucuauaagca

SEQ ID NO: 2349 - RNA, 17 nt, Artificial Sequence
  Synthetic
uagaguugccuugagca

SEQ ID NO: 2350 - RNA, 17 nt, Artificial Sequence
  Synthetic
aagaaccaacaagaaga

SEQ ID NO: 2351 - RNA, 17 nt, Artificial Sequence
  Synthetic
  misc_feature (6)..(6): n is a, c, g, or u
acugcnuuggcagauga

SEQ ID NO: 2352 - RNA, 17 nt, Artificial Sequence
  Synthetic
auccuggagaagauuga

SEQ ID NO: 2353 - RNA, 17 nt, Artificial Sequence
  Synthetic
ccaucucuccaccacua

SEQ ID NO: 2354 - RNA, 17 nt, Artificial Sequence
  Synthetic
agcaaaacaagcagcua

SEQ ID NO: 2355 - RNA, 17 nt, Artificial Sequence
  Synthetic
cagaggccaacaaggua

SEQ ID NO: 2356 - RNA, 17 nt, Artificial Sequence
  Synthetic
uaaugaccuuuguauua

SEQ ID NO: 2357 - RNA, 17 nt, Artificial Sequence
  Synthetic
aaauggcacuaguaaac

SEQ ID NO: 2358 - RNA, 17 nt, Artificial Sequence
  Synthetic
uuagugugcccugagac

SEQ ID NO: 2359 - RNA, 17 nt, Artificial Sequence
  Synthetic
acggagaagggggcgac

SEQ ID NO: 2360 - RNA, 17 nt, Artificial Sequence
  Synthetic
agccaagagaaacggac

SEQ ID NO: 2361 - RNA, 17 nt, Artificial Sequence
  Synthetic
aaaaaggacccuuggcc

SEQ ID NO: 2362 - RNA, 17 nt, Artificial Sequence
  Synthetic
uggaagauccagcaucc

SEQ ID NO: 2363 - RNA, 17 nt, Artificial Sequence
  Synthetic
auccuaucaacacuucc

SEQ ID NO: 2364 - RNA, 17 nt, Artificial Sequence
  Synthetic
aauccucacaauaccgc

SEQ ID NO: 2365 - RNA, 17 nt, Artificial Sequence
  Synthetic
acaagagaugauuaggc

SEQ ID NO: 2366 - RNA, 17 nt, Artificial Sequence
  Synthetic
aaggacuguguuuuugc

SEQ ID NO: 2367 - RNA, 17 nt, Artificial Sequence
  Synthetic
ucgaggauccuggaauc

SEQ ID NO: 2368 - RNA, 17 nt, Artificial Sequence
  Synthetic
aguuggacccagcauuc

SEQ ID NO: 2369 - RNA, 17 nt, Artificial Sequence
  Synthetic
cggguauucuauauaag

SEQ ID NO: 2370 - RNA, 17 nt, Artificial Sequence
  Synthetic
aauuggccuguuaacag

SEQ ID NO: 2371 - RNA, 17 nt, Artificial Sequence
  Synthetic
caccaaucgucagucag

SEQ ID NO: 2372 - RNA, 17 nt, Artificial Sequence
  Synthetic
ugagaaggaacagacgg

SEQ ID NO: 2373 - RNA, 17 nt, Artificial Sequence
  Synthetic
cucucaauuuucuaggg

SEQ ID NO: 2374 - RNA, 17 nt, Artificial Sequence
  Synthetic
ccugucuuacuuuuggg

SEQ ID NO: 2375 - RNA, 17 nt, Artificial Sequence
  Synthetic
cugucucuuaguggugg

SEQ ID NO: 2376 - RNA, 17 nt, Artificial Sequence
  Synthetic
uuagugguggagagaug

SEQ ID NO: 2377 - RNA, 17 nt, Artificial Sequence
  Synthetic
agaagauugacgagaug

SEQ ID NO: 2378 - RNA, 17 nt, Artificial Sequence
  Synthetic
  misc_feature (4)..(4): n is a, c, g, or u
ugcnuuggcagaugaug

SEQ ID NO: 2379 - RNA, 17 nt, Artificial Sequence
  Synthetic
uucgcaaaauaccuaug

SEQ ID NO: 2380 - RNA, 17 nt, Artificial Sequence
  Synthetic
ucguuucucauuuacug

SEQ ID NO: 2381 - RNA, 17 nt, Artificial Sequence
  Synthetic
aagauugacgagaugug

SEQ ID NO: 2382 - RNA, 17 nt, Artificial Sequence
  Synthetic
cucccccuagaaaauug

SEQ ID NO: 2383 - RNA, 17 nt, Artificial Sequence
  Synthetic
uagacucugcgguauug

SEQ ID NO: 2384 - RNA, 17 nt, Artificial Sequence
  Synthetic
uaaaguuucccaccuug

SEQ ID NO: 2385 - RNA, 17 nt, Artificial Sequence
  Synthetic
uuccugucuuacuuuug

SEQ ID NO: 2386 - RNA, 17 nt, Artificial Sequence
  Synthetic
cacucccccuagaaaau

SEQ ID NO: 2387 - RNA, 17 nt, Artificial Sequence
  Synthetic
caacaugagggauacau

SEQ ID NO: 2388 - RNA, 17 nt, Artificial Sequence
  Synthetic
uucacuaucccugaacu

SEQ ID NO: 2389 - RNA, 17 nt, Artificial Sequence
  Synthetic
aagguucuuuccccacu

SEQ ID NO: 2390 - RNA, 17 nt, Artificial Sequence
  Synthetic
acuaacauugggaagcu

SEQ ID NO: 2391 - RNA, 17 nt, Artificial Sequence
  Synthetic
  misc_feature (14)..(14): n is a, c, g, or u
uacccacccaggungcu

SEQ ID NO: 2392 - RNA, 17 nt, Artificial Sequence
  Synthetic
aaaucuguacaacaucu

SEQ ID NO: 2393 - RNA, 17 nt, Artificial Sequence
  Synthetic
aaugguaaauauuuagu

SEQ ID NO: 2394 - RNA, 17 nt, Artificial Sequence
  Synthetic
cggaggccuuuuggggu

SEQ ID NO: 2395 - RNA, 17 nt, Artificial Sequence
  Synthetic
ccugacugacgauuggu

SEQ ID NO: 2396 - RNA, 17 nt, Artificial Sequence
  Synthetic
ccaaaaggccuccgugu

SEQ ID NO: 2397 - RNA, 17 nt, Artificial Sequence
  Synthetic
ugacuuugggauuuugu

SEQ ID NO: 2398 - RNA, 17 nt, Artificial Sequence
  Synthetic
  misc_feature (16)..(16): n is a, c, g, or u
augucaacaaccgggnu

SEQ ID NO: 2399 - RNA, 17 nt, Artificial Sequence
  Synthetic
cacccaaggcacagcuu

SEQ ID NO: 2400 - RNA, 17 nt, Artificial Sequence
  Synthetic
ccaacaagguaggaguu

SEQ ID NO: 2401 - RNA, 17 nt, Artificial Sequence
  Synthetic
acccuuauaaagaauuu

SEQ ID NO: 2402 - RNA, 17 nt, Artificial Sequence
  Synthetic
aguauuuggugucuuuu

SEQ ID NO: 2403 - RNA, 20 nt, Artificial Sequence
  Synthetic
aaaaagucagaaggcaaaaa

SEQ ID NO: 2404 - RNA, 20 nt, Artificial Sequence
  Synthetic
aauggauauuuggaaaagaa

SEQ ID NO: 2405 - RNA, 20 nt, Artificial Sequence
  Synthetic
  misc_feature (9)..(9): n is a, c, g, or u
ugaacagunggacaugaaca

SEQ ID NO: 2406 - RNA, 20 nt, Artificial Sequence
  Synthetic
ccaggacaaguuggaggaca

SEQ ID NO: 2407 - RNA, 20 nt, Artificial Sequence
  Synthetic
aaauugagagaaguccacca

SEQ ID NO: 2408 - RNA, 20 nt, Artificial Sequence
  Synthetic
uugacauaacaaacagucca

SEQ ID NO: 2409 - RNA, 20 nt, Artificial Sequence
  Synthetic
cauuugguggucuauaagca

SEQ ID NO: 2410 - RNA, 20 nt, Artificial Sequence
  Synthetic
acugacgauugguggaggca

SEQ ID NO: 2411 - RNA, 20 nt, Artificial Sequence
  Synthetic
cagaagaaccaacaagaaga

SEQ ID NO: 2412 - RNA, 20 nt, Artificial Sequence
  Synthetic
agacuacuguuguuagacga

SEQ ID NO: 2413 - RNA, 20 nt, Artificial Sequence
  Synthetic
uugguggucuauaagcagga

SEQ ID NO: 2414 - RNA, 20 nt, Artificial Sequence
  Synthetic
  misc_feature (9)..(9): n is a, c, g, or u
auaacugcnuuggcagauga

SEQ ID NO: 2415 - RNA, 20 nt, Artificial Sequence
  Synthetic
ccaauccuggagaagauuga

SEQ ID NO: 2416 - RNA, 20 nt, Artificial Sequence
  Synthetic
  misc_feature (9)..(9): n is a, c, g, or u
ucugccaangcaguuauaua

SEQ ID NO: 2417 - RNA, 20 nt, Artificial Sequence
  Synthetic
cucccaucucuccaccacua

SEQ ID NO: 2418 - RNA, 20 nt, Artificial Sequence
  Synthetic
aacaaauggcacuaguaaac

SEQ ID NO: 2419 - RNA, 20 nt, Artificial Sequence
  Synthetic
uuguuagugugcccugagac

SEQ ID NO: 2420 - RNA, 20 nt, Artificial Sequence
  Synthetic
cagacggagaagggggcgac

SEQ ID NO: 2421 - RNA, 20 nt, Artificial Sequence
  Synthetic
cugagccaagagaaacggac

SEQ ID NO: 2422 - RNA, 20 nt, Artificial Sequence
  Synthetic
aagguucauguauuguuuac

SEQ ID NO: 2423 - RNA, 20 nt, Artificial Sequence
  Synthetic
cccaaaaaggacccuuggcc

SEQ ID NO: 2424 - RNA, 20 nt, Artificial Sequence
  Synthetic
  misc_feature (10)..(10): n is a, c, g, or u
ccagcacagnauugcuugcc

SEQ ID NO: 2425 - RNA, 20 nt, Artificial Sequence
  Synthetic
auuuggaagauccagcaucc

SEQ ID NO: 2426 - RNA, 20 nt, Artificial Sequence
  Synthetic
ccuauccuaucaacacuucc

SEQ ID NO: 2427 - RNA, 20 nt, Artificial Sequence
  Synthetic
aagaauccucacaauaccgc

SEQ ID NO: 2428 - RNA, 20 nt, Artificial Sequence
  Synthetic
ugaacaagagaugauuaggc

SEQ ID NO: 2429 - RNA, 20 nt, Artificial Sequence
  Synthetic
uucaaggacuguguuuuugc

SEQ ID NO: 2430 - RNA, 20 nt, Artificial Sequence
  Synthetic
accaguuggacccagcauuc

SEQ ID NO: 2431 - RNA, 20 nt, Artificial Sequence
  Synthetic
auggaaaggauguauauuuc

SEQ ID NO: 2432 - RNA, 20 nt, Artificial Sequence
  Synthetic
cuccaccaaucgucagucag

SEQ ID NO: 2433 - RNA, 20 nt, Artificial Sequence
  Synthetic
aaagucagaaggcaaaaacg

SEQ ID NO: 2434 - RNA, 20 nt, Artificial Sequence
  Synthetic
aaagguucuuuccccacucg

SEQ ID NO: 2435 - RNA, 20 nt, Artificial Sequence
  Synthetic
agaugagaaggaacagacgg

SEQ ID NO: 2436 - RNA, 20 nt, Artificial Sequence
  Synthetic
cuucucucaauuuucuaggg

SEQ ID NO: 2437 - RNA, 20 nt, Artificial Sequence
  Synthetic
  misc_feature (9)..(9): n is a, c, g, or u
caagcaauncugugcugggg

SEQ ID NO: 2438 - RNA, 20 nt, Artificial Sequence
  Synthetic
uuuccugucuuacuuuuggg

SEQ ID NO: 2439 - RNA, 20 nt, Artificial Sequence
  Synthetic
  misc_feature (7)..(7): n is a, c, g, or u
aacugcnuuggcagaugaug

SEQ ID NO: 2440 - RNA, 20 nt, Artificial Sequence
  Synthetic
ucuucguuucucauuuacug

SEQ ID NO: 2441 - RNA, 20 nt, Artificial Sequence
  Synthetic
uucguuucucauuuacugug

SEQ ID NO: 2442 - RNA, 20 nt, Artificial Sequence
  Synthetic
ccguaaaguuucccaccuug

SEQ ID NO: 2443 - RNA, 20 nt, Artificial Sequence
  Synthetic
cauuuccugucuuacuuuug

SEQ ID NO: 2444 - RNA, 20 nt, Artificial Sequence
  Synthetic
cagcaacaugagggauacau

SEQ ID NO: 2445 - RNA, 20 nt, Artificial Sequence
  Synthetic
agggauacauagaguugccu

SEQ ID NO: 2446 - RNA, 20 nt, Artificial Sequence
  Synthetic
  misc_feature (17)..(17): n is a, c, g, or u
uauuacccacccaggungcu

SEQ ID NO: 2447 - RNA, 20 nt, Artificial Sequence
  Synthetic
uuugggagagaaaccguucu

SEQ ID NO: 2448 - RNA, 20 nt, Artificial Sequence
  Synthetic
ucuaaugguaaauauuuagu

SEQ ID NO: 2449 - RNA, 20 nt, Artificial Sequence
  Synthetic
acacggaggccuuuuggggu

SEQ ID NO: 2450 - RNA, 20 nt, Artificial Sequence
  Synthetic
aaagaauuuggagcuacugu

SEQ ID NO: 2451 - RNA, 20 nt, Artificial Sequence
  Synthetic
agagcuugguggaaugcugu

SEQ ID NO: 2452 - RNA, 20 nt, Artificial Sequence
  Synthetic
cccugacuuugggauuuugu

SEQ ID NO: 2453 - RNA, 20 nt, Artificial Sequence
  Synthetic
caggagauuggugagugauu

SEQ ID NO: 2454 - RNA, 20 nt, Artificial Sequence
  Synthetic
agccacccaaggcacagcuu

SEQ ID NO: 2455 - RNA, 20 nt, Artificial Sequence
  Synthetic
uugacccuuauaaagaauuu

SEQ ID NO: 2456 - RNA, 20 nt, Artificial Sequence
  Synthetic
uugaguauuuggugucuuuu

SEQ ID NO: 2457 - RNA, 17 nt, Artificial Sequence
  Synthetic
gacuucaaucccaaaaa

SEQ ID NO: 2458 - RNA, 17 nt, Artificial Sequence
  Synthetic
  misc_feature (4)..(4): n is a, c, g, or u
accnuaacaaaacaaaa

SEQ ID NO: 2459 - RNA, 17 nt, Artificial Sequence
  Synthetic
uauggugacccacaaaa

SEQ ID NO: 2460 - RNA, 17 nt, Artificial Sequence
  Synthetic
gacgggacguaaacaaa

SEQ ID NO: 2461 - RNA, 17 nt, Artificial Sequence
  Synthetic
guauacccaaagacaaa

SEQ ID NO: 2462 - RNA, 17 nt, Artificial Sequence
  Synthetic
uggaaucagaggacaaa

SEQ ID NO: 2463 - RNA, 17 nt, Artificial Sequence
  Synthetic
cgaauccacacuccaaa

SEQ ID NO: 2464 - RNA, 17 nt, Artificial Sequence
  Synthetic
uguauauuuccgagaaa

SEQ ID NO: 2465 - RNA, 17 nt, Artificial Sequence
  Synthetic
ucacaguaaaugagaaa

SEQ ID NO: 2466 - RNA, 17 nt, Artificial Sequence
  Synthetic
aaaaguaagacaggaaa

SEQ ID NO: 2467 - RNA, 17 nt, Artificial Sequence
  Synthetic
ccuagcagccauggaaa

SEQ ID NO: 2468 - RNA, 17 nt, Artificial Sequence
  Synthetic
aaauggauauuuggaaa

SEQ ID NO: 2469 - RNA, 17 nt, Artificial Sequence
  Synthetic
aagacauuauaacuaaa

SEQ ID NO: 2470 - RNA, 17 nt, Artificial Sequence
  Synthetic
uauggugaggcgaacaa

SEQ ID NO: 2471 - RNA, 17 nt, Artificial Sequence
  Synthetic
auuccuuggacucacaa

SEQ ID NO: 2472 - RNA, 17 nt, Artificial Sequence
  Synthetic
uuuagauguauacccaa

SEQ ID NO: 2473 - RNA, 17 nt, Artificial Sequence
  Synthetic
cugcuccuuuuacccaa

SEQ ID NO: 2474 - RNA, 17 nt, Artificial Sequence
  Synthetic
ccaccuugugaguccaa

SEQ ID NO: 2475 - RNA, 17 nt, Artificial Sequence
  Synthetic
gaauacccgccuuccaa

SEQ ID NO: 2476 - RNA, 17 nt, Artificial Sequence
  Synthetic
auuggaaagucugucaa

SEQ ID NO: 2477 - RNA, 17 nt, Artificial Sequence
  Synthetic
  misc_feature (1)..(1): n is a, c, g, or u
nuggagaaauacuucaa

SEQ ID NO: 2478 - RNA, 17 nt, Artificial Sequence
  Synthetic
gaacggcagacggagaa

SEQ ID NO: 2479 - RNA, 17 nt, Artificial Sequence
  Synthetic
gguccggcagaugagaa

SEQ ID NO: 2480 - RNA, 17 nt, Artificial Sequence
  Synthetic
aaaggacgucccgcgaa

SEQ ID NO: 2481 - RNA, 17 nt, Artificial Sequence
  Synthetic
caacuggugaucgggaa

SEQ ID NO: 2482 - RNA, 17 nt, Artificial Sequence
  Synthetic
cccucucgaguggggaa

SEQ ID NO: 2483 - RNA, 17 nt, Artificial Sequence
  Synthetic
uuacauacccuuuggaa

SEQ ID NO: 2484 - RNA, 17 nt, Artificial Sequence
  Synthetic
  misc_feature (15)..(15): n is a, c, g, or u
ugguaacagcgguanaa

SEQ ID NO: 2485 - RNA, 17 nt, Artificial Sequence
  Synthetic
gacauugacccuuauaa

SEQ ID NO: 2486 - RNA, 17 nt, Artificial Sequence
  Synthetic
ugaucagaggacucuaa

SEQ ID NO: 2487 - RNA, 17 nt, Artificial Sequence
  Synthetic
gucuggucuggaaguaa

SEQ ID NO: 2488 - RNA, 17 nt, Artificial Sequence
  Synthetic
uggcgguuuccauguaa

SEQ ID NO: 2489 - RNA, 17 nt, Artificial Sequence
  Synthetic
uugccaaucaggauuaa

SEQ ID NO: 2490 - RNA, 17 nt, Artificial Sequence
  Synthetic
caaugaguccagguuaa

SEQ ID NO: 2491 - RNA, 17 nt, Artificial Sequence
  Synthetic
uaucccauaaaauuuaa

SEQ ID NO: 2492 - RNA, 17 nt, Artificial Sequence
  Synthetic
guccagaagaaccaaca

SEQ ID NO: 2493 - RNA, 17 nt, Artificial Sequence
  Synthetic
gaggauucuugucaaca

SEQ ID NO: 2494 - RNA, 17 nt, Artificial Sequence
  Synthetic
ccauauacuugggaaca

SEQ ID NO: 2495 - RNA, 17 nt, Artificial Sequence
  Synthetic
auuuaggccaggacaca

SEQ ID NO: 2496 - RNA, 17 nt, Artificial Sequence
  Synthetic
ugggguacuuugccaca

SEQ ID NO: 2497 - RNA, 17 nt, Artificial Sequence
  Synthetic
cucccaaaaguaagaca

SEQ ID NO: 2498 - RNA, 17 nt, Artificial Sequence
  Synthetic
  misc_feature (12)..(12): n is a, c, g, or u
gcuugaacagunggaca

SEQ ID NO: 2499 - RNA, 17 nt, Artificial Sequence
  Synthetic
gguuuuucuuguugaca

SEQ ID NO: 2500 - RNA, 17 nt, Artificial Sequence
  Synthetic
ucucuguaaacaauaca

SEQ ID NO: 2501 - RNA, 17 nt, Artificial Sequence
  Synthetic
gaugggaugggaauaca

SEQ ID NO: 2502 - RNA, 17 nt, Artificial Sequence
  Synthetic
ccccugcucguguuaca

SEQ ID NO: 2503 - RNA, 17 nt, Artificial Sequence
  Synthetic
gccguuccugccgacca

SEQ ID NO: 2504 - RNA, 17 nt, Artificial Sequence
  Synthetic
uauuuugcgaaagccca

SEQ ID NO: 2505 - RNA, 17 nt, Artificial Sequence
  Synthetic
acauccagcgauagcca

SEQ ID NO: 2506 - RNA, 17 nt, Artificial Sequence
  Synthetic
uuacauggaaaccgcca

SEQ ID NO: 2507 - RNA, 17 nt, Artificial Sequence
  Synthetic
acugcgaauuuaggcca

SEQ ID NO: 2508 - RNA, 17 nt, Artificial Sequence
  Synthetic
uuguuggccucuggcca

SEQ ID NO: 2509 - RNA, 17 nt, Artificial Sequence
  Synthetic
cggcccggucugugcca

SEQ ID NO: 2510 - RNA, 17 nt, Artificial Sequence
  Synthetic
cucgucaaucuucucca

SEQ ID NO: 2511 - RNA, 17 nt, Artificial Sequence
  Synthetic
ucgagagggaccgucca

SEQ ID NO: 2512 - RNA, 17 nt, Artificial Sequence
  Synthetic
uuuguccucugauucca

SEQ ID NO: 2513 - RNA, 17 nt, Artificial Sequence
  Synthetic
gaacaagaucuacagca

SEQ ID NO: 2514 - RNA, 17 nt, Artificial Sequence
  Synthetic
aacuggagccaccagca

SEQ ID NO: 2515 - RNA, 17 nt, Artificial Sequence
  Synthetic
gaugaggcauagcagca

SEQ ID NO: 2516 - RNA, 17 nt, Artificial Sequence
  Synthetic
cgccuguaacacgagca

SEQ ID NO: 2517 - RNA, 17 nt, Artificial Sequence
  Synthetic
cacaaagguuccacgca

SEQ ID NO: 2518 - RNA, 17 nt, Artificial Sequence
  Synthetic
  misc_feature (7)..(7): n is a, c, g, or u
caucggncaucagcgca

SEQ ID NO: 2519 - RNA, 17 nt, Artificial Sequence
  Synthetic
gcgccccguggucggca

SEQ ID NO: 2520 - RNA, 17 nt, Artificial Sequence
  Synthetic
acccugcaaaaccugca

SEQ ID NO: 2521 - RNA, 17 nt, Artificial Sequence
  Synthetic
aaggaguuugccaauca

SEQ ID NO: 2522 - RNA, 17 nt, Artificial Sequence
  Synthetic
uggagaacaucacauca

SEQ ID NO: 2523 - RNA, 17 nt, Artificial Sequence
  Synthetic
aauauccauuugcauca

SEQ ID NO: 2524 - RNA, 17 nt, Artificial Sequence
  Synthetic
cggugucgagaagauca

SEQ ID NO: 2525 - RNA, 17 nt, Artificial Sequence
  Synthetic
  misc_feature (6)..(6): n is a, c, g, or u
cgguanaaagggacuca

SEQ ID NO: 2526 - RNA, 17 nt, Artificial Sequence
  Synthetic
aagacaccaaauacuca

SEQ ID NO: 2527 - RNA, 17 nt, Artificial Sequence
  Synthetic
acaaaaucccaaaguca

SEQ ID NO: 2528 - RNA, 17 nt, Artificial Sequence
  Synthetic
  misc_feature (1)..(1): n is a, c, g, or u
nuaacaaaacaaaaaga

SEQ ID NO: 2529 - RNA, 17 nt, Artificial Sequence
  Synthetic
cagaagaaccaacaaga

SEQ ID NO: 2530 - RNA, 17 nt, Artificial Sequence
  Synthetic
uuugcgaaagcccaaga

SEQ ID NO: 2531 - RNA, 17 nt, Artificial Sequence
  Synthetic
gcagguccccucgaaga

SEQ ID NO: 2532 - RNA, 17 nt, Artificial Sequence
  Synthetic
uagcagcaggaugaaga

SEQ ID NO: 2533 - RNA, 17 nt, Artificial Sequence
  Synthetic
  misc_feature (3)..(3): n is a, c, g, or u
aangcaguuauauaaga

SEQ ID NO: 2534 - RNA, 17 nt, Artificial Sequence
  Synthetic
agaagaucacgaacaga

SEQ ID NO: 2535 - RNA, 17 nt, Artificial Sequence
  Synthetic
agaugagaaggaacaga

SEQ ID NO: 2536 - RNA, 17 nt, Artificial Sequence
  Synthetic
uaccuugauaguccaga

SEQ ID NO: 2537 - RNA, 17 nt, Artificial Sequence
  Synthetic
cucccucgccucgcaga

SEQ ID NO: 2538 - RNA, 17 nt, Artificial Sequence
  Synthetic
aaucgccgcgucgcaga

SEQ ID NO: 2539 - RNA, 17 nt, Artificial Sequence
  Synthetic
agagaugauuaggcaga

SEQ ID NO: 2540 - RNA, 17 nt, Artificial Sequence
  Synthetic
  misc_feature (9)..(9): n is a, c, g, or u
auaacugcnuuggcaga

SEQ ID NO: 2541 - RNA, 17 nt, Artificial Sequence
  Synthetic
uccauguaacgugcaga

SEQ ID NO: 2542 - RNA, 17 nt, Artificial Sequence
  Synthetic
aggauccuggaaucaga

SEQ ID NO: 2543 - RNA, 17 nt, Artificial Sequence
  Synthetic
ggcgaacaaugaucaga

SEQ ID NO: 2544 - RNA, 17 nt, Artificial Sequence
  Synthetic
gagaccgcguaaagaga

SEQ ID NO: 2545 - RNA, 17 nt, Artificial Sequence
  Synthetic
  misc_feature (1)..(1): n is a, c, g, or u
nggacaugaacaagaga

SEQ ID NO: 2546 - RNA, 17 nt, Artificial Sequence
  Synthetic
ucuuagugguggagaga

SEQ ID NO: 2547 - RNA, 17 nt, Artificial Sequence
  Synthetic
ggagaagauugacgaga

SEQ ID NO: 2548 - RNA, 17 nt, Artificial Sequence
  Synthetic
cugaagcggugucgaga

SEQ ID NO: 2549 - RNA, 17 nt, Artificial Sequence
  Synthetic
ggaacggcagacggaga

SEQ ID NO: 2550 - RNA, 17 nt, Artificial Sequence
  Synthetic
guccccaauccuggaga

SEQ ID NO: 2551 - RNA, 17 nt, Artificial Sequence
  Synthetic
  misc_feature (1)..(1): n is a, c, g, or u
nuuggcagaugaugaga

SEQ ID NO: 2552 - RNA, 17 nt, Artificial Sequence
  Synthetic
cgggaaggaauccuaga

SEQ ID NO: 2553 - RNA, 17 nt, Artificial Sequence
  Synthetic
aagacagguauaguaga

SEQ ID NO: 2554 - RNA, 17 nt, Artificial Sequence
  Synthetic
agacuacuguuguuaga

SEQ ID NO: 2555 - RNA, 17 nt, Artificial Sequence
  Synthetic
caguaaaugagaaacga

SEQ ID NO: 2556 - RNA, 17 nt, Artificial Sequence
  Synthetic
ccucgccucgcagacga

SEQ ID NO: 2557 - RNA, 17 nt, Artificial Sequence
  Synthetic
gugcagaggugaagcga

SEQ ID NO: 2558 - RNA, 17 nt, Artificial Sequence
  Synthetic
gagaucuucgucugcga

SEQ ID NO: 2559 - RNA, 17 nt, Artificial Sequence
  Synthetic
augcagaucuucugcga

SEQ ID NO: 2560 - RNA, 17 nt, Artificial Sequence
  Synthetic
gaggcagguccccucga

SEQ ID NO: 2561 - RNA, 17 nt, Artificial Sequence
  Synthetic
cccguacugguggucga

SEQ ID NO: 2562 - RNA, 17 nt, Artificial Sequence
  Synthetic
agggaguucuucuucga

SEQ ID NO: 2563 - RNA, 17 nt, Artificial Sequence
  Synthetic
auauuuccgagaaagga

SEQ ID NO: 2564 - RNA, 17 nt, Artificial Sequence
  Synthetic
gaggcauagcagcagga

SEQ ID NO: 2565 - RNA, 17 nt, Artificial Sequence
  Synthetic
gauugguggaggcagga

SEQ ID NO: 2566 - RNA, 17 nt, Artificial Sequence
  Synthetic
acugcauggccugagga

SEQ ID NO: 2567 - RNA, 17 nt, Artificial Sequence
  Synthetic
caacaguagucuccgga

SEQ ID NO: 2568 - RNA, 17 nt, Artificial Sequence
  Synthetic
gcgcugaauccagcgga

SEQ ID NO: 2569 - RNA, 17 nt, Artificial Sequence
  Synthetic
cccaaacggccccggga

SEQ ID NO: 2570 - RNA, 17 nt, Artificial Sequence
  Synthetic
agcccaagaugauggga

SEQ ID NO: 2571 - RNA, 17 nt, Artificial Sequence
  Synthetic
guuuuugcugaguggga

SEQ ID NO: 2572 - RNA, 17 nt, Artificial Sequence
  Synthetic
uccuggcuaucgcugga

SEQ ID NO: 2573 - RNA, 17 nt, Artificial Sequence
  Synthetic
aaaggccuccgugugga

SEQ ID NO: 2574 - RNA, 17 nt, Artificial Sequence
  Synthetic
agccaggacaaguugga

SEQ ID NO: 2575 - RNA, 17 nt, Artificial Sequence
  Synthetic
guggguaauaauuugga

SEQ ID NO: 2576 - RNA, 17 nt, Artificial Sequence
  Synthetic
  misc_feature (15)..(15): n is a, c, g, or u
gcuuucagcuauaunga

SEQ ID NO: 2577 - RNA, 17 nt, Artificial Sequence
  Synthetic
ggugacccacaaaauga

SEQ ID NO: 2578 - RNA, 17 nt, Artificial Sequence
  Synthetic
gcgaaagcccaagauga

SEQ ID NO: 2579 - RNA, 17 nt, Artificial Sequence
  Synthetic
  misc_feature (12)..(12): n is a, c, g, or u
uucagcuauaungauga

SEQ ID NO: 2580 - RNA, 17 nt, Artificial Sequence
  Synthetic
gcugccucccugacuga

SEQ ID NO: 2581 - RNA, 17 nt, Artificial Sequence
  Synthetic
uccacugcauggccuga

SEQ ID NO: 2582 - RNA, 17 nt, Artificial Sequence
  Synthetic
gguccuaggaauccuga

SEQ ID NO: 2583 - RNA, 17 nt, Artificial Sequence
  Synthetic
ucccgguacaaagcuga

SEQ ID NO: 2584 - RNA, 17 nt, Artificial Sequence
  Synthetic
gcuggauucagcgcuga

SEQ ID NO: 2585 - RNA, 17 nt, Artificial Sequence
  Synthetic
guaacgugcagagguga

SEQ ID NO: 2586 - RNA, 17 nt, Artificial Sequence
  Synthetic
ugagugcuguaugguga

SEQ ID NO: 2587 - RNA, 17 nt, Artificial Sequence
  Synthetic
  misc_feature (10)..(10): n is a, c, g, or u
cuuaauuuunuguguga

SEQ ID NO: 2588 - RNA, 17 nt, Artificial Sequence
  Synthetic
acucugcgguauuguga

SEQ ID NO: 2589 - RNA, 17 nt, Artificial Sequence
  Synthetic
gugcuggggugaguuga

SEQ ID NO: 2590 - RNA, 17 nt, Artificial Sequence
  Synthetic
caggaugaagaggaaua

SEQ ID NO: 2591 - RNA, 17 nt, Artificial Sequence
  Synthetic
uuauguuaauacuaaua

SEQ ID NO: 2592 - RNA, 17 nt, Artificial Sequence
  Synthetic
gaaguguugauaggaua

SEQ ID NO: 2593 - RNA, 17 nt, Artificial Sequence
  Synthetic
cuccggaaguguugaua

SEQ ID NO: 2594 - RNA, 17 nt, Artificial Sequence
  Synthetic
gcuccaaauucuuuaua

SEQ ID NO: 2595 - RNA, 17 nt, Artificial Sequence
  Synthetic
cuuucgcaaaauaccua

SEQ ID NO: 2596 - RNA, 17 nt, Artificial Sequence
  Synthetic
agugggggaaagcccua

SEQ ID NO: 2597 - RNA, 17 nt, Artificial Sequence
  Synthetic
cacgagcagggguccua

SEQ ID NO: 2598 - RNA, 17 nt, Artificial Sequence
  Synthetic
ucacaucaggauuccua

SEQ ID NO: 2599 - RNA, 17 nt, Artificial Sequence
  Synthetic
cacaaaaugaagcgcua

SEQ ID NO: 2600 - RNA, 17 nt, Artificial Sequence
  Synthetic
ccaccagcaauccucua

SEQ ID NO: 2601 - RNA, 17 nt, Artificial Sequence
  Synthetic
cuucucucaauuuucua

SEQ ID NO: 2602 - RNA, 17 nt, Artificial Sequence
  Synthetic
uuucucucccaaaagua

SEQ ID NO: 2603 - RNA, 17 nt, Artificial Sequence
  Synthetic
auccucgaccaccagua

SEQ ID NO: 2604 - RNA, 17 nt, Artificial Sequence
  Synthetic
caaggugggaaacuuua

SEQ ID NO: 2605 - RNA, 17 nt, Artificial Sequence
  Synthetic
gggcgcaccucucuuua

SEQ ID NO: 2606 - RNA, 17 nt, Artificial Sequence
  Synthetic
uuauuccuuaaauuuua

SEQ ID NO: 2607 - RNA, 17 nt, Artificial Sequence
  Synthetic
acugagccaagagaaac

SEQ ID NO: 2608 - RNA, 17 nt, Artificial Sequence
  Synthetic
uuuguuaugucaacaac

SEQ ID NO: 2609 - RNA, 17 nt, Artificial Sequence
  Synthetic
gagcagcgaaacccaac

SEQ ID NO: 2610 - RNA, 17 nt, Artificial Sequence
  Synthetic
ggccguugccuagcaac

SEQ ID NO: 2611 - RNA, 17 nt, Artificial Sequence
  Synthetic
ucgagaagaucacgaac

SEQ ID NO: 2612 - RNA, 17 nt, Artificial Sequence
  Synthetic
ggcagaugagaaggaac

SEQ ID NO: 2613 - RNA, 17 nt, Artificial Sequence
  Synthetic
gaggcaauagucggaac

SEQ ID NO: 2614 - RNA, 17 nt, Artificial Sequence
  Synthetic
aaaagaaaauugguaac

SEQ ID NO: 2615 - RNA, 17 nt, Artificial Sequence
  Synthetic
ucaauuggccuguuaac

SEQ ID NO: 2616 - RNA, 17 nt, Artificial Sequence
  Synthetic
aaagcccuacgaaccac

SEQ ID NO: 2617 - RNA, 17 nt, Artificial Sequence
  Synthetic
ccguuccugccgaccac

SEQ ID NO: 2618 - RNA, 17 nt, Artificial Sequence
  Synthetic
cagcaaacacuuggcac

SEQ ID NO: 2619 - RNA, 17 nt, Artificial Sequence
  Synthetic
gauuggggacccugcac

SEQ ID NO: 2620 - RNA, 17 nt, Artificial Sequence
  Synthetic
gaugagaaggaacagac

SEQ ID NO: 2621 - RNA, 17 nt, Artificial Sequence
  Synthetic
aaacacuuggcacagac

SEQ ID NO: 2622 - RNA, 17 nt, Artificial Sequence
  Synthetic
auagcugaaagccagac

SEQ ID NO: 2623 - RNA, 17 nt, Artificial Sequence
  Synthetic
ggaacagacggggagac

SEQ ID NO: 2624 - RNA, 17 nt, Artificial Sequence
  Synthetic
uuccgagaaaggacgac

SEQ ID NO: 2625 - RNA, 17 nt, Artificial Sequence
  Synthetic
agaaauacuucaaggac

SEQ ID NO: 2626 - RNA, 17 nt, Artificial Sequence
  Synthetic
cuucucaucugccggac

SEQ ID NO: 2627 - RNA, 17 nt, Artificial Sequence
  Synthetic
guacaaaaccuucggac

SEQ ID NO: 2628 - RNA, 17 nt, Artificial Sequence
  Synthetic
gauuggagguuggggac

SEQ ID NO: 2629 - RNA, 17 nt, Artificial Sequence
  Synthetic
gcaaaacucauugggac

SEQ ID NO: 2630 - RNA, 17 nt, Artificial Sequence
  Synthetic
uaggcugccucccugac

SEQ ID NO: 2631 - RNA, 17 nt, Artificial Sequence
  Synthetic
accaguuauucguugac

SEQ ID NO: 2632 - RNA, 17 nt, Artificial Sequence
  Synthetic
ccucugccgauccauac

SEQ ID NO: 2633 - RNA, 17 nt, Artificial Sequence
  Synthetic
aaagaauuuggagcuac

SEQ ID NO: 2634 - RNA, 17 nt, Artificial Sequence
  Synthetic
gacucaagauguuguac

SEQ ID NO: 2635 - RNA, 17 nt, Artificial Sequence
  Synthetic
ccgcuucagcuuuguac

SEQ ID NO: 2636 - RNA, 17 nt, Artificial Sequence
  Synthetic
cuucguuucucauuuac

SEQ ID NO: 2637 - RNA, 17 nt, Artificial Sequence
  Synthetic
aaggugggaaacuuuac

SEQ ID NO: 2638 - RNA, 17 nt, Artificial Sequence
  Synthetic
auggccaagccccaacc

SEQ ID NO: 2639 - RNA, 17 nt, Artificial Sequence
  Synthetic
guguggaggggugaacc

SEQ ID NO: 2640 - RNA, 17 nt, Artificial Sequence
  Synthetic
aucauuacuuccagacc

SEQ ID NO: 2641 - RNA, 17 nt, Artificial Sequence
  Synthetic
guuggagccuauggacc

SEQ ID NO: 2642 - RNA, 17 nt, Artificial Sequence
  Synthetic
  misc_feature (14)..(14): n is a, c, g, or u
ugaugacucuagcnacc

SEQ ID NO: 2643 - RNA, 17 nt, Artificial Sequence
  Synthetic
  misc_feature (6)..(6): n is a, c, g, or u
aggaanauacaggcccc

SEQ ID NO: 2644 - RNA, 17 nt, Artificial Sequence
  Synthetic
uaaagagaggugcgccc

SEQ ID NO: 2645 - RNA, 17 nt, Artificial Sequence
  Synthetic
agagccccaaacggccc

SEQ ID NO: 2646 - RNA, 17 nt, Artificial Sequence
  Synthetic
acaggguucacuauccc

SEQ ID NO: 2647 - RNA, 17 nt, Artificial Sequence
  Synthetic
agcggacgaccccuccc

SEQ ID NO: 2648 - RNA, 17 nt, Artificial Sequence
  Synthetic
ggaguaggcugccuccc

SEQ ID NO: 2649 - RNA, 17 nt, Artificial Sequence
  Synthetic
  misc_feature (2)..(2): n is a, c, g, or u
cnauauagcugaaagcc

SEQ ID NO: 2650 - RNA, 17 nt, Artificial Sequence
  Synthetic
aacuaguuaugccugcc

SEQ ID NO: 2651 - RNA, 17 nt, Artificial Sequence
  Synthetic
guuccuucucaucugcc

SEQ ID NO: 2652 - RNA, 17 nt, Artificial Sequence
  Synthetic
uuucuagggggagugcc

SEQ ID NO: 2653 - RNA, 17 nt, Artificial Sequence
  Synthetic
aaaccacaauaguugcc

SEQ ID NO: 2654 - RNA, 17 nt, Artificial Sequence
  Synthetic
gcaaauaccaacaaucc

SEQ ID NO: 2655 - RNA, 17 nt, Artificial Sequence
  Synthetic
agggguccuaggaaucc

SEQ ID NO: 2656 - RNA, 17 nt, Artificial Sequence
  Synthetic
ccgucagcgcugaaucc

SEQ ID NO: 2657 - RNA, 17 nt, Artificial Sequence
  Synthetic
auaccugucuuuaaucc

SEQ ID NO: 2658 - RNA, 17 nt, Artificial Sequence
  Synthetic
acgccgcagacacaucc

SEQ ID NO: 2659 - RNA, 17 nt, Artificial Sequence
  Synthetic
aucaaaccguauuaucc

SEQ ID NO: 2660 - RNA, 17 nt, Artificial Sequence
  Synthetic
cagcggacgaccccucc

SEQ ID NO: 2661 - RNA, 17 nt, Artificial Sequence
  Synthetic
ccaaugaguuuugcucc

SEQ ID NO: 2662 - RNA, 17 nt, Artificial Sequence
  Synthetic
uaacaacaguagucucc

SEQ ID NO: 2663 - RNA, 17 nt, Artificial Sequence
  Synthetic
acauaccuugauagucc

SEQ ID NO: 2664 - RNA, 17 nt, Artificial Sequence
  Synthetic
guaaacaaaggacgucc

SEQ ID NO: 2665 - RNA, 17 nt, Artificial Sequence
  Synthetic
aguuaaucauuacuucc

SEQ ID NO: 2666 - RNA, 17 nt, Artificial Sequence
  Synthetic
ccucuaggauuccuucc

SEQ ID NO: 2667 - RNA, 17 nt, Artificial Sequence
  Synthetic
gauucccgguacaaagc

SEQ ID NO: 2668 - RNA, 17 nt, Artificial Sequence
  Synthetic
uguucaagccuccaagc

SEQ ID NO: 2669 - RNA, 17 nt, Artificial Sequence
  Synthetic
cgguacaaagcugaagc

SEQ ID NO: 2670 - RNA, 17 nt, Artificial Sequence
  Synthetic
cuaacaacuuugccagc

SEQ ID NO: 2671 - RNA, 17 nt, Artificial Sequence
  Synthetic
ucagcgcugaauccagc

SEQ ID NO: 2672 - RNA, 17 nt, Artificial Sequence
  Synthetic
ccgccuguaacacgagc

SEQ ID NO: 2673 - RNA, 17 nt, Artificial Sequence
  Synthetic
cauuggguaaaaggagc

SEQ ID NO: 2674 - RNA, 17 nt, Artificial Sequence
  Synthetic
  misc_feature (10)..(10): n is a, c, g, or u
cacaucaucnauauagc

SEQ ID NO: 2675 - RNA, 17 nt, Artificial Sequence
  Synthetic
cagaucuucugcgacgc

SEQ ID NO: 2676 - RNA, 17 nt, Artificial Sequence
  Synthetic
auaugauaaaacgccgc

SEQ ID NO: 2677 - RNA, 17 nt, Artificial Sequence
  Synthetic
uuacgucccgucagcgc

SEQ ID NO: 2678 - RNA, 17 nt, Artificial Sequence
  Synthetic
uccgcuggauucagcgc

SEQ ID NO: 2679 - RNA, 17 nt, Artificial Sequence
  Synthetic
agguuccacgcaugcgc

SEQ ID NO: 2680 - RNA, 17 nt, Artificial Sequence
  Synthetic
acgaagaucucaaucgc

SEQ ID NO: 2681 - RNA, 17 nt, Artificial Sequence
  Synthetic
gaacucccucgccucgc

SEQ ID NO: 2682 - RNA, 17 nt, Artificial Sequence
  Synthetic
cucaaucgccgcgucgc

SEQ ID NO: 2683 - RNA, 17 nt, Artificial Sequence
  Synthetic
uauaaaggcauuaaggc

SEQ ID NO: 2684 - RNA, 17 nt, Artificial Sequence
  Synthetic
cugcucguguuacaggc

SEQ ID NO: 2685 - RNA, 17 nt, Artificial Sequence
  Synthetic
ugguggaggcaggaggc

SEQ ID NO: 2686 - RNA, 17 nt, Artificial Sequence
  Synthetic
uuccauggcugcuaggc

SEQ ID NO: 2687 - RNA, 17 nt, Artificial Sequence
  Synthetic
uggucggcaggaacggc

SEQ ID NO: 2688 - RNA, 17 nt, Artificial Sequence
  Synthetic
uuuugcuccagaccggc

SEQ ID NO: 2689 - RNA, 17 nt, Artificial Sequence
  Synthetic
agugcacacgguccggc

SEQ ID NO: 2690 - RNA, 17 nt, Artificial Sequence
  Synthetic
  misc_feature (12)..(12): n is a, c, g, or u
uauauaacugcnuuggc

SEQ ID NO: 2691 - RNA, 17 nt, Artificial Sequence
  Synthetic
guauuugcucugaaugc

SEQ ID NO: 2692 - RNA, 17 nt, Artificial Sequence
  Synthetic
ucauccucaggccaugc

SEQ ID NO: 2693 - RNA, 17 nt, Artificial Sequence
  Synthetic
ugggaagcuggagaugc

SEQ ID NO: 2694 - RNA, 17 nt, Artificial Sequence
  Synthetic
cugccgauccauacugc

SEQ ID NO: 2695 - RNA, 17 nt, Artificial Sequence
  Synthetic
ccgucugccguuccugc

SEQ ID NO: 2696 - RNA, 17 nt, Artificial Sequence
  Synthetic
cuuuguggcuccucugc

SEQ ID NO: 2697 - RNA, 17 nt, Artificial Sequence
  Synthetic
ucgcuggaugugucugc

SEQ ID NO: 2698 - RNA, 17 nt, Artificial Sequence
  Synthetic
uucuccauguucggugc

SEQ ID NO: 2699 - RNA, 17 nt, Artificial Sequence
  Synthetic
  misc_feature (11)..(11): n is a, c, g, or u
ggcaagcaauncugugc

SEQ ID NO: 2700 - RNA, 17 nt, Artificial Sequence
  Synthetic
cugugccaaguguuugc

SEQ ID NO: 2701 - RNA, 17 nt, Artificial Sequence
  Synthetic
agucgugcagguuuugc

SEQ ID NO: 2702 - RNA, 17 nt, Artificial Sequence
  Synthetic
  misc_feature (16)..(16): n is a, c, g, or u
acgcaugcgcugaugnc

SEQ ID NO: 2703 - RNA, 17 nt, Artificial Sequence
  Synthetic
  misc_feature (1)..(1): n is a, c, g, or u
  misc_feature (15)..(16): n is a, c, g, or u
ncauggugcuggugnnc

SEQ ID NO: 2704 - RNA, 17 nt, Artificial Sequence
  Synthetic
  misc_feature (16)..(16): n is a, c, g, or u
acucaggcaagcaaunc

SEQ ID NO: 2705 - RNA, 17 nt, Artificial Sequence
  Synthetic
  misc_feature (13)..(13): n is a, c, g, or u
cuuggccaucggncauc

SEQ ID NO: 2706 - RNA, 17 nt, Artificial Sequence
  Synthetic
accacgagucuagacuc

SEQ ID NO: 2707 - RNA, 17 nt, Artificial Sequence
  Synthetic
ccaccccaaaaggccuc

SEQ ID NO: 2708 - RNA, 17 nt, Artificial Sequence
  Synthetic
gaauccuuagaguccuc

SEQ ID NO: 2709 - RNA, 17 nt, Artificial Sequence
  Synthetic
guugcccguuuguccuc

SEQ ID NO: 2710 - RNA, 17 nt, Artificial Sequence
  Synthetic
auuguugguauuugcuc

SEQ ID NO: 2711 - RNA, 17 nt, Artificial Sequence
  Synthetic
guggagcccucagucuc

SEQ ID NO: 2712 - RNA, 17 nt, Artificial Sequence
  Synthetic
uucugucguccuuucuc

SEQ ID NO: 2713 - RNA, 17 nt, Artificial Sequence
  Synthetic
acagacgggaaaaaguc

SEQ ID NO: 2714 - RNA, 17 nt, Artificial Sequence
  Synthetic
uacaaaaucccaaaguc

SEQ ID NO: 2715 - RNA, 17 nt, Artificial Sequence
  Synthetic
uccaccaaucgucaguc

SEQ ID NO: 2716 - RNA, 17 nt, Artificial Sequence
  Synthetic
ugugagaggcaauaguc

SEQ ID NO: 2717 - RNA, 17 nt, Artificial Sequence
  Synthetic
uuuguuuacgucccguc

SEQ ID NO: 2718 - RNA, 17 nt, Artificial Sequence
  Synthetic
caggugcaauuuccguc

SEQ ID NO: 2719 - RNA, 17 nt, Artificial Sequence
  Synthetic
cgauugagaucuucguc

SEQ ID NO: 2720 - RNA, 17 nt, Artificial Sequence
  Synthetic
uaggcaacggcccgguc

SEQ ID NO: 2721 - RNA, 17 nt, Artificial Sequence
  Synthetic
cuaucgcuggauguguc

SEQ ID NO: 2722 - RNA, 17 nt, Artificial Sequence
  Synthetic
ggucguccgcuggauuc

SEQ ID NO: 2723 - RNA, 17 nt, Artificial Sequence
  Synthetic
ugcuguacaaaaccuuc

SEQ ID NO: 2724 - RNA, 17 nt, Artificial Sequence
  Synthetic
cucucguuuuugccuuc

SEQ ID NO: 2725 - RNA, 17 nt, Artificial Sequence
  Synthetic
uggagaugcagaucuuc

SEQ ID NO: 2726 - RNA, 17 nt, Artificial Sequence
  Synthetic
gcugguggcuccaguuc

SEQ ID NO: 2727 - RNA, 17 nt, Artificial Sequence
  Synthetic
ugauguucuccauguuc

SEQ ID NO: 2728 - RNA, 17 nt, Artificial Sequence
  Synthetic
gauagugaacccuguuc

SEQ ID NO: 2729 - RNA, 17 nt, Artificial Sequence
  Synthetic
acuagugccauuuguuc

SEQ ID NO: 2730 - RNA, 17 nt, Artificial Sequence
  Synthetic
uguuaacagggaguuuc

SEQ ID NO: 2731 - RNA, 17 nt, Artificial Sequence
  Synthetic
aauuaagcaauguuuuc

SEQ ID NO: 2732 - RNA, 17 nt, Artificial Sequence
  Synthetic
  misc_feature (13)..(13): n is a, c, g, or u
guaacagcgguanaaag

SEQ ID NO: 2733 - RNA, 17 nt, Artificial Sequence
  Synthetic
  misc_feature (4)..(4): n is a, c, g, or u
agunggacaugaacaag

SEQ ID NO: 2734 - RNA, 17 nt, Artificial Sequence
  Synthetic
uaguaaacugagccaag

SEQ ID NO: 2735 - RNA, 17 nt, Artificial Sequence
  Synthetic
aacggcagacggagaag

SEQ ID NO: 2736 - RNA, 17 nt, Artificial Sequence
  Synthetic
aacgugcagaggugaag

SEQ ID NO: 2737 - RNA, 17 nt, Artificial Sequence
  Synthetic
aucucuccaccacuaag

SEQ ID NO: 2738 - RNA, 17 nt, Artificial Sequence
  Synthetic
agcugaaagccagacag

SEQ ID NO: 2739 - RNA, 17 nt, Artificial Sequence
  Synthetic
ucauguauuguuuacag

SEQ ID NO: 2740 - RNA, 17 nt, Artificial Sequence
  Synthetic
ggccaagccccaaccag

SEQ ID NO: 2741 - RNA, 17 nt, Artificial Sequence
  Synthetic
gccgcagacacauccag

SEQ ID NO: 2742 - RNA, 17 nt, Artificial Sequence
  Synthetic
gaagauccagcauccag

SEQ ID NO: 2743 - RNA, 17 nt, Artificial Sequence
  Synthetic
uuggguaaaaggagcag

SEQ ID NO: 2744 - RNA, 17 nt, Artificial Sequence
  Synthetic
ugguggcuccaguucag

SEQ ID NO: 2745 - RNA, 17 nt, Artificial Sequence
  Synthetic
gguauucuauauaagag

SEQ ID NO: 2746 - RNA, 17 nt, Artificial Sequence
  Synthetic
cuuuccccacucgagag

SEQ ID NO: 2747 - RNA, 17 nt, Artificial Sequence
  Synthetic
uucuuuccccacucgag

SEQ ID NO: 2748 - RNA, 17 nt, Artificial Sequence
  Synthetic
ggacggucccucucgag

SEQ ID NO: 2749 - RNA, 17 nt, Artificial Sequence
  Synthetic
ucuauaagcaggaggag

SEQ ID NO: 2750 - RNA, 17 nt, Artificial Sequence
  Synthetic
caaaauaccuaugggag

SEQ ID NO: 2751 - RNA, 17 nt, Artificial Sequence
  Synthetic
ugucuuacuuuugggag

SEQ ID NO: 2752 - RNA, 17 nt, Artificial Sequence
  Synthetic
gucucuuagugguggag

SEQ ID NO: 2753 - RNA, 17 nt, Artificial Sequence
  Synthetic
uuuggugucuuuuggag

SEQ ID NO: 2754 - RNA, 17 nt, Artificial Sequence
  Synthetic
uuguacagcaacaugag

SEQ ID NO: 2755 - RNA, 17 nt, Artificial Sequence
  Synthetic
acuguguuuuugcugag

SEQ ID NO: 2756 - RNA, 17 nt, Artificial Sequence
  Synthetic
gacaggagauuggugag

SEQ ID NO: 2757 - RNA, 17 nt, Artificial Sequence
  Synthetic
uucucauuuacugugag

SEQ ID NO: 2758 - RNA, 17 nt, Artificial Sequence
  Synthetic
cccccuagaaaauugag

SEQ ID NO: 2759 - RNA, 17 nt, Artificial Sequence
  Synthetic
cuccaguucagggauag

SEQ ID NO: 2760 - RNA, 17 nt, Artificial Sequence
  Synthetic
uucucucaauuuucuag

SEQ ID NO: 2761 - RNA, 17 nt, Artificial Sequence
  Synthetic
gcuggcaaaguuguuag

SEQ ID NO: 2762 - RNA, 17 nt, Artificial Sequence
  Synthetic
aagaucacgaacagacg

SEQ ID NO: 2763 - RNA, 17 nt, Artificial Sequence
  Synthetic
uggauucagcgcugacg

SEQ ID NO: 2764 - RNA, 17 nt, Artificial Sequence
  Synthetic
ccuggagaagauugacg

SEQ ID NO: 2765 - RNA, 17 nt, Artificial Sequence
  Synthetic
caaaaugaagcgcuacg

SEQ ID NO: 2766 - RNA, 17 nt, Artificial Sequence
  Synthetic
ccucgaccaccaguacg

SEQ ID NO: 2767 - RNA, 17 nt, Artificial Sequence
  Synthetic
ucucaucugccggaccg

SEQ ID NO: 2768 - RNA, 17 nt, Artificial Sequence
  Synthetic
gcuucagcuuuguaccg

SEQ ID NO: 2769 - RNA, 17 nt, Artificial Sequence
  Synthetic
ucuagggggagugcccg

SEQ ID NO: 2770 - RNA, 17 nt, Artificial Sequence
  Synthetic
aaacaaaggacgucccg

SEQ ID NO: 2771 - RNA, 17 nt, Artificial Sequence
  Synthetic
accccaaaaggccuccg

SEQ ID NO: 2772 - RNA, 17 nt, Artificial Sequence
  Synthetic
aaggauguauauuuccg

SEQ ID NO: 2773 - RNA, 17 nt, Artificial Sequence
  Synthetic
caacuggauccuucgcg

SEQ ID NO: 2774 - RNA, 17 nt, Artificial Sequence
  Synthetic
ucuucgucugcgaggcg

SEQ ID NO: 2775 - RNA, 17 nt, Artificial Sequence
  Synthetic
ggccuuauaaguuggcg

SEQ ID NO: 2776 - RNA, 17 nt, Artificial Sequence
  Synthetic
gguccaacuggugaucg

SEQ ID NO: 2777 - RNA, 17 nt, Artificial Sequence
  Synthetic
uuggacggucccucucg

SEQ ID NO: 2778 - RNA, 17 nt, Artificial Sequence
  Synthetic
aagcugaagcggugucg

SEQ ID NO: 2779 - RNA, 17 nt, Artificial Sequence
  Synthetic
gccaacuggauccuucg

SEQ ID NO: 2780 - RNA, 17 nt, Artificial Sequence
  Synthetic
gagggaguucuucuucg

SEQ ID NO: 2781 - RNA, 17 nt, Artificial Sequence
  Synthetic
uuuuucccgucuguucg

SEQ ID NO: 2782 - RNA, 17 nt, Artificial Sequence
  Synthetic
uccuuggacucacaagg

SEQ ID NO: 2783 - RNA, 17 nt, Artificial Sequence
  Synthetic
acauacccuuuggaagg

SEQ ID NO: 2784 - RNA, 17 nt, Artificial Sequence
  Synthetic
acaaguuggaggacagg

SEQ ID NO: 2785 - RNA, 17 nt, Artificial Sequence
  Synthetic
ccugcucguguuacagg

SEQ ID NO: 2786 - RNA, 17 nt, Artificial Sequence
  Synthetic
agaugauuaggcagagg

SEQ ID NO: 2787 - RNA, 17 nt, Artificial Sequence
  Synthetic
cauguaacgugcagagg

SEQ ID NO: 2788 - RNA, 17 nt, Artificial Sequence
  Synthetic
gaccgcguaaagagagg

SEQ ID NO: 2789 - RNA, 17 nt, Artificial Sequence
  Synthetic
ggaguucuucuucgagg

SEQ ID NO: 2790 - RNA, 17 nt, Artificial Sequence
  Synthetic
ggucuauaagcaggagg

SEQ ID NO: 2791 - RNA, 17 nt, Artificial Sequence
  Synthetic
aggccuccguguggagg

SEQ ID NO: 2792 - RNA, 17 nt, Artificial Sequence
  Synthetic
agugcuguauggugagg

SEQ ID NO: 2793 - RNA, 17 nt, Artificial Sequence
  Synthetic
guuccugccgaccacgg

SEQ ID NO: 2794 - RNA, 17 nt, Artificial Sequence
  Synthetic
gcaggaacggcagacgg

SEQ ID NO: 2795 - RNA, 17 nt, Artificial Sequence
  Synthetic
ccuaucaacacuuccgg

SEQ ID NO: 2796 - RNA, 17 nt, Artificial Sequence
  Synthetic
gaucuucugcgacgcgg

SEQ ID NO: 2797 - RNA, 17 nt, Artificial Sequence
  Synthetic
cggcagacggagaaggg

SEQ ID NO: 2798 - RNA, 17 nt, Artificial Sequence
  Synthetic
ccccaaacggccccggg

SEQ ID NO: 2799 - RNA, 17 nt, Artificial Sequence
  Synthetic
gccuccguguggagggg

SEQ ID NO: 2800 - RNA, 17 nt, Artificial Sequence
  Synthetic
agaaggaacagacgggg

SEQ ID NO: 2801 - RNA, 17 nt, Artificial Sequence
  Synthetic
gcagacggagaaggggg

SEQ ID NO: 2802 - RNA, 17 nt, Artificial Sequence
  Synthetic
cucaauuuucuaggggg

SEQ ID NO: 2803 - RNA, 17 nt, Artificial Sequence
  Synthetic
cgcaaaauaccuauggg

SEQ ID NO: 2804 - RNA, 17 nt, Artificial Sequence
  Synthetic
  misc_feature (10)..(10): n is a, c, g, or u
gacucuagcnaccuggg

SEQ ID NO: 2805 - RNA, 17 nt, Artificial Sequence
  Synthetic
gaaagccagacaguggg

SEQ ID NO: 2806 - RNA, 17 nt, Artificial Sequence
  Synthetic
cccugcaccgaacaugg

SEQ ID NO: 2807 - RNA, 17 nt, Artificial Sequence
  Synthetic
uguucccaaguauaugg

SEQ ID NO: 2808 - RNA, 17 nt, Artificial Sequence
  Synthetic
augcuggguccaacugg

SEQ ID NO: 2809 - RNA, 17 nt, Artificial Sequence
  Synthetic
aggguccccaauccugg

SEQ ID NO: 2810 - RNA, 17 nt, Artificial Sequence
  Synthetic
uaacauugggaagcugg

SEQ ID NO: 2811 - RNA, 17 nt, Artificial Sequence
  Synthetic
  misc_feature (8)..(8): n is a, c, g, or u
aagcaauncugugcugg

SEQ ID NO: 2812 - RNA, 17 nt, Artificial Sequence
  Synthetic
cggucccucucgagugg

SEQ ID NO: 2813 - RNA, 17 nt, Artificial Sequence
  Synthetic
aaaaggccuccgugugg

SEQ ID NO: 2814 - RNA, 17 nt, Artificial Sequence
  Synthetic
  misc_feature (14)..(14): n is a, c, g, or u
gucaacaaccgggnugg

SEQ ID NO: 2815 - RNA, 17 nt, Artificial Sequence
  Synthetic
aucuucuccaggauugg

SEQ ID NO: 2816 - RNA, 17 nt, Artificial Sequence
  Synthetic
gagugauuggagguugg

SEQ ID NO: 2817 - RNA, 17 nt, Artificial Sequence
  Synthetic
acacggaggccuuuugg

SEQ ID NO: 2818 - RNA, 17 nt, Artificial Sequence
  Synthetic
uauuuggugucuuuugg

SEQ ID NO: 2819 - RNA, 17 nt, Artificial Sequence
  Synthetic
aaguaagacaggaaaug

SEQ ID NO: 2820 - RNA, 17 nt, Artificial Sequence
  Synthetic
gacauuauaacuaaaug

SEQ ID NO: 2821 - RNA, 17 nt, Artificial Sequence
  Synthetic
cccucucacaguaaaug

SEQ ID NO: 2822 - RNA, 17 nt, Artificial Sequence
  Synthetic
uuuuguacagcaacaug

SEQ ID NO: 2823 - RNA, 17 nt, Artificial Sequence
  Synthetic
  misc_feature (5)..(5): n is a, c, g, or u
ucggncaucagcgcaug

SEQ ID NO: 2824 - RNA, 17 nt, Artificial Sequence
  Synthetic
acacgguccggcagaug

SEQ ID NO: 2825 - RNA, 17 nt, Artificial Sequence
  Synthetic
cccaagaugaugggaug

SEQ ID NO: 2826 - RNA, 17 nt, Artificial Sequence
  Synthetic
gaaagcccaagaugaug

SEQ ID NO: 2827 - RNA, 17 nt, Artificial Sequence
  Synthetic
uccuaggaauccugaug

SEQ ID NO: 2828 - RNA, 17 nt, Artificial Sequence
  Synthetic
auuccuuaaauuuuaug

SEQ ID NO: 2829 - RNA, 17 nt, Artificial Sequence
  Synthetic
agugugcccugagacug

SEQ ID NO: 2830 - RNA, 17 nt, Artificial Sequence
  Synthetic
uuggagguuggggacug

SEQ ID NO: 2831 - RNA, 17 nt, Artificial Sequence
  Synthetic
  misc_feature (12)..(12): n is a, c, g, or u
augacucuagcnaccug

SEQ ID NO: 2832 - RNA, 17 nt, Artificial Sequence
  Synthetic
guuguuagugugcccug

SEQ ID NO: 2833 - RNA, 17 nt, Artificial Sequence
  Synthetic
  misc_feature (5)..(5): n is a, c, g, or u
acagnauugcuugccug

SEQ ID NO: 2834 - RNA, 17 nt, Artificial Sequence
  Synthetic
ggacuguguuuuugcug

SEQ ID NO: 2835 - RNA, 17 nt, Artificial Sequence
  Synthetic
gagaugcagaucuucug

SEQ ID NO: 2836 - RNA, 17 nt, Artificial Sequence
  Synthetic
cugaaagccagacagug

SEQ ID NO: 2837 - RNA, 17 nt, Artificial Sequence
  Synthetic
ccaagccccaaccagug

SEQ ID NO: 2838 - RNA, 17 nt, Artificial Sequence
  Synthetic
uauaagcaggaggagug

SEQ ID NO: 2839 - RNA, 17 nt, Artificial Sequence
  Synthetic
uguguuuuugcugagug

SEQ ID NO: 2840 - RNA, 17 nt, Artificial Sequence
  Synthetic
cuuggacucacaaggug

SEQ ID NO: 2841 - RNA, 17 nt, Artificial Sequence
  Synthetic
aggacaggagauuggug

SEQ ID NO: 2842 - RNA, 17 nt, Artificial Sequence
  Synthetic
  misc_feature (13)..(13): n is a, c, g, or u
uugcuuaauuuunugug

SEQ ID NO: 2843 - RNA, 17 nt, Artificial Sequence
  Synthetic
  misc_feature (15)..(15): n is a, c, g, or u
cauugcuuaauuuunug

SEQ ID NO: 2844 - RNA, 17 nt, Artificial Sequence
  Synthetic
aaggaauacuaacauug

SEQ ID NO: 2845 - RNA, 17 nt, Artificial Sequence
  Synthetic
uggagcaaaacucauug

SEQ ID NO: 2846 - RNA, 17 nt, Artificial Sequence
  Synthetic
accaacaauccagauug

SEQ ID NO: 2847 - RNA, 17 nt, Artificial Sequence
  Synthetic
cugcgacgcggcgauug

SEQ ID NO: 2848 - RNA, 17 nt, Artificial Sequence
  Synthetic
  misc_feature (2)..(2): n is a, c, g, or u
ungaugaugugguauug

SEQ ID NO: 2849 - RNA, 17 nt, Artificial Sequence
  Synthetic
gggucaccauauacuug

SEQ ID NO: 2850 - RNA, 17 nt, Artificial Sequence
  Synthetic
cuccaagcugugccuug

SEQ ID NO: 2851 - RNA, 17 nt, Artificial Sequence
  Synthetic
uaaaugugaacaauuug

SEQ ID NO: 2852 - RNA, 17 nt, Artificial Sequence
  Synthetic
acaggccccugacuuug

SEQ ID NO: 2853 - RNA, 17 nt, Artificial Sequence
  Synthetic
auauuuaguagaguuug

SEQ ID NO: 2854 - RNA, 17 nt, Artificial Sequence
  Synthetic
cguagcgcuucauuuug

SEQ ID NO: 2855 - RNA, 17 nt, Artificial Sequence
  Synthetic
cucccauagguauuuug

SEQ ID NO: 2856 - RNA, 17 nt, Artificial Sequence
  Synthetic
gccaaggguccuuuuug

SEQ ID NO: 2857 - RNA, 17 nt, Artificial Sequence
  Synthetic
  misc_feature (17)..(17): n is a, c, g, or u
uggaggcuugaacagun

SEQ ID NO: 2858 - RNA, 17 nt, Artificial Sequence
  Synthetic
  misc_feature (17)..(17): n is a, c, g, or u
aacauugcuuaauuuun

SEQ ID NO: 2859 - RNA, 17 nt, Artificial Sequence
  Synthetic
aaugucuugaugcaaau

SEQ ID NO: 2860 - RNA, 17 nt, Artificial Sequence
  Synthetic
ccuguuaacaggccaau

SEQ ID NO: 2861 - RNA, 17 nt, Artificial Sequence
  Synthetic
auuaguauuaacauaau

SEQ ID NO: 2862 - RNA, 17 nt, Artificial Sequence
  Synthetic
ccaaggaauacuaacau

SEQ ID NO: 2863 - RNA, 17 nt, Artificial Sequence
  Synthetic
aggcaggguaaccacau

SEQ ID NO: 2864 - RNA, 17 nt, Artificial Sequence
  Synthetic
cuuuuuggcuuagacau

SEQ ID NO: 2865 - RNA, 17 nt, Artificial Sequence
  Synthetic
accucugcacguuacau

SEQ ID NO: 2866 - RNA, 17 nt, Artificial Sequence
  Synthetic
cacagccuagcagccau

SEQ ID NO: 2867 - RNA, 17 nt, Artificial Sequence
  Synthetic
aacaagaucuacagcau

SEQ ID NO: 2868 - RNA, 17 nt, Artificial Sequence
  Synthetic
ggguggcuuuagggcau

SEQ ID NO: 2869 - RNA, 17 nt, Artificial Sequence
  Synthetic
  misc_feature (14)..(14): n is a, c, g, or u
aggugaaaaaguuncau

SEQ ID NO: 2870 - RNA, 17 nt, Artificial Sequence
  Synthetic
ucuggagcaaaacucau

SEQ ID NO: 2871 - RNA, 17 nt, Artificial Sequence
  Synthetic
ugaugagagguguucau

SEQ ID NO: 2872 - RNA, 17 nt, Artificial Sequence
  Synthetic
uaacaaaacaaaaagau

SEQ ID NO: 2873 - RNA, 17 nt, Artificial Sequence
  Synthetic
ccaauccuggagaagau

SEQ ID NO: 2874 - RNA, 17 nt, Artificial Sequence
  Synthetic
auaccaacaauccagau

SEQ ID NO: 2875 - RNA, 17 nt, Artificial Sequence
  Synthetic
ucaaucuucuccaggau

SEQ ID NO: 2876 - RNA, 17 nt, Artificial Sequence
  Synthetic
ggaaguguugauaggau

SEQ ID NO: 2877 - RNA, 17 nt, Artificial Sequence
  Synthetic
ggcuccaguucagggau

SEQ ID NO: 2878 - RNA, 17 nt, Artificial Sequence
  Synthetic
aggguccuuuuugggau

SEQ ID NO: 2879 - RNA, 17 nt, Artificial Sequence
  Synthetic
ggcuuuagggcauggau

SEQ ID NO: 2880 - RNA, 17 nt, Artificial Sequence
  Synthetic
uggguccaacuggugau

SEQ ID NO: 2881 - RNA, 17 nt, Artificial Sequence
  Synthetic
cuggcuuucagcuauau

SEQ ID NO: 2882 - RNA, 17 nt, Artificial Sequence
  Synthetic
cuuguucccaaguauau

SEQ ID NO: 2883 - RNA, 17 nt, Artificial Sequence
  Synthetic
auguuucucucuuauau

SEQ ID NO: 2884 - RNA, 17 nt, Artificial Sequence
  Synthetic
aaaaaucaggcaacuau

SEQ ID NO: 2885 - RNA, 17 nt, Artificial Sequence
  Synthetic
uaggaguuggagccuau

SEQ ID NO: 2886 - RNA, 17 nt, Artificial Sequence
  Synthetic
uaggaguuccgcaguau

SEQ ID NO: 2887 - RNA, 17 nt, Artificial Sequence
  Synthetic
ucuagacucugcgguau

SEQ ID NO: 2888 - RNA, 17 nt, Artificial Sequence
  Synthetic
  misc_feature (4)..(4): n is a, c, g, or u
uaungaugaugugguau

SEQ ID NO: 2889 - RNA, 17 nt, Artificial Sequence
  Synthetic
uugccugagugcuguau

SEQ ID NO: 2890 - RNA, 17 nt, Artificial Sequence
  Synthetic
gcacuccuccugcuuau

SEQ ID NO: 2891 - RNA, 17 nt, Artificial Sequence
  Synthetic
aggcugugcugccaacu

SEQ ID NO: 2892 - RNA, 17 nt, Artificial Sequence
  Synthetic
gaaugcuggguccaacu

SEQ ID NO: 2893 - RNA, 17 nt, Artificial Sequence
  Synthetic
accgcagagucuagacu

SEQ ID NO: 2894 - RNA, 17 nt, Artificial Sequence
  Synthetic
gugggucaccauauacu

SEQ ID NO: 2895 - RNA, 17 nt, Artificial Sequence
  Synthetic
uugcagggucccguacu

SEQ ID NO: 2896 - RNA, 17 nt, Artificial Sequence
  Synthetic
ucuuggcucaguuuacu

SEQ ID NO: 2897 - RNA, 17 nt, Artificial Sequence
  Synthetic
acaaaggucauuaaccu

SEQ ID NO: 2898 - RNA, 17 nt, Artificial Sequence
  Synthetic
cguaaaguuucccaccu

SEQ ID NO: 2899 - RNA, 17 nt, Artificial Sequence
  Synthetic
aaacgggcaacauaccu

SEQ ID NO: 2900 - RNA, 17 nt, Artificial Sequence
  Synthetic
acacgggcacucccccu

SEQ ID NO: 2901 - RNA, 17 nt, Artificial Sequence
  Synthetic
gaagaggcagguccccu

SEQ ID NO: 2902 - RNA, 17 nt, Artificial Sequence
  Synthetic
gccuccaagcugugccu

SEQ ID NO: 2903 - RNA, 17 nt, Artificial Sequence
  Synthetic
ucugauuccaggauccu

SEQ ID NO: 2904 - RNA, 17 nt, Artificial Sequence
  Synthetic
ugguggucgaggauccu

SEQ ID NO: 2905 - RNA, 17 nt, Artificial Sequence
  Synthetic
agcaaaaacacaguccu

SEQ ID NO: 2906 - RNA, 17 nt, Artificial Sequence
  Synthetic
gggaggggucguccgcu

SEQ ID NO: 2907 - RNA, 17 nt, Artificial Sequence
  Synthetic
uuguccuggcuaucgcu

SEQ ID NO: 2908 - RNA, 17 nt, Artificial Sequence
  Synthetic
ggcacagcuuggaggcu

SEQ ID NO: 2909 - RNA, 17 nt, Artificial Sequence
  Synthetic
ccaaaucucuggaugcu

SEQ ID NO: 2910 - RNA, 17 nt, Artificial Sequence
  Synthetic
uuccuaggaccccugcu

SEQ ID NO: 2911 - RNA, 17 nt, Artificial Sequence
  Synthetic
  misc_feature (9)..(9): n is a, c, g, or u
gccuguaunuuccugcu

SEQ ID NO: 2912 - RNA, 17 nt, Artificial Sequence
  Synthetic
  misc_feature (8)..(8): n is a, c, g, or u
aaaaguuncauggugcu

SEQ ID NO: 2913 - RNA, 17 nt, Artificial Sequence
  Synthetic
  misc_feature (10)..(10): n is a, c, g, or u
gcaagcaauncugugcu

SEQ ID NO: 2914 - RNA, 17 nt, Artificial Sequence
  Synthetic
aauccuagaggauugcu

SEQ ID NO: 2915 - RNA, 17 nt, Artificial Sequence
  Synthetic
gauugaagucccaaucu

SEQ ID NO: 2916 - RNA, 17 nt, Artificial Sequence
  Synthetic
uucccaucccaucaucu

SEQ ID NO: 2917 - RNA, 17 nt, Artificial Sequence
  Synthetic
uugaccaccaaaucucu

SEQ ID NO: 2918 - RNA, 17 nt, Artificial Sequence
  Synthetic
acaauaccgcagagucu

SEQ ID NO: 2919 - RNA, 17 nt, Artificial Sequence
  Synthetic
aaguccaccacgagucu

SEQ ID NO: 2920 - RNA, 17 nt, Artificial Sequence
  Synthetic
uaaauaaugucuggucu

SEQ ID NO: 2921 - RNA, 17 nt, Artificial Sequence
  Synthetic
auuuaguuauaaugucu

SEQ ID NO: 2922 - RNA, 17 nt, Artificial Sequence
  Synthetic
ucuguucgugaucuucu

SEQ ID NO: 2923 - RNA, 17 nt, Artificial Sequence
  Synthetic
uucuuguugguucuucu

SEQ ID NO: 2924 - RNA, 17 nt, Artificial Sequence
  Synthetic
  misc_feature (2)..(2): n is a, c, g, or u
unugugugauguguucu

SEQ ID NO: 2925 - RNA, 17 nt, Artificial Sequence
  Synthetic
acuucucucaauuuucu

SEQ ID NO: 2926 - RNA, 17 nt, Artificial Sequence
  Synthetic
gauuaacuacauuuucu

SEQ ID NO: 2927 - RNA, 17 nt, Artificial Sequence
  Synthetic
gauauguaauuggaagu

SEQ ID NO: 2928 - RNA, 17 nt, Artificial Sequence
  Synthetic
gcugaaagccagacagu

SEQ ID NO: 2929 - RNA, 17 nt, Artificial Sequence
  Synthetic
gccaagccccaaccagu

SEQ ID NO: 2930 - RNA, 17 nt, Artificial Sequence
  Synthetic
uccucaggccaugcagu

SEQ ID NO: 2931 - RNA, 17 nt, Artificial Sequence
  Synthetic
gacggucccucucgagu

SEQ ID NO: 2932 - RNA, 17 nt, Artificial Sequence
  Synthetic
uugccuugagcaggagu

SEQ ID NO: 2933 - RNA, 17 nt, Artificial Sequence
  Synthetic
  misc_feature (1)..(1): n is a, c, g, or u
ncugugcuggggugagu

SEQ ID NO: 2934 - RNA, 17 nt, Artificial Sequence
  Synthetic
uuaaagacagguauagu

SEQ ID NO: 2935 - RNA, 17 nt, Artificial Sequence
  Synthetic
gaugacugucucuuagu

SEQ ID NO: 2936 - RNA, 17 nt, Artificial Sequence
  Synthetic
agagagaaacaucccgu

SEQ ID NO: 2937 - RNA, 17 nt, Artificial Sequence
  Synthetic
  misc_feature (2)..(2): n is a, c, g, or u
gncaucagcgcaugcgu

SEQ ID NO: 2938 - RNA, 17 nt, Artificial Sequence
  Synthetic
gcagagucuagacucgu

SEQ ID NO: 2939 - RNA, 17 nt, Artificial Sequence
  Synthetic
acagaccaguuauucgu

SEQ ID NO: 2940 - RNA, 17 nt, Artificial Sequence
  Synthetic
uuuguucagugguucgu

SEQ ID NO: 2941 - RNA, 17 nt, Artificial Sequence
  Synthetic
ggugagugauuggaggu

SEQ ID NO: 2942 - RNA, 17 nt, Artificial Sequence
  Synthetic
ccccaaccagugggggu

SEQ ID NO: 2943 - RNA, 17 nt, Artificial Sequence
  Synthetic
acgcaacccccacuggu

SEQ ID NO: 2944 - RNA, 17 nt, Artificial Sequence
  Synthetic
ccuagaggauugcuggu

SEQ ID NO: 2945 - RNA, 17 nt, Artificial Sequence
  Synthetic
gagucuagacucguggu

SEQ ID NO: 2946 - RNA, 17 nt, Artificial Sequence
  Synthetic
auuuuguagagcuuggu

SEQ ID NO: 2947 - RNA, 17 nt, Artificial Sequence
  Synthetic
agaaagccccaugcugu

SEQ ID NO: 2948 - RNA, 17 nt, Artificial Sequence
  Synthetic
acgaauaacuggucugu

SEQ ID NO: 2949 - RNA, 17 nt, Artificial Sequence
  Synthetic
guagucuccggaagugu

SEQ ID NO: 2950 - RNA, 17 nt, Artificial Sequence
  Synthetic
ggugucuuuuggagugu

SEQ ID NO: 2951 - RNA, 17 nt, Artificial Sequence
  Synthetic
ggcgggguuuuucuugu

SEQ ID NO: 2952 - RNA, 17 nt, Artificial Sequence
  Synthetic
  misc_feature (8)..(8): n is a, c, g, or u
uucuccancccgguugu

SEQ ID NO: 2953 - RNA, 17 nt, Artificial Sequence
  Synthetic
acuaaaugugaacaauu

SEQ ID NO: 2954 - RNA, 17 nt, Artificial Sequence
  Synthetic
uuaugggauauguaauu

SEQ ID NO: 2955 - RNA, 17 nt, Artificial Sequence
  Synthetic
acuaaauauuuaccauu

SEQ ID NO: 2956 - RNA, 17 nt, Artificial Sequence
  Synthetic
uuggaggacaggagauu

SEQ ID NO: 2957 - RNA, 17 nt, Artificial Sequence
  Synthetic
cucccugacugacgauu

SEQ ID NO: 2958 - RNA, 17 nt, Artificial Sequence
  Synthetic
caaucuucuccaggauu

SEQ ID NO: 2959 - RNA, 17 nt, Artificial Sequence
  Synthetic
uaacaggccaauugauu

SEQ ID NO: 2960 - RNA, 17 nt, Artificial Sequence
  Synthetic
  misc_feature (3)..(3): n is a, c, g, or u
aungaugaugugguauu

SEQ ID NO: 2961 - RNA, 17 nt, Artificial Sequence
  Synthetic
auacaggccccugacuu

SEQ ID NO: 2962 - RNA, 17 nt, Artificial Sequence
  Synthetic
cgcaugcguggaaccuu

SEQ ID NO: 2963 - RNA, 17 nt, Artificial Sequence
  Synthetic
cugccaacuggauccuu

SEQ ID NO: 2964 - RNA, 17 nt, Artificial Sequence
  Synthetic
caauguuaguauuccuu

SEQ ID NO: 2965 - RNA, 17 nt, Artificial Sequence
  Synthetic
gggauuuuguagagcuu

SEQ ID NO: 2966 - RNA, 17 nt, Artificial Sequence
  Synthetic
uauggccuuuuuggcuu

SEQ ID NO: 2967 - RNA, 17 nt, Artificial Sequence
  Synthetic
uauauaagaggacucuu

SEQ ID NO: 2968 - RNA, 17 nt, Artificial Sequence
  Synthetic
gaggaugacugucucuu

SEQ ID NO: 2969 - RNA, 17 nt, Artificial Sequence
  Synthetic
caauuuucuuuugucuu

SEQ ID NO: 2970 - RNA, 17 nt, Artificial Sequence
  Synthetic
cagcauggggcuuucuu

SEQ ID NO: 2971 - RNA, 17 nt, Artificial Sequence
  Synthetic
auauguaauuggaaguu

SEQ ID NO: 2972 - RNA, 17 nt, Artificial Sequence
  Synthetic
gaaaggccuuauaaguu

SEQ ID NO: 2973 - RNA, 17 nt, Artificial Sequence
  Synthetic
cuucccgaucaccaguu

SEQ ID NO: 2974 - RNA, 17 nt, Artificial Sequence
  Synthetic
aaauauuuaguagaguu

SEQ ID NO: 2975 - RNA, 17 nt, Artificial Sequence
  Synthetic
ccccucccggggccguu

SEQ ID NO: 2976 - RNA, 17 nt, Artificial Sequence
  Synthetic
gugagugauuggagguu

SEQ ID NO: 2977 - RNA, 17 nt, Artificial Sequence
  Synthetic
uucuggauaauacgguu

SEQ ID NO: 2978 - RNA, 17 nt, Artificial Sequence
  Synthetic
cgcaacccccacugguu

SEQ ID NO: 2979 - RNA, 17 nt, Artificial Sequence
  Synthetic
acuuuuucccgucuguu

SEQ ID NO: 2980 - RNA, 17 nt, Artificial Sequence
  Synthetic
cugcuggcaaaguuguu

SEQ ID NO: 2981 - RNA, 17 nt, Artificial Sequence
  Synthetic
cggagacuacuguuguu

SEQ ID NO: 2982 - RNA, 17 nt, Artificial Sequence
  Synthetic
uggguggguaauaauuu

SEQ ID NO: 2983 - RNA, 17 nt, Artificial Sequence
  Synthetic
auaggauaggggcauuu

SEQ ID NO: 2984 - RNA, 17 nt, Artificial Sequence
  Synthetic
cccguagcgcuucauuu

SEQ ID NO: 2985 - RNA, 17 nt, Artificial Sequence
  Synthetic
ccagcauccagagauuu

SEQ ID NO: 2986 - RNA, 17 nt, Artificial Sequence
  Synthetic
gaugcaaauggauauuu

SEQ ID NO: 2987 - RNA, 17 nt, Artificial Sequence
  Synthetic
accguucuugaguauuu

SEQ ID NO: 2988 - RNA, 17 nt, Artificial Sequence
  Synthetic
cacucccauagguauuu

SEQ ID NO: 2989 - RNA, 17 nt, Artificial Sequence
  Synthetic
auuuccugucuuacuuu

SEQ ID NO: 2990 - RNA, 17 nt, Artificial Sequence
  Synthetic
uuauuuacauacccuuu

SEQ ID NO: 2991 - RNA, 17 nt, Artificial Sequence
  Synthetic
uccacacggaggccuuu

SEQ ID NO: 2992 - RNA, 17 nt, Artificial Sequence
  Synthetic
gugccuuggguggcuuu

SEQ ID NO: 2993 - RNA, 17 nt, Artificial Sequence
  Synthetic
cccucccggggccguuu

SEQ ID NO: 2994 - RNA, 17 nt, Artificial Sequence
  Synthetic
  misc_feature (12)..(12): n is a, c, g, or u
uuguuuuguuangguuu

SEQ ID NO: 2995 - RNA, 17 nt, Artificial Sequence
  Synthetic
ccacacggaggccuuuu

SEQ ID NO: 2996 - RNA, 17 nt, Artificial Sequence
  Synthetic
uggccaaggguccuuuu

SEQ ID NO: 2997 - RNA, 20 nt, Artificial Sequence
  Synthetic
ugggacuucaaucccaaaaa

SEQ ID NO: 2998 - RNA, 20 nt, Artificial Sequence
  Synthetic
  misc_feature (7)..(7): n is a, c, g, or u
uaaaccnuaacaaaacaaaa

SEQ ID NO: 2999 - RNA, 20 nt, Artificial Sequence
  Synthetic
guauauggugacccacaaaa

SEQ ID NO: 3000 - RNA, 20 nt, Artificial Sequence
  Synthetic
gcugacgggacguaaacaaa

SEQ ID NO: 3001 - RNA, 20 nt, Artificial Sequence
  Synthetic
gauguauacccaaagacaaa

SEQ ID NO: 3002 - RNA, 20 nt, Artificial Sequence
  Synthetic
uccuggaaucagaggacaaa

SEQ ID NO: 3003 - RNA, 20 nt, Artificial Sequence
  Synthetic
gugcgaauccacacuccaaa

SEQ ID NO: 3004 - RNA, 20 nt, Artificial Sequence
  Synthetic
ggauguauauuuccgagaaa

SEQ ID NO: 3005 - RNA, 20 nt, Artificial Sequence
  Synthetic
cucucacaguaaaugagaaa

SEQ ID NO: 3006 - RNA, 20 nt, Artificial Sequence
  Synthetic
cccaaaaguaagacaggaaa

SEQ ID NO: 3007 - RNA, 20 nt, Artificial Sequence
  Synthetic
cagccuagcagccauggaaa

SEQ ID NO: 3008 - RNA, 20 nt, Artificial Sequence
  Synthetic
ugcaaauggauauuuggaaa

SEQ ID NO: 3009 - RNA, 20 nt, Artificial Sequence
  Synthetic
aucaagacauuauaacuaaa

SEQ ID NO: 3010 - RNA, 20 nt, Artificial Sequence
  Synthetic
cuguauggugaggcgaacaa

SEQ ID NO: 3011 - RNA, 20 nt, Artificial Sequence
  Synthetic
aguauuccuuggacucacaa

SEQ ID NO: 3012 - RNA, 20 nt, Artificial Sequence
  Synthetic
  misc_feature (1)..(1): n is a, c, g, or u
ngguuuagauguauacccaa

SEQ ID NO: 3013 - RNA, 20 nt, Artificial Sequence
  Synthetic
ucgcugcuccuuuuacccaa

SEQ ID NO: 3014 - RNA, 20 nt, Artificial Sequence
  Synthetic
uucccaccuugugaguccaa

SEQ ID NO: 3015 - RNA, 20 nt, Artificial Sequence
  Synthetic
auagaauacccgccuuccaa

SEQ ID NO: 3016 - RNA, 20 nt, Artificial Sequence
  Synthetic
uugauuggaaagucugucaa

SEQ ID NO: 3017 - RNA, 20 nt, Artificial Sequence
  Synthetic
  misc_feature (4)..(4): n is a, c, g, or u
gggnuggagaaauacuucaa

SEQ ID NO: 3018 - RNA, 20 nt, Artificial Sequence
  Synthetic
caggaacggcagacggagaa

SEQ ID NO: 3019 - RNA, 20 nt, Artificial Sequence
  Synthetic
cacgguccggcagaugagaa

SEQ ID NO: 3020 - RNA, 20 nt, Artificial Sequence
  Synthetic
aacaaaggacgucccgcgaa

SEQ ID NO: 3021 - RNA, 20 nt, Artificial Sequence
  Synthetic
guccaacuggugaucgggaa

SEQ ID NO: 3022 - RNA, 20 nt, Artificial Sequence
  Synthetic
ggucccucucgaguggggaa

SEQ ID NO: 3023 - RNA, 20 nt, Artificial Sequence
  Synthetic
uauuuacauacccuuuggaa

SEQ ID NO: 3024 - RNA, 20 nt, Artificial Sequence
  Synthetic
  misc_feature (18)..(18): n is a, c, g, or u
aauugguaacagcgguanaa

SEQ ID NO: 3025 - RNA, 20 nt, Artificial Sequence
  Synthetic
uuagacauugacccuuauaa

SEQ ID NO: 3026 - RNA, 20 nt, Artificial Sequence
  Synthetic
caaugaucagaggacucuaa

SEQ ID NO: 3027 - RNA, 20 nt, Artificial Sequence
  Synthetic
aaugucuggucuggaaguaa

SEQ ID NO: 3028 - RNA, 20 nt, Artificial Sequence
  Synthetic
ucauggcgguuuccauguaa

SEQ ID NO: 3029 - RNA, 20 nt, Artificial Sequence
  Synthetic
aguuugccaaucaggauuaa

SEQ ID NO: 3030 - RNA, 20 nt, Artificial Sequence
  Synthetic
aggcaaugaguccagguuaa

SEQ ID NO: 3031 - RNA, 20 nt, Artificial Sequence
  Synthetic
acauaucccauaaaauuuaa

SEQ ID NO: 3032 - RNA, 20 nt, Artificial Sequence
  Synthetic
auaguccagaagaaccaaca

SEQ ID NO: 3033 - RNA, 20 nt, Artificial Sequence
  Synthetic
ugugaggauucuugucaaca

SEQ ID NO: 3034 - RNA, 20 nt, Artificial Sequence
  Synthetic
ucaccauauacuugggaaca

SEQ ID NO: 3035 - RNA, 20 nt, Artificial Sequence
  Synthetic
cgaauuuaggccaggacaca

SEQ ID NO: 3036 - RNA, 20 nt, Artificial Sequence
  Synthetic
aguugggguacuuugccaca

SEQ ID NO: 3037 - RNA, 20 nt, Artificial Sequence
  Synthetic
ucucucccaaaaguaagaca

SEQ ID NO: 3038 - RNA, 20 nt, Artificial Sequence
  Synthetic
  misc_feature (15)..(15): n is a, c, g, or u
gaggcuugaacagunggaca

SEQ ID NO: 3039 - RNA, 20 nt, Artificial Sequence
  Synthetic
cgggguuuuucuuguugaca

SEQ ID NO: 3040 - RNA, 20 nt, Artificial Sequence
  Synthetic
cuuucucuguaaacaauaca

SEQ ID NO: 3041 - RNA, 20 nt, Artificial Sequence
  Synthetic
gaugaugggaugggaauaca

SEQ ID NO: 3042 - RNA, 20 nt, Artificial Sequence
  Synthetic
ggaccccugcucguguuaca

SEQ ID NO: 3043 - RNA, 20 nt, Artificial Sequence
  Synthetic
ucugccguuccugccgacca

SEQ ID NO: 3044 - RNA, 20 nt, Artificial Sequence
  Synthetic
agguauuuugcgaaagccca

SEQ ID NO: 3045 - RNA, 20 nt, Artificial Sequence
  Synthetic
gacacauccagcgauagcca

SEQ ID NO: 3046 - RNA, 20 nt, Artificial Sequence
  Synthetic
acguuacauggaaaccgcca

SEQ ID NO: 3047 - RNA, 20 nt, Artificial Sequence
  Synthetic
gggacugcgaauuuaggcca

SEQ ID NO: 3048 - RNA, 20 nt, Artificial Sequence
  Synthetic
accuuguuggccucuggcca

SEQ ID NO: 3049 - RNA, 20 nt, Artificial Sequence
  Synthetic
caacggcccggucugugcca

SEQ ID NO: 3050 - RNA, 20 nt, Artificial Sequence
  Synthetic
caucucgucaaucuucucca

SEQ ID NO: 3051 - RNA, 20 nt, Artificial Sequence
  Synthetic
cacucgagagggaccgucca

SEQ ID NO: 3052 - RNA, 20 nt, Artificial Sequence
  Synthetic
ccguuuguccucugauucca

SEQ ID NO: 3053 - RNA, 20 nt, Artificial Sequence
  Synthetic
ugggaacaagaucuacagca

SEQ ID NO: 3054 - RNA, 20 nt, Artificial Sequence
  Synthetic
cugaacuggagccaccagca

SEQ ID NO: 3055 - RNA, 20 nt, Artificial Sequence
  Synthetic
gaagaugaggcauagcagca

SEQ ID NO: 3056 - RNA, 20 nt, Artificial Sequence
  Synthetic
ccccgccuguaacacgagca

SEQ ID NO: 3057 - RNA, 20 nt, Artificial Sequence
  Synthetic
agccacaaagguuccacgca

SEQ ID NO: 3058 - RNA, 20 nt, Artificial Sequence
  Synthetic
  misc_feature (10)..(10): n is a, c, g, or u
ggccaucggncaucagcgca

SEQ ID NO: 3059 - RNA, 20 nt, Artificial Sequence
  Synthetic
ggugcgccccguggucggca

SEQ ID NO: 3060 - RNA, 20 nt, Artificial Sequence
  Synthetic
gggacccugcaaaaccugca

SEQ ID NO: 3061 - RNA, 20 nt, Artificial Sequence
  Synthetic
aagaaggaguuugccaauca

SEQ ID NO: 3062 - RNA, 20 nt, Artificial Sequence
  Synthetic
acauggagaacaucacauca

SEQ ID NO: 3063 - RNA, 20 nt, Artificial Sequence
  Synthetic
ccaaauauccauuugcauca

SEQ ID NO: 3064 - RNA, 20 nt, Artificial Sequence
  Synthetic
aagcggugucgagaagauca

SEQ ID NO: 3065 - RNA, 20 nt, Artificial Sequence
  Synthetic
  misc_feature (9)..(9): n is a, c, g, or u
cagcgguanaaagggacuca

SEQ ID NO: 3066 - RNA, 20 nt, Artificial Sequence
  Synthetic
caaaagacaccaaauacuca

SEQ ID NO: 3067 - RNA, 20 nt, Artificial Sequence
  Synthetic
ucuacaaaaucccaaaguca

SEQ ID NO: 3068 - RNA, 20 nt, Artificial Sequence
  Synthetic
  misc_feature (4)..(4): n is a, c, g, or u
accnuaacaaaacaaaaaga

SEQ ID NO: 3069 - RNA, 20 nt, Artificial Sequence
  Synthetic
guccagaagaaccaacaaga

SEQ ID NO: 3070 - RNA, 20 nt, Artificial Sequence
  Synthetic
uauuuugcgaaagcccaaga

SEQ ID NO: 3071 - RNA, 20 nt, Artificial Sequence
  Synthetic
gaggcagguccccucgaaga

SEQ ID NO: 3072 - RNA, 20 nt, Artificial Sequence
  Synthetic
gcauagcagcaggaugaaga

SEQ ID NO: 3073 - RNA, 20 nt, Artificial Sequence
  Synthetic
  misc_feature (6)..(6): n is a, c, g, or u
gccaangcaguuauauaaga

SEQ ID NO: 3074 - RNA, 20 nt, Artificial Sequence
  Synthetic
ucgagaagaucacgaacaga

SEQ ID NO: 3075 - RNA, 20 nt, Artificial Sequence
  Synthetic
ggcagaugagaaggaacaga

SEQ ID NO: 3076 - RNA, 20 nt, Artificial Sequence
  Synthetic
acauaccuugauaguccaga

SEQ ID NO: 3077 - RNA, 20 nt, Artificial Sequence
  Synthetic
gaacucccucgccucgcaga

SEQ ID NO: 3078 - RNA, 20 nt, Artificial Sequence
  Synthetic
cucaaucgccgcgucgcaga

SEQ ID NO: 3079 - RNA, 20 nt, Artificial Sequence
  Synthetic
acaagagaugauuaggcaga

SEQ ID NO: 3080 - RNA, 20 nt, Artificial Sequence
  Synthetic
  misc_feature (12)..(12): n is a, c, g, or u
uauauaacugcnuuggcaga

SEQ ID NO: 3081 - RNA, 20 nt, Artificial Sequence
  Synthetic
guuuccauguaacgugcaga

SEQ ID NO: 3082 - RNA, 20 nt, Artificial Sequence
  Synthetic
ucgaggauccuggaaucaga

SEQ ID NO: 3083 - RNA, 20 nt, Artificial Sequence
  Synthetic
ugaggcgaacaaugaucaga

SEQ ID NO: 3084 - RNA, 20 nt, Artificial Sequence
  Synthetic
ggggagaccgcguaaagaga

SEQ ID NO: 3085 - RNA, 20 nt, Artificial Sequence
  Synthetic
  misc_feature (4)..(4): n is a, c, g, or u
agunggacaugaacaagaga

SEQ ID NO: 3086 - RNA, 20 nt, Artificial Sequence
  Synthetic
gucucuuagugguggagaga

SEQ ID NO: 3087 - RNA, 20 nt, Artificial Sequence
  Synthetic
ccuggagaagauugacgaga

SEQ ID NO: 3088 - RNA, 20 nt, Artificial Sequence
  Synthetic
aagcugaagcggugucgaga

SEQ ID NO: 3089 - RNA, 20 nt, Artificial Sequence
  Synthetic
gcaggaacggcagacggaga

SEQ ID NO: 3090 - RNA, 20 nt, Artificial Sequence
  Synthetic
aggguccccaauccuggaga

SEQ ID NO: 3091 - RNA, 20 nt, Artificial Sequence
  Synthetic
  misc_feature (4)..(4): n is a, c, g, or u
ugcnuuggcagaugaugaga

SEQ ID NO: 3092 - RNA, 20 nt, Artificial Sequence
  Synthetic
gaucgggaaggaauccuaga

SEQ ID NO: 3093 - RNA, 20 nt, Artificial Sequence
  Synthetic
uuaaagacagguauaguaga

SEQ ID NO: 3094 - RNA, 20 nt, Artificial Sequence
  Synthetic
cggagacuacuguuguuaga

SEQ ID NO: 3095 - RNA, 20 nt, Artificial Sequence
  Synthetic
ucacaguaaaugagaaacga

SEQ ID NO: 3096 - RNA, 20 nt, Artificial Sequence
  Synthetic
cucccucgccucgcagacga

SEQ ID NO: 3097 - RNA, 20 nt, Artificial Sequence
  Synthetic
aacgugcagaggugaagcga

SEQ ID NO: 3098 - RNA, 20 nt, Artificial Sequence
  Synthetic
auugagaucuucgucugcga

SEQ ID NO: 3099 - RNA, 20 nt, Artificial Sequence
  Synthetic
gagaugcagaucuucugcga

SEQ ID NO: 3100 - RNA, 20 nt, Artificial Sequence
  Synthetic
gaagaggcagguccccucga

SEQ ID NO: 3101 - RNA, 20 nt, Artificial Sequence
  Synthetic
ggucccguacugguggucga

SEQ ID NO: 3102 - RNA, 20 nt, Artificial Sequence
  Synthetic
gcgagggaguucuucuucga

SEQ ID NO: 3103 - RNA, 20 nt, Artificial Sequence
  Synthetic
uguauauuuccgagaaagga

SEQ ID NO: 3104 - RNA, 20 nt, Artificial Sequence
  Synthetic
gaugaggcauagcagcagga

SEQ ID NO: 3105 - RNA, 20 nt, Artificial Sequence
  Synthetic
gacgauugguggaggcagga

SEQ ID NO: 3106 - RNA, 20 nt, Artificial Sequence
  Synthetic
uccacugcauggccugagga

SEQ ID NO: 3107 - RNA, 20 nt, Artificial Sequence
  Synthetic
uaacaacaguagucuccgga

SEQ ID NO: 3108 - RNA, 20 nt, Artificial Sequence
  Synthetic
ucagcgcugaauccagcgga

SEQ ID NO: 3109 - RNA, 20 nt, Artificial Sequence
  Synthetic
agccccaaacggccccggga

SEQ ID NO: 3110 - RNA, 20 nt, Artificial Sequence
  Synthetic
gaaagcccaagaugauggga

SEQ ID NO: 3111 - RNA, 20 nt, Artificial Sequence
  Synthetic
uguguuuuugcugaguggga

SEQ ID NO: 3112 - RNA, 20 nt, Artificial Sequence
  Synthetic
uuguccuggcuaucgcugga

SEQ ID NO: 3113 - RNA, 20 nt, Artificial Sequence
  Synthetic
ccaaaaggccuccgugugga

SEQ ID NO: 3114 - RNA, 20 nt, Artificial Sequence
  Synthetic
gauagccaggacaaguugga

SEQ ID NO: 3115 - RNA, 20 nt, Artificial Sequence
  Synthetic
uggguggguaauaauuugga

SEQ ID NO: 3116 - RNA, 20 nt, Artificial Sequence
  Synthetic
  misc_feature (18)..(18): n is a, c, g, or u
cuggcuuucagcuauaunga

SEQ ID NO: 3117 - RNA, 20 nt, Artificial Sequence
  Synthetic
uauggugacccacaaaauga

SEQ ID NO: 3118 - RNA, 20 nt, Artificial Sequence
  Synthetic
uuugcgaaagcccaagauga

SEQ ID NO: 3119 - RNA, 20 nt, Artificial Sequence
  Synthetic
  misc_feature (15)..(15): n is a, c, g, or u
gcuuucagcuauaungauga

SEQ ID NO: 3120 - RNA, 20 nt, Artificial Sequence
  Synthetic
uaggcugccucccugacuga

SEQ ID NO: 3121 - RNA, 20 nt, Artificial Sequence
  Synthetic
agggguccuaggaauccuga

SEQ ID NO: 3122 - RNA, 20 nt, Artificial Sequence
  Synthetic
gauucccgguacaaagcuga

SEQ ID NO: 3123 - RNA, 20 nt, Artificial Sequence
  Synthetic
uccgcuggauucagcgcuga

SEQ ID NO: 3124 - RNA, 20 nt, Artificial Sequence
  Synthetic
cauguaacgugcagagguga

SEQ ID NO: 3125 - RNA, 20 nt, Artificial Sequence
  Synthetic
gccugagugcuguaugguga

SEQ ID NO: 3126 - RNA, 20 nt, Artificial Sequence
  Synthetic
  misc_feature (13)..(13): n is a, c, g, or u
uugcuuaauuuunuguguga

SEQ ID NO: 3127 - RNA, 20 nt, Artificial Sequence
  Synthetic
uagacucugcgguauuguga

SEQ ID NO: 3128 - RNA, 20 nt, Artificial Sequence
  Synthetic
  misc_feature (1)..(1): n is a, c, g, or u
ncugugcuggggugaguuga

SEQ ID NO: 3129 - RNA, 20 nt, Artificial Sequence
  Synthetic
cagcaggaugaagaggaaua

SEQ ID NO: 3130 - RNA, 20 nt, Artificial Sequence
  Synthetic
caauuauguuaauacuaaua

SEQ ID NO: 3131 - RNA, 20 nt, Artificial Sequence
  Synthetic
ccggaaguguugauaggaua

SEQ ID NO: 3132 - RNA, 20 nt, Artificial Sequence
  Synthetic
agucuccggaaguguugaua

SEQ ID NO: 3133 - RNA, 20 nt, Artificial Sequence
  Synthetic
guagcuccaaauucuuuaua

SEQ ID NO: 3134 - RNA, 20 nt, Artificial Sequence
  Synthetic
gggcuuucgcaaaauaccua

SEQ ID NO: 3135 - RNA, 20 nt, Artificial Sequence
  Synthetic
gacagugggggaaagcccua

SEQ ID NO: 3136 - RNA, 20 nt, Artificial Sequence
  Synthetic
uaacacgagcagggguccua

SEQ ID NO: 3137 - RNA, 20 nt, Artificial Sequence
  Synthetic
acaucacaucaggauuccua

SEQ ID NO: 3138 - RNA, 20 nt, Artificial Sequence
  Synthetic
acccacaaaaugaagcgcua

SEQ ID NO: 3139 - RNA, 20 nt, Artificial Sequence
  Synthetic
uuuccaccagcaauccucua

SEQ ID NO: 3140 - RNA, 20 nt, Artificial Sequence
  Synthetic
ggacuucucucaauuuucua

SEQ ID NO: 3141 - RNA, 20 nt, Artificial Sequence
  Synthetic
cgguuucucucccaaaagua

SEQ ID NO: 3142 - RNA, 20 nt, Artificial Sequence
  Synthetic
aggauccucgaccaccagua

SEQ ID NO: 3143 - RNA, 20 nt, Artificial Sequence
  Synthetic
ucacaaggugggaaacuuua

SEQ ID NO: 3144 - RNA, 20 nt, Artificial Sequence
  Synthetic
acggggcgcaccucucuuua

SEQ ID NO: 3145 - RNA, 20 nt, Artificial Sequence
  Synthetic
ggguuauuccuuaaauuuua

SEQ ID NO: 3146 - RNA, 20 nt, Artificial Sequence
  Synthetic
uaaacugagccaagagaaac

SEQ ID NO: 3147 - RNA, 20 nt, Artificial Sequence
  Synthetic
cuguuuguuaugucaacaac

SEQ ID NO: 3148 - RNA, 20 nt, Artificial Sequence
  Synthetic
aaggagcagcgaaacccaac

SEQ ID NO: 3149 - RNA, 20 nt, Artificial Sequence
  Synthetic
ccgggccguugccuagcaac

SEQ ID NO: 3150 - RNA, 20 nt, Artificial Sequence
  Synthetic
gugucgagaagaucacgaac

SEQ ID NO: 3151 - RNA, 20 nt, Artificial Sequence
  Synthetic
uccggcagaugagaaggaac

SEQ ID NO: 3152 - RNA, 20 nt, Artificial Sequence
  Synthetic
ugagaggcaauagucggaac

SEQ ID NO: 3153 - RNA, 20 nt, Artificial Sequence
  Synthetic
gacaaaagaaaauugguaac

SEQ ID NO: 3154 - RNA, 20 nt, Artificial Sequence
  Synthetic
caaucaauuggccuguuaac

SEQ ID NO: 3155 - RNA, 20 nt, Artificial Sequence
  Synthetic
gggaaagcccuacgaaccac

SEQ ID NO: 3156 - RNA, 20 nt, Artificial Sequence
  Synthetic
cugccguuccugccgaccac

SEQ ID NO: 3157 - RNA, 20 nt, Artificial Sequence
  Synthetic
cgucagcaaacacuuggcac

SEQ ID NO: 3158 - RNA, 20 nt, Artificial Sequence
  Synthetic
caggauuggggacccugcac

SEQ ID NO: 3159 - RNA, 20 nt, Artificial Sequence
  Synthetic
gcagaugagaaggaacagac

SEQ ID NO: 3160 - RNA, 20 nt, Artificial Sequence
  Synthetic
agcaaacacuuggcacagac

SEQ ID NO: 3161 - RNA, 20 nt, Artificial Sequence
  Synthetic
  misc_feature (1)..(1): n is a, c, g, or u
nauauagcugaaagccagac

SEQ ID NO: 3162 - RNA, 20 nt, Artificial Sequence
  Synthetic
gaaggaacagacggggagac

SEQ ID NO: 3163 - RNA, 20 nt, Artificial Sequence
  Synthetic
uauuuccgagaaaggacgac

SEQ ID NO: 3164 - RNA, 20 nt, Artificial Sequence
  Synthetic
uggagaaauacuucaaggac

SEQ ID NO: 3165 - RNA, 20 nt, Artificial Sequence
  Synthetic
uuccuucucaucugccggac

SEQ ID NO: 3166 - RNA, 20 nt, Artificial Sequence
  Synthetic
gcuguacaaaaccuucggac

SEQ ID NO: 3167 - RNA, 20 nt, Artificial Sequence
  Synthetic
agugauuggagguuggggac

SEQ ID NO: 3168 - RNA, 20 nt, Artificial Sequence
  Synthetic
ggagcaaaacucauugggac

SEQ ID NO: 3169 - RNA, 20 nt, Artificial Sequence
  Synthetic
gaguaggcugccucccugac

SEQ ID NO: 3170 - RNA, 20 nt, Artificial Sequence
  Synthetic
cagaccaguuauucguugac

SEQ ID NO: 3171 - RNA, 20 nt, Artificial Sequence
  Synthetic
gcuccucugccgauccauac

SEQ ID NO: 3172 - RNA, 20 nt, Artificial Sequence
  Synthetic
uauaaagaauuuggagcuac

SEQ ID NO: 3173 - RNA, 20 nt, Artificial Sequence
  Synthetic
agggacucaagauguuguac

SEQ ID NO: 3174 - RNA, 20 nt, Artificial Sequence
  Synthetic
acaccgcuucagcuuuguac

SEQ ID NO: 3175 - RNA, 20 nt, Artificial Sequence
  Synthetic
aaucuucguuucucauuuac

SEQ ID NO: 3176 - RNA, 20 nt, Artificial Sequence
  Synthetic
cacaaggugggaaacuuuac

SEQ ID NO: 3177 - RNA, 20 nt, Artificial Sequence
  Synthetic
ccgauggccaagccccaacc

SEQ ID NO: 3178 - RNA, 20 nt, Artificial Sequence
  Synthetic
uccguguggaggggugaacc

SEQ ID NO: 3179 - RNA, 20 nt, Artificial Sequence
  Synthetic
uuaaucauuacuuccagacc

SEQ ID NO: 3180 - RNA, 20 nt, Artificial Sequence
  Synthetic
ggaguuggagccuauggacc

SEQ ID NO: 3181 - RNA, 20 nt, Artificial Sequence
  Synthetic
  misc_feature (17)..(17): n is a, c, g, or u
aguugaugacucuagcnacc

SEQ ID NO: 3182 - RNA, 20 nt, Artificial Sequence
  Synthetic
  misc_feature (9)..(9): n is a, c, g, or u
agcaggaanauacaggcccc

SEQ ID NO: 3183 - RNA, 20 nt, Artificial Sequence
  Synthetic
gcguaaagagaggugcgccc

SEQ ID NO: 3184 - RNA, 20 nt, Artificial Sequence
  Synthetic
gacagagccccaaacggccc

SEQ ID NO: 3185 - RNA, 20 nt, Artificial Sequence
  Synthetic
ggaacaggguucacuauccc

SEQ ID NO: 3186 - RNA, 20 nt, Artificial Sequence
  Synthetic
uccagcggacgaccccuccc

SEQ ID NO: 3187 - RNA, 20 nt, Artificial Sequence
  Synthetic
augggaguaggcugccuccc

SEQ ID NO: 3188 - RNA, 20 nt, Artificial Sequence
  Synthetic
  misc_feature (5)..(5): n is a, c, g, or u
caucnauauagcugaaagcc

SEQ ID NO: 3189 - RNA, 20 nt, Artificial Sequence
  Synthetic
uaaaacuaguuaugccugcc

SEQ ID NO: 3190 - RNA, 20 nt, Artificial Sequence
  Synthetic
ucuguuccuucucaucugcc

SEQ ID NO: 3191 - RNA, 20 nt, Artificial Sequence
  Synthetic
aauuuucuagggggagugcc

SEQ ID NO: 3192 - RNA, 20 nt, Artificial Sequence
  Synthetic
gugaaaccacaauaguugcc

SEQ ID NO: 3193 - RNA, 20 nt, Artificial Sequence
  Synthetic
agagcaaauaccaacaaucc

SEQ ID NO: 3194 - RNA, 20 nt, Artificial Sequence
  Synthetic
agcagggguccuaggaaucc

SEQ ID NO: 3195 - RNA, 20 nt, Artificial Sequence
  Synthetic
gucccgucagcgcugaaucc

SEQ ID NO: 3196 - RNA, 20 nt, Artificial Sequence
  Synthetic
acuauaccugucuuuaaucc

SEQ ID NO: 3197 - RNA, 20 nt, Artificial Sequence
  Synthetic
aaaacgccgcagacacaucc

SEQ ID NO: 3198 - RNA, 20 nt, Artificial Sequence
  Synthetic
gguaucaaaccguauuaucc

SEQ ID NO: 3199 - RNA, 20 nt, Artificial Sequence
  Synthetic
auccagcggacgaccccucc

SEQ ID NO: 3200 - RNA, 20 nt, Artificial Sequence
  Synthetic
gucccaaugaguuuugcucc

SEQ ID NO: 3201 - RNA, 20 nt, Artificial Sequence
  Synthetic
gucuaacaacaguagucucc

SEQ ID NO: 3202 - RNA, 20 nt, Artificial Sequence
  Synthetic
gcaacauaccuugauagucc

SEQ ID NO: 3203 - RNA, 20 nt, Artificial Sequence
  Synthetic
gacguaaacaaaggacgucc

SEQ ID NO: 3204 - RNA, 20 nt, Artificial Sequence
  Synthetic
uguaguuaaucauuacuucc

SEQ ID NO: 3205 - RNA, 20 nt, Artificial Sequence
  Synthetic
aauccucuaggauuccuucc

SEQ ID NO: 3206 - RNA, 20 nt, Artificial Sequence
  Synthetic
aaggauucccgguacaaagc

SEQ ID NO: 3207 - RNA, 20 nt, Artificial Sequence
  Synthetic
  misc_feature (1)..(1): n is a, c, g, or u
nacuguucaagccuccaagc

SEQ ID NO: 3208 - RNA, 20 nt, Artificial Sequence
  Synthetic
ucccgguacaaagcugaagc

SEQ ID NO: 3209 - RNA, 20 nt, Artificial Sequence
  Synthetic
acacuaacaacuuugccagc

SEQ ID NO: 3210 - RNA, 20 nt, Artificial Sequence
  Synthetic
ccgucagcgcugaauccagc

SEQ ID NO: 3211 - RNA, 20 nt, Artificial Sequence
  Synthetic
accccgccuguaacacgagc

SEQ ID NO: 3212 - RNA, 20 nt, Artificial Sequence
  Synthetic
ccacauuggguaaaaggagc

SEQ ID NO: 3213 - RNA, 20 nt, Artificial Sequence
  Synthetic
  misc_feature (13)..(13): n is a, c, g, or u
uaccacaucaucnauauagc

SEQ ID NO: 3214 - RNA, 20 nt, Artificial Sequence
  Synthetic
augcagaucuucugcgacgc

SEQ ID NO: 3215 - RNA, 20 nt, Artificial Sequence
  Synthetic
ggaauaugauaaaacgccgc

SEQ ID NO: 3216 - RNA, 20 nt, Artificial Sequence
  Synthetic
uguuuacgucccgucagcgc

SEQ ID NO: 3217 - RNA, 20 nt, Artificial Sequence
  Synthetic
ucguccgcuggauucagcgc

SEQ ID NO: 3218 - RNA, 20 nt, Artificial Sequence
  Synthetic
caaagguuccacgcaugcgc

SEQ ID NO: 3219 - RNA, 20 nt, Artificial Sequence
  Synthetic
cagacgaagaucucaaucgc

SEQ ID NO: 3220 - RNA, 20 nt, Artificial Sequence
  Synthetic
gaagaacucccucgccucgc

SEQ ID NO: 3221 - RNA, 20 nt, Artificial Sequence
  Synthetic
gaucucaaucgccgcgucgc

SEQ ID NO: 3222 - RNA, 20 nt, Artificial Sequence
  Synthetic
gcauauaaaggcauuaaggc

SEQ ID NO: 3223 - RNA, 20 nt, Artificial Sequence
  Synthetic
ccccugcucguguuacaggc

SEQ ID NO: 3224 - RNA, 20 nt, Artificial Sequence
  Synthetic
gauugguggaggcaggaggc

SEQ ID NO: 3225 - RNA, 20 nt, Artificial Sequence
  Synthetic
ccuuuccauggcugcuaggc

SEQ ID NO: 3226 - RNA, 20 nt, Artificial Sequence
  Synthetic
ccguggucggcaggaacggc

SEQ ID NO: 3227 - RNA, 20 nt, Artificial Sequence
  Synthetic
gaguuuugcuccagaccggc

SEQ ID NO: 3228 - RNA, 20 nt, Artificial Sequence
  Synthetic
cgaagugcacacgguccggc

SEQ ID NO: 3229 - RNA, 20 nt, Artificial Sequence
  Synthetic
  misc_feature (15)..(15): n is a, c, g, or u
ucuuauauaacugcnuuggc

SEQ ID NO: 3230 - RNA, 20 nt, Artificial Sequence
  Synthetic
uugguauuugcucugaaugc

SEQ ID NO: 3231 - RNA, 20 nt, Artificial Sequence
  Synthetic
cagucauccucaggccaugc

SEQ ID NO: 3232 - RNA, 20 nt, Artificial Sequence
  Synthetic
cauugggaagcuggagaugc

SEQ ID NO: 3233 - RNA, 20 nt, Artificial Sequence
  Synthetic
ccucugccgauccauacugc

SEQ ID NO: 3234 - RNA, 20 nt, Artificial Sequence
  Synthetic
ucuccgucugccguuccugc

SEQ ID NO: 3235 - RNA, 20 nt, Artificial Sequence
  Synthetic
aaccuuuguggcuccucugc

SEQ ID NO: 3236 - RNA, 20 nt, Artificial Sequence
  Synthetic
cuaucgcuggaugugucugc

SEQ ID NO: 3237 - RNA, 20 nt, Artificial Sequence
  Synthetic
auguucuccauguucggugc

SEQ ID NO: 3238 - RNA, 20 nt, Artificial Sequence
  Synthetic
  misc_feature (14)..(14): n is a, c, g, or u
ucaggcaagcaauncugugc

SEQ ID NO: 3239 - RNA, 20 nt, Artificial Sequence
  Synthetic
ggucugugccaaguguuugc

SEQ ID NO: 3240 - RNA, 20 nt, Artificial Sequence
  Synthetic
aggagucgugcagguuuugc

SEQ ID NO: 3241 - RNA, 20 nt, Artificial Sequence
  Synthetic
  misc_feature (19)..(19): n is a, c, g, or u
uccacgcaugcgcugaugnc

SEQ ID NO: 3242 - RNA, 20 nt, Artificial Sequence
  Synthetic
  misc_feature (4)..(4): n is a, c, g, or u
  misc_feature (18)..(19): n is a, c, g, or u
guuncauggugcuggugnnc

SEQ ID NO: 3243 - RNA, 20 nt, Artificial Sequence
  Synthetic
  misc_feature (19)..(19): n is a, c, g, or u
agcacucaggcaagcaaunc

SEQ ID NO: 3244 - RNA, 20 nt, Artificial Sequence
  Synthetic
  misc_feature (16)..(16): n is a, c, g, or u
gggcuuggccaucggncauc

SEQ ID NO: 3245 - RNA, 20 nt, Artificial Sequence
  Synthetic
uccaccacgagucuagacuc

SEQ ID NO: 3246 - RNA, 20 nt, Artificial Sequence
  Synthetic
gcuccaccccaaaaggccuc

SEQ ID NO: 3247 - RNA, 20 nt, Artificial Sequence
  Synthetic
cgggaauccuuagaguccuc

SEQ ID NO: 3248 - RNA, 20 nt, Artificial Sequence
  Synthetic
uauguugcccguuuguccuc

SEQ ID NO: 3249 - RNA, 20 nt, Artificial Sequence
  Synthetic
uggauuguugguauuugcuc

SEQ ID NO: 3250 - RNA, 20 nt, Artificial Sequence
  Synthetic
gggguggagcccucagucuc

SEQ ID NO: 3251 - RNA, 20 nt, Artificial Sequence
  Synthetic
caauucugucguccuuucuc

SEQ ID NO: 3252 - RNA, 20 nt, Artificial Sequence
  Synthetic
cgaacagacgggaaaaaguc

SEQ ID NO: 3253 - RNA, 20 nt, Artificial Sequence
  Synthetic
cucuacaaaaucccaaaguc

SEQ ID NO: 3254 - RNA, 20 nt, Artificial Sequence
  Synthetic
gccuccaccaaucgucaguc

SEQ ID NO: 3255 - RNA, 20 nt, Artificial Sequence
  Synthetic
agaugugagaggcaauaguc

SEQ ID NO: 3256 - RNA, 20 nt, Artificial Sequence
  Synthetic
uccuuuguuuacgucccguc

SEQ ID NO: 3257 - RNA, 20 nt, Artificial Sequence
  Synthetic
auacaggugcaauuuccguc

SEQ ID NO: 3258 - RNA, 20 nt, Artificial Sequence
  Synthetic
cggcgauugagaucuucguc

SEQ ID NO: 3259 - RNA, 20 nt, Artificial Sequence
  Synthetic
ugcuaggcaacggcccgguc

SEQ ID NO: 3260 - RNA, 20 nt, Artificial Sequence
  Synthetic
uggcuaucgcuggauguguc

SEQ ID NO: 3261 - RNA, 20 nt, Artificial Sequence
  Synthetic
aggggucguccgcuggauuc

SEQ ID NO: 3262 - RNA, 20 nt, Artificial Sequence
  Synthetic
uguugcuguacaaaaccuuc

SEQ ID NO: 3263 - RNA, 20 nt, Artificial Sequence
  Synthetic
uugcucucguuuuugccuuc

SEQ ID NO: 3264 - RNA, 20 nt, Artificial Sequence
  Synthetic
agcuggagaugcagaucuuc

SEQ ID NO: 3265 - RNA, 20 nt, Artificial Sequence
  Synthetic
ccugcugguggcuccaguuc

SEQ ID NO: 3266 - RNA, 20 nt, Artificial Sequence
  Synthetic
augugauguucuccauguuc

SEQ ID NO: 3267 - RNA, 20 nt, Artificial Sequence
  Synthetic
agggauagugaacccuguuc

SEQ ID NO: 3268 - RNA, 20 nt, Artificial Sequence
  Synthetic
uuuacuagugccauuuguuc

SEQ ID NO: 3269 - RNA, 20 nt, Artificial Sequence
  Synthetic
gccuguuaacagggaguuuc

SEQ ID NO: 3270 - RNA, 20 nt, Artificial Sequence
  Synthetic
  misc_feature (1)..(1): n is a, c, g, or u
naaaauuaagcaauguuuuc

SEQ ID NO: 3271 - RNA, 20 nt, Artificial Sequence
  Synthetic
  misc_feature (16)..(16): n is a, c, g, or u
uugguaacagcgguanaaag

SEQ ID NO: 3272 - RNA, 20 nt, Artificial Sequence
  Synthetic
  misc_feature (7)..(7): n is a, c, g, or u
aacagunggacaugaacaag

SEQ ID NO: 3273 - RNA, 20 nt, Artificial Sequence
  Synthetic
cacuaguaaacugagccaag

SEQ ID NO: 3274 - RNA, 20 nt, Artificial Sequence
  Synthetic
aggaacggcagacggagaag

SEQ ID NO: 3275 - RNA, 20 nt, Artificial Sequence
  Synthetic
uguaacgugcagaggugaag

SEQ ID NO: 3276 - RNA, 20 nt, Artificial Sequence
  Synthetic
cccaucucuccaccacuaag

SEQ ID NO: 3277 - RNA, 20 nt, Artificial Sequence
  Synthetic
uauagcugaaagccagacag

SEQ ID NO: 3278 - RNA, 20 nt, Artificial Sequence
  Synthetic
gguucauguauuguuuacag

SEQ ID NO: 3279 - RNA, 20 nt, Artificial Sequence
  Synthetic
gauggccaagccccaaccag

SEQ ID NO: 3280 - RNA, 20 nt, Artificial Sequence
  Synthetic
aacgccgcagacacauccag

SEQ ID NO: 3281 - RNA, 20 nt, Artificial Sequence
  Synthetic
uuggaagauccagcauccag

SEQ ID NO: 3282 - RNA, 20 nt, Artificial Sequence
  Synthetic
acauuggguaaaaggagcag

SEQ ID NO: 3283 - RNA, 20 nt, Artificial Sequence
  Synthetic
ugcugguggcuccaguucag

SEQ ID NO: 3284 - RNA, 20 nt, Artificial Sequence
  Synthetic
gcggguauucuauauaagag

SEQ ID NO: 3285 - RNA, 20 nt, Artificial Sequence
  Synthetic
guucuuuccccacucgagag

SEQ ID NO: 3286 - RNA, 20 nt, Artificial Sequence
  Synthetic
agguucuuuccccacucgag

SEQ ID NO: 3287 - RNA, 20 nt, Artificial Sequence
  Synthetic
cuuggacggucccucucgag

SEQ ID NO: 3288 - RNA, 20 nt, Artificial Sequence
  Synthetic
uggucuauaagcaggaggag

SEQ ID NO: 3289 - RNA, 20 nt, Artificial Sequence
  Synthetic
ucgcaaaauaccuaugggag

SEQ ID NO: 3290 - RNA, 20 nt, Artificial Sequence
  Synthetic
uccugucuuacuuuugggag

SEQ ID NO: 3291 - RNA, 20 nt, Artificial Sequence
  Synthetic
acugucucuuagugguggag

SEQ ID NO: 3292 - RNA, 20 nt, Artificial Sequence
  Synthetic
guauuuggugucuuuuggag

SEQ ID NO: 3293 - RNA, 20 nt, Artificial Sequence
  Synthetic
guuuuguacagcaacaugag

SEQ ID NO: 3294 - RNA, 20 nt, Artificial Sequence
  Synthetic
aggacuguguuuuugcugag

SEQ ID NO: 3295 - RNA, 20 nt, Artificial Sequence
  Synthetic
gaggacaggagauuggugag

SEQ ID NO: 3296 - RNA, 20 nt, Artificial Sequence
  Synthetic
cguuucucauuuacugugag

SEQ ID NO: 3297 - RNA, 20 nt, Artificial Sequence
  Synthetic
acucccccuagaaaauugag

SEQ ID NO: 3298 - RNA, 20 nt, Artificial Sequence
  Synthetic
uggcuccaguucagggauag

SEQ ID NO: 3299 - RNA, 20 nt, Artificial Sequence
  Synthetic
gacuucucucaauuuucuag

SEQ ID NO: 3300 - RNA, 20 nt, Artificial Sequence
  Synthetic
ucugcuggcaaaguuguuag

SEQ ID NO: 3301 - RNA, 20 nt, Artificial Sequence
  Synthetic
gagaagaucacgaacagacg

SEQ ID NO: 3302 - RNA, 20 nt, Artificial Sequence
  Synthetic
cgcuggauucagcgcugacg

SEQ ID NO: 3303 - RNA, 20 nt, Artificial Sequence
  Synthetic
aauccuggagaagauugacg

SEQ ID NO: 3304 - RNA, 20 nt, Artificial Sequence
  Synthetic
ccacaaaaugaagcgcuacg

SEQ ID NO: 3305 - RNA, 20 nt, Artificial Sequence
  Synthetic
gauccucgaccaccaguacg

SEQ ID NO: 3306 - RNA, 20 nt, Artificial Sequence
  Synthetic
ccuucucaucugccggaccg

SEQ ID NO: 3307 - RNA, 20 nt, Artificial Sequence
  Synthetic
accgcuucagcuuuguaccg

SEQ ID NO: 3308 - RNA, 20 nt, Artificial Sequence
  Synthetic
uuuucuagggggagugcccg

SEQ ID NO: 3309 - RNA, 20 nt, Artificial Sequence
  Synthetic
cguaaacaaaggacgucccg

SEQ ID NO: 3310 - RNA, 20 nt, Artificial Sequence
  Synthetic
uccaccccaaaaggccuccg

SEQ ID NO: 3311 - RNA, 20 nt, Artificial Sequence
  Synthetic
ggaaaggauguauauuuccg

SEQ ID NO: 3312 - RNA, 20 nt, Artificial Sequence
  Synthetic
ugccaacuggauccuucgcg

SEQ ID NO: 3313 - RNA, 20 nt, Artificial Sequence
  Synthetic
agaucuucgucugcgaggcg

SEQ ID NO: 3314 - RNA, 20 nt, Artificial Sequence
  Synthetic
aaaggccuuauaaguuggcg

SEQ ID NO: 3315 - RNA, 20 nt, Artificial Sequence
  Synthetic
cuggguccaacuggugaucg

SEQ ID NO: 3316 - RNA, 20 nt, Artificial Sequence
  Synthetic
uucuuggacggucccucucg

SEQ ID NO: 3317 - RNA, 20 nt, Artificial Sequence
  Synthetic
acaaagcugaagcggugucg

SEQ ID NO: 3318 - RNA, 20 nt, Artificial Sequence
  Synthetic
gcugccaacuggauccuucg

SEQ ID NO: 3319 - RNA, 20 nt, Artificial Sequence
  Synthetic
ggcgagggaguucuucuucg

SEQ ID NO: 3320 - RNA, 20 nt, Artificial Sequence
  Synthetic
gacuuuuucccgucuguucg

SEQ ID NO: 3321 - RNA, 20 nt, Artificial Sequence
  Synthetic
uauuccuuggacucacaagg

SEQ ID NO: 3322 - RNA, 20 nt, Artificial Sequence
  Synthetic
uuuacauacccuuuggaagg

SEQ ID NO: 3323 - RNA, 20 nt, Artificial Sequence
  Synthetic
aggacaaguuggaggacagg

SEQ ID NO: 3324 - RNA, 20 nt, Artificial Sequence
  Synthetic
accccugcucguguuacagg

SEQ ID NO: 3325 - RNA, 20 nt, Artificial Sequence
  Synthetic
aagagaugauuaggcagagg

SEQ ID NO: 3326 - RNA, 20 nt, Artificial Sequence
  Synthetic
uuccauguaacgugcagagg

SEQ ID NO: 3327 - RNA, 20 nt, Artificial Sequence
  Synthetic
ggagaccgcguaaagagagg

SEQ ID NO: 3328 - RNA, 20 nt, Artificial Sequence
  Synthetic
gagggaguucuucuucgagg

SEQ ID NO: 3329 - RNA, 20 nt, Artificial Sequence
  Synthetic
gguggucuauaagcaggagg

SEQ ID NO: 3330 - RNA, 20 nt, Artificial Sequence
  Synthetic
aaaaggccuccguguggagg

SEQ ID NO: 3331 - RNA, 20 nt, Artificial Sequence
  Synthetic
cugagugcuguauggugagg

SEQ ID NO: 3332 - RNA, 20 nt, Artificial Sequence
  Synthetic
gccguuccugccgaccacgg

SEQ ID NO: 3333 - RNA, 20 nt, Artificial Sequence
  Synthetic
ucggcaggaacggcagacgg

SEQ ID NO: 3334 - RNA, 20 nt, Artificial Sequence
  Synthetic
uauccuaucaacacuuccgg

SEQ ID NO: 3335 - RNA, 20 nt, Artificial Sequence
  Synthetic
gcagaucuucugcgacgcgg

SEQ ID NO: 3336 - RNA, 20 nt, Artificial Sequence
  Synthetic
gaacggcagacggagaaggg

SEQ ID NO: 3337 - RNA, 20 nt, Artificial Sequence
  Synthetic
gagccccaaacggccccggg

SEQ ID NO: 3338 - RNA, 20 nt, Artificial Sequence
  Synthetic
aaggccuccguguggagggg

SEQ ID NO: 3339 - RNA, 20 nt, Artificial Sequence
  Synthetic
augagaaggaacagacgggg

SEQ ID NO: 3340 - RNA, 20 nt, Artificial Sequence
  Synthetic
acggcagacggagaaggggg

SEQ ID NO: 3341 - RNA, 20 nt, Artificial Sequence
  Synthetic
ucucucaauuuucuaggggg

SEQ ID NO: 3342 - RNA, 20 nt, Artificial Sequence
  Synthetic
uuucgcaaaauaccuauggg

SEQ ID NO: 3343 - RNA, 20 nt, Artificial Sequence
  Synthetic
  misc_feature (13)..(13): n is a, c, g, or u
gaugacucuagcnaccuggg

SEQ ID NO: 3344 - RNA, 20 nt, Artificial Sequence
  Synthetic
gcugaaagccagacaguggg

SEQ ID NO: 3345 - RNA, 20 nt, Artificial Sequence
  Synthetic
ggacccugcaccgaacaugg

SEQ ID NO: 3346 - RNA, 20 nt, Artificial Sequence
  Synthetic
ucuuguucccaaguauaugg

SEQ ID NO: 3347 - RNA, 20 nt, Artificial Sequence
  Synthetic
ugaaugcuggguccaacugg

SEQ ID NO: 3348 - RNA, 20 nt, Artificial Sequence
  Synthetic
ugcaggguccccaauccugg

SEQ ID NO: 3349 - RNA, 20 nt, Artificial Sequence
  Synthetic
uacuaacauugggaagcugg

SEQ ID NO: 3350 - RNA, 20 nt, Artificial Sequence
  Synthetic
  misc_feature (11)..(11): n is a, c, g, or u
ggcaagcaauncugugcugg

SEQ ID NO: 3351 - RNA, 20 nt, Artificial Sequence
  Synthetic
ggacggucccucucgagugg

SEQ ID NO: 3352 - RNA, 20 nt, Artificial Sequence
  Synthetic
cccaaaaggccuccgugugg

SEQ ID NO: 3353 - RNA, 20 nt, Artificial Sequence
  Synthetic
  misc_feature (17)..(17): n is a, c, g, or u
uaugucaacaaccgggnugg

SEQ ID NO: 3354 - RNA, 20 nt, Artificial Sequence
  Synthetic
ucaaucuucuccaggauugg

SEQ ID NO: 3355 - RNA, 20 nt, Artificial Sequence
  Synthetic
ggugagugauuggagguugg

SEQ ID NO: 3356 - RNA, 20 nt, Artificial Sequence
  Synthetic
uccacacggaggccuuuugg

SEQ ID NO: 3357 - RNA, 20 nt, Artificial Sequence
  Synthetic
gaguauuuggugucuuuugg

SEQ ID NO: 3358 - RNA, 20 nt, Artificial Sequence
  Synthetic
caaaaguaagacaggaaaug

SEQ ID NO: 3359 - RNA, 20 nt, Artificial Sequence
  Synthetic
caagacauuauaacuaaaug

SEQ ID NO: 3360 - RNA, 20 nt, Artificial Sequence
  Synthetic
gggcccucucacaguaaaug

SEQ ID NO: 3361 - RNA, 20 nt, Artificial Sequence
  Synthetic
agguuuuguacagcaacaug

SEQ ID NO: 3362 - RNA, 20 nt, Artificial Sequence
  Synthetic
  misc_feature (8)..(8): n is a, c, g, or u
ccaucggncaucagcgcaug

SEQ ID NO: 3363 - RNA, 20 nt, Artificial Sequence
  Synthetic
ugcacacgguccggcagaug

SEQ ID NO: 3364 - RNA, 20 nt, Artificial Sequence
  Synthetic
aagcccaagaugaugggaug

SEQ ID NO: 3365 - RNA, 20 nt, Artificial Sequence
  Synthetic
ugcgaaagcccaagaugaug

SEQ ID NO: 3366 - RNA, 20 nt, Artificial Sequence
  Synthetic
ggguccuaggaauccugaug

SEQ ID NO: 3367 - RNA, 20 nt, Artificial Sequence
  Synthetic
guuauuccuuaaauuuuaug

SEQ ID NO: 3368 - RNA, 20 nt, Artificial Sequence
  Synthetic
guuagugugcccugagacug

SEQ ID NO: 3369 - RNA, 20 nt, Artificial Sequence
  Synthetic
ugauuggagguuggggacug

SEQ ID NO: 3370 - RNA, 20 nt, Artificial Sequence
  Synthetic
  misc_feature (15)..(15): n is a, c, g, or u
uugaugacucuagcnaccug

SEQ ID NO: 3371 - RNA, 20 nt, Artificial Sequence
  Synthetic
aaaguuguuagugugcccug

SEQ ID NO: 3372 - RNA, 20 nt, Artificial Sequence
  Synthetic
  misc_feature (8)..(8): n is a, c, g, or u
agcacagnauugcuugccug

SEQ ID NO: 3373 - RNA, 20 nt, Artificial Sequence
  Synthetic
caaggacuguguuuuugcug

SEQ ID NO: 3374 - RNA, 20 nt, Artificial Sequence
  Synthetic
cuggagaugcagaucuucug

SEQ ID NO: 3375 - RNA, 20 nt, Artificial Sequence
  Synthetic
uagcugaaagccagacagug

SEQ ID NO: 3376 - RNA, 20 nt, Artificial Sequence
  Synthetic
uggccaagccccaaccagug

SEQ ID NO: 3377 - RNA, 20 nt, Artificial Sequence
  Synthetic
gucuauaagcaggaggagug

SEQ ID NO: 3378 - RNA, 20 nt, Artificial Sequence
  Synthetic
gacuguguuuuugcugagug

SEQ ID NO: 3379 - RNA, 20 nt, Artificial Sequence
  Synthetic
uuccuuggacucacaaggug

SEQ ID NO: 3380 - RNA, 20 nt, Artificial Sequence
  Synthetic
uggaggacaggagauuggug

SEQ ID NO: 3381 - RNA, 20 nt, Artificial Sequence
  Synthetic
  misc_feature (16)..(16): n is a, c, g, or u
acauugcuuaauuuunugug

SEQ ID NO: 3382 - RNA, 20 nt, Artificial Sequence
  Synthetic
  misc_feature (18)..(18): n is a, c, g, or u
aaacauugcuuaauuuunug

SEQ ID NO: 3383 - RNA, 20 nt, Artificial Sequence
  Synthetic
uccaaggaauacuaacauug

SEQ ID NO: 3384 - RNA, 20 nt, Artificial Sequence
  Synthetic
gucuggagcaaaacucauug

SEQ ID NO: 3385 - RNA, 20 nt, Artificial Sequence
  Synthetic
aauaccaacaauccagauug

SEQ ID NO: 3386 - RNA, 20 nt, Artificial Sequence
  Synthetic
cuucugcgacgcggcgauug

SEQ ID NO: 3387 - RNA, 20 nt, Artificial Sequence
  Synthetic
  misc_feature (5)..(5): n is a, c, g, or u
auaungaugaugugguauug

SEQ ID NO: 3388 - RNA, 20 nt, Artificial Sequence
  Synthetic
ugugggucaccauauacuug

SEQ ID NO: 3389 - RNA, 20 nt, Artificial Sequence
  Synthetic
agccuccaagcugugccuug

SEQ ID NO: 3390 - RNA, 20 nt, Artificial Sequence
  Synthetic
aacuaaaugugaacaauuug

SEQ ID NO: 3391 - RNA, 20 nt, Artificial Sequence
  Synthetic
  misc_feature (1)..(1): n is a, c, g, or u
nauacaggccccugacuuug

SEQ ID NO: 3392 - RNA, 20 nt, Artificial Sequence
  Synthetic
uaaauauuuaguagaguuug

SEQ ID NO: 3393 - RNA, 20 nt, Artificial Sequence
  Synthetic
ucccguagcgcuucauuuug

SEQ ID NO: 3394 - RNA, 20 nt, Artificial Sequence
  Synthetic
ccacucccauagguauuuug

SEQ ID NO: 3395 - RNA, 20 nt, Artificial Sequence
  Synthetic
cuggccaaggguccuuuuug

SEQ ID NO: 3396 - RNA, 20 nt, Artificial Sequence
  Synthetic
  misc_feature (20)..(20): n is a, c, g, or u
gcuuggaggcuugaacagun

SEQ ID NO: 3397 - RNA, 20 nt, Artificial Sequence
  Synthetic
  misc_feature (20)..(20): n is a, c, g, or u
gaaaacauugcuuaauuuun

SEQ ID NO: 3398 - RNA, 20 nt, Artificial Sequence
  Synthetic
uauaaugucuugaugcaaau

SEQ ID NO: 3399 - RNA, 20 nt, Artificial Sequence
  Synthetic
cucccuguuaacaggccaau

SEQ ID NO: 3400 - RNA, 20 nt, Artificial Sequence
  Synthetic
cauauuaguauuaacauaau

SEQ ID NO: 3401 - RNA, 20 nt, Artificial Sequence
  Synthetic
aguccaaggaauacuaacau

SEQ ID NO: 3402 - RNA, 20 nt, Artificial Sequence
  Synthetic
uuaaggcaggguaaccacau

SEQ ID NO: 3403 - RNA, 20 nt, Artificial Sequence
  Synthetic
ggccuuuuuggcuuagacau

SEQ ID NO: 3404 - RNA, 20 nt, Artificial Sequence
  Synthetic
uucaccucugcacguuacau

SEQ ID NO: 3405 - RNA, 20 nt, Artificial Sequence
  Synthetic
cagcacagccuagcagccau

SEQ ID NO: 3406 - RNA, 20 nt, Artificial Sequence
  Synthetic
gggaacaagaucuacagcau

SEQ ID NO: 3407 - RNA, 20 nt, Artificial Sequence
  Synthetic
cuuggguggcuuuagggcau

SEQ ID NO: 3408 - RNA, 20 nt, Artificial Sequence
  Synthetic
  misc_feature (17)..(17): n is a, c, g, or u
cagaggugaaaaaguuncau

SEQ ID NO: 3409 - RNA, 20 nt, Artificial Sequence
  Synthetic
cggucuggagcaaaacucau

SEQ ID NO: 3410 - RNA, 20 nt, Artificial Sequence
  Synthetic
agaugaugagagguguucau

SEQ ID NO: 3411 - RNA, 20 nt, Artificial Sequence
  Synthetic
  misc_feature (3)..(3): n is a, c, g, or u
ccnuaacaaaacaaaaagau

SEQ ID NO: 3412 - RNA, 20 nt, Artificial Sequence
  Synthetic
uccccaauccuggagaagau

SEQ ID NO: 3413 - RNA, 20 nt, Artificial Sequence
  Synthetic
caaauaccaacaauccagau

SEQ ID NO: 3414 - RNA, 20 nt, Artificial Sequence
  Synthetic
ucgucaaucuucuccaggau

SEQ ID NO: 3415 - RNA, 20 nt, Artificial Sequence
  Synthetic
uccggaaguguugauaggau

SEQ ID NO: 3416 - RNA, 20 nt, Artificial Sequence
  Synthetic
gguggcuccaguucagggau

SEQ ID NO: 3417 - RNA, 20 nt, Artificial Sequence
  Synthetic
ccaaggguccuuuuugggau

SEQ ID NO: 3418 - RNA, 20 nt, Artificial Sequence
  Synthetic
gguggcuuuagggcauggau

SEQ ID NO: 3419 - RNA, 20 nt, Artificial Sequence
  Synthetic
ugcuggguccaacuggugau

SEQ ID NO: 3420 - RNA, 20 nt, Artificial Sequence
  Synthetic
ugucuggcuuucagcuauau

SEQ ID NO: 3421 - RNA, 20 nt, Artificial Sequence
  Synthetic
gaucuuguucccaaguauau

SEQ ID NO: 3422 - RNA, 20 nt, Artificial Sequence
  Synthetic
gggauguuucucucuuauau

SEQ ID NO: 3423 - RNA, 20 nt, Artificial Sequence
  Synthetic
uuuaaaaaucaggcaacuau

SEQ ID NO: 3424 - RNA, 20 nt, Artificial Sequence
  Synthetic
agguaggaguuggagccuau

SEQ ID NO: 3425 - RNA, 20 nt, Artificial Sequence
  Synthetic
agcuaggaguuccgcaguau

SEQ ID NO: 3426 - RNA, 20 nt, Artificial Sequence
  Synthetic
gagucuagacucugcgguau

SEQ ID NO: 3427 - RNA, 20 nt, Artificial Sequence
  Synthetic
  misc_feature (7)..(7): n is a, c, g, or u
cuauaungaugaugugguau

SEQ ID NO: 3428 - RNA, 20 nt, Artificial Sequence
  Synthetic
ugcuugccugagugcuguau

SEQ ID NO: 3429 - RNA, 20 nt, Artificial Sequence
  Synthetic
uucgcacuccuccugcuuau

SEQ ID NO: 3430 - RNA, 20 nt, Artificial Sequence
  Synthetic
gcuaggcugugcugccaacu

SEQ ID NO: 3431 - RNA, 20 nt, Artificial Sequence
  Synthetic
ucugaaugcuggguccaacu

SEQ ID NO: 3432 - RNA, 20 nt, Artificial Sequence
  Synthetic
aauaccgcagagucuagacu

SEQ ID NO: 3433 - RNA, 20 nt, Artificial Sequence
  Synthetic
uuugugggucaccauauacu

SEQ ID NO: 3434 - RNA, 20 nt, Artificial Sequence
  Synthetic
guuuugcagggucccguacu

SEQ ID NO: 3435 - RNA, 20 nt, Artificial Sequence
  Synthetic
uucucuuggcucaguuuacu

SEQ ID NO: 3436 - RNA, 20 nt, Artificial Sequence
  Synthetic
aauacaaaggucauuaaccu

SEQ ID NO: 3437 - RNA, 20 nt, Artificial Sequence
  Synthetic
ccccguaaaguuucccaccu

SEQ ID NO: 3438 - RNA, 20 nt, Artificial Sequence
  Synthetic
gacaaacgggcaacauaccu

SEQ ID NO: 3439 - RNA, 20 nt, Artificial Sequence
  Synthetic
gacacacgggcacucccccu

SEQ ID NO: 3440 - RNA, 20 nt, Artificial Sequence
  Synthetic
gacgaagaggcagguccccu

SEQ ID NO: 3441 - RNA, 20 nt, Artificial Sequence
  Synthetic
caagccuccaagcugugccu

SEQ ID NO: 3442 - RNA, 20 nt, Artificial Sequence
  Synthetic
uccucugauuccaggauccu

SEQ ID NO: 3443 - RNA, 20 nt, Artificial Sequence
  Synthetic
uacugguggucgaggauccu

SEQ ID NO: 3444 - RNA, 20 nt, Artificial Sequence
  Synthetic
cucagcaaaaacacaguccu

SEQ ID NO: 3445 - RNA, 20 nt, Artificial Sequence
  Synthetic
cccgggaggggucguccgcu

SEQ ID NO: 3446 - RNA, 20 nt, Artificial Sequence
  Synthetic
aacuuguccuggcuaucgcu

SEQ ID NO: 3447 - RNA, 20 nt, Artificial Sequence
  Synthetic
caaggcacagcuuggaggcu

SEQ ID NO: 3448 - RNA, 20 nt, Artificial Sequence
  Synthetic
ccaccaaaucucuggaugcu

SEQ ID NO: 3449 - RNA, 20 nt, Artificial Sequence
  Synthetic
ggauuccuaggaccccugcu

SEQ ID NO: 3450 - RNA, 20 nt, Artificial Sequence
  Synthetic
  misc_feature (12)..(12): n is a, c, g, or u
ggggccuguaunuuccugcu

SEQ ID NO: 3451 - RNA, 20 nt, Artificial Sequence
  Synthetic
  misc_feature (11)..(11): n is a, c, g, or u
ugaaaaaguuncauggugcu

SEQ ID NO: 3452 - RNA, 20 nt, Artificial Sequence
  Synthetic
  misc_feature (13)..(13): n is a, c, g, or u
caggcaagcaauncugugcu

SEQ ID NO: 3453 - RNA, 20 nt, Artificial Sequence
  Synthetic
aggaauccuagaggauugcu

SEQ ID NO: 3454 - RNA, 20 nt, Artificial Sequence
  Synthetic
ugggauugaagucccaaucu

SEQ ID NO: 3455 - RNA, 20 nt, Artificial Sequence
  Synthetic
guauucccaucccaucaucu

SEQ ID NO: 3456 - RNA, 20 nt, Artificial Sequence
  Synthetic
uaauugaccaccaaaucucu

SEQ ID NO: 3457 - RNA, 20 nt, Artificial Sequence
  Synthetic
cucacaauaccgcagagucu

SEQ ID NO: 3458 - RNA, 20 nt, Artificial Sequence
  Synthetic
gagaaguccaccacgagucu

SEQ ID NO: 3459 - RNA, 20 nt, Artificial Sequence
  Synthetic
auguaaauaaugucuggucu

SEQ ID NO: 3460 - RNA, 20 nt, Artificial Sequence
  Synthetic
cacauuuaguuauaaugucu

SEQ ID NO: 3461 - RNA, 20 nt, Artificial Sequence
  Synthetic
ccgucuguucgugaucuucu

SEQ ID NO: 3462 - RNA, 20 nt, Artificial Sequence
  Synthetic
aucuucuuguugguucuucu

SEQ ID NO: 3463 - RNA, 20 nt, Artificial Sequence
  Synthetic
  misc_feature (5)..(5): n is a, c, g, or u
uuuunugugugauguguucu

SEQ ID NO: 3464 - RNA, 20 nt, Artificial Sequence
  Synthetic
uggacuucucucaauuuucu

SEQ ID NO: 3465 - RNA, 20 nt, Artificial Sequence
  Synthetic
aaugauuaacuacauuuucu

SEQ ID NO: 3466 - RNA, 20 nt, Artificial Sequence
  Synthetic
ugggauauguaauuggaagu

SEQ ID NO: 3467 - RNA, 20 nt, Artificial Sequence
  Synthetic
auagcugaaagccagacagu

SEQ ID NO: 3468 - RNA, 20 nt, Artificial Sequence
  Synthetic
auggccaagccccaaccagu

SEQ ID NO: 3469 - RNA, 20 nt, Artificial Sequence
  Synthetic
ucauccucaggccaugcagu

SEQ ID NO: 3470 - RNA, 20 nt, Artificial Sequence
  Synthetic
uuggacggucccucucgagu

SEQ ID NO: 3471 - RNA, 20 nt, Artificial Sequence
  Synthetic
gaguugccuugagcaggagu

SEQ ID NO: 3472 - RNA, 20 nt, Artificial Sequence
  Synthetic
  misc_feature (4)..(4): n is a, c, g, or u
aauncugugcuggggugagu

SEQ ID NO: 3473 - RNA, 20 nt, Artificial Sequence
  Synthetic
ggauuaaagacagguauagu

SEQ ID NO: 3474 - RNA, 20 nt, Artificial Sequence
  Synthetic
gaggaugacugucucuuagu

SEQ ID NO: 3475 - RNA, 20 nt, Artificial Sequence
  Synthetic
auaagagagaaacaucccgu

SEQ ID NO: 3476 - RNA, 20 nt, Artificial Sequence
  Synthetic
  misc_feature (5)..(5): n is a, c, g, or u
ucggncaucagcgcaugcgu

SEQ ID NO: 3477 - RNA, 20 nt, Artificial Sequence
  Synthetic
accgcagagucuagacucgu

SEQ ID NO: 3478 - RNA, 20 nt, Artificial Sequence
  Synthetic
ccaacagaccaguuauucgu

SEQ ID NO: 3479 - RNA, 20 nt, Artificial Sequence
  Synthetic
ccauuuguucagugguucgu

SEQ ID NO: 3480 - RNA, 20 nt, Artificial Sequence
  Synthetic
auuggugagugauuggaggu

SEQ ID NO: 3481 - RNA, 20 nt, Artificial Sequence
  Synthetic
aagccccaaccagugggggu

SEQ ID NO: 3482 - RNA, 20 nt, Artificial Sequence
  Synthetic
cugacgcaacccccacuggu

SEQ ID NO: 3483 - RNA, 20 nt, Artificial Sequence
  Synthetic
aauccuagaggauugcuggu

SEQ ID NO: 3484 - RNA, 20 nt, Artificial Sequence
  Synthetic
gcagagucuagacucguggu

SEQ ID NO: 3485 - RNA, 20 nt, Artificial Sequence
  Synthetic
gggauuuuguagagcuuggu

SEQ ID NO: 3486 - RNA, 20 nt, Artificial Sequence
  Synthetic
ccaagaaagccccaugcugu

SEQ ID NO: 3487 - RNA, 20 nt, Artificial Sequence
  Synthetic
ucaacgaauaacuggucugu

SEQ ID NO: 3488 - RNA, 20 nt, Artificial Sequence
  Synthetic
acaguagucuccggaagugu

SEQ ID NO: 3489 - RNA, 20 nt, Artificial Sequence
  Synthetic
uuuggugucuuuuggagugu

SEQ ID NO: 3490 - RNA, 20 nt, Artificial Sequence
  Synthetic
acaggcgggguuuuucuugu

SEQ ID NO: 3491 - RNA, 20 nt, Artificial Sequence
  Synthetic
  misc_feature (11)..(11): n is a, c, g, or u
uauuucuccancccgguugu

SEQ ID NO: 3492 - RNA, 20 nt, Artificial Sequence
  Synthetic
auaacuaaaugugaacaauu

SEQ ID NO: 3493 - RNA, 20 nt, Artificial Sequence
  Synthetic
auuuuaugggauauguaauu

SEQ ID NO: 3494 - RNA, 20 nt, Artificial Sequence
  Synthetic
ucuacuaaauauuuaccauu

SEQ ID NO: 3495 - RNA, 20 nt, Artificial Sequence
  Synthetic
aaguuggaggacaggagauu

SEQ ID NO: 3496 - RNA, 20 nt, Artificial Sequence
  Synthetic
ugccucccugacugacgauu

SEQ ID NO: 3497 - RNA, 20 nt, Artificial Sequence
  Synthetic
cgucaaucuucuccaggauu

SEQ ID NO: 3498 - RNA, 20 nt, Artificial Sequence
  Synthetic
uguuaacaggccaauugauu

SEQ ID NO: 3499 - RNA, 20 nt, Artificial Sequence
  Synthetic
  misc_feature (6)..(6): n is a, c, g, or u
uauaungaugaugugguauu

SEQ ID NO: 3500 - RNA, 20 nt, Artificial Sequence
  Synthetic
  misc_feature (3)..(3): n is a, c, g, or u
aanauacaggccccugacuu

SEQ ID NO: 3501 - RNA, 20 nt, Artificial Sequence
  Synthetic
cagcgcaugcguggaaccuu

SEQ ID NO: 3502 - RNA, 20 nt, Artificial Sequence
  Synthetic
gugcugccaacuggauccuu

SEQ ID NO: 3503 - RNA, 20 nt, Artificial Sequence
  Synthetic
ucccaauguuaguauuccuu

SEQ ID NO: 3504 - RNA, 20 nt, Artificial Sequence
  Synthetic
uuugggauuuuguagagcuu

SEQ ID NO: 3505 - RNA, 20 nt, Artificial Sequence
  Synthetic
ccauauggccuuuuuggcuu

SEQ ID NO: 3506 - RNA, 20 nt, Artificial Sequence
  Synthetic
aguuauauaagaggacucuu

SEQ ID NO: 3507 - RNA, 20 nt, Artificial Sequence
  Synthetic
ccugaggaugacugucucuu

SEQ ID NO: 3508 - RNA, 20 nt, Artificial Sequence
  Synthetic
uaccaauuuucuuuugucuu

SEQ ID NO: 3509 - RNA, 20 nt, Artificial Sequence
  Synthetic
cuacagcauggggcuuucuu

SEQ ID NO: 3510 - RNA, 20 nt, Artificial Sequence
  Synthetic
gggauauguaauuggaaguu

SEQ ID NO: 3511 - RNA, 20 nt, Artificial Sequence
  Synthetic
agagaaaggccuuauaaguu

SEQ ID NO: 3512 - RNA, 20 nt, Artificial Sequence
  Synthetic
uuccuucccgaucaccaguu

SEQ ID NO: 3513 - RNA, 20 nt, Artificial Sequence
  Synthetic
gguaaauauuuaguagaguu

SEQ ID NO: 3514 - RNA, 20 nt, Artificial Sequence
  Synthetic
cgaccccucccggggccguu

SEQ ID NO: 3515 - RNA, 20 nt, Artificial Sequence
  Synthetic
uuggugagugauuggagguu

SEQ ID NO: 3516 - RNA, 20 nt, Artificial Sequence
  Synthetic
auuuucuggauaauacgguu

SEQ ID NO: 3517 - RNA, 20 nt, Artificial Sequence
  Synthetic
ugacgcaacccccacugguu

SEQ ID NO: 3518 - RNA, 20 nt, Artificial Sequence
  Synthetic
cugacuuuuucccgucuguu

SEQ ID NO: 3519 - RNA, 20 nt, Artificial Sequence
  Synthetic
gaucugcuggcaaaguuguu

SEQ ID NO: 3520 - RNA, 20 nt, Artificial Sequence
  Synthetic
uuccggagacuacuguuguu

SEQ ID NO: 3521 - RNA, 20 nt, Artificial Sequence
  Synthetic
accuggguggguaauaauuu

SEQ ID NO: 3522 - RNA, 20 nt, Artificial Sequence
  Synthetic
uugauaggauaggggcauuu

SEQ ID NO: 3523 - RNA, 20 nt, Artificial Sequence
  Synthetic
caucccguagcgcuucauuu

SEQ ID NO: 3524 - RNA, 20 nt, Artificial Sequence
  Synthetic
gauccagcauccagagauuu

SEQ ID NO: 3525 - RNA, 20 nt, Artificial Sequence
  Synthetic
cuugaugcaaauggauauuu

SEQ ID NO: 3526 - RNA, 20 nt, Artificial Sequence
  Synthetic
gaaaccguucuugaguauuu

SEQ ID NO: 3527 - RNA, 20 nt, Artificial Sequence
  Synthetic
gcccacucccauagguauuu

SEQ ID NO: 3528 - RNA, 20 nt, Artificial Sequence
  Synthetic
cacauuuccugucuuacuuu

SEQ ID NO: 3529 - RNA, 20 nt, Artificial Sequence
  Synthetic
acauuauuuacauacccuuu

SEQ ID NO: 3530 - RNA, 20 nt, Artificial Sequence
  Synthetic
cccuccacacggaggccuuu

SEQ ID NO: 3531 - RNA, 20 nt, Artificial Sequence
  Synthetic
gcugugccuuggguggcuuu

SEQ ID NO: 3532 - RNA, 20 nt, Artificial Sequence
  Synthetic
gaccccucccggggccguuu

SEQ ID NO: 3533 - RNA, 20 nt, Artificial Sequence
  Synthetic
  misc_feature (15)..(15): n is a, c, g, or u
uuuuuguuuuguuangguuu

SEQ ID NO: 3534 - RNA, 20 nt, Artificial Sequence
  Synthetic
ccuccacacggaggccuuuu

SEQ ID NO: 3535 - RNA, 20 nt, Artificial Sequence
  Synthetic
cucuggccaaggguccuuuu

SEQ ID NO: 3536 - RNA, 17 nt, Artificial Sequence
  Synthetic
gagaucuucgucugcga

SEQ ID NO: 3537 - RNA, 17 nt, Artificial Sequence
  Synthetic
guaacgugcagagguga

SEQ ID NO: 3538 - RNA, 17 nt, Artificial Sequence
  Synthetic
gggcgcaccucucuuua

SEQ ID NO: 3539 - RNA, 17 nt, Artificial Sequence
  Synthetic
gauuggagguuggggac

SEQ ID NO: 3540 - RNA, 17 nt, Artificial Sequence
  Synthetic
guaaacaaaggacgucc

SEQ ID NO: 3541 - RNA, 17 nt, Artificial Sequence
  Synthetic
ggucguccgcuggauuc

SEQ ID NO: 3542 - RNA, 17 nt, Artificial Sequence
  Synthetic
gaccgcguaaagagagg

SEQ ID NO: 3543 - RNA, 17 nt, Artificial Sequence
  Synthetic
guuccugccgaccacgg

SEQ ID NO: 3544 - RNA, 20 nt, Artificial Sequence
  Synthetic
ggaccccugcucguguuaca

SEQ ID NO: 3545 - RNA, 20 nt, Artificial Sequence
  Synthetic
  misc_feature (10)..(10): n is a, c, g, or u
ggccaucggncaucagcgca

SEQ ID NO: 3546 - RNA, 20 nt, Artificial Sequence
  Synthetic
gagaugcagaucuucugcga

SEQ ID NO: 3547 - RNA, 20 nt, Artificial Sequence
  Synthetic
gauucccgguacaaagcuga

SEQ ID NO: 3548 - RNA, 20 nt, Artificial Sequence
  Synthetic
gccugagugcuguaugguga

SEQ ID NO: 3549 - RNA, 20 nt, Artificial Sequence
  Synthetic
gaaggaacagacggggagac

SEQ ID NO: 3550 - RNA, 20 nt, Artificial Sequence
  Synthetic
gcuccucugccgauccauac

SEQ ID NO: 3551 - RNA, 20 nt, Artificial Sequence
  Synthetic
gucccgucagcgcugaaucc

SEQ ID NO: 3552 - RNA, 20 nt, Artificial Sequence
  Synthetic
gacguaaacaaaggacgucc

SEQ ID NO: 3553 - RNA, 20 nt, Artificial Sequence
  Synthetic
gaguuuugcuccagaccggc

SEQ ID NO: 3554 - RNA, 20 nt, Artificial Sequence
  Synthetic
  misc_feature (16)..(16): n is a, c, g, or u
gggcuuggccaucggncauc

SEQ ID NO: 3555 - RNA, 20 nt, Artificial Sequence
  Synthetic
ggagaccgcguaaagagagg

SEQ ID NO: 3556 - RNA, 20 nt, Artificial Sequence
  Synthetic
gugcugccaacuggauccuu

SEQ ID NO: 3557 - RNA, 17 nt, Artificial Sequence
  Synthetic
ccccugcucguguuaca

SEQ ID NO: 3558 - RNA, 17 nt, Artificial Sequence
  Synthetic
cacaaagguuccacgca

SEQ ID NO: 3559 - RNA, 17 nt, Artificial Sequence
  Synthetic
  misc_feature (7)..(7): n is a, c, g, or u
caucggncaucagcgca

SEQ ID NO: 3560 - RNA, 17 nt, Artificial Sequence
  Synthetic
augcagaucuucugcga

SEQ ID NO: 3561 - RNA, 17 nt, Artificial Sequence
  Synthetic
ucccgguacaaagcuga

SEQ ID NO: 3562 - RNA, 17 nt, Artificial Sequence
  Synthetic
ugagugcuguaugguga

SEQ ID NO: 3563 - RNA, 17 nt, Artificial Sequence
  Synthetic
ccucugccgauccauac

SEQ ID NO: 3564 - RNA, 17 nt, Artificial Sequence
  Synthetic
ccgucagcgcugaaucc

SEQ ID NO: 3565 - RNA, 17 nt, Artificial Sequence
  Synthetic
cagaucuucugcgacgc

SEQ ID NO: 3566 - RNA, 17 nt, Artificial Sequence
  Synthetic
acgaagaucucaaucgc

SEQ ID NO: 3567 - RNA, 17 nt, Artificial Sequence
  Synthetic
uuuugcuccagaccggc

SEQ ID NO: 3568 - RNA, 17 nt, Artificial Sequence
  Synthetic
  misc_feature (13)..(13): n is a, c, g, or u
cuuggccaucggncauc

SEQ ID NO: 3569 - RNA, 17 nt, Artificial Sequence
  Synthetic
accacgagucuagacuc

SEQ ID NO: 3570 - RNA, 17 nt, Artificial Sequence
  Synthetic
uuuguuuacgucccguc

SEQ ID NO: 3571 - RNA, 17 nt, Artificial Sequence
  Synthetic
cgauugagaucuucguc

SEQ ID NO: 3572 - RNA, 17 nt, Artificial Sequence
  Synthetic
cuaucgcuggauguguc

SEQ ID NO: 3573 - RNA, 17 nt, Artificial Sequence
  Synthetic
agagagaaacaucccgu

SEQ ID NO: 3574 - RNA, 17 nt, Artificial Sequence
  Synthetic
ccccaaccagugggggu

SEQ ID NO: 3575 - RNA, 17 nt, Artificial Sequence
  Synthetic
cugccaacuggauccuu

SEQ ID NO: 3576 - RNA, 20 nt, Artificial Sequence
  Synthetic
uauuuacauacccuuuggaa

SEQ ID NO: 3577 - RNA, 20 nt, Artificial Sequence
  Synthetic
agccacaaagguuccacgca

SEQ ID NO: 3578 - RNA, 20 nt, Artificial Sequence
  Synthetic
auugagaucuucgucugcga

SEQ ID NO: 3579 - RNA, 20 nt, Artificial Sequence
  Synthetic
cauguaacgugcagagguga

SEQ ID NO: 3580 - RNA, 20 nt, Artificial Sequence
  Synthetic
acggggcgcaccucucuuua

SEQ ID NO: 3581 - RNA, 20 nt, Artificial Sequence
  Synthetic
aaaacgccgcagacacaucc

SEQ ID NO: 3582 - RNA, 20 nt, Artificial Sequence
  Synthetic
ccacauuggguaaaaggagc

SEQ ID NO: 3583 - RNA, 20 nt, Artificial Sequence
  Synthetic
augcagaucuucugcgacgc

SEQ ID NO: 3584 - RNA, 20 nt, Artificial Sequence
  Synthetic
cagacgaagaucucaaucgc

SEQ ID NO: 3585 - RNA, 20 nt, Artificial Sequence
  Synthetic
cuaucgcuggaugugucugc

SEQ ID NO: 3586 - RNA, 20 nt, Artificial Sequence
  Synthetic
uccaccacgagucuagacuc

SEQ ID NO: 3587 - RNA, 20 nt, Artificial Sequence
  Synthetic
uccuuuguuuacgucccguc

SEQ ID NO: 3588 - RNA, 20 nt, Artificial Sequence
  Synthetic
cggcgauugagaucuucguc

SEQ ID NO: 3589 - RNA, 20 nt, Artificial Sequence
  Synthetic
uggcuaucgcuggauguguc

SEQ ID NO: 3590 - RNA, 20 nt, Artificial Sequence
  Synthetic
aggggucguccgcuggauuc

SEQ ID NO: 3591 - RNA, 20 nt, Artificial Sequence
  Synthetic
agcuggagaugcagaucuuc

SEQ ID NO: 3592 - RNA, 20 nt, Artificial Sequence
  Synthetic
uggucuauaagcaggaggag

SEQ ID NO: 3593 - RNA, 20 nt, Artificial Sequence
  Synthetic
auaagagagaaacaucccgu

SEQ ID NO: 3594 - RNA, 20 nt, Artificial Sequence
  Synthetic
aagccccaaccagugggggu

SEQ ID NO: 3595 - RNA, 17 nt, Artificial Sequence
  Synthetic
gauugguggaggcagga

SEQ ID NO: 3596 - RNA, 17 nt, Artificial Sequence
  Synthetic
ggugacccacaaaauga

SEQ ID NO: 3597 - RNA, 17 nt, Artificial Sequence
  Synthetic
ggaacagacggggagac

SEQ ID NO: 3598 - RNA, 17 nt, Artificial Sequence
  Synthetic
gaaaggccuuauaaguu

SEQ ID NO: 3599 - RNA, 20 nt, Artificial Sequence
  Synthetic
gacgauugguggaggcagga

SEQ ID NO: 3600 - RNA, 20 nt, Artificial Sequence
  Synthetic
gacaaaagaaaauugguaac

SEQ ID NO: 3601 - RNA, 20 nt, Artificial Sequence
  Synthetic
gccguuccugccgaccacgg

SEQ ID NO: 3602 - RNA, 20 nt, Artificial Sequence
  Synthetic
gaacggcagacggagaaggg

SEQ ID NO: 3603 - RNA, 20 nt, Artificial Sequence
  Synthetic
gcccacucccauagguauuu

SEQ ID NO: 3604 - RNA, 17 nt, Artificial Sequence
  Synthetic
uuacauacccuuuggaa

SEQ ID NO: 3605 - RNA, 17 nt, Artificial Sequence
  Synthetic
aaaagaaaauugguaac

SEQ ID NO: 3606 - RNA, 17 nt, Artificial Sequence
  Synthetic
acgccgcagacacaucc

SEQ ID NO: 3607 - RNA, 17 nt, Artificial Sequence
  Synthetic
cauuggguaaaaggagc

SEQ ID NO: 3608 - RNA, 17 nt, Artificial Sequence
  Synthetic
ucgcuggaugugucugc

SEQ ID NO: 3609 - RNA, 17 nt, Artificial Sequence
  Synthetic
uggagaugcagaucuuc

SEQ ID NO: 3610 - RNA, 17 nt, Artificial Sequence
  Synthetic
ucuauaagcaggaggag

SEQ ID NO: 3611 - RNA, 17 nt, Artificial Sequence
  Synthetic
cggcagacggagaaggg

SEQ ID NO: 3612 - RNA, 17 nt, Artificial Sequence
  Synthetic
ugaugagagguguucau

SEQ ID NO: 3613 - RNA, 17 nt, Artificial Sequence
  Synthetic
cacucccauagguauuu

SEQ ID NO: 3614 - RNA, 20 nt, Artificial Sequence
  Synthetic
uauggugacccacaaaauga

SEQ ID NO: 3615 - RNA, 20 nt, Artificial Sequence
  Synthetic
agugauuggagguuggggac

SEQ ID NO: 3616 - RNA, 20 nt, Artificial Sequence
  Synthetic
agaugaugagagguguucau

SEQ ID NO: 3617 - RNA, 20 nt, Artificial Sequence
  Synthetic
agagaaaggccuuauaaguu

SEQ ID NO: 3618 - RNA, 17 nt, Artificial Sequence
  Synthetic
aaugucuaagccaaaaa

SEQ ID NO: 3619 - RNA, 17 nt, Artificial Sequence
  Synthetic
agggcuccaccccaaaa

SEQ ID NO: 3620 - RNA, 17 nt, Artificial Sequence
  Synthetic
agaggaauaugauaaaa

SEQ ID NO: 3621 - RNA, 17 nt, Artificial Sequence
  Synthetic
gcuuauagaccaccaaa

SEQ ID NO: 3622 - RNA, 17 nt, Artificial Sequence
  Synthetic
uauuguuuacagagaaa

SEQ ID NO: 3623 - RNA, 17 nt, Artificial Sequence
  Synthetic
guauacaugcauauaaa

SEQ ID NO: 3624 - RNA, 17 nt, Artificial Sequence
  Synthetic
guuggcgagaaaguaaa

SEQ ID NO: 3625 - RNA, 17 nt, Artificial Sequence
  Synthetic
aaggauucccgguacaa

SEQ ID NO: 3626 - RNA, 17 nt, Artificial Sequence
  Synthetic
gcccuaaagccacccaa

SEQ ID NO: 3627 - RNA, 17 nt, Artificial Sequence
  Synthetic
cucucaucaucugccaa

SEQ ID NO: 3628 - RNA, 17 nt, Artificial Sequence
  Synthetic
gcacgacuccugcucaa

SEQ ID NO: 3629 - RNA, 17 nt, Artificial Sequence
  Synthetic
gagggaccguccaagaa

SEQ ID NO: 3630 - RNA, 17 nt, Artificial Sequence
  Synthetic
acgggaaaaagucagaa

SEQ ID NO: 3631 - RNA, 17 nt, Artificial Sequence
  Synthetic
cauagguauuuugcgaa

SEQ ID NO: 3632 - RNA, 17 nt, Artificial Sequence
  Synthetic
gccagacagugggggaa

SEQ ID NO: 3633 - RNA, 17 nt, Artificial Sequence
  Synthetic
uguagagcuugguggaa

SEQ ID NO: 3634 - RNA, 17 nt, Artificial Sequence
  Synthetic
  misc_feature (6)..(6): n is a, c, g, or u
ucaucnauauagcugaa

SEQ ID NO: 3635 - RNA, 17 nt, Artificial Sequence
  Synthetic
uugguauuugcucugaa

SEQ ID NO: 3636 - RNA, 17 nt, Artificial Sequence
  Synthetic
uucucgccaacuuauaa

SEQ ID NO: 3637 - RNA, 17 nt, Artificial Sequence
  Synthetic
uucuauccaugcccuaa

SEQ ID NO: 3638 - RNA, 17 nt, Artificial Sequence
  Synthetic
gcauauaaaggcauuaa

SEQ ID NO: 3639 - RNA, 17 nt, Artificial Sequence
  Synthetic
ugguuacccugccuuaa

SEQ ID NO: 3640 - RNA, 17 nt, Artificial Sequence
  Synthetic
cggcugcgagcaaaaca

SEQ ID NO: 3641 - RNA, 17 nt, Artificial Sequence
  Synthetic
gaaacucccuguuaaca

SEQ ID NO: 3642 - RNA, 17 nt, Artificial Sequence
  Synthetic
  misc_feature (12)..(12): n is a, c, g, or u
accagcaggaanauaca

SEQ ID NO: 3643 - RNA, 17 nt, Artificial Sequence
  Synthetic
uuauaugcauguauaca

SEQ ID NO: 3644 - RNA, 17 nt, Artificial Sequence
  Synthetic
ugcuuagcuuguauaca

SEQ ID NO: 3645 - RNA, 17 nt, Artificial Sequence
  Synthetic
ucuacagcauuccacca

SEQ ID NO: 3646 - RNA, 17 nt, Artificial Sequence
  Synthetic
cguccaagaaagcccca

SEQ ID NO: 3647 - RNA, 17 nt, Artificial Sequence
  Synthetic
cagucauccucaggcca

SEQ ID NO: 3648 - RNA, 17 nt, Artificial Sequence
  Synthetic
  misc_feature (7)..(7): n is a, c, g, or u
cugaugnccgauggcca

SEQ ID NO: 3649 - RNA, 17 nt, Artificial Sequence
  Synthetic
caaaguuguucuaucca

SEQ ID NO: 3650 - RNA, 17 nt, Artificial Sequence
  Synthetic
  misc_feature (1)..(1): n is a, c, g, or u
nacuguucaagccucca

SEQ ID NO: 3651 - RNA, 17 nt, Artificial Sequence
  Synthetic
gagccacaaagguucca

SEQ ID NO: 3652 - RNA, 17 nt, Artificial Sequence
  Synthetic
uguauacaagcuaagca

SEQ ID NO: 3653 - RNA, 17 nt, Artificial Sequence
  Synthetic
cauacagcacucaggca

SEQ ID NO: 3654 - RNA, 17 nt, Artificial Sequence
  Synthetic
uugggaaaaaucuggca

SEQ ID NO: 3655 - RNA, 17 nt, Artificial Sequence
  Synthetic
uauggguuuaaaaauca

SEQ ID NO: 3656 - RNA, 17 nt, Artificial Sequence
  Synthetic
ucaccauacagcacuca

SEQ ID NO: 3657 - RNA, 17 nt, Artificial Sequence
  Synthetic
agagacagucauccuca

SEQ ID NO: 3658 - RNA, 17 nt, Artificial Sequence
  Synthetic
  misc_feature (9)..(9): n is a, c, g, or u
ucauguccnacuguuca

SEQ ID NO: 3659 - RNA, 17 nt, Artificial Sequence
  Synthetic
cuguuguuagacgaaga

SEQ ID NO: 3660 - RNA, 17 nt, Artificial Sequence
  Synthetic
aaggacccuuggccaga

SEQ ID NO: 3661 - RNA, 17 nt, Artificial Sequence
  Synthetic
cauugggaagcuggaga

SEQ ID NO: 3662 - RNA, 17 nt, Artificial Sequence
  Synthetic
auugacgagaugugaga

SEQ ID NO: 3663 - RNA, 17 nt, Artificial Sequence
  Synthetic
ugaccuuuguauuagga

SEQ ID NO: 3664 - RNA, 17 nt, Artificial Sequence
  Synthetic
ucaccccuccacacgga

SEQ ID NO: 3665 - RNA, 17 nt, Artificial Sequence
  Synthetic
caaucgucagucaggga

SEQ ID NO: 3666 - RNA, 17 nt, Artificial Sequence
  Synthetic
gaauacuaacauuggga

SEQ ID NO: 3667 - RNA, 17 nt, Artificial Sequence
  Synthetic
accaccaaaucucugga

SEQ ID NO: 3668 - RNA, 17 nt, Artificial Sequence
  Synthetic
gacugacgauuggugga

SEQ ID NO: 3669 - RNA, 17 nt, Artificial Sequence
  Synthetic
ccaaggcacagcuugga

SEQ ID NO: 3670 - RNA, 17 nt, Artificial Sequence
  Synthetic
aaccaacaagaagauga

SEQ ID NO: 3671 - RNA, 17 nt, Artificial Sequence
  Synthetic
caagagaaacggacuga

SEQ ID NO: 3672 - RNA, 17 nt, Artificial Sequence
  Synthetic
ugccaaguguuugcuga

SEQ ID NO: 3673 - RNA, 17 nt, Artificial Sequence
  Synthetic
uaguuauaaugucuuga

SEQ ID NO: 3674 - RNA, 17 nt, Artificial Sequence
  Synthetic
gugaacccggguccaua

SEQ ID NO: 3675 - RNA, 17 nt, Artificial Sequence
  Synthetic
gcauuugguggucuaua

SEQ ID NO: 3676 - RNA, 17 nt, Artificial Sequence
  Synthetic
gccuuaaugccuuuaua

SEQ ID NO: 3677 - RNA, 17 nt, Artificial Sequence
  Synthetic
ugcauguauacaagcua

SEQ ID NO: 3678 - RNA, 17 nt, Artificial Sequence
  Synthetic
ccuuuccauggcugcua

SEQ ID NO: 3679 - RNA, 17 nt, Artificial Sequence
  Synthetic
ucuucauccugcugcua

SEQ ID NO: 3680 - RNA, 17 nt, Artificial Sequence
  Synthetic
  misc_feature (10)..(10): n is a, c, g, or u
ccuuuacccnguugcua

SEQ ID NO: 3681 - RNA, 17 nt, Artificial Sequence
  Synthetic
auaagggucaaugucua

SEQ ID NO: 3682 - RNA, 17 nt, Artificial Sequence
  Synthetic
guggagagaugggagua

SEQ ID NO: 3683 - RNA, 17 nt, Artificial Sequence
  Synthetic
uguauuaggaggcugua

SEQ ID NO: 3684 - RNA, 17 nt, Artificial Sequence
  Synthetic
  misc_feature (10)..(10): n is a, c, g, or u
caucacacanaaaauua

SEQ ID NO: 3685 - RNA, 17 nt, Artificial Sequence
  Synthetic
cugagugggaagaauua

SEQ ID NO: 3686 - RNA, 17 nt, Artificial Sequence
  Synthetic
ugaacaagagaugauua

SEQ ID NO: 3687 - RNA, 17 nt, Artificial Sequence
  Synthetic
aagauuaaaacuaguua

SEQ ID NO: 3688 - RNA, 17 nt, Artificial Sequence
  Synthetic
  misc_feature (4)..(5): n is a, c, g, or u
gugnncagaccaauuua

SEQ ID NO: 3689 - RNA, 17 nt, Artificial Sequence
  Synthetic
uggggacugcgaauuua

SEQ ID NO: 3690 - RNA, 17 nt, Artificial Sequence
  Synthetic
gcgacagagccccaaac

SEQ ID NO: 3691 - RNA, 17 nt, Artificial Sequence
  Synthetic
gcacguuacauggaaac

SEQ ID NO: 3692 - RNA, 17 nt, Artificial Sequence
  Synthetic
  misc_feature (4)..(4): n is a, c, g, or u
cccnguugcuaggcaac

SEQ ID NO: 3693 - RNA, 17 nt, Artificial Sequence
  Synthetic
ccguggucggcaggaac

SEQ ID NO: 3694 - RNA, 17 nt, Artificial Sequence
  Synthetic
gaguccucuuauauaac

SEQ ID NO: 3695 - RNA, 17 nt, Artificial Sequence
  Synthetic
cgugaucuucucgacac

SEQ ID NO: 3696 - RNA, 17 nt, Artificial Sequence
  Synthetic
gauccaguuggcagcac

SEQ ID NO: 3697 - RNA, 17 nt, Artificial Sequence
  Synthetic
aaagccacccaaggcac

SEQ ID NO: 3698 - RNA, 17 nt, Artificial Sequence
  Synthetic
aagaauccucacaauac

SEQ ID NO: 3699 - RNA, 17 nt, Artificial Sequence
  Synthetic
guauaguagaagaauac

SEQ ID NO: 3700 - RNA, 17 nt, Artificial Sequence
  Synthetic
uguucgccucaccauac

SEQ ID NO: 3701 - RNA, 17 nt, Artificial Sequence
  Synthetic
gaccaauuuaugccuac

SEQ ID NO: 3702 - RNA, 17 nt, Artificial Sequence
  Synthetic
uugggaacaagaucuac

SEQ ID NO: 3703 - RNA, 17 nt, Artificial Sequence
  Synthetic
guccgaagguuuuguac

SEQ ID NO: 3704 - RNA, 17 nt, Artificial Sequence
  Synthetic
  misc_feature (14)..(14): n is a, c, g, or u
cuugagucccuuunuac

SEQ ID NO: 3705 - RNA, 17 nt, Artificial Sequence
  Synthetic
cgggacccugcaaaacc

SEQ ID NO: 3706 - RNA, 17 nt, Artificial Sequence
  Synthetic
ccugaacuggagccacc

SEQ ID NO: 3707 - RNA, 17 nt, Artificial Sequence
  Synthetic
gaaagaaccuuuccacc

SEQ ID NO: 3708 - RNA, 17 nt, Artificial Sequence
  Synthetic
  misc_feature (12)..(13): n is a, c, g, or u
aaauuggucugnncacc

SEQ ID NO: 3709 - RNA, 17 nt, Artificial Sequence
  Synthetic
gaguuuugcuccagacc

SEQ ID NO: 3710 - RNA, 17 nt, Artificial Sequence
  Synthetic
ucuucuucgaggggacc

SEQ ID NO: 3711 - RNA, 17 nt, Artificial Sequence
  Synthetic
cucuuauauagaauacc

SEQ ID NO: 3712 - RNA, 17 nt, Artificial Sequence
  Synthetic
gucaacaagaaaaaccc

SEQ ID NO: 3713 - RNA, 17 nt, Artificial Sequence
  Synthetic
ccaccaguacgggaccc

SEQ ID NO: 3714 - RNA, 17 nt, Artificial Sequence
  Synthetic
uccaggauuggggaccc

SEQ ID NO: 3715 - RNA, 17 nt, Artificial Sequence
  Synthetic
gaucaccaguuggaccc

SEQ ID NO: 3716 - RNA, 17 nt, Artificial Sequence
  Synthetic
acccaaugugguuaccc

SEQ ID NO: 3717 - RNA, 17 nt, Artificial Sequence
  Synthetic
agucaucaacucacccc

SEQ ID NO: 3718 - RNA, 17 nt, Artificial Sequence
  Synthetic
aggauuccuaggacccc

SEQ ID NO: 3719 - RNA, 17 nt, Artificial Sequence
  Synthetic
gcgagaaaguaaaagcc

SEQ ID NO: 3720 - RNA, 17 nt, Artificial Sequence
  Synthetic
uuaaaacuaguuaugcc

SEQ ID NO: 3721 - RNA, 17 nt, Artificial Sequence
  Synthetic
acacuaacaacuuugcc

SEQ ID NO: 3722 - RNA, 17 nt, Artificial Sequence
  Synthetic
cauauuccucuucaucc

SEQ ID NO: 3723 - RNA, 17 nt, Artificial Sequence
  Synthetic
aauaauuuggaagaucc

SEQ ID NO: 3724 - RNA, 17 nt, Artificial Sequence
  Synthetic
aaaaccugcacgacucc

SEQ ID NO: 3725 - RNA, 17 nt, Artificial Sequence
  Synthetic
ccagcagauccgccucc

SEQ ID NO: 3726 - RNA, 17 nt, Artificial Sequence
  Synthetic
uggauucgcacuccucc

SEQ ID NO: 3727 - RNA, 17 nt, Artificial Sequence
  Synthetic
agaagaucugcaucucc

SEQ ID NO: 3728 - RNA, 17 nt, Artificial Sequence
  Synthetic
cgaagugcacacggucc

SEQ ID NO: 3729 - RNA, 17 nt, Artificial Sequence
  Synthetic
ucuccgucugccguucc

SEQ ID NO: 3730 - RNA, 17 nt, Artificial Sequence
  Synthetic
  misc_feature (13)..(13): n is a, c, g, or u
aggggccuguaunuucc

SEQ ID NO: 3731 - RNA, 17 nt, Artificial Sequence
  Synthetic
cugcgagcaaaacaagc

SEQ ID NO: 3732 - RNA, 17 nt, Artificial Sequence
  Synthetic
agaagaugaggcauagc

SEQ ID NO: 3733 - RNA, 17 nt, Artificial Sequence
  Synthetic
uggcagcacagccuagc

SEQ ID NO: 3734 - RNA, 17 nt, Artificial Sequence
  Synthetic
acugcggaacuccuagc

SEQ ID NO: 3735 - RNA, 17 nt, Artificial Sequence
  Synthetic
ggaauaugauaaaacgc

SEQ ID NO: 3736 - RNA, 17 nt, Artificial Sequence
  Synthetic
cugcuuguuuugcucgc

SEQ ID NO: 3737 - RNA, 17 nt, Artificial Sequence
  Synthetic
ggucuguuggguuucgc

SEQ ID NO: 3738 - RNA, 17 nt, Artificial Sequence
  Synthetic
ucgucagucagggaggc

SEQ ID NO: 3739 - RNA, 17 nt, Artificial Sequence
  Synthetic
gagagaugggaguaggc

SEQ ID NO: 3740 - RNA, 17 nt, Artificial Sequence
  Synthetic
uacauccuuuccauggc

SEQ ID NO: 3741 - RNA, 17 nt, Artificial Sequence
  Synthetic
cgaaggauccaguuggc

SEQ ID NO: 3742 - RNA, 17 nt, Artificial Sequence
  Synthetic
auuccucuucauccugc

SEQ ID NO: 3743 - RNA, 17 nt, Artificial Sequence
  Synthetic
uggcugcuaggcugugc

SEQ ID NO: 3744 - RNA, 17 nt, Artificial Sequence
  Synthetic
gaacaccucucaucauc

SEQ ID NO: 3745 - RNA, 17 nt, Artificial Sequence
  Synthetic
gucuguuccuucucauc

SEQ ID NO: 3746 - RNA, 17 nt, Artificial Sequence
  Synthetic
ccgcgucgcagaagauc

SEQ ID NO: 3747 - RNA, 17 nt, Artificial Sequence
  Synthetic
aacuuugccagcagauc

SEQ ID NO: 3748 - RNA, 17 nt, Artificial Sequence
  Synthetic
gaggcaggaggcggauc

SEQ ID NO: 3749 - RNA, 17 nt, Artificial Sequence
  Synthetic
guuccgcaguauggauc

SEQ ID NO: 3750 - RNA, 17 nt, Artificial Sequence
  Synthetic
ccuaauucuucccacuc

SEQ ID NO: 3751 - RNA, 17 nt, Artificial Sequence
  Synthetic
gcacuucgcuucaccuc

SEQ ID NO: 3752 - RNA, 17 nt, Artificial Sequence
  Synthetic
  misc_feature (3)..(3): n is a, c, g, or u
ugnaacuuuuucaccuc

SEQ ID NO: 3753 - RNA, 17 nt, Artificial Sequence
  Synthetic
aaccuuuguggcuccuc

SEQ ID NO: 3754 - RNA, 17 nt, Artificial Sequence
  Synthetic
ucgcccccuucuccguc

SEQ ID NO: 3755 - RNA, 17 nt, Artificial Sequence
  Synthetic
ccaguggggguugcguc

SEQ ID NO: 3756 - RNA, 17 nt, Artificial Sequence
  Synthetic
ccccgggaggggucguc

SEQ ID NO: 3757 - RNA, 17 nt, Artificial Sequence
  Synthetic
aggugcgccccgugguc

SEQ ID NO: 3758 - RNA, 17 nt, Artificial Sequence
  Synthetic
cuucucgacaccgcuuc

SEQ ID NO: 3759 - RNA, 17 nt, Artificial Sequence
  Synthetic
caagcagcuaggaguuc

SEQ ID NO: 3760 - RNA, 17 nt, Artificial Sequence
  Synthetic
cccacugucuggcuuuc

SEQ ID NO: 3761 - RNA, 17 nt, Artificial Sequence
  Synthetic
gcagaggugaagcgaag

SEQ ID NO: 3762 - RNA, 17 nt, Artificial Sequence
  Synthetic
ugacccacaaaaugaag

SEQ ID NO: 3763 - RNA, 17 nt, Artificial Sequence
  Synthetic
ggagaagggggcgacag

SEQ ID NO: 3764 - RNA, 17 nt, Artificial Sequence
  Synthetic
  misc_feature (11)..(11): n is a, c, g, or u
uggccaucggncaucag

SEQ ID NO: 3765 - RNA, 17 nt, Artificial Sequence
  Synthetic
ggagcccucagucucag

SEQ ID NO: 3766 - RNA, 17 nt, Artificial Sequence
  Synthetic
uguuuacgucccgucag

SEQ ID NO: 3767 - RNA, 17 nt, Artificial Sequence
  Synthetic
uuggacccagcauucag

SEQ ID NO: 3768 - RNA, 17 nt, Artificial Sequence
  Synthetic
ucguccgcuggauucag

SEQ ID NO: 3769 - RNA, 17 nt, Artificial Sequence
  Synthetic
cucauuuacugugagag

SEQ ID NO: 3770 - RNA, 17 nt, Artificial Sequence
  Synthetic
cagaaggcaaaaacgag

SEQ ID NO: 3771 - RNA, 17 nt, Artificial Sequence
  Synthetic
caauuuucuagggggag

SEQ ID NO: 3772 - RNA, 17 nt, Artificial Sequence
  Synthetic
ugugcccugagacugag

SEQ ID NO: 3773 - RNA, 17 nt, Artificial Sequence
  Synthetic
  misc_feature (3)..(3): n is a, c, g, or u
agnauugcuugccugag

SEQ ID NO: 3774 - RNA, 17 nt, Artificial Sequence
  Synthetic
uuggcucaguuuacuag

SEQ ID NO: 3775 - RNA, 17 nt, Artificial Sequence
  Synthetic
agagaaacaucccguag

SEQ ID NO: 3776 - RNA, 17 nt, Artificial Sequence
  Synthetic
uguucagugguucguag

SEQ ID NO: 3777 - RNA, 17 nt, Artificial Sequence
  Synthetic
acuuugggauuuuguag

SEQ ID NO: 3778 - RNA, 17 nt, Artificial Sequence
  Synthetic
gccuuggguggcuuuag

SEQ ID NO: 3779 - RNA, 17 nt, Artificial Sequence
  Synthetic
gaaucagaggacaaacg

SEQ ID NO: 3780 - RNA, 17 nt, Artificial Sequence
  Synthetic
gcgguuuccauguaacg

SEQ ID NO: 3781 - RNA, 17 nt, Artificial Sequence
  Synthetic
accccgccuguaacacg

SEQ ID NO: 3782 - RNA, 17 nt, Artificial Sequence
  Synthetic
uuaggccaggacacacg

SEQ ID NO: 3783 - RNA, 17 nt, Artificial Sequence
  Synthetic
acacuuggcacagaccg

SEQ ID NO: 3784 - RNA, 17 nt, Artificial Sequence
  Synthetic
gcuccagaccggcugcg

SEQ ID NO: 3785 - RNA, 17 nt, Artificial Sequence
  Synthetic
gccuugagcaggagucg

SEQ ID NO: 3786 - RNA, 17 nt, Artificial Sequence
  Synthetic
ccacauuggguaaaagg

SEQ ID NO: 3787 - RNA, 17 nt, Artificial Sequence
  Synthetic
ugggaugggaauacagg

SEQ ID NO: 3788 - RNA, 17 nt, Artificial Sequence
  Synthetic
aaaaucccaaagucagg

SEQ ID NO: 3789 - RNA, 17 nt, Artificial Sequence
  Synthetic
guauggaucggcagagg

SEQ ID NO: 3790 - RNA, 17 nt, Artificial Sequence
  Synthetic
aguguugauaggauagg

SEQ ID NO: 3791 - RNA, 17 nt, Artificial Sequence
  Synthetic
ggugggaaacuuuacgg

SEQ ID NO: 3792 - RNA, 17 nt, Artificial Sequence
  Synthetic
cggacgaccccucccgg

SEQ ID NO: 3793 - RNA, 17 nt, Artificial Sequence
  Synthetic
auguucuccauguucgg

SEQ ID NO: 3794 - RNA, 17 nt, Artificial Sequence
  Synthetic
uccugccgaccacgggg

SEQ ID NO: 3795 - RNA, 17 nt, Artificial Sequence
  Synthetic
gaugaugugguauuggg

SEQ ID NO: 3796 - RNA, 17 nt, Artificial Sequence
  Synthetic
caagaucuacagcaugg

SEQ ID NO: 3797 - RNA, 17 nt, Artificial Sequence
  Synthetic
  misc_feature (12)..(12): n is a, c, g, or u
gugaaaaaguuncaugg

SEQ ID NO: 3798 - RNA, 17 nt, Artificial Sequence
  Synthetic
cacuaucccugaacugg

SEQ ID NO: 3799 - RNA, 17 nt, Artificial Sequence
  Synthetic
gcucgcagccggucugg

SEQ ID NO: 3800 - RNA, 17 nt, Artificial Sequence
  Synthetic
gaggccuuuuggggugg

SEQ ID NO: 3801 - RNA, 17 nt, Artificial Sequence
  Synthetic
aacaagguaggaguugg

SEQ ID NO: 3802 - RNA, 17 nt, Artificial Sequence
  Synthetic
caacccccacugguugg

SEQ ID NO: 3803 - RNA, 17 nt, Artificial Sequence
  Synthetic
ccuuauaaagaauuugg

SEQ ID NO: 3804 - RNA, 17 nt, Artificial Sequence
  Synthetic
cucccggggccguuugg

SEQ ID NO: 3805 - RNA, 17 nt, Artificial Sequence
  Synthetic
caaagguuccacgcaug

SEQ ID NO: 3806 - RNA, 17 nt, Artificial Sequence
  Synthetic
auggcacuaguaaacug

SEQ ID NO: 3807 - RNA, 17 nt, Artificial Sequence
  Synthetic
uucaagccuccaagcug

SEQ ID NO: 3808 - RNA, 17 nt, Artificial Sequence
  Synthetic
ccauggcugcuaggcug

SEQ ID NO: 3809 - RNA, 17 nt, Artificial Sequence
  Synthetic
  misc_feature (14)..(14): n is a, c, g, or u
ucaggcaagcaauncug

SEQ ID NO: 3810 - RNA, 17 nt, Artificial Sequence
  Synthetic
ggcaacggcccggucug

SEQ ID NO: 3811 - RNA, 17 nt, Artificial Sequence
  Synthetic
aaauaccuaugggagug

SEQ ID NO: 3812 - RNA, 17 nt, Artificial Sequence
  Synthetic
uggcaaaguuguuagug

SEQ ID NO: 3813 - RNA, 17 nt, Artificial Sequence
  Synthetic
ucaucugccggaccgug

SEQ ID NO: 3814 - RNA, 17 nt, Artificial Sequence
  Synthetic
ccgcguaaagagaggug

SEQ ID NO: 3815 - RNA, 17 nt, Artificial Sequence
  Synthetic
aaugugaacaauuugug

SEQ ID NO: 3816 - RNA, 17 nt, Artificial Sequence
  Synthetic
uacauagaguugccuug

SEQ ID NO: 3817 - RNA, 17 nt, Artificial Sequence
  Synthetic
cccaucccaucaucuug

SEQ ID NO: 3818 - RNA, 17 nt, Artificial Sequence
  Synthetic
cgaaccacugaacaaau

SEQ ID NO: 3819 - RNA, 17 nt, Artificial Sequence
  Synthetic
aaccuucggacggaaau

SEQ ID NO: 3820 - RNA, 17 nt, Artificial Sequence
  Synthetic
cagacgaagaucucaau

SEQ ID NO: 3821 - RNA, 17 nt, Artificial Sequence
  Synthetic
ggaguuuccgaaaacau

SEQ ID NO: 3822 - RNA, 17 nt, Artificial Sequence
  Synthetic
auauacauccuuuccau

SEQ ID NO: 3823 - RNA, 17 nt, Artificial Sequence
  Synthetic
acaagaagaugaggcau

SEQ ID NO: 3824 - RNA, 17 nt, Artificial Sequence
  Synthetic
cauuaaccuggacucau

SEQ ID NO: 3825 - RNA, 17 nt, Artificial Sequence
  Synthetic
  misc_feature (12)..(12): n is a, c, g, or u
augcgcugaugnccgau

SEQ ID NO: 3826 - RNA, 17 nt, Artificial Sequence
  Synthetic
cagacacauccagcgau

SEQ ID NO: 3827 - RNA, 17 nt, Artificial Sequence
  Synthetic
aaggaauccuagaggau

SEQ ID NO: 3828 - RNA, 17 nt, Artificial Sequence
  Synthetic
  misc_feature (15)..(15): n is a, c, g, or u
ucaccccagcacagnau

SEQ ID NO: 3829 - RNA, 17 nt, Artificial Sequence
  Synthetic
agccaaaaaggccauau

SEQ ID NO: 3830 - RNA, 17 nt, Artificial Sequence
  Synthetic
gaacaacuuugccauau

SEQ ID NO: 3831 - RNA, 17 nt, Artificial Sequence
  Synthetic
  misc_feature (13)..(13): n is a, c, g, or u
uaccacaucaucnauau

SEQ ID NO: 3832 - RNA, 17 nt, Artificial Sequence
  Synthetic
aacccuguuccgacuau

SEQ ID NO: 3833 - RNA, 17 nt, Artificial Sequence
  Synthetic
caacuuguccuggcuau

SEQ ID NO: 3834 - RNA, 17 nt, Artificial Sequence
  Synthetic
ucgaagaagaacucccu

SEQ ID NO: 3835 - RNA, 17 nt, Artificial Sequence
  Synthetic
aguuggcagcacagccu

SEQ ID NO: 3836 - RNA, 17 nt, Artificial Sequence
  Synthetic
gaagaacucccucgccu

SEQ ID NO: 3837 - RNA, 17 nt, Artificial Sequence
  Synthetic
agaccgggccguugccu

SEQ ID NO: 3838 - RNA, 17 nt, Artificial Sequence
  Synthetic
cauacugcggaacuccu

SEQ ID NO: 3839 - RNA, 17 nt, Artificial Sequence
  Synthetic
gagugcccguguguccu

SEQ ID NO: 3840 - RNA, 17 nt, Artificial Sequence
  Synthetic
guccuccaacuuguccu

SEQ ID NO: 3841 - RNA, 17 nt, Artificial Sequence
  Synthetic
caggaggcggaucugcu

SEQ ID NO: 3842 - RNA, 17 nt, Artificial Sequence
  Synthetic
  misc_feature (11)..(11): n is a, c, g, or u
cccagcacagnauugcu

SEQ ID NO: 3843 - RNA, 17 nt, Artificial Sequence
  Synthetic
uagcugcuuguuuugcu

SEQ ID NO: 3844 - RNA, 17 nt, Artificial Sequence
  Synthetic
gaguuugggaaaaaucu

SEQ ID NO: 3845 - RNA, 17 nt, Artificial Sequence
  Synthetic
ggugaguugaugacucu

SEQ ID NO: 3846 - RNA, 17 nt, Artificial Sequence
  Synthetic
cuaccuuguuggccucu

SEQ ID NO: 3847 - RNA, 17 nt, Artificial Sequence
  Synthetic
gcuuucccccacugucu

SEQ ID NO: 3848 - RNA, 17 nt, Artificial Sequence
  Synthetic
gcaggcuuuuacuuucu

SEQ ID NO: 3849 - RNA, 17 nt, Artificial Sequence
  Synthetic
gagagcaacuccacagu

SEQ ID NO: 3850 - RNA, 17 nt, Artificial Sequence
  Synthetic
ugagggauacauagagu

SEQ ID NO: 3851 - RNA, 17 nt, Artificial Sequence
  Synthetic
uggagcuacuguggagu

SEQ ID NO: 3852 - RNA, 17 nt, Artificial Sequence
  Synthetic
ugugaaaccacaauagu

SEQ ID NO: 3853 - RNA, 17 nt, Artificial Sequence
  Synthetic
ggcacagaccgggccgu

SEQ ID NO: 3854 - RNA, 17 nt, Artificial Sequence
  Synthetic
gaucucaaucgccgcgu

SEQ ID NO: 3855 - RNA, 17 nt, Artificial Sequence
  Synthetic
uuauuacccacccaggu

SEQ ID NO: 3856 - RNA, 17 nt, Artificial Sequence
  Synthetic
caagcugugccuugggu

SEQ ID NO: 3857 - RNA, 17 nt, Artificial Sequence
  Synthetic
  misc_feature (6)..(6): n is a, c, g, or u
uguaunuuccugcuggu

SEQ ID NO: 3858 - RNA, 17 nt, Artificial Sequence
  Synthetic
  misc_feature (15)..(15): n is a, c, g, or u
augaaccuuuacccngu

SEQ ID NO: 3859 - RNA, 17 nt, Artificial Sequence
  Synthetic
cuauguaucccucaugu

SEQ ID NO: 3860 - RNA, 17 nt, Artificial Sequence
  Synthetic
ggacuaucaagguaugu

SEQ ID NO: 3861 - RNA, 17 nt, Artificial Sequence
  Synthetic
gccguuuggggcucugu

SEQ ID NO: 3862 - RNA, 17 nt, Artificial Sequence
  Synthetic
gugugauguguucuugu

SEQ ID NO: 3863 - RNA, 17 nt, Artificial Sequence
  Synthetic
augcguggaaccuuugu

SEQ ID NO: 3864 - RNA, 17 nt, Artificial Sequence
  Synthetic
guguccuggccuaaauu

SEQ ID NO: 3865 - RNA, 17 nt, Artificial Sequence
  Synthetic
agacuuuccaaucaauu

SEQ ID NO: 3866 - RNA, 17 nt, Artificial Sequence
  Synthetic
uuuuccaaauauccauu

SEQ ID NO: 3867 - RNA, 17 nt, Artificial Sequence
  Synthetic
cuuuuggaguguggauu

SEQ ID NO: 3868 - RNA, 17 nt, Artificial Sequence
  Synthetic
ugucuuuaauccugauu

SEQ ID NO: 3869 - RNA, 17 nt, Artificial Sequence
  Synthetic
ucuggauuguugguauu

SEQ ID NO: 3870 - RNA, 17 nt, Artificial Sequence
  Synthetic
cauggauagaacaacuu

SEQ ID NO: 3871 - RNA, 17 nt, Artificial Sequence
  Synthetic
gggcacacuaacaacuu

SEQ ID NO: 3872 - RNA, 17 nt, Artificial Sequence
  Synthetic
ugcgucagcaaacacuu

SEQ ID NO: 3873 - RNA, 17 nt, Artificial Sequence
  Synthetic
ccggaccgugugcacuu

SEQ ID NO: 3874 - RNA, 17 nt, Artificial Sequence
  Synthetic
uggaaguugggguacuu

SEQ ID NO: 3875 - RNA, 17 nt, Artificial Sequence
  Synthetic
ucccaaaaaggacccuu

SEQ ID NO: 3876 - RNA, 17 nt, Artificial Sequence
  Synthetic
cccacugguuggggcuu

SEQ ID NO: 3877 - RNA, 17 nt, Artificial Sequence
  Synthetic
aaaguaaaagccugcuu

SEQ ID NO: 3878 - RNA, 17 nt, Artificial Sequence
  Synthetic
cucaguccguuucucuu

SEQ ID NO: 3879 - RNA, 17 nt, Artificial Sequence
  Synthetic
ccgcgaaggauccaguu

SEQ ID NO: 3880 - RNA, 17 nt, Artificial Sequence
  Synthetic
uuggaaaagaaggaguu

SEQ ID NO: 3881 - RNA, 17 nt, Artificial Sequence
  Synthetic
ggucugugccaaguguu

SEQ ID NO: 3882 - RNA, 17 nt, Artificial Sequence
  Synthetic
guccucugaucauuguu

SEQ ID NO: 3883 - RNA, 17 nt, Artificial Sequence
  Synthetic
ccaacuccuaccuuguu

SEQ ID NO: 3884 - RNA, 17 nt, Artificial Sequence
  Synthetic
  misc_feature (15)..(15): n is a, c, g, or u
ucuuauauaacugcnuu

SEQ ID NO: 3885 - RNA, 17 nt, Artificial Sequence
  Synthetic
agauguuguacagauuu

SEQ ID NO: 3886 - RNA, 17 nt, Artificial Sequence
  Synthetic
ccaucaucuugggcuuu

SEQ ID NO: 3887 - RNA, 17 nt, Artificial Sequence
  Synthetic
ucagucccaaugaguuu

SEQ ID NO: 3888 - RNA, 17 nt, Artificial Sequence
  Synthetic
aggagucgugcagguuu

SEQ ID NO: 3889 - RNA, 17 nt, Artificial Sequence
  Synthetic
acuggucuguuggguuu

SEQ ID NO: 3890 - RNA, 17 nt, Artificial Sequence
  Synthetic
cuccuagcugcuuguuu

SEQ ID NO: 3891 - RNA, 17 nt, Artificial Sequence
  Synthetic
ggaguugcucucguuuu

SEQ ID NO: 3892 - RNA, 17 nt, Artificial Sequence
  Synthetic
uucaaggacuguguuuu

SEQ ID NO: 3893 - RNA, 17 nt, Artificial Sequence
  Synthetic
ugccauauggccuuuuu

SEQ ID NO: 3894 - RNA, 20 nt, Artificial Sequence
  Synthetic
gucaaugucuaagccaaaaa

SEQ ID NO: 3895 - RNA, 20 nt, Artificial Sequence
  Synthetic
cugagggcuccaccccaaaa

SEQ ID NO: 3896 - RNA, 20 nt, Artificial Sequence
  Synthetic
ugaagaggaauaugauaaaa

SEQ ID NO: 3897 - RNA, 20 nt, Artificial Sequence
  Synthetic
ccugcuuauagaccaccaaa

SEQ ID NO: 3898 - RNA, 20 nt, Artificial Sequence
  Synthetic
auguauuguuuacagagaaa

SEQ ID NO: 3899 - RNA, 20 nt, Artificial Sequence
  Synthetic
cuuguauacaugcauauaaa

SEQ ID NO: 3900 - RNA, 20 nt, Artificial Sequence
  Synthetic
uaaguuggcgagaaaguaaa

SEQ ID NO: 3901 - RNA, 20 nt, Artificial Sequence
  Synthetic
ucuaaggauucccgguacaa

SEQ ID NO: 3902 - RNA, 20 nt, Artificial Sequence
  Synthetic
caugcccuaaagccacccaa

SEQ ID NO: 3903 - RNA, 20 nt, Artificial Sequence
  Synthetic
caccucucaucaucugccaa

SEQ ID NO: 3904 - RNA, 20 nt, Artificial Sequence
  Synthetic
ccugcacgacuccugcucaa

SEQ ID NO: 3905 - RNA, 20 nt, Artificial Sequence
  Synthetic
cgagagggaccguccaagaa

SEQ ID NO: 3906 - RNA, 20 nt, Artificial Sequence
  Synthetic
cagacgggaaaaagucagaa

SEQ ID NO: 3907 - RNA, 20 nt, Artificial Sequence
  Synthetic
ucccauagguauuuugcgaa

SEQ ID NO: 3908 - RNA, 20 nt, Artificial Sequence
  Synthetic
aaagccagacagugggggaa

SEQ ID NO: 3909 - RNA, 20 nt, Artificial Sequence
  Synthetic
uuuuguagagcuugguggaa

SEQ ID NO: 3910 - RNA, 20 nt, Artificial Sequence
  Synthetic
  misc_feature (9)..(9): n is a, c, g, or u
acaucaucnauauagcugaa

SEQ ID NO: 3911 - RNA, 20 nt, Artificial Sequence
  Synthetic
uuguugguauuugcucugaa

SEQ ID NO: 3912 - RNA, 20 nt, Artificial Sequence
  Synthetic
acuuucucgccaacuuauaa

SEQ ID NO: 3913 - RNA, 20 nt, Artificial Sequence
  Synthetic
uuguucuauccaugcccuaa

SEQ ID NO: 3914 - RNA, 20 nt, Artificial Sequence
  Synthetic
caugcauauaaaggcauuaa

SEQ ID NO: 3915 - RNA, 20 nt, Artificial Sequence
  Synthetic
augugguuacccugccuuaa

SEQ ID NO: 3916 - RNA, 20 nt, Artificial Sequence
  Synthetic
gaccggcugcgagcaaaaca

SEQ ID NO: 3917 - RNA, 20 nt, Artificial Sequence
  Synthetic
ucggaaacucccuguuaaca

SEQ ID NO: 3918 - RNA, 20 nt, Artificial Sequence
  Synthetic
  misc_feature (15)..(15): n is a, c, g, or u
gccaccagcaggaanauaca

SEQ ID NO: 3919 - RNA, 20 nt, Artificial Sequence
  Synthetic
ccuuuauaugcauguauaca

SEQ ID NO: 3920 - RNA, 20 nt, Artificial Sequence
  Synthetic
gccugcuuagcuuguauaca

SEQ ID NO: 3921 - RNA, 20 nt, Artificial Sequence
  Synthetic
gaccguccaagaaagcccca

SEQ ID NO: 3922 - RNA, 20 nt, Artificial Sequence
  Synthetic
agacagucauccucaggcca

SEQ ID NO: 3923 - RNA, 20 nt, Artificial Sequence
  Synthetic
  misc_feature (10)..(10): n is a, c, g, or u
gcgcugaugnccgauggcca

SEQ ID NO: 3924 - RNA, 20 nt, Artificial Sequence
  Synthetic
uggcaaaguuguucuaucca

SEQ ID NO: 3925 - RNA, 20 nt, Artificial Sequence
  Synthetic
  misc_feature (4)..(4): n is a, c, g, or u
uccnacuguucaagccucca

SEQ ID NO: 3926 - RNA, 20 nt, Artificial Sequence
  Synthetic
gaggagccacaaagguucca

SEQ ID NO: 3927 - RNA, 20 nt, Artificial Sequence
  Synthetic
gcauguauacaagcuaagca

SEQ ID NO: 3928 - RNA, 20 nt, Artificial Sequence
  Synthetic
caccauacagcacucaggca

SEQ ID NO: 3929 - RNA, 20 nt, Artificial Sequence
  Synthetic
aguuugggaaaaaucuggca

SEQ ID NO: 3930 - RNA, 20 nt, Artificial Sequence
  Synthetic
uaauauggguuuaaaaauca

SEQ ID NO: 3931 - RNA, 20 nt, Artificial Sequence
  Synthetic
gccucaccauacagcacuca

SEQ ID NO: 3932 - RNA, 20 nt, Artificial Sequence
  Synthetic
cuaagagacagucauccuca

SEQ ID NO: 3933 - RNA, 20 nt, Artificial Sequence
  Synthetic
  misc_feature (12)..(12): n is a, c, g, or u
uguucauguccnacuguuca

SEQ ID NO: 3934 - RNA, 20 nt, Artificial Sequence
  Synthetic
cuacuguuguuagacgaaga

SEQ ID NO: 3935 - RNA, 20 nt, Artificial Sequence
  Synthetic
aaaaaggacccuuggccaga

SEQ ID NO: 3936 - RNA, 20 nt, Artificial Sequence
  Synthetic
uaacauugggaagcuggaga

SEQ ID NO: 3937 - RNA, 20 nt, Artificial Sequence
  Synthetic
aagauugacgagaugugaga

SEQ ID NO: 3938 - RNA, 20 nt, Artificial Sequence
  Synthetic
uaaugaccuuuguauuagga

SEQ ID NO: 3939 - RNA, 20 nt, Artificial Sequence
  Synthetic
gguucaccccuccacacgga

SEQ ID NO: 3940 - RNA, 20 nt, Artificial Sequence
  Synthetic
caccaaucgucagucaggga

SEQ ID NO: 3941 - RNA, 20 nt, Artificial Sequence
  Synthetic
aaggaauacuaacauuggga

SEQ ID NO: 3942 - RNA, 20 nt, Artificial Sequence
  Synthetic
uugaccaccaaaucucugga

SEQ ID NO: 3943 - RNA, 20 nt, Artificial Sequence
  Synthetic
ccugacugacgauuggugga

SEQ ID NO: 3944 - RNA, 20 nt, Artificial Sequence
  Synthetic
cacccaaggcacagcuugga

SEQ ID NO: 3945 - RNA, 20 nt, Artificial Sequence
  Synthetic
aagaaccaacaagaagauga

SEQ ID NO: 3946 - RNA, 20 nt, Artificial Sequence
  Synthetic
agccaagagaaacggacuga

SEQ ID NO: 3947 - RNA, 20 nt, Artificial Sequence
  Synthetic
cugugccaaguguuugcuga

SEQ ID NO: 3948 - RNA, 20 nt, Artificial Sequence
  Synthetic
auuuaguuauaaugucuuga

SEQ ID NO: 3949 - RNA, 20 nt, Artificial Sequence
  Synthetic
ggggugaacccggguccaua

SEQ ID NO: 3950 - RNA, 20 nt, Artificial Sequence
  Synthetic
ggggcauuugguggucuaua

SEQ ID NO: 3951 - RNA, 20 nt, Artificial Sequence
  Synthetic
ccugccuuaaugccuuuaua

SEQ ID NO: 3952 - RNA, 20 nt, Artificial Sequence
  Synthetic
auaugcauguauacaagcua

SEQ ID NO: 3953 - RNA, 20 nt, Artificial Sequence
  Synthetic
cauccuuuccauggcugcua

SEQ ID NO: 3954 - RNA, 20 nt, Artificial Sequence
  Synthetic
uccucuucauccugcugcua

SEQ ID NO: 3955 - RNA, 20 nt, Artificial Sequence
  Synthetic
  misc_feature (13)..(13): n is a, c, g, or u
gaaccuuuacccnguugcua

SEQ ID NO: 3956 - RNA, 20 nt, Artificial Sequence
  Synthetic
uuuauaagggucaaugucua

SEQ ID NO: 3957 - RNA, 20 nt, Artificial Sequence
  Synthetic
gugguggagagaugggagua

SEQ ID NO: 3958 - RNA, 20 nt, Artificial Sequence
  Synthetic
cuuuguauuaggaggcugua

SEQ ID NO: 3959 - RNA, 20 nt, Artificial Sequence
  Synthetic
  misc_feature (13)..(13): n is a, c, g, or u
acacaucacacanaaaauua

SEQ ID NO: 3960 - RNA, 20 nt, Artificial Sequence
  Synthetic
uugcugagugggaagaauua

SEQ ID NO: 3961 - RNA, 20 nt, Artificial Sequence
  Synthetic
acaugaacaagagaugauua

SEQ ID NO: 3962 - RNA, 20 nt, Artificial Sequence
  Synthetic
acgaagauuaaaacuaguua

SEQ ID NO: 3963 - RNA, 20 nt, Artificial Sequence
  Synthetic
  misc_feature (7)..(8): n is a, c, g, or u
cuggugnncagaccaauuua

SEQ ID NO: 3964 - RNA, 20 nt, Artificial Sequence
  Synthetic
gguuggggacugcgaauuua

SEQ ID NO: 3965 - RNA, 20 nt, Artificial Sequence
  Synthetic
ggggcgacagagccccaaac

SEQ ID NO: 3966 - RNA, 20 nt, Artificial Sequence
  Synthetic
ucugcacguuacauggaaac

SEQ ID NO: 3967 - RNA, 20 nt, Artificial Sequence
  Synthetic
  misc_feature (7)..(7): n is a, c, g, or u
uuacccnguugcuaggcaac

SEQ ID NO: 3968 - RNA, 20 nt, Artificial Sequence
  Synthetic
gccccguggucggcaggaac

SEQ ID NO: 3969 - RNA, 20 nt, Artificial Sequence
  Synthetic
caagaguccucuuauauaac

SEQ ID NO: 3970 - RNA, 20 nt, Artificial Sequence
  Synthetic
guucgugaucuucucgacac

SEQ ID NO: 3971 - RNA, 20 nt, Artificial Sequence
  Synthetic
aaggauccaguuggcagcac

SEQ ID NO: 3972 - RNA, 20 nt, Artificial Sequence
  Synthetic
ccuaaagccacccaaggcac

SEQ ID NO: 3973 - RNA, 20 nt, Artificial Sequence
  Synthetic
gacaagaauccucacaauac

SEQ ID NO: 3974 - RNA, 20 nt, Artificial Sequence
  Synthetic
cagguauaguagaagaauac

SEQ ID NO: 3975 - RNA, 20 nt, Artificial Sequence
  Synthetic
cauuguucgccucaccauac

SEQ ID NO: 3976 - RNA, 20 nt, Artificial Sequence
  Synthetic
  misc_feature (1)..(1): n is a, c, g, or u
ncagaccaauuuaugccuac

SEQ ID NO: 3977 - RNA, 20 nt, Artificial Sequence
  Synthetic
uacuugggaacaagaucuac

SEQ ID NO: 3978 - RNA, 20 nt, Artificial Sequence
  Synthetic
uccguccgaagguuuuguac

SEQ ID NO: 3979 - RNA, 20 nt, Artificial Sequence
  Synthetic
  misc_feature (17)..(17): n is a, c, g, or u
caucuugagucccuuunuac

SEQ ID NO: 3980 - RNA, 20 nt, Artificial Sequence
  Synthetic
guacgggacccugcaaaacc

SEQ ID NO: 3981 - RNA, 20 nt, Artificial Sequence
  Synthetic
aucccugaacuggagccacc

SEQ ID NO: 3982 - RNA, 20 nt, Artificial Sequence
  Synthetic
ggggaaagaaccuuuccacc

SEQ ID NO: 3983 - RNA, 20 nt, Artificial Sequence
  Synthetic
  misc_feature (15)..(16): n is a, c, g, or u
cauaaauuggucugnncacc

SEQ ID NO: 3984 - RNA, 20 nt, Artificial Sequence
  Synthetic
aaugaguuuugcuccagacc

SEQ ID NO: 3985 - RNA, 20 nt, Artificial Sequence
  Synthetic
aguucuucuucgaggggacc

SEQ ID NO: 3986 - RNA, 20 nt, Artificial Sequence
  Synthetic
ucucucuuauauagaauacc

SEQ ID NO: 3987 - RNA, 20 nt, Artificial Sequence
  Synthetic
cuugucaacaagaaaaaccc

SEQ ID NO: 3988 - RNA, 20 nt, Artificial Sequence
  Synthetic
cgaccaccaguacgggaccc

SEQ ID NO: 3989 - RNA, 20 nt, Artificial Sequence
  Synthetic
uucuccaggauuggggaccc

SEQ ID NO: 3990 - RNA, 20 nt, Artificial Sequence
  Synthetic
cccgaucaccaguuggaccc

SEQ ID NO: 3991 - RNA, 20 nt, Artificial Sequence
  Synthetic
uuuacccaaugugguuaccc

SEQ ID NO: 3992 - RNA, 20 nt, Artificial Sequence
  Synthetic
uagagucaucaacucacccc

SEQ ID NO: 3993 - RNA, 20 nt, Artificial Sequence
  Synthetic
aucaggauuccuaggacccc

SEQ ID NO: 3994 - RNA, 20 nt, Artificial Sequence
  Synthetic
uuggcgagaaaguaaaagcc

SEQ ID NO: 3995 - RNA, 20 nt, Artificial Sequence
  Synthetic
agauuaaaacuaguuaugcc

SEQ ID NO: 3996 - RNA, 20 nt, Artificial Sequence
  Synthetic
ggcacacuaacaacuuugcc

SEQ ID NO: 3997 - RNA, 20 nt, Artificial Sequence
  Synthetic
uaucauauuccucuucaucc

SEQ ID NO: 3998 - RNA, 20 nt, Artificial Sequence
  Synthetic
gguaauaauuuggaagaucc

SEQ ID NO: 3999 - RNA, 20 nt, Artificial Sequence
  Synthetic
ugcaaaaccugcacgacucc

SEQ ID NO: 4000 - RNA, 20 nt, Artificial Sequence
  Synthetic
uugccagcagauccgccucc

SEQ ID NO: 4001 - RNA, 20 nt, Artificial Sequence
  Synthetic
guguggauucgcacuccucc

SEQ ID NO: 4002 - RNA, 20 nt, Artificial Sequence
  Synthetic
cgcagaagaucugcaucucc

SEQ ID NO: 4003 - RNA, 20 nt, Artificial Sequence
  Synthetic
aagcgaagugcacacggucc

SEQ ID NO: 4004 - RNA, 20 nt, Artificial Sequence
  Synthetic
ccuucuccgucugccguucc

SEQ ID NO: 4005 - RNA, 20 nt, Artificial Sequence
  Synthetic
  misc_feature (16)..(16): n is a, c, g, or u
gucaggggccuguaunuucc

SEQ ID NO: 4006 - RNA, 20 nt, Artificial Sequence
  Synthetic
cggcugcgagcaaaacaagc

SEQ ID NO: 4007 - RNA, 20 nt, Artificial Sequence
  Synthetic
acaagaagaugaggcauagc

SEQ ID NO: 4008 - RNA, 20 nt, Artificial Sequence
  Synthetic
aguuggcagcacagccuagc

SEQ ID NO: 4009 - RNA, 20 nt, Artificial Sequence
  Synthetic
cauacugcggaacuccuagc

SEQ ID NO: 4010 - RNA, 20 nt, Artificial Sequence
  Synthetic
agaggaauaugauaaaacgc

SEQ ID NO: 4011 - RNA, 20 nt, Artificial Sequence
  Synthetic
uagcugcuuguuuugcucgc

SEQ ID NO: 4012 - RNA, 20 nt, Artificial Sequence
  Synthetic
acuggucuguuggguuucgc

SEQ ID NO: 4013 - RNA, 20 nt, Artificial Sequence
  Synthetic
caaucgucagucagggaggc

SEQ ID NO: 4014 - RNA, 20 nt, Artificial Sequence
  Synthetic
guggagagaugggaguaggc

SEQ ID NO: 4015 - RNA, 20 nt, Artificial Sequence
  Synthetic
auauacauccuuuccauggc

SEQ ID NO: 4016 - RNA, 20 nt, Artificial Sequence
  Synthetic
ccgcgaaggauccaguuggc

SEQ ID NO: 4017 - RNA, 20 nt, Artificial Sequence
  Synthetic
cauauuccucuucauccugc

SEQ ID NO: 4018 - RNA, 20 nt, Artificial Sequence
  Synthetic
ccauggcugcuaggcugugc

SEQ ID NO: 4019 - RNA, 20 nt, Artificial Sequence
  Synthetic
caugaacaccucucaucauc

SEQ ID NO: 4020 - RNA, 20 nt, Artificial Sequence
  Synthetic
cccgucuguuccuucucauc

SEQ ID NO: 4021 - RNA, 20 nt, Artificial Sequence
  Synthetic
ucgccgcgucgcagaagauc

SEQ ID NO: 4022 - RNA, 20 nt, Artificial Sequence
  Synthetic
aacaacuuugccagcagauc

SEQ ID NO: 4023 - RNA, 20 nt, Artificial Sequence
  Synthetic
guggaggcaggaggcggauc

SEQ ID NO: 4024 - RNA, 20 nt, Artificial Sequence
  Synthetic
ggaguuccgcaguauggauc

SEQ ID NO: 4025 - RNA, 20 nt, Artificial Sequence
  Synthetic
uugccuaauucuucccacuc

SEQ ID NO: 4026 - RNA, 20 nt, Artificial Sequence
  Synthetic
ugugcacuucgcuucaccuc

SEQ ID NO: 4027 - RNA, 20 nt, Artificial Sequence
  Synthetic
  misc_feature (6)..(6): n is a, c, g, or u
ccaugnaacuuuuucaccuc

SEQ ID NO: 4028 - RNA, 20 nt, Artificial Sequence
  Synthetic
uggaaccuuuguggcuccuc

SEQ ID NO: 4029 - RNA, 20 nt, Artificial Sequence
  Synthetic
cugucgcccccuucuccguc

SEQ ID NO: 4030 - RNA, 20 nt, Artificial Sequence
  Synthetic
caaccaguggggguugcguc

SEQ ID NO: 4031 - RNA, 20 nt, Artificial Sequence
  Synthetic
cggccccgggaggggucguc

SEQ ID NO: 4032 - RNA, 20 nt, Artificial Sequence
  Synthetic
gagaggugcgccccgugguc

SEQ ID NO: 4033 - RNA, 20 nt, Artificial Sequence
  Synthetic
gaucuucucgacaccgcuuc

SEQ ID NO: 4034 - RNA, 20 nt, Artificial Sequence
  Synthetic
aaacaagcagcuaggaguuc

SEQ ID NO: 4035 - RNA, 20 nt, Artificial Sequence
  Synthetic
ucccccacugucuggcuuuc

SEQ ID NO: 4036 - RNA, 20 nt, Artificial Sequence
  Synthetic
cgugcagaggugaagcgaag

SEQ ID NO: 4037 - RNA, 20 nt, Artificial Sequence
  Synthetic
uggugacccacaaaaugaag

SEQ ID NO: 4038 - RNA, 20 nt, Artificial Sequence
  Synthetic
gacggagaagggggcgacag

SEQ ID NO: 4039 - RNA, 20 nt, Artificial Sequence
  Synthetic
  misc_feature (14)..(14): n is a, c, g, or u
gcuuggccaucggncaucag

SEQ ID NO: 4040 - RNA, 20 nt, Artificial Sequence
  Synthetic
gguggagcccucagucucag

SEQ ID NO: 4041 - RNA, 20 nt, Artificial Sequence
  Synthetic
cuuuguuuacgucccgucag

SEQ ID NO: 4042 - RNA, 20 nt, Artificial Sequence
  Synthetic
caguuggacccagcauucag

SEQ ID NO: 4043 - RNA, 20 nt, Artificial Sequence
  Synthetic
gggucguccgcuggauucag

SEQ ID NO: 4044 - RNA, 20 nt, Artificial Sequence
  Synthetic
uuucucauuuacugugagag

SEQ ID NO: 4045 - RNA, 20 nt, Artificial Sequence
  Synthetic
agucagaaggcaaaaacgag

SEQ ID NO: 4046 - RNA, 20 nt, Artificial Sequence
  Synthetic
ucucaauuuucuagggggag

SEQ ID NO: 4047 - RNA, 20 nt, Artificial Sequence
  Synthetic
uagugugcccugagacugag

SEQ ID NO: 4048 - RNA, 20 nt, Artificial Sequence
  Synthetic
  misc_feature (6)..(6): n is a, c, g, or u
cacagnauugcuugccugag

SEQ ID NO: 4049 - RNA, 20 nt, Artificial Sequence
  Synthetic
cucuuggcucaguuuacuag

SEQ ID NO: 4050 - RNA, 20 nt, Artificial Sequence
  Synthetic
aagagagaaacaucccguag

SEQ ID NO: 4051 - RNA, 20 nt, Artificial Sequence
  Synthetic
auuuguucagugguucguag

SEQ ID NO: 4052 - RNA, 20 nt, Artificial Sequence
  Synthetic
cugacuuugggauuuuguag

SEQ ID NO: 4053 - RNA, 20 nt, Artificial Sequence
  Synthetic
ugugccuuggguggcuuuag

SEQ ID NO: 4054 - RNA, 20 nt, Artificial Sequence
  Synthetic
cuggaaucagaggacaaacg

SEQ ID NO: 4055 - RNA, 20 nt, Artificial Sequence
  Synthetic
auggcgguuuccauguaacg

SEQ ID NO: 4056 - RNA, 20 nt, Artificial Sequence
  Synthetic
aaaaccccgccuguaacacg

SEQ ID NO: 4057 - RNA, 20 nt, Artificial Sequence
  Synthetic
aauuuaggccaggacacacg

SEQ ID NO: 4058 - RNA, 20 nt, Artificial Sequence
  Synthetic
caaacacuuggcacagaccg

SEQ ID NO: 4059 - RNA, 20 nt, Artificial Sequence
  Synthetic
uuugcuccagaccggcugcg

SEQ ID NO: 4060 - RNA, 20 nt, Artificial Sequence
  Synthetic
guugccuugagcaggagucg

SEQ ID NO: 4061 - RNA, 20 nt, Artificial Sequence
  Synthetic
uaaccacauuggguaaaagg

SEQ ID NO: 4062 - RNA, 20 nt, Artificial Sequence
  Synthetic
ugaugggaugggaauacagg

SEQ ID NO: 4063 - RNA, 20 nt, Artificial Sequence
  Synthetic
uacaaaaucccaaagucagg

SEQ ID NO: 4064 - RNA, 20 nt, Artificial Sequence
  Synthetic
gcaguauggaucggcagagg

SEQ ID NO: 4065 - RNA, 20 nt, Artificial Sequence
  Synthetic
ggaaguguugauaggauagg

SEQ ID NO: 4066 - RNA, 20 nt, Artificial Sequence
  Synthetic
caaggugggaaacuuuacgg

SEQ ID NO: 4067 - RNA, 20 nt, Artificial Sequence
  Synthetic
cagcggacgaccccucccgg

SEQ ID NO: 4068 - RNA, 20 nt, Artificial Sequence
  Synthetic
gugauguucuccauguucgg

SEQ ID NO: 4069 - RNA, 20 nt, Artificial Sequence
  Synthetic
cguuccugccgaccacgggg

SEQ ID NO: 4070 - RNA, 20 nt, Artificial Sequence
  Synthetic
  misc_feature (3)..(3): n is a, c, g, or u
aungaugaugugguauuggg

SEQ ID NO: 4071 - RNA, 20 nt, Artificial Sequence
  Synthetic
gaacaagaucuacagcaugg

SEQ ID NO: 4072 - RNA, 20 nt, Artificial Sequence
  Synthetic
  misc_feature (15)..(15): n is a, c, g, or u
gaggugaaaaaguuncaugg

SEQ ID NO: 4073 - RNA, 20 nt, Artificial Sequence
  Synthetic
guucacuaucccugaacugg

SEQ ID NO: 4074 - RNA, 20 nt, Artificial Sequence
  Synthetic
uuugcucgcagccggucugg

SEQ ID NO: 4075 - RNA, 20 nt, Artificial Sequence
  Synthetic
acggaggccuuuuggggugg

SEQ ID NO: 4076 - RNA, 20 nt, Artificial Sequence
  Synthetic
gccaacaagguaggaguugg

SEQ ID NO: 4077 - RNA, 20 nt, Artificial Sequence
  Synthetic
acgcaacccccacugguugg

SEQ ID NO: 4078 - RNA, 20 nt, Artificial Sequence
  Synthetic
gacccuuauaaagaauuugg

SEQ ID NO: 4079 - RNA, 20 nt, Artificial Sequence
  Synthetic
ccccucccggggccguuugg

SEQ ID NO: 4080 - RNA, 20 nt, Artificial Sequence
  Synthetic
ccacaaagguuccacgcaug

SEQ ID NO: 4081 - RNA, 20 nt, Artificial Sequence
  Synthetic
caaauggcacuaguaaacug

SEQ ID NO: 4082 - RNA, 20 nt, Artificial Sequence
  Synthetic
cuguucaagccuccaagcug

SEQ ID NO: 4083 - RNA, 20 nt, Artificial Sequence
  Synthetic
uuuccauggcugcuaggcug

SEQ ID NO: 4084 - RNA, 20 nt, Artificial Sequence
  Synthetic
  misc_feature (17)..(17): n is a, c, g, or u
cacucaggcaagcaauncug

SEQ ID NO: 4085 - RNA, 20 nt, Artificial Sequence
  Synthetic
cuaggcaacggcccggucug

SEQ ID NO: 4086 - RNA, 20 nt, Artificial Sequence
  Synthetic
gcaaaauaccuaugggagug

SEQ ID NO: 4087 - RNA, 20 nt, Artificial Sequence
  Synthetic
ugcuggcaaaguuguuagug

SEQ ID NO: 4088 - RNA, 20 nt, Artificial Sequence
  Synthetic
uucucaucugccggaccgug

SEQ ID NO: 4089 - RNA, 20 nt, Artificial Sequence
  Synthetic
agaccgcguaaagagaggug

SEQ ID NO: 4090 - RNA, 20 nt, Artificial Sequence
  Synthetic
cuaaaugugaacaauuugug

SEQ ID NO: 4091 - RNA, 20 nt, Artificial Sequence
  Synthetic
ggauacauagaguugccuug

SEQ ID NO: 4092 - RNA, 20 nt, Artificial Sequence
  Synthetic
auucccaucccaucaucuug

SEQ ID NO: 4093 - RNA, 20 nt, Artificial Sequence
  Synthetic
cuacgaaccacugaacaaau

SEQ ID NO: 4094 - RNA, 20 nt, Artificial Sequence
  Synthetic
caaaaccuucggacggaaau

SEQ ID NO: 4095 - RNA, 20 nt, Artificial Sequence
  Synthetic
ucgcagacgaagaucucaau

SEQ ID NO: 4096 - RNA, 20 nt, Artificial Sequence
  Synthetic
cagggaguuuccgaaaacau

SEQ ID NO: 4097 - RNA, 20 nt, Artificial Sequence
  Synthetic
gaaauauacauccuuuccau

SEQ ID NO: 4098 - RNA, 20 nt, Artificial Sequence
  Synthetic
ccaacaagaagaugaggcau

SEQ ID NO: 4099 - RNA, 20 nt, Artificial Sequence
  Synthetic
ggucauuaaccuggacucau

SEQ ID NO: 4100 - RNA, 20 nt, Artificial Sequence
  Synthetic
  misc_feature (15)..(15): n is a, c, g, or u
cgcaugcgcugaugnccgau

SEQ ID NO: 4101 - RNA, 20 nt, Artificial Sequence
  Synthetic
ccgcagacacauccagcgau

SEQ ID NO: 4102 - RNA, 20 nt, Artificial Sequence
  Synthetic
gggaaggaauccuagaggau

SEQ ID NO: 4103 - RNA, 20 nt, Artificial Sequence
  Synthetic
  misc_feature (18)..(18): n is a, c, g, or u
aacucaccccagcacagnau

SEQ ID NO: 4104 - RNA, 20 nt, Artificial Sequence
  Synthetic
cuaagccaaaaaggccauau

SEQ ID NO: 4105 - RNA, 20 nt, Artificial Sequence
  Synthetic
auagaacaacuuugccauau

SEQ ID NO: 4106 - RNA, 20 nt, Artificial Sequence
  Synthetic
  misc_feature (16)..(16): n is a, c, g, or u
caauaccacaucaucnauau

SEQ ID NO: 4107 - RNA, 20 nt, Artificial Sequence
  Synthetic
gugaacccuguuccgacuau

SEQ ID NO: 4108 - RNA, 20 nt, Artificial Sequence
  Synthetic
cuccaacuuguccuggcuau

SEQ ID NO: 4109 - RNA, 20 nt, Artificial Sequence
  Synthetic
cccucgaagaagaacucccu

SEQ ID NO: 4110 - RNA, 20 nt, Artificial Sequence
  Synthetic
uccaguuggcagcacagccu

SEQ ID NO: 4111 - RNA, 20 nt, Artificial Sequence
  Synthetic
gaagaagaacucccucgccu

SEQ ID NO: 4112 - RNA, 20 nt, Artificial Sequence
  Synthetic
cacagaccgggccguugccu

SEQ ID NO: 4113 - RNA, 20 nt, Artificial Sequence
  Synthetic
auccauacugcggaacuccu

SEQ ID NO: 4114 - RNA, 20 nt, Artificial Sequence
  Synthetic
ggggagugcccguguguccu

SEQ ID NO: 4115 - RNA, 20 nt, Artificial Sequence
  Synthetic
ccuguccuccaacuuguccu

SEQ ID NO: 4116 - RNA, 20 nt, Artificial Sequence
  Synthetic
aggcaggaggcggaucugcu

SEQ ID NO: 4117 - RNA, 20 nt, Artificial Sequence
  Synthetic
  misc_feature (14)..(14): n is a, c, g, or u
caccccagcacagnauugcu

SEQ ID NO: 4118 - RNA, 20 nt, Artificial Sequence
  Synthetic
uccuagcugcuuguuuugcu

SEQ ID NO: 4119 - RNA, 20 nt, Artificial Sequence
  Synthetic
guagaguuugggaaaaaucu

SEQ ID NO: 4120 - RNA, 20 nt, Artificial Sequence
  Synthetic
uggggugaguugaugacucu

SEQ ID NO: 4121 - RNA, 20 nt, Artificial Sequence
  Synthetic
cuccuaccuuguuggccucu

SEQ ID NO: 4122 - RNA, 20 nt, Artificial Sequence
  Synthetic
agggcuuucccccacugucu

SEQ ID NO: 4123 - RNA, 20 nt, Artificial Sequence
  Synthetic
uaagcaggcuuuuacuuucu

SEQ ID NO: 4124 - RNA, 20 nt, Artificial Sequence
  Synthetic
aacgagagcaacuccacagu

SEQ ID NO: 4125 - RNA, 20 nt, Artificial Sequence
  Synthetic
acaugagggauacauagagu

SEQ ID NO: 4126 - RNA, 20 nt, Artificial Sequence
  Synthetic
auuuggagcuacuguggagu

SEQ ID NO: 4127 - RNA, 20 nt, Artificial Sequence
  Synthetic
aaaugugaaaccacaauagu

SEQ ID NO: 4128 - RNA, 20 nt, Artificial Sequence
  Synthetic
cuuggcacagaccgggccgu

SEQ ID NO: 4129 - RNA, 20 nt, Artificial Sequence
  Synthetic
gaagaucucaaucgccgcgu

SEQ ID NO: 4130 - RNA, 20 nt, Artificial Sequence
  Synthetic
aaauuauuacccacccaggu

SEQ ID NO: 4131 - RNA, 20 nt, Artificial Sequence
  Synthetic
cuccaagcugugccuugggu

SEQ ID NO: 4132 - RNA, 20 nt, Artificial Sequence
  Synthetic
  misc_feature (9)..(9): n is a, c, g, or u
gccuguaunuuccugcuggu

SEQ ID NO: 4133 - RNA, 20 nt, Artificial Sequence
  Synthetic
  misc_feature (18)..(18): n is a, c, g, or u
uacaugaaccuuuacccngu

SEQ ID NO: 4134 - RNA, 20 nt, Artificial Sequence
  Synthetic
acucuauguaucccucaugu

SEQ ID NO: 4135 - RNA, 20 nt, Artificial Sequence
  Synthetic
ucuggacuaucaagguaugu

SEQ ID NO: 4136 - RNA, 20 nt, Artificial Sequence
  Synthetic
ggggccguuuggggcucugu

SEQ ID NO: 4137 - RNA, 20 nt, Artificial Sequence
  Synthetic
  misc_feature (2)..(2): n is a, c, g, or u
unugugugauguguucuugu

SEQ ID NO: 4138 - RNA, 20 nt, Artificial Sequence
  Synthetic
cgcaugcguggaaccuuugu

SEQ ID NO: 4139 - RNA, 20 nt, Artificial Sequence
  Synthetic
cguguguccuggccuaaauu

SEQ ID NO: 4140 - RNA, 20 nt, Artificial Sequence
  Synthetic
gacagacuuuccaaucaauu

SEQ ID NO: 4141 - RNA, 20 nt, Artificial Sequence
  Synthetic
uucuuuuccaaauauccauu

SEQ ID NO: 4142 - RNA, 20 nt, Artificial Sequence
  Synthetic
ugucuuuuggaguguggauu

SEQ ID NO: 4143 - RNA, 20 nt, Artificial Sequence
  Synthetic
accugucuuuaauccugauu

SEQ ID NO: 4144 - RNA, 20 nt, Artificial Sequence
  Synthetic
caaucuggauuguugguauu

SEQ ID NO: 4145 - RNA, 20 nt, Artificial Sequence
  Synthetic
gggcauggauagaacaacuu

SEQ ID NO: 4146 - RNA, 20 nt, Artificial Sequence
  Synthetic
ucagggcacacuaacaacuu

SEQ ID NO: 4147 - RNA, 20 nt, Artificial Sequence
  Synthetic
gguugcgucagcaaacacuu

SEQ ID NO: 4148 - RNA, 20 nt, Artificial Sequence
  Synthetic
cugccggaccgugugcacuu

SEQ ID NO: 4149 - RNA, 20 nt, Artificial Sequence
  Synthetic
aauuggaaguugggguacuu

SEQ ID NO: 4150 - RNA, 20 nt, Artificial Sequence
  Synthetic
caaucccaaaaaggacccuu

SEQ ID NO: 4151 - RNA, 20 nt, Artificial Sequence
  Synthetic
acccccacugguuggggcuu

SEQ ID NO: 4152 - RNA, 20 nt, Artificial Sequence
  Synthetic
gagaaaguaaaagccugcuu

SEQ ID NO: 4153 - RNA, 20 nt, Artificial Sequence
  Synthetic
ggccucaguccguuucucuu

SEQ ID NO: 4154 - RNA, 20 nt, Artificial Sequence
  Synthetic
gucccgcgaaggauccaguu

SEQ ID NO: 4155 - RNA, 20 nt, Artificial Sequence
  Synthetic
uauuuggaaaagaaggaguu

SEQ ID NO: 4156 - RNA, 20 nt, Artificial Sequence
  Synthetic
cccggucugugccaaguguu

SEQ ID NO: 4157 - RNA, 20 nt, Artificial Sequence
  Synthetic
agaguccucugaucauuguu

SEQ ID NO: 4158 - RNA, 20 nt, Artificial Sequence
  Synthetic
gcuccaacuccuaccuuguu

SEQ ID NO: 4159 - RNA, 20 nt, Artificial Sequence
  Synthetic
  misc_feature (18)..(18): n is a, c, g, or u
uccucuuauauaacugcnuu

SEQ ID NO: 4160 - RNA, 20 nt, Artificial Sequence
  Synthetic
ucaagauguuguacagauuu

SEQ ID NO: 4161 - RNA, 20 nt, Artificial Sequence
  Synthetic
aucccaucaucuugggcuuu

SEQ ID NO: 4162 - RNA, 20 nt, Artificial Sequence
  Synthetic
uugucagucccaaugaguuu

SEQ ID NO: 4163 - RNA, 20 nt, Artificial Sequence
  Synthetic
agcaggagucgugcagguuu

SEQ ID NO: 4164 - RNA, 20 nt, Artificial Sequence
  Synthetic
auaacuggucuguuggguuu

SEQ ID NO: 4165 - RNA, 20 nt, Artificial Sequence
  Synthetic
gaacuccuagcugcuuguuu

SEQ ID NO: 4166 - RNA, 20 nt, Artificial Sequence
  Synthetic
uguggaguugcucucguuuu

SEQ ID NO: 4167 - RNA, 20 nt, Artificial Sequence
  Synthetic
uacuucaaggacuguguuuu

SEQ ID NO: 4168 - RNA, 20 nt, Artificial Sequence
  Synthetic
cuuugccauauggccuuuuu

SEQ ID NO: 4169 - RNA, 17 nt, Artificial Sequence
  Synthetic
gccgauugguggaagca

SEQ ID NO: 4170 - RNA, 17 nt, Artificial Sequence
  Synthetic
gucuccaugcgacgugc

SEQ ID NO: 4171 - RNA, 17 nt, Artificial Sequence
  Synthetic
ggagguguacuuccuag

SEQ ID NO: 4172 - RNA, 17 nt, Artificial Sequence
  Synthetic
gauagccaggacaaguu

SEQ ID NO: 4173 - RNA, 20 nt, Artificial Sequence
  Synthetic
gaauauggugacccacaaaa

SEQ ID NO: 4174 - RNA, 20 nt, Artificial Sequence
  Synthetic
gaaacacaccgccuguaaca

SEQ ID NO: 4175 - RNA, 20 nt, Artificial Sequence
  Synthetic
guuccgcaguauggaucggc

SEQ ID NO: 4176 - RNA, 20 nt, Artificial Sequence
  Synthetic
guggucuccaugcgacgugc

SEQ ID NO: 4177 - RNA, 20 nt, Artificial Sequence
  Synthetic
  misc_feature (19)..(19): n is a, c, g, or u
gauccaguuggcagcacanc

SEQ ID NO: 4178 - RNA, 20 nt, Artificial Sequence
  Synthetic
  misc_feature (10)..(10): n is a, c, g, or u
gacggggagnccgcguaaag

SEQ ID NO: 4179 - RNA, 20 nt, Artificial Sequence
  Synthetic
  misc_feature (11)..(11): n is a, c, g, or u
gcgauugagancuucgucug

SEQ ID NO: 4180 - RNA, 20 nt, Artificial Sequence
  Synthetic
gucuagacucugugguauug

SEQ ID NO: 4181 - RNA, 20 nt, Artificial Sequence
  Synthetic
guuucgcucgcagccggucu

SEQ ID NO: 4182 - RNA, 17 nt, Artificial Sequence
  Synthetic
agcgaaacaagcugcaa

SEQ ID NO: 4183 - RNA, 17 nt, Artificial Sequence
  Synthetic
  misc_feature (9)..(9): n is a, c, g, or u
acggggagnccgcguaa

SEQ ID NO: 4184 - RNA, 17 nt, Artificial Sequence
  Synthetic
acacaccgccuguaaca

SEQ ID NO: 4185 - RNA, 17 nt, Artificial Sequence
  Synthetic
caguauggaucggcaga

SEQ ID NO: 4186 - RNA, 17 nt, Artificial Sequence
  Synthetic
cuacuguuguuagacga

SEQ ID NO: 4187 - RNA, 17 nt, Artificial Sequence
  Synthetic
cacgagcagggguccua

SEQ ID NO: 4188 - RNA, 17 nt, Artificial Sequence
  Synthetic
ccgcaguauggaucggc

SEQ ID NO: 4189 - RNA, 17 nt, Artificial Sequence
  Synthetic
uucgucugcgaggcgag

SEQ ID NO: 4190 - RNA, 17 nt, Artificial Sequence
  Synthetic
accucugcacgucgcau

SEQ ID NO: 4191 - RNA, 17 nt, Artificial Sequence
  Synthetic
uucugcgacgcggcgau

SEQ ID NO: 4192 - RNA, 17 nt, Artificial Sequence
  Synthetic
ucgcucgcagccggucu

SEQ ID NO: 4193 - RNA, 20 nt, Artificial Sequence
  Synthetic
  misc_feature (12)..(12): n is a, c, g, or u
cagacggggagnccgcguaa

SEQ ID NO: 4194 - RNA, 20 nt, Artificial Sequence
  Synthetic
ugcacuaguaaacugagcca

SEQ ID NO: 4195 - RNA, 20 nt, Artificial Sequence
  Synthetic
accgccgauugguggaagca

SEQ ID NO: 4196 - RNA, 20 nt, Artificial Sequence
  Synthetic
  misc_feature (12)..(12): n is a, c, g, or u
agugcacacggnccggcaga

SEQ ID NO: 4197 - RNA, 20 nt, Artificial Sequence
  Synthetic
ccgcaguauggaucggcaga

SEQ ID NO: 4198 - RNA, 20 nt, Artificial Sequence
  Synthetic
aaacuacuguuguuagacga

SEQ ID NO: 4199 - RNA, 20 nt, Artificial Sequence
  Synthetic
uaacacgagcagggguccua

SEQ ID NO: 4200 - RNA, 20 nt, Artificial Sequence
  Synthetic
  misc_feature (6)..(6): n is a, c, g, or u
auacangugcaguuuccguc

SEQ ID NO: 4201 - RNA, 20 nt, Artificial Sequence
  Synthetic
  misc_feature (2)..(2): n is a, c, g, or u
ancuucgucugcgaggcgag

SEQ ID NO: 4202 - RNA, 20 nt, Artificial Sequence
  Synthetic
uuccaccaaucggcgguccg

SEQ ID NO: 4203 - RNA, 20 nt, Artificial Sequence
  Synthetic
uucaccucugcacgucgcau

SEQ ID NO: 4204 - RNA, 20 nt, Artificial Sequence
  Synthetic
aucuucugcgacgcggcgau

SEQ ID NO: 4205 - RNA, 20 nt, Artificial Sequence
  Synthetic
agggaaacauagagguuccu

SEQ ID NO: 4206 - RNA, 20 nt, Artificial Sequence
  Synthetic
aauacuaacauugggaagcu

SEQ ID NO: 4207 - RNA, 17 nt, Artificial Sequence
  Synthetic
  misc_feature (5)..(5): n is a, c, g, or u
gaaunucaggaaaagaa

SEQ ID NO: 4208 - RNA, 17 nt, Artificial Sequence
  Synthetic
ggacaaguuggaggaca

SEQ ID NO: 4209 - RNA, 17 nt, Artificial Sequence
  Synthetic
  misc_feature (15)..(15): n is a, c, g, or u
gguuuggaacagcanca

SEQ ID NO: 4210 - RNA, 17 nt, Artificial Sequence
  Synthetic
  misc_feature (9)..(9): n is a, c, g, or u
gcacacggnccggcaga

SEQ ID NO: 4211 - RNA, 17 nt, Artificial Sequence
  Synthetic
  misc_feature (9)..(9): n is a, c, g, or u
guauuuaangacuggga

SEQ ID NO: 4212 - RNA, 17 nt, Artificial Sequence
  Synthetic
  misc_feature (14)..(14): n is a, c, g, or u
guggucuauaagcngga

SEQ ID NO: 4213 - RNA, 17 nt, Artificial Sequence
  Synthetic
gcauagcagcaggauga

SEQ ID NO: 4214 - RNA, 17 nt, Artificial Sequence
  Synthetic
  misc_feature (7)..(7): n is a, c, g, or u
ggggagnccgcguaaag

SEQ ID NO: 4215 - RNA, 17 nt, Artificial Sequence
  Synthetic
  misc_feature (3)..(3): n is a, c, g, or u
gancuucgucugcgagg

SEQ ID NO: 4216 - RNA, 17 nt, Artificial Sequence
  Synthetic
  misc_feature (13)..(13): n is a, c, g, or u
gacugggaggagnuggg

SEQ ID NO: 4217 - RNA, 17 nt, Artificial Sequence
  Synthetic
gugucucuuagaggugg

SEQ ID NO: 4218 - RNA, 17 nt, Artificial Sequence
  Synthetic
gaaacauagagguuccu

SEQ ID NO: 4219 - RNA, 17 nt, Artificial Sequence
  Synthetic
ggaagagaaacaguucu

SEQ ID NO: 4220 - RNA, 17 nt, Artificial Sequence
  Synthetic
  misc_feature (2)..(2): n is a, c, g, or u
gngugucucuuagaggu

SEQ ID NO: 4221 - RNA, 17 nt, Artificial Sequence
  Synthetic
  misc_feature (15)..(15): n is a, c, g, or u
gccugguggaacugngu

SEQ ID NO: 4222 - RNA, 17 nt, Artificial Sequence
  Synthetic
gagguugguaagugauu

SEQ ID NO: 4223 - RNA, 17 nt, Artificial Sequence
  Synthetic
  misc_feature (8)..(8): n is a, c, g, or u
guggaugngugucucuu

SEQ ID NO: 4224 - RNA, 20 nt, Artificial Sequence
  Synthetic
gcgagcgaaacaagcugcaa

SEQ ID NO: 4225 - RNA, 20 nt, Artificial Sequence
  Synthetic
  misc_feature (18)..(18): n is a, c, g, or u
gaggguuuggaacagcanca

SEQ ID NO: 4226 - RNA, 20 nt, Artificial Sequence
  Synthetic
  misc_feature (13)..(13): n is a, c, g, or u
gacugggaggagnuggggga

SEQ ID NO: 4227 - RNA, 20 nt, Artificial Sequence
  Synthetic
gaggcauagcagcaggauga

SEQ ID NO: 4228 - RNA, 20 nt, Artificial Sequence
  Synthetic
  misc_feature (4)..(4): n is a, c, g, or u
  misc_feature (7)..(7): n is a, c, g, or u
  misc_feature (10)..(10): n is a, c, g, or u
  misc_feature (14)..(14): n is a, c, g, or u
gaangcnggnauunuauaua

SEQ ID NO: 4229 - RNA, 20 nt, Artificial Sequence
  Synthetic
ggccaauggcaaacaaggua

SEQ ID NO: 4230 - RNA, 20 nt, Artificial Sequence
  Synthetic
  misc_feature (7)..(7): n is a, c, g, or u
  misc_feature (9)..(9): n is a, c, g, or u
  misc_feature (18)..(18): n is a, c, g, or u
gguuaangnucuuuguanua

SEQ ID NO: 4231 - RNA, 20 nt, Artificial Sequence
  Synthetic
ggcacaggccuggccguugc

SEQ ID NO: 4232 - RNA, 20 nt, Artificial Sequence
  Synthetic
  misc_feature (4)..(4): n is a, c, g, or u
gaanucagaaggcaaaaaag

SEQ ID NO: 4233 - RNA, 20 nt, Artificial Sequence
  Synthetic
ggaacaagagcuacagcaug

SEQ ID NO: 4234 - RNA, 20 nt, Artificial Sequence
  Synthetic
gcuuuaggaaaauaccuaug

SEQ ID NO: 4235 - RNA, 20 nt, Artificial Sequence
  Synthetic
  misc_feature (15)..(15): n is a, c, g, or u
gacuguguauuuaangacug

SEQ ID NO: 4236 - RNA, 20 nt, Artificial Sequence
  Synthetic
  misc_feature (3)..(4): n is a, c, g, or u
gunnucccccuagaaaauug

SEQ ID NO: 4237 - RNA, 20 nt, Artificial Sequence
  Synthetic
  misc_feature (5)..(6): n is a, c, g, or u
gggunnucccccuagaaaau

SEQ ID NO: 4238 - RNA, 20 nt, Artificial Sequence
  Synthetic
  misc_feature (13)..(13): n is a, c, g, or u
ggguucugugucncugaacu

SEQ ID NO: 4239 - RNA, 20 nt, Artificial Sequence
  Synthetic
  misc_feature (3)..(3): n is a, c, g, or u
ggnaaggagguguacuuccu

SEQ ID NO: 4240 - RNA, 20 nt, Artificial Sequence
  Synthetic
gccaaaucugugcagcaucu

SEQ ID NO: 4241 - RNA, 20 nt, Artificial Sequence
  Synthetic
  misc_feature (5)..(5): n is a, c, g, or u
gaugngugucucuuagaggu

SEQ ID NO: 4242 - RNA, 20 nt, Artificial Sequence
  Synthetic
  misc_feature (4)..(4): n is a, c, g, or u
guanagggcugaagcggugu

SEQ ID NO: 4243 - RNA, 17 nt, Artificial Sequence
  Synthetic
  misc_feature (3)..(3): n is a, c, g, or u
aanucagaaggcaaaaa

SEQ ID NO: 4244 - RNA, 17 nt, Artificial Sequence
  Synthetic
uauggugacccacaaaa

SEQ ID NO: 4245 - RNA, 17 nt, Artificial Sequence
  Synthetic
  misc_feature (15)..(15): n is a, c, g, or u
ccgagcagccauggnaa

SEQ ID NO: 4246 - RNA, 17 nt, Artificial Sequence
  Synthetic
  misc_feature (9)..(9): n is a, c, g, or u
ccauauucnugggaaca

SEQ ID NO: 4247 - RNA, 17 nt, Artificial Sequence
  Synthetic
uugagagaaguccacca

SEQ ID NO: 4248 - RNA, 17 nt, Artificial Sequence
  Synthetic
acuaguaaacugagcca

SEQ ID NO: 4249 - RNA, 17 nt, Artificial Sequence
  Synthetic
uagagguuccuugagca

SEQ ID NO: 4250 - RNA, 17 nt, Artificial Sequence
  Synthetic
  misc_feature (6)..(6): n is a, c, g, or u
acaggnauacagaggca

SEQ ID NO: 4251 - RNA, 17 nt, Artificial Sequence
  Synthetic
aagaaccaacaagaaga

SEQ ID NO: 4252 - RNA, 17 nt, Artificial Sequence
  Synthetic
  misc_feature (10)..(10): n is a, c, g, or u
ugggaggagnuggggga

SEQ ID NO: 4253 - RNA, 17 nt, Artificial Sequence
  Synthetic
ccugccuuacuuuugga

SEQ ID NO: 4254 - RNA, 17 nt, Artificial Sequence
  Synthetic
  misc_feature (1)..(1): n is a, c, g, or u
  misc_feature (4)..(4): n is a, c, g, or u
  misc_feature (7)..(7): n is a, c, g, or u
  misc_feature (11)..(11): n is a, c, g, or u
ngcnggnauunuauaua

SEQ ID NO: 4255 - RNA, 17 nt, Artificial Sequence
  Synthetic
cagucucuccaccucua

SEQ ID NO: 4256 - RNA, 17 nt, Artificial Sequence
  Synthetic
caauggcaaacaaggua

SEQ ID NO: 4257 - RNA, 17 nt, Artificial Sequence
  Synthetic
  misc_feature (4)..(4): n is a, c, g, or u
  misc_feature (6)..(6): n is a, c, g, or u
  misc_feature (15)..(15): n is a, c, g, or u
uaangnucuuuguanua

SEQ ID NO: 4258 - RNA, 17 nt, Artificial Sequence
  Synthetic
  misc_feature (5)..(5): n is a, c, g, or u
uaaanuuucccaccuua

SEQ ID NO: 4259 - RNA, 17 nt, Artificial Sequence
  Synthetic
aaauugcacuaguaaac

SEQ ID NO: 4260 - RNA, 17 nt, Artificial Sequence
  Synthetic
uuccuagagaggacaac

SEQ ID NO: 4261 - RNA, 17 nt, Artificial Sequence
  Synthetic
aauccucacaauaccac

SEQ ID NO: 4262 - RNA, 17 nt, Artificial Sequence
  Synthetic
  misc_feature (6)..(6): n is a, c, g, or u
  misc_feature (15)..(15): n is a, c, g, or u
cccagnggauugggnac

SEQ ID NO: 4263 - RNA, 17 nt, Artificial Sequence
  Synthetic
caccagcaggaaaauac

SEQ ID NO: 4264 - RNA, 17 nt, Artificial Sequence
  Synthetic
  misc_feature (5)..(5): n is a, c, g, or u
  misc_feature (13)..(13): n is a, c, g, or u
cagunauacaggnauac

SEQ ID NO: 4265 - RNA, 17 nt, Artificial Sequence
  Synthetic
  misc_feature (1)..(1): n is a, c, g, or u
  misc_feature (7)..(7): n is a, c, g, or u
ncacaanauagcuugcc

SEQ ID NO: 4266 - RNA, 17 nt, Artificial Sequence
  Synthetic
acaaaagaugauuaggc

SEQ ID NO: 4267 - RNA, 17 nt, Artificial Sequence
  Synthetic
agccaggagaaacgggc

SEQ ID NO: 4268 - RNA, 17 nt, Artificial Sequence
  Synthetic
acaggccuggccguugc

SEQ ID NO: 4269 - RNA, 17 nt, Artificial Sequence
  Synthetic
  misc_feature (16)..(16): n is a, c, g, or u
ccaguuggcagcacanc

SEQ ID NO: 4270 - RNA, 17 nt, Artificial Sequence
  Synthetic
  misc_feature (7)..(7): n is a, c, g, or u
  misc_feature (13)..(13): n is a, c, g, or u
ccaggcncuguungauc

SEQ ID NO: 4271 - RNA, 17 nt, Artificial Sequence
  Synthetic
ugagagaggcaauaguc

SEQ ID NO: 4272 - RNA, 17 nt, Artificial Sequence
  Synthetic
  misc_feature (3)..(3): n is a, c, g, or u
cangugcaguuuccguc

SEQ ID NO: 4273 - RNA, 17 nt, Artificial Sequence
  Synthetic
  misc_feature (1)..(1): n is a, c, g, or u
nucagaaggcaaaaaag

SEQ ID NO: 4274 - RNA, 17 nt, Artificial Sequence
  Synthetic
  misc_feature (2)..(2): n is a, c, g, or u
  misc_feature (5)..(5): n is a, c, g, or u
  misc_feature (9)..(9): n is a, c, g, or u
cnggnauunuauauaag

SEQ ID NO: 4275 - RNA, 17 nt, Artificial Sequence
  Synthetic
  misc_feature (4)..(4): n is a, c, g, or u
  misc_feature (13)..(13): n is a, c, g, or u
cagnggauugggnacag

SEQ ID NO: 4276 - RNA, 17 nt, Artificial Sequence
  Synthetic
aagauugaugaugugag

SEQ ID NO: 4277 - RNA, 17 nt, Artificial Sequence
  Synthetic
  misc_feature (12)..(12): n is a, c, g, or u
agccccaagcgnccccg

SEQ ID NO: 4278 - RNA, 17 nt, Artificial Sequence
  Synthetic
caccaaucggcgguccg

SEQ ID NO: 4279 - RNA, 17 nt, Artificial Sequence
  Synthetic
ugagaaggaacagacgg

SEQ ID NO: 4280 - RNA, 17 nt, Artificial Sequence
  Synthetic
acaagagcuacagcaug

SEQ ID NO: 4281 - RNA, 17 nt, Artificial Sequence
  Synthetic
  misc_feature (4)..(4): n is a, c, g, or u
aggnauacagaggcaug

SEQ ID NO: 4282 - RNA, 17 nt, Artificial Sequence
  Synthetic
  misc_feature (2)..(2): n is a, c, g, or u
cnagaagauugaugaug

SEQ ID NO: 4283 - RNA, 17 nt, Artificial Sequence
  Synthetic
uuaggaaaauaccuaug

SEQ ID NO: 4284 - RNA, 17 nt, Artificial Sequence
  Synthetic
  misc_feature (12)..(12): n is a, c, g, or u
uguguauuuaangacug

SEQ ID NO: 4285 - RNA, 17 nt, Artificial Sequence
  Synthetic
  misc_feature (5)..(5): n is a, c, g, or u
acaanauagcuugccug

SEQ ID NO: 4286 - RNA, 17 nt, Artificial Sequence
  Synthetic
ucgcuccagaccggcug

SEQ ID NO: 4287 - RNA, 17 nt, Artificial Sequence
  Synthetic
  misc_feature (8)..(8): n is a, c, g, or u
auugagancuucgucug

SEQ ID NO: 4288 - RNA, 17 nt, Artificial Sequence
  Synthetic
caaacaagguaggagug

SEQ ID NO: 4289 - RNA, 17 nt, Artificial Sequence
  Synthetic
agaagauugaugaugug

SEQ ID NO: 4290 - RNA, 17 nt, Artificial Sequence
  Synthetic
  misc_feature (1)..(1): n is a, c, g, or u
nucccccuagaaaauug

SEQ ID NO: 4291 - RNA, 17 nt, Artificial Sequence
  Synthetic
uagacucugugguauug

SEQ ID NO: 4292 - RNA, 17 nt, Artificial Sequence
  Synthetic
  misc_feature (7)..(8): n is a, c, g, or u
  misc_feature (17)..(17): n is a, c, g, or u
cccuucnngucguugan

SEQ ID NO: 4293 - RNA, 17 nt, Artificial Sequence
  Synthetic
  misc_feature (17)..(17): n is a, c, g, or u
uugguggucuauaagcn

SEQ ID NO: 4294 - RNA, 17 nt, Artificial Sequence
  Synthetic
  misc_feature (2)..(3): n is a, c, g, or u
unnucccccuagaaaau

SEQ ID NO: 4295 - RNA, 17 nt, Artificial Sequence
  Synthetic
  misc_feature (1)..(1): n is a, c, g, or u
  misc_feature (4)..(4): n is a, c, g, or u
  misc_feature (7)..(7): n is a, c, g, or u
ncunacnaaaaaugaau

SEQ ID NO: 4296 - RNA, 17 nt, Artificial Sequence
  Synthetic
  misc_feature (3)..(3): n is a, c, g, or u
  misc_feature (6)..(6): n is a, c, g, or u
cancangagggaaacau

SEQ ID NO: 4297 - RNA, 17 nt, Artificial Sequence
  Synthetic
auugggaagcuggagau

SEQ ID NO: 4298 - RNA, 17 nt, Artificial Sequence
  Synthetic
  misc_feature (10)..(10): n is a, c, g, or u
uucugugucncugaacu

SEQ ID NO: 4299 - RNA, 17 nt, Artificial Sequence
  Synthetic
aaggagguguacuuccu

SEQ ID NO: 4300 - RNA, 17 nt, Artificial Sequence
  Synthetic
acuaacauugggaagcu

SEQ ID NO: 4301 - RNA, 17 nt, Artificial Sequence
  Synthetic
aaaucugugcagcaucu

SEQ ID NO: 4302 - RNA, 17 nt, Artificial Sequence
  Synthetic
  misc_feature (11)..(11): n is a, c, g, or u
cgguggccugnuggggu

SEQ ID NO: 4303 - RNA, 17 nt, Artificial Sequence
  Synthetic
  misc_feature (1)..(1): n is a, c, g, or u
nagggcugaagcggugu

SEQ ID NO: 4304 - RNA, 17 nt, Artificial Sequence
  Synthetic
  misc_feature (5)..(5): n is a, c, g, or u
  misc_feature (16)..(16): n is a, c, g, or u
ucgungauccuggaanu

SEQ ID NO: 4305 - RNA, 17 nt, Artificial Sequence
  Synthetic
  misc_feature (4)..(4): n is a, c, g, or u
  misc_feature (13)..(13): n is a, c, g, or u
  misc_feature (16)..(16): n is a, c, g, or u
aggnacaguaganganu

SEQ ID NO: 4306 - RNA, 17 nt, Artificial Sequence
  Synthetic
cacccaaggcacagcuu

SEQ ID NO: 4307 - RNA, 17 nt, Artificial Sequence
  Synthetic
acccuuauaaagaauuu

SEQ ID NO: 4308 - RNA, 17 nt, Artificial Sequence
  Synthetic
  misc_feature (14)..(14): n is a, c, g, or u
aguauuuggugucnuuu

SEQ ID NO: 4309 - RNA, 20 nt, Artificial Sequence
  Synthetic
  misc_feature (6)..(6): n is a, c, g, or u
aagaanucagaaggcaaaaa

SEQ ID NO: 4310 - RNA, 20 nt, Artificial Sequence
  Synthetic
  misc_feature (8)..(8): n is a, c, g, or u
aaugaaunucaggaaaagaa

SEQ ID NO: 4311 - RNA, 20 nt, Artificial Sequence
  Synthetic
  misc_feature (3)..(3): n is a, c, g, or u
  misc_feature (18)..(18): n is a, c, g, or u
canccgagcagccauggnaa

SEQ ID NO: 4312 - RNA, 20 nt, Artificial Sequence
  Synthetic
  misc_feature (12)..(12): n is a, c, g, or u
ucaccauauucnugggaaca

SEQ ID NO: 4313 - RNA, 20 nt, Artificial Sequence
  Synthetic
ccaggacaaguuggaggaca

SEQ ID NO: 4314 - RNA, 20 nt, Artificial Sequence
  Synthetic
aaauugagagaaguccacca

SEQ ID NO: 4315 - RNA, 20 nt, Artificial Sequence
  Synthetic
acauagagguuccuugagca

SEQ ID NO: 4316 - RNA, 20 nt, Artificial Sequence
  Synthetic
  misc_feature (1)..(1): n is a, c, g, or u
  misc_feature (9)..(9): n is a, c, g, or u
nauacaggnauacagaggca

SEQ ID NO: 4317 - RNA, 20 nt, Artificial Sequence
  Synthetic
cagaagaaccaacaagaaga

SEQ ID NO: 4318 - RNA, 20 nt, Artificial Sequence
  Synthetic
  misc_feature (12)..(12): n is a, c, g, or u
uguguauuuaangacuggga

SEQ ID NO: 4319 - RNA, 20 nt, Artificial Sequence
  Synthetic
  misc_feature (17)..(17): n is a, c, g, or u
uugguggucuauaagcngga

SEQ ID NO: 4320 - RNA, 20 nt, Artificial Sequence
  Synthetic
uuuccugccuuacuuuugga

SEQ ID NO: 4321 - RNA, 20 nt, Artificial Sequence
  Synthetic
ccccagucucuccaccucua

SEQ ID NO: 4322 - RNA, 20 nt, Artificial Sequence
  Synthetic
  misc_feature (8)..(8): n is a, c, g, or u
ccguaaanuuucccaccuua

SEQ ID NO: 4323 - RNA, 20 nt, Artificial Sequence
  Synthetic
aacaaauugcacuaguaaac

SEQ ID NO: 4324 - RNA, 20 nt, Artificial Sequence
  Synthetic
uacuuccuagagaggacaac

SEQ ID NO: 4325 - RNA, 20 nt, Artificial Sequence
  Synthetic
aaaaauccucacaauaccac

SEQ ID NO: 4326 - RNA, 20 nt, Artificial Sequence
  Synthetic
  misc_feature (9)..(9): n is a, c, g, or u
  misc_feature (18)..(18): n is a, c, g, or u
aaucccagnggauugggnac

SEQ ID NO: 4327 - RNA, 20 nt, Artificial Sequence
  Synthetic
agccaccagcaggaaaauac

SEQ ID NO: 4328 - RNA, 20 nt, Artificial Sequence
  Synthetic
  misc_feature (2)..(2): n is a, c, g, or u
  misc_feature (8)..(8): n is a, c, g, or u
  misc_feature (16)..(16): n is a, c, g, or u
ungcagunauacaggnauac

SEQ ID NO: 4329 - RNA, 20 nt, Artificial Sequence
  Synthetic
  misc_feature (4)..(4): n is a, c, g, or u
  misc_feature (10)..(10): n is a, c, g, or u
ccancacaanauagcuugcc

SEQ ID NO: 4330 - RNA, 20 nt, Artificial Sequence
  Synthetic
ugaacaaaagaugauuaggc

SEQ ID NO: 4331 - RNA, 20 nt, Artificial Sequence
  Synthetic
cugagccaggagaaacgggc

SEQ ID NO: 4332 - RNA, 20 nt, Artificial Sequence
  Synthetic
  misc_feature (10)..(10): n is a, c, g, or u
  misc_feature (16)..(16): n is a, c, g, or u
ccaccaggcncuguungauc

SEQ ID NO: 4333 - RNA, 20 nt, Artificial Sequence
  Synthetic
augugagagaggcaauaguc

SEQ ID NO: 4334 - RNA, 20 nt, Artificial Sequence
  Synthetic
  misc_feature (2)..(2): n is a, c, g, or u
  misc_feature (5)..(5): n is a, c, g, or u
  misc_feature (8)..(8): n is a, c, g, or u
  misc_feature (12)..(12): n is a, c, g, or u
angcnggnauunuauauaag

SEQ ID NO: 4335 - RNA, 20 nt, Artificial Sequence
  Synthetic
  misc_feature (7)..(7): n is a, c, g, or u
  misc_feature (16)..(16): n is a, c, g, or u
ucccagnggauugggnacag

SEQ ID NO: 4336 - RNA, 20 nt, Artificial Sequence
  Synthetic
  misc_feature (1)..(1): n is a, c, g, or u
nagaagauugaugaugugag

SEQ ID NO: 4337 - RNA, 20 nt, Artificial Sequence
  Synthetic
  misc_feature (1)..(1): n is a, c, g, or u
naaggagguguacuuccuag

SEQ ID NO: 4338 - RNA, 20 nt, Artificial Sequence
  Synthetic
  misc_feature (3)..(3): n is a, c, g, or u
  misc_feature (15)..(15): n is a, c, g, or u
uanagccccaagcgnccccg

SEQ ID NO: 4339 - RNA, 20 nt, Artificial Sequence
  Synthetic
  misc_feature (6)..(6): n is a, c, g, or u
ugagancuucgucugcgagg

SEQ ID NO: 4340 - RNA, 20 nt, Artificial Sequence
  Synthetic
agaugagaaggaacagacgg

SEQ ID NO: 4341 - RNA, 20 nt, Artificial Sequence
  Synthetic
  misc_feature (3)..(3): n is a, c, g, or u
  misc_feature (16)..(16): n is a, c, g, or u
aangacugggaggagnuggg

SEQ ID NO: 4342 - RNA, 20 nt, Artificial Sequence
  Synthetic
  misc_feature (3)..(3): n is a, c, g, or u
ugngugucucuuagaggugg

SEQ ID NO: 4343 - RNA, 20 nt, Artificial Sequence
  Synthetic
  misc_feature (7)..(7): n is a, c, g, or u
uacaggnauacagaggcaug

SEQ ID NO: 4344 - RNA, 20 nt, Artificial Sequence
  Synthetic
  misc_feature (5)..(5): n is a, c, g, or u
cuucnagaagauugaugaug

SEQ ID NO: 4345 - RNA, 20 nt, Artificial Sequence
  Synthetic
  misc_feature (2)..(2): n is a, c, g, or u
  misc_feature (8)..(8): n is a, c, g, or u
ancacaanauagcuugccug

SEQ ID NO: 4346 - RNA, 20 nt, Artificial Sequence
  Synthetic
  misc_feature (1)..(2): n is a, c, g, or u
nnuucgcuccagaccggcug

SEQ ID NO: 4347 - RNA, 20 nt, Artificial Sequence
  Synthetic
uggcaaacaagguaggagug

SEQ ID NO: 4348 - RNA, 20 nt, Artificial Sequence
  Synthetic
  misc_feature (3)..(3): n is a, c, g, or u
ucnagaagauugaugaugug

SEQ ID NO: 4349 - RNA, 20 nt, Artificial Sequence
  Synthetic
  misc_feature (10)..(11): n is a, c, g, or u
  misc_feature (20)..(20): n is a, c, g, or u
ugccccuucnngucguugan

SEQ ID NO: 4350 - RNA, 20 nt, Artificial Sequence
  Synthetic
  misc_feature (20)..(20): n is a, c, g, or u
cauuugguggucuauaagcn

SEQ ID NO: 4351 - RNA, 20 nt, Artificial Sequence
  Synthetic
  misc_feature (4)..(4): n is a, c, g, or u
  misc_feature (7)..(7): n is a, c, g, or u
  misc_feature (10)..(10): n is a, c, g, or u
cccncunacnaaaaaugaau

SEQ ID NO: 4352 - RNA, 20 nt, Artificial Sequence
  Synthetic
  misc_feature (6)..(6): n is a, c, g, or u
  misc_feature (9)..(9): n is a, c, g, or u
cagcancangagggaaacau

SEQ ID NO: 4353 - RNA, 20 nt, Artificial Sequence
  Synthetic
aacauugggaagcuggagau

SEQ ID NO: 4354 - RNA, 20 nt, Artificial Sequence
  Synthetic
uuuggaagagaaacaguucu

SEQ ID NO: 4355 - RNA, 20 nt, Artificial Sequence
  Synthetic
  misc_feature (14)..(14): n is a, c, g, or u
acacgguggccugnuggggu

SEQ ID NO: 4356 - RNA, 20 nt, Artificial Sequence
  Synthetic
  misc_feature (3)..(3): n is a, c, g, or u
  misc_feature (18)..(18): n is a, c, g, or u
agngccugguggaacugngu

SEQ ID NO: 4357 - RNA, 20 nt, Artificial Sequence
  Synthetic
  misc_feature (8)..(8): n is a, c, g, or u
  misc_feature (19)..(19): n is a, c, g, or u
uggucgungauccuggaanu

SEQ ID NO: 4358 - RNA, 20 nt, Artificial Sequence
  Synthetic
  misc_feature (3)..(3): n is a, c, g, or u
  misc_feature (7)..(7): n is a, c, g, or u
  misc_feature (16)..(16): n is a, c, g, or u
  misc_feature (19)..(19): n is a, c, g, or u
agnaggnacaguaganganu

SEQ ID NO: 4359 - RNA, 20 nt, Artificial Sequence
  Synthetic
caggagguugguaagugauu

SEQ ID NO: 4360 - RNA, 20 nt, Artificial Sequence
  Synthetic
agccacccaaggcacagcuu

SEQ ID NO: 4361 - RNA, 20 nt, Artificial Sequence
  Synthetic
  misc_feature (11)..(11): n is a, c, g, or u
ccuguggaugngugucucuu

SEQ ID NO: 4362 - RNA, 20 nt, Artificial Sequence
  Synthetic
  misc_feature (2)..(2): n is a, c, g, or u
ancgauagccaggacaaguu

SEQ ID NO: 4363 - RNA, 20 nt, Artificial Sequence
  Synthetic
uugacccuuauaaagaauuu

SEQ ID NO: 4364 - RNA, 20 nt, Artificial Sequence
  Synthetic
  misc_feature (17)..(17): n is a, c, g, or u
uugaguauuuggugucnuuu

SEQ ID NO: 4365 - RNA, 17 nt, Artificial Sequence
  Synthetic
  misc_feature (6)..(6): n is a, c, g, or u
  misc_feature (9)..(9): n is a, c, g, or u
  misc_feature (12)..(12): n is a, c, g, or u
ggcccncunacnaaaaa

SEQ ID NO: 4366 - RNA, 17 nt, Artificial Sequence
  Synthetic
  misc_feature (5)..(5): n is a, c, g, or u
  misc_feature (8)..(8): n is a, c, g, or u
auacnucnaaaacaaaa

SEQ ID NO: 4367 - RNA, 17 nt, Artificial Sequence
  Synthetic
gacgggacguaaacaaa

SEQ ID NO: 4368 - RNA, 17 nt, Artificial Sequence
  Synthetic
  misc_feature (4)..(4): n is a, c, g, or u
agunggacaugaacaaa

SEQ ID NO: 4369 - RNA, 17 nt, Artificial Sequence
  Synthetic
  misc_feature (6)..(6): n is a, c, g, or u
uggaanuagaggacaaa

SEQ ID NO: 4370 - RNA, 17 nt, Artificial Sequence
  Synthetic
cgaauccacacuccaaa

SEQ ID NO: 4371 - RNA, 17 nt, Artificial Sequence
  Synthetic
aacugagccaggagaaa

SEQ ID NO: 4372 - RNA, 17 nt, Artificial Sequence
  Synthetic
cuuguaaguuggcgaaa

SEQ ID NO: 4373 - RNA, 17 nt, Artificial Sequence
  Synthetic
aaaaguaaggcaggaaa

SEQ ID NO: 4374 - RNA, 17 nt, Artificial Sequence
  Synthetic
  misc_feature (9)..(9): n is a, c, g, or u
aaaugaaunucaggaaa

SEQ ID NO: 4375 - RNA, 17 nt, Artificial Sequence
  Synthetic
  misc_feature (4)..(5): n is a, c, g, or u
  misc_feature (14)..(14): n is a, c, g, or u
ucannucuugaugnaaa

SEQ ID NO: 4376 - RNA, 17 nt, Artificial Sequence
  Synthetic
  misc_feature (5)..(6): n is a, c, g, or u
  misc_feature (12)..(14): n is a, c, g, or u
aagannugauannnaaa

SEQ ID NO: 4377 - RNA, 17 nt, Artificial Sequence
  Synthetic
  misc_feature (11)..(11): n is a, c, g, or u
gacuucaacanaaacaa

SEQ ID NO: 4378 - RNA, 17 nt, Artificial Sequence
  Synthetic
  misc_feature (12)..(12): n is a, c, g, or u
acagccuccuanuacaa

SEQ ID NO: 4379 - RNA, 17 nt, Artificial Sequence
  Synthetic
ccaccuuaugaguccaa

SEQ ID NO: 4380 - RNA, 17 nt, Artificial Sequence
  Synthetic
uggccguugccgagcaa

SEQ ID NO: 4381 - RNA, 17 nt, Artificial Sequence
  Synthetic
  misc_feature (2)..(2): n is a, c, g, or u
  misc_feature (5)..(5): n is a, c, g, or u
  misc_feature (8)..(8): n is a, c, g, or u
  misc_feature (11)..(11): n is a, c, g, or u
  misc_feature (14)..(14): n is a, c, g, or u
cngcnccnuunacncaa

SEQ ID NO: 4382 - RNA, 17 nt, Artificial Sequence
  Synthetic
aucgaagaauacaucaa

SEQ ID NO: 4383 - RNA, 17 nt, Artificial Sequence
  Synthetic
gcacaacucuugcucaa

SEQ ID NO: 4384 - RNA, 17 nt, Artificial Sequence
  Synthetic
  misc_feature (9)..(9): n is a, c, g, or u
  misc_feature (13)..(13): n is a, c, g, or u
auuguacanaaanucaa

SEQ ID NO: 4385 - RNA, 17 nt, Artificial Sequence
  Synthetic
  misc_feature (13)..(13): n is a, c, g, or u
gggagcaccucunucaa

SEQ ID NO: 4386 - RNA, 17 nt, Artificial Sequence
  Synthetic
  misc_feature (3)..(3): n is a, c, g, or u
ggnccggcagaugagaa

SEQ ID NO: 4387 - RNA, 17 nt, Artificial Sequence
  Synthetic
cagcugauggucuggaa

SEQ ID NO: 4388 - RNA, 17 nt, Artificial Sequence
  Synthetic
  misc_feature (4)..(4): n is a, c, g, or u
  misc_feature (13)..(14): n is a, c, g, or u
ucunucaacgacnngaa

SEQ ID NO: 4389 - RNA, 17 nt, Artificial Sequence
  Synthetic
  misc_feature (8)..(8): n is a, c, g, or u
gucuggunuuaaaauaa

SEQ ID NO: 4390 - RNA, 17 nt, Artificial Sequence
  Synthetic
auuccuuggacucauaa

SEQ ID NO: 4391 - RNA, 17 nt, Artificial Sequence
  Synthetic
ugguaacagcgguauaa

SEQ ID NO: 4392 - RNA, 17 nt, Artificial Sequence
  Synthetic
gacauugacccuuauaa

SEQ ID NO: 4393 - RNA, 17 nt, Artificial Sequence
  Synthetic
  misc_feature (4)..(4): n is a, c, g, or u
  misc_feature (13)..(13): n is a, c, g, or u
gugnugggguganuuaa

SEQ ID NO: 4394 - RNA, 17 nt, Artificial Sequence
  Synthetic
aaagacuguguauuuaa

SEQ ID NO: 4395 - RNA, 17 nt, Artificial Sequence
  Synthetic
guccagaagaaccaaca

SEQ ID NO: 4396 - RNA, 17 nt, Artificial Sequence
  Synthetic
gaggauuuuugucaaca

SEQ ID NO: 4397 - RNA, 17 nt, Artificial Sequence
  Synthetic
  misc_feature (7)..(7): n is a, c, g, or u
  misc_feature (10)..(10): n is a, c, g, or u
cuaugunaanacuaaca

SEQ ID NO: 4398 - RNA, 17 nt, Artificial Sequence
  Synthetic
  misc_feature (12)..(12): n is a, c, g, or u
gcuugaacagunggaca

SEQ ID NO: 4399 - RNA, 17 nt, Artificial Sequence
  Synthetic
gaugggaugggaauaca

SEQ ID NO: 4400 - RNA, 17 nt, Artificial Sequence
  Synthetic
  misc_feature (4)..(4): n is a, c, g, or u
  misc_feature (8)..(8): n is a, c, g, or u
  misc_feature (13)..(13): n is a, c, g, or u
ucunugunaacanuaca

SEQ ID NO: 4401 - RNA, 17 nt, Artificial Sequence
  Synthetic
ccccugcucguguuaca

SEQ ID NO: 4402 - RNA, 17 nt, Artificial Sequence
  Synthetic
  misc_feature (5)..(5): n is a, c, g, or u
  misc_feature (8)..(8): n is a, c, g, or u
caaunggncgauuuaca

SEQ ID NO: 4403 - RNA, 17 nt, Artificial Sequence
  Synthetic
  misc_feature (1)..(1): n is a, c, g, or u
  misc_feature (7)..(7): n is a, c, g, or u
nccaaunacauaaccca

SEQ ID NO: 4404 - RNA, 17 nt, Artificial Sequence
  Synthetic
  misc_feature (3)..(3): n is a, c, g, or u
aanuuauugcccaccca

SEQ ID NO: 4405 - RNA, 17 nt, Artificial Sequence
  Synthetic
  misc_feature (1)..(1): n is a, c, g, or u
  misc_feature (7)..(7): n is a, c, g, or u
  misc_feature (10)..(10): n is a, c, g, or u
ngggcgnuanagcccca

SEQ ID NO: 4406 - RNA, 17 nt, Artificial Sequence
  Synthetic
uauuuuccuaaagccca

SEQ ID NO: 4407 - RNA, 17 nt, Artificial Sequence
  Synthetic
uguagcucuuguuccca

SEQ ID NO: 4408 - RNA, 17 nt, Artificial Sequence
  Synthetic
  misc_feature (8)..(8): n is a, c, g, or u
acauccancgauagcca

SEQ ID NO: 4409 - RNA, 17 nt, Artificial Sequence
  Synthetic
acugcgaauuuuggcca

SEQ ID NO: 4410 - RNA, 17 nt, Artificial Sequence
  Synthetic
cggccaggccugugcca

SEQ ID NO: 4411 - RNA, 17 nt, Artificial Sequence
  Synthetic
guucacgguggucucca

SEQ ID NO: 4412 - RNA, 17 nt, Artificial Sequence
  Synthetic
  misc_feature (12)..(12): n is a, c, g, or u
uuuguccucuanuucca

SEQ ID NO: 4413 - RNA, 17 nt, Artificial Sequence
  Synthetic
gaacaagagcuacagca

SEQ ID NO: 4414 - RNA, 17 nt, Artificial Sequence
  Synthetic
  misc_feature (4)..(4): n is a, c, g, or u
aucnacgaccaccagca

SEQ ID NO: 4415 - RNA, 17 nt, Artificial Sequence
  Synthetic
aacuggagccaccagca

SEQ ID NO: 4416 - RNA, 17 nt, Artificial Sequence
  Synthetic
gaugaggcauagcagca

SEQ ID NO: 4417 - RNA, 17 nt, Artificial Sequence
  Synthetic
acagaggcaugagagca

SEQ ID NO: 4418 - RNA, 17 nt, Artificial Sequence
  Synthetic
cgccuguaacacgagca

SEQ ID NO: 4419 - RNA, 17 nt, Artificial Sequence
  Synthetic
cacaaagguuccacgca

SEQ ID NO: 4420 - RNA, 17 nt, Artificial Sequence
  Synthetic
cauuggccaucagcgca

SEQ ID NO: 4421 - RNA, 17 nt, Artificial Sequence
  Synthetic
cuuccaaaaguaaggca

SEQ ID NO: 4422 - RNA, 17 nt, Artificial Sequence
  Synthetic
  misc_feature (7)..(8): n is a, c, g, or u
aacgacnngaaggggca

SEQ ID NO: 4423 - RNA, 17 nt, Artificial Sequence
  Synthetic
  misc_feature (7)..(7): n is a, c, g, or u
  misc_feature (15)..(15): n is a, c, g, or u
uggggancauuaccnca

SEQ ID NO: 4424 - RNA, 17 nt, Artificial Sequence
  Synthetic
uggacaacaucacauca

SEQ ID NO: 4425 - RNA, 17 nt, Artificial Sequence
  Synthetic
  misc_feature (3)..(3): n is a, c, g, or u
  misc_feature (12)..(12): n is a, c, g, or u
ganauucauuuncauca

SEQ ID NO: 4426 - RNA, 17 nt, Artificial Sequence
  Synthetic
cgguauaaagggacuca

SEQ ID NO: 4427 - RNA, 17 nt, Artificial Sequence
  Synthetic
  misc_feature (2)..(2): n is a, c, g, or u
angacaccaaauacuca

SEQ ID NO: 4428 - RNA, 17 nt, Artificial Sequence
  Synthetic
  misc_feature (8)..(9): n is a, c, g, or u
  misc_feature (11)..(11): n is a, c, g, or u
  misc_feature (13)..(14): n is a, c, g, or u
gauuaacnncnunnuca

SEQ ID NO: 4429 - RNA, 17 nt, Artificial Sequence
  Synthetic
  misc_feature (5)..(5): n is a, c, g, or u
  misc_feature (14)..(14): n is a, c, g, or u
gaugnaaaugaaunuca

SEQ ID NO: 4430 - RNA, 17 nt, Artificial Sequence
  Synthetic
  misc_feature (4)..(4): n is a, c, g, or u
  misc_feature (6)..(8): n is a, c, g, or u
  misc_feature (11)..(11): n is a, c, g, or u
uuanannnuanauuuca

SEQ ID NO: 4431 - RNA, 17 nt, Artificial Sequence
  Synthetic
  misc_feature (6)..(6): n is a, c, g, or u
ggacunuuggacuuuca

SEQ ID NO: 4432 - RNA, 17 nt, Artificial Sequence
  Synthetic
  misc_feature (2)..(2): n is a, c, g, or u
  misc_feature (5)..(5): n is a, c, g, or u
cnucnaaaacaaaaaga

SEQ ID NO: 4433 - RNA, 17 nt, Artificial Sequence
  Synthetic
  misc_feature (1)..(1): n is a, c, g, or u
nggacaugaacaaaaga

SEQ ID NO: 4434 - RNA, 17 nt, Artificial Sequence
  Synthetic
cagaagaaccaacaaga

SEQ ID NO: 4435 - RNA, 17 nt, Artificial Sequence
  Synthetic
caggaugaagaggaaga

SEQ ID NO: 4436 - RNA, 17 nt, Artificial Sequence
  Synthetic
  misc_feature (12)..(12): n is a, c, g, or u
gcagguccccungaaga

SEQ ID NO: 4437 - RNA, 17 nt, Artificial Sequence
  Synthetic
uagcagcaggaugaaga

SEQ ID NO: 4438 - RNA, 17 nt, Artificial Sequence
  Synthetic
agaugagaaggaacaga

SEQ ID NO: 4439 - RNA, 17 nt, Artificial Sequence
  Synthetic
uaccuugauaguccaga

SEQ ID NO: 4440 - RNA, 17 nt, Artificial Sequence
  Synthetic
cucccucgccucgcaga

SEQ ID NO: 4441 - RNA, 17 nt, Artificial Sequence
  Synthetic
aaucgccgcgucgcaga

SEQ ID NO: 4442 - RNA, 17 nt, Artificial Sequence
  Synthetic
aaagaugauuaggcaga

SEQ ID NO: 4443 - RNA, 17 nt, Artificial Sequence
  Synthetic
uccaugcgacgugcaga

SEQ ID NO: 4444 - RNA, 17 nt, Artificial Sequence
  Synthetic
  misc_feature (4)..(4): n is a, c, g, or u
gagnccgcguaaagaga

SEQ ID NO: 4445 - RNA, 17 nt, Artificial Sequence
  Synthetic
gguguacuuccuagaga

SEQ ID NO: 4446 - RNA, 17 nt, Artificial Sequence
  Synthetic
  misc_feature (4)..(5): n is a, c, g, or u
  misc_feature (14)..(14): n is a, c, g, or u
uucnngucguuganaga

SEQ ID NO: 4447 - RNA, 17 nt, Artificial Sequence
  Synthetic
  misc_feature (14)..(14): n is a, c, g, or u
gcccccagucuucnaga

SEQ ID NO: 4448 - RNA, 17 nt, Artificial Sequence
  Synthetic
  misc_feature (5)..(5): n is a, c, g, or u
  misc_feature (9)..(9): n is a, c, g, or u
aaagnaggnacaguaga

SEQ ID NO: 4449 - RNA, 17 nt, Artificial Sequence
  Synthetic
  misc_feature (2)..(2): n is a, c, g, or u
  misc_feature (13)..(13): n is a, c, g, or u
ungauccuggaanuaga

SEQ ID NO: 4450 - RNA, 17 nt, Artificial Sequence
  Synthetic
  misc_feature (5)..(5): n is a, c, g, or u
gaugngugucucuuaga

SEQ ID NO: 4451 - RNA, 17 nt, Artificial Sequence
  Synthetic
aaacuacuguuguuaga

SEQ ID NO: 4452 - RNA, 17 nt, Artificial Sequence
  Synthetic
  misc_feature (3)..(3): n is a, c, g, or u
gcnggauucagcgccga

SEQ ID NO: 4453 - RNA, 17 nt, Artificial Sequence
  Synthetic
  misc_feature (10)..(10): n is a, c, g, or u
agaguugucngugccga

SEQ ID NO: 4454 - RNA, 17 nt, Artificial Sequence
  Synthetic
gugcagaggugaagcga

SEQ ID NO: 4455 - RNA, 17 nt, Artificial Sequence
  Synthetic
cgguggucuccaugcga

SEQ ID NO: 4456 - RNA, 17 nt, Artificial Sequence
  Synthetic
  misc_feature (5)..(5): n is a, c, g, or u
gagancuucgucugcga

SEQ ID NO: 4457 - RNA, 17 nt, Artificial Sequence
  Synthetic
auugagaucuucugcga

SEQ ID NO: 4458 - RNA, 17 nt, Artificial Sequence
  Synthetic
  misc_feature (6)..(6): n is a, c, g, or u
ucaaunaccuggaucga

SEQ ID NO: 4459 - RNA, 17 nt, Artificial Sequence
  Synthetic
  misc_feature (12)..(12): n is a, c, g, or u
agcagccauggnaagga

SEQ ID NO: 4460 - RNA, 17 nt, Artificial Sequence
  Synthetic
gauugguggaagcagga

SEQ ID NO: 4461 - RNA, 17 nt, Artificial Sequence
  Synthetic
gaggcauagcagcagga

SEQ ID NO: 4462 - RNA, 17 nt, Artificial Sequence
  Synthetic
cagcaggaugaagagga

SEQ ID NO: 4463 - RNA, 17 nt, Artificial Sequence
  Synthetic
caacaguaguuuccgga

SEQ ID NO: 4464 - RNA, 17 nt, Artificial Sequence
  Synthetic
  misc_feature (12)..(12): n is a, c, g, or u
gcgcugaauccngcgga

SEQ ID NO: 4465 - RNA, 17 nt, Artificial Sequence
  Synthetic
  misc_feature (10)..(10): n is a, c, g, or u
gucccgaacngacggga

SEQ ID NO: 4466 - RNA, 17 nt, Artificial Sequence
  Synthetic
  misc_feature (7)..(7): n is a, c, g, or u
agcccangaugauggga

SEQ ID NO: 4467 - RNA, 17 nt, Artificial Sequence
  Synthetic
gcuuuuaguuauaugga

SEQ ID NO: 4468 - RNA, 17 nt, Artificial Sequence
  Synthetic
  misc_feature (13)..(13): n is a, c, g, or u
uccuggcuaucgnugga

SEQ ID NO: 4469 - RNA, 17 nt, Artificial Sequence
  Synthetic
agccaggacaaguugga

SEQ ID NO: 4470 - RNA, 17 nt, Artificial Sequence
  Synthetic
  misc_feature (12)..(12): n is a, c, g, or u
gugggcaauaanuugga

SEQ ID NO: 4471 - RNA, 17 nt, Artificial Sequence
  Synthetic
  misc_feature (15)..(15): n is a, c, g, or u
uuuccuaaagcccanga

SEQ ID NO: 4472 - RNA, 17 nt, Artificial Sequence
  Synthetic
  misc_feature (15)..(15): n is a, c, g, or u
aguaggucccgaacnga

SEQ ID NO: 4473 - RNA, 17 nt, Artificial Sequence
  Synthetic
  misc_feature (5)..(5): n is a, c, g, or u
  misc_feature (14)..(15): n is a, c, g, or u
cucunucaacgacnnga

SEQ ID NO: 4474 - RNA, 17 nt, Artificial Sequence
  Synthetic
  misc_feature (15)..(15): n is a, c, g, or u
gaggcagguccccunga

SEQ ID NO: 4475 - RNA, 17 nt, Artificial Sequence
  Synthetic
  misc_feature (15)..(15): n is a, c, g, or u
aucaucaaucuucunga

SEQ ID NO: 4476 - RNA, 17 nt, Artificial Sequence
  Synthetic
ggugacccacaaaauga

SEQ ID NO: 4477 - RNA, 17 nt, Artificial Sequence
  Synthetic
  misc_feature (12)..(12): n is a, c, g, or u
ccuaaagcccangauga

SEQ ID NO: 4478 - RNA, 17 nt, Artificial Sequence
  Synthetic
  misc_feature (4)..(4): n is a, c, g, or u
uucnagaagauugauga

SEQ ID NO: 4479 - RNA, 17 nt, Artificial Sequence
  Synthetic
gguccuaggaguccuga

SEQ ID NO: 4480 - RNA, 17 nt, Artificial Sequence
  Synthetic
  misc_feature (5)..(5): n is a, c, g, or u
  misc_feature (9)..(9): n is a, c, g, or u
ucccnguanagggcuga

SEQ ID NO: 4481 - RNA, 17 nt, Artificial Sequence
  Synthetic
gcgacgugcagagguga

SEQ ID NO: 4482 - RNA, 17 nt, Artificial Sequence
  Synthetic
acucugugguauuguga

SEQ ID NO: 4483 - RNA, 17 nt, Artificial Sequence
  Synthetic
  misc_feature (7)..(7): n is a, c, g, or u
gucuucnagaagauuga

SEQ ID NO: 4484 - RNA, 17 nt, Artificial Sequence
  Synthetic
  misc_feature (5)..(5): n is a, c, g, or u
  misc_feature (8)..(8): n is a, c, g, or u
  misc_feature (11)..(11): n is a, c, g, or u
  misc_feature (16)..(16): n is a, c, g, or u
uaaunccnuunuccana

SEQ ID NO: 4485 - RNA, 17 nt, Artificial Sequence
  Synthetic
  misc_feature (16)..(16): n is a, c, g, or u
gccguuccagccgacna

SEQ ID NO: 4486 - RNA, 17 nt, Artificial Sequence
  Synthetic
  misc_feature (5)..(5): n is a, c, g, or u
  misc_feature (16)..(16): n is a, c, g, or u
ucuanuuccaggaucna

SEQ ID NO: 4487 - RNA, 17 nt, Artificial Sequence
  Synthetic
  misc_feature (16)..(16): n is a, c, g, or u
agggaguucuucuucna

SEQ ID NO: 4488 - RNA, 17 nt, Artificial Sequence
  Synthetic
  misc_feature (16)..(16): n is a, c, g, or u
aaaggacgucccgcgna

SEQ ID NO: 4489 - RNA, 17 nt, Artificial Sequence
  Synthetic
  misc_feature (16)..(16): n is a, c, g, or u
aaggaguuaaccaguna

SEQ ID NO: 4490 - RNA, 17 nt, Artificial Sequence
  Synthetic
uuccggaaguguggaua

SEQ ID NO: 4491 - RNA, 17 nt, Artificial Sequence
  Synthetic
  misc_feature (13)..(13): n is a, c, g, or u
gaaguguggauangaua

SEQ ID NO: 4492 - RNA, 17 nt, Artificial Sequence
  Synthetic
gcuccaaauucuuuaua

SEQ ID NO: 4493 - RNA, 17 nt, Artificial Sequence
  Synthetic
cuuuaggaaaauaccua

SEQ ID NO: 4494 - RNA, 17 nt, Artificial Sequence
  Synthetic
ucacaucaggacuccua

SEQ ID NO: 4495 - RNA, 17 nt, Artificial Sequence
  Synthetic
cacaaaaugaggcgcua

SEQ ID NO: 4496 - RNA, 17 nt, Artificial Sequence
  Synthetic
gacugggggcccugcua

SEQ ID NO: 4497 - RNA, 17 nt, Artificial Sequence
  Synthetic
cucuguuguccucucua

SEQ ID NO: 4498 - RNA, 17 nt, Artificial Sequence
  Synthetic
cuucucucaauuuucua

SEQ ID NO: 4499 - RNA, 17 nt, Artificial Sequence
  Synthetic
  misc_feature (5)..(5): n is a, c, g, or u
uguungauccgagggua

SEQ ID NO: 4500 - RNA, 17 nt, Artificial Sequence
  Synthetic
aggacaggagguuggua

SEQ ID NO: 4501 - RNA, 17 nt, Artificial Sequence
  Synthetic
  misc_feature (3)..(3): n is a, c, g, or u
  misc_feature (9)..(10): n is a, c, g, or u
aanaguccnnuuaugua

SEQ ID NO: 4502 - RNA, 17 nt, Artificial Sequence
  Synthetic
  misc_feature (8)..(8): n is a, c, g, or u
  misc_feature (13)..(14): n is a, c, g, or u
aauauuunguaannuua

SEQ ID NO: 4503 - RNA, 17 nt, Artificial Sequence
  Synthetic
  misc_feature (8)..(8): n is a, c, g, or u
caucaucnugggcuuua

SEQ ID NO: 4504 - RNA, 17 nt, Artificial Sequence
  Synthetic
ggucgcaccucucuuua

SEQ ID NO: 4505 - RNA, 17 nt, Artificial Sequence
  Synthetic
  misc_feature (13)..(13): n is a, c, g, or u
uaaggugggaaanuuua

SEQ ID NO: 4506 - RNA, 17 nt, Artificial Sequence
  Synthetic
ggccguugccgagcaac

SEQ ID NO: 4507 - RNA, 17 nt, Artificial Sequence
  Synthetic
ucgaguaggucccgaac

SEQ ID NO: 4508 - RNA, 17 nt, Artificial Sequence
  Synthetic
ggcagaugagaaggaac

SEQ ID NO: 4509 - RNA, 17 nt, Artificial Sequence
  Synthetic
gcauggugcuggugaac

SEQ ID NO: 4510 - RNA, 17 nt, Artificial Sequence
  Synthetic
ggauacccacagauaac

SEQ ID NO: 4511 - RNA, 17 nt, Artificial Sequence
  Synthetic
aacagaaaauugguaac

SEQ ID NO: 4512 - RNA, 17 nt, Artificial Sequence
  Synthetic
gguucacacccccacac

SEQ ID NO: 4513 - RNA, 17 nt, Artificial Sequence
  Synthetic
  misc_feature (12)..(12): n is a, c, g, or u
cuccaguucagngacac

SEQ ID NO: 4514 - RNA, 17 nt, Artificial Sequence
  Synthetic
aaagcccuacgcaccac

SEQ ID NO: 4515 - RNA, 17 nt, Artificial Sequence
  Synthetic
cgucgcauggagaccac

SEQ ID NO: 4516 - RNA, 17 nt, Artificial Sequence
  Synthetic
  misc_feature (3)..(3): n is a, c, g, or u
uunaaauggauacccac

SEQ ID NO: 4517 - RNA, 17 nt, Artificial Sequence
  Synthetic
  misc_feature (9)..(9): n is a, c, g, or u
ccaccccancaggccac

SEQ ID NO: 4518 - RNA, 17 nt, Artificial Sequence
  Synthetic
  misc_feature (9)..(9): n is a, c, g, or u
aaagagagnaauuccac

SEQ ID NO: 4519 - RNA, 17 nt, Artificial Sequence
  Synthetic
  misc_feature (6)..(7): n is a, c, g, or u
gcgaannucaucggcac

SEQ ID NO: 4520 - RNA, 17 nt, Artificial Sequence
  Synthetic
gacucaagaugcugcac

SEQ ID NO: 4521 - RNA, 17 nt, Artificial Sequence
  Synthetic
  misc_feature (3)..(3): n is a, c, g, or u
  misc_feature (5)..(6): n is a, c, g, or u
cuncnnggggcguucac

SEQ ID NO: 4522 - RNA, 17 nt, Artificial Sequence
  Synthetic
aagaauacaucaaagac

SEQ ID NO: 4523 - RNA, 17 nt, Artificial Sequence
  Synthetic
  misc_feature (11)..(11): n is a, c, g, or u
ucaaucuucungaagac

SEQ ID NO: 4524 - RNA, 17 nt, Artificial Sequence
  Synthetic
gaugagaaggaacagac

SEQ ID NO: 4525 - RNA, 17 nt, Artificial Sequence
  Synthetic
auaacuaaaagccagac

SEQ ID NO: 4526 - RNA, 17 nt, Artificial Sequence
  Synthetic
cuuagagguggagagac

SEQ ID NO: 4527 - RNA, 17 nt, Artificial Sequence
  Synthetic
guuccaaacccucggac

SEQ ID NO: 4528 - RNA, 17 nt, Artificial Sequence
  Synthetic
gauuggagguuggggac

SEQ ID NO: 4529 - RNA, 17 nt, Artificial Sequence
  Synthetic
  misc_feature (1)..(2): n is a, c, g, or u
nngaaggggcaugggac

SEQ ID NO: 4530 - RNA, 17 nt, Artificial Sequence
  Synthetic
  misc_feature (14)..(14): n is a, c, g, or u
acuguguauuuaangac

SEQ ID NO: 4531 - RNA, 17 nt, Artificial Sequence
  Synthetic
ccucugccgauccauac

SEQ ID NO: 4532 - RNA, 17 nt, Artificial Sequence
  Synthetic
  misc_feature (14)..(14): n is a, c, g, or u
ccgcuucagcccunuac

SEQ ID NO: 4533 - RNA, 17 nt, Artificial Sequence
  Synthetic
auggccaagccccaacc

SEQ ID NO: 4534 - RNA, 17 nt, Artificial Sequence
  Synthetic
auuuuggccaggacacc

SEQ ID NO: 4535 - RNA, 17 nt, Artificial Sequence
  Synthetic
  misc_feature (12)..(12): n is a, c, g, or u
gaugcuuuaganucacc

SEQ ID NO: 4536 - RNA, 17 nt, Artificial Sequence
  Synthetic
  misc_feature (14)..(14): n is a, c, g, or u
aucauuauuuuaanacc

SEQ ID NO: 4537 - RNA, 17 nt, Artificial Sequence
  Synthetic
  misc_feature (13)..(14): n is a, c, g, or u
uuucuagggggannacc

SEQ ID NO: 4538 - RNA, 17 nt, Artificial Sequence
  Synthetic
auuuggcccccaauacc

SEQ ID NO: 4539 - RNA, 17 nt, Artificial Sequence
  Synthetic
  misc_feature (9)..(9): n is a, c, g, or u
  misc_feature (12)..(12): n is a, c, g, or u
gggguuggnuuncuccc

SEQ ID NO: 4540 - RNA, 17 nt, Artificial Sequence
  Synthetic
ccauauaacuaaaagcc

SEQ ID NO: 4541 - RNA, 17 nt, Artificial Sequence
  Synthetic
ucggcaacggccaggcc

SEQ ID NO: 4542 - RNA, 17 nt, Artificial Sequence
  Synthetic
ccgucggcgcugaaucc

SEQ ID NO: 4543 - RNA, 17 nt, Artificial Sequence
  Synthetic
  misc_feature (9)..(9): n is a, c, g, or u
auuaaaccnuauuaucc

SEQ ID NO: 4544 - RNA, 17 nt, Artificial Sequence
  Synthetic
  misc_feature (8)..(9): n is a, c, g, or u
ccgaugannuucgcucc

SEQ ID NO: 4545 - RNA, 17 nt, Artificial Sequence
  Synthetic
gcaaauuccagcagucc

SEQ ID NO: 4546 - RNA, 17 nt, Artificial Sequence
  Synthetic
agggguccuaggagucc

SEQ ID NO: 4547 - RNA, 17 nt, Artificial Sequence
  Synthetic
acauaccuugauagucc

SEQ ID NO: 4548 - RNA, 17 nt, Artificial Sequence
  Synthetic
guaaacaaaggacgucc

SEQ ID NO: 4549 - RNA, 17 nt, Artificial Sequence
  Synthetic
cggugucgaguaggucc

SEQ ID NO: 4550 - RNA, 17 nt, Artificial Sequence
  Synthetic
  misc_feature (9)..(9): n is a, c, g, or u
gugggaggnuacggucc

SEQ ID NO: 4551 - RNA, 17 nt, Artificial Sequence
  Synthetic
cagguuuugcauggucc

SEQ ID NO: 4552 - RNA, 17 nt, Artificial Sequence
  Synthetic
  misc_feature (6)..(6): n is a, c, g, or u
  misc_feature (14)..(14): n is a, c, g, or u
caggunauugaccnucc

SEQ ID NO: 4553 - RNA, 17 nt, Artificial Sequence
  Synthetic
  misc_feature (4)..(4): n is a, c, g, or u
aucnuauccacacuucc

SEQ ID NO: 4554 - RNA, 17 nt, Artificial Sequence
  Synthetic
uaaugacuuuggcuucc

SEQ ID NO: 4555 - RNA, 17 nt, Artificial Sequence
  Synthetic
  misc_feature (3)..(3): n is a, c, g, or u
ccncugggauucuuucc

SEQ ID NO: 4556 - RNA, 17 nt, Artificial Sequence
  Synthetic
uaacaacaguaguuucc

SEQ ID NO: 4557 - RNA, 17 nt, Artificial Sequence
  Synthetic
uuaacuccuucuuuucc

SEQ ID NO: 4558 - RNA, 17 nt, Artificial Sequence
  Synthetic
uguucaagccuccaagc

SEQ ID NO: 4559 - RNA, 17 nt, Artificial Sequence
  Synthetic
  misc_feature (2)..(2): n is a, c, g, or u
  misc_feature (6)..(6): n is a, c, g, or u
cnguanagggcugaagc

SEQ ID NO: 4560 - RNA, 17 nt, Artificial Sequence
  Synthetic
  misc_feature (1)..(1): n is a, c, g, or u
  misc_feature (3)..(3): n is a, c, g, or u
  misc_feature (9)..(9): n is a, c, g, or u
nunacaacnuugccagc

SEQ ID NO: 4561 - RNA, 17 nt, Artificial Sequence
  Synthetic
  misc_feature (5)..(5): n is a, c, g, or u
  misc_feature (8)..(8): n is a, c, g, or u
ugaanagnggauccagc

SEQ ID NO: 4562 - RNA, 17 nt, Artificial Sequence
  Synthetic
  misc_feature (1)..(1): n is a, c, g, or u
ncgucugccguuccagc

SEQ ID NO: 4563 - RNA, 17 nt, Artificial Sequence
  Synthetic
ccgccuguaacacgagc

SEQ ID NO: 4564 - RNA, 17 nt, Artificial Sequence
  Synthetic
gaggcaauagucggagc

SEQ ID NO: 4565 - RNA, 17 nt, Artificial Sequence
  Synthetic
  misc_feature (13)..(13): n is a, c, g, or u
uuguccauguucnuagc

SEQ ID NO: 4566 - RNA, 17 nt, Artificial Sequence
  Synthetic
gagaucuucugcgacgc

SEQ ID NO: 4567 - RNA, 17 nt, Artificial Sequence
  Synthetic
  misc_feature (2)..(2): n is a, c, g, or u
  misc_feature (5)..(5): n is a, c, g, or u
gnuuncucccggaccgc

SEQ ID NO: 4568 - RNA, 17 nt, Artificial Sequence
  Synthetic
agaugauaaaacgccgc

SEQ ID NO: 4569 - RNA, 17 nt, Artificial Sequence
  Synthetic
  misc_feature (6)..(6): n is a, c, g, or u
uccgcnggauucagcgc

SEQ ID NO: 4570 - RNA, 17 nt, Artificial Sequence
  Synthetic
uuacgucccgucggcgc

SEQ ID NO: 4571 - RNA, 17 nt, Artificial Sequence
  Synthetic
agguuccacgcaugcgc

SEQ ID NO: 4572 - RNA, 17 nt, Artificial Sequence
  Synthetic
  misc_feature (7)..(7): n is a, c, g, or u
acgaagnucucaaucgc

SEQ ID NO: 4573 - RNA, 17 nt, Artificial Sequence
  Synthetic
gaacucccucgccucgc

SEQ ID NO: 4574 - RNA, 17 nt, Artificial Sequence
  Synthetic
cucaaucgccgcgucgc

SEQ ID NO: 4575 - RNA, 17 nt, Artificial Sequence
  Synthetic
cugcucguguuacaggc

SEQ ID NO: 4576 - RNA, 17 nt, Artificial Sequence
  Synthetic
ugguggaagcaggaggc

SEQ ID NO: 4577 - RNA, 17 nt, Artificial Sequence
  Synthetic
  misc_feature (2)..(2): n is a, c, g, or u
ungucggcuggaacggc

SEQ ID NO: 4578 - RNA, 17 nt, Artificial Sequence
  Synthetic
  misc_feature (1)..(1): n is a, c, g, or u
nuucgcuccagaccggc

SEQ ID NO: 4579 - RNA, 17 nt, Artificial Sequence
  Synthetic
  misc_feature (12)..(12): n is a, c, g, or u
agugcacacggnccggc

SEQ ID NO: 4580 - RNA, 17 nt, Artificial Sequence
  Synthetic
  misc_feature (8)..(8): n is a, c, g, or u
  misc_feature (12)..(12): n is a, c, g, or u
gcaucccnguanagggc

SEQ ID NO: 4581 - RNA, 17 nt, Artificial Sequence
  Synthetic
  misc_feature (15)..(15): n is a, c, g, or u
ucggcgcugaauccngc

SEQ ID NO: 4582 - RNA, 17 nt, Artificial Sequence
  Synthetic
  misc_feature (1)..(1): n is a, c, g, or u
  misc_feature (13)..(13): n is a, c, g, or u
ncauccacaggcnaugc

SEQ ID NO: 4583 - RNA, 17 nt, Artificial Sequence
  Synthetic
cugccgauccauacugc

SEQ ID NO: 4584 - RNA, 17 nt, Artificial Sequence
  Synthetic
cuuuguggcuccucugc

SEQ ID NO: 4585 - RNA, 17 nt, Artificial Sequence
  Synthetic
  misc_feature (4)..(4): n is a, c, g, or u
ucgnuggaugugucugc

SEQ ID NO: 4586 - RNA, 17 nt, Artificial Sequence
  Synthetic
  misc_feature (13)..(13): n is a, c, g, or u
aacagaguugucngugc

SEQ ID NO: 4587 - RNA, 17 nt, Artificial Sequence
  Synthetic
cugugccaaguguuugc

SEQ ID NO: 4588 - RNA, 17 nt, Artificial Sequence
  Synthetic
  misc_feature (7)..(7): n is a, c, g, or u
  misc_feature (16)..(16): n is a, c, g, or u
cucuguncccaauccnc

SEQ ID NO: 4589 - RNA, 17 nt, Artificial Sequence
  Synthetic
  misc_feature (16)..(16): n is a, c, g, or u
acugcuggaauuugcnc

SEQ ID NO: 4590 - RNA, 17 nt, Artificial Sequence
  Synthetic
  misc_feature (1)..(1): n is a, c, g, or u
  misc_feature (10)..(10): n is a, c, g, or u
  misc_feature (16)..(16): n is a, c, g, or u
ngcggacgancccucnc

SEQ ID NO: 4591 - RNA, 17 nt, Artificial Sequence
  Synthetic
  misc_feature (16)..(16): n is a, c, g, or u
gcaggguucugugucnc

SEQ ID NO: 4592 - RNA, 17 nt, Artificial Sequence
  Synthetic
  misc_feature (16)..(16): n is a, c, g, or u
ggaacagacggggagnc

SEQ ID NO: 4593 - RNA, 17 nt, Artificial Sequence
  Synthetic
  misc_feature (16)..(16): n is a, c, g, or u
cuucucaucugccggnc

SEQ ID NO: 4594 - RNA, 17 nt, Artificial Sequence
  Synthetic
guauugggggccaaauc

SEQ ID NO: 4595 - RNA, 17 nt, Artificial Sequence
  Synthetic
uccugcuuccaccaauc

SEQ ID NO: 4596 - RNA, 17 nt, Artificial Sequence
  Synthetic
cuuggccauuggccauc

SEQ ID NO: 4597 - RNA, 17 nt, Artificial Sequence
  Synthetic
accaauuuucuguuauc

SEQ ID NO: 4598 - RNA, 17 nt, Artificial Sequence
  Synthetic
accacgagucuagacuc

SEQ ID NO: 4599 - RNA, 17 nt, Artificial Sequence
  Synthetic
ugcuguuccaaacccuc

SEQ ID NO: 4600 - RNA, 17 nt, Artificial Sequence
  Synthetic
acagagcccuuacccuc

SEQ ID NO: 4601 - RNA, 17 nt, Artificial Sequence
  Synthetic
gacacagaacccugcuc

SEQ ID NO: 4602 - RNA, 17 nt, Artificial Sequence
  Synthetic
uuuguuuacgucccguc

SEQ ID NO: 4603 - RNA, 17 nt, Artificial Sequence
  Synthetic
  misc_feature (10)..(10): n is a, c, g, or u
cgauugagancuucguc

SEQ ID NO: 4604 - RNA, 17 nt, Artificial Sequence
  Synthetic
uccaccaaucggcgguc

SEQ ID NO: 4605 - RNA, 17 nt, Artificial Sequence
  Synthetic
  misc_feature (7)..(7): n is a, c, g, or u
cuaucgnuggauguguc

SEQ ID NO: 4606 - RNA, 17 nt, Artificial Sequence
  Synthetic
aggacaacagaguuguc

SEQ ID NO: 4607 - RNA, 17 nt, Artificial Sequence
  Synthetic
  misc_feature (3)..(3): n is a, c, g, or u
  misc_feature (15)..(15): n is a, c, g, or u
acngacgggaagaanuc

SEQ ID NO: 4608 - RNA, 17 nt, Artificial Sequence
  Synthetic
  misc_feature (2)..(2): n is a, c, g, or u
  misc_feature (11)..(11): n is a, c, g, or u
gnucguccgcnggauuc

SEQ ID NO: 4609 - RNA, 17 nt, Artificial Sequence
  Synthetic
cucucuuuuuugccuuc

SEQ ID NO: 4610 - RNA, 17 nt, Artificial Sequence
  Synthetic
aaagaauuuggagcuuc

SEQ ID NO: 4611 - RNA, 17 nt, Artificial Sequence
  Synthetic
uggagauugagaucuuc

SEQ ID NO: 4612 - RNA, 17 nt, Artificial Sequence
  Synthetic
uagucggagcaggguuc

SEQ ID NO: 4613 - RNA, 17 nt, Artificial Sequence
  Synthetic
acuagugcaauuuguuc

SEQ ID NO: 4614 - RNA, 17 nt, Artificial Sequence
  Synthetic
guaacagcgguauaaag

SEQ ID NO: 4615 - RNA, 17 nt, Artificial Sequence
  Synthetic
  misc_feature (12)..(12): n is a, c, g, or u
aacggcagacgnagaag

SEQ ID NO: 4616 - RNA, 17 nt, Artificial Sequence
  Synthetic
acaguaguuuccggaag

SEQ ID NO: 4617 - RNA, 17 nt, Artificial Sequence
  Synthetic
ugccuuacuuuuggaag

SEQ ID NO: 4618 - RNA, 17 nt, Artificial Sequence
  Synthetic
gacgugcagaggugaag

SEQ ID NO: 4619 - RNA, 17 nt, Artificial Sequence
  Synthetic
gucucuccaccucuaag

SEQ ID NO: 4620 - RNA, 17 nt, Artificial Sequence
  Synthetic
gacaggagguugguaag

SEQ ID NO: 4621 - RNA, 17 nt, Artificial Sequence
  Synthetic
aacuaaaagccagacag

SEQ ID NO: 4622 - RNA, 17 nt, Artificial Sequence
  Synthetic
ggccaagccccaaccag

SEQ ID NO: 4623 - RNA, 17 nt, Artificial Sequence
  Synthetic
ugguggcuccaguucag

SEQ ID NO: 4624 - RNA, 17 nt, Artificial Sequence
  Synthetic
  misc_feature (3)..(3): n is a, c, g, or u
  misc_feature (7)..(7): n is a, c, g, or u
ggnauunuauauaagag

SEQ ID NO: 4625 - RNA, 17 nt, Artificial Sequence
  Synthetic
  misc_feature (2)..(2): n is a, c, g, or u
  misc_feature (11)..(11): n is a, c, g, or u
gnggauugggnacagag

SEQ ID NO: 4626 - RNA, 17 nt, Artificial Sequence
  Synthetic
uccagaccggcugcgag

SEQ ID NO: 4627 - RNA, 17 nt, Artificial Sequence
  Synthetic
  misc_feature (10)..(10): n is a, c, g, or u
ucuauaagcnggaggag

SEQ ID NO: 4628 - RNA, 17 nt, Artificial Sequence
  Synthetic
ggcaaacaagguaggag

SEQ ID NO: 4629 - RNA, 17 nt, Artificial Sequence
  Synthetic
gaaaauaccuaugggag

SEQ ID NO: 4630 - RNA, 17 nt, Artificial Sequence
  Synthetic
ucgcagccggucuggag

SEQ ID NO: 4631 - RNA, 17 nt, Artificial Sequence
  Synthetic
gucucuuagagguggag

SEQ ID NO: 4632 - RNA, 17 nt, Artificial Sequence
  Synthetic
  misc_feature (10)..(10): n is a, c, g, or u
uuuggugucnuuuggag

SEQ ID NO: 4633 - RNA, 17 nt, Artificial Sequence
  Synthetic
  misc_feature (11)..(11): n is a, c, g, or u
  misc_feature (14)..(14): n is a, c, g, or u
uggaacagcancangag

SEQ ID NO: 4634 - RNA, 17 nt, Artificial Sequence
  Synthetic
  misc_feature (3)..(3): n is a, c, g, or u
aanauagcuugccugag

SEQ ID NO: 4635 - RNA, 17 nt, Artificial Sequence
  Synthetic
cccccuagaaaauugag

SEQ ID NO: 4636 - RNA, 17 nt, Artificial Sequence
  Synthetic
  misc_feature (3)..(3): n is a, c, g, or u
  misc_feature (6)..(6): n is a, c, g, or u
  misc_feature (12)..(12): n is a, c, g, or u
  misc_feature (15)..(15): n is a, c, g, or u
ganganccugcngcnag

SEQ ID NO: 4637 - RNA, 17 nt, Artificial Sequence
  Synthetic
  misc_feature (12)..(12): n is a, c, g, or u
  misc_feature (15)..(15): n is a, c, g, or u
aauucauuuuungunag

SEQ ID NO: 4638 - RNA, 17 nt, Artificial Sequence
  Synthetic
uucucucaauuuucuag

SEQ ID NO: 4639 - RNA, 17 nt, Artificial Sequence
  Synthetic
  misc_feature (2)..(2): n is a, c, g, or u
cnacgaccaccagcacg

SEQ ID NO: 4640 - RNA, 17 nt, Artificial Sequence
  Synthetic
  misc_feature (1)..(1): n is a, c, g, or u
nggauucagcgccgacg

SEQ ID NO: 4641 - RNA, 17 nt, Artificial Sequence
  Synthetic
  misc_feature (13)..(13): n is a, c, g, or u
uaggucccgaacngacg

SEQ ID NO: 4642 - RNA, 17 nt, Artificial Sequence
  Synthetic
caaaaugaggcgcuacg

SEQ ID NO: 4643 - RNA, 17 nt, Artificial Sequence
  Synthetic
ucgcauggagaccaccg

SEQ ID NO: 4644 - RNA, 17 nt, Artificial Sequence
  Synthetic
  misc_feature (7)..(7): n is a, c, g, or u
accccancaggccaccg

SEQ ID NO: 4645 - RNA, 17 nt, Artificial Sequence
  Synthetic
  misc_feature (11)..(12): n is a, c, g, or u
ucuagggggannacccg

SEQ ID NO: 4646 - RNA, 17 nt, Artificial Sequence
  Synthetic
  misc_feature (14)..(14): n is a, c, g, or u
ucucaucugccggnccg

SEQ ID NO: 4647 - RNA, 17 nt, Artificial Sequence
  Synthetic
  misc_feature (5)..(5): n is a, c, g, or u
  misc_feature (11)..(11): n is a, c, g, or u
aggcncuguungauccg

SEQ ID NO: 4648 - RNA, 17 nt, Artificial Sequence
  Synthetic
  misc_feature (1)..(1): n is a, c, g, or u
ngugcaguuuccguccg

SEQ ID NO: 4649 - RNA, 17 nt, Artificial Sequence
  Synthetic
  misc_feature (13)..(13): n is a, c, g, or u
caacuggauccuncgcg

SEQ ID NO: 4650 - RNA, 17 nt, Artificial Sequence
  Synthetic
  misc_feature (1)..(1): n is a, c, g, or u
ncuucgucugcgaggcg

SEQ ID NO: 4651 - RNA, 17 nt, Artificial Sequence
  Synthetic
gcuccagaccggcugcg

SEQ ID NO: 4652 - RNA, 17 nt, Artificial Sequence
  Synthetic
  misc_feature (15)..(15): n is a, c, g, or u
gccaacuggauccuncg

SEQ ID NO: 4653 - RNA, 17 nt, Artificial Sequence
  Synthetic
  misc_feature (14)..(14): n is a, c, g, or u
uguugaagucccanucg

SEQ ID NO: 4654 - RNA, 17 nt, Artificial Sequence
  Synthetic
  misc_feature (12)..(12): n is a, c, g, or u
uucuucccgucnguucg

SEQ ID NO: 4655 - RNA, 17 nt, Artificial Sequence
  Synthetic
uccuuggacucauaagg

SEQ ID NO: 4656 - RNA, 17 nt, Artificial Sequence
  Synthetic
uaguaaacugagccagg

SEQ ID NO: 4657 - RNA, 17 nt, Artificial Sequence
  Synthetic
agaugauuaggcagagg

SEQ ID NO: 4658 - RNA, 17 nt, Artificial Sequence
  Synthetic
caugcgacgugcagagg

SEQ ID NO: 4659 - RNA, 17 nt, Artificial Sequence
  Synthetic
  misc_feature (2)..(2): n is a, c, g, or u
gnccgcguaaagagagg

SEQ ID NO: 4660 - RNA, 17 nt, Artificial Sequence
  Synthetic
  misc_feature (8)..(8): n is a, c, g, or u
ggaggagnugggggagg

SEQ ID NO: 4661 - RNA, 17 nt, Artificial Sequence
  Synthetic
  misc_feature (12)..(12): n is a, c, g, or u
ggucuauaagcnggagg

SEQ ID NO: 4662 - RNA, 17 nt, Artificial Sequence
  Synthetic
  misc_feature (14)..(14): n is a, c, g, or u
ggaguucuucuucnagg

SEQ ID NO: 4663 - RNA, 17 nt, Artificial Sequence
  Synthetic
auggcaaacaagguagg

SEQ ID NO: 4664 - RNA, 17 nt, Artificial Sequence
  Synthetic
gaucuucugcgacgcgg

SEQ ID NO: 4665 - RNA, 17 nt, Artificial Sequence
  Synthetic
gcucguguuacaggcgg

SEQ ID NO: 4666 - RNA, 17 nt, Artificial Sequence
  Synthetic
cucucaauuuucuaggg

SEQ ID NO: 4667 - RNA, 17 nt, Artificial Sequence
  Synthetic
aggccaccguguggggg

SEQ ID NO: 4668 - RNA, 17 nt, Artificial Sequence
  Synthetic
  misc_feature (6)..(6): n is a, c, g, or u
  misc_feature (12)..(12): n is a, c, g, or u
gcuaunuugugnugggg

SEQ ID NO: 4669 - RNA, 17 nt, Artificial Sequence
  Synthetic
aggaaaauaccuauggg

SEQ ID NO: 4670 - RNA, 17 nt, Artificial Sequence
  Synthetic
gacuuuggcuuccuggg

SEQ ID NO: 4671 - RNA, 17 nt, Artificial Sequence
  Synthetic
aaaagccagacaguggg

SEQ ID NO: 4672 - RNA, 17 nt, Artificial Sequence
  Synthetic
  misc_feature (1)..(1): n is a, c, g, or u
ncaggccaccguguggg

SEQ ID NO: 4673 - RNA, 17 nt, Artificial Sequence
  Synthetic
  misc_feature (3)..(3): n is a, c, g, or u
  misc_feature (15)..(15): n is a, c, g, or u
ggngugcaauguucngg

SEQ ID NO: 4674 - RNA, 17 nt, Artificial Sequence
  Synthetic
  misc_feature (9)..(9): n is a, c, g, or u
  misc_feature (12)..(12): n is a, c, g, or u
  misc_feature (14)..(15): n is a, c, g, or u
guuggcaancuncnngg

SEQ ID NO: 4675 - RNA, 17 nt, Artificial Sequence
  Synthetic
  misc_feature (12)..(12): n is a, c, g, or u
  misc_feature (15)..(15): n is a, c, g, or u
agagcgguaugnuungg

SEQ ID NO: 4676 - RNA, 17 nt, Artificial Sequence
  Synthetic
cucugcacgucgcaugg

SEQ ID NO: 4677 - RNA, 17 nt, Artificial Sequence
  Synthetic
  misc_feature (9)..(9): n is a, c, g, or u
uguucccangaauaugg

SEQ ID NO: 4678 - RNA, 17 nt, Artificial Sequence
  Synthetic
uaacauugggaagcugg

SEQ ID NO: 4679 - RNA, 17 nt, Artificial Sequence
  Synthetic
aaguugcauggugcugg

SEQ ID NO: 4680 - RNA, 17 nt, Artificial Sequence
  Synthetic
gcucgcagccggucugg

SEQ ID NO: 4681 - RNA, 17 nt, Artificial Sequence
  Synthetic
ugcaauuuguucagugg

SEQ ID NO: 4682 - RNA, 17 nt, Artificial Sequence
  Synthetic
  misc_feature (14)..(14): n is a, c, g, or u
acacgguggccugnugg

SEQ ID NO: 4683 - RNA, 17 nt, Artificial Sequence
  Synthetic
  misc_feature (8)..(8): n is a, c, g, or u
  misc_feature (14)..(14): n is a, c, g, or u
aagcuaunuugugnugg

SEQ ID NO: 4684 - RNA, 17 nt, Artificial Sequence
  Synthetic
aaggccuuguaaguugg

SEQ ID NO: 4685 - RNA, 17 nt, Artificial Sequence
  Synthetic
  misc_feature (5)..(5): n is a, c, g, or u
  misc_feature (11)..(11): n is a, c, g, or u
augunauuggnaguugg

SEQ ID NO: 4686 - RNA, 17 nt, Artificial Sequence
  Synthetic
aagugauuggagguugg

SEQ ID NO: 4687 - RNA, 17 nt, Artificial Sequence
  Synthetic
  misc_feature (12)..(12): n is a, c, g, or u
uauuuggugucnuuugg

SEQ ID NO: 4688 - RNA, 17 nt, Artificial Sequence
  Synthetic
  misc_feature (13)..(13): n is a, c, g, or u
  misc_feature (16)..(16): n is a, c, g, or u
uuuggaacagcancang

SEQ ID NO: 4689 - RNA, 17 nt, Artificial Sequence
  Synthetic
  misc_feature (12)..(12): n is a, c, g, or u
  misc_feature (16)..(16): n is a, c, g, or u
gcuucagcccunuacng

SEQ ID NO: 4690 - RNA, 17 nt, Artificial Sequence
  Synthetic
  misc_feature (10)..(10): n is a, c, g, or u
  misc_feature (16)..(16): n is a, c, g, or u
cggcagacgnagaagng

SEQ ID NO: 4691 - RNA, 17 nt, Artificial Sequence
  Synthetic
  misc_feature (10)..(10): n is a, c, g, or u
  misc_feature (16)..(16): n is a, c, g, or u
ccccaagcgnccccgng

SEQ ID NO: 4692 - RNA, 17 nt, Artificial Sequence
  Synthetic
aaguaaggcaggaaaug

SEQ ID NO: 4693 - RNA, 17 nt, Artificial Sequence
  Synthetic
  misc_feature (3)..(4): n is a, c, g, or u
  misc_feature (10)..(12): n is a, c, g, or u
gannugauannnaaaug

SEQ ID NO: 4694 - RNA, 17 nt, Artificial Sequence
  Synthetic
ucacgguggucuccaug

SEQ ID NO: 4695 - RNA, 17 nt, Artificial Sequence
  Synthetic
uuggccaucagcgcaug

SEQ ID NO: 4696 - RNA, 17 nt, Artificial Sequence
  Synthetic
  misc_feature (5)..(6): n is a, c, g, or u
cgacnngaaggggcaug

SEQ ID NO: 4697 - RNA, 17 nt, Artificial Sequence
  Synthetic
  misc_feature (7)..(7): n is a, c, g, or u
acacggnccggcagaug

SEQ ID NO: 4698 - RNA, 17 nt, Artificial Sequence
  Synthetic
  misc_feature (5)..(5): n is a, c, g, or u
cccangaugaugggaug

SEQ ID NO: 4699 - RNA, 17 nt, Artificial Sequence
  Synthetic
  misc_feature (6)..(6): n is a, c, g, or u
ugcaungccuguggaug

SEQ ID NO: 4700 - RNA, 17 nt, Artificial Sequence
  Synthetic
  misc_feature (10)..(10): n is a, c, g, or u
uaaagcccangaugaug

SEQ ID NO: 4701 - RNA, 17 nt, Artificial Sequence
  Synthetic
uccuaggaguccugaug

SEQ ID NO: 4702 - RNA, 17 nt, Artificial Sequence
  Synthetic
  misc_feature (9)..(9): n is a, c, g, or u
aaucuucungaagacug

SEQ ID NO: 4703 - RNA, 17 nt, Artificial Sequence
  Synthetic
uuggagguuggggacug

SEQ ID NO: 4704 - RNA, 17 nt, Artificial Sequence
  Synthetic
augacuuuggcuuccug

SEQ ID NO: 4705 - RNA, 17 nt, Artificial Sequence
  Synthetic
  misc_feature (5)..(5): n is a, c, g, or u
  misc_feature (14)..(14): n is a, c, g, or u
cuguncccaauccncug

SEQ ID NO: 4706 - RNA, 17 nt, Artificial Sequence
  Synthetic
caauuuucuguuaucug

SEQ ID NO: 4707 - RNA, 17 nt, Artificial Sequence
  Synthetic
gagauugagaucuucug

SEQ ID NO: 4708 - RNA, 17 nt, Artificial Sequence
  Synthetic
cuaaaagccagacagug

SEQ ID NO: 4709 - RNA, 17 nt, Artificial Sequence
  Synthetic
ccaagccccaaccagug

SEQ ID NO: 4710 - RNA, 17 nt, Artificial Sequence
  Synthetic
  misc_feature (8)..(8): n is a, c, g, or u
uauaagcnggaggagug

SEQ ID NO: 4711 - RNA, 17 nt, Artificial Sequence
  Synthetic
  misc_feature (5)..(5): n is a, c, g, or u
cccancaggccaccgug

SEQ ID NO: 4712 - RNA, 17 nt, Artificial Sequence
  Synthetic
cuuggacucauaaggug

SEQ ID NO: 4713 - RNA, 17 nt, Artificial Sequence
  Synthetic
ccgcguaaagagaggug

SEQ ID NO: 4714 - RNA, 17 nt, Artificial Sequence
  Synthetic
gccaccgugugggggug

SEQ ID NO: 4715 - RNA, 17 nt, Artificial Sequence
  Synthetic
  misc_feature (3)..(3): n is a, c, g, or u
cancaggccaccgugug

SEQ ID NO: 4716 - RNA, 17 nt, Artificial Sequence
  Synthetic
  misc_feature (15)..(15): n is a, c, g, or u
uccagcagucccganug

SEQ ID NO: 4717 - RNA, 17 nt, Artificial Sequence
  Synthetic
  misc_feature (15)..(15): n is a, c, g, or u
gggucaccauauucnug

SEQ ID NO: 4718 - RNA, 17 nt, Artificial Sequence
  Synthetic
  misc_feature (2)..(2): n is a, c, g, or u
  misc_feature (15)..(15): n is a, c, g, or u
angacugggaggagnug

SEQ ID NO: 4719 - RNA, 17 nt, Artificial Sequence
  Synthetic
  misc_feature (2)..(2): n is a, c, g, or u
  misc_feature (5)..(5): n is a, c, g, or u
unacnaaaaaugaauug

SEQ ID NO: 4720 - RNA, 17 nt, Artificial Sequence
  Synthetic
aaggaauacuaacauug

SEQ ID NO: 4721 - RNA, 17 nt, Artificial Sequence
  Synthetic
ugggaagcuggagauug

SEQ ID NO: 4722 - RNA, 17 nt, Artificial Sequence
  Synthetic
cugcgacgcggcgauug

SEQ ID NO: 4723 - RNA, 17 nt, Artificial Sequence
  Synthetic
  misc_feature (13)..(13): n is a, c, g, or u
aguuugucaacgnauug

SEQ ID NO: 4724 - RNA, 17 nt, Artificial Sequence
  Synthetic
uggaugaucugguauug

SEQ ID NO: 4725 - RNA, 17 nt, Artificial Sequence
  Synthetic
cuccaagcugugccuug

SEQ ID NO: 4726 - RNA, 17 nt, Artificial Sequence
  Synthetic
cguagcgccucauuuug

SEQ ID NO: 4727 - RNA, 17 nt, Artificial Sequence
  Synthetic
  misc_feature (5)..(5): n is a, c, g, or u
  misc_feature (8)..(8): n is a, c, g, or u
  misc_feature (17)..(17): n is a, c, g, or u
ggagnccncaggcacan

SEQ ID NO: 4728 - RNA, 17 nt, Artificial Sequence
  Synthetic
  misc_feature (8)..(8): n is a, c, g, or u
  misc_feature (13)..(13): n is a, c, g, or u
  misc_feature (17)..(17): n is a, c, g, or u
ucauguanuguunacan

SEQ ID NO: 4729 - RNA, 17 nt, Artificial Sequence
  Synthetic
  misc_feature (17)..(17): n is a, c, g, or u
gccgcagacacauccan

SEQ ID NO: 4730 - RNA, 17 nt, Artificial Sequence
  Synthetic
  misc_feature (17)..(17): n is a, c, g, or u
auuccagcagucccgan

SEQ ID NO: 4731 - RNA, 17 nt, Artificial Sequence
  Synthetic
  misc_feature (13)..(13): n is a, c, g, or u
  misc_feature (17)..(17): n is a, c, g, or u
cuaaagcaucccnguan

SEQ ID NO: 4732 - RNA, 17 nt, Artificial Sequence
  Synthetic
  misc_feature (8)..(8): n is a, c, g, or u
  misc_feature (17)..(17): n is a, c, g, or u
caccucunucaacgacn

SEQ ID NO: 4733 - RNA, 17 nt, Artificial Sequence
  Synthetic
  misc_feature (2)..(2): n is a, c, g, or u
  misc_feature (8)..(8): n is a, c, g, or u
  misc_feature (10)..(11): n is a, c, g, or u
  misc_feature (17)..(17): n is a, c, g, or u
anguugunannacaccn

SEQ ID NO: 4734 - RNA, 17 nt, Artificial Sequence
  Synthetic
  misc_feature (17)..(17): n is a, c, g, or u
gugggggugugaacccn

SEQ ID NO: 4735 - RNA, 17 nt, Artificial Sequence
  Synthetic
  misc_feature (2)..(2): n is a, c, g, or u
  misc_feature (8)..(8): n is a, c, g, or u
  misc_feature (17)..(17): n is a, c, g, or u
gngagggnucguccgcn

SEQ ID NO: 4736 - RNA, 17 nt, Artificial Sequence
  Synthetic
  misc_feature (5)..(5): n is a, c, g, or u
  misc_feature (8)..(8): n is a, c, g, or u
  misc_feature (14)..(14): n is a, c, g, or u
  misc_feature (17)..(17): n is a, c, g, or u
ugganganccugcngcn

SEQ ID NO: 4737 - RNA, 17 nt, Artificial Sequence
  Synthetic
  misc_feature (5)..(6): n is a, c, g, or u
  misc_feature (15)..(15): n is a, c, g, or u
  misc_feature (17)..(17): n is a, c, g, or u
aauunnuuaugccancn

SEQ ID NO: 4738 - RNA, 17 nt, Artificial Sequence
  Synthetic
  misc_feature (12)..(12): n is a, c, g, or u
  misc_feature (15)..(15): n is a, c, g, or u
  misc_feature (17)..(17): n is a, c, g, or u
acuguuggcaancuncn

SEQ ID NO: 4739 - RNA, 17 nt, Artificial Sequence
  Synthetic
  misc_feature (17)..(17): n is a, c, g, or u
uucccaucccaucaucn

SEQ ID NO: 4740 - RNA, 17 nt, Artificial Sequence
  Synthetic
  misc_feature (2)..(2): n is a, c, g, or u
  misc_feature (11)..(11): n is a, c, g, or u
  misc_feature (17)..(17): n is a, c, g, or u
cngcggacgancccucn

SEQ ID NO: 4741 - RNA, 17 nt, Artificial Sequence
  Synthetic
  misc_feature (17)..(17): n is a, c, g, or u
gugggucaccauauucn

SEQ ID NO: 4742 - RNA, 17 nt, Artificial Sequence
  Synthetic
  misc_feature (17)..(17): n is a, c, g, or u
agggcccccagucuucn

SEQ ID NO: 4743 - RNA, 17 nt, Artificial Sequence
  Synthetic
  misc_feature (17)..(17): n is a, c, g, or u
gagggaguucuucuucn

SEQ ID NO: 4744 - RNA, 17 nt, Artificial Sequence
  Synthetic
  misc_feature (2)..(2): n is a, c, g, or u
  misc_feature (5)..(5): n is a, c, g, or u
  misc_feature (17)..(17): n is a, c, g, or u
unggngugcaauguucn

SEQ ID NO: 4745 - RNA, 17 nt, Artificial Sequence
  Synthetic
  misc_feature (17)..(17): n is a, c, g, or u
cuggaaagaaucccagn

SEQ ID NO: 4746 - RNA, 17 nt, Artificial Sequence
  Synthetic
  misc_feature (4)..(4): n is a, c, g, or u
  misc_feature (17)..(17): n is a, c, g, or u
uaangacugggaggagn

SEQ ID NO: 4747 - RNA, 17 nt, Artificial Sequence
  Synthetic
  misc_feature (8)..(8): n is a, c, g, or u
  misc_feature (14)..(14): n is a, c, g, or u
  misc_feature (17)..(17): n is a, c, g, or u
aauuugcncugaanagn

SEQ ID NO: 4748 - RNA, 17 nt, Artificial Sequence
  Synthetic
  misc_feature (17)..(17): n is a, c, g, or u
gcuggaacggcagacgn

SEQ ID NO: 4749 - RNA, 17 nt, Artificial Sequence
  Synthetic
  misc_feature (2)..(2): n is a, c, g, or u
  misc_feature (17)..(17): n is a, c, g, or u
unccauggcugcucggn

SEQ ID NO: 4750 - RNA, 17 nt, Artificial Sequence
  Synthetic
  misc_feature (8)..(8): n is a, c, g, or u
  misc_feature (14)..(14): n is a, c, g, or u
  misc_feature (17)..(17): n is a, c, g, or u
cuuuccanucaaunggn

SEQ ID NO: 4751 - RNA, 17 nt, Artificial Sequence
  Synthetic
  misc_feature (17)..(17): n is a, c, g, or u
cccacacgguggccugn

SEQ ID NO: 4752 - RNA, 17 nt, Artificial Sequence
  Synthetic
  misc_feature (11)..(11): n is a, c, g, or u
  misc_feature (17)..(17): n is a, c, g, or u
ggcaagcuaunuugugn

SEQ ID NO: 4753 - RNA, 17 nt, Artificial Sequence
  Synthetic
  misc_feature (16)..(17): n is a, c, g, or u
aacagucuuacauaann

SEQ ID NO: 4754 - RNA, 17 nt, Artificial Sequence
  Synthetic
  misc_feature (7)..(7): n is a, c, g, or u
  misc_feature (16)..(17): n is a, c, g, or u
ucauuuncaucaagann

SEQ ID NO: 4755 - RNA, 17 nt, Artificial Sequence
  Synthetic
  misc_feature (11)..(11): n is a, c, g, or u
  misc_feature (14)..(14): n is a, c, g, or u
  misc_feature (16)..(17): n is a, c, g, or u
cuguuggcaancuncnn

SEQ ID NO: 4756 - RNA, 17 nt, Artificial Sequence
  Synthetic
  misc_feature (4)..(4): n is a, c, g, or u
  misc_feature (14)..(14): n is a, c, g, or u
  misc_feature (16)..(17): n is a, c, g, or u
aaanauuagacaanunn

SEQ ID NO: 4757 - RNA, 17 nt, Artificial Sequence
  Synthetic
  misc_feature (4)..(4): n is a, c, g, or u
  misc_feature (8)..(8): n is a, c, g, or u
  misc_feature (17)..(17): n is a, c, g, or u
uganuuunuguacaaun

SEQ ID NO: 4758 - RNA, 17 nt, Artificial Sequence
  Synthetic
  misc_feature (17)..(17): n is a, c, g, or u
cugccaacuggauccun

SEQ ID NO: 4759 - RNA, 17 nt, Artificial Sequence
  Synthetic
  misc_feature (17)..(17): n is a, c, g, or u
uggaggcuugaacagun

SEQ ID NO: 4760 - RNA, 17 nt, Artificial Sequence
  Synthetic
  misc_feature (4)..(4): n is a, c, g, or u
  misc_feature (7)..(7): n is a, c, g, or u
  misc_feature (13)..(13): n is a, c, g, or u
uuunganguauunaaau

SEQ ID NO: 4761 - RNA, 17 nt, Artificial Sequence
  Synthetic
  misc_feature (11)..(11): n is a, c, g, or u
ggcccugcuangaacau

SEQ ID NO: 4762 - RNA, 17 nt, Artificial Sequence
  Synthetic
ccaaggaauacuaacau

SEQ ID NO: 4763 - RNA, 17 nt, Artificial Sequence
  Synthetic
cuuuggggcauggacau

SEQ ID NO: 4764 - RNA, 17 nt, Artificial Sequence
  Synthetic
ggguggcuuuggggcau

SEQ ID NO: 4765 - RNA, 17 nt, Artificial Sequence
  Synthetic
aggugaaaaaguugcau

SEQ ID NO: 4766 - RNA, 17 nt, Artificial Sequence
  Synthetic
  misc_feature (1)..(1): n is a, c, g, or u
  misc_feature (4)..(4): n is a, c, g, or u
nucnaaaacaaaaagau

SEQ ID NO: 4767 - RNA, 17 nt, Artificial Sequence
  Synthetic
  misc_feature (10)..(10): n is a, c, g, or u
ccagucuucnagaagau

SEQ ID NO: 4768 - RNA, 17 nt, Artificial Sequence
  Synthetic
  misc_feature (13)..(13): n is a, c, g, or u
aaagaaucccagnggau

SEQ ID NO: 4769 - RNA, 17 nt, Artificial Sequence
  Synthetic
  misc_feature (1)..(1): n is a, c, g, or u
  misc_feature (9)..(9): n is a, c, g, or u
nggucaaunaccuggau

SEQ ID NO: 4770 - RNA, 17 nt, Artificial Sequence
  Synthetic
  misc_feature (14)..(14): n is a, c, g, or u
ggaaguguggauangau

SEQ ID NO: 4771 - RNA, 17 nt, Artificial Sequence
  Synthetic
  misc_feature (12)..(12): n is a, c, g, or u
  misc_feature (15)..(15): n is a, c, g, or u
ccuguaaaucgnccnau

SEQ ID NO: 4772 - RNA, 17 nt, Artificial Sequence
  Synthetic
  misc_feature (15)..(15): n is a, c, g, or u
aaaguuugucaacgnau

SEQ ID NO: 4773 - RNA, 17 nt, Artificial Sequence
  Synthetic
  misc_feature (15)..(15): n is a, c, g, or u
ucuucgauccaggunau

SEQ ID NO: 4774 - RNA, 17 nt, Artificial Sequence
  Synthetic
  misc_feature (11)..(11): n is a, c, g, or u
cuuguucccangaauau

SEQ ID NO: 4775 - RNA, 17 nt, Artificial Sequence
  Synthetic
cuggcuuuuaguuauau

SEQ ID NO: 4776 - RNA, 17 nt, Artificial Sequence
  Synthetic
aaggaguuccgcaguau

SEQ ID NO: 4777 - RNA, 17 nt, Artificial Sequence
  Synthetic
uauggaugaucugguau

SEQ ID NO: 4778 - RNA, 17 nt, Artificial Sequence
  Synthetic
ucuagacucugugguau

SEQ ID NO: 4779 - RNA, 17 nt, Artificial Sequence
  Synthetic
  misc_feature (11)..(11): n is a, c, g, or u
gcacuccuccngcuuau

SEQ ID NO: 4780 - RNA, 17 nt, Artificial Sequence
  Synthetic
  misc_feature (1)..(1): n is a, c, g, or u
nuauuugcauacuuuau

SEQ ID NO: 4781 - RNA, 17 nt, Artificial Sequence
  Synthetic
  misc_feature (4)..(4): n is a, c, g, or u
cggnugugcugccaacu

SEQ ID NO: 4782 - RNA, 17 nt, Artificial Sequence
  Synthetic
  misc_feature (10)..(10): n is a, c, g, or u
caaucuucungaagacu

SEQ ID NO: 4783 - RNA, 17 nt, Artificial Sequence
  Synthetic
uuagagguggagagacu

SEQ ID NO: 4784 - RNA, 17 nt, Artificial Sequence
  Synthetic
accacagagucuagacu

SEQ ID NO: 4785 - RNA, 17 nt, Artificial Sequence
  Synthetic
  misc_feature (3)..(3): n is a, c, g, or u
ucnguucgggaccuacu

SEQ ID NO: 4786 - RNA, 17 nt, Artificial Sequence
  Synthetic
uccuggcucaguuuacu

SEQ ID NO: 4787 - RNA, 17 nt, Artificial Sequence
  Synthetic
  misc_feature (5)..(5): n is a, c, g, or u
  misc_feature (13)..(13): n is a, c, g, or u
agganggucaaunaccu

SEQ ID NO: 4788 - RNA, 17 nt, Artificial Sequence
  Synthetic
aaacgggcaacauaccu

SEQ ID NO: 4789 - RNA, 17 nt, Artificial Sequence
  Synthetic
  misc_feature (9)..(10): n is a, c, g, or u
acccgggunnucccccu

SEQ ID NO: 4790 - RNA, 17 nt, Artificial Sequence
  Synthetic
gacgaggcagguccccu

SEQ ID NO: 4791 - RNA, 17 nt, Artificial Sequence
  Synthetic
  misc_feature (7)..(7): n is a, c, g, or u
  misc_feature (13)..(13): n is a, c, g, or u
cggaucnaacagngccu

SEQ ID NO: 4792 - RNA, 17 nt, Artificial Sequence
  Synthetic
gccuccaagcugugccu

SEQ ID NO: 4793 - RNA, 17 nt, Artificial Sequence
  Synthetic
  misc_feature (11)..(11): n is a, c, g, or u
ugguggucgungauccu

SEQ ID NO: 4794 - RNA, 17 nt, Artificial Sequence
  Synthetic
uuuccagaccaucagcu

SEQ ID NO: 4795 - RNA, 17 nt, Artificial Sequence
  Synthetic
  misc_feature (1)..(1): n is a, c, g, or u
  misc_feature (7)..(7): n is a, c, g, or u
  misc_feature (13)..(13): n is a, c, g, or u
ncccucncggggncgcu

SEQ ID NO: 4796 - RNA, 17 nt, Artificial Sequence
  Synthetic
ggcacagcuuggaggcu

SEQ ID NO: 4797 - RNA, 17 nt, Artificial Sequence
  Synthetic
  misc_feature (10)..(10): n is a, c, g, or u
gcgacccgungucggcu

SEQ ID NO: 4798 - RNA, 17 nt, Artificial Sequence
  Synthetic
  misc_feature (6)..(6): n is a, c, g, or u
ucccanucgggacugcu

SEQ ID NO: 4799 - RNA, 17 nt, Artificial Sequence
  Synthetic
cuccuaggaccccugcu

SEQ ID NO: 4800 - RNA, 17 nt, Artificial Sequence
  Synthetic
cucuguauuuuccugcu

SEQ ID NO: 4801 - RNA, 17 nt, Artificial Sequence
  Synthetic
uugcauggucccgugcu

SEQ ID NO: 4802 - RNA, 17 nt, Artificial Sequence
  Synthetic
aaaaguugcauggugcu

SEQ ID NO: 4803 - RNA, 17 nt, Artificial Sequence
  Synthetic
acaauaccacagagucu

SEQ ID NO: 4804 - RNA, 17 nt, Artificial Sequence
  Synthetic
aaguccaccacgagucu

SEQ ID NO: 4805 - RNA, 17 nt, Artificial Sequence
  Synthetic
gauccagcugauggucu

SEQ ID NO: 4806 - RNA, 17 nt, Artificial Sequence
  Synthetic
  misc_feature (5)..(7): n is a, c, g, or u
  misc_feature (13)..(14): n is a, c, g, or u
auuunnnuaucannucu

SEQ ID NO: 4807 - RNA, 17 nt, Artificial Sequence
  Synthetic
cacaucaucaaucuucu

SEQ ID NO: 4808 - RNA, 17 nt, Artificial Sequence
  Synthetic
uucuuguugguucuucu

SEQ ID NO: 4809 - RNA, 17 nt, Artificial Sequence
  Synthetic
acuucucucaauuuucu

SEQ ID NO: 4810 - RNA, 17 nt, Artificial Sequence
  Synthetic
acuaaaagccagacagu

SEQ ID NO: 4811 - RNA, 17 nt, Artificial Sequence
  Synthetic
  misc_feature (3)..(3): n is a, c, g, or u
  misc_feature (8)..(8): n is a, c, g, or u
  misc_feature (12)..(12): n is a, c, g, or u
uunaaagnaggnacagu

SEQ ID NO: 4812 - RNA, 17 nt, Artificial Sequence
  Synthetic
gccaagccccaaccagu

SEQ ID NO: 4813 - RNA, 17 nt, Artificial Sequence
  Synthetic
  misc_feature (10)..(10): n is a, c, g, or u
uccacaggcnaugcagu

SEQ ID NO: 4814 - RNA, 17 nt, Artificial Sequence
  Synthetic
agugcaauuuguucagu

SEQ ID NO: 4815 - RNA, 17 nt, Artificial Sequence
  Synthetic
guuccuugagcaagagu

SEQ ID NO: 4816 - RNA, 17 nt, Artificial Sequence
  Synthetic
  misc_feature (8)..(8): n is a, c, g, or u
  misc_feature (14)..(14): n is a, c, g, or u
guuaugunauuggnagu

SEQ ID NO: 4817 - RNA, 17 nt, Artificial Sequence
  Synthetic
agagagaauccacacgu

SEQ ID NO: 4818 - RNA, 17 nt, Artificial Sequence
  Synthetic
gccaucagcgcaugcgu

SEQ ID NO: 4819 - RNA, 17 nt, Artificial Sequence
  Synthetic
uuuguucaguggugcgu

SEQ ID NO: 4820 - RNA, 17 nt, Artificial Sequence
  Synthetic
  misc_feature (5)..(5): n is a, c, g, or u
  misc_feature (14)..(14): n is a, c, g, or u
aaagncccacaauncgu

SEQ ID NO: 4821 - RNA, 17 nt, Artificial Sequence
  Synthetic
acagagucuagacucgu

SEQ ID NO: 4822 - RNA, 17 nt, Artificial Sequence
  Synthetic
cccgugcugguggucgu

SEQ ID NO: 4823 - RNA, 17 nt, Artificial Sequence
  Synthetic
  misc_feature (11)..(12): n is a, c, g, or u
augccccuucnngucgu

SEQ ID NO: 4824 - RNA, 17 nt, Artificial Sequence
  Synthetic
gguaagugauuggaggu

SEQ ID NO: 4825 - RNA, 17 nt, Artificial Sequence
  Synthetic
ccccaaccagugggggu

SEQ ID NO: 4826 - RNA, 17 nt, Artificial Sequence
  Synthetic
acgcaacccccacuggu

SEQ ID NO: 4827 - RNA, 17 nt, Artificial Sequence
  Synthetic
  misc_feature (4)..(4): n is a, c, g, or u
  misc_feature (10)..(10): n is a, c, g, or u
aucnaacagngccuggu

SEQ ID NO: 4828 - RNA, 17 nt, Artificial Sequence
  Synthetic
gagucuagacucguggu

SEQ ID NO: 4829 - RNA, 17 nt, Artificial Sequence
  Synthetic
ccggaccgccgauuggu

SEQ ID NO: 4830 - RNA, 17 nt, Artificial Sequence
  Synthetic
  misc_feature (11)..(11): n is a, c, g, or u
uccacugcaungccugu

SEQ ID NO: 4831 - RNA, 17 nt, Artificial Sequence
  Synthetic
gaauuuggagcuucugu

SEQ ID NO: 4832 - RNA, 17 nt, Artificial Sequence
  Synthetic
guaguuuccggaagugu

SEQ ID NO: 4833 - RNA, 17 nt, Artificial Sequence
  Synthetic
  misc_feature (7)..(7): n is a, c, g, or u
ggugucnuuuggagugu

SEQ ID NO: 4834 - RNA, 17 nt, Artificial Sequence
  Synthetic
aaugaggcgcuacgugu

SEQ ID NO: 4835 - RNA, 17 nt, Artificial Sequence
  Synthetic
  misc_feature (4)..(4): n is a, c, g, or u
ccancaggccaccgugu

SEQ ID NO: 4836 - RNA, 17 nt, Artificial Sequence
  Synthetic
  misc_feature (2)..(2): n is a, c, g, or u
  misc_feature (14)..(14): n is a, c, g, or u
anuguccuuguuunugu

SEQ ID NO: 4837 - RNA, 17 nt, Artificial Sequence
  Synthetic
ggcgguguguuucuugu

SEQ ID NO: 4838 - RNA, 17 nt, Artificial Sequence
  Synthetic
  misc_feature (2)..(2): n is a, c, g, or u
  misc_feature (16)..(16): n is a, c, g, or u
unuguugaagucccanu

SEQ ID NO: 4839 - RNA, 17 nt, Artificial Sequence
  Synthetic
  misc_feature (7)..(7): n is a, c, g, or u
  misc_feature (10)..(10): n is a, c, g, or u
  misc_feature (16)..(16): n is a, c, g, or u
aaaucgnccnauuganu

SEQ ID NO: 4840 - RNA, 17 nt, Artificial Sequence
  Synthetic
  misc_feature (3)..(3): n is a, c, g, or u
  misc_feature (16)..(16): n is a, c, g, or u
aangacugggaggagnu

SEQ ID NO: 4841 - RNA, 17 nt, Artificial Sequence
  Synthetic
  misc_feature (16)..(16): n is a, c, g, or u
uuguccuggcuaucgnu

SEQ ID NO: 4842 - RNA, 17 nt, Artificial Sequence
  Synthetic
  misc_feature (16)..(16): n is a, c, g, or u
ccacacgguggccugnu

SEQ ID NO: 4843 - RNA, 17 nt, Artificial Sequence
  Synthetic
  misc_feature (10)..(10): n is a, c, g, or u
  misc_feature (16)..(16): n is a, c, g, or u
gcaagcuaunuugugnu

SEQ ID NO: 4844 - RNA, 17 nt, Artificial Sequence
  Synthetic
  misc_feature (16)..(16): n is a, c, g, or u
ucucaggcaagcuaunu

SEQ ID NO: 4845 - RNA, 17 nt, Artificial Sequence
  Synthetic
  misc_feature (3)..(3): n is a, c, g, or u
  misc_feature (16)..(16): n is a, c, g, or u
acnaaauauuuuccunu

SEQ ID NO: 4846 - RNA, 17 nt, Artificial Sequence
  Synthetic
cucccggaccgccgauu

SEQ ID NO: 4847 - RNA, 17 nt, Artificial Sequence
  Synthetic
  misc_feature (9)..(9): n is a, c, g, or u
  misc_feature (14)..(14): n is a, c, g, or u
acaugggcnuaaanauu

SEQ ID NO: 4848 - RNA, 17 nt, Artificial Sequence
  Synthetic
auggaugaucugguauu

SEQ ID NO: 4849 - RNA, 17 nt, Artificial Sequence
  Synthetic
cgcaugcguggaaccuu

SEQ ID NO: 4850 - RNA, 17 nt, Artificial Sequence
  Synthetic
caauguuaguauuccuu

SEQ ID NO: 4851 - RNA, 17 nt, Artificial Sequence
  Synthetic
  misc_feature (6)..(6): n is a, c, g, or u
  misc_feature (12)..(12): n is a, c, g, or u
cccucncggggncgcuu

SEQ ID NO: 4852 - RNA, 17 nt, Artificial Sequence
  Synthetic
ugugccuuggguggcuu

SEQ ID NO: 4853 - RNA, 17 nt, Artificial Sequence
  Synthetic
  misc_feature (1)..(1): n is a, c, g, or u
nuuaaauacacagucuu

SEQ ID NO: 4854 - RNA, 17 nt, Artificial Sequence
  Synthetic
  misc_feature (4)..(4): n is a, c, g, or u
  misc_feature (6)..(6): n is a, c, g, or u
  misc_feature (13)..(13): n is a, c, g, or u
uuuncnaaaacanucuu

SEQ ID NO: 4855 - RNA, 17 nt, Artificial Sequence
  Synthetic
gucuuugauguauucuu

SEQ ID NO: 4856 - RNA, 17 nt, Artificial Sequence
  Synthetic
gaaaggccuuguaaguu

SEQ ID NO: 4857 - RNA, 17 nt, Artificial Sequence
  Synthetic
  misc_feature (7)..(7): n is a, c, g, or u
  misc_feature (13)..(13): n is a, c, g, or u
uuaugunauuggnaguu

SEQ ID NO: 4858 - RNA, 17 nt, Artificial Sequence
  Synthetic
guaagugauuggagguu

SEQ ID NO: 4859 - RNA, 17 nt, Artificial Sequence
  Synthetic
cgcaacccccacugguu

SEQ ID NO: 4860 - RNA, 17 nt, Artificial Sequence
  Synthetic
  misc_feature (2)..(2): n is a, c, g, or u
  misc_feature (14)..(14): n is a, c, g, or u
anuucuucccgucnguu

SEQ ID NO: 4861 - RNA, 17 nt, Artificial Sequence
  Synthetic
  misc_feature (12)..(12): n is a, c, g, or u
uuccaccaggcncuguu

SEQ ID NO: 4862 - RNA, 17 nt, Artificial Sequence
  Synthetic
cggaaacuacuguuguu

SEQ ID NO: 4863 - RNA, 17 nt, Artificial Sequence
  Synthetic
  misc_feature (15)..(15): n is a, c, g, or u
ugggugggcaauaanuu

SEQ ID NO: 4864 - RNA, 17 nt, Artificial Sequence
  Synthetic
  misc_feature (8)..(9): n is a, c, g, or u
  misc_feature (15)..(15): n is a, c, g, or u
uacauaannggacunuu

SEQ ID NO: 4865 - RNA, 17 nt, Artificial Sequence
  Synthetic
  misc_feature (4)..(4): n is a, c, g, or u
auangauaggggcauuu

SEQ ID NO: 4866 - RNA, 17 nt, Artificial Sequence
  Synthetic
cacguagcgccucauuu

SEQ ID NO: 4867 - RNA, 17 nt, Artificial Sequence
  Synthetic
acaguucuugaguauuu

SEQ ID NO: 4868 - RNA, 17 nt, Artificial Sequence
  Synthetic
gugccuuggguggcuuu

SEQ ID NO: 4869 - RNA, 17 nt, Artificial Sequence
  Synthetic
  misc_feature (3)..(3): n is a, c, g, or u
  misc_feature (7)..(7): n is a, c, g, or u
cunuacngggaugcuuu

SEQ ID NO: 4870 - RNA, 17 nt, Artificial Sequence
  Synthetic
  misc_feature (4)..(4): n is a, c, g, or u
  misc_feature (13)..(13): n is a, c, g, or u
acgnauugugggncuuu

SEQ ID NO: 4871 - RNA, 17 nt, Artificial Sequence
  Synthetic
uuuccguccgaggguuu

SEQ ID NO: 4872 - RNA, 17 nt, Artificial Sequence
  Synthetic
uuuccugccuuacuuuu

SEQ ID NO: 4873 - RNA, 17 nt, Artificial Sequence
  Synthetic
ccccaucuuuuuguuuu

SEQ ID NO: 4874 - RNA, 20 nt, Artificial Sequence
  Synthetic
  misc_feature (9)..(9): n is a, c, g, or u
  misc_feature (12)..(12): n is a, c, g, or u
  misc_feature (15)..(15): n is a, c, g, or u
guaggcccncunacnaaaaa

SEQ ID NO: 4875 - RNA, 20 nt, Artificial Sequence
  Synthetic
  misc_feature (2)..(2): n is a, c, g, or u
  misc_feature (8)..(8): n is a, c, g, or u
  misc_feature (11)..(11): n is a, c, g, or u
unaauacnucnaaaacaaaa

SEQ ID NO: 4876 - RNA, 20 nt, Artificial Sequence
  Synthetic
gccgacgggacguaaacaaa

SEQ ID NO: 4877 - RNA, 20 nt, Artificial Sequence
  Synthetic
  misc_feature (7)..(7): n is a, c, g, or u
aacagunggacaugaacaaa

SEQ ID NO: 4878 - RNA, 20 nt, Artificial Sequence
  Synthetic
  misc_feature (9)..(9): n is a, c, g, or u
uccuggaanuagaggacaaa

SEQ ID NO: 4879 - RNA, 20 nt, Artificial Sequence
  Synthetic
gugcgaauccacacuccaaa

SEQ ID NO: 4880 - RNA, 20 nt, Artificial Sequence
  Synthetic
guaaacugagccaggagaaa

SEQ ID NO: 4881 - RNA, 20 nt, Artificial Sequence
  Synthetic
ggccuuguaaguuggcgaaa

SEQ ID NO: 4882 - RNA, 20 nt, Artificial Sequence
  Synthetic
uccaaaaguaaggcaggaaa

SEQ ID NO: 4883 - RNA, 20 nt, Artificial Sequence
  Synthetic
  misc_feature (3)..(3): n is a, c, g, or u
  misc_feature (12)..(12): n is a, c, g, or u
ugnaaaugaaunucaggaaa

SEQ ID NO: 4884 - RNA, 20 nt, Artificial Sequence
  Synthetic
  misc_feature (1)..(1): n is a, c, g, or u
  misc_feature (7)..(8): n is a, c, g, or u
  misc_feature (17)..(17): n is a, c, g, or u
nuaucannucuugaugnaaa

SEQ ID NO: 4885 - RNA, 20 nt, Artificial Sequence
  Synthetic
  misc_feature (8)..(9): n is a, c, g, or u
  misc_feature (15)..(17): n is a, c, g, or u
aucaagannugauannnaaa

SEQ ID NO: 4886 - RNA, 20 nt, Artificial Sequence
  Synthetic
  misc_feature (14)..(14): n is a, c, g, or u
ugggacuucaacanaaacaa

SEQ ID NO: 4887 - RNA, 20 nt, Artificial Sequence
  Synthetic
  misc_feature (15)..(15): n is a, c, g, or u
ccuacagccuccuanuacaa

SEQ ID NO: 4888 - RNA, 20 nt, Artificial Sequence
  Synthetic
uucccaccuuaugaguccaa

SEQ ID NO: 4889 - RNA, 20 nt, Artificial Sequence
  Synthetic
gccuggccguugccgagcaa

SEQ ID NO: 4890 - RNA, 20 nt, Artificial Sequence
  Synthetic
  misc_feature (5)..(5): n is a, c, g, or u
  misc_feature (8)..(8): n is a, c, g, or u
  misc_feature (11)..(11): n is a, c, g, or u
  misc_feature (14)..(14): n is a, c, g, or u
  misc_feature (17)..(17): n is a, c, g, or u
uugcngcnccnuunacncaa

SEQ ID NO: 4891 - RNA, 20 nt, Artificial Sequence
  Synthetic
uggaucgaagaauacaucaa

SEQ ID NO: 4892 - RNA, 20 nt, Artificial Sequence
  Synthetic
ccugcacaacucuugcucaa

SEQ ID NO: 4893 - RNA, 20 nt, Artificial Sequence
  Synthetic
  misc_feature (3)..(3): n is a, c, g, or u
  misc_feature (12)..(12): n is a, c, g, or u
  misc_feature (16)..(16): n is a, c, g, or u
canauuguacanaaanucaa

SEQ ID NO: 4894 - RNA, 20 nt, Artificial Sequence
  Synthetic
  misc_feature (16)..(16): n is a, c, g, or u
caugggagcaccucunucaa

SEQ ID NO: 4895 - RNA, 20 nt, Artificial Sequence
  Synthetic
  misc_feature (6)..(6): n is a, c, g, or u
cacggnccggcagaugagaa

SEQ ID NO: 4896 - RNA, 20 nt, Artificial Sequence
  Synthetic
auccagcugauggucuggaa

SEQ ID NO: 4897 - RNA, 20 nt, Artificial Sequence
  Synthetic
  misc_feature (7)..(7): n is a, c, g, or u
  misc_feature (16)..(17): n is a, c, g, or u
accucunucaacgacnngaa

SEQ ID NO: 4898 - RNA, 20 nt, Artificial Sequence
  Synthetic
  misc_feature (2)..(2): n is a, c, g, or u
  misc_feature (11)..(11): n is a, c, g, or u
anugucuggunuuaaaauaa

SEQ ID NO: 4899 - RNA, 20 nt, Artificial Sequence
  Synthetic
aguauuccuuggacucauaa

SEQ ID NO: 4900 - RNA, 20 nt, Artificial Sequence
  Synthetic
aauugguaacagcgguauaa

SEQ ID NO: 4901 - RNA, 20 nt, Artificial Sequence
  Synthetic
auggacauugacccuuauaa

SEQ ID NO: 4902 - RNA, 20 nt, Artificial Sequence
  Synthetic
  misc_feature (1)..(1): n is a, c, g, or u
  misc_feature (7)..(7): n is a, c, g, or u
  misc_feature (16)..(16): n is a, c, g, or u
nuugugnugggguganuuaa

SEQ ID NO: 4903 - RNA, 20 nt, Artificial Sequence
  Synthetic
aucaaagacuguguauuuaa

SEQ ID NO: 4904 - RNA, 20 nt, Artificial Sequence
  Synthetic
auaguccagaagaaccaaca

SEQ ID NO: 4905 - RNA, 20 nt, Artificial Sequence
  Synthetic
ugugaggauuuuugucaaca

SEQ ID NO: 4906 - RNA, 20 nt, Artificial Sequence
  Synthetic
  misc_feature (10)..(10): n is a, c, g, or u
  misc_feature (13)..(13): n is a, c, g, or u
uaacuaugunaanacuaaca

SEQ ID NO: 4907 - RNA, 20 nt, Artificial Sequence
  Synthetic
  misc_feature (15)..(15): n is a, c, g, or u
gaggcuugaacagunggaca

SEQ ID NO: 4908 - RNA, 20 nt, Artificial Sequence
  Synthetic
gaugaugggaugggaauaca

SEQ ID NO: 4909 - RNA, 20 nt, Artificial Sequence
  Synthetic
  misc_feature (7)..(7): n is a, c, g, or u
  misc_feature (11)..(11): n is a, c, g, or u
  misc_feature (16)..(16): n is a, c, g, or u
cuuucunugunaacanuaca

SEQ ID NO: 4910 - RNA, 20 nt, Artificial Sequence
  Synthetic
ggaccccugcucguguuaca

SEQ ID NO: 4911 - RNA, 20 nt, Artificial Sequence
  Synthetic
  misc_feature (2)..(2): n is a, c, g, or u
  misc_feature (8)..(8): n is a, c, g, or u
  misc_feature (11)..(11): n is a, c, g, or u
anucaaunggncgauuuaca

SEQ ID NO: 4912 - RNA, 20 nt, Artificial Sequence
  Synthetic
  misc_feature (4)..(4): n is a, c, g, or u
  misc_feature (10)..(10): n is a, c, g, or u
acunccaaunacauaaccca

SEQ ID NO: 4913 - RNA, 20 nt, Artificial Sequence
  Synthetic
  misc_feature (6)..(6): n is a, c, g, or u
uccaanuuauugcccaccca

SEQ ID NO: 4914 - RNA, 20 nt, Artificial Sequence
  Synthetic
  misc_feature (4)..(4): n is a, c, g, or u
  misc_feature (10)..(10): n is a, c, g, or u
  misc_feature (13)..(13): n is a, c, g, or u
aagngggcgnuanagcccca

SEQ ID NO: 4915 - RNA, 20 nt, Artificial Sequence
  Synthetic
agguauuuuccuaaagccca

SEQ ID NO: 4916 - RNA, 20 nt, Artificial Sequence
  Synthetic
ugcuguagcucuuguuccca

SEQ ID NO: 4917 - RNA, 20 nt, Artificial Sequence
  Synthetic
  misc_feature (11)..(11): n is a, c, g, or u
gacacauccancgauagcca

SEQ ID NO: 4918 - RNA, 20 nt, Artificial Sequence
  Synthetic
gggacugcgaauuuuggcca

SEQ ID NO: 4919 - RNA, 20 nt, Artificial Sequence
  Synthetic
caacggccaggccugugcca

SEQ ID NO: 4920 - RNA, 20 nt, Artificial Sequence
  Synthetic
ggcguucacgguggucucca

SEQ ID NO: 4921 - RNA, 20 nt, Artificial Sequence
  Synthetic
  misc_feature (15)..(15): n is a, c, g, or u
ccguuuguccucuanuucca

SEQ ID NO: 4922 - RNA, 20 nt, Artificial Sequence
  Synthetic
ugggaacaagagcuacagca

SEQ ID NO: 4923 - RNA, 20 nt, Artificial Sequence
  Synthetic
  misc_feature (7)..(7): n is a, c, g, or u
aggaucnacgaccaccagca

SEQ ID NO: 4924 - RNA, 20 nt, Artificial Sequence
  Synthetic
cugaacuggagccaccagca

SEQ ID NO: 4925 - RNA, 20 nt, Artificial Sequence
  Synthetic
gaagaugaggcauagcagca

SEQ ID NO: 4926 - RNA, 20 nt, Artificial Sequence
  Synthetic
  misc_feature (1)..(1): n is a, c, g, or u
nauacagaggcaugagagca

SEQ ID NO: 4927 - RNA, 20 nt, Artificial Sequence
  Synthetic
caccgccuguaacacgagca

SEQ ID NO: 4928 - RNA, 20 nt, Artificial Sequence
  Synthetic
agccacaaagguuccacgca

SEQ ID NO: 4929 - RNA, 20 nt, Artificial Sequence
  Synthetic
ggccauuggccaucagcgca

SEQ ID NO: 4930 - RNA, 20 nt, Artificial Sequence
  Synthetic
ucucuuccaaaaguaaggca

SEQ ID NO: 4931 - RNA, 20 nt, Artificial Sequence
  Synthetic
  misc_feature (1)..(1): n is a, c, g, or u
  misc_feature (10)..(11): n is a, c, g, or u
nucaacgacnngaaggggca

SEQ ID NO: 4932 - RNA, 20 nt, Artificial Sequence
  Synthetic
  misc_feature (10)..(10): n is a, c, g, or u
  misc_feature (18)..(18): n is a, c, g, or u
aguuggggancauuaccnca

SEQ ID NO: 4933 - RNA, 20 nt, Artificial Sequence
  Synthetic
acauggacaacaucacauca

SEQ ID NO: 4934 - RNA, 20 nt, Artificial Sequence
  Synthetic
  misc_feature (6)..(6): n is a, c, g, or u
  misc_feature (15)..(15): n is a, c, g, or u
ccuganauucauuuncauca

SEQ ID NO: 4935 - RNA, 20 nt, Artificial Sequence
  Synthetic
cagcgguauaaagggacuca

SEQ ID NO: 4936 - RNA, 20 nt, Artificial Sequence
  Synthetic
  misc_feature (5)..(5): n is a, c, g, or u
caaangacaccaaauacuca

SEQ ID NO: 4937 - RNA, 20 nt, Artificial Sequence
  Synthetic
  misc_feature (11)..(12): n is a, c, g, or u
  misc_feature (14)..(14): n is a, c, g, or u
  misc_feature (16)..(17): n is a, c, g, or u
aaugauuaacnncnunnuca

SEQ ID NO: 4938 - RNA, 20 nt, Artificial Sequence
  Synthetic
  misc_feature (8)..(8): n is a, c, g, or u
  misc_feature (17)..(17): n is a, c, g, or u
cuugaugnaaaugaaunuca

SEQ ID NO: 4939 - RNA, 20 nt, Artificial Sequence
  Synthetic
  misc_feature (7)..(7): n is a, c, g, or u
  misc_feature (9)..(11): n is a, c, g, or u
  misc_feature (14)..(14): n is a, c, g, or u
ggguuanannnuanauuuca

SEQ ID NO: 4940 - RNA, 20 nt, Artificial Sequence
  Synthetic
  misc_feature (2)..(3): n is a, c, g, or u
  misc_feature (9)..(9): n is a, c, g, or u
annggacunuuggacuuuca

SEQ ID NO: 4941 - RNA, 20 nt, Artificial Sequence
  Synthetic
  misc_feature (5)..(5): n is a, c, g, or u
  misc_feature (8)..(8): n is a, c, g, or u
auacnucnaaaacaaaaaga

SEQ ID NO: 4942 - RNA, 20 nt, Artificial Sequence
  Synthetic
  misc_feature (4)..(4): n is a, c, g, or u
agunggacaugaacaaaaga

SEQ ID NO: 4943 - RNA, 20 nt, Artificial Sequence
  Synthetic
guccagaagaaccaacaaga

SEQ ID NO: 4944 - RNA, 20 nt, Artificial Sequence
  Synthetic
cagcaggaugaagaggaaga

SEQ ID NO: 4945 - RNA, 20 nt, Artificial Sequence
  Synthetic
  misc_feature (15)..(15): n is a, c, g, or u
gaggcagguccccungaaga

SEQ ID NO: 4946 - RNA, 20 nt, Artificial Sequence
  Synthetic
gcauagcagcaggaugaaga

SEQ ID NO: 4947 - RNA, 20 nt, Artificial Sequence
  Synthetic
ggcagaugagaaggaacaga

SEQ ID NO: 4948 - RNA, 20 nt, Artificial Sequence
  Synthetic
acauaccuugauaguccaga

SEQ ID NO: 4949 - RNA, 20 nt, Artificial Sequence
  Synthetic
gaacucccucgccucgcaga

SEQ ID NO: 4950 - RNA, 20 nt, Artificial Sequence
  Synthetic
cucaaucgccgcgucgcaga

SEQ ID NO: 4951 - RNA, 20 nt, Artificial Sequence
  Synthetic
acaaaagaugauuaggcaga

SEQ ID NO: 4952 - RNA, 20 nt, Artificial Sequence
  Synthetic
gucuccaugcgacgugcaga

SEQ ID NO: 4953 - RNA, 20 nt, Artificial Sequence
  Synthetic
  misc_feature (7)..(7): n is a, c, g, or u
ggggagnccgcguaaagaga

SEQ ID NO: 4954 - RNA, 20 nt, Artificial Sequence
  Synthetic
ggagguguacuuccuagaga

SEQ ID NO: 4955 - RNA, 20 nt, Artificial Sequence
  Synthetic
  misc_feature (7)..(8): n is a, c, g, or u
  misc_feature (17)..(17): n is a, c, g, or u
cccuucnngucguuganaga

SEQ ID NO: 4956 - RNA, 20 nt, Artificial Sequence
  Synthetic
  misc_feature (17)..(17): n is a, c, g, or u
agggcccccagucuucnaga

SEQ ID NO: 4957 - RNA, 20 nt, Artificial Sequence
  Synthetic
  misc_feature (3)..(3): n is a, c, g, or u
  misc_feature (8)..(8): n is a, c, g, or u
  misc_feature (12)..(12): n is a, c, g, or u
uunaaagnaggnacaguaga

SEQ ID NO: 4958 - RNA, 20 nt, Artificial Sequence
  Synthetic
  misc_feature (5)..(5): n is a, c, g, or u
  misc_feature (16)..(16): n is a, c, g, or u
ucgungauccuggaanuaga

SEQ ID NO: 4959 - RNA, 20 nt, Artificial Sequence
  Synthetic
  misc_feature (8)..(8): n is a, c, g, or u
guggaugngugucucuuaga

SEQ ID NO: 4960 - RNA, 20 nt, Artificial Sequence
  Synthetic
cggaaacuacuguuguuaga

SEQ ID NO: 4961 - RNA, 20 nt, Artificial Sequence
  Synthetic
  misc_feature (6)..(6): n is a, c, g, or u
uccgcnggauucagcgccga

SEQ ID NO: 4962 - RNA, 20 nt, Artificial Sequence
  Synthetic
  misc_feature (13)..(13): n is a, c, g, or u
aacagaguugucngugccga

SEQ ID NO: 4963 - RNA, 20 nt, Artificial Sequence
  Synthetic
gacgugcagaggugaagcga

SEQ ID NO: 4964 - RNA, 20 nt, Artificial Sequence
  Synthetic
ucacgguggucuccaugcga

SEQ ID NO: 4965 - RNA, 20 nt, Artificial Sequence
  Synthetic
  misc_feature (8)..(8): n is a, c, g, or u
auugagancuucgucugcga

SEQ ID NO: 4966 - RNA, 20 nt, Artificial Sequence
  Synthetic
gagauugagaucuucugcga

SEQ ID NO: 4967 - RNA, 20 nt, Artificial Sequence
  Synthetic
  misc_feature (1)..(1): n is a, c, g, or u
  misc_feature (9)..(9): n is a, c, g, or u
nggucaaunaccuggaucga

SEQ ID NO: 4968 - RNA, 20 nt, Artificial Sequence
  Synthetic
  misc_feature (15)..(15): n is a, c, g, or u
ccgagcagccauggnaagga

SEQ ID NO: 4969 - RNA, 20 nt, Artificial Sequence
  Synthetic
gccgauugguggaagcagga

SEQ ID NO: 4970 - RNA, 20 nt, Artificial Sequence
  Synthetic
gaugaggcauagcagcagga

SEQ ID NO: 4971 - RNA, 20 nt, Artificial Sequence
  Synthetic
uagcagcaggaugaagagga

SEQ ID NO: 4972 - RNA, 20 nt, Artificial Sequence
  Synthetic
uaacaacaguaguuuccgga

SEQ ID NO: 4973 - RNA, 20 nt, Artificial Sequence
  Synthetic
  misc_feature (15)..(15): n is a, c, g, or u
ucggcgcugaauccngcgga

SEQ ID NO: 4974 - RNA, 20 nt, Artificial Sequence
  Synthetic
  misc_feature (13)..(13): n is a, c, g, or u
uaggucccgaacngacggga

SEQ ID NO: 4975 - RNA, 20 nt, Artificial Sequence
  Synthetic
  misc_feature (10)..(10): n is a, c, g, or u
uaaagcccangaugauggga

SEQ ID NO: 4976 - RNA, 20 nt, Artificial Sequence
  Synthetic
cuggcuuuuaguuauaugga

SEQ ID NO: 4977 - RNA, 20 nt, Artificial Sequence
  Synthetic
  misc_feature (16)..(16): n is a, c, g, or u
uuguccuggcuaucgnugga

SEQ ID NO: 4978 - RNA, 20 nt, Artificial Sequence
  Synthetic
gauagccaggacaaguugga

SEQ ID NO: 4979 - RNA, 20 nt, Artificial Sequence
  Synthetic
  misc_feature (15)..(15): n is a, c, g, or u
ugggugggcaauaanuugga

SEQ ID NO: 4980 - RNA, 20 nt, Artificial Sequence
  Synthetic
  misc_feature (18)..(18): n is a, c, g, or u
uauuuuccuaaagcccanga

SEQ ID NO: 4981 - RNA, 20 nt, Artificial Sequence
  Synthetic
  misc_feature (18)..(18): n is a, c, g, or u
ucgaguaggucccgaacnga

SEQ ID NO: 4982 - RNA, 20 nt, Artificial Sequence
  Synthetic
  misc_feature (8)..(8): n is a, c, g, or u
  misc_feature (17)..(18): n is a, c, g, or u
caccucunucaacgacnnga

SEQ ID NO: 4983 - RNA, 20 nt, Artificial Sequence
  Synthetic
  misc_feature (18)..(18): n is a, c, g, or u
gacgaggcagguccccunga

SEQ ID NO: 4984 - RNA, 20 nt, Artificial Sequence
  Synthetic
  misc_feature (18)..(18): n is a, c, g, or u
cacaucaucaaucuucunga

SEQ ID NO: 4985 - RNA, 20 nt, Artificial Sequence
  Synthetic
uauggugacccacaaaauga

SEQ ID NO: 4986 - RNA, 20 nt, Artificial Sequence
  Synthetic
  misc_feature (15)..(15): n is a, c, g, or u
uuuccuaaagcccangauga

SEQ ID NO: 4987 - RNA, 20 nt, Artificial Sequence
  Synthetic
  misc_feature (7)..(7): n is a, c, g, or u
gucuucnagaagauugauga

SEQ ID NO: 4988 - RNA, 20 nt, Artificial Sequence
  Synthetic
agggguccuaggaguccuga

SEQ ID NO: 4989 - RNA, 20 nt, Artificial Sequence
  Synthetic
  misc_feature (8)..(8): n is a, c, g, or u
  misc_feature (12)..(12): n is a, c, g, or u
gcaucccnguanagggcuga

SEQ ID NO: 4990 - RNA, 20 nt, Artificial Sequence
  Synthetic
caugcgacgugcagagguga

SEQ ID NO: 4991 - RNA, 20 nt, Artificial Sequence
  Synthetic
uagacucugugguauuguga

SEQ ID NO: 4992 - RNA, 20 nt, Artificial Sequence
  Synthetic
  misc_feature (10)..(10): n is a, c, g, or u
ccagucuucnagaagauuga

SEQ ID NO: 4993 - RNA, 20 nt, Artificial Sequence
  Synthetic
  misc_feature (8)..(8): n is a, c, g, or u
  misc_feature (11)..(11): n is a, c, g, or u
  misc_feature (14)..(14): n is a, c, g, or u
  misc_feature (19)..(19): n is a, c, g, or u
guuuaaunccnuunuccana

SEQ ID NO: 4994 - RNA, 20 nt, Artificial Sequence
  Synthetic
  misc_feature (19)..(19): n is a, c, g, or u
ucugccguuccagccgacna

SEQ ID NO: 4995 - RNA, 20 nt, Artificial Sequence
  Synthetic
  misc_feature (8)..(8): n is a, c, g, or u
  misc_feature (19)..(19): n is a, c, g, or u
uccucuanuuccaggaucna

SEQ ID NO: 4996 - RNA, 20 nt, Artificial Sequence
  Synthetic
  misc_feature (19)..(19): n is a, c, g, or u
gcgagggaguucuucuucna

SEQ ID NO: 4997 - RNA, 20 nt, Artificial Sequence
  Synthetic
  misc_feature (19)..(19): n is a, c, g, or u
aacaaaggacgucccgcgna

SEQ ID NO: 4998 - RNA, 20 nt, Artificial Sequence
  Synthetic
  misc_feature (19)..(19): n is a, c, g, or u
aagaaggaguuaaccaguna

SEQ ID NO: 4999 - RNA, 20 nt, Artificial Sequence
  Synthetic
aguuuccggaaguguggaua

SEQ ID NO: 5000 - RNA, 20 nt, Artificial Sequence
  Synthetic
  misc_feature (16)..(16): n is a, c, g, or u
ccggaaguguggauangaua

SEQ ID NO: 5001 - RNA, 20 nt, Artificial Sequence
  Synthetic
gaagcuccaaauucuuuaua

SEQ ID NO: 5002 - RNA, 20 nt, Artificial Sequence
  Synthetic
gggcuuuaggaaaauaccua

SEQ ID NO: 5003 - RNA, 20 nt, Artificial Sequence
  Synthetic
acaucacaucaggacuccua

SEQ ID NO: 5004 - RNA, 20 nt, Artificial Sequence
  Synthetic
acccacaaaaugaggcgcua

SEQ ID NO: 5005 - RNA, 20 nt, Artificial Sequence
  Synthetic
gaagacugggggcccugcua

SEQ ID NO: 5006 - RNA, 20 nt, Artificial Sequence
  Synthetic
caacucuguuguccucucua

SEQ ID NO: 5007 - RNA, 20 nt, Artificial Sequence
  Synthetic
ggacuucucucaauuuucua

SEQ ID NO: 5008 - RNA, 20 nt, Artificial Sequence
  Synthetic
  misc_feature (2)..(2): n is a, c, g, or u
  misc_feature (8)..(8): n is a, c, g, or u
cncuguungauccgagggua

SEQ ID NO: 5009 - RNA, 20 nt, Artificial Sequence
  Synthetic
uggaggacaggagguuggua

SEQ ID NO: 5010 - RNA, 20 nt, Artificial Sequence
  Synthetic
  misc_feature (6)..(6): n is a, c, g, or u
  misc_feature (12)..(13): n is a, c, g, or u
uccaanaguccnnuuaugua

SEQ ID NO: 5011 - RNA, 20 nt, Artificial Sequence
  Synthetic
  misc_feature (11)..(11): n is a, c, g, or u
  misc_feature (16)..(17): n is a, c, g, or u
gaaaauauuunguaannuua

SEQ ID NO: 5012 - RNA, 20 nt, Artificial Sequence
  Synthetic
  misc_feature (11)..(11): n is a, c, g, or u
ucccaucaucnugggcuuua

SEQ ID NO: 5013 - RNA, 20 nt, Artificial Sequence
  Synthetic
acgggucgcaccucucuuua

SEQ ID NO: 5014 - RNA, 20 nt, Artificial Sequence
  Synthetic
  misc_feature (16)..(16): n is a, c, g, or u
ucauaaggugggaaanuuua

SEQ ID NO: 5015 - RNA, 20 nt, Artificial Sequence
  Synthetic
ccuggccguugccgagcaac

SEQ ID NO: 5016 - RNA, 20 nt, Artificial Sequence
  Synthetic
gugucgaguaggucccgaac

SEQ ID NO: 5017 - RNA, 20 nt, Artificial Sequence
  Synthetic
  misc_feature (1)..(1): n is a, c, g, or u
nccggcagaugagaaggaac

SEQ ID NO: 5018 - RNA, 20 nt, Artificial Sequence
  Synthetic
guugcauggugcuggugaac

SEQ ID NO: 5019 - RNA, 20 nt, Artificial Sequence
  Synthetic
aauggauacccacagauaac

SEQ ID NO: 5020 - RNA, 20 nt, Artificial Sequence
  Synthetic
gauaacagaaaauugguaac

SEQ ID NO: 5021 - RNA, 20 nt, Artificial Sequence
  Synthetic
  misc_feature (2)..(2): n is a, c, g, or u
cnggguucacacccccacac

SEQ ID NO: 5022 - RNA, 20 nt, Artificial Sequence
  Synthetic
  misc_feature (15)..(15): n is a, c, g, or u
uggcuccaguucagngacac

SEQ ID NO: 5023 - RNA, 20 nt, Artificial Sequence
  Synthetic
gggaaagcccuacgcaccac

SEQ ID NO: 5024 - RNA, 20 nt, Artificial Sequence
  Synthetic
gcacgucgcauggagaccac

SEQ ID NO: 5025 - RNA, 20 nt, Artificial Sequence
  Synthetic
  misc_feature (6)..(6): n is a, c, g, or u
guauunaaauggauacccac

SEQ ID NO: 5026 - RNA, 20 nt, Artificial Sequence
  Synthetic
  misc_feature (1)..(1): n is a, c, g, or u
  misc_feature (12)..(12): n is a, c, g, or u
ncuccaccccancaggccac

SEQ ID NO: 5027 - RNA, 20 nt, Artificial Sequence
  Synthetic
  misc_feature (12)..(12): n is a, c, g, or u
aaaaaagagagnaauuccac

SEQ ID NO: 5028 - RNA, 20 nt, Artificial Sequence
  Synthetic
  misc_feature (9)..(10): n is a, c, g, or u
ggagcgaannucaucggcac

SEQ ID NO: 5029 - RNA, 20 nt, Artificial Sequence
  Synthetic
agggacucaagaugcugcac

SEQ ID NO: 5030 - RNA, 20 nt, Artificial Sequence
  Synthetic
  misc_feature (3)..(3): n is a, c, g, or u
  misc_feature (6)..(6): n is a, c, g, or u
  misc_feature (8)..(9): n is a, c, g, or u
aancuncnnggggcguucac

SEQ ID NO: 5031 - RNA, 20 nt, Artificial Sequence
  Synthetic
ucgaagaauacaucaaagac

SEQ ID NO: 5032 - RNA, 20 nt, Artificial Sequence
  Synthetic
  misc_feature (14)..(14): n is a, c, g, or u
ucaucaaucuucungaagac

SEQ ID NO: 5033 - RNA, 20 nt, Artificial Sequence
  Synthetic
gcagaugagaaggaacagac

SEQ ID NO: 5034 - RNA, 20 nt, Artificial Sequence
  Synthetic
cauauaacuaaaagccagac

SEQ ID NO: 5035 - RNA, 20 nt, Artificial Sequence
  Synthetic
ucucuuagagguggagagac

SEQ ID NO: 5036 - RNA, 20 nt, Artificial Sequence
  Synthetic
gcuguuccaaacccucggac

SEQ ID NO: 5037 - RNA, 20 nt, Artificial Sequence
  Synthetic
agugauuggagguuggggac

SEQ ID NO: 5038 - RNA, 20 nt, Artificial Sequence
  Synthetic
  misc_feature (4)..(5): n is a, c, g, or u
gacnngaaggggcaugggac

SEQ ID NO: 5039 - RNA, 20 nt, Artificial Sequence
  Synthetic
  misc_feature (17)..(17): n is a, c, g, or u
aagacuguguauuuaangac

SEQ ID NO: 5040 - RNA, 20 nt, Artificial Sequence
  Synthetic
gcuccucugccgauccauac

SEQ ID NO: 5041 - RNA, 20 nt, Artificial Sequence
  Synthetic
  misc_feature (17)..(17): n is a, c, g, or u
acaccgcuucagcccunuac

SEQ ID NO: 5042 - RNA, 20 nt, Artificial Sequence
  Synthetic
ccaauggccaagccccaacc

SEQ ID NO: 5043 - RNA, 20 nt, Artificial Sequence
  Synthetic
cgaauuuuggccaggacacc

SEQ ID NO: 5044 - RNA, 20 nt, Artificial Sequence
  Synthetic
  misc_feature (1)..(1): n is a, c, g, or u
  misc_feature (15)..(15): n is a, c, g, or u
ngggaugcuuuaganucacc

SEQ ID NO: 5045 - RNA, 20 nt, Artificial Sequence
  Synthetic
  misc_feature (17)..(17): n is a, c, g, or u
uuaaucauuauuuuaanacc

SEQ ID NO: 5046 - RNA, 20 nt, Artificial Sequence
  Synthetic
  misc_feature (16)..(17): n is a, c, g, or u
aauuuucuagggggannacc

SEQ ID NO: 5047 - RNA, 20 nt, Artificial Sequence
  Synthetic
cagauuuggcccccaauacc

SEQ ID NO: 5048 - RNA, 20 nt, Artificial Sequence
  Synthetic
  misc_feature (12)..(12): n is a, c, g, or u
  misc_feature (15)..(15): n is a, c, g, or u
acugggguuggnuuncuccc

SEQ ID NO: 5049 - RNA, 20 nt, Artificial Sequence
  Synthetic
cauccauauaacuaaaagcc

SEQ ID NO: 5050 - RNA, 20 nt, Artificial Sequence
  Synthetic
ugcucggcaacggccaggcc

SEQ ID NO: 5051 - RNA, 20 nt, Artificial Sequence
  Synthetic
gucccgucggcgcugaaucc

SEQ ID NO: 5052 - RNA, 20 nt, Artificial Sequence
  Synthetic
  misc_feature (3)..(3): n is a, c, g, or u
  misc_feature (12)..(12): n is a, c, g, or u
ggnauuaaaccnuauuaucc

SEQ ID NO: 5053 - RNA, 20 nt, Artificial Sequence
  Synthetic
  misc_feature (11)..(12): n is a, c, g, or u
gugccgaugannuucgcucc

SEQ ID NO: 5054 - RNA, 20 nt, Artificial Sequence
  Synthetic
  misc_feature (3)..(3): n is a, c, g, or u
agngcaaauuccagcagucc

SEQ ID NO: 5055 - RNA, 20 nt, Artificial Sequence
  Synthetic
agcagggguccuaggagucc

SEQ ID NO: 5056 - RNA, 20 nt, Artificial Sequence
  Synthetic
gcaacauaccuugauagucc

SEQ ID NO: 5057 - RNA, 20 nt, Artificial Sequence
  Synthetic
gacguaaacaaaggacgucc

SEQ ID NO: 5058 - RNA, 20 nt, Artificial Sequence
  Synthetic
aagcggugucgaguaggucc

SEQ ID NO: 5059 - RNA, 20 nt, Artificial Sequence
  Synthetic
  misc_feature (12)..(12): n is a, c, g, or u
ggagugggaggnuacggucc

SEQ ID NO: 5060 - RNA, 20 nt, Artificial Sequence
  Synthetic
gugcagguuuugcauggucc

SEQ ID NO: 5061 - RNA, 20 nt, Artificial Sequence
  Synthetic
  misc_feature (9)..(9): n is a, c, g, or u
  misc_feature (17)..(17): n is a, c, g, or u
auccaggunauugaccnucc

SEQ ID NO: 5062 - RNA, 20 nt, Artificial Sequence
  Synthetic
  misc_feature (7)..(7): n is a, c, g, or u
ccuaucnuauccacacuucc

SEQ ID NO: 5063 - RNA, 20 nt, Artificial Sequence
  Synthetic
  misc_feature (2)..(2): n is a, c, g, or u
anuuaaugacuuuggcuucc

SEQ ID NO: 5064 - RNA, 20 nt, Artificial Sequence
  Synthetic
  misc_feature (6)..(6): n is a, c, g, or u
aauccncugggauucuuucc

SEQ ID NO: 5065 - RNA, 20 nt, Artificial Sequence
  Synthetic
gucuaacaacaguaguuucc

SEQ ID NO: 5066 - RNA, 20 nt, Artificial Sequence
  Synthetic
ugguuaacuccuucuuuucc

SEQ ID NO: 5067 - RNA, 20 nt, Artificial Sequence
  Synthetic
  misc_feature (1)..(1): n is a, c, g, or u
nacuguucaagccuccaagc

SEQ ID NO: 5068 - RNA, 20 nt, Artificial Sequence
  Synthetic
  misc_feature (5)..(5): n is a, c, g, or u
  misc_feature (9)..(9): n is a, c, g, or u
ucccnguanagggcugaagc

SEQ ID NO: 5069 - RNA, 20 nt, Artificial Sequence
  Synthetic
  misc_feature (3)..(4): n is a, c, g, or u
  misc_feature (6)..(6): n is a, c, g, or u
  misc_feature (12)..(12): n is a, c, g, or u
gunnunacaacnuugccagc

SEQ ID NO: 5070 - RNA, 20 nt, Artificial Sequence
  Synthetic
  misc_feature (2)..(2): n is a, c, g, or u
  misc_feature (8)..(8): n is a, c, g, or u
  misc_feature (11)..(11): n is a, c, g, or u
cncugaanagnggauccagc

SEQ ID NO: 5071 - RNA, 20 nt, Artificial Sequence
  Synthetic
  misc_feature (4)..(4): n is a, c, g, or u
ucuncgucugccguuccagc

SEQ ID NO: 5072 - RNA, 20 nt, Artificial Sequence
  Synthetic
acaccgccuguaacacgagc

SEQ ID NO: 5073 - RNA, 20 nt, Artificial Sequence
  Synthetic
agagaggcaauagucggagc

SEQ ID NO: 5074 - RNA, 20 nt, Artificial Sequence
  Synthetic
  misc_feature (16)..(16): n is a, c, g, or u
auguuguccauguucnuagc

SEQ ID NO: 5075 - RNA, 20 nt, Artificial Sequence
  Synthetic
auugagaucuucugcgacgc

SEQ ID NO: 5076 - RNA, 20 nt, Artificial Sequence
  Synthetic
  misc_feature (5)..(5): n is a, c, g, or u
  misc_feature (8)..(8): n is a, c, g, or u
uuggnuuncucccggaccgc

SEQ ID NO: 5077 - RNA, 20 nt, Artificial Sequence
  Synthetic
ggaagaugauaaaacgccgc

SEQ ID NO: 5078 - RNA, 20 nt, Artificial Sequence
  Synthetic
  misc_feature (9)..(9): n is a, c, g, or u
ucguccgcnggauucagcgc

SEQ ID NO: 5079 - RNA, 20 nt, Artificial Sequence
  Synthetic
uguuuacgucccgucggcgc

SEQ ID NO: 5080 - RNA, 20 nt, Artificial Sequence
  Synthetic
caaagguuccacgcaugcgc

SEQ ID NO: 5081 - RNA, 20 nt, Artificial Sequence
  Synthetic
  misc_feature (10)..(10): n is a, c, g, or u
cagacgaagnucucaaucgc

SEQ ID NO: 5082 - RNA, 20 nt, Artificial Sequence
  Synthetic
gaagaacucccucgccucgc

SEQ ID NO: 5083 - RNA, 20 nt, Artificial Sequence
  Synthetic
  misc_feature (2)..(2): n is a, c, g, or u
gnucucaaucgccgcgucgc

SEQ ID NO: 5084 - RNA, 20 nt, Artificial Sequence
  Synthetic
ccccugcucguguuacaggc

SEQ ID NO: 5085 - RNA, 20 nt, Artificial Sequence
  Synthetic
gauugguggaagcaggaggc

SEQ ID NO: 5086 - RNA, 20 nt, Artificial Sequence
  Synthetic
  misc_feature (5)..(5): n is a, c, g, or u
ccgungucggcuggaacggc

SEQ ID NO: 5087 - RNA, 20 nt, Artificial Sequence
  Synthetic
  misc_feature (3)..(4): n is a, c, g, or u
gannuucgcuccagaccggc

SEQ ID NO: 5088 - RNA, 20 nt, Artificial Sequence
  Synthetic
  misc_feature (15)..(15): n is a, c, g, or u
cgaagugcacacggnccggc

SEQ ID NO: 5089 - RNA, 20 nt, Artificial Sequence
  Synthetic
  misc_feature (11)..(11): n is a, c, g, or u
  misc_feature (15)..(15): n is a, c, g, or u
aaagcaucccnguanagggc

SEQ ID NO: 5090 - RNA, 20 nt, Artificial Sequence
  Synthetic
  misc_feature (18)..(18): n is a, c, g, or u
ccgucggcgcugaauccngc

SEQ ID NO: 5091 - RNA, 20 nt, Artificial Sequence
  Synthetic
  misc_feature (4)..(4): n is a, c, g, or u
  misc_feature (16)..(16): n is a, c, g, or u
cacncauccacaggcnaugc

SEQ ID NO: 5092 - RNA, 20 nt, Artificial Sequence
  Synthetic
ccucugccgauccauacugc

SEQ ID NO: 5093 - RNA, 20 nt, Artificial Sequence
  Synthetic
aaccuuuguggcuccucugc

SEQ ID NO: 5094 - RNA, 20 nt, Artificial Sequence
  Synthetic
  misc_feature (7)..(7): n is a, c, g, or u
cuaucgnuggaugugucugc

SEQ ID NO: 5095 - RNA, 20 nt, Artificial Sequence
  Synthetic
  misc_feature (16)..(16): n is a, c, g, or u
gacaacagaguugucngugc

SEQ ID NO: 5096 - RNA, 20 nt, Artificial Sequence
  Synthetic
ggccugugccaaguguuugc

SEQ ID NO: 5097 - RNA, 20 nt, Artificial Sequence
  Synthetic
  misc_feature (10)..(10): n is a, c, g, or u
  misc_feature (19)..(19): n is a, c, g, or u
ucucucuguncccaauccnc

SEQ ID NO: 5098 - RNA, 20 nt, Artificial Sequence
  Synthetic
  misc_feature (19)..(19): n is a, c, g, or u
gggacugcuggaauuugcnc

SEQ ID NO: 5099 - RNA, 20 nt, Artificial Sequence
  Synthetic
  misc_feature (4)..(4): n is a, c, g, or u
  misc_feature (13)..(13): n is a, c, g, or u
  misc_feature (19)..(19): n is a, c, g, or u
uccngcggacgancccucnc

SEQ ID NO: 5100 - RNA, 20 nt, Artificial Sequence
  Synthetic
  misc_feature (19)..(19): n is a, c, g, or u
ggagcaggguucugugucnc

SEQ ID NO: 5101 - RNA, 20 nt, Artificial Sequence
  Synthetic
  misc_feature (19)..(19): n is a, c, g, or u
gaaggaacagacggggagnc

SEQ ID NO: 5102 - RNA, 20 nt, Artificial Sequence
  Synthetic
  misc_feature (19)..(19): n is a, c, g, or u
uuccuucucaucugccggnc

SEQ ID NO: 5103 - RNA, 20 nt, Artificial Sequence
  Synthetic
cugguauugggggccaaauc

SEQ ID NO: 5104 - RNA, 20 nt, Artificial Sequence
  Synthetic
gccuccugcuuccaccaauc

SEQ ID NO: 5105 - RNA, 20 nt, Artificial Sequence
  Synthetic
gggcuuggccauuggccauc

SEQ ID NO: 5106 - RNA, 20 nt, Artificial Sequence
  Synthetic
guuaccaauuuucuguuauc

SEQ ID NO: 5107 - RNA, 20 nt, Artificial Sequence
  Synthetic
uccaccacgagucuagacuc

SEQ ID NO: 5108 - RNA, 20 nt, Artificial Sequence
  Synthetic
  misc_feature (3)..(3): n is a, c, g, or u
ugnugcuguuccaaacccuc

SEQ ID NO: 5109 - RNA, 20 nt, Artificial Sequence
  Synthetic
aauacagagcccuuacccuc

SEQ ID NO: 5110 - RNA, 20 nt, Artificial Sequence
  Synthetic
  misc_feature (3)..(3): n is a, c, g, or u
agngacacagaacccugcuc

SEQ ID NO: 5111 - RNA, 20 nt, Artificial Sequence
  Synthetic
uccuuuguuuacgucccguc

SEQ ID NO: 5112 - RNA, 20 nt, Artificial Sequence
  Synthetic
  misc_feature (13)..(13): n is a, c, g, or u
cggcgauugagancuucguc

SEQ ID NO: 5113 - RNA, 20 nt, Artificial Sequence
  Synthetic
gcuuccaccaaucggcgguc

SEQ ID NO: 5114 - RNA, 20 nt, Artificial Sequence
  Synthetic
  misc_feature (10)..(10): n is a, c, g, or u
uggcuaucgnuggauguguc

SEQ ID NO: 5115 - RNA, 20 nt, Artificial Sequence
  Synthetic
gagaggacaacagaguuguc

SEQ ID NO: 5116 - RNA, 20 nt, Artificial Sequence
  Synthetic
  misc_feature (6)..(6): n is a, c, g, or u
  misc_feature (18)..(18): n is a, c, g, or u
cgaacngacgggaagaanuc

SEQ ID NO: 5117 - RNA, 20 nt, Artificial Sequence
  Synthetic
  misc_feature (5)..(5): n is a, c, g, or u
  misc_feature (14)..(14): n is a, c, g, or u
agggnucguccgcnggauuc

SEQ ID NO: 5118 - RNA, 20 nt, Artificial Sequence
  Synthetic
  misc_feature (3)..(3): n is a, c, g, or u
uuncucucuuuuuugccuuc

SEQ ID NO: 5119 - RNA, 20 nt, Artificial Sequence
  Synthetic
uauaaagaauuuggagcuuc

SEQ ID NO: 5120 - RNA, 20 nt, Artificial Sequence
  Synthetic
agcuggagauugagaucuuc

SEQ ID NO: 5121 - RNA, 20 nt, Artificial Sequence
  Synthetic
caauagucggagcaggguuc

SEQ ID NO: 5122 - RNA, 20 nt, Artificial Sequence
  Synthetic
uuuacuagugcaauuuguuc

SEQ ID NO: 5123 - RNA, 20 nt, Artificial Sequence
  Synthetic
uugguaacagcgguauaaag

SEQ ID NO: 5124 - RNA, 20 nt, Artificial Sequence
  Synthetic
  misc_feature (15)..(15): n is a, c, g, or u
uggaacggcagacgnagaag

SEQ ID NO: 5125 - RNA, 20 nt, Artificial Sequence
  Synthetic
acaacaguaguuuccggaag

SEQ ID NO: 5126 - RNA, 20 nt, Artificial Sequence
  Synthetic
uccugccuuacuuuuggaag

SEQ ID NO: 5127 - RNA, 20 nt, Artificial Sequence
  Synthetic
ugcgacgugcagaggugaag

SEQ ID NO: 5128 - RNA, 20 nt, Artificial Sequence
  Synthetic
ccagucucuccaccucuaag

SEQ ID NO: 5129 - RNA, 20 nt, Artificial Sequence
  Synthetic
gaggacaggagguugguaag

SEQ ID NO: 5130 - RNA, 20 nt, Artificial Sequence
  Synthetic
uauaacuaaaagccagacag

SEQ ID NO: 5131 - RNA, 20 nt, Artificial Sequence
  Synthetic
aauggccaagccccaaccag

SEQ ID NO: 5132 - RNA, 20 nt, Artificial Sequence
  Synthetic
ugcugguggcuccaguucag

SEQ ID NO: 5133 - RNA, 20 nt, Artificial Sequence
  Synthetic
  misc_feature (3)..(3): n is a, c, g, or u
  misc_feature (6)..(6): n is a, c, g, or u
  misc_feature (10)..(10): n is a, c, g, or u
gcnggnauunuauauaagag

SEQ ID NO: 5134 - RNA, 20 nt, Artificial Sequence
  Synthetic
  misc_feature (5)..(5): n is a, c, g, or u
  misc_feature (14)..(14): n is a, c, g, or u
ccagnggauugggnacagag

SEQ ID NO: 5135 - RNA, 20 nt, Artificial Sequence
  Synthetic
cgcuccagaccggcugcgag

SEQ ID NO: 5136 - RNA, 20 nt, Artificial Sequence
  Synthetic
  misc_feature (13)..(13): n is a, c, g, or u
uggucuauaagcnggaggag

SEQ ID NO: 5137 - RNA, 20 nt, Artificial Sequence
  Synthetic
aauggcaaacaagguaggag

SEQ ID NO: 5138 - RNA, 20 nt, Artificial Sequence
  Synthetic
uaggaaaauaccuaugggag

SEQ ID NO: 5139 - RNA, 20 nt, Artificial Sequence
  Synthetic
cgcucgcagccggucuggag

SEQ ID NO: 5140 - RNA, 20 nt, Artificial Sequence
  Synthetic
  misc_feature (1)..(1): n is a, c, g, or u
ngugucucuuagagguggag

SEQ ID NO: 5141 - RNA, 20 nt, Artificial Sequence
  Synthetic
  misc_feature (13)..(13): n is a, c, g, or u
guauuuggugucnuuuggag

SEQ ID NO: 5142 - RNA, 20 nt, Artificial Sequence
  Synthetic
  misc_feature (14)..(14): n is a, c, g, or u
  misc_feature (17)..(17): n is a, c, g, or u
guuuggaacagcancangag

SEQ ID NO: 5143 - RNA, 20 nt, Artificial Sequence
  Synthetic
  misc_feature (6)..(6): n is a, c, g, or u
cacaanauagcuugccugag

SEQ ID NO: 5144 - RNA, 20 nt, Artificial Sequence
  Synthetic
  misc_feature (1)..(2): n is a, c, g, or u
nnucccccuagaaaauugag

SEQ ID NO: 5145 - RNA, 20 nt, Artificial Sequence
  Synthetic
  misc_feature (6)..(6): n is a, c, g, or u
  misc_feature (9)..(9): n is a, c, g, or u
  misc_feature (15)..(15): n is a, c, g, or u
  misc_feature (18)..(18): n is a, c, g, or u
uugganganccugcngcnag

SEQ ID NO: 5146 - RNA, 20 nt, Artificial Sequence
  Synthetic
  misc_feature (15)..(15): n is a, c, g, or u
  misc_feature (18)..(18): n is a, c, g, or u
cucaauucauuuuungunag

SEQ ID NO: 5147 - RNA, 20 nt, Artificial Sequence
  Synthetic
gacuucucucaauuuucuag

SEQ ID NO: 5148 - RNA, 20 nt, Artificial Sequence
  Synthetic
  misc_feature (5)..(5): n is a, c, g, or u
gaucnacgaccaccagcacg

SEQ ID NO: 5149 - RNA, 20 nt, Artificial Sequence
  Synthetic
  misc_feature (4)..(4): n is a, c, g, or u
cgcnggauucagcgccgacg

SEQ ID NO: 5150 - RNA, 20 nt, Artificial Sequence
  Synthetic
  misc_feature (16)..(16): n is a, c, g, or u
gaguaggucccgaacngacg

SEQ ID NO: 5151 - RNA, 20 nt, Artificial Sequence
  Synthetic
ccacaaaaugaggcgcuacg

SEQ ID NO: 5152 - RNA, 20 nt, Artificial Sequence
  Synthetic
acgucgcauggagaccaccg

SEQ ID NO: 5153 - RNA, 20 nt, Artificial Sequence
  Synthetic
  misc_feature (10)..(10): n is a, c, g, or u
uccaccccancaggccaccg

SEQ ID NO: 5154 - RNA, 20 nt, Artificial Sequence
  Synthetic
  misc_feature (14)..(15): n is a, c, g, or u
uuuucuagggggannacccg

SEQ ID NO: 5155 - RNA, 20 nt, Artificial Sequence
  Synthetic
  misc_feature (17)..(17): n is a, c, g, or u
ccuucucaucugccggnccg

SEQ ID NO: 5156 - RNA, 20 nt, Artificial Sequence
  Synthetic
  misc_feature (8)..(8): n is a, c, g, or u
  misc_feature (14)..(14): n is a, c, g, or u
accaggcncuguungauccg

SEQ ID NO: 5157 - RNA, 20 nt, Artificial Sequence
  Synthetic
  misc_feature (4)..(4): n is a, c, g, or u
acangugcaguuuccguccg

SEQ ID NO: 5158 - RNA, 20 nt, Artificial Sequence
  Synthetic
  misc_feature (16)..(16): n is a, c, g, or u
ugccaacuggauccuncgcg

SEQ ID NO: 5159 - RNA, 20 nt, Artificial Sequence
  Synthetic
  misc_feature (4)..(4): n is a, c, g, or u
agancuucgucugcgaggcg

SEQ ID NO: 5160 - RNA, 20 nt, Artificial Sequence
  Synthetic
uucgcuccagaccggcugcg

SEQ ID NO: 5161 - RNA, 20 nt, Artificial Sequence
  Synthetic
  misc_feature (18)..(18): n is a, c, g, or u
gcugccaacuggauccuncg

SEQ ID NO: 5162 - RNA, 20 nt, Artificial Sequence
  Synthetic
  misc_feature (3)..(3): n is a, c, g, or u
  misc_feature (17)..(17): n is a, c, g, or u
uunuguugaagucccanucg

SEQ ID NO: 5163 - RNA, 20 nt, Artificial Sequence
  Synthetic
  misc_feature (3)..(3): n is a, c, g, or u
  misc_feature (15)..(15): n is a, c, g, or u
ganuucuucccgucnguucg

SEQ ID NO: 5164 - RNA, 20 nt, Artificial Sequence
  Synthetic
uauuccuuggacucauaagg

SEQ ID NO: 5165 - RNA, 20 nt, Artificial Sequence
  Synthetic
cacuaguaaacugagccagg

SEQ ID NO: 5166 - RNA, 20 nt, Artificial Sequence
  Synthetic
aaaagaugauuaggcagagg

SEQ ID NO: 5167 - RNA, 20 nt, Artificial Sequence
  Synthetic
cuccaugcgacgugcagagg

SEQ ID NO: 5168 - RNA, 20 nt, Artificial Sequence
  Synthetic
  misc_feature (5)..(5): n is a, c, g, or u
ggagnccgcguaaagagagg

SEQ ID NO: 5169 - RNA, 20 nt, Artificial Sequence
  Synthetic
  misc_feature (11)..(11): n is a, c, g, or u
cugggaggagnugggggagg

SEQ ID NO: 5170 - RNA, 20 nt, Artificial Sequence
  Synthetic
  misc_feature (15)..(15): n is a, c, g, or u
gguggucuauaagcnggagg

SEQ ID NO: 5171 - RNA, 20 nt, Artificial Sequence
  Synthetic
  misc_feature (17)..(17): n is a, c, g, or u
gagggaguucuucuucnagg

SEQ ID NO: 5172 - RNA, 20 nt, Artificial Sequence
  Synthetic
ccaauggcaaacaagguagg

SEQ ID NO: 5173 - RNA, 20 nt, Artificial Sequence
  Synthetic
ugagaucuucugcgacgcgg

SEQ ID NO: 5174 - RNA, 20 nt, Artificial Sequence
  Synthetic
ccugcucguguuacaggcgg

SEQ ID NO: 5175 - RNA, 20 nt, Artificial Sequence
  Synthetic
cuucucucaauuuucuaggg

SEQ ID NO: 5176 - RNA, 20 nt, Artificial Sequence
  Synthetic
  misc_feature (2)..(2): n is a, c, g, or u
ancaggccaccguguggggg

SEQ ID NO: 5177 - RNA, 20 nt, Artificial Sequence
  Synthetic
  misc_feature (9)..(9): n is a, c, g, or u
  misc_feature (15)..(15): n is a, c, g, or u
caagcuaunuugugnugggg

SEQ ID NO: 5178 - RNA, 20 nt, Artificial Sequence
  Synthetic
uuuaggaaaauaccuauggg

SEQ ID NO: 5179 - RNA, 20 nt, Artificial Sequence
  Synthetic
aaugacuuuggcuuccuggg

SEQ ID NO: 5180 - RNA, 20 nt, Artificial Sequence
  Synthetic
acuaaaagccagacaguggg

SEQ ID NO: 5181 - RNA, 20 nt, Artificial Sequence
  Synthetic
  misc_feature (4)..(4): n is a, c, g, or u
ccancaggccaccguguggg

SEQ ID NO: 5182 - RNA, 20 nt, Artificial Sequence
  Synthetic
  misc_feature (3)..(3): n is a, c, g, or u
  misc_feature (6)..(6): n is a, c, g, or u
  misc_feature (18)..(18): n is a, c, g, or u
uunggngugcaauguucngg

SEQ ID NO: 5183 - RNA, 20 nt, Artificial Sequence
  Synthetic
  misc_feature (12)..(12): n is a, c, g, or u
  misc_feature (15)..(15): n is a, c, g, or u
  misc_feature (17)..(18): n is a, c, g, or u
acuguuggcaancuncnngg

SEQ ID NO: 5184 - RNA, 20 nt, Artificial Sequence
  Synthetic
  misc_feature (15)..(15): n is a, c, g, or u
  misc_feature (18)..(18): n is a, c, g, or u
cugagagcgguaugnuungg

SEQ ID NO: 5185 - RNA, 20 nt, Artificial Sequence
  Synthetic
caccucugcacgucgcaugg

SEQ ID NO: 5186 - RNA, 20 nt, Artificial Sequence
  Synthetic
  misc_feature (12)..(12): n is a, c, g, or u
ucuuguucccangaauaugg

SEQ ID NO: 5187 - RNA, 20 nt, Artificial Sequence
  Synthetic
uacuaacauugggaagcugg

SEQ ID NO: 5188 - RNA, 20 nt, Artificial Sequence
  Synthetic
aaaaaguugcauggugcugg

SEQ ID NO: 5189 - RNA, 20 nt, Artificial Sequence
  Synthetic
uucgcucgcagccggucugg

SEQ ID NO: 5190 - RNA, 20 nt, Artificial Sequence
  Synthetic
uagugcaauuuguucagugg

SEQ ID NO: 5191 - RNA, 20 nt, Artificial Sequence
  Synthetic
  misc_feature (17)..(17): n is a, c, g, or u
cccacacgguggccugnugg

SEQ ID NO: 5192 - RNA, 20 nt, Artificial Sequence
  Synthetic
  misc_feature (11)..(11): n is a, c, g, or u
  misc_feature (17)..(17): n is a, c, g, or u
ggcaagcuaunuugugnugg

SEQ ID NO: 5193 - RNA, 20 nt, Artificial Sequence
  Synthetic
agaaaggccuuguaaguugg

SEQ ID NO: 5194 - RNA, 20 nt, Artificial Sequence
  Synthetic
  misc_feature (8)..(8): n is a, c, g, or u
  misc_feature (14)..(14): n is a, c, g, or u
guuaugunauuggnaguugg

SEQ ID NO: 5195 - RNA, 20 nt, Artificial Sequence
  Synthetic
gguaagugauuggagguugg

SEQ ID NO: 5196 - RNA, 20 nt, Artificial Sequence
  Synthetic
  misc_feature (15)..(15): n is a, c, g, or u
gaguauuuggugucnuuugg

SEQ ID NO: 5197 - RNA, 20 nt, Artificial Sequence
  Synthetic
  misc_feature (16)..(16): n is a, c, g, or u
  misc_feature (19)..(19): n is a, c, g, or u
ggguuuggaacagcancang

SEQ ID NO: 5198 - RNA, 20 nt, Artificial Sequence
  Synthetic
  misc_feature (15)..(15): n is a, c, g, or u
  misc_feature (19)..(19): n is a, c, g, or u
accgcuucagcccunuacng

SEQ ID NO: 5199 - RNA, 20 nt, Artificial Sequence
  Synthetic
  misc_feature (13)..(13): n is a, c, g, or u
  misc_feature (19)..(19): n is a, c, g, or u
gaacggcagacgnagaagng

SEQ ID NO: 5200 - RNA, 20 nt, Artificial Sequence
  Synthetic
  misc_feature (1)..(1): n is a, c, g, or u
  misc_feature (13)..(13): n is a, c, g, or u
  misc_feature (19)..(19): n is a, c, g, or u
nagccccaagcgnccccgng

SEQ ID NO: 5201 - RNA, 20 nt, Artificial Sequence
  Synthetic
caaaaguaaggcaggaaaug

SEQ ID NO: 5202 - RNA, 20 nt, Artificial Sequence
  Synthetic
  misc_feature (6)..(7): n is a, c, g, or u
  misc_feature (13)..(15): n is a, c, g, or u
caagannugauannnaaaug

SEQ ID NO: 5203 - RNA, 20 nt, Artificial Sequence
  Synthetic
cguucacgguggucuccaug

SEQ ID NO: 5204 - RNA, 20 nt, Artificial Sequence
  Synthetic
ccauuggccaucagcgcaug

SEQ ID NO: 5205 - RNA, 20 nt, Artificial Sequence
  Synthetic
  misc_feature (8)..(9): n is a, c, g, or u
caacgacnngaaggggcaug

SEQ ID NO: 5206 - RNA, 20 nt, Artificial Sequence
  Synthetic
  misc_feature (10)..(10): n is a, c, g, or u
ugcacacggnccggcagaug

SEQ ID NO: 5207 - RNA, 20 nt, Artificial Sequence
  Synthetic
  misc_feature (8)..(8): n is a, c, g, or u
aagcccangaugaugggaug

SEQ ID NO: 5208 - RNA, 20 nt, Artificial Sequence
  Synthetic
  misc_feature (9)..(9): n is a, c, g, or u
cacugcaungccuguggaug

SEQ ID NO: 5209 - RNA, 20 nt, Artificial Sequence
  Synthetic
  misc_feature (13)..(13): n is a, c, g, or u
uccuaaagcccangaugaug

SEQ ID NO: 5210 - RNA, 20 nt, Artificial Sequence
  Synthetic
ggguccuaggaguccugaug

SEQ ID NO: 5211 - RNA, 20 nt, Artificial Sequence
  Synthetic
  misc_feature (12)..(12): n is a, c, g, or u
aucaaucuucungaagacug

SEQ ID NO: 5212 - RNA, 20 nt, Artificial Sequence
  Synthetic
ugauuggagguuggggacug

SEQ ID NO: 5213 - RNA, 20 nt, Artificial Sequence
  Synthetic
uuaaugacuuuggcuuccug

SEQ ID NO: 5214 - RNA, 20 nt, Artificial Sequence
  Synthetic
  misc_feature (8)..(8): n is a, c, g, or u
  misc_feature (17)..(17): n is a, c, g, or u
ucucuguncccaauccncug

SEQ ID NO: 5215 - RNA, 20 nt, Artificial Sequence
  Synthetic
uaccaauuuucuguuaucug

SEQ ID NO: 5216 - RNA, 20 nt, Artificial Sequence
  Synthetic
cuggagauugagaucuucug

SEQ ID NO: 5217 - RNA, 20 nt, Artificial Sequence
  Synthetic
uaacuaaaagccagacagug

SEQ ID NO: 5218 - RNA, 20 nt, Artificial Sequence
  Synthetic
uggccaagccccaaccagug

SEQ ID NO: 5219 - RNA, 20 nt, Artificial Sequence
  Synthetic
  misc_feature (11)..(11): n is a, c, g, or u
gucuauaagcnggaggagug

SEQ ID NO: 5220 - RNA, 20 nt, Artificial Sequence
  Synthetic
  misc_feature (8)..(8): n is a, c, g, or u
caccccancaggccaccgug

SEQ ID NO: 5221 - RNA, 20 nt, Artificial Sequence
  Synthetic
uuccuuggacucauaaggug

SEQ ID NO: 5222 - RNA, 20 nt, Artificial Sequence
  Synthetic
  misc_feature (3)..(3): n is a, c, g, or u
agnccgcguaaagagaggug

SEQ ID NO: 5223 - RNA, 20 nt, Artificial Sequence
  Synthetic
caggccaccgugugggggug

SEQ ID NO: 5224 - RNA, 20 nt, Artificial Sequence
  Synthetic
  misc_feature (6)..(6): n is a, c, g, or u
ccccancaggccaccgugug

SEQ ID NO: 5225 - RNA, 20 nt, Artificial Sequence
  Synthetic
  misc_feature (18)..(18): n is a, c, g, or u
aauuccagcagucccganug

SEQ ID NO: 5226 - RNA, 20 nt, Artificial Sequence
  Synthetic
  misc_feature (18)..(18): n is a, c, g, or u
ugugggucaccauauucnug

SEQ ID NO: 5227 - RNA, 20 nt, Artificial Sequence
  Synthetic
  misc_feature (5)..(5): n is a, c, g, or u
  misc_feature (18)..(18): n is a, c, g, or u
uuaangacugggaggagnug

SEQ ID NO: 5228 - RNA, 20 nt, Artificial Sequence
  Synthetic
  misc_feature (2)..(2): n is a, c, g, or u
  misc_feature (5)..(5): n is a, c, g, or u
  misc_feature (8)..(8): n is a, c, g, or u
cncunacnaaaaaugaauug

SEQ ID NO: 5229 - RNA, 20 nt, Artificial Sequence
  Synthetic
uccaaggaauacuaacauug

SEQ ID NO: 5230 - RNA, 20 nt, Artificial Sequence
  Synthetic
cauugggaagcuggagauug

SEQ ID NO: 5231 - RNA, 20 nt, Artificial Sequence
  Synthetic
cuucugcgacgcggcgauug

SEQ ID NO: 5232 - RNA, 20 nt, Artificial Sequence
  Synthetic
  misc_feature (16)..(16): n is a, c, g, or u
gaaaguuugucaacgnauug

SEQ ID NO: 5233 - RNA, 20 nt, Artificial Sequence
  Synthetic
auauggaugaucugguauug

SEQ ID NO: 5234 - RNA, 20 nt, Artificial Sequence
  Synthetic
agccuccaagcugugccuug

SEQ ID NO: 5235 - RNA, 20 nt, Artificial Sequence
  Synthetic
acacguagcgccucauuuug

SEQ ID NO: 5236 - RNA, 20 nt, Artificial Sequence
  Synthetic
  misc_feature (8)..(8): n is a, c, g, or u
  misc_feature (11)..(11): n is a, c, g, or u
  misc_feature (20)..(20): n is a, c, g, or u
gguggagnccncaggcacan

SEQ ID NO: 5237 - RNA, 20 nt, Artificial Sequence
  Synthetic
  misc_feature (11)..(11): n is a, c, g, or u
  misc_feature (16)..(16): n is a, c, g, or u
  misc_feature (20)..(20): n is a, c, g, or u
gguucauguanuguunacan

SEQ ID NO: 5238 - RNA, 20 nt, Artificial Sequence
  Synthetic
  misc_feature (20)..(20): n is a, c, g, or u
aacgccgcagacacauccan

SEQ ID NO: 5239 - RNA, 20 nt, Artificial Sequence
  Synthetic
  misc_feature (20)..(20): n is a, c, g, or u
caaauuccagcagucccgan

SEQ ID NO: 5240 - RNA, 20 nt, Artificial Sequence
  Synthetic
  misc_feature (2)..(2): n is a, c, g, or u
  misc_feature (16)..(16): n is a, c, g, or u
  misc_feature (20)..(20): n is a, c, g, or u
anucuaaagcaucccnguan

SEQ ID NO: 5241 - RNA, 20 nt, Artificial Sequence
  Synthetic
  misc_feature (11)..(11): n is a, c, g, or u
  misc_feature (20)..(20): n is a, c, g, or u
gagcaccucunucaacgacn

SEQ ID NO: 5242 - RNA, 20 nt, Artificial Sequence
  Synthetic
  misc_feature (5)..(5): n is a, c, g, or u
  misc_feature (11)..(11): n is a, c, g, or u
  misc_feature (13)..(14): n is a, c, g, or u
  misc_feature (20)..(20): n is a, c, g, or u
gcaanguugunannacaccn

SEQ ID NO: 5243 - RNA, 20 nt, Artificial Sequence
  Synthetic
  misc_feature (20)..(20): n is a, c, g, or u
cgugugggggugugaacccn

SEQ ID NO: 5244 - RNA, 20 nt, Artificial Sequence
  Synthetic
  misc_feature (5)..(5): n is a, c, g, or u
  misc_feature (11)..(11): n is a, c, g, or u
  misc_feature (20)..(20): n is a, c, g, or u
cccgngagggnucguccgcn

SEQ ID NO: 5245 - RNA, 20 nt, Artificial Sequence
  Synthetic
  misc_feature (2)..(2): n is a, c, g, or u
  misc_feature (8)..(8): n is a, c, g, or u
  misc_feature (11)..(11): n is a, c, g, or u
  misc_feature (17)..(17): n is a, c, g, or u
  misc_feature (20)..(20): n is a, c, g, or u
anuugganganccugcngcn

SEQ ID NO: 5246 - RNA, 20 nt, Artificial Sequence
  Synthetic
  misc_feature (2)..(2): n is a, c, g, or u
  misc_feature (8)..(9): n is a, c, g, or u
  misc_feature (18)..(18): n is a, c, g, or u
  misc_feature (20)..(20): n is a, c, g, or u
unaaauunnuuaugccancn

SEQ ID NO: 5247 - RNA, 20 nt, Artificial Sequence
  Synthetic
  misc_feature (15)..(15): n is a, c, g, or u
  misc_feature (18)..(18): n is a, c, g, or u
  misc_feature (20)..(20): n is a, c, g, or u
aagacuguuggcaancuncn

SEQ ID NO: 5248 - RNA, 20 nt, Artificial Sequence
  Synthetic
  misc_feature (20)..(20): n is a, c, g, or u
guauucccaucccaucaucn

SEQ ID NO: 5249 - RNA, 20 nt, Artificial Sequence
  Synthetic
  misc_feature (5)..(5): n is a, c, g, or u
  misc_feature (14)..(14): n is a, c, g, or u
  misc_feature (20)..(20): n is a, c, g, or u
auccngcggacgancccucn

SEQ ID NO: 5250 - RNA, 20 nt, Artificial Sequence
  Synthetic
  misc_feature (20)..(20): n is a, c, g, or u
uuugugggucaccauauucn

SEQ ID NO: 5251 - RNA, 20 nt, Artificial Sequence
  Synthetic
  misc_feature (20)..(20): n is a, c, g, or u
agcagggcccccagucuucn

SEQ ID NO: 5252 - RNA, 20 nt, Artificial Sequence
  Synthetic
  misc_feature (20)..(20): n is a, c, g, or u
ggcgagggaguucuucuucn

SEQ ID NO: 5253 - RNA, 20 nt, Artificial Sequence
  Synthetic
  misc_feature (2)..(2): n is a, c, g, or u
  misc_feature (5)..(5): n is a, c, g, or u
  misc_feature (8)..(8): n is a, c, g, or u
  misc_feature (20)..(20): n is a, c, g, or u
gnuunggngugcaauguucn

SEQ ID NO: 5254 - RNA, 20 nt, Artificial Sequence
  Synthetic
  misc_feature (20)..(20): n is a, c, g, or u
ggucuggaaagaaucccagn

SEQ ID NO: 5255 - RNA, 20 nt, Artificial Sequence
  Synthetic
  misc_feature (7)..(7): n is a, c, g, or u
  misc_feature (20)..(20): n is a, c, g, or u
auuuaangacugggaggagn

SEQ ID NO: 5256 - RNA, 20 nt, Artificial Sequence
  Synthetic
  misc_feature (11)..(11): n is a, c, g, or u
  misc_feature (17)..(17): n is a, c, g, or u
  misc_feature (20)..(20): n is a, c, g, or u
uggaauuugcncugaanagn

SEQ ID NO: 5257 - RNA, 20 nt, Artificial Sequence
  Synthetic
  misc_feature (20)..(20): n is a, c, g, or u
ucggcuggaacggcagacgn

SEQ ID NO: 5258 - RNA, 20 nt, Artificial Sequence
  Synthetic
  misc_feature (5)..(5): n is a, c, g, or u
  misc_feature (20)..(20): n is a, c, g, or u
ccuunccauggcugcucggn

SEQ ID NO: 5259 - RNA, 20 nt, Artificial Sequence
  Synthetic
  misc_feature (11)..(11): n is a, c, g, or u
  misc_feature (17)..(17): n is a, c, g, or u
  misc_feature (20)..(20): n is a, c, g, or u
aaacuuuccanucaaunggn

SEQ ID NO: 5260 - RNA, 20 nt, Artificial Sequence
  Synthetic
  misc_feature (20)..(20): n is a, c, g, or u
acccccacacgguggccugn

SEQ ID NO: 5261 - RNA, 20 nt, Artificial Sequence
  Synthetic
  misc_feature (14)..(14): n is a, c, g, or u
  misc_feature (20)..(20): n is a, c, g, or u
ucaggcaagcuaunuugugn

SEQ ID NO: 5262 - RNA, 20 nt, Artificial Sequence
  Synthetic
  misc_feature (19)..(20): n is a, c, g, or u
gccaacagucuuacauaann

SEQ ID NO: 5263 - RNA, 20 nt, Artificial Sequence
  Synthetic
  misc_feature (1)..(1): n is a, c, g, or u
  misc_feature (10)..(10): n is a, c, g, or u
  misc_feature (19)..(20): n is a, c, g, or u
nauucauuuncaucaagann

SEQ ID NO: 5264 - RNA, 20 nt, Artificial Sequence
  Synthetic
  misc_feature (14)..(14): n is a, c, g, or u
  misc_feature (17)..(17): n is a, c, g, or u
  misc_feature (19)..(20): n is a, c, g, or u
agacuguuggcaancuncnn

SEQ ID NO: 5265 - RNA, 20 nt, Artificial Sequence
  Synthetic
  misc_feature (2)..(2): n is a, c, g, or u
  misc_feature (7)..(7): n is a, c, g, or u
  misc_feature (17)..(17): n is a, c, g, or u
  misc_feature (19)..(20): n is a, c, g, or u
cnuaaanauuagacaanunn

SEQ ID NO: 5266 - RNA, 20 nt, Artificial Sequence
  Synthetic
  misc_feature (7)..(7): n is a, c, g, or u
  misc_feature (11)..(11): n is a, c, g, or u
  misc_feature (20)..(20): n is a, c, g, or u
cuuuganuuunuguacaaun

SEQ ID NO: 5267 - RNA, 20 nt, Artificial Sequence
  Synthetic
  misc_feature (20)..(20): n is a, c, g, or u
gugcugccaacuggauccun

SEQ ID NO: 5268 - RNA, 20 nt, Artificial Sequence
  Synthetic
  misc_feature (20)..(20): n is a, c, g, or u
gcuuggaggcuugaacagun

SEQ ID NO: 5269 - RNA, 20 nt, Artificial Sequence
  Synthetic
  misc_feature (7)..(7): n is a, c, g, or u
  misc_feature (10)..(10): n is a, c, g, or u
  misc_feature (16)..(16): n is a, c, g, or u
uguuuunganguauunaaau

SEQ ID NO: 5270 - RNA, 20 nt, Artificial Sequence
  Synthetic
  misc_feature (14)..(14): n is a, c, g, or u
gggggcccugcuangaacau

SEQ ID NO: 5271 - RNA, 20 nt, Artificial Sequence
  Synthetic
aguccaaggaauacuaacau

SEQ ID NO: 5272 - RNA, 20 nt, Artificial Sequence
  Synthetic
uggcuuuggggcauggacau

SEQ ID NO: 5273 - RNA, 20 nt, Artificial Sequence
  Synthetic
cuuggguggcuuuggggcau

SEQ ID NO: 5274 - RNA, 20 nt, Artificial Sequence
  Synthetic
cagaggugaaaaaguugcau

SEQ ID NO: 5275 - RNA, 20 nt, Artificial Sequence
  Synthetic
  misc_feature (4)..(4): n is a, c, g, or u
  misc_feature (7)..(7): n is a, c, g, or u
uacnucnaaaacaaaaagau

SEQ ID NO: 5276 - RNA, 20 nt, Artificial Sequence
  Synthetic
  misc_feature (13)..(13): n is a, c, g, or u
cccccagucuucnagaagau

SEQ ID NO: 5277 - RNA, 20 nt, Artificial Sequence
  Synthetic
  misc_feature (16)..(16): n is a, c, g, or u
uggaaagaaucccagnggau

SEQ ID NO: 5278 - RNA, 20 nt, Artificial Sequence
  Synthetic
  misc_feature (4)..(4): n is a, c, g, or u
  misc_feature (12)..(12): n is a, c, g, or u
gganggucaaunaccuggau

SEQ ID NO: 5279 - RNA, 20 nt, Artificial Sequence
  Synthetic
  misc_feature (17)..(17): n is a, c, g, or u
uccggaaguguggauangau

SEQ ID NO: 5280 - RNA, 20 nt, Artificial Sequence
  Synthetic
  misc_feature (15)..(15): n is a, c, g, or u
  misc_feature (18)..(18): n is a, c, g, or u
cuuccuguaaaucgnccnau

SEQ ID NO: 5281 - RNA, 20 nt, Artificial Sequence
  Synthetic
  misc_feature (18)..(18): n is a, c, g, or u
uggaaaguuugucaacgnau

SEQ ID NO: 5282 - RNA, 20 nt, Artificial Sequence
  Synthetic
  misc_feature (18)..(18): n is a, c, g, or u
uauucuucgauccaggunau

SEQ ID NO: 5283 - RNA, 20 nt, Artificial Sequence
  Synthetic
  misc_feature (14)..(14): n is a, c, g, or u
gcucuuguucccangaauau

SEQ ID NO: 5284 - RNA, 20 nt, Artificial Sequence
  Synthetic
ugucuggcuuuuaguuauau

SEQ ID NO: 5285 - RNA, 20 nt, Artificial Sequence
  Synthetic
ugcaaggaguuccgcaguau

SEQ ID NO: 5286 - RNA, 20 nt, Artificial Sequence
  Synthetic
uuauauggaugaucugguau

SEQ ID NO: 5287 - RNA, 20 nt, Artificial Sequence
  Synthetic
gagucuagacucugugguau

SEQ ID NO: 5288 - RNA, 20 nt, Artificial Sequence
  Synthetic
  misc_feature (14)..(14): n is a, c, g, or u
uucgcacuccuccngcuuau

SEQ ID NO: 5289 - RNA, 20 nt, Artificial Sequence
  Synthetic
  misc_feature (4)..(4): n is a, c, g, or u
acanuauuugcauacuuuau

SEQ ID NO: 5290 - RNA, 20 nt, Artificial Sequence
  Synthetic
  misc_feature (7)..(7): n is a, c, g, or u
gcucggnugugcugccaacu

SEQ ID NO: 5291 - RNA, 20 nt, Artificial Sequence
  Synthetic
  misc_feature (13)..(13): n is a, c, g, or u
caucaaucuucungaagacu

SEQ ID NO: 5292 - RNA, 20 nt, Artificial Sequence
  Synthetic
cucuuagagguggagagacu

SEQ ID NO: 5293 - RNA, 20 nt, Artificial Sequence
  Synthetic
aauaccacagagucuagacu

SEQ ID NO: 5294 - RNA, 20 nt, Artificial Sequence
  Synthetic
  misc_feature (6)..(6): n is a, c, g, or u
ccgucnguucgggaccuacu

SEQ ID NO: 5295 - RNA, 20 nt, Artificial Sequence
  Synthetic
uucuccuggcucaguuuacu

SEQ ID NO: 5296 - RNA, 20 nt, Artificial Sequence
  Synthetic
  misc_feature (8)..(8): n is a, c, g, or u
  misc_feature (16)..(16): n is a, c, g, or u
uucagganggucaaunaccu

SEQ ID NO: 5297 - RNA, 20 nt, Artificial Sequence
  Synthetic
gacaaacgggcaacauaccu

SEQ ID NO: 5298 - RNA, 20 nt, Artificial Sequence
  Synthetic
  misc_feature (12)..(13): n is a, c, g, or u
gacacccgggunnucccccu

SEQ ID NO: 5299 - RNA, 20 nt, Artificial Sequence
  Synthetic
gacgacgaggcagguccccu

SEQ ID NO: 5300 - RNA, 20 nt, Artificial Sequence
  Synthetic
  misc_feature (10)..(10): n is a, c, g, or u
  misc_feature (16)..(16): n is a, c, g, or u
ccucggaucnaacagngccu

SEQ ID NO: 5301 - RNA, 20 nt, Artificial Sequence
  Synthetic
caagccuccaagcugugccu

SEQ ID NO: 5302 - RNA, 20 nt, Artificial Sequence
  Synthetic
  misc_feature (14)..(14): n is a, c, g, or u
ugcugguggucgungauccu

SEQ ID NO: 5303 - RNA, 20 nt, Artificial Sequence
  Synthetic
uucuuuccagaccaucagcu

SEQ ID NO: 5304 - RNA, 20 nt, Artificial Sequence
  Synthetic
  misc_feature (4)..(4): n is a, c, g, or u
  misc_feature (10)..(10): n is a, c, g, or u
  misc_feature (16)..(16): n is a, c, g, or u
cgancccucncggggncgcu

SEQ ID NO: 5305 - RNA, 20 nt, Artificial Sequence
  Synthetic
caaggcacagcuuggaggcu

SEQ ID NO: 5306 - RNA, 20 nt, Artificial Sequence
  Synthetic
  misc_feature (13)..(13): n is a, c, g, or u
ggugcgacccgungucggcu

SEQ ID NO: 5307 - RNA, 20 nt, Artificial Sequence
  Synthetic
  misc_feature (9)..(9): n is a, c, g, or u
aagucccanucgggacugcu

SEQ ID NO: 5308 - RNA, 20 nt, Artificial Sequence
  Synthetic
ggacuccuaggaccccugcu

SEQ ID NO: 5309 - RNA, 20 nt, Artificial Sequence
  Synthetic
gggcucuguauuuuccugcu

SEQ ID NO: 5310 - RNA, 20 nt, Artificial Sequence
  Synthetic
guuuugcauggucccgugcu

SEQ ID NO: 5311 - RNA, 20 nt, Artificial Sequence
  Synthetic
ugaaaaaguugcauggugcu

SEQ ID NO: 5312 - RNA, 20 nt, Artificial Sequence
  Synthetic
cucacaauaccacagagucu

SEQ ID NO: 5313 - RNA, 20 nt, Artificial Sequence
  Synthetic
gagaaguccaccacgagucu

SEQ ID NO: 5314 - RNA, 20 nt, Artificial Sequence
  Synthetic
  misc_feature (2)..(2): n is a, c, g, or u
gnggauccagcugauggucu

SEQ ID NO: 5315 - RNA, 20 nt, Artificial Sequence
  Synthetic
  misc_feature (8)..(10): n is a, c, g, or u
  misc_feature (16)..(17): n is a, c, g, or u
cacauuunnnuaucannucu

SEQ ID NO: 5316 - RNA, 20 nt, Artificial Sequence
  Synthetic
ucucacaucaucaaucuucu

SEQ ID NO: 5317 - RNA, 20 nt, Artificial Sequence
  Synthetic
aucuucuuguugguucuucu

SEQ ID NO: 5318 - RNA, 20 nt, Artificial Sequence
  Synthetic
uggacuucucucaauuuucu

SEQ ID NO: 5319 - RNA, 20 nt, Artificial Sequence
  Synthetic
auaacuaaaagccagacagu

SEQ ID NO: 5320 - RNA, 20 nt, Artificial Sequence
  Synthetic
  misc_feature (6)..(6): n is a, c, g, or u
  misc_feature (11)..(11): n is a, c, g, or u
  misc_feature (15)..(15): n is a, c, g, or u
ggauunaaagnaggnacagu

SEQ ID NO: 5321 - RNA, 20 nt, Artificial Sequence
  Synthetic
auggccaagccccaaccagu

SEQ ID NO: 5322 - RNA, 20 nt, Artificial Sequence
  Synthetic
  misc_feature (1)..(1): n is a, c, g, or u
  misc_feature (13)..(13): n is a, c, g, or u
ncauccacaggcnaugcagu

SEQ ID NO: 5323 - RNA, 20 nt, Artificial Sequence
  Synthetic
acuagugcaauuuguucagu

SEQ ID NO: 5324 - RNA, 20 nt, Artificial Sequence
  Synthetic
gagguuccuugagcaagagu

SEQ ID NO: 5325 - RNA, 20 nt, Artificial Sequence
  Synthetic
  misc_feature (11)..(11): n is a, c, g, or u
  misc_feature (17)..(17): n is a, c, g, or u
uggguuaugunauuggnagu

SEQ ID NO: 5326 - RNA, 20 nt, Artificial Sequence
  Synthetic
auaagagagaauccacacgu

SEQ ID NO: 5327 - RNA, 20 nt, Artificial Sequence
  Synthetic
uuggccaucagcgcaugcgu

SEQ ID NO: 5328 - RNA, 20 nt, Artificial Sequence
  Synthetic
caauuuguucaguggugcgu

SEQ ID NO: 5329 - RNA, 20 nt, Artificial Sequence
  Synthetic
  misc_feature (8)..(8): n is a, c, g, or u
  misc_feature (17)..(17): n is a, c, g, or u
ccaaaagncccacaauncgu

SEQ ID NO: 5330 - RNA, 20 nt, Artificial Sequence
  Synthetic
accacagagucuagacucgu

SEQ ID NO: 5331 - RNA, 20 nt, Artificial Sequence
  Synthetic
ggucccgugcugguggucgu

SEQ ID NO: 5332 - RNA, 20 nt, Artificial Sequence
  Synthetic
  misc_feature (14)..(15): n is a, c, g, or u
cccaugccccuucnngucgu

SEQ ID NO: 5333 - RNA, 20 nt, Artificial Sequence
  Synthetic
guugguaagugauuggaggu

SEQ ID NO: 5334 - RNA, 20 nt, Artificial Sequence
  Synthetic
aagccccaaccagugggggu

SEQ ID NO: 5335 - RNA, 20 nt, Artificial Sequence
  Synthetic
cugacgcaacccccacuggu

SEQ ID NO: 5336 - RNA, 20 nt, Artificial Sequence
  Synthetic
  misc_feature (7)..(7): n is a, c, g, or u
  misc_feature (13)..(13): n is a, c, g, or u
cggaucnaacagngccuggu

SEQ ID NO: 5337 - RNA, 20 nt, Artificial Sequence
  Synthetic
acagagucuagacucguggu

SEQ ID NO: 5338 - RNA, 20 nt, Artificial Sequence
  Synthetic
cucccggaccgccgauuggu

SEQ ID NO: 5339 - RNA, 20 nt, Artificial Sequence
  Synthetic
aaagaauuuggagcuucugu

SEQ ID NO: 5340 - RNA, 20 nt, Artificial Sequence
  Synthetic
acaguaguuuccggaagugu

SEQ ID NO: 5341 - RNA, 20 nt, Artificial Sequence
  Synthetic
  misc_feature (10)..(10): n is a, c, g, or u
uuuggugucnuuuggagugu

SEQ ID NO: 5342 - RNA, 20 nt, Artificial Sequence
  Synthetic
caaaaugaggcgcuacgugu

SEQ ID NO: 5343 - RNA, 20 nt, Artificial Sequence
  Synthetic
  misc_feature (7)..(7): n is a, c, g, or u
accccancaggccaccgugu

SEQ ID NO: 5344 - RNA, 20 nt, Artificial Sequence
  Synthetic
  misc_feature (5)..(5): n is a, c, g, or u
  misc_feature (17)..(17): n is a, c, g, or u
ccaanuguccuuguuunugu

SEQ ID NO: 5345 - RNA, 20 nt, Artificial Sequence
  Synthetic
acaggcgguguguuucuugu

SEQ ID NO: 5346 - RNA, 20 nt, Artificial Sequence
  Synthetic
  misc_feature (5)..(5): n is a, c, g, or u
  misc_feature (19)..(19): n is a, c, g, or u
guuunuguugaagucccanu

SEQ ID NO: 5347 - RNA, 20 nt, Artificial Sequence
  Synthetic
  misc_feature (10)..(10): n is a, c, g, or u
  misc_feature (13)..(13): n is a, c, g, or u
  misc_feature (19)..(19): n is a, c, g, or u
uguaaaucgnccnauuganu

SEQ ID NO: 5348 - RNA, 20 nt, Artificial Sequence
  Synthetic
  misc_feature (6)..(6): n is a, c, g, or u
  misc_feature (19)..(19): n is a, c, g, or u
uuuaangacugggaggagnu

SEQ ID NO: 5349 - RNA, 20 nt, Artificial Sequence
  Synthetic
  misc_feature (19)..(19): n is a, c, g, or u
aacuuguccuggcuaucgnu

SEQ ID NO: 5350 - RNA, 20 nt, Artificial Sequence
  Synthetic
  misc_feature (19)..(19): n is a, c, g, or u
cccccacacgguggccugnu

SEQ ID NO: 5351 - RNA, 20 nt, Artificial Sequence
  Synthetic
  misc_feature (13)..(13): n is a, c, g, or u
  misc_feature (19)..(19): n is a, c, g, or u
caggcaagcuaunuugugnu

SEQ ID NO: 5352 - RNA, 20 nt, Artificial Sequence
  Synthetic
  misc_feature (19)..(19): n is a, c, g, or u
cgcucucaggcaagcuaunu

SEQ ID NO: 5353 - RNA, 20 nt, Artificial Sequence
  Synthetic
  misc_feature (1)..(1): n is a, c, g, or u
  misc_feature (6)..(6): n is a, c, g, or u
  misc_feature (19)..(19): n is a, c, g, or u
nuuacnaaauauuuuccunu

SEQ ID NO: 5354 - RNA, 20 nt, Artificial Sequence
  Synthetic
  misc_feature (3)..(3): n is a, c, g, or u
uuncucccggaccgccgauu

SEQ ID NO: 5355 - RNA, 20 nt, Artificial Sequence
  Synthetic
  misc_feature (12)..(12): n is a, c, g, or u
  misc_feature (17)..(17): n is a, c, g, or u
cuaacaugggcnuaaanauu

SEQ ID NO: 5356 - RNA, 20 nt, Artificial Sequence
  Synthetic
uauauggaugaucugguauu

SEQ ID NO: 5357 - RNA, 20 nt, Artificial Sequence
  Synthetic
cagcgcaugcguggaaccuu

SEQ ID NO: 5358 - RNA, 20 nt, Artificial Sequence
  Synthetic
ucccaauguuaguauuccuu

SEQ ID NO: 5359 - RNA, 20 nt, Artificial Sequence
  Synthetic
  misc_feature (3)..(3): n is a, c, g, or u
  misc_feature (9)..(9): n is a, c, g, or u
  misc_feature (15)..(15): n is a, c, g, or u
gancccucncggggncgcuu

SEQ ID NO: 5360 - RNA, 20 nt, Artificial Sequence
  Synthetic
agcugugccuuggguggcuu

SEQ ID NO: 5361 - RNA, 20 nt, Artificial Sequence
  Synthetic
  misc_feature (4)..(4): n is a, c, g, or u
gucnuuaaauacacagucuu

SEQ ID NO: 5362 - RNA, 20 nt, Artificial Sequence
  Synthetic
  misc_feature (7)..(7): n is a, c, g, or u
  misc_feature (9)..(9): n is a, c, g, or u
  misc_feature (16)..(16): n is a, c, g, or u
aaguuuncnaaaacanucuu

SEQ ID NO: 5363 - RNA, 20 nt, Artificial Sequence
  Synthetic
acagucuuugauguauucuu

SEQ ID NO: 5364 - RNA, 20 nt, Artificial Sequence
  Synthetic
  misc_feature (2)..(2): n is a, c, g, or u
anagaaaggccuuguaaguu

SEQ ID NO: 5365 - RNA, 20 nt, Artificial Sequence
  Synthetic
  misc_feature (10)..(10): n is a, c, g, or u
  misc_feature (16)..(16): n is a, c, g, or u
ggguuaugunauuggnaguu

SEQ ID NO: 5366 - RNA, 20 nt, Artificial Sequence
  Synthetic
uugguaagugauuggagguu

SEQ ID NO: 5367 - RNA, 20 nt, Artificial Sequence
  Synthetic
ugacgcaacccccacugguu

SEQ ID NO: 5368 - RNA, 20 nt, Artificial Sequence
  Synthetic
  misc_feature (5)..(5): n is a, c, g, or u
  misc_feature (17)..(17): n is a, c, g, or u
cuganuucuucccgucnguu

SEQ ID NO: 5369 - RNA, 20 nt, Artificial Sequence
  Synthetic
  misc_feature (15)..(15): n is a, c, g, or u
caguuccaccaggcncuguu

SEQ ID NO: 5370 - RNA, 20 nt, Artificial Sequence
  Synthetic
uuccggaaacuacuguuguu

SEQ ID NO: 5371 - RNA, 20 nt, Artificial Sequence
  Synthetic
  misc_feature (18)..(18): n is a, c, g, or u
uccugggugggcaauaanuu

SEQ ID NO: 5372 - RNA, 20 nt, Artificial Sequence
  Synthetic
  misc_feature (11)..(12): n is a, c, g, or u
  misc_feature (18)..(18): n is a, c, g, or u
ucuuacauaannggacunuu

SEQ ID NO: 5373 - RNA, 20 nt, Artificial Sequence
  Synthetic
  misc_feature (7)..(7): n is a, c, g, or u
uggauangauaggggcauuu

SEQ ID NO: 5374 - RNA, 20 nt, Artificial Sequence
  Synthetic
ccacacguagcgccucauuu

SEQ ID NO: 5375 - RNA, 20 nt, Artificial Sequence
  Synthetic
gaaacaguucuugaguauuu

SEQ ID NO: 5376 - RNA, 20 nt, Artificial Sequence
  Synthetic
gcugugccuuggguggcuuu

SEQ ID NO: 5377 - RNA, 20 nt, Artificial Sequence
  Synthetic
  misc_feature (6)..(6): n is a, c, g, or u
  misc_feature (10)..(10): n is a, c, g, or u
gcccunuacngggaugcuuu

SEQ ID NO: 5378 - RNA, 20 nt, Artificial Sequence
  Synthetic
  misc_feature (7)..(7): n is a, c, g, or u
  misc_feature (16)..(16): n is a, c, g, or u
ucaacgnauugugggncuuu

SEQ ID NO: 5379 - RNA, 20 nt, Artificial Sequence
  Synthetic
caguuuccguccgaggguuu

SEQ ID NO: 5380 - RNA, 20 nt, Artificial Sequence
  Synthetic
acauuuccugccuuacuuuu

SEQ ID NO: 5381 - RNA, 20 nt, Artificial Sequence
  Synthetic
uaaccccaucuuuuuguuuu

SEQ ID NO: 5382 - RNA, 17 nt, Artificial Sequence
  Synthetic
  misc_feature (5)..(5): n is a, c, g, or u
gagancuucgucugcga

SEQ ID NO: 5383 - RNA, 17 nt, Artificial Sequence
  Synthetic
gcgacgugcagagguga

SEQ ID NO: 5384 - RNA, 17 nt, Artificial Sequence
  Synthetic
ggucgcaccucucuuua

SEQ ID NO: 5385 - RNA, 17 nt, Artificial Sequence
  Synthetic
gauuggagguuggggac

SEQ ID NO: 5386 - RNA, 17 nt, Artificial Sequence
  Synthetic
guaaacaaaggacgucc

SEQ ID NO: 5387 - RNA, 17 nt, Artificial Sequence
  Synthetic
gagaucuucugcgacgc

SEQ ID NO: 5388 - RNA, 17 nt, Artificial Sequence
  Synthetic
  misc_feature (2)..(2): n is a, c, g, or u
gnccgcguaaagagagg

SEQ ID NO: 5389 - RNA, 17 nt, Artificial Sequence
  Synthetic
gaaaggccuuguaaguu

SEQ ID NO: 5390 - RNA, 20 nt, Artificial Sequence
  Synthetic
ggaccccugcucguguuaca

SEQ ID NO: 5391 - RNA, 20 nt, Artificial Sequence
  Synthetic
ggcguucacgguggucucca

SEQ ID NO: 5392 - RNA, 20 nt, Artificial Sequence
  Synthetic
ggccauuggccaucagcgca

SEQ ID NO: 5393 - RNA, 20 nt, Artificial Sequence
  Synthetic
gagauugagaucuucugcga

SEQ ID NO: 5394 - RNA, 20 nt, Artificial Sequence
  Synthetic
gccgauugguggaagcagga

SEQ ID NO: 5395 - RNA, 20 nt, Artificial Sequence
  Synthetic
gauaacagaaaauugguaac

SEQ ID NO: 5396 - RNA, 20 nt, Artificial Sequence
  Synthetic
gcuccucugccgauccauac

SEQ ID NO: 5397 - RNA, 20 nt, Artificial Sequence
  Synthetic
gucccgucggcgcugaaucc

SEQ ID NO: 5398 - RNA, 20 nt, Artificial Sequence
  Synthetic
gacguaaacaaaggacgucc

SEQ ID NO: 5399 - RNA, 20 nt, Artificial Sequence
  Synthetic
gccuccugcuuccaccaauc

SEQ ID NO: 5400 - RNA, 20 nt, Artificial Sequence
  Synthetic
gggcuuggccauuggccauc

SEQ ID NO: 5401 - RNA, 20 nt, Artificial Sequence
  Synthetic
  misc_feature (5)..(5): n is a, c, g, or u
ggagnccgcguaaagagagg

SEQ ID NO: 5402 - RNA, 20 nt, Artificial Sequence
  Synthetic
  misc_feature (20)..(20): n is a, c, g, or u
gugcugccaacuggauccun

SEQ ID NO: 5403 - RNA, 17 nt, Artificial Sequence
  Synthetic
ccccugcucguguuaca

SEQ ID NO: 5404 - RNA, 17 nt, Artificial Sequence
  Synthetic
cacaaagguuccacgca

SEQ ID NO: 5405 - RNA, 17 nt, Artificial Sequence
  Synthetic
cauuggccaucagcgca

SEQ ID NO: 5406 - RNA, 17 nt, Artificial Sequence
  Synthetic
auugagaucuucugcga

SEQ ID NO: 5407 - RNA, 17 nt, Artificial Sequence
  Synthetic
ccucugccgauccauac

SEQ ID NO: 5408 - RNA, 17 nt, Artificial Sequence
  Synthetic
ccgucggcgcugaaucc

SEQ ID NO: 5409 - RNA, 17 nt, Artificial Sequence
  Synthetic
  misc_feature (7)..(7): n is a, c, g, or u
acgaagnucucaaucgc

SEQ ID NO: 5410 - RNA, 17 nt, Artificial Sequence
  Synthetic
uuuguuuacgucccguc

SEQ ID NO: 5411 - RNA, 17 nt, Artificial Sequence
  Synthetic
  misc_feature (10)..(10): n is a, c, g, or u
cgauugagancuucguc

SEQ ID NO: 5412 - RNA, 17 nt, Artificial Sequence
  Synthetic
  misc_feature (7)..(7): n is a, c, g, or u
cuaucgnuggauguguc

SEQ ID NO: 5413 - RNA, 17 nt, Artificial Sequence
  Synthetic
uggagauugagaucuuc

SEQ ID NO: 5414 - RNA, 17 nt, Artificial Sequence
  Synthetic
ugcaauuuguucagugg

SEQ ID NO: 5415 - RNA, 17 nt, Artificial Sequence
  Synthetic
ccccaaccagugggggu

SEQ ID NO: 5416 - RNA, 20 nt, Artificial Sequence
  Synthetic
agccacaaagguuccacgca

SEQ ID NO: 5417 - RNA, 20 nt, Artificial Sequence
  Synthetic
  misc_feature (8)..(8): n is a, c, g, or u
auugagancuucgucugcga

SEQ ID NO: 5418 - RNA, 20 nt, Artificial Sequence
  Synthetic
caugcgacgugcagagguga

SEQ ID NO: 5419 - RNA, 20 nt, Artificial Sequence
  Synthetic
acgggucgcaccucucuuua

SEQ ID NO: 5420 - RNA, 20 nt, Artificial Sequence
  Synthetic
auugagaucuucugcgacgc

SEQ ID NO: 5421 - RNA, 20 nt, Artificial Sequence
  Synthetic
  misc_feature (10)..(10): n is a, c, g, or u
cagacgaagnucucaaucgc

SEQ ID NO: 5422 - RNA, 20 nt, Artificial Sequence
  Synthetic
uccuuuguuuacgucccguc

SEQ ID NO: 5423 - RNA, 20 nt, Artificial Sequence
  Synthetic
  misc_feature (13)..(13): n is a, c, g, or u
cggcgauugagancuucguc

SEQ ID NO: 5424 - RNA, 20 nt, Artificial Sequence
  Synthetic
  misc_feature (10)..(10): n is a, c, g, or u
uggcuaucgnuggauguguc

SEQ ID NO: 5425 - RNA, 20 nt, Artificial Sequence
  Synthetic
  misc_feature (5)..(5): n is a, c, g, or u
  misc_feature (14)..(14): n is a, c, g, or u
agggnucguccgcnggauuc

SEQ ID NO: 5426 - RNA, 20 nt, Artificial Sequence
  Synthetic
agcuggagauugagaucuuc

SEQ ID NO: 5427 - RNA, 20 nt, Artificial Sequence
  Synthetic
  misc_feature (13)..(13): n is a, c, g, or u
uggucuauaagcnggaggag

SEQ ID NO: 5428 - RNA, 20 nt, Artificial Sequence
  Synthetic
  misc_feature (6)..(6): n is a, c, g, or u
cacaanauagcuugccugag

SEQ ID NO: 5429 - RNA, 20 nt, Artificial Sequence
  Synthetic
uucgcucgcagccggucugg

SEQ ID NO: 5430 - RNA, 20 nt, Artificial Sequence
  Synthetic
uagugcaauuuguucagugg

SEQ ID NO: 5431 - RNA, 20 nt, Artificial Sequence
  Synthetic
auaagagagaauccacacgu

SEQ ID NO: 5432 - RNA, 20 nt, Artificial Sequence
  Synthetic
aagccccaaccagugggggu

SEQ ID NO: 5433 - RNA, 20 nt, Artificial Sequence
  Synthetic
  misc_feature (2)..(2): n is a, c, g, or u
anagaaaggccuuguaaguu

SEQ ID NO: 5434 - RNA, 17 nt, Artificial Sequence
  Synthetic
guucacgguggucucca

SEQ ID NO: 5435 - RNA, 17 nt, Artificial Sequence
  Synthetic
gauugguggaagcagga

SEQ ID NO: 5436 - RNA, 17 nt, Artificial Sequence
  Synthetic
ggugacccacaaaauga

SEQ ID NO: 5437 - RNA, 17 nt, Artificial Sequence
  Synthetic
  misc_feature (16)..(16): n is a, c, g, or u
ggaacagacggggagnc

SEQ ID NO: 5438 - RNA, 17 nt, Artificial Sequence
  Synthetic
  misc_feature (2)..(2): n is a, c, g, or u
  misc_feature (11)..(11): n is a, c, g, or u
gnucguccgcnggauuc

SEQ ID NO: 5439 - RNA, 17 nt, Artificial Sequence
  Synthetic
gcuccagaccggcugcg

SEQ ID NO: 5440 - RNA, 17 nt, Artificial Sequence
  Synthetic
  misc_feature (9)..(9): n is a, c, g, or u
  misc_feature (12)..(12): n is a, c, g, or u
  misc_feature (14)..(15): n is a, c, g, or u
guuggcaancuncnngg

SEQ ID NO: 5441 - RNA, 17 nt, Artificial Sequence
  Synthetic
gcucgcagccggucugg

SEQ ID NO: 5442 - RNA, 20 nt, Artificial Sequence
  Synthetic
  misc_feature (8)..(8): n is a, c, g, or u
  misc_feature (12)..(12): n is a, c, g, or u
gcaucccnguanagggcuga

SEQ ID NO: 5443 - RNA, 20 nt, Artificial Sequence
  Synthetic
  misc_feature (3)..(4): n is a, c, g, or u
gannuucgcuccagaccggc

SEQ ID NO: 5444 - RNA, 20 nt, Artificial Sequence
  Synthetic
  misc_feature (19)..(19): n is a, c, g, or u
gaaggaacagacggggagnc

SEQ ID NO: 5445 - RNA, 20 nt, Artificial Sequence
  Synthetic
  misc_feature (13)..(13): n is a, c, g, or u
  misc_feature (19)..(19): n is a, c, g, or u
gaacggcagacgnagaagng

SEQ ID NO: 5446 - RNA, 17 nt, Artificial Sequence
  Synthetic
  misc_feature (1)..(1): n is a, c, g, or u
  misc_feature (7)..(7): n is a, c, g, or u
  misc_feature (10)..(10): n is a, c, g, or u
ngggcgnuanagcccca

SEQ ID NO: 5447 - RNA, 17 nt, Artificial Sequence
  Synthetic
  misc_feature (5)..(5): n is a, c, g, or u
  misc_feature (9)..(9): n is a, c, g, or u
ucccnguanagggcuga

SEQ ID NO: 5448 - RNA, 17 nt, Artificial Sequence
  Synthetic
aacagaaaauugguaac

SEQ ID NO: 5449 - RNA, 17 nt, Artificial Sequence
  Synthetic
  misc_feature (1)..(1): n is a, c, g, or u
nuucgcuccagaccggc

SEQ ID NO: 5450 - RNA, 17 nt, Artificial Sequence
  Synthetic
  misc_feature (4)..(4): n is a, c, g, or u
ucgnuggaugugucugc

SEQ ID NO: 5451 - RNA, 17 nt, Artificial Sequence
  Synthetic
uccugcuuccaccaauc

SEQ ID NO: 5452 - RNA, 17 nt, Artificial Sequence
  Synthetic
cuuggccauuggccauc

SEQ ID NO: 5453 - RNA, 17 nt, Artificial Sequence
  Synthetic
  misc_feature (10)..(10): n is a, c, g, or u
ucuauaagcnggaggag

SEQ ID NO: 5454 - RNA, 17 nt, Artificial Sequence
  Synthetic
  misc_feature (3)..(3): n is a, c, g, or u
aanauagcuugccugag

SEQ ID NO: 5455 - RNA, 17 nt, Artificial Sequence
  Synthetic
  misc_feature (10)..(10): n is a, c, g, or u
  misc_feature (16)..(16): n is a, c, g, or u
cggcagacgnagaagng

SEQ ID NO: 5456 - RNA, 17 nt, Artificial Sequence
  Synthetic
  misc_feature (17)..(17): n is a, c, g, or u
cugccaacuggauccun

SEQ ID NO: 5457 - RNA, 17 nt, Artificial Sequence
  Synthetic
agagagaauccacacgu

SEQ ID NO: 5458 - RNA, 20 nt, Artificial Sequence
  Synthetic
  misc_feature (4)..(4): n is a, c, g, or u
  misc_feature (10)..(10): n is a, c, g, or u
  misc_feature (13)..(13): n is a, c, g, or u
aagngggcgnuanagcccca

SEQ ID NO: 5459 - RNA, 20 nt, Artificial Sequence
  Synthetic
uauggugacccacaaaauga

SEQ ID NO: 5460 - RNA, 20 nt, Artificial Sequence
  Synthetic
agugauuggagguuggggac

SEQ ID NO: 5461 - RNA, 20 nt, Artificial Sequence
  Synthetic
  misc_feature (7)..(7): n is a, c, g, or u
cuaucgnuggaugugucugc

SEQ ID NO: 5462 - RNA, 20 nt, Artificial Sequence
  Synthetic
uucgcuccagaccggcugcg

SEQ ID NO: 5463 - RNA, 20 nt, Artificial Sequence
  Synthetic
  misc_feature (12)..(12): n is a, c, g, or u
  misc_feature (15)..(15): n is a, c, g, or u
  misc_feature (17)..(18): n is a, c, g, or u
acuguuggcaancuncnngg

SEQ ID NO: 5464 - RNA, 17 nt, Artificial Sequence
  Synthetic
agaggaagaugauaaaa

SEQ ID NO: 5465 - RNA, 17 nt, Artificial Sequence
  Synthetic
guuggcgaaaagacaaa

SEQ ID NO: 5466 - RNA, 17 nt, Artificial Sequence
  Synthetic
gcuuauagaccaccaaa

SEQ ID NO: 5467 - RNA, 17 nt, Artificial Sequence
  Synthetic
  misc_feature (3)..(3): n is a, c, g, or u
  misc_feature (8)..(8): n is a, c, g, or u
  misc_feature (12)..(12): n is a, c, g, or u
uanuguunacanagaaa

SEQ ID NO: 5468 - RNA, 17 nt, Artificial Sequence
  Synthetic
ucauccauauaacuaaa

SEQ ID NO: 5469 - RNA, 17 nt, Artificial Sequence
  Synthetic
uuuucgccaacuuacaa

SEQ ID NO: 5470 - RNA, 17 nt, Artificial Sequence
  Synthetic
gccccaaagccacccaa

SEQ ID NO: 5471 - RNA, 17 nt, Artificial Sequence
  Synthetic
caauguccaugccccaa

SEQ ID NO: 5472 - RNA, 17 nt, Artificial Sequence
  Synthetic
  misc_feature (1)..(1): n is a, c, g, or u
  misc_feature (4)..(4): n is a, c, g, or u
  misc_feature (7)..(7): n is a, c, g, or u
  misc_feature (10)..(10): n is a, c, g, or u
  misc_feature (13)..(13): n is a, c, g, or u
ngunaanggngcngcaa

SEQ ID NO: 5473 - RNA, 17 nt, Artificial Sequence
  Synthetic
  misc_feature (11)..(11): n is a, c, g, or u
acgggaagaanucagaa

SEQ ID NO: 5474 - RNA, 17 nt, Artificial Sequence
  Synthetic
gccagacagugggggaa

SEQ ID NO: 5475 - RNA, 17 nt, Artificial Sequence
  Synthetic
uugcauacuuuauggaa

SEQ ID NO: 5476 - RNA, 17 nt, Artificial Sequence
  Synthetic
auggagaccaccgugaa

SEQ ID NO: 5477 - RNA, 17 nt, Artificial Sequence
  Synthetic
cauagguauuuuccuaa

SEQ ID NO: 5478 - RNA, 17 nt, Artificial Sequence
  Synthetic
  misc_feature (6)..(6): n is a, c, g, or u
  misc_feature (12)..(12): n is a, c, g, or u
uguucngguganucuaa

SEQ ID NO: 5479 - RNA, 17 nt, Artificial Sequence
  Synthetic
uucucuuccaaaaguaa

SEQ ID NO: 5480 - RNA, 17 nt, Artificial Sequence
  Synthetic
cggcugcgagcgaaaca

SEQ ID NO: 5481 - RNA, 17 nt, Artificial Sequence
  Synthetic
  misc_feature (6)..(6): n is a, c, g, or u
  misc_feature (12)..(12): n is a, c, g, or u
uguaunacugcnaaaca

SEQ ID NO: 5482 - RNA, 17 nt, Artificial Sequence
  Synthetic
  misc_feature (9)..(9): n is a, c, g, or u
agagacacncauccaca

SEQ ID NO: 5483 - RNA, 17 nt, Artificial Sequence
  Synthetic
agcaaacacuuggcaca

SEQ ID NO: 5484 - RNA, 17 nt, Artificial Sequence
  Synthetic
  misc_feature (3)..(3): n is a, c, g, or u
  misc_feature (6)..(6): n is a, c, g, or u
ucnacncaguuccacca

SEQ ID NO: 5485 - RNA, 17 nt, Artificial Sequence
  Synthetic
ucuguucaccagcacca

SEQ ID NO: 5486 - RNA, 17 nt, Artificial Sequence
  Synthetic
ccaccagcacgggacca

SEQ ID NO: 5487 - RNA, 17 nt, Artificial Sequence
  Synthetic
  misc_feature (4)..(4): n is a, c, g, or u
uganagaggugcuccca

SEQ ID NO: 5488 - RNA, 17 nt, Artificial Sequence
  Synthetic
agagagauucuguccca

SEQ ID NO: 5489 - RNA, 17 nt, Artificial Sequence
  Synthetic
uugcucggcaacggcca

SEQ ID NO: 5490 - RNA, 17 nt, Artificial Sequence
  Synthetic
cugauggccaauggcca

SEQ ID NO: 5491 - RNA, 17 nt, Artificial Sequence
  Synthetic
  misc_feature (1)..(1): n is a, c, g, or u
nacuguucaagccucca

SEQ ID NO: 5492 - RNA, 17 nt, Artificial Sequence
  Synthetic
auaagggucaaugucca

SEQ ID NO: 5493 - RNA, 17 nt, Artificial Sequence
  Synthetic
gagccacaaagguucca

SEQ ID NO: 5494 - RNA, 17 nt, Artificial Sequence
  Synthetic
cauaccgcucucaggca

SEQ ID NO: 5495 - RNA, 17 nt, Artificial Sequence
  Synthetic
  misc_feature (1)..(1): n is a, c, g, or u
  misc_feature (4)..(4): n is a, c, g, or u
  misc_feature (15)..(15): n is a, c, g, or u
nggncuccaccccanca

SEQ ID NO: 5496 - RNA, 17 nt, Artificial Sequence
  Synthetic
  misc_feature (1)..(1): n is a, c, g, or u
  misc_feature (12)..(12): n is a, c, g, or u
  misc_feature (15)..(15): n is a, c, g, or u
nugggguggagnccnca

SEQ ID NO: 5497 - RNA, 17 nt, Artificial Sequence
  Synthetic
  misc_feature (1)..(1): n is a, c, g, or u
  misc_feature (4)..(4): n is a, c, g, or u
naancauaccgcucuca

SEQ ID NO: 5498 - RNA, 17 nt, Artificial Sequence
  Synthetic
ugguuauccugcucuca

SEQ ID NO: 5499 - RNA, 17 nt, Artificial Sequence
  Synthetic
  misc_feature (9)..(9): n is a, c, g, or u
ucauguccnacuguuca

SEQ ID NO: 5500 - RNA, 17 nt, Artificial Sequence
  Synthetic
uauaaagggacucaaga

SEQ ID NO: 5501 - RNA, 17 nt, Artificial Sequence
  Synthetic
  misc_feature (6)..(6): n is a, c, g, or u
gagagnaauuccacaga

SEQ ID NO: 5502 - RNA, 17 nt, Artificial Sequence
  Synthetic
  misc_feature (2)..(2): n is a, c, g, or u
  misc_feature (10)..(10): n is a, c, g, or u
unauacaggnauacaga

SEQ ID NO: 5503 - RNA, 17 nt, Artificial Sequence
  Synthetic
auugaugaugugagaga

SEQ ID NO: 5504 - RNA, 17 nt, Artificial Sequence
  Synthetic
cuguuguuagacgacga

SEQ ID NO: 5505 - RNA, 17 nt, Artificial Sequence
  Synthetic
uuauugcccacccagga

SEQ ID NO: 5506 - RNA, 17 nt, Artificial Sequence
  Synthetic
  misc_feature (1)..(1): n is a, c, g, or u
  misc_feature (3)..(3): n is a, c, g, or u
  misc_feature (12)..(12): n is a, c, g, or u
ngnucuuuguanuagga

SEQ ID NO: 5507 - RNA, 17 nt, Artificial Sequence
  Synthetic
  misc_feature (9)..(9): n is a, c, g, or u
  misc_feature (13)..(13): n is a, c, g, or u
ucagcccunuacnggga

SEQ ID NO: 5508 - RNA, 17 nt, Artificial Sequence
  Synthetic
gaauacuaacauuggga

SEQ ID NO: 5509 - RNA, 17 nt, Artificial Sequence
  Synthetic
gaccgccgauuggugga

SEQ ID NO: 5510 - RNA, 17 nt, Artificial Sequence
  Synthetic
ccaaggcacagcuugga

SEQ ID NO: 5511 - RNA, 17 nt, Artificial Sequence
  Synthetic
aaccaacaagaagauga

SEQ ID NO: 5512 - RNA, 17 nt, Artificial Sequence
  Synthetic
caggagaaacgggcuga

SEQ ID NO: 5513 - RNA, 17 nt, Artificial Sequence
  Synthetic
ugccaaguguuugcuga

SEQ ID NO: 5514 - RNA, 17 nt, Artificial Sequence
  Synthetic
  misc_feature (4)..(4): n is a, c, g, or u
  misc_feature (16)..(16): n is a, c, g, or u
cacncauccacaggcna

SEQ ID NO: 5515 - RNA, 17 nt, Artificial Sequence
  Synthetic
gcauuugguggucuaua

SEQ ID NO: 5516 - RNA, 17 nt, Artificial Sequence
  Synthetic
agugggggaaagcccua

SEQ ID NO: 5517 - RNA, 17 nt, Artificial Sequence
  Synthetic
ucuucauccugcugcua

SEQ ID NO: 5518 - RNA, 17 nt, Artificial Sequence
  Synthetic
  misc_feature (2)..(2): n is a, c, g, or u
  misc_feature (5)..(5): n is a, c, g, or u
cngcnuuccauaaagua

SEQ ID NO: 5519 - RNA, 17 nt, Artificial Sequence
  Synthetic
  misc_feature (5)..(5): n is a, c, g, or u
uguanuaggaggcugua

SEQ ID NO: 5520 - RNA, 17 nt, Artificial Sequence
  Synthetic
aaugugaacaauuugua

SEQ ID NO: 5521 - RNA, 17 nt, Artificial Sequence
  Synthetic
ugaacaaaagaugauua

SEQ ID NO: 5522 - RNA, 17 nt, Artificial Sequence
  Synthetic
  misc_feature (4)..(4): n is a, c, g, or u
  misc_feature (7)..(7): n is a, c, g, or u
  misc_feature (13)..(14): n is a, c, g, or u
aagnuunaaauunnuua

SEQ ID NO: 5523 - RNA, 17 nt, Artificial Sequence
  Synthetic
gugaacagaccaauuua

SEQ ID NO: 5524 - RNA, 17 nt, Artificial Sequence
  Synthetic
  misc_feature (1)..(1): n is a, c, g, or u
  misc_feature (3)..(3): n is a, c, g, or u
  misc_feature (13)..(13): n is a, c, g, or u
nanuugucuaaunuuua

SEQ ID NO: 5525 - RNA, 17 nt, Artificial Sequence
  Synthetic
aacccucggacggaaac

SEQ ID NO: 5526 - RNA, 17 nt, Artificial Sequence
  Synthetic
ccccguugcucggcaac

SEQ ID NO: 5527 - RNA, 17 nt, Artificial Sequence
  Synthetic
  misc_feature (5)..(5): n is a, c, g, or u
ccgungucggcuggaac

SEQ ID NO: 5528 - RNA, 17 nt, Artificial Sequence
  Synthetic
guccgaggguuuggaac

SEQ ID NO: 5529 - RNA, 17 nt, Artificial Sequence
  Synthetic
gucaacaagaaacacac

SEQ ID NO: 5530 - RNA, 17 nt, Artificial Sequence
  Synthetic
cgggaccuacucgacac

SEQ ID NO: 5531 - RNA, 17 nt, Artificial Sequence
  Synthetic
aaagccacccaaggcac

SEQ ID NO: 5532 - RNA, 17 nt, Artificial Sequence
  Synthetic
  misc_feature (5)..(5): n is a, c, g, or u
  misc_feature (8)..(8): n is a, c, g, or u
uuggnuuncucccggac

SEQ ID NO: 5533 - RNA, 17 nt, Artificial Sequence
  Synthetic
  misc_feature (10)..(10): n is a, c, g, or u
gaagucccanucgggac

SEQ ID NO: 5534 - RNA, 17 nt, Artificial Sequence
  Synthetic
  misc_feature (7)..(7): n is a, c, g, or u
  misc_feature (15)..(15): n is a, c, g, or u
cuguaunccuguaunac

SEQ ID NO: 5535 - RNA, 17 nt, Artificial Sequence
  Synthetic
  misc_feature (6)..(6): n is a, c, g, or u
  misc_feature (9)..(9): n is a, c, g, or u
  misc_feature (12)..(12): n is a, c, g, or u
ugcacnccnaancauac

SEQ ID NO: 5536 - RNA, 17 nt, Artificial Sequence
  Synthetic
cuugagucccuuuauac

SEQ ID NO: 5537 - RNA, 17 nt, Artificial Sequence
  Synthetic
gaccaauuuaugccuac

SEQ ID NO: 5538 - RNA, 17 nt, Artificial Sequence
  Synthetic
  misc_feature (1)..(1): n is a, c, g, or u
nugggaacaagagcuac

SEQ ID NO: 5539 - RNA, 17 nt, Artificial Sequence
  Synthetic
cgggaccaugcaaaacc

SEQ ID NO: 5540 - RNA, 17 nt, Artificial Sequence
  Synthetic
  misc_feature (8)..(8): n is a, c, g, or u
caggaucnacgaccacc

SEQ ID NO: 5541 - RNA, 17 nt, Artificial Sequence
  Synthetic
  misc_feature (1)..(1): n is a, c, g, or u
ncugaacuggagccacc

SEQ ID NO: 5542 - RNA, 17 nt, Artificial Sequence
  Synthetic
aaauuggucuguucacc

SEQ ID NO: 5543 - RNA, 17 nt, Artificial Sequence
  Synthetic
  misc_feature (3)..(4): n is a, c, g, or u
gannuucgcuccagacc

SEQ ID NO: 5544 - RNA, 17 nt, Artificial Sequence
  Synthetic
  misc_feature (9)..(9): n is a, c, g, or u
ucuucuucnaggggacc

SEQ ID NO: 5545 - RNA, 17 nt, Artificial Sequence
  Synthetic
  misc_feature (5)..(5): n is a, c, g, or u
ucagngacacagaaccc

SEQ ID NO: 5546 - RNA, 17 nt, Artificial Sequence
  Synthetic
aggacuccuaggacccc

SEQ ID NO: 5547 - RNA, 17 nt, Artificial Sequence
  Synthetic
  misc_feature (2)..(2): n is a, c, g, or u
ungaagacugggggccc

SEQ ID NO: 5548 - RNA, 17 nt, Artificial Sequence
  Synthetic
  misc_feature (3)..(4): n is a, c, g, or u
  misc_feature (6)..(6): n is a, c, g, or u
  misc_feature (12)..(12): n is a, c, g, or u
gunnunacaacnuugcc

SEQ ID NO: 5549 - RNA, 17 nt, Artificial Sequence
  Synthetic
  misc_feature (6)..(6): n is a, c, g, or u
  misc_feature (12)..(12): n is a, c, g, or u
  misc_feature (15)..(15): n is a, c, g, or u
aauaanuuggangancc

SEQ ID NO: 5550 - RNA, 17 nt, Artificial Sequence
  Synthetic
  misc_feature (15)..(15): n is a, c, g, or u
cgaagugcacacggncc

SEQ ID NO: 5551 - RNA, 17 nt, Artificial Sequence
  Synthetic
  misc_feature (11)..(11): n is a, c, g, or u
  misc_feature (15)..(15): n is a, c, g, or u
cucuuauauanaauncc

SEQ ID NO: 5552 - RNA, 17 nt, Artificial Sequence
  Synthetic
caucuuccucuucaucc

SEQ ID NO: 5553 - RNA, 17 nt, Artificial Sequence
  Synthetic
  misc_feature (2)..(2): n is a, c, g, or u
  misc_feature (8)..(8): n is a, c, g, or u
  misc_feature (11)..(11): n is a, c, g, or u
cncugaanagnggaucc

SEQ ID NO: 5554 - RNA, 17 nt, Artificial Sequence
  Synthetic
  misc_feature (3)..(3): n is a, c, g, or u
acncaaugugguuaucc

SEQ ID NO: 5555 - RNA, 17 nt, Artificial Sequence
  Synthetic
ccagcagauccgccucc

SEQ ID NO: 5556 - RNA, 17 nt, Artificial Sequence
  Synthetic
uggauucgcacuccucc

SEQ ID NO: 5557 - RNA, 17 nt, Artificial Sequence
  Synthetic
agaagaucucaaucucc

SEQ ID NO: 5558 - RNA, 17 nt, Artificial Sequence
  Synthetic
  misc_feature (2)..(2): n is a, c, g, or u
  misc_feature (8)..(8): n is a, c, g, or u
unuucagngcaaauucc

SEQ ID NO: 5559 - RNA, 17 nt, Artificial Sequence
  Synthetic
  misc_feature (4)..(4): n is a, c, g, or u
ucuncgucugccguucc

SEQ ID NO: 5560 - RNA, 17 nt, Artificial Sequence
  Synthetic
ugugguuucacauuucc

SEQ ID NO: 5561 - RNA, 17 nt, Artificial Sequence
  Synthetic
agggcucuguauuuucc

SEQ ID NO: 5562 - RNA, 17 nt, Artificial Sequence
  Synthetic
cugcgagcgaaacaagc

SEQ ID NO: 5563 - RNA, 17 nt, Artificial Sequence
  Synthetic
  misc_feature (11)..(11): n is a, c, g, or u
uggcagcacanccgagc

SEQ ID NO: 5564 - RNA, 17 nt, Artificial Sequence
  Synthetic
agaagaugaggcauagc

SEQ ID NO: 5565 - RNA, 17 nt, Artificial Sequence
  Synthetic
ggaagaugauaaaacgc

SEQ ID NO: 5566 - RNA, 17 nt, Artificial Sequence
  Synthetic
cagcuuguuucgcucgc

SEQ ID NO: 5567 - RNA, 17 nt, Artificial Sequence
  Synthetic
  misc_feature (10)..(10): n is a, c, g, or u
caccuccuunccauggc

SEQ ID NO: 5568 - RNA, 17 nt, Artificial Sequence
  Synthetic
  misc_feature (3)..(3): n is a, c, g, or u
cgnaggauccaguuggc

SEQ ID NO: 5569 - RNA, 17 nt, Artificial Sequence
  Synthetic
  misc_feature (6)..(6): n is a, c, g, or u
  misc_feature (9)..(9): n is a, c, g, or u
  misc_feature (12)..(12): n is a, c, g, or u
  misc_feature (15)..(15): n is a, c, g, or u
cauugngunaanggngc

SEQ ID NO: 5570 - RNA, 17 nt, Artificial Sequence
  Synthetic
  misc_feature (3)..(3): n is a, c, g, or u
  misc_feature (8)..(9): n is a, c, g, or u
  misc_feature (15)..(15): n is a, c, g, or u
acnacuannucccungc

SEQ ID NO: 5571 - RNA, 17 nt, Artificial Sequence
  Synthetic
aaagggacucaagaugc

SEQ ID NO: 5572 - RNA, 17 nt, Artificial Sequence
  Synthetic
  misc_feature (3)..(3): n is a, c, g, or u
  misc_feature (9)..(9): n is a, c, g, or u
  misc_feature (12)..(12): n is a, c, g, or u
aanuugganganccugc

SEQ ID NO: 5573 - RNA, 17 nt, Artificial Sequence
  Synthetic
cuuccucuucauccugc

SEQ ID NO: 5574 - RNA, 17 nt, Artificial Sequence
  Synthetic
gggggccaaaucugugc

SEQ ID NO: 5575 - RNA, 17 nt, Artificial Sequence
  Synthetic
  misc_feature (12)..(12): n is a, c, g, or u
uggcugcucggnugugc

SEQ ID NO: 5576 - RNA, 17 nt, Artificial Sequence
  Synthetic
acugcggaacuccuugc

SEQ ID NO: 5577 - RNA, 17 nt, Artificial Sequence
  Synthetic
  misc_feature (3)..(3): n is a, c, g, or u
ggncuuuugggcuuugc

SEQ ID NO: 5578 - RNA, 17 nt, Artificial Sequence
  Synthetic
auucuuuccagaccauc

SEQ ID NO: 5579 - RNA, 17 nt, Artificial Sequence
  Synthetic
gucuguuccuucucauc

SEQ ID NO: 5580 - RNA, 17 nt, Artificial Sequence
  Synthetic
  misc_feature (11)..(12): n is a, c, g, or u
cuggagcgaannucauc

SEQ ID NO: 5581 - RNA, 17 nt, Artificial Sequence
  Synthetic
  misc_feature (4)..(4): n is a, c, g, or u
aacnuugccagcagauc

SEQ ID NO: 5582 - RNA, 17 nt, Artificial Sequence
  Synthetic
gaagcaggaggcggauc

SEQ ID NO: 5583 - RNA, 17 nt, Artificial Sequence
  Synthetic
guuccgcaguauggauc

SEQ ID NO: 5584 - RNA, 17 nt, Artificial Sequence
  Synthetic
gcacuucgcuucaccuc

SEQ ID NO: 5585 - RNA, 17 nt, Artificial Sequence
  Synthetic
ugcaacuuuuucaccuc

SEQ ID NO: 5586 - RNA, 17 nt, Artificial Sequence
  Synthetic
cuaugggagugggccuc

SEQ ID NO: 5587 - RNA, 17 nt, Artificial Sequence
  Synthetic
aaccuuuguggcuccuc

SEQ ID NO: 5588 - RNA, 17 nt, Artificial Sequence
  Synthetic
ccuuuaccccguugcuc

SEQ ID NO: 5589 - RNA, 17 nt, Artificial Sequence
  Synthetic
ccaguggggguugcguc

SEQ ID NO: 5590 - RNA, 17 nt, Artificial Sequence
  Synthetic
  misc_feature (1)..(1): n is a, c, g, or u
  misc_feature (7)..(7): n is a, c, g, or u
  misc_feature (13)..(13): n is a, c, g, or u
ncgcccncuucuncguc

SEQ ID NO: 5591 - RNA, 17 nt, Artificial Sequence
  Synthetic
  misc_feature (6)..(6): n is a, c, g, or u
  misc_feature (12)..(12): n is a, c, g, or u
ccccgngagggnucguc

SEQ ID NO: 5592 - RNA, 17 nt, Artificial Sequence
  Synthetic
  misc_feature (14)..(14): n is a, c, g, or u
aggugcgacccgunguc

SEQ ID NO: 5593 - RNA, 17 nt, Artificial Sequence
  Synthetic
cuacucgacaccgcuuc

SEQ ID NO: 5594 - RNA, 17 nt, Artificial Sequence
  Synthetic
caagcugcaaggaguuc

SEQ ID NO: 5595 - RNA, 17 nt, Artificial Sequence
  Synthetic
  misc_feature (7)..(7): n is a, c, g, or u
auauucnugggaacaag

SEQ ID NO: 5596 - RNA, 17 nt, Artificial Sequence
  Synthetic
gcagaggugaagcgaag

SEQ ID NO: 5597 - RNA, 17 nt, Artificial Sequence
  Synthetic
  misc_feature (3)..(3): n is a, c, g, or u
uungauccgaggguaag

SEQ ID NO: 5598 - RNA, 17 nt, Artificial Sequence
  Synthetic
  misc_feature (12)..(12): n is a, c, g, or u
acccucggaucnaacag

SEQ ID NO: 5599 - RNA, 17 nt, Artificial Sequence
  Synthetic
ccagcaggaaaauacag

SEQ ID NO: 5600 - RNA, 17 nt, Artificial Sequence
  Synthetic
  misc_feature (11)..(11): n is a, c, g, or u
guccauguucnuagcag

SEQ ID NO: 5601 - RNA, 17 nt, Artificial Sequence
  Synthetic
uggccauuggccaucag

SEQ ID NO: 5602 - RNA, 17 nt, Artificial Sequence
  Synthetic
  misc_feature (9)..(9): n is a, c, g, or u
ucguccgcnggauucag

SEQ ID NO: 5603 - RNA, 17 nt, Artificial Sequence
  Synthetic
  misc_feature (9)..(9): n is a, c, g, or u
  misc_feature (12)..(12): n is a, c, g, or u
cuggauccncunuucag

SEQ ID NO: 5604 - RNA, 17 nt, Artificial Sequence
  Synthetic
  misc_feature (2)..(2): n is a, c, g, or u
gnauacagaggcaugag

SEQ ID NO: 5605 - RNA, 17 nt, Artificial Sequence
  Synthetic
  misc_feature (11)..(11): n is a, c, g, or u
  misc_feature (15)..(15): n is a, c, g, or u
aaagcaucccnguanag

SEQ ID NO: 5606 - RNA, 17 nt, Artificial Sequence
  Synthetic
cuggcucaguuuacuag

SEQ ID NO: 5607 - RNA, 17 nt, Artificial Sequence
  Synthetic
agagaauccacacguag

SEQ ID NO: 5608 - RNA, 17 nt, Artificial Sequence
  Synthetic
uguucaguggugcguag

SEQ ID NO: 5609 - RNA, 17 nt, Artificial Sequence
  Synthetic
  misc_feature (4)..(4): n is a, c, g, or u
gaanuagaggacaaacg

SEQ ID NO: 5610 - RNA, 17 nt, Artificial Sequence
  Synthetic
cugagccaggagaaacg

SEQ ID NO: 5611 - RNA, 17 nt, Artificial Sequence
  Synthetic
acaccgccuguaacacg

SEQ ID NO: 5612 - RNA, 17 nt, Artificial Sequence
  Synthetic
guggucuccaugcgacg

SEQ ID NO: 5613 - RNA, 17 nt, Artificial Sequence
  Synthetic
gguuuugcauggucccg

SEQ ID NO: 5614 - RNA, 17 nt, Artificial Sequence
  Synthetic
aggccuggccguugccg

SEQ ID NO: 5615 - RNA, 17 nt, Artificial Sequence
  Synthetic
  misc_feature (14)..(14): n is a, c, g, or u
aguuggcagcacanccg

SEQ ID NO: 5616 - RNA, 17 nt, Artificial Sequence
  Synthetic
  misc_feature (2)..(2): n is a, c, g, or u
  misc_feature (11)..(12): n is a, c, g, or u
unucaacgacnngaagg

SEQ ID NO: 5617 - RNA, 17 nt, Artificial Sequence
  Synthetic
guauggaucggcagagg

SEQ ID NO: 5618 - RNA, 17 nt, Artificial Sequence
  Synthetic
  misc_feature (2)..(3): n is a, c, g, or u
  misc_feature (12)..(12): n is a, c, g, or u
cnngucguuganagagg

SEQ ID NO: 5619 - RNA, 17 nt, Artificial Sequence
  Synthetic
ugacccacaaaaugagg

SEQ ID NO: 5620 - RNA, 17 nt, Artificial Sequence
  Synthetic
  misc_feature (11)..(11): n is a, c, g, or u
aguguggauangauagg

SEQ ID NO: 5621 - RNA, 17 nt, Artificial Sequence
  Synthetic
agagaggcaauagucgg

SEQ ID NO: 5622 - RNA, 17 nt, Artificial Sequence
  Synthetic
uguuuacgucccgucgg

SEQ ID NO: 5623 - RNA, 17 nt, Artificial Sequence
  Synthetic
aagagcuacagcauggg

SEQ ID NO: 5624 - RNA, 17 nt, Artificial Sequence
  Synthetic
  misc_feature (7)..(7): n is a, c, g, or u
ucuucungaagacuggg

SEQ ID NO: 5625 - RNA, 17 nt, Artificial Sequence
  Synthetic
gaugaucugguauuggg

SEQ ID NO: 5626 - RNA, 17 nt, Artificial Sequence
  Synthetic
  misc_feature (9)..(9): n is a, c, g, or u
  misc_feature (12)..(12): n is a, c, g, or u
  misc_feature (15)..(15): n is a, c, g, or u
ccacauugngunaangg

SEQ ID NO: 5627 - RNA, 17 nt, Artificial Sequence
  Synthetic
gugaaaaaguugcaugg

SEQ ID NO: 5628 - RNA, 17 nt, Artificial Sequence
  Synthetic
  misc_feature (8)..(8): n is a, c, g, or u
cugugucncugaacugg

SEQ ID NO: 5629 - RNA, 17 nt, Artificial Sequence
  Synthetic
  misc_feature (4)..(4): n is a, c, g, or u
  misc_feature (10)..(10): n is a, c, g, or u
cucncggggncgcuugg

SEQ ID NO: 5630 - RNA, 17 nt, Artificial Sequence
  Synthetic
caacccccacugguugg

SEQ ID NO: 5631 - RNA, 17 nt, Artificial Sequence
  Synthetic
ccuuauaaagaauuugg

SEQ ID NO: 5632 - RNA, 17 nt, Artificial Sequence
  Synthetic
gccuuggguggcuuugg

SEQ ID NO: 5633 - RNA, 17 nt, Artificial Sequence
  Synthetic
  misc_feature (16)..(16): n is a, c, g, or u
ugggaugggaauacang

SEQ ID NO: 5634 - RNA, 17 nt, Artificial Sequence
  Synthetic
  misc_feature (16)..(16): n is a, c, g, or u
gacaacagaguugucng

SEQ ID NO: 5635 - RNA, 17 nt, Artificial Sequence
  Synthetic
  misc_feature (10)..(10): n is a, c, g, or u
  misc_feature (13)..(13): n is a, c, g, or u
  misc_feature (16)..(16): n is a, c, g, or u
uucauuuuungunagng

SEQ ID NO: 5636 - RNA, 17 nt, Artificial Sequence
  Synthetic
  misc_feature (10)..(10): n is a, c, g, or u
  misc_feature (13)..(13): n is a, c, g, or u
  misc_feature (16)..(16): n is a, c, g, or u
agcgguaugnuunggng

SEQ ID NO: 5637 - RNA, 17 nt, Artificial Sequence
  Synthetic
  misc_feature (5)..(5): n is a, c, g, or u
  misc_feature (8)..(8): n is a, c, g, or u
augunaanacuaacaug

SEQ ID NO: 5638 - RNA, 17 nt, Artificial Sequence
  Synthetic
caaagguuccacgcaug

SEQ ID NO: 5639 - RNA, 17 nt, Artificial Sequence
  Synthetic
auugcacuaguaaacug

SEQ ID NO: 5640 - RNA, 17 nt, Artificial Sequence
  Synthetic
ggcaacggccaggccug

SEQ ID NO: 5641 - RNA, 17 nt, Artificial Sequence
  Synthetic
uucaagccuccaagcug

SEQ ID NO: 5642 - RNA, 17 nt, Artificial Sequence
  Synthetic
auugggggccaaaucug

SEQ ID NO: 5643 - RNA, 17 nt, Artificial Sequence
  Synthetic
aaauaccuaugggagug

SEQ ID NO: 5644 - RNA, 17 nt, Artificial Sequence
  Synthetic
  misc_feature (12)..(12): n is a, c, g, or u
ucaucugccggnccgug

SEQ ID NO: 5645 - RNA, 17 nt, Artificial Sequence
  Synthetic
cuuuggcuuccugggug

SEQ ID NO: 5646 - RNA, 17 nt, Artificial Sequence
  Synthetic
  misc_feature (6)..(6): n is a, c, g, or u
  misc_feature (8)..(9): n is a, c, g, or u
  misc_feature (15)..(15): n is a, c, g, or u
guugunannacaccnug

SEQ ID NO: 5647 - RNA, 17 nt, Artificial Sequence
  Synthetic
  misc_feature (15)..(15): n is a, c, g, or u
cccaucccaucaucnug

SEQ ID NO: 5648 - RNA, 17 nt, Artificial Sequence
  Synthetic
  misc_feature (15)..(15): n is a, c, g, or u
ccauggcugcucggnug

SEQ ID NO: 5649 - RNA, 17 nt, Artificial Sequence
  Synthetic
aacauagagguuccuug

SEQ ID NO: 5650 - RNA, 17 nt, Artificial Sequence
  Synthetic
uccuugagcaagaguug

SEQ ID NO: 5651 - RNA, 17 nt, Artificial Sequence
  Synthetic
  misc_feature (2)..(2): n is a, c, g, or u
  misc_feature (11)..(11): n is a, c, g, or u
gnauugugggncuuuug

SEQ ID NO: 5652 - RNA, 17 nt, Artificial Sequence
  Synthetic
  misc_feature (2)..(2): n is a, c, g, or u
  misc_feature (8)..(8): n is a, c, g, or u
  misc_feature (14)..(14): n is a, c, g, or u
  misc_feature (17)..(17): n is a, c, g, or u
gnagaagngggcgnuan

SEQ ID NO: 5653 - RNA, 17 nt, Artificial Sequence
  Synthetic
  misc_feature (2)..(2): n is a, c, g, or u
  misc_feature (14)..(14): n is a, c, g, or u
  misc_feature (17)..(17): n is a, c, g, or u
gncgcuuggggcunuan

SEQ ID NO: 5654 - RNA, 17 nt, Artificial Sequence
  Synthetic
  misc_feature (5)..(5): n is a, c, g, or u
  misc_feature (11)..(11): n is a, c, g, or u
  misc_feature (17)..(17): n is a, c, g, or u
acgancccucncggggn

SEQ ID NO: 5655 - RNA, 17 nt, Artificial Sequence
  Synthetic
  misc_feature (14)..(14): n is a, c, g, or u
  misc_feature (17)..(17): n is a, c, g, or u
cuauguuucccucnugn

SEQ ID NO: 5656 - RNA, 17 nt, Artificial Sequence
  Synthetic
cgcaccacugaacaaau

SEQ ID NO: 5657 - RNA, 17 nt, Artificial Sequence
  Synthetic
augcgcugauggccaau

SEQ ID NO: 5658 - RNA, 17 nt, Artificial Sequence
  Synthetic
  misc_feature (8)..(8): n is a, c, g, or u
aaggacanuuggccaau

SEQ ID NO: 5659 - RNA, 17 nt, Artificial Sequence
  Synthetic
  misc_feature (10)..(10): n is a, c, g, or u
cagacgaagnucucaau

SEQ ID NO: 5660 - RNA, 17 nt, Artificial Sequence
  Synthetic
  misc_feature (5)..(5): n is a, c, g, or u
  misc_feature (11)..(11): n is a, c, g, or u
uaganucaccngaacau

SEQ ID NO: 5661 - RNA, 17 nt, Artificial Sequence
  Synthetic
  misc_feature (13)..(13): n is a, c, g, or u
guacaccuccuunccau

SEQ ID NO: 5662 - RNA, 17 nt, Artificial Sequence
  Synthetic
acaagaagaugaggcau

SEQ ID NO: 5663 - RNA, 17 nt, Artificial Sequence
  Synthetic
  misc_feature (13)..(13): n is a, c, g, or u
cagacacauccancgau

SEQ ID NO: 5664 - RNA, 17 nt, Artificial Sequence
  Synthetic
uccacgcaugcgcugau

SEQ ID NO: 5665 - RNA, 17 nt, Artificial Sequence
  Synthetic
  misc_feature (9)..(9): n is a, c, g, or u
  misc_feature (15)..(15): n is a, c, g, or u
ucaccccancacaanau

SEQ ID NO: 5666 - RNA, 17 nt, Artificial Sequence
  Synthetic
aacccugcuccgacuau

SEQ ID NO: 5667 - RNA, 17 nt, Artificial Sequence
  Synthetic
  misc_feature (4)..(4): n is a, c, g, or u
  misc_feature (7)..(7): n is a, c, g, or u
  misc_feature (13)..(13): n is a, c, g, or u
aggnucnuccaanuuau

SEQ ID NO: 5668 - RNA, 17 nt, Artificial Sequence
  Synthetic
  misc_feature (2)..(2): n is a, c, g, or u
ungaagaagaacucccu

SEQ ID NO: 5669 - RNA, 17 nt, Artificial Sequence
  Synthetic
  misc_feature (6)..(6): n is a, c, g, or u
  misc_feature (11)..(12): n is a, c, g, or u
uuaacnacuannucccu

SEQ ID NO: 5670 - RNA, 17 nt, Artificial Sequence
  Synthetic
gaagaacucccucgccu

SEQ ID NO: 5671 - RNA, 17 nt, Artificial Sequence
  Synthetic
acacuuggcacaggccu

SEQ ID NO: 5672 - RNA, 17 nt, Artificial Sequence
  Synthetic
cauacugcggaacuccu

SEQ ID NO: 5673 - RNA, 17 nt, Artificial Sequence
  Synthetic
cucagcccguuucuccu

SEQ ID NO: 5674 - RNA, 17 nt, Artificial Sequence
  Synthetic
  misc_feature (3)..(4): n is a, c, g, or u
gannacccggguguccu

SEQ ID NO: 5675 - RNA, 17 nt, Artificial Sequence
  Synthetic
guccuccaacuuguccu

SEQ ID NO: 5676 - RNA, 17 nt, Artificial Sequence
  Synthetic
  misc_feature (5)..(5): n is a, c, g, or u
  misc_feature (11)..(11): n is a, c, g, or u
cccancacaanauagcu

SEQ ID NO: 5677 - RNA, 17 nt, Artificial Sequence
  Synthetic
uugcagcuuguuucgcu

SEQ ID NO: 5678 - RNA, 17 nt, Artificial Sequence
  Synthetic
caggaggcggaucugcu

SEQ ID NO: 5679 - RNA, 17 nt, Artificial Sequence
  Synthetic
aaaaccugcacaacucu

SEQ ID NO: 5680 - RNA, 17 nt, Artificial Sequence
  Synthetic
gcuuucccccacugucu

SEQ ID NO: 5681 - RNA, 17 nt, Artificial Sequence
  Synthetic
ggcagaggugaaaaagu

SEQ ID NO: 5682 - RNA, 17 nt, Artificial Sequence
  Synthetic
gcuucaccucugcacgu

SEQ ID NO: 5683 - RNA, 17 nt, Artificial Sequence
  Synthetic
augaaccuuuaccccgu

SEQ ID NO: 5684 - RNA, 17 nt, Artificial Sequence
  Synthetic
ggcacaggccuggccgu

SEQ ID NO: 5685 - RNA, 17 nt, Artificial Sequence
  Synthetic
  misc_feature (2)..(2): n is a, c, g, or u
gnucucaaucgccgcgu

SEQ ID NO: 5686 - RNA, 17 nt, Artificial Sequence
  Synthetic
ucacacccccacacggu

SEQ ID NO: 5687 - RNA, 17 nt, Artificial Sequence
  Synthetic
  misc_feature (11)..(11): n is a, c, g, or u
uccagccgacnacgggu

SEQ ID NO: 5688 - RNA, 17 nt, Artificial Sequence
  Synthetic
caagcugugccuugggu

SEQ ID NO: 5689 - RNA, 17 nt, Artificial Sequence
  Synthetic
uguauuuuccugcuggu

SEQ ID NO: 5690 - RNA, 17 nt, Artificial Sequence
  Synthetic
ggacuaucaagguaugu

SEQ ID NO: 5691 - RNA, 17 nt, Artificial Sequence
  Synthetic
aggugcucccaugcugu

SEQ ID NO: 5692 - RNA, 17 nt, Artificial Sequence
  Synthetic
augcguggaaccuuugu

SEQ ID NO: 5693 - RNA, 17 nt, Artificial Sequence
  Synthetic
  misc_feature (1)..(1): n is a, c, g, or u
  misc_feature (7)..(8): n is a, c, g, or u
  misc_feature (10)..(10): n is a, c, g, or u
  misc_feature (16)..(16): n is a, c, g, or u
nggugunnunacaacnu

SEQ ID NO: 5694 - RNA, 17 nt, Artificial Sequence
  Synthetic
  misc_feature (16)..(16): n is a, c, g, or u
auguuguccauguucnu

SEQ ID NO: 5695 - RNA, 17 nt, Artificial Sequence
  Synthetic
  misc_feature (10)..(11): n is a, c, g, or u
  misc_feature (13)..(13): n is a, c, g, or u
  misc_feature (16)..(16): n is a, c, g, or u
gaacgccccnngnagnu

SEQ ID NO: 5696 - RNA, 17 nt, Artificial Sequence
  Synthetic
  misc_feature (6)..(6): n is a, c, g, or u
  misc_feature (8)..(8): n is a, c, g, or u
  misc_feature (14)..(14): n is a, c, g, or u
  misc_feature (16)..(16): n is a, c, g, or u
uaggananaaucungnu

SEQ ID NO: 5697 - RNA, 17 nt, Artificial Sequence
  Synthetic
guguccuggccaaaauu

SEQ ID NO: 5698 - RNA, 17 nt, Artificial Sequence
  Synthetic
ucgggacugcuggaauu

SEQ ID NO: 5699 - RNA, 17 nt, Artificial Sequence
  Synthetic
guuggggcuuggccauu

SEQ ID NO: 5700 - RNA, 17 nt, Artificial Sequence
  Synthetic
cuaccuuguuugccauu

SEQ ID NO: 5701 - RNA, 17 nt, Artificial Sequence
  Synthetic
  misc_feature (2)..(2): n is a, c, g, or u
cnuuuggaguguggauu

SEQ ID NO: 5702 - RNA, 17 nt, Artificial Sequence
  Synthetic
  misc_feature (4)..(4): n is a, c, g, or u
  misc_feature (13)..(13): n is a, c, g, or u
uaanaccagacanuauu

SEQ ID NO: 5703 - RNA, 17 nt, Artificial Sequence
  Synthetic
ugcgucagcaaacacuu

SEQ ID NO: 5704 - RNA, 17 nt, Artificial Sequence
  Synthetic
  misc_feature (5)..(5): n is a, c, g, or u
ccggnccgugugcacuu

SEQ ID NO: 5705 - RNA, 17 nt, Artificial Sequence
  Synthetic
cccacugguuggggcuu

SEQ ID NO: 5706 - RNA, 17 nt, Artificial Sequence
  Synthetic
  misc_feature (6)..(6): n is a, c, g, or u
gugggncuuuugggcuu

SEQ ID NO: 5707 - RNA, 17 nt, Artificial Sequence
  Synthetic
  misc_feature (6)..(6): n is a, c, g, or u
ccgcgnaggauccaguu

SEQ ID NO: 5708 - RNA, 17 nt, Artificial Sequence
  Synthetic
  misc_feature (1)..(2): n is a, c, g, or u
nnuuauguaagacuguu

SEQ ID NO: 5709 - RNA, 17 nt, Artificial Sequence
  Synthetic
ggccugugccaaguguu

SEQ ID NO: 5710 - RNA, 17 nt, Artificial Sequence
  Synthetic
cccacuccuaccuuguu

SEQ ID NO: 5711 - RNA, 17 nt, Artificial Sequence
  Synthetic
  misc_feature (3)..(3): n is a, c, g, or u
  misc_feature (15)..(15): n is a, c, g, or u
canaaacaaggacanuu

SEQ ID NO: 5712 - RNA, 17 nt, Artificial Sequence
  Synthetic
  misc_feature (3)..(3): n is a, c, g, or u
  misc_feature (14)..(15): n is a, c, g, or u
ucngugccgaugannuu

SEQ ID NO: 5713 - RNA, 17 nt, Artificial Sequence
  Synthetic
agaugcugcacagauuu

SEQ ID NO: 5714 - RNA, 17 nt, Artificial Sequence
  Synthetic
  misc_feature (6)..(6): n is a, c, g, or u
gguganuuaaugacuuu

SEQ ID NO: 5715 - RNA, 17 nt, Artificial Sequence
  Synthetic
aagaguugugcagguuu

SEQ ID NO: 5716 - RNA, 17 nt, Artificial Sequence
  Synthetic
aagacaaaagccuguuu

SEQ ID NO: 5717 - RNA, 17 nt, Artificial Sequence
  Synthetic
cuccuugcagcuuguuu

SEQ ID NO: 5718 - RNA, 17 nt, Artificial Sequence
  Synthetic
uggggacugcgaauuuu

SEQ ID NO: 5719 - RNA, 17 nt, Artificial Sequence
  Synthetic
acaggcuuuugucuuuu

SEQ ID NO: 5720 - RNA, 17 nt, Artificial Sequence
  Synthetic
  misc_feature (7)..(7): n is a, c, g, or u
ggaauuncucucuuuuu

SEQ ID NO: 5721 - RNA, 20 nt, Artificial Sequence
  Synthetic
ugaagaggaagaugauaaaa

SEQ ID NO: 5722 - RNA, 20 nt, Artificial Sequence
  Synthetic
uaaguuggcgaaaagacaaa

SEQ ID NO: 5723 - RNA, 20 nt, Artificial Sequence
  Synthetic
  misc_feature (3)..(3): n is a, c, g, or u
ccngcuuauagaccaccaaa

SEQ ID NO: 5724 - RNA, 20 nt, Artificial Sequence
  Synthetic
  misc_feature (6)..(6): n is a, c, g, or u
  misc_feature (11)..(11): n is a, c, g, or u
  misc_feature (15)..(15): n is a, c, g, or u
auguanuguunacanagaaa

SEQ ID NO: 5725 - RNA, 20 nt, Artificial Sequence
  Synthetic
agaucauccauauaacuaaa

SEQ ID NO: 5726 - RNA, 20 nt, Artificial Sequence
  Synthetic
gucuuuucgccaacuuacaa

SEQ ID NO: 5727 - RNA, 20 nt, Artificial Sequence
  Synthetic
caugccccaaagccacccaa

SEQ ID NO: 5728 - RNA, 20 nt, Artificial Sequence
  Synthetic
ggucaauguccaugccccaa

SEQ ID NO: 5729 - RNA, 20 nt, Artificial Sequence
  Synthetic
  misc_feature (4)..(4): n is a, c, g, or u
  misc_feature (7)..(7): n is a, c, g, or u
  misc_feature (10)..(10): n is a, c, g, or u
  misc_feature (13)..(13): n is a, c, g, or u
  misc_feature (16)..(16): n is a, c, g, or u
uugngunaanggngcngcaa

SEQ ID NO: 5730 - RNA, 20 nt, Artificial Sequence
  Synthetic
  misc_feature (2)..(2): n is a, c, g, or u
  misc_feature (14)..(14): n is a, c, g, or u
cngacgggaagaanucagaa

SEQ ID NO: 5731 - RNA, 20 nt, Artificial Sequence
  Synthetic
aaagccagacagugggggaa

SEQ ID NO: 5732 - RNA, 20 nt, Artificial Sequence
  Synthetic
uauuugcauacuuuauggaa

SEQ ID NO: 5733 - RNA, 20 nt, Artificial Sequence
  Synthetic
cgcauggagaccaccgugaa

SEQ ID NO: 5734 - RNA, 20 nt, Artificial Sequence
  Synthetic
ucccauagguauuuuccuaa

SEQ ID NO: 5735 - RNA, 20 nt, Artificial Sequence
  Synthetic
  misc_feature (9)..(9): n is a, c, g, or u
  misc_feature (15)..(15): n is a, c, g, or u
caauguucngguganucuaa

SEQ ID NO: 5736 - RNA, 20 nt, Artificial Sequence
  Synthetic
uguuucucuuccaaaaguaa

SEQ ID NO: 5737 - RNA, 20 nt, Artificial Sequence
  Synthetic
gaccggcugcgagcgaaaca

SEQ ID NO: 5738 - RNA, 20 nt, Artificial Sequence
  Synthetic
  misc_feature (1)..(1): n is a, c, g, or u
  misc_feature (9)..(9): n is a, c, g, or u
  misc_feature (15)..(15): n is a, c, g, or u
nccuguaunacugcnaaaca

SEQ ID NO: 5739 - RNA, 20 nt, Artificial Sequence
  Synthetic
  misc_feature (12)..(12): n is a, c, g, or u
cuaagagacacncauccaca

SEQ ID NO: 5740 - RNA, 20 nt, Artificial Sequence
  Synthetic
gucagcaaacacuuggcaca

SEQ ID NO: 5741 - RNA, 20 nt, Artificial Sequence
  Synthetic
uggucuguucaccagcacca

SEQ ID NO: 5742 - RNA, 20 nt, Artificial Sequence
  Synthetic
cgaccaccagcacgggacca

SEQ ID NO: 5743 - RNA, 20 nt, Artificial Sequence
  Synthetic
  misc_feature (7)..(7): n is a, c, g, or u
cguuganagaggugcuccca

SEQ ID NO: 5744 - RNA, 20 nt, Artificial Sequence
  Synthetic
  misc_feature (1)..(1): n is a, c, g, or u
nacagagagauucuguccca

SEQ ID NO: 5745 - RNA, 20 nt, Artificial Sequence
  Synthetic
ccguugcucggcaacggcca

SEQ ID NO: 5746 - RNA, 20 nt, Artificial Sequence
  Synthetic
gcgcugauggccaauggcca

SEQ ID NO: 5747 - RNA, 20 nt, Artificial Sequence
  Synthetic
  misc_feature (4)..(4): n is a, c, g, or u
uccnacuguucaagccucca

SEQ ID NO: 5748 - RNA, 20 nt, Artificial Sequence
  Synthetic
uuuauaagggucaaugucca

SEQ ID NO: 5749 - RNA, 20 nt, Artificial Sequence
  Synthetic
gaggagccacaaagguucca

SEQ ID NO: 5750 - RNA, 20 nt, Artificial Sequence
  Synthetic
  misc_feature (3)..(3): n is a, c, g, or u
aancauaccgcucucaggca

SEQ ID NO: 5751 - RNA, 20 nt, Artificial Sequence
  Synthetic
  misc_feature (4)..(4): n is a, c, g, or u
  misc_feature (7)..(7): n is a, c, g, or u
  misc_feature (18)..(18): n is a, c, g, or u
cugnggncuccaccccanca

SEQ ID NO: 5752 - RNA, 20 nt, Artificial Sequence
  Synthetic
  misc_feature (4)..(4): n is a, c, g, or u
  misc_feature (15)..(15): n is a, c, g, or u
  misc_feature (18)..(18): n is a, c, g, or u
cugnugggguggagnccnca

SEQ ID NO: 5753 - RNA, 20 nt, Artificial Sequence
  Synthetic
  misc_feature (1)..(1): n is a, c, g, or u
  misc_feature (4)..(4): n is a, c, g, or u
  misc_feature (7)..(7): n is a, c, g, or u
nccnaancauaccgcucuca

SEQ ID NO: 5754 - RNA, 20 nt, Artificial Sequence
  Synthetic
augugguuauccugcucuca

SEQ ID NO: 5755 - RNA, 20 nt, Artificial Sequence
  Synthetic
  misc_feature (12)..(12): n is a, c, g, or u
uguucauguccnacuguuca

SEQ ID NO: 5756 - RNA, 20 nt, Artificial Sequence
  Synthetic
cgguauaaagggacucaaga

SEQ ID NO: 5757 - RNA, 20 nt, Artificial Sequence
  Synthetic
  misc_feature (9)..(9): n is a, c, g, or u
aaagagagnaauuccacaga

SEQ ID NO: 5758 - RNA, 20 nt, Artificial Sequence
  Synthetic
  misc_feature (5)..(5): n is a, c, g, or u
  misc_feature (13)..(13): n is a, c, g, or u
cagunauacaggnauacaga

SEQ ID NO: 5759 - RNA, 20 nt, Artificial Sequence
  Synthetic
aagauugaugaugugagaga

SEQ ID NO: 5760 - RNA, 20 nt, Artificial Sequence
  Synthetic
cuacuguuguuagacgacga

SEQ ID NO: 5761 - RNA, 20 nt, Artificial Sequence
  Synthetic
  misc_feature (3)..(3): n is a, c, g, or u
aanuuauugcccacccagga

SEQ ID NO: 5762 - RNA, 20 nt, Artificial Sequence
  Synthetic
  misc_feature (4)..(4): n is a, c, g, or u
  misc_feature (6)..(6): n is a, c, g, or u
  misc_feature (15)..(15): n is a, c, g, or u
uaangnucuuuguanuagga

SEQ ID NO: 5763 - RNA, 20 nt, Artificial Sequence
  Synthetic
  misc_feature (12)..(12): n is a, c, g, or u
  misc_feature (16)..(16): n is a, c, g, or u
gcuucagcccunuacnggga

SEQ ID NO: 5764 - RNA, 20 nt, Artificial Sequence
  Synthetic
aaggaauacuaacauuggga

SEQ ID NO: 5765 - RNA, 20 nt, Artificial Sequence
  Synthetic
ccggaccgccgauuggugga

SEQ ID NO: 5766 - RNA, 20 nt, Artificial Sequence
  Synthetic
cacccaaggcacagcuugga

SEQ ID NO: 5767 - RNA, 20 nt, Artificial Sequence
  Synthetic
aagaaccaacaagaagauga

SEQ ID NO: 5768 - RNA, 20 nt, Artificial Sequence
  Synthetic
agccaggagaaacgggcuga

SEQ ID NO: 5769 - RNA, 20 nt, Artificial Sequence
  Synthetic
cugugccaaguguuugcuga

SEQ ID NO: 5770 - RNA, 20 nt, Artificial Sequence
  Synthetic
  misc_feature (7)..(7): n is a, c, g, or u
  misc_feature (19)..(19): n is a, c, g, or u
agacacncauccacaggcna

SEQ ID NO: 5771 - RNA, 20 nt, Artificial Sequence
  Synthetic
ggggcauuugguggucuaua

SEQ ID NO: 5772 - RNA, 20 nt, Artificial Sequence
  Synthetic
gacagugggggaaagcccua

SEQ ID NO: 5773 - RNA, 20 nt, Artificial Sequence
  Synthetic
uccucuucauccugcugcua

SEQ ID NO: 5774 - RNA, 20 nt, Artificial Sequence
  Synthetic
  misc_feature (2)..(2): n is a, c, g, or u
  misc_feature (5)..(5): n is a, c, g, or u
  misc_feature (8)..(8): n is a, c, g, or u
unccngcnuuccauaaagua

SEQ ID NO: 5775 - RNA, 20 nt, Artificial Sequence
  Synthetic
  misc_feature (8)..(8): n is a, c, g, or u
cuuuguanuaggaggcugua

SEQ ID NO: 5776 - RNA, 20 nt, Artificial Sequence
  Synthetic
  misc_feature (1)..(2): n is a, c, g, or u
nnaaaugugaacaauuugua

SEQ ID NO: 5777 - RNA, 20 nt, Artificial Sequence
  Synthetic
acaugaacaaaagaugauua

SEQ ID NO: 5778 - RNA, 20 nt, Artificial Sequence
  Synthetic
  misc_feature (7)..(7): n is a, c, g, or u
  misc_feature (10)..(10): n is a, c, g, or u
  misc_feature (16)..(17): n is a, c, g, or u
gagaagnuunaaauunnuua

SEQ ID NO: 5779 - RNA, 20 nt, Artificial Sequence
  Synthetic
cuggugaacagaccaauuua

SEQ ID NO: 5780 - RNA, 20 nt, Artificial Sequence
  Synthetic
  misc_feature (3)..(4): n is a, c, g, or u
  misc_feature (6)..(6): n is a, c, g, or u
  misc_feature (16)..(16): n is a, c, g, or u
cannanuugucuaaunuuua

SEQ ID NO: 5781 - RNA, 20 nt, Artificial Sequence
  Synthetic
ccaaacccucggacggaaac

SEQ ID NO: 5782 - RNA, 20 nt, Artificial Sequence
  Synthetic
uuaccccguugcucggcaac

SEQ ID NO: 5783 - RNA, 20 nt, Artificial Sequence
  Synthetic
  misc_feature (8)..(8): n is a, c, g, or u
gacccgungucggcuggaac

SEQ ID NO: 5784 - RNA, 20 nt, Artificial Sequence
  Synthetic
uccguccgaggguuuggaac

SEQ ID NO: 5785 - RNA, 20 nt, Artificial Sequence
  Synthetic
uuugucaacaagaaacacac

SEQ ID NO: 5786 - RNA, 20 nt, Artificial Sequence
  Synthetic
guucgggaccuacucgacac

SEQ ID NO: 5787 - RNA, 20 nt, Artificial Sequence
  Synthetic
cccaaagccacccaaggcac

SEQ ID NO: 5788 - RNA, 20 nt, Artificial Sequence
  Synthetic
  misc_feature (8)..(8): n is a, c, g, or u
  misc_feature (11)..(11): n is a, c, g, or u
ggguuggnuuncucccggac

SEQ ID NO: 5789 - RNA, 20 nt, Artificial Sequence
  Synthetic
  misc_feature (13)..(13): n is a, c, g, or u
guugaagucccanucgggac

SEQ ID NO: 5790 - RNA, 20 nt, Artificial Sequence
  Synthetic
  misc_feature (10)..(10): n is a, c, g, or u
  misc_feature (18)..(18): n is a, c, g, or u
ccucuguaunccuguaunac

SEQ ID NO: 5791 - RNA, 20 nt, Artificial Sequence
  Synthetic
  misc_feature (9)..(9): n is a, c, g, or u
  misc_feature (12)..(12): n is a, c, g, or u
  misc_feature (15)..(15): n is a, c, g, or u
cauugcacnccnaancauac

SEQ ID NO: 5792 - RNA, 20 nt, Artificial Sequence
  Synthetic
caucuugagucccuuuauac

SEQ ID NO: 5793 - RNA, 20 nt, Artificial Sequence
  Synthetic
acagaccaauuuaugccuac

SEQ ID NO: 5794 - RNA, 20 nt, Artificial Sequence
  Synthetic
  misc_feature (4)..(4): n is a, c, g, or u
uucnugggaacaagagcuac

SEQ ID NO: 5795 - RNA, 20 nt, Artificial Sequence
  Synthetic
gcacgggaccaugcaaaacc

SEQ ID NO: 5796 - RNA, 20 nt, Artificial Sequence
  Synthetic
  misc_feature (11)..(11): n is a, c, g, or u
uuccaggaucnacgaccacc

SEQ ID NO: 5797 - RNA, 20 nt, Artificial Sequence
  Synthetic
  misc_feature (4)..(4): n is a, c, g, or u
gucncugaacuggagccacc

SEQ ID NO: 5798 - RNA, 20 nt, Artificial Sequence
  Synthetic
cauaaauuggucuguucacc

SEQ ID NO: 5799 - RNA, 20 nt, Artificial Sequence
  Synthetic
  misc_feature (6)..(7): n is a, c, g, or u
gaugannuucgcuccagacc

SEQ ID NO: 5800 - RNA, 20 nt, Artificial Sequence
  Synthetic
  misc_feature (12)..(12): n is a, c, g, or u
aguucuucuucnaggggacc

SEQ ID NO: 5801 - RNA, 20 nt, Artificial Sequence
  Synthetic
  misc_feature (8)..(8): n is a, c, g, or u
aguucagngacacagaaccc

SEQ ID NO: 5802 - RNA, 20 nt, Artificial Sequence
  Synthetic
aucaggacuccuaggacccc

SEQ ID NO: 5803 - RNA, 20 nt, Artificial Sequence
  Synthetic
  misc_feature (5)..(5): n is a, c, g, or u
uucungaagacugggggccc

SEQ ID NO: 5804 - RNA, 20 nt, Artificial Sequence
  Synthetic
  misc_feature (6)..(7): n is a, c, g, or u
  misc_feature (9)..(9): n is a, c, g, or u
  misc_feature (15)..(15): n is a, c, g, or u
ggugunnunacaacnuugcc

SEQ ID NO: 5805 - RNA, 20 nt, Artificial Sequence
  Synthetic
  misc_feature (9)..(9): n is a, c, g, or u
  misc_feature (15)..(15): n is a, c, g, or u
  misc_feature (18)..(18): n is a, c, g, or u
ggcaauaanuuggangancc

SEQ ID NO: 5806 - RNA, 20 nt, Artificial Sequence
  Synthetic
  misc_feature (18)..(18): n is a, c, g, or u
aagcgaagugcacacggncc

SEQ ID NO: 5807 - RNA, 20 nt, Artificial Sequence
  Synthetic
  misc_feature (14)..(14): n is a, c, g, or u
  misc_feature (18)..(18): n is a, c, g, or u
ucucucuuauauanaauncc

SEQ ID NO: 5808 - RNA, 20 nt, Artificial Sequence
  Synthetic
uaucaucuuccucuucaucc

SEQ ID NO: 5809 - RNA, 20 nt, Artificial Sequence
  Synthetic
  misc_feature (5)..(5): n is a, c, g, or u
  misc_feature (11)..(11): n is a, c, g, or u
  misc_feature (14)..(14): n is a, c, g, or u
uugcncugaanagnggaucc

SEQ ID NO: 5810 - RNA, 20 nt, Artificial Sequence
  Synthetic
  misc_feature (3)..(3): n is a, c, g, or u
  misc_feature (6)..(6): n is a, c, g, or u
uunacncaaugugguuaucc

SEQ ID NO: 5811 - RNA, 20 nt, Artificial Sequence
  Synthetic
uugccagcagauccgccucc

SEQ ID NO: 5812 - RNA, 20 nt, Artificial Sequence
  Synthetic
guguggauucgcacuccucc

SEQ ID NO: 5813 - RNA, 20 nt, Artificial Sequence
  Synthetic
cgcagaagaucucaaucucc

SEQ ID NO: 5814 - RNA, 20 nt, Artificial Sequence
  Synthetic
  misc_feature (2)..(2): n is a, c, g, or u
  misc_feature (5)..(5): n is a, c, g, or u
  misc_feature (11)..(11): n is a, c, g, or u
cncunuucagngcaaauucc

SEQ ID NO: 5815 - RNA, 20 nt, Artificial Sequence
  Synthetic
  misc_feature (1)..(1): n is a, c, g, or u
  misc_feature (7)..(7): n is a, c, g, or u
ncuucuncgucugccguucc

SEQ ID NO: 5816 - RNA, 20 nt, Artificial Sequence
  Synthetic
  misc_feature (2)..(3): n is a, c, g, or u
unnugugguuucacauuucc

SEQ ID NO: 5817 - RNA, 20 nt, Artificial Sequence
  Synthetic
guaagggcucuguauuuucc

SEQ ID NO: 5818 - RNA, 20 nt, Artificial Sequence
  Synthetic
cggcugcgagcgaaacaagc

SEQ ID NO: 5819 - RNA, 20 nt, Artificial Sequence
  Synthetic
  misc_feature (14)..(14): n is a, c, g, or u
aguuggcagcacanccgagc

SEQ ID NO: 5820 - RNA, 20 nt, Artificial Sequence
  Synthetic
acaagaagaugaggcauagc

SEQ ID NO: 5821 - RNA, 20 nt, Artificial Sequence
  Synthetic
agaggaagaugauaaaacgc

SEQ ID NO: 5822 - RNA, 20 nt, Artificial Sequence
  Synthetic
uugcagcuuguuucgcucgc

SEQ ID NO: 5823 - RNA, 20 nt, Artificial Sequence
  Synthetic
  misc_feature (13)..(13): n is a, c, g, or u
guacaccuccuunccauggc

SEQ ID NO: 5824 - RNA, 20 nt, Artificial Sequence
  Synthetic
  misc_feature (6)..(6): n is a, c, g, or u
ccgcgnaggauccaguuggc

SEQ ID NO: 5825 - RNA, 20 nt, Artificial Sequence
  Synthetic
  misc_feature (9)..(9): n is a, c, g, or u
  misc_feature (12)..(12): n is a, c, g, or u
  misc_feature (15)..(15): n is a, c, g, or u
  misc_feature (18)..(18): n is a, c, g, or u
ccacauugngunaanggngc

SEQ ID NO: 5826 - RNA, 20 nt, Artificial Sequence
  Synthetic
  misc_feature (6)..(6): n is a, c, g, or u
  misc_feature (11)..(12): n is a, c, g, or u
  misc_feature (18)..(18): n is a, c, g, or u
uuaacnacuannucccungc

SEQ ID NO: 5827 - RNA, 20 nt, Artificial Sequence
  Synthetic
uauaaagggacucaagaugc

SEQ ID NO: 5828 - RNA, 20 nt, Artificial Sequence
  Synthetic
  misc_feature (6)..(6): n is a, c, g, or u
  misc_feature (12)..(12): n is a, c, g, or u
  misc_feature (15)..(15): n is a, c, g, or u
aauaanuugganganccugc

SEQ ID NO: 5829 - RNA, 20 nt, Artificial Sequence
  Synthetic
caucuuccucuucauccugc

SEQ ID NO: 5830 - RNA, 20 nt, Artificial Sequence
  Synthetic
auugggggccaaaucugugc

SEQ ID NO: 5831 - RNA, 20 nt, Artificial Sequence
  Synthetic
  misc_feature (15)..(15): n is a, c, g, or u
ccauggcugcucggnugugc

SEQ ID NO: 5832 - RNA, 20 nt, Artificial Sequence
  Synthetic
cauacugcggaacuccuugc

SEQ ID NO: 5833 - RNA, 20 nt, Artificial Sequence
  Synthetic
  misc_feature (6)..(6): n is a, c, g, or u
gugggncuuuugggcuuugc

SEQ ID NO: 5834 - RNA, 20 nt, Artificial Sequence
  Synthetic
gggauucuuuccagaccauc

SEQ ID NO: 5835 - RNA, 20 nt, Artificial Sequence
  Synthetic
cccgucuguuccuucucauc

SEQ ID NO: 5836 - RNA, 20 nt, Artificial Sequence
  Synthetic
  misc_feature (14)..(15): n is a, c, g, or u
ggucuggagcgaannucauc

SEQ ID NO: 5837 - RNA, 20 nt, Artificial Sequence
  Synthetic
  misc_feature (1)..(1): n is a, c, g, or u
  misc_feature (7)..(7): n is a, c, g, or u
nacaacnuugccagcagauc

SEQ ID NO: 5838 - RNA, 20 nt, Artificial Sequence
  Synthetic
guggaagcaggaggcggauc

SEQ ID NO: 5839 - RNA, 20 nt, Artificial Sequence
  Synthetic
ggaguuccgcaguauggauc

SEQ ID NO: 5840 - RNA, 20 nt, Artificial Sequence
  Synthetic
ugugcacuucgcuucaccuc

SEQ ID NO: 5841 - RNA, 20 nt, Artificial Sequence
  Synthetic
ccaugcaacuuuuucaccuc

SEQ ID NO: 5842 - RNA, 20 nt, Artificial Sequence
  Synthetic
uaccuaugggagugggccuc

SEQ ID NO: 5843 - RNA, 20 nt, Artificial Sequence
  Synthetic
uggaaccuuuguggcuccuc

SEQ ID NO: 5844 - RNA, 20 nt, Artificial Sequence
  Synthetic
gaaccuuuaccccguugcuc

SEQ ID NO: 5845 - RNA, 20 nt, Artificial Sequence
  Synthetic
caaccaguggggguugcguc

SEQ ID NO: 5846 - RNA, 20 nt, Artificial Sequence
  Synthetic
  misc_feature (1)..(1): n is a, c, g, or u
  misc_feature (4)..(4): n is a, c, g, or u
  misc_feature (10)..(10): n is a, c, g, or u
  misc_feature (16)..(16): n is a, c, g, or u
nuancgcccncuucuncguc

SEQ ID NO: 5847 - RNA, 20 nt, Artificial Sequence
  Synthetic
  misc_feature (3)..(3): n is a, c, g, or u
  misc_feature (9)..(9): n is a, c, g, or u
  misc_feature (15)..(15): n is a, c, g, or u
cgnccccgngagggnucguc

SEQ ID NO: 5848 - RNA, 20 nt, Artificial Sequence
  Synthetic
  misc_feature (17)..(17): n is a, c, g, or u
gagaggugcgacccgunguc

SEQ ID NO: 5849 - RNA, 20 nt, Artificial Sequence
  Synthetic
gaccuacucgacaccgcuuc

SEQ ID NO: 5850 - RNA, 20 nt, Artificial Sequence
  Synthetic
aaacaagcugcaaggaguuc

SEQ ID NO: 5851 - RNA, 20 nt, Artificial Sequence
  Synthetic
  misc_feature (10)..(10): n is a, c, g, or u
accauauucnugggaacaag

SEQ ID NO: 5852 - RNA, 20 nt, Artificial Sequence
  Synthetic
cgugcagaggugaagcgaag

SEQ ID NO: 5853 - RNA, 20 nt, Artificial Sequence
  Synthetic
  misc_feature (6)..(6): n is a, c, g, or u
cuguungauccgaggguaag

SEQ ID NO: 5854 - RNA, 20 nt, Artificial Sequence
  Synthetic
  misc_feature (15)..(15): n is a, c, g, or u
cuuacccucggaucnaacag

SEQ ID NO: 5855 - RNA, 20 nt, Artificial Sequence
  Synthetic
ccaccagcaggaaaauacag

SEQ ID NO: 5856 - RNA, 20 nt, Artificial Sequence
  Synthetic
  misc_feature (14)..(14): n is a, c, g, or u
guuguccauguucnuagcag

SEQ ID NO: 5857 - RNA, 20 nt, Artificial Sequence
  Synthetic
gcuuggccauuggccaucag

SEQ ID NO: 5858 - RNA, 20 nt, Artificial Sequence
  Synthetic
  misc_feature (3)..(3): n is a, c, g, or u
  misc_feature (12)..(12): n is a, c, g, or u
ggnucguccgcnggauucag

SEQ ID NO: 5859 - RNA, 20 nt, Artificial Sequence
  Synthetic
  misc_feature (12)..(12): n is a, c, g, or u
  misc_feature (15)..(15): n is a, c, g, or u
cagcuggauccncunuucag

SEQ ID NO: 5860 - RNA, 20 nt, Artificial Sequence
  Synthetic
  misc_feature (5)..(5): n is a, c, g, or u
caggnauacagaggcaugag

SEQ ID NO: 5861 - RNA, 20 nt, Artificial Sequence
  Synthetic
  misc_feature (14)..(14): n is a, c, g, or u
  misc_feature (18)..(18): n is a, c, g, or u
ucuaaagcaucccnguanag

SEQ ID NO: 5862 - RNA, 20 nt, Artificial Sequence
  Synthetic
cuccuggcucaguuuacuag

SEQ ID NO: 5863 - RNA, 20 nt, Artificial Sequence
  Synthetic
aagagagaauccacacguag

SEQ ID NO: 5864 - RNA, 20 nt, Artificial Sequence
  Synthetic
auuuguucaguggugcguag

SEQ ID NO: 5865 - RNA, 20 nt, Artificial Sequence
  Synthetic
  misc_feature (7)..(7): n is a, c, g, or u
cuggaanuagaggacaaacg

SEQ ID NO: 5866 - RNA, 20 nt, Artificial Sequence
  Synthetic
aaacugagccaggagaaacg

SEQ ID NO: 5867 - RNA, 20 nt, Artificial Sequence
  Synthetic
aacacaccgccuguaacacg

SEQ ID NO: 5868 - RNA, 20 nt, Artificial Sequence
  Synthetic
acgguggucuccaugcgacg

SEQ ID NO: 5869 - RNA, 20 nt, Artificial Sequence
  Synthetic
gcagguuuugcauggucccg

SEQ ID NO: 5870 - RNA, 20 nt, Artificial Sequence
  Synthetic
cacaggccuggccguugccg

SEQ ID NO: 5871 - RNA, 20 nt, Artificial Sequence
  Synthetic
  misc_feature (17)..(17): n is a, c, g, or u
uccaguuggcagcacanccg

SEQ ID NO: 5872 - RNA, 20 nt, Artificial Sequence
  Synthetic
  misc_feature (5)..(5): n is a, c, g, or u
  misc_feature (14)..(15): n is a, c, g, or u
cucunucaacgacnngaagg

SEQ ID NO: 5873 - RNA, 20 nt, Artificial Sequence
  Synthetic
gcaguauggaucggcagagg

SEQ ID NO: 5874 - RNA, 20 nt, Artificial Sequence
  Synthetic
  misc_feature (5)..(6): n is a, c, g, or u
  misc_feature (15)..(15): n is a, c, g, or u
cuucnngucguuganagagg

SEQ ID NO: 5875 - RNA, 20 nt, Artificial Sequence
  Synthetic
uggugacccacaaaaugagg

SEQ ID NO: 5876 - RNA, 20 nt, Artificial Sequence
  Synthetic
  misc_feature (14)..(14): n is a, c, g, or u
ggaaguguggauangauagg

SEQ ID NO: 5877 - RNA, 20 nt, Artificial Sequence
  Synthetic
gugagagaggcaauagucgg

SEQ ID NO: 5878 - RNA, 20 nt, Artificial Sequence
  Synthetic
cuuuguuuacgucccgucgg

SEQ ID NO: 5879 - RNA, 20 nt, Artificial Sequence
  Synthetic
aacaagagcuacagcauggg

SEQ ID NO: 5880 - RNA, 20 nt, Artificial Sequence
  Synthetic
  misc_feature (10)..(10): n is a, c, g, or u
caaucuucungaagacuggg

SEQ ID NO: 5881 - RNA, 20 nt, Artificial Sequence
  Synthetic
auggaugaucugguauuggg

SEQ ID NO: 5882 - RNA, 20 nt, Artificial Sequence
  Synthetic
  misc_feature (12)..(12): n is a, c, g, or u
  misc_feature (15)..(15): n is a, c, g, or u
  misc_feature (18)..(18): n is a, c, g, or u
uaaccacauugngunaangg

SEQ ID NO: 5883 - RNA, 20 nt, Artificial Sequence
  Synthetic
gaggugaaaaaguugcaugg

SEQ ID NO: 5884 - RNA, 20 nt, Artificial Sequence
  Synthetic
  misc_feature (11)..(11): n is a, c, g, or u
guucugugucncugaacugg

SEQ ID NO: 5885 - RNA, 20 nt, Artificial Sequence
  Synthetic
  misc_feature (1)..(1): n is a, c, g, or u
  misc_feature (7)..(7): n is a, c, g, or u
  misc_feature (13)..(13): n is a, c, g, or u
ncccucncggggncgcuugg

SEQ ID NO: 5886 - RNA, 20 nt, Artificial Sequence
  Synthetic
acgcaacccccacugguugg

SEQ ID NO: 5887 - RNA, 20 nt, Artificial Sequence
  Synthetic
gacccuuauaaagaauuugg

SEQ ID NO: 5888 - RNA, 20 nt, Artificial Sequence
  Synthetic
ugugccuuggguggcuuugg

SEQ ID NO: 5889 - RNA, 20 nt, Artificial Sequence
  Synthetic
  misc_feature (19)..(19): n is a, c, g, or u
ugaugggaugggaauacang

SEQ ID NO: 5890 - RNA, 20 nt, Artificial Sequence
  Synthetic
  misc_feature (19)..(19): n is a, c, g, or u
gaggacaacagaguugucng

SEQ ID NO: 5891 - RNA, 20 nt, Artificial Sequence
  Synthetic
  misc_feature (13)..(13): n is a, c, g, or u
  misc_feature (16)..(16): n is a, c, g, or u
  misc_feature (19)..(19): n is a, c, g, or u
caauucauuuuungunagng

SEQ ID NO: 5892 - RNA, 20 nt, Artificial Sequence
  Synthetic
  misc_feature (13)..(13): n is a, c, g, or u
  misc_feature (16)..(16): n is a, c, g, or u
  misc_feature (19)..(19): n is a, c, g, or u
gagagcgguaugnuunggng

SEQ ID NO: 5893 - RNA, 20 nt, Artificial Sequence
  Synthetic
  misc_feature (8)..(8): n is a, c, g, or u
  misc_feature (11)..(11): n is a, c, g, or u
acuaugunaanacuaacaug

SEQ ID NO: 5894 - RNA, 20 nt, Artificial Sequence
  Synthetic
ccacaaagguuccacgcaug

SEQ ID NO: 5895 - RNA, 20 nt, Artificial Sequence
  Synthetic
caaauugcacuaguaaacug

SEQ ID NO: 5896 - RNA, 20 nt, Artificial Sequence
  Synthetic
cucggcaacggccaggccug

SEQ ID NO: 5897 - RNA, 20 nt, Artificial Sequence
  Synthetic
cuguucaagccuccaagcug

SEQ ID NO: 5898 - RNA, 20 nt, Artificial Sequence
  Synthetic
gguauugggggccaaaucug

SEQ ID NO: 5899 - RNA, 20 nt, Artificial Sequence
  Synthetic
ggaaaauaccuaugggagug

SEQ ID NO: 5900 - RNA, 20 nt, Artificial Sequence
  Synthetic
  misc_feature (15)..(15): n is a, c, g, or u
uucucaucugccggnccgug

SEQ ID NO: 5901 - RNA, 20 nt, Artificial Sequence
  Synthetic
ugacuuuggcuuccugggug

SEQ ID NO: 5902 - RNA, 20 nt, Artificial Sequence
  Synthetic
  misc_feature (3)..(3): n is a, c, g, or u
  misc_feature (9)..(9): n is a, c, g, or u
  misc_feature (11)..(12): n is a, c, g, or u
  misc_feature (18)..(18): n is a, c, g, or u
aanguugunannacaccnug

SEQ ID NO: 5903 - RNA, 20 nt, Artificial Sequence
  Synthetic
  misc_feature (18)..(18): n is a, c, g, or u
auucccaucccaucaucnug

SEQ ID NO: 5904 - RNA, 20 nt, Artificial Sequence
  Synthetic
  misc_feature (3)..(3): n is a, c, g, or u
  misc_feature (18)..(18): n is a, c, g, or u
uunccauggcugcucggnug

SEQ ID NO: 5905 - RNA, 20 nt, Artificial Sequence
  Synthetic
ggaaacauagagguuccuug

SEQ ID NO: 5906 - RNA, 20 nt, Artificial Sequence
  Synthetic
gguuccuugagcaagaguug

SEQ ID NO: 5907 - RNA, 20 nt, Artificial Sequence
  Synthetic
  misc_feature (5)..(5): n is a, c, g, or u
  misc_feature (14)..(14): n is a, c, g, or u
aacgnauugugggncuuuug

SEQ ID NO: 5908 - RNA, 20 nt, Artificial Sequence
  Synthetic
  misc_feature (5)..(5): n is a, c, g, or u
  misc_feature (11)..(11): n is a, c, g, or u
  misc_feature (17)..(17): n is a, c, g, or u
  misc_feature (20)..(20): n is a, c, g, or u
gacgnagaagngggcgnuan

SEQ ID NO: 5909 - RNA, 20 nt, Artificial Sequence
  Synthetic
  misc_feature (5)..(5): n is a, c, g, or u
  misc_feature (17)..(17): n is a, c, g, or u
  misc_feature (20)..(20): n is a, c, g, or u
ggggncgcuuggggcunuan

SEQ ID NO: 5910 - RNA, 20 nt, Artificial Sequence
  Synthetic
  misc_feature (8)..(8): n is a, c, g, or u
  misc_feature (14)..(14): n is a, c, g, or u
  misc_feature (20)..(20): n is a, c, g, or u
cggacgancccucncggggn

SEQ ID NO: 5911 - RNA, 20 nt, Artificial Sequence
  Synthetic
  misc_feature (17)..(17): n is a, c, g, or u
  misc_feature (20)..(20): n is a, c, g, or u
ccucuauguuucccucnugn

SEQ ID NO: 5912 - RNA, 20 nt, Artificial Sequence
  Synthetic
cuacgcaccacugaacaaau

SEQ ID NO: 5913 - RNA, 20 nt, Artificial Sequence
  Synthetic
cgcaugcgcugauggccaau

SEQ ID NO: 5914 - RNA, 20 nt, Artificial Sequence
  Synthetic
  misc_feature (11)..(11): n is a, c, g, or u
aacaaggacanuuggccaau

SEQ ID NO: 5915 - RNA, 20 nt, Artificial Sequence
  Synthetic
  misc_feature (13)..(13): n is a, c, g, or u
ucgcagacgaagnucucaau

SEQ ID NO: 5916 - RNA, 20 nt, Artificial Sequence
  Synthetic
  misc_feature (8)..(8): n is a, c, g, or u
  misc_feature (14)..(14): n is a, c, g, or u
cuuuaganucaccngaacau

SEQ ID NO: 5917 - RNA, 20 nt, Artificial Sequence
  Synthetic
  misc_feature (16)..(16): n is a, c, g, or u
gaaguacaccuccuunccau

SEQ ID NO: 5918 - RNA, 20 nt, Artificial Sequence
  Synthetic
ccaacaagaagaugaggcau

SEQ ID NO: 5919 - RNA, 20 nt, Artificial Sequence
  Synthetic
  misc_feature (16)..(16): n is a, c, g, or u
ccgcagacacauccancgau

SEQ ID NO: 5920 - RNA, 20 nt, Artificial Sequence
  Synthetic
gguuccacgcaugcgcugau

SEQ ID NO: 5921 - RNA, 20 nt, Artificial Sequence
  Synthetic
  misc_feature (3)..(3): n is a, c, g, or u
  misc_feature (12)..(12): n is a, c, g, or u
  misc_feature (18)..(18): n is a, c, g, or u
aanucaccccancacaanau

SEQ ID NO: 5922 - RNA, 20 nt, Artificial Sequence
  Synthetic
cagaacccugcuccgacuau

SEQ ID NO: 5923 - RNA, 20 nt, Artificial Sequence
  Synthetic
  misc_feature (1)..(1): n is a, c, g, or u
  misc_feature (7)..(7): n is a, c, g, or u
  misc_feature (10)..(10): n is a, c, g, or u
  misc_feature (16)..(16): n is a, c, g, or u
ngcaggnucnuccaanuuau

SEQ ID NO: 5924 - RNA, 20 nt, Artificial Sequence
  Synthetic
  misc_feature (5)..(5): n is a, c, g, or u
cccungaagaagaacucccu

SEQ ID NO: 5925 - RNA, 20 nt, Artificial Sequence
  Synthetic
  misc_feature (9)..(9): n is a, c, g, or u
  misc_feature (14)..(15): n is a, c, g, or u
uaguuaacnacuannucccu

SEQ ID NO: 5926 - RNA, 20 nt, Artificial Sequence
  Synthetic
gaagaagaacucccucgccu

SEQ ID NO: 5927 - RNA, 20 nt, Artificial Sequence
  Synthetic
caaacacuuggcacaggccu

SEQ ID NO: 5928 - RNA, 20 nt, Artificial Sequence
  Synthetic
auccauacugcggaacuccu

SEQ ID NO: 5929 - RNA, 20 nt, Artificial Sequence
  Synthetic
ggccucagcccguuucuccu

SEQ ID NO: 5930 - RNA, 20 nt, Artificial Sequence
  Synthetic
  misc_feature (6)..(7): n is a, c, g, or u
ggggannacccggguguccu

SEQ ID NO: 5931 - RNA, 20 nt, Artificial Sequence
  Synthetic
ccuguccuccaacuuguccu

SEQ ID NO: 5932 - RNA, 20 nt, Artificial Sequence
  Synthetic
  misc_feature (8)..(8): n is a, c, g, or u
  misc_feature (14)..(14): n is a, c, g, or u
caccccancacaanauagcu

SEQ ID NO: 5933 - RNA, 20 nt, Artificial Sequence
  Synthetic
uccuugcagcuuguuucgcu

SEQ ID NO: 5934 - RNA, 20 nt, Artificial Sequence
  Synthetic
aagcaggaggcggaucugcu

SEQ ID NO: 5935 - RNA, 20 nt, Artificial Sequence
  Synthetic
ugcaaaaccugcacaacucu

SEQ ID NO: 5936 - RNA, 20 nt, Artificial Sequence
  Synthetic
agggcuuucccccacugucu

SEQ ID NO: 5937 - RNA, 20 nt, Artificial Sequence
  Synthetic
uuaggcagaggugaaaaagu

SEQ ID NO: 5938 - RNA, 20 nt, Artificial Sequence
  Synthetic
uucgcuucaccucugcacgu

SEQ ID NO: 5939 - RNA, 20 nt, Artificial Sequence
  Synthetic
uacaugaaccuuuaccccgu

SEQ ID NO: 5940 - RNA, 20 nt, Artificial Sequence
  Synthetic
cuuggcacaggccuggccgu

SEQ ID NO: 5941 - RNA, 20 nt, Artificial Sequence
  Synthetic
  misc_feature (5)..(5): n is a, c, g, or u
gaagnucucaaucgccgcgu

SEQ ID NO: 5942 - RNA, 20 nt, Artificial Sequence
  Synthetic
gguucacacccccacacggu

SEQ ID NO: 5943 - RNA, 20 nt, Artificial Sequence
  Synthetic
  misc_feature (14)..(14): n is a, c, g, or u
cguuccagccgacnacgggu

SEQ ID NO: 5944 - RNA, 20 nt, Artificial Sequence
  Synthetic
cuccaagcugugccuugggu

SEQ ID NO: 5945 - RNA, 20 nt, Artificial Sequence
  Synthetic
cucuguauuuuccugcuggu

SEQ ID NO: 5946 - RNA, 20 nt, Artificial Sequence
  Synthetic
ucuggacuaucaagguaugu

SEQ ID NO: 5947 - RNA, 20 nt, Artificial Sequence
  Synthetic
  misc_feature (1)..(1): n is a, c, g, or u
nagaggugcucccaugcugu

SEQ ID NO: 5948 - RNA, 20 nt, Artificial Sequence
  Synthetic
cgcaugcguggaaccuuugu

SEQ ID NO: 5949 - RNA, 20 nt, Artificial Sequence
  Synthetic
  misc_feature (4)..(4): n is a, c, g, or u
  misc_feature (10)..(11): n is a, c, g, or u
  misc_feature (13)..(13): n is a, c, g, or u
  misc_feature (19)..(19): n is a, c, g, or u
acanggugunnunacaacnu

SEQ ID NO: 5950 - RNA, 20 nt, Artificial Sequence
  Synthetic
  misc_feature (19)..(19): n is a, c, g, or u
gugauguuguccauguucnu

SEQ ID NO: 5951 - RNA, 20 nt, Artificial Sequence
  Synthetic
  misc_feature (13)..(14): n is a, c, g, or u
  misc_feature (16)..(16): n is a, c, g, or u
  misc_feature (19)..(19): n is a, c, g, or u
cgugaacgccccnngnagnu

SEQ ID NO: 5952 - RNA, 20 nt, Artificial Sequence
  Synthetic
  misc_feature (1)..(2): n is a, c, g, or u
  misc_feature (9)..(9): n is a, c, g, or u
  misc_feature (11)..(11): n is a, c, g, or u
  misc_feature (17)..(17): n is a, c, g, or u
  misc_feature (19)..(19): n is a, c, g, or u
nnuuaggananaaucungnu

SEQ ID NO: 5953 - RNA, 20 nt, Artificial Sequence
  Synthetic
cggguguccuggccaaaauu

SEQ ID NO: 5954 - RNA, 20 nt, Artificial Sequence
  Synthetic
  misc_feature (3)..(3): n is a, c, g, or u
canucgggacugcuggaauu

SEQ ID NO: 5955 - RNA, 20 nt, Artificial Sequence
  Synthetic
cugguuggggcuuggccauu

SEQ ID NO: 5956 - RNA, 20 nt, Artificial Sequence
  Synthetic
cuccuaccuuguuugccauu

SEQ ID NO: 5957 - RNA, 20 nt, Artificial Sequence
  Synthetic
  misc_feature (5)..(5): n is a, c, g, or u
ugucnuuuggaguguggauu

SEQ ID NO: 5958 - RNA, 20 nt, Artificial Sequence
  Synthetic
  misc_feature (7)..(7): n is a, c, g, or u
  misc_feature (16)..(16): n is a, c, g, or u
uuuuaanaccagacanuauu

SEQ ID NO: 5959 - RNA, 20 nt, Artificial Sequence
  Synthetic
gguugcgucagcaaacacuu

SEQ ID NO: 5960 - RNA, 20 nt, Artificial Sequence
  Synthetic
  misc_feature (8)..(8): n is a, c, g, or u
cugccggnccgugugcacuu

SEQ ID NO: 5961 - RNA, 20 nt, Artificial Sequence
  Synthetic
acccccacugguuggggcuu

SEQ ID NO: 5962 - RNA, 20 nt, Artificial Sequence
  Synthetic
  misc_feature (9)..(9): n is a, c, g, or u
auugugggncuuuugggcuu

SEQ ID NO: 5963 - RNA, 20 nt, Artificial Sequence
  Synthetic
  misc_feature (9)..(9): n is a, c, g, or u
gucccgcgnaggauccaguu

SEQ ID NO: 5964 - RNA, 20 nt, Artificial Sequence
  Synthetic
  misc_feature (4)..(5): n is a, c, g, or u
uccnnuuauguaagacuguu

SEQ ID NO: 5965 - RNA, 20 nt, Artificial Sequence
  Synthetic
ccaggccugugccaaguguu

SEQ ID NO: 5966 - RNA, 20 nt, Artificial Sequence
  Synthetic
ccucccacuccuaccuuguu

SEQ ID NO: 5967 - RNA, 20 nt, Artificial Sequence
  Synthetic
  misc_feature (6)..(6): n is a, c, g, or u
  misc_feature (18)..(18): n is a, c, g, or u
caacanaaacaaggacanuu

SEQ ID NO: 5968 - RNA, 20 nt, Artificial Sequence
  Synthetic
  misc_feature (6)..(6): n is a, c, g, or u
  misc_feature (17)..(18): n is a, c, g, or u
uugucngugccgaugannuu

SEQ ID NO: 5969 - RNA, 20 nt, Artificial Sequence
  Synthetic
ucaagaugcugcacagauuu

SEQ ID NO: 5970 - RNA, 20 nt, Artificial Sequence
  Synthetic
  misc_feature (9)..(9): n is a, c, g, or u
ugggguganuuaaugacuuu

SEQ ID NO: 5971 - RNA, 20 nt, Artificial Sequence
  Synthetic
agcaagaguugugcagguuu

SEQ ID NO: 5972 - RNA, 20 nt, Artificial Sequence
  Synthetic
gaaaagacaaaagccuguuu

SEQ ID NO: 5973 - RNA, 20 nt, Artificial Sequence
  Synthetic
gaacuccuugcagcuuguuu

SEQ ID NO: 5974 - RNA, 20 nt, Artificial Sequence
  Synthetic
gguuggggacugcgaauuuu

SEQ ID NO: 5975 - RNA, 20 nt, Artificial Sequence
  Synthetic
  misc_feature (1)..(1): n is a, c, g, or u
naaacaggcuuuugucuuuu

SEQ ID NO: 5976 - RNA, 20 nt, Artificial Sequence
  Synthetic
  misc_feature (10)..(10): n is a, c, g, or u
uguggaauuncucucuuuuu

SEQ ID NO: 5977 - RNA, 17 nt, Artificial Sequence
  Synthetic
gcacacgguccggcaga

SEQ ID NO: 5978 - RNA, 17 nt, Artificial Sequence
  Synthetic
gcaucccgauacagagc

SEQ ID NO: 5979 - RNA, 17 nt, Artificial Sequence
  Synthetic
gucuccaugcgacgugc

SEQ ID NO: 5980 - RNA, 20 nt, Artificial Sequence
  Synthetic
gaaaaaccccgccuguaaca

SEQ ID NO: 5981 - RNA, 20 nt, Artificial Sequence
  Synthetic
ggcacuaguaaacugagcca

SEQ ID NO: 5982 - RNA, 20 nt, Artificial Sequence
  Synthetic
gauuaaaggucuuuguacua

SEQ ID NO: 5983 - RNA, 20 nt, Artificial Sequence
  Synthetic
gcgagcaaaacaagcggcua

SEQ ID NO: 5984 - RNA, 20 nt, Artificial Sequence
  Synthetic
  misc_feature (8)..(8): n is a, c, g, or u
ggucggcnggaacggcagac

SEQ ID NO: 5985 - RNA, 20 nt, Artificial Sequence
  Synthetic
gguggucgggaaaaaauccc

SEQ ID NO: 5986 - RNA, 20 nt, Artificial Sequence
  Synthetic
guuccgcaguauggaucggc

SEQ ID NO: 5987 - RNA, 20 nt, Artificial Sequence
  Synthetic
guggucuccaugcgacgugc

SEQ ID NO: 5988 - RNA, 20 nt, Artificial Sequence
  Synthetic
gacgguuucucuuccaaaag

SEQ ID NO: 5989 - RNA, 20 nt, Artificial Sequence
  Synthetic
gacggggagaccgcguaaag

SEQ ID NO: 5990 - RNA, 20 nt, Artificial Sequence
  Synthetic
gagaagauugacgagaugag

SEQ ID NO: 5991 - RNA, 20 nt, Artificial Sequence
  Synthetic
  misc_feature (19)..(19): n is a, c, g, or u
gucggucguugacauugcng

SEQ ID NO: 5992 - RNA, 20 nt, Artificial Sequence
  Synthetic
gcuuucggaaaauuccuaug

SEQ ID NO: 5993 - RNA, 20 nt, Artificial Sequence
  Synthetic
gugcugccaacuggauccug

SEQ ID NO: 5994 - RNA, 20 nt, Artificial Sequence
  Synthetic
gcgauugagaucuucgucug

SEQ ID NO: 5995 - RNA, 20 nt, Artificial Sequence
  Synthetic
gagcucccccuagaaaauug

SEQ ID NO: 5996 - RNA, 20 nt, Artificial Sequence
  Synthetic
gucuagacucugcgguauug

SEQ ID NO: 5997 - RNA, 20 nt, Artificial Sequence
  Synthetic
gggagcucccccuagaaaau

SEQ ID NO: 5998 - RNA, 20 nt, Artificial Sequence
  Synthetic
ggguucacuguuccggaacu

SEQ ID NO: 5999 - RNA, 20 nt, Artificial Sequence
  Synthetic
gcaaugucaacgaccgaccu

SEQ ID NO: 6000 - RNA, 20 nt, Artificial Sequence
  Synthetic
gcaauguuuuuagcaugccu

SEQ ID NO: 6001 - RNA, 20 nt, Artificial Sequence
  Synthetic
guuuugcucgcagcaggucu

SEQ ID NO: 6002 - RNA, 17 nt, Artificial Sequence
  Synthetic
acggggagaccgcguaa

SEQ ID NO: 6003 - RNA, 17 nt, Artificial Sequence
  Synthetic
aaaccccgccuguaaca

SEQ ID NO: 6004 - RNA, 17 nt, Artificial Sequence
  Synthetic
caguauggaucggcaga

SEQ ID NO: 6005 - RNA, 17 nt, Artificial Sequence
  Synthetic
auccucgagaagauuga

SEQ ID NO: 6006 - RNA, 17 nt, Artificial Sequence
  Synthetic
cuaaggcaucccgauac

SEQ ID NO: 6007 - RNA, 17 nt, Artificial Sequence
  Synthetic
ccgcaguauggaucggc

SEQ ID NO: 6008 - RNA, 17 nt, Artificial Sequence
  Synthetic
ucggucguugacauugc

SEQ ID NO: 6009 - RNA, 17 nt, Artificial Sequence
  Synthetic
uucgucugcgaggcgag

SEQ ID NO: 6010 - RNA, 17 nt, Artificial Sequence
  Synthetic
auugagaucuucgucug

SEQ ID NO: 6011 - RNA, 17 nt, Artificial Sequence
  Synthetic
accucugcacgucgcau

SEQ ID NO: 6012 - RNA, 17 nt, Artificial Sequence
  Synthetic
uucugcgacgcggcgau

SEQ ID NO: 6013 - RNA, 17 nt, Artificial Sequence
  Synthetic
augucaacgaccgaccu

SEQ ID NO: 6014 - RNA, 17 nt, Artificial Sequence
  Synthetic
caucucgucaaucuucu

SEQ ID NO: 6015 - RNA, 20 nt, Artificial Sequence
  Synthetic
cagacggggagaccgcguaa

SEQ ID NO: 6016 - RNA, 20 nt, Artificial Sequence
  Synthetic
agugcacacgguccggcaga

SEQ ID NO: 6017 - RNA, 20 nt, Artificial Sequence
  Synthetic
ccgcaguauggaucggcaga

SEQ ID NO: 6018 - RNA, 20 nt, Artificial Sequence
  Synthetic
ccucgagaagauugacgaga

SEQ ID NO: 6019 - RNA, 20 nt, Artificial Sequence
  Synthetic
uccacugcauggccugagga

SEQ ID NO: 6020 - RNA, 20 nt, Artificial Sequence
  Synthetic
uugguggucuauaagcugga

SEQ ID NO: 6021 - RNA, 20 nt, Artificial Sequence
  Synthetic
ccaauccucgagaagauuga

SEQ ID NO: 6022 - RNA, 20 nt, Artificial Sequence
  Synthetic
uagauugaauacacgcauac

SEQ ID NO: 6023 - RNA, 20 nt, Artificial Sequence
  Synthetic
auucuaaggcaucccgauac

SEQ ID NO: 6024 - RNA, 20 nt, Artificial Sequence
  Synthetic
uuuuuagcaugccuugagcc

SEQ ID NO: 6025 - RNA, 20 nt, Artificial Sequence
  Synthetic
ccagcaaagaauggcuugcc

SEQ ID NO: 6026 - RNA, 20 nt, Artificial Sequence
  Synthetic
cucuuacucugggauccugc

SEQ ID NO: 6027 - RNA, 20 nt, Artificial Sequence
  Synthetic
aggucggucguugacauugc

SEQ ID NO: 6028 - RNA, 20 nt, Artificial Sequence
  Synthetic
accaguuggauccagcauuc

SEQ ID NO: 6029 - RNA, 20 nt, Artificial Sequence
  Synthetic
aucuucgucugcgaggcgag

SEQ ID NO: 6030 - RNA, 20 nt, Artificial Sequence
  Synthetic
aauuuuggccaagacacacg

SEQ ID NO: 6031 - RNA, 20 nt, Artificial Sequence
  Synthetic
aaugauucuucccccauucg

SEQ ID NO: 6032 - RNA, 20 nt, Artificial Sequence
  Synthetic
ugagaucuucgucugcgagg

SEQ ID NO: 6033 - RNA, 20 nt, Artificial Sequence
  Synthetic
agaaaggccuuguaaguugg

SEQ ID NO: 6034 - RNA, 20 nt, Artificial Sequence
  Synthetic
auuggaggacaagagguugg

SEQ ID NO: 6035 - RNA, 20 nt, Artificial Sequence
  Synthetic
ccguaaaauuucccaccuug

SEQ ID NO: 6036 - RNA, 20 nt, Artificial Sequence
  Synthetic
uucaccucugcacgucgcau

SEQ ID NO: 6037 - RNA, 20 nt, Artificial Sequence
  Synthetic
aucuucugcgacgcggcgau

SEQ ID NO: 6038 - RNA, 20 nt, Artificial Sequence
  Synthetic
agggaaacauagagguuccu

SEQ ID NO: 6039 - RNA, 20 nt, Artificial Sequence
  Synthetic
aauacuaacauugggaagcu

SEQ ID NO: 6040 - RNA, 20 nt, Artificial Sequence
  Synthetic
cauuugguggucuauaagcu

SEQ ID NO: 6041 - RNA, 20 nt, Artificial Sequence
  Synthetic
acucaucucgucaaucuucu

SEQ ID NO: 6042 - RNA, 20 nt, Artificial Sequence
  Synthetic
ugguugaugauccuggaauu

SEQ ID NO: 6043 - RNA, 20 nt, Artificial Sequence
  Synthetic
uagaguauuuggugucuuuu

SEQ ID NO: 6044 - RNA, 17 nt, Artificial Sequence
  Synthetic
gguuuugaacagcaaca

SEQ ID NO: 6045 - RNA, 17 nt, Artificial Sequence
  Synthetic
ggacaaauuggaggaca

SEQ ID NO: 6046 - RNA, 17 nt, Artificial Sequence
  Synthetic
gccgauugguggaggca

SEQ ID NO: 6047 - RNA, 17 nt, Artificial Sequence
  Synthetic
  misc_feature (2)..(2): n is a, c, g, or u
gnggugaacaaugcuca

SEQ ID NO: 6048 - RNA, 17 nt, Artificial Sequence
  Synthetic
guggucuauaagcugga

SEQ ID NO: 6049 - RNA, 17 nt, Artificial Sequence
  Synthetic
gcauagcagcaggauga

SEQ ID NO: 6050 - RNA, 17 nt, Artificial Sequence
  Synthetic
gcccaaggucuuacaua

SEQ ID NO: 6051 - RNA, 17 nt, Artificial Sequence
  Synthetic
gguucacucccccacac

SEQ ID NO: 6052 - RNA, 17 nt, Artificial Sequence
  Synthetic
ggucgggaaaaaauccc

SEQ ID NO: 6053 - RNA, 17 nt, Artificial Sequence
  Synthetic
gcaaagaauggcuugcc

SEQ ID NO: 6054 - RNA, 17 nt, Artificial Sequence
  Synthetic
gaugccuuagaaucucc

SEQ ID NO: 6055 - RNA, 17 nt, Artificial Sequence
  Synthetic
gguuucucuuccaaaag

SEQ ID NO: 6056 - RNA, 17 nt, Artificial Sequence
  Synthetic
ggggagaccgcguaaag

SEQ ID NO: 6057 - RNA, 17 nt, Artificial Sequence
  Synthetic
gucagaaggcaaaaacg

SEQ ID NO: 6058 - RNA, 17 nt, Artificial Sequence
  Synthetic
gauucuucccccauucg

SEQ ID NO: 6059 - RNA, 17 nt, Artificial Sequence
  Synthetic
gaucuucgucugcgagg

SEQ ID NO: 6060 - RNA, 17 nt, Artificial Sequence
  Synthetic
  misc_feature (14)..(14): n is a, c, g, or u
gacugggaggagunggg

SEQ ID NO: 6061 - RNA, 17 nt, Artificial Sequence
  Synthetic
ggaggacaagagguugg

SEQ ID NO: 6062 - RNA, 17 nt, Artificial Sequence
  Synthetic
  misc_feature (16)..(16): n is a, c, g, or u
ggucguugacauugcng

SEQ ID NO: 6063 - RNA, 17 nt, Artificial Sequence
  Synthetic
gaauaucaggaaaagau

SEQ ID NO: 6064 - RNA, 17 nt, Artificial Sequence
  Synthetic
gcaggguccccaauccu

SEQ ID NO: 6065 - RNA, 17 nt, Artificial Sequence
  Synthetic
gaaacauagagguuccu

SEQ ID NO: 6066 - RNA, 17 nt, Artificial Sequence
  Synthetic
gagugucucucaaaggu

SEQ ID NO: 6067 - RNA, 17 nt, Artificial Sequence
  Synthetic
gaauuuggagcuacugu

SEQ ID NO: 6068 - RNA, 17 nt, Artificial Sequence
  Synthetic
  misc_feature (16)..(16): n is a, c, g, or u
gagguuggugaguganu

SEQ ID NO: 6069 - RNA, 17 nt, Artificial Sequence
  Synthetic
  misc_feature (16)..(16): n is a, c, g, or u
ggaagagaaaccgucnu

SEQ ID NO: 6070 - RNA, 17 nt, Artificial Sequence
  Synthetic
gauagccaggacaaauu

SEQ ID NO: 6071 - RNA, 17 nt, Artificial Sequence
  Synthetic
guuuuucauuuacuguu

SEQ ID NO: 6072 - RNA, 20 nt, Artificial Sequence
  Synthetic
  misc_feature (16)..(16): n is a, c, g, or u
gaauaaggugacccanaaaa

SEQ ID NO: 6073 - RNA, 20 nt, Artificial Sequence
  Synthetic
gaagguuuugaacagcaaca

SEQ ID NO: 6074 - RNA, 20 nt, Artificial Sequence
  Synthetic
  misc_feature (5)..(5): n is a, c, g, or u
ggugnggugaacaaugcuca

SEQ ID NO: 6075 - RNA, 20 nt, Artificial Sequence
  Synthetic
  misc_feature (14)..(14): n is a, c, g, or u
gacugggaggagunggggga

SEQ ID NO: 6076 - RNA, 20 nt, Artificial Sequence
  Synthetic
gaggcauagcagcaggauga

SEQ ID NO: 6077 - RNA, 20 nt, Artificial Sequence
  Synthetic
  misc_feature (5)..(5): n is a, c, g, or u
ggacngaagccaacaaggua

SEQ ID NO: 6078 - RNA, 20 nt, Artificial Sequence
  Synthetic
gacaaaagaaaauugguaac

SEQ ID NO: 6079 - RNA, 20 nt, Artificial Sequence
  Synthetic
  misc_feature (3)..(3): n is a, c, g, or u
  misc_feature (7)..(7): n is a, c, g, or u
ganaganccccaagcgaccc

SEQ ID NO: 6080 - RNA, 20 nt, Artificial Sequence
  Synthetic
gaagucagaaggcaaaaacg

SEQ ID NO: 6081 - RNA, 20 nt, Artificial Sequence
  Synthetic
  misc_feature (6)..(6): n is a, c, g, or u
ggaaangauguauauuuccg

SEQ ID NO: 6082 - RNA, 20 nt, Artificial Sequence
  Synthetic
gacuguuuguuuaaagacug

SEQ ID NO: 6083 - RNA, 20 nt, Artificial Sequence
  Synthetic
  misc_feature (5)..(5): n is a, c, g, or u
guuungcuccagaccugcug

SEQ ID NO: 6084 - RNA, 20 nt, Artificial Sequence
  Synthetic
ggugcaggguccccaauccu

SEQ ID NO: 6085 - RNA, 20 nt, Artificial Sequence
  Synthetic
gccaagucuguacaacaucu

SEQ ID NO: 6086 - RNA, 20 nt, Artificial Sequence
  Synthetic
gaugagugucucucaaaggu

SEQ ID NO: 6087 - RNA, 20 nt, Artificial Sequence
  Synthetic
ggaaugauucuucccccauu

SEQ ID NO: 6088 - RNA, 17 nt, Artificial Sequence
  Synthetic
aagucagaaggcaaaaa

SEQ ID NO: 6089 - RNA, 17 nt, Artificial Sequence
  Synthetic
  misc_feature (13)..(13): n is a, c, g, or u
uaaggugacccanaaaa

SEQ ID NO: 6090 - RNA, 17 nt, Artificial Sequence
  Synthetic
ccuuauucuugggaaca

SEQ ID NO: 6091 - RNA, 17 nt, Artificial Sequence
  Synthetic
acaguaggacaugaaca

SEQ ID NO: 6092 - RNA, 17 nt, Artificial Sequence
  Synthetic
uugagagaaguccacca

SEQ ID NO: 6093 - RNA, 17 nt, Artificial Sequence
  Synthetic
acuaguaaacugagcca

SEQ ID NO: 6094 - RNA, 17 nt, Artificial Sequence
  Synthetic
  misc_feature (8)..(8): n is a, c, g, or u
acauugcngagagucca

SEQ ID NO: 6095 - RNA, 17 nt, Artificial Sequence
  Synthetic
uagagguuccuugagca

SEQ ID NO: 6096 - RNA, 17 nt, Artificial Sequence
  Synthetic
aagaaccaacaagaaga

SEQ ID NO: 6097 - RNA, 17 nt, Artificial Sequence
  Synthetic
cgagaagauugacgaga

SEQ ID NO: 6098 - RNA, 17 nt, Artificial Sequence
  Synthetic
  misc_feature (1)..(1): n is a, c, g, or u
nuacuguuguuagacga

SEQ ID NO: 6099 - RNA, 17 nt, Artificial Sequence
  Synthetic
acugcauggccugagga

SEQ ID NO: 6100 - RNA, 17 nt, Artificial Sequence
  Synthetic
  misc_feature (11)..(11): n is a, c, g, or u
ugggaggagunggggga

SEQ ID NO: 6101 - RNA, 17 nt, Artificial Sequence
  Synthetic
uuguuuaaagacuggga

SEQ ID NO: 6102 - RNA, 17 nt, Artificial Sequence
  Synthetic
cuugucucacuuuugga

SEQ ID NO: 6103 - RNA, 17 nt, Artificial Sequence
  Synthetic
uaaaggucuuuguacua

SEQ ID NO: 6104 - RNA, 17 nt, Artificial Sequence
  Synthetic
agcaaaacaagcggcua

SEQ ID NO: 6105 - RNA, 17 nt, Artificial Sequence
  Synthetic
acuucuuuccuucagua

SEQ ID NO: 6106 - RNA, 17 nt, Artificial Sequence
  Synthetic
ugcaggaucccagagua

SEQ ID NO: 6107 - RNA, 17 nt, Artificial Sequence
  Synthetic
  misc_feature (2)..(2): n is a, c, g, or u
cngaagccaacaaggua

SEQ ID NO: 6108 - RNA, 17 nt, Artificial Sequence
  Synthetic
aaauggcacuaguaaac

SEQ ID NO: 6109 - RNA, 17 nt, Artificial Sequence
  Synthetic
aaaagaaaauugguaac

SEQ ID NO: 6110 - RNA, 17 nt, Artificial Sequence
  Synthetic
  misc_feature (5)..(5): n is a, c, g, or u
cggcnggaacggcagac

SEQ ID NO: 6111 - RNA, 17 nt, Artificial Sequence
  Synthetic
auugaauacacgcauac

SEQ ID NO: 6112 - RNA, 17 nt, Artificial Sequence
  Synthetic
  misc_feature (4)..(4): n is a, c, g, or u
aganccccaagcgaccc

SEQ ID NO: 6113 - RNA, 17 nt, Artificial Sequence
  Synthetic
aagcucugcaggauccc

SEQ ID NO: 6114 - RNA, 17 nt, Artificial Sequence
  Synthetic
uuagcaugccuugagcc

SEQ ID NO: 6115 - RNA, 17 nt, Artificial Sequence
  Synthetic
aucuuaucaacacuucc

SEQ ID NO: 6116 - RNA, 17 nt, Artificial Sequence
  Synthetic
aauccucacaauaccgc

SEQ ID NO: 6117 - RNA, 17 nt, Artificial Sequence
  Synthetic
acaagagaugauuaggc

SEQ ID NO: 6118 - RNA, 17 nt, Artificial Sequence
  Synthetic
agccaggagaaacgggc

SEQ ID NO: 6119 - RNA, 17 nt, Artificial Sequence
  Synthetic
uuacucugggauccugc

SEQ ID NO: 6120 - RNA, 17 nt, Artificial Sequence
  Synthetic
aguuggauccagcauuc

SEQ ID NO: 6121 - RNA, 17 nt, Artificial Sequence
  Synthetic
  misc_feature (10)..(10): n is a, c, g, or u
aauaggccgnuuaacag

SEQ ID NO: 6122 - RNA, 17 nt, Artificial Sequence
  Synthetic
aagauugacgagaugag

SEQ ID NO: 6123 - RNA, 17 nt, Artificial Sequence
  Synthetic
uuuggccaagacacacg

SEQ ID NO: 6124 - RNA, 17 nt, Artificial Sequence
  Synthetic
  misc_feature (3)..(3): n is a, c, g, or u
aangauguauauuuccg

SEQ ID NO: 6125 - RNA, 17 nt, Artificial Sequence
  Synthetic
ugagaaggcacagacgg

SEQ ID NO: 6126 - RNA, 17 nt, Artificial Sequence
  Synthetic
cucucaauuuucuaggg

SEQ ID NO: 6127 - RNA, 17 nt, Artificial Sequence
  Synthetic
  misc_feature (1)..(1): n is a, c, g, or u
ngauguauauuuccggg

SEQ ID NO: 6128 - RNA, 17 nt, Artificial Sequence
  Synthetic
aaaggccuccguguggg

SEQ ID NO: 6129 - RNA, 17 nt, Artificial Sequence
  Synthetic
aaggccuuguaaguugg

SEQ ID NO: 6130 - RNA, 17 nt, Artificial Sequence
  Synthetic
uucggaaaauuccuaug

SEQ ID NO: 6131 - RNA, 17 nt, Artificial Sequence
  Synthetic
uguuuguuuaaagacug

SEQ ID NO: 6132 - RNA, 17 nt, Artificial Sequence
  Synthetic
cugccaacuggauccug

SEQ ID NO: 6133 - RNA, 17 nt, Artificial Sequence
  Synthetic
  misc_feature (2)..(2): n is a, c, g, or u
ungcuccagaccugcug

SEQ ID NO: 6134 - RNA, 17 nt, Artificial Sequence
  Synthetic
ccaacaagguaggagug

SEQ ID NO: 6135 - RNA, 17 nt, Artificial Sequence
  Synthetic
cucccccuagaaaauug

SEQ ID NO: 6136 - RNA, 17 nt, Artificial Sequence
  Synthetic
uagacucugcgguauug

SEQ ID NO: 6137 - RNA, 17 nt, Artificial Sequence
  Synthetic
uaaaauuucccaccuug

SEQ ID NO: 6138 - RNA, 17 nt, Artificial Sequence
  Synthetic
caaucacuccaccuuug

SEQ ID NO: 6139 - RNA, 17 nt, Artificial Sequence
  Synthetic
agcucccccuagaaaau

SEQ ID NO: 6140 - RNA, 17 nt, Artificial Sequence
  Synthetic
caacaugagggaaacau

SEQ ID NO: 6141 - RNA, 17 nt, Artificial Sequence
  Synthetic
auugggaagcuggagau

SEQ ID NO: 6142 - RNA, 17 nt, Artificial Sequence
  Synthetic
uucacuguuccggaacu

SEQ ID NO: 6143 - RNA, 17 nt, Artificial Sequence
  Synthetic
  misc_feature (3)..(3): n is a, c, g, or u
  misc_feature (12)..(12): n is a, c, g, or u
acnaaauauuunccccu

SEQ ID NO: 6144 - RNA, 17 nt, Artificial Sequence
  Synthetic
auguuuuuagcaugccu

SEQ ID NO: 6145 - RNA, 17 nt, Artificial Sequence
  Synthetic
acuaacauugggaagcu

SEQ ID NO: 6146 - RNA, 17 nt, Artificial Sequence
  Synthetic
uugguggucuauaagcu

SEQ ID NO: 6147 - RNA, 17 nt, Artificial Sequence
  Synthetic
cacccacccagguagcu

SEQ ID NO: 6148 - RNA, 17 nt, Artificial Sequence
  Synthetic
aagucuguacaacaucu

SEQ ID NO: 6149 - RNA, 17 nt, Artificial Sequence
  Synthetic
uugcucgcagcaggucu

SEQ ID NO: 6150 - RNA, 17 nt, Artificial Sequence
  Synthetic
cggaggccuuuuggggu

SEQ ID NO: 6151 - RNA, 17 nt, Artificial Sequence
  Synthetic
ccugacugccgauuggu

SEQ ID NO: 6152 - RNA, 17 nt, Artificial Sequence
  Synthetic
  misc_feature (6)..(6): n is a, c, g, or u
  misc_feature (15)..(15): n is a, c, g, or u
aggggnaaauauuungu

SEQ ID NO: 6153 - RNA, 17 nt, Artificial Sequence
  Synthetic
uugaugauccuggaauu

SEQ ID NO: 6154 - RNA, 17 nt, Artificial Sequence
  Synthetic
augauucuucccccauu

SEQ ID NO: 6155 - RNA, 17 nt, Artificial Sequence
  Synthetic
cccaaucacuccaccuu

SEQ ID NO: 6156 - RNA, 17 nt, Artificial Sequence
  Synthetic
cacccaaggcacagcuu

SEQ ID NO: 6157 - RNA, 17 nt, Artificial Sequence
  Synthetic
acccuuauaaagaauuu

SEQ ID NO: 6158 - RNA, 17 nt, Artificial Sequence
  Synthetic
aguauuuggugucuuuu

SEQ ID NO: 6159 - RNA, 20 nt, Artificial Sequence
  Synthetic
aagaagucagaaggcaaaaa

SEQ ID NO: 6160 - RNA, 20 nt, Artificial Sequence
  Synthetic
ucaccuuauucuugggaaca

SEQ ID NO: 6161 - RNA, 20 nt, Artificial Sequence
  Synthetic
ugaacaguaggacaugaaca

SEQ ID NO: 6162 - RNA, 20 nt, Artificial Sequence
  Synthetic
ccaggacaaauuggaggaca

SEQ ID NO: 6163 - RNA, 20 nt, Artificial Sequence
  Synthetic
aaauugagagaaguccacca

SEQ ID NO: 6164 - RNA, 20 nt, Artificial Sequence
  Synthetic
  misc_feature (11)..(11): n is a, c, g, or u
uugacauugcngagagucca

SEQ ID NO: 6165 - RNA, 20 nt, Artificial Sequence
  Synthetic
acauagagguuccuugagca

SEQ ID NO: 6166 - RNA, 20 nt, Artificial Sequence
  Synthetic
acugccgauugguggaggca

SEQ ID NO: 6167 - RNA, 20 nt, Artificial Sequence
  Synthetic
cagaagaaccaacaagaaga

SEQ ID NO: 6168 - RNA, 20 nt, Artificial Sequence
  Synthetic
  misc_feature (4)..(4): n is a, c, g, or u
aganuacuguuguuagacga

SEQ ID NO: 6169 - RNA, 20 nt, Artificial Sequence
  Synthetic
uguuuguuuaaagacuggga

SEQ ID NO: 6170 - RNA, 20 nt, Artificial Sequence
  Synthetic
uuucuugucucacuuuugga

SEQ ID NO: 6171 - RNA, 20 nt, Artificial Sequence
  Synthetic
cuugcccaaggucuuacaua

SEQ ID NO: 6172 - RNA, 20 nt, Artificial Sequence
  Synthetic
cugacuucuuuccuucagua

SEQ ID NO: 6173 - RNA, 20 nt, Artificial Sequence
  Synthetic
cucugcaggaucccagagua

SEQ ID NO: 6174 - RNA, 20 nt, Artificial Sequence
  Synthetic
aacaaauggcacuaguaaac

SEQ ID NO: 6175 - RNA, 20 nt, Artificial Sequence
  Synthetic
  misc_feature (2)..(2): n is a, c, g, or u
cnggguucacucccccacac

SEQ ID NO: 6176 - RNA, 20 nt, Artificial Sequence
  Synthetic
accaagcucugcaggauccc

SEQ ID NO: 6177 - RNA, 20 nt, Artificial Sequence
  Synthetic
cgggaugccuuagaaucucc

SEQ ID NO: 6178 - RNA, 20 nt, Artificial Sequence
  Synthetic
ccuaucuuaucaacacuucc

SEQ ID NO: 6179 - RNA, 20 nt, Artificial Sequence
  Synthetic
aaggcaucccgauacagagc

SEQ ID NO: 6180 - RNA, 20 nt, Artificial Sequence
  Synthetic
aaaaauccucacaauaccgc

SEQ ID NO: 6181 - RNA, 20 nt, Artificial Sequence
  Synthetic
ugaacaagagaugauuaggc

SEQ ID NO: 6182 - RNA, 20 nt, Artificial Sequence
  Synthetic
cugagccaggagaaacgggc

SEQ ID NO: 6183 - RNA, 20 nt, Artificial Sequence
  Synthetic
  misc_feature (13)..(13): n is a, c, g, or u
aucaauaggccgnuuaacag

SEQ ID NO: 6184 - RNA, 20 nt, Artificial Sequence
  Synthetic
agaugagaaggcacagacgg

SEQ ID NO: 6185 - RNA, 20 nt, Artificial Sequence
  Synthetic
cuucucucaauuuucuaggg

SEQ ID NO: 6186 - RNA, 20 nt, Artificial Sequence
  Synthetic
  misc_feature (4)..(4): n is a, c, g, or u
aaangauguauauuuccggg

SEQ ID NO: 6187 - RNA, 20 nt, Artificial Sequence
  Synthetic
  misc_feature (17)..(17): n is a, c, g, or u
aaagacugggaggagunggg

SEQ ID NO: 6188 - RNA, 20 nt, Artificial Sequence
  Synthetic
ccaaaaggccuccguguggg

SEQ ID NO: 6189 - RNA, 20 nt, Artificial Sequence
  Synthetic
aagccaacaagguaggagug

SEQ ID NO: 6190 - RNA, 20 nt, Artificial Sequence
  Synthetic
ccccaaucacuccaccuuug

SEQ ID NO: 6191 - RNA, 20 nt, Artificial Sequence
  Synthetic
cagcaacaugagggaaacau

SEQ ID NO: 6192 - RNA, 20 nt, Artificial Sequence
  Synthetic
aaugaauaucaggaaaagau

SEQ ID NO: 6193 - RNA, 20 nt, Artificial Sequence
  Synthetic
aacauugggaagcuggagau

SEQ ID NO: 6194 - RNA, 20 nt, Artificial Sequence
  Synthetic
  misc_feature (6)..(6): n is a, c, g, or u
  misc_feature (15)..(15): n is a, c, g, or u
ucuacnaaauauuunccccu

SEQ ID NO: 6195 - RNA, 20 nt, Artificial Sequence
  Synthetic
  misc_feature (3)..(3): n is a, c, g, or u
uuncacccacccagguagcu

SEQ ID NO: 6196 - RNA, 20 nt, Artificial Sequence
  Synthetic
acacggaggccuuuuggggu

SEQ ID NO: 6197 - RNA, 20 nt, Artificial Sequence
  Synthetic
cuuccugacugccgauuggu

SEQ ID NO: 6198 - RNA, 20 nt, Artificial Sequence
  Synthetic
  misc_feature (9)..(9): n is a, c, g, or u
  misc_feature (18)..(18): n is a, c, g, or u
ucuaggggnaaauauuungu

SEQ ID NO: 6199 - RNA, 20 nt, Artificial Sequence
  Synthetic
aaagaauuuggagcuacugu

SEQ ID NO: 6200 - RNA, 20 nt, Artificial Sequence
  Synthetic
  misc_feature (19)..(19): n is a, c, g, or u
caagagguuggugaguganu

SEQ ID NO: 6201 - RNA, 20 nt, Artificial Sequence
  Synthetic
  misc_feature (19)..(19): n is a, c, g, or u
uuuggaagagaaaccgucnu

SEQ ID NO: 6202 - RNA, 20 nt, Artificial Sequence
  Synthetic
agcgauagccaggacaaauu

SEQ ID NO: 6203 - RNA, 20 nt, Artificial Sequence
  Synthetic
uaccccaaucacuccaccuu

SEQ ID NO: 6204 - RNA, 20 nt, Artificial Sequence
  Synthetic
agccacccaaggcacagcuu

SEQ ID NO: 6205 - RNA, 20 nt, Artificial Sequence
  Synthetic
uucguuuuucauuuacuguu

SEQ ID NO: 6206 - RNA, 20 nt, Artificial Sequence
  Synthetic
uugacccuuauaaagaauuu

SEQ ID NO: 6207 - RNA, 17 nt, Artificial Sequence
  Synthetic
uaacaguaaaugaaaaa

SEQ ID NO: 6208 - RNA, 17 nt, Artificial Sequence
  Synthetic
aucccaacaaaacaaaa

SEQ ID NO: 6209 - RNA, 17 nt, Artificial Sequence
  Synthetic
  misc_feature (2)..(2): n is a, c, g, or u
anccacauuguguaaaa

SEQ ID NO: 6210 - RNA, 17 nt, Artificial Sequence
  Synthetic
aggacauuauuaacaaa

SEQ ID NO: 6211 - RNA, 17 nt, Artificial Sequence
  Synthetic
guauacccaaagacaaa

SEQ ID NO: 6212 - RNA, 17 nt, Artificial Sequence
  Synthetic
gacgggacguagacaaa

SEQ ID NO: 6213 - RNA, 17 nt, Artificial Sequence
  Synthetic
uggaauuagaggacaaa

SEQ ID NO: 6214 - RNA, 17 nt, Artificial Sequence
  Synthetic
gggcagcaaagcccaaa

SEQ ID NO: 6215 - RNA, 17 nt, Artificial Sequence
  Synthetic
cgaauccacacuccaaa

SEQ ID NO: 6216 - RNA, 17 nt, Artificial Sequence
  Synthetic
acgguuucucuuccaaa

SEQ ID NO: 6217 - RNA, 17 nt, Artificial Sequence
  Synthetic
uaauguccuggugcaaa

SEQ ID NO: 6218 - RNA, 17 nt, Artificial Sequence
  Synthetic
gaugagugucucucaaa

SEQ ID NO: 6219 - RNA, 17 nt, Artificial Sequence
  Synthetic
aaaagugagacaagaaa

SEQ ID NO: 6220 - RNA, 17 nt, Artificial Sequence
  Synthetic
aacugagccaggagaaa

SEQ ID NO: 6221 - RNA, 17 nt, Artificial Sequence
  Synthetic
aaaugaauaucaggaaa

SEQ ID NO: 6222 - RNA, 17 nt, Artificial Sequence
  Synthetic
ccuagcagccauggaaa

SEQ ID NO: 6223 - RNA, 17 nt, Artificial Sequence
  Synthetic
gguccucuaacaguaaa

SEQ ID NO: 6224 - RNA, 17 nt, Artificial Sequence
  Synthetic
  misc_feature (3)..(3): n is a, c, g, or u
uanccacauuguguaaa

SEQ ID NO: 6225 - RNA, 17 nt, Artificial Sequence
  Synthetic
gaccacaaucccaacaa

SEQ ID NO: 6226 - RNA, 17 nt, Artificial Sequence
  Synthetic
cugccccuuuuacacaa

SEQ ID NO: 6227 - RNA, 17 nt, Artificial Sequence
  Synthetic
auuccuuggacucacaa

SEQ ID NO: 6228 - RNA, 17 nt, Artificial Sequence
  Synthetic
acagccuccuaguacaa

SEQ ID NO: 6229 - RNA, 17 nt, Artificial Sequence
  Synthetic
uuuaaauguauacccaa

SEQ ID NO: 6230 - RNA, 17 nt, Artificial Sequence
  Synthetic
ccaccuugugaguccaa

SEQ ID NO: 6231 - RNA, 17 nt, Artificial Sequence
  Synthetic
  misc_feature (4)..(5): n is a, c, g, or u
uuannuccccccagcaa

SEQ ID NO: 6232 - RNA, 17 nt, Artificial Sequence
  Synthetic
  misc_feature (1)..(1): n is a, c, g, or u
nggccguugccgggcaa

SEQ ID NO: 6233 - RNA, 17 nt, Artificial Sequence
  Synthetic
  misc_feature (7)..(7): n is a, c, g, or u
aucaganugaaaaucaa

SEQ ID NO: 6234 - RNA, 17 nt, Artificial Sequence
  Synthetic
gcacgacucuugcucaa

SEQ ID NO: 6235 - RNA, 17 nt, Artificial Sequence
  Synthetic
  misc_feature (7)..(7): n is a, c, g, or u
acucucngcaaugucaa

SEQ ID NO: 6236 - RNA, 17 nt, Artificial Sequence
  Synthetic
auuggaaaguaugucaa

SEQ ID NO: 6237 - RNA, 17 nt, Artificial Sequence
  Synthetic
cuugaggcauacuucaa

SEQ ID NO: 6238 - RNA, 17 nt, Artificial Sequence
  Synthetic
auauuuccgggagagaa

SEQ ID NO: 6239 - RNA, 17 nt, Artificial Sequence
  Synthetic
uuguaaguuggcgagaa

SEQ ID NO: 6240 - RNA, 17 nt, Artificial Sequence
  Synthetic
gaacggcagacggagaa

SEQ ID NO: 6241 - RNA, 17 nt, Artificial Sequence
  Synthetic
ggacggucccucucgaa

SEQ ID NO: 6242 - RNA, 17 nt, Artificial Sequence
  Synthetic
aucucuuacugaaggaa

SEQ ID NO: 6243 - RNA, 17 nt, Artificial Sequence
  Synthetic
uuacauacccuauggaa

SEQ ID NO: 6244 - RNA, 17 nt, Artificial Sequence
  Synthetic
gaggauuggugguggaa

SEQ ID NO: 6245 - RNA, 17 nt, Artificial Sequence
  Synthetic
gaagaucucuuacugaa

SEQ ID NO: 6246 - RNA, 17 nt, Artificial Sequence
  Synthetic
cuuguucccaagaauaa

SEQ ID NO: 6247 - RNA, 17 nt, Artificial Sequence
  Synthetic
ugguaacagagguauaa

SEQ ID NO: 6248 - RNA, 17 nt, Artificial Sequence
  Synthetic
gacauugacccuuauaa

SEQ ID NO: 6249 - RNA, 17 nt, Artificial Sequence
  Synthetic
gucugguuuggaaguaa

SEQ ID NO: 6250 - RNA, 17 nt, Artificial Sequence
  Synthetic
  misc_feature (9)..(9): n is a, c, g, or u
auguguucnugugguaa

SEQ ID NO: 6251 - RNA, 17 nt, Artificial Sequence
  Synthetic
  misc_feature (13)..(14): n is a, c, g, or u
uugcuggggggannuaa

SEQ ID NO: 6252 - RNA, 17 nt, Artificial Sequence
  Synthetic
uuuccaguuaggauuaa

SEQ ID NO: 6253 - RNA, 17 nt, Artificial Sequence
  Synthetic
aaagacuguuuguuuaa

SEQ ID NO: 6254 - RNA, 17 nt, Artificial Sequence
  Synthetic
cugcugcgagcaaaaca

SEQ ID NO: 6255 - RNA, 17 nt, Artificial Sequence
  Synthetic
guccagaagaaccaaca

SEQ ID NO: 6256 - RNA, 17 nt, Artificial Sequence
  Synthetic
gaggauuuuugucaaca

SEQ ID NO: 6257 - RNA, 17 nt, Artificial Sequence
  Synthetic
auuuuggccaagacaca

SEQ ID NO: 6258 - RNA, 17 nt, Artificial Sequence
  Synthetic
  misc_feature (6)..(6): n is a, c, g, or u
uggggnucauuaccaca

SEQ ID NO: 6259 - RNA, 17 nt, Artificial Sequence
  Synthetic
cuuccaaaagugagaca

SEQ ID NO: 6260 - RNA, 17 nt, Artificial Sequence
  Synthetic
gcuugaacaguaggaca

SEQ ID NO: 6261 - RNA, 17 nt, Artificial Sequence
  Synthetic
gaugggaugggaauaca

SEQ ID NO: 6262 - RNA, 17 nt, Artificial Sequence
  Synthetic
ccccugcucguguuaca

SEQ ID NO: 6263 - RNA, 17 nt, Artificial Sequence
  Synthetic
gauauucauuugcacca

SEQ ID NO: 6264 - RNA, 17 nt, Artificial Sequence
  Synthetic
  misc_feature (9)..(9): n is a, c, g, or u
gccguuccngccgacca

SEQ ID NO: 6265 - RNA, 17 nt, Artificial Sequence
  Synthetic
uccaauuacauaaccca

SEQ ID NO: 6266 - RNA, 17 nt, Artificial Sequence
  Synthetic
cguccaagaaagcccca

SEQ ID NO: 6267 - RNA, 17 nt, Artificial Sequence
  Synthetic
  misc_feature (8)..(8): n is a, c, g, or u
  misc_feature (12)..(12): n is a, c, g, or u
gggacganagancccca

SEQ ID NO: 6268 - RNA, 17 nt, Artificial Sequence
  Synthetic
aauuuuccgaaagccca

SEQ ID NO: 6269 - RNA, 17 nt, Artificial Sequence
  Synthetic
uguagcucuuguuccca

SEQ ID NO: 6270 - RNA, 17 nt, Artificial Sequence
  Synthetic
acauccagcgauagcca

SEQ ID NO: 6271 - RNA, 17 nt, Artificial Sequence
  Synthetic
acugcgaauuuuggcca

SEQ ID NO: 6272 - RNA, 17 nt, Artificial Sequence
  Synthetic
  misc_feature (6)..(6): n is a, c, g, or u
cggccnggucugugcca

SEQ ID NO: 6273 - RNA, 17 nt, Artificial Sequence
  Synthetic
guucacgguggucucca

SEQ ID NO: 6274 - RNA, 17 nt, Artificial Sequence
  Synthetic
ucgagagggaccgucca

SEQ ID NO: 6275 - RNA, 17 nt, Artificial Sequence
  Synthetic
uuuguccucuaauucca

SEQ ID NO: 6276 - RNA, 17 nt, Artificial Sequence
  Synthetic
acagaggcauuaaagca

SEQ ID NO: 6277 - RNA, 17 nt, Artificial Sequence
  Synthetic
aacuggagccaccagca

SEQ ID NO: 6278 - RNA, 17 nt, Artificial Sequence
  Synthetic
gaugaggcauagcagca

SEQ ID NO: 6279 - RNA, 17 nt, Artificial Sequence
  Synthetic
cgccuguaacacgagca

SEQ ID NO: 6280 - RNA, 17 nt, Artificial Sequence
  Synthetic
  misc_feature (5)..(5): n is a, c, g, or u
gagangggucguccgca

SEQ ID NO: 6281 - RNA, 17 nt, Artificial Sequence
  Synthetic
cauaggccaucagcgca

SEQ ID NO: 6282 - RNA, 17 nt, Artificial Sequence
  Synthetic
  misc_feature (13)..(13): n is a, c, g, or u
cacaaagguuccncgca

SEQ ID NO: 6283 - RNA, 17 nt, Artificial Sequence
  Synthetic
aaaggacgucccucgca

SEQ ID NO: 6284 - RNA, 17 nt, Artificial Sequence
  Synthetic
aaaaaaucuagcaggca

SEQ ID NO: 6285 - RNA, 17 nt, Artificial Sequence
  Synthetic
auguaagaccuugggca

SEQ ID NO: 6286 - RNA, 17 nt, Artificial Sequence
  Synthetic
acccugccgaaccugca

SEQ ID NO: 6287 - RNA, 17 nt, Artificial Sequence
  Synthetic
uuccaccaagcucugca

SEQ ID NO: 6288 - RNA, 17 nt, Artificial Sequence
  Synthetic
uggaaagcaucacauca

SEQ ID NO: 6289 - RNA, 17 nt, Artificial Sequence
  Synthetic
gaacaagagcuacauca

SEQ ID NO: 6290 - RNA, 17 nt, Artificial Sequence
  Synthetic
uucccaucccaucauca

SEQ ID NO: 6291 - RNA, 17 nt, Artificial Sequence
  Synthetic
ggugcaaaugaauauca

SEQ ID NO: 6292 - RNA, 17 nt, Artificial Sequence
  Synthetic
agguauaaagggacuca

SEQ ID NO: 6293 - RNA, 17 nt, Artificial Sequence
  Synthetic
ccaccaaucggcaguca

SEQ ID NO: 6294 - RNA, 17 nt, Artificial Sequence
  Synthetic
  misc_feature (11)..(11): n is a, c, g, or u
auauucccuanauuuca

SEQ ID NO: 6295 - RNA, 17 nt, Artificial Sequence
  Synthetic
ccaacaaaacaaaaaga

SEQ ID NO: 6296 - RNA, 17 nt, Artificial Sequence
  Synthetic
cagaagaaccaacaaga

SEQ ID NO: 6297 - RNA, 17 nt, Artificial Sequence
  Synthetic
gcagguccccuagaaga

SEQ ID NO: 6298 - RNA, 17 nt, Artificial Sequence
  Synthetic
caggaugaagaggaaga

SEQ ID NO: 6299 - RNA, 17 nt, Artificial Sequence
  Synthetic
uagcagcaggaugaaga

SEQ ID NO: 6300 - RNA, 17 nt, Artificial Sequence
  Synthetic
caaggucuuacauaaga

SEQ ID NO: 6301 - RNA, 17 nt, Artificial Sequence
  Synthetic
agaugagaaggcacaga

SEQ ID NO: 6302 - RNA, 17 nt, Artificial Sequence
  Synthetic
cgggaaaaaaucccaga

SEQ ID NO: 6303 - RNA, 17 nt, Artificial Sequence
  Synthetic
uaccuugauaguccaga

SEQ ID NO: 6304 - RNA, 17 nt, Artificial Sequence
  Synthetic
cucccucgccucgcaga

SEQ ID NO: 6305 - RNA, 17 nt, Artificial Sequence
  Synthetic
aaucgccgcgucgcaga

SEQ ID NO: 6306 - RNA, 17 nt, Artificial Sequence
  Synthetic
agagaugauuaggcaga

SEQ ID NO: 6307 - RNA, 17 nt, Artificial Sequence
  Synthetic
uccaugcgacgugcaga

SEQ ID NO: 6308 - RNA, 17 nt, Artificial Sequence
  Synthetic
gagaccgcguaaagaga

SEQ ID NO: 6309 - RNA, 17 nt, Artificial Sequence
  Synthetic
aggacaugaacaagaga

SEQ ID NO: 6310 - RNA, 17 nt, Artificial Sequence
  Synthetic
  misc_feature (1)..(1): n is a, c, g, or u
  misc_feature (10)..(10): n is a, c, g, or u
naaauauuunguagaga

SEQ ID NO: 6311 - RNA, 17 nt, Artificial Sequence
  Synthetic
cccaagcgaccccgaga

SEQ ID NO: 6312 - RNA, 17 nt, Artificial Sequence
  Synthetic
guccccaauccucgaga

SEQ ID NO: 6313 - RNA, 17 nt, Artificial Sequence
  Synthetic
ggaacggcagacggaga

SEQ ID NO: 6314 - RNA, 17 nt, Artificial Sequence
  Synthetic
gaggcagguccccuaga

SEQ ID NO: 6315 - RNA, 17 nt, Artificial Sequence
  Synthetic
cugaggcgguaucuaga

SEQ ID NO: 6316 - RNA, 17 nt, Artificial Sequence
  Synthetic
aagacagguauaguaga

SEQ ID NO: 6317 - RNA, 17 nt, Artificial Sequence
  Synthetic
augauccuggaauuaga

SEQ ID NO: 6318 - RNA, 17 nt, Artificial Sequence
  Synthetic
uuucauuuacuguuaga

SEQ ID NO: 6319 - RNA, 17 nt, Artificial Sequence
  Synthetic
  misc_feature (4)..(4): n is a, c, g, or u
aganuacuguuguuaga

SEQ ID NO: 6320 - RNA, 17 nt, Artificial Sequence
  Synthetic
caguaaaugaaaaacga

SEQ ID NO: 6321 - RNA, 17 nt, Artificial Sequence
  Synthetic
ccucgccucgcagacga

SEQ ID NO: 6322 - RNA, 17 nt, Artificial Sequence
  Synthetic
gugcagaggugaagcga

SEQ ID NO: 6323 - RNA, 17 nt, Artificial Sequence
  Synthetic
cgguggucuccaugcga

SEQ ID NO: 6324 - RNA, 17 nt, Artificial Sequence
  Synthetic
gagaucuucgucugcga

SEQ ID NO: 6325 - RNA, 17 nt, Artificial Sequence
  Synthetic
auugagaucuucugcga

SEQ ID NO: 6326 - RNA, 17 nt, Artificial Sequence
  Synthetic
cucgucaaucuucucga

SEQ ID NO: 6327 - RNA, 17 nt, Artificial Sequence
  Synthetic
gaggcauagcagcagga

SEQ ID NO: 6328 - RNA, 17 nt, Artificial Sequence
  Synthetic
gauugguggaggcagga

SEQ ID NO: 6329 - RNA, 17 nt, Artificial Sequence
  Synthetic
cagcaggaugaagagga

SEQ ID NO: 6330 - RNA, 17 nt, Artificial Sequence
  Synthetic
  misc_feature (9)..(9): n is a, c, g, or u
caacaguanucuccgga

SEQ ID NO: 6331 - RNA, 17 nt, Artificial Sequence
  Synthetic
gcgcugaauccugcgga

SEQ ID NO: 6332 - RNA, 17 nt, Artificial Sequence
  Synthetic
gcagacggagaagggga

SEQ ID NO: 6333 - RNA, 17 nt, Artificial Sequence
  Synthetic
cccucucgaauggggga

SEQ ID NO: 6334 - RNA, 17 nt, Artificial Sequence
  Synthetic
agcccaugaugauggga

SEQ ID NO: 6335 - RNA, 17 nt, Artificial Sequence
  Synthetic
gcuuucaguuauaugga

SEQ ID NO: 6336 - RNA, 17 nt, Artificial Sequence
  Synthetic
uccuggcuaucgcugga

SEQ ID NO: 6337 - RNA, 17 nt, Artificial Sequence
  Synthetic
agccaggacaaauugga

SEQ ID NO: 6338 - RNA, 17 nt, Artificial Sequence
  Synthetic
  misc_feature (8)..(8): n is a, c, g, or u
gugggugnaaauuugga

SEQ ID NO: 6339 - RNA, 17 nt, Artificial Sequence
  Synthetic
  misc_feature (10)..(10): n is a, c, g, or u
ggugacccanaaaauga

SEQ ID NO: 6340 - RNA, 17 nt, Artificial Sequence
  Synthetic
uuuccgaaagcccauga

SEQ ID NO: 6341 - RNA, 17 nt, Artificial Sequence
  Synthetic
uucaguuauauggauga

SEQ ID NO: 6342 - RNA, 17 nt, Artificial Sequence
  Synthetic
ccgaaagcccaugauga

SEQ ID NO: 6343 - RNA, 17 nt, Artificial Sequence
  Synthetic
uccacugcauggccuga

SEQ ID NO: 6344 - RNA, 17 nt, Artificial Sequence
  Synthetic
gguccuaggaauccuga

SEQ ID NO: 6345 - RNA, 17 nt, Artificial Sequence
  Synthetic
ucccgauacagagcuga

SEQ ID NO: 6346 - RNA, 17 nt, Artificial Sequence
  Synthetic
gcaggauucagcgcuga

SEQ ID NO: 6347 - RNA, 17 nt, Artificial Sequence
  Synthetic
  misc_feature (12)..(12): n is a, c, g, or u
uuugauuuucanucuga

SEQ ID NO: 6348 - RNA, 17 nt, Artificial Sequence
  Synthetic
gcgacgugcagagguga

SEQ ID NO: 6349 - RNA, 17 nt, Artificial Sequence
  Synthetic
acucugcgguauuguga

SEQ ID NO: 6350 - RNA, 17 nt, Artificial Sequence
  Synthetic
cccguacuggugguuga

SEQ ID NO: 6351 - RNA, 17 nt, Artificial Sequence
  Synthetic
uuaugucaauacuaaua

SEQ ID NO: 6352 - RNA, 17 nt, Artificial Sequence
  Synthetic
ugaggcccacucccaua

SEQ ID NO: 6353 - RNA, 17 nt, Artificial Sequence
  Synthetic
gaaguguugauaagaua

SEQ ID NO: 6354 - RNA, 17 nt, Artificial Sequence
  Synthetic
cuccggaaguguugaua

SEQ ID NO: 6355 - RNA, 17 nt, Artificial Sequence
  Synthetic
  misc_feature (7)..(7): n is a, c, g, or u
aguuucncuuuuauaua

SEQ ID NO: 6356 - RNA, 17 nt, Artificial Sequence
  Synthetic
gcuccaaauucuuuaua

SEQ ID NO: 6357 - RNA, 17 nt, Artificial Sequence
  Synthetic
cacgagcagggguccua

SEQ ID NO: 6358 - RNA, 17 nt, Artificial Sequence
  Synthetic
cuuucggaaaauuccua

SEQ ID NO: 6359 - RNA, 17 nt, Artificial Sequence
  Synthetic
ucacaucaggauuccua

SEQ ID NO: 6360 - RNA, 17 nt, Artificial Sequence
  Synthetic
agacaccaaauacucua

SEQ ID NO: 6361 - RNA, 17 nt, Artificial Sequence
  Synthetic
uuuuauaccuuucucua

SEQ ID NO: 6362 - RNA, 17 nt, Artificial Sequence
  Synthetic
agggaguucuucuucua

SEQ ID NO: 6363 - RNA, 17 nt, Artificial Sequence
  Synthetic
cuucucucaauuuucua

SEQ ID NO: 6364 - RNA, 17 nt, Artificial Sequence
  Synthetic
uggaggcuugaacagua

SEQ ID NO: 6365 - RNA, 17 nt, Artificial Sequence
  Synthetic
aucaucaaccaccagua

SEQ ID NO: 6366 - RNA, 17 nt, Artificial Sequence
  Synthetic
aagaguccucuuaugua

SEQ ID NO: 6367 - RNA, 17 nt, Artificial Sequence
  Synthetic
gcuuuaaugccucugua

SEQ ID NO: 6368 - RNA, 17 nt, Artificial Sequence
  Synthetic
auggaguuuuccaguua

SEQ ID NO: 6369 - RNA, 17 nt, Artificial Sequence
  Synthetic
gggcgcaccucucuuua

SEQ ID NO: 6370 - RNA, 17 nt, Artificial Sequence
  Synthetic
caaggugggaaauuuua

SEQ ID NO: 6371 - RNA, 17 nt, Artificial Sequence
  Synthetic
ggccguugccgggcaac

SEQ ID NO: 6372 - RNA, 17 nt, Artificial Sequence
  Synthetic
ggcuccaguuccggaac

SEQ ID NO: 6373 - RNA, 17 nt, Artificial Sequence
  Synthetic
gaggcaguagucggaac

SEQ ID NO: 6374 - RNA, 17 nt, Artificial Sequence
  Synthetic
auuaguauugacauaac

SEQ ID NO: 6375 - RNA, 17 nt, Artificial Sequence
  Synthetic
cacaucauccauauaac

SEQ ID NO: 6376 - RNA, 17 nt, Artificial Sequence
  Synthetic
  misc_feature (12)..(12): n is a, c, g, or u
ucaauaggccgnuuaac

SEQ ID NO: 6377 - RNA, 17 nt, Artificial Sequence
  Synthetic
  misc_feature (4)..(5): n is a, c, g, or u
ucannuauuguuuacac

SEQ ID NO: 6378 - RNA, 17 nt, Artificial Sequence
  Synthetic
aaagcccggcgaaccac

SEQ ID NO: 6379 - RNA, 17 nt, Artificial Sequence
  Synthetic
cgucgcauggagaccac

SEQ ID NO: 6380 - RNA, 17 nt, Artificial Sequence
  Synthetic
  misc_feature (8)..(8): n is a, c, g, or u
ccguuccngccgaccac

SEQ ID NO: 6381 - RNA, 17 nt, Artificial Sequence
  Synthetic
ggcagaugagaaggcac

SEQ ID NO: 6382 - RNA, 17 nt, Artificial Sequence
  Synthetic
cagcaaacacuuggcac

SEQ ID NO: 6383 - RNA, 17 nt, Artificial Sequence
  Synthetic
gauuggggacccugcac

SEQ ID NO: 6384 - RNA, 17 nt, Artificial Sequence
  Synthetic
auuuggugggcguucac

SEQ ID NO: 6385 - RNA, 17 nt, Artificial Sequence
  Synthetic
acuguuuguuuaaagac

SEQ ID NO: 6386 - RNA, 17 nt, Artificial Sequence
  Synthetic
gaugagaaggcacagac

SEQ ID NO: 6387 - RNA, 17 nt, Artificial Sequence
  Synthetic
auaacugaaagccagac

SEQ ID NO: 6388 - RNA, 17 nt, Artificial Sequence
  Synthetic
ggcacagacggggagac

SEQ ID NO: 6389 - RNA, 17 nt, Artificial Sequence
  Synthetic
  misc_feature (3)..(3): n is a, c, g, or u
ucngcaaugucaacgac

SEQ ID NO: 6390 - RNA, 17 nt, Artificial Sequence
  Synthetic
uuccgggagagaacgac

SEQ ID NO: 6391 - RNA, 17 nt, Artificial Sequence
  Synthetic
cuucucaucugccggac

SEQ ID NO: 6392 - RNA, 17 nt, Artificial Sequence
  Synthetic
guucaaaaccuucggac

SEQ ID NO: 6393 - RNA, 17 nt, Artificial Sequence
  Synthetic
  misc_feature (3)..(3): n is a, c, g, or u
gcnaaacuuaucgggac

SEQ ID NO: 6394 - RNA, 17 nt, Artificial Sequence
  Synthetic
  misc_feature (3)..(3): n is a, c, g, or u
  misc_feature (9)..(9): n is a, c, g, or u
ganuggagnuuggggac

SEQ ID NO: 6395 - RNA, 17 nt, Artificial Sequence
  Synthetic
aacaaagaccacuggac

SEQ ID NO: 6396 - RNA, 17 nt, Artificial Sequence
  Synthetic
ccucugccgauccauac

SEQ ID NO: 6397 - RNA, 17 nt, Artificial Sequence
  Synthetic
aaagaauuuggagcuac

SEQ ID NO: 6398 - RNA, 17 nt, Artificial Sequence
  Synthetic
gacucaagauguuguac

SEQ ID NO: 6399 - RNA, 17 nt, Artificial Sequence
  Synthetic
ucuagaagaucucuuac

SEQ ID NO: 6400 - RNA, 17 nt, Artificial Sequence
  Synthetic
aaggugggaaauuuuac

SEQ ID NO: 6401 - RNA, 17 nt, Artificial Sequence
  Synthetic
aucauuacuuccaaacc

SEQ ID NO: 6402 - RNA, 17 nt, Artificial Sequence
  Synthetic
cauucagagcaaacacc

SEQ ID NO: 6403 - RNA, 17 nt, Artificial Sequence
  Synthetic
uaaugacucuagcuacc

SEQ ID NO: 6404 - RNA, 17 nt, Artificial Sequence
  Synthetic
acagugggggaaagccc

SEQ ID NO: 6405 - RNA, 17 nt, Artificial Sequence
  Synthetic
uaaagagaggugcgccc

SEQ ID NO: 6406 - RNA, 17 nt, Artificial Sequence
  Synthetic
uucugucguucucuccc

SEQ ID NO: 6407 - RNA, 17 nt, Artificial Sequence
  Synthetic
ccauauaacugaaagcc

SEQ ID NO: 6408 - RNA, 17 nt, Artificial Sequence
  Synthetic
auggccaagccccagcc

SEQ ID NO: 6409 - RNA, 17 nt, Artificial Sequence
  Synthetic
gugggagcauucgggcc

SEQ ID NO: 6410 - RNA, 17 nt, Artificial Sequence
  Synthetic
  misc_feature (13)..(13): n is a, c, g, or u
gggagugaacccnggcc

SEQ ID NO: 6411 - RNA, 17 nt, Artificial Sequence
  Synthetic
gugccuucucaucugcc

SEQ ID NO: 6412 - RNA, 17 nt, Artificial Sequence
  Synthetic
aaaccacaauaauugcc

SEQ ID NO: 6413 - RNA, 17 nt, Artificial Sequence
  Synthetic
gcaaacaccagaaaucc

SEQ ID NO: 6414 - RNA, 17 nt, Artificial Sequence
  Synthetic
agggguccuaggaaucc

SEQ ID NO: 6415 - RNA, 17 nt, Artificial Sequence
  Synthetic
ccgucagcgcugaaucc

SEQ ID NO: 6416 - RNA, 17 nt, Artificial Sequence
  Synthetic
acgccgcagacacaucc

SEQ ID NO: 6417 - RNA, 17 nt, Artificial Sequence
  Synthetic
uggaagauccagcaucc

SEQ ID NO: 6418 - RNA, 17 nt, Artificial Sequence
  Synthetic
gagauucuaaggcaucc

SEQ ID NO: 6419 - RNA, 17 nt, Artificial Sequence
  Synthetic
ugcugccaacuggaucc

SEQ ID NO: 6420 - RNA, 17 nt, Artificial Sequence
  Synthetic
auaaaaccuuauuaucc

SEQ ID NO: 6421 - RNA, 17 nt, Artificial Sequence
  Synthetic
uuucuagggggagcucc

SEQ ID NO: 6422 - RNA, 17 nt, Artificial Sequence
  Synthetic
  misc_feature (12)..(12): n is a, c, g, or u
ccgauaaguuungcucc

SEQ ID NO: 6423 - RNA, 17 nt, Artificial Sequence
  Synthetic
  misc_feature (12)..(12): n is a, c, g, or u
uaacaacaguanucucc

SEQ ID NO: 6424 - RNA, 17 nt, Artificial Sequence
  Synthetic
acauaccuugauagucc

SEQ ID NO: 6425 - RNA, 17 nt, Artificial Sequence
  Synthetic
  misc_feature (13)..(13): n is a, c, g, or u
gacagaauuaucngucc

SEQ ID NO: 6426 - RNA, 17 nt, Artificial Sequence
  Synthetic
  misc_feature (13)..(13): n is a, c, g, or u
cuuguuggcuucngucc

SEQ ID NO: 6427 - RNA, 17 nt, Artificial Sequence
  Synthetic
gggguaggcugccuucc

SEQ ID NO: 6428 - RNA, 17 nt, Artificial Sequence
  Synthetic
cugguggcuccaguucc

SEQ ID NO: 6429 - RNA, 17 nt, Artificial Sequence
  Synthetic
acaggguucacuguucc

SEQ ID NO: 6430 - RNA, 17 nt, Artificial Sequence
  Synthetic
aaaacuccaucuuuucc

SEQ ID NO: 6431 - RNA, 17 nt, Artificial Sequence
  Synthetic
ccucugggauuuuuucc

SEQ ID NO: 6432 - RNA, 17 nt, Artificial Sequence
  Synthetic
uguucaagccuccaagc

SEQ ID NO: 6433 - RNA, 17 nt, Artificial Sequence
  Synthetic
cuaaaaacauugccagc

SEQ ID NO: 6434 - RNA, 17 nt, Artificial Sequence
  Synthetic
ccgccuguaacacgagc

SEQ ID NO: 6435 - RNA, 17 nt, Artificial Sequence
  Synthetic
gagaucuucugcgacgc

SEQ ID NO: 6436 - RNA, 17 nt, Artificial Sequence
  Synthetic
agaugauaaaacgccgc

SEQ ID NO: 6437 - RNA, 17 nt, Artificial Sequence
  Synthetic
cuacgucccgucagcgc

SEQ ID NO: 6438 - RNA, 17 nt, Artificial Sequence
  Synthetic
uccgcaggauucagcgc

SEQ ID NO: 6439 - RNA, 17 nt, Artificial Sequence
  Synthetic
  misc_feature (8)..(8): n is a, c, g, or u
agguuccncgcaugcgc

SEQ ID NO: 6440 - RNA, 17 nt, Artificial Sequence
  Synthetic
gcauggugcuggugcgc

SEQ ID NO: 6441 - RNA, 17 nt, Artificial Sequence
  Synthetic
acgaagaucucaaucgc

SEQ ID NO: 6442 - RNA, 17 nt, Artificial Sequence
  Synthetic
gaacucccucgccucgc

SEQ ID NO: 6443 - RNA, 17 nt, Artificial Sequence
  Synthetic
cucaaucgccgcgucgc

SEQ ID NO: 6444 - RNA, 17 nt, Artificial Sequence
  Synthetic
uuuguucagugguucgc

SEQ ID NO: 6445 - RNA, 17 nt, Artificial Sequence
  Synthetic
cugcucguguuacaggc

SEQ ID NO: 6446 - RNA, 17 nt, Artificial Sequence
  Synthetic
ugguggaggcaggaggc

SEQ ID NO: 6447 - RNA, 17 nt, Artificial Sequence
  Synthetic
uuccauggcugcuaggc

SEQ ID NO: 6448 - RNA, 17 nt, Artificial Sequence
  Synthetic
  misc_feature (9)..(9): n is a, c, g, or u
uggucggcnggaacggc

SEQ ID NO: 6449 - RNA, 17 nt, Artificial Sequence
  Synthetic
agugcacacgguccggc

SEQ ID NO: 6450 - RNA, 17 nt, Artificial Sequence
  Synthetic
agucgugcagguucggc

SEQ ID NO: 6451 - RNA, 17 nt, Artificial Sequence
  Synthetic
augcaacccccacuggc

SEQ ID NO: 6452 - RNA, 17 nt, Artificial Sequence
  Synthetic
  misc_feature (15)..(15): n is a, c, g, or u
ccgucugccguuccngc

SEQ ID NO: 6453 - RNA, 17 nt, Artificial Sequence
  Synthetic
ucauccucaggccaugc

SEQ ID NO: 6454 - RNA, 17 nt, Artificial Sequence
  Synthetic
gcugccuuccugacugc

SEQ ID NO: 6455 - RNA, 17 nt, Artificial Sequence
  Synthetic
cugccgauccauacugc

SEQ ID NO: 6456 - RNA, 17 nt, Artificial Sequence
  Synthetic
  misc_feature (4)..(4): n is a, c, g, or u
uuungcuccagaccugc

SEQ ID NO: 6457 - RNA, 17 nt, Artificial Sequence
  Synthetic
ccaguacgggacccugc

SEQ ID NO: 6458 - RNA, 17 nt, Artificial Sequence
  Synthetic
ucagcgcugaauccugc

SEQ ID NO: 6459 - RNA, 17 nt, Artificial Sequence
  Synthetic
cuuuguggcuccucugc

SEQ ID NO: 6460 - RNA, 17 nt, Artificial Sequence
  Synthetic
ucgcuggaugugucugc

SEQ ID NO: 6461 - RNA, 17 nt, Artificial Sequence
  Synthetic
cuuuccauguucggugc

SEQ ID NO: 6462 - RNA, 17 nt, Artificial Sequence
  Synthetic
  misc_feature (8)..(8): n is a, c, g, or u
acagaccnggccguugc

SEQ ID NO: 6463 - RNA, 17 nt, Artificial Sequence
  Synthetic
ggcaagccauucuuugc

SEQ ID NO: 6464 - RNA, 17 nt, Artificial Sequence
  Synthetic
cugugccaaguguuugc

SEQ ID NO: 6465 - RNA, 17 nt, Artificial Sequence
  Synthetic
  misc_feature (8)..(8): n is a, c, g, or u
uaccacangaacacauc

SEQ ID NO: 6466 - RNA, 17 nt, Artificial Sequence
  Synthetic
cuuggccauaggccauc

SEQ ID NO: 6467 - RNA, 17 nt, Artificial Sequence
  Synthetic
accacgagucuagacuc

SEQ ID NO: 6468 - RNA, 17 nt, Artificial Sequence
  Synthetic
auacaggccucuuacuc

SEQ ID NO: 6469 - RNA, 17 nt, Artificial Sequence
  Synthetic
ccaccccaaaaggccuc

SEQ ID NO: 6470 - RNA, 17 nt, Artificial Sequence
  Synthetic
uuccaccaccaauccuc

SEQ ID NO: 6471 - RNA, 17 nt, Artificial Sequence
  Synthetic
auuucugguguuugcuc

SEQ ID NO: 6472 - RNA, 17 nt, Artificial Sequence
  Synthetic
  misc_feature (13)..(13): n is a, c, g, or u
ugcggacgacccnucuc

SEQ ID NO: 6473 - RNA, 17 nt, Artificial Sequence
  Synthetic
acugaaggaaagaaguc

SEQ ID NO: 6474 - RNA, 17 nt, Artificial Sequence
  Synthetic
ugagugaggcaguaguc

SEQ ID NO: 6475 - RNA, 17 nt, Artificial Sequence
  Synthetic
uacgcggucuccccguc

SEQ ID NO: 6476 - RNA, 17 nt, Artificial Sequence
  Synthetic
uuugucuacgucccguc

SEQ ID NO: 6477 - RNA, 17 nt, Artificial Sequence
  Synthetic
caagugcaauuuccguc

SEQ ID NO: 6478 - RNA, 17 nt, Artificial Sequence
  Synthetic
cgauugagaucuucguc

SEQ ID NO: 6479 - RNA, 17 nt, Artificial Sequence
  Synthetic
  misc_feature (13)..(13): n is a, c, g, or u
ccggcaacggccngguc

SEQ ID NO: 6480 - RNA, 17 nt, Artificial Sequence
  Synthetic
guaggcauaaauugguc

SEQ ID NO: 6481 - RNA, 17 nt, Artificial Sequence
  Synthetic
cuaucgcuggauguguc

SEQ ID NO: 6482 - RNA, 17 nt, Artificial Sequence
  Synthetic
  misc_feature (15)..(15): n is a, c, g, or u
gucuuugauuuucanuc

SEQ ID NO: 6483 - RNA, 17 nt, Artificial Sequence
  Synthetic
ggucguccgcaggauuc

SEQ ID NO: 6484 - RNA, 17 nt, Artificial Sequence
  Synthetic
ugcuguucaaaaccuuc

SEQ ID NO: 6485 - RNA, 17 nt, Artificial Sequence
  Synthetic
cucucguuuuugccuuc

SEQ ID NO: 6486 - RNA, 17 nt, Artificial Sequence
  Synthetic
uggagauugagaucuuc

SEQ ID NO: 6487 - RNA, 17 nt, Artificial Sequence
  Synthetic
ugaugcuuuccauguuc

SEQ ID NO: 6488 - RNA, 17 nt, Artificial Sequence
  Synthetic
aacagugaacccuguuc

SEQ ID NO: 6489 - RNA, 17 nt, Artificial Sequence
  Synthetic
acuagugccauuuguuc

SEQ ID NO: 6490 - RNA, 17 nt, Artificial Sequence
  Synthetic
  misc_feature (5)..(5): n is a, c, g, or u
gaaangauguauauuuc

SEQ ID NO: 6491 - RNA, 17 nt, Artificial Sequence
  Synthetic
aacuuacaaggccuuuc

SEQ ID NO: 6492 - RNA, 17 nt, Artificial Sequence
  Synthetic
caucaucaugggcuuuc

SEQ ID NO: 6493 - RNA, 17 nt, Artificial Sequence
  Synthetic
cucccauaggaauuuuc

SEQ ID NO: 6494 - RNA, 17 nt, Artificial Sequence
  Synthetic
ggcaucuuauauaaaag

SEQ ID NO: 6495 - RNA, 17 nt, Artificial Sequence
  Synthetic
guaaguuggcgagaaag

SEQ ID NO: 6496 - RNA, 17 nt, Artificial Sequence
  Synthetic
guaacagagguauaaag

SEQ ID NO: 6497 - RNA, 17 nt, Artificial Sequence
  Synthetic
aguaggacaugaacaag

SEQ ID NO: 6498 - RNA, 17 nt, Artificial Sequence
  Synthetic
  misc_feature (6)..(6): n is a, c, g, or u
  misc_feature (10)..(10): n is a, c, g, or u
gacganaganccccaag

SEQ ID NO: 6499 - RNA, 17 nt, Artificial Sequence
  Synthetic
ugucucacuuuuggaag

SEQ ID NO: 6500 - RNA, 17 nt, Artificial Sequence
  Synthetic
gacgugcagaggugaag

SEQ ID NO: 6501 - RNA, 17 nt, Artificial Sequence
  Synthetic
uucuuuccuucaguaag

SEQ ID NO: 6502 - RNA, 17 nt, Artificial Sequence
  Synthetic
cuccaguuccggaacag

SEQ ID NO: 6503 - RNA, 17 nt, Artificial Sequence
  Synthetic
aacugaaagccagacag

SEQ ID NO: 6504 - RNA, 17 nt, Artificial Sequence
  Synthetic
ggccaagccccagccag

SEQ ID NO: 6505 - RNA, 17 nt, Artificial Sequence
  Synthetic
gccgcagacacauccag

SEQ ID NO: 6506 - RNA, 17 nt, Artificial Sequence
  Synthetic
gaagauccagcauccag

SEQ ID NO: 6507 - RNA, 17 nt, Artificial Sequence
  Synthetic
cuucccccauucgagag

SEQ ID NO: 6508 - RNA, 17 nt, Artificial Sequence
  Synthetic
caacuggauccugcgag

SEQ ID NO: 6509 - RNA, 17 nt, Artificial Sequence
  Synthetic
uucuucccccauucgag

SEQ ID NO: 6510 - RNA, 17 nt, Artificial Sequence
  Synthetic
ucuauaagcuggaggag

SEQ ID NO: 6511 - RNA, 17 nt, Artificial Sequence
  Synthetic
agccaacaagguaggag

SEQ ID NO: 6512 - RNA, 17 nt, Artificial Sequence
  Synthetic
auguauauuuccgggag

SEQ ID NO: 6513 - RNA, 17 nt, Artificial Sequence
  Synthetic
gccuccgugugggggag

SEQ ID NO: 6514 - RNA, 17 nt, Artificial Sequence
  Synthetic
gaaaauuccuaugggag

SEQ ID NO: 6515 - RNA, 17 nt, Artificial Sequence
  Synthetic
gucucucaaagguggag

SEQ ID NO: 6516 - RNA, 17 nt, Artificial Sequence
  Synthetic
uuuggugucuuuuggag

SEQ ID NO: 6517 - RNA, 17 nt, Artificial Sequence
  Synthetic
uugaacagcaacaugag

SEQ ID NO: 6518 - RNA, 17 nt, Artificial Sequence
  Synthetic
gacaagagguuggugag

SEQ ID NO: 6519 - RNA, 17 nt, Artificial Sequence
  Synthetic
cccccuagaaaauugag

SEQ ID NO: 6520 - RNA, 17 nt, Artificial Sequence
  Synthetic
aucacuccaccuuugag

SEQ ID NO: 6521 - RNA, 17 nt, Artificial Sequence
  Synthetic
  misc_feature (1)..(1): n is a, c, g, or u
  misc_feature (10)..(10): n is a, c, g, or u
naaauauuunccccuag

SEQ ID NO: 6522 - RNA, 17 nt, Artificial Sequence
  Synthetic
uucucucaauuuucuag

SEQ ID NO: 6523 - RNA, 17 nt, Artificial Sequence
  Synthetic
  misc_feature (4)..(4): n is a, c, g, or u
  misc_feature (13)..(13): n is a, c, g, or u
gggnaaauauuunguag

SEQ ID NO: 6524 - RNA, 17 nt, Artificial Sequence
  Synthetic
  misc_feature (14)..(14): n is a, c, g, or u
uaacccaugaaaunuag

SEQ ID NO: 6525 - RNA, 17 nt, Artificial Sequence
  Synthetic
aggauucagcgcugacg

SEQ ID NO: 6526 - RNA, 17 nt, Artificial Sequence
  Synthetic
ccucgagaagauugacg

SEQ ID NO: 6527 - RNA, 17 nt, Artificial Sequence
  Synthetic
caucaaccaccaguacg

SEQ ID NO: 6528 - RNA, 17 nt, Artificial Sequence
  Synthetic
ucgcauggagaccaccg

SEQ ID NO: 6529 - RNA, 17 nt, Artificial Sequence
  Synthetic
ucucaucugccggaccg

SEQ ID NO: 6530 - RNA, 17 nt, Artificial Sequence
  Synthetic
  misc_feature (2)..(2): n is a, c, g, or u
anccccaagcgaccccg

SEQ ID NO: 6531 - RNA, 17 nt, Artificial Sequence
  Synthetic
ucuagggggagcucccg

SEQ ID NO: 6532 - RNA, 17 nt, Artificial Sequence
  Synthetic
accccaaaaggccuccg

SEQ ID NO: 6533 - RNA, 17 nt, Artificial Sequence
  Synthetic
ucuucgucugcgaggcg

SEQ ID NO: 6534 - RNA, 17 nt, Artificial Sequence
  Synthetic
ggccuuguaaguuggcg

SEQ ID NO: 6535 - RNA, 17 nt, Artificial Sequence
  Synthetic
gccaacuggauccugcg

SEQ ID NO: 6536 - RNA, 17 nt, Artificial Sequence
  Synthetic
gccucagcucuguaucg

SEQ ID NO: 6537 - RNA, 17 nt, Artificial Sequence
  Synthetic
  misc_feature (7)..(7): n is a, c, g, or u
uggagcnaaacuuaucg

SEQ ID NO: 6538 - RNA, 17 nt, Artificial Sequence
  Synthetic
aggguccccaauccucg

SEQ ID NO: 6539 - RNA, 17 nt, Artificial Sequence
  Synthetic
gauccaacugguggucg

SEQ ID NO: 6540 - RNA, 17 nt, Artificial Sequence
  Synthetic
uccuuggacucacaagg

SEQ ID NO: 6541 - RNA, 17 nt, Artificial Sequence
  Synthetic
acggcagacggagaagg

SEQ ID NO: 6542 - RNA, 17 nt, Artificial Sequence
  Synthetic
acauacccuauggaagg

SEQ ID NO: 6543 - RNA, 17 nt, Artificial Sequence
  Synthetic
uguucccaagaauaagg

SEQ ID NO: 6544 - RNA, 17 nt, Artificial Sequence
  Synthetic
ccugcucguguuacagg

SEQ ID NO: 6545 - RNA, 17 nt, Artificial Sequence
  Synthetic
uaguaaacugagccagg

SEQ ID NO: 6546 - RNA, 17 nt, Artificial Sequence
  Synthetic
ggugaacaaugcucagg

SEQ ID NO: 6547 - RNA, 17 nt, Artificial Sequence
  Synthetic
agaugauuaggcagagg

SEQ ID NO: 6548 - RNA, 17 nt, Artificial Sequence
  Synthetic
caugcgacgugcagagg

SEQ ID NO: 6549 - RNA, 17 nt, Artificial Sequence
  Synthetic
gaccgcguaaagagagg

SEQ ID NO: 6550 - RNA, 17 nt, Artificial Sequence
  Synthetic
  misc_feature (9)..(9): n is a, c, g, or u
ggaggagungggggagg

SEQ ID NO: 6551 - RNA, 17 nt, Artificial Sequence
  Synthetic
ggucuauaagcuggagg

SEQ ID NO: 6552 - RNA, 17 nt, Artificial Sequence
  Synthetic
ggaguucuucuucuagg

SEQ ID NO: 6553 - RNA, 17 nt, Artificial Sequence
  Synthetic
gaagccaacaagguagg

SEQ ID NO: 6554 - RNA, 17 nt, Artificial Sequence
  Synthetic
  misc_feature (6)..(6): n is a, c, g, or u
guuccngccgaccacgg

SEQ ID NO: 6555 - RNA, 17 nt, Artificial Sequence
  Synthetic
  misc_feature (3)..(3): n is a, c, g, or u
gcnggaacggcagacgg

SEQ ID NO: 6556 - RNA, 17 nt, Artificial Sequence
  Synthetic
agugggggaaagcccgg

SEQ ID NO: 6557 - RNA, 17 nt, Artificial Sequence
  Synthetic
cuuaucaacacuuccgg

SEQ ID NO: 6558 - RNA, 17 nt, Artificial Sequence
  Synthetic
gaucuucugcgacgcgg

SEQ ID NO: 6559 - RNA, 17 nt, Artificial Sequence
  Synthetic
agaaggcacagacgggg

SEQ ID NO: 6560 - RNA, 17 nt, Artificial Sequence
  Synthetic
aggccuccguguggggg

SEQ ID NO: 6561 - RNA, 17 nt, Artificial Sequence
  Synthetic
gccauucuuugcugggg

SEQ ID NO: 6562 - RNA, 17 nt, Artificial Sequence
  Synthetic
ggucccucucgaauggg

SEQ ID NO: 6563 - RNA, 17 nt, Artificial Sequence
  Synthetic
cggaaaauuccuauggg

SEQ ID NO: 6564 - RNA, 17 nt, Artificial Sequence
  Synthetic
gacucuagcuaccuggg

SEQ ID NO: 6565 - RNA, 17 nt, Artificial Sequence
  Synthetic
gaaagccagacaguggg

SEQ ID NO: 6566 - RNA, 17 nt, Artificial Sequence
  Synthetic
  misc_feature (9)..(9): n is a, c, g, or u
  misc_feature (15)..(15): n is a, c, g, or u
agugcagunuggugngg

SEQ ID NO: 6567 - RNA, 17 nt, Artificial Sequence
  Synthetic
cucugcacgucgcaugg

SEQ ID NO: 6568 - RNA, 17 nt, Artificial Sequence
  Synthetic
acaaaacaaaaagaugg

SEQ ID NO: 6569 - RNA, 17 nt, Artificial Sequence
  Synthetic
uaacauugggaagcugg

SEQ ID NO: 6570 - RNA, 17 nt, Artificial Sequence
  Synthetic
aaguugcauggugcugg

SEQ ID NO: 6571 - RNA, 17 nt, Artificial Sequence
  Synthetic
aagccauucuuugcugg

SEQ ID NO: 6572 - RNA, 17 nt, Artificial Sequence
  Synthetic
gugucucucaaaggugg

SEQ ID NO: 6573 - RNA, 17 nt, Artificial Sequence
  Synthetic
aucuucucgaggauugg

SEQ ID NO: 6574 - RNA, 17 nt, Artificial Sequence
  Synthetic
  misc_feature (7)..(7): n is a, c, g, or u
  misc_feature (13)..(13): n is a, c, g, or u
gaguganuggagnuugg

SEQ ID NO: 6575 - RNA, 17 nt, Artificial Sequence
  Synthetic
ccuugggcaagauuugg

SEQ ID NO: 6576 - RNA, 17 nt, Artificial Sequence
  Synthetic
acacggaggccuuuugg

SEQ ID NO: 6577 - RNA, 17 nt, Artificial Sequence
  Synthetic
uauuuggugucuuuugg

SEQ ID NO: 6578 - RNA, 17 nt, Artificial Sequence
  Synthetic
  misc_feature (16)..(16): n is a, c, g, or u
aagacugggaggagung

SEQ ID NO: 6579 - RNA, 17 nt, Artificial Sequence
  Synthetic
gacauuauuaacaaaug

SEQ ID NO: 6580 - RNA, 17 nt, Artificial Sequence
  Synthetic
aagugagacaagaaaug

SEQ ID NO: 6581 - RNA, 17 nt, Artificial Sequence
  Synthetic
acggucccucucgaaug

SEQ ID NO: 6582 - RNA, 17 nt, Artificial Sequence
  Synthetic
uuuugaacagcaacaug

SEQ ID NO: 6583 - RNA, 17 nt, Artificial Sequence
  Synthetic
ucacgguggucuccaug

SEQ ID NO: 6584 - RNA, 17 nt, Artificial Sequence
  Synthetic
acacgguccggcagaug

SEQ ID NO: 6585 - RNA, 17 nt, Artificial Sequence
  Synthetic
  misc_feature (8)..(8): n is a, c, g, or u
aauauuunguagagaug

SEQ ID NO: 6586 - RNA, 17 nt, Artificial Sequence
  Synthetic
agaagauugacgagaug

SEQ ID NO: 6587 - RNA, 17 nt, Artificial Sequence
  Synthetic
ugcauggccugaggaug

SEQ ID NO: 6588 - RNA, 17 nt, Artificial Sequence
  Synthetic
cccaugaugaugggaug

SEQ ID NO: 6589 - RNA, 17 nt, Artificial Sequence
  Synthetic
gaaagcccaugaugaug

SEQ ID NO: 6590 - RNA, 17 nt, Artificial Sequence
  Synthetic
uccuaggaauccugaug

SEQ ID NO: 6591 - RNA, 17 nt, Artificial Sequence
  Synthetic
uuuaaugccucuguaug

SEQ ID NO: 6592 - RNA, 17 nt, Artificial Sequence
  Synthetic
  misc_feature (1)..(1): n is a, c, g, or u
  misc_feature (7)..(7): n is a, c, g, or u
nuggagnuuggggacug

SEQ ID NO: 6593 - RNA, 17 nt, Artificial Sequence
  Synthetic
augacucuagcuaccug

SEQ ID NO: 6594 - RNA, 17 nt, Artificial Sequence
  Synthetic
agcaugccuugagccug

SEQ ID NO: 6595 - RNA, 17 nt, Artificial Sequence
  Synthetic
aaagaauggcuugccug

SEQ ID NO: 6596 - RNA, 17 nt, Artificial Sequence
  Synthetic
caagccauucuuugcug

SEQ ID NO: 6597 - RNA, 17 nt, Artificial Sequence
  Synthetic
acaggccucuuacucug

SEQ ID NO: 6598 - RNA, 17 nt, Artificial Sequence
  Synthetic
ccaccaccaauccucug

SEQ ID NO: 6599 - RNA, 17 nt, Artificial Sequence
  Synthetic
gagauugagaucuucug

SEQ ID NO: 6600 - RNA, 17 nt, Artificial Sequence
  Synthetic
uuucucuuccaaaagug

SEQ ID NO: 6601 - RNA, 17 nt, Artificial Sequence
  Synthetic
cugaaagccagacagug

SEQ ID NO: 6602 - RNA, 17 nt, Artificial Sequence
  Synthetic
ccaagccccagccagug

SEQ ID NO: 6603 - RNA, 17 nt, Artificial Sequence
  Synthetic
uauaagcuggaggagug

SEQ ID NO: 6604 - RNA, 17 nt, Artificial Sequence
  Synthetic
cccaaaaggccuccgug

SEQ ID NO: 6605 - RNA, 17 nt, Artificial Sequence
  Synthetic
cuuggacucacaaggug

SEQ ID NO: 6606 - RNA, 17 nt, Artificial Sequence
  Synthetic
cucuagcuaccugggug

SEQ ID NO: 6607 - RNA, 17 nt, Artificial Sequence
  Synthetic
aggacaagagguuggug

SEQ ID NO: 6608 - RNA, 17 nt, Artificial Sequence
  Synthetic
uugggcaagauuuggug

SEQ ID NO: 6609 - RNA, 17 nt, Artificial Sequence
  Synthetic
caaaaggccuccgugug

SEQ ID NO: 6610 - RNA, 17 nt, Artificial Sequence
  Synthetic
  misc_feature (11)..(11): n is a, c, g, or u
aguaugucaangaauug

SEQ ID NO: 6611 - RNA, 17 nt, Artificial Sequence
  Synthetic
aaggaauacuaacauug

SEQ ID NO: 6612 - RNA, 17 nt, Artificial Sequence
  Synthetic
accagaaauccagauug

SEQ ID NO: 6613 - RNA, 17 nt, Artificial Sequence
  Synthetic
ugggaagcuggagauug

SEQ ID NO: 6614 - RNA, 17 nt, Artificial Sequence
  Synthetic
cugcgacgcggcgauug

SEQ ID NO: 6615 - RNA, 17 nt, Artificial Sequence
  Synthetic
uggaugaugugguauug

SEQ ID NO: 6616 - RNA, 17 nt, Artificial Sequence
  Synthetic
cuccaagcugugccuug

SEQ ID NO: 6617 - RNA, 17 nt, Artificial Sequence
  Synthetic
gggucaccuuauucuug

SEQ ID NO: 6618 - RNA, 17 nt, Artificial Sequence
  Synthetic
uccaguggucuuuguug

SEQ ID NO: 6619 - RNA, 17 nt, Artificial Sequence
  Synthetic
aucuuuuuguuuuguug

SEQ ID NO: 6620 - RNA, 17 nt, Artificial Sequence
  Synthetic
  misc_feature (4)..(4): n is a, c, g, or u
  misc_feature (17)..(17): n is a, c, g, or u
acangaacacaucagan

SEQ ID NO: 6621 - RNA, 17 nt, Artificial Sequence
  Synthetic
  misc_feature (17)..(17): n is a, c, g, or u
acggagaaggggacgan

SEQ ID NO: 6622 - RNA, 17 nt, Artificial Sequence
  Synthetic
  misc_feature (17)..(17): n is a, c, g, or u
gcgccccguggucggcn

SEQ ID NO: 6623 - RNA, 17 nt, Artificial Sequence
  Synthetic
  misc_feature (4)..(4): n is a, c, g, or u
  misc_feature (17)..(17): n is a, c, g, or u
ucanucugauguguucn

SEQ ID NO: 6624 - RNA, 17 nt, Artificial Sequence
  Synthetic
  misc_feature (17)..(17): n is a, c, g, or u
gccaucagcgcaugcgn

SEQ ID NO: 6625 - RNA, 17 nt, Artificial Sequence
  Synthetic
  misc_feature (11)..(11): n is a, c, g, or u
  misc_feature (17)..(17): n is a, c, g, or u
ugagugcagunuggugn

SEQ ID NO: 6626 - RNA, 17 nt, Artificial Sequence
  Synthetic
  misc_feature (16)..(17): n is a, c, g, or u
ucuguguaaacaauann

SEQ ID NO: 6627 - RNA, 17 nt, Artificial Sequence
  Synthetic
  misc_feature (17)..(17): n is a, c, g, or u
aaagacugggaggagun

SEQ ID NO: 6628 - RNA, 17 nt, Artificial Sequence
  Synthetic
  misc_feature (17)..(17): n is a, c, g, or u
cguagcgccucauuuun

SEQ ID NO: 6629 - RNA, 17 nt, Artificial Sequence
  Synthetic
ccauaggguauguaaau

SEQ ID NO: 6630 - RNA, 17 nt, Artificial Sequence
  Synthetic
gacggucccucucgaau

SEQ ID NO: 6631 - RNA, 17 nt, Artificial Sequence
  Synthetic
  misc_feature (13)..(13): n is a, c, g, or u
aaaguaugucaangaau

SEQ ID NO: 6632 - RNA, 17 nt, Artificial Sequence
  Synthetic
gacccugcaccgaacau

SEQ ID NO: 6633 - RNA, 17 nt, Artificial Sequence
  Synthetic
ccaaggaauacuaacau

SEQ ID NO: 6634 - RNA, 17 nt, Artificial Sequence
  Synthetic
  misc_feature (11)..(11): n is a, c, g, or u
aagcaggauanccacau

SEQ ID NO: 6635 - RNA, 17 nt, Artificial Sequence
  Synthetic
  misc_feature (5)..(5): n is a, c, g, or u
  misc_feature (8)..(8): n is a, c, g, or u
cuuunggncauggacau

SEQ ID NO: 6636 - RNA, 17 nt, Artificial Sequence
  Synthetic
cacagccuagcagccau

SEQ ID NO: 6637 - RNA, 17 nt, Artificial Sequence
  Synthetic
agaugcccgccuuccau

SEQ ID NO: 6638 - RNA, 17 nt, Artificial Sequence
  Synthetic
aggugaaaaaguugcau

SEQ ID NO: 6639 - RNA, 17 nt, Artificial Sequence
  Synthetic
  misc_feature (11)..(11): n is a, c, g, or u
  misc_feature (14)..(14): n is a, c, g, or u
ggguggcuuunggncau

SEQ ID NO: 6640 - RNA, 17 nt, Artificial Sequence
  Synthetic
aacaagagcuacaucau

SEQ ID NO: 6641 - RNA, 17 nt, Artificial Sequence
  Synthetic
caacaaaacaaaaagau

SEQ ID NO: 6642 - RNA, 17 nt, Artificial Sequence
  Synthetic
ccaauccucgagaagau

SEQ ID NO: 6643 - RNA, 17 nt, Artificial Sequence
  Synthetic
ggaaguguugauaagau

SEQ ID NO: 6644 - RNA, 17 nt, Artificial Sequence
  Synthetic
acaccagaaauccagau

SEQ ID NO: 6645 - RNA, 17 nt, Artificial Sequence
  Synthetic
ugaaagccugcuuagau

SEQ ID NO: 6646 - RNA, 17 nt, Artificial Sequence
  Synthetic
ucaaucuucucgaggau

SEQ ID NO: 6647 - RNA, 17 nt, Artificial Sequence
  Synthetic
guggucuuuguugggau

SEQ ID NO: 6648 - RNA, 17 nt, Artificial Sequence
  Synthetic
cucaaagguggagugau

SEQ ID NO: 6649 - RNA, 17 nt, Artificial Sequence
  Synthetic
cuggcuuucaguuauau

SEQ ID NO: 6650 - RNA, 17 nt, Artificial Sequence
  Synthetic
cuauuuacauacccuau

SEQ ID NO: 6651 - RNA, 17 nt, Artificial Sequence
  Synthetic
  misc_feature (9)..(9): n is a, c, g, or u
ccuguuaancggccuau

SEQ ID NO: 6652 - RNA, 17 nt, Artificial Sequence
  Synthetic
uaggaguuccgcaguau

SEQ ID NO: 6653 - RNA, 17 nt, Artificial Sequence
  Synthetic
uaggcccauauuaguau

SEQ ID NO: 6654 - RNA, 17 nt, Artificial Sequence
  Synthetic
ucuagacucugcgguau

SEQ ID NO: 6655 - RNA, 17 nt, Artificial Sequence
  Synthetic
uauggaugaugugguau

SEQ ID NO: 6656 - RNA, 17 nt, Artificial Sequence
  Synthetic
ccgccucagcucuguau

SEQ ID NO: 6657 - RNA, 17 nt, Artificial Sequence
  Synthetic
aaaguucaggcaauuau

SEQ ID NO: 6658 - RNA, 17 nt, Artificial Sequence
  Synthetic
  misc_feature (9)..(9): n is a, c, g, or u
ucuggagcnaaacuuau

SEQ ID NO: 6659 - RNA, 17 nt, Artificial Sequence
  Synthetic
gcacuccuccagcuuau

SEQ ID NO: 6660 - RNA, 17 nt, Artificial Sequence
  Synthetic
aggcugugcugccaacu

SEQ ID NO: 6661 - RNA, 17 nt, Artificial Sequence
  Synthetic
gaaugcuggauccaacu

SEQ ID NO: 6662 - RNA, 17 nt, Artificial Sequence
  Synthetic
ugucuuuaauccuaacu

SEQ ID NO: 6663 - RNA, 17 nt, Artificial Sequence
  Synthetic
ucccaacaaagaccacu

SEQ ID NO: 6664 - RNA, 17 nt, Artificial Sequence
  Synthetic
accgcagagucuagacu

SEQ ID NO: 6665 - RNA, 17 nt, Artificial Sequence
  Synthetic
cggcagggucccguacu

SEQ ID NO: 6666 - RNA, 17 nt, Artificial Sequence
  Synthetic
uccuggcucaguuuacu

SEQ ID NO: 6667 - RNA, 17 nt, Artificial Sequence
  Synthetic
cguaaaauuucccaccu

SEQ ID NO: 6668 - RNA, 17 nt, Artificial Sequence
  Synthetic
ccucuuauguaagaccu

SEQ ID NO: 6669 - RNA, 17 nt, Artificial Sequence
  Synthetic
aaacgggcaacauaccu

SEQ ID NO: 6670 - RNA, 17 nt, Artificial Sequence
  Synthetic
acacgggagcucccccu

SEQ ID NO: 6671 - RNA, 17 nt, Artificial Sequence
  Synthetic
gaagaggcagguccccu

SEQ ID NO: 6672 - RNA, 17 nt, Artificial Sequence
  Synthetic
cugacuacuaggucccu

SEQ ID NO: 6673 - RNA, 17 nt, Artificial Sequence
  Synthetic
gccuccaagcugugccu

SEQ ID NO: 6674 - RNA, 17 nt, Artificial Sequence
  Synthetic
uggugguugaugauccu

SEQ ID NO: 6675 - RNA, 17 nt, Artificial Sequence
  Synthetic
uuuguuaauaauguccu

SEQ ID NO: 6676 - RNA, 17 nt, Artificial Sequence
  Synthetic
uuguccuggcuaucgcu

SEQ ID NO: 6677 - RNA, 17 nt, Artificial Sequence
  Synthetic
  misc_feature (4)..(4): n is a, c, g, or u
cccnucucggggucgcu

SEQ ID NO: 6678 - RNA, 17 nt, Artificial Sequence
  Synthetic
ggcacagcuuggaggcu

SEQ ID NO: 6679 - RNA, 17 nt, Artificial Sequence
  Synthetic
ugcaacccccacuggcu

SEQ ID NO: 6680 - RNA, 17 nt, Artificial Sequence
  Synthetic
uguuugcucugaaugcu

SEQ ID NO: 6681 - RNA, 17 nt, Artificial Sequence
  Synthetic
cuaggucccuggaugcu

SEQ ID NO: 6682 - RNA, 17 nt, Artificial Sequence
  Synthetic
uuccuaggaccccugcu

SEQ ID NO: 6683 - RNA, 17 nt, Artificial Sequence
  Synthetic
acuuagucaugccugcu

SEQ ID NO: 6684 - RNA, 17 nt, Artificial Sequence
  Synthetic
gccuguauuuuccugcu

SEQ ID NO: 6685 - RNA, 17 nt, Artificial Sequence
  Synthetic
aaaaguugcauggugcu

SEQ ID NO: 6686 - RNA, 17 nt, Artificial Sequence
  Synthetic
gcaagccauucuuugcu

SEQ ID NO: 6687 - RNA, 17 nt, Artificial Sequence
  Synthetic
gauuguggucccaaucu

SEQ ID NO: 6688 - RNA, 17 nt, Artificial Sequence
  Synthetic
gagcugaggcgguaucu

SEQ ID NO: 6689 - RNA, 17 nt, Artificial Sequence
  Synthetic
gauuaacuacauuaucu

SEQ ID NO: 6690 - RNA, 17 nt, Artificial Sequence
  Synthetic
ucuuggacggucccucu

SEQ ID NO: 6691 - RNA, 17 nt, Artificial Sequence
  Synthetic
guuuuauaccuuucucu

SEQ ID NO: 6692 - RNA, 17 nt, Artificial Sequence
  Synthetic
acaauaccgcagagucu

SEQ ID NO: 6693 - RNA, 17 nt, Artificial Sequence
  Synthetic
aaguccaccacgagucu

SEQ ID NO: 6694 - RNA, 17 nt, Artificial Sequence
  Synthetic
  misc_feature (14)..(14): n is a, c, g, or u
cugcggacgacccnucu

SEQ ID NO: 6695 - RNA, 17 nt, Artificial Sequence
  Synthetic
  misc_feature (1)..(1): n is a, c, g, or u
nugggucaccuuauucu

SEQ ID NO: 6696 - RNA, 17 nt, Artificial Sequence
  Synthetic
ucaguaagagaucuucu

SEQ ID NO: 6697 - RNA, 17 nt, Artificial Sequence
  Synthetic
gagggaguucuucuucu

SEQ ID NO: 6698 - RNA, 17 nt, Artificial Sequence
  Synthetic
uucuuguugguucuucu

SEQ ID NO: 6699 - RNA, 17 nt, Artificial Sequence
  Synthetic
ucccaaucuggauuucu

SEQ ID NO: 6700 - RNA, 17 nt, Artificial Sequence
  Synthetic
acuucucucaauuuucu

SEQ ID NO: 6701 - RNA, 17 nt, Artificial Sequence
  Synthetic
guuauguaauuggaagu

SEQ ID NO: 6702 - RNA, 17 nt, Artificial Sequence
  Synthetic
acugaaagccagacagu

SEQ ID NO: 6703 - RNA, 17 nt, Artificial Sequence
  Synthetic
gccaagccccagccagu

SEQ ID NO: 6704 - RNA, 17 nt, Artificial Sequence
  Synthetic
uccucaggccaugcagu

SEQ ID NO: 6705 - RNA, 17 nt, Artificial Sequence
  Synthetic
guuccuugagcaagagu

SEQ ID NO: 6706 - RNA, 17 nt, Artificial Sequence
  Synthetic
uaaagacugggaggagu

SEQ ID NO: 6707 - RNA, 17 nt, Artificial Sequence
  Synthetic
uuaaagacagguauagu

SEQ ID NO: 6708 - RNA, 17 nt, Artificial Sequence
  Synthetic
cagcgcugacgggacgu

SEQ ID NO: 6709 - RNA, 17 nt, Artificial Sequence
  Synthetic
  misc_feature (5)..(5): n is a, c, g, or u
  misc_feature (14)..(14): n is a, c, g, or u
aaagngaaacuacncgu

SEQ ID NO: 6710 - RNA, 17 nt, Artificial Sequence
  Synthetic
gcagagucuagacucgu

SEQ ID NO: 6711 - RNA, 17 nt, Artificial Sequence
  Synthetic
gccucaaggucggucgu

SEQ ID NO: 6712 - RNA, 17 nt, Artificial Sequence
  Synthetic
gagucuagacucguggu

SEQ ID NO: 6713 - RNA, 17 nt, Artificial Sequence
  Synthetic
uggauccaacugguggu

SEQ ID NO: 6714 - RNA, 17 nt, Artificial Sequence
  Synthetic
ggucccguacugguggu

SEQ ID NO: 6715 - RNA, 17 nt, Artificial Sequence
  Synthetic
cccagaggauugguggu

SEQ ID NO: 6716 - RNA, 17 nt, Artificial Sequence
  Synthetic
aaucccagaggauuggu

SEQ ID NO: 6717 - RNA, 17 nt, Artificial Sequence
  Synthetic
auccugcagagcuuggu

SEQ ID NO: 6718 - RNA, 17 nt, Artificial Sequence
  Synthetic
agagcuugguggaaugu

SEQ ID NO: 6719 - RNA, 17 nt, Artificial Sequence
  Synthetic
  misc_feature (4)..(4): n is a, c, g, or u
guanucuccggaagugu

SEQ ID NO: 6720 - RNA, 17 nt, Artificial Sequence
  Synthetic
ggugucuuuuggagugu

SEQ ID NO: 6721 - RNA, 17 nt, Artificial Sequence
  Synthetic
ccaaaaggccuccgugu

SEQ ID NO: 6722 - RNA, 17 nt, Artificial Sequence
  Synthetic
ggcgggguuuuucuugu

SEQ ID NO: 6723 - RNA, 17 nt, Artificial Sequence
  Synthetic
gcuugguggaauguugu

SEQ ID NO: 6724 - RNA, 17 nt, Artificial Sequence
  Synthetic
  misc_feature (1)..(1): n is a, c, g, or u
nguccaguggucuuugu

SEQ ID NO: 6725 - RNA, 17 nt, Artificial Sequence
  Synthetic
ccaucuuuuuguuuugu

SEQ ID NO: 6726 - RNA, 17 nt, Artificial Sequence
  Synthetic
  misc_feature (4)..(4): n is a, c, g, or u
  misc_feature (16)..(16): n is a, c, g, or u
agungggggaggaganu

SEQ ID NO: 6727 - RNA, 17 nt, Artificial Sequence
  Synthetic
  misc_feature (16)..(16): n is a, c, g, or u
aaagacccacaauucnu

SEQ ID NO: 6728 - RNA, 17 nt, Artificial Sequence
  Synthetic
  misc_feature (10)..(10): n is a, c, g, or u
  misc_feature (16)..(16): n is a, c, g, or u
ggugaguganuggagnu

SEQ ID NO: 6729 - RNA, 17 nt, Artificial Sequence
  Synthetic
  misc_feature (16)..(16): n is a, c, g, or u
cauaacccaugaaaunu

SEQ ID NO: 6730 - RNA, 17 nt, Artificial Sequence
  Synthetic
  misc_feature (16)..(16): n is a, c, g, or u
uugccugagugcagunu

SEQ ID NO: 6731 - RNA, 17 nt, Artificial Sequence
  Synthetic
ucauggguuauguaauu

SEQ ID NO: 6732 - RNA, 17 nt, Artificial Sequence
  Synthetic
guaggagugggagcauu

SEQ ID NO: 6733 - RNA, 17 nt, Artificial Sequence
  Synthetic
cuuccugacugccgauu

SEQ ID NO: 6734 - RNA, 17 nt, Artificial Sequence
  Synthetic
aaaaaucccagaggauu

SEQ ID NO: 6735 - RNA, 17 nt, Artificial Sequence
  Synthetic
caaucuucucgaggauu

SEQ ID NO: 6736 - RNA, 17 nt, Artificial Sequence
  Synthetic
ucaaagguggagugauu

SEQ ID NO: 6737 - RNA, 17 nt, Artificial Sequence
  Synthetic
  misc_feature (4)..(4): n is a, c, g, or u
uaancggccuauugauu

SEQ ID NO: 6738 - RNA, 17 nt, Artificial Sequence
  Synthetic
auggaugaugugguauu

SEQ ID NO: 6739 - RNA, 17 nt, Artificial Sequence
  Synthetic
  misc_feature (9)..(9): n is a, c, g, or u
cgcaugcgnggaaccuu

SEQ ID NO: 6740 - RNA, 17 nt, Artificial Sequence
  Synthetic
cuguaucgggaugccuu

SEQ ID NO: 6741 - RNA, 17 nt, Artificial Sequence
  Synthetic
caauguuaguauuccuu

SEQ ID NO: 6742 - RNA, 17 nt, Artificial Sequence
  Synthetic
gggauccugcagagcuu

SEQ ID NO: 6743 - RNA, 17 nt, Artificial Sequence
  Synthetic
  misc_feature (3)..(3): n is a, c, g, or u
ccnucucggggucgcuu

SEQ ID NO: 6744 - RNA, 17 nt, Artificial Sequence
  Synthetic
aaagugaaagccugcuu

SEQ ID NO: 6745 - RNA, 17 nt, Artificial Sequence
  Synthetic
uacauaagaggacucuu

SEQ ID NO: 6746 - RNA, 17 nt, Artificial Sequence
  Synthetic
uuuucuaaaacagucuu

SEQ ID NO: 6747 - RNA, 17 nt, Artificial Sequence
  Synthetic
uuuaaacaaacagucuu

SEQ ID NO: 6748 - RNA, 17 nt, Artificial Sequence
  Synthetic
caauuuucuuuugucuu

SEQ ID NO: 6749 - RNA, 17 nt, Artificial Sequence
  Synthetic
caucauggggcuuucuu

SEQ ID NO: 6750 - RNA, 17 nt, Artificial Sequence
  Synthetic
uuauguaauuggaaguu

SEQ ID NO: 6751 - RNA, 17 nt, Artificial Sequence
  Synthetic
gaaaggccuuguaaguu

SEQ ID NO: 6752 - RNA, 17 nt, Artificial Sequence
  Synthetic
uuucccgaccaccaguu

SEQ ID NO: 6753 - RNA, 17 nt, Artificial Sequence
  Synthetic
uuggaggacaagagguu

SEQ ID NO: 6754 - RNA, 17 nt, Artificial Sequence
  Synthetic
  misc_feature (7)..(7): n is a, c, g, or u
cggaganuacuguuguu

SEQ ID NO: 6755 - RNA, 17 nt, Artificial Sequence
  Synthetic
  misc_feature (9)..(9): n is a, c, g, or u
  misc_feature (15)..(15): n is a, c, g, or u
gugaguganuggagnuu

SEQ ID NO: 6756 - RNA, 17 nt, Artificial Sequence
  Synthetic
  misc_feature (11)..(11): n is a, c, g, or u
ugggugggugnaaauuu

SEQ ID NO: 6757 - RNA, 17 nt, Artificial Sequence
  Synthetic
auaagauaggggcauuu

SEQ ID NO: 6758 - RNA, 17 nt, Artificial Sequence
  Synthetic
gaccuugggcaagauuu

SEQ ID NO: 6759 - RNA, 17 nt, Artificial Sequence
  Synthetic
  misc_feature (7)..(7): n is a, c, g, or u
accgucnuagaguauuu

SEQ ID NO: 6760 - RNA, 17 nt, Artificial Sequence
  Synthetic
cccacacggaggccuuu

SEQ ID NO: 6761 - RNA, 17 nt, Artificial Sequence
  Synthetic
  misc_feature (2)..(2): n is a, c, g, or u
angaauugugggucuuu

SEQ ID NO: 6762 - RNA, 17 nt, Artificial Sequence
  Synthetic
uuuccguccgaagguuu

SEQ ID NO: 6763 - RNA, 17 nt, Artificial Sequence
  Synthetic
uaaauagugucugguuu

SEQ ID NO: 6764 - RNA, 17 nt, Artificial Sequence
  Synthetic
uuucuugucucacuuuu

SEQ ID NO: 6765 - RNA, 17 nt, Artificial Sequence
  Synthetic
ccacacggaggccuuuu

SEQ ID NO: 6766 - RNA, 17 nt, Artificial Sequence
  Synthetic
aaaucaaagacuguuuu

SEQ ID NO: 6767 - RNA, 20 nt, Artificial Sequence
  Synthetic
cucuaacaguaaaugaaaaa

SEQ ID NO: 6768 - RNA, 20 nt, Artificial Sequence
  Synthetic
uaaaucccaacaaaacaaaa

SEQ ID NO: 6769 - RNA, 20 nt, Artificial Sequence
  Synthetic
  misc_feature (5)..(5): n is a, c, g, or u
gauanccacauuguguaaaa

SEQ ID NO: 6770 - RNA, 20 nt, Artificial Sequence
  Synthetic
accaggacauuauuaacaaa

SEQ ID NO: 6771 - RNA, 20 nt, Artificial Sequence
  Synthetic
aauguauacccaaagacaaa

SEQ ID NO: 6772 - RNA, 20 nt, Artificial Sequence
  Synthetic
gcugacgggacguagacaaa

SEQ ID NO: 6773 - RNA, 20 nt, Artificial Sequence
  Synthetic
uccuggaauuagaggacaaa

SEQ ID NO: 6774 - RNA, 20 nt, Artificial Sequence
  Synthetic
aaggggcagcaaagcccaaa

SEQ ID NO: 6775 - RNA, 20 nt, Artificial Sequence
  Synthetic
gugcgaauccacacuccaaa

SEQ ID NO: 6776 - RNA, 20 nt, Artificial Sequence
  Synthetic
  misc_feature (2)..(2): n is a, c, g, or u
angacgguuucucuuccaaa

SEQ ID NO: 6777 - RNA, 20 nt, Artificial Sequence
  Synthetic
uaauaauguccuggugcaaa

SEQ ID NO: 6778 - RNA, 20 nt, Artificial Sequence
  Synthetic
gaggaugagugucucucaaa

SEQ ID NO: 6779 - RNA, 20 nt, Artificial Sequence
  Synthetic
uccaaaagugagacaagaaa

SEQ ID NO: 6780 - RNA, 20 nt, Artificial Sequence
  Synthetic
guaaacugagccaggagaaa

SEQ ID NO: 6781 - RNA, 20 nt, Artificial Sequence
  Synthetic
ugcaaaugaauaucaggaaa

SEQ ID NO: 6782 - RNA, 20 nt, Artificial Sequence
  Synthetic
cagccuagcagccauggaaa

SEQ ID NO: 6783 - RNA, 20 nt, Artificial Sequence
  Synthetic
guagguccucuaacaguaaa

SEQ ID NO: 6784 - RNA, 20 nt, Artificial Sequence
  Synthetic
  misc_feature (6)..(6): n is a, c, g, or u
ggauanccacauuguguaaa

SEQ ID NO: 6785 - RNA, 20 nt, Artificial Sequence
  Synthetic
ugggaccacaaucccaacaa

SEQ ID NO: 6786 - RNA, 20 nt, Artificial Sequence
  Synthetic
uugcugccccuuuuacacaa

SEQ ID NO: 6787 - RNA, 20 nt, Artificial Sequence
  Synthetic
aguauuccuuggacucacaa

SEQ ID NO: 6788 - RNA, 20 nt, Artificial Sequence
  Synthetic
ccuacagccuccuaguacaa

SEQ ID NO: 6789 - RNA, 20 nt, Artificial Sequence
  Synthetic
ggauuuaaauguauacccaa

SEQ ID NO: 6790 - RNA, 20 nt, Artificial Sequence
  Synthetic
uucccaccuugugaguccaa

SEQ ID NO: 6791 - RNA, 20 nt, Artificial Sequence
  Synthetic
  misc_feature (7)..(8): n is a, c, g, or u
ucauuannuccccccagcaa

SEQ ID NO: 6792 - RNA, 20 nt, Artificial Sequence
  Synthetic
  misc_feature (4)..(4): n is a, c, g, or u
accnggccguugccgggcaa

SEQ ID NO: 6793 - RNA, 20 nt, Artificial Sequence
  Synthetic
  misc_feature (10)..(10): n is a, c, g, or u
cacaucaganugaaaaucaa

SEQ ID NO: 6794 - RNA, 20 nt, Artificial Sequence
  Synthetic
ccugcacgacucuugcucaa

SEQ ID NO: 6795 - RNA, 20 nt, Artificial Sequence
  Synthetic
  misc_feature (10)..(10): n is a, c, g, or u
uggacucucngcaaugucaa

SEQ ID NO: 6796 - RNA, 20 nt, Artificial Sequence
  Synthetic
uugauuggaaaguaugucaa

SEQ ID NO: 6797 - RNA, 20 nt, Artificial Sequence
  Synthetic
gaccuugaggcauacuucaa

SEQ ID NO: 6798 - RNA, 20 nt, Artificial Sequence
  Synthetic
uguauauuuccgggagagaa

SEQ ID NO: 6799 - RNA, 20 nt, Artificial Sequence
  Synthetic
gccuuguaaguuggcgagaa

SEQ ID NO: 6800 - RNA, 20 nt, Artificial Sequence
  Synthetic
  misc_feature (2)..(2): n is a, c, g, or u
cnggaacggcagacggagaa

SEQ ID NO: 6801 - RNA, 20 nt, Artificial Sequence
  Synthetic
cuuggacggucccucucgaa

SEQ ID NO: 6802 - RNA, 20 nt, Artificial Sequence
  Synthetic
aagaucucuuacugaaggaa

SEQ ID NO: 6803 - RNA, 20 nt, Artificial Sequence
  Synthetic
uauuuacauacccuauggaa

SEQ ID NO: 6804 - RNA, 20 nt, Artificial Sequence
  Synthetic
ccagaggauuggugguggaa

SEQ ID NO: 6805 - RNA, 20 nt, Artificial Sequence
  Synthetic
cuagaagaucucuuacugaa

SEQ ID NO: 6806 - RNA, 20 nt, Artificial Sequence
  Synthetic
gcucuuguucccaagaauaa

SEQ ID NO: 6807 - RNA, 20 nt, Artificial Sequence
  Synthetic
aauugguaacagagguauaa

SEQ ID NO: 6808 - RNA, 20 nt, Artificial Sequence
  Synthetic
auggacauugacccuuauaa

SEQ ID NO: 6809 - RNA, 20 nt, Artificial Sequence
  Synthetic
agugucugguuuggaaguaa

SEQ ID NO: 6810 - RNA, 20 nt, Artificial Sequence
  Synthetic
  misc_feature (12)..(12): n is a, c, g, or u
cugauguguucnugugguaa

SEQ ID NO: 6811 - RNA, 20 nt, Artificial Sequence
  Synthetic
  misc_feature (16)..(17): n is a, c, g, or u
ucuuugcuggggggannuaa

SEQ ID NO: 6812 - RNA, 20 nt, Artificial Sequence
  Synthetic
aguuuuccaguuaggauuaa

SEQ ID NO: 6813 - RNA, 20 nt, Artificial Sequence
  Synthetic
uucaaagacuguuuguuuaa

SEQ ID NO: 6814 - RNA, 20 nt, Artificial Sequence
  Synthetic
gaccugcugcgagcaaaaca

SEQ ID NO: 6815 - RNA, 20 nt, Artificial Sequence
  Synthetic
auaguccagaagaaccaaca

SEQ ID NO: 6816 - RNA, 20 nt, Artificial Sequence
  Synthetic
ugugaggauuuuugucaaca

SEQ ID NO: 6817 - RNA, 20 nt, Artificial Sequence
  Synthetic
cgaauuuuggccaagacaca

SEQ ID NO: 6818 - RNA, 20 nt, Artificial Sequence
  Synthetic
  misc_feature (9)..(9): n is a, c, g, or u
aguuggggnucauuaccaca

SEQ ID NO: 6819 - RNA, 20 nt, Artificial Sequence
  Synthetic
ucucuuccaaaagugagaca

SEQ ID NO: 6820 - RNA, 20 nt, Artificial Sequence
  Synthetic
gaggcuugaacaguaggaca

SEQ ID NO: 6821 - RNA, 20 nt, Artificial Sequence
  Synthetic
gaugaugggaugggaauaca

SEQ ID NO: 6822 - RNA, 20 nt, Artificial Sequence
  Synthetic
ggaccccugcucguguuaca

SEQ ID NO: 6823 - RNA, 20 nt, Artificial Sequence
  Synthetic
ccugauauucauuugcacca

SEQ ID NO: 6824 - RNA, 20 nt, Artificial Sequence
  Synthetic
  misc_feature (12)..(12): n is a, c, g, or u
ucugccguuccngccgacca

SEQ ID NO: 6825 - RNA, 20 nt, Artificial Sequence
  Synthetic
acuuccaauuacauaaccca

SEQ ID NO: 6826 - RNA, 20 nt, Artificial Sequence
  Synthetic
gaccguccaagaaagcccca

SEQ ID NO: 6827 - RNA, 20 nt, Artificial Sequence
  Synthetic
  misc_feature (11)..(11): n is a, c, g, or u
  misc_feature (15)..(15): n is a, c, g, or u
aaggggacganagancccca

SEQ ID NO: 6828 - RNA, 20 nt, Artificial Sequence
  Synthetic
aggaauuuuccgaaagccca

SEQ ID NO: 6829 - RNA, 20 nt, Artificial Sequence
  Synthetic
ugauguagcucuuguuccca

SEQ ID NO: 6830 - RNA, 20 nt, Artificial Sequence
  Synthetic
gacacauccagcgauagcca

SEQ ID NO: 6831 - RNA, 20 nt, Artificial Sequence
  Synthetic
gggacugcgaauuuuggcca

SEQ ID NO: 6832 - RNA, 20 nt, Artificial Sequence
  Synthetic
  misc_feature (9)..(9): n is a, c, g, or u
caacggccnggucugugcca

SEQ ID NO: 6833 - RNA, 20 nt, Artificial Sequence
  Synthetic
ggcguucacgguggucucca

SEQ ID NO: 6834 - RNA, 20 nt, Artificial Sequence
  Synthetic
cauucgagagggaccgucca

SEQ ID NO: 6835 - RNA, 20 nt, Artificial Sequence
  Synthetic
ccguuuguccucuaauucca

SEQ ID NO: 6836 - RNA, 20 nt, Artificial Sequence
  Synthetic
cauacagaggcauuaaagca

SEQ ID NO: 6837 - RNA, 20 nt, Artificial Sequence
  Synthetic
cggaacuggagccaccagca

SEQ ID NO: 6838 - RNA, 20 nt, Artificial Sequence
  Synthetic
gaagaugaggcauagcagca

SEQ ID NO: 6839 - RNA, 20 nt, Artificial Sequence
  Synthetic
ccccgccuguaacacgagca

SEQ ID NO: 6840 - RNA, 20 nt, Artificial Sequence
  Synthetic
  misc_feature (8)..(8): n is a, c, g, or u
cccgagangggucguccgca

SEQ ID NO: 6841 - RNA, 20 nt, Artificial Sequence
  Synthetic
ggccauaggccaucagcgca

SEQ ID NO: 6842 - RNA, 20 nt, Artificial Sequence
  Synthetic
  misc_feature (16)..(16): n is a, c, g, or u
agccacaaagguuccncgca

SEQ ID NO: 6843 - RNA, 20 nt, Artificial Sequence
  Synthetic
gacaaaggacgucccucgca

SEQ ID NO: 6844 - RNA, 20 nt, Artificial Sequence
  Synthetic
gggaaaaaaucuagcaggca

SEQ ID NO: 6845 - RNA, 20 nt, Artificial Sequence
  Synthetic
cuuauguaagaccuugggca

SEQ ID NO: 6846 - RNA, 20 nt, Artificial Sequence
  Synthetic
gggacccugccgaaccugca

SEQ ID NO: 6847 - RNA, 20 nt, Artificial Sequence
  Synthetic
acauuccaccaagcucugca

SEQ ID NO: 6848 - RNA, 20 nt, Artificial Sequence
  Synthetic
acauggaaagcaucacauca

SEQ ID NO: 6849 - RNA, 20 nt, Artificial Sequence
  Synthetic
ugggaacaagagcuacauca

SEQ ID NO: 6850 - RNA, 20 nt, Artificial Sequence
  Synthetic
guauucccaucccaucauca

SEQ ID NO: 6851 - RNA, 20 nt, Artificial Sequence
  Synthetic
ccuggugcaaaugaauauca

SEQ ID NO: 6852 - RNA, 20 nt, Artificial Sequence
  Synthetic
cagagguauaaagggacuca

SEQ ID NO: 6853 - RNA, 20 nt, Artificial Sequence
  Synthetic
ccuccaccaaucggcaguca

SEQ ID NO: 6854 - RNA, 20 nt, Artificial Sequence
  Synthetic
  misc_feature (14)..(14): n is a, c, g, or u
gggauauucccuanauuuca

SEQ ID NO: 6855 - RNA, 20 nt, Artificial Sequence
  Synthetic
aucccaacaaaacaaaaaga

SEQ ID NO: 6856 - RNA, 20 nt, Artificial Sequence
  Synthetic
guccagaagaaccaacaaga

SEQ ID NO: 6857 - RNA, 20 nt, Artificial Sequence
  Synthetic
gaggcagguccccuagaaga

SEQ ID NO: 6858 - RNA, 20 nt, Artificial Sequence
  Synthetic
cagcaggaugaagaggaaga

SEQ ID NO: 6859 - RNA, 20 nt, Artificial Sequence
  Synthetic
gcauagcagcaggaugaaga

SEQ ID NO: 6860 - RNA, 20 nt, Artificial Sequence
  Synthetic
gcccaaggucuuacauaaga

SEQ ID NO: 6861 - RNA, 20 nt, Artificial Sequence
  Synthetic
ggcagaugagaaggcacaga

SEQ ID NO: 6862 - RNA, 20 nt, Artificial Sequence
  Synthetic
ggucgggaaaaaaucccaga

SEQ ID NO: 6863 - RNA, 20 nt, Artificial Sequence
  Synthetic
acauaccuugauaguccaga

SEQ ID NO: 6864 - RNA, 20 nt, Artificial Sequence
  Synthetic
gaacucccucgccucgcaga

SEQ ID NO: 6865 - RNA, 20 nt, Artificial Sequence
  Synthetic
cucaaucgccgcgucgcaga

SEQ ID NO: 6866 - RNA, 20 nt, Artificial Sequence
  Synthetic
acaagagaugauuaggcaga

SEQ ID NO: 6867 - RNA, 20 nt, Artificial Sequence
  Synthetic
gucuccaugcgacgugcaga

SEQ ID NO: 6868 - RNA, 20 nt, Artificial Sequence
  Synthetic
ggggagaccgcguaaagaga

SEQ ID NO: 6869 - RNA, 20 nt, Artificial Sequence
  Synthetic
aguaggacaugaacaagaga

SEQ ID NO: 6870 - RNA, 20 nt, Artificial Sequence
  Synthetic
  misc_feature (4)..(4): n is a, c, g, or u
  misc_feature (13)..(13): n is a, c, g, or u
gggnaaauauuunguagaga

SEQ ID NO: 6871 - RNA, 20 nt, Artificial Sequence
  Synthetic
  misc_feature (2)..(2): n is a, c, g, or u
anccccaagcgaccccgaga

SEQ ID NO: 6872 - RNA, 20 nt, Artificial Sequence
  Synthetic
aggguccccaauccucgaga

SEQ ID NO: 6873 - RNA, 20 nt, Artificial Sequence
  Synthetic
  misc_feature (3)..(3): n is a, c, g, or u
gcnggaacggcagacggaga

SEQ ID NO: 6874 - RNA, 20 nt, Artificial Sequence
  Synthetic
gaagaggcagguccccuaga

SEQ ID NO: 6875 - RNA, 20 nt, Artificial Sequence
  Synthetic
gagcugaggcgguaucuaga

SEQ ID NO: 6876 - RNA, 20 nt, Artificial Sequence
  Synthetic
uuaaagacagguauaguaga

SEQ ID NO: 6877 - RNA, 20 nt, Artificial Sequence
  Synthetic
uugaugauccuggaauuaga

SEQ ID NO: 6878 - RNA, 20 nt, Artificial Sequence
  Synthetic
guuuuucauuuacuguuaga

SEQ ID NO: 6879 - RNA, 20 nt, Artificial Sequence
  Synthetic
  misc_feature (7)..(7): n is a, c, g, or u
cggaganuacuguuguuaga

SEQ ID NO: 6880 - RNA, 20 nt, Artificial Sequence
  Synthetic
uaacaguaaaugaaaaacga

SEQ ID NO: 6881 - RNA, 20 nt, Artificial Sequence
  Synthetic
cucccucgccucgcagacga

SEQ ID NO: 6882 - RNA, 20 nt, Artificial Sequence
  Synthetic
gacgugcagaggugaagcga

SEQ ID NO: 6883 - RNA, 20 nt, Artificial Sequence
  Synthetic
ucacgguggucuccaugcga

SEQ ID NO: 6884 - RNA, 20 nt, Artificial Sequence
  Synthetic
auugagaucuucgucugcga

SEQ ID NO: 6885 - RNA, 20 nt, Artificial Sequence
  Synthetic
gagauugagaucuucugcga

SEQ ID NO: 6886 - RNA, 20 nt, Artificial Sequence
  Synthetic
caucucgucaaucuucucga

SEQ ID NO: 6887 - RNA, 20 nt, Artificial Sequence
  Synthetic
gaugaggcauagcagcagga

SEQ ID NO: 6888 - RNA, 20 nt, Artificial Sequence
  Synthetic
gccgauugguggaggcagga

SEQ ID NO: 6889 - RNA, 20 nt, Artificial Sequence
  Synthetic
uagcagcaggaugaagagga

SEQ ID NO: 6890 - RNA, 20 nt, Artificial Sequence
  Synthetic
  misc_feature (12)..(12): n is a, c, g, or u
uaacaacaguanucuccgga

SEQ ID NO: 6891 - RNA, 20 nt, Artificial Sequence
  Synthetic
ucagcgcugaauccugcgga

SEQ ID NO: 6892 - RNA, 20 nt, Artificial Sequence
  Synthetic
acggcagacggagaagggga

SEQ ID NO: 6893 - RNA, 20 nt, Artificial Sequence
  Synthetic
ggucccucucgaauggggga

SEQ ID NO: 6894 - RNA, 20 nt, Artificial Sequence
  Synthetic
gaaagcccaugaugauggga

SEQ ID NO: 6895 - RNA, 20 nt, Artificial Sequence
  Synthetic
cuggcuuucaguuauaugga

SEQ ID NO: 6896 - RNA, 20 nt, Artificial Sequence
  Synthetic
uuguccuggcuaucgcugga

SEQ ID NO: 6897 - RNA, 20 nt, Artificial Sequence
  Synthetic
gauagccaggacaaauugga

SEQ ID NO: 6898 - RNA, 20 nt, Artificial Sequence
  Synthetic
  misc_feature (11)..(11): n is a, c, g, or u
ugggugggugnaaauuugga

SEQ ID NO: 6899 - RNA, 20 nt, Artificial Sequence
  Synthetic
  misc_feature (13)..(13): n is a, c, g, or u
uaaggugacccanaaaauga

SEQ ID NO: 6900 - RNA, 20 nt, Artificial Sequence
  Synthetic
aauuuuccgaaagcccauga

SEQ ID NO: 6901 - RNA, 20 nt, Artificial Sequence
  Synthetic
gcuuucaguuauauggauga

SEQ ID NO: 6902 - RNA, 20 nt, Artificial Sequence
  Synthetic
uuuccgaaagcccaugauga

SEQ ID NO: 6903 - RNA, 20 nt, Artificial Sequence
  Synthetic
agggguccuaggaauccuga

SEQ ID NO: 6904 - RNA, 20 nt, Artificial Sequence
  Synthetic
gcaucccgauacagagcuga

SEQ ID NO: 6905 - RNA, 20 nt, Artificial Sequence
  Synthetic
uccgcaggauucagcgcuga

SEQ ID NO: 6906 - RNA, 20 nt, Artificial Sequence
  Synthetic
  misc_feature (15)..(15): n is a, c, g, or u
gucuuugauuuucanucuga

SEQ ID NO: 6907 - RNA, 20 nt, Artificial Sequence
  Synthetic
caugcgacgugcagagguga

SEQ ID NO: 6908 - RNA, 20 nt, Artificial Sequence
  Synthetic
uagacucugcgguauuguga

SEQ ID NO: 6909 - RNA, 20 nt, Artificial Sequence
  Synthetic
ggucccguacuggugguuga

SEQ ID NO: 6910 - RNA, 20 nt, Artificial Sequence
  Synthetic
caguuaugucaauacuaaua

SEQ ID NO: 6911 - RNA, 20 nt, Artificial Sequence
  Synthetic
ggcugaggcccacucccaua

SEQ ID NO: 6912 - RNA, 20 nt, Artificial Sequence
  Synthetic
ccggaaguguugauaagaua

SEQ ID NO: 6913 - RNA, 20 nt, Artificial Sequence
  Synthetic
  misc_feature (2)..(2): n is a, c, g, or u
anucuccggaaguguugaua

SEQ ID NO: 6914 - RNA, 20 nt, Artificial Sequence
  Synthetic
  misc_feature (1)..(1): n is a, c, g, or u
  misc_feature (10)..(10): n is a, c, g, or u
nguaguuucncuuuuauaua

SEQ ID NO: 6915 - RNA, 20 nt, Artificial Sequence
  Synthetic
guagcuccaaauucuuuaua

SEQ ID NO: 6916 - RNA, 20 nt, Artificial Sequence
  Synthetic
uaacacgagcagggguccua

SEQ ID NO: 6917 - RNA, 20 nt, Artificial Sequence
  Synthetic
gggcuuucggaaaauuccua

SEQ ID NO: 6918 - RNA, 20 nt, Artificial Sequence
  Synthetic
gcaucacaucaggauuccua

SEQ ID NO: 6919 - RNA, 20 nt, Artificial Sequence
  Synthetic
aaaagacaccaaauacucua

SEQ ID NO: 6920 - RNA, 20 nt, Artificial Sequence
  Synthetic
agguuuuauaccuuucucua

SEQ ID NO: 6921 - RNA, 20 nt, Artificial Sequence
  Synthetic
gcgagggaguucuucuucua

SEQ ID NO: 6922 - RNA, 20 nt, Artificial Sequence
  Synthetic
ggacuucucucaauuuucua

SEQ ID NO: 6923 - RNA, 20 nt, Artificial Sequence
  Synthetic
gcuuggaggcuugaacagua

SEQ ID NO: 6924 - RNA, 20 nt, Artificial Sequence
  Synthetic
aggaucaucaaccaccagua

SEQ ID NO: 6925 - RNA, 20 nt, Artificial Sequence
  Synthetic
uccaagaguccucuuaugua

SEQ ID NO: 6926 - RNA, 20 nt, Artificial Sequence
  Synthetic
ccugcuuuaaugccucugua

SEQ ID NO: 6927 - RNA, 20 nt, Artificial Sequence
  Synthetic
aagauggaguuuuccaguua

SEQ ID NO: 6928 - RNA, 20 nt, Artificial Sequence
  Synthetic
acggggcgcaccucucuuua

SEQ ID NO: 6929 - RNA, 20 nt, Artificial Sequence
  Synthetic
ucacaaggugggaaauuuua

SEQ ID NO: 6930 - RNA, 20 nt, Artificial Sequence
  Synthetic
  misc_feature (3)..(3): n is a, c, g, or u
ccnggccguugccgggcaac

SEQ ID NO: 6931 - RNA, 20 nt, Artificial Sequence
  Synthetic
gguggcuccaguuccggaac

SEQ ID NO: 6932 - RNA, 20 nt, Artificial Sequence
  Synthetic
agugaggcaguagucggaac

SEQ ID NO: 6933 - RNA, 20 nt, Artificial Sequence
  Synthetic
cauauuaguauugacauaac

SEQ ID NO: 6934 - RNA, 20 nt, Artificial Sequence
  Synthetic
uaccacaucauccauauaac

SEQ ID NO: 6935 - RNA, 20 nt, Artificial Sequence
  Synthetic
  misc_feature (15)..(15): n is a, c, g, or u
caaucaauaggccgnuuaac

SEQ ID NO: 6936 - RNA, 20 nt, Artificial Sequence
  Synthetic
  misc_feature (7)..(8): n is a, c, g, or u
gguucannuauuguuuacac

SEQ ID NO: 6937 - RNA, 20 nt, Artificial Sequence
  Synthetic
gggaaagcccggcgaaccac

SEQ ID NO: 6938 - RNA, 20 nt, Artificial Sequence
  Synthetic
gcacgucgcauggagaccac

SEQ ID NO: 6939 - RNA, 20 nt, Artificial Sequence
  Synthetic
  misc_feature (11)..(11): n is a, c, g, or u
cugccguuccngccgaccac

SEQ ID NO: 6940 - RNA, 20 nt, Artificial Sequence
  Synthetic
uccggcagaugagaaggcac

SEQ ID NO: 6941 - RNA, 20 nt, Artificial Sequence
  Synthetic
caucagcaaacacuuggcac

SEQ ID NO: 6942 - RNA, 20 nt, Artificial Sequence
  Synthetic
gaggauuggggacccugcac

SEQ ID NO: 6943 - RNA, 20 nt, Artificial Sequence
  Synthetic
aagauuuggugggcguucac

SEQ ID NO: 6944 - RNA, 20 nt, Artificial Sequence
  Synthetic
aagacuguuuguuuaaagac

SEQ ID NO: 6945 - RNA, 20 nt, Artificial Sequence
  Synthetic
gcagaugagaaggcacagac

SEQ ID NO: 6946 - RNA, 20 nt, Artificial Sequence
  Synthetic
cauauaacugaaagccagac

SEQ ID NO: 6947 - RNA, 20 nt, Artificial Sequence
  Synthetic
gaaggcacagacggggagac

SEQ ID NO: 6948 - RNA, 20 nt, Artificial Sequence
  Synthetic
  misc_feature (6)..(6): n is a, c, g, or u
cucucngcaaugucaacgac

SEQ ID NO: 6949 - RNA, 20 nt, Artificial Sequence
  Synthetic
uauuuccgggagagaacgac

SEQ ID NO: 6950 - RNA, 20 nt, Artificial Sequence
  Synthetic
ugccuucucaucugccggac

SEQ ID NO: 6951 - RNA, 20 nt, Artificial Sequence
  Synthetic
gcuguucaaaaccuucggac

SEQ ID NO: 6952 - RNA, 20 nt, Artificial Sequence
  Synthetic
  misc_feature (6)..(6): n is a, c, g, or u
ggagcnaaacuuaucgggac

SEQ ID NO: 6953 - RNA, 20 nt, Artificial Sequence
  Synthetic
  misc_feature (6)..(6): n is a, c, g, or u
  misc_feature (12)..(12): n is a, c, g, or u
aguganuggagnuuggggac

SEQ ID NO: 6954 - RNA, 20 nt, Artificial Sequence
  Synthetic
cccaacaaagaccacuggac

SEQ ID NO: 6955 - RNA, 20 nt, Artificial Sequence
  Synthetic
gcuccucugccgauccauac

SEQ ID NO: 6956 - RNA, 20 nt, Artificial Sequence
  Synthetic
uauaaagaauuuggagcuac

SEQ ID NO: 6957 - RNA, 20 nt, Artificial Sequence
  Synthetic
agggacucaagauguuguac

SEQ ID NO: 6958 - RNA, 20 nt, Artificial Sequence
  Synthetic
guaucuagaagaucucuuac

SEQ ID NO: 6959 - RNA, 20 nt, Artificial Sequence
  Synthetic
cacaaggugggaaauuuuac

SEQ ID NO: 6960 - RNA, 20 nt, Artificial Sequence
  Synthetic
uuaaucauuacuuccaaacc

SEQ ID NO: 6961 - RNA, 20 nt, Artificial Sequence
  Synthetic
cagcauucagagcaaacacc

SEQ ID NO: 6962 - RNA, 20 nt, Artificial Sequence
  Synthetic
  misc_feature (2)..(3): n is a, c, g, or u
annuaaugacucuagcuacc

SEQ ID NO: 6963 - RNA, 20 nt, Artificial Sequence
  Synthetic
cagacagugggggaaagccc

SEQ ID NO: 6964 - RNA, 20 nt, Artificial Sequence
  Synthetic
gcguaaagagaggugcgccc

SEQ ID NO: 6965 - RNA, 20 nt, Artificial Sequence
  Synthetic
uaauucugucguucucuccc

SEQ ID NO: 6966 - RNA, 20 nt, Artificial Sequence
  Synthetic
cauccauauaacugaaagcc

SEQ ID NO: 6967 - RNA, 20 nt, Artificial Sequence
  Synthetic
ccuauggccaagccccagcc

SEQ ID NO: 6968 - RNA, 20 nt, Artificial Sequence
  Synthetic
ggagugggagcauucgggcc

SEQ ID NO: 6969 - RNA, 20 nt, Artificial Sequence
  Synthetic
  misc_feature (16)..(16): n is a, c, g, or u
ugggggagugaacccnggcc

SEQ ID NO: 6970 - RNA, 20 nt, Artificial Sequence
  Synthetic
ucugugccuucucaucugcc

SEQ ID NO: 6971 - RNA, 20 nt, Artificial Sequence
  Synthetic
gugaaaccacaauaauugcc

SEQ ID NO: 6972 - RNA, 20 nt, Artificial Sequence
  Synthetic
agagcaaacaccagaaaucc

SEQ ID NO: 6973 - RNA, 20 nt, Artificial Sequence
  Synthetic
agcagggguccuaggaaucc

SEQ ID NO: 6974 - RNA, 20 nt, Artificial Sequence
  Synthetic
gucccgucagcgcugaaucc

SEQ ID NO: 6975 - RNA, 20 nt, Artificial Sequence
  Synthetic
aaaacgccgcagacacaucc

SEQ ID NO: 6976 - RNA, 20 nt, Artificial Sequence
  Synthetic
auuuggaagauccagcaucc

SEQ ID NO: 6977 - RNA, 20 nt, Artificial Sequence
  Synthetic
caggagauucuaaggcaucc

SEQ ID NO: 6978 - RNA, 20 nt, Artificial Sequence
  Synthetic
cugugcugccaacuggaucc

SEQ ID NO: 6979 - RNA, 20 nt, Artificial Sequence
  Synthetic
gguauaaaaccuuauuaucc

SEQ ID NO: 6980 - RNA, 20 nt, Artificial Sequence
  Synthetic
aauuuucuagggggagcucc

SEQ ID NO: 6981 - RNA, 20 nt, Artificial Sequence
  Synthetic
  misc_feature (15)..(15): n is a, c, g, or u
gucccgauaaguuungcucc

SEQ ID NO: 6982 - RNA, 20 nt, Artificial Sequence
  Synthetic
  misc_feature (15)..(15): n is a, c, g, or u
gucuaacaacaguanucucc

SEQ ID NO: 6983 - RNA, 20 nt, Artificial Sequence
  Synthetic
gcaacauaccuugauagucc

SEQ ID NO: 6984 - RNA, 20 nt, Artificial Sequence
  Synthetic
  misc_feature (16)..(16): n is a, c, g, or u
aacgacagaauuaucngucc

SEQ ID NO: 6985 - RNA, 20 nt, Artificial Sequence
  Synthetic
  misc_feature (16)..(16): n is a, c, g, or u
uaccuuguuggcuucngucc

SEQ ID NO: 6986 - RNA, 20 nt, Artificial Sequence
  Synthetic
auugggguaggcugccuucc

SEQ ID NO: 6987 - RNA, 20 nt, Artificial Sequence
  Synthetic
cugcugguggcuccaguucc

SEQ ID NO: 6988 - RNA, 20 nt, Artificial Sequence
  Synthetic
ggaacaggguucacuguucc

SEQ ID NO: 6989 - RNA, 20 nt, Artificial Sequence
  Synthetic
uggaaaacuccaucuuuucc

SEQ ID NO: 6990 - RNA, 20 nt, Artificial Sequence
  Synthetic
aauccucugggauuuuuucc

SEQ ID NO: 6991 - RNA, 20 nt, Artificial Sequence
  Synthetic
uacuguucaagccuccaagc

SEQ ID NO: 6992 - RNA, 20 nt, Artificial Sequence
  Synthetic
augcuaaaaacauugccagc

SEQ ID NO: 6993 - RNA, 20 nt, Artificial Sequence
  Synthetic
accccgccuguaacacgagc

SEQ ID NO: 6994 - RNA, 20 nt, Artificial Sequence
  Synthetic
auugagaucuucugcgacgc

SEQ ID NO: 6995 - RNA, 20 nt, Artificial Sequence
  Synthetic
ggaagaugauaaaacgccgc

SEQ ID NO: 6996 - RNA, 20 nt, Artificial Sequence
  Synthetic
ugucuacgucccgucagcgc

SEQ ID NO: 6997 - RNA, 20 nt, Artificial Sequence
  Synthetic
ucguccgcaggauucagcgc

SEQ ID NO: 6998 - RNA, 20 nt, Artificial Sequence
  Synthetic
  misc_feature (11)..(11): n is a, c, g, or u
caaagguuccncgcaugcgc

SEQ ID NO: 6999 - RNA, 20 nt, Artificial Sequence
  Synthetic
guugcauggugcuggugcgc

SEQ ID NO: 7000 - RNA, 20 nt, Artificial Sequence
  Synthetic
cagacgaagaucucaaucgc

SEQ ID NO: 7001 - RNA, 20 nt, Artificial Sequence
  Synthetic
gaagaacucccucgccucgc

SEQ ID NO: 7002 - RNA, 20 nt, Artificial Sequence
  Synthetic
gaucucaaucgccgcgucgc

SEQ ID NO: 7003 - RNA, 20 nt, Artificial Sequence
  Synthetic
ccauuuguucagugguucgc

SEQ ID NO: 7004 - RNA, 20 nt, Artificial Sequence
  Synthetic
ccccugcucguguuacaggc

SEQ ID NO: 7005 - RNA, 20 nt, Artificial Sequence
  Synthetic
gauugguggaggcaggaggc

SEQ ID NO: 7006 - RNA, 20 nt, Artificial Sequence
  Synthetic
  misc_feature (2)..(2): n is a, c, g, or u
cnuuuccauggcugcuaggc

SEQ ID NO: 7007 - RNA, 20 nt, Artificial Sequence
  Synthetic
  misc_feature (12)..(12): n is a, c, g, or u
ccguggucggcnggaacggc

SEQ ID NO: 7008 - RNA, 20 nt, Artificial Sequence
  Synthetic
cgaagugcacacgguccggc

SEQ ID NO: 7009 - RNA, 20 nt, Artificial Sequence
  Synthetic
aagagucgugcagguucggc

SEQ ID NO: 7010 - RNA, 20 nt, Artificial Sequence
  Synthetic
cugaugcaacccccacuggc

SEQ ID NO: 7011 - RNA, 20 nt, Artificial Sequence
  Synthetic
  misc_feature (18)..(18): n is a, c, g, or u
ucuccgucugccguuccngc

SEQ ID NO: 7012 - RNA, 20 nt, Artificial Sequence
  Synthetic
cacucauccucaggccaugc

SEQ ID NO: 7013 - RNA, 20 nt, Artificial Sequence
  Synthetic
uaggcugccuuccugacugc

SEQ ID NO: 7014 - RNA, 20 nt, Artificial Sequence
  Synthetic
ccucugccgauccauacugc

SEQ ID NO: 7015 - RNA, 20 nt, Artificial Sequence
  Synthetic
  misc_feature (7)..(7): n is a, c, g, or u
aaguuungcuccagaccugc

SEQ ID NO: 7016 - RNA, 20 nt, Artificial Sequence
  Synthetic
ccaccaguacgggacccugc

SEQ ID NO: 7017 - RNA, 20 nt, Artificial Sequence
  Synthetic
ccgucagcgcugaauccugc

SEQ ID NO: 7018 - RNA, 20 nt, Artificial Sequence
  Synthetic
aaccuuuguggcuccucugc

SEQ ID NO: 7019 - RNA, 20 nt, Artificial Sequence
  Synthetic
cuaucgcuggaugugucugc

SEQ ID NO: 7020 - RNA, 20 nt, Artificial Sequence
  Synthetic
augcuuuccauguucggugc

SEQ ID NO: 7021 - RNA, 20 nt, Artificial Sequence
  Synthetic
  misc_feature (11)..(11): n is a, c, g, or u
ggcacagaccnggccguugc

SEQ ID NO: 7022 - RNA, 20 nt, Artificial Sequence
  Synthetic
ucaggcaagccauucuuugc

SEQ ID NO: 7023 - RNA, 20 nt, Artificial Sequence
  Synthetic
ggucugugccaaguguuugc

SEQ ID NO: 7024 - RNA, 20 nt, Artificial Sequence
  Synthetic
  misc_feature (11)..(11): n is a, c, g, or u
cauuaccacangaacacauc

SEQ ID NO: 7025 - RNA, 20 nt, Artificial Sequence
  Synthetic
gggcuuggccauaggccauc

SEQ ID NO: 7026 - RNA, 20 nt, Artificial Sequence
  Synthetic
uccaccacgagucuagacuc

SEQ ID NO: 7027 - RNA, 20 nt, Artificial Sequence
  Synthetic
aaaauacaggccucuuacuc

SEQ ID NO: 7028 - RNA, 20 nt, Artificial Sequence
  Synthetic
gcuccaccccaaaaggccuc

SEQ ID NO: 7029 - RNA, 20 nt, Artificial Sequence
  Synthetic
ucauuccaccaccaauccuc

SEQ ID NO: 7030 - RNA, 20 nt, Artificial Sequence
  Synthetic
uggauuucugguguuugcuc

SEQ ID NO: 7031 - RNA, 20 nt, Artificial Sequence
  Synthetic
  misc_feature (16)..(16): n is a, c, g, or u
uccugcggacgacccnucuc

SEQ ID NO: 7032 - RNA, 20 nt, Artificial Sequence
  Synthetic
cuuacugaaggaaagaaguc

SEQ ID NO: 7033 - RNA, 20 nt, Artificial Sequence
  Synthetic
agaugagugaggcaguaguc

SEQ ID NO: 7034 - RNA, 20 nt, Artificial Sequence
  Synthetic
cuuuacgcggucuccccguc

SEQ ID NO: 7035 - RNA, 20 nt, Artificial Sequence
  Synthetic
uccuuugucuacgucccguc

SEQ ID NO: 7036 - RNA, 20 nt, Artificial Sequence
  Synthetic
auacaagugcaauuuccguc

SEQ ID NO: 7037 - RNA, 20 nt, Artificial Sequence
  Synthetic
cggcgauugagaucuucguc

SEQ ID NO: 7038 - RNA, 20 nt, Artificial Sequence
  Synthetic
  misc_feature (16)..(16): n is a, c, g, or u
ugcccggcaacggccngguc

SEQ ID NO: 7039 - RNA, 20 nt, Artificial Sequence
  Synthetic
gcuguaggcauaaauugguc

SEQ ID NO: 7040 - RNA, 20 nt, Artificial Sequence
  Synthetic
uggcuaucgcuggauguguc

SEQ ID NO: 7041 - RNA, 20 nt, Artificial Sequence
  Synthetic
  misc_feature (18)..(18): n is a, c, g, or u
acagucuuugauuuucanuc

SEQ ID NO: 7042 - RNA, 20 nt, Artificial Sequence
  Synthetic
  misc_feature (2)..(2): n is a, c, g, or u
angggucguccgcaggauuc

SEQ ID NO: 7043 - RNA, 20 nt, Artificial Sequence
  Synthetic
uguugcuguucaaaaccuuc

SEQ ID NO: 7044 - RNA, 20 nt, Artificial Sequence
  Synthetic
uuacucucguuuuugccuuc

SEQ ID NO: 7045 - RNA, 20 nt, Artificial Sequence
  Synthetic
agcuggagauugagaucuuc

SEQ ID NO: 7046 - RNA, 20 nt, Artificial Sequence
  Synthetic
augugaugcuuuccauguuc

SEQ ID NO: 7047 - RNA, 20 nt, Artificial Sequence
  Synthetic
cggaacagugaacccuguuc

SEQ ID NO: 7048 - RNA, 20 nt, Artificial Sequence
  Synthetic
uuuacuagugccauuuguuc

SEQ ID NO: 7049 - RNA, 20 nt, Artificial Sequence
  Synthetic
  misc_feature (8)..(8): n is a, c, g, or u
auggaaangauguauauuuc

SEQ ID NO: 7050 - RNA, 20 nt, Artificial Sequence
  Synthetic
gccaacuuacaaggccuuuc

SEQ ID NO: 7051 - RNA, 20 nt, Artificial Sequence
  Synthetic
ucccaucaucaugggcuuuc

SEQ ID NO: 7052 - RNA, 20 nt, Artificial Sequence
  Synthetic
ccacucccauaggaauuuuc

SEQ ID NO: 7053 - RNA, 20 nt, Artificial Sequence
  Synthetic
gcgggcaucuuauauaaaag

SEQ ID NO: 7054 - RNA, 20 nt, Artificial Sequence
  Synthetic
cuuguaaguuggcgagaaag

SEQ ID NO: 7055 - RNA, 20 nt, Artificial Sequence
  Synthetic
uugguaacagagguauaaag

SEQ ID NO: 7056 - RNA, 20 nt, Artificial Sequence
  Synthetic
aacaguaggacaugaacaag

SEQ ID NO: 7057 - RNA, 20 nt, Artificial Sequence
  Synthetic
  misc_feature (9)..(9): n is a, c, g, or u
  misc_feature (13)..(13): n is a, c, g, or u
ggggacganaganccccaag

SEQ ID NO: 7058 - RNA, 20 nt, Artificial Sequence
  Synthetic
ucuugucucacuuuuggaag

SEQ ID NO: 7059 - RNA, 20 nt, Artificial Sequence
  Synthetic
ugcgacgugcagaggugaag

SEQ ID NO: 7060 - RNA, 20 nt, Artificial Sequence
  Synthetic
gacuucuuuccuucaguaag

SEQ ID NO: 7061 - RNA, 20 nt, Artificial Sequence
  Synthetic
uggcuccaguuccggaacag

SEQ ID NO: 7062 - RNA, 20 nt, Artificial Sequence
  Synthetic
uauaacugaaagccagacag

SEQ ID NO: 7063 - RNA, 20 nt, Artificial Sequence
  Synthetic
uauggccaagccccagccag

SEQ ID NO: 7064 - RNA, 20 nt, Artificial Sequence
  Synthetic
aacgccgcagacacauccag

SEQ ID NO: 7065 - RNA, 20 nt, Artificial Sequence
  Synthetic
uuggaagauccagcauccag

SEQ ID NO: 7066 - RNA, 20 nt, Artificial Sequence
  Synthetic
auucuucccccauucgagag

SEQ ID NO: 7067 - RNA, 20 nt, Artificial Sequence
  Synthetic
ugccaacuggauccugcgag

SEQ ID NO: 7068 - RNA, 20 nt, Artificial Sequence
  Synthetic
ugauucuucccccauucgag

SEQ ID NO: 7069 - RNA, 20 nt, Artificial Sequence
  Synthetic
uggucuauaagcuggaggag

SEQ ID NO: 7070 - RNA, 20 nt, Artificial Sequence
  Synthetic
  misc_feature (1)..(1): n is a, c, g, or u
ngaagccaacaagguaggag

SEQ ID NO: 7071 - RNA, 20 nt, Artificial Sequence
  Synthetic
  misc_feature (2)..(2): n is a, c, g, or u
angauguauauuuccgggag

SEQ ID NO: 7072 - RNA, 20 nt, Artificial Sequence
  Synthetic
aaggccuccgugugggggag

SEQ ID NO: 7073 - RNA, 20 nt, Artificial Sequence
  Synthetic
ucggaaaauuccuaugggag

SEQ ID NO: 7074 - RNA, 20 nt, Artificial Sequence
  Synthetic
agugucucucaaagguggag

SEQ ID NO: 7075 - RNA, 20 nt, Artificial Sequence
  Synthetic
guauuuggugucuuuuggag

SEQ ID NO: 7076 - RNA, 20 nt, Artificial Sequence
  Synthetic
guuuugaacagcaacaugag

SEQ ID NO: 7077 - RNA, 20 nt, Artificial Sequence
  Synthetic
gaggacaagagguuggugag

SEQ ID NO: 7078 - RNA, 20 nt, Artificial Sequence
  Synthetic
gcucccccuagaaaauugag

SEQ ID NO: 7079 - RNA, 20 nt, Artificial Sequence
  Synthetic
ccaaucacuccaccuuugag

SEQ ID NO: 7080 - RNA, 20 nt, Artificial Sequence
  Synthetic
  misc_feature (4)..(4): n is a, c, g, or u
  misc_feature (13)..(13): n is a, c, g, or u
uacnaaauauuunccccuag

SEQ ID NO: 7081 - RNA, 20 nt, Artificial Sequence
  Synthetic
gacuucucucaauuuucuag

SEQ ID NO: 7082 - RNA, 20 nt, Artificial Sequence
  Synthetic
  misc_feature (7)..(7): n is a, c, g, or u
  misc_feature (16)..(16): n is a, c, g, or u
uaggggnaaauauuunguag

SEQ ID NO: 7083 - RNA, 20 nt, Artificial Sequence
  Synthetic
  misc_feature (17)..(17): n is a, c, g, or u
acauaacccaugaaaunuag

SEQ ID NO: 7084 - RNA, 20 nt, Artificial Sequence
  Synthetic
cgcaggauucagcgcugacg

SEQ ID NO: 7085 - RNA, 20 nt, Artificial Sequence
  Synthetic
aauccucgagaagauugacg

SEQ ID NO: 7086 - RNA, 20 nt, Artificial Sequence
  Synthetic
gaucaucaaccaccaguacg

SEQ ID NO: 7087 - RNA, 20 nt, Artificial Sequence
  Synthetic
acgucgcauggagaccaccg

SEQ ID NO: 7088 - RNA, 20 nt, Artificial Sequence
  Synthetic
ccuucucaucugccggaccg

SEQ ID NO: 7089 - RNA, 20 nt, Artificial Sequence
  Synthetic
  misc_feature (1)..(1): n is a, c, g, or u
  misc_feature (5)..(5): n is a, c, g, or u
naganccccaagcgaccccg

SEQ ID NO: 7090 - RNA, 20 nt, Artificial Sequence
  Synthetic
uuuucuagggggagcucccg

SEQ ID NO: 7091 - RNA, 20 nt, Artificial Sequence
  Synthetic
uccaccccaaaaggccuccg

SEQ ID NO: 7092 - RNA, 20 nt, Artificial Sequence
  Synthetic
agaucuucgucugcgaggcg

SEQ ID NO: 7093 - RNA, 20 nt, Artificial Sequence
  Synthetic
aaaggccuuguaaguuggcg

SEQ ID NO: 7094 - RNA, 20 nt, Artificial Sequence
  Synthetic
gcugccaacuggauccugcg

SEQ ID NO: 7095 - RNA, 20 nt, Artificial Sequence
  Synthetic
accgccucagcucuguaucg

SEQ ID NO: 7096 - RNA, 20 nt, Artificial Sequence
  Synthetic
  misc_feature (10)..(10): n is a, c, g, or u
gucuggagcnaaacuuaucg

SEQ ID NO: 7097 - RNA, 20 nt, Artificial Sequence
  Synthetic
ugcaggguccccaauccucg

SEQ ID NO: 7098 - RNA, 20 nt, Artificial Sequence
  Synthetic
cuggauccaacugguggucg

SEQ ID NO: 7099 - RNA, 20 nt, Artificial Sequence
  Synthetic
uauuccuuggacucacaagg

SEQ ID NO: 7100 - RNA, 20 nt, Artificial Sequence
  Synthetic
ggaacggcagacggagaagg

SEQ ID NO: 7101 - RNA, 20 nt, Artificial Sequence
  Synthetic
uuuacauacccuauggaagg

SEQ ID NO: 7102 - RNA, 20 nt, Artificial Sequence
  Synthetic
ucuuguucccaagaauaagg

SEQ ID NO: 7103 - RNA, 20 nt, Artificial Sequence
  Synthetic
accccugcucguguuacagg

SEQ ID NO: 7104 - RNA, 20 nt, Artificial Sequence
  Synthetic
cacuaguaaacugagccagg

SEQ ID NO: 7105 - RNA, 20 nt, Artificial Sequence
  Synthetic
  misc_feature (3)..(3): n is a, c, g, or u
ugnggugaacaaugcucagg

SEQ ID NO: 7106 - RNA, 20 nt, Artificial Sequence
  Synthetic
aagagaugauuaggcagagg

SEQ ID NO: 7107 - RNA, 20 nt, Artificial Sequence
  Synthetic
cuccaugcgacgugcagagg

SEQ ID NO: 7108 - RNA, 20 nt, Artificial Sequence
  Synthetic
ggagaccgcguaaagagagg

SEQ ID NO: 7109 - RNA, 20 nt, Artificial Sequence
  Synthetic
  misc_feature (12)..(12): n is a, c, g, or u
cugggaggagungggggagg

SEQ ID NO: 7110 - RNA, 20 nt, Artificial Sequence
  Synthetic
gguggucuauaagcuggagg

SEQ ID NO: 7111 - RNA, 20 nt, Artificial Sequence
  Synthetic
gagggaguucuucuucuagg

SEQ ID NO: 7112 - RNA, 20 nt, Artificial Sequence
  Synthetic
  misc_feature (3)..(3): n is a, c, g, or u
acngaagccaacaagguagg

SEQ ID NO: 7113 - RNA, 20 nt, Artificial Sequence
  Synthetic
  misc_feature (9)..(9): n is a, c, g, or u
gccguuccngccgaccacgg

SEQ ID NO: 7114 - RNA, 20 nt, Artificial Sequence
  Synthetic
  misc_feature (6)..(6): n is a, c, g, or u
ucggcnggaacggcagacgg

SEQ ID NO: 7115 - RNA, 20 nt, Artificial Sequence
  Synthetic
gacagugggggaaagcccgg

SEQ ID NO: 7116 - RNA, 20 nt, Artificial Sequence
  Synthetic
uaucuuaucaacacuuccgg

SEQ ID NO: 7117 - RNA, 20 nt, Artificial Sequence
  Synthetic
ugagaucuucugcgacgcgg

SEQ ID NO: 7118 - RNA, 20 nt, Artificial Sequence
  Synthetic
augagaaggcacagacgggg

SEQ ID NO: 7119 - RNA, 20 nt, Artificial Sequence
  Synthetic
aaaaggccuccguguggggg

SEQ ID NO: 7120 - RNA, 20 nt, Artificial Sequence
  Synthetic
caagccauucuuugcugggg

SEQ ID NO: 7121 - RNA, 20 nt, Artificial Sequence
  Synthetic
gacggucccucucgaauggg

SEQ ID NO: 7122 - RNA, 20 nt, Artificial Sequence
  Synthetic
uuucggaaaauuccuauggg

SEQ ID NO: 7123 - RNA, 20 nt, Artificial Sequence
  Synthetic
aaugacucuagcuaccuggg

SEQ ID NO: 7124 - RNA, 20 nt, Artificial Sequence
  Synthetic
acugaaagccagacaguggg

SEQ ID NO: 7125 - RNA, 20 nt, Artificial Sequence
  Synthetic
  misc_feature (12)..(12): n is a, c, g, or u
  misc_feature (18)..(18): n is a, c, g, or u
cugagugcagunuggugngg

SEQ ID NO: 7126 - RNA, 20 nt, Artificial Sequence
  Synthetic
caccucugcacgucgcaugg

SEQ ID NO: 7127 - RNA, 20 nt, Artificial Sequence
  Synthetic
ccaacaaaacaaaaagaugg

SEQ ID NO: 7128 - RNA, 20 nt, Artificial Sequence
  Synthetic
uacuaacauugggaagcugg

SEQ ID NO: 7129 - RNA, 20 nt, Artificial Sequence
  Synthetic
aaaaaguugcauggugcugg

SEQ ID NO: 7130 - RNA, 20 nt, Artificial Sequence
  Synthetic
ggcaagccauucuuugcugg

SEQ ID NO: 7131 - RNA, 20 nt, Artificial Sequence
  Synthetic
ugagugucucucaaaggugg

SEQ ID NO: 7132 - RNA, 20 nt, Artificial Sequence
  Synthetic
ucaaucuucucgaggauugg

SEQ ID NO: 7133 - RNA, 20 nt, Artificial Sequence
  Synthetic
  misc_feature (10)..(10): n is a, c, g, or u
  misc_feature (16)..(16): n is a, c, g, or u
ggugaguganuggagnuugg

SEQ ID NO: 7134 - RNA, 20 nt, Artificial Sequence
  Synthetic
agaccuugggcaagauuugg

SEQ ID NO: 7135 - RNA, 20 nt, Artificial Sequence
  Synthetic
cccacacggaggccuuuugg

SEQ ID NO: 7136 - RNA, 20 nt, Artificial Sequence
  Synthetic
gaguauuuggugucuuuugg

SEQ ID NO: 7137 - RNA, 20 nt, Artificial Sequence
  Synthetic
  misc_feature (19)..(19): n is a, c, g, or u
uuaaagacugggaggagung

SEQ ID NO: 7138 - RNA, 20 nt, Artificial Sequence
  Synthetic
caggacauuauuaacaaaug

SEQ ID NO: 7139 - RNA, 20 nt, Artificial Sequence
  Synthetic
caaaagugagacaagaaaug

SEQ ID NO: 7140 - RNA, 20 nt, Artificial Sequence
  Synthetic
uggacggucccucucgaaug

SEQ ID NO: 7141 - RNA, 20 nt, Artificial Sequence
  Synthetic
agguuuugaacagcaacaug

SEQ ID NO: 7142 - RNA, 20 nt, Artificial Sequence
  Synthetic
cguucacgguggucuccaug

SEQ ID NO: 7143 - RNA, 20 nt, Artificial Sequence
  Synthetic
ugcacacgguccggcagaug

SEQ ID NO: 7144 - RNA, 20 nt, Artificial Sequence
  Synthetic
  misc_feature (2)..(2): n is a, c, g, or u
  misc_feature (11)..(11): n is a, c, g, or u
gnaaauauuunguagagaug

SEQ ID NO: 7145 - RNA, 20 nt, Artificial Sequence
  Synthetic
ucgagaagauugacgagaug

SEQ ID NO: 7146 - RNA, 20 nt, Artificial Sequence
  Synthetic
cacugcauggccugaggaug

SEQ ID NO: 7147 - RNA, 20 nt, Artificial Sequence
  Synthetic
aagcccaugaugaugggaug

SEQ ID NO: 7148 - RNA, 20 nt, Artificial Sequence
  Synthetic
uccgaaagcccaugaugaug

SEQ ID NO: 7149 - RNA, 20 nt, Artificial Sequence
  Synthetic
ggguccuaggaauccugaug

SEQ ID NO: 7150 - RNA, 20 nt, Artificial Sequence
  Synthetic
ugcuuuaaugccucuguaug

SEQ ID NO: 7151 - RNA, 20 nt, Artificial Sequence
  Synthetic
  misc_feature (4)..(4): n is a, c, g, or u
  misc_feature (10)..(10): n is a, c, g, or u
uganuggagnuuggggacug

SEQ ID NO: 7152 - RNA, 20 nt, Artificial Sequence
  Synthetic
  misc_feature (1)..(1): n is a, c, g, or u
nuaaugacucuagcuaccug

SEQ ID NO: 7153 - RNA, 20 nt, Artificial Sequence
  Synthetic
uuuagcaugccuugagccug

SEQ ID NO: 7154 - RNA, 20 nt, Artificial Sequence
  Synthetic
agcaaagaauggcuugccug

SEQ ID NO: 7155 - RNA, 20 nt, Artificial Sequence
  Synthetic
aggcaagccauucuuugcug

SEQ ID NO: 7156 - RNA, 20 nt, Artificial Sequence
  Synthetic
aauacaggccucuuacucug

SEQ ID NO: 7157 - RNA, 20 nt, Artificial Sequence
  Synthetic
auuccaccaccaauccucug

SEQ ID NO: 7158 - RNA, 20 nt, Artificial Sequence
  Synthetic
cuggagauugagaucuucug

SEQ ID NO: 7159 - RNA, 20 nt, Artificial Sequence
  Synthetic
cgguuucucuuccaaaagug

SEQ ID NO: 7160 - RNA, 20 nt, Artificial Sequence
  Synthetic
uaacugaaagccagacagug

SEQ ID NO: 7161 - RNA, 20 nt, Artificial Sequence
  Synthetic
uggccaagccccagccagug

SEQ ID NO: 7162 - RNA, 20 nt, Artificial Sequence
  Synthetic
gucuauaagcuggaggagug

SEQ ID NO: 7163 - RNA, 20 nt, Artificial Sequence
  Synthetic
caccccaaaaggccuccgug

SEQ ID NO: 7164 - RNA, 20 nt, Artificial Sequence
  Synthetic
uuccuuggacucacaaggug

SEQ ID NO: 7165 - RNA, 20 nt, Artificial Sequence
  Synthetic
ugacucuagcuaccugggug

SEQ ID NO: 7166 - RNA, 20 nt, Artificial Sequence
  Synthetic
uggaggacaagagguuggug

SEQ ID NO: 7167 - RNA, 20 nt, Artificial Sequence
  Synthetic
accuugggcaagauuuggug

SEQ ID NO: 7168 - RNA, 20 nt, Artificial Sequence
  Synthetic
ccccaaaaggccuccgugug

SEQ ID NO: 7169 - RNA, 20 nt, Artificial Sequence
  Synthetic
  misc_feature (14)..(14): n is a, c, g, or u
gaaaguaugucaangaauug

SEQ ID NO: 7170 - RNA, 20 nt, Artificial Sequence
  Synthetic
uccaaggaauacuaacauug

SEQ ID NO: 7171 - RNA, 20 nt, Artificial Sequence
  Synthetic
aacaccagaaauccagauug

SEQ ID NO: 7172 - RNA, 20 nt, Artificial Sequence
  Synthetic
cauugggaagcuggagauug

SEQ ID NO: 7173 - RNA, 20 nt, Artificial Sequence
  Synthetic
cuucugcgacgcggcgauug

SEQ ID NO: 7174 - RNA, 20 nt, Artificial Sequence
  Synthetic
auauggaugaugugguauug

SEQ ID NO: 7175 - RNA, 20 nt, Artificial Sequence
  Synthetic
agccuccaagcugugccuug

SEQ ID NO: 7176 - RNA, 20 nt, Artificial Sequence
  Synthetic
  misc_feature (2)..(2): n is a, c, g, or u
unugggucaccuuauucuug

SEQ ID NO: 7177 - RNA, 20 nt, Artificial Sequence
  Synthetic
  misc_feature (2)..(2): n is a, c, g, or u
cnguccaguggucuuuguug

SEQ ID NO: 7178 - RNA, 20 nt, Artificial Sequence
  Synthetic
cccaucuuuuuguuuuguug

SEQ ID NO: 7179 - RNA, 20 nt, Artificial Sequence
  Synthetic
  misc_feature (7)..(7): n is a, c, g, or u
  misc_feature (20)..(20): n is a, c, g, or u
accacangaacacaucagan

SEQ ID NO: 7180 - RNA, 20 nt, Artificial Sequence
  Synthetic
  misc_feature (20)..(20): n is a, c, g, or u
cagacggagaaggggacgan

SEQ ID NO: 7181 - RNA, 20 nt, Artificial Sequence
  Synthetic
  misc_feature (20)..(20): n is a, c, g, or u
ggugcgccccguggucggcn

SEQ ID NO: 7182 - RNA, 20 nt, Artificial Sequence
  Synthetic
  misc_feature (7)..(7): n is a, c, g, or u
  misc_feature (20)..(20): n is a, c, g, or u
uuuucanucugauguguucn

SEQ ID NO: 7183 - RNA, 20 nt, Artificial Sequence
  Synthetic
  misc_feature (20)..(20): n is a, c, g, or u
uaggccaucagcgcaugcgn

SEQ ID NO: 7184 - RNA, 20 nt, Artificial Sequence
  Synthetic
  misc_feature (14)..(14): n is a, c, g, or u
  misc_feature (20)..(20): n is a, c, g, or u
gccugagugcagunuggugn

SEQ ID NO: 7185 - RNA, 20 nt, Artificial Sequence
  Synthetic
  misc_feature (19)..(20): n is a, c, g, or u
cuuucuguguaaacaauann

SEQ ID NO: 7186 - RNA, 20 nt, Artificial Sequence
  Synthetic
  misc_feature (20)..(20): n is a, c, g, or u
uuuaaagacugggaggagun

SEQ ID NO: 7187 - RNA, 20 nt, Artificial Sequence
  Synthetic
  misc_feature (3)..(3): n is a, c, g, or u
  misc_feature (20)..(20): n is a, c, g, or u
acncguagcgccucauuuun

SEQ ID NO: 7188 - RNA, 20 nt, Artificial Sequence
  Synthetic
cuuccauaggguauguaaau

SEQ ID NO: 7189 - RNA, 20 nt, Artificial Sequence
  Synthetic
uuggacggucccucucgaau

SEQ ID NO: 7190 - RNA, 20 nt, Artificial Sequence
  Synthetic
  misc_feature (16)..(16): n is a, c, g, or u
uggaaaguaugucaangaau

SEQ ID NO: 7191 - RNA, 20 nt, Artificial Sequence
  Synthetic
ggggacccugcaccgaacau

SEQ ID NO: 7192 - RNA, 20 nt, Artificial Sequence
  Synthetic
aguccaaggaauacuaacau

SEQ ID NO: 7193 - RNA, 20 nt, Artificial Sequence
  Synthetic
  misc_feature (14)..(14): n is a, c, g, or u
uuaaagcaggauanccacau

SEQ ID NO: 7194 - RNA, 20 nt, Artificial Sequence
  Synthetic
  misc_feature (8)..(8): n is a, c, g, or u
  misc_feature (11)..(11): n is a, c, g, or u
uggcuuunggncauggacau

SEQ ID NO: 7195 - RNA, 20 nt, Artificial Sequence
  Synthetic
cagcacagccuagcagccau

SEQ ID NO: 7196 - RNA, 20 nt, Artificial Sequence
  Synthetic
auaagaugcccgccuuccau

SEQ ID NO: 7197 - RNA, 20 nt, Artificial Sequence
  Synthetic
cagaggugaaaaaguugcau

SEQ ID NO: 7198 - RNA, 20 nt, Artificial Sequence
  Synthetic
  misc_feature (14)..(14): n is a, c, g, or u
  misc_feature (17)..(17): n is a, c, g, or u
cuuggguggcuuunggncau

SEQ ID NO: 7199 - RNA, 20 nt, Artificial Sequence
  Synthetic
gggaacaagagcuacaucau

SEQ ID NO: 7200 - RNA, 20 nt, Artificial Sequence
  Synthetic
ucccaacaaaacaaaaagau

SEQ ID NO: 7201 - RNA, 20 nt, Artificial Sequence
  Synthetic
uccccaauccucgagaagau

SEQ ID NO: 7202 - RNA, 20 nt, Artificial Sequence
  Synthetic
uccggaaguguugauaagau

SEQ ID NO: 7203 - RNA, 20 nt, Artificial Sequence
  Synthetic
caaacaccagaaauccagau

SEQ ID NO: 7204 - RNA, 20 nt, Artificial Sequence
  Synthetic
aagugaaagccugcuuagau

SEQ ID NO: 7205 - RNA, 20 nt, Artificial Sequence
  Synthetic
ucgucaaucuucucgaggau

SEQ ID NO: 7206 - RNA, 20 nt, Artificial Sequence
  Synthetic
ccaguggucuuuguugggau

SEQ ID NO: 7207 - RNA, 20 nt, Artificial Sequence
  Synthetic
ucucucaaagguggagugau

SEQ ID NO: 7208 - RNA, 20 nt, Artificial Sequence
  Synthetic
ugucuggcuuucaguuauau

SEQ ID NO: 7209 - RNA, 20 nt, Artificial Sequence
  Synthetic
acacuauuuacauacccuau

SEQ ID NO: 7210 - RNA, 20 nt, Artificial Sequence
  Synthetic
  misc_feature (12)..(12): n is a, c, g, or u
cucccuguuaancggccuau

SEQ ID NO: 7211 - RNA, 20 nt, Artificial Sequence
  Synthetic
ggcuaggaguuccgcaguau

SEQ ID NO: 7212 - RNA, 20 nt, Artificial Sequence
  Synthetic
cuuuaggcccauauuaguau

SEQ ID NO: 7213 - RNA, 20 nt, Artificial Sequence
  Synthetic
gagucuagacucugcgguau

SEQ ID NO: 7214 - RNA, 20 nt, Artificial Sequence
  Synthetic
uuauauggaugaugugguau

SEQ ID NO: 7215 - RNA, 20 nt, Artificial Sequence
  Synthetic
auaccgccucagcucuguau

SEQ ID NO: 7216 - RNA, 20 nt, Artificial Sequence
  Synthetic
ccuaaaguucaggcaauuau

SEQ ID NO: 7217 - RNA, 20 nt, Artificial Sequence
  Synthetic
  misc_feature (12)..(12): n is a, c, g, or u
aggucuggagcnaaacuuau

SEQ ID NO: 7218 - RNA, 20 nt, Artificial Sequence
  Synthetic
uucgcacuccuccagcuuau

SEQ ID NO: 7219 - RNA, 20 nt, Artificial Sequence
  Synthetic
gcuaggcugugcugccaacu

SEQ ID NO: 7220 - RNA, 20 nt, Artificial Sequence
  Synthetic
ucugaaugcuggauccaacu

SEQ ID NO: 7221 - RNA, 20 nt, Artificial Sequence
  Synthetic
accugucuuuaauccuaacu

SEQ ID NO: 7222 - RNA, 20 nt, Artificial Sequence
  Synthetic
caaucccaacaaagaccacu

SEQ ID NO: 7223 - RNA, 20 nt, Artificial Sequence
  Synthetic
aauaccgcagagucuagacu

SEQ ID NO: 7224 - RNA, 20 nt, Artificial Sequence
  Synthetic
guucggcagggucccguacu

SEQ ID NO: 7225 - RNA, 20 nt, Artificial Sequence
  Synthetic
uucuccuggcucaguuuacu

SEQ ID NO: 7226 - RNA, 20 nt, Artificial Sequence
  Synthetic
ccccguaaaauuucccaccu

SEQ ID NO: 7227 - RNA, 20 nt, Artificial Sequence
  Synthetic
aguccucuuauguaagaccu

SEQ ID NO: 7228 - RNA, 20 nt, Artificial Sequence
  Synthetic
gacaaacgggcaacauaccu

SEQ ID NO: 7229 - RNA, 20 nt, Artificial Sequence
  Synthetic
gacacacgggagcucccccu

SEQ ID NO: 7230 - RNA, 20 nt, Artificial Sequence
  Synthetic
gacgaagaggcagguccccu

SEQ ID NO: 7231 - RNA, 20 nt, Artificial Sequence
  Synthetic
uaacugacuacuaggucccu

SEQ ID NO: 7232 - RNA, 20 nt, Artificial Sequence
  Synthetic
caagccuccaagcugugccu

SEQ ID NO: 7233 - RNA, 20 nt, Artificial Sequence
  Synthetic
uacuggugguugaugauccu

SEQ ID NO: 7234 - RNA, 20 nt, Artificial Sequence
  Synthetic
acauuuguuaauaauguccu

SEQ ID NO: 7235 - RNA, 20 nt, Artificial Sequence
  Synthetic
aauuuguccuggcuaucgcu

SEQ ID NO: 7236 - RNA, 20 nt, Artificial Sequence
  Synthetic
  misc_feature (7)..(7): n is a, c, g, or u
cgacccnucucggggucgcu

SEQ ID NO: 7237 - RNA, 20 nt, Artificial Sequence
  Synthetic
caaggcacagcuuggaggcu

SEQ ID NO: 7238 - RNA, 20 nt, Artificial Sequence
  Synthetic
ugaugcaacccccacuggcu

SEQ ID NO: 7239 - RNA, 20 nt, Artificial Sequence
  Synthetic
ugguguuugcucugaaugcu

SEQ ID NO: 7240 - RNA, 20 nt, Artificial Sequence
  Synthetic
cuacuaggucccuggaugcu

SEQ ID NO: 7241 - RNA, 20 nt, Artificial Sequence
  Synthetic
ggauuccuaggaccccugcu

SEQ ID NO: 7242 - RNA, 20 nt, Artificial Sequence
  Synthetic
uaaacuuagucaugccugcu

SEQ ID NO: 7243 - RNA, 20 nt, Artificial Sequence
  Synthetic
gaggccuguauuuuccugcu

SEQ ID NO: 7244 - RNA, 20 nt, Artificial Sequence
  Synthetic
ugaaaaaguugcauggugcu

SEQ ID NO: 7245 - RNA, 20 nt, Artificial Sequence
  Synthetic
caggcaagccauucuuugcu

SEQ ID NO: 7246 - RNA, 20 nt, Artificial Sequence
  Synthetic
ugggauuguggucccaaucu

SEQ ID NO: 7247 - RNA, 20 nt, Artificial Sequence
  Synthetic
acagagcugaggcgguaucu

SEQ ID NO: 7248 - RNA, 20 nt, Artificial Sequence
  Synthetic
aaugauuaacuacauuaucu

SEQ ID NO: 7249 - RNA, 20 nt, Artificial Sequence
  Synthetic
cuuucuuggacggucccucu

SEQ ID NO: 7250 - RNA, 20 nt, Artificial Sequence
  Synthetic
aagguuuuauaccuuucucu

SEQ ID NO: 7251 - RNA, 20 nt, Artificial Sequence
  Synthetic
cucacaauaccgcagagucu

SEQ ID NO: 7252 - RNA, 20 nt, Artificial Sequence
  Synthetic
gagaaguccaccacgagucu

SEQ ID NO: 7253 - RNA, 20 nt, Artificial Sequence
  Synthetic
  misc_feature (17)..(17): n is a, c, g, or u
auccugcggacgacccnucu

SEQ ID NO: 7254 - RNA, 20 nt, Artificial Sequence
  Synthetic
  misc_feature (4)..(4): n is a, c, g, or u
uuunugggucaccuuauucu

SEQ ID NO: 7255 - RNA, 20 nt, Artificial Sequence
  Synthetic
ccuucaguaagagaucuucu

SEQ ID NO: 7256 - RNA, 20 nt, Artificial Sequence
  Synthetic
ggcgagggaguucuucuucu

SEQ ID NO: 7257 - RNA, 20 nt, Artificial Sequence
  Synthetic
aucuucuuguugguucuucu

SEQ ID NO: 7258 - RNA, 20 nt, Artificial Sequence
  Synthetic
uggucccaaucuggauuucu

SEQ ID NO: 7259 - RNA, 20 nt, Artificial Sequence
  Synthetic
uggacuucucucaauuuucu

SEQ ID NO: 7260 - RNA, 20 nt, Artificial Sequence
  Synthetic
uggguuauguaauuggaagu

SEQ ID NO: 7261 - RNA, 20 nt, Artificial Sequence
  Synthetic
auaacugaaagccagacagu

SEQ ID NO: 7262 - RNA, 20 nt, Artificial Sequence
  Synthetic
auggccaagccccagccagu

SEQ ID NO: 7263 - RNA, 20 nt, Artificial Sequence
  Synthetic
ucauccucaggccaugcagu

SEQ ID NO: 7264 - RNA, 20 nt, Artificial Sequence
  Synthetic
gagguuccuugagcaagagu

SEQ ID NO: 7265 - RNA, 20 nt, Artificial Sequence
  Synthetic
guuuaaagacugggaggagu

SEQ ID NO: 7266 - RNA, 20 nt, Artificial Sequence
  Synthetic
ggauuaaagacagguauagu

SEQ ID NO: 7267 - RNA, 20 nt, Artificial Sequence
  Synthetic
auucagcgcugacgggacgu

SEQ ID NO: 7268 - RNA, 20 nt, Artificial Sequence
  Synthetic
  misc_feature (8)..(8): n is a, c, g, or u
  misc_feature (17)..(17): n is a, c, g, or u
auaaaagngaaacuacncgu

SEQ ID NO: 7269 - RNA, 20 nt, Artificial Sequence
  Synthetic
accgcagagucuagacucgu

SEQ ID NO: 7270 - RNA, 20 nt, Artificial Sequence
  Synthetic
uaugccucaaggucggucgu

SEQ ID NO: 7271 - RNA, 20 nt, Artificial Sequence
  Synthetic
gcagagucuagacucguggu

SEQ ID NO: 7272 - RNA, 20 nt, Artificial Sequence
  Synthetic
ugcuggauccaacugguggu

SEQ ID NO: 7273 - RNA, 20 nt, Artificial Sequence
  Synthetic
cagggucccguacugguggu

SEQ ID NO: 7274 - RNA, 20 nt, Artificial Sequence
  Synthetic
aaucccagaggauugguggu

SEQ ID NO: 7275 - RNA, 20 nt, Artificial Sequence
  Synthetic
aaaaaucccagaggauuggu

SEQ ID NO: 7276 - RNA, 20 nt, Artificial Sequence
  Synthetic
gggauccugcagagcuuggu

SEQ ID NO: 7277 - RNA, 20 nt, Artificial Sequence
  Synthetic
ugcagagcuugguggaaugu

SEQ ID NO: 7278 - RNA, 20 nt, Artificial Sequence
  Synthetic
  misc_feature (7)..(7): n is a, c, g, or u
acaguanucuccggaagugu

SEQ ID NO: 7279 - RNA, 20 nt, Artificial Sequence
  Synthetic
uuuggugucuuuuggagugu

SEQ ID NO: 7280 - RNA, 20 nt, Artificial Sequence
  Synthetic
accccaaaaggccuccgugu

SEQ ID NO: 7281 - RNA, 20 nt, Artificial Sequence
  Synthetic
acaggcgggguuuuucuugu

SEQ ID NO: 7282 - RNA, 20 nt, Artificial Sequence
  Synthetic
agagcuugguggaauguugu

SEQ ID NO: 7283 - RNA, 20 nt, Artificial Sequence
  Synthetic
  misc_feature (4)..(4): n is a, c, g, or u
uucnguccaguggucuuugu

SEQ ID NO: 7284 - RNA, 20 nt, Artificial Sequence
  Synthetic
uccccaucuuuuuguuuugu

SEQ ID NO: 7285 - RNA, 20 nt, Artificial Sequence
  Synthetic
  misc_feature (7)..(7): n is a, c, g, or u
  misc_feature (19)..(19): n is a, c, g, or u
aggagungggggaggaganu

SEQ ID NO: 7286 - RNA, 20 nt, Artificial Sequence
  Synthetic
  misc_feature (19)..(19): n is a, c, g, or u
ccaaaagacccacaauucnu

SEQ ID NO: 7287 - RNA, 20 nt, Artificial Sequence
  Synthetic
  misc_feature (13)..(13): n is a, c, g, or u
  misc_feature (19)..(19): n is a, c, g, or u
guuggugaguganuggagnu

SEQ ID NO: 7288 - RNA, 20 nt, Artificial Sequence
  Synthetic
  misc_feature (19)..(19): n is a, c, g, or u
uuacauaacccaugaaaunu

SEQ ID NO: 7289 - RNA, 20 nt, Artificial Sequence
  Synthetic
  misc_feature (19)..(19): n is a, c, g, or u
ggcuugccugagugcagunu

SEQ ID NO: 7290 - RNA, 20 nt, Artificial Sequence
  Synthetic
auuucauggguuauguaauu

SEQ ID NO: 7291 - RNA, 20 nt, Artificial Sequence
  Synthetic
aagguaggagugggagcauu

SEQ ID NO: 7292 - RNA, 20 nt, Artificial Sequence
  Synthetic
ugccuuccugacugccgauu

SEQ ID NO: 7293 - RNA, 20 nt, Artificial Sequence
  Synthetic
ggaaaaaaucccagaggauu

SEQ ID NO: 7294 - RNA, 20 nt, Artificial Sequence
  Synthetic
cgucaaucuucucgaggauu

SEQ ID NO: 7295 - RNA, 20 nt, Artificial Sequence
  Synthetic
cucucaaagguggagugauu

SEQ ID NO: 7296 - RNA, 20 nt, Artificial Sequence
  Synthetic
  misc_feature (7)..(7): n is a, c, g, or u
uguuaancggccuauugauu

SEQ ID NO: 7297 - RNA, 20 nt, Artificial Sequence
  Synthetic
uauauggaugaugugguauu

SEQ ID NO: 7298 - RNA, 20 nt, Artificial Sequence
  Synthetic
  misc_feature (12)..(12): n is a, c, g, or u
cagcgcaugcgnggaaccuu

SEQ ID NO: 7299 - RNA, 20 nt, Artificial Sequence
  Synthetic
gcucuguaucgggaugccuu

SEQ ID NO: 7300 - RNA, 20 nt, Artificial Sequence
  Synthetic
ucccaauguuaguauuccuu

SEQ ID NO: 7301 - RNA, 20 nt, Artificial Sequence
  Synthetic
ucugggauccugcagagcuu

SEQ ID NO: 7302 - RNA, 20 nt, Artificial Sequence
  Synthetic
  misc_feature (6)..(6): n is a, c, g, or u
gacccnucucggggucgcuu

SEQ ID NO: 7303 - RNA, 20 nt, Artificial Sequence
  Synthetic
gagaaagugaaagccugcuu

SEQ ID NO: 7304 - RNA, 20 nt, Artificial Sequence
  Synthetic
ucuuacauaagaggacucuu

SEQ ID NO: 7305 - RNA, 20 nt, Artificial Sequence
  Synthetic
gaguuuucuaaaacagucuu

SEQ ID NO: 7306 - RNA, 20 nt, Artificial Sequence
  Synthetic
gucuuuaaacaaacagucuu

SEQ ID NO: 7307 - RNA, 20 nt, Artificial Sequence
  Synthetic
uaccaauuuucuuuugucuu

SEQ ID NO: 7308 - RNA, 20 nt, Artificial Sequence
  Synthetic
cuacaucauggggcuuucuu

SEQ ID NO: 7309 - RNA, 20 nt, Artificial Sequence
  Synthetic
ggguuauguaauuggaaguu

SEQ ID NO: 7310 - RNA, 20 nt, Artificial Sequence
  Synthetic
acagaaaggccuuguaaguu

SEQ ID NO: 7311 - RNA, 20 nt, Artificial Sequence
  Synthetic
uuuuuucccgaccaccaguu

SEQ ID NO: 7312 - RNA, 20 nt, Artificial Sequence
  Synthetic
aaauuggaggacaagagguu

SEQ ID NO: 7313 - RNA, 20 nt, Artificial Sequence
  Synthetic
  misc_feature (10)..(10): n is a, c, g, or u
uuccggaganuacuguuguu

SEQ ID NO: 7314 - RNA, 20 nt, Artificial Sequence
  Synthetic
  misc_feature (12)..(12): n is a, c, g, or u
  misc_feature (18)..(18): n is a, c, g, or u
uuggugaguganuggagnuu

SEQ ID NO: 7315 - RNA, 20 nt, Artificial Sequence
  Synthetic
  misc_feature (14)..(14): n is a, c, g, or u
accugggugggugnaaauuu

SEQ ID NO: 7316 - RNA, 20 nt, Artificial Sequence
  Synthetic
uugauaagauaggggcauuu

SEQ ID NO: 7317 - RNA, 20 nt, Artificial Sequence
  Synthetic
uaagaccuugggcaagauuu

SEQ ID NO: 7318 - RNA, 20 nt, Artificial Sequence
  Synthetic
  misc_feature (10)..(10): n is a, c, g, or u
gaaaccgucnuagaguauuu

SEQ ID NO: 7319 - RNA, 20 nt, Artificial Sequence
  Synthetic
ucccccacacggaggccuuu

SEQ ID NO: 7320 - RNA, 20 nt, Artificial Sequence
  Synthetic
  misc_feature (5)..(5): n is a, c, g, or u
ucaangaauugugggucuuu

SEQ ID NO: 7321 - RNA, 20 nt, Artificial Sequence
  Synthetic
caauuuccguccgaagguuu

SEQ ID NO: 7322 - RNA, 20 nt, Artificial Sequence
  Synthetic
auguaaauagugucugguuu

SEQ ID NO: 7323 - RNA, 20 nt, Artificial Sequence
  Synthetic
acauuucuugucucacuuuu

SEQ ID NO: 7324 - RNA, 20 nt, Artificial Sequence
  Synthetic
cccccacacggaggccuuuu

SEQ ID NO: 7325 - RNA, 20 nt, Artificial Sequence
  Synthetic
ugaaaaucaaagacuguuuu

SEQ ID NO: 7326 - RNA, 17 nt, Artificial Sequence
  Synthetic
gagaucuucgucugcga

SEQ ID NO: 7327 - RNA, 17 nt, Artificial Sequence
  Synthetic
gcgacgugcagagguga

SEQ ID NO: 7328 - RNA, 17 nt, Artificial Sequence
  Synthetic
gggcgcaccucucuuua

SEQ ID NO: 7329 - RNA, 17 nt, Artificial Sequence
  Synthetic
gagaucuucugcgacgc

SEQ ID NO: 7330 - RNA, 17 nt, Artificial Sequence
  Synthetic
guaggcauaaauugguc

SEQ ID NO: 7331 - RNA, 17 nt, Artificial Sequence
  Synthetic
ggucguccgcaggauuc

SEQ ID NO: 7332 - RNA, 17 nt, Artificial Sequence
  Synthetic
gaccgcguaaagagagg

SEQ ID NO: 7333 - RNA, 17 nt, Artificial Sequence
  Synthetic
  misc_feature (6)..(6): n is a, c, g, or u
guuccngccgaccacgg

SEQ ID NO: 7334 - RNA, 17 nt, Artificial Sequence
  Synthetic
gaaaggccuuguaaguu

SEQ ID NO: 7335 - RNA, 20 nt, Artificial Sequence
  Synthetic
gaccugcugcgagcaaaaca

SEQ ID NO: 7336 - RNA, 20 nt, Artificial Sequence
  Synthetic
ggaccccugcucguguuaca

SEQ ID NO: 7337 - RNA, 20 nt, Artificial Sequence
  Synthetic
ggcguucacgguggucucca

SEQ ID NO: 7338 - RNA, 20 nt, Artificial Sequence
  Synthetic
gagauugagaucuucugcga

SEQ ID NO: 7339 - RNA, 20 nt, Artificial Sequence
  Synthetic
gccgauugguggaggcagga

SEQ ID NO: 7340 - RNA, 20 nt, Artificial Sequence
  Synthetic
gcaucccgauacagagcuga

SEQ ID NO: 7341 - RNA, 20 nt, Artificial Sequence
  Synthetic
gaaggcacagacggggagac

SEQ ID NO: 7342 - RNA, 20 nt, Artificial Sequence
  Synthetic
gcuccucugccgauccauac

SEQ ID NO: 7343 - RNA, 20 nt, Artificial Sequence
  Synthetic
gucccgucagcgcugaaucc

SEQ ID NO: 7344 - RNA, 20 nt, Artificial Sequence
  Synthetic
gggcuuggccauaggccauc

SEQ ID NO: 7345 - RNA, 20 nt, Artificial Sequence
  Synthetic
gcuguaggcauaaauugguc

SEQ ID NO: 7346 - RNA, 20 nt, Artificial Sequence
  Synthetic
ggagaccgcguaaagagagg

SEQ ID NO: 7347 - RNA, 17 nt, Artificial Sequence
  Synthetic
uuacauacccuauggaa

SEQ ID NO: 7348 - RNA, 17 nt, Artificial Sequence
  Synthetic
cugcugcgagcaaaaca

SEQ ID NO: 7349 - RNA, 17 nt, Artificial Sequence
  Synthetic
ccccugcucguguuaca

SEQ ID NO: 7350 - RNA, 17 nt, Artificial Sequence
  Synthetic
auugagaucuucugcga

SEQ ID NO: 7351 - RNA, 17 nt, Artificial Sequence
  Synthetic
ucccgauacagagcuga

SEQ ID NO: 7352 - RNA, 17 nt, Artificial Sequence
  Synthetic
ccucugccgauccauac

SEQ ID NO: 7353 - RNA, 17 nt, Artificial Sequence
  Synthetic
ccgucagcgcugaaucc

SEQ ID NO: 7354 - RNA, 17 nt, Artificial Sequence
  Synthetic
acgaagaucucaaucgc

SEQ ID NO: 7355 - RNA, 17 nt, Artificial Sequence
  Synthetic
cuuggccauaggccauc

SEQ ID NO: 7356 - RNA, 17 nt, Artificial Sequence
  Synthetic
accacgagucuagacuc

SEQ ID NO: 7357 - RNA, 17 nt, Artificial Sequence
  Synthetic
uuugucuacgucccguc

SEQ ID NO: 7358 - RNA, 17 nt, Artificial Sequence
  Synthetic
cgauugagaucuucguc

SEQ ID NO: 7359 - RNA, 17 nt, Artificial Sequence
  Synthetic
cuaucgcuggauguguc

SEQ ID NO: 7360 - RNA, 17 nt, Artificial Sequence
  Synthetic
uggagauugagaucuuc

SEQ ID NO: 7361 - RNA, 20 nt, Artificial Sequence
  Synthetic
uauuuacauacccuauggaa

SEQ ID NO: 7362 - RNA, 20 nt, Artificial Sequence
  Synthetic
  misc_feature (16)..(16): n is a, c, g, or u
agccacaaagguuccncgca

SEQ ID NO: 7363 - RNA, 20 nt, Artificial Sequence
  Synthetic
auugagaucuucgucugcga

SEQ ID NO: 7364 - RNA, 20 nt, Artificial Sequence
  Synthetic
caugcgacgugcagagguga

SEQ ID NO: 7365 - RNA, 20 nt, Artificial Sequence
  Synthetic
acggggcgcaccucucuuua

SEQ ID NO: 7366 - RNA, 20 nt, Artificial Sequence
  Synthetic
aaaacgccgcagacacaucc

SEQ ID NO: 7367 - RNA, 20 nt, Artificial Sequence
  Synthetic
cugugcugccaacuggaucc

SEQ ID NO: 7368 - RNA, 20 nt, Artificial Sequence
  Synthetic
auugagaucuucugcgacgc

SEQ ID NO: 7369 - RNA, 20 nt, Artificial Sequence
  Synthetic
cagacgaagaucucaaucgc

SEQ ID NO: 7370 - RNA, 20 nt, Artificial Sequence
  Synthetic
cuaucgcuggaugugucugc

SEQ ID NO: 7371 - RNA, 20 nt, Artificial Sequence
  Synthetic
uccaccacgagucuagacuc

SEQ ID NO: 7372 - RNA, 20 nt, Artificial Sequence
  Synthetic
uccuuugucuacgucccguc

SEQ ID NO: 7373 - RNA, 20 nt, Artificial Sequence
  Synthetic
cggcgauugagaucuucguc

SEQ ID NO: 7374 - RNA, 20 nt, Artificial Sequence
  Synthetic
uggcuaucgcuggauguguc

SEQ ID NO: 7375 - RNA, 20 nt, Artificial Sequence
  Synthetic
  misc_feature (2)..(2): n is a, c, g, or u
angggucguccgcaggauuc

SEQ ID NO: 7376 - RNA, 20 nt, Artificial Sequence
  Synthetic
agcuggagauugagaucuuc

SEQ ID NO: 7377 - RNA, 20 nt, Artificial Sequence
  Synthetic
uggucuauaagcuggaggag

SEQ ID NO: 7378 - RNA, 20 nt, Artificial Sequence
  Synthetic
aaaaaguugcauggugcugg

SEQ ID NO: 7379 - RNA, 20 nt, Artificial Sequence
  Synthetic
acagaaaggccuuguaaguu

SEQ ID NO: 7380 - RNA, 17 nt, Artificial Sequence
  Synthetic
  misc_feature (8)..(8): n is a, c, g, or u
  misc_feature (12)..(12): n is a, c, g, or u
gggacganagancccca

SEQ ID NO: 7381 - RNA, 17 nt, Artificial Sequence
  Synthetic
guucacgguggucucca

SEQ ID NO: 7382 - RNA, 17 nt, Artificial Sequence
  Synthetic
gauugguggaggcagga

SEQ ID NO: 7383 - RNA, 17 nt, Artificial Sequence
  Synthetic
  misc_feature (10)..(10): n is a, c, g, or u
ggugacccanaaaauga

SEQ ID NO: 7384 - RNA, 17 nt, Artificial Sequence
  Synthetic
gcuuuaaugccucugua

SEQ ID NO: 7385 - RNA, 17 nt, Artificial Sequence
  Synthetic
ggcacagacggggagac

SEQ ID NO: 7386 - RNA, 17 nt, Artificial Sequence
  Synthetic
  misc_feature (3)..(3): n is a, c, g, or u
  misc_feature (9)..(9): n is a, c, g, or u
ganuggagnuuggggac

SEQ ID NO: 7387 - RNA, 20 nt, Artificial Sequence
  Synthetic
ggccauaggccaucagcgca

SEQ ID NO: 7388 - RNA, 20 nt, Artificial Sequence
  Synthetic
  misc_feature (9)..(9): n is a, c, g, or u
gccguuccngccgaccacgg

SEQ ID NO: 7389 - RNA, 17 nt, Artificial Sequence
  Synthetic
cauaggccaucagcgca

SEQ ID NO: 7390 - RNA, 17 nt, Artificial Sequence
  Synthetic
  misc_feature (13)..(13): n is a, c, g, or u
cacaaagguuccncgca

SEQ ID NO: 7391 - RNA, 17 nt, Artificial Sequence
  Synthetic
acagugggggaaagccc

SEQ ID NO: 7392 - RNA, 17 nt, Artificial Sequence
  Synthetic
acgccgcagacacaucc

SEQ ID NO: 7393 - RNA, 17 nt, Artificial Sequence
  Synthetic
ugcugccaacuggaucc

SEQ ID NO: 7394 - RNA, 17 nt, Artificial Sequence
  Synthetic
  misc_feature (4)..(4): n is a, c, g, or u
uuungcuccagaccugc

SEQ ID NO: 7395 - RNA, 17 nt, Artificial Sequence
  Synthetic
ucgcuggaugugucugc

SEQ ID NO: 7396 - RNA, 17 nt, Artificial Sequence
  Synthetic
ucuauaagcuggaggag

SEQ ID NO: 7397 - RNA, 17 nt, Artificial Sequence
  Synthetic
aaguugcauggugcugg

SEQ ID NO: 7398 - RNA, 17 nt, Artificial Sequence
  Synthetic
uugggcaagauuuggug

SEQ ID NO: 7399 - RNA, 17 nt, Artificial Sequence
  Synthetic
  misc_feature (5)..(5): n is a, c, g, or u
  misc_feature (14)..(14): n is a, c, g, or u
aaagngaaacuacncgu

SEQ ID NO: 7400 - RNA, 20 nt, Artificial Sequence
  Synthetic
  misc_feature (11)..(11): n is a, c, g, or u
  misc_feature (15)..(15): n is a, c, g, or u
aaggggacganagancccca

SEQ ID NO: 7401 - RNA, 20 nt, Artificial Sequence
  Synthetic
  misc_feature (13)..(13): n is a, c, g, or u
uaaggugacccanaaaauga

SEQ ID NO: 7402 - RNA, 20 nt, Artificial Sequence
  Synthetic
ccugcuuuaaugccucugua

SEQ ID NO: 7403 - RNA, 20 nt, Artificial Sequence
  Synthetic
  misc_feature (6)..(6): n is a, c, g, or u
  misc_feature (12)..(12): n is a, c, g, or u
aguganuggagnuuggggac

SEQ ID NO: 7404 - RNA, 20 nt, Artificial Sequence
  Synthetic
cagacagugggggaaagccc

SEQ ID NO: 7405 - RNA, 20 nt, Artificial Sequence
  Synthetic
  misc_feature (7)..(7): n is a, c, g, or u
aaguuungcuccagaccugc

SEQ ID NO: 7406 - RNA, 20 nt, Artificial Sequence
  Synthetic
accuugggcaagauuuggug

SEQ ID NO: 7407 - RNA, 20 nt, Artificial Sequence
  Synthetic
  misc_feature (8)..(8): n is a, c, g, or u
  misc_feature (17)..(17): n is a, c, g, or u
auaaaagngaaacuacncgu

SEQ ID NO: 7408 - RNA, 17 nt, Artificial Sequence
  Synthetic
agggcuccaccccaaaa

SEQ ID NO: 7409 - RNA, 17 nt, Artificial Sequence
  Synthetic
agaggaagaugauaaaa

SEQ ID NO: 7410 - RNA, 17 nt, Artificial Sequence
  Synthetic
gcuuauagaccaccaaa

SEQ ID NO: 7411 - RNA, 17 nt, Artificial Sequence
  Synthetic
uauuguuuacacagaaa

SEQ ID NO: 7412 - RNA, 17 nt, Artificial Sequence
  Synthetic
  misc_feature (2)..(2): n is a, c, g, or u
  misc_feature (8)..(8): n is a, c, g, or u
unuggugnggugaacaa

SEQ ID NO: 7413 - RNA, 17 nt, Artificial Sequence
  Synthetic
uucucgccaacuuacaa

SEQ ID NO: 7414 - RNA, 17 nt, Artificial Sequence
  Synthetic
  misc_feature (2)..(2): n is a, c, g, or u
  misc_feature (5)..(5): n is a, c, g, or u
gnccnaaagccacccaa

SEQ ID NO: 7415 - RNA, 17 nt, Artificial Sequence
  Synthetic
uguaaaaggggcagcaa

SEQ ID NO: 7416 - RNA, 17 nt, Artificial Sequence
  Synthetic
ggagcccucaggcucaa

SEQ ID NO: 7417 - RNA, 17 nt, Artificial Sequence
  Synthetic
gagggaccguccaagaa

SEQ ID NO: 7418 - RNA, 17 nt, Artificial Sequence
  Synthetic
aaggaaagaagucagaa

SEQ ID NO: 7419 - RNA, 17 nt, Artificial Sequence
  Synthetic
gguccggcagaugagaa

SEQ ID NO: 7420 - RNA, 17 nt, Artificial Sequence
  Synthetic
  misc_feature (9)..(9): n is a, c, g, or u
gugaacccnggcccgaa

SEQ ID NO: 7421 - RNA, 17 nt, Artificial Sequence
  Synthetic
cauaggaauuuuccgaa

SEQ ID NO: 7422 - RNA, 17 nt, Artificial Sequence
  Synthetic
caaucggcagucaggaa

SEQ ID NO: 7423 - RNA, 17 nt, Artificial Sequence
  Synthetic
gccagacagugggggaa

SEQ ID NO: 7424 - RNA, 17 nt, Artificial Sequence
  Synthetic
cugcaccgaacauggaa

SEQ ID NO: 7425 - RNA, 17 nt, Artificial Sequence
  Synthetic
ucauccauauaacugaa

SEQ ID NO: 7426 - RNA, 17 nt, Artificial Sequence
  Synthetic
cugguguuugcucugaa

SEQ ID NO: 7427 - RNA, 17 nt, Artificial Sequence
  Synthetic
guuggcgagaaagugaa

SEQ ID NO: 7428 - RNA, 17 nt, Artificial Sequence
  Synthetic
auggagaccaccgugaa

SEQ ID NO: 7429 - RNA, 17 nt, Artificial Sequence
  Synthetic
  misc_feature (12)..(12): n is a, c, g, or u
  misc_feature (15)..(15): n is a, c, g, or u
caauguccaugnccnaa

SEQ ID NO: 7430 - RNA, 17 nt, Artificial Sequence
  Synthetic
ugcucaggagauucuaa

SEQ ID NO: 7431 - RNA, 17 nt, Artificial Sequence
  Synthetic
  misc_feature (14)..(14): n is a, c, g, or u
guauaguagaaganuaa

SEQ ID NO: 7432 - RNA, 17 nt, Artificial Sequence
  Synthetic
gcauacagaggcauuaa

SEQ ID NO: 7433 - RNA, 17 nt, Artificial Sequence
  Synthetic
  misc_feature (4)..(4): n is a, c, g, or u
uggnuauccugcuuuaa

SEQ ID NO: 7434 - RNA, 17 nt, Artificial Sequence
  Synthetic
accagcaggaaaauaca

SEQ ID NO: 7435 - RNA, 17 nt, Artificial Sequence
  Synthetic
ugcuuagauugaauaca

SEQ ID NO: 7436 - RNA, 17 nt, Artificial Sequence
  Synthetic
uccacaacauuccacca

SEQ ID NO: 7437 - RNA, 17 nt, Artificial Sequence
  Synthetic
ucugcgcaccagcacca

SEQ ID NO: 7438 - RNA, 17 nt, Artificial Sequence
  Synthetic
cacucauccucaggcca

SEQ ID NO: 7439 - RNA, 17 nt, Artificial Sequence
  Synthetic
cugauggccuauggcca

SEQ ID NO: 7440 - RNA, 17 nt, Artificial Sequence
  Synthetic
uacuguucaagccucca

SEQ ID NO: 7441 - RNA, 17 nt, Artificial Sequence
  Synthetic
uguauucaaucuaagca

SEQ ID NO: 7442 - RNA, 17 nt, Artificial Sequence
  Synthetic
ugggaaaaaaucuagca

SEQ ID NO: 7443 - RNA, 17 nt, Artificial Sequence
  Synthetic
uggcaauguuuuuagca

SEQ ID NO: 7444 - RNA, 17 nt, Artificial Sequence
  Synthetic
cccucaggcucaaggca

SEQ ID NO: 7445 - RNA, 17 nt, Artificial Sequence
  Synthetic
  misc_feature (3)..(3): n is a, c, g, or u
canacugcacucaggca

SEQ ID NO: 7446 - RNA, 17 nt, Artificial Sequence
  Synthetic
  misc_feature (1)..(1): n is a, c, g, or u
  misc_feature (7)..(7): n is a, c, g, or u
ncaccanacugcacuca

SEQ ID NO: 7447 - RNA, 17 nt, Artificial Sequence
  Synthetic
uugggguggagcccuca

SEQ ID NO: 7448 - RNA, 17 nt, Artificial Sequence
  Synthetic
agagacacucauccuca

SEQ ID NO: 7449 - RNA, 17 nt, Artificial Sequence
  Synthetic
aagauuaaacuuaguca

SEQ ID NO: 7450 - RNA, 17 nt, Artificial Sequence
  Synthetic
uaugggccuaaaguuca

SEQ ID NO: 7451 - RNA, 17 nt, Artificial Sequence
  Synthetic
ucauguccuacuguuca

SEQ ID NO: 7452 - RNA, 17 nt, Artificial Sequence
  Synthetic
cuguuguuagacgaaga

SEQ ID NO: 7453 - RNA, 17 nt, Artificial Sequence
  Synthetic
  misc_feature (4)..(4): n is a, c, g, or u
uucncuuuuauauaaga

SEQ ID NO: 7454 - RNA, 17 nt, Artificial Sequence
  Synthetic
aggaucccagaguaaga

SEQ ID NO: 7455 - RNA, 17 nt, Artificial Sequence
  Synthetic
gaauacacgcauacaga

SEQ ID NO: 7456 - RNA, 17 nt, Artificial Sequence
  Synthetic
aggucuuuguacuagga

SEQ ID NO: 7457 - RNA, 17 nt, Artificial Sequence
  Synthetic
ucacucccccacacgga

SEQ ID NO: 7458 - RNA, 17 nt, Artificial Sequence
  Synthetic
ucagcucuguaucggga

SEQ ID NO: 7459 - RNA, 17 nt, Artificial Sequence
  Synthetic
gaauacuaacauuggga

SEQ ID NO: 7460 - RNA, 17 nt, Artificial Sequence
  Synthetic
acuacuaggucccugga

SEQ ID NO: 7461 - RNA, 17 nt, Artificial Sequence
  Synthetic
gacugccgauuggugga

SEQ ID NO: 7462 - RNA, 17 nt, Artificial Sequence
  Synthetic
ccaaggcacagcuugga

SEQ ID NO: 7463 - RNA, 17 nt, Artificial Sequence
  Synthetic
  misc_feature (15)..(15): n is a, c, g, or u
aaagaccacuggacnga

SEQ ID NO: 7464 - RNA, 17 nt, Artificial Sequence
  Synthetic
aaccaacaagaagauga

SEQ ID NO: 7465 - RNA, 17 nt, Artificial Sequence
  Synthetic
caggagaaacgggcuga

SEQ ID NO: 7466 - RNA, 17 nt, Artificial Sequence
  Synthetic
ugccaaguguuugcuga

SEQ ID NO: 7467 - RNA, 17 nt, Artificial Sequence
  Synthetic
auugacgagaugaguga

SEQ ID NO: 7468 - RNA, 17 nt, Artificial Sequence
  Synthetic
uaggaauccugauguga

SEQ ID NO: 7469 - RNA, 17 nt, Artificial Sequence
  Synthetic
ucaacgaccgaccuuga

SEQ ID NO: 7470 - RNA, 17 nt, Artificial Sequence
  Synthetic
auacuuuccaaucaaua

SEQ ID NO: 7471 - RNA, 17 nt, Artificial Sequence
  Synthetic
gcuggggcuuggccaua

SEQ ID NO: 7472 - RNA, 17 nt, Artificial Sequence
  Synthetic
gcauuugguggucuaua

SEQ ID NO: 7473 - RNA, 17 nt, Artificial Sequence
  Synthetic
  misc_feature (2)..(2): n is a, c, g, or u
cnuuuccauggcugcua

SEQ ID NO: 7474 - RNA, 17 nt, Artificial Sequence
  Synthetic
ucuucauccugcugcua

SEQ ID NO: 7475 - RNA, 17 nt, Artificial Sequence
  Synthetic
ugcguguauucaaucua

SEQ ID NO: 7476 - RNA, 17 nt, Artificial Sequence
  Synthetic
aaacagucuuugaagua

SEQ ID NO: 7477 - RNA, 17 nt, Artificial Sequence
  Synthetic
guggagugauuggggua

SEQ ID NO: 7478 - RNA, 17 nt, Artificial Sequence
  Synthetic
uguacuaggaggcugua

SEQ ID NO: 7479 - RNA, 17 nt, Artificial Sequence
  Synthetic
ugaacaagagaugauua

SEQ ID NO: 7480 - RNA, 17 nt, Artificial Sequence
  Synthetic
gugcgcagaccaauuua

SEQ ID NO: 7481 - RNA, 17 nt, Artificial Sequence
  Synthetic
uaauugccugaacuuua

SEQ ID NO: 7482 - RNA, 17 nt, Artificial Sequence
  Synthetic
ccccguugcccggcaac

SEQ ID NO: 7483 - RNA, 17 nt, Artificial Sequence
  Synthetic
  misc_feature (12)..(12): n is a, c, g, or u
ccguggucggcnggaac

SEQ ID NO: 7484 - RNA, 17 nt, Artificial Sequence
  Synthetic
guccgaagguuuugaac

SEQ ID NO: 7485 - RNA, 17 nt, Artificial Sequence
  Synthetic
gauccaguuggcagcac

SEQ ID NO: 7486 - RNA, 17 nt, Artificial Sequence
  Synthetic
aaagccacccaaggcac

SEQ ID NO: 7487 - RNA, 17 nt, Artificial Sequence
  Synthetic
uaggcugccuuccugac

SEQ ID NO: 7488 - RNA, 17 nt, Artificial Sequence
  Synthetic
  misc_feature (9)..(9): n is a, c, g, or u
  misc_feature (15)..(15): n is a, c, g, or u
uguucaccncaccanac

SEQ ID NO: 7489 - RNA, 17 nt, Artificial Sequence
  Synthetic
aaaaauccucacaauac

SEQ ID NO: 7490 - RNA, 17 nt, Artificial Sequence
  Synthetic
agagaucuucuagauac

SEQ ID NO: 7491 - RNA, 17 nt, Artificial Sequence
  Synthetic
aacccuguuccgacuac

SEQ ID NO: 7492 - RNA, 17 nt, Artificial Sequence
  Synthetic
gaccaauuuaugccuac

SEQ ID NO: 7493 - RNA, 17 nt, Artificial Sequence
  Synthetic
cgggacccugccgaacc

SEQ ID NO: 7494 - RNA, 17 nt, Artificial Sequence
  Synthetic
ccggaacuggagccacc

SEQ ID NO: 7495 - RNA, 17 nt, Artificial Sequence
  Synthetic
aaauuggucugcgcacc

SEQ ID NO: 7496 - RNA, 17 nt, Artificial Sequence
  Synthetic
  misc_feature (7)..(7): n is a, c, g, or u
aaguuungcuccagacc

SEQ ID NO: 7497 - RNA, 17 nt, Artificial Sequence
  Synthetic
ucuucuucuaggggacc

SEQ ID NO: 7498 - RNA, 17 nt, Artificial Sequence
  Synthetic
gucaacaagaaaaaccc

SEQ ID NO: 7499 - RNA, 17 nt, Artificial Sequence
  Synthetic
ccaccaguacgggaccc

SEQ ID NO: 7500 - RNA, 17 nt, Artificial Sequence
  Synthetic
ucgaggauuggggaccc

SEQ ID NO: 7501 - RNA, 17 nt, Artificial Sequence
  Synthetic
aggauuccuaggacccc

SEQ ID NO: 7502 - RNA, 17 nt, Artificial Sequence
  Synthetic
  misc_feature (9)..(10): n is a, c, g, or u
agucauuannucccccc

SEQ ID NO: 7503 - RNA, 17 nt, Artificial Sequence
  Synthetic
gccuauggccaagcccc

SEQ ID NO: 7504 - RNA, 17 nt, Artificial Sequence
  Synthetic
ccuuuaccccguugccc

SEQ ID NO: 7505 - RNA, 17 nt, Artificial Sequence
  Synthetic
gcgagaaagugaaagcc

SEQ ID NO: 7506 - RNA, 17 nt, Artificial Sequence
  Synthetic
uuaaacuuagucaugcc

SEQ ID NO: 7507 - RNA, 17 nt, Artificial Sequence
  Synthetic
cuuuuauauaagaugcc

SEQ ID NO: 7508 - RNA, 17 nt, Artificial Sequence
  Synthetic
augcuaaaaacauugcc

SEQ ID NO: 7509 - RNA, 17 nt, Artificial Sequence
  Synthetic
caucuuccucuucaucc

SEQ ID NO: 7510 - RNA, 17 nt, Artificial Sequence
  Synthetic
  misc_feature (2)..(2): n is a, c, g, or u
gnaaauuuggaagaucc

SEQ ID NO: 7511 - RNA, 17 nt, Artificial Sequence
  Synthetic
cucuuacucugggaucc

SEQ ID NO: 7512 - RNA, 17 nt, Artificial Sequence
  Synthetic
gaccaccaguuggaucc

SEQ ID NO: 7513 - RNA, 17 nt, Artificial Sequence
  Synthetic
  misc_feature (12)..(12): n is a, c, g, or u
acacaauguggnuaucc

SEQ ID NO: 7514 - RNA, 17 nt, Artificial Sequence
  Synthetic
ccagcagauccgccucc

SEQ ID NO: 7515 - RNA, 17 nt, Artificial Sequence
  Synthetic
uggauucgcacuccucc

SEQ ID NO: 7516 - RNA, 17 nt, Artificial Sequence
  Synthetic
agaagaucucaaucucc

SEQ ID NO: 7517 - RNA, 17 nt, Artificial Sequence
  Synthetic
cgaagugcacacggucc

SEQ ID NO: 7518 - RNA, 17 nt, Artificial Sequence
  Synthetic
ucuccgucugccguucc

SEQ ID NO: 7519 - RNA, 17 nt, Artificial Sequence
  Synthetic
agaggccuguauuuucc

SEQ ID NO: 7520 - RNA, 17 nt, Artificial Sequence
  Synthetic
cugcgagcaaaacaagc

SEQ ID NO: 7521 - RNA, 17 nt, Artificial Sequence
  Synthetic
agaagaugaggcauagc

SEQ ID NO: 7522 - RNA, 17 nt, Artificial Sequence
  Synthetic
uggcagcacagccuagc

SEQ ID NO: 7523 - RNA, 17 nt, Artificial Sequence
  Synthetic
acugcggaacuccuagc

SEQ ID NO: 7524 - RNA, 17 nt, Artificial Sequence
  Synthetic
ggaagaugauaaaacgc

SEQ ID NO: 7525 - RNA, 17 nt, Artificial Sequence
  Synthetic
ccgcuuguuuugcucgc

SEQ ID NO: 7526 - RNA, 17 nt, Artificial Sequence
  Synthetic
ucggcagucaggaaggc

SEQ ID NO: 7527 - RNA, 17 nt, Artificial Sequence
  Synthetic
gagugauugggguaggc

SEQ ID NO: 7528 - RNA, 17 nt, Artificial Sequence
  Synthetic
cauuguguaaaaggggc

SEQ ID NO: 7529 - RNA, 17 nt, Artificial Sequence
  Synthetic
  misc_feature (7)..(7): n is a, c, g, or u
uacaucnuuuccauggc

SEQ ID NO: 7530 - RNA, 17 nt, Artificial Sequence
  Synthetic
cgcaggauccaguuggc

SEQ ID NO: 7531 - RNA, 17 nt, Artificial Sequence
  Synthetic
cuuccucuucauccugc

SEQ ID NO: 7532 - RNA, 17 nt, Artificial Sequence
  Synthetic
uggcugcuaggcugugc

SEQ ID NO: 7533 - RNA, 17 nt, Artificial Sequence
  Synthetic
ggucuuuugggcuuugc

SEQ ID NO: 7534 - RNA, 17 nt, Artificial Sequence
  Synthetic
  misc_feature (16)..(16): n is a, c, g, or u
aaaacucccuguuaanc

SEQ ID NO: 7535 - RNA, 17 nt, Artificial Sequence
  Synthetic
uccugccuccaccaauc

SEQ ID NO: 7536 - RNA, 17 nt, Artificial Sequence
  Synthetic
ccaguggggguugcauc

SEQ ID NO: 7537 - RNA, 17 nt, Artificial Sequence
  Synthetic
gucugugccuucucauc

SEQ ID NO: 7538 - RNA, 17 nt, Artificial Sequence
  Synthetic
aacauugccagcagauc

SEQ ID NO: 7539 - RNA, 17 nt, Artificial Sequence
  Synthetic
gaggcaggaggcggauc

SEQ ID NO: 7540 - RNA, 17 nt, Artificial Sequence
  Synthetic
guuccgcaguauggauc

SEQ ID NO: 7541 - RNA, 17 nt, Artificial Sequence
  Synthetic
gcacuucgcuucaccuc

SEQ ID NO: 7542 - RNA, 17 nt, Artificial Sequence
  Synthetic
ugcaacuuuuucaccuc

SEQ ID NO: 7543 - RNA, 17 nt, Artificial Sequence
  Synthetic
cuucuagauaccgccuc

SEQ ID NO: 7544 - RNA, 17 nt, Artificial Sequence
  Synthetic
cuaugggagugggccuc

SEQ ID NO: 7545 - RNA, 17 nt, Artificial Sequence
  Synthetic
aaccuuuguggcuccuc

SEQ ID NO: 7546 - RNA, 17 nt, Artificial Sequence
  Synthetic
aacauuccaccaagcuc

SEQ ID NO: 7547 - RNA, 17 nt, Artificial Sequence
  Synthetic
aggacucuuggacucuc

SEQ ID NO: 7548 - RNA, 17 nt, Artificial Sequence
  Synthetic
ucguccccuucuccguc

SEQ ID NO: 7549 - RNA, 17 nt, Artificial Sequence
  Synthetic
  misc_feature (9)..(9): n is a, c, g, or u
ccccgagangggucguc

SEQ ID NO: 7550 - RNA, 17 nt, Artificial Sequence
  Synthetic
aggugcgccccgugguc

SEQ ID NO: 7551 - RNA, 17 nt, Artificial Sequence
  Synthetic
caagcggcuaggaguuc

SEQ ID NO: 7552 - RNA, 17 nt, Artificial Sequence
  Synthetic
aagagucgugcagguuc

SEQ ID NO: 7553 - RNA, 17 nt, Artificial Sequence
  Synthetic
uuauucuugggaacaag

SEQ ID NO: 7554 - RNA, 17 nt, Artificial Sequence
  Synthetic
ugggaugggaauacaag

SEQ ID NO: 7555 - RNA, 17 nt, Artificial Sequence
  Synthetic
gcagaggugaagcgaag

SEQ ID NO: 7556 - RNA, 17 nt, Artificial Sequence
  Synthetic
aaggcaucccgauacag

SEQ ID NO: 7557 - RNA, 17 nt, Artificial Sequence
  Synthetic
acucugggauccugcag

SEQ ID NO: 7558 - RNA, 17 nt, Artificial Sequence
  Synthetic
uggccauaggccaucag

SEQ ID NO: 7559 - RNA, 17 nt, Artificial Sequence
  Synthetic
ugucuacgucccgucag

SEQ ID NO: 7560 - RNA, 17 nt, Artificial Sequence
  Synthetic
uuggauccagcauucag

SEQ ID NO: 7561 - RNA, 17 nt, Artificial Sequence
  Synthetic
ucguccgcaggauucag

SEQ ID NO: 7562 - RNA, 17 nt, Artificial Sequence
  Synthetic
caugccuugagccugag

SEQ ID NO: 7563 - RNA, 17 nt, Artificial Sequence
  Synthetic
agaauggcuugccugag

SEQ ID NO: 7564 - RNA, 17 nt, Artificial Sequence
  Synthetic
cuggcucaguuuacuag

SEQ ID NO: 7565 - RNA, 17 nt, Artificial Sequence
  Synthetic
  misc_feature (3)..(3): n is a, c, g, or u
  misc_feature (12)..(12): n is a, c, g, or u
agngaaacuacncguag

SEQ ID NO: 7566 - RNA, 17 nt, Artificial Sequence
  Synthetic
gaauuagaggacaaacg

SEQ ID NO: 7567 - RNA, 17 nt, Artificial Sequence
  Synthetic
cugagccaggagaaacg

SEQ ID NO: 7568 - RNA, 17 nt, Artificial Sequence
  Synthetic
accccgccuguaacacg

SEQ ID NO: 7569 - RNA, 17 nt, Artificial Sequence
  Synthetic
guggucuccaugcgacg

SEQ ID NO: 7570 - RNA, 17 nt, Artificial Sequence
  Synthetic
uguucagugguucgccg

SEQ ID NO: 7571 - RNA, 17 nt, Artificial Sequence
  Synthetic
  misc_feature (6)..(6): n is a, c, g, or u
agaccnggccguugccg

SEQ ID NO: 7572 - RNA, 17 nt, Artificial Sequence
  Synthetic
auacccuauggaaggcg

SEQ ID NO: 7573 - RNA, 17 nt, Artificial Sequence
  Synthetic
gcuccagaccugcugcg

SEQ ID NO: 7574 - RNA, 17 nt, Artificial Sequence
  Synthetic
uccuugagcaagagucg

SEQ ID NO: 7575 - RNA, 17 nt, Artificial Sequence
  Synthetic
aggagugggagcauucg

SEQ ID NO: 7576 - RNA, 17 nt, Artificial Sequence
  Synthetic
ccacauuguguaaaagg

SEQ ID NO: 7577 - RNA, 17 nt, Artificial Sequence
  Synthetic
guauggaucggcagagg

SEQ ID NO: 7578 - RNA, 17 nt, Artificial Sequence
  Synthetic
  misc_feature (8)..(8): n is a, c, g, or u
ugacccanaaaaugagg

SEQ ID NO: 7579 - RNA, 17 nt, Artificial Sequence
  Synthetic
aguguugauaagauagg

SEQ ID NO: 7580 - RNA, 17 nt, Artificial Sequence
  Synthetic
ggugggaaauuuuacgg

SEQ ID NO: 7581 - RNA, 17 nt, Artificial Sequence
  Synthetic
augcuuuccauguucgg

SEQ ID NO: 7582 - RNA, 17 nt, Artificial Sequence
  Synthetic
uggccaagacacacggg

SEQ ID NO: 7583 - RNA, 17 nt, Artificial Sequence
  Synthetic
  misc_feature (4)..(4): n is a, c, g, or u
uccngccgaccacgggg

SEQ ID NO: 7584 - RNA, 17 nt, Artificial Sequence
  Synthetic
cucaauuuucuaggggg

SEQ ID NO: 7585 - RNA, 17 nt, Artificial Sequence
  Synthetic
aacaagguaggaguggg

SEQ ID NO: 7586 - RNA, 17 nt, Artificial Sequence
  Synthetic
gaugaugugguauuggg

SEQ ID NO: 7587 - RNA, 17 nt, Artificial Sequence
  Synthetic
gugaaaaaguugcaugg

SEQ ID NO: 7588 - RNA, 17 nt, Artificial Sequence
  Synthetic
caagagcuacaucaugg

SEQ ID NO: 7589 - RNA, 17 nt, Artificial Sequence
  Synthetic
cacuguuccggaacugg

SEQ ID NO: 7590 - RNA, 17 nt, Artificial Sequence
  Synthetic
uguuaauaauguccugg

SEQ ID NO: 7591 - RNA, 17 nt, Artificial Sequence
  Synthetic
caacccccacuggcugg

SEQ ID NO: 7592 - RNA, 17 nt, Artificial Sequence
  Synthetic
gcucgcagcaggucugg

SEQ ID NO: 7593 - RNA, 17 nt, Artificial Sequence
  Synthetic
gaggccuuuuggggugg

SEQ ID NO: 7594 - RNA, 17 nt, Artificial Sequence
  Synthetic
ccuuauaaagaauuugg

SEQ ID NO: 7595 - RNA, 17 nt, Artificial Sequence
  Synthetic
  misc_feature (11)..(11): n is a, c, g, or u
caaagguuccncgcaug

SEQ ID NO: 7596 - RNA, 17 nt, Artificial Sequence
  Synthetic
cccaucccaucaucaug

SEQ ID NO: 7597 - RNA, 17 nt, Artificial Sequence
  Synthetic
augucaauacuaauaug

SEQ ID NO: 7598 - RNA, 17 nt, Artificial Sequence
  Synthetic
auggcacuaguaaacug

SEQ ID NO: 7599 - RNA, 17 nt, Artificial Sequence
  Synthetic
ugccuuagaaucuccug

SEQ ID NO: 7600 - RNA, 17 nt, Artificial Sequence
  Synthetic
uucaagccuccaagcug

SEQ ID NO: 7601 - RNA, 17 nt, Artificial Sequence
  Synthetic
ccauggcugcuaggcug

SEQ ID NO: 7602 - RNA, 17 nt, Artificial Sequence
  Synthetic
cgcggucuccccgucug

SEQ ID NO: 7603 - RNA, 17 nt, Artificial Sequence
  Synthetic
  misc_feature (11)..(11): n is a, c, g, or u
ggcaacggccnggucug

SEQ ID NO: 7604 - RNA, 17 nt, Artificial Sequence
  Synthetic
aggcauaaauuggucug

SEQ ID NO: 7605 - RNA, 17 nt, Artificial Sequence
  Synthetic
aaauuccuaugggagug

SEQ ID NO: 7606 - RNA, 17 nt, Artificial Sequence
  Synthetic
ucaucugccggaccgug

SEQ ID NO: 7607 - RNA, 17 nt, Artificial Sequence
  Synthetic
ccgcguaaagagaggug

SEQ ID NO: 7608 - RNA, 17 nt, Artificial Sequence
  Synthetic
guugcauggugcuggug

SEQ ID NO: 7609 - RNA, 17 nt, Artificial Sequence
  Synthetic
ucuuauguaagaccuug

SEQ ID NO: 7610 - RNA, 17 nt, Artificial Sequence
  Synthetic
guuuuuagcaugccuug

SEQ ID NO: 7611 - RNA, 17 nt, Artificial Sequence
  Synthetic
aacauagagguuccuug

SEQ ID NO: 7612 - RNA, 17 nt, Artificial Sequence
  Synthetic
gaauugugggucuuuug

SEQ ID NO: 7613 - RNA, 17 nt, Artificial Sequence
  Synthetic
  misc_feature (17)..(17): n is a, c, g, or u
acacuuggcacagaccn

SEQ ID NO: 7614 - RNA, 17 nt, Artificial Sequence
  Synthetic
  misc_feature (17)..(17): n is a, c, g, or u
gugggggagugaacccn

SEQ ID NO: 7615 - RNA, 17 nt, Artificial Sequence
  Synthetic
  misc_feature (17)..(17): n is a, c, g, or u
gagccacaaagguuccn

SEQ ID NO: 7616 - RNA, 17 nt, Artificial Sequence
  Synthetic
cgaaccacugaacaaau

SEQ ID NO: 7617 - RNA, 17 nt, Artificial Sequence
  Synthetic
aaccuucggacggaaau

SEQ ID NO: 7618 - RNA, 17 nt, Artificial Sequence
  Synthetic
cagacgaagaucucaau

SEQ ID NO: 7619 - RNA, 17 nt, Artificial Sequence
  Synthetic
uccccccagcaaagaau

SEQ ID NO: 7620 - RNA, 17 nt, Artificial Sequence
  Synthetic
ugugaaaccacaauaau

SEQ ID NO: 7621 - RNA, 17 nt, Artificial Sequence
  Synthetic
aggcaugcuaaaaacau

SEQ ID NO: 7622 - RNA, 17 nt, Artificial Sequence
  Synthetic
aggucggucguugacau

SEQ ID NO: 7623 - RNA, 17 nt, Artificial Sequence
  Synthetic
  misc_feature (10)..(10): n is a, c, g, or u
auauacaucnuuuccau

SEQ ID NO: 7624 - RNA, 17 nt, Artificial Sequence
  Synthetic
acaagaagaugaggcau

SEQ ID NO: 7625 - RNA, 17 nt, Artificial Sequence
  Synthetic
cagacacauccagcgau

SEQ ID NO: 7626 - RNA, 17 nt, Artificial Sequence
  Synthetic
  misc_feature (4)..(4): n is a, c, g, or u
uccncgcaugcgcugau

SEQ ID NO: 7627 - RNA, 17 nt, Artificial Sequence
  Synthetic
augcgcugauggccuau

SEQ ID NO: 7628 - RNA, 17 nt, Artificial Sequence
  Synthetic
caauuuguccuggcuau

SEQ ID NO: 7629 - RNA, 17 nt, Artificial Sequence
  Synthetic
cugaugcaacccccacu

SEQ ID NO: 7630 - RNA, 17 nt, Artificial Sequence
  Synthetic
uagaagaagaacucccu

SEQ ID NO: 7631 - RNA, 17 nt, Artificial Sequence
  Synthetic
agacaaaggacgucccu

SEQ ID NO: 7632 - RNA, 17 nt, Artificial Sequence
  Synthetic
aguuggcagcacagccu

SEQ ID NO: 7633 - RNA, 17 nt, Artificial Sequence
  Synthetic
gaagaacucccucgccu

SEQ ID NO: 7634 - RNA, 17 nt, Artificial Sequence
  Synthetic
cauacugcggaacuccu

SEQ ID NO: 7635 - RNA, 17 nt, Artificial Sequence
  Synthetic
cucagcccguuucuccu

SEQ ID NO: 7636 - RNA, 17 nt, Artificial Sequence
  Synthetic
guccuccaauuuguccu

SEQ ID NO: 7637 - RNA, 17 nt, Artificial Sequence
  Synthetic
cccagcaaagaauggcu

SEQ ID NO: 7638 - RNA, 17 nt, Artificial Sequence
  Synthetic
caggaggcggaucugcu

SEQ ID NO: 7639 - RNA, 17 nt, Artificial Sequence
  Synthetic
uagccgcuuguuuugcu

SEQ ID NO: 7640 - RNA, 17 nt, Artificial Sequence
  Synthetic
gagaugggaaaaaaucu

SEQ ID NO: 7641 - RNA, 17 nt, Artificial Sequence
  Synthetic
gaacgcccaccaaaucu

SEQ ID NO: 7642 - RNA, 17 nt, Artificial Sequence
  Synthetic
cgaaccugcacgacucu

SEQ ID NO: 7643 - RNA, 17 nt, Artificial Sequence
  Synthetic
  misc_feature (6)..(7): n is a, c, g, or u
ggggannuaaugacucu

SEQ ID NO: 7644 - RNA, 17 nt, Artificial Sequence
  Synthetic
gcuuucccccacugucu

SEQ ID NO: 7645 - RNA, 17 nt, Artificial Sequence
  Synthetic
gcaggcuuucacuuucu

SEQ ID NO: 7646 - RNA, 17 nt, Artificial Sequence
  Synthetic
ggcagaggugaaaaagu

SEQ ID NO: 7647 - RNA, 17 nt, Artificial Sequence
  Synthetic
gagaguaacuccacagu

SEQ ID NO: 7648 - RNA, 17 nt, Artificial Sequence
  Synthetic
gcuucaccucugcacgu

SEQ ID NO: 7649 - RNA, 17 nt, Artificial Sequence
  Synthetic
  misc_feature (1)..(1): n is a, c, g, or u
nugaaccuuuaccccgu

SEQ ID NO: 7650 - RNA, 17 nt, Artificial Sequence
  Synthetic
  misc_feature (11)..(11): n is a, c, g, or u
ggcacagaccnggccgu

SEQ ID NO: 7651 - RNA, 17 nt, Artificial Sequence
  Synthetic
gaucucaaucgccgcgu

SEQ ID NO: 7652 - RNA, 17 nt, Artificial Sequence
  Synthetic
  misc_feature (4)..(4): n is a, c, g, or u
uuuncacccacccaggu

SEQ ID NO: 7653 - RNA, 17 nt, Artificial Sequence
  Synthetic
  misc_feature (8)..(8): n is a, c, g, or u
acgacccnucucggggu

SEQ ID NO: 7654 - RNA, 17 nt, Artificial Sequence
  Synthetic
ccccagccagugggggu

SEQ ID NO: 7655 - RNA, 17 nt, Artificial Sequence
  Synthetic
caagcugugccuugggu

SEQ ID NO: 7656 - RNA, 17 nt, Artificial Sequence
  Synthetic
uguauuuuccugcuggu

SEQ ID NO: 7657 - RNA, 17 nt, Artificial Sequence
  Synthetic
cuauguuucccucaugu

SEQ ID NO: 7658 - RNA, 17 nt, Artificial Sequence
  Synthetic
agaaagccccaugaugu

SEQ ID NO: 7659 - RNA, 17 nt, Artificial Sequence
  Synthetic
ggacuaucaagguaugu

SEQ ID NO: 7660 - RNA, 17 nt, Artificial Sequence
  Synthetic
  misc_feature (6)..(6): n is a, c, g, or u
augcgnggaaccuuugu

SEQ ID NO: 7661 - RNA, 17 nt, Artificial Sequence
  Synthetic
gugucuuggccaaaauu

SEQ ID NO: 7662 - RNA, 17 nt, Artificial Sequence
  Synthetic
uuuuccugauauucauu

SEQ ID NO: 7663 - RNA, 17 nt, Artificial Sequence
  Synthetic
cuuuuggaguguggauu

SEQ ID NO: 7664 - RNA, 17 nt, Artificial Sequence
  Synthetic
ugcaucagcaaacacuu

SEQ ID NO: 7665 - RNA, 17 nt, Artificial Sequence
  Synthetic
ccggaccgugugcacuu

SEQ ID NO: 7666 - RNA, 17 nt, Artificial Sequence
  Synthetic
agauguuguacagacuu

SEQ ID NO: 7667 - RNA, 17 nt, Artificial Sequence
  Synthetic
cccacuggcuggggcuu

SEQ ID NO: 7668 - RNA, 17 nt, Artificial Sequence
  Synthetic
gugggucuuuugggcuu

SEQ ID NO: 7669 - RNA, 17 nt, Artificial Sequence
  Synthetic
gagcucccgugugucuu

SEQ ID NO: 7670 - RNA, 17 nt, Artificial Sequence
  Synthetic
ucaggcaagccauucuu

SEQ ID NO: 7671 - RNA, 17 nt, Artificial Sequence
  Synthetic
ccucgcaggauccaguu

SEQ ID NO: 7672 - RNA, 17 nt, Artificial Sequence
  Synthetic
ccauuuguucagugguu

SEQ ID NO: 7673 - RNA, 17 nt, Artificial Sequence
  Synthetic
ggucugugccaaguguu

SEQ ID NO: 7674 - RNA, 17 nt, Artificial Sequence
  Synthetic
ucuggauuucugguguu

SEQ ID NO: 7675 - RNA, 17 nt, Artificial Sequence
  Synthetic
cccacuccuaccuuguu

SEQ ID NO: 7676 - RNA, 17 nt, Artificial Sequence
  Synthetic
  misc_feature (3)..(3): n is a, c, g, or u
ucngucccgauaaguuu

SEQ ID NO: 7677 - RNA, 17 nt, Artificial Sequence
  Synthetic
cuccuagccgcuuguuu

SEQ ID NO: 7678 - RNA, 17 nt, Artificial Sequence
  Synthetic
uggggacugcgaauuuu

SEQ ID NO: 7679 - RNA, 17 nt, Artificial Sequence
  Synthetic
ggaguuacucucguuuu

SEQ ID NO: 7680 - RNA, 17 nt, Artificial Sequence
  Synthetic
cugcuggcaauguuuuu

SEQ ID NO: 7681 - RNA, 20 nt, Artificial Sequence
  Synthetic
cugagggcuccaccccaaaa

SEQ ID NO: 7682 - RNA, 20 nt, Artificial Sequence
  Synthetic
ugaagaggaagaugauaaaa

SEQ ID NO: 7683 - RNA, 20 nt, Artificial Sequence
  Synthetic
ccagcuuauagaccaccaaa

SEQ ID NO: 7684 - RNA, 20 nt, Artificial Sequence
  Synthetic
  misc_feature (2)..(3): n is a, c, g, or u
annuauuguuuacacagaaa

SEQ ID NO: 7685 - RNA, 20 nt, Artificial Sequence
  Synthetic
  misc_feature (5)..(5): n is a, c, g, or u
  misc_feature (11)..(11): n is a, c, g, or u
cagunuggugnggugaacaa

SEQ ID NO: 7686 - RNA, 20 nt, Artificial Sequence
  Synthetic
acuuucucgccaacuuacaa

SEQ ID NO: 7687 - RNA, 20 nt, Artificial Sequence
  Synthetic
  misc_feature (5)..(5): n is a, c, g, or u
  misc_feature (8)..(8): n is a, c, g, or u
caugnccnaaagccacccaa

SEQ ID NO: 7688 - RNA, 20 nt, Artificial Sequence
  Synthetic
uuguguaaaaggggcagcaa

SEQ ID NO: 7689 - RNA, 20 nt, Artificial Sequence
  Synthetic
gguggagcccucaggcucaa

SEQ ID NO: 7690 - RNA, 20 nt, Artificial Sequence
  Synthetic
cgagagggaccguccaagaa

SEQ ID NO: 7691 - RNA, 20 nt, Artificial Sequence
  Synthetic
cugaaggaaagaagucagaa

SEQ ID NO: 7692 - RNA, 20 nt, Artificial Sequence
  Synthetic
cacgguccggcagaugagaa

SEQ ID NO: 7693 - RNA, 20 nt, Artificial Sequence
  Synthetic
  misc_feature (12)..(12): n is a, c, g, or u
ggagugaacccnggcccgaa

SEQ ID NO: 7694 - RNA, 20 nt, Artificial Sequence
  Synthetic
ucccauaggaauuuuccgaa

SEQ ID NO: 7695 - RNA, 20 nt, Artificial Sequence
  Synthetic
caccaaucggcagucaggaa

SEQ ID NO: 7696 - RNA, 20 nt, Artificial Sequence
  Synthetic
aaagccagacagugggggaa

SEQ ID NO: 7697 - RNA, 20 nt, Artificial Sequence
  Synthetic
acccugcaccgaacauggaa

SEQ ID NO: 7698 - RNA, 20 nt, Artificial Sequence
  Synthetic
acaucauccauauaacugaa

SEQ ID NO: 7699 - RNA, 20 nt, Artificial Sequence
  Synthetic
uuucugguguuugcucugaa

SEQ ID NO: 7700 - RNA, 20 nt, Artificial Sequence
  Synthetic
uaaguuggcgagaaagugaa

SEQ ID NO: 7701 - RNA, 20 nt, Artificial Sequence
  Synthetic
cgcauggagaccaccgugaa

SEQ ID NO: 7702 - RNA, 20 nt, Artificial Sequence
  Synthetic
  misc_feature (15)..(15): n is a, c, g, or u
  misc_feature (18)..(18): n is a, c, g, or u
ggucaauguccaugnccnaa

SEQ ID NO: 7703 - RNA, 20 nt, Artificial Sequence
  Synthetic
caaugcucaggagauucuaa

SEQ ID NO: 7704 - RNA, 20 nt, Artificial Sequence
  Synthetic
  misc_feature (17)..(17): n is a, c, g, or u
cagguauaguagaaganuaa

SEQ ID NO: 7705 - RNA, 20 nt, Artificial Sequence
  Synthetic
cacgcauacagaggcauuaa

SEQ ID NO: 7706 - RNA, 20 nt, Artificial Sequence
  Synthetic
  misc_feature (7)..(7): n is a, c, g, or u
auguggnuauccugcuuuaa

SEQ ID NO: 7707 - RNA, 20 nt, Artificial Sequence
  Synthetic
gccaccagcaggaaaauaca

SEQ ID NO: 7708 - RNA, 20 nt, Artificial Sequence
  Synthetic
gccugcuuagauugaauaca

SEQ ID NO: 7709 - RNA, 20 nt, Artificial Sequence
  Synthetic
uggucugcgcaccagcacca

SEQ ID NO: 7710 - RNA, 20 nt, Artificial Sequence
  Synthetic
agacacucauccucaggcca

SEQ ID NO: 7711 - RNA, 20 nt, Artificial Sequence
  Synthetic
gcgcugauggccuauggcca

SEQ ID NO: 7712 - RNA, 20 nt, Artificial Sequence
  Synthetic
uccuacuguucaagccucca

SEQ ID NO: 7713 - RNA, 20 nt, Artificial Sequence
  Synthetic
gcguguauucaaucuaagca

SEQ ID NO: 7714 - RNA, 20 nt, Artificial Sequence
  Synthetic
agaugggaaaaaaucuagca

SEQ ID NO: 7715 - RNA, 20 nt, Artificial Sequence
  Synthetic
ugcuggcaauguuuuuagca

SEQ ID NO: 7716 - RNA, 20 nt, Artificial Sequence
  Synthetic
gagcccucaggcucaaggca

SEQ ID NO: 7717 - RNA, 20 nt, Artificial Sequence
  Synthetic
  misc_feature (6)..(6): n is a, c, g, or u
caccanacugcacucaggca

SEQ ID NO: 7718 - RNA, 20 nt, Artificial Sequence
  Synthetic
  misc_feature (4)..(4): n is a, c, g, or u
  misc_feature (10)..(10): n is a, c, g, or u
accncaccanacugcacuca

SEQ ID NO: 7719 - RNA, 20 nt, Artificial Sequence
  Synthetic
cuuuugggguggagcccuca

SEQ ID NO: 7720 - RNA, 20 nt, Artificial Sequence
  Synthetic
uugagagacacucauccuca

SEQ ID NO: 7721 - RNA, 20 nt, Artificial Sequence
  Synthetic
acgaagauuaaacuuaguca

SEQ ID NO: 7722 - RNA, 20 nt, Artificial Sequence
  Synthetic
uaauaugggccuaaaguuca

SEQ ID NO: 7723 - RNA, 20 nt, Artificial Sequence
  Synthetic
uguucauguccuacuguuca

SEQ ID NO: 7724 - RNA, 20 nt, Artificial Sequence
  Synthetic
  misc_feature (1)..(1): n is a, c, g, or u
nuacuguuguuagacgaaga

SEQ ID NO: 7725 - RNA, 20 nt, Artificial Sequence
  Synthetic
  misc_feature (7)..(7): n is a, c, g, or u
aguuucncuuuuauauaaga

SEQ ID NO: 7726 - RNA, 20 nt, Artificial Sequence
  Synthetic
ugcaggaucccagaguaaga

SEQ ID NO: 7727 - RNA, 20 nt, Artificial Sequence
  Synthetic
auugaauacacgcauacaga

SEQ ID NO: 7728 - RNA, 20 nt, Artificial Sequence
  Synthetic
uaaaggucuuuguacuagga

SEQ ID NO: 7729 - RNA, 20 nt, Artificial Sequence
  Synthetic
gguucacucccccacacgga

SEQ ID NO: 7730 - RNA, 20 nt, Artificial Sequence
  Synthetic
gccucagcucuguaucggga

SEQ ID NO: 7731 - RNA, 20 nt, Artificial Sequence
  Synthetic
aaggaauacuaacauuggga

SEQ ID NO: 7732 - RNA, 20 nt, Artificial Sequence
  Synthetic
cugacuacuaggucccugga

SEQ ID NO: 7733 - RNA, 20 nt, Artificial Sequence
  Synthetic
ccugacugccgauuggugga

SEQ ID NO: 7734 - RNA, 20 nt, Artificial Sequence
  Synthetic
cacccaaggcacagcuugga

SEQ ID NO: 7735 - RNA, 20 nt, Artificial Sequence
  Synthetic
  misc_feature (18)..(18): n is a, c, g, or u
aacaaagaccacuggacnga

SEQ ID NO: 7736 - RNA, 20 nt, Artificial Sequence
  Synthetic
aagaaccaacaagaagauga

SEQ ID NO: 7737 - RNA, 20 nt, Artificial Sequence
  Synthetic
agccaggagaaacgggcuga

SEQ ID NO: 7738 - RNA, 20 nt, Artificial Sequence
  Synthetic
cugugccaaguguuugcuga

SEQ ID NO: 7739 - RNA, 20 nt, Artificial Sequence
  Synthetic
aagauugacgagaugaguga

SEQ ID NO: 7740 - RNA, 20 nt, Artificial Sequence
  Synthetic
uccuaggaauccugauguga

SEQ ID NO: 7741 - RNA, 20 nt, Artificial Sequence
  Synthetic
augucaacgaccgaccuuga

SEQ ID NO: 7742 - RNA, 20 nt, Artificial Sequence
  Synthetic
gacauacuuuccaaucaaua

SEQ ID NO: 7743 - RNA, 20 nt, Artificial Sequence
  Synthetic
cuggcuggggcuuggccaua

SEQ ID NO: 7744 - RNA, 20 nt, Artificial Sequence
  Synthetic
ggggcauuugguggucuaua

SEQ ID NO: 7745 - RNA, 20 nt, Artificial Sequence
  Synthetic
  misc_feature (5)..(5): n is a, c, g, or u
caucnuuuccauggcugcua

SEQ ID NO: 7746 - RNA, 20 nt, Artificial Sequence
  Synthetic
uccucuucauccugcugcua

SEQ ID NO: 7747 - RNA, 20 nt, Artificial Sequence
  Synthetic
guaugcguguauucaaucua

SEQ ID NO: 7748 - RNA, 20 nt, Artificial Sequence
  Synthetic
aacaaacagucuuugaagua

SEQ ID NO: 7749 - RNA, 20 nt, Artificial Sequence
  Synthetic
aagguggagugauuggggua

SEQ ID NO: 7750 - RNA, 20 nt, Artificial Sequence
  Synthetic
cuuuguacuaggaggcugua

SEQ ID NO: 7751 - RNA, 20 nt, Artificial Sequence
  Synthetic
acaugaacaagagaugauua

SEQ ID NO: 7752 - RNA, 20 nt, Artificial Sequence
  Synthetic
cuggugcgcagaccaauuua

SEQ ID NO: 7753 - RNA, 20 nt, Artificial Sequence
  Synthetic
caauaauugccugaacuuua

SEQ ID NO: 7754 - RNA, 20 nt, Artificial Sequence
  Synthetic
uuaccccguugcccggcaac

SEQ ID NO: 7755 - RNA, 20 nt, Artificial Sequence
  Synthetic
  misc_feature (15)..(15): n is a, c, g, or u
gccccguggucggcnggaac

SEQ ID NO: 7756 - RNA, 20 nt, Artificial Sequence
  Synthetic
uccguccgaagguuuugaac

SEQ ID NO: 7757 - RNA, 20 nt, Artificial Sequence
  Synthetic
caggauccaguuggcagcac

SEQ ID NO: 7758 - RNA, 20 nt, Artificial Sequence
  Synthetic
  misc_feature (3)..(3): n is a, c, g, or u
ccnaaagccacccaaggcac

SEQ ID NO: 7759 - RNA, 20 nt, Artificial Sequence
  Synthetic
ggguaggcugccuuccugac

SEQ ID NO: 7760 - RNA, 20 nt, Artificial Sequence
  Synthetic
  misc_feature (12)..(12): n is a, c, g, or u
  misc_feature (18)..(18): n is a, c, g, or u
cauuguucaccncaccanac

SEQ ID NO: 7761 - RNA, 20 nt, Artificial Sequence
  Synthetic
gacaaaaauccucacaauac

SEQ ID NO: 7762 - RNA, 20 nt, Artificial Sequence
  Synthetic
guaagagaucuucuagauac

SEQ ID NO: 7763 - RNA, 20 nt, Artificial Sequence
  Synthetic
gugaacccuguuccgacuac

SEQ ID NO: 7764 - RNA, 20 nt, Artificial Sequence
  Synthetic
gcagaccaauuuaugccuac

SEQ ID NO: 7765 - RNA, 20 nt, Artificial Sequence
  Synthetic
guacgggacccugccgaacc

SEQ ID NO: 7766 - RNA, 20 nt, Artificial Sequence
  Synthetic
guuccggaacuggagccacc

SEQ ID NO: 7767 - RNA, 20 nt, Artificial Sequence
  Synthetic
cauaaauuggucugcgcacc

SEQ ID NO: 7768 - RNA, 20 nt, Artificial Sequence
  Synthetic
  misc_feature (10)..(10): n is a, c, g, or u
gauaaguuungcuccagacc

SEQ ID NO: 7769 - RNA, 20 nt, Artificial Sequence
  Synthetic
aguucuucuucuaggggacc

SEQ ID NO: 7770 - RNA, 20 nt, Artificial Sequence
  Synthetic
uuugucaacaagaaaaaccc

SEQ ID NO: 7771 - RNA, 20 nt, Artificial Sequence
  Synthetic
caaccaccaguacgggaccc

SEQ ID NO: 7772 - RNA, 20 nt, Artificial Sequence
  Synthetic
uucucgaggauuggggaccc

SEQ ID NO: 7773 - RNA, 20 nt, Artificial Sequence
  Synthetic
aucaggauuccuaggacccc

SEQ ID NO: 7774 - RNA, 20 nt, Artificial Sequence
  Synthetic
  misc_feature (12)..(13): n is a, c, g, or u
uagagucauuannucccccc

SEQ ID NO: 7775 - RNA, 20 nt, Artificial Sequence
  Synthetic
auggccuauggccaagcccc

SEQ ID NO: 7776 - RNA, 20 nt, Artificial Sequence
  Synthetic
gaaccuuuaccccguugccc

SEQ ID NO: 7777 - RNA, 20 nt, Artificial Sequence
  Synthetic
uuggcgagaaagugaaagcc

SEQ ID NO: 7778 - RNA, 20 nt, Artificial Sequence
  Synthetic
agauuaaacuuagucaugcc

SEQ ID NO: 7779 - RNA, 20 nt, Artificial Sequence
  Synthetic
  misc_feature (3)..(3): n is a, c, g, or u
ucncuuuuauauaagaugcc

SEQ ID NO: 7780 - RNA, 20 nt, Artificial Sequence
  Synthetic
ggcaugcuaaaaacauugcc

SEQ ID NO: 7781 - RNA, 20 nt, Artificial Sequence
  Synthetic
uaucaucuuccucuucaucc

SEQ ID NO: 7782 - RNA, 20 nt, Artificial Sequence
  Synthetic
  misc_feature (5)..(5): n is a, c, g, or u
ggugnaaauuuggaagaucc

SEQ ID NO: 7783 - RNA, 20 nt, Artificial Sequence
  Synthetic
ggccucuuacucugggaucc

SEQ ID NO: 7784 - RNA, 20 nt, Artificial Sequence
  Synthetic
cccgaccaccaguuggaucc

SEQ ID NO: 7785 - RNA, 20 nt, Artificial Sequence
  Synthetic
  misc_feature (15)..(15): n is a, c, g, or u
uuuacacaauguggnuaucc

SEQ ID NO: 7786 - RNA, 20 nt, Artificial Sequence
  Synthetic
uugccagcagauccgccucc

SEQ ID NO: 7787 - RNA, 20 nt, Artificial Sequence
  Synthetic
guguggauucgcacuccucc

SEQ ID NO: 7788 - RNA, 20 nt, Artificial Sequence
  Synthetic
cgcagaagaucucaaucucc

SEQ ID NO: 7789 - RNA, 20 nt, Artificial Sequence
  Synthetic
aagcgaagugcacacggucc

SEQ ID NO: 7790 - RNA, 20 nt, Artificial Sequence
  Synthetic
ccuucuccgucugccguucc

SEQ ID NO: 7791 - RNA, 20 nt, Artificial Sequence
  Synthetic
guaagaggccuguauuuucc

SEQ ID NO: 7792 - RNA, 20 nt, Artificial Sequence
  Synthetic
cugcugcgagcaaaacaagc

SEQ ID NO: 7793 - RNA, 20 nt, Artificial Sequence
  Synthetic
acaagaagaugaggcauagc

SEQ ID NO: 7794 - RNA, 20 nt, Artificial Sequence
  Synthetic
aguuggcagcacagccuagc

SEQ ID NO: 7795 - RNA, 20 nt, Artificial Sequence
  Synthetic
cauacugcggaacuccuagc

SEQ ID NO: 7796 - RNA, 20 nt, Artificial Sequence
  Synthetic
agaggaagaugauaaaacgc

SEQ ID NO: 7797 - RNA, 20 nt, Artificial Sequence
  Synthetic
uagccgcuuguuuugcucgc

SEQ ID NO: 7798 - RNA, 20 nt, Artificial Sequence
  Synthetic
caaucggcagucaggaaggc

SEQ ID NO: 7799 - RNA, 20 nt, Artificial Sequence
  Synthetic
guggagugauugggguaggc

SEQ ID NO: 7800 - RNA, 20 nt, Artificial Sequence
  Synthetic
ccacauuguguaaaaggggc

SEQ ID NO: 7801 - RNA, 20 nt, Artificial Sequence
  Synthetic
  misc_feature (10)..(10): n is a, c, g, or u
auauacaucnuuuccauggc

SEQ ID NO: 7802 - RNA, 20 nt, Artificial Sequence
  Synthetic
ccucgcaggauccaguuggc

SEQ ID NO: 7803 - RNA, 20 nt, Artificial Sequence
  Synthetic
caucuuccucuucauccugc

SEQ ID NO: 7804 - RNA, 20 nt, Artificial Sequence
  Synthetic
ccauggcugcuaggcugugc

SEQ ID NO: 7805 - RNA, 20 nt, Artificial Sequence
  Synthetic
gugggucuuuugggcuuugc

SEQ ID NO: 7806 - RNA, 20 nt, Artificial Sequence
  Synthetic
  misc_feature (19)..(19): n is a, c, g, or u
uagaaaacucccuguuaanc

SEQ ID NO: 7807 - RNA, 20 nt, Artificial Sequence
  Synthetic
gccuccugccuccaccaauc

SEQ ID NO: 7808 - RNA, 20 nt, Artificial Sequence
  Synthetic
cagccaguggggguugcauc

SEQ ID NO: 7809 - RNA, 20 nt, Artificial Sequence
  Synthetic
cccgucugugccuucucauc

SEQ ID NO: 7810 - RNA, 20 nt, Artificial Sequence
  Synthetic
aaaaacauugccagcagauc

SEQ ID NO: 7811 - RNA, 20 nt, Artificial Sequence
  Synthetic
guggaggcaggaggcggauc

SEQ ID NO: 7812 - RNA, 20 nt, Artificial Sequence
  Synthetic
ggaguuccgcaguauggauc

SEQ ID NO: 7813 - RNA, 20 nt, Artificial Sequence
  Synthetic
ugugcacuucgcuucaccuc

SEQ ID NO: 7814 - RNA, 20 nt, Artificial Sequence
  Synthetic
ccaugcaacuuuuucaccuc

SEQ ID NO: 7815 - RNA, 20 nt, Artificial Sequence
  Synthetic
gaucuucuagauaccgccuc

SEQ ID NO: 7816 - RNA, 20 nt, Artificial Sequence
  Synthetic
uuccuaugggagugggccuc

SEQ ID NO: 7817 - RNA, 20 nt, Artificial Sequence
  Synthetic
  misc_feature (1)..(1): n is a, c, g, or u
nggaaccuuuguggcuccuc

SEQ ID NO: 7818 - RNA, 20 nt, Artificial Sequence
  Synthetic
cacaacauuccaccaagcuc

SEQ ID NO: 7819 - RNA, 20 nt, Artificial Sequence
  Synthetic
aagaggacucuuggacucuc

SEQ ID NO: 7820 - RNA, 20 nt, Artificial Sequence
  Synthetic
  misc_feature (3)..(3): n is a, c, g, or u
cunucguccccuucuccguc

SEQ ID NO: 7821 - RNA, 20 nt, Artificial Sequence
  Synthetic
  misc_feature (12)..(12): n is a, c, g, or u
cgaccccgagangggucguc

SEQ ID NO: 7822 - RNA, 20 nt, Artificial Sequence
  Synthetic
gagaggugcgccccgugguc

SEQ ID NO: 7823 - RNA, 20 nt, Artificial Sequence
  Synthetic
aaacaagcggcuaggaguuc

SEQ ID NO: 7824 - RNA, 20 nt, Artificial Sequence
  Synthetic
agcaagagucgugcagguuc

SEQ ID NO: 7825 - RNA, 20 nt, Artificial Sequence
  Synthetic
accuuauucuugggaacaag

SEQ ID NO: 7826 - RNA, 20 nt, Artificial Sequence
  Synthetic
ugaugggaugggaauacaag

SEQ ID NO: 7827 - RNA, 20 nt, Artificial Sequence
  Synthetic
cgugcagaggugaagcgaag

SEQ ID NO: 7828 - RNA, 20 nt, Artificial Sequence
  Synthetic
ucuaaggcaucccgauacag

SEQ ID NO: 7829 - RNA, 20 nt, Artificial Sequence
  Synthetic
cuuacucugggauccugcag

SEQ ID NO: 7830 - RNA, 20 nt, Artificial Sequence
  Synthetic
gcuuggccauaggccaucag

SEQ ID NO: 7831 - RNA, 20 nt, Artificial Sequence
  Synthetic
cuuugucuacgucccgucag

SEQ ID NO: 7832 - RNA, 20 nt, Artificial Sequence
  Synthetic
caguuggauccagcauucag

SEQ ID NO: 7833 - RNA, 20 nt, Artificial Sequence
  Synthetic
gggucguccgcaggauucag

SEQ ID NO: 7834 - RNA, 20 nt, Artificial Sequence
  Synthetic
uagcaugccuugagccugag

SEQ ID NO: 7835 - RNA, 20 nt, Artificial Sequence
  Synthetic
caaagaauggcuugccugag

SEQ ID NO: 7836 - RNA, 20 nt, Artificial Sequence
  Synthetic
cuccuggcucaguuuacuag

SEQ ID NO: 7837 - RNA, 20 nt, Artificial Sequence
  Synthetic
  misc_feature (6)..(6): n is a, c, g, or u
  misc_feature (15)..(15): n is a, c, g, or u
aaaagngaaacuacncguag

SEQ ID NO: 7838 - RNA, 20 nt, Artificial Sequence
  Synthetic
cuggaauuagaggacaaacg

SEQ ID NO: 7839 - RNA, 20 nt, Artificial Sequence
  Synthetic
aaacugagccaggagaaacg

SEQ ID NO: 7840 - RNA, 20 nt, Artificial Sequence
  Synthetic
aaaaccccgccuguaacacg

SEQ ID NO: 7841 - RNA, 20 nt, Artificial Sequence
  Synthetic
acgguggucuccaugcgacg

SEQ ID NO: 7842 - RNA, 20 nt, Artificial Sequence
  Synthetic
auuuguucagugguucgccg

SEQ ID NO: 7843 - RNA, 20 nt, Artificial Sequence
  Synthetic
  misc_feature (9)..(9): n is a, c, g, or u
cacagaccnggccguugccg

SEQ ID NO: 7844 - RNA, 20 nt, Artificial Sequence
  Synthetic
uacauacccuauggaaggcg

SEQ ID NO: 7845 - RNA, 20 nt, Artificial Sequence
  Synthetic
  misc_feature (3)..(3): n is a, c, g, or u
uungcuccagaccugcugcg

SEQ ID NO: 7846 - RNA, 20 nt, Artificial Sequence
  Synthetic
gguuccuugagcaagagucg

SEQ ID NO: 7847 - RNA, 20 nt, Artificial Sequence
  Synthetic
gguaggagugggagcauucg

SEQ ID NO: 7848 - RNA, 20 nt, Artificial Sequence
  Synthetic
  misc_feature (3)..(3): n is a, c, g, or u
uanccacauuguguaaaagg

SEQ ID NO: 7849 - RNA, 20 nt, Artificial Sequence
  Synthetic
gcaguauggaucggcagagg

SEQ ID NO: 7850 - RNA, 20 nt, Artificial Sequence
  Synthetic
  misc_feature (11)..(11): n is a, c, g, or u
aggugacccanaaaaugagg

SEQ ID NO: 7851 - RNA, 20 nt, Artificial Sequence
  Synthetic
ggaaguguugauaagauagg

SEQ ID NO: 7852 - RNA, 20 nt, Artificial Sequence
  Synthetic
caaggugggaaauuuuacgg

SEQ ID NO: 7853 - RNA, 20 nt, Artificial Sequence
  Synthetic
gugaugcuuuccauguucgg

SEQ ID NO: 7854 - RNA, 20 nt, Artificial Sequence
  Synthetic
uuuuggccaagacacacggg

SEQ ID NO: 7855 - RNA, 20 nt, Artificial Sequence
  Synthetic
  misc_feature (7)..(7): n is a, c, g, or u
cguuccngccgaccacgggg

SEQ ID NO: 7856 - RNA, 20 nt, Artificial Sequence
  Synthetic
ucucucaauuuucuaggggg

SEQ ID NO: 7857 - RNA, 20 nt, Artificial Sequence
  Synthetic
gccaacaagguaggaguggg

SEQ ID NO: 7858 - RNA, 20 nt, Artificial Sequence
  Synthetic
auggaugaugugguauuggg

SEQ ID NO: 7859 - RNA, 20 nt, Artificial Sequence
  Synthetic
gaggugaaaaaguugcaugg

SEQ ID NO: 7860 - RNA, 20 nt, Artificial Sequence
  Synthetic
gaacaagagcuacaucaugg

SEQ ID NO: 7861 - RNA, 20 nt, Artificial Sequence
  Synthetic
guucacuguuccggaacugg

SEQ ID NO: 7862 - RNA, 20 nt, Artificial Sequence
  Synthetic
auuuguuaauaauguccugg

SEQ ID NO: 7863 - RNA, 20 nt, Artificial Sequence
  Synthetic
augcaacccccacuggcugg

SEQ ID NO: 7864 - RNA, 20 nt, Artificial Sequence
  Synthetic
uuugcucgcagcaggucugg

SEQ ID NO: 7865 - RNA, 20 nt, Artificial Sequence
  Synthetic
acggaggccuuuuggggugg

SEQ ID NO: 7866 - RNA, 20 nt, Artificial Sequence
  Synthetic
gacccuuauaaagaauuugg

SEQ ID NO: 7867 - RNA, 20 nt, Artificial Sequence
  Synthetic
  misc_feature (14)..(14): n is a, c, g, or u
ccacaaagguuccncgcaug

SEQ ID NO: 7868 - RNA, 20 nt, Artificial Sequence
  Synthetic
auucccaucccaucaucaug

SEQ ID NO: 7869 - RNA, 20 nt, Artificial Sequence
  Synthetic
guuaugucaauacuaauaug

SEQ ID NO: 7870 - RNA, 20 nt, Artificial Sequence
  Synthetic
caaauggcacuaguaaacug

SEQ ID NO: 7871 - RNA, 20 nt, Artificial Sequence
  Synthetic
ggaugccuuagaaucuccug

SEQ ID NO: 7872 - RNA, 20 nt, Artificial Sequence
  Synthetic
cuguucaagccuccaagcug

SEQ ID NO: 7873 - RNA, 20 nt, Artificial Sequence
  Synthetic
uuuccauggcugcuaggcug

SEQ ID NO: 7874 - RNA, 20 nt, Artificial Sequence
  Synthetic
uuacgcggucuccccgucug

SEQ ID NO: 7875 - RNA, 20 nt, Artificial Sequence
  Synthetic
  misc_feature (14)..(14): n is a, c, g, or u
cccggcaacggccnggucug

SEQ ID NO: 7876 - RNA, 20 nt, Artificial Sequence
  Synthetic
uguaggcauaaauuggucug

SEQ ID NO: 7877 - RNA, 20 nt, Artificial Sequence
  Synthetic
ggaaaauuccuaugggagug

SEQ ID NO: 7878 - RNA, 20 nt, Artificial Sequence
  Synthetic
uucucaucugccggaccgug

SEQ ID NO: 7879 - RNA, 20 nt, Artificial Sequence
  Synthetic
agaccgcguaaagagaggug

SEQ ID NO: 7880 - RNA, 20 nt, Artificial Sequence
  Synthetic
aaaguugcauggugcuggug

SEQ ID NO: 7881 - RNA, 20 nt, Artificial Sequence
  Synthetic
uccucuuauguaagaccuug

SEQ ID NO: 7882 - RNA, 20 nt, Artificial Sequence
  Synthetic
aauguuuuuagcaugccuug

SEQ ID NO: 7883 - RNA, 20 nt, Artificial Sequence
  Synthetic
ggaaacauagagguuccuug

SEQ ID NO: 7884 - RNA, 20 nt, Artificial Sequence
  Synthetic
  misc_feature (3)..(3): n is a, c, g, or u
aangaauugugggucuuuug

SEQ ID NO: 7885 - RNA, 20 nt, Artificial Sequence
  Synthetic
  misc_feature (20)..(20): n is a, c, g, or u
caaacacuuggcacagaccn

SEQ ID NO: 7886 - RNA, 20 nt, Artificial Sequence
  Synthetic
  misc_feature (20)..(20): n is a, c, g, or u
cgugugggggagugaacccn

SEQ ID NO: 7887 - RNA, 20 nt, Artificial Sequence
  Synthetic
  misc_feature (20)..(20): n is a, c, g, or u
gaggagccacaaagguuccn

SEQ ID NO: 7888 - RNA, 20 nt, Artificial Sequence
  Synthetic
cggcgaaccacugaacaaau

SEQ ID NO: 7889 - RNA, 20 nt, Artificial Sequence
  Synthetic
caaaaccuucggacggaaau

SEQ ID NO: 7890 - RNA, 20 nt, Artificial Sequence
  Synthetic
ucgcagacgaagaucucaau

SEQ ID NO: 7891 - RNA, 20 nt, Artificial Sequence
  Synthetic
  misc_feature (2)..(3): n is a, c, g, or u
annuccccccagcaaagaau

SEQ ID NO: 7892 - RNA, 20 nt, Artificial Sequence
  Synthetic
aaaugugaaaccacaauaau

SEQ ID NO: 7893 - RNA, 20 nt, Artificial Sequence
  Synthetic
ucaaggcaugcuaaaaacau

SEQ ID NO: 7894 - RNA, 20 nt, Artificial Sequence
  Synthetic
ucaaggucggucguugacau

SEQ ID NO: 7895 - RNA, 20 nt, Artificial Sequence
  Synthetic
  misc_feature (13)..(13): n is a, c, g, or u
gaaauauacaucnuuuccau

SEQ ID NO: 7896 - RNA, 20 nt, Artificial Sequence
  Synthetic
ccaacaagaagaugaggcau

SEQ ID NO: 7897 - RNA, 20 nt, Artificial Sequence
  Synthetic
ccgcagacacauccagcgau

SEQ ID NO: 7898 - RNA, 20 nt, Artificial Sequence
  Synthetic
  misc_feature (7)..(7): n is a, c, g, or u
gguuccncgcaugcgcugau

SEQ ID NO: 7899 - RNA, 20 nt, Artificial Sequence
  Synthetic
cgcaugcgcugauggccuau

SEQ ID NO: 7900 - RNA, 20 nt, Artificial Sequence
  Synthetic
cuccaauuuguccuggcuau

SEQ ID NO: 7901 - RNA, 20 nt, Artificial Sequence
  Synthetic
uugcugaugcaacccccacu

SEQ ID NO: 7902 - RNA, 20 nt, Artificial Sequence
  Synthetic
cccuagaagaagaacucccu

SEQ ID NO: 7903 - RNA, 20 nt, Artificial Sequence
  Synthetic
cguagacaaaggacgucccu

SEQ ID NO: 7904 - RNA, 20 nt, Artificial Sequence
  Synthetic
uccaguuggcagcacagccu

SEQ ID NO: 7905 - RNA, 20 nt, Artificial Sequence
  Synthetic
gaagaagaacucccucgccu

SEQ ID NO: 7906 - RNA, 20 nt, Artificial Sequence
  Synthetic
auccauacugcggaacuccu

SEQ ID NO: 7907 - RNA, 20 nt, Artificial Sequence
  Synthetic
ggccucagcccguuucuccu

SEQ ID NO: 7908 - RNA, 20 nt, Artificial Sequence
  Synthetic
cuuguccuccaauuuguccu

SEQ ID NO: 7909 - RNA, 20 nt, Artificial Sequence
  Synthetic
ccccccagcaaagaauggcu

SEQ ID NO: 7910 - RNA, 20 nt, Artificial Sequence
  Synthetic
aggcaggaggcggaucugcu

SEQ ID NO: 7911 - RNA, 20 nt, Artificial Sequence
  Synthetic
uccuagccgcuuguuuugcu

SEQ ID NO: 7912 - RNA, 20 nt, Artificial Sequence
  Synthetic
guagagaugggaaaaaaucu

SEQ ID NO: 7913 - RNA, 20 nt, Artificial Sequence
  Synthetic
cgugaacgcccaccaaaucu

SEQ ID NO: 7914 - RNA, 20 nt, Artificial Sequence
  Synthetic
ugccgaaccugcacgacucu

SEQ ID NO: 7915 - RNA, 20 nt, Artificial Sequence
  Synthetic
  misc_feature (9)..(10): n is a, c, g, or u
uggggggannuaaugacucu

SEQ ID NO: 7916 - RNA, 20 nt, Artificial Sequence
  Synthetic
cgggcuuucccccacugucu

SEQ ID NO: 7917 - RNA, 20 nt, Artificial Sequence
  Synthetic
uaagcaggcuuucacuuucu

SEQ ID NO: 7918 - RNA, 20 nt, Artificial Sequence
  Synthetic
uuaggcagaggugaaaaagu

SEQ ID NO: 7919 - RNA, 20 nt, Artificial Sequence
  Synthetic
aacgagaguaacuccacagu

SEQ ID NO: 7920 - RNA, 20 nt, Artificial Sequence
  Synthetic
uucgcuucaccucugcacgu

SEQ ID NO: 7921 - RNA, 20 nt, Artificial Sequence
  Synthetic
  misc_feature (3)..(4): n is a, c, g, or u
uannugaaccuuuaccccgu

SEQ ID NO: 7922 - RNA, 20 nt, Artificial Sequence
  Synthetic
  misc_feature (14)..(14): n is a, c, g, or u
cuuggcacagaccnggccgu

SEQ ID NO: 7923 - RNA, 20 nt, Artificial Sequence
  Synthetic
gaagaucucaaucgccgcgu

SEQ ID NO: 7924 - RNA, 20 nt, Artificial Sequence
  Synthetic
  misc_feature (7)..(7): n is a, c, g, or u
aaauuuncacccacccaggu

SEQ ID NO: 7925 - RNA, 20 nt, Artificial Sequence
  Synthetic
  misc_feature (11)..(11): n is a, c, g, or u
cggacgacccnucucggggu

SEQ ID NO: 7926 - RNA, 20 nt, Artificial Sequence
  Synthetic
aagccccagccagugggggu

SEQ ID NO: 7927 - RNA, 20 nt, Artificial Sequence
  Synthetic
cuccaagcugugccuugggu

SEQ ID NO: 7928 - RNA, 20 nt, Artificial Sequence
  Synthetic
gccuguauuuuccugcuggu

SEQ ID NO: 7929 - RNA, 20 nt, Artificial Sequence
  Synthetic
ccucuauguuucccucaugu

SEQ ID NO: 7930 - RNA, 20 nt, Artificial Sequence
  Synthetic
ccaagaaagccccaugaugu

SEQ ID NO: 7931 - RNA, 20 nt, Artificial Sequence
  Synthetic
ucuggacuaucaagguaugu

SEQ ID NO: 7932 - RNA, 20 nt, Artificial Sequence
  Synthetic
  misc_feature (9)..(9): n is a, c, g, or u
cgcaugcgnggaaccuuugu

SEQ ID NO: 7933 - RNA, 20 nt, Artificial Sequence
  Synthetic
cgugugucuuggccaaaauu

SEQ ID NO: 7934 - RNA, 20 nt, Artificial Sequence
  Synthetic
aucuuuuccugauauucauu

SEQ ID NO: 7935 - RNA, 20 nt, Artificial Sequence
  Synthetic
ugucuuuuggaguguggauu

SEQ ID NO: 7936 - RNA, 20 nt, Artificial Sequence
  Synthetic
gguugcaucagcaaacacuu

SEQ ID NO: 7937 - RNA, 20 nt, Artificial Sequence
  Synthetic
cugccggaccgugugcacuu

SEQ ID NO: 7938 - RNA, 20 nt, Artificial Sequence
  Synthetic
ucaagauguuguacagacuu

SEQ ID NO: 7939 - RNA, 20 nt, Artificial Sequence
  Synthetic
acccccacuggcuggggcuu

SEQ ID NO: 7940 - RNA, 20 nt, Artificial Sequence
  Synthetic
auugugggucuuuugggcuu

SEQ ID NO: 7941 - RNA, 20 nt, Artificial Sequence
  Synthetic
ggggagcucccgugugucuu

SEQ ID NO: 7942 - RNA, 20 nt, Artificial Sequence
  Synthetic
cacucaggcaagccauucuu

SEQ ID NO: 7943 - RNA, 20 nt, Artificial Sequence
  Synthetic
gucccucgcaggauccaguu

SEQ ID NO: 7944 - RNA, 20 nt, Artificial Sequence
  Synthetic
gugccauuuguucagugguu

SEQ ID NO: 7945 - RNA, 20 nt, Artificial Sequence
  Synthetic
  misc_feature (3)..(3): n is a, c, g, or u
ccnggucugugccaaguguu

SEQ ID NO: 7946 - RNA, 20 nt, Artificial Sequence
  Synthetic
caaucuggauuucugguguu

SEQ ID NO: 7947 - RNA, 20 nt, Artificial Sequence
  Synthetic
gcucccacuccuaccuuguu

SEQ ID NO: 7948 - RNA, 20 nt, Artificial Sequence
  Synthetic
  misc_feature (6)..(6): n is a, c, g, or u
uuaucngucccgauaaguuu

SEQ ID NO: 7949 - RNA, 20 nt, Artificial Sequence
  Synthetic
gaacuccuagccgcuuguuu

SEQ ID NO: 7950 - RNA, 20 nt, Artificial Sequence
  Synthetic
  misc_feature (2)..(2): n is a, c, g, or u
gnuuggggacugcgaauuuu

SEQ ID NO: 7951 - RNA, 20 nt, Artificial Sequence
  Synthetic
uguggaguuacucucguuuu

SEQ ID NO: 7952 - RNA, 20 nt, Artificial Sequence
  Synthetic
gaucugcuggcaauguuuuu

SEQ ID NO: 7953 - RNA, 17 nt, Artificial Sequence
  Synthetic
gcacacgguccggcaga

SEQ ID NO: 7954 - RNA, 17 nt, Artificial Sequence
  Synthetic
gucuccaugcgacgugc

SEQ ID NO: 7955 - RNA, 17 nt, Artificial Sequence
  Synthetic
ggggaguccgcguaaag

SEQ ID NO: 7956 - RNA, 20 nt, Artificial Sequence
  Synthetic
gaauauggugacccacaaaa

SEQ ID NO: 7957 - RNA, 20 nt, Artificial Sequence
  Synthetic
gaaaaaccccgccuguaaca

SEQ ID NO: 7958 - RNA, 20 nt, Artificial Sequence
  Synthetic
ggcacuaguaaacugagcca

SEQ ID NO: 7959 - RNA, 20 nt, Artificial Sequence
  Synthetic
gaaggcggguauauuauaua

SEQ ID NO: 7960 - RNA, 20 nt, Artificial Sequence
  Synthetic
gcgagcaaaacaagcggcua

SEQ ID NO: 7961 - RNA, 20 nt, Artificial Sequence
  Synthetic
ggccagacgccaacaaggua

SEQ ID NO: 7962 - RNA, 20 nt, Artificial Sequence
  Synthetic
  misc_feature (7)..(7): n is a, c, g, or u
  misc_feature (10)..(10): n is a, c, g, or u
ggucggncgnaacggcagac

SEQ ID NO: 7963 - RNA, 20 nt, Artificial Sequence
  Synthetic
guuccgcaguauggaucggc

SEQ ID NO: 7964 - RNA, 20 nt, Artificial Sequence
  Synthetic
guggucuccaugcgacgugc

SEQ ID NO: 7965 - RNA, 20 nt, Artificial Sequence
  Synthetic
gacggggaguccgcguaaag

SEQ ID NO: 7966 - RNA, 20 nt, Artificial Sequence
  Synthetic
  misc_feature (17)..(17): n is a, c, g, or u
gucggucguugacauuncag

SEQ ID NO: 7967 - RNA, 20 nt, Artificial Sequence
  Synthetic
gcuuucggaaaauuccuaug

SEQ ID NO: 7968 - RNA, 20 nt, Artificial Sequence
  Synthetic
gcgauugagaccuucgucug

SEQ ID NO: 7969 - RNA, 20 nt, Artificial Sequence
  Synthetic
gucuagacucugcgguauug

SEQ ID NO: 7970 - RNA, 20 nt, Artificial Sequence
  Synthetic
ggggacccugcgcugaacau

SEQ ID NO: 7971 - RNA, 20 nt, Artificial Sequence
  Synthetic
  misc_feature (2)..(2): n is a, c, g, or u
gnaaugucaacgaccgaccu

SEQ ID NO: 7972 - RNA, 20 nt, Artificial Sequence
  Synthetic
gccaagucuguacagcaucu

SEQ ID NO: 7973 - RNA, 20 nt, Artificial Sequence
  Synthetic
guuuugcucgcagcaggucu

SEQ ID NO: 7974 - RNA, 20 nt, Artificial Sequence
  Synthetic
  misc_feature (6)..(6): n is a, c, g, or u
  misc_feature (15)..(15): n is a, c, g, or u
gcucunuaucgggangccuu

SEQ ID NO: 7975 - RNA, 17 nt, Artificial Sequence
  Synthetic
acggggaguccgcguaa

SEQ ID NO: 7976 - RNA, 17 nt, Artificial Sequence
  Synthetic
aaaccccgccuguaaca

SEQ ID NO: 7977 - RNA, 17 nt, Artificial Sequence
  Synthetic
caguauggaucggcaga

SEQ ID NO: 7978 - RNA, 17 nt, Artificial Sequence
  Synthetic
cuacuguuguuagacga

SEQ ID NO: 7979 - RNA, 17 nt, Artificial Sequence
  Synthetic
cagacgccaacaaggua

SEQ ID NO: 7980 - RNA, 17 nt, Artificial Sequence
  Synthetic
ccgcaguauggaucggc

SEQ ID NO: 7981 - RNA, 17 nt, Artificial Sequence
  Synthetic
  misc_feature (16)..(16): n is a, c, g, or u
ucggucguugacauunc

SEQ ID NO: 7982 - RNA, 17 nt, Artificial Sequence
  Synthetic
uucgucugcgaggcgag

SEQ ID NO: 7983 - RNA, 17 nt, Artificial Sequence
  Synthetic
aacgauguauauuugcg

SEQ ID NO: 7984 - RNA, 17 nt, Artificial Sequence
  Synthetic
cgauguauauuugcggg

SEQ ID NO: 7985 - RNA, 17 nt, Artificial Sequence
  Synthetic
auugagaccuucgucug

SEQ ID NO: 7986 - RNA, 17 nt, Artificial Sequence
  Synthetic
auauacccgccuuccau

SEQ ID NO: 7987 - RNA, 17 nt, Artificial Sequence
  Synthetic
accucugcacgucgcau

SEQ ID NO: 7988 - RNA, 17 nt, Artificial Sequence
  Synthetic
auugagauucccgagau

SEQ ID NO: 7989 - RNA, 17 nt, Artificial Sequence
  Synthetic
uucugcgacgcggcgau

SEQ ID NO: 7990 - RNA, 17 nt, Artificial Sequence
  Synthetic
augucaacgaccgaccu

SEQ ID NO: 7991 - RNA, 20 nt, Artificial Sequence
  Synthetic
cagacggggaguccgcguaa

SEQ ID NO: 7992 - RNA, 20 nt, Artificial Sequence
  Synthetic
agugcacacgguccggcaga

SEQ ID NO: 7993 - RNA, 20 nt, Artificial Sequence
  Synthetic
ccgcaguauggaucggcaga

SEQ ID NO: 7994 - RNA, 20 nt, Artificial Sequence
  Synthetic
uccacugcauggccugagga

SEQ ID NO: 7995 - RNA, 20 nt, Artificial Sequence
  Synthetic
  misc_feature (19)..(19): n is a, c, g, or u
aggucggucguugacauunc

SEQ ID NO: 7996 - RNA, 20 nt, Artificial Sequence
  Synthetic
uagaguauuuggugucuuuc

SEQ ID NO: 7997 - RNA, 20 nt, Artificial Sequence
  Synthetic
accuucgucugcgaggcgag

SEQ ID NO: 7998 - RNA, 20 nt, Artificial Sequence
  Synthetic
ugagaccuucgucugcgagg

SEQ ID NO: 7999 - RNA, 20 nt, Artificial Sequence
  Synthetic
aaacgauguauauuugcggg

SEQ ID NO: 8000 - RNA, 20 nt, Artificial Sequence
  Synthetic
agaaaggccuuguaaguugg

SEQ ID NO: 8001 - RNA, 20 nt, Artificial Sequence
  Synthetic
  misc_feature (19)..(19): n is a, c, g, or u
ucgagaagauugacgauang

SEQ ID NO: 8002 - RNA, 20 nt, Artificial Sequence
  Synthetic
auaauauacccgccuuccau

SEQ ID NO: 8003 - RNA, 20 nt, Artificial Sequence
  Synthetic
uucaccucugcacgucgcau

SEQ ID NO: 8004 - RNA, 20 nt, Artificial Sequence
  Synthetic
aacauugagauucccgagau

SEQ ID NO: 8005 - RNA, 20 nt, Artificial Sequence
  Synthetic
aucuucugcgacgcggcgau

SEQ ID NO: 8006 - RNA, 20 nt, Artificial Sequence
  Synthetic
agcgcaggguccccaauccu

SEQ ID NO: 8007 - RNA, 20 nt, Artificial Sequence
  Synthetic
acgccaacaagguaggagcu

SEQ ID NO: 8008 - RNA, 20 nt, Artificial Sequence
  Synthetic
agcgauaaccaggacaaguu

SEQ ID NO: 8009 - RNA, 17 nt, Artificial Sequence
  Synthetic
  misc_feature (3)..(3): n is a, c, g, or u
  misc_feature (15)..(15): n is a, c, g, or u
ggnccacucacagunaa

SEQ ID NO: 8010 - RNA, 17 nt, Artificial Sequence
  Synthetic
gguuugguacagcaaca

SEQ ID NO: 8011 - RNA, 17 nt, Artificial Sequence
  Synthetic
ggacaaguuggaggaca

SEQ ID NO: 8012 - RNA, 17 nt, Artificial Sequence
  Synthetic
  misc_feature (11)..(11): n is a, c, g, or u
  misc_feature (14)..(14): n is a, c, g, or u
ggcgauuggungangca

SEQ ID NO: 8013 - RNA, 17 nt, Artificial Sequence
  Synthetic
  misc_feature (8)..(8): n is a, c, g, or u
gaggugancaaugcuca

SEQ ID NO: 8014 - RNA, 17 nt, Artificial Sequence
  Synthetic
guggucuauaagcugga

SEQ ID NO: 8015 - RNA, 17 nt, Artificial Sequence
  Synthetic
gcauagcagcaggauga

SEQ ID NO: 8016 - RNA, 17 nt, Artificial Sequence
  Synthetic
gcccaaggucuuacaua

SEQ ID NO: 8017 - RNA, 17 nt, Artificial Sequence
  Synthetic
ggcggguauauuauaua

SEQ ID NO: 8018 - RNA, 17 nt, Artificial Sequence
  Synthetic
  misc_feature (2)..(2): n is a, c, g, or u
gnuucaccccaccgcac

SEQ ID NO: 8019 - RNA, 17 nt, Artificial Sequence
  Synthetic
ggucgggaaagaauccc

SEQ ID NO: 8020 - RNA, 17 nt, Artificial Sequence
  Synthetic
  misc_feature (4)..(4): n is a, c, g, or u
guanuaugcccugagcc

SEQ ID NO: 8021 - RNA, 17 nt, Artificial Sequence
  Synthetic
  misc_feature (4)..(4): n is a, c, g, or u
  misc_feature (7)..(7): n is a, c, g, or u
gcanagnauugcuugcc

SEQ ID NO: 8022 - RNA, 17 nt, Artificial Sequence
  Synthetic
  misc_feature (3)..(3): n is a, c, g, or u
gangccuuagagucucc

SEQ ID NO: 8023 - RNA, 17 nt, Artificial Sequence
  Synthetic
  misc_feature (3)..(3): n is a, c, g, or u
  misc_feature (12)..(12): n is a, c, g, or u
gcnucccgauanagagc

SEQ ID NO: 8024 - RNA, 17 nt, Artificial Sequence
  Synthetic
  misc_feature (14)..(14): n is a, c, g, or u
ggucguugacauuncag

SEQ ID NO: 8025 - RNA, 17 nt, Artificial Sequence
  Synthetic
gucagaaggcaaaaacg

SEQ ID NO: 8026 - RNA, 17 nt, Artificial Sequence
  Synthetic
gaccuucgucugcgagg

SEQ ID NO: 8027 - RNA, 17 nt, Artificial Sequence
  Synthetic
gacugggaggaguuggg

SEQ ID NO: 8028 - RNA, 17 nt, Artificial Sequence
  Synthetic
ggaggacaggagguugg

SEQ ID NO: 8029 - RNA, 17 nt, Artificial Sequence
  Synthetic
  misc_feature (17)..(17): n is a, c, g, or u
gccugagugcaguaugn

SEQ ID NO: 8030 - RNA, 17 nt, Artificial Sequence
  Synthetic
gacccugcgcugaacau

SEQ ID NO: 8031 - RNA, 17 nt, Artificial Sequence
  Synthetic
gcaggguccccaauccu

SEQ ID NO: 8032 - RNA, 17 nt, Artificial Sequence
  Synthetic
gaguguuucucaaaggu

SEQ ID NO: 8033 - RNA, 17 nt, Artificial Sequence
  Synthetic
  misc_feature (13)..(13): n is a, c, g, or u
gaauuuggagcuncugu

SEQ ID NO: 8034 - RNA, 17 nt, Artificial Sequence
  Synthetic
guuugguggaagguugu

SEQ ID NO: 8035 - RNA, 17 nt, Artificial Sequence
  Synthetic
  misc_feature (12)..(12): n is a, c, g, or u
  misc_feature (15)..(16): n is a, c, g, or u
ggaagagaaacngunnu

SEQ ID NO: 8036 - RNA, 17 nt, Artificial Sequence
  Synthetic
gagguuggugagugauu

SEQ ID NO: 8037 - RNA, 17 nt, Artificial Sequence
  Synthetic
gauaaccaggacaaguu

SEQ ID NO: 8038 - RNA, 20 nt, Artificial Sequence
  Synthetic
  misc_feature (8)..(8): n is a, c, g, or u
gaaaagangguguuuuccaa

SEQ ID NO: 8039 - RNA, 20 nt, Artificial Sequence
  Synthetic
  misc_feature (6)..(6): n is a, c, g, or u
  misc_feature (18)..(18): n is a, c, g, or u
guaggnccacucacagunaa

SEQ ID NO: 8040 - RNA, 20 nt, Artificial Sequence
  Synthetic
gaagguuugguacagcaaca

SEQ ID NO: 8041 - RNA, 20 nt, Artificial Sequence
  Synthetic
  misc_feature (2)..(2): n is a, c, g, or u
  misc_feature (11)..(11): n is a, c, g, or u
gnugaggugancaaugcuca

SEQ ID NO: 8042 - RNA, 20 nt, Artificial Sequence
  Synthetic
gacugggaggaguuggggga

SEQ ID NO: 8043 - RNA, 20 nt, Artificial Sequence
  Synthetic
gaggcauagcagcaggauga

SEQ ID NO: 8044 - RNA, 20 nt, Artificial Sequence
  Synthetic
  misc_feature (2)..(2): n is a, c, g, or u
  misc_feature (7)..(7): n is a, c, g, or u
  misc_feature (9)..(9): n is a, c, g, or u
  misc_feature (11)..(11): n is a, c, g, or u
  misc_feature (18)..(18): n is a, c, g, or u
gnuuaangnunuuuguanua

SEQ ID NO: 8045 - RNA, 20 nt, Artificial Sequence
  Synthetic
  misc_feature (5)..(5): n is a, c, g, or u
  misc_feature (13)..(13): n is a, c, g, or u
gcaanguuuguanuaugccc

SEQ ID NO: 8046 - RNA, 20 nt, Artificial Sequence
  Synthetic
  misc_feature (3)..(3): n is a, c, g, or u
  misc_feature (17)..(17): n is a, c, g, or u
ganagagucccaagcgnccc

SEQ ID NO: 8047 - RNA, 20 nt, Artificial Sequence
  Synthetic
gguggucgggaaagaauccc

SEQ ID NO: 8048 - RNA, 20 nt, Artificial Sequence
  Synthetic
gaagucagaaggcaaaaacg

SEQ ID NO: 8049 - RNA, 20 nt, Artificial Sequence
  Synthetic
ggaaacgauguauauuugcg

SEQ ID NO: 8050 - RNA, 20 nt, Artificial Sequence
  Synthetic
guuggaggacaggagguugg

SEQ ID NO: 8051 - RNA, 20 nt, Artificial Sequence
  Synthetic
  misc_feature (17)..(17): n is a, c, g, or u
  misc_feature (19)..(19): n is a, c, g, or u
gagaagauugacgauangng

SEQ ID NO: 8052 - RNA, 20 nt, Artificial Sequence
  Synthetic
  misc_feature (15)..(15): n is a, c, g, or u
gacuguuuguuuaangacug

SEQ ID NO: 8053 - RNA, 20 nt, Artificial Sequence
  Synthetic
  misc_feature (4)..(4): n is a, c, g, or u
  misc_feature (7)..(7): n is a, c, g, or u
ggunguncccccuagaaaau

SEQ ID NO: 8054 - RNA, 20 nt, Artificial Sequence
  Synthetic
ggguuuacuguuccugaacu

SEQ ID NO: 8055 - RNA, 20 nt, Artificial Sequence
  Synthetic
gaugaguguuucucaaaggu

SEQ ID NO: 8056 - RNA, 20 nt, Artificial Sequence
  Synthetic
gcacggaggccuuuuggggu

SEQ ID NO: 8057 - RNA, 17 nt, Artificial Sequence
  Synthetic
aagucagaaggcaaaaa

SEQ ID NO: 8058 - RNA, 17 nt, Artificial Sequence
  Synthetic
uauggugacccacaaaa

SEQ ID NO: 8059 - RNA, 17 nt, Artificial Sequence
  Synthetic
  misc_feature (5)..(5): n is a, c, g, or u
aagangguguuuuccaa

SEQ ID NO: 8060 - RNA, 17 nt, Artificial Sequence
  Synthetic
ccauauucuugggaaca

SEQ ID NO: 8061 - RNA, 17 nt, Artificial Sequence
  Synthetic
acaguaggacaugaaca

SEQ ID NO: 8062 - RNA, 17 nt, Artificial Sequence
  Synthetic
uugagagaaguccacca

SEQ ID NO: 8063 - RNA, 17 nt, Artificial Sequence
  Synthetic
acuaguaaacugagcca

SEQ ID NO: 8064 - RNA, 17 nt, Artificial Sequence
  Synthetic
  misc_feature (6)..(6): n is a, c, g, or u
acauuncagagagucca

SEQ ID NO: 8065 - RNA, 17 nt, Artificial Sequence
  Synthetic
aagaaccaacaagaaga

SEQ ID NO: 8066 - RNA, 17 nt, Artificial Sequence
  Synthetic
acugcauggccugagga

SEQ ID NO: 8067 - RNA, 17 nt, Artificial Sequence
  Synthetic
ugggaggaguuggggga

SEQ ID NO: 8068 - RNA, 17 nt, Artificial Sequence
  Synthetic
  misc_feature (9)..(9): n is a, c, g, or u
uuguuuaangacuggga

SEQ ID NO: 8069 - RNA, 17 nt, Artificial Sequence
  Synthetic
cuugucucacuuuugga

SEQ ID NO: 8070 - RNA, 17 nt, Artificial Sequence
  Synthetic
agcaaaacaagcggcua

SEQ ID NO: 8071 - RNA, 17 nt, Artificial Sequence
  Synthetic
  misc_feature (14)..(14): n is a, c, g, or u
acuucuuuccuucngua

SEQ ID NO: 8072 - RNA, 17 nt, Artificial Sequence
  Synthetic
  misc_feature (4)..(4): n is a, c, g, or u
  misc_feature (6)..(6): n is a, c, g, or u
  misc_feature (8)..(8): n is a, c, g, or u
  misc_feature (15)..(15): n is a, c, g, or u
uaangnunuuuguanua

SEQ ID NO: 8073 - RNA, 17 nt, Artificial Sequence
  Synthetic
  misc_feature (8)..(8): n is a, c, g, or u
uaaaguuncccaccuua

SEQ ID NO: 8074 - RNA, 17 nt, Artificial Sequence
  Synthetic
aaauggcacuaguaaac

SEQ ID NO: 8075 - RNA, 17 nt, Artificial Sequence
  Synthetic
  misc_feature (12)..(12): n is a, c, g, or u
uugcgggagagnacaac

SEQ ID NO: 8076 - RNA, 17 nt, Artificial Sequence
  Synthetic
  misc_feature (4)..(4): n is a, c, g, or u
  misc_feature (7)..(7): n is a, c, g, or u
cggncgnaacggcagac

SEQ ID NO: 8077 - RNA, 17 nt, Artificial Sequence
  Synthetic
  misc_feature (2)..(2): n is a, c, g, or u
  misc_feature (10)..(10): n is a, c, g, or u
anguuuguanuaugccc

SEQ ID NO: 8078 - RNA, 17 nt, Artificial Sequence
  Synthetic
  misc_feature (14)..(14): n is a, c, g, or u
agagucccaagcgnccc

SEQ ID NO: 8079 - RNA, 17 nt, Artificial Sequence
  Synthetic
acuaacauugagauucc

SEQ ID NO: 8080 - RNA, 17 nt, Artificial Sequence
  Synthetic
aucuuaucaacacuucc

SEQ ID NO: 8081 - RNA, 17 nt, Artificial Sequence
  Synthetic
aauccucacaauaccgc

SEQ ID NO: 8082 - RNA, 17 nt, Artificial Sequence
  Synthetic
acaagagaugauuaggc

SEQ ID NO: 8083 - RNA, 17 nt, Artificial Sequence
  Synthetic
agccaggagaaacgggc

SEQ ID NO: 8084 - RNA, 17 nt, Artificial Sequence
  Synthetic
  misc_feature (5)..(5): n is a, c, g, or u
ucacncugggaucuugc

SEQ ID NO: 8085 - RNA, 17 nt, Artificial Sequence
  Synthetic
aguuggauccagccuuc

SEQ ID NO: 8086 - RNA, 17 nt, Artificial Sequence
  Synthetic
aguauuuggugucuuuc

SEQ ID NO: 8087 - RNA, 17 nt, Artificial Sequence
  Synthetic
  misc_feature (1)..(1): n is a, c, g, or u
nguuucucuuccaaaag

SEQ ID NO: 8088 - RNA, 17 nt, Artificial Sequence
  Synthetic
cggguauauuauauaag

SEQ ID NO: 8089 - RNA, 17 nt, Artificial Sequence
  Synthetic
ugagaaggcacagacgg

SEQ ID NO: 8090 - RNA, 17 nt, Artificial Sequence
  Synthetic
aaggccuuguaaguugg

SEQ ID NO: 8091 - RNA, 17 nt, Artificial Sequence
  Synthetic
  misc_feature (16)..(16): n is a, c, g, or u
agaagauugacgauang

SEQ ID NO: 8092 - RNA, 17 nt, Artificial Sequence
  Synthetic
  misc_feature (16)..(16): n is a, c, g, or u
ucugcaagaucccagng

SEQ ID NO: 8093 - RNA, 17 nt, Artificial Sequence
  Synthetic
  misc_feature (14)..(14): n is a, c, g, or u
  misc_feature (16)..(16): n is a, c, g, or u
aagauugacgauangng

SEQ ID NO: 8094 - RNA, 17 nt, Artificial Sequence
  Synthetic
uucggaaaauuccuaug

SEQ ID NO: 8095 - RNA, 17 nt, Artificial Sequence
  Synthetic
  misc_feature (12)..(12): n is a, c, g, or u
uguuuguuuaangacug

SEQ ID NO: 8096 - RNA, 17 nt, Artificial Sequence
  Synthetic
  misc_feature (3)..(3): n is a, c, g, or u
  misc_feature (13)..(13): n is a, c, g, or u
ucnuuucucauunacug

SEQ ID NO: 8097 - RNA, 17 nt, Artificial Sequence
  Synthetic
uugcuccagaccugcug

SEQ ID NO: 8098 - RNA, 17 nt, Artificial Sequence
  Synthetic
  misc_feature (14)..(14): n is a, c, g, or u
ugcaagaucccagngug

SEQ ID NO: 8099 - RNA, 17 nt, Artificial Sequence
  Synthetic
  misc_feature (2)..(2): n is a, c, g, or u
uncccccuagaaaauug

SEQ ID NO: 8100 - RNA, 17 nt, Artificial Sequence
  Synthetic
uagacucugcgguauug

SEQ ID NO: 8101 - RNA, 17 nt, Artificial Sequence
  Synthetic
  misc_feature (17)..(17): n is a, c, g, or u
acggagaaggggacgan

SEQ ID NO: 8102 - RNA, 17 nt, Artificial Sequence
  Synthetic
  misc_feature (8)..(8): n is a, c, g, or u
  misc_feature (17)..(17): n is a, c, g, or u
cuaaggcnucccgauan

SEQ ID NO: 8103 - RNA, 17 nt, Artificial Sequence
  Synthetic
  misc_feature (3)..(3): n is a, c, g, or u
  misc_feature (9)..(9): n is a, c, g, or u
  misc_feature (14)..(14): n is a, c, g, or u
  misc_feature (17)..(17): n is a, c, g, or u
uancccaunaaaunuan

SEQ ID NO: 8104 - RNA, 17 nt, Artificial Sequence
  Synthetic
  misc_feature (1)..(1): n is a, c, g, or u
  misc_feature (4)..(4): n is a, c, g, or u
nguncccccuagaaaau

SEQ ID NO: 8105 - RNA, 17 nt, Artificial Sequence
  Synthetic
ccaaggaauacuaacau

SEQ ID NO: 8106 - RNA, 17 nt, Artificial Sequence
  Synthetic
caacaggagggauacau

SEQ ID NO: 8107 - RNA, 17 nt, Artificial Sequence
  Synthetic
uuuacuguuccugaacu

SEQ ID NO: 8108 - RNA, 17 nt, Artificial Sequence
  Synthetic
  misc_feature (2)..(2): n is a, c, g, or u
ungguggucuauaagcu

SEQ ID NO: 8109 - RNA, 17 nt, Artificial Sequence
  Synthetic
ccaacaagguaggagcu

SEQ ID NO: 8110 - RNA, 17 nt, Artificial Sequence
  Synthetic
  misc_feature (14)..(14): n is a, c, g, or u
cacccacccaggungcu

SEQ ID NO: 8111 - RNA, 17 nt, Artificial Sequence
  Synthetic
aagucuguacagcaucu

SEQ ID NO: 8112 - RNA, 17 nt, Artificial Sequence
  Synthetic
uugcucgcagcaggucu

SEQ ID NO: 8113 - RNA, 17 nt, Artificial Sequence
  Synthetic
  misc_feature (2)..(2): n is a, c, g, or u
cnuaucgucaaucuucu

SEQ ID NO: 8114 - RNA, 17 nt, Artificial Sequence
  Synthetic
cggaggccuuuuggggu

SEQ ID NO: 8115 - RNA, 17 nt, Artificial Sequence
  Synthetic
  misc_feature (5)..(5): n is a, c, g, or u
uugangauccuggaauu

SEQ ID NO: 8116 - RNA, 17 nt, Artificial Sequence
  Synthetic
  misc_feature (4)..(4): n is a, c, g, or u
cccncugucuccaccuu

SEQ ID NO: 8117 - RNA, 17 nt, Artificial Sequence
  Synthetic
  misc_feature (3)..(3): n is a, c, g, or u
  misc_feature (12)..(12): n is a, c, g, or u
cunuaucgggangccuu

SEQ ID NO: 8118 - RNA, 17 nt, Artificial Sequence
  Synthetic
cacccaaggcacagcuu

SEQ ID NO: 8119 - RNA, 17 nt, Artificial Sequence
  Synthetic
  misc_feature (2)..(2): n is a, c, g, or u
anccuuauaaagaauuu

SEQ ID NO: 8120 - RNA, 20 nt, Artificial Sequence
  Synthetic
aagaagucagaaggcaaaaa

SEQ ID NO: 8121 - RNA, 20 nt, Artificial Sequence
  Synthetic
ucaccauauucuugggaaca

SEQ ID NO: 8122 - RNA, 20 nt, Artificial Sequence
  Synthetic
ugaacaguaggacaugaaca

SEQ ID NO: 8123 - RNA, 20 nt, Artificial Sequence
  Synthetic
ccaggacaaguuggaggaca

SEQ ID NO: 8124 - RNA, 20 nt, Artificial Sequence
  Synthetic
aaauugagagaaguccacca

SEQ ID NO: 8125 - RNA, 20 nt, Artificial Sequence
  Synthetic
  misc_feature (9)..(9): n is a, c, g, or u
uugacauuncagagagucca

SEQ ID NO: 8126 - RNA, 20 nt, Artificial Sequence
  Synthetic
  misc_feature (14)..(14): n is a, c, g, or u
  misc_feature (17)..(17): n is a, c, g, or u
acuggcgauuggungangca

SEQ ID NO: 8127 - RNA, 20 nt, Artificial Sequence
  Synthetic
cagaagaaccaacaagaaga

SEQ ID NO: 8128 - RNA, 20 nt, Artificial Sequence
  Synthetic
agacuacuguuguuagacga

SEQ ID NO: 8129 - RNA, 20 nt, Artificial Sequence
  Synthetic
  misc_feature (12)..(12): n is a, c, g, or u
uguuuguuuaangacuggga

SEQ ID NO: 8130 - RNA, 20 nt, Artificial Sequence
  Synthetic
  misc_feature (2)..(2): n is a, c, g, or u
ungguggucuauaagcugga

SEQ ID NO: 8131 - RNA, 20 nt, Artificial Sequence
  Synthetic
uuucuugucucacuuuugga

SEQ ID NO: 8132 - RNA, 20 nt, Artificial Sequence
  Synthetic
cuugcccaaggucuuacaua

SEQ ID NO: 8133 - RNA, 20 nt, Artificial Sequence
  Synthetic
  misc_feature (17)..(17): n is a, c, g, or u
cugacuucuuuccuucngua

SEQ ID NO: 8134 - RNA, 20 nt, Artificial Sequence
  Synthetic
  misc_feature (2)..(2): n is a, c, g, or u
  misc_feature (11)..(11): n is a, c, g, or u
cnguaaaguuncccaccuua

SEQ ID NO: 8135 - RNA, 20 nt, Artificial Sequence
  Synthetic
aacaaauggcacuaguaaac

SEQ ID NO: 8136 - RNA, 20 nt, Artificial Sequence
  Synthetic
  misc_feature (15)..(15): n is a, c, g, or u
uauuugcgggagagnacaac

SEQ ID NO: 8137 - RNA, 20 nt, Artificial Sequence
  Synthetic
  misc_feature (5)..(5): n is a, c, g, or u
ugggnuucaccccaccgcac

SEQ ID NO: 8138 - RNA, 20 nt, Artificial Sequence
  Synthetic
  misc_feature (7)..(7): n is a, c, g, or u
uuuguanuaugcccugagcc

SEQ ID NO: 8139 - RNA, 20 nt, Artificial Sequence
  Synthetic
  misc_feature (7)..(7): n is a, c, g, or u
  misc_feature (10)..(10): n is a, c, g, or u
ccagcanagnauugcuugcc

SEQ ID NO: 8140 - RNA, 20 nt, Artificial Sequence
  Synthetic
  misc_feature (6)..(6): n is a, c, g, or u
cgggangccuuagagucucc

SEQ ID NO: 8141 - RNA, 20 nt, Artificial Sequence
  Synthetic
aauacuaacauugagauucc

SEQ ID NO: 8142 - RNA, 20 nt, Artificial Sequence
  Synthetic
ccuaucuuaucaacacuucc

SEQ ID NO: 8143 - RNA, 20 nt, Artificial Sequence
  Synthetic
  misc_feature (6)..(6): n is a, c, g, or u
  misc_feature (15)..(15): n is a, c, g, or u
aaggcnucccgauanagagc

SEQ ID NO: 8144 - RNA, 20 nt, Artificial Sequence
  Synthetic
aagaauccucacaauaccgc

SEQ ID NO: 8145 - RNA, 20 nt, Artificial Sequence
  Synthetic
ugaacaagagaugauuaggc

SEQ ID NO: 8146 - RNA, 20 nt, Artificial Sequence
  Synthetic
cugagccaggagaaacgggc

SEQ ID NO: 8147 - RNA, 20 nt, Artificial Sequence
  Synthetic
  misc_feature (8)..(8): n is a, c, g, or u
cucucacncugggaucuugc

SEQ ID NO: 8148 - RNA, 20 nt, Artificial Sequence
  Synthetic
accaguuggauccagccuuc

SEQ ID NO: 8149 - RNA, 20 nt, Artificial Sequence
  Synthetic
  misc_feature (1)..(1): n is a, c, g, or u
  misc_feature (4)..(4): n is a, c, g, or u
nacnguuucucuuccaaaag

SEQ ID NO: 8150 - RNA, 20 nt, Artificial Sequence
  Synthetic
aggcggguauauuauauaag

SEQ ID NO: 8151 - RNA, 20 nt, Artificial Sequence
  Synthetic
agaugagaaggcacagacgg

SEQ ID NO: 8152 - RNA, 20 nt, Artificial Sequence
  Synthetic
  misc_feature (3)..(3): n is a, c, g, or u
aangacugggaggaguuggg

SEQ ID NO: 8153 - RNA, 20 nt, Artificial Sequence
  Synthetic
  misc_feature (19)..(19): n is a, c, g, or u
aacucugcaagaucccagng

SEQ ID NO: 8154 - RNA, 20 nt, Artificial Sequence
  Synthetic
  misc_feature (6)..(6): n is a, c, g, or u
  misc_feature (16)..(16): n is a, c, g, or u
ucuucnuuucucauunacug

SEQ ID NO: 8155 - RNA, 20 nt, Artificial Sequence
  Synthetic
uguuugcuccagaccugcug

SEQ ID NO: 8156 - RNA, 20 nt, Artificial Sequence
  Synthetic
  misc_feature (17)..(17): n is a, c, g, or u
cucugcaagaucccagngug

SEQ ID NO: 8157 - RNA, 20 nt, Artificial Sequence
  Synthetic
  misc_feature (2)..(2): n is a, c, g, or u
  misc_feature (5)..(5): n is a, c, g, or u
unguncccccuagaaaauug

SEQ ID NO: 8158 - RNA, 20 nt, Artificial Sequence
  Synthetic
  misc_feature (20)..(20): n is a, c, g, or u
cagacggagaaggggacgan

SEQ ID NO: 8159 - RNA, 20 nt, Artificial Sequence
  Synthetic
  misc_feature (11)..(11): n is a, c, g, or u
  misc_feature (20)..(20): n is a, c, g, or u
acucuaaggcnucccgauan

SEQ ID NO: 8160 - RNA, 20 nt, Artificial Sequence
  Synthetic
  misc_feature (6)..(6): n is a, c, g, or u
  misc_feature (12)..(12): n is a, c, g, or u
  misc_feature (17)..(17): n is a, c, g, or u
  misc_feature (20)..(20): n is a, c, g, or u
acauancccaunaaaunuan

SEQ ID NO: 8161 - RNA, 20 nt, Artificial Sequence
  Synthetic
  misc_feature (20)..(20): n is a, c, g, or u
cuugccugagugcaguaugn

SEQ ID NO: 8162 - RNA, 20 nt, Artificial Sequence
  Synthetic
aguccaaggaauacuaacau

SEQ ID NO: 8163 - RNA, 20 nt, Artificial Sequence
  Synthetic
cagcaacaggagggauacau

SEQ ID NO: 8164 - RNA, 20 nt, Artificial Sequence
  Synthetic
  misc_feature (5)..(5): n is a, c, g, or u
cauungguggucuauaagcu

SEQ ID NO: 8165 - RNA, 20 nt, Artificial Sequence
  Synthetic
  misc_feature (3)..(3): n is a, c, g, or u
  misc_feature (17)..(17): n is a, c, g, or u
uancacccacccaggungcu

SEQ ID NO: 8166 - RNA, 20 nt, Artificial Sequence
  Synthetic
  misc_feature (3)..(3): n is a, c, g, or u
  misc_feature (5)..(5): n is a, c, g, or u
ucncnuaucgucaaucuucu

SEQ ID NO: 8167 - RNA, 20 nt, Artificial Sequence
  Synthetic
  misc_feature (16)..(16): n is a, c, g, or u
aaagaauuuggagcuncugu

SEQ ID NO: 8168 - RNA, 20 nt, Artificial Sequence
  Synthetic
agaguuugguggaagguugu

SEQ ID NO: 8169 - RNA, 20 nt, Artificial Sequence
  Synthetic
  misc_feature (15)..(15): n is a, c, g, or u
  misc_feature (18)..(19): n is a, c, g, or u
uuuggaagagaaacngunnu

SEQ ID NO: 8170 - RNA, 20 nt, Artificial Sequence
  Synthetic
  misc_feature (2)..(2): n is a, c, g, or u
  misc_feature (8)..(8): n is a, c, g, or u
unguugangauccuggaauu

SEQ ID NO: 8171 - RNA, 20 nt, Artificial Sequence
  Synthetic
caggagguuggugagugauu

SEQ ID NO: 8172 - RNA, 20 nt, Artificial Sequence
  Synthetic
  misc_feature (7)..(7): n is a, c, g, or u
uaccccncugucuccaccuu

SEQ ID NO: 8173 - RNA, 20 nt, Artificial Sequence
  Synthetic
agccacccaaggcacagcuu

SEQ ID NO: 8174 - RNA, 20 nt, Artificial Sequence
  Synthetic
  misc_feature (5)..(5): n is a, c, g, or u
uuganccuuauaaagaauuu

SEQ ID NO: 8175 - RNA, 17 nt, Artificial Sequence
  Synthetic
  misc_feature (8)..(8): n is a, c, g, or u
aagacaunaucaaaaaa

SEQ ID NO: 8176 - RNA, 17 nt, Artificial Sequence
  Synthetic
ugguaacagcgguaaaa

SEQ ID NO: 8177 - RNA, 17 nt, Artificial Sequence
  Synthetic
aaccacauuguguaaaa

SEQ ID NO: 8178 - RNA, 17 nt, Artificial Sequence
  Synthetic
gacgggacguaaacaaa

SEQ ID NO: 8179 - RNA, 17 nt, Artificial Sequence
  Synthetic
guauacccaaagacaaa

SEQ ID NO: 8180 - RNA, 17 nt, Artificial Sequence
  Synthetic
uggaauuagaggacaaa

SEQ ID NO: 8181 - RNA, 17 nt, Artificial Sequence
  Synthetic
gggcagcaaaacccaaa

SEQ ID NO: 8182 - RNA, 17 nt, Artificial Sequence
  Synthetic
  misc_feature (3)..(3): n is a, c, g, or u
acnguuucucuuccaaa

SEQ ID NO: 8183 - RNA, 17 nt, Artificial Sequence
  Synthetic
gaugaguguuucucaaa

SEQ ID NO: 8184 - RNA, 17 nt, Artificial Sequence
  Synthetic
aaaagugagacaagaaa

SEQ ID NO: 8185 - RNA, 17 nt, Artificial Sequence
  Synthetic
aacugagccaggagaaa

SEQ ID NO: 8186 - RNA, 17 nt, Artificial Sequence
  Synthetic
  misc_feature (8)..(8): n is a, c, g, or u
ucacagunaaugagaaa

SEQ ID NO: 8187 - RNA, 17 nt, Artificial Sequence
  Synthetic
aaauguauauuaggaaa

SEQ ID NO: 8188 - RNA, 17 nt, Artificial Sequence
  Synthetic
ccuagcagccauggaaa

SEQ ID NO: 8189 - RNA, 17 nt, Artificial Sequence
  Synthetic
  misc_feature (14)..(14): n is a, c, g, or u
acccuaacaaaacnaaa

SEQ ID NO: 8190 - RNA, 17 nt, Artificial Sequence
  Synthetic
uaaccacauuguguaaa

SEQ ID NO: 8191 - RNA, 17 nt, Artificial Sequence
  Synthetic
gacuucaaucccaacaa

SEQ ID NO: 8192 - RNA, 17 nt, Artificial Sequence
  Synthetic
cugccccuuuuacacaa

SEQ ID NO: 8193 - RNA, 17 nt, Artificial Sequence
  Synthetic
uuuaaauguauacccaa

SEQ ID NO: 8194 - RNA, 17 nt, Artificial Sequence
  Synthetic
  misc_feature (1)..(1): n is a, c, g, or u
ngacccauaacauccaa

SEQ ID NO: 8195 - RNA, 17 nt, Artificial Sequence
  Synthetic
ccaccuuaugaguccaa

SEQ ID NO: 8196 - RNA, 17 nt, Artificial Sequence
  Synthetic
uggccguugccgggcaa

SEQ ID NO: 8197 - RNA, 17 nt, Artificial Sequence
  Synthetic
  misc_feature (6)..(6): n is a, c, g, or u
augugnucuuguggcaa

SEQ ID NO: 8198 - RNA, 17 nt, Artificial Sequence
  Synthetic
  misc_feature (5)..(5): n is a, c, g, or u
  misc_feature (9)..(9): n is a, c, g, or u
aucanacanaaaaucaa

SEQ ID NO: 8199 - RNA, 17 nt, Artificial Sequence
  Synthetic
  misc_feature (9)..(9): n is a, c, g, or u
acucucugnaaugucaa

SEQ ID NO: 8200 - RNA, 17 nt, Artificial Sequence
  Synthetic
  misc_feature (9)..(9): n is a, c, g, or u
  misc_feature (13)..(13): n is a, c, g, or u
gcacgacuncugnucaa

SEQ ID NO: 8201 - RNA, 17 nt, Artificial Sequence
  Synthetic
cuugaggcauacuucaa

SEQ ID NO: 8202 - RNA, 17 nt, Artificial Sequence
  Synthetic
uuguaaguuggcgagaa

SEQ ID NO: 8203 - RNA, 17 nt, Artificial Sequence
  Synthetic
  misc_feature (1)..(1): n is a, c, g, or u
naacggcagacggagaa

SEQ ID NO: 8204 - RNA, 17 nt, Artificial Sequence
  Synthetic
cgaauccacacuccgaa

SEQ ID NO: 8205 - RNA, 17 nt, Artificial Sequence
  Synthetic
  misc_feature (10)..(10): n is a, c, g, or u
aucucguacngaaggaa

SEQ ID NO: 8206 - RNA, 17 nt, Artificial Sequence
  Synthetic
caacugguggucgggaa

SEQ ID NO: 8207 - RNA, 17 nt, Artificial Sequence
  Synthetic
uuacacacucuauggaa

SEQ ID NO: 8208 - RNA, 17 nt, Artificial Sequence
  Synthetic
gaggauugcugguggaa

SEQ ID NO: 8209 - RNA, 17 nt, Artificial Sequence
  Synthetic
  misc_feature (14)..(14): n is a, c, g, or u
gaagaucucguacngaa

SEQ ID NO: 8210 - RNA, 17 nt, Artificial Sequence
  Synthetic
auuccuuggacucauaa

SEQ ID NO: 8211 - RNA, 17 nt, Artificial Sequence
  Synthetic
  misc_feature (9)..(9): n is a, c, g, or u
gacauuganccuuauaa

SEQ ID NO: 8212 - RNA, 17 nt, Artificial Sequence
  Synthetic
  misc_feature (1)..(1): n is a, c, g, or u
  misc_feature (13)..(13): n is a, c, g, or u
nugcuggggggancuaa

SEQ ID NO: 8213 - RNA, 17 nt, Artificial Sequence
  Synthetic
  misc_feature (5)..(5): n is a, c, g, or u
gucunguuuggaaguaa

SEQ ID NO: 8214 - RNA, 17 nt, Artificial Sequence
  Synthetic
  misc_feature (13)..(13): n is a, c, g, or u
uuuccaaugaggnuuaa

SEQ ID NO: 8215 - RNA, 17 nt, Artificial Sequence
  Synthetic
aaagacuguuuguuuaa

SEQ ID NO: 8216 - RNA, 17 nt, Artificial Sequence
  Synthetic
cugcugcgagcaaaaca

SEQ ID NO: 8217 - RNA, 17 nt, Artificial Sequence
  Synthetic
guccagaagaaccaaca

SEQ ID NO: 8218 - RNA, 17 nt, Artificial Sequence
  Synthetic
gaggauucuugucaaca

SEQ ID NO: 8219 - RNA, 17 nt, Artificial Sequence
  Synthetic
caauaggccuguuaaca

SEQ ID NO: 8220 - RNA, 17 nt, Artificial Sequence
  Synthetic
  misc_feature (9)..(9): n is a, c, g, or u
uaugggucnuugccaca

SEQ ID NO: 8221 - RNA, 17 nt, Artificial Sequence
  Synthetic
cuuccaaaagugagaca

SEQ ID NO: 8222 - RNA, 17 nt, Artificial Sequence
  Synthetic
gcuugaacaguaggaca

SEQ ID NO: 8223 - RNA, 17 nt, Artificial Sequence
  Synthetic
gguuuuucuuguugaca

SEQ ID NO: 8224 - RNA, 17 nt, Artificial Sequence
  Synthetic
gaugggaugggaauaca

SEQ ID NO: 8225 - RNA, 17 nt, Artificial Sequence
  Synthetic
  misc_feature (6)..(6): n is a, c, g, or u
ccccuncucguguuaca

SEQ ID NO: 8226 - RNA, 17 nt, Artificial Sequence
  Synthetic
acauccagcgauaacca

SEQ ID NO: 8227 - RNA, 17 nt, Artificial Sequence
  Synthetic
aauauacauuuacacca

SEQ ID NO: 8228 - RNA, 17 nt, Artificial Sequence
  Synthetic
  misc_feature (7)..(7): n is a, c, g, or u
  misc_feature (10)..(10): n is a, c, g, or u
gccguuncgnccgacca

SEQ ID NO: 8229 - RNA, 17 nt, Artificial Sequence
  Synthetic
aauuuuccgaaagccca

SEQ ID NO: 8230 - RNA, 17 nt, Artificial Sequence
  Synthetic
caugcgcugauggccca

SEQ ID NO: 8231 - RNA, 17 nt, Artificial Sequence
  Synthetic
  misc_feature (8)..(8): n is a, c, g, or u
gggacganagaguccca

SEQ ID NO: 8232 - RNA, 17 nt, Artificial Sequence
  Synthetic
uguagcucuuguuccca

SEQ ID NO: 8233 - RNA, 17 nt, Artificial Sequence
  Synthetic
uuguuggcgucuggcca

SEQ ID NO: 8234 - RNA, 17 nt, Artificial Sequence
  Synthetic
acugcgaauuuuggcca

SEQ ID NO: 8235 - RNA, 17 nt, Artificial Sequence
  Synthetic
cggccaggucugugcca

SEQ ID NO: 8236 - RNA, 17 nt, Artificial Sequence
  Synthetic
guucacgguggucucca

SEQ ID NO: 8237 - RNA, 17 nt, Artificial Sequence
  Synthetic
uuuguccucuaauucca

SEQ ID NO: 8238 - RNA, 17 nt, Artificial Sequence
  Synthetic
  misc_feature (5)..(5): n is a, c, g, or u
acaanggcauuaaagca

SEQ ID NO: 8239 - RNA, 17 nt, Artificial Sequence
  Synthetic
gaacaagagcuacagca

SEQ ID NO: 8240 - RNA, 17 nt, Artificial Sequence
  Synthetic
gaugaggcauagcagca

SEQ ID NO: 8241 - RNA, 17 nt, Artificial Sequence
  Synthetic
  misc_feature (2)..(3): n is a, c, g, or u
cnnaaagguuccacgca

SEQ ID NO: 8242 - RNA, 17 nt, Artificial Sequence
  Synthetic
caugggccaucagcgca

SEQ ID NO: 8243 - RNA, 17 nt, Artificial Sequence
  Synthetic
aaaggacgucccgcgca

SEQ ID NO: 8244 - RNA, 17 nt, Artificial Sequence
  Synthetic
auguaagaccuugggca

SEQ ID NO: 8245 - RNA, 17 nt, Artificial Sequence
  Synthetic
accaugcagaaccugca

SEQ ID NO: 8246 - RNA, 17 nt, Artificial Sequence
  Synthetic
uuccaccaaacucugca

SEQ ID NO: 8247 - RNA, 17 nt, Artificial Sequence
  Synthetic
uggagaacaucacauca

SEQ ID NO: 8248 - RNA, 17 nt, Artificial Sequence
  Synthetic
cgguaaaaagggacuca

SEQ ID NO: 8249 - RNA, 17 nt, Artificial Sequence
  Synthetic
  misc_feature (2)..(2): n is a, c, g, or u
cnaccaaucgccaguca

SEQ ID NO: 8250 - RNA, 17 nt, Artificial Sequence
  Synthetic
uggcuggggcuugguca

SEQ ID NO: 8251 - RNA, 17 nt, Artificial Sequence
  Synthetic
cugguggcuccaguuca

SEQ ID NO: 8252 - RNA, 17 nt, Artificial Sequence
  Synthetic
  misc_feature (11)..(11): n is a, c, g, or u
cuaacaaaacnaaaaga

SEQ ID NO: 8253 - RNA, 17 nt, Artificial Sequence
  Synthetic
cagaagaaccaacaaga

SEQ ID NO: 8254 - RNA, 17 nt, Artificial Sequence
  Synthetic
gcagguccccuagaaga

SEQ ID NO: 8255 - RNA, 17 nt, Artificial Sequence
  Synthetic
caggaugaagaggaaga

SEQ ID NO: 8256 - RNA, 17 nt, Artificial Sequence
  Synthetic
uagcagcaggaugaaga

SEQ ID NO: 8257 - RNA, 17 nt, Artificial Sequence
  Synthetic
caaggucuuacauaaga

SEQ ID NO: 8258 - RNA, 17 nt, Artificial Sequence
  Synthetic
agaugagaaggcacaga

SEQ ID NO: 8259 - RNA, 17 nt, Artificial Sequence
  Synthetic
cgggaaagaaucccaga

SEQ ID NO: 8260 - RNA, 17 nt, Artificial Sequence
  Synthetic
uaccuugauaguccaga

SEQ ID NO: 8261 - RNA, 17 nt, Artificial Sequence
  Synthetic
cucccucgccucgcaga

SEQ ID NO: 8262 - RNA, 17 nt, Artificial Sequence
  Synthetic
aaucgccgcgucgcaga

SEQ ID NO: 8263 - RNA, 17 nt, Artificial Sequence
  Synthetic
agagaugauuaggcaga

SEQ ID NO: 8264 - RNA, 17 nt, Artificial Sequence
  Synthetic
uccaugcgacgugcaga

SEQ ID NO: 8265 - RNA, 17 nt, Artificial Sequence
  Synthetic
gaguccgcguaaagaga

SEQ ID NO: 8266 - RNA, 17 nt, Artificial Sequence
  Synthetic
aggacaugaacaagaga

SEQ ID NO: 8267 - RNA, 17 nt, Artificial Sequence
  Synthetic
  misc_feature (9)..(9): n is a, c, g, or u
cccaagcgnccccgaga

SEQ ID NO: 8268 - RNA, 17 nt, Artificial Sequence
  Synthetic
guccccaauccucgaga

SEQ ID NO: 8269 - RNA, 17 nt, Artificial Sequence
  Synthetic
  misc_feature (2)..(2): n is a, c, g, or u
gnaacggcagacggaga

SEQ ID NO: 8270 - RNA, 17 nt, Artificial Sequence
  Synthetic
  misc_feature (14)..(14): n is a, c, g, or u
cugaggcgguaucnaga

SEQ ID NO: 8271 - RNA, 17 nt, Artificial Sequence
  Synthetic
gaggcagguccccuaga

SEQ ID NO: 8272 - RNA, 17 nt, Artificial Sequence
  Synthetic
  misc_feature (9)..(9): n is a, c, g, or u
aagacaggnacaguaga

SEQ ID NO: 8273 - RNA, 17 nt, Artificial Sequence
  Synthetic
  misc_feature (2)..(2): n is a, c, g, or u
angauccuggaauuaga

SEQ ID NO: 8274 - RNA, 17 nt, Artificial Sequence
  Synthetic
agacuacuguuguuaga

SEQ ID NO: 8275 - RNA, 17 nt, Artificial Sequence
  Synthetic
gcgggauucagcgccga

SEQ ID NO: 8276 - RNA, 17 nt, Artificial Sequence
  Synthetic
gugcagaggugaagcga

SEQ ID NO: 8277 - RNA, 17 nt, Artificial Sequence
  Synthetic
cgguggucuccaugcga

SEQ ID NO: 8278 - RNA, 17 nt, Artificial Sequence
  Synthetic
gagaccuucgucugcga

SEQ ID NO: 8279 - RNA, 17 nt, Artificial Sequence
  Synthetic
auugagaucuucugcga

SEQ ID NO: 8280 - RNA, 17 nt, Artificial Sequence
  Synthetic
aucgucaaucuucucga

SEQ ID NO: 8281 - RNA, 17 nt, Artificial Sequence
  Synthetic
gaggcauagcagcagga

SEQ ID NO: 8282 - RNA, 17 nt, Artificial Sequence
  Synthetic
  misc_feature (8)..(8): n is a, c, g, or u
  misc_feature (11)..(11): n is a, c, g, or u
gauuggungangcagga

SEQ ID NO: 8283 - RNA, 17 nt, Artificial Sequence
  Synthetic
cagcaggaugaagagga

SEQ ID NO: 8284 - RNA, 17 nt, Artificial Sequence
  Synthetic
caacaguagucuccgga

SEQ ID NO: 8285 - RNA, 17 nt, Artificial Sequence
  Synthetic
gcgcugaaucccgcgga

SEQ ID NO: 8286 - RNA, 17 nt, Artificial Sequence
  Synthetic
gcagacggagaagggga

SEQ ID NO: 8287 - RNA, 17 nt, Artificial Sequence
  Synthetic
  misc_feature (7)..(7): n is a, c, g, or u
agcccangaugauggga

SEQ ID NO: 8288 - RNA, 17 nt, Artificial Sequence
  Synthetic
gcuuucaguuauaugga

SEQ ID NO: 8289 - RNA, 17 nt, Artificial Sequence
  Synthetic
uccugguuaucgcugga

SEQ ID NO: 8290 - RNA, 17 nt, Artificial Sequence
  Synthetic
aaccaggacaaguugga

SEQ ID NO: 8291 - RNA, 17 nt, Artificial Sequence
  Synthetic
  misc_feature (8)..(8): n is a, c, g, or u
gugggugnuaauuugga

SEQ ID NO: 8292 - RNA, 17 nt, Artificial Sequence
  Synthetic
  misc_feature (5)..(5): n is a, c, g, or u
  misc_feature (15)..(15): n is a, c, g, or u
cagunaaugagaaanga

SEQ ID NO: 8293 - RNA, 17 nt, Artificial Sequence
  Synthetic
  misc_feature (15)..(15): n is a, c, g, or u
uuuccgaaagcccanga

SEQ ID NO: 8294 - RNA, 17 nt, Artificial Sequence
  Synthetic
ggugacccacaaaauga

SEQ ID NO: 8295 - RNA, 17 nt, Artificial Sequence
  Synthetic
uucaguuauauggauga

SEQ ID NO: 8296 - RNA, 17 nt, Artificial Sequence
  Synthetic
  misc_feature (12)..(12): n is a, c, g, or u
ccgaaagcccangauga

SEQ ID NO: 8297 - RNA, 17 nt, Artificial Sequence
  Synthetic
uccacugcauggccuga

SEQ ID NO: 8298 - RNA, 17 nt, Artificial Sequence
  Synthetic
gguccuaggaauccuga

SEQ ID NO: 8299 - RNA, 17 nt, Artificial Sequence
  Synthetic
  misc_feature (9)..(9): n is a, c, g, or u
ucccgauanagagcuga

SEQ ID NO: 8300 - RNA, 17 nt, Artificial Sequence
  Synthetic
gcgacgugcagagguga

SEQ ID NO: 8301 - RNA, 17 nt, Artificial Sequence
  Synthetic
acucugcgguauuguga

SEQ ID NO: 8302 - RNA, 17 nt, Artificial Sequence
  Synthetic
  misc_feature (14)..(14): n is a, c, g, or u
ugagugcaguaugnuga

SEQ ID NO: 8303 - RNA, 17 nt, Artificial Sequence
  Synthetic
  misc_feature (10)..(10): n is a, c, g, or u
  misc_feature (14)..(14): n is a, c, g, or u
uuugauuuunugunuga

SEQ ID NO: 8304 - RNA, 17 nt, Artificial Sequence
  Synthetic
auccucgagaagauuga

SEQ ID NO: 8305 - RNA, 17 nt, Artificial Sequence
  Synthetic
  misc_feature (4)..(5): n is a, c, g, or u
  misc_feature (12)..(12): n is a, c, g, or u
cccnngcuggunguuga

SEQ ID NO: 8306 - RNA, 17 nt, Artificial Sequence
  Synthetic
  misc_feature (16)..(16): n is a, c, g, or u
cgccuguaacacgagna

SEQ ID NO: 8307 - RNA, 17 nt, Artificial Sequence
  Synthetic
  misc_feature (8)..(8): n is a, c, g, or u
  misc_feature (11)..(11): n is a, c, g, or u
  misc_feature (16)..(16): n is a, c, g, or u
uuacucunuanauuuna

SEQ ID NO: 8308 - RNA, 17 nt, Artificial Sequence
  Synthetic
  misc_feature (7)..(7): n is a, c, g, or u
uuaugunaacacuaaua

SEQ ID NO: 8309 - RNA, 17 nt, Artificial Sequence
  Synthetic
ugaggcccacucccaua

SEQ ID NO: 8310 - RNA, 17 nt, Artificial Sequence
  Synthetic
gaaguguugauaagaua

SEQ ID NO: 8311 - RNA, 17 nt, Artificial Sequence
  Synthetic
  misc_feature (7)..(7): n is a, c, g, or u
  misc_feature (13)..(13): n is a, c, g, or u
auauuunccauungaua

SEQ ID NO: 8312 - RNA, 17 nt, Artificial Sequence
  Synthetic
cuccggaaguguugaua

SEQ ID NO: 8313 - RNA, 17 nt, Artificial Sequence
  Synthetic
agugggggaaagcccua

SEQ ID NO: 8314 - RNA, 17 nt, Artificial Sequence
  Synthetic
  misc_feature (7)..(7): n is a, c, g, or u
cacgagnagggguccua

SEQ ID NO: 8315 - RNA, 17 nt, Artificial Sequence
  Synthetic
cuuucggaaaauuccua

SEQ ID NO: 8316 - RNA, 17 nt, Artificial Sequence
  Synthetic
ucacaucaggauuccua

SEQ ID NO: 8317 - RNA, 17 nt, Artificial Sequence
  Synthetic
cacaaaaugaggcgcua

SEQ ID NO: 8318 - RNA, 17 nt, Artificial Sequence
  Synthetic
agggaguucuucuucua

SEQ ID NO: 8319 - RNA, 17 nt, Artificial Sequence
  Synthetic
cuucucucaauuuucua

SEQ ID NO: 8320 - RNA, 17 nt, Artificial Sequence
  Synthetic
uggaggcuugaacagua

SEQ ID NO: 8321 - RNA, 17 nt, Artificial Sequence
  Synthetic
aagaguccucuuaugua

SEQ ID NO: 8322 - RNA, 17 nt, Artificial Sequence
  Synthetic
gguguaaauguauauua

SEQ ID NO: 8323 - RNA, 17 nt, Artificial Sequence
  Synthetic
uaugucauuggauguua

SEQ ID NO: 8324 - RNA, 17 nt, Artificial Sequence
  Synthetic
gggcgcaccucucuuua

SEQ ID NO: 8325 - RNA, 17 nt, Artificial Sequence
  Synthetic
auaacugaaagccaaac

SEQ ID NO: 8326 - RNA, 17 nt, Artificial Sequence
  Synthetic
ggccguugccgggcaac

SEQ ID NO: 8327 - RNA, 17 nt, Artificial Sequence
  Synthetic
  misc_feature (4)..(4): n is a, c, g, or u
gagncaguagucggaac

SEQ ID NO: 8328 - RNA, 17 nt, Artificial Sequence
  Synthetic
  misc_feature (10)..(10): n is a, c, g, or u
auuaguguunacauaac

SEQ ID NO: 8329 - RNA, 17 nt, Artificial Sequence
  Synthetic
cacaucauccauauaac

SEQ ID NO: 8330 - RNA, 17 nt, Artificial Sequence
  Synthetic
aaaagaaaauugguaac

SEQ ID NO: 8331 - RNA, 17 nt, Artificial Sequence
  Synthetic
ucagguauuguuuacac

SEQ ID NO: 8332 - RNA, 17 nt, Artificial Sequence
  Synthetic
aaagcccuacgaaccac

SEQ ID NO: 8333 - RNA, 17 nt, Artificial Sequence
  Synthetic
cgucgcauggagaccac

SEQ ID NO: 8334 - RNA, 17 nt, Artificial Sequence
  Synthetic
  misc_feature (6)..(6): n is a, c, g, or u
  misc_feature (9)..(9): n is a, c, g, or u
ccguuncgnccgaccac

SEQ ID NO: 8335 - RNA, 17 nt, Artificial Sequence
  Synthetic
ggcagaugagaaggcac

SEQ ID NO: 8336 - RNA, 17 nt, Artificial Sequence
  Synthetic
cagcaaacacuuggcac

SEQ ID NO: 8337 - RNA, 17 nt, Artificial Sequence
  Synthetic
  misc_feature (2)..(3): n is a, c, g, or u
annuggugggcguucac

SEQ ID NO: 8338 - RNA, 17 nt, Artificial Sequence
  Synthetic
gaugagaaggcacagac

SEQ ID NO: 8339 - RNA, 17 nt, Artificial Sequence
  Synthetic
  misc_feature (5)..(5): n is a, c, g, or u
ucugnaaugucaacgac

SEQ ID NO: 8340 - RNA, 17 nt, Artificial Sequence
  Synthetic
cuucucaucugccggac

SEQ ID NO: 8341 - RNA, 17 nt, Artificial Sequence
  Synthetic
guaccaaaccuucggac

SEQ ID NO: 8342 - RNA, 17 nt, Artificial Sequence
  Synthetic
  misc_feature (10)..(10): n is a, c, g, or u
gcaaacauunucgggac

SEQ ID NO: 8343 - RNA, 17 nt, Artificial Sequence
  Synthetic
gauuggagguuggggac

SEQ ID NO: 8344 - RNA, 17 nt, Artificial Sequence
  Synthetic
  misc_feature (14)..(14): n is a, c, g, or u
acuguuuguuuaangac

SEQ ID NO: 8345 - RNA, 17 nt, Artificial Sequence
  Synthetic
  misc_feature (12)..(12): n is a, c, g, or u
  misc_feature (15)..(15): n is a, c, g, or u
uuucuagggggnacnac

SEQ ID NO: 8346 - RNA, 17 nt, Artificial Sequence
  Synthetic
  misc_feature (5)..(5): n is a, c, g, or u
  misc_feature (15)..(15): n is a, c, g, or u
cuucnuuucucauunac

SEQ ID NO: 8347 - RNA, 17 nt, Artificial Sequence
  Synthetic
ccucugccgauccauac

SEQ ID NO: 8348 - RNA, 17 nt, Artificial Sequence
  Synthetic
  misc_feature (3)..(3): n is a, c, g, or u
ucnagaagaucucguac

SEQ ID NO: 8349 - RNA, 17 nt, Artificial Sequence
  Synthetic
gacucaagaugcuguac

SEQ ID NO: 8350 - RNA, 17 nt, Artificial Sequence
  Synthetic
  misc_feature (9)..(9): n is a, c, g, or u
aaggugggnaacuuuac

SEQ ID NO: 8351 - RNA, 17 nt, Artificial Sequence
  Synthetic
  misc_feature (14)..(14): n is a, c, g, or u
uaaugacucuagcnacc

SEQ ID NO: 8352 - RNA, 17 nt, Artificial Sequence
  Synthetic
ucuguguaaacaauacc

SEQ ID NO: 8353 - RNA, 17 nt, Artificial Sequence
  Synthetic
ucgaggauuggggaccc

SEQ ID NO: 8354 - RNA, 17 nt, Artificial Sequence
  Synthetic
uaaagagaggugcgccc

SEQ ID NO: 8355 - RNA, 17 nt, Artificial Sequence
  Synthetic
augaccaagccccagcc

SEQ ID NO: 8356 - RNA, 17 nt, Artificial Sequence
  Synthetic
  misc_feature (10)..(10): n is a, c, g, or u
uggggugaancccagcc

SEQ ID NO: 8357 - RNA, 17 nt, Artificial Sequence
  Synthetic
aacaaggacaccuggcc

SEQ ID NO: 8358 - RNA, 17 nt, Artificial Sequence
  Synthetic
gugccuucucaucugcc

SEQ ID NO: 8359 - RNA, 17 nt, Artificial Sequence
  Synthetic
  misc_feature (10)..(10): n is a, c, g, or u
aaaccacaanaguugcc

SEQ ID NO: 8360 - RNA, 17 nt, Artificial Sequence
  Synthetic
gcaaacaccgcaaaucc

SEQ ID NO: 8361 - RNA, 17 nt, Artificial Sequence
  Synthetic
agggguccuaggaaucc

SEQ ID NO: 8362 - RNA, 17 nt, Artificial Sequence
  Synthetic
ccgucggcgcugaaucc

SEQ ID NO: 8363 - RNA, 17 nt, Artificial Sequence
  Synthetic
acgccgcagacacaucc

SEQ ID NO: 8364 - RNA, 17 nt, Artificial Sequence
  Synthetic
ugcugccaacuggaucc

SEQ ID NO: 8365 - RNA, 17 nt, Artificial Sequence
  Synthetic
auuaaaccuuauuaucc

SEQ ID NO: 8366 - RNA, 17 nt, Artificial Sequence
  Synthetic
  misc_feature (5)..(5): n is a, c, g, or u
ccganaauguuugcucc

SEQ ID NO: 8367 - RNA, 17 nt, Artificial Sequence
  Synthetic
uaacaacaguagucucc

SEQ ID NO: 8368 - RNA, 17 nt, Artificial Sequence
  Synthetic
acauaccuugauagucc

SEQ ID NO: 8369 - RNA, 17 nt, Artificial Sequence
  Synthetic
guaaacaaaggacgucc

SEQ ID NO: 8370 - RNA, 17 nt, Artificial Sequence
  Synthetic
  misc_feature (13)..(13): n is a, c, g, or u
aacagaguuaucngucc

SEQ ID NO: 8371 - RNA, 17 nt, Artificial Sequence
  Synthetic
  misc_feature (14)..(14): n is a, c, g, or u
gagacucuaaggcnucc

SEQ ID NO: 8372 - RNA, 17 nt, Artificial Sequence
  Synthetic
gggguaggcugccuucc

SEQ ID NO: 8373 - RNA, 17 nt, Artificial Sequence
  Synthetic
acaggguuuacuguucc

SEQ ID NO: 8374 - RNA, 17 nt, Artificial Sequence
  Synthetic
ccucugggauucuuucc

SEQ ID NO: 8375 - RNA, 17 nt, Artificial Sequence
  Synthetic
uguucaagccuccaagc

SEQ ID NO: 8376 - RNA, 17 nt, Artificial Sequence
  Synthetic
gaacuggagccaccagc

SEQ ID NO: 8377 - RNA, 17 nt, Artificial Sequence
  Synthetic
gagaucuucugcgacgc

SEQ ID NO: 8378 - RNA, 17 nt, Artificial Sequence
  Synthetic
cgcaccucucuuuacgc

SEQ ID NO: 8379 - RNA, 17 nt, Artificial Sequence
  Synthetic
ucggcgcugaaucccgc

SEQ ID NO: 8380 - RNA, 17 nt, Artificial Sequence
  Synthetic
agaugauaaaacgccgc

SEQ ID NO: 8381 - RNA, 17 nt, Artificial Sequence
  Synthetic
uccgcgggauucagcgc

SEQ ID NO: 8382 - RNA, 17 nt, Artificial Sequence
  Synthetic
uucuccauguucagcgc

SEQ ID NO: 8383 - RNA, 17 nt, Artificial Sequence
  Synthetic
uuacgucccgucggcgc

SEQ ID NO: 8384 - RNA, 17 nt, Artificial Sequence
  Synthetic
agguuccacgcaugcgc

SEQ ID NO: 8385 - RNA, 17 nt, Artificial Sequence
  Synthetic
gauuggggacccugcgc

SEQ ID NO: 8386 - RNA, 17 nt, Artificial Sequence
  Synthetic
gcauggugcuggugcgc

SEQ ID NO: 8387 - RNA, 17 nt, Artificial Sequence
  Synthetic
acgaaggucucaaucgc

SEQ ID NO: 8388 - RNA, 17 nt, Artificial Sequence
  Synthetic
gaacucccucgccucgc

SEQ ID NO: 8389 - RNA, 17 nt, Artificial Sequence
  Synthetic
cucaaucgccgcgucgc

SEQ ID NO: 8390 - RNA, 17 nt, Artificial Sequence
  Synthetic
  misc_feature (3)..(3): n is a, c, g, or u
cuncucguguuacaggc

SEQ ID NO: 8391 - RNA, 17 nt, Artificial Sequence
  Synthetic
  misc_feature (5)..(5): n is a, c, g, or u
  misc_feature (8)..(8): n is a, c, g, or u
uggungangcaggaggc

SEQ ID NO: 8392 - RNA, 17 nt, Artificial Sequence
  Synthetic
uuccauggcugcuaggc

SEQ ID NO: 8393 - RNA, 17 nt, Artificial Sequence
  Synthetic
  misc_feature (8)..(8): n is a, c, g, or u
  misc_feature (11)..(11): n is a, c, g, or u
uggucggncgnaacggc

SEQ ID NO: 8394 - RNA, 17 nt, Artificial Sequence
  Synthetic
agugcacacgguccggc

SEQ ID NO: 8395 - RNA, 17 nt, Artificial Sequence
  Synthetic
agcuggagcauucgggc

SEQ ID NO: 8396 - RNA, 17 nt, Artificial Sequence
  Synthetic
gagcuacagcauggggc

SEQ ID NO: 8397 - RNA, 17 nt, Artificial Sequence
  Synthetic
acgcaacccccacuggc

SEQ ID NO: 8398 - RNA, 17 nt, Artificial Sequence
  Synthetic
  misc_feature (6)..(7): n is a, c, g, or u
ccagcnngggaccaugc

SEQ ID NO: 8399 - RNA, 17 nt, Artificial Sequence
  Synthetic
ucauccucaggccaugc

SEQ ID NO: 8400 - RNA, 17 nt, Artificial Sequence
  Synthetic
cugccgauccauacugc

SEQ ID NO: 8401 - RNA, 17 nt, Artificial Sequence
  Synthetic
guuugcuccagaccugc

SEQ ID NO: 8402 - RNA, 17 nt, Artificial Sequence
  Synthetic
  misc_feature (5)..(6): n is a, c, g, or u
cuuunnggcuccucugc

SEQ ID NO: 8403 - RNA, 17 nt, Artificial Sequence
  Synthetic
ucgcuggaugugucugc

SEQ ID NO: 8404 - RNA, 17 nt, Artificial Sequence
  Synthetic
ccaaaaggccuccgugc

SEQ ID NO: 8405 - RNA, 17 nt, Artificial Sequence
  Synthetic
  misc_feature (11)..(11): n is a, c, g, or u
  misc_feature (14)..(14): n is a, c, g, or u
ggcaagcaauncunugc

SEQ ID NO: 8406 - RNA, 17 nt, Artificial Sequence
  Synthetic
acagaccuggccguugc

SEQ ID NO: 8407 - RNA, 17 nt, Artificial Sequence
  Synthetic
ucccaaucuggauuugc

SEQ ID NO: 8408 - RNA, 17 nt, Artificial Sequence
  Synthetic
cugugccaaguguuugc

SEQ ID NO: 8409 - RNA, 17 nt, Artificial Sequence
  Synthetic
  misc_feature (16)..(16): n is a, c, g, or u
auacaggccucucacnc

SEQ ID NO: 8410 - RNA, 17 nt, Artificial Sequence
  Synthetic
  misc_feature (13)..(13): n is a, c, g, or u
  misc_feature (16)..(16): n is a, c, g, or u
ccgucugccguuncgnc

SEQ ID NO: 8411 - RNA, 17 nt, Artificial Sequence
  Synthetic
  misc_feature (16)..(16): n is a, c, g, or u
aaagaauuuggagcunc

SEQ ID NO: 8412 - RNA, 17 nt, Artificial Sequence
  Synthetic
cuuggucaugggccauc

SEQ ID NO: 8413 - RNA, 17 nt, Artificial Sequence
  Synthetic
agugcgaauccacacuc

SEQ ID NO: 8414 - RNA, 17 nt, Artificial Sequence
  Synthetic
accacgagucuagacuc

SEQ ID NO: 8415 - RNA, 17 nt, Artificial Sequence
  Synthetic
ccaccccaaaaggccuc

SEQ ID NO: 8416 - RNA, 17 nt, Artificial Sequence
  Synthetic
uuccaccagcaauccuc

SEQ ID NO: 8417 - RNA, 17 nt, Artificial Sequence
  Synthetic
guggagcccucaggcuc

SEQ ID NO: 8418 - RNA, 17 nt, Artificial Sequence
  Synthetic
auuugcgguguuugcuc

SEQ ID NO: 8419 - RNA, 17 nt, Artificial Sequence
  Synthetic
cgcggacgacccuucuc

SEQ ID NO: 8420 - RNA, 17 nt, Artificial Sequence
  Synthetic
  misc_feature (3)..(3): n is a, c, g, or u
acngaaggaaagaaguc

SEQ ID NO: 8421 - RNA, 17 nt, Artificial Sequence
  Synthetic
ggcacagacggggaguc

SEQ ID NO: 8422 - RNA, 17 nt, Artificial Sequence
  Synthetic
  misc_feature (1)..(1): n is a, c, g, or u
  misc_feature (3)..(3): n is a, c, g, or u
  misc_feature (9)..(9): n is a, c, g, or u
ngngagagncaguaguc

SEQ ID NO: 8423 - RNA, 17 nt, Artificial Sequence
  Synthetic
uacgcggacuccccguc

SEQ ID NO: 8424 - RNA, 17 nt, Artificial Sequence
  Synthetic
uuuguuuacgucccguc

SEQ ID NO: 8425 - RNA, 17 nt, Artificial Sequence
  Synthetic
caggugcaauuuccguc

SEQ ID NO: 8426 - RNA, 17 nt, Artificial Sequence
  Synthetic
ccccgagaagggucguc

SEQ ID NO: 8427 - RNA, 17 nt, Artificial Sequence
  Synthetic
cgauugagaccuucguc

SEQ ID NO: 8428 - RNA, 17 nt, Artificial Sequence
  Synthetic
ccggcaacggccagguc

SEQ ID NO: 8429 - RNA, 17 nt, Artificial Sequence
  Synthetic
guaggcauaaauugguc

SEQ ID NO: 8430 - RNA, 17 nt, Artificial Sequence
  Synthetic
uuaucgcuggauguguc

SEQ ID NO: 8431 - RNA, 17 nt, Artificial Sequence
  Synthetic
ggucguccgcgggauuc

SEQ ID NO: 8432 - RNA, 17 nt, Artificial Sequence
  Synthetic
ugcuguaccaaaccuuc

SEQ ID NO: 8433 - RNA, 17 nt, Artificial Sequence
  Synthetic
cucucguuuuugccuuc

SEQ ID NO: 8434 - RNA, 17 nt, Artificial Sequence
  Synthetic
ccgagauugagaucuuc

SEQ ID NO: 8435 - RNA, 17 nt, Artificial Sequence
  Synthetic
ugauguucuccauguuc

SEQ ID NO: 8436 - RNA, 17 nt, Artificial Sequence
  Synthetic
aacaguaaacccuguuc

SEQ ID NO: 8437 - RNA, 17 nt, Artificial Sequence
  Synthetic
acuagugccauuuguuc

SEQ ID NO: 8438 - RNA, 17 nt, Artificial Sequence
  Synthetic
aacuuacaaggccuuuc

SEQ ID NO: 8439 - RNA, 17 nt, Artificial Sequence
  Synthetic
  misc_feature (8)..(8): n is a, c, g, or u
caucaucnugggcuuuc

SEQ ID NO: 8440 - RNA, 17 nt, Artificial Sequence
  Synthetic
cucccauaggaauuuuc

SEQ ID NO: 8441 - RNA, 17 nt, Artificial Sequence
  Synthetic
guaacagcgguaaaaag

SEQ ID NO: 8442 - RNA, 17 nt, Artificial Sequence
  Synthetic
guaaguuggcgagaaag

SEQ ID NO: 8443 - RNA, 17 nt, Artificial Sequence
  Synthetic
aguaggacaugaacaag

SEQ ID NO: 8444 - RNA, 17 nt, Artificial Sequence
  Synthetic
ugucucacuuuuggaag

SEQ ID NO: 8445 - RNA, 17 nt, Artificial Sequence
  Synthetic
gacgugcagaggugaag

SEQ ID NO: 8446 - RNA, 17 nt, Artificial Sequence
  Synthetic
aacugaaagccaaacag

SEQ ID NO: 8447 - RNA, 17 nt, Artificial Sequence
  Synthetic
cucaaagguggagacag

SEQ ID NO: 8448 - RNA, 17 nt, Artificial Sequence
  Synthetic
acucugcaagaucccag

SEQ ID NO: 8449 - RNA, 17 nt, Artificial Sequence
  Synthetic
gaccaagccccagccag

SEQ ID NO: 8450 - RNA, 17 nt, Artificial Sequence
  Synthetic
gccgcagacacauccag

SEQ ID NO: 8451 - RNA, 17 nt, Artificial Sequence
  Synthetic
acuggagccaccagcag

SEQ ID NO: 8452 - RNA, 17 nt, Artificial Sequence
  Synthetic
gguauauuauauaagag

SEQ ID NO: 8453 - RNA, 17 nt, Artificial Sequence
  Synthetic
acccgccuuccauagag

SEQ ID NO: 8454 - RNA, 17 nt, Artificial Sequence
  Synthetic
ugguacagcaacaggag

SEQ ID NO: 8455 - RNA, 17 nt, Artificial Sequence
  Synthetic
ucuauaagcuggaggag

SEQ ID NO: 8456 - RNA, 17 nt, Artificial Sequence
  Synthetic
uuuggugucuuucggag

SEQ ID NO: 8457 - RNA, 17 nt, Artificial Sequence
  Synthetic
gaaaauuccuaugggag

SEQ ID NO: 8458 - RNA, 17 nt, Artificial Sequence
  Synthetic
gacaggagguuggugag

SEQ ID NO: 8459 - RNA, 17 nt, Artificial Sequence
  Synthetic
cccccuagaaaauugag

SEQ ID NO: 8460 - RNA, 17 nt, Artificial Sequence
  Synthetic
  misc_feature (10)..(11): n is a, c, g, or u
  misc_feature (15)..(15): n is a, c, g, or u
gaagauccannaucnag

SEQ ID NO: 8461 - RNA, 17 nt, Artificial Sequence
  Synthetic
auacccgccuuccauag

SEQ ID NO: 8462 - RNA, 17 nt, Artificial Sequence
  Synthetic
uucucucaauuuucuag

SEQ ID NO: 8463 - RNA, 17 nt, Artificial Sequence
  Synthetic
gggauucagcgccgacg

SEQ ID NO: 8464 - RNA, 17 nt, Artificial Sequence
  Synthetic
  misc_feature (12)..(12): n is a, c, g, or u
uucuuuccuucnguacg

SEQ ID NO: 8465 - RNA, 17 nt, Artificial Sequence
  Synthetic
ucgcauggagaccaccg

SEQ ID NO: 8466 - RNA, 17 nt, Artificial Sequence
  Synthetic
ucucaucugccggaccg

SEQ ID NO: 8467 - RNA, 17 nt, Artificial Sequence
  Synthetic
  misc_feature (10)..(10): n is a, c, g, or u
  misc_feature (13)..(13): n is a, c, g, or u
ucuagggggnacnaccg

SEQ ID NO: 8468 - RNA, 17 nt, Artificial Sequence
  Synthetic
  misc_feature (12)..(12): n is a, c, g, or u
agucccaagcgnccccg

SEQ ID NO: 8469 - RNA, 17 nt, Artificial Sequence
  Synthetic
uaacauugagauucccg

SEQ ID NO: 8470 - RNA, 17 nt, Artificial Sequence
  Synthetic
accccaaaaggccuccg

SEQ ID NO: 8471 - RNA, 17 nt, Artificial Sequence
  Synthetic
ccgagaagggucguccg

SEQ ID NO: 8472 - RNA, 17 nt, Artificial Sequence
  Synthetic
gagaagggucguccgcg

SEQ ID NO: 8473 - RNA, 17 nt, Artificial Sequence
  Synthetic
caacuggauccugcgcg

SEQ ID NO: 8474 - RNA, 17 nt, Artificial Sequence
  Synthetic
ccuucgucugcgaggcg

SEQ ID NO: 8475 - RNA, 17 nt, Artificial Sequence
  Synthetic
ggccuuguaaguuggcg

SEQ ID NO: 8476 - RNA, 17 nt, Artificial Sequence
  Synthetic
gccaacuggauccugcg

SEQ ID NO: 8477 - RNA, 17 nt, Artificial Sequence
  Synthetic
  misc_feature (12)..(12): n is a, c, g, or u
gccucagcucunuaucg

SEQ ID NO: 8478 - RNA, 17 nt, Artificial Sequence
  Synthetic
aggguccccaauccucg

SEQ ID NO: 8479 - RNA, 17 nt, Artificial Sequence
  Synthetic
agaagaucucaaucucg

SEQ ID NO: 8480 - RNA, 17 nt, Artificial Sequence
  Synthetic
gauccaacugguggucg

SEQ ID NO: 8481 - RNA, 17 nt, Artificial Sequence
  Synthetic
  misc_feature (14)..(14): n is a, c, g, or u
uggagcaaacauunucg

SEQ ID NO: 8482 - RNA, 17 nt, Artificial Sequence
  Synthetic
acggcagacggagaagg

SEQ ID NO: 8483 - RNA, 17 nt, Artificial Sequence
  Synthetic
acacacucuauggaagg

SEQ ID NO: 8484 - RNA, 17 nt, Artificial Sequence
  Synthetic
uccuuggacucauaagg

SEQ ID NO: 8485 - RNA, 17 nt, Artificial Sequence
  Synthetic
uuugguacagcaacagg

SEQ ID NO: 8486 - RNA, 17 nt, Artificial Sequence
  Synthetic
  misc_feature (4)..(4): n is a, c, g, or u
ccuncucguguuacagg

SEQ ID NO: 8487 - RNA, 17 nt, Artificial Sequence
  Synthetic
uaguaaacugagccagg

SEQ ID NO: 8488 - RNA, 17 nt, Artificial Sequence
  Synthetic
  misc_feature (6)..(6): n is a, c, g, or u
ggugancaaugcucagg

SEQ ID NO: 8489 - RNA, 17 nt, Artificial Sequence
  Synthetic
agaugauuaggcagagg

SEQ ID NO: 8490 - RNA, 17 nt, Artificial Sequence
  Synthetic
caugcgacgugcagagg

SEQ ID NO: 8491 - RNA, 17 nt, Artificial Sequence
  Synthetic
guccgcguaaagagagg

SEQ ID NO: 8492 - RNA, 17 nt, Artificial Sequence
  Synthetic
ggucuauaagcuggagg

SEQ ID NO: 8493 - RNA, 17 nt, Artificial Sequence
  Synthetic
  misc_feature (12)..(12): n is a, c, g, or u
agugcaguaugnugagg

SEQ ID NO: 8494 - RNA, 17 nt, Artificial Sequence
  Synthetic
ggaguucuucuucuagg

SEQ ID NO: 8495 - RNA, 17 nt, Artificial Sequence
  Synthetic
  misc_feature (4)..(4): n is a, c, g, or u
  misc_feature (7)..(7): n is a, c, g, or u
guuncgnccgaccacgg

SEQ ID NO: 8496 - RNA, 17 nt, Artificial Sequence
  Synthetic
  misc_feature (2)..(2): n is a, c, g, or u
  misc_feature (5)..(5): n is a, c, g, or u
gncgnaacggcagacgg

SEQ ID NO: 8497 - RNA, 17 nt, Artificial Sequence
  Synthetic
cuuaucaacacuuccgg

SEQ ID NO: 8498 - RNA, 17 nt, Artificial Sequence
  Synthetic
gaucuucugcgacgcgg

SEQ ID NO: 8499 - RNA, 17 nt, Artificial Sequence
  Synthetic
aaaaggccuccgugcgg

SEQ ID NO: 8500 - RNA, 17 nt, Artificial Sequence
  Synthetic
uauuuggugucuuucgg

SEQ ID NO: 8501 - RNA, 17 nt, Artificial Sequence
  Synthetic
  misc_feature (6)..(6): n is a, c, g, or u
  misc_feature (9)..(9): n is a, c, g, or u
gcaauncunugcugggg

SEQ ID NO: 8502 - RNA, 17 nt, Artificial Sequence
  Synthetic
gccuccgugcggugggg

SEQ ID NO: 8503 - RNA, 17 nt, Artificial Sequence
  Synthetic
cggaaaauuccuauggg

SEQ ID NO: 8504 - RNA, 17 nt, Artificial Sequence
  Synthetic
  misc_feature (10)..(10): n is a, c, g, or u
gacucuagcnaccuggg

SEQ ID NO: 8505 - RNA, 17 nt, Artificial Sequence
  Synthetic
gaaagccaaacaguggg

SEQ ID NO: 8506 - RNA, 17 nt, Artificial Sequence
  Synthetic
cccugcgcugaacaugg

SEQ ID NO: 8507 - RNA, 17 nt, Artificial Sequence
  Synthetic
cucugcacgucgcaugg

SEQ ID NO: 8508 - RNA, 17 nt, Artificial Sequence
  Synthetic
uguucccaagaauaugg

SEQ ID NO: 8509 - RNA, 17 nt, Artificial Sequence
  Synthetic
gcugccuuccugacugg

SEQ ID NO: 8510 - RNA, 17 nt, Artificial Sequence
  Synthetic
aaguugcauggugcugg

SEQ ID NO: 8511 - RNA, 17 nt, Artificial Sequence
  Synthetic
  misc_feature (8)..(8): n is a, c, g, or u
  misc_feature (11)..(11): n is a, c, g, or u
aagcaauncunugcugg

SEQ ID NO: 8512 - RNA, 17 nt, Artificial Sequence
  Synthetic
guguuucucaaaggugg

SEQ ID NO: 8513 - RNA, 17 nt, Artificial Sequence
  Synthetic
aggccuccgugcggugg

SEQ ID NO: 8514 - RNA, 17 nt, Artificial Sequence
  Synthetic
  misc_feature (13)..(14): n is a, c, g, or u
ccuugggcaagannugg

SEQ ID NO: 8515 - RNA, 17 nt, Artificial Sequence
  Synthetic
aucuucucgaggauugg

SEQ ID NO: 8516 - RNA, 17 nt, Artificial Sequence
  Synthetic
gagugauuggagguugg

SEQ ID NO: 8517 - RNA, 17 nt, Artificial Sequence
  Synthetic
gcacggaggccuuuugg

SEQ ID NO: 8518 - RNA, 17 nt, Artificial Sequence
  Synthetic
  misc_feature (2)..(2): n is a, c, g, or u
  misc_feature (8)..(8): n is a, c, g, or u
  misc_feature (15)..(16): n is a, c, g, or u
cnucaacnaccagcnng

SEQ ID NO: 8519 - RNA, 17 nt, Artificial Sequence
  Synthetic
  misc_feature (6)..(6): n is a, c, g, or u
gacaunaucaaaaaaug

SEQ ID NO: 8520 - RNA, 17 nt, Artificial Sequence
  Synthetic
aagugagacaagaaaug

SEQ ID NO: 8521 - RNA, 17 nt, Artificial Sequence
  Synthetic
  misc_feature (1)..(1): n is a, c, g, or u
  misc_feature (13)..(13): n is a, c, g, or u
nccacucacagunaaug

SEQ ID NO: 8522 - RNA, 17 nt, Artificial Sequence
  Synthetic
ucacgguggucuccaug

SEQ ID NO: 8523 - RNA, 17 nt, Artificial Sequence
  Synthetic
ugggccaucagcgcaug

SEQ ID NO: 8524 - RNA, 17 nt, Artificial Sequence
  Synthetic
acacgguccggcagaug

SEQ ID NO: 8525 - RNA, 17 nt, Artificial Sequence
  Synthetic
ugcauggccugaggaug

SEQ ID NO: 8526 - RNA, 17 nt, Artificial Sequence
  Synthetic
  misc_feature (5)..(5): n is a, c, g, or u
cccangaugaugggaug

SEQ ID NO: 8527 - RNA, 17 nt, Artificial Sequence
  Synthetic
  misc_feature (10)..(10): n is a, c, g, or u
gaaagcccangaugaug

SEQ ID NO: 8528 - RNA, 17 nt, Artificial Sequence
  Synthetic
uccuaggaauccugaug

SEQ ID NO: 8529 - RNA, 17 nt, Artificial Sequence
  Synthetic
uuggagguuggggacug

SEQ ID NO: 8530 - RNA, 17 nt, Artificial Sequence
  Synthetic
  misc_feature (12)..(12): n is a, c, g, or u
augacucuagcnaccug

SEQ ID NO: 8531 - RNA, 17 nt, Artificial Sequence
  Synthetic
  misc_feature (2)..(2): n is a, c, g, or u
anuaugcccugagccug

SEQ ID NO: 8532 - RNA, 17 nt, Artificial Sequence
  Synthetic
  misc_feature (2)..(2): n is a, c, g, or u
  misc_feature (5)..(5): n is a, c, g, or u
anagnauugcuugccug

SEQ ID NO: 8533 - RNA, 17 nt, Artificial Sequence
  Synthetic
cugccaacuggauccug

SEQ ID NO: 8534 - RNA, 17 nt, Artificial Sequence
  Synthetic
  misc_feature (9)..(9): n is a, c, g, or u
  misc_feature (12)..(12): n is a, c, g, or u
caagcaauncunugcug

SEQ ID NO: 8535 - RNA, 17 nt, Artificial Sequence
  Synthetic
  misc_feature (14)..(14): n is a, c, g, or u
acaggccucucacncug

SEQ ID NO: 8536 - RNA, 17 nt, Artificial Sequence
  Synthetic
ccaccagcaauccucug

SEQ ID NO: 8537 - RNA, 17 nt, Artificial Sequence
  Synthetic
gagauugagaucuucug

SEQ ID NO: 8538 - RNA, 17 nt, Artificial Sequence
  Synthetic
uuucucuuccaaaagug

SEQ ID NO: 8539 - RNA, 17 nt, Artificial Sequence
  Synthetic
cugaaagccaaacagug

SEQ ID NO: 8540 - RNA, 17 nt, Artificial Sequence
  Synthetic
ccaagccccagccagug

SEQ ID NO: 8541 - RNA, 17 nt, Artificial Sequence
  Synthetic
uauaagcuggaggagug

SEQ ID NO: 8542 - RNA, 17 nt, Artificial Sequence
  Synthetic
  misc_feature (8)..(8): n is a, c, g, or u
cucuagcnaccugggug

SEQ ID NO: 8543 - RNA, 17 nt, Artificial Sequence
  Synthetic
  misc_feature (11)..(12): n is a, c, g, or u
uugggcaagannuggug

SEQ ID NO: 8544 - RNA, 17 nt, Artificial Sequence
  Synthetic
aggacaggagguuggug

SEQ ID NO: 8545 - RNA, 17 nt, Artificial Sequence
  Synthetic
  misc_feature (1)..(1): n is a, c, g, or u
  misc_feature (11)..(11): n is a, c, g, or u
nuuucucauunacugug

SEQ ID NO: 8546 - RNA, 17 nt, Artificial Sequence
  Synthetic
aaggaauacuaacauug

SEQ ID NO: 8547 - RNA, 17 nt, Artificial Sequence
  Synthetic
accgcaaauccagauug

SEQ ID NO: 8548 - RNA, 17 nt, Artificial Sequence
  Synthetic
ugagauucccgagauug

SEQ ID NO: 8549 - RNA, 17 nt, Artificial Sequence
  Synthetic
cugcgacgcggcgauug

SEQ ID NO: 8550 - RNA, 17 nt, Artificial Sequence
  Synthetic
  misc_feature (4)..(4): n is a, c, g, or u
  misc_feature (13)..(13): n is a, c, g, or u
agunugucaacgnauug

SEQ ID NO: 8551 - RNA, 17 nt, Artificial Sequence
  Synthetic
uggaugaugugguauug

SEQ ID NO: 8552 - RNA, 17 nt, Artificial Sequence
  Synthetic
cuccaagcugugccuug

SEQ ID NO: 8553 - RNA, 17 nt, Artificial Sequence
  Synthetic
  misc_feature (11)..(11): n is a, c, g, or u
cuucucggggncgcuug

SEQ ID NO: 8554 - RNA, 17 nt, Artificial Sequence
  Synthetic
gggucaccauauucuug

SEQ ID NO: 8555 - RNA, 17 nt, Artificial Sequence
  Synthetic
  misc_feature (2)..(2): n is a, c, g, or u
angacugggaggaguug

SEQ ID NO: 8556 - RNA, 17 nt, Artificial Sequence
  Synthetic
gccagguguccuuguug

SEQ ID NO: 8557 - RNA, 17 nt, Artificial Sequence
  Synthetic
gaaacgauguauauuug

SEQ ID NO: 8558 - RNA, 17 nt, Artificial Sequence
  Synthetic
  misc_feature (2)..(2): n is a, c, g, or u
cncugucuccaccuuug

SEQ ID NO: 8559 - RNA, 17 nt, Artificial Sequence
  Synthetic
  misc_feature (2)..(2): n is a, c, g, or u
cnuagcgccucauuuug

SEQ ID NO: 8560 - RNA, 17 nt, Artificial Sequence
  Synthetic
  misc_feature (17)..(17): n is a, c, g, or u
guauauuaggaaaagan

SEQ ID NO: 8561 - RNA, 17 nt, Artificial Sequence
  Synthetic
  misc_feature (17)..(17): n is a, c, g, or u
ugaaagccugcuuagan

SEQ ID NO: 8562 - RNA, 17 nt, Artificial Sequence
  Synthetic
  misc_feature (17)..(17): n is a, c, g, or u
aucauuacuuccaaacn

SEQ ID NO: 8563 - RNA, 17 nt, Artificial Sequence
  Synthetic
  misc_feature (4)..(4): n is a, c, g, or u
  misc_feature (10)..(10): n is a, c, g, or u
  misc_feature (17)..(17): n is a, c, g, or u
aucnucaacnaccagcn

SEQ ID NO: 8564 - RNA, 17 nt, Artificial Sequence
  Synthetic
  misc_feature (17)..(17): n is a, c, g, or u
uucccaucccaucaucn

SEQ ID NO: 8565 - RNA, 17 nt, Artificial Sequence
  Synthetic
  misc_feature (17)..(17): n is a, c, g, or u
gagcugaggcgguaucn

SEQ ID NO: 8566 - RNA, 17 nt, Artificial Sequence
  Synthetic
  misc_feature (17)..(17): n is a, c, g, or u
ucaaagguggagacagn

SEQ ID NO: 8567 - RNA, 17 nt, Artificial Sequence
  Synthetic
  misc_feature (17)..(17): n is a, c, g, or u
ccgccuguaacacgagn

SEQ ID NO: 8568 - RNA, 17 nt, Artificial Sequence
  Synthetic
  misc_feature (13)..(13): n is a, c, g, or u
  misc_feature (17)..(17): n is a, c, g, or u
uucuuugauuuunugun

SEQ ID NO: 8569 - RNA, 17 nt, Artificial Sequence
  Synthetic
  misc_feature (17)..(17): n is a, c, g, or u
auaagauaggggcauun

SEQ ID NO: 8570 - RNA, 17 nt, Artificial Sequence
  Synthetic
aagcaggauaaccacau

SEQ ID NO: 8571 - RNA, 17 nt, Artificial Sequence
  Synthetic
  misc_feature (5)..(5): n is a, c, g, or u
  misc_feature (8)..(8): n is a, c, g, or u
cuuunggncauggacau

SEQ ID NO: 8572 - RNA, 17 nt, Artificial Sequence
  Synthetic
cacagccuagcagccau

SEQ ID NO: 8573 - RNA, 17 nt, Artificial Sequence
  Synthetic
aacaagagcuacagcau

SEQ ID NO: 8574 - RNA, 17 nt, Artificial Sequence
  Synthetic
aggugaaaaaguugcau

SEQ ID NO: 8575 - RNA, 17 nt, Artificial Sequence
  Synthetic
  misc_feature (11)..(11): n is a, c, g, or u
  misc_feature (14)..(14): n is a, c, g, or u
ggguggcuuunggncau

SEQ ID NO: 8576 - RNA, 17 nt, Artificial Sequence
  Synthetic
  misc_feature (10)..(10): n is a, c, g, or u
uaacaaaacnaaaagau

SEQ ID NO: 8577 - RNA, 17 nt, Artificial Sequence
  Synthetic
ccaauccucgagaagau

SEQ ID NO: 8578 - RNA, 17 nt, Artificial Sequence
  Synthetic
ggaaguguugauaagau

SEQ ID NO: 8579 - RNA, 17 nt, Artificial Sequence
  Synthetic
acaccgcaaauccagau

SEQ ID NO: 8580 - RNA, 17 nt, Artificial Sequence
  Synthetic
ucaaucuucucgaggau

SEQ ID NO: 8581 - RNA, 17 nt, Artificial Sequence
  Synthetic
gguguccuuguugggau

SEQ ID NO: 8582 - RNA, 17 nt, Artificial Sequence
  Synthetic
  misc_feature (6)..(6): n is a, c, g, or u
  misc_feature (15)..(15): n is a, c, g, or u
aaagunugucaacgnau

SEQ ID NO: 8583 - RNA, 17 nt, Artificial Sequence
  Synthetic
cuuguucccaagaauau

SEQ ID NO: 8584 - RNA, 17 nt, Artificial Sequence
  Synthetic
uuggcuuucaguuauau

SEQ ID NO: 8585 - RNA, 17 nt, Artificial Sequence
  Synthetic
ccuguuaacaggccuau

SEQ ID NO: 8586 - RNA, 17 nt, Artificial Sequence
  Synthetic
  misc_feature (1)..(1): n is a, c, g, or u
nuauuuacacacucuau

SEQ ID NO: 8587 - RNA, 17 nt, Artificial Sequence
  Synthetic
uaggaguuccgcaguau

SEQ ID NO: 8588 - RNA, 17 nt, Artificial Sequence
  Synthetic
ucuagacucugcgguau

SEQ ID NO: 8589 - RNA, 17 nt, Artificial Sequence
  Synthetic
uauggaugaugugguau

SEQ ID NO: 8590 - RNA, 17 nt, Artificial Sequence
  Synthetic
  misc_feature (14)..(14): n is a, c, g, or u
ccgccucagcucunuau

SEQ ID NO: 8591 - RNA, 17 nt, Artificial Sequence
  Synthetic
gcacuccuccagcuuau

SEQ ID NO: 8592 - RNA, 17 nt, Artificial Sequence
  Synthetic
aggcugugcugccaacu

SEQ ID NO: 8593 - RNA, 17 nt, Artificial Sequence
  Synthetic
gaaggcuggauccaacu

SEQ ID NO: 8594 - RNA, 17 nt, Artificial Sequence
  Synthetic
ggaaguaaugauuaacu

SEQ ID NO: 8595 - RNA, 17 nt, Artificial Sequence
  Synthetic
accgcagagucuagacu

SEQ ID NO: 8596 - RNA, 17 nt, Artificial Sequence
  Synthetic
aggcugccuuccugacu

SEQ ID NO: 8597 - RNA, 17 nt, Artificial Sequence
  Synthetic
uccuggcucaguuuacu

SEQ ID NO: 8598 - RNA, 17 nt, Artificial Sequence
  Synthetic
ccucuuauguaagaccu

SEQ ID NO: 8599 - RNA, 17 nt, Artificial Sequence
  Synthetic
aaacgggcaacauaccu

SEQ ID NO: 8600 - RNA, 17 nt, Artificial Sequence
  Synthetic
  misc_feature (8)..(8): n is a, c, g, or u
  misc_feature (11)..(11): n is a, c, g, or u
acacggunguncccccu

SEQ ID NO: 8601 - RNA, 17 nt, Artificial Sequence
  Synthetic
gacgaggcagguccccu

SEQ ID NO: 8602 - RNA, 17 nt, Artificial Sequence
  Synthetic
gccuccaagcugugccu

SEQ ID NO: 8603 - RNA, 17 nt, Artificial Sequence
  Synthetic
  misc_feature (5)..(5): n is a, c, g, or u
  misc_feature (11)..(11): n is a, c, g, or u
uggunguugangauccu

SEQ ID NO: 8604 - RNA, 17 nt, Artificial Sequence
  Synthetic
gauacauagagguuccu

SEQ ID NO: 8605 - RNA, 17 nt, Artificial Sequence
  Synthetic
  misc_feature (13)..(13): n is a, c, g, or u
cccuucucggggncgcu

SEQ ID NO: 8606 - RNA, 17 nt, Artificial Sequence
  Synthetic
uuguccugguuaucgcu

SEQ ID NO: 8607 - RNA, 17 nt, Artificial Sequence
  Synthetic
uguuugcucugaaggcu

SEQ ID NO: 8608 - RNA, 17 nt, Artificial Sequence
  Synthetic
ggcacagcuuggaggcu

SEQ ID NO: 8609 - RNA, 17 nt, Artificial Sequence
  Synthetic
cgcaacccccacuggcu

SEQ ID NO: 8610 - RNA, 17 nt, Artificial Sequence
  Synthetic
gccuguauuucccugcu

SEQ ID NO: 8611 - RNA, 17 nt, Artificial Sequence
  Synthetic
aaaaguugcauggugcu

SEQ ID NO: 8612 - RNA, 17 nt, Artificial Sequence
  Synthetic
  misc_feature (10)..(10): n is a, c, g, or u
  misc_feature (13)..(13): n is a, c, g, or u
gcaagcaauncunugcu

SEQ ID NO: 8613 - RNA, 17 nt, Artificial Sequence
  Synthetic
aaucccagaggauugcu

SEQ ID NO: 8614 - RNA, 17 nt, Artificial Sequence
  Synthetic
  misc_feature (15)..(15): n is a, c, g, or u
cugacuacuaggucncu

SEQ ID NO: 8615 - RNA, 17 nt, Artificial Sequence
  Synthetic
  misc_feature (15)..(15): n is a, c, g, or u
uuccuaggaccccuncu

SEQ ID NO: 8616 - RNA, 17 nt, Artificial Sequence
  Synthetic
gauugaagucccaaucu

SEQ ID NO: 8617 - RNA, 17 nt, Artificial Sequence
  Synthetic
gcagaagaucucaaucu

SEQ ID NO: 8618 - RNA, 17 nt, Artificial Sequence
  Synthetic
acaauaccgcagagucu

SEQ ID NO: 8619 - RNA, 17 nt, Artificial Sequence
  Synthetic
aaguccaccacgagucu

SEQ ID NO: 8620 - RNA, 17 nt, Artificial Sequence
  Synthetic
  misc_feature (2)..(2): n is a, c, g, or u
  misc_feature (6)..(6): n is a, c, g, or u
  misc_feature (14)..(14): n is a, c, g, or u
unugunugaugugnucu

SEQ ID NO: 8621 - RNA, 17 nt, Artificial Sequence
  Synthetic
gugggucaccauauucu

SEQ ID NO: 8622 - RNA, 17 nt, Artificial Sequence
  Synthetic
ccgcggacgacccuucu

SEQ ID NO: 8623 - RNA, 17 nt, Artificial Sequence
  Synthetic
  misc_feature (3)..(3): n is a, c, g, or u
ucnguacgagaucuucu

SEQ ID NO: 8624 - RNA, 17 nt, Artificial Sequence
  Synthetic
gagggaguucuucuucu

SEQ ID NO: 8625 - RNA, 17 nt, Artificial Sequence
  Synthetic
uucuuguugguucuucu

SEQ ID NO: 8626 - RNA, 17 nt, Artificial Sequence
  Synthetic
gauuaacuagauguucu

SEQ ID NO: 8627 - RNA, 17 nt, Artificial Sequence
  Synthetic
acuucucucaauuuucu

SEQ ID NO: 8628 - RNA, 17 nt, Artificial Sequence
  Synthetic
acugaaagccaaacagu

SEQ ID NO: 8629 - RNA, 17 nt, Artificial Sequence
  Synthetic
  misc_feature (12)..(12): n is a, c, g, or u
uuaaagacaggnacagu

SEQ ID NO: 8630 - RNA, 17 nt, Artificial Sequence
  Synthetic
accaagccccagccagu

SEQ ID NO: 8631 - RNA, 17 nt, Artificial Sequence
  Synthetic
uccucaggccaugcagu

SEQ ID NO: 8632 - RNA, 17 nt, Artificial Sequence
  Synthetic
  misc_feature (4)..(4): n is a, c, g, or u
uaangacugggaggagu

SEQ ID NO: 8633 - RNA, 17 nt, Artificial Sequence
  Synthetic
  misc_feature (10)..(10): n is a, c, g, or u
  misc_feature (14)..(14): n is a, c, g, or u
guuccuugancagnagu

SEQ ID NO: 8634 - RNA, 17 nt, Artificial Sequence
  Synthetic
gccaucagcgcaugcgu

SEQ ID NO: 8635 - RNA, 17 nt, Artificial Sequence
  Synthetic
  misc_feature (14)..(14): n is a, c, g, or u
aaagacccacaauncgu

SEQ ID NO: 8636 - RNA, 17 nt, Artificial Sequence
  Synthetic
gcagagucuagacucgu

SEQ ID NO: 8637 - RNA, 17 nt, Artificial Sequence
  Synthetic
gccucaaggucggucgu

SEQ ID NO: 8638 - RNA, 17 nt, Artificial Sequence
  Synthetic
uuuguucagugguucgu

SEQ ID NO: 8639 - RNA, 17 nt, Artificial Sequence
  Synthetic
agaguuugguggaaggu

SEQ ID NO: 8640 - RNA, 17 nt, Artificial Sequence
  Synthetic
ggugagugauuggaggu

SEQ ID NO: 8641 - RNA, 17 nt, Artificial Sequence
  Synthetic
aaaggccuccgugcggu

SEQ ID NO: 8642 - RNA, 17 nt, Artificial Sequence
  Synthetic
ccccagccagugggggu

SEQ ID NO: 8643 - RNA, 17 nt, Artificial Sequence
  Synthetic
cccagaggauugcuggu

SEQ ID NO: 8644 - RNA, 17 nt, Artificial Sequence
  Synthetic
gagucuagacucguggu

SEQ ID NO: 8645 - RNA, 17 nt, Artificial Sequence
  Synthetic
uggauccaacugguggu

SEQ ID NO: 8646 - RNA, 17 nt, Artificial Sequence
  Synthetic
ccugacuggcgauuggu

SEQ ID NO: 8647 - RNA, 17 nt, Artificial Sequence
  Synthetic
aucuugcagaguuuggu

SEQ ID NO: 8648 - RNA, 17 nt, Artificial Sequence
  Synthetic
  misc_feature (7)..(8): n is a, c, g, or u
  misc_feature (15)..(15): n is a, c, g, or u
ggucccnngcuggungu

SEQ ID NO: 8649 - RNA, 17 nt, Artificial Sequence
  Synthetic
guagucuccggaagugu

SEQ ID NO: 8650 - RNA, 17 nt, Artificial Sequence
  Synthetic
ggugucuuucggagugu

SEQ ID NO: 8651 - RNA, 17 nt, Artificial Sequence
  Synthetic
uggccagguguccuugu

SEQ ID NO: 8652 - RNA, 17 nt, Artificial Sequence
  Synthetic
ggcgggguuuuucuugu

SEQ ID NO: 8653 - RNA, 17 nt, Artificial Sequence
  Synthetic
  misc_feature (16)..(16): n is a, c, g, or u
agagagaaacaacacnu

SEQ ID NO: 8654 - RNA, 17 nt, Artificial Sequence
  Synthetic
  misc_feature (15)..(16): n is a, c, g, or u
gaccuugggcaagannu

SEQ ID NO: 8655 - RNA, 17 nt, Artificial Sequence
  Synthetic
  misc_feature (8)..(8): n is a, c, g, or u
  misc_feature (11)..(11): n is a, c, g, or u
  misc_feature (15)..(16): n is a, c, g, or u
cuaggucncungaunnu

SEQ ID NO: 8656 - RNA, 17 nt, Artificial Sequence
  Synthetic
  misc_feature (16)..(16): n is a, c, g, or u
aaaguucaggcaacunu

SEQ ID NO: 8657 - RNA, 17 nt, Artificial Sequence
  Synthetic
  misc_feature (16)..(16): n is a, c, g, or u
ucuggagcaaacauunu

SEQ ID NO: 8658 - RNA, 17 nt, Artificial Sequence
  Synthetic
  misc_feature (12)..(12): n is a, c, g, or u
accaaauauuunccauu

SEQ ID NO: 8659 - RNA, 17 nt, Artificial Sequence
  Synthetic
guaggagcuggagcauu

SEQ ID NO: 8660 - RNA, 17 nt, Artificial Sequence
  Synthetic
  misc_feature (10)..(10): n is a, c, g, or u
ugucuuuaanccucauu

SEQ ID NO: 8661 - RNA, 17 nt, Artificial Sequence
  Synthetic
  misc_feature (2)..(2): n is a, c, g, or u
  misc_feature (8)..(8): n is a, c, g, or u
unaugggnuaugucauu

SEQ ID NO: 8662 - RNA, 17 nt, Artificial Sequence
  Synthetic
caaucuucucgaggauu

SEQ ID NO: 8663 - RNA, 17 nt, Artificial Sequence
  Synthetic
aagucccaaucuggauu

SEQ ID NO: 8664 - RNA, 17 nt, Artificial Sequence
  Synthetic
uaacaggccuauugauu

SEQ ID NO: 8665 - RNA, 17 nt, Artificial Sequence
  Synthetic
aacuuuaggcccauauu

SEQ ID NO: 8666 - RNA, 17 nt, Artificial Sequence
  Synthetic
uggaaacgauguauauu

SEQ ID NO: 8667 - RNA, 17 nt, Artificial Sequence
  Synthetic
auggaugaugugguauu

SEQ ID NO: 8668 - RNA, 17 nt, Artificial Sequence
  Synthetic
caauguuaguauuccuu

SEQ ID NO: 8669 - RNA, 17 nt, Artificial Sequence
  Synthetic
aaagugaaagccugcuu

SEQ ID NO: 8670 - RNA, 17 nt, Artificial Sequence
  Synthetic
uacauaagaggacucuu

SEQ ID NO: 8671 - RNA, 17 nt, Artificial Sequence
  Synthetic
  misc_feature (1)..(1): n is a, c, g, or u
nuuaaacaaacagucuu

SEQ ID NO: 8672 - RNA, 17 nt, Artificial Sequence
  Synthetic
  misc_feature (10)..(10): n is a, c, g, or u
uuuuuugaunaugucuu

SEQ ID NO: 8673 - RNA, 17 nt, Artificial Sequence
  Synthetic
caauuuucuuuugucuu

SEQ ID NO: 8674 - RNA, 17 nt, Artificial Sequence
  Synthetic
uuuucuaaaacauucuu

SEQ ID NO: 8675 - RNA, 17 nt, Artificial Sequence
  Synthetic
gaaaggccuuguaaguu

SEQ ID NO: 8676 - RNA, 17 nt, Artificial Sequence
  Synthetic
uuucccgaccaccaguu

SEQ ID NO: 8677 - RNA, 17 nt, Artificial Sequence
  Synthetic
  misc_feature (3)..(3): n is a, c, g, or u
aangacugggaggaguu

SEQ ID NO: 8678 - RNA, 17 nt, Artificial Sequence
  Synthetic
uuggaggacaggagguu

SEQ ID NO: 8679 - RNA, 17 nt, Artificial Sequence
  Synthetic
gugagugauuggagguu

SEQ ID NO: 8680 - RNA, 17 nt, Artificial Sequence
  Synthetic
ccagcuccuaccuuguu

SEQ ID NO: 8681 - RNA, 17 nt, Artificial Sequence
  Synthetic
cggagacuacuguuguu

SEQ ID NO: 8682 - RNA, 17 nt, Artificial Sequence
  Synthetic
  misc_feature (9)..(9): n is a, c, g, or u
caucuuuunguuuuguu

SEQ ID NO: 8683 - RNA, 17 nt, Artificial Sequence
  Synthetic
  misc_feature (11)..(11): n is a, c, g, or u
ugggugggugnuaauuu

SEQ ID NO: 8684 - RNA, 17 nt, Artificial Sequence
  Synthetic
  misc_feature (4)..(4): n is a, c, g, or u
cacnuagcgccucauuu

SEQ ID NO: 8685 - RNA, 17 nt, Artificial Sequence
  Synthetic
  misc_feature (3)..(3): n is a, c, g, or u
  misc_feature (6)..(7): n is a, c, g, or u
acngunnuagaguauuu

SEQ ID NO: 8686 - RNA, 17 nt, Artificial Sequence
  Synthetic
accgcacggaggccuuu

SEQ ID NO: 8687 - RNA, 17 nt, Artificial Sequence
  Synthetic
  misc_feature (4)..(4): n is a, c, g, or u
acgnauugugggucuuu

SEQ ID NO: 8688 - RNA, 17 nt, Artificial Sequence
  Synthetic
gggaucuugcagaguuu

SEQ ID NO: 8689 - RNA, 17 nt, Artificial Sequence
  Synthetic
  misc_feature (7)..(7): n is a, c, g, or u
  misc_feature (13)..(13): n is a, c, g, or u
uaaauanugucunguuu

SEQ ID NO: 8690 - RNA, 17 nt, Artificial Sequence
  Synthetic
  misc_feature (14)..(14): n is a, c, g, or u
aauauuugguaacnuuu

SEQ ID NO: 8691 - RNA, 17 nt, Artificial Sequence
  Synthetic
uuucuugucucacuuuu

SEQ ID NO: 8692 - RNA, 17 nt, Artificial Sequence
  Synthetic
ccgcacggaggccuuuu

SEQ ID NO: 8693 - RNA, 17 nt, Artificial Sequence
  Synthetic
aaaucaaagaauguuuu

SEQ ID NO: 8694 - RNA, 17 nt, Artificial Sequence
  Synthetic
  misc_feature (4)..(4): n is a, c, g, or u
aaanuguucacauuuuu

SEQ ID NO: 8695 - RNA, 20 nt, Artificial Sequence
  Synthetic
  misc_feature (11)..(11): n is a, c, g, or u
accaagacaunaucaaaaaa

SEQ ID NO: 8696 - RNA, 20 nt, Artificial Sequence
  Synthetic
aauugguaacagcgguaaaa

SEQ ID NO: 8697 - RNA, 20 nt, Artificial Sequence
  Synthetic
gauaaccacauuguguaaaa

SEQ ID NO: 8698 - RNA, 20 nt, Artificial Sequence
  Synthetic
gccgacgggacguaaacaaa

SEQ ID NO: 8699 - RNA, 20 nt, Artificial Sequence
  Synthetic
aauguauacccaaagacaaa

SEQ ID NO: 8700 - RNA, 20 nt, Artificial Sequence
  Synthetic
uccuggaauuagaggacaaa

SEQ ID NO: 8701 - RNA, 20 nt, Artificial Sequence
  Synthetic
aaggggcagcaaaacccaaa

SEQ ID NO: 8702 - RNA, 20 nt, Artificial Sequence
  Synthetic
  misc_feature (2)..(3): n is a, c, g, or u
  misc_feature (6)..(6): n is a, c, g, or u
annacnguuucucuuccaaa

SEQ ID NO: 8703 - RNA, 20 nt, Artificial Sequence
  Synthetic
gaggaugaguguuucucaaa

SEQ ID NO: 8704 - RNA, 20 nt, Artificial Sequence
  Synthetic
uccaaaagugagacaagaaa

SEQ ID NO: 8705 - RNA, 20 nt, Artificial Sequence
  Synthetic
guaaacugagccaggagaaa

SEQ ID NO: 8706 - RNA, 20 nt, Artificial Sequence
  Synthetic
  misc_feature (11)..(11): n is a, c, g, or u
cacucacagunaaugagaaa

SEQ ID NO: 8707 - RNA, 20 nt, Artificial Sequence
  Synthetic
uguaaauguauauuaggaaa

SEQ ID NO: 8708 - RNA, 20 nt, Artificial Sequence
  Synthetic
cagccuagcagccauggaaa

SEQ ID NO: 8709 - RNA, 20 nt, Artificial Sequence
  Synthetic
  misc_feature (17)..(17): n is a, c, g, or u
uaaacccuaacaaaacnaaa

SEQ ID NO: 8710 - RNA, 20 nt, Artificial Sequence
  Synthetic
ggauaaccacauuguguaaa

SEQ ID NO: 8711 - RNA, 20 nt, Artificial Sequence
  Synthetic
ugggacuucaaucccaacaa

SEQ ID NO: 8712 - RNA, 20 nt, Artificial Sequence
  Synthetic
uugcugccccuuuuacacaa

SEQ ID NO: 8713 - RNA, 20 nt, Artificial Sequence
  Synthetic
ggguuuaaauguauacccaa

SEQ ID NO: 8714 - RNA, 20 nt, Artificial Sequence
  Synthetic
  misc_feature (4)..(4): n is a, c, g, or u
caangacccauaacauccaa

SEQ ID NO: 8715 - RNA, 20 nt, Artificial Sequence
  Synthetic
  misc_feature (2)..(2): n is a, c, g, or u
uncccaccuuaugaguccaa

SEQ ID NO: 8716 - RNA, 20 nt, Artificial Sequence
  Synthetic
accuggccguugccgggcaa

SEQ ID NO: 8717 - RNA, 20 nt, Artificial Sequence
  Synthetic
  misc_feature (1)..(1): n is a, c, g, or u
  misc_feature (9)..(9): n is a, c, g, or u
nugaugugnucuuguggcaa

SEQ ID NO: 8718 - RNA, 20 nt, Artificial Sequence
  Synthetic
  misc_feature (8)..(8): n is a, c, g, or u
  misc_feature (12)..(12): n is a, c, g, or u
cacaucanacanaaaaucaa

SEQ ID NO: 8719 - RNA, 20 nt, Artificial Sequence
  Synthetic
  misc_feature (12)..(12): n is a, c, g, or u
uggacucucugnaaugucaa

SEQ ID NO: 8720 - RNA, 20 nt, Artificial Sequence
  Synthetic
  misc_feature (12)..(12): n is a, c, g, or u
  misc_feature (16)..(16): n is a, c, g, or u
ccugcacgacuncugnucaa

SEQ ID NO: 8721 - RNA, 20 nt, Artificial Sequence
  Synthetic
gaccuugaggcauacuucaa

SEQ ID NO: 8722 - RNA, 20 nt, Artificial Sequence
  Synthetic
gccuuguaaguuggcgagaa

SEQ ID NO: 8723 - RNA, 20 nt, Artificial Sequence
  Synthetic
  misc_feature (1)..(1): n is a, c, g, or u
  misc_feature (4)..(4): n is a, c, g, or u
ncgnaacggcagacggagaa

SEQ ID NO: 8724 - RNA, 20 nt, Artificial Sequence
  Synthetic
gugcgaauccacacuccgaa

SEQ ID NO: 8725 - RNA, 20 nt, Artificial Sequence
  Synthetic
  misc_feature (13)..(13): n is a, c, g, or u
aagaucucguacngaaggaa

SEQ ID NO: 8726 - RNA, 20 nt, Artificial Sequence
  Synthetic
auccaacugguggucgggaa

SEQ ID NO: 8727 - RNA, 20 nt, Artificial Sequence
  Synthetic
uauuuacacacucuauggaa

SEQ ID NO: 8728 - RNA, 20 nt, Artificial Sequence
  Synthetic
ccagaggauugcugguggaa

SEQ ID NO: 8729 - RNA, 20 nt, Artificial Sequence
  Synthetic
  misc_feature (2)..(2): n is a, c, g, or u
  misc_feature (17)..(17): n is a, c, g, or u
cnagaagaucucguacngaa

SEQ ID NO: 8730 - RNA, 20 nt, Artificial Sequence
  Synthetic
aguauuccuuggacucauaa

SEQ ID NO: 8731 - RNA, 20 nt, Artificial Sequence
  Synthetic
  misc_feature (12)..(12): n is a, c, g, or u
auggacauuganccuuauaa

SEQ ID NO: 8732 - RNA, 20 nt, Artificial Sequence
  Synthetic
  misc_feature (1)..(1): n is a, c, g, or u
  misc_feature (4)..(4): n is a, c, g, or u
  misc_feature (16)..(16): n is a, c, g, or u
ncunugcuggggggancuaa

SEQ ID NO: 8733 - RNA, 20 nt, Artificial Sequence
  Synthetic
  misc_feature (2)..(2): n is a, c, g, or u
  misc_feature (8)..(8): n is a, c, g, or u
anugucunguuuggaaguaa

SEQ ID NO: 8734 - RNA, 20 nt, Artificial Sequence
  Synthetic
  misc_feature (16)..(16): n is a, c, g, or u
uguuuuccaaugaggnuuaa

SEQ ID NO: 8735 - RNA, 20 nt, Artificial Sequence
  Synthetic
uucaaagacuguuuguuuaa

SEQ ID NO: 8736 - RNA, 20 nt, Artificial Sequence
  Synthetic
gaccugcugcgagcaaaaca

SEQ ID NO: 8737 - RNA, 20 nt, Artificial Sequence
  Synthetic
auaguccagaagaaccaaca

SEQ ID NO: 8738 - RNA, 20 nt, Artificial Sequence
  Synthetic
ugugaggauucuugucaaca

SEQ ID NO: 8739 - RNA, 20 nt, Artificial Sequence
  Synthetic
aaucaauaggccuguuaaca

SEQ ID NO: 8740 - RNA, 20 nt, Artificial Sequence
  Synthetic
  misc_feature (12)..(12): n is a, c, g, or u
uguuaugggucnuugccaca

SEQ ID NO: 8741 - RNA, 20 nt, Artificial Sequence
  Synthetic
ucucuuccaaaagugagaca

SEQ ID NO: 8742 - RNA, 20 nt, Artificial Sequence
  Synthetic
gaggcuugaacaguaggaca

SEQ ID NO: 8743 - RNA, 20 nt, Artificial Sequence
  Synthetic
cgggguuuuucuuguugaca

SEQ ID NO: 8744 - RNA, 20 nt, Artificial Sequence
  Synthetic
gaugaugggaugggaauaca

SEQ ID NO: 8745 - RNA, 20 nt, Artificial Sequence
  Synthetic
  misc_feature (9)..(9): n is a, c, g, or u
ggaccccuncucguguuaca

SEQ ID NO: 8746 - RNA, 20 nt, Artificial Sequence
  Synthetic
gacacauccagcgauaacca

SEQ ID NO: 8747 - RNA, 20 nt, Artificial Sequence
  Synthetic
ccuaauauacauuuacacca

SEQ ID NO: 8748 - RNA, 20 nt, Artificial Sequence
  Synthetic
  misc_feature (10)..(10): n is a, c, g, or u
  misc_feature (13)..(13): n is a, c, g, or u
ucugccguuncgnccgacca

SEQ ID NO: 8749 - RNA, 20 nt, Artificial Sequence
  Synthetic
aggaauuuuccgaaagccca

SEQ ID NO: 8750 - RNA, 20 nt, Artificial Sequence
  Synthetic
acgcaugcgcugauggccca

SEQ ID NO: 8751 - RNA, 20 nt, Artificial Sequence
  Synthetic
  misc_feature (11)..(11): n is a, c, g, or u
aaggggacganagaguccca

SEQ ID NO: 8752 - RNA, 20 nt, Artificial Sequence
  Synthetic
ugcuguagcucuuguuccca

SEQ ID NO: 8753 - RNA, 20 nt, Artificial Sequence
  Synthetic
accuuguuggcgucuggcca

SEQ ID NO: 8754 - RNA, 20 nt, Artificial Sequence
  Synthetic
gggacugcgaauuuuggcca

SEQ ID NO: 8755 - RNA, 20 nt, Artificial Sequence
  Synthetic
caacggccaggucugugcca

SEQ ID NO: 8756 - RNA, 20 nt, Artificial Sequence
  Synthetic
ggcguucacgguggucucca

SEQ ID NO: 8757 - RNA, 20 nt, Artificial Sequence
  Synthetic
ccguuuguccucuaauucca

SEQ ID NO: 8758 - RNA, 20 nt, Artificial Sequence
  Synthetic
  misc_feature (8)..(8): n is a, c, g, or u
cauacaanggcauuaaagca

SEQ ID NO: 8759 - RNA, 20 nt, Artificial Sequence
  Synthetic
ugggaacaagagcuacagca

SEQ ID NO: 8760 - RNA, 20 nt, Artificial Sequence
  Synthetic
gaagaugaggcauagcagca

SEQ ID NO: 8761 - RNA, 20 nt, Artificial Sequence
  Synthetic
  misc_feature (5)..(6): n is a, c, g, or u
agccnnaaagguuccacgca

SEQ ID NO: 8762 - RNA, 20 nt, Artificial Sequence
  Synthetic
ggucaugggccaucagcgca

SEQ ID NO: 8763 - RNA, 20 nt, Artificial Sequence
  Synthetic
aacaaaggacgucccgcgca

SEQ ID NO: 8764 - RNA, 20 nt, Artificial Sequence
  Synthetic
cuuauguaagaccuugggca

SEQ ID NO: 8765 - RNA, 20 nt, Artificial Sequence
  Synthetic
gggaccaugcagaaccugca

SEQ ID NO: 8766 - RNA, 20 nt, Artificial Sequence
  Synthetic
accuuccaccaaacucugca

SEQ ID NO: 8767 - RNA, 20 nt, Artificial Sequence
  Synthetic
acauggagaacaucacauca

SEQ ID NO: 8768 - RNA, 20 nt, Artificial Sequence
  Synthetic
cagcgguaaaaagggacuca

SEQ ID NO: 8769 - RNA, 20 nt, Artificial Sequence
  Synthetic
  misc_feature (2)..(2): n is a, c, g, or u
  misc_feature (5)..(5): n is a, c, g, or u
cnucnaccaaucgccaguca

SEQ ID NO: 8770 - RNA, 20 nt, Artificial Sequence
  Synthetic
cacuggcuggggcuugguca

SEQ ID NO: 8771 - RNA, 20 nt, Artificial Sequence
  Synthetic
cugcugguggcuccaguuca

SEQ ID NO: 8772 - RNA, 20 nt, Artificial Sequence
  Synthetic
  misc_feature (14)..(14): n is a, c, g, or u
acccuaacaaaacnaaaaga

SEQ ID NO: 8773 - RNA, 20 nt, Artificial Sequence
  Synthetic
guccagaagaaccaacaaga

SEQ ID NO: 8774 - RNA, 20 nt, Artificial Sequence
  Synthetic
gaggcagguccccuagaaga

SEQ ID NO: 8775 - RNA, 20 nt, Artificial Sequence
  Synthetic
cagcaggaugaagaggaaga

SEQ ID NO: 8776 - RNA, 20 nt, Artificial Sequence
  Synthetic
gcauagcagcaggaugaaga

SEQ ID NO: 8777 - RNA, 20 nt, Artificial Sequence
  Synthetic
gcccaaggucuuacauaaga

SEQ ID NO: 8778 - RNA, 20 nt, Artificial Sequence
  Synthetic
ggcagaugagaaggcacaga

SEQ ID NO: 8779 - RNA, 20 nt, Artificial Sequence
  Synthetic
ggucgggaaagaaucccaga

SEQ ID NO: 8780 - RNA, 20 nt, Artificial Sequence
  Synthetic
acauaccuugauaguccaga

SEQ ID NO: 8781 - RNA, 20 nt, Artificial Sequence
  Synthetic
gaacucccucgccucgcaga

SEQ ID NO: 8782 - RNA, 20 nt, Artificial Sequence
  Synthetic
cucaaucgccgcgucgcaga

SEQ ID NO: 8783 - RNA, 20 nt, Artificial Sequence
  Synthetic
acaagagaugauuaggcaga

SEQ ID NO: 8784 - RNA, 20 nt, Artificial Sequence
  Synthetic
gucuccaugcgacgugcaga

SEQ ID NO: 8785 - RNA, 20 nt, Artificial Sequence
  Synthetic
ggggaguccgcguaaagaga

SEQ ID NO: 8786 - RNA, 20 nt, Artificial Sequence
  Synthetic
aguaggacaugaacaagaga

SEQ ID NO: 8787 - RNA, 20 nt, Artificial Sequence
  Synthetic
  misc_feature (12)..(12): n is a, c, g, or u
agucccaagcgnccccgaga

SEQ ID NO: 8788 - RNA, 20 nt, Artificial Sequence
  Synthetic
aggguccccaauccucgaga

SEQ ID NO: 8789 - RNA, 20 nt, Artificial Sequence
  Synthetic
  misc_feature (2)..(2): n is a, c, g, or u
  misc_feature (5)..(5): n is a, c, g, or u
gncgnaacggcagacggaga

SEQ ID NO: 8790 - RNA, 20 nt, Artificial Sequence
  Synthetic
  misc_feature (17)..(17): n is a, c, g, or u
gagcugaggcgguaucnaga

SEQ ID NO: 8791 - RNA, 20 nt, Artificial Sequence
  Synthetic
gacgaggcagguccccuaga

SEQ ID NO: 8792 - RNA, 20 nt, Artificial Sequence
  Synthetic
  misc_feature (12)..(12): n is a, c, g, or u
uuaaagacaggnacaguaga

SEQ ID NO: 8793 - RNA, 20 nt, Artificial Sequence
  Synthetic
  misc_feature (5)..(5): n is a, c, g, or u
uugangauccuggaauuaga

SEQ ID NO: 8794 - RNA, 20 nt, Artificial Sequence
  Synthetic
cggagacuacuguuguuaga

SEQ ID NO: 8795 - RNA, 20 nt, Artificial Sequence
  Synthetic
uccgcgggauucagcgccga

SEQ ID NO: 8796 - RNA, 20 nt, Artificial Sequence
  Synthetic
gacgugcagaggugaagcga

SEQ ID NO: 8797 - RNA, 20 nt, Artificial Sequence
  Synthetic
ucacgguggucuccaugcga

SEQ ID NO: 8798 - RNA, 20 nt, Artificial Sequence
  Synthetic
auugagaccuucgucugcga

SEQ ID NO: 8799 - RNA, 20 nt, Artificial Sequence
  Synthetic
gagauugagaucuucugcga

SEQ ID NO: 8800 - RNA, 20 nt, Artificial Sequence
  Synthetic
  misc_feature (2)..(2): n is a, c, g, or u
cnuaucgucaaucuucucga

SEQ ID NO: 8801 - RNA, 20 nt, Artificial Sequence
  Synthetic
gaugaggcauagcagcagga

SEQ ID NO: 8802 - RNA, 20 nt, Artificial Sequence
  Synthetic
  misc_feature (11)..(11): n is a, c, g, or u
  misc_feature (14)..(14): n is a, c, g, or u
ggcgauuggungangcagga

SEQ ID NO: 8803 - RNA, 20 nt, Artificial Sequence
  Synthetic
uagcagcaggaugaagagga

SEQ ID NO: 8804 - RNA, 20 nt, Artificial Sequence
  Synthetic
uaacaacaguagucuccgga

SEQ ID NO: 8805 - RNA, 20 nt, Artificial Sequence
  Synthetic
ucggcgcugaaucccgcgga

SEQ ID NO: 8806 - RNA, 20 nt, Artificial Sequence
  Synthetic
acggcagacggagaagggga

SEQ ID NO: 8807 - RNA, 20 nt, Artificial Sequence
  Synthetic
  misc_feature (10)..(10): n is a, c, g, or u
gaaagcccangaugauggga

SEQ ID NO: 8808 - RNA, 20 nt, Artificial Sequence
  Synthetic
uuggcuuucaguuauaugga

SEQ ID NO: 8809 - RNA, 20 nt, Artificial Sequence
  Synthetic
uuguccugguuaucgcugga

SEQ ID NO: 8810 - RNA, 20 nt, Artificial Sequence
  Synthetic
gauaaccaggacaaguugga

SEQ ID NO: 8811 - RNA, 20 nt, Artificial Sequence
  Synthetic
  misc_feature (11)..(11): n is a, c, g, or u
ugggugggugnuaauuugga

SEQ ID NO: 8812 - RNA, 20 nt, Artificial Sequence
  Synthetic
  misc_feature (8)..(8): n is a, c, g, or u
  misc_feature (18)..(18): n is a, c, g, or u
ucacagunaaugagaaanga

SEQ ID NO: 8813 - RNA, 20 nt, Artificial Sequence
  Synthetic
  misc_feature (18)..(18): n is a, c, g, or u
aauuuuccgaaagcccanga

SEQ ID NO: 8814 - RNA, 20 nt, Artificial Sequence
  Synthetic
uauggugacccacaaaauga

SEQ ID NO: 8815 - RNA, 20 nt, Artificial Sequence
  Synthetic
gcuuucaguuauauggauga

SEQ ID NO: 8816 - RNA, 20 nt, Artificial Sequence
  Synthetic
  misc_feature (15)..(15): n is a, c, g, or u
uuuccgaaagcccangauga

SEQ ID NO: 8817 - RNA, 20 nt, Artificial Sequence
  Synthetic
agggguccuaggaauccuga

SEQ ID NO: 8818 - RNA, 20 nt, Artificial Sequence
  Synthetic
  misc_feature (3)..(3): n is a, c, g, or u
  misc_feature (12)..(12): n is a, c, g, or u
gcnucccgauanagagcuga

SEQ ID NO: 8819 - RNA, 20 nt, Artificial Sequence
  Synthetic
caugcgacgugcagagguga

SEQ ID NO: 8820 - RNA, 20 nt, Artificial Sequence
  Synthetic
uagacucugcgguauuguga

SEQ ID NO: 8821 - RNA, 20 nt, Artificial Sequence
  Synthetic
  misc_feature (17)..(17): n is a, c, g, or u
gccugagugcaguaugnuga

SEQ ID NO: 8822 - RNA, 20 nt, Artificial Sequence
  Synthetic
  misc_feature (13)..(13): n is a, c, g, or u
  misc_feature (17)..(17): n is a, c, g, or u
uucuuugauuuunugunuga

SEQ ID NO: 8823 - RNA, 20 nt, Artificial Sequence
  Synthetic
ccaauccucgagaagauuga

SEQ ID NO: 8824 - RNA, 20 nt, Artificial Sequence
  Synthetic
  misc_feature (7)..(8): n is a, c, g, or u
  misc_feature (15)..(15): n is a, c, g, or u
ggucccnngcuggunguuga

SEQ ID NO: 8825 - RNA, 20 nt, Artificial Sequence
  Synthetic
  misc_feature (19)..(19): n is a, c, g, or u
ccccgccuguaacacgagna

SEQ ID NO: 8826 - RNA, 20 nt, Artificial Sequence
  Synthetic
  misc_feature (11)..(11): n is a, c, g, or u
  misc_feature (14)..(14): n is a, c, g, or u
  misc_feature (19)..(19): n is a, c, g, or u
ggguuacucunuanauuuna

SEQ ID NO: 8827 - RNA, 20 nt, Artificial Sequence
  Synthetic
  misc_feature (10)..(10): n is a, c, g, or u
caguuaugunaacacuaaua

SEQ ID NO: 8828 - RNA, 20 nt, Artificial Sequence
  Synthetic
ggcugaggcccacucccaua

SEQ ID NO: 8829 - RNA, 20 nt, Artificial Sequence
  Synthetic
ccggaaguguugauaagaua

SEQ ID NO: 8830 - RNA, 20 nt, Artificial Sequence
  Synthetic
  misc_feature (10)..(10): n is a, c, g, or u
  misc_feature (16)..(16): n is a, c, g, or u
caaauauuunccauungaua

SEQ ID NO: 8831 - RNA, 20 nt, Artificial Sequence
  Synthetic
agucuccggaaguguugaua

SEQ ID NO: 8832 - RNA, 20 nt, Artificial Sequence
  Synthetic
aacagugggggaaagcccua

SEQ ID NO: 8833 - RNA, 20 nt, Artificial Sequence
  Synthetic
  misc_feature (10)..(10): n is a, c, g, or u
uaacacgagnagggguccua

SEQ ID NO: 8834 - RNA, 20 nt, Artificial Sequence
  Synthetic
gggcuuucggaaaauuccua

SEQ ID NO: 8835 - RNA, 20 nt, Artificial Sequence
  Synthetic
acaucacaucaggauuccua

SEQ ID NO: 8836 - RNA, 20 nt, Artificial Sequence
  Synthetic
acccacaaaaugaggcgcua

SEQ ID NO: 8837 - RNA, 20 nt, Artificial Sequence
  Synthetic
gcgagggaguucuucuucua

SEQ ID NO: 8838 - RNA, 20 nt, Artificial Sequence
  Synthetic
ggacuucucucaauuuucua

SEQ ID NO: 8839 - RNA, 20 nt, Artificial Sequence
  Synthetic
gcuuggaggcuugaacagua

SEQ ID NO: 8840 - RNA, 20 nt, Artificial Sequence
  Synthetic
uccaagaguccucuuaugua

SEQ ID NO: 8841 - RNA, 20 nt, Artificial Sequence
  Synthetic
cuugguguaaauguauauua

SEQ ID NO: 8842 - RNA, 20 nt, Artificial Sequence
  Synthetic
  misc_feature (3)..(3): n is a, c, g, or u
ggnuaugucauuggauguua

SEQ ID NO: 8843 - RNA, 20 nt, Artificial Sequence
  Synthetic
acggggcgcaccucucuuua

SEQ ID NO: 8844 - RNA, 20 nt, Artificial Sequence
  Synthetic
cauauaacugaaagccaaac

SEQ ID NO: 8845 - RNA, 20 nt, Artificial Sequence
  Synthetic
ccuggccguugccgggcaac

SEQ ID NO: 8846 - RNA, 20 nt, Artificial Sequence
  Synthetic
  misc_feature (1)..(1): n is a, c, g, or u
  misc_feature (7)..(7): n is a, c, g, or u
ngagagncaguagucggaac

SEQ ID NO: 8847 - RNA, 20 nt, Artificial Sequence
  Synthetic
  misc_feature (13)..(13): n is a, c, g, or u
cauauuaguguunacauaac

SEQ ID NO: 8848 - RNA, 20 nt, Artificial Sequence
  Synthetic
uaccacaucauccauauaac

SEQ ID NO: 8849 - RNA, 20 nt, Artificial Sequence
  Synthetic
gacaaaagaaaauugguaac

SEQ ID NO: 8850 - RNA, 20 nt, Artificial Sequence
  Synthetic
gguucagguauuguuuacac

SEQ ID NO: 8851 - RNA, 20 nt, Artificial Sequence
  Synthetic
gggaaagcccuacgaaccac

SEQ ID NO: 8852 - RNA, 20 nt, Artificial Sequence
  Synthetic
gcacgucgcauggagaccac

SEQ ID NO: 8853 - RNA, 20 nt, Artificial Sequence
  Synthetic
  misc_feature (9)..(9): n is a, c, g, or u
  misc_feature (12)..(12): n is a, c, g, or u
cugccguuncgnccgaccac

SEQ ID NO: 8854 - RNA, 20 nt, Artificial Sequence
  Synthetic
uccggcagaugagaaggcac

SEQ ID NO: 8855 - RNA, 20 nt, Artificial Sequence
  Synthetic
cgucagcaaacacuuggcac

SEQ ID NO: 8856 - RNA, 20 nt, Artificial Sequence
  Synthetic
  misc_feature (5)..(6): n is a, c, g, or u
aagannuggugggcguucac

SEQ ID NO: 8857 - RNA, 20 nt, Artificial Sequence
  Synthetic
gcagaugagaaggcacagac

SEQ ID NO: 8858 - RNA, 20 nt, Artificial Sequence
  Synthetic
  misc_feature (8)..(8): n is a, c, g, or u
cucucugnaaugucaacgac

SEQ ID NO: 8859 - RNA, 20 nt, Artificial Sequence
  Synthetic
ugccuucucaucugccggac

SEQ ID NO: 8860 - RNA, 20 nt, Artificial Sequence
  Synthetic
gcuguaccaaaccuucggac

SEQ ID NO: 8861 - RNA, 20 nt, Artificial Sequence
  Synthetic
  misc_feature (13)..(13): n is a, c, g, or u
ggagcaaacauunucgggac

SEQ ID NO: 8862 - RNA, 20 nt, Artificial Sequence
  Synthetic
agugauuggagguuggggac

SEQ ID NO: 8863 - RNA, 20 nt, Artificial Sequence
  Synthetic
  misc_feature (17)..(17): n is a, c, g, or u
aagacuguuuguuuaangac

SEQ ID NO: 8864 - RNA, 20 nt, Artificial Sequence
  Synthetic
  misc_feature (15)..(15): n is a, c, g, or u
  misc_feature (18)..(18): n is a, c, g, or u
aauuuucuagggggnacnac

SEQ ID NO: 8865 - RNA, 20 nt, Artificial Sequence
  Synthetic
  misc_feature (2)..(2): n is a, c, g, or u
  misc_feature (8)..(8): n is a, c, g, or u
  misc_feature (18)..(18): n is a, c, g, or u
anucuucnuuucucauunac

SEQ ID NO: 8866 - RNA, 20 nt, Artificial Sequence
  Synthetic
gcuccucugccgauccauac

SEQ ID NO: 8867 - RNA, 20 nt, Artificial Sequence
  Synthetic
  misc_feature (6)..(6): n is a, c, g, or u
guaucnagaagaucucguac

SEQ ID NO: 8868 - RNA, 20 nt, Artificial Sequence
  Synthetic
agggacucaagaugcuguac

SEQ ID NO: 8869 - RNA, 20 nt, Artificial Sequence
  Synthetic
  misc_feature (12)..(12): n is a, c, g, or u
cauaaggugggnaacuuuac

SEQ ID NO: 8870 - RNA, 20 nt, Artificial Sequence
  Synthetic
  misc_feature (2)..(2): n is a, c, g, or u
  misc_feature (17)..(17): n is a, c, g, or u
ancuaaugacucuagcnacc

SEQ ID NO: 8871 - RNA, 20 nt, Artificial Sequence
  Synthetic
cuuucuguguaaacaauacc

SEQ ID NO: 8872 - RNA, 20 nt, Artificial Sequence
  Synthetic
uucucgaggauuggggaccc

SEQ ID NO: 8873 - RNA, 20 nt, Artificial Sequence
  Synthetic
gcguaaagagaggugcgccc

SEQ ID NO: 8874 - RNA, 20 nt, Artificial Sequence
  Synthetic
cccaugaccaagccccagcc

SEQ ID NO: 8875 - RNA, 20 nt, Artificial Sequence
  Synthetic
  misc_feature (13)..(13): n is a, c, g, or u
cgguggggugaancccagcc

SEQ ID NO: 8876 - RNA, 20 nt, Artificial Sequence
  Synthetic
cccaacaaggacaccuggcc

SEQ ID NO: 8877 - RNA, 20 nt, Artificial Sequence
  Synthetic
ucugugccuucucaucugcc

SEQ ID NO: 8878 - RNA, 20 nt, Artificial Sequence
  Synthetic
  misc_feature (13)..(13): n is a, c, g, or u
gugaaaccacaanaguugcc

SEQ ID NO: 8879 - RNA, 20 nt, Artificial Sequence
  Synthetic
agagcaaacaccgcaaaucc

SEQ ID NO: 8880 - RNA, 20 nt, Artificial Sequence
  Synthetic
  misc_feature (3)..(3): n is a, c, g, or u
agnagggguccuaggaaucc

SEQ ID NO: 8881 - RNA, 20 nt, Artificial Sequence
  Synthetic
gucccgucggcgcugaaucc

SEQ ID NO: 8882 - RNA, 20 nt, Artificial Sequence
  Synthetic
aaaacgccgcagacacaucc

SEQ ID NO: 8883 - RNA, 20 nt, Artificial Sequence
  Synthetic
cugugcugccaacuggaucc

SEQ ID NO: 8884 - RNA, 20 nt, Artificial Sequence
  Synthetic
gguauuaaaccuuauuaucc

SEQ ID NO: 8885 - RNA, 20 nt, Artificial Sequence
  Synthetic
  misc_feature (8)..(8): n is a, c, g, or u
gucccganaauguuugcucc

SEQ ID NO: 8886 - RNA, 20 nt, Artificial Sequence
  Synthetic
gucuaacaacaguagucucc

SEQ ID NO: 8887 - RNA, 20 nt, Artificial Sequence
  Synthetic
gcaacauaccuugauagucc

SEQ ID NO: 8888 - RNA, 20 nt, Artificial Sequence
  Synthetic
gacguaaacaaaggacgucc

SEQ ID NO: 8889 - RNA, 20 nt, Artificial Sequence
  Synthetic
  misc_feature (1)..(1): n is a, c, g, or u
  misc_feature (16)..(16): n is a, c, g, or u
nacaacagaguuaucngucc

SEQ ID NO: 8890 - RNA, 20 nt, Artificial Sequence
  Synthetic
  misc_feature (17)..(17): n is a, c, g, or u
caggagacucuaaggcnucc

SEQ ID NO: 8891 - RNA, 20 nt, Artificial Sequence
  Synthetic
  misc_feature (3)..(3): n is a, c, g, or u
agngggguaggcugccuucc

SEQ ID NO: 8892 - RNA, 20 nt, Artificial Sequence
  Synthetic
ggaacaggguuuacuguucc

SEQ ID NO: 8893 - RNA, 20 nt, Artificial Sequence
  Synthetic
aauccucugggauucuuucc

SEQ ID NO: 8894 - RNA, 20 nt, Artificial Sequence
  Synthetic
uacuguucaagccuccaagc

SEQ ID NO: 8895 - RNA, 20 nt, Artificial Sequence
  Synthetic
ccugaacuggagccaccagc

SEQ ID NO: 8896 - RNA, 20 nt, Artificial Sequence
  Synthetic
auugagaucuucugcgacgc

SEQ ID NO: 8897 - RNA, 20 nt, Artificial Sequence
  Synthetic
gggcgcaccucucuuuacgc

SEQ ID NO: 8898 - RNA, 20 nt, Artificial Sequence
  Synthetic
ccgucggcgcugaaucccgc

SEQ ID NO: 8899 - RNA, 20 nt, Artificial Sequence
  Synthetic
ggaagaugauaaaacgccgc

SEQ ID NO: 8900 - RNA, 20 nt, Artificial Sequence
  Synthetic
ucguccgcgggauucagcgc

SEQ ID NO: 8901 - RNA, 20 nt, Artificial Sequence
  Synthetic
auguucuccauguucagcgc

SEQ ID NO: 8902 - RNA, 20 nt, Artificial Sequence
  Synthetic
uguuuacgucccgucggcgc

SEQ ID NO: 8903 - RNA, 20 nt, Artificial Sequence
  Synthetic
  misc_feature (1)..(1): n is a, c, g, or u
naaagguuccacgcaugcgc

SEQ ID NO: 8904 - RNA, 20 nt, Artificial Sequence
  Synthetic
gaggauuggggacccugcgc

SEQ ID NO: 8905 - RNA, 20 nt, Artificial Sequence
  Synthetic
guugcauggugcuggugcgc

SEQ ID NO: 8906 - RNA, 20 nt, Artificial Sequence
  Synthetic
cagacgaaggucucaaucgc

SEQ ID NO: 8907 - RNA, 20 nt, Artificial Sequence
  Synthetic
gaagaacucccucgccucgc

SEQ ID NO: 8908 - RNA, 20 nt, Artificial Sequence
  Synthetic
ggucucaaucgccgcgucgc

SEQ ID NO: 8909 - RNA, 20 nt, Artificial Sequence
  Synthetic
  misc_feature (6)..(6): n is a, c, g, or u
ccccuncucguguuacaggc

SEQ ID NO: 8910 - RNA, 20 nt, Artificial Sequence
  Synthetic
  misc_feature (8)..(8): n is a, c, g, or u
  misc_feature (11)..(11): n is a, c, g, or u
gauuggungangcaggaggc

SEQ ID NO: 8911 - RNA, 20 nt, Artificial Sequence
  Synthetic
cguuuccauggcugcuaggc

SEQ ID NO: 8912 - RNA, 20 nt, Artificial Sequence
  Synthetic
  misc_feature (11)..(11): n is a, c, g, or u
  misc_feature (14)..(14): n is a, c, g, or u
ccguggucggncgnaacggc

SEQ ID NO: 8913 - RNA, 20 nt, Artificial Sequence
  Synthetic
cgaagugcacacgguccggc

SEQ ID NO: 8914 - RNA, 20 nt, Artificial Sequence
  Synthetic
aggagcuggagcauucgggc

SEQ ID NO: 8915 - RNA, 20 nt, Artificial Sequence
  Synthetic
caagagcuacagcauggggc

SEQ ID NO: 8916 - RNA, 20 nt, Artificial Sequence
  Synthetic
cugacgcaacccccacuggc

SEQ ID NO: 8917 - RNA, 20 nt, Artificial Sequence
  Synthetic
  misc_feature (2)..(2): n is a, c, g, or u
  misc_feature (9)..(10): n is a, c, g, or u
cnaccagcnngggaccaugc

SEQ ID NO: 8918 - RNA, 20 nt, Artificial Sequence
  Synthetic
cacucauccucaggccaugc

SEQ ID NO: 8919 - RNA, 20 nt, Artificial Sequence
  Synthetic
ccucugccgauccauacugc

SEQ ID NO: 8920 - RNA, 20 nt, Artificial Sequence
  Synthetic
aauguuugcuccagaccugc

SEQ ID NO: 8921 - RNA, 20 nt, Artificial Sequence
  Synthetic
  misc_feature (8)..(9): n is a, c, g, or u
aaccuuunnggcuccucugc

SEQ ID NO: 8922 - RNA, 20 nt, Artificial Sequence
  Synthetic
uuaucgcuggaugugucugc

SEQ ID NO: 8923 - RNA, 20 nt, Artificial Sequence
  Synthetic
accccaaaaggccuccgugc

SEQ ID NO: 8924 - RNA, 20 nt, Artificial Sequence
  Synthetic
  misc_feature (14)..(14): n is a, c, g, or u
  misc_feature (17)..(17): n is a, c, g, or u
ucaggcaagcaauncunugc

SEQ ID NO: 8925 - RNA, 20 nt, Artificial Sequence
  Synthetic
ggcacagaccuggccguugc

SEQ ID NO: 8926 - RNA, 20 nt, Artificial Sequence
  Synthetic
aagucccaaucuggauuugc

SEQ ID NO: 8927 - RNA, 20 nt, Artificial Sequence
  Synthetic
ggucugugccaaguguuugc

SEQ ID NO: 8928 - RNA, 20 nt, Artificial Sequence
  Synthetic
  misc_feature (19)..(19): n is a, c, g, or u
gaaauacaggccucucacnc

SEQ ID NO: 8929 - RNA, 20 nt, Artificial Sequence
  Synthetic
  misc_feature (16)..(16): n is a, c, g, or u
  misc_feature (19)..(19): n is a, c, g, or u
ucuccgucugccguuncgnc

SEQ ID NO: 8930 - RNA, 20 nt, Artificial Sequence
  Synthetic
  misc_feature (19)..(19): n is a, c, g, or u
uauaaagaauuuggagcunc

SEQ ID NO: 8931 - RNA, 20 nt, Artificial Sequence
  Synthetic
gggcuuggucaugggccauc

SEQ ID NO: 8932 - RNA, 20 nt, Artificial Sequence
  Synthetic
aggagugcgaauccacacuc

SEQ ID NO: 8933 - RNA, 20 nt, Artificial Sequence
  Synthetic
uccaccacgagucuagacuc

SEQ ID NO: 8934 - RNA, 20 nt, Artificial Sequence
  Synthetic
gcuccaccccaaaaggccuc

SEQ ID NO: 8935 - RNA, 20 nt, Artificial Sequence
  Synthetic
ucuuuccaccagcaauccuc

SEQ ID NO: 8936 - RNA, 20 nt, Artificial Sequence
  Synthetic
gggguggagcccucaggcuc

SEQ ID NO: 8937 - RNA, 20 nt, Artificial Sequence
  Synthetic
uggauuugcgguguuugcuc

SEQ ID NO: 8938 - RNA, 20 nt, Artificial Sequence
  Synthetic
ucccgcggacgacccuucuc

SEQ ID NO: 8939 - RNA, 20 nt, Artificial Sequence
  Synthetic
  misc_feature (6)..(6): n is a, c, g, or u
cguacngaaggaaagaaguc

SEQ ID NO: 8940 - RNA, 20 nt, Artificial Sequence
  Synthetic
gaaggcacagacggggaguc

SEQ ID NO: 8941 - RNA, 20 nt, Artificial Sequence
  Synthetic
  misc_feature (4)..(4): n is a, c, g, or u
  misc_feature (6)..(6): n is a, c, g, or u
  misc_feature (12)..(12): n is a, c, g, or u
auangngagagncaguaguc

SEQ ID NO: 8942 - RNA, 20 nt, Artificial Sequence
  Synthetic
cuuuacgcggacuccccguc

SEQ ID NO: 8943 - RNA, 20 nt, Artificial Sequence
  Synthetic
uccuuuguuuacgucccguc

SEQ ID NO: 8944 - RNA, 20 nt, Artificial Sequence
  Synthetic
auacaggugcaauuuccguc

SEQ ID NO: 8945 - RNA, 20 nt, Artificial Sequence
  Synthetic
  misc_feature (3)..(3): n is a, c, g, or u
cgnccccgagaagggucguc

SEQ ID NO: 8946 - RNA, 20 nt, Artificial Sequence
  Synthetic
cggcgauugagaccuucguc

SEQ ID NO: 8947 - RNA, 20 nt, Artificial Sequence
  Synthetic
ugcccggcaacggccagguc

SEQ ID NO: 8948 - RNA, 20 nt, Artificial Sequence
  Synthetic
gcuguaggcauaaauugguc

SEQ ID NO: 8949 - RNA, 20 nt, Artificial Sequence
  Synthetic
ugguuaucgcuggauguguc

SEQ ID NO: 8950 - RNA, 20 nt, Artificial Sequence
  Synthetic
aagggucguccgcgggauuc

SEQ ID NO: 8951 - RNA, 20 nt, Artificial Sequence
  Synthetic
uguugcuguaccaaaccuuc

SEQ ID NO: 8952 - RNA, 20 nt, Artificial Sequence
  Synthetic
uuacucucguuuuugccuuc

SEQ ID NO: 8953 - RNA, 20 nt, Artificial Sequence
  Synthetic
uucccgagauugagaucuuc

SEQ ID NO: 8954 - RNA, 20 nt, Artificial Sequence
  Synthetic
augugauguucuccauguuc

SEQ ID NO: 8955 - RNA, 20 nt, Artificial Sequence
  Synthetic
aggaacaguaaacccuguuc

SEQ ID NO: 8956 - RNA, 20 nt, Artificial Sequence
  Synthetic
uuuacuagugccauuuguuc

SEQ ID NO: 8957 - RNA, 20 nt, Artificial Sequence
  Synthetic
gccaacuuacaaggccuuuc

SEQ ID NO: 8958 - RNA, 20 nt, Artificial Sequence
  Synthetic
  misc_feature (11)..(11): n is a, c, g, or u
ucccaucaucnugggcuuuc

SEQ ID NO: 8959 - RNA, 20 nt, Artificial Sequence
  Synthetic
ccacucccauaggaauuuuc

SEQ ID NO: 8960 - RNA, 20 nt, Artificial Sequence
  Synthetic
uugguaacagcgguaaaaag

SEQ ID NO: 8961 - RNA, 20 nt, Artificial Sequence
  Synthetic
cuuguaaguuggcgagaaag

SEQ ID NO: 8962 - RNA, 20 nt, Artificial Sequence
  Synthetic
aacaguaggacaugaacaag

SEQ ID NO: 8963 - RNA, 20 nt, Artificial Sequence
  Synthetic
ucuugucucacuuuuggaag

SEQ ID NO: 8964 - RNA, 20 nt, Artificial Sequence
  Synthetic
ugcgacgugcagaggugaag

SEQ ID NO: 8965 - RNA, 20 nt, Artificial Sequence
  Synthetic
uauaacugaaagccaaacag

SEQ ID NO: 8966 - RNA, 20 nt, Artificial Sequence
  Synthetic
uuucucaaagguggagacag

SEQ ID NO: 8967 - RNA, 20 nt, Artificial Sequence
  Synthetic
caaacucugcaagaucccag

SEQ ID NO: 8968 - RNA, 20 nt, Artificial Sequence
  Synthetic
caugaccaagccccagccag

SEQ ID NO: 8969 - RNA, 20 nt, Artificial Sequence
  Synthetic
aacgccgcagacacauccag

SEQ ID NO: 8970 - RNA, 20 nt, Artificial Sequence
  Synthetic
ugaacuggagccaccagcag

SEQ ID NO: 8971 - RNA, 20 nt, Artificial Sequence
  Synthetic
gcggguauauuauauaagag

SEQ ID NO: 8972 - RNA, 20 nt, Artificial Sequence
  Synthetic
uauacccgccuuccauagag

SEQ ID NO: 8973 - RNA, 20 nt, Artificial Sequence
  Synthetic
guuugguacagcaacaggag

SEQ ID NO: 8974 - RNA, 20 nt, Artificial Sequence
  Synthetic
uggucuauaagcuggaggag

SEQ ID NO: 8975 - RNA, 20 nt, Artificial Sequence
  Synthetic
guauuuggugucuuucggag

SEQ ID NO: 8976 - RNA, 20 nt, Artificial Sequence
  Synthetic
ucggaaaauuccuaugggag

SEQ ID NO: 8977 - RNA, 20 nt, Artificial Sequence
  Synthetic
gaggacaggagguuggugag

SEQ ID NO: 8978 - RNA, 20 nt, Artificial Sequence
  Synthetic
  misc_feature (3)..(3): n is a, c, g, or u
guncccccuagaaaauugag

SEQ ID NO: 8979 - RNA, 20 nt, Artificial Sequence
  Synthetic
  misc_feature (13)..(14): n is a, c, g, or u
  misc_feature (18)..(18): n is a, c, g, or u
uuggaagauccannaucnag

SEQ ID NO: 8980 - RNA, 20 nt, Artificial Sequence
  Synthetic
aauauacccgccuuccauag

SEQ ID NO: 8981 - RNA, 20 nt, Artificial Sequence
  Synthetic
gacuucucucaauuuucuag

SEQ ID NO: 8982 - RNA, 20 nt, Artificial Sequence
  Synthetic
cgcgggauucagcgccgacg

SEQ ID NO: 8983 - RNA, 20 nt, Artificial Sequence
  Synthetic
  misc_feature (15)..(15): n is a, c, g, or u
gacuucuuuccuucnguacg

SEQ ID NO: 8984 - RNA, 20 nt, Artificial Sequence
  Synthetic
acgucgcauggagaccaccg

SEQ ID NO: 8985 - RNA, 20 nt, Artificial Sequence
  Synthetic
ccuucucaucugccggaccg

SEQ ID NO: 8986 - RNA, 20 nt, Artificial Sequence
  Synthetic
  misc_feature (13)..(13): n is a, c, g, or u
  misc_feature (16)..(16): n is a, c, g, or u
uuuucuagggggnacnaccg

SEQ ID NO: 8987 - RNA, 20 nt, Artificial Sequence
  Synthetic
  misc_feature (1)..(1): n is a, c, g, or u
  misc_feature (15)..(15): n is a, c, g, or u
nagagucccaagcgnccccg

SEQ ID NO: 8988 - RNA, 20 nt, Artificial Sequence
  Synthetic
uacuaacauugagauucccg

SEQ ID NO: 8989 - RNA, 20 nt, Artificial Sequence
  Synthetic
uccaccccaaaaggccuccg

SEQ ID NO: 8990 - RNA, 20 nt, Artificial Sequence
  Synthetic
  misc_feature (1)..(1): n is a, c, g, or u
nccccgagaagggucguccg

SEQ ID NO: 8991 - RNA, 20 nt, Artificial Sequence
  Synthetic
cccgagaagggucguccgcg

SEQ ID NO: 8992 - RNA, 20 nt, Artificial Sequence
  Synthetic
ugccaacuggauccugcgcg

SEQ ID NO: 8993 - RNA, 20 nt, Artificial Sequence
  Synthetic
agaccuucgucugcgaggcg

SEQ ID NO: 8994 - RNA, 20 nt, Artificial Sequence
  Synthetic
aaaggccuuguaaguuggcg

SEQ ID NO: 8995 - RNA, 20 nt, Artificial Sequence
  Synthetic
gcugccaacuggauccugcg

SEQ ID NO: 8996 - RNA, 20 nt, Artificial Sequence
  Synthetic
  misc_feature (15)..(15): n is a, c, g, or u
accgccucagcucunuaucg

SEQ ID NO: 8997 - RNA, 20 nt, Artificial Sequence
  Synthetic
cgcaggguccccaauccucg

SEQ ID NO: 8998 - RNA, 20 nt, Artificial Sequence
  Synthetic
cgcagaagaucucaaucucg

SEQ ID NO: 8999 - RNA, 20 nt, Artificial Sequence
  Synthetic
cuggauccaacugguggucg

SEQ ID NO: 9000 - RNA, 20 nt, Artificial Sequence
  Synthetic
  misc_feature (17)..(17): n is a, c, g, or u
gucuggagcaaacauunucg

SEQ ID NO: 9001 - RNA, 20 nt, Artificial Sequence
  Synthetic
  misc_feature (2)..(2): n is a, c, g, or u
gnaacggcagacggagaagg

SEQ ID NO: 9002 - RNA, 20 nt, Artificial Sequence
  Synthetic
uuuacacacucuauggaagg

SEQ ID NO: 9003 - RNA, 20 nt, Artificial Sequence
  Synthetic
uauuccuuggacucauaagg

SEQ ID NO: 9004 - RNA, 20 nt, Artificial Sequence
  Synthetic
agguuugguacagcaacagg

SEQ ID NO: 9005 - RNA, 20 nt, Artificial Sequence
  Synthetic
  misc_feature (7)..(7): n is a, c, g, or u
accccuncucguguuacagg

SEQ ID NO: 9006 - RNA, 20 nt, Artificial Sequence
  Synthetic
cacuaguaaacugagccagg

SEQ ID NO: 9007 - RNA, 20 nt, Artificial Sequence
  Synthetic
  misc_feature (9)..(9): n is a, c, g, or u
ugaggugancaaugcucagg

SEQ ID NO: 9008 - RNA, 20 nt, Artificial Sequence
  Synthetic
aagagaugauuaggcagagg

SEQ ID NO: 9009 - RNA, 20 nt, Artificial Sequence
  Synthetic
cuccaugcgacgugcagagg

SEQ ID NO: 9010 - RNA, 20 nt, Artificial Sequence
  Synthetic
ggaguccgcguaaagagagg

SEQ ID NO: 9011 - RNA, 20 nt, Artificial Sequence
  Synthetic
gguggucuauaagcuggagg

SEQ ID NO: 9012 - RNA, 20 nt, Artificial Sequence
  Synthetic
  misc_feature (15)..(15): n is a, c, g, or u
cugagugcaguaugnugagg

SEQ ID NO: 9013 - RNA, 20 nt, Artificial Sequence
  Synthetic
gagggaguucuucuucuagg

SEQ ID NO: 9014 - RNA, 20 nt, Artificial Sequence
  Synthetic
  misc_feature (7)..(7): n is a, c, g, or u
  misc_feature (10)..(10): n is a, c, g, or u
gccguuncgnccgaccacgg

SEQ ID NO: 9015 - RNA, 20 nt, Artificial Sequence
  Synthetic
  misc_feature (5)..(5): n is a, c, g, or u
  misc_feature (8)..(8): n is a, c, g, or u
ucggncgnaacggcagacgg

SEQ ID NO: 9016 - RNA, 20 nt, Artificial Sequence
  Synthetic
uaucuuaucaacacuuccgg

SEQ ID NO: 9017 - RNA, 20 nt, Artificial Sequence
  Synthetic
ugagaucuucugcgacgcgg

SEQ ID NO: 9018 - RNA, 20 nt, Artificial Sequence
  Synthetic
cccaaaaggccuccgugcgg

SEQ ID NO: 9019 - RNA, 20 nt, Artificial Sequence
  Synthetic
gaguauuuggugucuuucgg

SEQ ID NO: 9020 - RNA, 20 nt, Artificial Sequence
  Synthetic
  misc_feature (9)..(9): n is a, c, g, or u
  misc_feature (12)..(12): n is a, c, g, or u
caagcaauncunugcugggg

SEQ ID NO: 9021 - RNA, 20 nt, Artificial Sequence
  Synthetic
aaggccuccgugcggugggg

SEQ ID NO: 9022 - RNA, 20 nt, Artificial Sequence
  Synthetic
uuucggaaaauuccuauggg

SEQ ID NO: 9023 - RNA, 20 nt, Artificial Sequence
  Synthetic
  misc_feature (13)..(13): n is a, c, g, or u
aaugacucuagcnaccuggg

SEQ ID NO: 9024 - RNA, 20 nt, Artificial Sequence
  Synthetic
acugaaagccaaacaguggg

SEQ ID NO: 9025 - RNA, 20 nt, Artificial Sequence
  Synthetic
ggacccugcgcugaacaugg

SEQ ID NO: 9026 - RNA, 20 nt, Artificial Sequence
  Synthetic
caccucugcacgucgcaugg

SEQ ID NO: 9027 - RNA, 20 nt, Artificial Sequence
  Synthetic
ucuuguucccaagaauaugg

SEQ ID NO: 9028 - RNA, 20 nt, Artificial Sequence
  Synthetic
uaggcugccuuccugacugg

SEQ ID NO: 9029 - RNA, 20 nt, Artificial Sequence
  Synthetic
aaaaaguugcauggugcugg

SEQ ID NO: 9030 - RNA, 20 nt, Artificial Sequence
  Synthetic
  misc_feature (11)..(11): n is a, c, g, or u
  misc_feature (14)..(14): n is a, c, g, or u
ggcaagcaauncunugcugg

SEQ ID NO: 9031 - RNA, 20 nt, Artificial Sequence
  Synthetic
ugaguguuucucaaaggugg

SEQ ID NO: 9032 - RNA, 20 nt, Artificial Sequence
  Synthetic
aaaaggccuccgugcggugg

SEQ ID NO: 9033 - RNA, 20 nt, Artificial Sequence
  Synthetic
  misc_feature (16)..(17): n is a, c, g, or u
agaccuugggcaagannugg

SEQ ID NO: 9034 - RNA, 20 nt, Artificial Sequence
  Synthetic
ucaaucuucucgaggauugg

SEQ ID NO: 9035 - RNA, 20 nt, Artificial Sequence
  Synthetic
ggugagugauuggagguugg

SEQ ID NO: 9036 - RNA, 20 nt, Artificial Sequence
  Synthetic
accgcacggaggccuuuugg

SEQ ID NO: 9037 - RNA, 20 nt, Artificial Sequence
  Synthetic
  misc_feature (5)..(5): n is a, c, g, or u
  misc_feature (11)..(11): n is a, c, g, or u
  misc_feature (18)..(19): n is a, c, g, or u
gaucnucaacnaccagcnng

SEQ ID NO: 9038 - RNA, 20 nt, Artificial Sequence
  Synthetic
  misc_feature (9)..(9): n is a, c, g, or u
caagacaunaucaaaaaaug

SEQ ID NO: 9039 - RNA, 20 nt, Artificial Sequence
  Synthetic
caaaagugagacaagaaaug

SEQ ID NO: 9040 - RNA, 20 nt, Artificial Sequence
  Synthetic
  misc_feature (4)..(4): n is a, c, g, or u
  misc_feature (16)..(16): n is a, c, g, or u
aggnccacucacagunaaug

SEQ ID NO: 9041 - RNA, 20 nt, Artificial Sequence
  Synthetic
cguucacgguggucuccaug

SEQ ID NO: 9042 - RNA, 20 nt, Artificial Sequence
  Synthetic
ucaugggccaucagcgcaug

SEQ ID NO: 9043 - RNA, 20 nt, Artificial Sequence
  Synthetic
ugcacacgguccggcagaug

SEQ ID NO: 9044 - RNA, 20 nt, Artificial Sequence
  Synthetic
cacugcauggccugaggaug

SEQ ID NO: 9045 - RNA, 20 nt, Artificial Sequence
  Synthetic
  misc_feature (8)..(8): n is a, c, g, or u
aagcccangaugaugggaug

SEQ ID NO: 9046 - RNA, 20 nt, Artificial Sequence
  Synthetic
  misc_feature (13)..(13): n is a, c, g, or u
uccgaaagcccangaugaug

SEQ ID NO: 9047 - RNA, 20 nt, Artificial Sequence
  Synthetic
ggguccuaggaauccugaug

SEQ ID NO: 9048 - RNA, 20 nt, Artificial Sequence
  Synthetic
ugauuggagguuggggacug

SEQ ID NO: 9049 - RNA, 20 nt, Artificial Sequence
  Synthetic
  misc_feature (15)..(15): n is a, c, g, or u
cuaaugacucuagcnaccug

SEQ ID NO: 9050 - RNA, 20 nt, Artificial Sequence
  Synthetic
  misc_feature (5)..(5): n is a, c, g, or u
uguanuaugcccugagccug

SEQ ID NO: 9051 - RNA, 20 nt, Artificial Sequence
  Synthetic
  misc_feature (5)..(5): n is a, c, g, or u
  misc_feature (8)..(8): n is a, c, g, or u
agcanagnauugcuugccug

SEQ ID NO: 9052 - RNA, 20 nt, Artificial Sequence
  Synthetic
gugcugccaacuggauccug

SEQ ID NO: 9053 - RNA, 20 nt, Artificial Sequence
  Synthetic
  misc_feature (12)..(12): n is a, c, g, or u
  misc_feature (15)..(15): n is a, c, g, or u
aggcaagcaauncunugcug

SEQ ID NO: 9054 - RNA, 20 nt, Artificial Sequence
  Synthetic
  misc_feature (17)..(17): n is a, c, g, or u
aauacaggccucucacncug

SEQ ID NO: 9055 - RNA, 20 nt, Artificial Sequence
  Synthetic
uuuccaccagcaauccucug

SEQ ID NO: 9056 - RNA, 20 nt, Artificial Sequence
  Synthetic
cccgagauugagaucuucug

SEQ ID NO: 9057 - RNA, 20 nt, Artificial Sequence
  Synthetic
  misc_feature (2)..(2): n is a, c, g, or u
cnguuucucuuccaaaagug

SEQ ID NO: 9058 - RNA, 20 nt, Artificial Sequence
  Synthetic
uaacugaaagccaaacagug

SEQ ID NO: 9059 - RNA, 20 nt, Artificial Sequence
  Synthetic
ugaccaagccccagccagug

SEQ ID NO: 9060 - RNA, 20 nt, Artificial Sequence
  Synthetic
gucuauaagcuggaggagug

SEQ ID NO: 9061 - RNA, 20 nt, Artificial Sequence
  Synthetic
  misc_feature (11)..(11): n is a, c, g, or u
ugacucuagcnaccugggug

SEQ ID NO: 9062 - RNA, 20 nt, Artificial Sequence
  Synthetic
  misc_feature (14)..(15): n is a, c, g, or u
accuugggcaagannuggug

SEQ ID NO: 9063 - RNA, 20 nt, Artificial Sequence
  Synthetic
uggaggacaggagguuggug

SEQ ID NO: 9064 - RNA, 20 nt, Artificial Sequence
  Synthetic
  misc_feature (4)..(4): n is a, c, g, or u
  misc_feature (14)..(14): n is a, c, g, or u
uucnuuucucauunacugug

SEQ ID NO: 9065 - RNA, 20 nt, Artificial Sequence
  Synthetic
uccaaggaauacuaacauug

SEQ ID NO: 9066 - RNA, 20 nt, Artificial Sequence
  Synthetic
aacaccgcaaauccagauug

SEQ ID NO: 9067 - RNA, 20 nt, Artificial Sequence
  Synthetic
cauugagauucccgagauug

SEQ ID NO: 9068 - RNA, 20 nt, Artificial Sequence
  Synthetic
cuucugcgacgcggcgauug

SEQ ID NO: 9069 - RNA, 20 nt, Artificial Sequence
  Synthetic
  misc_feature (7)..(7): n is a, c, g, or u
  misc_feature (16)..(16): n is a, c, g, or u
gaaagunugucaacgnauug

SEQ ID NO: 9070 - RNA, 20 nt, Artificial Sequence
  Synthetic
auauggaugaugugguauug

SEQ ID NO: 9071 - RNA, 20 nt, Artificial Sequence
  Synthetic
agccuccaagcugugccuug

SEQ ID NO: 9072 - RNA, 20 nt, Artificial Sequence
  Synthetic
  misc_feature (14)..(14): n is a, c, g, or u
acccuucucggggncgcuug

SEQ ID NO: 9073 - RNA, 20 nt, Artificial Sequence
  Synthetic
ugugggucaccauauucuug

SEQ ID NO: 9074 - RNA, 20 nt, Artificial Sequence
  Synthetic
  misc_feature (5)..(5): n is a, c, g, or u
uuaangacugggaggaguug

SEQ ID NO: 9075 - RNA, 20 nt, Artificial Sequence
  Synthetic
cuggccagguguccuuguug

SEQ ID NO: 9076 - RNA, 20 nt, Artificial Sequence
  Synthetic
auggaaacgauguauauuug

SEQ ID NO: 9077 - RNA, 20 nt, Artificial Sequence
  Synthetic
  misc_feature (5)..(5): n is a, c, g, or u
ccccncugucuccaccuuug

SEQ ID NO: 9078 - RNA, 20 nt, Artificial Sequence
  Synthetic
  misc_feature (5)..(5): n is a, c, g, or u
acacnuagcgccucauuuug

SEQ ID NO: 9079 - RNA, 20 nt, Artificial Sequence
  Synthetic
  misc_feature (20)..(20): n is a, c, g, or u
aauguauauuaggaaaagan

SEQ ID NO: 9080 - RNA, 20 nt, Artificial Sequence
  Synthetic
  misc_feature (20)..(20): n is a, c, g, or u
aagugaaagccugcuuagan

SEQ ID NO: 9081 - RNA, 20 nt, Artificial Sequence
  Synthetic
  misc_feature (20)..(20): n is a, c, g, or u
uuaaucauuacuuccaaacn

SEQ ID NO: 9082 - RNA, 20 nt, Artificial Sequence
  Synthetic
  misc_feature (7)..(7): n is a, c, g, or u
  misc_feature (13)..(13): n is a, c, g, or u
  misc_feature (20)..(20): n is a, c, g, or u
aggaucnucaacnaccagcn

SEQ ID NO: 9083 - RNA, 20 nt, Artificial Sequence
  Synthetic
  misc_feature (20)..(20): n is a, c, g, or u
guauucccaucccaucaucn

SEQ ID NO: 9084 - RNA, 20 nt, Artificial Sequence
  Synthetic
  misc_feature (2)..(2): n is a, c, g, or u
  misc_feature (20)..(20): n is a, c, g, or u
anagagcugaggcgguaucn

SEQ ID NO: 9085 - RNA, 20 nt, Artificial Sequence
  Synthetic
  misc_feature (20)..(20): n is a, c, g, or u
uucucaaagguggagacagn

SEQ ID NO: 9086 - RNA, 20 nt, Artificial Sequence
  Synthetic
  misc_feature (20)..(20): n is a, c, g, or u
accccgccuguaacacgagn

SEQ ID NO: 9087 - RNA, 20 nt, Artificial Sequence
  Synthetic
  misc_feature (16)..(16): n is a, c, g, or u
  misc_feature (20)..(20): n is a, c, g, or u
acauucuuugauuuunugun

SEQ ID NO: 9088 - RNA, 20 nt, Artificial Sequence
  Synthetic
  misc_feature (20)..(20): n is a, c, g, or u
uugauaagauaggggcauun

SEQ ID NO: 9089 - RNA, 20 nt, Artificial Sequence
  Synthetic
uuaaagcaggauaaccacau

SEQ ID NO: 9090 - RNA, 20 nt, Artificial Sequence
  Synthetic
  misc_feature (8)..(8): n is a, c, g, or u
  misc_feature (11)..(11): n is a, c, g, or u
uggcuuunggncauggacau

SEQ ID NO: 9091 - RNA, 20 nt, Artificial Sequence
  Synthetic
cagcacagccuagcagccau

SEQ ID NO: 9092 - RNA, 20 nt, Artificial Sequence
  Synthetic
gggaacaagagcuacagcau

SEQ ID NO: 9093 - RNA, 20 nt, Artificial Sequence
  Synthetic
cagaggugaaaaaguugcau

SEQ ID NO: 9094 - RNA, 20 nt, Artificial Sequence
  Synthetic
  misc_feature (14)..(14): n is a, c, g, or u
  misc_feature (17)..(17): n is a, c, g, or u
cuuggguggcuuunggncau

SEQ ID NO: 9095 - RNA, 20 nt, Artificial Sequence
  Synthetic
  misc_feature (13)..(13): n is a, c, g, or u
cccuaacaaaacnaaaagau

SEQ ID NO: 9096 - RNA, 20 nt, Artificial Sequence
  Synthetic
uccccaauccucgagaagau

SEQ ID NO: 9097 - RNA, 20 nt, Artificial Sequence
  Synthetic
uccggaaguguugauaagau

SEQ ID NO: 9098 - RNA, 20 nt, Artificial Sequence
  Synthetic
caaacaccgcaaauccagau

SEQ ID NO: 9099 - RNA, 20 nt, Artificial Sequence
  Synthetic
ucgucaaucuucucgaggau

SEQ ID NO: 9100 - RNA, 20 nt, Artificial Sequence
  Synthetic
ccagguguccuuguugggau

SEQ ID NO: 9101 - RNA, 20 nt, Artificial Sequence
  Synthetic
  misc_feature (9)..(9): n is a, c, g, or u
  misc_feature (18)..(18): n is a, c, g, or u
uggaaagunugucaacgnau

SEQ ID NO: 9102 - RNA, 20 nt, Artificial Sequence
  Synthetic
gcucuuguucccaagaauau

SEQ ID NO: 9103 - RNA, 20 nt, Artificial Sequence
  Synthetic
uguuuggcuuucaguuauau

SEQ ID NO: 9104 - RNA, 20 nt, Artificial Sequence
  Synthetic
cuuccuguuaacaggccuau

SEQ ID NO: 9105 - RNA, 20 nt, Artificial Sequence
  Synthetic
  misc_feature (4)..(4): n is a, c, g, or u
acanuauuuacacacucuau

SEQ ID NO: 9106 - RNA, 20 nt, Artificial Sequence
  Synthetic
ggcuaggaguuccgcaguau

SEQ ID NO: 9107 - RNA, 20 nt, Artificial Sequence
  Synthetic
gagucuagacucugcgguau

SEQ ID NO: 9108 - RNA, 20 nt, Artificial Sequence
  Synthetic
uuauauggaugaugugguau

SEQ ID NO: 9109 - RNA, 20 nt, Artificial Sequence
  Synthetic
  misc_feature (17)..(17): n is a, c, g, or u
auaccgccucagcucunuau

SEQ ID NO: 9110 - RNA, 20 nt, Artificial Sequence
  Synthetic
uucgcacuccuccagcuuau

SEQ ID NO: 9111 - RNA, 20 nt, Artificial Sequence
  Synthetic
gcuaggcugugcugccaacu

SEQ ID NO: 9112 - RNA, 20 nt, Artificial Sequence
  Synthetic
ucugaaggcuggauccaacu

SEQ ID NO: 9113 - RNA, 20 nt, Artificial Sequence
  Synthetic
uuuggaaguaaugauuaacu

SEQ ID NO: 9114 - RNA, 20 nt, Artificial Sequence
  Synthetic
aauaccgcagagucuagacu

SEQ ID NO: 9115 - RNA, 20 nt, Artificial Sequence
  Synthetic
gguaggcugccuuccugacu

SEQ ID NO: 9116 - RNA, 20 nt, Artificial Sequence
  Synthetic
uucuccuggcucaguuuacu

SEQ ID NO: 9117 - RNA, 20 nt, Artificial Sequence
  Synthetic
aguccucuuauguaagaccu

SEQ ID NO: 9118 - RNA, 20 nt, Artificial Sequence
  Synthetic
gacaaacgggcaacauaccu

SEQ ID NO: 9119 - RNA, 20 nt, Artificial Sequence
  Synthetic
  misc_feature (11)..(11): n is a, c, g, or u
  misc_feature (14)..(14): n is a, c, g, or u
gacacacggunguncccccu

SEQ ID NO: 9120 - RNA, 20 nt, Artificial Sequence
  Synthetic
gacgacgaggcagguccccu

SEQ ID NO: 9121 - RNA, 20 nt, Artificial Sequence
  Synthetic
caagccuccaagcugugccu

SEQ ID NO: 9122 - RNA, 20 nt, Artificial Sequence
  Synthetic
  misc_feature (1)..(1): n is a, c, g, or u
  misc_feature (8)..(8): n is a, c, g, or u
  misc_feature (14)..(14): n is a, c, g, or u
ngcuggunguugangauccu

SEQ ID NO: 9123 - RNA, 20 nt, Artificial Sequence
  Synthetic
agggauacauagagguuccu

SEQ ID NO: 9124 - RNA, 20 nt, Artificial Sequence
  Synthetic
  misc_feature (16)..(16): n is a, c, g, or u
cgacccuucucggggncgcu

SEQ ID NO: 9125 - RNA, 20 nt, Artificial Sequence
  Synthetic
aacuuguccugguuaucgcu

SEQ ID NO: 9126 - RNA, 20 nt, Artificial Sequence
  Synthetic
cgguguuugcucugaaggcu

SEQ ID NO: 9127 - RNA, 20 nt, Artificial Sequence
  Synthetic
caaggcacagcuuggaggcu

SEQ ID NO: 9128 - RNA, 20 nt, Artificial Sequence
  Synthetic
ugacgcaacccccacuggcu

SEQ ID NO: 9129 - RNA, 20 nt, Artificial Sequence
  Synthetic
gaggccuguauuucccugcu

SEQ ID NO: 9130 - RNA, 20 nt, Artificial Sequence
  Synthetic
ugaaaaaguugcauggugcu

SEQ ID NO: 9131 - RNA, 20 nt, Artificial Sequence
  Synthetic
  misc_feature (13)..(13): n is a, c, g, or u
  misc_feature (16)..(16): n is a, c, g, or u
caggcaagcaauncunugcu

SEQ ID NO: 9132 - RNA, 20 nt, Artificial Sequence
  Synthetic
aagaaucccagaggauugcu

SEQ ID NO: 9133 - RNA, 20 nt, Artificial Sequence
  Synthetic
  misc_feature (18)..(18): n is a, c, g, or u
uaacugacuacuaggucncu

SEQ ID NO: 9134 - RNA, 20 nt, Artificial Sequence
  Synthetic
  misc_feature (18)..(18): n is a, c, g, or u
ggauuccuaggaccccuncu

SEQ ID NO: 9135 - RNA, 20 nt, Artificial Sequence
  Synthetic
ugggauugaagucccaaucu

SEQ ID NO: 9136 - RNA, 20 nt, Artificial Sequence
  Synthetic
gucgcagaagaucucaaucu

SEQ ID NO: 9137 - RNA, 20 nt, Artificial Sequence
  Synthetic
cucacaauaccgcagagucu

SEQ ID NO: 9138 - RNA, 20 nt, Artificial Sequence
  Synthetic
gagaaguccaccacgagucu

SEQ ID NO: 9139 - RNA, 20 nt, Artificial Sequence
  Synthetic
  misc_feature (5)..(5): n is a, c, g, or u
  misc_feature (9)..(9): n is a, c, g, or u
  misc_feature (17)..(17): n is a, c, g, or u
uuuunugunugaugugnucu

SEQ ID NO: 9140 - RNA, 20 nt, Artificial Sequence
  Synthetic
uuugugggucaccauauucu

SEQ ID NO: 9141 - RNA, 20 nt, Artificial Sequence
  Synthetic
aucccgcggacgacccuucu

SEQ ID NO: 9142 - RNA, 20 nt, Artificial Sequence
  Synthetic
  misc_feature (6)..(6): n is a, c, g, or u
ccuucnguacgagaucuucu

SEQ ID NO: 9143 - RNA, 20 nt, Artificial Sequence
  Synthetic
ggcgagggaguucuucuucu

SEQ ID NO: 9144 - RNA, 20 nt, Artificial Sequence
  Synthetic
aucuucuuguugguucuucu

SEQ ID NO: 9145 - RNA, 20 nt, Artificial Sequence
  Synthetic
aaugauuaacuagauguucu

SEQ ID NO: 9146 - RNA, 20 nt, Artificial Sequence
  Synthetic
uggacuucucucaauuuucu

SEQ ID NO: 9147 - RNA, 20 nt, Artificial Sequence
  Synthetic
auaacugaaagccaaacagu

SEQ ID NO: 9148 - RNA, 20 nt, Artificial Sequence
  Synthetic
  misc_feature (3)..(3): n is a, c, g, or u
  misc_feature (15)..(15): n is a, c, g, or u
ggnuuaaagacaggnacagu

SEQ ID NO: 9149 - RNA, 20 nt, Artificial Sequence
  Synthetic
augaccaagccccagccagu

SEQ ID NO: 9150 - RNA, 20 nt, Artificial Sequence
  Synthetic
ucauccucaggccaugcagu

SEQ ID NO: 9151 - RNA, 20 nt, Artificial Sequence
  Synthetic
  misc_feature (7)..(7): n is a, c, g, or u
guuuaangacugggaggagu

SEQ ID NO: 9152 - RNA, 20 nt, Artificial Sequence
  Synthetic
  misc_feature (13)..(13): n is a, c, g, or u
  misc_feature (17)..(17): n is a, c, g, or u
gagguuccuugancagnagu

SEQ ID NO: 9153 - RNA, 20 nt, Artificial Sequence
  Synthetic
ugggccaucagcgcaugcgu

SEQ ID NO: 9154 - RNA, 20 nt, Artificial Sequence
  Synthetic
  misc_feature (17)..(17): n is a, c, g, or u
ccaaaagacccacaauncgu

SEQ ID NO: 9155 - RNA, 20 nt, Artificial Sequence
  Synthetic
accgcagagucuagacucgu

SEQ ID NO: 9156 - RNA, 20 nt, Artificial Sequence
  Synthetic
uaugccucaaggucggucgu

SEQ ID NO: 9157 - RNA, 20 nt, Artificial Sequence
  Synthetic
ccauuuguucagugguucgu

SEQ ID NO: 9158 - RNA, 20 nt, Artificial Sequence
  Synthetic
ugcagaguuugguggaaggu

SEQ ID NO: 9159 - RNA, 20 nt, Artificial Sequence
  Synthetic
guuggugagugauuggaggu

SEQ ID NO: 9160 - RNA, 20 nt, Artificial Sequence
  Synthetic
ccaaaaggccuccgugcggu

SEQ ID NO: 9161 - RNA, 20 nt, Artificial Sequence
  Synthetic
aagccccagccagugggggu

SEQ ID NO: 9162 - RNA, 20 nt, Artificial Sequence
  Synthetic
aaucccagaggauugcuggu

SEQ ID NO: 9163 - RNA, 20 nt, Artificial Sequence
  Synthetic
gcagagucuagacucguggu

SEQ ID NO: 9164 - RNA, 20 nt, Artificial Sequence
  Synthetic
ggcuggauccaacugguggu

SEQ ID NO: 9165 - RNA, 20 nt, Artificial Sequence
  Synthetic
cuuccugacuggcgauuggu

SEQ ID NO: 9166 - RNA, 20 nt, Artificial Sequence
  Synthetic
gggaucuugcagaguuuggu

SEQ ID NO: 9167 - RNA, 20 nt, Artificial Sequence
  Synthetic
  misc_feature (10)..(11): n is a, c, g, or u
  misc_feature (18)..(18): n is a, c, g, or u
cauggucccnngcuggungu

SEQ ID NO: 9168 - RNA, 20 nt, Artificial Sequence
  Synthetic
acaguagucuccggaagugu

SEQ ID NO: 9169 - RNA, 20 nt, Artificial Sequence
  Synthetic
uuuggugucuuucggagugu

SEQ ID NO: 9170 - RNA, 20 nt, Artificial Sequence
  Synthetic
gucuggccagguguccuugu

SEQ ID NO: 9171 - RNA, 20 nt, Artificial Sequence
  Synthetic
acaggcgggguuuuucuugu

SEQ ID NO: 9172 - RNA, 20 nt, Artificial Sequence
  Synthetic
  misc_feature (19)..(19): n is a, c, g, or u
auaagagagaaacaacacnu

SEQ ID NO: 9173 - RNA, 20 nt, Artificial Sequence
  Synthetic
  misc_feature (18)..(19): n is a, c, g, or u
uaagaccuugggcaagannu

SEQ ID NO: 9174 - RNA, 20 nt, Artificial Sequence
  Synthetic
  misc_feature (11)..(11): n is a, c, g, or u
  misc_feature (14)..(14): n is a, c, g, or u
  misc_feature (18)..(19): n is a, c, g, or u
cuacuaggucncungaunnu

SEQ ID NO: 9175 - RNA, 20 nt, Artificial Sequence
  Synthetic
  misc_feature (19)..(19): n is a, c, g, or u
ccuaaaguucaggcaacunu

SEQ ID NO: 9176 - RNA, 20 nt, Artificial Sequence
  Synthetic
  misc_feature (19)..(19): n is a, c, g, or u
aggucuggagcaaacauunu

SEQ ID NO: 9177 - RNA, 20 nt, Artificial Sequence
  Synthetic
  misc_feature (15)..(15): n is a, c, g, or u
guuaccaaauauuunccauu

SEQ ID NO: 9178 - RNA, 20 nt, Artificial Sequence
  Synthetic
aagguaggagcuggagcauu

SEQ ID NO: 9179 - RNA, 20 nt, Artificial Sequence
  Synthetic
  misc_feature (1)..(1): n is a, c, g, or u
  misc_feature (13)..(13): n is a, c, g, or u
nccugucuuuaanccucauu

SEQ ID NO: 9180 - RNA, 20 nt, Artificial Sequence
  Synthetic
  misc_feature (5)..(5): n is a, c, g, or u
  misc_feature (11)..(11): n is a, c, g, or u
auuunaugggnuaugucauu

SEQ ID NO: 9181 - RNA, 20 nt, Artificial Sequence
  Synthetic
cgucaaucuucucgaggauu

SEQ ID NO: 9182 - RNA, 20 nt, Artificial Sequence
  Synthetic
uugaagucccaaucuggauu

SEQ ID NO: 9183 - RNA, 20 nt, Artificial Sequence
  Synthetic
uguuaacaggccuauugauu

SEQ ID NO: 9184 - RNA, 20 nt, Artificial Sequence
  Synthetic
cugaacuuuaggcccauauu

SEQ ID NO: 9185 - RNA, 20 nt, Artificial Sequence
  Synthetic
ccauggaaacgauguauauu

SEQ ID NO: 9186 - RNA, 20 nt, Artificial Sequence
  Synthetic
uauauggaugaugugguauu

SEQ ID NO: 9187 - RNA, 20 nt, Artificial Sequence
  Synthetic
ucucaauguuaguauuccuu

SEQ ID NO: 9188 - RNA, 20 nt, Artificial Sequence
  Synthetic
gagaaagugaaagccugcuu

SEQ ID NO: 9189 - RNA, 20 nt, Artificial Sequence
  Synthetic
ucuuacauaagaggacucuu

SEQ ID NO: 9190 - RNA, 20 nt, Artificial Sequence
  Synthetic
  misc_feature (4)..(4): n is a, c, g, or u
gucnuuaaacaaacagucuu

SEQ ID NO: 9191 - RNA, 20 nt, Artificial Sequence
  Synthetic
  misc_feature (13)..(13): n is a, c, g, or u
acauuuuuugaunaugucuu

SEQ ID NO: 9192 - RNA, 20 nt, Artificial Sequence
  Synthetic
uaccaauuuucuuuugucuu

SEQ ID NO: 9193 - RNA, 20 nt, Artificial Sequence
  Synthetic
aaguuuucuaaaacauucuu

SEQ ID NO: 9194 - RNA, 20 nt, Artificial Sequence
  Synthetic
acagaaaggccuuguaaguu

SEQ ID NO: 9195 - RNA, 20 nt, Artificial Sequence
  Synthetic
uucuuucccgaccaccaguu

SEQ ID NO: 9196 - RNA, 20 nt, Artificial Sequence
  Synthetic
  misc_feature (6)..(6): n is a, c, g, or u
uuuaangacugggaggaguu

SEQ ID NO: 9197 - RNA, 20 nt, Artificial Sequence
  Synthetic
aaguuggaggacaggagguu

SEQ ID NO: 9198 - RNA, 20 nt, Artificial Sequence
  Synthetic
uuggugagugauuggagguu

SEQ ID NO: 9199 - RNA, 20 nt, Artificial Sequence
  Synthetic
gcuccagcuccuaccuuguu

SEQ ID NO: 9200 - RNA, 20 nt, Artificial Sequence
  Synthetic
uuccggagacuacuguuguu

SEQ ID NO: 9201 - RNA, 20 nt, Artificial Sequence
  Synthetic
  misc_feature (12)..(12): n is a, c, g, or u
ccccaucuuuunguuuuguu

SEQ ID NO: 9202 - RNA, 20 nt, Artificial Sequence
  Synthetic
  misc_feature (14)..(14): n is a, c, g, or u
accugggugggugnuaauuu

SEQ ID NO: 9203 - RNA, 20 nt, Artificial Sequence
  Synthetic
  misc_feature (7)..(7): n is a, c, g, or u
caacacnuagcgccucauuu

SEQ ID NO: 9204 - RNA, 20 nt, Artificial Sequence
  Synthetic
  misc_feature (6)..(6): n is a, c, g, or u
  misc_feature (9)..(10): n is a, c, g, or u
gaaacngunnuagaguauuu

SEQ ID NO: 9205 - RNA, 20 nt, Artificial Sequence
  Synthetic
cccaccgcacggaggccuuu

SEQ ID NO: 9206 - RNA, 20 nt, Artificial Sequence
  Synthetic
  misc_feature (7)..(7): n is a, c, g, or u
ucaacgnauugugggucuuu

SEQ ID NO: 9207 - RNA, 20 nt, Artificial Sequence
  Synthetic
  misc_feature (1)..(1): n is a, c, g, or u
ncugggaucuugcagaguuu

SEQ ID NO: 9208 - RNA, 20 nt, Artificial Sequence
  Synthetic
  misc_feature (10)..(10): n is a, c, g, or u
  misc_feature (16)..(16): n is a, c, g, or u
guguaaauanugucunguuu

SEQ ID NO: 9209 - RNA, 20 nt, Artificial Sequence
  Synthetic
  misc_feature (2)..(2): n is a, c, g, or u
  misc_feature (17)..(17): n is a, c, g, or u
gnaaauauuugguaacnuuu

SEQ ID NO: 9210 - RNA, 20 nt, Artificial Sequence
  Synthetic
acauuucuugucucacuuuu

SEQ ID NO: 9211 - RNA, 20 nt, Artificial Sequence
  Synthetic
ccaccgcacggaggccuuuu

SEQ ID NO: 9212 - RNA, 20 nt, Artificial Sequence
  Synthetic
  misc_feature (2)..(2): n is a, c, g, or u
anaaaaucaaagaauguuuu

SEQ ID NO: 9213 - RNA, 20 nt, Artificial Sequence
  Synthetic
  misc_feature (7)..(7): n is a, c, g, or u
uacaaanuguucacauuuuu

SEQ ID NO: 9214 - RNA, 17 nt, Artificial Sequence
  Synthetic
gagaccuucgucugcga

SEQ ID NO: 9215 - RNA, 17 nt, Artificial Sequence
  Synthetic
gcgacgugcagagguga

SEQ ID NO: 9216 - RNA, 17 nt, Artificial Sequence
  Synthetic
gggcgcaccucucuuua

SEQ ID NO: 9217 - RNA, 17 nt, Artificial Sequence
  Synthetic
gauuggagguuggggac

SEQ ID NO: 9218 - RNA, 17 nt, Artificial Sequence
  Synthetic
guaaacaaaggacgucc

SEQ ID NO: 9219 - RNA, 17 nt, Artificial Sequence
  Synthetic
gagaucuucugcgacgc

SEQ ID NO: 9220 - RNA, 17 nt, Artificial Sequence
  Synthetic
guuugcuccagaccugc

SEQ ID NO: 9221 - RNA, 17 nt, Artificial Sequence
  Synthetic
ggcacagacggggaguc

SEQ ID NO: 9222 - RNA, 17 nt, Artificial Sequence
  Synthetic
guaggcauaaauugguc

SEQ ID NO: 9223 - RNA, 17 nt, Artificial Sequence
  Synthetic
ggucguccgcgggauuc

SEQ ID NO: 9224 - RNA, 17 nt, Artificial Sequence
  Synthetic
guccgcguaaagagagg

SEQ ID NO: 9225 - RNA, 17 nt, Artificial Sequence
  Synthetic
  misc_feature (4)..(4): n is a, c, g, or u
  misc_feature (7)..(7): n is a, c, g, or u
guuncgnccgaccacgg

SEQ ID NO: 9226 - RNA, 17 nt, Artificial Sequence
  Synthetic
gaaaggccuuguaaguu

SEQ ID NO: 9227 - RNA, 20 nt, Artificial Sequence
  Synthetic
gaccugcugcgagcaaaaca

SEQ ID NO: 9228 - RNA, 20 nt, Artificial Sequence
  Synthetic
  misc_feature (9)..(9): n is a, c, g, or u
ggaccccuncucguguuaca

SEQ ID NO: 9229 - RNA, 20 nt, Artificial Sequence
  Synthetic
ggcguucacgguggucucca

SEQ ID NO: 9230 - RNA, 20 nt, Artificial Sequence
  Synthetic
gagauugagaucuucugcga

SEQ ID NO: 9231 - RNA, 20 nt, Artificial Sequence
  Synthetic
gcuccucugccgauccauac

SEQ ID NO: 9232 - RNA, 20 nt, Artificial Sequence
  Synthetic
gucccgucggcgcugaaucc

SEQ ID NO: 9233 - RNA, 20 nt, Artificial Sequence
  Synthetic
gacguaaacaaaggacgucc

SEQ ID NO: 9234 - RNA, 20 nt, Artificial Sequence
  Synthetic
gggcuuggucaugggccauc

SEQ ID NO: 9235 - RNA, 20 nt, Artificial Sequence
  Synthetic
gaaggcacagacggggaguc

SEQ ID NO: 9236 - RNA, 20 nt, Artificial Sequence
  Synthetic
gcuguaggcauaaauugguc

SEQ ID NO: 9237 - RNA, 20 nt, Artificial Sequence
  Synthetic
ggaguccgcguaaagagagg

SEQ ID NO: 9238 - RNA, 20 nt, Artificial Sequence
  Synthetic
  misc_feature (7)..(7): n is a, c, g, or u
  misc_feature (10)..(10): n is a, c, g, or u
gccguuncgnccgaccacgg

SEQ ID NO: 9239 - RNA, 20 nt, Artificial Sequence
  Synthetic
gugcugccaacuggauccug

SEQ ID NO: 9240 - RNA, 17 nt, Artificial Sequence
  Synthetic
cugcugcgagcaaaaca

SEQ ID NO: 9241 - RNA, 17 nt, Artificial Sequence
  Synthetic
auugagaucuucugcga

SEQ ID NO: 9242 - RNA, 17 nt, Artificial Sequence
  Synthetic
ccucugccgauccauac

SEQ ID NO: 9243 - RNA, 17 nt, Artificial Sequence
  Synthetic
ccgucggcgcugaaucc

SEQ ID NO: 9244 - RNA, 17 nt, Artificial Sequence
  Synthetic
acgaaggucucaaucgc

SEQ ID NO: 9245 - RNA, 17 nt, Artificial Sequence
  Synthetic
cuuggucaugggccauc

SEQ ID NO: 9246 - RNA, 17 nt, Artificial Sequence
  Synthetic
accacgagucuagacuc

SEQ ID NO: 9247 - RNA, 17 nt, Artificial Sequence
  Synthetic
uuuguuuacgucccguc

SEQ ID NO: 9248 - RNA, 17 nt, Artificial Sequence
  Synthetic
ccccgagaagggucguc

SEQ ID NO: 9249 - RNA, 17 nt, Artificial Sequence
  Synthetic
cgauugagaccuucguc

SEQ ID NO: 9250 - RNA, 17 nt, Artificial Sequence
  Synthetic
uuaucgcuggauguguc

SEQ ID NO: 9251 - RNA, 17 nt, Artificial Sequence
  Synthetic
ccgagauugagaucuuc

SEQ ID NO: 9252 - RNA, 17 nt, Artificial Sequence
  Synthetic
accccaaaaggccuccg

SEQ ID NO: 9253 - RNA, 17 nt, Artificial Sequence
  Synthetic
aagucccaaucuggauu

SEQ ID NO: 9254 - RNA, 17 nt, Artificial Sequence
  Synthetic
uggaaacgauguauauu

SEQ ID NO: 9255 - RNA, 20 nt, Artificial Sequence
  Synthetic
auugagaccuucgucugcga

SEQ ID NO: 9256 - RNA, 20 nt, Artificial Sequence
  Synthetic
caugcgacgugcagagguga

SEQ ID NO: 9257 - RNA, 20 nt, Artificial Sequence
  Synthetic
acggggcgcaccucucuuua

SEQ ID NO: 9258 - RNA, 20 nt, Artificial Sequence
  Synthetic
uucucgaggauuggggaccc

SEQ ID NO: 9259 - RNA, 20 nt, Artificial Sequence
  Synthetic
aaaacgccgcagacacaucc

SEQ ID NO: 9260 - RNA, 20 nt, Artificial Sequence
  Synthetic
cugugcugccaacuggaucc

SEQ ID NO: 9261 - RNA, 20 nt, Artificial Sequence
  Synthetic
auugagaucuucugcgacgc

SEQ ID NO: 9262 - RNA, 20 nt, Artificial Sequence
  Synthetic
cagacgaaggucucaaucgc

SEQ ID NO: 9263 - RNA, 20 nt, Artificial Sequence
  Synthetic
aauguuugcuccagaccugc

SEQ ID NO: 9264 - RNA, 20 nt, Artificial Sequence
  Synthetic
uuaucgcuggaugugucugc

SEQ ID NO: 9265 - RNA, 20 nt, Artificial Sequence
  Synthetic
uccaccacgagucuagacuc

SEQ ID NO: 9266 - RNA, 20 nt, Artificial Sequence
  Synthetic
uccuuuguuuacgucccguc

SEQ ID NO: 9267 - RNA, 20 nt, Artificial Sequence
  Synthetic
  misc_feature (3)..(3): n is a, c, g, or u
cgnccccgagaagggucguc

SEQ ID NO: 9268 - RNA, 20 nt, Artificial Sequence
  Synthetic
cggcgauugagaccuucguc

SEQ ID NO: 9269 - RNA, 20 nt, Artificial Sequence
  Synthetic
ugguuaucgcuggauguguc

SEQ ID NO: 9270 - RNA, 20 nt, Artificial Sequence
  Synthetic
aagggucguccgcgggauuc

SEQ ID NO: 9271 - RNA, 20 nt, Artificial Sequence
  Synthetic
uucccgagauugagaucuuc

SEQ ID NO: 9272 - RNA, 20 nt, Artificial Sequence
  Synthetic
uggucuauaagcuggaggag

SEQ ID NO: 9273 - RNA, 20 nt, Artificial Sequence
  Synthetic
uccaccccaaaaggccuccg

SEQ ID NO: 9274 - RNA, 20 nt, Artificial Sequence
  Synthetic
aaaaaguugcauggugcugg

SEQ ID NO: 9275 - RNA, 20 nt, Artificial Sequence
  Synthetic
uugaagucccaaucuggauu

SEQ ID NO: 9276 - RNA, 20 nt, Artificial Sequence
  Synthetic
ccauggaaacgauguauauu

SEQ ID NO: 9277 - RNA, 20 nt, Artificial Sequence
  Synthetic
acagaaaggccuuguaaguu

SEQ ID NO: 9278 - RNA, 17 nt, Artificial Sequence
  Synthetic
  misc_feature (8)..(8): n is a, c, g, or u
gggacganagaguccca

SEQ ID NO: 9279 - RNA, 17 nt, Artificial Sequence
  Synthetic
guucacgguggucucca

SEQ ID NO: 9280 - RNA, 17 nt, Artificial Sequence
  Synthetic
  misc_feature (8)..(8): n is a, c, g, or u
  misc_feature (11)..(11): n is a, c, g, or u
gauuggungangcagga

SEQ ID NO: 9281 - RNA, 17 nt, Artificial Sequence
  Synthetic
ggugacccacaaaauga

SEQ ID NO: 9282 - RNA, 20 nt, Artificial Sequence
  Synthetic
ggucaugggccaucagcgca

SEQ ID NO: 9283 - RNA, 20 nt, Artificial Sequence
  Synthetic
  misc_feature (11)..(11): n is a, c, g, or u
  misc_feature (14)..(14): n is a, c, g, or u
ggcgauuggungangcagga

SEQ ID NO: 9284 - RNA, 20 nt, Artificial Sequence
  Synthetic
  misc_feature (3)..(3): n is a, c, g, or u
  misc_feature (12)..(12): n is a, c, g, or u
gcnucccgauanagagcuga

SEQ ID NO: 9285 - RNA, 20 nt, Artificial Sequence
  Synthetic
gacaaaagaaaauugguaac

SEQ ID NO: 9286 - RNA, 20 nt, Artificial Sequence
  Synthetic
gguaggcugccuuccugacu

SEQ ID NO: 9287 - RNA, 20 nt, Artificial Sequence
  Synthetic
gcuccagcuccuaccuuguu

SEQ ID NO: 9288 - RNA, 17 nt, Artificial Sequence
  Synthetic
uuacacacucuauggaa

SEQ ID NO: 9289 - RNA, 17 nt, Artificial Sequence
  Synthetic
  misc_feature (6)..(6): n is a, c, g, or u
ccccuncucguguuaca

SEQ ID NO: 9290 - RNA, 17 nt, Artificial Sequence
  Synthetic
  misc_feature (2)..(3): n is a, c, g, or u
cnnaaagguuccacgca

SEQ ID NO: 9291 - RNA, 17 nt, Artificial Sequence
  Synthetic
caugggccaucagcgca

SEQ ID NO: 9292 - RNA, 17 nt, Artificial Sequence
  Synthetic
  misc_feature (9)..(9): n is a, c, g, or u
ucccgauanagagcuga

SEQ ID NO: 9293 - RNA, 17 nt, Artificial Sequence
  Synthetic
aaaagaaaauugguaac

SEQ ID NO: 9294 - RNA, 17 nt, Artificial Sequence
  Synthetic
ucgaggauuggggaccc

SEQ ID NO: 9295 - RNA, 17 nt, Artificial Sequence
  Synthetic
acgccgcagacacaucc

SEQ ID NO: 9296 - RNA, 17 nt, Artificial Sequence
  Synthetic
ugcugccaacuggaucc

SEQ ID NO: 9297 - RNA, 17 nt, Artificial Sequence
  Synthetic
ucgcuggaugugucugc

SEQ ID NO: 9298 - RNA, 17 nt, Artificial Sequence
  Synthetic
ugauguucuccauguuc

SEQ ID NO: 9299 - RNA, 17 nt, Artificial Sequence
  Synthetic
ucuauaagcuggaggag

SEQ ID NO: 9300 - RNA, 17 nt, Artificial Sequence
  Synthetic
aaguugcauggugcugg

SEQ ID NO: 9301 - RNA, 17 nt, Artificial Sequence
  Synthetic
cugccaacuggauccug

SEQ ID NO: 9302 - RNA, 17 nt, Artificial Sequence
  Synthetic
  misc_feature (11)..(12): n is a, c, g, or u
uugggcaagannuggug

SEQ ID NO: 9303 - RNA, 17 nt, Artificial Sequence
  Synthetic
aggcugccuuccugacu

SEQ ID NO: 9304 - RNA, 17 nt, Artificial Sequence
  Synthetic
ccccagccagugggggu

SEQ ID NO: 9305 - RNA, 17 nt, Artificial Sequence
  Synthetic
  misc_feature (16)..(16): n is a, c, g, or u
agagagaaacaacacnu

SEQ ID NO: 9306 - RNA, 17 nt, Artificial Sequence
  Synthetic
ccagcuccuaccuuguu

SEQ ID NO: 9307 - RNA, 20 nt, Artificial Sequence
  Synthetic
uauuuacacacucuauggaa

SEQ ID NO: 9308 - RNA, 20 nt, Artificial Sequence
  Synthetic
  misc_feature (11)..(11): n is a, c, g, or u
aaggggacganagaguccca

SEQ ID NO: 9309 - RNA, 20 nt, Artificial Sequence
  Synthetic
  misc_feature (5)..(6): n is a, c, g, or u
agccnnaaagguuccacgca

SEQ ID NO: 9310 - RNA, 20 nt, Artificial Sequence
  Synthetic
uauggugacccacaaaauga

SEQ ID NO: 9311 - RNA, 20 nt, Artificial Sequence
  Synthetic
agugauuggagguuggggac

SEQ ID NO: 9312 - RNA, 20 nt, Artificial Sequence
  Synthetic
augugauguucuccauguuc

SEQ ID NO: 9313 - RNA, 20 nt, Artificial Sequence
  Synthetic
  misc_feature (14)..(15): n is a, c, g, or u
accuugggcaagannuggug

SEQ ID NO: 9314 - RNA, 20 nt, Artificial Sequence
  Synthetic
aagccccagccagugggggu

SEQ ID NO: 9315 - RNA, 20 nt, Artificial Sequence
  Synthetic
  misc_feature (19)..(19): n is a, c, g, or u
auaagagagaaacaacacnu

SEQ ID NO: 9316 - RNA, 17 nt, Artificial Sequence
  Synthetic
agggcuccaccccaaaa

SEQ ID NO: 9317 - RNA, 17 nt, Artificial Sequence
  Synthetic
agaggaagaugauaaaa

SEQ ID NO: 9318 - RNA, 17 nt, Artificial Sequence
  Synthetic
uauuguuuacacagaaa

SEQ ID NO: 9319 - RNA, 17 nt, Artificial Sequence
  Synthetic
uucucgccaacuuacaa

SEQ ID NO: 9320 - RNA, 17 nt, Artificial Sequence
  Synthetic
  misc_feature (2)..(2): n is a, c, g, or u
  misc_feature (5)..(5): n is a, c, g, or u
gnccnaaagccacccaa

SEQ ID NO: 9321 - RNA, 17 nt, Artificial Sequence
  Synthetic
  misc_feature (5)..(5): n is a, c, g, or u
  misc_feature (14)..(14): n is a, c, g, or u
uaugnugaggugancaa

SEQ ID NO: 9322 - RNA, 17 nt, Artificial Sequence
  Synthetic
aaggaaagaagucagaa

SEQ ID NO: 9323 - RNA, 17 nt, Artificial Sequence
  Synthetic
gguccggcagaugagaa

SEQ ID NO: 9324 - RNA, 17 nt, Artificial Sequence
  Synthetic
  misc_feature (6)..(6): n is a, c, g, or u
gugaancccagcccgaa

SEQ ID NO: 9325 - RNA, 17 nt, Artificial Sequence
  Synthetic
cauaggaauuuuccgaa

SEQ ID NO: 9326 - RNA, 17 nt, Artificial Sequence
  Synthetic
caaucgccagucaggaa

SEQ ID NO: 9327 - RNA, 17 nt, Artificial Sequence
  Synthetic
gccaaacagugggggaa

SEQ ID NO: 9328 - RNA, 17 nt, Artificial Sequence
  Synthetic
ucauccauauaacugaa

SEQ ID NO: 9329 - RNA, 17 nt, Artificial Sequence
  Synthetic
gcgguguuugcucugaa

SEQ ID NO: 9330 - RNA, 17 nt, Artificial Sequence
  Synthetic
guuggcgagaaagugaa

SEQ ID NO: 9331 - RNA, 17 nt, Artificial Sequence
  Synthetic
auggagaccaccgugaa

SEQ ID NO: 9332 - RNA, 17 nt, Artificial Sequence
  Synthetic
  misc_feature (15)..(15): n is a, c, g, or u
gcuuauagaccaccnaa

SEQ ID NO: 9333 - RNA, 17 nt, Artificial Sequence
  Synthetic
  misc_feature (12)..(12): n is a, c, g, or u
  misc_feature (15)..(15): n is a, c, g, or u
caauguccaugnccnaa

SEQ ID NO: 9334 - RNA, 17 nt, Artificial Sequence
  Synthetic
  misc_feature (2)..(2): n is a, c, g, or u
gnacaguagaagaauaa

SEQ ID NO: 9335 - RNA, 17 nt, Artificial Sequence
  Synthetic
ugcucaggagacucuaa

SEQ ID NO: 9336 - RNA, 17 nt, Artificial Sequence
  Synthetic
  misc_feature (9)..(9): n is a, c, g, or u
gcauacaanggcauuaa

SEQ ID NO: 9337 - RNA, 17 nt, Artificial Sequence
  Synthetic
ugguuauccugcuuuaa

SEQ ID NO: 9338 - RNA, 17 nt, Artificial Sequence
  Synthetic
aaaacuuccuguuaaca

SEQ ID NO: 9339 - RNA, 17 nt, Artificial Sequence
  Synthetic
accagcagggaaauaca

SEQ ID NO: 9340 - RNA, 17 nt, Artificial Sequence
  Synthetic
  misc_feature (9)..(9): n is a, c, g, or u
ugcuuaganugaauaca

SEQ ID NO: 9341 - RNA, 17 nt, Artificial Sequence
  Synthetic
ucugcgcaccagcacca

SEQ ID NO: 9342 - RNA, 17 nt, Artificial Sequence
  Synthetic
  misc_feature (2)..(2): n is a, c, g, or u
  misc_feature (9)..(10): n is a, c, g, or u
cnaccagcnngggacca

SEQ ID NO: 9343 - RNA, 17 nt, Artificial Sequence
  Synthetic
cugauggcccaugacca

SEQ ID NO: 9344 - RNA, 17 nt, Artificial Sequence
  Synthetic
ggaaagauucugcccca

SEQ ID NO: 9345 - RNA, 17 nt, Artificial Sequence
  Synthetic
cacucauccucaggcca

SEQ ID NO: 9346 - RNA, 17 nt, Artificial Sequence
  Synthetic
uacuguucaagccucca

SEQ ID NO: 9347 - RNA, 17 nt, Artificial Sequence
  Synthetic
  misc_feature (6)..(7): n is a, c, g, or u
gagccnnaaagguucca

SEQ ID NO: 9348 - RNA, 17 nt, Artificial Sequence
  Synthetic
  misc_feature (9)..(9): n is a, c, g, or u
uguauucanucuaagca

SEQ ID NO: 9349 - RNA, 17 nt, Artificial Sequence
  Synthetic
uuggauaaaaccuagca

SEQ ID NO: 9350 - RNA, 17 nt, Artificial Sequence
  Synthetic
cauacugcacucaggca

SEQ ID NO: 9351 - RNA, 17 nt, Artificial Sequence
  Synthetic
  misc_feature (4)..(4): n is a, c, g, or u
ucancauacugcacuca

SEQ ID NO: 9352 - RNA, 17 nt, Artificial Sequence
  Synthetic
uugggguggagcccuca

SEQ ID NO: 9353 - RNA, 17 nt, Artificial Sequence
  Synthetic
agaaacacucauccuca

SEQ ID NO: 9354 - RNA, 17 nt, Artificial Sequence
  Synthetic
uaugggccuaaaguuca

SEQ ID NO: 9355 - RNA, 17 nt, Artificial Sequence
  Synthetic
ucauguccuacuguuca

SEQ ID NO: 9356 - RNA, 17 nt, Artificial Sequence
  Synthetic
uaaaaagggacucaaga

SEQ ID NO: 9357 - RNA, 17 nt, Artificial Sequence
  Synthetic
aaggacaccuggccaga

SEQ ID NO: 9358 - RNA, 17 nt, Artificial Sequence
  Synthetic
  misc_feature (11)..(11): n is a, c, g, or u
aagaucccagngugaga

SEQ ID NO: 9359 - RNA, 17 nt, Artificial Sequence
  Synthetic
cuguuguuagacgacga

SEQ ID NO: 9360 - RNA, 17 nt, Artificial Sequence
  Synthetic
  misc_feature (1)..(1): n is a, c, g, or u
  misc_feature (3)..(3): n is a, c, g, or u
  misc_feature (5)..(5): n is a, c, g, or u
  misc_feature (12)..(12): n is a, c, g, or u
ngnunuuuguanuagga

SEQ ID NO: 9361 - RNA, 17 nt, Artificial Sequence
  Synthetic
ucaccccaccgcacgga

SEQ ID NO: 9362 - RNA, 17 nt, Artificial Sequence
  Synthetic
  misc_feature (9)..(9): n is a, c, g, or u
ucagcucunuaucggga

SEQ ID NO: 9363 - RNA, 17 nt, Artificial Sequence
  Synthetic
ccaaggcacagcuugga

SEQ ID NO: 9364 - RNA, 17 nt, Artificial Sequence
  Synthetic
  misc_feature (15)..(15): n is a, c, g, or u
gacuggcgauuggunga

SEQ ID NO: 9365 - RNA, 17 nt, Artificial Sequence
  Synthetic
aaccaacaagaagauga

SEQ ID NO: 9366 - RNA, 17 nt, Artificial Sequence
  Synthetic
caggagaaacgggcuga

SEQ ID NO: 9367 - RNA, 17 nt, Artificial Sequence
  Synthetic
ugccaaguguuugcuga

SEQ ID NO: 9368 - RNA, 17 nt, Artificial Sequence
  Synthetic
ucaacgaccgaccuuga

SEQ ID NO: 9369 - RNA, 17 nt, Artificial Sequence
  Synthetic
  misc_feature (2)..(2): n is a, c, g, or u
anacuuuccaaucaaua

SEQ ID NO: 9370 - RNA, 17 nt, Artificial Sequence
  Synthetic
  misc_feature (6)..(6): n is a, c, g, or u
gcauungguggucuaua

SEQ ID NO: 9371 - RNA, 17 nt, Artificial Sequence
  Synthetic
cguuuccauggcugcua

SEQ ID NO: 9372 - RNA, 17 nt, Artificial Sequence
  Synthetic
ucuucauccugcugcua

SEQ ID NO: 9373 - RNA, 17 nt, Artificial Sequence
  Synthetic
  misc_feature (4)..(4): n is a, c, g, or u
  misc_feature (13)..(13): n is a, c, g, or u
ugcnuguauucanucua

SEQ ID NO: 9374 - RNA, 17 nt, Artificial Sequence
  Synthetic
aaacagucuuugaagua

SEQ ID NO: 9375 - RNA, 17 nt, Artificial Sequence
  Synthetic
  misc_feature (11)..(11): n is a, c, g, or u
guggagacagnggggua

SEQ ID NO: 9376 - RNA, 17 nt, Artificial Sequence
  Synthetic
  misc_feature (5)..(5): n is a, c, g, or u
uguanuaggaggcugua

SEQ ID NO: 9377 - RNA, 17 nt, Artificial Sequence
  Synthetic
  misc_feature (12)..(12): n is a, c, g, or u
gcuuuaaugccnuugua

SEQ ID NO: 9378 - RNA, 17 nt, Artificial Sequence
  Synthetic
  misc_feature (7)..(7): n is a, c, g, or u
  misc_feature (15)..(15): n is a, c, g, or u
uggcaanguuuguanua

SEQ ID NO: 9379 - RNA, 17 nt, Artificial Sequence
  Synthetic
ugaacaagagaugauua

SEQ ID NO: 9380 - RNA, 17 nt, Artificial Sequence
  Synthetic
  misc_feature (5)..(5): n is a, c, g, or u
  misc_feature (13)..(13): n is a, c, g, or u
aaganugcaauunauua

SEQ ID NO: 9381 - RNA, 17 nt, Artificial Sequence
  Synthetic
gugcgcagaccaauuua

SEQ ID NO: 9382 - RNA, 17 nt, Artificial Sequence
  Synthetic
  misc_feature (1)..(1): n is a, c, g, or u
naguugccugaacuuua

SEQ ID NO: 9383 - RNA, 17 nt, Artificial Sequence
  Synthetic
ccccguugcccggcaac

SEQ ID NO: 9384 - RNA, 17 nt, Artificial Sequence
  Synthetic
  misc_feature (11)..(11): n is a, c, g, or u
  misc_feature (14)..(14): n is a, c, g, or u
ccguggucggncgnaac

SEQ ID NO: 9385 - RNA, 17 nt, Artificial Sequence
  Synthetic
gccuucagagcaaacac

SEQ ID NO: 9386 - RNA, 17 nt, Artificial Sequence
  Synthetic
  misc_feature (7)..(7): n is a, c, g, or u
gcugggnuucaccccac

SEQ ID NO: 9387 - RNA, 17 nt, Artificial Sequence
  Synthetic
gauccaguuggcagcac

SEQ ID NO: 9388 - RNA, 17 nt, Artificial Sequence
  Synthetic
aaagccacccaaggcac

SEQ ID NO: 9389 - RNA, 17 nt, Artificial Sequence
  Synthetic
aagaauccucacaauac

SEQ ID NO: 9390 - RNA, 17 nt, Artificial Sequence
  Synthetic
  misc_feature (3)..(3): n is a, c, g, or u
  misc_feature (12)..(12): n is a, c, g, or u
ugnucaccucancauac

SEQ ID NO: 9391 - RNA, 17 nt, Artificial Sequence
  Synthetic
  misc_feature (12)..(12): n is a, c, g, or u
cgagaucuucungauac

SEQ ID NO: 9392 - RNA, 17 nt, Artificial Sequence
  Synthetic
gaccaauuuaugccuac

SEQ ID NO: 9393 - RNA, 17 nt, Artificial Sequence
  Synthetic
uugggaacaagagcuac

SEQ ID NO: 9394 - RNA, 17 nt, Artificial Sequence
  Synthetic
guccgaagguuugguac

SEQ ID NO: 9395 - RNA, 17 nt, Artificial Sequence
  Synthetic
gggggccaagucuguac

SEQ ID NO: 9396 - RNA, 17 nt, Artificial Sequence
  Synthetic
cuugagucccuuuuuac

SEQ ID NO: 9397 - RNA, 17 nt, Artificial Sequence
  Synthetic
  misc_feature (1)..(1): n is a, c, g, or u
ngggaccaugcagaacc

SEQ ID NO: 9398 - RNA, 17 nt, Artificial Sequence
  Synthetic
ccugaacuggagccacc

SEQ ID NO: 9399 - RNA, 17 nt, Artificial Sequence
  Synthetic
ggcagaaucuuuccacc

SEQ ID NO: 9400 - RNA, 17 nt, Artificial Sequence
  Synthetic
aaauuggucugcgcacc

SEQ ID NO: 9401 - RNA, 17 nt, Artificial Sequence
  Synthetic
aauguuugcuccagacc

SEQ ID NO: 9402 - RNA, 17 nt, Artificial Sequence
  Synthetic
ucuucuucuaggggacc

SEQ ID NO: 9403 - RNA, 17 nt, Artificial Sequence
  Synthetic
  misc_feature (8)..(8): n is a, c, g, or u
  misc_feature (14)..(14): n is a, c, g, or u
caggaucnucaacnacc

SEQ ID NO: 9404 - RNA, 17 nt, Artificial Sequence
  Synthetic
cucuuauauaauauacc

SEQ ID NO: 9405 - RNA, 17 nt, Artificial Sequence
  Synthetic
gucaacaagaaaaaccc

SEQ ID NO: 9406 - RNA, 17 nt, Artificial Sequence
  Synthetic
  misc_feature (10)..(10): n is a, c, g, or u
agucauuagnucccccc

SEQ ID NO: 9407 - RNA, 17 nt, Artificial Sequence
  Synthetic
gcccaugaccaagcccc

SEQ ID NO: 9408 - RNA, 17 nt, Artificial Sequence
  Synthetic
ccuuuaccccguugccc

SEQ ID NO: 9409 - RNA, 17 nt, Artificial Sequence
  Synthetic
  misc_feature (14)..(14): n is a, c, g, or u
gcgguggggugaanccc

SEQ ID NO: 9410 - RNA, 17 nt, Artificial Sequence
  Synthetic
agaggccuguauuuccc

SEQ ID NO: 9411 - RNA, 17 nt, Artificial Sequence
  Synthetic
gcgagaaagugaaagcc

SEQ ID NO: 9412 - RNA, 17 nt, Artificial Sequence
  Synthetic
  misc_feature (1)..(1): n is a, c, g, or u
  misc_feature (9)..(9): n is a, c, g, or u
nugcaauunauuaugcc

SEQ ID NO: 9413 - RNA, 17 nt, Artificial Sequence
  Synthetic
  misc_feature (4)..(4): n is a, c, g, or u
  misc_feature (12)..(12): n is a, c, g, or u
auanuacaaacnuugcc

SEQ ID NO: 9414 - RNA, 17 nt, Artificial Sequence
  Synthetic
caucuuccucuucaucc

SEQ ID NO: 9415 - RNA, 17 nt, Artificial Sequence
  Synthetic
gaccaccaguuggaucc

SEQ ID NO: 9416 - RNA, 17 nt, Artificial Sequence
  Synthetic
acacaaugugguuaucc

SEQ ID NO: 9417 - RNA, 17 nt, Artificial Sequence
  Synthetic
ccagcaaauccgccucc

SEQ ID NO: 9418 - RNA, 17 nt, Artificial Sequence
  Synthetic
uggauucgcacuccucc

SEQ ID NO: 9419 - RNA, 17 nt, Artificial Sequence
  Synthetic
cccagcccgaaugcucc

SEQ ID NO: 9420 - RNA, 17 nt, Artificial Sequence
  Synthetic
  misc_feature (11)..(11): n is a, c, g, or u
acucuguuguncucucc

SEQ ID NO: 9421 - RNA, 17 nt, Artificial Sequence
  Synthetic
cgaagugcacacggucc

SEQ ID NO: 9422 - RNA, 17 nt, Artificial Sequence
  Synthetic
cugcgagcaaaacaagc

SEQ ID NO: 9423 - RNA, 17 nt, Artificial Sequence
  Synthetic
agaagaugaggcauagc

SEQ ID NO: 9424 - RNA, 17 nt, Artificial Sequence
  Synthetic
uggcagcacagccuagc

SEQ ID NO: 9425 - RNA, 17 nt, Artificial Sequence
  Synthetic
acugcggaacuccuagc

SEQ ID NO: 9426 - RNA, 17 nt, Artificial Sequence
  Synthetic
ggaagaugauaaaacgc

SEQ ID NO: 9427 - RNA, 17 nt, Artificial Sequence
  Synthetic
ccgcuuguuuugcucgc

SEQ ID NO: 9428 - RNA, 17 nt, Artificial Sequence
  Synthetic
ucgccagucaggaaggc

SEQ ID NO: 9429 - RNA, 17 nt, Artificial Sequence
  Synthetic
  misc_feature (8)..(8): n is a, c, g, or u
gagacagngggguaggc

SEQ ID NO: 9430 - RNA, 17 nt, Artificial Sequence
  Synthetic
cauuguguaaaaggggc

SEQ ID NO: 9431 - RNA, 17 nt, Artificial Sequence
  Synthetic
uacaucguuuccauggc

SEQ ID NO: 9432 - RNA, 17 nt, Artificial Sequence
  Synthetic
cgcaggauccaguuggc

SEQ ID NO: 9433 - RNA, 17 nt, Artificial Sequence
  Synthetic
cuuccucuucauccugc

SEQ ID NO: 9434 - RNA, 17 nt, Artificial Sequence
  Synthetic
uggcugcuaggcugugc

SEQ ID NO: 9435 - RNA, 17 nt, Artificial Sequence
  Synthetic
ggucuuuuggguuuugc

SEQ ID NO: 9436 - RNA, 17 nt, Artificial Sequence
  Synthetic
  misc_feature (4)..(4): n is a, c, g, or u
aacnuugccagcaaauc

SEQ ID NO: 9437 - RNA, 17 nt, Artificial Sequence
  Synthetic
gucugugccuucucauc

SEQ ID NO: 9438 - RNA, 17 nt, Artificial Sequence
  Synthetic
guuccgcaguauggauc

SEQ ID NO: 9439 - RNA, 17 nt, Artificial Sequence
  Synthetic
aaccuuccaccaaacuc

SEQ ID NO: 9440 - RNA, 17 nt, Artificial Sequence
  Synthetic
gcacuucgcuucaccuc

SEQ ID NO: 9441 - RNA, 17 nt, Artificial Sequence
  Synthetic
ugcaacuuuuucaccuc

SEQ ID NO: 9442 - RNA, 17 nt, Artificial Sequence
  Synthetic
  misc_feature (6)..(6): n is a, c, g, or u
cuucungauaccgccuc

SEQ ID NO: 9443 - RNA, 17 nt, Artificial Sequence
  Synthetic
cuaugggagugggccuc

SEQ ID NO: 9444 - RNA, 17 nt, Artificial Sequence
  Synthetic
  misc_feature (8)..(9): n is a, c, g, or u
aaccuuunnggcuccuc

SEQ ID NO: 9445 - RNA, 17 nt, Artificial Sequence
  Synthetic
ucguccccuucuccguc

SEQ ID NO: 9446 - RNA, 17 nt, Artificial Sequence
  Synthetic
ccaguggggguugcguc

SEQ ID NO: 9447 - RNA, 17 nt, Artificial Sequence
  Synthetic
ugcugguggaaagauuc

SEQ ID NO: 9448 - RNA, 17 nt, Artificial Sequence
  Synthetic
caagcggcuaggaguuc

SEQ ID NO: 9449 - RNA, 17 nt, Artificial Sequence
  Synthetic
  misc_feature (3)..(3): n is a, c, g, or u
agnagucgugcagguuc

SEQ ID NO: 9450 - RNA, 17 nt, Artificial Sequence
  Synthetic
auauucuugggaacaag

SEQ ID NO: 9451 - RNA, 17 nt, Artificial Sequence
  Synthetic
gcagaggugaagcgaag

SEQ ID NO: 9452 - RNA, 17 nt, Artificial Sequence
  Synthetic
uggucaugggccaucag

SEQ ID NO: 9453 - RNA, 17 nt, Artificial Sequence
  Synthetic
ggagcccucaggcucag

SEQ ID NO: 9454 - RNA, 17 nt, Artificial Sequence
  Synthetic
ucguccgcgggauucag

SEQ ID NO: 9455 - RNA, 17 nt, Artificial Sequence
  Synthetic
uuggauccagccuucag

SEQ ID NO: 9456 - RNA, 17 nt, Artificial Sequence
  Synthetic
auguucuccauguucag

SEQ ID NO: 9457 - RNA, 17 nt, Artificial Sequence
  Synthetic
uaugcccugagccugag

SEQ ID NO: 9458 - RNA, 17 nt, Artificial Sequence
  Synthetic
  misc_feature (3)..(3): n is a, c, g, or u
agnauugcuugccugag

SEQ ID NO: 9459 - RNA, 17 nt, Artificial Sequence
  Synthetic
  misc_feature (6)..(6): n is a, c, g, or u
  misc_feature (15)..(15): n is a, c, g, or u
aaggcnucccgauanag

SEQ ID NO: 9460 - RNA, 17 nt, Artificial Sequence
  Synthetic
cuggcucaguuuacuag

SEQ ID NO: 9461 - RNA, 17 nt, Artificial Sequence
  Synthetic
uguucagugguucguag

SEQ ID NO: 9462 - RNA, 17 nt, Artificial Sequence
  Synthetic
  misc_feature (14)..(14): n is a, c, g, or u
agagaaacaacacnuag

SEQ ID NO: 9463 - RNA, 17 nt, Artificial Sequence
  Synthetic
gaauuagaggacaaacg

SEQ ID NO: 9464 - RNA, 17 nt, Artificial Sequence
  Synthetic
cugagccaggagaaacg

SEQ ID NO: 9465 - RNA, 17 nt, Artificial Sequence
  Synthetic
guggucuccaugcgacg

SEQ ID NO: 9466 - RNA, 17 nt, Artificial Sequence
  Synthetic
aaacaaaggacgucccg

SEQ ID NO: 9467 - RNA, 17 nt, Artificial Sequence
  Synthetic
agaccuggccguugccg

SEQ ID NO: 9468 - RNA, 17 nt, Artificial Sequence
  Synthetic
gcuccagaccugcugcg

SEQ ID NO: 9469 - RNA, 17 nt, Artificial Sequence
  Synthetic
  misc_feature (8)..(8): n is a, c, g, or u
  misc_feature (12)..(12): n is a, c, g, or u
uccuugancagnagucg

SEQ ID NO: 9470 - RNA, 17 nt, Artificial Sequence
  Synthetic
aggagcuggagcauucg

SEQ ID NO: 9471 - RNA, 17 nt, Artificial Sequence
  Synthetic
ccacauuguguaaaagg

SEQ ID NO: 9472 - RNA, 17 nt, Artificial Sequence
  Synthetic
ugggaugggaauacagg

SEQ ID NO: 9473 - RNA, 17 nt, Artificial Sequence
  Synthetic
guauggaucggcagagg

SEQ ID NO: 9474 - RNA, 17 nt, Artificial Sequence
  Synthetic
ugacccacaaaaugagg

SEQ ID NO: 9475 - RNA, 17 nt, Artificial Sequence
  Synthetic
aguguugauaagauagg

SEQ ID NO: 9476 - RNA, 17 nt, Artificial Sequence
  Synthetic
gacgccaacaagguagg

SEQ ID NO: 9477 - RNA, 17 nt, Artificial Sequence
  Synthetic
uguuuacgucccgucgg

SEQ ID NO: 9478 - RNA, 17 nt, Artificial Sequence
  Synthetic
  misc_feature (2)..(2): n is a, c, g, or u
  misc_feature (5)..(5): n is a, c, g, or u
uncgnccgaccacgggg

SEQ ID NO: 9479 - RNA, 17 nt, Artificial Sequence
  Synthetic
gaugaugugguauuggg

SEQ ID NO: 9480 - RNA, 17 nt, Artificial Sequence
  Synthetic
caagagcuacagcaugg

SEQ ID NO: 9481 - RNA, 17 nt, Artificial Sequence
  Synthetic
gugaaaaaguugcaugg

SEQ ID NO: 9482 - RNA, 17 nt, Artificial Sequence
  Synthetic
uacuguuccugaacugg

SEQ ID NO: 9483 - RNA, 17 nt, Artificial Sequence
  Synthetic
aacaagguaggagcugg

SEQ ID NO: 9484 - RNA, 17 nt, Artificial Sequence
  Synthetic
caacccccacuggcugg

SEQ ID NO: 9485 - RNA, 17 nt, Artificial Sequence
  Synthetic
gcucgcagcaggucugg

SEQ ID NO: 9486 - RNA, 17 nt, Artificial Sequence
  Synthetic
gaggccuuuuggggugg

SEQ ID NO: 9487 - RNA, 17 nt, Artificial Sequence
  Synthetic
ccuuauaaagaauuugg

SEQ ID NO: 9488 - RNA, 17 nt, Artificial Sequence
  Synthetic
  misc_feature (7)..(7): n is a, c, g, or u
  misc_feature (16)..(16): n is a, c, g, or u
ggugggnaacuuuacng

SEQ ID NO: 9489 - RNA, 17 nt, Artificial Sequence
  Synthetic
  misc_feature (1)..(1): n is a, c, g, or u
naaagguuccacgcaug

SEQ ID NO: 9490 - RNA, 17 nt, Artificial Sequence
  Synthetic
gcuggggcuuggucaug

SEQ ID NO: 9491 - RNA, 17 nt, Artificial Sequence
  Synthetic
  misc_feature (5)..(5): n is a, c, g, or u
augunaacacuaauaug

SEQ ID NO: 9492 - RNA, 17 nt, Artificial Sequence
  Synthetic
auggcacuaguaaacug

SEQ ID NO: 9493 - RNA, 17 nt, Artificial Sequence
  Synthetic
gaggauuggggacccug

SEQ ID NO: 9494 - RNA, 17 nt, Artificial Sequence
  Synthetic
  misc_feature (8)..(8): n is a, c, g, or u
guuuguanuaugcccug

SEQ ID NO: 9495 - RNA, 17 nt, Artificial Sequence
  Synthetic
  misc_feature (1)..(1): n is a, c, g, or u
ngccuuagagucuccug

SEQ ID NO: 9496 - RNA, 17 nt, Artificial Sequence
  Synthetic
uucaagccuccaagcug

SEQ ID NO: 9497 - RNA, 17 nt, Artificial Sequence
  Synthetic
ccauggcugcuaggcug

SEQ ID NO: 9498 - RNA, 17 nt, Artificial Sequence
  Synthetic
cgcggacuccccgucug

SEQ ID NO: 9499 - RNA, 17 nt, Artificial Sequence
  Synthetic
ggcaacggccaggucug

SEQ ID NO: 9500 - RNA, 17 nt, Artificial Sequence
  Synthetic
aggcauaaauuggucug

SEQ ID NO: 9501 - RNA, 17 nt, Artificial Sequence
  Synthetic
aaauuccuaugggagug

SEQ ID NO: 9502 - RNA, 17 nt, Artificial Sequence
  Synthetic
ucaucugccggaccgug

SEQ ID NO: 9503 - RNA, 17 nt, Artificial Sequence
  Synthetic
ccgcguaaagagaggug

SEQ ID NO: 9504 - RNA, 17 nt, Artificial Sequence
  Synthetic
guugcauggugcuggug

SEQ ID NO: 9505 - RNA, 17 nt, Artificial Sequence
  Synthetic
  misc_feature (15)..(15): n is a, c, g, or u
cccaucccaucaucnug

SEQ ID NO: 9506 - RNA, 17 nt, Artificial Sequence
  Synthetic
ucuuauguaagaccuug

SEQ ID NO: 9507 - RNA, 17 nt, Artificial Sequence
  Synthetic
  misc_feature (8)..(8): n is a, c, g, or u
  misc_feature (17)..(17): n is a, c, g, or u
gaauacangcauacaan

SEQ ID NO: 9508 - RNA, 17 nt, Artificial Sequence
  Synthetic
  misc_feature (1)..(1): n is a, c, g, or u
  misc_feature (11)..(11): n is a, c, g, or u
  misc_feature (17)..(17): n is a, c, g, or u
naaugagaaangaagan

SEQ ID NO: 9509 - RNA, 17 nt, Artificial Sequence
  Synthetic
  misc_feature (17)..(17): n is a, c, g, or u
gguucugcauggucccn

SEQ ID NO: 9510 - RNA, 17 nt, Artificial Sequence
  Synthetic
  misc_feature (17)..(17): n is a, c, g, or u
gagaguaacuccacagn

SEQ ID NO: 9511 - RNA, 17 nt, Artificial Sequence
  Synthetic
  misc_feature (17)..(17): n is a, c, g, or u
acgacccuucucggggn

SEQ ID NO: 9512 - RNA, 17 nt, Artificial Sequence
  Synthetic
  misc_feature (16)..(17): n is a, c, g, or u
augcguggaaccuuunn

SEQ ID NO: 9513 - RNA, 17 nt, Artificial Sequence
  Synthetic
  misc_feature (14)..(14): n is a, c, g, or u
  misc_feature (17)..(17): n is a, c, g, or u
ucaggcaagcaauncun

SEQ ID NO: 9514 - RNA, 17 nt, Artificial Sequence
  Synthetic
cgaaccacugaacaaau

SEQ ID NO: 9515 - RNA, 17 nt, Artificial Sequence
  Synthetic
aaccuucggacggaaau

SEQ ID NO: 9516 - RNA, 17 nt, Artificial Sequence
  Synthetic
  misc_feature (8)..(8): n is a, c, g, or u
  misc_feature (11)..(11): n is a, c, g, or u
cuccugcnucnaccaau

SEQ ID NO: 9517 - RNA, 17 nt, Artificial Sequence
  Synthetic
cagacgaaggucucaau

SEQ ID NO: 9518 - RNA, 17 nt, Artificial Sequence
  Synthetic
  misc_feature (14)..(14): n is a, c, g, or u
uagcaggcauaaunaau

SEQ ID NO: 9519 - RNA, 17 nt, Artificial Sequence
  Synthetic
auauacaucguuuccau

SEQ ID NO: 9520 - RNA, 17 nt, Artificial Sequence
  Synthetic
acaagaagaugaggcau

SEQ ID NO: 9521 - RNA, 17 nt, Artificial Sequence
  Synthetic
aaagaaucccagaggau

SEQ ID NO: 9522 - RNA, 17 nt, Artificial Sequence
  Synthetic
uccacgcaugcgcugau

SEQ ID NO: 9523 - RNA, 17 nt, Artificial Sequence
  Synthetic
  misc_feature (12)..(12): n is a, c, g, or u
  misc_feature (15)..(15): n is a, c, g, or u
uccccccagcanagnau

SEQ ID NO: 9524 - RNA, 17 nt, Artificial Sequence
  Synthetic
caacuuguccugguuau

SEQ ID NO: 9525 - RNA, 17 nt, Artificial Sequence
  Synthetic
cugacgcaacccccacu

SEQ ID NO: 9526 - RNA, 17 nt, Artificial Sequence
  Synthetic
  misc_feature (3)..(3): n is a, c, g, or u
acnuuuggauaaaaccu

SEQ ID NO: 9527 - RNA, 17 nt, Artificial Sequence
  Synthetic
ucccaacaaggacaccu

SEQ ID NO: 9528 - RNA, 17 nt, Artificial Sequence
  Synthetic
acacuuggcacagaccu

SEQ ID NO: 9529 - RNA, 17 nt, Artificial Sequence
  Synthetic
uagaagaagaacucccu

SEQ ID NO: 9530 - RNA, 17 nt, Artificial Sequence
  Synthetic
aguuggcagcacagccu

SEQ ID NO: 9531 - RNA, 17 nt, Artificial Sequence
  Synthetic
gaagaacucccucgccu

SEQ ID NO: 9532 - RNA, 17 nt, Artificial Sequence
  Synthetic
cauacugcggaacuccu

SEQ ID NO: 9533 - RNA, 17 nt, Artificial Sequence
  Synthetic
cucagcccguuucuccu

SEQ ID NO: 9534 - RNA, 17 nt, Artificial Sequence
  Synthetic
  misc_feature (8)..(8): n is a, c, g, or u
  misc_feature (11)..(11): n is a, c, g, or u
cccagcanagnauugcu

SEQ ID NO: 9535 - RNA, 17 nt, Artificial Sequence
  Synthetic
caggaggcggauuugcu

SEQ ID NO: 9536 - RNA, 17 nt, Artificial Sequence
  Synthetic
uagccgcuuguuuugcu

SEQ ID NO: 9537 - RNA, 17 nt, Artificial Sequence
  Synthetic
  misc_feature (8)..(8): n is a, c, g, or u
cucucacncugggaucu

SEQ ID NO: 9538 - RNA, 17 nt, Artificial Sequence
  Synthetic
  misc_feature (6)..(6): n is a, c, g, or u
ggggancuaaugacucu

SEQ ID NO: 9539 - RNA, 17 nt, Artificial Sequence
  Synthetic
cuaccuuguuggcgucu

SEQ ID NO: 9540 - RNA, 17 nt, Artificial Sequence
  Synthetic
  misc_feature (13)..(14): n is a, c, g, or u
gaacgcccaccannucu

SEQ ID NO: 9541 - RNA, 17 nt, Artificial Sequence
  Synthetic
gcaggcuuucacuuucu

SEQ ID NO: 9542 - RNA, 17 nt, Artificial Sequence
  Synthetic
ggcagaggugaaaaagu

SEQ ID NO: 9543 - RNA, 17 nt, Artificial Sequence
  Synthetic
  misc_feature (14)..(14): n is a, c, g, or u
ugugaaaccacaanagu

SEQ ID NO: 9544 - RNA, 17 nt, Artificial Sequence
  Synthetic
gcuucaccucugcacgu

SEQ ID NO: 9545 - RNA, 17 nt, Artificial Sequence
  Synthetic
cugaaccuuuaccccgu

SEQ ID NO: 9546 - RNA, 17 nt, Artificial Sequence
  Synthetic
ggcacagaccuggccgu

SEQ ID NO: 9547 - RNA, 17 nt, Artificial Sequence
  Synthetic
ggucucaaucgccgcgu

SEQ ID NO: 9548 - RNA, 17 nt, Artificial Sequence
  Synthetic
  misc_feature (4)..(4): n is a, c, g, or u
uuancacccacccaggu

SEQ ID NO: 9549 - RNA, 17 nt, Artificial Sequence
  Synthetic
caagcugugccuugggu

SEQ ID NO: 9550 - RNA, 17 nt, Artificial Sequence
  Synthetic
uguauuucccugcuggu

SEQ ID NO: 9551 - RNA, 17 nt, Artificial Sequence
  Synthetic
ggacuaucaagguaugu

SEQ ID NO: 9552 - RNA, 17 nt, Artificial Sequence
  Synthetic
cuauguaucccuccugu

SEQ ID NO: 9553 - RNA, 17 nt, Artificial Sequence
  Synthetic
auucugccccaugcugu

SEQ ID NO: 9554 - RNA, 17 nt, Artificial Sequence
  Synthetic
  misc_feature (3)..(3): n is a, c, g, or u
  misc_feature (11)..(11): n is a, c, g, or u
gunugaugugnucuugu

SEQ ID NO: 9555 - RNA, 17 nt, Artificial Sequence
  Synthetic
  misc_feature (8)..(8): n is a, c, g, or u
  misc_feature (16)..(16): n is a, c, g, or u
gggcauanuacaaacnu

SEQ ID NO: 9556 - RNA, 17 nt, Artificial Sequence
  Synthetic
  misc_feature (16)..(16): n is a, c, g, or u
uggauguuaugggucnu

SEQ ID NO: 9557 - RNA, 17 nt, Artificial Sequence
  Synthetic
gugucuuggccaaaauu

SEQ ID NO: 9558 - RNA, 17 nt, Artificial Sequence
  Synthetic
  misc_feature (3)..(3): n is a, c, g, or u
gangcaggaggcggauu

SEQ ID NO: 9559 - RNA, 17 nt, Artificial Sequence
  Synthetic
cuuucggaguguggauu

SEQ ID NO: 9560 - RNA, 17 nt, Artificial Sequence
  Synthetic
ugcgucagcaaacacuu

SEQ ID NO: 9561 - RNA, 17 nt, Artificial Sequence
  Synthetic
ccggaccgugugcacuu

SEQ ID NO: 9562 - RNA, 17 nt, Artificial Sequence
  Synthetic
agaugcuguacagacuu

SEQ ID NO: 9563 - RNA, 17 nt, Artificial Sequence
  Synthetic
  misc_feature (2)..(2): n is a, c, g, or u
  misc_feature (5)..(5): n is a, c, g, or u
gnacnaccgugugucuu

SEQ ID NO: 9564 - RNA, 17 nt, Artificial Sequence
  Synthetic
ccgcgcaggauccaguu

SEQ ID NO: 9565 - RNA, 17 nt, Artificial Sequence
  Synthetic
  misc_feature (3)..(3): n is a, c, g, or u
  misc_feature (11)..(11): n is a, c, g, or u
ucngucccganaauguu

SEQ ID NO: 9566 - RNA, 17 nt, Artificial Sequence
  Synthetic
ggucugugccaaguguu

SEQ ID NO: 9567 - RNA, 17 nt, Artificial Sequence
  Synthetic
ucuggauuugcgguguu

SEQ ID NO: 9568 - RNA, 17 nt, Artificial Sequence
  Synthetic
gugggucuuuuggguuu

SEQ ID NO: 9569 - RNA, 17 nt, Artificial Sequence
  Synthetic
gcuuucccccacuguuu

SEQ ID NO: 9570 - RNA, 17 nt, Artificial Sequence
  Synthetic
cuccuagccgcuuguuu

SEQ ID NO: 9571 - RNA, 17 nt, Artificial Sequence
  Synthetic
uggggacugcgaauuuu

SEQ ID NO: 9572 - RNA, 17 nt, Artificial Sequence
  Synthetic
ggaguuacucucguuuu

SEQ ID NO: 9573 - RNA, 20 nt, Artificial Sequence
  Synthetic
cugagggcuccaccccaaaa

SEQ ID NO: 9574 - RNA, 20 nt, Artificial Sequence
  Synthetic
ugaagaggaagaugauaaaa

SEQ ID NO: 9575 - RNA, 20 nt, Artificial Sequence
  Synthetic
agguauuguuuacacagaaa

SEQ ID NO: 9576 - RNA, 20 nt, Artificial Sequence
  Synthetic
acuuucucgccaacuuacaa

SEQ ID NO: 9577 - RNA, 20 nt, Artificial Sequence
  Synthetic
  misc_feature (5)..(5): n is a, c, g, or u
  misc_feature (8)..(8): n is a, c, g, or u
caugnccnaaagccacccaa

SEQ ID NO: 9578 - RNA, 20 nt, Artificial Sequence
  Synthetic
  misc_feature (8)..(8): n is a, c, g, or u
  misc_feature (17)..(17): n is a, c, g, or u
caguaugnugaggugancaa

SEQ ID NO: 9579 - RNA, 20 nt, Artificial Sequence
  Synthetic
  misc_feature (2)..(2): n is a, c, g, or u
cngaaggaaagaagucagaa

SEQ ID NO: 9580 - RNA, 20 nt, Artificial Sequence
  Synthetic
cacgguccggcagaugagaa

SEQ ID NO: 9581 - RNA, 20 nt, Artificial Sequence
  Synthetic
  misc_feature (9)..(9): n is a, c, g, or u
ggggugaancccagcccgaa

SEQ ID NO: 9582 - RNA, 20 nt, Artificial Sequence
  Synthetic
ucccauaggaauuuuccgaa

SEQ ID NO: 9583 - RNA, 20 nt, Artificial Sequence
  Synthetic
  misc_feature (1)..(1): n is a, c, g, or u
naccaaucgccagucaggaa

SEQ ID NO: 9584 - RNA, 20 nt, Artificial Sequence
  Synthetic
aaagccaaacagugggggaa

SEQ ID NO: 9585 - RNA, 20 nt, Artificial Sequence
  Synthetic
acaucauccauauaacugaa

SEQ ID NO: 9586 - RNA, 20 nt, Artificial Sequence
  Synthetic
uuugcgguguuugcucugaa

SEQ ID NO: 9587 - RNA, 20 nt, Artificial Sequence
  Synthetic
uaaguuggcgagaaagugaa

SEQ ID NO: 9588 - RNA, 20 nt, Artificial Sequence
  Synthetic
cgcauggagaccaccgugaa

SEQ ID NO: 9589 - RNA, 20 nt, Artificial Sequence
  Synthetic
  misc_feature (18)..(18): n is a, c, g, or u
ccagcuuauagaccaccnaa

SEQ ID NO: 9590 - RNA, 20 nt, Artificial Sequence
  Synthetic
  misc_feature (2)..(2): n is a, c, g, or u
  misc_feature (15)..(15): n is a, c, g, or u
  misc_feature (18)..(18): n is a, c, g, or u
gnucaauguccaugnccnaa

SEQ ID NO: 9591 - RNA, 20 nt, Artificial Sequence
  Synthetic
  misc_feature (5)..(5): n is a, c, g, or u
caggnacaguagaagaauaa

SEQ ID NO: 9592 - RNA, 20 nt, Artificial Sequence
  Synthetic
caaugcucaggagacucuaa

SEQ ID NO: 9593 - RNA, 20 nt, Artificial Sequence
  Synthetic
  misc_feature (3)..(3): n is a, c, g, or u
  misc_feature (12)..(12): n is a, c, g, or u
cangcauacaanggcauuaa

SEQ ID NO: 9594 - RNA, 20 nt, Artificial Sequence
  Synthetic
augugguuauccugcuuuaa

SEQ ID NO: 9595 - RNA, 20 nt, Artificial Sequence
  Synthetic
uagaaaacuuccuguuaaca

SEQ ID NO: 9596 - RNA, 20 nt, Artificial Sequence
  Synthetic
gccaccagcagggaaauaca

SEQ ID NO: 9597 - RNA, 20 nt, Artificial Sequence
  Synthetic
  misc_feature (12)..(12): n is a, c, g, or u
gccugcuuaganugaauaca

SEQ ID NO: 9598 - RNA, 20 nt, Artificial Sequence
  Synthetic
uggucugcgcaccagcacca

SEQ ID NO: 9599 - RNA, 20 nt, Artificial Sequence
  Synthetic
  misc_feature (5)..(5): n is a, c, g, or u
  misc_feature (12)..(13): n is a, c, g, or u
caacnaccagcnngggacca

SEQ ID NO: 9600 - RNA, 20 nt, Artificial Sequence
  Synthetic
gcgcugauggcccaugacca

SEQ ID NO: 9601 - RNA, 20 nt, Artificial Sequence
  Synthetic
gguggaaagauucugcccca

SEQ ID NO: 9602 - RNA, 20 nt, Artificial Sequence
  Synthetic
aaacacucauccucaggcca

SEQ ID NO: 9603 - RNA, 20 nt, Artificial Sequence
  Synthetic
uccuacuguucaagccucca

SEQ ID NO: 9604 - RNA, 20 nt, Artificial Sequence
  Synthetic
  misc_feature (9)..(10): n is a, c, g, or u
gaggagccnnaaagguucca

SEQ ID NO: 9605 - RNA, 20 nt, Artificial Sequence
  Synthetic
  misc_feature (3)..(3): n is a, c, g, or u
  misc_feature (12)..(12): n is a, c, g, or u
gcnuguauucanucuaagca

SEQ ID NO: 9606 - RNA, 20 nt, Artificial Sequence
  Synthetic
  misc_feature (2)..(2): n is a, c, g, or u
cnuuuggauaaaaccuagca

SEQ ID NO: 9607 - RNA, 20 nt, Artificial Sequence
  Synthetic
  misc_feature (3)..(3): n is a, c, g, or u
cancauacugcacucaggca

SEQ ID NO: 9608 - RNA, 20 nt, Artificial Sequence
  Synthetic
  misc_feature (7)..(7): n is a, c, g, or u
accucancauacugcacuca

SEQ ID NO: 9609 - RNA, 20 nt, Artificial Sequence
  Synthetic
cuuuugggguggagcccuca

SEQ ID NO: 9610 - RNA, 20 nt, Artificial Sequence
  Synthetic
uugagaaacacucauccuca

SEQ ID NO: 9611 - RNA, 20 nt, Artificial Sequence
  Synthetic
uaauaugggccuaaaguuca

SEQ ID NO: 9612 - RNA, 20 nt, Artificial Sequence
  Synthetic
uguucauguccuacuguuca

SEQ ID NO: 9613 - RNA, 20 nt, Artificial Sequence
  Synthetic
cgguaaaaagggacucaaga

SEQ ID NO: 9614 - RNA, 20 nt, Artificial Sequence
  Synthetic
aacaaggacaccuggccaga

SEQ ID NO: 9615 - RNA, 20 nt, Artificial Sequence
  Synthetic
  misc_feature (14)..(14): n is a, c, g, or u
ugcaagaucccagngugaga

SEQ ID NO: 9616 - RNA, 20 nt, Artificial Sequence
  Synthetic
cuacuguuguuagacgacga

SEQ ID NO: 9617 - RNA, 20 nt, Artificial Sequence
  Synthetic
  misc_feature (4)..(4): n is a, c, g, or u
  misc_feature (6)..(6): n is a, c, g, or u
  misc_feature (8)..(8): n is a, c, g, or u
  misc_feature (15)..(15): n is a, c, g, or u
uaangnunuuuguanuagga

SEQ ID NO: 9618 - RNA, 20 nt, Artificial Sequence
  Synthetic
  misc_feature (2)..(2): n is a, c, g, or u
gnuucaccccaccgcacgga

SEQ ID NO: 9619 - RNA, 20 nt, Artificial Sequence
  Synthetic
  misc_feature (12)..(12): n is a, c, g, or u
gccucagcucunuaucggga

SEQ ID NO: 9620 - RNA, 20 nt, Artificial Sequence
  Synthetic
cacccaaggcacagcuugga

SEQ ID NO: 9621 - RNA, 20 nt, Artificial Sequence
  Synthetic
  misc_feature (18)..(18): n is a, c, g, or u
ccugacuggcgauuggunga

SEQ ID NO: 9622 - RNA, 20 nt, Artificial Sequence
  Synthetic
aagaaccaacaagaagauga

SEQ ID NO: 9623 - RNA, 20 nt, Artificial Sequence
  Synthetic
agccaggagaaacgggcuga

SEQ ID NO: 9624 - RNA, 20 nt, Artificial Sequence
  Synthetic
cugugccaaguguuugcuga

SEQ ID NO: 9625 - RNA, 20 nt, Artificial Sequence
  Synthetic
augucaacgaccgaccuuga

SEQ ID NO: 9626 - RNA, 20 nt, Artificial Sequence
  Synthetic
  misc_feature (5)..(5): n is a, c, g, or u
gacanacuuuccaaucaaua

SEQ ID NO: 9627 - RNA, 20 nt, Artificial Sequence
  Synthetic
  misc_feature (9)..(9): n is a, c, g, or u
ggggcauungguggucuaua

SEQ ID NO: 9628 - RNA, 20 nt, Artificial Sequence
  Synthetic
caucguuuccauggcugcua

SEQ ID NO: 9629 - RNA, 20 nt, Artificial Sequence
  Synthetic
uccucuucauccugcugcua

SEQ ID NO: 9630 - RNA, 20 nt, Artificial Sequence
  Synthetic
  misc_feature (7)..(7): n is a, c, g, or u
  misc_feature (16)..(16): n is a, c, g, or u
guaugcnuguauucanucua

SEQ ID NO: 9631 - RNA, 20 nt, Artificial Sequence
  Synthetic
aacaaacagucuuugaagua

SEQ ID NO: 9632 - RNA, 20 nt, Artificial Sequence
  Synthetic
  misc_feature (14)..(14): n is a, c, g, or u
aagguggagacagnggggua

SEQ ID NO: 9633 - RNA, 20 nt, Artificial Sequence
  Synthetic
  misc_feature (1)..(1): n is a, c, g, or u
  misc_feature (8)..(8): n is a, c, g, or u
nuuuguanuaggaggcugua

SEQ ID NO: 9634 - RNA, 20 nt, Artificial Sequence
  Synthetic
  misc_feature (15)..(15): n is a, c, g, or u
ccugcuuuaaugccnuugua

SEQ ID NO: 9635 - RNA, 20 nt, Artificial Sequence
  Synthetic
  misc_feature (10)..(10): n is a, c, g, or u
  misc_feature (18)..(18): n is a, c, g, or u
ugcuggcaanguuuguanua

SEQ ID NO: 9636 - RNA, 20 nt, Artificial Sequence
  Synthetic
acaugaacaagagaugauua

SEQ ID NO: 9637 - RNA, 20 nt, Artificial Sequence
  Synthetic
  misc_feature (2)..(2): n is a, c, g, or u
  misc_feature (8)..(8): n is a, c, g, or u
  misc_feature (16)..(16): n is a, c, g, or u
angaaganugcaauunauua

SEQ ID NO: 9638 - RNA, 20 nt, Artificial Sequence
  Synthetic
cuggugcgcagaccaauuua

SEQ ID NO: 9639 - RNA, 20 nt, Artificial Sequence
  Synthetic
  misc_feature (4)..(4): n is a, c, g, or u
caanaguugccugaacuuua

SEQ ID NO: 9640 - RNA, 20 nt, Artificial Sequence
  Synthetic
uuaccccguugcccggcaac

SEQ ID NO: 9641 - RNA, 20 nt, Artificial Sequence
  Synthetic
  misc_feature (14)..(14): n is a, c, g, or u
  misc_feature (17)..(17): n is a, c, g, or u
gccccguggucggncgnaac

SEQ ID NO: 9642 - RNA, 20 nt, Artificial Sequence
  Synthetic
ccagccuucagagcaaacac

SEQ ID NO: 9643 - RNA, 20 nt, Artificial Sequence
  Synthetic
  misc_feature (10)..(10): n is a, c, g, or u
cgggcugggnuucaccccac

SEQ ID NO: 9644 - RNA, 20 nt, Artificial Sequence
  Synthetic
caggauccaguuggcagcac

SEQ ID NO: 9645 - RNA, 20 nt, Artificial Sequence
  Synthetic
  misc_feature (3)..(3): n is a, c, g, or u
ccnaaagccacccaaggcac

SEQ ID NO: 9646 - RNA, 20 nt, Artificial Sequence
  Synthetic
gacaagaauccucacaauac

SEQ ID NO: 9647 - RNA, 20 nt, Artificial Sequence
  Synthetic
  misc_feature (6)..(6): n is a, c, g, or u
  misc_feature (15)..(15): n is a, c, g, or u
cauugnucaccucancauac

SEQ ID NO: 9648 - RNA, 20 nt, Artificial Sequence
  Synthetic
  misc_feature (15)..(15): n is a, c, g, or u
guacgagaucuucungauac

SEQ ID NO: 9649 - RNA, 20 nt, Artificial Sequence
  Synthetic
gcagaccaauuuaugccuac

SEQ ID NO: 9650 - RNA, 20 nt, Artificial Sequence
  Synthetic
uucuugggaacaagagcuac

SEQ ID NO: 9651 - RNA, 20 nt, Artificial Sequence
  Synthetic
uccguccgaagguuugguac

SEQ ID NO: 9652 - RNA, 20 nt, Artificial Sequence
  Synthetic
auugggggccaagucuguac

SEQ ID NO: 9653 - RNA, 20 nt, Artificial Sequence
  Synthetic
caucuugagucccuuuuuac

SEQ ID NO: 9654 - RNA, 20 nt, Artificial Sequence
  Synthetic
  misc_feature (3)..(4): n is a, c, g, or u
gcnngggaccaugcagaacc

SEQ ID NO: 9655 - RNA, 20 nt, Artificial Sequence
  Synthetic
guuccugaacuggagccacc

SEQ ID NO: 9656 - RNA, 20 nt, Artificial Sequence
  Synthetic
uggggcagaaucuuuccacc

SEQ ID NO: 9657 - RNA, 20 nt, Artificial Sequence
  Synthetic
cauaaauuggucugcgcacc

SEQ ID NO: 9658 - RNA, 20 nt, Artificial Sequence
  Synthetic
  misc_feature (3)..(3): n is a, c, g, or u
ganaauguuugcuccagacc

SEQ ID NO: 9659 - RNA, 20 nt, Artificial Sequence
  Synthetic
aguucuucuucuaggggacc

SEQ ID NO: 9660 - RNA, 20 nt, Artificial Sequence
  Synthetic
  misc_feature (11)..(11): n is a, c, g, or u
  misc_feature (17)..(17): n is a, c, g, or u
uuccaggaucnucaacnacc

SEQ ID NO: 9661 - RNA, 20 nt, Artificial Sequence
  Synthetic
ucucucuuauauaauauacc

SEQ ID NO: 9662 - RNA, 20 nt, Artificial Sequence
  Synthetic
cuugucaacaagaaaaaccc

SEQ ID NO: 9663 - RNA, 20 nt, Artificial Sequence
  Synthetic
  misc_feature (13)..(13): n is a, c, g, or u
uagagucauuagnucccccc

SEQ ID NO: 9664 - RNA, 20 nt, Artificial Sequence
  Synthetic
auggcccaugaccaagcccc

SEQ ID NO: 9665 - RNA, 20 nt, Artificial Sequence
  Synthetic
gaaccuuuaccccguugccc

SEQ ID NO: 9666 - RNA, 20 nt, Artificial Sequence
  Synthetic
  misc_feature (17)..(17): n is a, c, g, or u
cgugcgguggggugaanccc

SEQ ID NO: 9667 - RNA, 20 nt, Artificial Sequence
  Synthetic
gugagaggccuguauuuccc

SEQ ID NO: 9668 - RNA, 20 nt, Artificial Sequence
  Synthetic
uuggcgagaaagugaaagcc

SEQ ID NO: 9669 - RNA, 20 nt, Artificial Sequence
  Synthetic
  misc_feature (4)..(4): n is a, c, g, or u
  misc_feature (12)..(12): n is a, c, g, or u
aganugcaauunauuaugcc

SEQ ID NO: 9670 - RNA, 20 nt, Artificial Sequence
  Synthetic
  misc_feature (7)..(7): n is a, c, g, or u
  misc_feature (15)..(15): n is a, c, g, or u
ggcauanuacaaacnuugcc

SEQ ID NO: 9671 - RNA, 20 nt, Artificial Sequence
  Synthetic
uaucaucuuccucuucaucc

SEQ ID NO: 9672 - RNA, 20 nt, Artificial Sequence
  Synthetic
cccgaccaccaguuggaucc

SEQ ID NO: 9673 - RNA, 20 nt, Artificial Sequence
  Synthetic
uuuacacaaugugguuaucc

SEQ ID NO: 9674 - RNA, 20 nt, Artificial Sequence
  Synthetic
uugccagcaaauccgccucc

SEQ ID NO: 9675 - RNA, 20 nt, Artificial Sequence
  Synthetic
guguggauucgcacuccucc

SEQ ID NO: 9676 - RNA, 20 nt, Artificial Sequence
  Synthetic
  misc_feature (3)..(3): n is a, c, g, or u
aancccagcccgaaugcucc

SEQ ID NO: 9677 - RNA, 20 nt, Artificial Sequence
  Synthetic
  misc_feature (14)..(14): n is a, c, g, or u
auaacucuguuguncucucc

SEQ ID NO: 9678 - RNA, 20 nt, Artificial Sequence
  Synthetic
aagcgaagugcacacggucc

SEQ ID NO: 9679 - RNA, 20 nt, Artificial Sequence
  Synthetic
cugcugcgagcaaaacaagc

SEQ ID NO: 9680 - RNA, 20 nt, Artificial Sequence
  Synthetic
acaagaagaugaggcauagc

SEQ ID NO: 9681 - RNA, 20 nt, Artificial Sequence
  Synthetic
aguuggcagcacagccuagc

SEQ ID NO: 9682 - RNA, 20 nt, Artificial Sequence
  Synthetic
cauacugcggaacuccuagc

SEQ ID NO: 9683 - RNA, 20 nt, Artificial Sequence
  Synthetic
agaggaagaugauaaaacgc

SEQ ID NO: 9684 - RNA, 20 nt, Artificial Sequence
  Synthetic
uagccgcuuguuuugcucgc

SEQ ID NO: 9685 - RNA, 20 nt, Artificial Sequence
  Synthetic
caaucgccagucaggaaggc

SEQ ID NO: 9686 - RNA, 20 nt, Artificial Sequence
  Synthetic
  misc_feature (11)..(11): n is a, c, g, or u
guggagacagngggguaggc

SEQ ID NO: 9687 - RNA, 20 nt, Artificial Sequence
  Synthetic
ccacauuguguaaaaggggc

SEQ ID NO: 9688 - RNA, 20 nt, Artificial Sequence
  Synthetic
auauacaucguuuccauggc

SEQ ID NO: 9689 - RNA, 20 nt, Artificial Sequence
  Synthetic
ccgcgcaggauccaguuggc

SEQ ID NO: 9690 - RNA, 20 nt, Artificial Sequence
  Synthetic
caucuuccucuucauccugc

SEQ ID NO: 9691 - RNA, 20 nt, Artificial Sequence
  Synthetic
ccauggcugcuaggcugugc

SEQ ID NO: 9692 - RNA, 20 nt, Artificial Sequence
  Synthetic
gugggucuuuuggguuuugc

SEQ ID NO: 9693 - RNA, 20 nt, Artificial Sequence
  Synthetic
  misc_feature (7)..(7): n is a, c, g, or u
acaaacnuugccagcaaauc

SEQ ID NO: 9694 - RNA, 20 nt, Artificial Sequence
  Synthetic
cccgucugugccuucucauc

SEQ ID NO: 9695 - RNA, 20 nt, Artificial Sequence
  Synthetic
ggaguuccgcaguauggauc

SEQ ID NO: 9696 - RNA, 20 nt, Artificial Sequence
  Synthetic
cacaaccuuccaccaaacuc

SEQ ID NO: 9697 - RNA, 20 nt, Artificial Sequence
  Synthetic
ugugcacuucgcuucaccuc

SEQ ID NO: 9698 - RNA, 20 nt, Artificial Sequence
  Synthetic
ccaugcaacuuuuucaccuc

SEQ ID NO: 9699 - RNA, 20 nt, Artificial Sequence
  Synthetic
  misc_feature (9)..(9): n is a, c, g, or u
gaucuucungauaccgccuc

SEQ ID NO: 9700 - RNA, 20 nt, Artificial Sequence
  Synthetic
uuccuaugggagugggccuc

SEQ ID NO: 9701 - RNA, 20 nt, Artificial Sequence
  Synthetic
  misc_feature (11)..(12): n is a, c, g, or u
uggaaccuuunnggcuccuc

SEQ ID NO: 9702 - RNA, 20 nt, Artificial Sequence
  Synthetic
  misc_feature (3)..(3): n is a, c, g, or u
cunucguccccuucuccguc

SEQ ID NO: 9703 - RNA, 20 nt, Artificial Sequence
  Synthetic
cagccaguggggguugcguc

SEQ ID NO: 9704 - RNA, 20 nt, Artificial Sequence
  Synthetic
gauugcugguggaaagauuc

SEQ ID NO: 9705 - RNA, 20 nt, Artificial Sequence
  Synthetic
aaacaagcggcuaggaguuc

SEQ ID NO: 9706 - RNA, 20 nt, Artificial Sequence
  Synthetic
  misc_feature (2)..(2): n is a, c, g, or u
  misc_feature (6)..(6): n is a, c, g, or u
ancagnagucgugcagguuc

SEQ ID NO: 9707 - RNA, 20 nt, Artificial Sequence
  Synthetic
accauauucuugggaacaag

SEQ ID NO: 9708 - RNA, 20 nt, Artificial Sequence
  Synthetic
cgugcagaggugaagcgaag

SEQ ID NO: 9709 - RNA, 20 nt, Artificial Sequence
  Synthetic
gcuuggucaugggccaucag

SEQ ID NO: 9710 - RNA, 20 nt, Artificial Sequence
  Synthetic
gguggagcccucaggcucag

SEQ ID NO: 9711 - RNA, 20 nt, Artificial Sequence
  Synthetic
gggucguccgcgggauucag

SEQ ID NO: 9712 - RNA, 20 nt, Artificial Sequence
  Synthetic
caguuggauccagccuucag

SEQ ID NO: 9713 - RNA, 20 nt, Artificial Sequence
  Synthetic
gugauguucuccauguucag

SEQ ID NO: 9714 - RNA, 20 nt, Artificial Sequence
  Synthetic
  misc_feature (3)..(3): n is a, c, g, or u
uanuaugcccugagccugag

SEQ ID NO: 9715 - RNA, 20 nt, Artificial Sequence
  Synthetic
  misc_feature (3)..(3): n is a, c, g, or u
  misc_feature (6)..(6): n is a, c, g, or u
canagnauugcuugccugag

SEQ ID NO: 9716 - RNA, 20 nt, Artificial Sequence
  Synthetic
  misc_feature (9)..(9): n is a, c, g, or u
  misc_feature (18)..(18): n is a, c, g, or u
ucuaaggcnucccgauanag

SEQ ID NO: 9717 - RNA, 20 nt, Artificial Sequence
  Synthetic
cuccuggcucaguuuacuag

SEQ ID NO: 9718 - RNA, 20 nt, Artificial Sequence
  Synthetic
auuuguucagugguucguag

SEQ ID NO: 9719 - RNA, 20 nt, Artificial Sequence
  Synthetic
  misc_feature (17)..(17): n is a, c, g, or u
aagagagaaacaacacnuag

SEQ ID NO: 9720 - RNA, 20 nt, Artificial Sequence
  Synthetic
cuggaauuagaggacaaacg

SEQ ID NO: 9721 - RNA, 20 nt, Artificial Sequence
  Synthetic
aaacugagccaggagaaacg

SEQ ID NO: 9722 - RNA, 20 nt, Artificial Sequence
  Synthetic
acgguggucuccaugcgacg

SEQ ID NO: 9723 - RNA, 20 nt, Artificial Sequence
  Synthetic
cguaaacaaaggacgucccg

SEQ ID NO: 9724 - RNA, 20 nt, Artificial Sequence
  Synthetic
cacagaccuggccguugccg

SEQ ID NO: 9725 - RNA, 20 nt, Artificial Sequence
  Synthetic
uuugcuccagaccugcugcg

SEQ ID NO: 9726 - RNA, 20 nt, Artificial Sequence
  Synthetic
  misc_feature (11)..(11): n is a, c, g, or u
  misc_feature (15)..(15): n is a, c, g, or u
gguuccuugancagnagucg

SEQ ID NO: 9727 - RNA, 20 nt, Artificial Sequence
  Synthetic
gguaggagcuggagcauucg

SEQ ID NO: 9728 - RNA, 20 nt, Artificial Sequence
  Synthetic
uaaccacauuguguaaaagg

SEQ ID NO: 9729 - RNA, 20 nt, Artificial Sequence
  Synthetic
ugaugggaugggaauacagg

SEQ ID NO: 9730 - RNA, 20 nt, Artificial Sequence
  Synthetic
gcaguauggaucggcagagg

SEQ ID NO: 9731 - RNA, 20 nt, Artificial Sequence
  Synthetic
uggugacccacaaaaugagg

SEQ ID NO: 9732 - RNA, 20 nt, Artificial Sequence
  Synthetic
ggaaguguugauaagauagg

SEQ ID NO: 9733 - RNA, 20 nt, Artificial Sequence
  Synthetic
ccagacgccaacaagguagg

SEQ ID NO: 9734 - RNA, 20 nt, Artificial Sequence
  Synthetic
cuuuguuuacgucccgucgg

SEQ ID NO: 9735 - RNA, 20 nt, Artificial Sequence
  Synthetic
  misc_feature (5)..(5): n is a, c, g, or u
  misc_feature (8)..(8): n is a, c, g, or u
cguuncgnccgaccacgggg

SEQ ID NO: 9736 - RNA, 20 nt, Artificial Sequence
  Synthetic
auggaugaugugguauuggg

SEQ ID NO: 9737 - RNA, 20 nt, Artificial Sequence
  Synthetic
gaacaagagcuacagcaugg

SEQ ID NO: 9738 - RNA, 20 nt, Artificial Sequence
  Synthetic
gaggugaaaaaguugcaugg

SEQ ID NO: 9739 - RNA, 20 nt, Artificial Sequence
  Synthetic
guuuacuguuccugaacugg

SEQ ID NO: 9740 - RNA, 20 nt, Artificial Sequence
  Synthetic
gccaacaagguaggagcugg

SEQ ID NO: 9741 - RNA, 20 nt, Artificial Sequence
  Synthetic
acgcaacccccacuggcugg

SEQ ID NO: 9742 - RNA, 20 nt, Artificial Sequence
  Synthetic
uuugcucgcagcaggucugg

SEQ ID NO: 9743 - RNA, 20 nt, Artificial Sequence
  Synthetic
acggaggccuuuuggggugg

SEQ ID NO: 9744 - RNA, 20 nt, Artificial Sequence
  Synthetic
  misc_feature (3)..(3): n is a, c, g, or u
ganccuuauaaagaauuugg

SEQ ID NO: 9745 - RNA, 20 nt, Artificial Sequence
  Synthetic
  misc_feature (10)..(10): n is a, c, g, or u
  misc_feature (19)..(19): n is a, c, g, or u
uaaggugggnaacuuuacng

SEQ ID NO: 9746 - RNA, 20 nt, Artificial Sequence
  Synthetic
  misc_feature (3)..(4): n is a, c, g, or u
ccnnaaagguuccacgcaug

SEQ ID NO: 9747 - RNA, 20 nt, Artificial Sequence
  Synthetic
cuggcuggggcuuggucaug

SEQ ID NO: 9748 - RNA, 20 nt, Artificial Sequence
  Synthetic
  misc_feature (8)..(8): n is a, c, g, or u
guuaugunaacacuaauaug

SEQ ID NO: 9749 - RNA, 20 nt, Artificial Sequence
  Synthetic
caaauggcacuaguaaacug

SEQ ID NO: 9750 - RNA, 20 nt, Artificial Sequence
  Synthetic
cucgaggauuggggacccug

SEQ ID NO: 9751 - RNA, 20 nt, Artificial Sequence
  Synthetic
  misc_feature (3)..(3): n is a, c, g, or u
  misc_feature (11)..(11): n is a, c, g, or u
aanguuuguanuaugcccug

SEQ ID NO: 9752 - RNA, 20 nt, Artificial Sequence
  Synthetic
  misc_feature (4)..(4): n is a, c, g, or u
ggangccuuagagucuccug

SEQ ID NO: 9753 - RNA, 20 nt, Artificial Sequence
  Synthetic
cuguucaagccuccaagcug

SEQ ID NO: 9754 - RNA, 20 nt, Artificial Sequence
  Synthetic
uuuccauggcugcuaggcug

SEQ ID NO: 9755 - RNA, 20 nt, Artificial Sequence
  Synthetic
uuacgcggacuccccgucug

SEQ ID NO: 9756 - RNA, 20 nt, Artificial Sequence
  Synthetic
cccggcaacggccaggucug

SEQ ID NO: 9757 - RNA, 20 nt, Artificial Sequence
  Synthetic
uguaggcauaaauuggucug

SEQ ID NO: 9758 - RNA, 20 nt, Artificial Sequence
  Synthetic
ggaaaauuccuaugggagug

SEQ ID NO: 9759 - RNA, 20 nt, Artificial Sequence
  Synthetic
uucucaucugccggaccgug

SEQ ID NO: 9760 - RNA, 20 nt, Artificial Sequence
  Synthetic
aguccgcguaaagagaggug

SEQ ID NO: 9761 - RNA, 20 nt, Artificial Sequence
  Synthetic
aaaguugcauggugcuggug

SEQ ID NO: 9762 - RNA, 20 nt, Artificial Sequence
  Synthetic
  misc_feature (18)..(18): n is a, c, g, or u
auucccaucccaucaucnug

SEQ ID NO: 9763 - RNA, 20 nt, Artificial Sequence
  Synthetic
uccucuuauguaagaccuug

SEQ ID NO: 9764 - RNA, 20 nt, Artificial Sequence
  Synthetic
  misc_feature (2)..(2): n is a, c, g, or u
  misc_feature (11)..(11): n is a, c, g, or u
  misc_feature (20)..(20): n is a, c, g, or u
anugaauacangcauacaan

SEQ ID NO: 9765 - RNA, 20 nt, Artificial Sequence
  Synthetic
  misc_feature (4)..(4): n is a, c, g, or u
  misc_feature (14)..(14): n is a, c, g, or u
  misc_feature (20)..(20): n is a, c, g, or u
agunaaugagaaangaagan

SEQ ID NO: 9766 - RNA, 20 nt, Artificial Sequence
  Synthetic
  misc_feature (20)..(20): n is a, c, g, or u
gcagguucugcauggucccn

SEQ ID NO: 9767 - RNA, 20 nt, Artificial Sequence
  Synthetic
  misc_feature (20)..(20): n is a, c, g, or u
aacgagaguaacuccacagn

SEQ ID NO: 9768 - RNA, 20 nt, Artificial Sequence
  Synthetic
  misc_feature (20)..(20): n is a, c, g, or u
cggacgacccuucucggggn

SEQ ID NO: 9769 - RNA, 20 nt, Artificial Sequence
  Synthetic
  misc_feature (19)..(20): n is a, c, g, or u
cgcaugcguggaaccuuunn

SEQ ID NO: 9770 - RNA, 20 nt, Artificial Sequence
  Synthetic
  misc_feature (17)..(17): n is a, c, g, or u
  misc_feature (20)..(20): n is a, c, g, or u
cacucaggcaagcaauncun

SEQ ID NO: 9771 - RNA, 20 nt, Artificial Sequence
  Synthetic
cuacgaaccacugaacaaau

SEQ ID NO: 9772 - RNA, 20 nt, Artificial Sequence
  Synthetic
ccaaaccuucggacggaaau

SEQ ID NO: 9773 - RNA, 20 nt, Artificial Sequence
  Synthetic
  misc_feature (11)..(11): n is a, c, g, or u
  misc_feature (14)..(14): n is a, c, g, or u
cgccuccugcnucnaccaau

SEQ ID NO: 9774 - RNA, 20 nt, Artificial Sequence
  Synthetic
ucgcagacgaaggucucaau

SEQ ID NO: 9775 - RNA, 20 nt, Artificial Sequence
  Synthetic
  misc_feature (17)..(17): n is a, c, g, or u
accuagcaggcauaaunaau

SEQ ID NO: 9776 - RNA, 20 nt, Artificial Sequence
  Synthetic
caaauauacaucguuuccau

SEQ ID NO: 9777 - RNA, 20 nt, Artificial Sequence
  Synthetic
ccaacaagaagaugaggcau

SEQ ID NO: 9778 - RNA, 20 nt, Artificial Sequence
  Synthetic
gggaaagaaucccagaggau

SEQ ID NO: 9779 - RNA, 20 nt, Artificial Sequence
  Synthetic
gguuccacgcaugcgcugau

SEQ ID NO: 9780 - RNA, 20 nt, Artificial Sequence
  Synthetic
  misc_feature (3)..(3): n is a, c, g, or u
  misc_feature (15)..(15): n is a, c, g, or u
  misc_feature (18)..(18): n is a, c, g, or u
agnuccccccagcanagnau

SEQ ID NO: 9781 - RNA, 20 nt, Artificial Sequence
  Synthetic
cuccaacuuguccugguuau

SEQ ID NO: 9782 - RNA, 20 nt, Artificial Sequence
  Synthetic
uugcugacgcaacccccacu

SEQ ID NO: 9783 - RNA, 20 nt, Artificial Sequence
  Synthetic
  misc_feature (6)..(6): n is a, c, g, or u
guaacnuuuggauaaaaccu

SEQ ID NO: 9784 - RNA, 20 nt, Artificial Sequence
  Synthetic
caaucccaacaaggacaccu

SEQ ID NO: 9785 - RNA, 20 nt, Artificial Sequence
  Synthetic
caaacacuuggcacagaccu

SEQ ID NO: 9786 - RNA, 20 nt, Artificial Sequence
  Synthetic
cccuagaagaagaacucccu

SEQ ID NO: 9787 - RNA, 20 nt, Artificial Sequence
  Synthetic
uccaguuggcagcacagccu

SEQ ID NO: 9788 - RNA, 20 nt, Artificial Sequence
  Synthetic
gaagaagaacucccucgccu

SEQ ID NO: 9789 - RNA, 20 nt, Artificial Sequence
  Synthetic
auccauacugcggaacuccu

SEQ ID NO: 9790 - RNA, 20 nt, Artificial Sequence
  Synthetic
ggccucagcccguuucuccu

SEQ ID NO: 9791 - RNA, 20 nt, Artificial Sequence
  Synthetic
  misc_feature (11)..(11): n is a, c, g, or u
  misc_feature (14)..(14): n is a, c, g, or u
ccccccagcanagnauugcu

SEQ ID NO: 9792 - RNA, 20 nt, Artificial Sequence
  Synthetic
  misc_feature (2)..(2): n is a, c, g, or u
angcaggaggcggauuugcu

SEQ ID NO: 9793 - RNA, 20 nt, Artificial Sequence
  Synthetic
uccuagccgcuuguuuugcu

SEQ ID NO: 9794 - RNA, 20 nt, Artificial Sequence
  Synthetic
  misc_feature (11)..(11): n is a, c, g, or u
ggccucucacncugggaucu

SEQ ID NO: 9795 - RNA, 20 nt, Artificial Sequence
  Synthetic
  misc_feature (9)..(9): n is a, c, g, or u
uggggggancuaaugacucu

SEQ ID NO: 9796 - RNA, 20 nt, Artificial Sequence
  Synthetic
cuccuaccuuguuggcgucu

SEQ ID NO: 9797 - RNA, 20 nt, Artificial Sequence
  Synthetic
  misc_feature (16)..(17): n is a, c, g, or u
cgugaacgcccaccannucu

SEQ ID NO: 9798 - RNA, 20 nt, Artificial Sequence
  Synthetic
uaagcaggcuuucacuuucu

SEQ ID NO: 9799 - RNA, 20 nt, Artificial Sequence
  Synthetic
uuaggcagaggugaaaaagu

SEQ ID NO: 9800 - RNA, 20 nt, Artificial Sequence
  Synthetic
  misc_feature (17)..(17): n is a, c, g, or u
aaaugugaaaccacaanagu

SEQ ID NO: 9801 - RNA, 20 nt, Artificial Sequence
  Synthetic
uucgcuucaccucugcacgu

SEQ ID NO: 9802 - RNA, 20 nt, Artificial Sequence
  Synthetic
uaccugaaccuuuaccccgu

SEQ ID NO: 9803 - RNA, 20 nt, Artificial Sequence
  Synthetic
cuuggcacagaccuggccgu

SEQ ID NO: 9804 - RNA, 20 nt, Artificial Sequence
  Synthetic
gaaggucucaaucgccgcgu

SEQ ID NO: 9805 - RNA, 20 nt, Artificial Sequence
  Synthetic
  misc_feature (7)..(7): n is a, c, g, or u
aaauuancacccacccaggu

SEQ ID NO: 9806 - RNA, 20 nt, Artificial Sequence
  Synthetic
cuccaagcugugccuugggu

SEQ ID NO: 9807 - RNA, 20 nt, Artificial Sequence
  Synthetic
gccuguauuucccugcuggu

SEQ ID NO: 9808 - RNA, 20 nt, Artificial Sequence
  Synthetic
ucuggacuaucaagguaugu

SEQ ID NO: 9809 - RNA, 20 nt, Artificial Sequence
  Synthetic
ccucuauguaucccuccugu

SEQ ID NO: 9810 - RNA, 20 nt, Artificial Sequence
  Synthetic
aagauucugccccaugcugu

SEQ ID NO: 9811 - RNA, 20 nt, Artificial Sequence
  Synthetic
  misc_feature (2)..(2): n is a, c, g, or u
  misc_feature (6)..(6): n is a, c, g, or u
  misc_feature (14)..(14): n is a, c, g, or u
unugunugaugugnucuugu

SEQ ID NO: 9812 - RNA, 20 nt, Artificial Sequence
  Synthetic
  misc_feature (11)..(11): n is a, c, g, or u
  misc_feature (19)..(19): n is a, c, g, or u
ucagggcauanuacaaacnu

SEQ ID NO: 9813 - RNA, 20 nt, Artificial Sequence
  Synthetic
  misc_feature (19)..(19): n is a, c, g, or u
cauuggauguuaugggucnu

SEQ ID NO: 9814 - RNA, 20 nt, Artificial Sequence
  Synthetic
cgugugucuuggccaaaauu

SEQ ID NO: 9815 - RNA, 20 nt, Artificial Sequence
  Synthetic
  misc_feature (3)..(3): n is a, c, g, or u
  misc_feature (6)..(6): n is a, c, g, or u
gungangcaggaggcggauu

SEQ ID NO: 9816 - RNA, 20 nt, Artificial Sequence
  Synthetic
ugucuuucggaguguggauu

SEQ ID NO: 9817 - RNA, 20 nt, Artificial Sequence
  Synthetic
gguugcgucagcaaacacuu

SEQ ID NO: 9818 - RNA, 20 nt, Artificial Sequence
  Synthetic
cugccggaccgugugcacuu

SEQ ID NO: 9819 - RNA, 20 nt, Artificial Sequence
  Synthetic
ucaagaugcuguacagacuu

SEQ ID NO: 9820 - RNA, 20 nt, Artificial Sequence
  Synthetic
  misc_feature (5)..(5): n is a, c, g, or u
  misc_feature (8)..(8): n is a, c, g, or u
ggggnacnaccgugugucuu

SEQ ID NO: 9821 - RNA, 20 nt, Artificial Sequence
  Synthetic
gucccgcgcaggauccaguu

SEQ ID NO: 9822 - RNA, 20 nt, Artificial Sequence
  Synthetic
  misc_feature (6)..(6): n is a, c, g, or u
  misc_feature (14)..(14): n is a, c, g, or u
uuaucngucccganaauguu

SEQ ID NO: 9823 - RNA, 20 nt, Artificial Sequence
  Synthetic
ccaggucugugccaaguguu

SEQ ID NO: 9824 - RNA, 20 nt, Artificial Sequence
  Synthetic
caaucuggauuugcgguguu

SEQ ID NO: 9825 - RNA, 20 nt, Artificial Sequence
  Synthetic
auugugggucuuuuggguuu

SEQ ID NO: 9826 - RNA, 20 nt, Artificial Sequence
  Synthetic
agggcuuucccccacuguuu

SEQ ID NO: 9827 - RNA, 20 nt, Artificial Sequence
  Synthetic
gaacuccuagccgcuuguuu

SEQ ID NO: 9828 - RNA, 20 nt, Artificial Sequence
  Synthetic
gguuggggacugcgaauuuu

SEQ ID NO: 9829 - RNA, 20 nt, Artificial Sequence
  Synthetic
uguggaguuacucucguuuu

SEQ ID NO: 9830 - RNA, 17 nt, Artificial Sequence
  Synthetic
  misc_feature (3)..(3): n is a, c, g, or u
gunuccaugcgacgugc

SEQ ID NO: 9831 - RNA, 17 nt, Artificial Sequence
  Synthetic
ggagguguauuuccgag

SEQ ID NO: 9832 - RNA, 17 nt, Artificial Sequence
  Synthetic
ggucguugacauugcug

SEQ ID NO: 9833 - RNA, 20 nt, Artificial Sequence
  Synthetic
gaauauggugacccacaaaa

SEQ ID NO: 9834 - RNA, 20 nt, Artificial Sequence
  Synthetic
gaaaaaccccgccuguaaca

SEQ ID NO: 9835 - RNA, 20 nt, Artificial Sequence
  Synthetic
ggcacuaguaaacugagcca

SEQ ID NO: 9836 - RNA, 20 nt, Artificial Sequence
  Synthetic
  misc_feature (8)..(8): n is a, c, g, or u
gguagagncccaaacggccc

SEQ ID NO: 9837 - RNA, 20 nt, Artificial Sequence
  Synthetic
ggugaggugaacaauguucc

SEQ ID NO: 9838 - RNA, 20 nt, Artificial Sequence
  Synthetic
guuccgcaguauggaucggc

SEQ ID NO: 9839 - RNA, 20 nt, Artificial Sequence
  Synthetic
  misc_feature (6)..(6): n is a, c, g, or u
guggunuccaugcgacgugc

SEQ ID NO: 9840 - RNA, 20 nt, Artificial Sequence
  Synthetic
gacggggagaccgcguaaag

SEQ ID NO: 9841 - RNA, 20 nt, Artificial Sequence
  Synthetic
ggaaaggagguguauuuccg

SEQ ID NO: 9842 - RNA, 20 nt, Artificial Sequence
  Synthetic
gcuuucgcaagauuccuaug

SEQ ID NO: 9843 - RNA, 20 nt, Artificial Sequence
  Synthetic
gucggucguugacauugcug

SEQ ID NO: 9844 - RNA, 20 nt, Artificial Sequence
  Synthetic
gcgauugagaccuucgucug

SEQ ID NO: 9845 - RNA, 20 nt, Artificial Sequence
  Synthetic
gucuagacucugugguauug

SEQ ID NO: 9846 - RNA, 20 nt, Artificial Sequence
  Synthetic
gggugcucccccuagaaaau

SEQ ID NO: 9847 - RNA, 20 nt, Artificial Sequence
  Synthetic
  misc_feature (18)..(18): n is a, c, g, or u
ggggacccugcaccgaanau

SEQ ID NO: 9848 - RNA, 20 nt, Artificial Sequence
  Synthetic
ggguuuacuguuccggaacu

SEQ ID NO: 9849 - RNA, 20 nt, Artificial Sequence
  Synthetic
gcaaugucaacgaccgaccu

SEQ ID NO: 9850 - RNA, 20 nt, Artificial Sequence
  Synthetic
guuuugcucgcagccggucu

SEQ ID NO: 9851 - RNA, 20 nt, Artificial Sequence
  Synthetic
gaugacugucucuuagaggu

SEQ ID NO: 9852 - RNA, 20 nt, Artificial Sequence
  Synthetic
gcucuguaucgggaggccuu

SEQ ID NO: 9853 - RNA, 17 nt, Artificial Sequence
  Synthetic
acggggagaccgcguaa

SEQ ID NO: 9854 - RNA, 17 nt, Artificial Sequence
  Synthetic
aaaccccgccuguaaca

SEQ ID NO: 9855 - RNA, 17 nt, Artificial Sequence
  Synthetic
caguauggaucggcaga

SEQ ID NO: 9856 - RNA, 17 nt, Artificial Sequence
  Synthetic
cuacuguuguuagacga

SEQ ID NO: 9857 - RNA, 17 nt, Artificial Sequence
  Synthetic
uuccgagagaggacaac

SEQ ID NO: 9858 - RNA, 17 nt, Artificial Sequence
  Synthetic
cuaaggccucccgauac

SEQ ID NO: 9859 - RNA, 17 nt, Artificial Sequence
  Synthetic
ccgcaguauggaucggc

SEQ ID NO: 9860 - RNA, 17 nt, Artificial Sequence
  Synthetic
uucgucugcgaggcgag

SEQ ID NO: 9861 - RNA, 17 nt, Artificial Sequence
  Synthetic
aaggagguguauuuccg

SEQ ID NO: 9862 - RNA, 17 nt, Artificial Sequence
  Synthetic
aagauugacgauauggg

SEQ ID NO: 9863 - RNA, 17 nt, Artificial Sequence
  Synthetic
auugagaccuucgucug

SEQ ID NO: 9864 - RNA, 17 nt, Artificial Sequence
  Synthetic
auugagauucccgagau

SEQ ID NO: 9865 - RNA, 17 nt, Artificial Sequence
  Synthetic
uucugcgacgcggcgau

SEQ ID NO: 9866 - RNA, 17 nt, Artificial Sequence
  Synthetic
augucaacgaccgaccu

SEQ ID NO: 9867 - RNA, 17 nt, Artificial Sequence
  Synthetic
uugcucgcagccggucu

SEQ ID NO: 9868 - RNA, 17 nt, Artificial Sequence
  Synthetic
cuguaucgggaggccuu

SEQ ID NO: 9869 - RNA, 20 nt, Artificial Sequence
  Synthetic
cagacggggagaccgcguaa

SEQ ID NO: 9870 - RNA, 20 nt, Artificial Sequence
  Synthetic
  misc_feature (12)..(12): n is a, c, g, or u
agugcacacggnccggcaga

SEQ ID NO: 9871 - RNA, 20 nt, Artificial Sequence
  Synthetic
ccgcaguauggaucggcaga

SEQ ID NO: 9872 - RNA, 20 nt, Artificial Sequence
  Synthetic
aaacuacuguuguuagacga

SEQ ID NO: 9873 - RNA, 20 nt, Artificial Sequence
  Synthetic
caguaaaguuucccaccuua

SEQ ID NO: 9874 - RNA, 20 nt, Artificial Sequence
  Synthetic
uauuuccgagagaggacaac

SEQ ID NO: 9875 - RNA, 20 nt, Artificial Sequence
  Synthetic
acucuaaggccucccgauac

SEQ ID NO: 9876 - RNA, 20 nt, Artificial Sequence
  Synthetic
uugucaauaugcccugagcc

SEQ ID NO: 9877 - RNA, 20 nt, Artificial Sequence
  Synthetic
aaggccucccgauacagagc

SEQ ID NO: 9878 - RNA, 20 nt, Artificial Sequence
  Synthetic
aaaggagguguauuuccgag

SEQ ID NO: 9879 - RNA, 20 nt, Artificial Sequence
  Synthetic
accuucgucugcgaggcgag

SEQ ID NO: 9880 - RNA, 20 nt, Artificial Sequence
  Synthetic
  misc_feature (9)..(9): n is a, c, g, or u
accgccucngcucuguaucg

SEQ ID NO: 9881 - RNA, 20 nt, Artificial Sequence
  Synthetic
ugagaccuucgucugcgagg

SEQ ID NO: 9882 - RNA, 20 nt, Artificial Sequence
  Synthetic
caagcuauucuguguugggg

SEQ ID NO: 9883 - RNA, 20 nt, Artificial Sequence
  Synthetic
  misc_feature (8)..(8): n is a, c, g, or u
cuugccunagugcuguaugg

SEQ ID NO: 9884 - RNA, 20 nt, Artificial Sequence
  Synthetic
ugacugucucuuagaggugg

SEQ ID NO: 9885 - RNA, 20 nt, Artificial Sequence
  Synthetic
agaaaggccuuguaaguugg

SEQ ID NO: 9886 - RNA, 20 nt, Artificial Sequence
  Synthetic
aacauugagauucccgagau

SEQ ID NO: 9887 - RNA, 20 nt, Artificial Sequence
  Synthetic
aucuucugcgacgcggcgau

SEQ ID NO: 9888 - RNA, 20 nt, Artificial Sequence
  Synthetic
agggaaacauagagguuccu

SEQ ID NO: 9889 - RNA, 20 nt, Artificial Sequence
  Synthetic
  misc_feature (1)..(1): n is a, c, g, or u
ncccauaucgucaaucuucu

SEQ ID NO: 9890 - RNA, 20 nt, Artificial Sequence
  Synthetic
uaguugauguuccuggaagu

SEQ ID NO: 9891 - RNA, 17 nt, Artificial Sequence
  Synthetic
gguuuuguacagcaaca

SEQ ID NO: 9892 - RNA, 17 nt, Artificial Sequence
  Synthetic
  misc_feature (7)..(7): n is a, c, g, or u
ggacaanuuggaggaca

SEQ ID NO: 9893 - RNA, 17 nt, Artificial Sequence
  Synthetic
gccgauugguggaggca

SEQ ID NO: 9894 - RNA, 17 nt, Artificial Sequence
  Synthetic
  misc_feature (9)..(9): n is a, c, g, or u
gcacacggnccggcaga

SEQ ID NO: 9895 - RNA, 17 nt, Artificial Sequence
  Synthetic
gauugguggaggcagga

SEQ ID NO: 9896 - RNA, 17 nt, Artificial Sequence
  Synthetic
gcauagcagcaggauga

SEQ ID NO: 9897 - RNA, 17 nt, Artificial Sequence
  Synthetic
  misc_feature (14)..(14): n is a, c, g, or u
  misc_feature (16)..(16): n is a, c, g, or u
guggucuguaagcngna

SEQ ID NO: 9898 - RNA, 17 nt, Artificial Sequence
  Synthetic
  misc_feature (14)..(14): n is a, c, g, or u
gcccaaggucuuanaua

SEQ ID NO: 9899 - RNA, 17 nt, Artificial Sequence
  Synthetic
  misc_feature (7)..(7): n is a, c, g, or u
  misc_feature (11)..(11): n is a, c, g, or u
ggcuggnauunuauaua

SEQ ID NO: 9900 - RNA, 17 nt, Artificial Sequence
  Synthetic
gaucgggaaagaauccc

SEQ ID NO: 9901 - RNA, 17 nt, Artificial Sequence
  Synthetic
gaggugaacaauguucc

SEQ ID NO: 9902 - RNA, 17 nt, Artificial Sequence
  Synthetic
gccucccgauacagagc

SEQ ID NO: 9903 - RNA, 17 nt, Artificial Sequence
  Synthetic
gaaaggagguguauuuc

SEQ ID NO: 9904 - RNA, 17 nt, Artificial Sequence
  Synthetic
gucagaaggcaaaaaag

SEQ ID NO: 9905 - RNA, 17 nt, Artificial Sequence
  Synthetic
ggggagaccgcguaaag

SEQ ID NO: 9906 - RNA, 17 nt, Artificial Sequence
  Synthetic
  misc_feature (7)..(7): n is a, c, g, or u
  misc_feature (14)..(14): n is a, c, g, or u
gaaugunaggaaangag

SEQ ID NO: 9907 - RNA, 17 nt, Artificial Sequence
  Synthetic
  misc_feature (6)..(6): n is a, c, g, or u
gccucngcucuguaucg

SEQ ID NO: 9908 - RNA, 17 nt, Artificial Sequence
  Synthetic
gaccuucgucugcgagg

SEQ ID NO: 9909 - RNA, 17 nt, Artificial Sequence
  Synthetic
gcuauucuguguugggg

SEQ ID NO: 9910 - RNA, 17 nt, Artificial Sequence
  Synthetic
gacugggaggaguuggg

SEQ ID NO: 9911 - RNA, 17 nt, Artificial Sequence
  Synthetic
  misc_feature (5)..(5): n is a, c, g, or u
gccunagugcuguaugg

SEQ ID NO: 9912 - RNA, 17 nt, Artificial Sequence
  Synthetic
ggaggacaagagguugg

SEQ ID NO: 9913 - RNA, 17 nt, Artificial Sequence
  Synthetic
  misc_feature (15)..(15): n is a, c, g, or u
gacccugcaccgaanau

SEQ ID NO: 9914 - RNA, 17 nt, Artificial Sequence
  Synthetic
gcaggguccccaguccu

SEQ ID NO: 9915 - RNA, 17 nt, Artificial Sequence
  Synthetic
gaaacauagagguuccu

SEQ ID NO: 9916 - RNA, 17 nt, Artificial Sequence
  Synthetic
ggaagagaaacuguucu

SEQ ID NO: 9917 - RNA, 17 nt, Artificial Sequence
  Synthetic
gacugucucuuagaggu

SEQ ID NO: 9918 - RNA, 17 nt, Artificial Sequence
  Synthetic
gaauuuggagcuucugu

SEQ ID NO: 9919 - RNA, 17 nt, Artificial Sequence
  Synthetic
  misc_feature (15)..(16): n is a, c, g, or u
gcuugguggaaugunnu

SEQ ID NO: 9920 - RNA, 17 nt, Artificial Sequence
  Synthetic
gagguuggugagugauu

SEQ ID NO: 9921 - RNA, 17 nt, Artificial Sequence
  Synthetic
gaggaugacugucucuu

SEQ ID NO: 9922 - RNA, 17 nt, Artificial Sequence
  Synthetic
  misc_feature (5)..(5): n is a, c, g, or u
  misc_feature (15)..(15): n is a, c, g, or u
gauanccaggacaanuu

SEQ ID NO: 9923 - RNA, 20 nt, Artificial Sequence
  Synthetic
gaagguuuuguacagcaaca

SEQ ID NO: 9924 - RNA, 20 nt, Artificial Sequence
  Synthetic
gccgauugguggaggcagga

SEQ ID NO: 9925 - RNA, 20 nt, Artificial Sequence
  Synthetic
gacugggaggaguuggggga

SEQ ID NO: 9926 - RNA, 20 nt, Artificial Sequence
  Synthetic
gaggcauagcagcaggauga

SEQ ID NO: 9927 - RNA, 20 nt, Artificial Sequence
  Synthetic
  misc_feature (10)..(10): n is a, c, g, or u
  misc_feature (14)..(14): n is a, c, g, or u
gaaggcuggnauunuauaua

SEQ ID NO: 9928 - RNA, 20 nt, Artificial Sequence
  Synthetic
gcgagcaaaacaagcugcua

SEQ ID NO: 9929 - RNA, 20 nt, Artificial Sequence
  Synthetic
  misc_feature (7)..(7): n is a, c, g, or u
  misc_feature (14)..(14): n is a, c, g, or u
ggccagnggcaaancaggua

SEQ ID NO: 9930 - RNA, 20 nt, Artificial Sequence
  Synthetic
gcacuguugucaauaugccc

SEQ ID NO: 9931 - RNA, 20 nt, Artificial Sequence
  Synthetic
ggugaucgggaaagaauccc

SEQ ID NO: 9932 - RNA, 20 nt, Artificial Sequence
  Synthetic
gauacuaacauugagauucc

SEQ ID NO: 9933 - RNA, 20 nt, Artificial Sequence
  Synthetic
gaagucagaaggcaaaaaag

SEQ ID NO: 9934 - RNA, 20 nt, Artificial Sequence
  Synthetic
gagaagauugacgauauggg

SEQ ID NO: 9935 - RNA, 20 nt, Artificial Sequence
  Synthetic
ggaacaagagcuacagcaug

SEQ ID NO: 9936 - RNA, 20 nt, Artificial Sequence
  Synthetic
  misc_feature (7)..(7): n is a, c, g, or u
  misc_feature (9)..(9): n is a, c, g, or u
  misc_feature (15)..(15): n is a, c, g, or u
gacugununuuuaangacug

SEQ ID NO: 9937 - RNA, 20 nt, Artificial Sequence
  Synthetic
  misc_feature (5)..(5): n is a, c, g, or u
guuungcuccagaccggcug

SEQ ID NO: 9938 - RNA, 20 nt, Artificial Sequence
  Synthetic
gugcucccccuagaaaauug

SEQ ID NO: 9939 - RNA, 20 nt, Artificial Sequence
  Synthetic
  misc_feature (7)..(7): n is a, c, g, or u
  misc_feature (9)..(9): n is a, c, g, or u
  misc_feature (20)..(20): n is a, c, g, or u
gguuaangnucuuuguacun

SEQ ID NO: 9940 - RNA, 20 nt, Artificial Sequence
  Synthetic
ggugcaggguccccaguccu

SEQ ID NO: 9941 - RNA, 20 nt, Artificial Sequence
  Synthetic
  misc_feature (5)..(5): n is a, c, g, or u
gauunguccccaugccuugu

SEQ ID NO: 9942 - RNA, 17 nt, Artificial Sequence
  Synthetic
uacaguuaaugaaaaaa

SEQ ID NO: 9943 - RNA, 17 nt, Artificial Sequence
  Synthetic
aagucagaaggcaaaaa

SEQ ID NO: 9944 - RNA, 17 nt, Artificial Sequence
  Synthetic
uauggugacccacaaaa

SEQ ID NO: 9945 - RNA, 17 nt, Artificial Sequence
  Synthetic
  misc_feature (11)..(11): n is a, c, g, or u
aaaugaaugunaggaaa

SEQ ID NO: 9946 - RNA, 17 nt, Artificial Sequence
  Synthetic
  misc_feature (3)..(3): n is a, c, g, or u
ccnagcagccauggaaa

SEQ ID NO: 9947 - RNA, 17 nt, Artificial Sequence
  Synthetic
ccauauucuugggaaca

SEQ ID NO: 9948 - RNA, 17 nt, Artificial Sequence
  Synthetic
acaguaggacaugaaca

SEQ ID NO: 9949 - RNA, 17 nt, Artificial Sequence
  Synthetic
uugagagaaguccacca

SEQ ID NO: 9950 - RNA, 17 nt, Artificial Sequence
  Synthetic
acuaguaaacugagcca

SEQ ID NO: 9951 - RNA, 17 nt, Artificial Sequence
  Synthetic
  misc_feature (10)..(10): n is a, c, g, or u
acauugcugngagucca

SEQ ID NO: 9952 - RNA, 17 nt, Artificial Sequence
  Synthetic
aagaaccaacaagaaga

SEQ ID NO: 9953 - RNA, 17 nt, Artificial Sequence
  Synthetic
  misc_feature (4)..(4): n is a, c, g, or u
agcngaggcggugucga

SEQ ID NO: 9954 - RNA, 17 nt, Artificial Sequence
  Synthetic
ugggaggaguuggggga

SEQ ID NO: 9955 - RNA, 17 nt, Artificial Sequence
  Synthetic
  misc_feature (1)..(1): n is a, c, g, or u
  misc_feature (3)..(3): n is a, c, g, or u
  misc_feature (9)..(9): n is a, c, g, or u
nunuuuaangacuggga

SEQ ID NO: 9956 - RNA, 17 nt, Artificial Sequence
  Synthetic
ccugucuuacuuuugga

SEQ ID NO: 9957 - RNA, 17 nt, Artificial Sequence
  Synthetic
  misc_feature (4)..(4): n is a, c, g, or u
  misc_feature (15)..(16): n is a, c, g, or u
ccunacauucauuunna

SEQ ID NO: 9958 - RNA, 17 nt, Artificial Sequence
  Synthetic
agcaaaacaagcugcua

SEQ ID NO: 9959 - RNA, 17 nt, Artificial Sequence
  Synthetic
ccaucucuccaccucua

SEQ ID NO: 9960 - RNA, 17 nt, Artificial Sequence
  Synthetic
  misc_feature (4)..(4): n is a, c, g, or u
  misc_feature (11)..(11): n is a, c, g, or u
cagnggcaaancaggua

SEQ ID NO: 9961 - RNA, 17 nt, Artificial Sequence
  Synthetic
uuuuuucauuaacugua

SEQ ID NO: 9962 - RNA, 17 nt, Artificial Sequence
  Synthetic
uaaaguuucccaccuua

SEQ ID NO: 9963 - RNA, 17 nt, Artificial Sequence
  Synthetic
aaauggcacuaguaaac

SEQ ID NO: 9964 - RNA, 17 nt, Artificial Sequence
  Synthetic
aauccucacaauaccac

SEQ ID NO: 9965 - RNA, 17 nt, Artificial Sequence
  Synthetic
  misc_feature (1)..(1): n is a, c, g, or u
  misc_feature (5)..(5): n is a, c, g, or u
naaunccagccuuccac

SEQ ID NO: 9966 - RNA, 17 nt, Artificial Sequence
  Synthetic
agccaggagaaacggac

SEQ ID NO: 9967 - RNA, 17 nt, Artificial Sequence
  Synthetic
  misc_feature (5)..(5): n is a, c, g, or u
agagncccaaacggccc

SEQ ID NO: 9968 - RNA, 17 nt, Artificial Sequence
  Synthetic
cuguugucaauaugccc

SEQ ID NO: 9969 - RNA, 17 nt, Artificial Sequence
  Synthetic
  misc_feature (14)..(14): n is a, c, g, or u
aagcucugcuaganccc

SEQ ID NO: 9970 - RNA, 17 nt, Artificial Sequence
  Synthetic
ucaauaugcccugagcc

SEQ ID NO: 9971 - RNA, 17 nt, Artificial Sequence
  Synthetic
ucuuccacugcauggcc

SEQ ID NO: 9972 - RNA, 17 nt, Artificial Sequence
  Synthetic
acuaacauugagauucc

SEQ ID NO: 9973 - RNA, 17 nt, Artificial Sequence
  Synthetic
  misc_feature (11)..(11): n is a, c, g, or u
ucacucugggnucuagc

SEQ ID NO: 9974 - RNA, 17 nt, Artificial Sequence
  Synthetic
acaugagaugauuaggc

SEQ ID NO: 9975 - RNA, 17 nt, Artificial Sequence
  Synthetic
  misc_feature (11)..(11): n is a, c, g, or u
  misc_feature (14)..(14): n is a, c, g, or u
aguuggacccngcnuuc

SEQ ID NO: 9976 - RNA, 17 nt, Artificial Sequence
  Synthetic
  misc_feature (5)..(5): n is a, c, g, or u
  misc_feature (9)..(9): n is a, c, g, or u
cuggnauunuauauaag

SEQ ID NO: 9977 - RNA, 17 nt, Artificial Sequence
  Synthetic
  misc_feature (12)..(12): n is a, c, g, or u
uaucccaugaanuuaag

SEQ ID NO: 9978 - RNA, 17 nt, Artificial Sequence
  Synthetic
  misc_feature (10)..(10): n is a, c, g, or u
ucugcuagancccagag

SEQ ID NO: 9979 - RNA, 17 nt, Artificial Sequence
  Synthetic
ugagaaggcacagacgg

SEQ ID NO: 9980 - RNA, 17 nt, Artificial Sequence
  Synthetic
cucucaauuuucuaggg

SEQ ID NO: 9981 - RNA, 17 nt, Artificial Sequence
  Synthetic
cugucucuuagaggugg

SEQ ID NO: 9982 - RNA, 17 nt, Artificial Sequence
  Synthetic
aaggccuuguaaguugg

SEQ ID NO: 9983 - RNA, 17 nt, Artificial Sequence
  Synthetic
acaagagcuacagcaug

SEQ ID NO: 9984 - RNA, 17 nt, Artificial Sequence
  Synthetic
uuagagguggagagaug

SEQ ID NO: 9985 - RNA, 17 nt, Artificial Sequence
  Synthetic
uucgcaagauuccuaug

SEQ ID NO: 9986 - RNA, 17 nt, Artificial Sequence
  Synthetic
  misc_feature (4)..(4): n is a, c, g, or u
  misc_feature (6)..(6): n is a, c, g, or u
  misc_feature (12)..(12): n is a, c, g, or u
ugununuuuaangacug

SEQ ID NO: 9987 - RNA, 17 nt, Artificial Sequence
  Synthetic
  misc_feature (2)..(2): n is a, c, g, or u
ungcuccagaccggcug

SEQ ID NO: 9988 - RNA, 17 nt, Artificial Sequence
  Synthetic
cucccccuagaaaauug

SEQ ID NO: 9989 - RNA, 17 nt, Artificial Sequence
  Synthetic
uagacucugugguauug

SEQ ID NO: 9990 - RNA, 17 nt, Artificial Sequence
  Synthetic
  misc_feature (4)..(4): n is a, c, g, or u
  misc_feature (6)..(6): n is a, c, g, or u
  misc_feature (17)..(17): n is a, c, g, or u
uaangnucuuuguacun

SEQ ID NO: 9991 - RNA, 17 nt, Artificial Sequence
  Synthetic
ugcucccccuagaaaau

SEQ ID NO: 9992 - RNA, 17 nt, Artificial Sequence
  Synthetic
caacaagagggaaacau

SEQ ID NO: 9993 - RNA, 17 nt, Artificial Sequence
  Synthetic
ccaagggauacuaacau

SEQ ID NO: 9994 - RNA, 17 nt, Artificial Sequence
  Synthetic
uuuacuguuccggaacu

SEQ ID NO: 9995 - RNA, 17 nt, Artificial Sequence
  Synthetic
cauaucgucaaucuucu

SEQ ID NO: 9996 - RNA, 17 nt, Artificial Sequence
  Synthetic
uugauguuccuggaagu

SEQ ID NO: 9997 - RNA, 17 nt, Artificial Sequence
  Synthetic
  misc_feature (2)..(2): n is a, c, g, or u
  misc_feature (4)..(4): n is a, c, g, or u
angnagaaggggacggu

SEQ ID NO: 9998 - RNA, 17 nt, Artificial Sequence
  Synthetic
  misc_feature (5)..(5): n is a, c, g, or u
cggcngucuuuuggggu

SEQ ID NO: 9999 - RNA, 17 nt, Artificial Sequence
  Synthetic
ccugacugccgauuggu

SEQ ID NO: 10000 - RNA, 17 nt, Artificial Sequence
  Synthetic
  misc_feature (7)..(7): n is a, c, g, or u
cagagcngaggcggugu

SEQ ID NO: 10001 - RNA, 17 nt, Artificial Sequence
  Synthetic
  misc_feature (2)..(2): n is a, c, g, or u
unguccccaugccuugu

SEQ ID NO: 10002 - RNA, 17 nt, Artificial Sequence
  Synthetic
cacccaaggcacagcuu

SEQ ID NO: 10003 - RNA, 17 nt, Artificial Sequence
  Synthetic
  misc_feature (5)..(5): n is a, c, g, or u
acccnuauaaagaauuu

SEQ ID NO: 10004 - RNA, 17 nt, Artificial Sequence
  Synthetic
aguauuuggugucuuuu

SEQ ID NO: 10005 - RNA, 20 nt, Artificial Sequence
  Synthetic
ucuuacaguuaaugaaaaaa

SEQ ID NO: 10006 - RNA, 20 nt, Artificial Sequence
  Synthetic
aagaagucagaaggcaaaaa

SEQ ID NO: 10007 - RNA, 20 nt, Artificial Sequence
  Synthetic
  misc_feature (2)..(3): n is a, c, g, or u
  misc_feature (14)..(14): n is a, c, g, or u
unnaaaugaaugunaggaaa

SEQ ID NO: 10008 - RNA, 20 nt, Artificial Sequence
  Synthetic
  misc_feature (3)..(3): n is a, c, g, or u
  misc_feature (6)..(6): n is a, c, g, or u
canccnagcagccauggaaa

SEQ ID NO: 10009 - RNA, 20 nt, Artificial Sequence
  Synthetic
ucaccauauucuugggaaca

SEQ ID NO: 10010 - RNA, 20 nt, Artificial Sequence
  Synthetic
ugaacaguaggacaugaaca

SEQ ID NO: 10011 - RNA, 20 nt, Artificial Sequence
  Synthetic
  misc_feature (10)..(10): n is a, c, g, or u
ccaggacaanuuggaggaca

SEQ ID NO: 10012 - RNA, 20 nt, Artificial Sequence
  Synthetic
aaauugagagaaguccacca

SEQ ID NO: 10013 - RNA, 20 nt, Artificial Sequence
  Synthetic
  misc_feature (13)..(13): n is a, c, g, or u
uugacauugcugngagucca

SEQ ID NO: 10014 - RNA, 20 nt, Artificial Sequence
  Synthetic
acugccgauugguggaggca

SEQ ID NO: 10015 - RNA, 20 nt, Artificial Sequence
  Synthetic
cagaagaaccaacaagaaga

SEQ ID NO: 10016 - RNA, 20 nt, Artificial Sequence
  Synthetic
  misc_feature (7)..(7): n is a, c, g, or u
cagagcngaggcggugucga

SEQ ID NO: 10017 - RNA, 20 nt, Artificial Sequence
  Synthetic
  misc_feature (4)..(4): n is a, c, g, or u
  misc_feature (6)..(6): n is a, c, g, or u
  misc_feature (12)..(12): n is a, c, g, or u
ugununuuuaangacuggga

SEQ ID NO: 10018 - RNA, 20 nt, Artificial Sequence
  Synthetic
uuuccugucuuacuuuugga

SEQ ID NO: 10019 - RNA, 20 nt, Artificial Sequence
  Synthetic
  misc_feature (17)..(17): n is a, c, g, or u
  misc_feature (19)..(19): n is a, c, g, or u
uugguggucuguaagcngna

SEQ ID NO: 10020 - RNA, 20 nt, Artificial Sequence
  Synthetic
  misc_feature (7)..(7): n is a, c, g, or u
  misc_feature (18)..(19): n is a, c, g, or u
uuuccunacauucauuunna

SEQ ID NO: 10021 - RNA, 20 nt, Artificial Sequence
  Synthetic
  misc_feature (17)..(17): n is a, c, g, or u
cuugcccaaggucuuanaua

SEQ ID NO: 10022 - RNA, 20 nt, Artificial Sequence
  Synthetic
cucccaucucuccaccucua

SEQ ID NO: 10023 - RNA, 20 nt, Artificial Sequence
  Synthetic
uccuuuuuucauuaacugua

SEQ ID NO: 10024 - RNA, 20 nt, Artificial Sequence
  Synthetic
aacaaauggcacuaguaaac

SEQ ID NO: 10025 - RNA, 20 nt, Artificial Sequence
  Synthetic
aagaauccucacaauaccac

SEQ ID NO: 10026 - RNA, 20 nt, Artificial Sequence
  Synthetic
  misc_feature (4)..(4): n is a, c, g, or u
  misc_feature (8)..(8): n is a, c, g, or u
auanaaunccagccuuccac

SEQ ID NO: 10027 - RNA, 20 nt, Artificial Sequence
  Synthetic
cugagccaggagaaacggac

SEQ ID NO: 10028 - RNA, 20 nt, Artificial Sequence
  Synthetic
  misc_feature (17)..(17): n is a, c, g, or u
accaagcucugcuaganccc

SEQ ID NO: 10029 - RNA, 20 nt, Artificial Sequence
  Synthetic
  misc_feature (14)..(14): n is a, c, g, or u
cccucacucugggnucuagc

SEQ ID NO: 10030 - RNA, 20 nt, Artificial Sequence
  Synthetic
ugaacaugagaugauuaggc

SEQ ID NO: 10031 - RNA, 20 nt, Artificial Sequence
  Synthetic
  misc_feature (14)..(14): n is a, c, g, or u
  misc_feature (17)..(17): n is a, c, g, or u
accaguuggacccngcnuuc

SEQ ID NO: 10032 - RNA, 20 nt, Artificial Sequence
  Synthetic
auggaaaggagguguauuuc

SEQ ID NO: 10033 - RNA, 20 nt, Artificial Sequence
  Synthetic
  misc_feature (8)..(8): n is a, c, g, or u
  misc_feature (12)..(12): n is a, c, g, or u
aggcuggnauunuauauaag

SEQ ID NO: 10034 - RNA, 20 nt, Artificial Sequence
  Synthetic
  misc_feature (15)..(15): n is a, c, g, or u
acauaucccaugaanuuaag

SEQ ID NO: 10035 - RNA, 20 nt, Artificial Sequence
  Synthetic
  misc_feature (13)..(13): n is a, c, g, or u
agcucugcuagancccagag

SEQ ID NO: 10036 - RNA, 20 nt, Artificial Sequence
  Synthetic
  misc_feature (10)..(10): n is a, c, g, or u
  misc_feature (17)..(17): n is a, c, g, or u
aaugaaugunaggaaangag

SEQ ID NO: 10037 - RNA, 20 nt, Artificial Sequence
  Synthetic
agaugagaaggcacagacgg

SEQ ID NO: 10038 - RNA, 20 nt, Artificial Sequence
  Synthetic
cuucucucaauuuucuaggg

SEQ ID NO: 10039 - RNA, 20 nt, Artificial Sequence
  Synthetic
  misc_feature (3)..(3): n is a, c, g, or u
aangacugggaggaguuggg

SEQ ID NO: 10040 - RNA, 20 nt, Artificial Sequence
  Synthetic
  misc_feature (1)..(1): n is a, c, g, or u
nuuggaggacaagagguugg

SEQ ID NO: 10041 - RNA, 20 nt, Artificial Sequence
  Synthetic
cucuuagagguggagagaug

SEQ ID NO: 10042 - RNA, 20 nt, Artificial Sequence
  Synthetic
cagcaacaagagggaaacau

SEQ ID NO: 10043 - RNA, 20 nt, Artificial Sequence
  Synthetic
aguccaagggauacuaacau

SEQ ID NO: 10044 - RNA, 20 nt, Artificial Sequence
  Synthetic
uuuggaagagaaacuguucu

SEQ ID NO: 10045 - RNA, 20 nt, Artificial Sequence
  Synthetic
  misc_feature (5)..(5): n is a, c, g, or u
  misc_feature (7)..(7): n is a, c, g, or u
cagangnagaaggggacggu

SEQ ID NO: 10046 - RNA, 20 nt, Artificial Sequence
  Synthetic
  misc_feature (8)..(8): n is a, c, g, or u
acacggcngucuuuuggggu

SEQ ID NO: 10047 - RNA, 20 nt, Artificial Sequence
  Synthetic
cuuccugacugccgauuggu

SEQ ID NO: 10048 - RNA, 20 nt, Artificial Sequence
  Synthetic
aaagaauuuggagcuucugu

SEQ ID NO: 10049 - RNA, 20 nt, Artificial Sequence
  Synthetic
  misc_feature (10)..(10): n is a, c, g, or u
auacagagcngaggcggugu

SEQ ID NO: 10050 - RNA, 20 nt, Artificial Sequence
  Synthetic
  misc_feature (18)..(19): n is a, c, g, or u
agagcuugguggaaugunnu

SEQ ID NO: 10051 - RNA, 20 nt, Artificial Sequence
  Synthetic
caagagguuggugagugauu

SEQ ID NO: 10052 - RNA, 20 nt, Artificial Sequence
  Synthetic
agccacccaaggcacagcuu

SEQ ID NO: 10053 - RNA, 20 nt, Artificial Sequence
  Synthetic
ccugaggaugacugucucuu

SEQ ID NO: 10054 - RNA, 20 nt, Artificial Sequence
  Synthetic
  misc_feature (8)..(8): n is a, c, g, or u
  misc_feature (18)..(18): n is a, c, g, or u
agcgauanccaggacaanuu

SEQ ID NO: 10055 - RNA, 20 nt, Artificial Sequence
  Synthetic
  misc_feature (8)..(8): n is a, c, g, or u
uugacccnuauaaagaauuu

SEQ ID NO: 10056 - RNA, 20 nt, Artificial Sequence
  Synthetic
uugaguauuuggugucuuuu

SEQ ID NO: 10057 - RNA, 17 nt, Artificial Sequence
  Synthetic
  misc_feature (10)..(10): n is a, c, g, or u
ugguaauagngguaaaa

SEQ ID NO: 10058 - RNA, 17 nt, Artificial Sequence
  Synthetic
  misc_feature (2)..(2): n is a, c, g, or u
anccacauuguguaaaa

SEQ ID NO: 10059 - RNA, 17 nt, Artificial Sequence
  Synthetic
guauacccaaagacaaa

SEQ ID NO: 10060 - RNA, 17 nt, Artificial Sequence
  Synthetic
gacgggacguagacaaa

SEQ ID NO: 10061 - RNA, 17 nt, Artificial Sequence
  Synthetic
uggaaguagaggacaaa

SEQ ID NO: 10062 - RNA, 17 nt, Artificial Sequence
  Synthetic
gagggcuccaccccaaa

SEQ ID NO: 10063 - RNA, 17 nt, Artificial Sequence
  Synthetic
cgaauccacacuccaaa

SEQ ID NO: 10064 - RNA, 17 nt, Artificial Sequence
  Synthetic
aaaaguaagacaggaaa

SEQ ID NO: 10065 - RNA, 17 nt, Artificial Sequence
  Synthetic
  misc_feature (5)..(5): n is a, c, g, or u
  misc_feature (11)..(11): n is a, c, g, or u
  misc_feature (13)..(14): n is a, c, g, or u
uaaunuccucnunnaaa

SEQ ID NO: 10066 - RNA, 17 nt, Artificial Sequence
  Synthetic
  misc_feature (3)..(3): n is a, c, g, or u
uanccacauuguguaaa

SEQ ID NO: 10067 - RNA, 17 nt, Artificial Sequence
  Synthetic
gacuucaaccccaacaa

SEQ ID NO: 10068 - RNA, 17 nt, Artificial Sequence
  Synthetic
  misc_feature (2)..(2): n is a, c, g, or u
cngccccuuuuacacaa

SEQ ID NO: 10069 - RNA, 17 nt, Artificial Sequence
  Synthetic
  misc_feature (10)..(10): n is a, c, g, or u
acagccuccnaguacaa

SEQ ID NO: 10070 - RNA, 17 nt, Artificial Sequence
  Synthetic
  misc_feature (3)..(3): n is a, c, g, or u
uunaaauguauacccaa

SEQ ID NO: 10071 - RNA, 17 nt, Artificial Sequence
  Synthetic
  misc_feature (13)..(13): n is a, c, g, or u
ugaccguugccgngcaa

SEQ ID NO: 10072 - RNA, 17 nt, Artificial Sequence
  Synthetic
  misc_feature (7)..(7): n is a, c, g, or u
gcacganuccugcucaa

SEQ ID NO: 10073 - RNA, 17 nt, Artificial Sequence
  Synthetic
  misc_feature (5)..(5): n is a, c, g, or u
acucncagcaaugucaa

SEQ ID NO: 10074 - RNA, 17 nt, Artificial Sequence
  Synthetic
cuugaggcauacuucaa

SEQ ID NO: 10075 - RNA, 17 nt, Artificial Sequence
  Synthetic
gaggauugggaacagaa

SEQ ID NO: 10076 - RNA, 17 nt, Artificial Sequence
  Synthetic
uuguaaguuggcgagaa

SEQ ID NO: 10077 - RNA, 17 nt, Artificial Sequence
  Synthetic
  misc_feature (11)..(11): n is a, c, g, or u
  misc_feature (13)..(13): n is a, c, g, or u
gaacggcagangnagaa

SEQ ID NO: 10078 - RNA, 17 nt, Artificial Sequence
  Synthetic
  misc_feature (8)..(8): n is a, c, g, or u
ggagaucncgaauagaa

SEQ ID NO: 10079 - RNA, 17 nt, Artificial Sequence
  Synthetic
  misc_feature (4)..(4): n is a, c, g, or u
aucncgaauagaaggaa

SEQ ID NO: 10080 - RNA, 17 nt, Artificial Sequence
  Synthetic
caacuggugaucgggaa

SEQ ID NO: 10081 - RNA, 17 nt, Artificial Sequence
  Synthetic
aucccuuggacucauaa

SEQ ID NO: 10082 - RNA, 17 nt, Artificial Sequence
  Synthetic
  misc_feature (12)..(12): n is a, c, g, or u
gacauugacccnuauaa

SEQ ID NO: 10083 - RNA, 17 nt, Artificial Sequence
  Synthetic
  misc_feature (10)..(10): n is a, c, g, or u
gccuaguuungaaguaa

SEQ ID NO: 10084 - RNA, 17 nt, Artificial Sequence
  Synthetic
  misc_feature (7)..(7): n is a, c, g, or u
uugccanucaggauuaa

SEQ ID NO: 10085 - RNA, 17 nt, Artificial Sequence
  Synthetic
ggcccucuuacaguuaa

SEQ ID NO: 10086 - RNA, 17 nt, Artificial Sequence
  Synthetic
  misc_feature (10)..(10): n is a, c, g, or u
  misc_feature (12)..(12): n is a, c, g, or u
aaagacugununuuuaa

SEQ ID NO: 10087 - RNA, 17 nt, Artificial Sequence
  Synthetic
guccagaagaaccaaca

SEQ ID NO: 10088 - RNA, 17 nt, Artificial Sequence
  Synthetic
gaggauucuugucaaca

SEQ ID NO: 10089 - RNA, 17 nt, Artificial Sequence
  Synthetic
cuuccaaaaguaagaca

SEQ ID NO: 10090 - RNA, 17 nt, Artificial Sequence
  Synthetic
  misc_feature (1)..(1): n is a, c, g, or u
naauuuuggccaggaca

SEQ ID NO: 10091 - RNA, 17 nt, Artificial Sequence
  Synthetic
gcuugaacaguaggaca

SEQ ID NO: 10092 - RNA, 17 nt, Artificial Sequence
  Synthetic
gguuuuucuuguugaca

SEQ ID NO: 10093 - RNA, 17 nt, Artificial Sequence
  Synthetic
gaugggaugggaauaca

SEQ ID NO: 10094 - RNA, 17 nt, Artificial Sequence
  Synthetic
ccccugcucguguuaca

SEQ ID NO: 10095 - RNA, 17 nt, Artificial Sequence
  Synthetic
gccguuccggccgacca

SEQ ID NO: 10096 - RNA, 17 nt, Artificial Sequence
  Synthetic
aaauuacuucccaccca

SEQ ID NO: 10097 - RNA, 17 nt, Artificial Sequence
  Synthetic
ucuagggggagcaccca

SEQ ID NO: 10098 - RNA, 17 nt, Artificial Sequence
  Synthetic
aaucuugcgaaagccca

SEQ ID NO: 10099 - RNA, 17 nt, Artificial Sequence
  Synthetic
uccaauuacauauccca

SEQ ID NO: 10100 - RNA, 17 nt, Artificial Sequence
  Synthetic
uguagcucuuguuccca

SEQ ID NO: 10101 - RNA, 17 nt, Artificial Sequence
  Synthetic
  misc_feature (6)..(6): n is a, c, g, or u
acugcnaauuuuggcca

SEQ ID NO: 10102 - RNA, 17 nt, Artificial Sequence
  Synthetic
  misc_feature (12)..(12): n is a, c, g, or u
cggucaggucunugcca

SEQ ID NO: 10103 - RNA, 17 nt, Artificial Sequence
  Synthetic
  misc_feature (14)..(14): n is a, c, g, or u
acauccagcgauancca

SEQ ID NO: 10104 - RNA, 17 nt, Artificial Sequence
  Synthetic
cccaccuuaugagucca

SEQ ID NO: 10105 - RNA, 17 nt, Artificial Sequence
  Synthetic
  misc_feature (13)..(13): n is a, c, g, or u
guucacgguggunucca

SEQ ID NO: 10106 - RNA, 17 nt, Artificial Sequence
  Synthetic
uuuguccucuacuucca

SEQ ID NO: 10107 - RNA, 17 nt, Artificial Sequence
  Synthetic
gaacaagagcuacagca

SEQ ID NO: 10108 - RNA, 17 nt, Artificial Sequence
  Synthetic
aacuggagccaccagca

SEQ ID NO: 10109 - RNA, 17 nt, Artificial Sequence
  Synthetic
aacaucaacuaccagca

SEQ ID NO: 10110 - RNA, 17 nt, Artificial Sequence
  Synthetic
gaugaggcauagcagca

SEQ ID NO: 10111 - RNA, 17 nt, Artificial Sequence
  Synthetic
cgccuguaacacgagca

SEQ ID NO: 10112 - RNA, 17 nt, Artificial Sequence
  Synthetic
uagagguuccuugagca

SEQ ID NO: 10113 - RNA, 17 nt, Artificial Sequence
  Synthetic
cacaaagguuccacgca

SEQ ID NO: 10114 - RNA, 17 nt, Artificial Sequence
  Synthetic
aaaggacgucccgcgca

SEQ ID NO: 10115 - RNA, 17 nt, Artificial Sequence
  Synthetic
  misc_feature (1)..(1): n is a, c, g, or u
  misc_feature (4)..(4): n is a, c, g, or u
  misc_feature (12)..(13): n is a, c, g, or u
naunggccaucnncgca

SEQ ID NO: 10116 - RNA, 17 nt, Artificial Sequence
  Synthetic
  misc_feature (5)..(5): n is a, c, g, or u
caucnugggcuuucgca

SEQ ID NO: 10117 - RNA, 17 nt, Artificial Sequence
  Synthetic
caaaccucgacaaggca

SEQ ID NO: 10118 - RNA, 17 nt, Artificial Sequence
  Synthetic
  misc_feature (3)..(3): n is a, c, g, or u
aunuaagaccuugggca

SEQ ID NO: 10119 - RNA, 17 nt, Artificial Sequence
  Synthetic
cagcacgggaccaugca

SEQ ID NO: 10120 - RNA, 17 nt, Artificial Sequence
  Synthetic
accaugcaagaccugca

SEQ ID NO: 10121 - RNA, 17 nt, Artificial Sequence
  Synthetic
  misc_feature (9)..(9): n is a, c, g, or u
  misc_feature (12)..(12): n is a, c, g, or u
  misc_feature (15)..(15): n is a, c, g, or u
ugggguacnuunccnca

SEQ ID NO: 10122 - RNA, 17 nt, Artificial Sequence
  Synthetic
  misc_feature (7)..(7): n is a, c, g, or u
  misc_feature (11)..(11): n is a, c, g, or u
uggagancacnacauca

SEQ ID NO: 10123 - RNA, 17 nt, Artificial Sequence
  Synthetic
aagacaccaaauacuca

SEQ ID NO: 10124 - RNA, 17 nt, Artificial Sequence
  Synthetic
ccaccaaucggcaguca

SEQ ID NO: 10125 - RNA, 17 nt, Artificial Sequence
  Synthetic
  misc_feature (14)..(14): n is a, c, g, or u
agggaguuugccanuca

SEQ ID NO: 10126 - RNA, 17 nt, Artificial Sequence
  Synthetic
  misc_feature (1)..(1): n is a, c, g, or u
  misc_feature (14)..(14): n is a, c, g, or u
ngguaaaaaggganuca

SEQ ID NO: 10127 - RNA, 17 nt, Artificial Sequence
  Synthetic
  misc_feature (10)..(10): n is a, c, g, or u
gauuaacugnauguuca

SEQ ID NO: 10128 - RNA, 17 nt, Artificial Sequence
  Synthetic
  misc_feature (13)..(13): n is a, c, g, or u
cuacucccuuaanuuca

SEQ ID NO: 10129 - RNA, 17 nt, Artificial Sequence
  Synthetic
cagaagaaccaacaaga

SEQ ID NO: 10130 - RNA, 17 nt, Artificial Sequence
  Synthetic
gcagguccccuagaaga

SEQ ID NO: 10131 - RNA, 17 nt, Artificial Sequence
  Synthetic
uagcagcaggaugaaga

SEQ ID NO: 10132 - RNA, 17 nt, Artificial Sequence
  Synthetic
  misc_feature (11)..(11): n is a, c, g, or u
caaggucuuanauaaga

SEQ ID NO: 10133 - RNA, 17 nt, Artificial Sequence
  Synthetic
agaugagaaggcacaga

SEQ ID NO: 10134 - RNA, 17 nt, Artificial Sequence
  Synthetic
cgggaaagaaucccaga

SEQ ID NO: 10135 - RNA, 17 nt, Artificial Sequence
  Synthetic
uaccuugguaguccaga

SEQ ID NO: 10136 - RNA, 17 nt, Artificial Sequence
  Synthetic
cucccucgccucgcaga

SEQ ID NO: 10137 - RNA, 17 nt, Artificial Sequence
  Synthetic
aaucgccgcgucgcaga

SEQ ID NO: 10138 - RNA, 17 nt, Artificial Sequence
  Synthetic
ugagaugauuaggcaga

SEQ ID NO: 10139 - RNA, 17 nt, Artificial Sequence
  Synthetic
uccaugcgacgugcaga

SEQ ID NO: 10140 - RNA, 17 nt, Artificial Sequence
  Synthetic
gagaccgcguaaagaga

SEQ ID NO: 10141 - RNA, 17 nt, Artificial Sequence
  Synthetic
gguguauuuccgagaga

SEQ ID NO: 10142 - RNA, 17 nt, Artificial Sequence
  Synthetic
ucuuagagguggagaga

SEQ ID NO: 10143 - RNA, 17 nt, Artificial Sequence
  Synthetic
cccaaacggccccgaga

SEQ ID NO: 10144 - RNA, 17 nt, Artificial Sequence
  Synthetic
guccccaguccucgaga

SEQ ID NO: 10145 - RNA, 17 nt, Artificial Sequence
  Synthetic
aggacaugaacaugaga

SEQ ID NO: 10146 - RNA, 17 nt, Artificial Sequence
  Synthetic
  misc_feature (12)..(12): n is a, c, g, or u
  misc_feature (14)..(14): n is a, c, g, or u
ggaacggcagangnaga

SEQ ID NO: 10147 - RNA, 17 nt, Artificial Sequence
  Synthetic
gaggcagguccccuaga

SEQ ID NO: 10148 - RNA, 17 nt, Artificial Sequence
  Synthetic
auguuccuggaaguaga

SEQ ID NO: 10149 - RNA, 17 nt, Artificial Sequence
  Synthetic
aagacagguacaguaga

SEQ ID NO: 10150 - RNA, 17 nt, Artificial Sequence
  Synthetic
gaugacugucucuuaga

SEQ ID NO: 10151 - RNA, 17 nt, Artificial Sequence
  Synthetic
aaacuacuguuguuaga

SEQ ID NO: 10152 - RNA, 17 nt, Artificial Sequence
  Synthetic
gcgggauucagcgccga

SEQ ID NO: 10153 - RNA, 17 nt, Artificial Sequence
  Synthetic
gugcagaggugaagcga

SEQ ID NO: 10154 - RNA, 17 nt, Artificial Sequence
  Synthetic
  misc_feature (8)..(8): n is a, c, g, or u
cgguggunuccaugcga

SEQ ID NO: 10155 - RNA, 17 nt, Artificial Sequence
  Synthetic
gagaccuucgucugcga

SEQ ID NO: 10156 - RNA, 17 nt, Artificial Sequence
  Synthetic
auugagaucuucugcga

SEQ ID NO: 10157 - RNA, 17 nt, Artificial Sequence
  Synthetic
aucgucaaucuucucga

SEQ ID NO: 10158 - RNA, 17 nt, Artificial Sequence
  Synthetic
agcagccauggaaagga

SEQ ID NO: 10159 - RNA, 17 nt, Artificial Sequence
  Synthetic
gaggcauagcagcagga

SEQ ID NO: 10160 - RNA, 17 nt, Artificial Sequence
  Synthetic
ccaaucggcagucagga

SEQ ID NO: 10161 - RNA, 17 nt, Artificial Sequence
  Synthetic
acugcauggccugagga

SEQ ID NO: 10162 - RNA, 17 nt, Artificial Sequence
  Synthetic
caacaguaguuuccgga

SEQ ID NO: 10163 - RNA, 17 nt, Artificial Sequence
  Synthetic
gcgcugaaucccgcgga

SEQ ID NO: 10164 - RNA, 17 nt, Artificial Sequence
  Synthetic
  misc_feature (7)..(7): n is a, c, g, or u
agcccangaugauggga

SEQ ID NO: 10165 - RNA, 17 nt, Artificial Sequence
  Synthetic
gcuuucaguuauaugga

SEQ ID NO: 10166 - RNA, 17 nt, Artificial Sequence
  Synthetic
  misc_feature (7)..(7): n is a, c, g, or u
uccuggnuaucgcugga

SEQ ID NO: 10167 - RNA, 17 nt, Artificial Sequence
  Synthetic
ucaggccaugcagugga

SEQ ID NO: 10168 - RNA, 17 nt, Artificial Sequence
  Synthetic
  misc_feature (2)..(2): n is a, c, g, or u
  misc_feature (12)..(12): n is a, c, g, or u
anccaggacaanuugga

SEQ ID NO: 10169 - RNA, 17 nt, Artificial Sequence
  Synthetic
gugggaaguaauuugga

SEQ ID NO: 10170 - RNA, 17 nt, Artificial Sequence
  Synthetic
ccuugucgagguuugga

SEQ ID NO: 10171 - RNA, 17 nt, Artificial Sequence
  Synthetic
  misc_feature (15)..(15): n is a, c, g, or u
cuugcgaaagcccanga

SEQ ID NO: 10172 - RNA, 17 nt, Artificial Sequence
  Synthetic
  misc_feature (1)..(1): n is a, c, g, or u
  misc_feature (12)..(13): n is a, c, g, or u
  misc_feature (15)..(15): n is a, c, g, or u
nacauucauuunnanga

SEQ ID NO: 10173 - RNA, 17 nt, Artificial Sequence
  Synthetic
  misc_feature (15)..(15): n is a, c, g, or u
ucccgauacagagcnga

SEQ ID NO: 10174 - RNA, 17 nt, Artificial Sequence
  Synthetic
ggugacccacaaaauga

SEQ ID NO: 10175 - RNA, 17 nt, Artificial Sequence
  Synthetic
uucaguuauauggauga

SEQ ID NO: 10176 - RNA, 17 nt, Artificial Sequence
  Synthetic
  misc_feature (12)..(12): n is a, c, g, or u
gcgaaagcccangauga

SEQ ID NO: 10177 - RNA, 17 nt, Artificial Sequence
  Synthetic
uccacugcauggccuga

SEQ ID NO: 10178 - RNA, 17 nt, Artificial Sequence
  Synthetic
  misc_feature (7)..(7): n is a, c, g, or u
gcuagancccagaguga

SEQ ID NO: 10179 - RNA, 17 nt, Artificial Sequence
  Synthetic
gcgacgugcagagguga

SEQ ID NO: 10180 - RNA, 17 nt, Artificial Sequence
  Synthetic
  misc_feature (2)..(2): n is a, c, g, or u
unagugcuguaugguga

SEQ ID NO: 10181 - RNA, 17 nt, Artificial Sequence
  Synthetic
acucugugguauuguga

SEQ ID NO: 10182 - RNA, 17 nt, Artificial Sequence
  Synthetic
guccucgagaagauuga

SEQ ID NO: 10183 - RNA, 17 nt, Artificial Sequence
  Synthetic
guguuggggugaguuga

SEQ ID NO: 10184 - RNA, 17 nt, Artificial Sequence
  Synthetic
  misc_feature (16)..(16): n is a, c, g, or u
caggaugaagaggaana

SEQ ID NO: 10185 - RNA, 17 nt, Artificial Sequence
  Synthetic
  misc_feature (5)..(5): n is a, c, g, or u
  misc_feature (16)..(16): n is a, c, g, or u
gggcngcaaagcccana

SEQ ID NO: 10186 - RNA, 17 nt, Artificial Sequence
  Synthetic
  misc_feature (13)..(13): n is a, c, g, or u
  misc_feature (16)..(16): n is a, c, g, or u
uuuaaugccuuunucna

SEQ ID NO: 10187 - RNA, 17 nt, Artificial Sequence
  Synthetic
  misc_feature (2)..(2): n is a, c, g, or u
  misc_feature (4)..(5): n is a, c, g, or u
  misc_feature (16)..(16): n is a, c, g, or u
cnunnaaaugaauguna

SEQ ID NO: 10188 - RNA, 17 nt, Artificial Sequence
  Synthetic
aauagaugucaacaaua

SEQ ID NO: 10189 - RNA, 17 nt, Artificial Sequence
  Synthetic
cuaugucaauguuaaua

SEQ ID NO: 10190 - RNA, 17 nt, Artificial Sequence
  Synthetic
ugaggcccacucccaua

SEQ ID NO: 10191 - RNA, 17 nt, Artificial Sequence
  Synthetic
gaaguguugauaagaua

SEQ ID NO: 10192 - RNA, 17 nt, Artificial Sequence
  Synthetic
cgagaagauugacgaua

SEQ ID NO: 10193 - RNA, 17 nt, Artificial Sequence
  Synthetic
uuccggaaguguugaua

SEQ ID NO: 10194 - RNA, 17 nt, Artificial Sequence
  Synthetic
gcuccaaauucuuuaua

SEQ ID NO: 10195 - RNA, 17 nt, Artificial Sequence
  Synthetic
agugggggaaagcccua

SEQ ID NO: 10196 - RNA, 17 nt, Artificial Sequence
  Synthetic
cacgagcagggguccua

SEQ ID NO: 10197 - RNA, 17 nt, Artificial Sequence
  Synthetic
cuuucgcaagauuccua

SEQ ID NO: 10198 - RNA, 17 nt, Artificial Sequence
  Synthetic
  misc_feature (2)..(2): n is a, c, g, or u
cnacaucaggauuccua

SEQ ID NO: 10199 - RNA, 17 nt, Artificial Sequence
  Synthetic
agggaguucuucuucua

SEQ ID NO: 10200 - RNA, 17 nt, Artificial Sequence
  Synthetic
cuucucucaauuuucua

SEQ ID NO: 10201 - RNA, 17 nt, Artificial Sequence
  Synthetic
uuucucuuccaaaagua

SEQ ID NO: 10202 - RNA, 17 nt, Artificial Sequence
  Synthetic
uggaggcuugaacagua

SEQ ID NO: 10203 - RNA, 17 nt, Artificial Sequence
  Synthetic
  misc_feature (15)..(15): n is a, c, g, or u
aagaguccucuuaunua

SEQ ID NO: 10204 - RNA, 17 nt, Artificial Sequence
  Synthetic
aauauuugguaagguua

SEQ ID NO: 10205 - RNA, 17 nt, Artificial Sequence
  Synthetic
  misc_feature (14)..(14): n is a, c, g, or u
cauaucccaugaanuua

SEQ ID NO: 10206 - RNA, 17 nt, Artificial Sequence
  Synthetic
gggcgcaccucucuuua

SEQ ID NO: 10207 - RNA, 17 nt, Artificial Sequence
  Synthetic
auaacugaaagccaaac

SEQ ID NO: 10208 - RNA, 17 nt, Artificial Sequence
  Synthetic
acugagccaggagaaac

SEQ ID NO: 10209 - RNA, 17 nt, Artificial Sequence
  Synthetic
cagggcauauugacaac

SEQ ID NO: 10210 - RNA, 17 nt, Artificial Sequence
  Synthetic
  misc_feature (12)..(12): n is a, c, g, or u
gaccguugccgngcaac

SEQ ID NO: 10211 - RNA, 17 nt, Artificial Sequence
  Synthetic
gaggcaguagucggaac

SEQ ID NO: 10212 - RNA, 17 nt, Artificial Sequence
  Synthetic
cccagaggauugggaac

SEQ ID NO: 10213 - RNA, 17 nt, Artificial Sequence
  Synthetic
gcauggugcuggugaac

SEQ ID NO: 10214 - RNA, 17 nt, Artificial Sequence
  Synthetic
cacaucauccauauaac

SEQ ID NO: 10215 - RNA, 17 nt, Artificial Sequence
  Synthetic
ucaacucaccccaacac

SEQ ID NO: 10216 - RNA, 17 nt, Artificial Sequence
  Synthetic
ucagauauuguuuacac

SEQ ID NO: 10217 - RNA, 17 nt, Artificial Sequence
  Synthetic
aaagcccuacgaaccac

SEQ ID NO: 10218 - RNA, 17 nt, Artificial Sequence
  Synthetic
ccguuccggccgaccac

SEQ ID NO: 10219 - RNA, 17 nt, Artificial Sequence
  Synthetic
  misc_feature (12)..(12): n is a, c, g, or u
cgucgcaugganaccac

SEQ ID NO: 10220 - RNA, 17 nt, Artificial Sequence
  Synthetic
aaagagaguaacuccac

SEQ ID NO: 10221 - RNA, 17 nt, Artificial Sequence
  Synthetic
ggcagaugagaaggcac

SEQ ID NO: 10222 - RNA, 17 nt, Artificial Sequence
  Synthetic
gacuggggacccugcac

SEQ ID NO: 10223 - RNA, 17 nt, Artificial Sequence
  Synthetic
  misc_feature (7)..(7): n is a, c, g, or u
accuggngggcguucac

SEQ ID NO: 10224 - RNA, 17 nt, Artificial Sequence
  Synthetic
gaugagaaggcacagac

SEQ ID NO: 10225 - RNA, 17 nt, Artificial Sequence
  Synthetic
ggcacagacggggagac

SEQ ID NO: 10226 - RNA, 17 nt, Artificial Sequence
  Synthetic
  misc_feature (1)..(1): n is a, c, g, or u
ncagcaaugucaacgac

SEQ ID NO: 10227 - RNA, 17 nt, Artificial Sequence
  Synthetic
ucaaucuucucgaggac

SEQ ID NO: 10228 - RNA, 17 nt, Artificial Sequence
  Synthetic
guacaaaaccuucggac

SEQ ID NO: 10229 - RNA, 17 nt, Artificial Sequence
  Synthetic
  misc_feature (6)..(6): n is a, c, g, or u
  misc_feature (8)..(8): n is a, c, g, or u
  misc_feature (14)..(14): n is a, c, g, or u
acugununuuuaangac

SEQ ID NO: 10230 - RNA, 17 nt, Artificial Sequence
  Synthetic
  misc_feature (3)..(3): n is a, c, g, or u
  misc_feature (9)..(9): n is a, c, g, or u
  misc_feature (15)..(15): n is a, c, g, or u
gcnaaacunaucggnac

SEQ ID NO: 10231 - RNA, 17 nt, Artificial Sequence
  Synthetic
ccucugccgauccauac

SEQ ID NO: 10232 - RNA, 17 nt, Artificial Sequence
  Synthetic
  misc_feature (3)..(3): n is a, c, g, or u
ganucaagauguuguac

SEQ ID NO: 10233 - RNA, 17 nt, Artificial Sequence
  Synthetic
  misc_feature (9)..(9): n is a, c, g, or u
  misc_feature (11)..(11): n is a, c, g, or u
gcacuccuncngcuuac

SEQ ID NO: 10234 - RNA, 17 nt, Artificial Sequence
  Synthetic
aaggugggaaacuuuac

SEQ ID NO: 10235 - RNA, 17 nt, Artificial Sequence
  Synthetic
ugaugaaucuggccacc

SEQ ID NO: 10236 - RNA, 17 nt, Artificial Sequence
  Synthetic
  misc_feature (12)..(12): n is a, c, g, or u
aacacuuggcanagacc

SEQ ID NO: 10237 - RNA, 17 nt, Artificial Sequence
  Synthetic
uaaagagaggugcgccc

SEQ ID NO: 10238 - RNA, 17 nt, Artificial Sequence
  Synthetic
gcgccccguggucggcc

SEQ ID NO: 10239 - RNA, 17 nt, Artificial Sequence
  Synthetic
  misc_feature (2)..(2): n is a, c, g, or u
  misc_feature (7)..(7): n is a, c, g, or u
gngggancauucgggcc

SEQ ID NO: 10240 - RNA, 17 nt, Artificial Sequence
  Synthetic
  misc_feature (4)..(4): n is a, c, g, or u
uggngugaacccuggcc

SEQ ID NO: 10241 - RNA, 17 nt, Artificial Sequence
  Synthetic
uucccacccagguggcc

SEQ ID NO: 10242 - RNA, 17 nt, Artificial Sequence
  Synthetic
  misc_feature (3)..(3): n is a, c, g, or u
  misc_feature (15)..(15): n is a, c, g, or u
aungccaagccccancc

SEQ ID NO: 10243 - RNA, 17 nt, Artificial Sequence
  Synthetic
  misc_feature (6)..(6): n is a, c, g, or u
gccaanucaaacaaucc

SEQ ID NO: 10244 - RNA, 17 nt, Artificial Sequence
  Synthetic
agggguccuaggaaucc

SEQ ID NO: 10245 - RNA, 17 nt, Artificial Sequence
  Synthetic
ccgucggcgcugaaucc

SEQ ID NO: 10246 - RNA, 17 nt, Artificial Sequence
  Synthetic
guaccugucuuuaaucc

SEQ ID NO: 10247 - RNA, 17 nt, Artificial Sequence
  Synthetic
acgccgcagacacaucc

SEQ ID NO: 10248 - RNA, 17 nt, Artificial Sequence
  Synthetic
  misc_feature (8)..(8): n is a, c, g, or u
uggaaganccagcaucc

SEQ ID NO: 10249 - RNA, 17 nt, Artificial Sequence
  Synthetic
ugcugccaacuggaucc

SEQ ID NO: 10250 - RNA, 17 nt, Artificial Sequence
  Synthetic
  misc_feature (9)..(9): n is a, c, g, or u
auuaaaccnuauuaucc

SEQ ID NO: 10251 - RNA, 17 nt, Artificial Sequence
  Synthetic
gagacucuaaggccucc

SEQ ID NO: 10252 - RNA, 17 nt, Artificial Sequence
  Synthetic
  misc_feature (6)..(6): n is a, c, g, or u
  misc_feature (12)..(12): n is a, c, g, or u
ccgaunaguuungcucc

SEQ ID NO: 10253 - RNA, 17 nt, Artificial Sequence
  Synthetic
gaggccuuagagucucc

SEQ ID NO: 10254 - RNA, 17 nt, Artificial Sequence
  Synthetic
acauaccuugguagucc

SEQ ID NO: 10255 - RNA, 17 nt, Artificial Sequence
  Synthetic
guagacaaaggacgucc

SEQ ID NO: 10256 - RNA, 17 nt, Artificial Sequence
  Synthetic
caggucuugcauggucc

SEQ ID NO: 10257 - RNA, 17 nt, Artificial Sequence
  Synthetic
aucuuaucaacacuucc

SEQ ID NO: 10258 - RNA, 17 nt, Artificial Sequence
  Synthetic
ggaguaggcugucuucc

SEQ ID NO: 10259 - RNA, 17 nt, Artificial Sequence
  Synthetic
cugguggcuccaguucc

SEQ ID NO: 10260 - RNA, 17 nt, Artificial Sequence
  Synthetic
acaggguuuacuguucc

SEQ ID NO: 10261 - RNA, 17 nt, Artificial Sequence
  Synthetic
ccucugggauucuuucc

SEQ ID NO: 10262 - RNA, 17 nt, Artificial Sequence
  Synthetic
uaacaacaguaguuucc

SEQ ID NO: 10263 - RNA, 17 nt, Artificial Sequence
  Synthetic
uguucaagccuccaagc

SEQ ID NO: 10264 - RNA, 17 nt, Artificial Sequence
  Synthetic
ccgccuguaacacgagc

SEQ ID NO: 10265 - RNA, 17 nt, Artificial Sequence
  Synthetic
agagagaaacuacacgc

SEQ ID NO: 10266 - RNA, 17 nt, Artificial Sequence
  Synthetic
gagaucuucugcgacgc

SEQ ID NO: 10267 - RNA, 17 nt, Artificial Sequence
  Synthetic
ucggcgcugaaucccgc

SEQ ID NO: 10268 - RNA, 17 nt, Artificial Sequence
  Synthetic
  misc_feature (2)..(2): n is a, c, g, or u
anaugauaaaacgccgc

SEQ ID NO: 10269 - RNA, 17 nt, Artificial Sequence
  Synthetic
uccgcgggauucagcgc

SEQ ID NO: 10270 - RNA, 17 nt, Artificial Sequence
  Synthetic
cccacaaaaugaggcgc

SEQ ID NO: 10271 - RNA, 17 nt, Artificial Sequence
  Synthetic
cuacgucccgucggcgc

SEQ ID NO: 10272 - RNA, 17 nt, Artificial Sequence
  Synthetic
acgaaggucucaaucgc

SEQ ID NO: 10273 - RNA, 17 nt, Artificial Sequence
  Synthetic
gaacucccucgccucgc

SEQ ID NO: 10274 - RNA, 17 nt, Artificial Sequence
  Synthetic
cucaaucgccgcgucgc

SEQ ID NO: 10275 - RNA, 17 nt, Artificial Sequence
  Synthetic
cugcucguguuacaggc

SEQ ID NO: 10276 - RNA, 17 nt, Artificial Sequence
  Synthetic
  misc_feature (12)..(12): n is a, c, g, or u
cgauacagagcngaggc

SEQ ID NO: 10277 - RNA, 17 nt, Artificial Sequence
  Synthetic
uggucggccggaacggc

SEQ ID NO: 10278 - RNA, 17 nt, Artificial Sequence
  Synthetic
  misc_feature (4)..(4): n is a, c, g, or u
uuungcuccagaccggc

SEQ ID NO: 10279 - RNA, 17 nt, Artificial Sequence
  Synthetic
  misc_feature (12)..(12): n is a, c, g, or u
agugcacacggnccggc

SEQ ID NO: 10280 - RNA, 17 nt, Artificial Sequence
  Synthetic
  misc_feature (1)..(1): n is a, c, g, or u
  misc_feature (3)..(3): n is a, c, g, or u
ncnucugccguuccggc

SEQ ID NO: 10281 - RNA, 17 nt, Artificial Sequence
  Synthetic
  misc_feature (3)..(3): n is a, c, g, or u
  misc_feature (15)..(15): n is a, c, g, or u
ganuuggcuccgaangc

SEQ ID NO: 10282 - RNA, 17 nt, Artificial Sequence
  Synthetic
  misc_feature (15)..(15): n is a, c, g, or u
ccaccccaaaagacngc

SEQ ID NO: 10283 - RNA, 17 nt, Artificial Sequence
  Synthetic
ucauccucaggccaugc

SEQ ID NO: 10284 - RNA, 17 nt, Artificial Sequence
  Synthetic
gcugucuuccugacugc

SEQ ID NO: 10285 - RNA, 17 nt, Artificial Sequence
  Synthetic
cugccgauccauacugc

SEQ ID NO: 10286 - RNA, 17 nt, Artificial Sequence
  Synthetic
cuuuguggcuccucugc

SEQ ID NO: 10287 - RNA, 17 nt, Artificial Sequence
  Synthetic
ucgcuggaugugucugc

SEQ ID NO: 10288 - RNA, 17 nt, Artificial Sequence
  Synthetic
  misc_feature (1)..(1): n is a, c, g, or u
  misc_feature (9)..(9): n is a, c, g, or u
nucuccaunuucggugc

SEQ ID NO: 10289 - RNA, 17 nt, Artificial Sequence
  Synthetic
  misc_feature (3)..(3): n is a, c, g, or u
cunugccaaguguuugc

SEQ ID NO: 10290 - RNA, 17 nt, Artificial Sequence
  Synthetic
  misc_feature (16)..(16): n is a, c, g, or u
cuucucaucugccggnc

SEQ ID NO: 10291 - RNA, 17 nt, Artificial Sequence
  Synthetic
  misc_feature (13)..(13): n is a, c, g, or u
  misc_feature (16)..(16): n is a, c, g, or u
aacagaguugucngunc

SEQ ID NO: 10292 - RNA, 17 nt, Artificial Sequence
  Synthetic
ucuguguaaacaauauc

SEQ ID NO: 10293 - RNA, 17 nt, Artificial Sequence
  Synthetic
  misc_feature (1)..(1): n is a, c, g, or u
nuauaggccccucacuc

SEQ ID NO: 10294 - RNA, 17 nt, Artificial Sequence
  Synthetic
accacgagucuagacuc

SEQ ID NO: 10295 - RNA, 17 nt, Artificial Sequence
  Synthetic
gcauuauuuacauacuc

SEQ ID NO: 10296 - RNA, 17 nt, Artificial Sequence
  Synthetic
uucuguucccaauccuc

SEQ ID NO: 10297 - RNA, 17 nt, Artificial Sequence
  Synthetic
guggagcccucaggcuc

SEQ ID NO: 10298 - RNA, 17 nt, Artificial Sequence
  Synthetic
  misc_feature (10)..(10): n is a, c, g, or u
auuguuuganuuggcuc

SEQ ID NO: 10299 - RNA, 17 nt, Artificial Sequence
  Synthetic
cucuguuguccucucuc

SEQ ID NO: 10300 - RNA, 17 nt, Artificial Sequence
  Synthetic
cgcggacgacccgucuc

SEQ ID NO: 10301 - RNA, 17 nt, Artificial Sequence
  Synthetic
auagaaggaaagaaguc

SEQ ID NO: 10302 - RNA, 17 nt, Artificial Sequence
  Synthetic
  misc_feature (5)..(5): n is a, c, g, or u
ugggngaggcaguaguc

SEQ ID NO: 10303 - RNA, 17 nt, Artificial Sequence
  Synthetic
uacgcggucuccccguc

SEQ ID NO: 10304 - RNA, 17 nt, Artificial Sequence
  Synthetic
uuugucuacgucccguc

SEQ ID NO: 10305 - RNA, 17 nt, Artificial Sequence
  Synthetic
  misc_feature (9)..(9): n is a, c, g, or u
caagugcanuuuccguc

SEQ ID NO: 10306 - RNA, 17 nt, Artificial Sequence
  Synthetic
ccccgagacgggucguc

SEQ ID NO: 10307 - RNA, 17 nt, Artificial Sequence
  Synthetic
cgauugagaccuucguc

SEQ ID NO: 10308 - RNA, 17 nt, Artificial Sequence
  Synthetic
  misc_feature (1)..(1): n is a, c, g, or u
nuaucgcuggauguguc

SEQ ID NO: 10309 - RNA, 17 nt, Artificial Sequence
  Synthetic
  misc_feature (9)..(9): n is a, c, g, or u
aaaccacanuaguuguc

SEQ ID NO: 10310 - RNA, 17 nt, Artificial Sequence
  Synthetic
  misc_feature (15)..(15): n is a, c, g, or u
auaugggccuaaaanuc

SEQ ID NO: 10311 - RNA, 17 nt, Artificial Sequence
  Synthetic
ggucguccgcgggauuc

SEQ ID NO: 10312 - RNA, 17 nt, Artificial Sequence
  Synthetic
  misc_feature (4)..(4): n is a, c, g, or u
acunaggcaagcuauuc

SEQ ID NO: 10313 - RNA, 17 nt, Artificial Sequence
  Synthetic
ugcuguacaaaaccuuc

SEQ ID NO: 10314 - RNA, 17 nt, Artificial Sequence
  Synthetic
cucucuuuuuugccuuc

SEQ ID NO: 10315 - RNA, 17 nt, Artificial Sequence
  Synthetic
aaagaauuuggagcuuc

SEQ ID NO: 10316 - RNA, 17 nt, Artificial Sequence
  Synthetic
ccgagauugagaucuuc

SEQ ID NO: 10317 - RNA, 17 nt, Artificial Sequence
  Synthetic
caacgggguaaagguuc

SEQ ID NO: 10318 - RNA, 17 nt, Artificial Sequence
  Synthetic
aacaguaaacccuguuc

SEQ ID NO: 10319 - RNA, 17 nt, Artificial Sequence
  Synthetic
acuagugccauuuguuc

SEQ ID NO: 10320 - RNA, 17 nt, Artificial Sequence
  Synthetic
  misc_feature (2)..(2): n is a, c, g, or u
  misc_feature (6)..(6): n is a, c, g, or u
  misc_feature (14)..(14): n is a, c, g, or u
ungugnucuccaunuuc

SEQ ID NO: 10321 - RNA, 17 nt, Artificial Sequence
  Synthetic
aacuuacaaggccuuuc

SEQ ID NO: 10322 - RNA, 17 nt, Artificial Sequence
  Synthetic
  misc_feature (8)..(8): n is a, c, g, or u
guaauagngguaaaaag

SEQ ID NO: 10323 - RNA, 17 nt, Artificial Sequence
  Synthetic
guaaguuggcgagaaag

SEQ ID NO: 10324 - RNA, 17 nt, Artificial Sequence
  Synthetic
uuuuguacagcaacaag

SEQ ID NO: 10325 - RNA, 17 nt, Artificial Sequence
  Synthetic
caccuuaugaguccaag

SEQ ID NO: 10326 - RNA, 17 nt, Artificial Sequence
  Synthetic
ugucuuacuuuuggaag

SEQ ID NO: 10327 - RNA, 17 nt, Artificial Sequence
  Synthetic
gacgugcagaggugaag

SEQ ID NO: 10328 - RNA, 17 nt, Artificial Sequence
  Synthetic
aucucuccaccucuaag

SEQ ID NO: 10329 - RNA, 17 nt, Artificial Sequence
  Synthetic
uuuucauuaacuguaag

SEQ ID NO: 10330 - RNA, 17 nt, Artificial Sequence
  Synthetic
aacugaaagccaaacag

SEQ ID NO: 10331 - RNA, 17 nt, Artificial Sequence
  Synthetic
  misc_feature (12)..(12): n is a, c, g, or u
gcucugcuagancccag

SEQ ID NO: 10332 - RNA, 17 nt, Artificial Sequence
  Synthetic
  misc_feature (1)..(1): n is a, c, g, or u
  misc_feature (13)..(13): n is a, c, g, or u
ngccaagccccanccag

SEQ ID NO: 10333 - RNA, 17 nt, Artificial Sequence
  Synthetic
gccgcagacacauccag

SEQ ID NO: 10334 - RNA, 17 nt, Artificial Sequence
  Synthetic
  misc_feature (6)..(6): n is a, c, g, or u
gaaganccagcauccag

SEQ ID NO: 10335 - RNA, 17 nt, Artificial Sequence
  Synthetic
uuguacagcaacaagag

SEQ ID NO: 10336 - RNA, 17 nt, Artificial Sequence
  Synthetic
  misc_feature (3)..(3): n is a, c, g, or u
  misc_feature (7)..(7): n is a, c, g, or u
ggnauunuauauaagag

SEQ ID NO: 10337 - RNA, 17 nt, Artificial Sequence
  Synthetic
  misc_feature (10)..(10): n is a, c, g, or u
  misc_feature (12)..(12): n is a, c, g, or u
ucuguaagcngnaggag

SEQ ID NO: 10338 - RNA, 17 nt, Artificial Sequence
  Synthetic
  misc_feature (7)..(7): n is a, c, g, or u
ggcaaancagguaggag

SEQ ID NO: 10339 - RNA, 17 nt, Artificial Sequence
  Synthetic
caagauuccuaugggag

SEQ ID NO: 10340 - RNA, 17 nt, Artificial Sequence
  Synthetic
gucucuuagagguggag

SEQ ID NO: 10341 - RNA, 17 nt, Artificial Sequence
  Synthetic
uuuggugucuuuuggag

SEQ ID NO: 10342 - RNA, 17 nt, Artificial Sequence
  Synthetic
gacaagagguuggugag

SEQ ID NO: 10343 - RNA, 17 nt, Artificial Sequence
  Synthetic
cccccuagaaaauugag

SEQ ID NO: 10344 - RNA, 17 nt, Artificial Sequence
  Synthetic
uucucucaauuuucuag

SEQ ID NO: 10345 - RNA, 17 nt, Artificial Sequence
  Synthetic
auuuuggccaggacacg

SEQ ID NO: 10346 - RNA, 17 nt, Artificial Sequence
  Synthetic
caucaacuaccagcacg

SEQ ID NO: 10347 - RNA, 17 nt, Artificial Sequence
  Synthetic
gggauucagcgccgacg

SEQ ID NO: 10348 - RNA, 17 nt, Artificial Sequence
  Synthetic
  misc_feature (10)..(10): n is a, c, g, or u
ucgcaugganaccaccg

SEQ ID NO: 10349 - RNA, 17 nt, Artificial Sequence
  Synthetic
  misc_feature (3)..(3): n is a, c, g, or u
agncccaaacggccccg

SEQ ID NO: 10350 - RNA, 17 nt, Artificial Sequence
  Synthetic
uaacauugagauucccg

SEQ ID NO: 10351 - RNA, 17 nt, Artificial Sequence
  Synthetic
  misc_feature (13)..(13): n is a, c, g, or u
accccaaaagacngccg

SEQ ID NO: 10352 - RNA, 17 nt, Artificial Sequence
  Synthetic
  misc_feature (14)..(14): n is a, c, g, or u
ucucaucugccggnccg

SEQ ID NO: 10353 - RNA, 17 nt, Artificial Sequence
  Synthetic
ccgagacgggucguccg

SEQ ID NO: 10354 - RNA, 17 nt, Artificial Sequence
  Synthetic
gagacgggucguccgcg

SEQ ID NO: 10355 - RNA, 17 nt, Artificial Sequence
  Synthetic
caacuggauccugcgcg

SEQ ID NO: 10356 - RNA, 17 nt, Artificial Sequence
  Synthetic
ccuucgucugcgaggcg

SEQ ID NO: 10357 - RNA, 17 nt, Artificial Sequence
  Synthetic
ggccuuguaaguuggcg

SEQ ID NO: 10358 - RNA, 17 nt, Artificial Sequence
  Synthetic
gccaacuggauccugcg

SEQ ID NO: 10359 - RNA, 17 nt, Artificial Sequence
  Synthetic
gguccaacuggugaucg

SEQ ID NO: 10360 - RNA, 17 nt, Artificial Sequence
  Synthetic
aggguccccaguccucg

SEQ ID NO: 10361 - RNA, 17 nt, Artificial Sequence
  Synthetic
agaagaucucaaucucg

SEQ ID NO: 10362 - RNA, 17 nt, Artificial Sequence
  Synthetic
uucuuuccuucuauucg

SEQ ID NO: 10363 - RNA, 17 nt, Artificial Sequence
  Synthetic
caguuaaugaaaaaagg

SEQ ID NO: 10364 - RNA, 17 nt, Artificial Sequence
  Synthetic
  misc_feature (9)..(9): n is a, c, g, or u
  misc_feature (11)..(11): n is a, c, g, or u
acggcagangnagaagg

SEQ ID NO: 10365 - RNA, 17 nt, Artificial Sequence
  Synthetic
cccuuggacucauaagg

SEQ ID NO: 10366 - RNA, 17 nt, Artificial Sequence
  Synthetic
ccugcucguguuacagg

SEQ ID NO: 10367 - RNA, 17 nt, Artificial Sequence
  Synthetic
uaguaaacugagccagg

SEQ ID NO: 10368 - RNA, 17 nt, Artificial Sequence
  Synthetic
agaugauuaggcagagg

SEQ ID NO: 10369 - RNA, 17 nt, Artificial Sequence
  Synthetic
caugcgacgugcagagg

SEQ ID NO: 10370 - RNA, 17 nt, Artificial Sequence
  Synthetic
gaccgcguaaagagagg

SEQ ID NO: 10371 - RNA, 17 nt, Artificial Sequence
  Synthetic
  misc_feature (2)..(2): n is a, c, g, or u
cngaggcggugucgagg

SEQ ID NO: 10372 - RNA, 17 nt, Artificial Sequence
  Synthetic
ggaggaguugggggagg

SEQ ID NO: 10373 - RNA, 17 nt, Artificial Sequence
  Synthetic
agugcuguauggugagg

SEQ ID NO: 10374 - RNA, 17 nt, Artificial Sequence
  Synthetic
  misc_feature (12)..(12): n is a, c, g, or u
  misc_feature (14)..(14): n is a, c, g, or u
ggucuguaagcngnagg

SEQ ID NO: 10375 - RNA, 17 nt, Artificial Sequence
  Synthetic
ggaguucuucuucuagg

SEQ ID NO: 10376 - RNA, 17 nt, Artificial Sequence
  Synthetic
guuccggccgaccacgg

SEQ ID NO: 10377 - RNA, 17 nt, Artificial Sequence
  Synthetic
ggugaacaauguuccgg

SEQ ID NO: 10378 - RNA, 17 nt, Artificial Sequence
  Synthetic
gaucuucugcgacgcgg

SEQ ID NO: 10379 - RNA, 17 nt, Artificial Sequence
  Synthetic
agaaggcacagacgggg

SEQ ID NO: 10380 - RNA, 17 nt, Artificial Sequence
  Synthetic
cgcaagauuccuauggg

SEQ ID NO: 10381 - RNA, 17 nt, Artificial Sequence
  Synthetic
gaaucuggccaccuggg

SEQ ID NO: 10382 - RNA, 17 nt, Artificial Sequence
  Synthetic
gaaagccaaacaguggg

SEQ ID NO: 10383 - RNA, 17 nt, Artificial Sequence
  Synthetic
accucgacaaggcaugg

SEQ ID NO: 10384 - RNA, 17 nt, Artificial Sequence
  Synthetic
  misc_feature (13)..(13): n is a, c, g, or u
cccugcaccgaanaugg

SEQ ID NO: 10385 - RNA, 17 nt, Artificial Sequence
  Synthetic
uguucccaagaauaugg

SEQ ID NO: 10386 - RNA, 17 nt, Artificial Sequence
  Synthetic
  misc_feature (2)..(2): n is a, c, g, or u
  misc_feature (5)..(5): n is a, c, g, or u
angcnggguccaacugg

SEQ ID NO: 10387 - RNA, 17 nt, Artificial Sequence
  Synthetic
aucuucucgaggacugg

SEQ ID NO: 10388 - RNA, 17 nt, Artificial Sequence
  Synthetic
ccuugggcaagaccugg

SEQ ID NO: 10389 - RNA, 17 nt, Artificial Sequence
  Synthetic
aaguugcauggugcugg

SEQ ID NO: 10390 - RNA, 17 nt, Artificial Sequence
  Synthetic
  misc_feature (5)..(5): n is a, c, g, or u
agacngccguguggugg

SEQ ID NO: 10391 - RNA, 17 nt, Artificial Sequence
  Synthetic
gagugauuggagguugg

SEQ ID NO: 10392 - RNA, 17 nt, Artificial Sequence
  Synthetic
aagcuauucuguguugg

SEQ ID NO: 10393 - RNA, 17 nt, Artificial Sequence
  Synthetic
  misc_feature (8)..(8): n is a, c, g, or u
acacggcngucuuuugg

SEQ ID NO: 10394 - RNA, 17 nt, Artificial Sequence
  Synthetic
uauuuggugucuuuugg

SEQ ID NO: 10395 - RNA, 17 nt, Artificial Sequence
  Synthetic
  misc_feature (9)..(9): n is a, c, g, or u
  misc_feature (16)..(16): n is a, c, g, or u
augaaugunaggaaang

SEQ ID NO: 10396 - RNA, 17 nt, Artificial Sequence
  Synthetic
  misc_feature (5)..(5): n is a, c, g, or u
  misc_feature (16)..(16): n is a, c, g, or u
caaancagguaggagng

SEQ ID NO: 10397 - RNA, 17 nt, Artificial Sequence
  Synthetic
  misc_feature (16)..(16): n is a, c, g, or u
uugggcaagaccuggng

SEQ ID NO: 10398 - RNA, 17 nt, Artificial Sequence
  Synthetic
  misc_feature (3)..(3): n is a, c, g, or u
  misc_feature (16)..(16): n is a, c, g, or u
acngccgugugguggng

SEQ ID NO: 10399 - RNA, 17 nt, Artificial Sequence
  Synthetic
aaguaagacaggaaaug

SEQ ID NO: 10400 - RNA, 17 nt, Artificial Sequence
  Synthetic
aguaggacaugaacaug

SEQ ID NO: 10401 - RNA, 17 nt, Artificial Sequence
  Synthetic
  misc_feature (11)..(11): n is a, c, g, or u
ucacgguggunuccaug

SEQ ID NO: 10402 - RNA, 17 nt, Artificial Sequence
  Synthetic
  misc_feature (2)..(2): n is a, c, g, or u
  misc_feature (10)..(11): n is a, c, g, or u
unggccaucnncgcaug

SEQ ID NO: 10403 - RNA, 17 nt, Artificial Sequence
  Synthetic
  misc_feature (11)..(11): n is a, c, g, or u
acucccuuaanuucaug

SEQ ID NO: 10404 - RNA, 17 nt, Artificial Sequence
  Synthetic
  misc_feature (7)..(7): n is a, c, g, or u
acacggnccggcagaug

SEQ ID NO: 10405 - RNA, 17 nt, Artificial Sequence
  Synthetic
  misc_feature (5)..(5): n is a, c, g, or u
cccangaugaugggaug

SEQ ID NO: 10406 - RNA, 17 nt, Artificial Sequence
  Synthetic
  misc_feature (10)..(10): n is a, c, g, or u
gaaagcccangaugaug

SEQ ID NO: 10407 - RNA, 17 nt, Artificial Sequence
  Synthetic
uagaugucaacaauaug

SEQ ID NO: 10408 - RNA, 17 nt, Artificial Sequence
  Synthetic
augaaucuggccaccug

SEQ ID NO: 10409 - RNA, 17 nt, Artificial Sequence
  Synthetic
aauaugcccugagccug

SEQ ID NO: 10410 - RNA, 17 nt, Artificial Sequence
  Synthetic
cugccaacuggauccug

SEQ ID NO: 10411 - RNA, 17 nt, Artificial Sequence
  Synthetic
cacaaaaugaggcgcug

SEQ ID NO: 10412 - RNA, 17 nt, Artificial Sequence
  Synthetic
cuguucccaauccucug

SEQ ID NO: 10413 - RNA, 17 nt, Artificial Sequence
  Synthetic
gagauugagaucuucug

SEQ ID NO: 10414 - RNA, 17 nt, Artificial Sequence
  Synthetic
cugaaagccaaacagug

SEQ ID NO: 10415 - RNA, 17 nt, Artificial Sequence
  Synthetic
  misc_feature (11)..(11): n is a, c, g, or u
ccaagccccanccagug

SEQ ID NO: 10416 - RNA, 17 nt, Artificial Sequence
  Synthetic
  misc_feature (8)..(8): n is a, c, g, or u
ugcuagancccagagug

SEQ ID NO: 10417 - RNA, 17 nt, Artificial Sequence
  Synthetic
  misc_feature (8)..(8): n is a, c, g, or u
  misc_feature (10)..(10): n is a, c, g, or u
uguaagcngnaggagug

SEQ ID NO: 10418 - RNA, 17 nt, Artificial Sequence
  Synthetic
uuuggccaggacacgug

SEQ ID NO: 10419 - RNA, 17 nt, Artificial Sequence
  Synthetic
cuuggacucauaaggug

SEQ ID NO: 10420 - RNA, 17 nt, Artificial Sequence
  Synthetic
aucuggccaccugggug

SEQ ID NO: 10421 - RNA, 17 nt, Artificial Sequence
  Synthetic
aggacaagagguuggug

SEQ ID NO: 10422 - RNA, 17 nt, Artificial Sequence
  Synthetic
  misc_feature (10)..(10): n is a, c, g, or u
aguaugucanagaauug

SEQ ID NO: 10423 - RNA, 17 nt, Artificial Sequence
  Synthetic
aagggauacuaacauug

SEQ ID NO: 10424 - RNA, 17 nt, Artificial Sequence
  Synthetic
ucaaacaauccagauug

SEQ ID NO: 10425 - RNA, 17 nt, Artificial Sequence
  Synthetic
ugagauucccgagauug

SEQ ID NO: 10426 - RNA, 17 nt, Artificial Sequence
  Synthetic
cugcgacgcggcgauug

SEQ ID NO: 10427 - RNA, 17 nt, Artificial Sequence
  Synthetic
agaaucccagaggauug

SEQ ID NO: 10428 - RNA, 17 nt, Artificial Sequence
  Synthetic
uggaugaugugguauug

SEQ ID NO: 10429 - RNA, 17 nt, Artificial Sequence
  Synthetic
cuccaagcugugccuug

SEQ ID NO: 10430 - RNA, 17 nt, Artificial Sequence
  Synthetic
cucccauaggaaucuug

SEQ ID NO: 10431 - RNA, 17 nt, Artificial Sequence
  Synthetic
gggucaccauauucuug

SEQ ID NO: 10432 - RNA, 17 nt, Artificial Sequence
  Synthetic
  misc_feature (2)..(2): n is a, c, g, or u
angacugggaggaguug

SEQ ID NO: 10433 - RNA, 17 nt, Artificial Sequence
  Synthetic
cgcagcgccucauuuug

SEQ ID NO: 10434 - RNA, 17 nt, Artificial Sequence
  Synthetic
  misc_feature (2)..(2): n is a, c, g, or u
  misc_feature (9)..(9): n is a, c, g, or u
  misc_feature (17)..(17): n is a, c, g, or u
gnuuugccncuggccan

SEQ ID NO: 10435 - RNA, 17 nt, Artificial Sequence
  Synthetic
  misc_feature (17)..(17): n is a, c, g, or u
cagcaaacacuuggcan

SEQ ID NO: 10436 - RNA, 17 nt, Artificial Sequence
  Synthetic
  misc_feature (17)..(17): n is a, c, g, or u
auuggaaaguaugucan

SEQ ID NO: 10437 - RNA, 17 nt, Artificial Sequence
  Synthetic
  misc_feature (5)..(5): n is a, c, g, or u
  misc_feature (17)..(17): n is a, c, g, or u
aaaanucagacaacuan

SEQ ID NO: 10438 - RNA, 17 nt, Artificial Sequence
  Synthetic
  misc_feature (17)..(17): n is a, c, g, or u
uucccaucccaucaucn

SEQ ID NO: 10439 - RNA, 17 nt, Artificial Sequence
  Synthetic
  misc_feature (17)..(17): n is a, c, g, or u
cggugucgaggagaucn

SEQ ID NO: 10440 - RNA, 17 nt, Artificial Sequence
  Synthetic
  misc_feature (17)..(17): n is a, c, g, or u
agguuccacgcaugcgn

SEQ ID NO: 10441 - RNA, 17 nt, Artificial Sequence
  Synthetic
  misc_feature (14)..(14): n is a, c, g, or u
  misc_feature (17)..(17): n is a, c, g, or u
uuccauggcugcunggn

SEQ ID NO: 10442 - RNA, 17 nt, Artificial Sequence
  Synthetic
  misc_feature (17)..(17): n is a, c, g, or u
acgcaacccccacuggn

SEQ ID NO: 10443 - RNA, 17 nt, Artificial Sequence
  Synthetic
  misc_feature (15)..(15): n is a, c, g, or u
  misc_feature (17)..(17): n is a, c, g, or u
gccggaacggcagangn

SEQ ID NO: 10444 - RNA, 17 nt, Artificial Sequence
  Synthetic
  misc_feature (17)..(17): n is a, c, g, or u
acagaauagcuugccun

SEQ ID NO: 10445 - RNA, 17 nt, Artificial Sequence
  Synthetic
  misc_feature (1)..(1): n is a, c, g, or u
  misc_feature (17)..(17): n is a, c, g, or u
naagacccacaauucun

SEQ ID NO: 10446 - RNA, 17 nt, Artificial Sequence
  Synthetic
  misc_feature (1)..(1): n is a, c, g, or u
  misc_feature (17)..(17): n is a, c, g, or u
nagaauugugggucuun

SEQ ID NO: 10447 - RNA, 17 nt, Artificial Sequence
  Synthetic
  misc_feature (7)..(7): n is a, c, g, or u
  misc_feature (11)..(11): n is a, c, g, or u
  misc_feature (17)..(17): n is a, c, g, or u
uauuuanaggnaguuun

SEQ ID NO: 10448 - RNA, 17 nt, Artificial Sequence
  Synthetic
  misc_feature (2)..(2): n is a, c, g, or u
  misc_feature (8)..(8): n is a, c, g, or u
  misc_feature (12)..(12): n is a, c, g, or u
gnaaacunccunuaaau

SEQ ID NO: 10449 - RNA, 17 nt, Artificial Sequence
  Synthetic
  misc_feature (12)..(12): n is a, c, g, or u
aaaguaugucanagaau

SEQ ID NO: 10450 - RNA, 17 nt, Artificial Sequence
  Synthetic
  misc_feature (12)..(12): n is a, c, g, or u
ucgaggagaucncgaau

SEQ ID NO: 10451 - RNA, 17 nt, Artificial Sequence
  Synthetic
  misc_feature (2)..(2): n is a, c, g, or u
  misc_feature (8)..(8): n is a, c, g, or u
  misc_feature (14)..(14): n is a, c, g, or u
angagganauuaunaau

SEQ ID NO: 10452 - RNA, 17 nt, Artificial Sequence
  Synthetic
uaggcccauauuaacau

SEQ ID NO: 10453 - RNA, 17 nt, Artificial Sequence
  Synthetic
  misc_feature (2)..(2): n is a, c, g, or u
  misc_feature (5)..(5): n is a, c, g, or u
  misc_feature (8)..(8): n is a, c, g, or u
  misc_feature (11)..(11): n is a, c, g, or u
angcnggnuanccacau

SEQ ID NO: 10454 - RNA, 17 nt, Artificial Sequence
  Synthetic
  misc_feature (5)..(5): n is a, c, g, or u
cuuungggcauggacau

SEQ ID NO: 10455 - RNA, 17 nt, Artificial Sequence
  Synthetic
  misc_feature (5)..(5): n is a, c, g, or u
  misc_feature (8)..(8): n is a, c, g, or u
cacanccnagcagccau

SEQ ID NO: 10456 - RNA, 17 nt, Artificial Sequence
  Synthetic
accucugcacgucgcau

SEQ ID NO: 10457 - RNA, 17 nt, Artificial Sequence
  Synthetic
aaaccucgacaaggcau

SEQ ID NO: 10458 - RNA, 17 nt, Artificial Sequence
  Synthetic
  misc_feature (11)..(11): n is a, c, g, or u
ggguggcuuungggcau

SEQ ID NO: 10459 - RNA, 17 nt, Artificial Sequence
  Synthetic
aggugaaaaaguugcau

SEQ ID NO: 10460 - RNA, 17 nt, Artificial Sequence
  Synthetic
ccaguccucgagaagau

SEQ ID NO: 10461 - RNA, 17 nt, Artificial Sequence
  Synthetic
ggaaguguugauaagau

SEQ ID NO: 10462 - RNA, 17 nt, Artificial Sequence
  Synthetic
  misc_feature (2)..(2): n is a, c, g, or u
anucaaacaauccagau

SEQ ID NO: 10463 - RNA, 17 nt, Artificial Sequence
  Synthetic
aaagaaucccagaggau

SEQ ID NO: 10464 - RNA, 17 nt, Artificial Sequence
  Synthetic
uuugguaagguuaggau

SEQ ID NO: 10465 - RNA, 17 nt, Artificial Sequence
  Synthetic
  misc_feature (1)..(1): n is a, c, g, or u
nggguccaacuggugau

SEQ ID NO: 10466 - RNA, 17 nt, Artificial Sequence
  Synthetic
cuuguucccaagaauau

SEQ ID NO: 10467 - RNA, 17 nt, Artificial Sequence
  Synthetic
ucaggcucagggcauau

SEQ ID NO: 10468 - RNA, 17 nt, Artificial Sequence
  Synthetic
uuggcuuucaguuauau

SEQ ID NO: 10469 - RNA, 17 nt, Artificial Sequence
  Synthetic
  misc_feature (4)..(4): n is a, c, g, or u
ccunuaaauagaccuau

SEQ ID NO: 10470 - RNA, 17 nt, Artificial Sequence
  Synthetic
uaggaguuccgcaguau

SEQ ID NO: 10471 - RNA, 17 nt, Artificial Sequence
  Synthetic
uauggaugaugugguau

SEQ ID NO: 10472 - RNA, 17 nt, Artificial Sequence
  Synthetic
ucuagacucugugguau

SEQ ID NO: 10473 - RNA, 17 nt, Artificial Sequence
  Synthetic
  misc_feature (7)..(7): n is a, c, g, or u
uugccunagugcuguau

SEQ ID NO: 10474 - RNA, 17 nt, Artificial Sequence
  Synthetic
  misc_feature (8)..(8): n is a, c, g, or u
ccgccucngcucuguau

SEQ ID NO: 10475 - RNA, 17 nt, Artificial Sequence
  Synthetic
  misc_feature (1)..(1): n is a, c, g, or u
  misc_feature (4)..(4): n is a, c, g, or u
nggnugugcugccaacu

SEQ ID NO: 10476 - RNA, 17 nt, Artificial Sequence
  Synthetic
  misc_feature (4)..(4): n is a, c, g, or u
  misc_feature (7)..(7): n is a, c, g, or u
gaangcnggguccaacu

SEQ ID NO: 10477 - RNA, 17 nt, Artificial Sequence
  Synthetic
accacagagucuagacu

SEQ ID NO: 10478 - RNA, 17 nt, Artificial Sequence
  Synthetic
caaucuucucgaggacu

SEQ ID NO: 10479 - RNA, 17 nt, Artificial Sequence
  Synthetic
uccuggcucaguuuacu

SEQ ID NO: 10480 - RNA, 17 nt, Artificial Sequence
  Synthetic
guuggucuuccaaaccu

SEQ ID NO: 10481 - RNA, 17 nt, Artificial Sequence
  Synthetic
  misc_feature (9)..(9): n is a, c, g, or u
ccucuuaunuaagaccu

SEQ ID NO: 10482 - RNA, 17 nt, Artificial Sequence
  Synthetic
acgugggugcucccccu

SEQ ID NO: 10483 - RNA, 17 nt, Artificial Sequence
  Synthetic
gacgaggcagguccccu

SEQ ID NO: 10484 - RNA, 17 nt, Artificial Sequence
  Synthetic
  misc_feature (3)..(3): n is a, c, g, or u
cunacuacuaauucccu

SEQ ID NO: 10485 - RNA, 17 nt, Artificial Sequence
  Synthetic
gccuccaagcugugccu

SEQ ID NO: 10486 - RNA, 17 nt, Artificial Sequence
  Synthetic
  misc_feature (9)..(9): n is a, c, g, or u
ucuauucgngaucuccu

SEQ ID NO: 10487 - RNA, 17 nt, Artificial Sequence
  Synthetic
ugguaguugauguuccu

SEQ ID NO: 10488 - RNA, 17 nt, Artificial Sequence
  Synthetic
  misc_feature (10)..(10): n is a, c, g, or u
uuguccuggnuaucgcu

SEQ ID NO: 10489 - RNA, 17 nt, Artificial Sequence
  Synthetic
ggcacagcuuggaggcu

SEQ ID NO: 10490 - RNA, 17 nt, Artificial Sequence
  Synthetic
uuccuaggaccccugcu

SEQ ID NO: 10491 - RNA, 17 nt, Artificial Sequence
  Synthetic
  misc_feature (8)..(8): n is a, c, g, or u
gccuauanuuuccugcu

SEQ ID NO: 10492 - RNA, 17 nt, Artificial Sequence
  Synthetic
uuccaccaagcucugcu

SEQ ID NO: 10493 - RNA, 17 nt, Artificial Sequence
  Synthetic
aaaaguugcauggugcu

SEQ ID NO: 10494 - RNA, 17 nt, Artificial Sequence
  Synthetic
gguugaagucccaaucu

SEQ ID NO: 10495 - RNA, 17 nt, Artificial Sequence
  Synthetic
gcagaagaucucaaucu

SEQ ID NO: 10496 - RNA, 17 nt, Artificial Sequence
  Synthetic
cacucccauaggaaucu

SEQ ID NO: 10497 - RNA, 17 nt, Artificial Sequence
  Synthetic
aagucuguacaacaucu

SEQ ID NO: 10498 - RNA, 17 nt, Artificial Sequence
  Synthetic
acaauaccacagagucu

SEQ ID NO: 10499 - RNA, 17 nt, Artificial Sequence
  Synthetic
aaguccaccacgagucu

SEQ ID NO: 10500 - RNA, 17 nt, Artificial Sequence
  Synthetic
ccgcggacgacccgucu

SEQ ID NO: 10501 - RNA, 17 nt, Artificial Sequence
  Synthetic
gugggucaccauauucu

SEQ ID NO: 10502 - RNA, 17 nt, Artificial Sequence
  Synthetic
gagggaguucuucuucu

SEQ ID NO: 10503 - RNA, 17 nt, Artificial Sequence
  Synthetic
uucuuguugguucuucu

SEQ ID NO: 10504 - RNA, 17 nt, Artificial Sequence
  Synthetic
acuucucucaauuuucu

SEQ ID NO: 10505 - RNA, 17 nt, Artificial Sequence
  Synthetic
gauauguaauuggaagu

SEQ ID NO: 10506 - RNA, 17 nt, Artificial Sequence
  Synthetic
acugaaagccaaacagu

SEQ ID NO: 10507 - RNA, 17 nt, Artificial Sequence
  Synthetic
uuaaagacagguacagu

SEQ ID NO: 10508 - RNA, 17 nt, Artificial Sequence
  Synthetic
  misc_feature (12)..(12): n is a, c, g, or u
gccaagccccanccagu

SEQ ID NO: 10509 - RNA, 17 nt, Artificial Sequence
  Synthetic
uccucaggccaugcagu

SEQ ID NO: 10510 - RNA, 17 nt, Artificial Sequence
  Synthetic
  misc_feature (4)..(4): n is a, c, g, or u
uaangacugggaggagu

SEQ ID NO: 10511 - RNA, 17 nt, Artificial Sequence
  Synthetic
ucuguguuggggugagu

SEQ ID NO: 10512 - RNA, 17 nt, Artificial Sequence
  Synthetic
ggucccgugcugguagu

SEQ ID NO: 10513 - RNA, 17 nt, Artificial Sequence
  Synthetic
cuaauaaaaccaaacgu

SEQ ID NO: 10514 - RNA, 17 nt, Artificial Sequence
  Synthetic
cagcgccgacgggacgu

SEQ ID NO: 10515 - RNA, 17 nt, Artificial Sequence
  Synthetic
  misc_feature (7)..(8): n is a, c, g, or u
gccaucnncgcaugcgu

SEQ ID NO: 10516 - RNA, 17 nt, Artificial Sequence
  Synthetic
acagagucuagacucgu

SEQ ID NO: 10517 - RNA, 17 nt, Artificial Sequence
  Synthetic
gccucaaggucggucgu

SEQ ID NO: 10518 - RNA, 17 nt, Artificial Sequence
  Synthetic
uuuguucagugguucgu

SEQ ID NO: 10519 - RNA, 17 nt, Artificial Sequence
  Synthetic
ggugagugauuggaggu

SEQ ID NO: 10520 - RNA, 17 nt, Artificial Sequence
  Synthetic
  misc_feature (6)..(6): n is a, c, g, or u
ccccanccagugggggu

SEQ ID NO: 10521 - RNA, 17 nt, Artificial Sequence
  Synthetic
  misc_feature (1)..(1): n is a, c, g, or u
nugauccuuguuggggu

SEQ ID NO: 10522 - RNA, 17 nt, Artificial Sequence
  Synthetic
gagucuagacucguggu

SEQ ID NO: 10523 - RNA, 17 nt, Artificial Sequence
  Synthetic
  misc_feature (1)..(1): n is a, c, g, or u
nucuagcagagcuuggu

SEQ ID NO: 10524 - RNA, 17 nt, Artificial Sequence
  Synthetic
ccuaggaauccugaugu

SEQ ID NO: 10525 - RNA, 17 nt, Artificial Sequence
  Synthetic
uuauuuacauacucugu

SEQ ID NO: 10526 - RNA, 17 nt, Artificial Sequence
  Synthetic
guaguuuccggaagugu

SEQ ID NO: 10527 - RNA, 17 nt, Artificial Sequence
  Synthetic
ggugucuuuuggagugu

SEQ ID NO: 10528 - RNA, 17 nt, Artificial Sequence
  Synthetic
  misc_feature (10)..(10): n is a, c, g, or u
ccaaaagacngccgugu

SEQ ID NO: 10529 - RNA, 17 nt, Artificial Sequence
  Synthetic
ggcaagcuauucugugu

SEQ ID NO: 10530 - RNA, 17 nt, Artificial Sequence
  Synthetic
gagggcccacauauugu

SEQ ID NO: 10531 - RNA, 17 nt, Artificial Sequence
  Synthetic
  misc_feature (7)..(7): n is a, c, g, or u
uggccanugauccuugu

SEQ ID NO: 10532 - RNA, 17 nt, Artificial Sequence
  Synthetic
ggcgggguuuuucuugu

SEQ ID NO: 10533 - RNA, 17 nt, Artificial Sequence
  Synthetic
  misc_feature (16)..(16): n is a, c, g, or u
guuccuugagcagganu

SEQ ID NO: 10534 - RNA, 17 nt, Artificial Sequence
  Synthetic
  misc_feature (16)..(16): n is a, c, g, or u
cgcaacccccacuggnu

SEQ ID NO: 10535 - RNA, 17 nt, Artificial Sequence
  Synthetic
ucaugggauauguaauu

SEQ ID NO: 10536 - RNA, 17 nt, Artificial Sequence
  Synthetic
  misc_feature (8)..(8): n is a, c, g, or u
  misc_feature (13)..(13): n is a, c, g, or u
guaggagngggancauu

SEQ ID NO: 10537 - RNA, 17 nt, Artificial Sequence
  Synthetic
cuuccugacugccgauu

SEQ ID NO: 10538 - RNA, 17 nt, Artificial Sequence
  Synthetic
aaauagaccuauugauu

SEQ ID NO: 10539 - RNA, 17 nt, Artificial Sequence
  Synthetic
auggaugaugugguauu

SEQ ID NO: 10540 - RNA, 17 nt, Artificial Sequence
  Synthetic
caacguuugguuuuauu

SEQ ID NO: 10541 - RNA, 17 nt, Artificial Sequence
  Synthetic
cgcaugcguggaaccuu

SEQ ID NO: 10542 - RNA, 17 nt, Artificial Sequence
  Synthetic
accaaauauuugcccuu

SEQ ID NO: 10543 - RNA, 17 nt, Artificial Sequence
  Synthetic
caauguuaguaucccuu

SEQ ID NO: 10544 - RNA, 17 nt, Artificial Sequence
  Synthetic
  misc_feature (4)..(4): n is a, c, g, or u
gggnucuagcagagcuu

SEQ ID NO: 10545 - RNA, 17 nt, Artificial Sequence
  Synthetic
  misc_feature (3)..(3): n is a, c, g, or u
uanauaagaggacucuu

SEQ ID NO: 10546 - RNA, 17 nt, Artificial Sequence
  Synthetic
  misc_feature (1)..(1): n is a, c, g, or u
  misc_feature (7)..(7): n is a, c, g, or u
  misc_feature (9)..(9): n is a, c, g, or u
nuuaaananacagucuu

SEQ ID NO: 10547 - RNA, 17 nt, Artificial Sequence
  Synthetic
caauuuucuuuugucuu

SEQ ID NO: 10548 - RNA, 17 nt, Artificial Sequence
  Synthetic
auauguaauuggaaguu

SEQ ID NO: 10549 - RNA, 17 nt, Artificial Sequence
  Synthetic
gaaaggccuuguaaguu

SEQ ID NO: 10550 - RNA, 17 nt, Artificial Sequence
  Synthetic
uuucccgaucaccaguu

SEQ ID NO: 10551 - RNA, 17 nt, Artificial Sequence
  Synthetic
  misc_feature (3)..(3): n is a, c, g, or u
aangacugggaggaguu

SEQ ID NO: 10552 - RNA, 17 nt, Artificial Sequence
  Synthetic
uaauaaaaccaaacguu

SEQ ID NO: 10553 - RNA, 17 nt, Artificial Sequence
  Synthetic
cccgucucggggccguu

SEQ ID NO: 10554 - RNA, 17 nt, Artificial Sequence
  Synthetic
uuggaggacaagagguu

SEQ ID NO: 10555 - RNA, 17 nt, Artificial Sequence
  Synthetic
gugagugauuggagguu

SEQ ID NO: 10556 - RNA, 17 nt, Artificial Sequence
  Synthetic
gcaagcuauucuguguu

SEQ ID NO: 10557 - RNA, 17 nt, Artificial Sequence
  Synthetic
ucccaaucuggauuguu

SEQ ID NO: 10558 - RNA, 17 nt, Artificial Sequence
  Synthetic
  misc_feature (6)..(6): n is a, c, g, or u
ggccanugauccuuguu

SEQ ID NO: 10559 - RNA, 17 nt, Artificial Sequence
  Synthetic
cggaaacuacuguuguu

SEQ ID NO: 10560 - RNA, 17 nt, Artificial Sequence
  Synthetic
ugggugggaaguaauuu

SEQ ID NO: 10561 - RNA, 17 nt, Artificial Sequence
  Synthetic
auaagauaggggcauuu

SEQ ID NO: 10562 - RNA, 17 nt, Artificial Sequence
  Synthetic
cacgcagcgccucauuu

SEQ ID NO: 10563 - RNA, 17 nt, Artificial Sequence
  Synthetic
acuguucuugaguauuu

SEQ ID NO: 10564 - RNA, 17 nt, Artificial Sequence
  Synthetic
gugccuuggguggcuuu

SEQ ID NO: 10565 - RNA, 17 nt, Artificial Sequence
  Synthetic
  misc_feature (11)..(11): n is a, c, g, or u
accacacggcngucuuu

SEQ ID NO: 10566 - RNA, 17 nt, Artificial Sequence
  Synthetic
uaaauaaugccuaguuu

SEQ ID NO: 10567 - RNA, 17 nt, Artificial Sequence
  Synthetic
augccuugucgagguuu

SEQ ID NO: 10568 - RNA, 17 nt, Artificial Sequence
  Synthetic
uuuccugucuuacuuuu

SEQ ID NO: 10569 - RNA, 17 nt, Artificial Sequence
  Synthetic
  misc_feature (10)..(10): n is a, c, g, or u
ccacacggcngucuuuu

SEQ ID NO: 10570 - RNA, 20 nt, Artificial Sequence
  Synthetic
  misc_feature (13)..(13): n is a, c, g, or u
aauugguaauagngguaaaa

SEQ ID NO: 10571 - RNA, 20 nt, Artificial Sequence
  Synthetic
  misc_feature (2)..(2): n is a, c, g, or u
  misc_feature (5)..(5): n is a, c, g, or u
gnuanccacauuguguaaaa

SEQ ID NO: 10572 - RNA, 20 nt, Artificial Sequence
  Synthetic
aauguauacccaaagacaaa

SEQ ID NO: 10573 - RNA, 20 nt, Artificial Sequence
  Synthetic
gccgacgggacguagacaaa

SEQ ID NO: 10574 - RNA, 20 nt, Artificial Sequence
  Synthetic
uccuggaaguagaggacaaa

SEQ ID NO: 10575 - RNA, 20 nt, Artificial Sequence
  Synthetic
ccugagggcuccaccccaaa

SEQ ID NO: 10576 - RNA, 20 nt, Artificial Sequence
  Synthetic
gugcgaauccacacuccaaa

SEQ ID NO: 10577 - RNA, 20 nt, Artificial Sequence
  Synthetic
uccaaaaguaagacaggaaa

SEQ ID NO: 10578 - RNA, 20 nt, Artificial Sequence
  Synthetic
  misc_feature (2)..(2): n is a, c, g, or u
  misc_feature (8)..(8): n is a, c, g, or u
  misc_feature (14)..(14): n is a, c, g, or u
  misc_feature (16)..(17): n is a, c, g, or u
unauaaunuccucnunnaaa

SEQ ID NO: 10579 - RNA, 20 nt, Artificial Sequence
  Synthetic
  misc_feature (3)..(3): n is a, c, g, or u
  misc_feature (6)..(6): n is a, c, g, or u
ggnuanccacauuguguaaa

SEQ ID NO: 10580 - RNA, 20 nt, Artificial Sequence
  Synthetic
ugggacuucaaccccaacaa

SEQ ID NO: 10581 - RNA, 20 nt, Artificial Sequence
  Synthetic
  misc_feature (5)..(5): n is a, c, g, or u
uugcngccccuuuuacacaa

SEQ ID NO: 10582 - RNA, 20 nt, Artificial Sequence
  Synthetic
  misc_feature (13)..(13): n is a, c, g, or u
ccuacagccuccnaguacaa

SEQ ID NO: 10583 - RNA, 20 nt, Artificial Sequence
  Synthetic
  misc_feature (6)..(6): n is a, c, g, or u
ggguunaaauguauacccaa

SEQ ID NO: 10584 - RNA, 20 nt, Artificial Sequence
  Synthetic
  misc_feature (16)..(16): n is a, c, g, or u
accugaccguugccgngcaa

SEQ ID NO: 10585 - RNA, 20 nt, Artificial Sequence
  Synthetic
  misc_feature (10)..(10): n is a, c, g, or u
ccugcacganuccugcucaa

SEQ ID NO: 10586 - RNA, 20 nt, Artificial Sequence
  Synthetic
  misc_feature (8)..(8): n is a, c, g, or u
uggacucncagcaaugucaa

SEQ ID NO: 10587 - RNA, 20 nt, Artificial Sequence
  Synthetic
gaccuugaggcauacuucaa

SEQ ID NO: 10588 - RNA, 20 nt, Artificial Sequence
  Synthetic
ccagaggauugggaacagaa

SEQ ID NO: 10589 - RNA, 20 nt, Artificial Sequence
  Synthetic
gccuuguaaguuggcgagaa

SEQ ID NO: 10590 - RNA, 20 nt, Artificial Sequence
  Synthetic
  misc_feature (14)..(14): n is a, c, g, or u
  misc_feature (16)..(16): n is a, c, g, or u
ccggaacggcagangnagaa

SEQ ID NO: 10591 - RNA, 20 nt, Artificial Sequence
  Synthetic
  misc_feature (11)..(11): n is a, c, g, or u
cgaggagaucncgaauagaa

SEQ ID NO: 10592 - RNA, 20 nt, Artificial Sequence
  Synthetic
  misc_feature (7)..(7): n is a, c, g, or u
gagaucncgaauagaaggaa

SEQ ID NO: 10593 - RNA, 20 nt, Artificial Sequence
  Synthetic
guccaacuggugaucgggaa

SEQ ID NO: 10594 - RNA, 20 nt, Artificial Sequence
  Synthetic
aguaucccuuggacucauaa

SEQ ID NO: 10595 - RNA, 20 nt, Artificial Sequence
  Synthetic
  misc_feature (15)..(15): n is a, c, g, or u
auggacauugacccnuauaa

SEQ ID NO: 10596 - RNA, 20 nt, Artificial Sequence
  Synthetic
  misc_feature (13)..(13): n is a, c, g, or u
aaugccuaguuungaaguaa

SEQ ID NO: 10597 - RNA, 20 nt, Artificial Sequence
  Synthetic
  misc_feature (10)..(10): n is a, c, g, or u
aguuugccanucaggauuaa

SEQ ID NO: 10598 - RNA, 20 nt, Artificial Sequence
  Synthetic
gugggcccucuuacaguuaa

SEQ ID NO: 10599 - RNA, 20 nt, Artificial Sequence
  Synthetic
  misc_feature (13)..(13): n is a, c, g, or u
  misc_feature (15)..(15): n is a, c, g, or u
uucaaagacugununuuuaa

SEQ ID NO: 10600 - RNA, 20 nt, Artificial Sequence
  Synthetic
guaguccagaagaaccaaca

SEQ ID NO: 10601 - RNA, 20 nt, Artificial Sequence
  Synthetic
ugugaggauucuugucaaca

SEQ ID NO: 10602 - RNA, 20 nt, Artificial Sequence
  Synthetic
ucucuuccaaaaguaagaca

SEQ ID NO: 10603 - RNA, 20 nt, Artificial Sequence
  Synthetic
  misc_feature (4)..(4): n is a, c, g, or u
ugcnaauuuuggccaggaca

SEQ ID NO: 10604 - RNA, 20 nt, Artificial Sequence
  Synthetic
gaggcuugaacaguaggaca

SEQ ID NO: 10605 - RNA, 20 nt, Artificial Sequence
  Synthetic
cgggguuuuucuuguugaca

SEQ ID NO: 10606 - RNA, 20 nt, Artificial Sequence
  Synthetic
gaugaugggaugggaauaca

SEQ ID NO: 10607 - RNA, 20 nt, Artificial Sequence
  Synthetic
ggaccccugcucguguuaca

SEQ ID NO: 10608 - RNA, 20 nt, Artificial Sequence
  Synthetic
ucugccguuccggccgacca

SEQ ID NO: 10609 - RNA, 20 nt, Artificial Sequence
  Synthetic
uccaaauuacuucccaccca

SEQ ID NO: 10610 - RNA, 20 nt, Artificial Sequence
  Synthetic
uuuucuagggggagcaccca

SEQ ID NO: 10611 - RNA, 20 nt, Artificial Sequence
  Synthetic
aggaaucuugcgaaagccca

SEQ ID NO: 10612 - RNA, 20 nt, Artificial Sequence
  Synthetic
acuuccaauuacauauccca

SEQ ID NO: 10613 - RNA, 20 nt, Artificial Sequence
  Synthetic
ugcuguagcucuuguuccca

SEQ ID NO: 10614 - RNA, 20 nt, Artificial Sequence
  Synthetic
  misc_feature (9)..(9): n is a, c, g, or u
gggacugcnaauuuuggcca

SEQ ID NO: 10615 - RNA, 20 nt, Artificial Sequence
  Synthetic
  misc_feature (15)..(15): n is a, c, g, or u
caacggucaggucunugcca

SEQ ID NO: 10616 - RNA, 20 nt, Artificial Sequence
  Synthetic
  misc_feature (17)..(17): n is a, c, g, or u
gacacauccagcgauancca

SEQ ID NO: 10617 - RNA, 20 nt, Artificial Sequence
  Synthetic
uuucccaccuuaugagucca

SEQ ID NO: 10618 - RNA, 20 nt, Artificial Sequence
  Synthetic
  misc_feature (16)..(16): n is a, c, g, or u
ggcguucacgguggunucca

SEQ ID NO: 10619 - RNA, 20 nt, Artificial Sequence
  Synthetic
ccguuuguccucuacuucca

SEQ ID NO: 10620 - RNA, 20 nt, Artificial Sequence
  Synthetic
ugggaacaagagcuacagca

SEQ ID NO: 10621 - RNA, 20 nt, Artificial Sequence
  Synthetic
cggaacuggagccaccagca

SEQ ID NO: 10622 - RNA, 20 nt, Artificial Sequence
  Synthetic
aggaacaucaacuaccagca

SEQ ID NO: 10623 - RNA, 20 nt, Artificial Sequence
  Synthetic
gaagaugaggcauagcagca

SEQ ID NO: 10624 - RNA, 20 nt, Artificial Sequence
  Synthetic
ccccgccuguaacacgagca

SEQ ID NO: 10625 - RNA, 20 nt, Artificial Sequence
  Synthetic
acauagagguuccuugagca

SEQ ID NO: 10626 - RNA, 20 nt, Artificial Sequence
  Synthetic
agccacaaagguuccacgca

SEQ ID NO: 10627 - RNA, 20 nt, Artificial Sequence
  Synthetic
gacaaaggacgucccgcgca

SEQ ID NO: 10628 - RNA, 20 nt, Artificial Sequence
  Synthetic
  misc_feature (4)..(4): n is a, c, g, or u
  misc_feature (7)..(7): n is a, c, g, or u
  misc_feature (15)..(16): n is a, c, g, or u
ggcnaunggccaucnncgca

SEQ ID NO: 10629 - RNA, 20 nt, Artificial Sequence
  Synthetic
  misc_feature (8)..(8): n is a, c, g, or u
caucaucnugggcuuucgca

SEQ ID NO: 10630 - RNA, 20 nt, Artificial Sequence
  Synthetic
uuccaaaccucgacaaggca

SEQ ID NO: 10631 - RNA, 20 nt, Artificial Sequence
  Synthetic
  misc_feature (6)..(6): n is a, c, g, or u
cuuaunuaagaccuugggca

SEQ ID NO: 10632 - RNA, 20 nt, Artificial Sequence
  Synthetic
uaccagcacgggaccaugca

SEQ ID NO: 10633 - RNA, 20 nt, Artificial Sequence
  Synthetic
gggaccaugcaagaccugca

SEQ ID NO: 10634 - RNA, 20 nt, Artificial Sequence
  Synthetic
  misc_feature (12)..(12): n is a, c, g, or u
  misc_feature (15)..(15): n is a, c, g, or u
  misc_feature (18)..(18): n is a, c, g, or u
aguugggguacnuunccnca

SEQ ID NO: 10635 - RNA, 20 nt, Artificial Sequence
  Synthetic
  misc_feature (2)..(2): n is a, c, g, or u
  misc_feature (10)..(10): n is a, c, g, or u
  misc_feature (14)..(14): n is a, c, g, or u
anauggagancacnacauca

SEQ ID NO: 10636 - RNA, 20 nt, Artificial Sequence
  Synthetic
caaaagacaccaaauacuca

SEQ ID NO: 10637 - RNA, 20 nt, Artificial Sequence
  Synthetic
ccuccaccaaucggcaguca

SEQ ID NO: 10638 - RNA, 20 nt, Artificial Sequence
  Synthetic
  misc_feature (2)..(2): n is a, c, g, or u
  misc_feature (17)..(17): n is a, c, g, or u
angagggaguuugccanuca

SEQ ID NO: 10639 - RNA, 20 nt, Artificial Sequence
  Synthetic
  misc_feature (4)..(4): n is a, c, g, or u
  misc_feature (17)..(17): n is a, c, g, or u
uagngguaaaaaggganuca

SEQ ID NO: 10640 - RNA, 20 nt, Artificial Sequence
  Synthetic
  misc_feature (13)..(13): n is a, c, g, or u
aaugauuaacugnauguuca

SEQ ID NO: 10641 - RNA, 20 nt, Artificial Sequence
  Synthetic
  misc_feature (16)..(16): n is a, c, g, or u
gggcuacucccuuaanuuca

SEQ ID NO: 10642 - RNA, 20 nt, Artificial Sequence
  Synthetic
guccagaagaaccaacaaga

SEQ ID NO: 10643 - RNA, 20 nt, Artificial Sequence
  Synthetic
gaggcagguccccuagaaga

SEQ ID NO: 10644 - RNA, 20 nt, Artificial Sequence
  Synthetic
gcauagcagcaggaugaaga

SEQ ID NO: 10645 - RNA, 20 nt, Artificial Sequence
  Synthetic
  misc_feature (14)..(14): n is a, c, g, or u
gcccaaggucuuanauaaga

SEQ ID NO: 10646 - RNA, 20 nt, Artificial Sequence
  Synthetic
ggcagaugagaaggcacaga

SEQ ID NO: 10647 - RNA, 20 nt, Artificial Sequence
  Synthetic
gaucgggaaagaaucccaga

SEQ ID NO: 10648 - RNA, 20 nt, Artificial Sequence
  Synthetic
acauaccuugguaguccaga

SEQ ID NO: 10649 - RNA, 20 nt, Artificial Sequence
  Synthetic
gaacucccucgccucgcaga

SEQ ID NO: 10650 - RNA, 20 nt, Artificial Sequence
  Synthetic
cucaaucgccgcgucgcaga

SEQ ID NO: 10651 - RNA, 20 nt, Artificial Sequence
  Synthetic
acaugagaugauuaggcaga

SEQ ID NO: 10652 - RNA, 20 nt, Artificial Sequence
  Synthetic
  misc_feature (3)..(3): n is a, c, g, or u
gunuccaugcgacgugcaga

SEQ ID NO: 10653 - RNA, 20 nt, Artificial Sequence
  Synthetic
ggggagaccgcguaaagaga

SEQ ID NO: 10654 - RNA, 20 nt, Artificial Sequence
  Synthetic
ggagguguauuuccgagaga

SEQ ID NO: 10655 - RNA, 20 nt, Artificial Sequence
  Synthetic
gucucuuagagguggagaga

SEQ ID NO: 10656 - RNA, 20 nt, Artificial Sequence
  Synthetic
  misc_feature (3)..(3): n is a, c, g, or u
agncccaaacggccccgaga

SEQ ID NO: 10657 - RNA, 20 nt, Artificial Sequence
  Synthetic
aggguccccaguccucgaga

SEQ ID NO: 10658 - RNA, 20 nt, Artificial Sequence
  Synthetic
aguaggacaugaacaugaga

SEQ ID NO: 10659 - RNA, 20 nt, Artificial Sequence
  Synthetic
  misc_feature (15)..(15): n is a, c, g, or u
  misc_feature (17)..(17): n is a, c, g, or u
gccggaacggcagangnaga

SEQ ID NO: 10660 - RNA, 20 nt, Artificial Sequence
  Synthetic
gacgaggcagguccccuaga

SEQ ID NO: 10661 - RNA, 20 nt, Artificial Sequence
  Synthetic
uugauguuccuggaaguaga

SEQ ID NO: 10662 - RNA, 20 nt, Artificial Sequence
  Synthetic
uuaaagacagguacaguaga

SEQ ID NO: 10663 - RNA, 20 nt, Artificial Sequence
  Synthetic
gaggaugacugucucuuaga

SEQ ID NO: 10664 - RNA, 20 nt, Artificial Sequence
  Synthetic
cggaaacuacuguuguuaga

SEQ ID NO: 10665 - RNA, 20 nt, Artificial Sequence
  Synthetic
uccgcgggauucagcgccga

SEQ ID NO: 10666 - RNA, 20 nt, Artificial Sequence
  Synthetic
gacgugcagaggugaagcga

SEQ ID NO: 10667 - RNA, 20 nt, Artificial Sequence
  Synthetic
  misc_feature (11)..(11): n is a, c, g, or u
ucacgguggunuccaugcga

SEQ ID NO: 10668 - RNA, 20 nt, Artificial Sequence
  Synthetic
auugagaccuucgucugcga

SEQ ID NO: 10669 - RNA, 20 nt, Artificial Sequence
  Synthetic
gagauugagaucuucugcga

SEQ ID NO: 10670 - RNA, 20 nt, Artificial Sequence
  Synthetic
cauaucgucaaucuucucga

SEQ ID NO: 10671 - RNA, 20 nt, Artificial Sequence
  Synthetic
  misc_feature (3)..(3): n is a, c, g, or u
ccnagcagccauggaaagga

SEQ ID NO: 10672 - RNA, 20 nt, Artificial Sequence
  Synthetic
gaugaggcauagcagcagga

SEQ ID NO: 10673 - RNA, 20 nt, Artificial Sequence
  Synthetic
ccaccaaucggcagucagga

SEQ ID NO: 10674 - RNA, 20 nt, Artificial Sequence
  Synthetic
uccacugcauggccugagga

SEQ ID NO: 10675 - RNA, 20 nt, Artificial Sequence
  Synthetic
uaacaacaguaguuuccgga

SEQ ID NO: 10676 - RNA, 20 nt, Artificial Sequence
  Synthetic
ucggcgcugaaucccgcgga

SEQ ID NO: 10677 - RNA, 20 nt, Artificial Sequence
  Synthetic
  misc_feature (10)..(10): n is a, c, g, or u
gaaagcccangaugauggga

SEQ ID NO: 10678 - RNA, 20 nt, Artificial Sequence
  Synthetic
uuggcuuucaguuauaugga

SEQ ID NO: 10679 - RNA, 20 nt, Artificial Sequence
  Synthetic
  misc_feature (10)..(10): n is a, c, g, or u
uuguccuggnuaucgcugga

SEQ ID NO: 10680 - RNA, 20 nt, Artificial Sequence
  Synthetic
uccucaggccaugcagugga

SEQ ID NO: 10681 - RNA, 20 nt, Artificial Sequence
  Synthetic
  misc_feature (5)..(5): n is a, c, g, or u
  misc_feature (15)..(15): n is a, c, g, or u
gauanccaggacaanuugga

SEQ ID NO: 10682 - RNA, 20 nt, Artificial Sequence
  Synthetic
ugggugggaaguaauuugga

SEQ ID NO: 10683 - RNA, 20 nt, Artificial Sequence
  Synthetic
augccuugucgagguuugga

SEQ ID NO: 10684 - RNA, 20 nt, Artificial Sequence
  Synthetic
  misc_feature (18)..(18): n is a, c, g, or u
aaucuugcgaaagcccanga

SEQ ID NO: 10685 - RNA, 20 nt, Artificial Sequence
  Synthetic
  misc_feature (4)..(4): n is a, c, g, or u
  misc_feature (15)..(16): n is a, c, g, or u
  misc_feature (18)..(18): n is a, c, g, or u
ccunacauucauuunnanga

SEQ ID NO: 10686 - RNA, 20 nt, Artificial Sequence
  Synthetic
  misc_feature (18)..(18): n is a, c, g, or u
gccucccgauacagagcnga

SEQ ID NO: 10687 - RNA, 20 nt, Artificial Sequence
  Synthetic
uauggugacccacaaaauga

SEQ ID NO: 10688 - RNA, 20 nt, Artificial Sequence
  Synthetic
gcuuucaguuauauggauga

SEQ ID NO: 10689 - RNA, 20 nt, Artificial Sequence
  Synthetic
  misc_feature (15)..(15): n is a, c, g, or u
cuugcgaaagcccangauga

SEQ ID NO: 10690 - RNA, 20 nt, Artificial Sequence
  Synthetic
ucuuccacugcauggccuga

SEQ ID NO: 10691 - RNA, 20 nt, Artificial Sequence
  Synthetic
  misc_feature (10)..(10): n is a, c, g, or u
ucugcuagancccagaguga

SEQ ID NO: 10692 - RNA, 20 nt, Artificial Sequence
  Synthetic
caugcgacgugcagagguga

SEQ ID NO: 10693 - RNA, 20 nt, Artificial Sequence
  Synthetic
  misc_feature (5)..(5): n is a, c, g, or u
gccunagugcuguaugguga

SEQ ID NO: 10694 - RNA, 20 nt, Artificial Sequence
  Synthetic
uagacucugugguauuguga

SEQ ID NO: 10695 - RNA, 20 nt, Artificial Sequence
  Synthetic
ccaguccucgagaagauuga

SEQ ID NO: 10696 - RNA, 20 nt, Artificial Sequence
  Synthetic
ucuguguuggggugaguuga

SEQ ID NO: 10697 - RNA, 20 nt, Artificial Sequence
  Synthetic
  misc_feature (19)..(19): n is a, c, g, or u
cagcaggaugaagaggaana

SEQ ID NO: 10698 - RNA, 20 nt, Artificial Sequence
  Synthetic
  misc_feature (8)..(8): n is a, c, g, or u
  misc_feature (19)..(19): n is a, c, g, or u
aaggggcngcaaagcccana

SEQ ID NO: 10699 - RNA, 20 nt, Artificial Sequence
  Synthetic
  misc_feature (1)..(1): n is a, c, g, or u
  misc_feature (16)..(16): n is a, c, g, or u
  misc_feature (19)..(19): n is a, c, g, or u
ngguuuaaugccuuunucna

SEQ ID NO: 10700 - RNA, 20 nt, Artificial Sequence
  Synthetic
  misc_feature (5)..(5): n is a, c, g, or u
  misc_feature (7)..(8): n is a, c, g, or u
  misc_feature (19)..(19): n is a, c, g, or u
ccucnunnaaaugaauguna

SEQ ID NO: 10701 - RNA, 20 nt, Artificial Sequence
  Synthetic
  misc_feature (3)..(3): n is a, c, g, or u
aunaauagaugucaacaaua

SEQ ID NO: 10702 - RNA, 20 nt, Artificial Sequence
  Synthetic
  misc_feature (1)..(1): n is a, c, g, or u
nagcuaugucaauguuaaua

SEQ ID NO: 10703 - RNA, 20 nt, Artificial Sequence
  Synthetic
gacugaggcccacucccaua

SEQ ID NO: 10704 - RNA, 20 nt, Artificial Sequence
  Synthetic
ccggaaguguugauaagaua

SEQ ID NO: 10705 - RNA, 20 nt, Artificial Sequence
  Synthetic
ccucgagaagauugacgaua

SEQ ID NO: 10706 - RNA, 20 nt, Artificial Sequence
  Synthetic
aguuuccggaaguguugaua

SEQ ID NO: 10707 - RNA, 20 nt, Artificial Sequence
  Synthetic
gaagcuccaaauucuuuaua

SEQ ID NO: 10708 - RNA, 20 nt, Artificial Sequence
  Synthetic
aacagugggggaaagcccua

SEQ ID NO: 10709 - RNA, 20 nt, Artificial Sequence
  Synthetic
uaacacgagcagggguccua

SEQ ID NO: 10710 - RNA, 20 nt, Artificial Sequence
  Synthetic
gggcuuucgcaagauuccua

SEQ ID NO: 10711 - RNA, 20 nt, Artificial Sequence
  Synthetic
  misc_feature (1)..(1): n is a, c, g, or u
  misc_feature (5)..(5): n is a, c, g, or u
ncacnacaucaggauuccua

SEQ ID NO: 10712 - RNA, 20 nt, Artificial Sequence
  Synthetic
gcgagggaguucuucuucua

SEQ ID NO: 10713 - RNA, 20 nt, Artificial Sequence
  Synthetic
ggacuucucucaauuuucua

SEQ ID NO: 10714 - RNA, 20 nt, Artificial Sequence
  Synthetic
caguuucucuuccaaaagua

SEQ ID NO: 10715 - RNA, 20 nt, Artificial Sequence
  Synthetic
gcuuggaggcuugaacagua

SEQ ID NO: 10716 - RNA, 20 nt, Artificial Sequence
  Synthetic
  misc_feature (18)..(18): n is a, c, g, or u
uccaagaguccucuuaunua

SEQ ID NO: 10717 - RNA, 20 nt, Artificial Sequence
  Synthetic
gcaaauauuugguaagguua

SEQ ID NO: 10718 - RNA, 20 nt, Artificial Sequence
  Synthetic
  misc_feature (17)..(17): n is a, c, g, or u
uuacauaucccaugaanuua

SEQ ID NO: 10719 - RNA, 20 nt, Artificial Sequence
  Synthetic
acggggcgcaccucucuuua

SEQ ID NO: 10720 - RNA, 20 nt, Artificial Sequence
  Synthetic
cauauaacugaaagccaaac

SEQ ID NO: 10721 - RNA, 20 nt, Artificial Sequence
  Synthetic
uaaacugagccaggagaaac

SEQ ID NO: 10722 - RNA, 20 nt, Artificial Sequence
  Synthetic
gcucagggcauauugacaac

SEQ ID NO: 10723 - RNA, 20 nt, Artificial Sequence
  Synthetic
  misc_feature (15)..(15): n is a, c, g, or u
ccugaccguugccgngcaac

SEQ ID NO: 10724 - RNA, 20 nt, Artificial Sequence
  Synthetic
  misc_feature (3)..(3): n is a, c, g, or u
ggngaggcaguagucggaac

SEQ ID NO: 10725 - RNA, 20 nt, Artificial Sequence
  Synthetic
aaucccagaggauugggaac

SEQ ID NO: 10726 - RNA, 20 nt, Artificial Sequence
  Synthetic
guugcauggugcuggugaac

SEQ ID NO: 10727 - RNA, 20 nt, Artificial Sequence
  Synthetic
uaccacaucauccauauaac

SEQ ID NO: 10728 - RNA, 20 nt, Artificial Sequence
  Synthetic
ucaucaacucaccccaacac

SEQ ID NO: 10729 - RNA, 20 nt, Artificial Sequence
  Synthetic
gguucagauauuguuuacac

SEQ ID NO: 10730 - RNA, 20 nt, Artificial Sequence
  Synthetic
gggaaagcccuacgaaccac

SEQ ID NO: 10731 - RNA, 20 nt, Artificial Sequence
  Synthetic
cugccguuccggccgaccac

SEQ ID NO: 10732 - RNA, 20 nt, Artificial Sequence
  Synthetic
  misc_feature (15)..(15): n is a, c, g, or u
gcacgucgcaugganaccac

SEQ ID NO: 10733 - RNA, 20 nt, Artificial Sequence
  Synthetic
aaaaaagagaguaacuccac

SEQ ID NO: 10734 - RNA, 20 nt, Artificial Sequence
  Synthetic
  misc_feature (1)..(1): n is a, c, g, or u
nccggcagaugagaaggcac

SEQ ID NO: 10735 - RNA, 20 nt, Artificial Sequence
  Synthetic
gaggacuggggacccugcac

SEQ ID NO: 10736 - RNA, 20 nt, Artificial Sequence
  Synthetic
  misc_feature (10)..(10): n is a, c, g, or u
aagaccuggngggcguucac

SEQ ID NO: 10737 - RNA, 20 nt, Artificial Sequence
  Synthetic
gcagaugagaaggcacagac

SEQ ID NO: 10738 - RNA, 20 nt, Artificial Sequence
  Synthetic
gaaggcacagacggggagac

SEQ ID NO: 10739 - RNA, 20 nt, Artificial Sequence
  Synthetic
  misc_feature (4)..(4): n is a, c, g, or u
cucncagcaaugucaacgac

SEQ ID NO: 10740 - RNA, 20 nt, Artificial Sequence
  Synthetic
ucgucaaucuucucgaggac

SEQ ID NO: 10741 - RNA, 20 nt, Artificial Sequence
  Synthetic
gcuguacaaaaccuucggac

SEQ ID NO: 10742 - RNA, 20 nt, Artificial Sequence
  Synthetic
  misc_feature (9)..(9): n is a, c, g, or u
  misc_feature (11)..(11): n is a, c, g, or u
  misc_feature (17)..(17): n is a, c, g, or u
aagacugununuuuaangac

SEQ ID NO: 10743 - RNA, 20 nt, Artificial Sequence
  Synthetic
  misc_feature (6)..(6): n is a, c, g, or u
  misc_feature (12)..(12): n is a, c, g, or u
  misc_feature (18)..(18): n is a, c, g, or u
ggagcnaaacunaucggnac

SEQ ID NO: 10744 - RNA, 20 nt, Artificial Sequence
  Synthetic
gcuccucugccgauccauac

SEQ ID NO: 10745 - RNA, 20 nt, Artificial Sequence
  Synthetic
  misc_feature (6)..(6): n is a, c, g, or u
aggganucaagauguuguac

SEQ ID NO: 10746 - RNA, 20 nt, Artificial Sequence
  Synthetic
  misc_feature (12)..(12): n is a, c, g, or u
  misc_feature (14)..(14): n is a, c, g, or u
uucgcacuccuncngcuuac

SEQ ID NO: 10747 - RNA, 20 nt, Artificial Sequence
  Synthetic
cauaaggugggaaacuuuac

SEQ ID NO: 10748 - RNA, 20 nt, Artificial Sequence
  Synthetic
aguugaugaaucuggccacc

SEQ ID NO: 10749 - RNA, 20 nt, Artificial Sequence
  Synthetic
  misc_feature (15)..(15): n is a, c, g, or u
gcaaacacuuggcanagacc

SEQ ID NO: 10750 - RNA, 20 nt, Artificial Sequence
  Synthetic
gcguaaagagaggugcgccc

SEQ ID NO: 10751 - RNA, 20 nt, Artificial Sequence
  Synthetic
ggugcgccccguggucggcc

SEQ ID NO: 10752 - RNA, 20 nt, Artificial Sequence
  Synthetic
  misc_feature (5)..(5): n is a, c, g, or u
  misc_feature (10)..(10): n is a, c, g, or u
ggagngggancauucgggcc

SEQ ID NO: 10753 - RNA, 20 nt, Artificial Sequence
  Synthetic
  misc_feature (7)..(7): n is a, c, g, or u
ugguggngugaacccuggcc

SEQ ID NO: 10754 - RNA, 20 nt, Artificial Sequence
  Synthetic
uacuucccacccagguggcc

SEQ ID NO: 10755 - RNA, 20 nt, Artificial Sequence
  Synthetic
  misc_feature (3)..(3): n is a, c, g, or u
  misc_feature (6)..(6): n is a, c, g, or u
  misc_feature (18)..(18): n is a, c, g, or u
ccnaungccaagccccancc

SEQ ID NO: 10756 - RNA, 20 nt, Artificial Sequence
  Synthetic
  misc_feature (9)..(9): n is a, c, g, or u
ggagccaanucaaacaaucc

SEQ ID NO: 10757 - RNA, 20 nt, Artificial Sequence
  Synthetic
agcagggguccuaggaaucc

SEQ ID NO: 10758 - RNA, 20 nt, Artificial Sequence
  Synthetic
gucccgucggcgcugaaucc

SEQ ID NO: 10759 - RNA, 20 nt, Artificial Sequence
  Synthetic
acuguaccugucuuuaaucc

SEQ ID NO: 10760 - RNA, 20 nt, Artificial Sequence
  Synthetic
aaaacgccgcagacacaucc

SEQ ID NO: 10761 - RNA, 20 nt, Artificial Sequence
  Synthetic
  misc_feature (11)..(11): n is a, c, g, or u
auuuggaaganccagcaucc

SEQ ID NO: 10762 - RNA, 20 nt, Artificial Sequence
  Synthetic
  misc_feature (1)..(1): n is a, c, g, or u
nugugcugccaacuggaucc

SEQ ID NO: 10763 - RNA, 20 nt, Artificial Sequence
  Synthetic
  misc_feature (12)..(12): n is a, c, g, or u
ggcauuaaaccnuauuaucc

SEQ ID NO: 10764 - RNA, 20 nt, Artificial Sequence
  Synthetic
ccggagacucuaaggccucc

SEQ ID NO: 10765 - RNA, 20 nt, Artificial Sequence
  Synthetic
  misc_feature (3)..(3): n is a, c, g, or u
  misc_feature (9)..(9): n is a, c, g, or u
  misc_feature (15)..(15): n is a, c, g, or u
gunccgaunaguuungcucc

SEQ ID NO: 10766 - RNA, 20 nt, Artificial Sequence
  Synthetic
cgggaggccuuagagucucc

SEQ ID NO: 10767 - RNA, 20 nt, Artificial Sequence
  Synthetic
gcaacauaccuugguagucc

SEQ ID NO: 10768 - RNA, 20 nt, Artificial Sequence
  Synthetic
gacguagacaaaggacgucc

SEQ ID NO: 10769 - RNA, 20 nt, Artificial Sequence
  Synthetic
gugcaggucuugcauggucc

SEQ ID NO: 10770 - RNA, 20 nt, Artificial Sequence
  Synthetic
ccuaucuuaucaacacuucc

SEQ ID NO: 10771 - RNA, 20 nt, Artificial Sequence
  Synthetic
augggaguaggcugucuucc

SEQ ID NO: 10772 - RNA, 20 nt, Artificial Sequence
  Synthetic
cugcugguggcuccaguucc

SEQ ID NO: 10773 - RNA, 20 nt, Artificial Sequence
  Synthetic
ggaacaggguuuacuguucc

SEQ ID NO: 10774 - RNA, 20 nt, Artificial Sequence
  Synthetic
aauccucugggauucuuucc

SEQ ID NO: 10775 - RNA, 20 nt, Artificial Sequence
  Synthetic
gucuaacaacaguaguuucc

SEQ ID NO: 10776 - RNA, 20 nt, Artificial Sequence
  Synthetic
uacuguucaagccuccaagc

SEQ ID NO: 10777 - RNA, 20 nt, Artificial Sequence
  Synthetic
accccgccuguaacacgagc

SEQ ID NO: 10778 - RNA, 20 nt, Artificial Sequence
  Synthetic
auaagagagaaacuacacgc

SEQ ID NO: 10779 - RNA, 20 nt, Artificial Sequence
  Synthetic
auugagaucuucugcgacgc

SEQ ID NO: 10780 - RNA, 20 nt, Artificial Sequence
  Synthetic
ccgucggcgcugaaucccgc

SEQ ID NO: 10781 - RNA, 20 nt, Artificial Sequence
  Synthetic
  misc_feature (5)..(5): n is a, c, g, or u
ggaanaugauaaaacgccgc

SEQ ID NO: 10782 - RNA, 20 nt, Artificial Sequence
  Synthetic
ucguccgcgggauucagcgc

SEQ ID NO: 10783 - RNA, 20 nt, Artificial Sequence
  Synthetic
ugacccacaaaaugaggcgc

SEQ ID NO: 10784 - RNA, 20 nt, Artificial Sequence
  Synthetic
ugucuacgucccgucggcgc

SEQ ID NO: 10785 - RNA, 20 nt, Artificial Sequence
  Synthetic
cagacgaaggucucaaucgc

SEQ ID NO: 10786 - RNA, 20 nt, Artificial Sequence
  Synthetic
gaagaacucccucgccucgc

SEQ ID NO: 10787 - RNA, 20 nt, Artificial Sequence
  Synthetic
ggucucaaucgccgcgucgc

SEQ ID NO: 10788 - RNA, 20 nt, Artificial Sequence
  Synthetic
ccccugcucguguuacaggc

SEQ ID NO: 10789 - RNA, 20 nt, Artificial Sequence
  Synthetic
  misc_feature (15)..(15): n is a, c, g, or u
ucccgauacagagcngaggc

SEQ ID NO: 10790 - RNA, 20 nt, Artificial Sequence
  Synthetic
ccguggucggccggaacggc

SEQ ID NO: 10791 - RNA, 20 nt, Artificial Sequence
  Synthetic
  misc_feature (1)..(1): n is a, c, g, or u
  misc_feature (7)..(7): n is a, c, g, or u
naguuungcuccagaccggc

SEQ ID NO: 10792 - RNA, 20 nt, Artificial Sequence
  Synthetic
  misc_feature (15)..(15): n is a, c, g, or u
cgaagugcacacggnccggc

SEQ ID NO: 10793 - RNA, 20 nt, Artificial Sequence
  Synthetic
  misc_feature (4)..(4): n is a, c, g, or u
  misc_feature (6)..(6): n is a, c, g, or u
ucuncnucugccguuccggc

SEQ ID NO: 10794 - RNA, 20 nt, Artificial Sequence
  Synthetic
  misc_feature (6)..(6): n is a, c, g, or u
  misc_feature (18)..(18): n is a, c, g, or u
uuuganuuggcuccgaangc

SEQ ID NO: 10795 - RNA, 20 nt, Artificial Sequence
  Synthetic
  misc_feature (18)..(18): n is a, c, g, or u
gcuccaccccaaaagacngc

SEQ ID NO: 10796 - RNA, 20 nt, Artificial Sequence
  Synthetic
cagucauccucaggccaugc

SEQ ID NO: 10797 - RNA, 20 nt, Artificial Sequence
  Synthetic
uaggcugucuuccugacugc

SEQ ID NO: 10798 - RNA, 20 nt, Artificial Sequence
  Synthetic
ccucugccgauccauacugc

SEQ ID NO: 10799 - RNA, 20 nt, Artificial Sequence
  Synthetic
aaccuuuguggcuccucugc

SEQ ID NO: 10800 - RNA, 20 nt, Artificial Sequence
  Synthetic
  misc_feature (1)..(1): n is a, c, g, or u
nuaucgcuggaugugucugc

SEQ ID NO: 10801 - RNA, 20 nt, Artificial Sequence
  Synthetic
  misc_feature (4)..(4): n is a, c, g, or u
  misc_feature (12)..(12): n is a, c, g, or u
gugnucuccaunuucggugc

SEQ ID NO: 10802 - RNA, 20 nt, Artificial Sequence
  Synthetic
  misc_feature (6)..(6): n is a, c, g, or u
ggucunugccaaguguuugc

SEQ ID NO: 10803 - RNA, 20 nt, Artificial Sequence
  Synthetic
  misc_feature (19)..(19): n is a, c, g, or u
ugccuucucaucugccggnc

SEQ ID NO: 10804 - RNA, 20 nt, Artificial Sequence
  Synthetic
  misc_feature (16)..(16): n is a, c, g, or u
  misc_feature (19)..(19): n is a, c, g, or u
gacaacagaguugucngunc

SEQ ID NO: 10805 - RNA, 20 nt, Artificial Sequence
  Synthetic
cuuucuguguaaacaauauc

SEQ ID NO: 10806 - RNA, 20 nt, Artificial Sequence
  Synthetic
  misc_feature (4)..(4): n is a, c, g, or u
aaanuauaggccccucacuc

SEQ ID NO: 10807 - RNA, 20 nt, Artificial Sequence
  Synthetic
uccaccacgagucuagacuc

SEQ ID NO: 10808 - RNA, 20 nt, Artificial Sequence
  Synthetic
uaggcauuauuuacauacuc

SEQ ID NO: 10809 - RNA, 20 nt, Artificial Sequence
  Synthetic
ucuuucuguucccaauccuc

SEQ ID NO: 10810 - RNA, 20 nt, Artificial Sequence
  Synthetic
gggguggagcccucaggcuc

SEQ ID NO: 10811 - RNA, 20 nt, Artificial Sequence
  Synthetic
  misc_feature (13)..(13): n is a, c, g, or u
uggauuguuuganuuggcuc

SEQ ID NO: 10812 - RNA, 20 nt, Artificial Sequence
  Synthetic
caacucuguuguccucucuc

SEQ ID NO: 10813 - RNA, 20 nt, Artificial Sequence
  Synthetic
ucccgcggacgacccgucuc

SEQ ID NO: 10814 - RNA, 20 nt, Artificial Sequence
  Synthetic
cgaauagaaggaaagaaguc

SEQ ID NO: 10815 - RNA, 20 nt, Artificial Sequence
  Synthetic
  misc_feature (8)..(8): n is a, c, g, or u
auaugggngaggcaguaguc

SEQ ID NO: 10816 - RNA, 20 nt, Artificial Sequence
  Synthetic
cuuuacgcggucuccccguc

SEQ ID NO: 10817 - RNA, 20 nt, Artificial Sequence
  Synthetic
uccuuugucuacgucccguc

SEQ ID NO: 10818 - RNA, 20 nt, Artificial Sequence
  Synthetic
  misc_feature (12)..(12): n is a, c, g, or u
auacaagugcanuuuccguc

SEQ ID NO: 10819 - RNA, 20 nt, Artificial Sequence
  Synthetic
cggccccgagacgggucguc

SEQ ID NO: 10820 - RNA, 20 nt, Artificial Sequence
  Synthetic
cggcgauugagaccuucguc

SEQ ID NO: 10821 - RNA, 20 nt, Artificial Sequence
  Synthetic
  misc_feature (4)..(4): n is a, c, g, or u
uggnuaucgcuggauguguc

SEQ ID NO: 10822 - RNA, 20 nt, Artificial Sequence
  Synthetic
  misc_feature (12)..(12): n is a, c, g, or u
gugaaaccacanuaguuguc

SEQ ID NO: 10823 - RNA, 20 nt, Artificial Sequence
  Synthetic
  misc_feature (18)..(18): n is a, c, g, or u
uuaauaugggccuaaaanuc

SEQ ID NO: 10824 - RNA, 20 nt, Artificial Sequence
  Synthetic
acgggucguccgcgggauuc

SEQ ID NO: 10825 - RNA, 20 nt, Artificial Sequence
  Synthetic
  misc_feature (7)..(7): n is a, c, g, or u
agcacunaggcaagcuauuc

SEQ ID NO: 10826 - RNA, 20 nt, Artificial Sequence
  Synthetic
uguugcuguacaaaaccuuc

SEQ ID NO: 10827 - RNA, 20 nt, Artificial Sequence
  Synthetic
uuacucucuuuuuugccuuc

SEQ ID NO: 10828 - RNA, 20 nt, Artificial Sequence
  Synthetic
uauaaagaauuuggagcuuc

SEQ ID NO: 10829 - RNA, 20 nt, Artificial Sequence
  Synthetic
uucccgagauugagaucuuc

SEQ ID NO: 10830 - RNA, 20 nt, Artificial Sequence
  Synthetic
  misc_feature (2)..(2): n is a, c, g, or u
gngcaacgggguaaagguuc

SEQ ID NO: 10831 - RNA, 20 nt, Artificial Sequence
  Synthetic
cggaacaguaaacccuguuc

SEQ ID NO: 10832 - RNA, 20 nt, Artificial Sequence
  Synthetic
uuuacuagugccauuuguuc

SEQ ID NO: 10833 - RNA, 20 nt, Artificial Sequence
  Synthetic
  misc_feature (5)..(5): n is a, c, g, or u
  misc_feature (9)..(9): n is a, c, g, or u
  misc_feature (17)..(17): n is a, c, g, or u
augungugnucuccaunuuc

SEQ ID NO: 10834 - RNA, 20 nt, Artificial Sequence
  Synthetic
gccaacuuacaaggccuuuc

SEQ ID NO: 10835 - RNA, 20 nt, Artificial Sequence
  Synthetic
  misc_feature (11)..(11): n is a, c, g, or u
uugguaauagngguaaaaag

SEQ ID NO: 10836 - RNA, 20 nt, Artificial Sequence
  Synthetic
cuuguaaguuggcgagaaag

SEQ ID NO: 10837 - RNA, 20 nt, Artificial Sequence
  Synthetic
agguuuuguacagcaacaag

SEQ ID NO: 10838 - RNA, 20 nt, Artificial Sequence
  Synthetic
ucccaccuuaugaguccaag

SEQ ID NO: 10839 - RNA, 20 nt, Artificial Sequence
  Synthetic
uccugucuuacuuuuggaag

SEQ ID NO: 10840 - RNA, 20 nt, Artificial Sequence
  Synthetic
ugcgacgugcagaggugaag

SEQ ID NO: 10841 - RNA, 20 nt, Artificial Sequence
  Synthetic
cccaucucuccaccucuaag

SEQ ID NO: 10842 - RNA, 20 nt, Artificial Sequence
  Synthetic
cuuuuuucauuaacuguaag

SEQ ID NO: 10843 - RNA, 20 nt, Artificial Sequence
  Synthetic
uauaacugaaagccaaacag

SEQ ID NO: 10844 - RNA, 20 nt, Artificial Sequence
  Synthetic
  misc_feature (15)..(15): n is a, c, g, or u
caagcucugcuagancccag

SEQ ID NO: 10845 - RNA, 20 nt, Artificial Sequence
  Synthetic
  misc_feature (1)..(1): n is a, c, g, or u
  misc_feature (4)..(4): n is a, c, g, or u
  misc_feature (16)..(16): n is a, c, g, or u
naungccaagccccanccag

SEQ ID NO: 10846 - RNA, 20 nt, Artificial Sequence
  Synthetic
aacgccgcagacacauccag

SEQ ID NO: 10847 - RNA, 20 nt, Artificial Sequence
  Synthetic
  misc_feature (9)..(9): n is a, c, g, or u
uuggaaganccagcauccag

SEQ ID NO: 10848 - RNA, 20 nt, Artificial Sequence
  Synthetic
guuuuguacagcaacaagag

SEQ ID NO: 10849 - RNA, 20 nt, Artificial Sequence
  Synthetic
  misc_feature (6)..(6): n is a, c, g, or u
  misc_feature (10)..(10): n is a, c, g, or u
gcuggnauunuauauaagag

SEQ ID NO: 10850 - RNA, 20 nt, Artificial Sequence
  Synthetic
  misc_feature (13)..(13): n is a, c, g, or u
  misc_feature (15)..(15): n is a, c, g, or u
uggucuguaagcngnaggag

SEQ ID NO: 10851 - RNA, 20 nt, Artificial Sequence
  Synthetic
  misc_feature (3)..(3): n is a, c, g, or u
  misc_feature (10)..(10): n is a, c, g, or u
agnggcaaancagguaggag

SEQ ID NO: 10852 - RNA, 20 nt, Artificial Sequence
  Synthetic
ucgcaagauuccuaugggag

SEQ ID NO: 10853 - RNA, 20 nt, Artificial Sequence
  Synthetic
acugucucuuagagguggag

SEQ ID NO: 10854 - RNA, 20 nt, Artificial Sequence
  Synthetic
guauuuggugucuuuuggag

SEQ ID NO: 10855 - RNA, 20 nt, Artificial Sequence
  Synthetic
gaggacaagagguuggugag

SEQ ID NO: 10856 - RNA, 20 nt, Artificial Sequence
  Synthetic
gcucccccuagaaaauugag

SEQ ID NO: 10857 - RNA, 20 nt, Artificial Sequence
  Synthetic
gacuucucucaauuuucuag

SEQ ID NO: 10858 - RNA, 20 nt, Artificial Sequence
  Synthetic
  misc_feature (2)..(2): n is a, c, g, or u
cnaauuuuggccaggacacg

SEQ ID NO: 10859 - RNA, 20 nt, Artificial Sequence
  Synthetic
gaacaucaacuaccagcacg

SEQ ID NO: 10860 - RNA, 20 nt, Artificial Sequence
  Synthetic
cgcgggauucagcgccgacg

SEQ ID NO: 10861 - RNA, 20 nt, Artificial Sequence
  Synthetic
  misc_feature (13)..(13): n is a, c, g, or u
acgucgcaugganaccaccg

SEQ ID NO: 10862 - RNA, 20 nt, Artificial Sequence
  Synthetic
  misc_feature (6)..(6): n is a, c, g, or u
uagagncccaaacggccccg

SEQ ID NO: 10863 - RNA, 20 nt, Artificial Sequence
  Synthetic
uacuaacauugagauucccg

SEQ ID NO: 10864 - RNA, 20 nt, Artificial Sequence
  Synthetic
  misc_feature (16)..(16): n is a, c, g, or u
uccaccccaaaagacngccg

SEQ ID NO: 10865 - RNA, 20 nt, Artificial Sequence
  Synthetic
  misc_feature (17)..(17): n is a, c, g, or u
ccuucucaucugccggnccg

SEQ ID NO: 10866 - RNA, 20 nt, Artificial Sequence
  Synthetic
gccccgagacgggucguccg

SEQ ID NO: 10867 - RNA, 20 nt, Artificial Sequence
  Synthetic
cccgagacgggucguccgcg

SEQ ID NO: 10868 - RNA, 20 nt, Artificial Sequence
  Synthetic
ugccaacuggauccugcgcg

SEQ ID NO: 10869 - RNA, 20 nt, Artificial Sequence
  Synthetic
agaccuucgucugcgaggcg

SEQ ID NO: 10870 - RNA, 20 nt, Artificial Sequence
  Synthetic
aaaggccuuguaaguuggcg

SEQ ID NO: 10871 - RNA, 20 nt, Artificial Sequence
  Synthetic
gcugccaacuggauccugcg

SEQ ID NO: 10872 - RNA, 20 nt, Artificial Sequence
  Synthetic
  misc_feature (2)..(2): n is a, c, g, or u
cnggguccaacuggugaucg

SEQ ID NO: 10873 - RNA, 20 nt, Artificial Sequence
  Synthetic
ugcaggguccccaguccucg

SEQ ID NO: 10874 - RNA, 20 nt, Artificial Sequence
  Synthetic
cgcagaagaucucaaucucg

SEQ ID NO: 10875 - RNA, 20 nt, Artificial Sequence
  Synthetic
gacuucuuuccuucuauucg

SEQ ID NO: 10876 - RNA, 20 nt, Artificial Sequence
  Synthetic
uuacaguuaaugaaaaaagg

SEQ ID NO: 10877 - RNA, 20 nt, Artificial Sequence
  Synthetic
  misc_feature (12)..(12): n is a, c, g, or u
  misc_feature (14)..(14): n is a, c, g, or u
ggaacggcagangnagaagg

SEQ ID NO: 10878 - RNA, 20 nt, Artificial Sequence
  Synthetic
uaucccuuggacucauaagg

SEQ ID NO: 10879 - RNA, 20 nt, Artificial Sequence
  Synthetic
accccugcucguguuacagg

SEQ ID NO: 10880 - RNA, 20 nt, Artificial Sequence
  Synthetic
cacuaguaaacugagccagg

SEQ ID NO: 10881 - RNA, 20 nt, Artificial Sequence
  Synthetic
augagaugauuaggcagagg

SEQ ID NO: 10882 - RNA, 20 nt, Artificial Sequence
  Synthetic
  misc_feature (1)..(1): n is a, c, g, or u
nuccaugcgacgugcagagg

SEQ ID NO: 10883 - RNA, 20 nt, Artificial Sequence
  Synthetic
ggagaccgcguaaagagagg

SEQ ID NO: 10884 - RNA, 20 nt, Artificial Sequence
  Synthetic
  misc_feature (5)..(5): n is a, c, g, or u
gagcngaggcggugucgagg

SEQ ID NO: 10885 - RNA, 20 nt, Artificial Sequence
  Synthetic
cugggaggaguugggggagg

SEQ ID NO: 10886 - RNA, 20 nt, Artificial Sequence
  Synthetic
  misc_feature (3)..(3): n is a, c, g, or u
cunagugcuguauggugagg

SEQ ID NO: 10887 - RNA, 20 nt, Artificial Sequence
  Synthetic
  misc_feature (15)..(15): n is a, c, g, or u
  misc_feature (17)..(17): n is a, c, g, or u
gguggucuguaagcngnagg

SEQ ID NO: 10888 - RNA, 20 nt, Artificial Sequence
  Synthetic
gagggaguucuucuucuagg

SEQ ID NO: 10889 - RNA, 20 nt, Artificial Sequence
  Synthetic
gccguuccggccgaccacgg

SEQ ID NO: 10890 - RNA, 20 nt, Artificial Sequence
  Synthetic
ugaggugaacaauguuccgg

SEQ ID NO: 10891 - RNA, 20 nt, Artificial Sequence
  Synthetic
ugagaucuucugcgacgcgg

SEQ ID NO: 10892 - RNA, 20 nt, Artificial Sequence
  Synthetic
augagaaggcacagacgggg

SEQ ID NO: 10893 - RNA, 20 nt, Artificial Sequence
  Synthetic
uuucgcaagauuccuauggg

SEQ ID NO: 10894 - RNA, 20 nt, Artificial Sequence
  Synthetic
gaugaaucuggccaccuggg

SEQ ID NO: 10895 - RNA, 20 nt, Artificial Sequence
  Synthetic
acugaaagccaaacaguggg

SEQ ID NO: 10896 - RNA, 20 nt, Artificial Sequence
  Synthetic
caaaccucgacaaggcaugg

SEQ ID NO: 10897 - RNA, 20 nt, Artificial Sequence
  Synthetic
  misc_feature (16)..(16): n is a, c, g, or u
ggacccugcaccgaanaugg

SEQ ID NO: 10898 - RNA, 20 nt, Artificial Sequence
  Synthetic
ucuuguucccaagaauaugg

SEQ ID NO: 10899 - RNA, 20 nt, Artificial Sequence
  Synthetic
  misc_feature (5)..(5): n is a, c, g, or u
  misc_feature (8)..(8): n is a, c, g, or u
cgaangcnggguccaacugg

SEQ ID NO: 10900 - RNA, 20 nt, Artificial Sequence
  Synthetic
ucaaucuucucgaggacugg

SEQ ID NO: 10901 - RNA, 20 nt, Artificial Sequence
  Synthetic
agaccuugggcaagaccugg

SEQ ID NO: 10902 - RNA, 20 nt, Artificial Sequence
  Synthetic
aaaaaguugcauggugcugg

SEQ ID NO: 10903 - RNA, 20 nt, Artificial Sequence
  Synthetic
  misc_feature (8)..(8): n is a, c, g, or u
aaaagacngccguguggugg

SEQ ID NO: 10904 - RNA, 20 nt, Artificial Sequence
  Synthetic
ggugagugauuggagguugg

SEQ ID NO: 10905 - RNA, 20 nt, Artificial Sequence
  Synthetic
ggcaagcuauucuguguugg

SEQ ID NO: 10906 - RNA, 20 nt, Artificial Sequence
  Synthetic
  misc_feature (11)..(11): n is a, c, g, or u
accacacggcngucuuuugg

SEQ ID NO: 10907 - RNA, 20 nt, Artificial Sequence
  Synthetic
gaguauuuggugucuuuugg

SEQ ID NO: 10908 - RNA, 20 nt, Artificial Sequence
  Synthetic
  misc_feature (1)..(1): n is a, c, g, or u
  misc_feature (12)..(12): n is a, c, g, or u
  misc_feature (19)..(19): n is a, c, g, or u
naaaugaaugunaggaaang

SEQ ID NO: 10909 - RNA, 20 nt, Artificial Sequence
  Synthetic
  misc_feature (1)..(1): n is a, c, g, or u
  misc_feature (8)..(8): n is a, c, g, or u
  misc_feature (19)..(19): n is a, c, g, or u
nggcaaancagguaggagng

SEQ ID NO: 10910 - RNA, 20 nt, Artificial Sequence
  Synthetic
  misc_feature (19)..(19): n is a, c, g, or u
accuugggcaagaccuggng

SEQ ID NO: 10911 - RNA, 20 nt, Artificial Sequence
  Synthetic
  misc_feature (6)..(6): n is a, c, g, or u
  misc_feature (19)..(19): n is a, c, g, or u
aagacngccgugugguggng

SEQ ID NO: 10912 - RNA, 20 nt, Artificial Sequence
  Synthetic
caaaaguaagacaggaaaug

SEQ ID NO: 10913 - RNA, 20 nt, Artificial Sequence
  Synthetic
aacaguaggacaugaacaug

SEQ ID NO: 10914 - RNA, 20 nt, Artificial Sequence
  Synthetic
  misc_feature (14)..(14): n is a, c, g, or u
cguucacgguggunuccaug

SEQ ID NO: 10915 - RNA, 20 nt, Artificial Sequence
  Synthetic
  misc_feature (2)..(2): n is a, c, g, or u
  misc_feature (5)..(5): n is a, c, g, or u
  misc_feature (13)..(14): n is a, c, g, or u
cnaunggccaucnncgcaug

SEQ ID NO: 10916 - RNA, 20 nt, Artificial Sequence
  Synthetic
  misc_feature (14)..(14): n is a, c, g, or u
gcuacucccuuaanuucaug

SEQ ID NO: 10917 - RNA, 20 nt, Artificial Sequence
  Synthetic
  misc_feature (10)..(10): n is a, c, g, or u
ugcacacggnccggcagaug

SEQ ID NO: 10918 - RNA, 20 nt, Artificial Sequence
  Synthetic
  misc_feature (8)..(8): n is a, c, g, or u
aagcccangaugaugggaug

SEQ ID NO: 10919 - RNA, 20 nt, Artificial Sequence
  Synthetic
  misc_feature (13)..(13): n is a, c, g, or u
ugcgaaagcccangaugaug

SEQ ID NO: 10920 - RNA, 20 nt, Artificial Sequence
  Synthetic
  misc_feature (1)..(1): n is a, c, g, or u
naauagaugucaacaauaug

SEQ ID NO: 10921 - RNA, 20 nt, Artificial Sequence
  Synthetic
uugaugaaucuggccaccug

SEQ ID NO: 10922 - RNA, 20 nt, Artificial Sequence
  Synthetic
gucaauaugcccugagccug

SEQ ID NO: 10923 - RNA, 20 nt, Artificial Sequence
  Synthetic
gugcugccaacuggauccug

SEQ ID NO: 10924 - RNA, 20 nt, Artificial Sequence
  Synthetic
acccacaaaaugaggcgcug

SEQ ID NO: 10925 - RNA, 20 nt, Artificial Sequence
  Synthetic
uuucuguucccaauccucug

SEQ ID NO: 10926 - RNA, 20 nt, Artificial Sequence
  Synthetic
cccgagauugagaucuucug

SEQ ID NO: 10927 - RNA, 20 nt, Artificial Sequence
  Synthetic
uaacugaaagccaaacagug

SEQ ID NO: 10928 - RNA, 20 nt, Artificial Sequence
  Synthetic
  misc_feature (2)..(2): n is a, c, g, or u
  misc_feature (14)..(14): n is a, c, g, or u
ungccaagccccanccagug

SEQ ID NO: 10929 - RNA, 20 nt, Artificial Sequence
  Synthetic
  misc_feature (11)..(11): n is a, c, g, or u
cucugcuagancccagagug

SEQ ID NO: 10930 - RNA, 20 nt, Artificial Sequence
  Synthetic
  misc_feature (11)..(11): n is a, c, g, or u
  misc_feature (13)..(13): n is a, c, g, or u
gucuguaagcngnaggagug

SEQ ID NO: 10931 - RNA, 20 nt, Artificial Sequence
  Synthetic
aauuuuggccaggacacgug

SEQ ID NO: 10932 - RNA, 20 nt, Artificial Sequence
  Synthetic
ucccuuggacucauaaggug

SEQ ID NO: 10933 - RNA, 20 nt, Artificial Sequence
  Synthetic
ugaaucuggccaccugggug

SEQ ID NO: 10934 - RNA, 20 nt, Artificial Sequence
  Synthetic
uggaggacaagagguuggug

SEQ ID NO: 10935 - RNA, 20 nt, Artificial Sequence
  Synthetic
  misc_feature (13)..(13): n is a, c, g, or u
gaaaguaugucanagaauug

SEQ ID NO: 10936 - RNA, 20 nt, Artificial Sequence
  Synthetic
uccaagggauacuaacauug

SEQ ID NO: 10937 - RNA, 20 nt, Artificial Sequence
  Synthetic
  misc_feature (3)..(3): n is a, c, g, or u
aanucaaacaauccagauug

SEQ ID NO: 10938 - RNA, 20 nt, Artificial Sequence
  Synthetic
cauugagauucccgagauug

SEQ ID NO: 10939 - RNA, 20 nt, Artificial Sequence
  Synthetic
cuucugcgacgcggcgauug

SEQ ID NO: 10940 - RNA, 20 nt, Artificial Sequence
  Synthetic
gaaagaaucccagaggauug

SEQ ID NO: 10941 - RNA, 20 nt, Artificial Sequence
  Synthetic
auauggaugaugugguauug

SEQ ID NO: 10942 - RNA, 20 nt, Artificial Sequence
  Synthetic
agccuccaagcugugccuug

SEQ ID NO: 10943 - RNA, 20 nt, Artificial Sequence
  Synthetic
ccacucccauaggaaucuug

SEQ ID NO: 10944 - RNA, 20 nt, Artificial Sequence
  Synthetic
ugugggucaccauauucuug

SEQ ID NO: 10945 - RNA, 20 nt, Artificial Sequence
  Synthetic
  misc_feature (5)..(5): n is a, c, g, or u
uuaangacugggaggaguug

SEQ ID NO: 10946 - RNA, 20 nt, Artificial Sequence
  Synthetic
acacgcagcgccucauuuug

SEQ ID NO: 10947 - RNA, 20 nt, Artificial Sequence
  Synthetic
  misc_feature (5)..(5): n is a, c, g, or u
  misc_feature (12)..(12): n is a, c, g, or u
  misc_feature (20)..(20): n is a, c, g, or u
ccugnuuugccncuggccan

SEQ ID NO: 10948 - RNA, 20 nt, Artificial Sequence
  Synthetic
  misc_feature (20)..(20): n is a, c, g, or u
cgucagcaaacacuuggcan

SEQ ID NO: 10949 - RNA, 20 nt, Artificial Sequence
  Synthetic
  misc_feature (20)..(20): n is a, c, g, or u
uugauuggaaaguaugucan

SEQ ID NO: 10950 - RNA, 20 nt, Artificial Sequence
  Synthetic
  misc_feature (8)..(8): n is a, c, g, or u
  misc_feature (20)..(20): n is a, c, g, or u
ccuaaaanucagacaacuan

SEQ ID NO: 10951 - RNA, 20 nt, Artificial Sequence
  Synthetic
  misc_feature (20)..(20): n is a, c, g, or u
guauucccaucccaucaucn

SEQ ID NO: 10952 - RNA, 20 nt, Artificial Sequence
  Synthetic
  misc_feature (20)..(20): n is a, c, g, or u
aggcggugucgaggagaucn

SEQ ID NO: 10953 - RNA, 20 nt, Artificial Sequence
  Synthetic
  misc_feature (20)..(20): n is a, c, g, or u
caaagguuccacgcaugcgn

SEQ ID NO: 10954 - RNA, 20 nt, Artificial Sequence
  Synthetic
  misc_feature (17)..(17): n is a, c, g, or u
  misc_feature (20)..(20): n is a, c, g, or u
ccuuuccauggcugcunggn

SEQ ID NO: 10955 - RNA, 20 nt, Artificial Sequence
  Synthetic
  misc_feature (20)..(20): n is a, c, g, or u
cugacgcaacccccacuggn

SEQ ID NO: 10956 - RNA, 20 nt, Artificial Sequence
  Synthetic
  misc_feature (18)..(18): n is a, c, g, or u
  misc_feature (20)..(20): n is a, c, g, or u
ucggccggaacggcagangn

SEQ ID NO: 10957 - RNA, 20 nt, Artificial Sequence
  Synthetic
  misc_feature (20)..(20): n is a, c, g, or u
aacacagaauagcuugccun

SEQ ID NO: 10958 - RNA, 20 nt, Artificial Sequence
  Synthetic
  misc_feature (4)..(4): n is a, c, g, or u
  misc_feature (20)..(20): n is a, c, g, or u
ccanaagacccacaauucun

SEQ ID NO: 10959 - RNA, 20 nt, Artificial Sequence
  Synthetic
  misc_feature (4)..(4): n is a, c, g, or u
  misc_feature (20)..(20): n is a, c, g, or u
ucanagaauugugggucuun

SEQ ID NO: 10960 - RNA, 20 nt, Artificial Sequence
  Synthetic
  misc_feature (10)..(10): n is a, c, g, or u
  misc_feature (14)..(14): n is a, c, g, or u
  misc_feature (20)..(20): n is a, c, g, or u
gucuauuuanaggnaguuun

SEQ ID NO: 10961 - RNA, 20 nt, Artificial Sequence
  Synthetic
  misc_feature (5)..(5): n is a, c, g, or u
  misc_feature (11)..(11): n is a, c, g, or u
  misc_feature (15)..(15): n is a, c, g, or u
uucgnaaacunccunuaaau

SEQ ID NO: 10962 - RNA, 20 nt, Artificial Sequence
  Synthetic
  misc_feature (15)..(15): n is a, c, g, or u
uggaaaguaugucanagaau

SEQ ID NO: 10963 - RNA, 20 nt, Artificial Sequence
  Synthetic
  misc_feature (15)..(15): n is a, c, g, or u
gugucgaggagaucncgaau

SEQ ID NO: 10964 - RNA, 20 nt, Artificial Sequence
  Synthetic
  misc_feature (2)..(3): n is a, c, g, or u
  misc_feature (5)..(5): n is a, c, g, or u
  misc_feature (11)..(11): n is a, c, g, or u
  misc_feature (17)..(17): n is a, c, g, or u
unnangagganauuaunaau

SEQ ID NO: 10965 - RNA, 20 nt, Artificial Sequence
  Synthetic
uuuuaggcccauauuaacau

SEQ ID NO: 10966 - RNA, 20 nt, Artificial Sequence
  Synthetic
  misc_feature (2)..(2): n is a, c, g, or u
  misc_feature (5)..(5): n is a, c, g, or u
  misc_feature (8)..(8): n is a, c, g, or u
  misc_feature (11)..(11): n is a, c, g, or u
  misc_feature (14)..(14): n is a, c, g, or u
unaangcnggnuanccacau

SEQ ID NO: 10967 - RNA, 20 nt, Artificial Sequence
  Synthetic
  misc_feature (8)..(8): n is a, c, g, or u
uggcuuungggcauggacau

SEQ ID NO: 10968 - RNA, 20 nt, Artificial Sequence
  Synthetic
  misc_feature (8)..(8): n is a, c, g, or u
  misc_feature (11)..(11): n is a, c, g, or u
cagcacanccnagcagccau

SEQ ID NO: 10969 - RNA, 20 nt, Artificial Sequence
  Synthetic
uucaccucugcacgucgcau

SEQ ID NO: 10970 - RNA, 20 nt, Artificial Sequence
  Synthetic
uccaaaccucgacaaggcau

SEQ ID NO: 10971 - RNA, 20 nt, Artificial Sequence
  Synthetic
  misc_feature (14)..(14): n is a, c, g, or u
cuuggguggcuuungggcau

SEQ ID NO: 10972 - RNA, 20 nt, Artificial Sequence
  Synthetic
cagaggugaaaaaguugcau

SEQ ID NO: 10973 - RNA, 20 nt, Artificial Sequence
  Synthetic
uccccaguccucgagaagau

SEQ ID NO: 10974 - RNA, 20 nt, Artificial Sequence
  Synthetic
uccggaaguguugauaagau

SEQ ID NO: 10975 - RNA, 20 nt, Artificial Sequence
  Synthetic
  misc_feature (5)..(5): n is a, c, g, or u
ccaanucaaacaauccagau

SEQ ID NO: 10976 - RNA, 20 nt, Artificial Sequence
  Synthetic
gggaaagaaucccagaggau

SEQ ID NO: 10977 - RNA, 20 nt, Artificial Sequence
  Synthetic
auauuugguaagguuaggau

SEQ ID NO: 10978 - RNA, 20 nt, Artificial Sequence
  Synthetic
  misc_feature (1)..(1): n is a, c, g, or u
  misc_feature (4)..(4): n is a, c, g, or u
ngcnggguccaacuggugau

SEQ ID NO: 10979 - RNA, 20 nt, Artificial Sequence
  Synthetic
gcucuuguucccaagaauau

SEQ ID NO: 10980 - RNA, 20 nt, Artificial Sequence
  Synthetic
cccucaggcucagggcauau

SEQ ID NO: 10981 - RNA, 20 nt, Artificial Sequence
  Synthetic
uguuuggcuuucaguuauau

SEQ ID NO: 10982 - RNA, 20 nt, Artificial Sequence
  Synthetic
  misc_feature (3)..(3): n is a, c, g, or u
  misc_feature (7)..(7): n is a, c, g, or u
cunccunuaaauagaccuau

SEQ ID NO: 10983 - RNA, 20 nt, Artificial Sequence
  Synthetic
ugcuaggaguuccgcaguau

SEQ ID NO: 10984 - RNA, 20 nt, Artificial Sequence
  Synthetic
uuauauggaugaugugguau

SEQ ID NO: 10985 - RNA, 20 nt, Artificial Sequence
  Synthetic
gagucuagacucugugguau

SEQ ID NO: 10986 - RNA, 20 nt, Artificial Sequence
  Synthetic
  misc_feature (10)..(10): n is a, c, g, or u
agcuugccunagugcuguau

SEQ ID NO: 10987 - RNA, 20 nt, Artificial Sequence
  Synthetic
  misc_feature (11)..(11): n is a, c, g, or u
acaccgccucngcucuguau

SEQ ID NO: 10988 - RNA, 20 nt, Artificial Sequence
  Synthetic
  misc_feature (4)..(4): n is a, c, g, or u
  misc_feature (7)..(7): n is a, c, g, or u
gcunggnugugcugccaacu

SEQ ID NO: 10989 - RNA, 20 nt, Artificial Sequence
  Synthetic
  misc_feature (7)..(7): n is a, c, g, or u
  misc_feature (10)..(10): n is a, c, g, or u
uccgaangcnggguccaacu

SEQ ID NO: 10990 - RNA, 20 nt, Artificial Sequence
  Synthetic
aauaccacagagucuagacu

SEQ ID NO: 10991 - RNA, 20 nt, Artificial Sequence
  Synthetic
cgucaaucuucucgaggacu

SEQ ID NO: 10992 - RNA, 20 nt, Artificial Sequence
  Synthetic
uucuccuggcucaguuuacu

SEQ ID NO: 10993 - RNA, 20 nt, Artificial Sequence
  Synthetic
gagguuggucuuccaaaccu

SEQ ID NO: 10994 - RNA, 20 nt, Artificial Sequence
  Synthetic
  misc_feature (12)..(12): n is a, c, g, or u
aguccucuuaunuaagaccu

SEQ ID NO: 10995 - RNA, 20 nt, Artificial Sequence
  Synthetic
gacacgugggugcucccccu

SEQ ID NO: 10996 - RNA, 20 nt, Artificial Sequence
  Synthetic
gacgacgaggcagguccccu

SEQ ID NO: 10997 - RNA, 20 nt, Artificial Sequence
  Synthetic
  misc_feature (6)..(6): n is a, c, g, or u
uagcunacuacuaauucccu

SEQ ID NO: 10998 - RNA, 20 nt, Artificial Sequence
  Synthetic
caagccuccaagcugugccu

SEQ ID NO: 10999 - RNA, 20 nt, Artificial Sequence
  Synthetic
  misc_feature (12)..(12): n is a, c, g, or u
ccuucuauucgngaucuccu

SEQ ID NO: 11000 - RNA, 20 nt, Artificial Sequence
  Synthetic
ugcugguaguugauguuccu

SEQ ID NO: 11001 - RNA, 20 nt, Artificial Sequence
  Synthetic
  misc_feature (3)..(3): n is a, c, g, or u
  misc_feature (13)..(13): n is a, c, g, or u
aanuuguccuggnuaucgcu

SEQ ID NO: 11002 - RNA, 20 nt, Artificial Sequence
  Synthetic
caaggcacagcuuggaggcu

SEQ ID NO: 11003 - RNA, 20 nt, Artificial Sequence
  Synthetic
ggauuccuaggaccccugcu

SEQ ID NO: 11004 - RNA, 20 nt, Artificial Sequence
  Synthetic
  misc_feature (11)..(11): n is a, c, g, or u
ggggccuauanuuuccugcu

SEQ ID NO: 11005 - RNA, 20 nt, Artificial Sequence
  Synthetic
acauuccaccaagcucugcu

SEQ ID NO: 11006 - RNA, 20 nt, Artificial Sequence
  Synthetic
ugaaaaaguugcauggugcu

SEQ ID NO: 11007 - RNA, 20 nt, Artificial Sequence
  Synthetic
ugggguugaagucccaaucu

SEQ ID NO: 11008 - RNA, 20 nt, Artificial Sequence
  Synthetic
gucgcagaagaucucaaucu

SEQ ID NO: 11009 - RNA, 20 nt, Artificial Sequence
  Synthetic
gcccacucccauaggaaucu

SEQ ID NO: 11010 - RNA, 20 nt, Artificial Sequence
  Synthetic
gccaagucuguacaacaucu

SEQ ID NO: 11011 - RNA, 20 nt, Artificial Sequence
  Synthetic
cucacaauaccacagagucu

SEQ ID NO: 11012 - RNA, 20 nt, Artificial Sequence
  Synthetic
gagaaguccaccacgagucu

SEQ ID NO: 11013 - RNA, 20 nt, Artificial Sequence
  Synthetic
aucccgcggacgacccgucu

SEQ ID NO: 11014 - RNA, 20 nt, Artificial Sequence
  Synthetic
uuugugggucaccauauucu

SEQ ID NO: 11015 - RNA, 20 nt, Artificial Sequence
  Synthetic
ggcgagggaguucuucuucu

SEQ ID NO: 11016 - RNA, 20 nt, Artificial Sequence
  Synthetic
aucuucuuguugguucuucu

SEQ ID NO: 11017 - RNA, 20 nt, Artificial Sequence
  Synthetic
uggacuucucucaauuuucu

SEQ ID NO: 11018 - RNA, 20 nt, Artificial Sequence
  Synthetic
ugggauauguaauuggaagu

SEQ ID NO: 11019 - RNA, 20 nt, Artificial Sequence
  Synthetic
auaacugaaagccaaacagu

SEQ ID NO: 11020 - RNA, 20 nt, Artificial Sequence
  Synthetic
ggauuaaagacagguacagu

SEQ ID NO: 11021 - RNA, 20 nt, Artificial Sequence
  Synthetic
  misc_feature (3)..(3): n is a, c, g, or u
  misc_feature (15)..(15): n is a, c, g, or u
aungccaagccccanccagu

SEQ ID NO: 11022 - RNA, 20 nt, Artificial Sequence
  Synthetic
ucauccucaggccaugcagu

SEQ ID NO: 11023 - RNA, 20 nt, Artificial Sequence
  Synthetic
  misc_feature (1)..(1): n is a, c, g, or u
  misc_feature (7)..(7): n is a, c, g, or u
nuuuaangacugggaggagu

SEQ ID NO: 11024 - RNA, 20 nt, Artificial Sequence
  Synthetic
uauucuguguuggggugagu

SEQ ID NO: 11025 - RNA, 20 nt, Artificial Sequence
  Synthetic
cauggucccgugcugguagu

SEQ ID NO: 11026 - RNA, 20 nt, Artificial Sequence
  Synthetic
acccuaauaaaaccaaacgu

SEQ ID NO: 11027 - RNA, 20 nt, Artificial Sequence
  Synthetic
auucagcgccgacgggacgu

SEQ ID NO: 11028 - RNA, 20 nt, Artificial Sequence
  Synthetic
  misc_feature (2)..(2): n is a, c, g, or u
  misc_feature (10)..(11): n is a, c, g, or u
unggccaucnncgcaugcgu

SEQ ID NO: 11029 - RNA, 20 nt, Artificial Sequence
  Synthetic
accacagagucuagacucgu

SEQ ID NO: 11030 - RNA, 20 nt, Artificial Sequence
  Synthetic
uaugccucaaggucggucgu

SEQ ID NO: 11031 - RNA, 20 nt, Artificial Sequence
  Synthetic
ccauuuguucagugguucgu

SEQ ID NO: 11032 - RNA, 20 nt, Artificial Sequence
  Synthetic
guuggugagugauuggaggu

SEQ ID NO: 11033 - RNA, 20 nt, Artificial Sequence
  Synthetic
  misc_feature (9)..(9): n is a, c, g, or u
aagccccanccagugggggu

SEQ ID NO: 11034 - RNA, 20 nt, Artificial Sequence
  Synthetic
  misc_feature (4)..(4): n is a, c, g, or u
ccanugauccuuguuggggu

SEQ ID NO: 11035 - RNA, 20 nt, Artificial Sequence
  Synthetic
acagagucuagacucguggu

SEQ ID NO: 11036 - RNA, 20 nt, Artificial Sequence
  Synthetic
  misc_feature (4)..(4): n is a, c, g, or u
gggnucuagcagagcuuggu

SEQ ID NO: 11037 - RNA, 20 nt, Artificial Sequence
  Synthetic
gguccuaggaauccugaugu

SEQ ID NO: 11038 - RNA, 20 nt, Artificial Sequence
  Synthetic
gcauuauuuacauacucugu

SEQ ID NO: 11039 - RNA, 20 nt, Artificial Sequence
  Synthetic
acaguaguuuccggaagugu

SEQ ID NO: 11040 - RNA, 20 nt, Artificial Sequence
  Synthetic
uuuggugucuuuuggagugu

SEQ ID NO: 11041 - RNA, 20 nt, Artificial Sequence
  Synthetic
  misc_feature (13)..(13): n is a, c, g, or u
accccaaaagacngccgugu

SEQ ID NO: 11042 - RNA, 20 nt, Artificial Sequence
  Synthetic
  misc_feature (2)..(2): n is a, c, g, or u
unaggcaagcuauucugugu

SEQ ID NO: 11043 - RNA, 20 nt, Artificial Sequence
  Synthetic
uaagagggcccacauauugu

SEQ ID NO: 11044 - RNA, 20 nt, Artificial Sequence
  Synthetic
  misc_feature (2)..(2): n is a, c, g, or u
  misc_feature (10)..(10): n is a, c, g, or u
cncuggccanugauccuugu

SEQ ID NO: 11045 - RNA, 20 nt, Artificial Sequence
  Synthetic
acaggcgggguuuuucuugu

SEQ ID NO: 11046 - RNA, 20 nt, Artificial Sequence
  Synthetic
  misc_feature (19)..(19): n is a, c, g, or u
gagguuccuugagcagganu

SEQ ID NO: 11047 - RNA, 20 nt, Artificial Sequence
  Synthetic
  misc_feature (19)..(19): n is a, c, g, or u
ugacgcaacccccacuggnu

SEQ ID NO: 11048 - RNA, 20 nt, Artificial Sequence
  Synthetic
  misc_feature (2)..(2): n is a, c, g, or u
anuucaugggauauguaauu

SEQ ID NO: 11049 - RNA, 20 nt, Artificial Sequence
  Synthetic
  misc_feature (11)..(11): n is a, c, g, or u
  misc_feature (16)..(16): n is a, c, g, or u
cagguaggagngggancauu

SEQ ID NO: 11050 - RNA, 20 nt, Artificial Sequence
  Synthetic
ugucuuccugacugccgauu

SEQ ID NO: 11051 - RNA, 20 nt, Artificial Sequence
  Synthetic
  misc_feature (2)..(2): n is a, c, g, or u
unuaaauagaccuauugauu

SEQ ID NO: 11052 - RNA, 20 nt, Artificial Sequence
  Synthetic
uauauggaugaugugguauu

SEQ ID NO: 11053 - RNA, 20 nt, Artificial Sequence
  Synthetic
ccccaacguuugguuuuauu

SEQ ID NO: 11054 - RNA, 20 nt, Artificial Sequence
  Synthetic
  misc_feature (2)..(3): n is a, c, g, or u
cnncgcaugcguggaaccuu

SEQ ID NO: 11055 - RNA, 20 nt, Artificial Sequence
  Synthetic
cuuaccaaauauuugcccuu

SEQ ID NO: 11056 - RNA, 20 nt, Artificial Sequence
  Synthetic
ucucaauguuaguaucccuu

SEQ ID NO: 11057 - RNA, 20 nt, Artificial Sequence
  Synthetic
  misc_feature (7)..(7): n is a, c, g, or u
ucugggnucuagcagagcuu

SEQ ID NO: 11058 - RNA, 20 nt, Artificial Sequence
  Synthetic
  misc_feature (6)..(6): n is a, c, g, or u
ucuuanauaagaggacucuu

SEQ ID NO: 11059 - RNA, 20 nt, Artificial Sequence
  Synthetic
  misc_feature (4)..(4): n is a, c, g, or u
  misc_feature (10)..(10): n is a, c, g, or u
  misc_feature (12)..(12): n is a, c, g, or u
gucnuuaaananacagucuu

SEQ ID NO: 11060 - RNA, 20 nt, Artificial Sequence
  Synthetic
uaccaauuuucuuuugucuu

SEQ ID NO: 11061 - RNA, 20 nt, Artificial Sequence
  Synthetic
gggauauguaauuggaaguu

SEQ ID NO: 11062 - RNA, 20 nt, Artificial Sequence
  Synthetic
acagaaaggccuuguaaguu

SEQ ID NO: 11063 - RNA, 20 nt, Artificial Sequence
  Synthetic
uucuuucccgaucaccaguu

SEQ ID NO: 11064 - RNA, 20 nt, Artificial Sequence
  Synthetic
  misc_feature (6)..(6): n is a, c, g, or u
uuuaangacugggaggaguu

SEQ ID NO: 11065 - RNA, 20 nt, Artificial Sequence
  Synthetic
cccuaauaaaaccaaacguu

SEQ ID NO: 11066 - RNA, 20 nt, Artificial Sequence
  Synthetic
cgacccgucucggggccguu

SEQ ID NO: 11067 - RNA, 20 nt, Artificial Sequence
  Synthetic
  misc_feature (3)..(3): n is a, c, g, or u
aanuuggaggacaagagguu

SEQ ID NO: 11068 - RNA, 20 nt, Artificial Sequence
  Synthetic
uuggugagugauuggagguu

SEQ ID NO: 11069 - RNA, 20 nt, Artificial Sequence
  Synthetic
  misc_feature (1)..(1): n is a, c, g, or u
naggcaagcuauucuguguu

SEQ ID NO: 11070 - RNA, 20 nt, Artificial Sequence
  Synthetic
aagucccaaucuggauuguu

SEQ ID NO: 11071 - RNA, 20 nt, Artificial Sequence
  Synthetic
  misc_feature (1)..(1): n is a, c, g, or u
  misc_feature (9)..(9): n is a, c, g, or u
ncuggccanugauccuuguu

SEQ ID NO: 11072 - RNA, 20 nt, Artificial Sequence
  Synthetic
uuccggaaacuacuguuguu

SEQ ID NO: 11073 - RNA, 20 nt, Artificial Sequence
  Synthetic
accugggugggaaguaauuu

SEQ ID NO: 11074 - RNA, 20 nt, Artificial Sequence
  Synthetic
uugauaagauaggggcauuu

SEQ ID NO: 11075 - RNA, 20 nt, Artificial Sequence
  Synthetic
cuacacgcagcgccucauuu

SEQ ID NO: 11076 - RNA, 20 nt, Artificial Sequence
  Synthetic
gaaacuguucuugaguauuu

SEQ ID NO: 11077 - RNA, 20 nt, Artificial Sequence
  Synthetic
gcugugccuuggguggcuuu

SEQ ID NO: 11078 - RNA, 20 nt, Artificial Sequence
  Synthetic
  misc_feature (1)..(1): n is a, c, g, or u
  misc_feature (14)..(14): n is a, c, g, or u
nccaccacacggcngucuuu

SEQ ID NO: 11079 - RNA, 20 nt, Artificial Sequence
  Synthetic
auguaaauaaugccuaguuu

SEQ ID NO: 11080 - RNA, 20 nt, Artificial Sequence
  Synthetic
cccaugccuugucgagguuu

SEQ ID NO: 11081 - RNA, 20 nt, Artificial Sequence
  Synthetic
acauuuccugucuuacuuuu

SEQ ID NO: 11082 - RNA, 20 nt, Artificial Sequence
  Synthetic
  misc_feature (13)..(13): n is a, c, g, or u
ccaccacacggcngucuuuu

SEQ ID NO: 11083 - RNA, 17 nt, Artificial Sequence
  Synthetic
gagaccuucgucugcga

SEQ ID NO: 11084 - RNA, 17 nt, Artificial Sequence
  Synthetic
gcgacgugcagagguga

SEQ ID NO: 11085 - RNA, 17 nt, Artificial Sequence
  Synthetic
gggcgcaccucucuuua

SEQ ID NO: 11086 - RNA, 17 nt, Artificial Sequence
  Synthetic
guagacaaaggacgucc

SEQ ID NO: 11087 - RNA, 17 nt, Artificial Sequence
  Synthetic
gagaucuucugcgacgc

SEQ ID NO: 11088 - RNA, 17 nt, Artificial Sequence
  Synthetic
ggucguccgcgggauuc

SEQ ID NO: 11089 - RNA, 17 nt, Artificial Sequence
  Synthetic
gaccgcguaaagagagg

SEQ ID NO: 11090 - RNA, 17 nt, Artificial Sequence
  Synthetic
guuccggccgaccacgg

SEQ ID NO: 11091 - RNA, 17 nt, Artificial Sequence
  Synthetic
gaaaggccuuguaaguu

SEQ ID NO: 11092 - RNA, 20 nt, Artificial Sequence
  Synthetic
ggaccccugcucguguuaca

SEQ ID NO: 11093 - RNA, 20 nt, Artificial Sequence
  Synthetic
gagauugagaucuucugcga

SEQ ID NO: 11094 - RNA, 20 nt, Artificial Sequence
  Synthetic
  misc_feature (18)..(18): n is a, c, g, or u
gccucccgauacagagcnga

SEQ ID NO: 11095 - RNA, 20 nt, Artificial Sequence
  Synthetic
gaaggcacagacggggagac

SEQ ID NO: 11096 - RNA, 20 nt, Artificial Sequence
  Synthetic
gcuccucugccgauccauac

SEQ ID NO: 11097 - RNA, 20 nt, Artificial Sequence
  Synthetic
gucccgucggcgcugaaucc

SEQ ID NO: 11098 - RNA, 20 nt, Artificial Sequence
  Synthetic
gacguagacaaaggacgucc

SEQ ID NO: 11099 - RNA, 20 nt, Artificial Sequence
  Synthetic
ggagaccgcguaaagagagg

SEQ ID NO: 11100 - RNA, 20 nt, Artificial Sequence
  Synthetic
gccguuccggccgaccacgg

SEQ ID NO: 11101 - RNA, 20 nt, Artificial Sequence
  Synthetic
gugcugccaacuggauccug

SEQ ID NO: 11102 - RNA, 20 nt, Artificial Sequence
  Synthetic
gcccacucccauaggaaucu

SEQ ID NO: 11103 - RNA, 17 nt, Artificial Sequence
  Synthetic
ccccugcucguguuaca

SEQ ID NO: 11104 - RNA, 17 nt, Artificial Sequence
  Synthetic
cacaaagguuccacgca

SEQ ID NO: 11105 - RNA, 17 nt, Artificial Sequence
  Synthetic
auugagaucuucugcga

SEQ ID NO: 11106 - RNA, 17 nt, Artificial Sequence
  Synthetic
ccucugccgauccauac

SEQ ID NO: 11107 - RNA, 17 nt, Artificial Sequence
  Synthetic
ccgucggcgcugaaucc

SEQ ID NO: 11108 - RNA, 17 nt, Artificial Sequence
  Synthetic
agagagaaacuacacgc

SEQ ID NO: 11109 - RNA, 17 nt, Artificial Sequence
  Synthetic
cccacaaaaugaggcgc

SEQ ID NO: 11110 - RNA, 17 nt, Artificial Sequence
  Synthetic
acgaaggucucaaucgc

SEQ ID NO: 11111 - RNA, 17 nt, Artificial Sequence
  Synthetic
uuugucuacgucccguc

SEQ ID NO: 11112 - RNA, 17 nt, Artificial Sequence
  Synthetic
ccccgagacgggucguc

SEQ ID NO: 11113 - RNA, 17 nt, Artificial Sequence
  Synthetic
cgauugagaccuucguc

SEQ ID NO: 11114 - RNA, 17 nt, Artificial Sequence
  Synthetic
  misc_feature (1)..(1): n is a, c, g, or u
nuaucgcuggauguguc

SEQ ID NO: 11115 - RNA, 17 nt, Artificial Sequence
  Synthetic
ccgagauugagaucuuc

SEQ ID NO: 11116 - RNA, 20 nt, Artificial Sequence
  Synthetic
agccacaaagguuccacgca

SEQ ID NO: 11117 - RNA, 20 nt, Artificial Sequence
  Synthetic
auugagaccuucgucugcga

SEQ ID NO: 11118 - RNA, 20 nt, Artificial Sequence
  Synthetic
caugcgacgugcagagguga

SEQ ID NO: 11119 - RNA, 20 nt, Artificial Sequence
  Synthetic
acggggcgcaccucucuuua

SEQ ID NO: 11120 - RNA, 20 nt, Artificial Sequence
  Synthetic
aaaacgccgcagacacaucc

SEQ ID NO: 11121 - RNA, 20 nt, Artificial Sequence
  Synthetic
  misc_feature (1)..(1): n is a, c, g, or u
nugugcugccaacuggaucc

SEQ ID NO: 11122 - RNA, 20 nt, Artificial Sequence
  Synthetic
auaagagagaaacuacacgc

SEQ ID NO: 11123 - RNA, 20 nt, Artificial Sequence
  Synthetic
auugagaucuucugcgacgc

SEQ ID NO: 11124 - RNA, 20 nt, Artificial Sequence
  Synthetic
ugacccacaaaaugaggcgc

SEQ ID NO: 11125 - RNA, 20 nt, Artificial Sequence
  Synthetic
cagacgaaggucucaaucgc

SEQ ID NO: 11126 - RNA, 20 nt, Artificial Sequence
  Synthetic
uccuuugucuacgucccguc

SEQ ID NO: 11127 - RNA, 20 nt, Artificial Sequence
  Synthetic
cggccccgagacgggucguc

SEQ ID NO: 11128 - RNA, 20 nt, Artificial Sequence
  Synthetic
cggcgauugagaccuucguc

SEQ ID NO: 11129 - RNA, 20 nt, Artificial Sequence
  Synthetic
acgggucguccgcgggauuc

SEQ ID NO: 11130 - RNA, 20 nt, Artificial Sequence
  Synthetic
uucccgagauugagaucuuc

SEQ ID NO: 11131 - RNA, 20 nt, Artificial Sequence
  Synthetic
acagaaaggccuuguaaguu

SEQ ID NO: 11132 - RNA, 17 nt, Artificial Sequence
  Synthetic
  misc_feature (13)..(13): n is a, c, g, or u
guucacgguggunucca

SEQ ID NO: 11133 - RNA, 17 nt, Artificial Sequence
  Synthetic
ggugacccacaaaauga

SEQ ID NO: 11134 - RNA, 17 nt, Artificial Sequence
  Synthetic
ggcacagacggggagac

SEQ ID NO: 11135 - RNA, 20 nt, Artificial Sequence
  Synthetic
  misc_feature (16)..(16): n is a, c, g, or u
ggcguucacgguggunucca

SEQ ID NO: 11136 - RNA, 20 nt, Artificial Sequence
  Synthetic
  misc_feature (4)..(4): n is a, c, g, or u
  misc_feature (7)..(7): n is a, c, g, or u
  misc_feature (15)..(16): n is a, c, g, or u
ggcnaunggccaucnncgca

SEQ ID NO: 11137 - RNA, 17 nt, Artificial Sequence
  Synthetic
  misc_feature (1)..(1): n is a, c, g, or u
  misc_feature (4)..(4): n is a, c, g, or u
  misc_feature (12)..(13): n is a, c, g, or u
naunggccaucnncgca

SEQ ID NO: 11138 - RNA, 17 nt, Artificial Sequence
  Synthetic
  misc_feature (15)..(15): n is a, c, g, or u
ucccgauacagagcnga

SEQ ID NO: 11139 - RNA, 17 nt, Artificial Sequence
  Synthetic
acgccgcagacacaucc

SEQ ID NO: 11140 - RNA, 17 nt, Artificial Sequence
  Synthetic
ugcugccaacuggaucc

SEQ ID NO: 11141 - RNA, 17 nt, Artificial Sequence
  Synthetic
  misc_feature (4)..(4): n is a, c, g, or u
uuungcuccagaccggc

SEQ ID NO: 11142 - RNA, 17 nt, Artificial Sequence
  Synthetic
ucgcuggaugugucugc

SEQ ID NO: 11143 - RNA, 17 nt, Artificial Sequence
  Synthetic
  misc_feature (10)..(10): n is a, c, g, or u
  misc_feature (12)..(12): n is a, c, g, or u
ucuguaagcngnaggag

SEQ ID NO: 11144 - RNA, 17 nt, Artificial Sequence
  Synthetic
  misc_feature (16)..(16): n is a, c, g, or u
uugggcaagaccuggng

SEQ ID NO: 11145 - RNA, 17 nt, Artificial Sequence
  Synthetic
cugccaacuggauccug

SEQ ID NO: 11146 - RNA, 17 nt, Artificial Sequence
  Synthetic
cacucccauaggaaucu

SEQ ID NO: 11147 - RNA, 17 nt, Artificial Sequence
  Synthetic
  misc_feature (6)..(6): n is a, c, g, or u
ccccanccagugggggu

SEQ ID NO: 11148 - RNA, 20 nt, Artificial Sequence
  Synthetic
uauggugacccacaaaauga

SEQ ID NO: 11149 - RNA, 20 nt, Artificial Sequence
  Synthetic
  misc_feature (1)..(1): n is a, c, g, or u
  misc_feature (7)..(7): n is a, c, g, or u
naguuungcuccagaccggc

SEQ ID NO: 11150 - RNA, 20 nt, Artificial Sequence
  Synthetic
  misc_feature (1)..(1): n is a, c, g, or u
nuaucgcuggaugugucugc

SEQ ID NO: 11151 - RNA, 20 nt, Artificial Sequence
  Synthetic
  misc_feature (4)..(4): n is a, c, g, or u
uggnuaucgcuggauguguc

SEQ ID NO: 11152 - RNA, 20 nt, Artificial Sequence
  Synthetic
  misc_feature (13)..(13): n is a, c, g, or u
  misc_feature (15)..(15): n is a, c, g, or u
uggucuguaagcngnaggag

SEQ ID NO: 11153 - RNA, 20 nt, Artificial Sequence
  Synthetic
  misc_feature (19)..(19): n is a, c, g, or u
accuugggcaagaccuggng

SEQ ID NO: 11154 - RNA, 20 nt, Artificial Sequence
  Synthetic
  misc_feature (9)..(9): n is a, c, g, or u
aagccccanccagugggggu

SEQ ID NO: 11155 - RNA, 17 nt, Artificial Sequence
  Synthetic
  misc_feature (8)..(8): n is a, c, g, or u
agaggaanaugauaaaa

SEQ ID NO: 11156 - RNA, 17 nt, Artificial Sequence
  Synthetic
gcuuacagaccaccaaa

SEQ ID NO: 11157 - RNA, 17 nt, Artificial Sequence
  Synthetic
uauuguuuacacagaaa

SEQ ID NO: 11158 - RNA, 17 nt, Artificial Sequence
  Synthetic
  misc_feature (11)..(11): n is a, c, g, or u
  misc_feature (14)..(14): n is a, c, g, or u
auuugcccuunganaaa

SEQ ID NO: 11159 - RNA, 17 nt, Artificial Sequence
  Synthetic
  misc_feature (14)..(14): n is a, c, g, or u
guauacaugcauanaaa

SEQ ID NO: 11160 - RNA, 17 nt, Artificial Sequence
  Synthetic
cuuccaaaccucgacaa

SEQ ID NO: 11161 - RNA, 17 nt, Artificial Sequence
  Synthetic
uucucgccaacuuacaa

SEQ ID NO: 11162 - RNA, 17 nt, Artificial Sequence
  Synthetic
  misc_feature (5)..(5): n is a, c, g, or u
gcccnaaagccacccaa

SEQ ID NO: 11163 - RNA, 17 nt, Artificial Sequence
  Synthetic
  misc_feature (13)..(13): n is a, c, g, or u
uguaaaaggggcngcaa

SEQ ID NO: 11164 - RNA, 17 nt, Artificial Sequence
  Synthetic
aaggaaagaagucagaa

SEQ ID NO: 11165 - RNA, 17 nt, Artificial Sequence
  Synthetic
  misc_feature (3)..(3): n is a, c, g, or u
ggnccggcagaugagaa

SEQ ID NO: 11166 - RNA, 17 nt, Artificial Sequence
  Synthetic
  misc_feature (6)..(6): n is a, c, g, or u
uuuganuuggcuccgaa

SEQ ID NO: 11167 - RNA, 17 nt, Artificial Sequence
  Synthetic
cauaggaaucuugcgaa

SEQ ID NO: 11168 - RNA, 17 nt, Artificial Sequence
  Synthetic
gccaaacagugggggaa

SEQ ID NO: 11169 - RNA, 17 nt, Artificial Sequence
  Synthetic
uuacauacucuguggaa

SEQ ID NO: 11170 - RNA, 17 nt, Artificial Sequence
  Synthetic
ucauccauauaacugaa

SEQ ID NO: 11171 - RNA, 17 nt, Artificial Sequence
  Synthetic
guuggcgagaaagugaa

SEQ ID NO: 11172 - RNA, 17 nt, Artificial Sequence
  Synthetic
  misc_feature (6)..(6): n is a, c, g, or u
augganaccaccgugaa

SEQ ID NO: 11173 - RNA, 17 nt, Artificial Sequence
  Synthetic
  misc_feature (15)..(15): n is a, c, g, or u
caauguccaugcccnaa

SEQ ID NO: 11174 - RNA, 17 nt, Artificial Sequence
  Synthetic
  misc_feature (6)..(6): n is a, c, g, or u
  misc_feature (15)..(15): n is a, c, g, or u
gcauanaaaggcaunaa

SEQ ID NO: 11175 - RNA, 17 nt, Artificial Sequence
  Synthetic
acagaguauguaaauaa

SEQ ID NO: 11176 - RNA, 17 nt, Artificial Sequence
  Synthetic
guacaguagaagaauaa

SEQ ID NO: 11177 - RNA, 17 nt, Artificial Sequence
  Synthetic
uguuccggagacucuaa

SEQ ID NO: 11178 - RNA, 17 nt, Artificial Sequence
  Synthetic
  misc_feature (10)..(10): n is a, c, g, or u
aggauaauangguuuaa

SEQ ID NO: 11179 - RNA, 17 nt, Artificial Sequence
  Synthetic
cggcugcgagcaaaaca

SEQ ID NO: 11180 - RNA, 17 nt, Artificial Sequence
  Synthetic
  misc_feature (8)..(8): n is a, c, g, or u
ugcuuagnuuguauaca

SEQ ID NO: 11181 - RNA, 17 nt, Artificial Sequence
  Synthetic
auaagagagaaacuaca

SEQ ID NO: 11182 - RNA, 17 nt, Artificial Sequence
  Synthetic
  misc_feature (5)..(6): n is a, c, g, or u
uccannacauuccacca

SEQ ID NO: 11183 - RNA, 17 nt, Artificial Sequence
  Synthetic
ucuguucaccagcacca

SEQ ID NO: 11184 - RNA, 17 nt, Artificial Sequence
  Synthetic
cuaccagcacgggacca

SEQ ID NO: 11185 - RNA, 17 nt, Artificial Sequence
  Synthetic
  misc_feature (10)..(10): n is a, c, g, or u
agaaagauungucccca

SEQ ID NO: 11186 - RNA, 17 nt, Artificial Sequence
  Synthetic
ggaagaccaaccuccca

SEQ ID NO: 11187 - RNA, 17 nt, Artificial Sequence
  Synthetic
cagucauccucaggcca

SEQ ID NO: 11188 - RNA, 17 nt, Artificial Sequence
  Synthetic
  misc_feature (1)..(2): n is a, c, g, or u
  misc_feature (10)..(10): n is a, c, g, or u
  misc_feature (13)..(13): n is a, c, g, or u
nngauggccnaungcca

SEQ ID NO: 11189 - RNA, 17 nt, Artificial Sequence
  Synthetic
uacuguucaagccucca

SEQ ID NO: 11190 - RNA, 17 nt, Artificial Sequence
  Synthetic
  misc_feature (4)..(4): n is a, c, g, or u
auangggucaaugucca

SEQ ID NO: 11191 - RNA, 17 nt, Artificial Sequence
  Synthetic
gagccacaaagguucca

SEQ ID NO: 11192 - RNA, 17 nt, Artificial Sequence
  Synthetic
  misc_feature (10)..(10): n is a, c, g, or u
uguauacaancuaagca

SEQ ID NO: 11193 - RNA, 17 nt, Artificial Sequence
  Synthetic
uaggauagaaccuagca

SEQ ID NO: 11194 - RNA, 17 nt, Artificial Sequence
  Synthetic
  misc_feature (12)..(12): n is a, c, g, or u
cauacagcacunaggca

SEQ ID NO: 11195 - RNA, 17 nt, Artificial Sequence
  Synthetic
uugggguggagcccuca

SEQ ID NO: 11196 - RNA, 17 nt, Artificial Sequence
  Synthetic
agagacagucauccuca

SEQ ID NO: 11197 - RNA, 17 nt, Artificial Sequence
  Synthetic
ucauguccuacuguuca

SEQ ID NO: 11198 - RNA, 17 nt, Artificial Sequence
  Synthetic
gagaguaacuccacaga

SEQ ID NO: 11199 - RNA, 17 nt, Artificial Sequence
  Synthetic
cuguuguuagacgacga

SEQ ID NO: 11200 - RNA, 17 nt, Artificial Sequence
  Synthetic
  misc_feature (3)..(3): n is a, c, g, or u
ucngcucuguaucggga

SEQ ID NO: 11201 - RNA, 17 nt, Artificial Sequence
  Synthetic
  misc_feature (1)..(1): n is a, c, g, or u
  misc_feature (3)..(3): n is a, c, g, or u
  misc_feature (14)..(14): n is a, c, g, or u
ngnucuuuguacungga

SEQ ID NO: 11202 - RNA, 17 nt, Artificial Sequence
  Synthetic
acuacuaauucccugga

SEQ ID NO: 11203 - RNA, 17 nt, Artificial Sequence
  Synthetic
gacugccgauuggugga

SEQ ID NO: 11204 - RNA, 17 nt, Artificial Sequence
  Synthetic
ccaaggcacagcuugga

SEQ ID NO: 11205 - RNA, 17 nt, Artificial Sequence
  Synthetic
  misc_feature (15)..(15): n is a, c, g, or u
auugacgauaugggnga

SEQ ID NO: 11206 - RNA, 17 nt, Artificial Sequence
  Synthetic
aaccaacaagaagauga

SEQ ID NO: 11207 - RNA, 17 nt, Artificial Sequence
  Synthetic
caggagaaacggacuga

SEQ ID NO: 11208 - RNA, 17 nt, Artificial Sequence
  Synthetic
ugccaaguguuugcuga

SEQ ID NO: 11209 - RNA, 17 nt, Artificial Sequence
  Synthetic
ucaacgaccgaccuuga

SEQ ID NO: 11210 - RNA, 17 nt, Artificial Sequence
  Synthetic
  misc_feature (16)..(16): n is a, c, g, or u
ucaccauacagcacuna

SEQ ID NO: 11211 - RNA, 17 nt, Artificial Sequence
  Synthetic
  misc_feature (4)..(4): n is a, c, g, or u
  misc_feature (7)..(7): n is a, c, g, or u
  misc_feature (10)..(10): n is a, c, g, or u
  misc_feature (13)..(13): n is a, c, g, or u
  misc_feature (16)..(16): n is a, c, g, or u
uggnuanccngcnuuna

SEQ ID NO: 11212 - RNA, 17 nt, Artificial Sequence
  Synthetic
uggcacuguugucaaua

SEQ ID NO: 11213 - RNA, 17 nt, Artificial Sequence
  Synthetic
  misc_feature (13)..(13): n is a, c, g, or u
accagcaggaaanuaua

SEQ ID NO: 11214 - RNA, 17 nt, Artificial Sequence
  Synthetic
  misc_feature (11)..(11): n is a, c, g, or u
ucauuacuucnaaacua

SEQ ID NO: 11215 - RNA, 17 nt, Artificial Sequence
  Synthetic
ucuucauccugcugcua

SEQ ID NO: 11216 - RNA, 17 nt, Artificial Sequence
  Synthetic
  misc_feature (14)..(14): n is a, c, g, or u
ugcauguauacaancua

SEQ ID NO: 11217 - RNA, 17 nt, Artificial Sequence
  Synthetic
  misc_feature (2)..(2): n is a, c, g, or u
anacagucuuugaagua

SEQ ID NO: 11218 - RNA, 17 nt, Artificial Sequence
  Synthetic
guggagagaugggagua

SEQ ID NO: 11219 - RNA, 17 nt, Artificial Sequence
  Synthetic
  misc_feature (7)..(7): n is a, c, g, or u
uguacunggaggcugua

SEQ ID NO: 11220 - RNA, 17 nt, Artificial Sequence
  Synthetic
gcauuugguggucugua

SEQ ID NO: 11221 - RNA, 17 nt, Artificial Sequence
  Synthetic
  misc_feature (3)..(3): n is a, c, g, or u
  misc_feature (6)..(6): n is a, c, g, or u
  misc_feature (15)..(15): n is a, c, g, or u
gcnuunaugccuuunua

SEQ ID NO: 11222 - RNA, 17 nt, Artificial Sequence
  Synthetic
ugaacaugagaugauua

SEQ ID NO: 11223 - RNA, 17 nt, Artificial Sequence
  Synthetic
  misc_feature (13)..(13): n is a, c, g, or u
gagauuaaaauunauua

SEQ ID NO: 11224 - RNA, 17 nt, Artificial Sequence
  Synthetic
gugaacagaccaauuua

SEQ ID NO: 11225 - RNA, 17 nt, Artificial Sequence
  Synthetic
  misc_feature (12)..(12): n is a, c, g, or u
uaguugucuganuuuua

SEQ ID NO: 11226 - RNA, 17 nt, Artificial Sequence
  Synthetic
  misc_feature (10)..(10): n is a, c, g, or u
acgguagagncccaaac

SEQ ID NO: 11227 - RNA, 17 nt, Artificial Sequence
  Synthetic
ccguggucggccggaac

SEQ ID NO: 11228 - RNA, 17 nt, Artificial Sequence
  Synthetic
  misc_feature (8)..(8): n is a, c, g, or u
gguucacnccaccacac

SEQ ID NO: 11229 - RNA, 17 nt, Artificial Sequence
  Synthetic
  misc_feature (3)..(3): n is a, c, g, or u
cgngaucuccucgacac

SEQ ID NO: 11230 - RNA, 17 nt, Artificial Sequence
  Synthetic
aaagccacccaaggcac

SEQ ID NO: 11231 - RNA, 17 nt, Artificial Sequence
  Synthetic
gcuccaccccaaaagac

SEQ ID NO: 11232 - RNA, 17 nt, Artificial Sequence
  Synthetic
ucggcagucaggaagac

SEQ ID NO: 11233 - RNA, 17 nt, Artificial Sequence
  Synthetic
gauuggagguuggggac

SEQ ID NO: 11234 - RNA, 17 nt, Artificial Sequence
  Synthetic
uaggcugucuuccugac

SEQ ID NO: 11235 - RNA, 17 nt, Artificial Sequence
  Synthetic
uguucaccucaccauac

SEQ ID NO: 11236 - RNA, 17 nt, Artificial Sequence
  Synthetic
aacccuguuccgacuac

SEQ ID NO: 11237 - RNA, 17 nt, Artificial Sequence
  Synthetic
gaccaauuuaugccuac

SEQ ID NO: 11238 - RNA, 17 nt, Artificial Sequence
  Synthetic
uugggaacaagagcuac

SEQ ID NO: 11239 - RNA, 17 nt, Artificial Sequence
  Synthetic
guccgaagguuuuguac

SEQ ID NO: 11240 - RNA, 17 nt, Artificial Sequence
  Synthetic
ccggaacuggagccacc

SEQ ID NO: 11241 - RNA, 17 nt, Artificial Sequence
  Synthetic
aaauuggucuguucacc

SEQ ID NO: 11242 - RNA, 17 nt, Artificial Sequence
  Synthetic
cgggaccaugcaagacc

SEQ ID NO: 11243 - RNA, 17 nt, Artificial Sequence
  Synthetic
  misc_feature (1)..(1): n is a, c, g, or u
  misc_feature (7)..(7): n is a, c, g, or u
naguuungcuccagacc

SEQ ID NO: 11244 - RNA, 17 nt, Artificial Sequence
  Synthetic
ucuucuucuaggggacc

SEQ ID NO: 11245 - RNA, 17 nt, Artificial Sequence
  Synthetic
caggaacaucaacuacc

SEQ ID NO: 11246 - RNA, 17 nt, Artificial Sequence
  Synthetic
gucaacaagaaaaaccc

SEQ ID NO: 11247 - RNA, 17 nt, Artificial Sequence
  Synthetic
ucgaggacuggggaccc

SEQ ID NO: 11248 - RNA, 17 nt, Artificial Sequence
  Synthetic
gaucaccaguuggaccc

SEQ ID NO: 11249 - RNA, 17 nt, Artificial Sequence
  Synthetic
aggauuccuaggacccc

SEQ ID NO: 11250 - RNA, 17 nt, Artificial Sequence
  Synthetic
gcgagaaagugaaagcc

SEQ ID NO: 11251 - RNA, 17 nt, Artificial Sequence
  Synthetic
  misc_feature (9)..(9): n is a, c, g, or u
uuaaaauunauuaugcc

SEQ ID NO: 11252 - RNA, 17 nt, Artificial Sequence
  Synthetic
  misc_feature (15)..(15): n is a, c, g, or u
aguaauuuggaagancc

SEQ ID NO: 11253 - RNA, 17 nt, Artificial Sequence
  Synthetic
  misc_feature (12)..(12): n is a, c, g, or u
  misc_feature (15)..(15): n is a, c, g, or u
acacaauguggnuancc

SEQ ID NO: 11254 - RNA, 17 nt, Artificial Sequence
  Synthetic
  misc_feature (15)..(15): n is a, c, g, or u
cgaagugcacacggncc

SEQ ID NO: 11255 - RNA, 17 nt, Artificial Sequence
  Synthetic
  misc_feature (11)..(11): n is a, c, g, or u
  misc_feature (15)..(15): n is a, c, g, or u
cucuuauauanaauncc

SEQ ID NO: 11256 - RNA, 17 nt, Artificial Sequence
  Synthetic
  misc_feature (4)..(4): n is a, c, g, or u
caunuuccucuucaucc

SEQ ID NO: 11257 - RNA, 17 nt, Artificial Sequence
  Synthetic
  misc_feature (5)..(5): n is a, c, g, or u
  misc_feature (9)..(9): n is a, c, g, or u
ccagnagcnccuccucc

SEQ ID NO: 11258 - RNA, 17 nt, Artificial Sequence
  Synthetic
  misc_feature (14)..(14): n is a, c, g, or u
aagaccugcacganucc

SEQ ID NO: 11259 - RNA, 17 nt, Artificial Sequence
  Synthetic
  misc_feature (4)..(4): n is a, c, g, or u
  misc_feature (6)..(6): n is a, c, g, or u
ucuncnucugccguucc

SEQ ID NO: 11260 - RNA, 17 nt, Artificial Sequence
  Synthetic
  misc_feature (12)..(12): n is a, c, g, or u
aggggccuauanuuucc

SEQ ID NO: 11261 - RNA, 17 nt, Artificial Sequence
  Synthetic
cugcgagcaaaacaagc

SEQ ID NO: 11262 - RNA, 17 nt, Artificial Sequence
  Synthetic
  misc_feature (11)..(11): n is a, c, g, or u
  misc_feature (14)..(14): n is a, c, g, or u
uggcagcacanccnagc

SEQ ID NO: 11263 - RNA, 17 nt, Artificial Sequence
  Synthetic
agaagaugaggcauagc

SEQ ID NO: 11264 - RNA, 17 nt, Artificial Sequence
  Synthetic
acugcggaacuccuagc

SEQ ID NO: 11265 - RNA, 17 nt, Artificial Sequence
  Synthetic
  misc_feature (5)..(5): n is a, c, g, or u
ggaanaugauaaaacgc

SEQ ID NO: 11266 - RNA, 17 nt, Artificial Sequence
  Synthetic
cagcuuguuuugcucgc

SEQ ID NO: 11267 - RNA, 17 nt, Artificial Sequence
  Synthetic
cauuguguaaaaggggc

SEQ ID NO: 11268 - RNA, 17 nt, Artificial Sequence
  Synthetic
caccuccuuuccauggc

SEQ ID NO: 11269 - RNA, 17 nt, Artificial Sequence
  Synthetic
cgcaggauccaguuggc

SEQ ID NO: 11270 - RNA, 17 nt, Artificial Sequence
  Synthetic
  misc_feature (1)..(1): n is a, c, g, or u
nuuccucuucauccugc

SEQ ID NO: 11271 - RNA, 17 nt, Artificial Sequence
  Synthetic
  misc_feature (9)..(9): n is a, c, g, or u
  misc_feature (12)..(12): n is a, c, g, or u
uggcugcunggnugugc

SEQ ID NO: 11272 - RNA, 17 nt, Artificial Sequence
  Synthetic
  misc_feature (7)..(7): n is a, c, g, or u
ggucuunugggcuuugc

SEQ ID NO: 11273 - RNA, 17 nt, Artificial Sequence
  Synthetic
  misc_feature (16)..(16): n is a, c, g, or u
ccuuuaccccguugcnc

SEQ ID NO: 11274 - RNA, 17 nt, Artificial Sequence
  Synthetic
  misc_feature (16)..(16): n is a, c, g, or u
aggacucuuggacucnc

SEQ ID NO: 11275 - RNA, 17 nt, Artificial Sequence
  Synthetic
  misc_feature (16)..(16): n is a, c, g, or u
uggauucgcacuccunc

SEQ ID NO: 11276 - RNA, 17 nt, Artificial Sequence
  Synthetic
uccugccuccaccaauc

SEQ ID NO: 11277 - RNA, 17 nt, Artificial Sequence
  Synthetic
gucugugccuucucauc

SEQ ID NO: 11278 - RNA, 17 nt, Artificial Sequence
  Synthetic
guuccgcaguauggauc

SEQ ID NO: 11279 - RNA, 17 nt, Artificial Sequence
  Synthetic
gcacuucgcuucaccuc

SEQ ID NO: 11280 - RNA, 17 nt, Artificial Sequence
  Synthetic
ugcaacuuuuucaccuc

SEQ ID NO: 11281 - RNA, 17 nt, Artificial Sequence
  Synthetic
cuccucgacaccgccuc

SEQ ID NO: 11282 - RNA, 17 nt, Artificial Sequence
  Synthetic
aaccuuuguggcuccuc

SEQ ID NO: 11283 - RNA, 17 nt, Artificial Sequence
  Synthetic
  misc_feature (1)..(1): n is a, c, g, or u
nacauuccaccaagcuc

SEQ ID NO: 11284 - RNA, 17 nt, Artificial Sequence
  Synthetic
ccaguggggguugcguc

SEQ ID NO: 11285 - RNA, 17 nt, Artificial Sequence
  Synthetic
aggugcgccccgugguc

SEQ ID NO: 11286 - RNA, 17 nt, Artificial Sequence
  Synthetic
  misc_feature (13)..(13): n is a, c, g, or u
  misc_feature (15)..(15): n is a, c, g, or u
ccguccccuucuncnuc

SEQ ID NO: 11287 - RNA, 17 nt, Artificial Sequence
  Synthetic
caagcugcuaggaguuc

SEQ ID NO: 11288 - RNA, 17 nt, Artificial Sequence
  Synthetic
auauucuugggaacaag

SEQ ID NO: 11289 - RNA, 17 nt, Artificial Sequence
  Synthetic
ugggaugggaauacaag

SEQ ID NO: 11290 - RNA, 17 nt, Artificial Sequence
  Synthetic
gcagaggugaagcgaag

SEQ ID NO: 11291 - RNA, 17 nt, Artificial Sequence
  Synthetic
  misc_feature (11)..(11): n is a, c, g, or u
  misc_feature (14)..(14): n is a, c, g, or u
uaaugccuuunucnaag

SEQ ID NO: 11292 - RNA, 17 nt, Artificial Sequence
  Synthetic
gggcauauugacaacag

SEQ ID NO: 11293 - RNA, 17 nt, Artificial Sequence
  Synthetic
aaggccucccgauacag

SEQ ID NO: 11294 - RNA, 17 nt, Artificial Sequence
  Synthetic
  misc_feature (9)..(9): n is a, c, g, or u
acucugggnucuagcag

SEQ ID NO: 11295 - RNA, 17 nt, Artificial Sequence
  Synthetic
agagaaacuacacgcag

SEQ ID NO: 11296 - RNA, 17 nt, Artificial Sequence
  Synthetic
ggagcccucaggcucag

SEQ ID NO: 11297 - RNA, 17 nt, Artificial Sequence
  Synthetic
ucguccgcgggauucag

SEQ ID NO: 11298 - RNA, 17 nt, Artificial Sequence
  Synthetic
uucauuaacuguaagag

SEQ ID NO: 11299 - RNA, 17 nt, Artificial Sequence
  Synthetic
uaugcccugagccugag

SEQ ID NO: 11300 - RNA, 17 nt, Artificial Sequence
  Synthetic
  misc_feature (15)..(15): n is a, c, g, or u
agaauagcuugccunag

SEQ ID NO: 11301 - RNA, 17 nt, Artificial Sequence
  Synthetic
cuggcucaguuuacuag

SEQ ID NO: 11302 - RNA, 17 nt, Artificial Sequence
  Synthetic
uguucagugguucguag

SEQ ID NO: 11303 - RNA, 17 nt, Artificial Sequence
  Synthetic
gaaguagaggacaaacg

SEQ ID NO: 11304 - RNA, 17 nt, Artificial Sequence
  Synthetic
accccgccuguaacacg

SEQ ID NO: 11305 - RNA, 17 nt, Artificial Sequence
  Synthetic
  misc_feature (6)..(6): n is a, c, g, or u
guggunuccaugcgacg

SEQ ID NO: 11306 - RNA, 17 nt, Artificial Sequence
  Synthetic
agacaaaggacgucccg

SEQ ID NO: 11307 - RNA, 17 nt, Artificial Sequence
  Synthetic
ggucuugcauggucccg

SEQ ID NO: 11308 - RNA, 17 nt, Artificial Sequence
  Synthetic
agaccugaccguugccg

SEQ ID NO: 11309 - RNA, 17 nt, Artificial Sequence
  Synthetic
gcuccagaccggcugcg

SEQ ID NO: 11310 - RNA, 17 nt, Artificial Sequence
  Synthetic
  misc_feature (14)..(14): n is a, c, g, or u
uccuugagcagganucg

SEQ ID NO: 11311 - RNA, 17 nt, Artificial Sequence
  Synthetic
  misc_feature (6)..(6): n is a, c, g, or u
  misc_feature (11)..(11): n is a, c, g, or u
aggagngggancauucg

SEQ ID NO: 11312 - RNA, 17 nt, Artificial Sequence
  Synthetic
ccacauuguguaaaagg

SEQ ID NO: 11313 - RNA, 17 nt, Artificial Sequence
  Synthetic
guauggaucggcagagg

SEQ ID NO: 11314 - RNA, 17 nt, Artificial Sequence
  Synthetic
guggaggcaggaggagg

SEQ ID NO: 11315 - RNA, 17 nt, Artificial Sequence
  Synthetic
ugacccacaaaaugagg

SEQ ID NO: 11316 - RNA, 17 nt, Artificial Sequence
  Synthetic
  misc_feature (5)..(5): n is a, c, g, or u
uagancccagagugagg

SEQ ID NO: 11317 - RNA, 17 nt, Artificial Sequence
  Synthetic
aguguugauaagauagg

SEQ ID NO: 11318 - RNA, 17 nt, Artificial Sequence
  Synthetic
cggacgacccgucucgg

SEQ ID NO: 11319 - RNA, 17 nt, Artificial Sequence
  Synthetic
ugucuacgucccgucgg

SEQ ID NO: 11320 - RNA, 17 nt, Artificial Sequence
  Synthetic
  misc_feature (9)..(9): n is a, c, g, or u
  misc_feature (12)..(12): n is a, c, g, or u
uuggacccngcnuucgg

SEQ ID NO: 11321 - RNA, 17 nt, Artificial Sequence
  Synthetic
  misc_feature (4)..(4): n is a, c, g, or u
  misc_feature (12)..(12): n is a, c, g, or u
gugnucuccaunuucgg

SEQ ID NO: 11322 - RNA, 17 nt, Artificial Sequence
  Synthetic
uccggccgaccacgggg

SEQ ID NO: 11323 - RNA, 17 nt, Artificial Sequence
  Synthetic
cucaauuuucuaggggg

SEQ ID NO: 11324 - RNA, 17 nt, Artificial Sequence
  Synthetic
uggccaggacacguggg

SEQ ID NO: 11325 - RNA, 17 nt, Artificial Sequence
  Synthetic
gaugaugugguauuggg

SEQ ID NO: 11326 - RNA, 17 nt, Artificial Sequence
  Synthetic
gugaaaaaguugcaugg

SEQ ID NO: 11327 - RNA, 17 nt, Artificial Sequence
  Synthetic
uacuguuccggaacugg

SEQ ID NO: 11328 - RNA, 17 nt, Artificial Sequence
  Synthetic
gcucgcagccggucugg

SEQ ID NO: 11329 - RNA, 17 nt, Artificial Sequence
  Synthetic
  misc_feature (3)..(3): n is a, c, g, or u
gcngucuuuuggggugg

SEQ ID NO: 11330 - RNA, 17 nt, Artificial Sequence
  Synthetic
  misc_feature (14)..(14): n is a, c, g, or u
caacccccacuggnugg

SEQ ID NO: 11331 - RNA, 17 nt, Artificial Sequence
  Synthetic
auaaaaccaaacguugg

SEQ ID NO: 11332 - RNA, 17 nt, Artificial Sequence
  Synthetic
  misc_feature (3)..(3): n is a, c, g, or u
ccnuauaaagaauuugg

SEQ ID NO: 11333 - RNA, 17 nt, Artificial Sequence
  Synthetic
  misc_feature (16)..(16): n is a, c, g, or u
gccuuggguggcuuung

SEQ ID NO: 11334 - RNA, 17 nt, Artificial Sequence
  Synthetic
augucaauguuaauaug

SEQ ID NO: 11335 - RNA, 17 nt, Artificial Sequence
  Synthetic
auggcacuaguaaacug

SEQ ID NO: 11336 - RNA, 17 nt, Artificial Sequence
  Synthetic
ggugggaaacuuuacug

SEQ ID NO: 11337 - RNA, 17 nt, Artificial Sequence
  Synthetic
guugucaauaugcccug

SEQ ID NO: 11338 - RNA, 17 nt, Artificial Sequence
  Synthetic
uucaagccuccaagcug

SEQ ID NO: 11339 - RNA, 17 nt, Artificial Sequence
  Synthetic
cgcggucuccccgucug

SEQ ID NO: 11340 - RNA, 17 nt, Artificial Sequence
  Synthetic
agauuccuaugggagug

SEQ ID NO: 11341 - RNA, 17 nt, Artificial Sequence
  Synthetic
  misc_feature (12)..(12): n is a, c, g, or u
ucaucugccggnccgug

SEQ ID NO: 11342 - RNA, 17 nt, Artificial Sequence
  Synthetic
ccgcguaaagagaggug

SEQ ID NO: 11343 - RNA, 17 nt, Artificial Sequence
  Synthetic
gaugucaacaauaugug

SEQ ID NO: 11344 - RNA, 17 nt, Artificial Sequence
  Synthetic
  misc_feature (15)..(15): n is a, c, g, or u
cccaucccaucaucnug

SEQ ID NO: 11345 - RNA, 17 nt, Artificial Sequence
  Synthetic
  misc_feature (12)..(12): n is a, c, g, or u
  misc_feature (15)..(15): n is a, c, g, or u
ccauggcugcunggnug

SEQ ID NO: 11346 - RNA, 17 nt, Artificial Sequence
  Synthetic
  misc_feature (15)..(15): n is a, c, g, or u
gaauugugggucuunug

SEQ ID NO: 11347 - RNA, 17 nt, Artificial Sequence
  Synthetic
  misc_feature (7)..(7): n is a, c, g, or u
ucuuaunuaagaccuug

SEQ ID NO: 11348 - RNA, 17 nt, Artificial Sequence
  Synthetic
aacauagagguuccuug

SEQ ID NO: 11349 - RNA, 17 nt, Artificial Sequence
  Synthetic
  misc_feature (17)..(17): n is a, c, g, or u
aaccuucggacggaaan

SEQ ID NO: 11350 - RNA, 17 nt, Artificial Sequence
  Synthetic
  misc_feature (14)..(14): n is a, c, g, or u
  misc_feature (17)..(17): n is a, c, g, or u
aguuggcagcacanccn

SEQ ID NO: 11351 - RNA, 17 nt, Artificial Sequence
  Synthetic
  misc_feature (9)..(9): n is a, c, g, or u
  misc_feature (17)..(17): n is a, c, g, or u
aaggaucanuggccagn

SEQ ID NO: 11352 - RNA, 17 nt, Artificial Sequence
  Synthetic
  misc_feature (17)..(17): n is a, c, g, or u
uugacaacagugccagn

SEQ ID NO: 11353 - RNA, 17 nt, Artificial Sequence
  Synthetic
  misc_feature (5)..(5): n is a, c, g, or u
  misc_feature (8)..(8): n is a, c, g, or u
  misc_feature (16)..(17): n is a, c, g, or u
uggcnaunggccaucnn

SEQ ID NO: 11354 - RNA, 17 nt, Artificial Sequence
  Synthetic
  misc_feature (2)..(2): n is a, c, g, or u
  misc_feature (14)..(14): n is a, c, g, or u
  misc_feature (17)..(17): n is a, c, g, or u
gnuggggcuuggcnaun

SEQ ID NO: 11355 - RNA, 17 nt, Artificial Sequence
  Synthetic
  misc_feature (17)..(17): n is a, c, g, or u
ggcaacggucaggucun

SEQ ID NO: 11356 - RNA, 17 nt, Artificial Sequence
  Synthetic
  misc_feature (17)..(17): n is a, c, g, or u
ccagggaauuaguagun

SEQ ID NO: 11357 - RNA, 17 nt, Artificial Sequence
  Synthetic
cgaaccacugaacaaau

SEQ ID NO: 11358 - RNA, 17 nt, Artificial Sequence
  Synthetic
cagacgaaggucucaau

SEQ ID NO: 11359 - RNA, 17 nt, Artificial Sequence
  Synthetic
ucaccccaacacagaau

SEQ ID NO: 11360 - RNA, 17 nt, Artificial Sequence
  Synthetic
cauauuaacauugacau

SEQ ID NO: 11361 - RNA, 17 nt, Artificial Sequence
  Synthetic
aggucggucguugacau

SEQ ID NO: 11362 - RNA, 17 nt, Artificial Sequence
  Synthetic
auacaccuccuuuccau

SEQ ID NO: 11363 - RNA, 17 nt, Artificial Sequence
  Synthetic
acaagaagaugaggcau

SEQ ID NO: 11364 - RNA, 17 nt, Artificial Sequence
  Synthetic
  misc_feature (13)..(14): n is a, c, g, or u
uccacgcaugcgnngau

SEQ ID NO: 11365 - RNA, 17 nt, Artificial Sequence
  Synthetic
  misc_feature (6)..(7): n is a, c, g, or u
  misc_feature (15)..(15): n is a, c, g, or u
augcgnngauggccnau

SEQ ID NO: 11366 - RNA, 17 nt, Artificial Sequence
  Synthetic
  misc_feature (4)..(4): n is a, c, g, or u
  misc_feature (14)..(14): n is a, c, g, or u
caanuuguccuggnuau

SEQ ID NO: 11367 - RNA, 17 nt, Artificial Sequence
  Synthetic
agguuaggauagaaccu

SEQ ID NO: 11368 - RNA, 17 nt, Artificial Sequence
  Synthetic
  misc_feature (8)..(8): n is a, c, g, or u
gugguggngugaacccu

SEQ ID NO: 11369 - RNA, 17 nt, Artificial Sequence
  Synthetic
uagaagaagaacucccu

SEQ ID NO: 11370 - RNA, 17 nt, Artificial Sequence
  Synthetic
gaagaacucccucgccu

SEQ ID NO: 11371 - RNA, 17 nt, Artificial Sequence
  Synthetic
cauacugcggaacuccu

SEQ ID NO: 11372 - RNA, 17 nt, Artificial Sequence
  Synthetic
cucaguccguuucuccu

SEQ ID NO: 11373 - RNA, 17 nt, Artificial Sequence
  Synthetic
gagcacccacguguccu

SEQ ID NO: 11374 - RNA, 17 nt, Artificial Sequence
  Synthetic
cccaacacagaauagcu

SEQ ID NO: 11375 - RNA, 17 nt, Artificial Sequence
  Synthetic
uagcagcuuguuuugcu

SEQ ID NO: 11376 - RNA, 17 nt, Artificial Sequence
  Synthetic
  misc_feature (8)..(8): n is a, c, g, or u
  misc_feature (15)..(15): n is a, c, g, or u
cuaccugnuuugccncu

SEQ ID NO: 11377 - RNA, 17 nt, Artificial Sequence
  Synthetic
  misc_feature (11)..(11): n is a, c, g, or u
  misc_feature (15)..(15): n is a, c, g, or u
caggaggaggngcuncu

SEQ ID NO: 11378 - RNA, 17 nt, Artificial Sequence
  Synthetic
ggugaguugaugaaucu

SEQ ID NO: 11379 - RNA, 17 nt, Artificial Sequence
  Synthetic
  misc_feature (9)..(9): n is a, c, g, or u
gaacgcccnccaggucu

SEQ ID NO: 11380 - RNA, 17 nt, Artificial Sequence
  Synthetic
  misc_feature (5)..(5): n is a, c, g, or u
agganucgugcaggucu

SEQ ID NO: 11381 - RNA, 17 nt, Artificial Sequence
  Synthetic
  misc_feature (14)..(14): n is a, c, g, or u
cccucacucugggnucu

SEQ ID NO: 11382 - RNA, 17 nt, Artificial Sequence
  Synthetic
gcaggcuuucacuuucu

SEQ ID NO: 11383 - RNA, 17 nt, Artificial Sequence
  Synthetic
ggcagaggugaaaaagu

SEQ ID NO: 11384 - RNA, 17 nt, Artificial Sequence
  Synthetic
  misc_feature (7)..(7): n is a, c, g, or u
caugaanuuaagggagu

SEQ ID NO: 11385 - RNA, 17 nt, Artificial Sequence
  Synthetic
gcuucaccucugcacgu

SEQ ID NO: 11386 - RNA, 17 nt, Artificial Sequence
  Synthetic
  misc_feature (5)..(5): n is a, c, g, or u
ggcanagaccugaccgu

SEQ ID NO: 11387 - RNA, 17 nt, Artificial Sequence
  Synthetic
cugaaccuuuaccccgu

SEQ ID NO: 11388 - RNA, 17 nt, Artificial Sequence
  Synthetic
ggucucaaucgccgcgu

SEQ ID NO: 11389 - RNA, 17 nt, Artificial Sequence
  Synthetic
uuacuucccacccaggu

SEQ ID NO: 11390 - RNA, 17 nt, Artificial Sequence
  Synthetic
caagcugugccuugggu

SEQ ID NO: 11391 - RNA, 17 nt, Artificial Sequence
  Synthetic
  misc_feature (5)..(5): n is a, c, g, or u
uauanuuuccugcuggu

SEQ ID NO: 11392 - RNA, 17 nt, Artificial Sequence
  Synthetic
ggacuaccaagguaugu

SEQ ID NO: 11393 - RNA, 17 nt, Artificial Sequence
  Synthetic
ccaaccucccaugcugu

SEQ ID NO: 11394 - RNA, 17 nt, Artificial Sequence
  Synthetic
cuauguuucccucuugu

SEQ ID NO: 11395 - RNA, 17 nt, Artificial Sequence
  Synthetic
augcguggaaccuuugu

SEQ ID NO: 11396 - RNA, 17 nt, Artificial Sequence
  Synthetic
  misc_feature (16)..(16): n is a, c, g, or u
ccccaacaaggaucanu

SEQ ID NO: 11397 - RNA, 17 nt, Artificial Sequence
  Synthetic
  misc_feature (16)..(16): n is a, c, g, or u
ugucuuuaauccuganu

SEQ ID NO: 11398 - RNA, 17 nt, Artificial Sequence
  Synthetic
guguccuggccaaaauu

SEQ ID NO: 11399 - RNA, 17 nt, Artificial Sequence
  Synthetic
cuuuuggaguguggauu

SEQ ID NO: 11400 - RNA, 17 nt, Artificial Sequence
  Synthetic
uaaccuuaccaaauauu

SEQ ID NO: 11401 - RNA, 17 nt, Artificial Sequence
  Synthetic
ugcgucagcaaacacuu

SEQ ID NO: 11402 - RNA, 17 nt, Artificial Sequence
  Synthetic
  misc_feature (5)..(5): n is a, c, g, or u
ccggnccgugugcacuu

SEQ ID NO: 11403 - RNA, 17 nt, Artificial Sequence
  Synthetic
agauguuguacagacuu

SEQ ID NO: 11404 - RNA, 17 nt, Artificial Sequence
  Synthetic
  misc_feature (9)..(9): n is a, c, g, or u
cccacuggnuggggcuu

SEQ ID NO: 11405 - RNA, 17 nt, Artificial Sequence
  Synthetic
  misc_feature (10)..(10): n is a, c, g, or u
gugggucuunugggcuu

SEQ ID NO: 11406 - RNA, 17 nt, Artificial Sequence
  Synthetic
ccgcgcaggauccaguu

SEQ ID NO: 11407 - RNA, 17 nt, Artificial Sequence
  Synthetic
  misc_feature (1)..(1): n is a, c, g, or u
  misc_feature (8)..(8): n is a, c, g, or u
naggaaangagggaguu

SEQ ID NO: 11408 - RNA, 17 nt, Artificial Sequence
  Synthetic
  misc_feature (6)..(6): n is a, c, g, or u
ggucunugccaaguguu

SEQ ID NO: 11409 - RNA, 17 nt, Artificial Sequence
  Synthetic
  misc_feature (15)..(15): n is a, c, g, or u
ucuggauuguuuganuu

SEQ ID NO: 11410 - RNA, 17 nt, Artificial Sequence
  Synthetic
  misc_feature (4)..(4): n is a, c, g, or u
  misc_feature (15)..(15): n is a, c, g, or u
cccncuccuaccugnuu

SEQ ID NO: 11411 - RNA, 17 nt, Artificial Sequence
  Synthetic
  misc_feature (9)..(9): n is a, c, g, or u
ccaucaucnugggcuuu

SEQ ID NO: 11412 - RNA, 17 nt, Artificial Sequence
  Synthetic
  misc_feature (3)..(3): n is a, c, g, or u
  misc_feature (6)..(6): n is a, c, g, or u
  misc_feature (12)..(12): n is a, c, g, or u
ucngunccgaunaguuu

SEQ ID NO: 11413 - RNA, 17 nt, Artificial Sequence
  Synthetic
gcuuucccccacuguuu

SEQ ID NO: 11414 - RNA, 17 nt, Artificial Sequence
  Synthetic
cuccuagcagcuuguuu

SEQ ID NO: 11415 - RNA, 17 nt, Artificial Sequence
  Synthetic
  misc_feature (11)..(11): n is a, c, g, or u
uggggacugcnaauuuu

SEQ ID NO: 11416 - RNA, 17 nt, Artificial Sequence
  Synthetic
ggaguuacucucuuuuu

SEQ ID NO: 11417 - RNA, 20 nt, Artificial Sequence
  Synthetic
  misc_feature (11)..(11): n is a, c, g, or u
ugaagaggaanaugauaaaa

SEQ ID NO: 11418 - RNA, 20 nt, Artificial Sequence
  Synthetic
  misc_feature (1)..(1): n is a, c, g, or u
  misc_feature (3)..(3): n is a, c, g, or u
ncngcuuacagaccaccaaa

SEQ ID NO: 11419 - RNA, 20 nt, Artificial Sequence
  Synthetic
agauauuguuuacacagaaa

SEQ ID NO: 11420 - RNA, 20 nt, Artificial Sequence
  Synthetic
  misc_feature (14)..(14): n is a, c, g, or u
  misc_feature (17)..(17): n is a, c, g, or u
aauauuugcccuunganaaa

SEQ ID NO: 11421 - RNA, 20 nt, Artificial Sequence
  Synthetic
  misc_feature (1)..(1): n is a, c, g, or u
  misc_feature (17)..(17): n is a, c, g, or u
nuuguauacaugcauanaaa

SEQ ID NO: 11422 - RNA, 20 nt, Artificial Sequence
  Synthetic
ggucuuccaaaccucgacaa

SEQ ID NO: 11423 - RNA, 20 nt, Artificial Sequence
  Synthetic
acuuucucgccaacuuacaa

SEQ ID NO: 11424 - RNA, 20 nt, Artificial Sequence
  Synthetic
  misc_feature (8)..(8): n is a, c, g, or u
caugcccnaaagccacccaa

SEQ ID NO: 11425 - RNA, 20 nt, Artificial Sequence
  Synthetic
  misc_feature (16)..(16): n is a, c, g, or u
uuguguaaaaggggcngcaa

SEQ ID NO: 11426 - RNA, 20 nt, Artificial Sequence
  Synthetic
uagaaggaaagaagucagaa

SEQ ID NO: 11427 - RNA, 20 nt, Artificial Sequence
  Synthetic
  misc_feature (6)..(6): n is a, c, g, or u
cacggnccggcagaugagaa

SEQ ID NO: 11428 - RNA, 20 nt, Artificial Sequence
  Synthetic
  misc_feature (9)..(9): n is a, c, g, or u
uuguuuganuuggcuccgaa

SEQ ID NO: 11429 - RNA, 20 nt, Artificial Sequence
  Synthetic
ucccauaggaaucuugcgaa

SEQ ID NO: 11430 - RNA, 20 nt, Artificial Sequence
  Synthetic
aaagccaaacagugggggaa

SEQ ID NO: 11431 - RNA, 20 nt, Artificial Sequence
  Synthetic
uauuuacauacucuguggaa

SEQ ID NO: 11432 - RNA, 20 nt, Artificial Sequence
  Synthetic
acaucauccauauaacugaa

SEQ ID NO: 11433 - RNA, 20 nt, Artificial Sequence
  Synthetic
uaaguuggcgagaaagugaa

SEQ ID NO: 11434 - RNA, 20 nt, Artificial Sequence
  Synthetic
  misc_feature (9)..(9): n is a, c, g, or u
cgcaugganaccaccgugaa

SEQ ID NO: 11435 - RNA, 20 nt, Artificial Sequence
  Synthetic
  misc_feature (18)..(18): n is a, c, g, or u
ggucaauguccaugcccnaa

SEQ ID NO: 11436 - RNA, 20 nt, Artificial Sequence
  Synthetic
  misc_feature (9)..(9): n is a, c, g, or u
  misc_feature (18)..(18): n is a, c, g, or u
caugcauanaaaggcaunaa

SEQ ID NO: 11437 - RNA, 20 nt, Artificial Sequence
  Synthetic
uccacagaguauguaaauaa

SEQ ID NO: 11438 - RNA, 20 nt, Artificial Sequence
  Synthetic
cagguacaguagaagaauaa

SEQ ID NO: 11439 - RNA, 20 nt, Artificial Sequence
  Synthetic
caauguuccggagacucuaa

SEQ ID NO: 11440 - RNA, 20 nt, Artificial Sequence
  Synthetic
  misc_feature (13)..(13): n is a, c, g, or u
uucaggauaauangguuuaa

SEQ ID NO: 11441 - RNA, 20 nt, Artificial Sequence
  Synthetic
gaccggcugcgagcaaaaca

SEQ ID NO: 11442 - RNA, 20 nt, Artificial Sequence
  Synthetic
  misc_feature (11)..(11): n is a, c, g, or u
gccugcuuagnuuguauaca

SEQ ID NO: 11443 - RNA, 20 nt, Artificial Sequence
  Synthetic
uauauaagagagaaacuaca

SEQ ID NO: 11444 - RNA, 20 nt, Artificial Sequence
  Synthetic
uggucuguucaccagcacca

SEQ ID NO: 11445 - RNA, 20 nt, Artificial Sequence
  Synthetic
caacuaccagcacgggacca

SEQ ID NO: 11446 - RNA, 20 nt, Artificial Sequence
  Synthetic
  misc_feature (13)..(13): n is a, c, g, or u
aacagaaagauungucccca

SEQ ID NO: 11447 - RNA, 20 nt, Artificial Sequence
  Synthetic
uuuggaagaccaaccuccca

SEQ ID NO: 11448 - RNA, 20 nt, Artificial Sequence
  Synthetic
agacagucauccucaggcca

SEQ ID NO: 11449 - RNA, 20 nt, Artificial Sequence
  Synthetic
  misc_feature (4)..(5): n is a, c, g, or u
  misc_feature (13)..(13): n is a, c, g, or u
  misc_feature (16)..(16): n is a, c, g, or u
gcgnngauggccnaungcca

SEQ ID NO: 11450 - RNA, 20 nt, Artificial Sequence
  Synthetic
uccuacuguucaagccucca

SEQ ID NO: 11451 - RNA, 20 nt, Artificial Sequence
  Synthetic
  misc_feature (7)..(7): n is a, c, g, or u
uuuauangggucaaugucca

SEQ ID NO: 11452 - RNA, 20 nt, Artificial Sequence
  Synthetic
gaggagccacaaagguucca

SEQ ID NO: 11453 - RNA, 20 nt, Artificial Sequence
  Synthetic
  misc_feature (13)..(13): n is a, c, g, or u
gcauguauacaancuaagca

SEQ ID NO: 11454 - RNA, 20 nt, Artificial Sequence
  Synthetic
gguuaggauagaaccuagca

SEQ ID NO: 11455 - RNA, 20 nt, Artificial Sequence
  Synthetic
  misc_feature (15)..(15): n is a, c, g, or u
caccauacagcacunaggca

SEQ ID NO: 11456 - RNA, 20 nt, Artificial Sequence
  Synthetic
cuuuugggguggagcccuca

SEQ ID NO: 11457 - RNA, 20 nt, Artificial Sequence
  Synthetic
cuaagagacagucauccuca

SEQ ID NO: 11458 - RNA, 20 nt, Artificial Sequence
  Synthetic
uguucauguccuacuguuca

SEQ ID NO: 11459 - RNA, 20 nt, Artificial Sequence
  Synthetic
aaagagaguaacuccacaga

SEQ ID NO: 11460 - RNA, 20 nt, Artificial Sequence
  Synthetic
cuacuguuguuagacgacga

SEQ ID NO: 11461 - RNA, 20 nt, Artificial Sequence
  Synthetic
  misc_feature (6)..(6): n is a, c, g, or u
gccucngcucuguaucggga

SEQ ID NO: 11462 - RNA, 20 nt, Artificial Sequence
  Synthetic
  misc_feature (4)..(4): n is a, c, g, or u
  misc_feature (6)..(6): n is a, c, g, or u
  misc_feature (17)..(17): n is a, c, g, or u
uaangnucuuuguacungga

SEQ ID NO: 11463 - RNA, 20 nt, Artificial Sequence
  Synthetic
  misc_feature (3)..(3): n is a, c, g, or u
cunacuacuaauucccugga

SEQ ID NO: 11464 - RNA, 20 nt, Artificial Sequence
  Synthetic
ccugacugccgauuggugga

SEQ ID NO: 11465 - RNA, 20 nt, Artificial Sequence
  Synthetic
cacccaaggcacagcuugga

SEQ ID NO: 11466 - RNA, 20 nt, Artificial Sequence
  Synthetic
  misc_feature (18)..(18): n is a, c, g, or u
aagauugacgauaugggnga

SEQ ID NO: 11467 - RNA, 20 nt, Artificial Sequence
  Synthetic
aagaaccaacaagaagauga

SEQ ID NO: 11468 - RNA, 20 nt, Artificial Sequence
  Synthetic
agccaggagaaacggacuga

SEQ ID NO: 11469 - RNA, 20 nt, Artificial Sequence
  Synthetic
  misc_feature (3)..(3): n is a, c, g, or u
cunugccaaguguuugcuga

SEQ ID NO: 11470 - RNA, 20 nt, Artificial Sequence
  Synthetic
augucaacgaccgaccuuga

SEQ ID NO: 11471 - RNA, 20 nt, Artificial Sequence
  Synthetic
  misc_feature (19)..(19): n is a, c, g, or u
accucaccauacagcacuna

SEQ ID NO: 11472 - RNA, 20 nt, Artificial Sequence
  Synthetic
  misc_feature (7)..(7): n is a, c, g, or u
  misc_feature (10)..(10): n is a, c, g, or u
  misc_feature (13)..(13): n is a, c, g, or u
  misc_feature (16)..(16): n is a, c, g, or u
  misc_feature (19)..(19): n is a, c, g, or u
auguggnuanccngcnuuna

SEQ ID NO: 11473 - RNA, 20 nt, Artificial Sequence
  Synthetic
  misc_feature (2)..(2): n is a, c, g, or u
uncuggcacuguugucaaua

SEQ ID NO: 11474 - RNA, 20 nt, Artificial Sequence
  Synthetic
  misc_feature (16)..(16): n is a, c, g, or u
gccaccagcaggaaanuaua

SEQ ID NO: 11475 - RNA, 20 nt, Artificial Sequence
  Synthetic
  misc_feature (14)..(14): n is a, c, g, or u
uaaucauuacuucnaaacua

SEQ ID NO: 11476 - RNA, 20 nt, Artificial Sequence
  Synthetic
uccucuucauccugcugcua

SEQ ID NO: 11477 - RNA, 20 nt, Artificial Sequence
  Synthetic
  misc_feature (1)..(1): n is a, c, g, or u
  misc_feature (17)..(17): n is a, c, g, or u
nuaugcauguauacaancua

SEQ ID NO: 11478 - RNA, 20 nt, Artificial Sequence
  Synthetic
  misc_feature (3)..(3): n is a, c, g, or u
  misc_feature (5)..(5): n is a, c, g, or u
aananacagucuuugaagua

SEQ ID NO: 11479 - RNA, 20 nt, Artificial Sequence
  Synthetic
gagguggagagaugggagua

SEQ ID NO: 11480 - RNA, 20 nt, Artificial Sequence
  Synthetic
  misc_feature (10)..(10): n is a, c, g, or u
cuuuguacunggaggcugua

SEQ ID NO: 11481 - RNA, 20 nt, Artificial Sequence
  Synthetic
ggggcauuugguggucugua

SEQ ID NO: 11482 - RNA, 20 nt, Artificial Sequence
  Synthetic
  misc_feature (3)..(3): n is a, c, g, or u
  misc_feature (6)..(6): n is a, c, g, or u
  misc_feature (9)..(9): n is a, c, g, or u
  misc_feature (18)..(18): n is a, c, g, or u
ccngcnuunaugccuuunua

SEQ ID NO: 11483 - RNA, 20 nt, Artificial Sequence
  Synthetic
acaugaacaugagaugauua

SEQ ID NO: 11484 - RNA, 20 nt, Artificial Sequence
  Synthetic
  misc_feature (16)..(16): n is a, c, g, or u
aaggagauuaaaauunauua

SEQ ID NO: 11485 - RNA, 20 nt, Artificial Sequence
  Synthetic
cuggugaacagaccaauuua

SEQ ID NO: 11486 - RNA, 20 nt, Artificial Sequence
  Synthetic
  misc_feature (3)..(3): n is a, c, g, or u
  misc_feature (15)..(15): n is a, c, g, or u
canuaguugucuganuuuua

SEQ ID NO: 11487 - RNA, 20 nt, Artificial Sequence
  Synthetic
  misc_feature (13)..(13): n is a, c, g, or u
gggacgguagagncccaaac

SEQ ID NO: 11488 - RNA, 20 nt, Artificial Sequence
  Synthetic
gccccguggucggccggaac

SEQ ID NO: 11489 - RNA, 20 nt, Artificial Sequence
  Synthetic
  misc_feature (11)..(11): n is a, c, g, or u
caggguucacnccaccacac

SEQ ID NO: 11490 - RNA, 20 nt, Artificial Sequence
  Synthetic
  misc_feature (6)..(6): n is a, c, g, or u
auucgngaucuccucgacac

SEQ ID NO: 11491 - RNA, 20 nt, Artificial Sequence
  Synthetic
  misc_feature (3)..(3): n is a, c, g, or u
ccnaaagccacccaaggcac

SEQ ID NO: 11492 - RNA, 20 nt, Artificial Sequence
  Synthetic
agggcuccaccccaaaagac

SEQ ID NO: 11493 - RNA, 20 nt, Artificial Sequence
  Synthetic
caaucggcagucaggaagac

SEQ ID NO: 11494 - RNA, 20 nt, Artificial Sequence
  Synthetic
agugauuggagguuggggac

SEQ ID NO: 11495 - RNA, 20 nt, Artificial Sequence
  Synthetic
gaguaggcugucuuccugac

SEQ ID NO: 11496 - RNA, 20 nt, Artificial Sequence
  Synthetic
cauuguucaccucaccauac

SEQ ID NO: 11497 - RNA, 20 nt, Artificial Sequence
  Synthetic
guaaacccuguuccgacuac

SEQ ID NO: 11498 - RNA, 20 nt, Artificial Sequence
  Synthetic
acagaccaauuuaugccuac

SEQ ID NO: 11499 - RNA, 20 nt, Artificial Sequence
  Synthetic
uucuugggaacaagagcuac

SEQ ID NO: 11500 - RNA, 20 nt, Artificial Sequence
  Synthetic
uccguccgaagguuuuguac

SEQ ID NO: 11501 - RNA, 20 nt, Artificial Sequence
  Synthetic
guuccggaacuggagccacc

SEQ ID NO: 11502 - RNA, 20 nt, Artificial Sequence
  Synthetic
cauaaauuggucuguucacc

SEQ ID NO: 11503 - RNA, 20 nt, Artificial Sequence
  Synthetic
gcacgggaccaugcaagacc

SEQ ID NO: 11504 - RNA, 20 nt, Artificial Sequence
  Synthetic
  misc_feature (4)..(4): n is a, c, g, or u
  misc_feature (10)..(10): n is a, c, g, or u
gaunaguuungcuccagacc

SEQ ID NO: 11505 - RNA, 20 nt, Artificial Sequence
  Synthetic
aguucuucuucuaggggacc

SEQ ID NO: 11506 - RNA, 20 nt, Artificial Sequence
  Synthetic
uuccaggaacaucaacuacc

SEQ ID NO: 11507 - RNA, 20 nt, Artificial Sequence
  Synthetic
cuugucaacaagaaaaaccc

SEQ ID NO: 11508 - RNA, 20 nt, Artificial Sequence
  Synthetic
uucucgaggacuggggaccc

SEQ ID NO: 11509 - RNA, 20 nt, Artificial Sequence
  Synthetic
cccgaucaccaguuggaccc

SEQ ID NO: 11510 - RNA, 20 nt, Artificial Sequence
  Synthetic
aucaggauuccuaggacccc

SEQ ID NO: 11511 - RNA, 20 nt, Artificial Sequence
  Synthetic
uuggcgagaaagugaaagcc

SEQ ID NO: 11512 - RNA, 20 nt, Artificial Sequence
  Synthetic
  misc_feature (12)..(12): n is a, c, g, or u
agauuaaaauunauuaugcc

SEQ ID NO: 11513 - RNA, 20 nt, Artificial Sequence
  Synthetic
  misc_feature (18)..(18): n is a, c, g, or u
ggaaguaauuuggaagancc

SEQ ID NO: 11514 - RNA, 20 nt, Artificial Sequence
  Synthetic
  misc_feature (15)..(15): n is a, c, g, or u
  misc_feature (18)..(18): n is a, c, g, or u
uuuacacaauguggnuancc

SEQ ID NO: 11515 - RNA, 20 nt, Artificial Sequence
  Synthetic
  misc_feature (18)..(18): n is a, c, g, or u
aagcgaagugcacacggncc

SEQ ID NO: 11516 - RNA, 20 nt, Artificial Sequence
  Synthetic
  misc_feature (14)..(14): n is a, c, g, or u
  misc_feature (18)..(18): n is a, c, g, or u
ucucucuuauauanaauncc

SEQ ID NO: 11517 - RNA, 20 nt, Artificial Sequence
  Synthetic
  misc_feature (7)..(7): n is a, c, g, or u
uaucaunuuccucuucaucc

SEQ ID NO: 11518 - RNA, 20 nt, Artificial Sequence
  Synthetic
  misc_feature (8)..(8): n is a, c, g, or u
  misc_feature (12)..(12): n is a, c, g, or u
gugccagnagcnccuccucc

SEQ ID NO: 11519 - RNA, 20 nt, Artificial Sequence
  Synthetic
  misc_feature (17)..(17): n is a, c, g, or u
ugcaagaccugcacganucc

SEQ ID NO: 11520 - RNA, 20 nt, Artificial Sequence
  Synthetic
  misc_feature (7)..(7): n is a, c, g, or u
  misc_feature (9)..(9): n is a, c, g, or u
ccuucuncnucugccguucc

SEQ ID NO: 11521 - RNA, 20 nt, Artificial Sequence
  Synthetic
  misc_feature (15)..(15): n is a, c, g, or u
gugaggggccuauanuuucc

SEQ ID NO: 11522 - RNA, 20 nt, Artificial Sequence
  Synthetic
cggcugcgagcaaaacaagc

SEQ ID NO: 11523 - RNA, 20 nt, Artificial Sequence
  Synthetic
  misc_feature (14)..(14): n is a, c, g, or u
  misc_feature (17)..(17): n is a, c, g, or u
aguuggcagcacanccnagc

SEQ ID NO: 11524 - RNA, 20 nt, Artificial Sequence
  Synthetic
acaagaagaugaggcauagc

SEQ ID NO: 11525 - RNA, 20 nt, Artificial Sequence
  Synthetic
cauacugcggaacuccuagc

SEQ ID NO: 11526 - RNA, 20 nt, Artificial Sequence
  Synthetic
  misc_feature (8)..(8): n is a, c, g, or u
agaggaanaugauaaaacgc

SEQ ID NO: 11527 - RNA, 20 nt, Artificial Sequence
  Synthetic
uagcagcuuguuuugcucgc

SEQ ID NO: 11528 - RNA, 20 nt, Artificial Sequence
  Synthetic
ccacauuguguaaaaggggc

SEQ ID NO: 11529 - RNA, 20 nt, Artificial Sequence
  Synthetic
auacaccuccuuuccauggc

SEQ ID NO: 11530 - RNA, 20 nt, Artificial Sequence
  Synthetic
ccgcgcaggauccaguuggc

SEQ ID NO: 11531 - RNA, 20 nt, Artificial Sequence
  Synthetic
  misc_feature (4)..(4): n is a, c, g, or u
caunuuccucuucauccugc

SEQ ID NO: 11532 - RNA, 20 nt, Artificial Sequence
  Synthetic
  misc_feature (12)..(12): n is a, c, g, or u
  misc_feature (15)..(15): n is a, c, g, or u
ccauggcugcunggnugugc

SEQ ID NO: 11533 - RNA, 20 nt, Artificial Sequence
  Synthetic
  misc_feature (10)..(10): n is a, c, g, or u
gugggucuunugggcuuugc

SEQ ID NO: 11534 - RNA, 20 nt, Artificial Sequence
  Synthetic
  misc_feature (19)..(19): n is a, c, g, or u
gaaccuuuaccccguugcnc

SEQ ID NO: 11535 - RNA, 20 nt, Artificial Sequence
  Synthetic
  misc_feature (19)..(19): n is a, c, g, or u
aagaggacucuuggacucnc

SEQ ID NO: 11536 - RNA, 20 nt, Artificial Sequence
  Synthetic
  misc_feature (19)..(19): n is a, c, g, or u
guguggauucgcacuccunc

SEQ ID NO: 11537 - RNA, 20 nt, Artificial Sequence
  Synthetic
uccuccugccuccaccaauc

SEQ ID NO: 11538 - RNA, 20 nt, Artificial Sequence
  Synthetic
cccgucugugccuucucauc

SEQ ID NO: 11539 - RNA, 20 nt, Artificial Sequence
  Synthetic
ggaguuccgcaguauggauc

SEQ ID NO: 11540 - RNA, 20 nt, Artificial Sequence
  Synthetic
ugugcacuucgcuucaccuc

SEQ ID NO: 11541 - RNA, 20 nt, Artificial Sequence
  Synthetic
ccaugcaacuuuuucaccuc

SEQ ID NO: 11542 - RNA, 20 nt, Artificial Sequence
  Synthetic
gaucuccucgacaccgccuc

SEQ ID NO: 11543 - RNA, 20 nt, Artificial Sequence
  Synthetic
uggaaccuuuguggcuccuc

SEQ ID NO: 11544 - RNA, 20 nt, Artificial Sequence
  Synthetic
  misc_feature (3)..(4): n is a, c, g, or u
cannacauuccaccaagcuc

SEQ ID NO: 11545 - RNA, 20 nt, Artificial Sequence
  Synthetic
  misc_feature (3)..(3): n is a, c, g, or u
canccaguggggguugcguc

SEQ ID NO: 11546 - RNA, 20 nt, Artificial Sequence
  Synthetic
gagaggugcgccccgugguc

SEQ ID NO: 11547 - RNA, 20 nt, Artificial Sequence
  Synthetic
  misc_feature (16)..(16): n is a, c, g, or u
  misc_feature (18)..(18): n is a, c, g, or u
cuaccguccccuucuncnuc

SEQ ID NO: 11548 - RNA, 20 nt, Artificial Sequence
  Synthetic
aaacaagcugcuaggaguuc

SEQ ID NO: 11549 - RNA, 20 nt, Artificial Sequence
  Synthetic
accauauucuugggaacaag

SEQ ID NO: 11550 - RNA, 20 nt, Artificial Sequence
  Synthetic
ugaugggaugggaauacaag

SEQ ID NO: 11551 - RNA, 20 nt, Artificial Sequence
  Synthetic
cgugcagaggugaagcgaag

SEQ ID NO: 11552 - RNA, 20 nt, Artificial Sequence
  Synthetic
  misc_feature (14)..(14): n is a, c, g, or u
  misc_feature (17)..(17): n is a, c, g, or u
guuuaaugccuuunucnaag

SEQ ID NO: 11553 - RNA, 20 nt, Artificial Sequence
  Synthetic
ucagggcauauugacaacag

SEQ ID NO: 11554 - RNA, 20 nt, Artificial Sequence
  Synthetic
ucuaaggccucccgauacag

SEQ ID NO: 11555 - RNA, 20 nt, Artificial Sequence
  Synthetic
  misc_feature (12)..(12): n is a, c, g, or u
cucacucugggnucuagcag

SEQ ID NO: 11556 - RNA, 20 nt, Artificial Sequence
  Synthetic
aagagagaaacuacacgcag

SEQ ID NO: 11557 - RNA, 20 nt, Artificial Sequence
  Synthetic
gguggagcccucaggcucag

SEQ ID NO: 11558 - RNA, 20 nt, Artificial Sequence
  Synthetic
gggucguccgcgggauucag

SEQ ID NO: 11559 - RNA, 20 nt, Artificial Sequence
  Synthetic
uuuuucauuaacuguaagag

SEQ ID NO: 11560 - RNA, 20 nt, Artificial Sequence
  Synthetic
caauaugcccugagccugag

SEQ ID NO: 11561 - RNA, 20 nt, Artificial Sequence
  Synthetic
  misc_feature (18)..(18): n is a, c, g, or u
cacagaauagcuugccunag

SEQ ID NO: 11562 - RNA, 20 nt, Artificial Sequence
  Synthetic
cuccuggcucaguuuacuag

SEQ ID NO: 11563 - RNA, 20 nt, Artificial Sequence
  Synthetic
auuuguucagugguucguag

SEQ ID NO: 11564 - RNA, 20 nt, Artificial Sequence
  Synthetic
cuggaaguagaggacaaacg

SEQ ID NO: 11565 - RNA, 20 nt, Artificial Sequence
  Synthetic
aaaaccccgccuguaacacg

SEQ ID NO: 11566 - RNA, 20 nt, Artificial Sequence
  Synthetic
  misc_feature (9)..(9): n is a, c, g, or u
acgguggunuccaugcgacg

SEQ ID NO: 11567 - RNA, 20 nt, Artificial Sequence
  Synthetic
cguagacaaaggacgucccg

SEQ ID NO: 11568 - RNA, 20 nt, Artificial Sequence
  Synthetic
gcaggucuugcauggucccg

SEQ ID NO: 11569 - RNA, 20 nt, Artificial Sequence
  Synthetic
  misc_feature (3)..(3): n is a, c, g, or u
canagaccugaccguugccg

SEQ ID NO: 11570 - RNA, 20 nt, Artificial Sequence
  Synthetic
  misc_feature (3)..(3): n is a, c, g, or u
uungcuccagaccggcugcg

SEQ ID NO: 11571 - RNA, 20 nt, Artificial Sequence
  Synthetic
  misc_feature (17)..(17): n is a, c, g, or u
gguuccuugagcagganucg

SEQ ID NO: 11572 - RNA, 20 nt, Artificial Sequence
  Synthetic
  misc_feature (9)..(9): n is a, c, g, or u
  misc_feature (14)..(14): n is a, c, g, or u
gguaggagngggancauucg

SEQ ID NO: 11573 - RNA, 20 nt, Artificial Sequence
  Synthetic
  misc_feature (3)..(3): n is a, c, g, or u
uanccacauuguguaaaagg

SEQ ID NO: 11574 - RNA, 20 nt, Artificial Sequence
  Synthetic
gcaguauggaucggcagagg

SEQ ID NO: 11575 - RNA, 20 nt, Artificial Sequence
  Synthetic
uugguggaggcaggaggagg

SEQ ID NO: 11576 - RNA, 20 nt, Artificial Sequence
  Synthetic
uggugacccacaaaaugagg

SEQ ID NO: 11577 - RNA, 20 nt, Artificial Sequence
  Synthetic
  misc_feature (8)..(8): n is a, c, g, or u
ugcuagancccagagugagg

SEQ ID NO: 11578 - RNA, 20 nt, Artificial Sequence
  Synthetic
ggaaguguugauaagauagg

SEQ ID NO: 11579 - RNA, 20 nt, Artificial Sequence
  Synthetic
ccgcggacgacccgucucgg

SEQ ID NO: 11580 - RNA, 20 nt, Artificial Sequence
  Synthetic
cuuugucuacgucccgucgg

SEQ ID NO: 11581 - RNA, 20 nt, Artificial Sequence
  Synthetic
  misc_feature (12)..(12): n is a, c, g, or u
  misc_feature (15)..(15): n is a, c, g, or u
caguuggacccngcnuucgg

SEQ ID NO: 11582 - RNA, 20 nt, Artificial Sequence
  Synthetic
  misc_feature (3)..(3): n is a, c, g, or u
  misc_feature (7)..(7): n is a, c, g, or u
  misc_feature (15)..(15): n is a, c, g, or u
gungugnucuccaunuucgg

SEQ ID NO: 11583 - RNA, 20 nt, Artificial Sequence
  Synthetic
cguuccggccgaccacgggg

SEQ ID NO: 11584 - RNA, 20 nt, Artificial Sequence
  Synthetic
ucucucaauuuucuaggggg

SEQ ID NO: 11585 - RNA, 20 nt, Artificial Sequence
  Synthetic
uuuuggccaggacacguggg

SEQ ID NO: 11586 - RNA, 20 nt, Artificial Sequence
  Synthetic
auggaugaugugguauuggg

SEQ ID NO: 11587 - RNA, 20 nt, Artificial Sequence
  Synthetic
gaggugaaaaaguugcaugg

SEQ ID NO: 11588 - RNA, 20 nt, Artificial Sequence
  Synthetic
guuuacuguuccggaacugg

SEQ ID NO: 11589 - RNA, 20 nt, Artificial Sequence
  Synthetic
uuugcucgcagccggucugg

SEQ ID NO: 11590 - RNA, 20 nt, Artificial Sequence
  Synthetic
  misc_feature (6)..(6): n is a, c, g, or u
acggcngucuuuuggggugg

SEQ ID NO: 11591 - RNA, 20 nt, Artificial Sequence
  Synthetic
  misc_feature (17)..(17): n is a, c, g, or u
acgcaacccccacuggnugg

SEQ ID NO: 11592 - RNA, 20 nt, Artificial Sequence
  Synthetic
cuaauaaaaccaaacguugg

SEQ ID NO: 11593 - RNA, 20 nt, Artificial Sequence
  Synthetic
  misc_feature (6)..(6): n is a, c, g, or u
gacccnuauaaagaauuugg

SEQ ID NO: 11594 - RNA, 20 nt, Artificial Sequence
  Synthetic
  misc_feature (19)..(19): n is a, c, g, or u
ugugccuuggguggcuuung

SEQ ID NO: 11595 - RNA, 20 nt, Artificial Sequence
  Synthetic
gcuaugucaauguuaauaug

SEQ ID NO: 11596 - RNA, 20 nt, Artificial Sequence
  Synthetic
caaauggcacuaguaaacug

SEQ ID NO: 11597 - RNA, 20 nt, Artificial Sequence
  Synthetic
uaaggugggaaacuuuacug

SEQ ID NO: 11598 - RNA, 20 nt, Artificial Sequence
  Synthetic
acuguugucaauaugcccug

SEQ ID NO: 11599 - RNA, 20 nt, Artificial Sequence
  Synthetic
cuguucaagccuccaagcug

SEQ ID NO: 11600 - RNA, 20 nt, Artificial Sequence
  Synthetic
uuacgcggucuccccgucug

SEQ ID NO: 11601 - RNA, 20 nt, Artificial Sequence
  Synthetic
gcaagauuccuaugggagug

SEQ ID NO: 11602 - RNA, 20 nt, Artificial Sequence
  Synthetic
  misc_feature (15)..(15): n is a, c, g, or u
uucucaucugccggnccgug

SEQ ID NO: 11603 - RNA, 20 nt, Artificial Sequence
  Synthetic
agaccgcguaaagagaggug

SEQ ID NO: 11604 - RNA, 20 nt, Artificial Sequence
  Synthetic
auagaugucaacaauaugug

SEQ ID NO: 11605 - RNA, 20 nt, Artificial Sequence
  Synthetic
  misc_feature (18)..(18): n is a, c, g, or u
auucccaucccaucaucnug

SEQ ID NO: 11606 - RNA, 20 nt, Artificial Sequence
  Synthetic
  misc_feature (15)..(15): n is a, c, g, or u
  misc_feature (18)..(18): n is a, c, g, or u
uuuccauggcugcunggnug

SEQ ID NO: 11607 - RNA, 20 nt, Artificial Sequence
  Synthetic
  misc_feature (2)..(2): n is a, c, g, or u
  misc_feature (18)..(18): n is a, c, g, or u
anagaauugugggucuunug

SEQ ID NO: 11608 - RNA, 20 nt, Artificial Sequence
  Synthetic
  misc_feature (10)..(10): n is a, c, g, or u
uccucuuaunuaagaccuug

SEQ ID NO: 11609 - RNA, 20 nt, Artificial Sequence
  Synthetic
ggaaacauagagguuccuug

SEQ ID NO: 11610 - RNA, 20 nt, Artificial Sequence
  Synthetic
  misc_feature (20)..(20): n is a, c, g, or u
caaaaccuucggacggaaan

SEQ ID NO: 11611 - RNA, 20 nt, Artificial Sequence
  Synthetic
  misc_feature (17)..(17): n is a, c, g, or u
  misc_feature (20)..(20): n is a, c, g, or u
uccaguuggcagcacanccn

SEQ ID NO: 11612 - RNA, 20 nt, Artificial Sequence
  Synthetic
  misc_feature (12)..(12): n is a, c, g, or u
  misc_feature (20)..(20): n is a, c, g, or u
aacaaggaucanuggccagn

SEQ ID NO: 11613 - RNA, 20 nt, Artificial Sequence
  Synthetic
  misc_feature (20)..(20): n is a, c, g, or u
auauugacaacagugccagn

SEQ ID NO: 11614 - RNA, 20 nt, Artificial Sequence
  Synthetic
  misc_feature (8)..(8): n is a, c, g, or u
  misc_feature (11)..(11): n is a, c, g, or u
  misc_feature (19)..(20): n is a, c, g, or u
gcuuggcnaunggccaucnn

SEQ ID NO: 11615 - RNA, 20 nt, Artificial Sequence
  Synthetic
  misc_feature (5)..(5): n is a, c, g, or u
  misc_feature (17)..(17): n is a, c, g, or u
  misc_feature (20)..(20): n is a, c, g, or u
cuggnuggggcuuggcnaun

SEQ ID NO: 11616 - RNA, 20 nt, Artificial Sequence
  Synthetic
  misc_feature (2)..(2): n is a, c, g, or u
  misc_feature (20)..(20): n is a, c, g, or u
cncggcaacggucaggucun

SEQ ID NO: 11617 - RNA, 20 nt, Artificial Sequence
  Synthetic
  misc_feature (20)..(20): n is a, c, g, or u
cauccagggaauuaguagun

SEQ ID NO: 11618 - RNA, 20 nt, Artificial Sequence
  Synthetic
cuacgaaccacugaacaaau

SEQ ID NO: 11619 - RNA, 20 nt, Artificial Sequence
  Synthetic
ucgcagacgaaggucucaau

SEQ ID NO: 11620 - RNA, 20 nt, Artificial Sequence
  Synthetic
aacucaccccaacacagaau

SEQ ID NO: 11621 - RNA, 20 nt, Artificial Sequence
  Synthetic
gcccauauuaacauugacau

SEQ ID NO: 11622 - RNA, 20 nt, Artificial Sequence
  Synthetic
ucaaggucggucguugacau

SEQ ID NO: 11623 - RNA, 20 nt, Artificial Sequence
  Synthetic
gaaauacaccuccuuuccau

SEQ ID NO: 11624 - RNA, 20 nt, Artificial Sequence
  Synthetic
ccaacaagaagaugaggcau

SEQ ID NO: 11625 - RNA, 20 nt, Artificial Sequence
  Synthetic
  misc_feature (16)..(17): n is a, c, g, or u
gguuccacgcaugcgnngau

SEQ ID NO: 11626 - RNA, 20 nt, Artificial Sequence
  Synthetic
  misc_feature (9)..(10): n is a, c, g, or u
  misc_feature (18)..(18): n is a, c, g, or u
cgcaugcgnngauggccnau

SEQ ID NO: 11627 - RNA, 20 nt, Artificial Sequence
  Synthetic
  misc_feature (7)..(7): n is a, c, g, or u
  misc_feature (17)..(17): n is a, c, g, or u
cuccaanuuguccuggnuau

SEQ ID NO: 11628 - RNA, 20 nt, Artificial Sequence
  Synthetic
guaagguuaggauagaaccu

SEQ ID NO: 11629 - RNA, 20 nt, Artificial Sequence
  Synthetic
  misc_feature (11)..(11): n is a, c, g, or u
cgugugguggngugaacccu

SEQ ID NO: 11630 - RNA, 20 nt, Artificial Sequence
  Synthetic
cccuagaagaagaacucccu

SEQ ID NO: 11631 - RNA, 20 nt, Artificial Sequence
  Synthetic
gaagaagaacucccucgccu

SEQ ID NO: 11632 - RNA, 20 nt, Artificial Sequence
  Synthetic
auccauacugcggaacuccu

SEQ ID NO: 11633 - RNA, 20 nt, Artificial Sequence
  Synthetic
ggccucaguccguuucuccu

SEQ ID NO: 11634 - RNA, 20 nt, Artificial Sequence
  Synthetic
ggggagcacccacguguccu

SEQ ID NO: 11635 - RNA, 20 nt, Artificial Sequence
  Synthetic
caccccaacacagaauagcu

SEQ ID NO: 11636 - RNA, 20 nt, Artificial Sequence
  Synthetic
uccuagcagcuuguuuugcu

SEQ ID NO: 11637 - RNA, 20 nt, Artificial Sequence
  Synthetic
  misc_feature (11)..(11): n is a, c, g, or u
  misc_feature (18)..(18): n is a, c, g, or u
cuccuaccugnuuugccncu

SEQ ID NO: 11638 - RNA, 20 nt, Artificial Sequence
  Synthetic
  misc_feature (14)..(14): n is a, c, g, or u
  misc_feature (18)..(18): n is a, c, g, or u
aggcaggaggaggngcuncu

SEQ ID NO: 11639 - RNA, 20 nt, Artificial Sequence
  Synthetic
uggggugaguugaugaaucu

SEQ ID NO: 11640 - RNA, 20 nt, Artificial Sequence
  Synthetic
  misc_feature (12)..(12): n is a, c, g, or u
cgugaacgcccnccaggucu

SEQ ID NO: 11641 - RNA, 20 nt, Artificial Sequence
  Synthetic
  misc_feature (8)..(8): n is a, c, g, or u
agcagganucgugcaggucu

SEQ ID NO: 11642 - RNA, 20 nt, Artificial Sequence
  Synthetic
  misc_feature (17)..(17): n is a, c, g, or u
ggccccucacucugggnucu

SEQ ID NO: 11643 - RNA, 20 nt, Artificial Sequence
  Synthetic
uaagcaggcuuucacuuucu

SEQ ID NO: 11644 - RNA, 20 nt, Artificial Sequence
  Synthetic
uuaggcagaggugaaaaagu

SEQ ID NO: 11645 - RNA, 20 nt, Artificial Sequence
  Synthetic
  misc_feature (10)..(10): n is a, c, g, or u
ucccaugaanuuaagggagu

SEQ ID NO: 11646 - RNA, 20 nt, Artificial Sequence
  Synthetic
uucgcuucaccucugcacgu

SEQ ID NO: 11647 - RNA, 20 nt, Artificial Sequence
  Synthetic
  misc_feature (8)..(8): n is a, c, g, or u
cuuggcanagaccugaccgu

SEQ ID NO: 11648 - RNA, 20 nt, Artificial Sequence
  Synthetic
uaucugaaccuuuaccccgu

SEQ ID NO: 11649 - RNA, 20 nt, Artificial Sequence
  Synthetic
gaaggucucaaucgccgcgu

SEQ ID NO: 11650 - RNA, 20 nt, Artificial Sequence
  Synthetic
aaauuacuucccacccaggu

SEQ ID NO: 11651 - RNA, 20 nt, Artificial Sequence
  Synthetic
cuccaagcugugccuugggu

SEQ ID NO: 11652 - RNA, 20 nt, Artificial Sequence
  Synthetic
  misc_feature (8)..(8): n is a, c, g, or u
gccuauanuuuccugcuggu

SEQ ID NO: 11653 - RNA, 20 nt, Artificial Sequence
  Synthetic
ucuggacuaccaagguaugu

SEQ ID NO: 11654 - RNA, 20 nt, Artificial Sequence
  Synthetic
agaccaaccucccaugcugu

SEQ ID NO: 11655 - RNA, 20 nt, Artificial Sequence
  Synthetic
ccucuauguuucccucuugu

SEQ ID NO: 11656 - RNA, 20 nt, Artificial Sequence
  Synthetic
cgcaugcguggaaccuuugu

SEQ ID NO: 11657 - RNA, 20 nt, Artificial Sequence
  Synthetic
  misc_feature (19)..(19): n is a, c, g, or u
caaccccaacaaggaucanu

SEQ ID NO: 11658 - RNA, 20 nt, Artificial Sequence
  Synthetic
  misc_feature (19)..(19): n is a, c, g, or u
accugucuuuaauccuganu

SEQ ID NO: 11659 - RNA, 20 nt, Artificial Sequence
  Synthetic
cacguguccuggccaaaauu

SEQ ID NO: 11660 - RNA, 20 nt, Artificial Sequence
  Synthetic
ugucuuuuggaguguggauu

SEQ ID NO: 11661 - RNA, 20 nt, Artificial Sequence
  Synthetic
uccuaaccuuaccaaauauu

SEQ ID NO: 11662 - RNA, 20 nt, Artificial Sequence
  Synthetic
gguugcgucagcaaacacuu

SEQ ID NO: 11663 - RNA, 20 nt, Artificial Sequence
  Synthetic
  misc_feature (8)..(8): n is a, c, g, or u
cugccggnccgugugcacuu

SEQ ID NO: 11664 - RNA, 20 nt, Artificial Sequence
  Synthetic
ucaagauguuguacagacuu

SEQ ID NO: 11665 - RNA, 20 nt, Artificial Sequence
  Synthetic
  misc_feature (12)..(12): n is a, c, g, or u
acccccacuggnuggggcuu

SEQ ID NO: 11666 - RNA, 20 nt, Artificial Sequence
  Synthetic
  misc_feature (13)..(13): n is a, c, g, or u
auugugggucuunugggcuu

SEQ ID NO: 11667 - RNA, 20 nt, Artificial Sequence
  Synthetic
gucccgcgcaggauccaguu

SEQ ID NO: 11668 - RNA, 20 nt, Artificial Sequence
  Synthetic
  misc_feature (4)..(4): n is a, c, g, or u
  misc_feature (11)..(11): n is a, c, g, or u
ugunaggaaangagggaguu

SEQ ID NO: 11669 - RNA, 20 nt, Artificial Sequence
  Synthetic
  misc_feature (9)..(9): n is a, c, g, or u
ucaggucunugccaaguguu

SEQ ID NO: 11670 - RNA, 20 nt, Artificial Sequence
  Synthetic
  misc_feature (18)..(18): n is a, c, g, or u
caaucuggauuguuuganuu

SEQ ID NO: 11671 - RNA, 20 nt, Artificial Sequence
  Synthetic
  misc_feature (2)..(2): n is a, c, g, or u
  misc_feature (7)..(7): n is a, c, g, or u
  misc_feature (18)..(18): n is a, c, g, or u
gnucccncuccuaccugnuu

SEQ ID NO: 11672 - RNA, 20 nt, Artificial Sequence
  Synthetic
  misc_feature (12)..(12): n is a, c, g, or u
aucccaucaucnugggcuuu

SEQ ID NO: 11673 - RNA, 20 nt, Artificial Sequence
  Synthetic
  misc_feature (6)..(6): n is a, c, g, or u
  misc_feature (9)..(9): n is a, c, g, or u
  misc_feature (15)..(15): n is a, c, g, or u
uugucngunccgaunaguuu

SEQ ID NO: 11674 - RNA, 20 nt, Artificial Sequence
  Synthetic
agggcuuucccccacuguuu

SEQ ID NO: 11675 - RNA, 20 nt, Artificial Sequence
  Synthetic
gaacuccuagcagcuuguuu

SEQ ID NO: 11676 - RNA, 20 nt, Artificial Sequence
  Synthetic
  misc_feature (14)..(14): n is a, c, g, or u
gguuggggacugcnaauuuu

SEQ ID NO: 11677 - RNA, 20 nt, Artificial Sequence
  Synthetic
uguggaguuacucucuuuuu

SEQ ID NO: 11678 - RNA, 17 nt, Artificial Sequence
  Synthetic
gucuccaugcgacgugc

SEQ ID NO: 11679 - RNA, 17 nt, Artificial Sequence
  Synthetic
ggggaguccgcguaaag

SEQ ID NO: 11680 - RNA, 17 nt, Artificial Sequence
  Synthetic
gccugagugccguaugg

SEQ ID NO: 11681 - RNA, 17 nt, Artificial Sequence
  Synthetic
gacccuguaccgaacau

SEQ ID NO: 11682 - RNA, 20 nt, Artificial Sequence
  Synthetic
gaauauggugacccgcaaaa

SEQ ID NO: 11683 - RNA, 20 nt, Artificial Sequence
  Synthetic
gaaaaaccccgccuguaaca

SEQ ID NO: 11684 - RNA, 20 nt, Artificial Sequence
  Synthetic
ggcacuaguaaacugagcca

SEQ ID NO: 11685 - RNA, 20 nt, Artificial Sequence
  Synthetic
gacagaauugucagucccga

SEQ ID NO: 11686 - RNA, 20 nt, Artificial Sequence
  Synthetic
gcgagcaaaacaagcggcua

SEQ ID NO: 11687 - RNA, 20 nt, Artificial Sequence
  Synthetic
  misc_feature (16)..(16): n is a, c, g, or u
gcacaguugugaguangccc

SEQ ID NO: 11688 - RNA, 20 nt, Artificial Sequence
  Synthetic
ggugaggugaacaauguucc

SEQ ID NO: 11689 - RNA, 20 nt, Artificial Sequence
  Synthetic
guuccgcaguauggaucggc

SEQ ID NO: 11690 - RNA, 20 nt, Artificial Sequence
  Synthetic
guggucuccaugcgacgugc

SEQ ID NO: 11691 - RNA, 20 nt, Artificial Sequence
  Synthetic
gacggggaguccgcguaaag

SEQ ID NO: 11692 - RNA, 20 nt, Artificial Sequence
  Synthetic
gcuuucgcaaaauaccuaug

SEQ ID NO: 11693 - RNA, 20 nt, Artificial Sequence
  Synthetic
gcgauugagaccuucgucug

SEQ ID NO: 11694 - RNA, 20 nt, Artificial Sequence
  Synthetic
ggccggacgccaacaaggug

SEQ ID NO: 11695 - RNA, 20 nt, Artificial Sequence
  Synthetic
gucuagacucugugguauug

SEQ ID NO: 11696 - RNA, 20 nt, Artificial Sequence
  Synthetic
  misc_feature (8)..(8): n is a, c, g, or u
ggguguunccccuagaaaau

SEQ ID NO: 11697 - RNA, 20 nt, Artificial Sequence
  Synthetic
ggggacccuguaccgaacau

SEQ ID NO: 11698 - RNA, 20 nt, Artificial Sequence
  Synthetic
gggcucacuguuccugaacu

SEQ ID NO: 11699 - RNA, 20 nt, Artificial Sequence
  Synthetic
gcaaugucaacgaccgaccu

SEQ ID NO: 11700 - RNA, 20 nt, Artificial Sequence
  Synthetic
gcucuguaucgggaggccuu

SEQ ID NO: 11701 - RNA, 17 nt, Artificial Sequence
  Synthetic
uauggugacccgcaaaa

SEQ ID NO: 11702 - RNA, 17 nt, Artificial Sequence
  Synthetic
acggggaguccgcguaa

SEQ ID NO: 11703 - RNA, 17 nt, Artificial Sequence
  Synthetic
aaaccccgccuguaaca

SEQ ID NO: 11704 - RNA, 17 nt, Artificial Sequence
  Synthetic
caguauggaucggcaga

SEQ ID NO: 11705 - RNA, 17 nt, Artificial Sequence
  Synthetic
cuacuguuguuagacga

SEQ ID NO: 11706 - RNA, 17 nt, Artificial Sequence
  Synthetic
agaauugucagucccga

SEQ ID NO: 11707 - RNA, 17 nt, Artificial Sequence
  Synthetic
cacgagcagggguccua

SEQ ID NO: 11708 - RNA, 17 nt, Artificial Sequence
  Synthetic
cuaaggccucccgauac

SEQ ID NO: 11709 - RNA, 17 nt, Artificial Sequence
  Synthetic
ccgcaguauggaucggc

SEQ ID NO: 11710 - RNA, 17 nt, Artificial Sequence
  Synthetic
uucgucugcgaggcgag

SEQ ID NO: 11711 - RNA, 17 nt, Artificial Sequence
  Synthetic
auugagaccuucgucug

SEQ ID NO: 11712 - RNA, 17 nt, Artificial Sequence
  Synthetic
cggacgccaacaaggug

SEQ ID NO: 11713 - RNA, 17 nt, Artificial Sequence
  Synthetic
accucugcacgucgcau

SEQ ID NO: 11714 - RNA, 17 nt, Artificial Sequence
  Synthetic
auugagauucccgagau

SEQ ID NO: 11715 - RNA, 17 nt, Artificial Sequence
  Synthetic
uucugcgacgcggcgau

SEQ ID NO: 11716 - RNA, 17 nt, Artificial Sequence
  Synthetic
augucaacgaccgaccu

SEQ ID NO: 11717 - RNA, 17 nt, Artificial Sequence
  Synthetic
cuguaucgggaggccuu

SEQ ID NO: 11718 - RNA, 20 nt, Artificial Sequence
  Synthetic
cagacggggaguccgcguaa

SEQ ID NO: 11719 - RNA, 20 nt, Artificial Sequence
  Synthetic
ccgcaguauggaucggcaga

SEQ ID NO: 11720 - RNA, 20 nt, Artificial Sequence
  Synthetic
  misc_feature (17)..(17): n is a, c, g, or u
agugcacacgguccggnaga

SEQ ID NO: 11721 - RNA, 20 nt, Artificial Sequence
  Synthetic
aaacuacuguuguuagacga

SEQ ID NO: 11722 - RNA, 20 nt, Artificial Sequence
  Synthetic
uccacugcauggccugagga

SEQ ID NO: 11723 - RNA, 20 nt, Artificial Sequence
  Synthetic
uaacacgagcagggguccua

SEQ ID NO: 11724 - RNA, 20 nt, Artificial Sequence
  Synthetic
acucuaaggccucccgauac

SEQ ID NO: 11725 - RNA, 20 nt, Artificial Sequence
  Synthetic
aaggccucccgauacagagc

SEQ ID NO: 11726 - RNA, 20 nt, Artificial Sequence
  Synthetic
aggucccaaucuggauuuuc

SEQ ID NO: 11727 - RNA, 20 nt, Artificial Sequence
  Synthetic
accuucgucugcgaggcgag

SEQ ID NO: 11728 - RNA, 20 nt, Artificial Sequence
  Synthetic
uagagccccaagcggccccg

SEQ ID NO: 11729 - RNA, 20 nt, Artificial Sequence
  Synthetic
accgccucugcucuguaucg

SEQ ID NO: 11730 - RNA, 20 nt, Artificial Sequence
  Synthetic
ugagaccuucgucugcgagg

SEQ ID NO: 11731 - RNA, 20 nt, Artificial Sequence
  Synthetic
caagcuauucuguguugggg

SEQ ID NO: 11732 - RNA, 20 nt, Artificial Sequence
  Synthetic
cuugccugagugccguaugg

SEQ ID NO: 11733 - RNA, 20 nt, Artificial Sequence
  Synthetic
agaaaggccuuguaaguugg

SEQ ID NO: 11734 - RNA, 20 nt, Artificial Sequence
  Synthetic
acgccaacaaggugggagug

SEQ ID NO: 11735 - RNA, 20 nt, Artificial Sequence
  Synthetic
uucaccucugcacgucgcau

SEQ ID NO: 11736 - RNA, 20 nt, Artificial Sequence
  Synthetic
aacauugagauucccgagau

SEQ ID NO: 11737 - RNA, 20 nt, Artificial Sequence
  Synthetic
aucuucugcgacgcggcgau

SEQ ID NO: 11738 - RNA, 20 nt, Artificial Sequence
  Synthetic
agggaaacauagagguuccu

SEQ ID NO: 11739 - RNA, 20 nt, Artificial Sequence
  Synthetic
agcgauaaccaggacaaauu

SEQ ID NO: 11740 - RNA, 17 nt, Artificial Sequence
  Synthetic
gaaugucaggaaaagaa

SEQ ID NO: 11741 - RNA, 17 nt, Artificial Sequence
  Synthetic
gguuuuguacagcaaca

SEQ ID NO: 11742 - RNA, 17 nt, Artificial Sequence
  Synthetic
gccgauugguggaggca

SEQ ID NO: 11743 - RNA, 17 nt, Artificial Sequence
  Synthetic
  misc_feature (14)..(14): n is a, c, g, or u
gcacacgguccggnaga

SEQ ID NO: 11744 - RNA, 17 nt, Artificial Sequence
  Synthetic
gauugguggaggcagga

SEQ ID NO: 11745 - RNA, 17 nt, Artificial Sequence
  Synthetic
guggucuauaugcagga

SEQ ID NO: 11746 - RNA, 17 nt, Artificial Sequence
  Synthetic
  misc_feature (8)..(8): n is a, c, g, or u
guguuuanugaguggga

SEQ ID NO: 11747 - RNA, 17 nt, Artificial Sequence
  Synthetic
gcccaaggucuugcaua

SEQ ID NO: 11748 - RNA, 17 nt, Artificial Sequence
  Synthetic
gaggugaacaauguucc

SEQ ID NO: 11749 - RNA, 17 nt, Artificial Sequence
  Synthetic
gccucccgauacagagc

SEQ ID NO: 11750 - RNA, 17 nt, Artificial Sequence
  Synthetic
gcauagcagcaggaugc

SEQ ID NO: 11751 - RNA, 17 nt, Artificial Sequence
  Synthetic
gucagaaggcaaaaaag

SEQ ID NO: 11752 - RNA, 17 nt, Artificial Sequence
  Synthetic
  misc_feature (3)..(3): n is a, c, g, or u
ggnaucuuauauaaaag

SEQ ID NO: 11753 - RNA, 17 nt, Artificial Sequence
  Synthetic
gccucugcucuguaucg

SEQ ID NO: 11754 - RNA, 17 nt, Artificial Sequence
  Synthetic
gaccuucgucugcgagg

SEQ ID NO: 11755 - RNA, 17 nt, Artificial Sequence
  Synthetic
gcuauucuguguugggg

SEQ ID NO: 11756 - RNA, 17 nt, Artificial Sequence
  Synthetic
gagugggaggaguuggg

SEQ ID NO: 11757 - RNA, 17 nt, Artificial Sequence
  Synthetic
  misc_feature (12)..(12): n is a, c, g, or u
ggaggacaacanguugg

SEQ ID NO: 11758 - RNA, 17 nt, Artificial Sequence
  Synthetic
gaaacauagagguuccu

SEQ ID NO: 11759 - RNA, 17 nt, Artificial Sequence
  Synthetic
  misc_feature (8)..(8): n is a, c, g, or u
gagugucncuuagaggu

SEQ ID NO: 11760 - RNA, 17 nt, Artificial Sequence
  Synthetic
  misc_feature (13)..(13): n is a, c, g, or u
guuguccuugugngggu

SEQ ID NO: 11761 - RNA, 17 nt, Artificial Sequence
  Synthetic
  misc_feature (12)..(12): n is a, c, g, or u
guuugguggaanguggu

SEQ ID NO: 11762 - RNA, 17 nt, Artificial Sequence
  Synthetic
gaauuuggagcuucugu

SEQ ID NO: 11763 - RNA, 17 nt, Artificial Sequence
  Synthetic
gauaaccaggacaaauu

SEQ ID NO: 11764 - RNA, 17 nt, Artificial Sequence
  Synthetic
  misc_feature (14)..(14): n is a, c, g, or u
gaggaugagugucncuu

SEQ ID NO: 11765 - RNA, 20 nt, Artificial Sequence
  Synthetic
guagguuuuguacagcaaca

SEQ ID NO: 11766 - RNA, 20 nt, Artificial Sequence
  Synthetic
gccgauugguggaggcagga

SEQ ID NO: 11767 - RNA, 20 nt, Artificial Sequence
  Synthetic
gauugguggaggcaggagga

SEQ ID NO: 11768 - RNA, 20 nt, Artificial Sequence
  Synthetic
gagugggaggaguuggggga

SEQ ID NO: 11769 - RNA, 20 nt, Artificial Sequence
  Synthetic
  misc_feature (7)..(7): n is a, c, g, or u
  misc_feature (9)..(9): n is a, c, g, or u
gguuaangnucuuuguacua

SEQ ID NO: 11770 - RNA, 20 nt, Artificial Sequence
  Synthetic
  misc_feature (3)..(3): n is a, c, g, or u
  misc_feature (12)..(12): n is a, c, g, or u
ggnaucaaaccnuauuaucc

SEQ ID NO: 11771 - RNA, 20 nt, Artificial Sequence
  Synthetic
gaggcauagcagcaggaugc

SEQ ID NO: 11772 - RNA, 20 nt, Artificial Sequence
  Synthetic
  misc_feature (13)..(13): n is a, c, g, or u
ggcacagaccagnccguugc

SEQ ID NO: 11773 - RNA, 20 nt, Artificial Sequence
  Synthetic
  misc_feature (14)..(15): n is a, c, g, or u
  misc_feature (19)..(19): n is a, c, g, or u
ggucggucgguacnncagnc

SEQ ID NO: 11774 - RNA, 20 nt, Artificial Sequence
  Synthetic
gaagucagaaggcaaaaaag

SEQ ID NO: 11775 - RNA, 20 nt, Artificial Sequence
  Synthetic
  misc_feature (6)..(6): n is a, c, g, or u
gcgggnaucuuauauaaaag

SEQ ID NO: 11776 - RNA, 20 nt, Artificial Sequence
  Synthetic
  misc_feature (10)..(10): n is a, c, g, or u
ggaacaagancuacagcaug

SEQ ID NO: 11777 - RNA, 20 nt, Artificial Sequence
  Synthetic
  misc_feature (5)..(5): n is a, c, g, or u
  misc_feature (8)..(8): n is a, c, g, or u
  misc_feature (16)..(16): n is a, c, g, or u
guuungcnccagaccngcug

SEQ ID NO: 11778 - RNA, 20 nt, Artificial Sequence
  Synthetic
  misc_feature (14)..(14): n is a, c, g, or u
gacuguguguuuanugagug

SEQ ID NO: 11779 - RNA, 20 nt, Artificial Sequence
  Synthetic
  misc_feature (6)..(6): n is a, c, g, or u
guguunccccuagaaaauug

SEQ ID NO: 11780 - RNA, 20 nt, Artificial Sequence
  Synthetic
  misc_feature (20)..(20): n is a, c, g, or u
gauaagauugacgauauggn

SEQ ID NO: 11781 - RNA, 20 nt, Artificial Sequence
  Synthetic
gccaagucuguacaacaucu

SEQ ID NO: 11782 - RNA, 20 nt, Artificial Sequence
  Synthetic
  misc_feature (11)..(11): n is a, c, g, or u
gaugagugucncuuagaggu

SEQ ID NO: 11783 - RNA, 20 nt, Artificial Sequence
  Synthetic
gauuuguccccaugccuuuu

SEQ ID NO: 11784 - RNA, 17 nt, Artificial Sequence
  Synthetic
aagucagaaggcaaaaa

SEQ ID NO: 11785 - RNA, 17 nt, Artificial Sequence
  Synthetic
  misc_feature (5)..(5): n is a, c, g, or u
cgggnaucuuauauaaa

SEQ ID NO: 11786 - RNA, 17 nt, Artificial Sequence
  Synthetic
  misc_feature (5)..(5): n is a, c, g, or u
agauncccgccuuccaa

SEQ ID NO: 11787 - RNA, 17 nt, Artificial Sequence
  Synthetic
  misc_feature (1)..(1): n is a, c, g, or u
nacaguaaaugaaaaca

SEQ ID NO: 11788 - RNA, 17 nt, Artificial Sequence
  Synthetic
acaguaggacaugaaca

SEQ ID NO: 11789 - RNA, 17 nt, Artificial Sequence
  Synthetic
uugagagaaguccacca

SEQ ID NO: 11790 - RNA, 17 nt, Artificial Sequence
  Synthetic
acuaguaaacugagcca

SEQ ID NO: 11791 - RNA, 17 nt, Artificial Sequence
  Synthetic
acauugcugaaagucca

SEQ ID NO: 11792 - RNA, 17 nt, Artificial Sequence
  Synthetic
uagagguuccuugagca

SEQ ID NO: 11793 - RNA, 17 nt, Artificial Sequence
  Synthetic
uugguggucuauaugca

SEQ ID NO: 11794 - RNA, 17 nt, Artificial Sequence
  Synthetic
ccugacauucauuugca

SEQ ID NO: 11795 - RNA, 17 nt, Artificial Sequence
  Synthetic
aagaaccaacaagaaga

SEQ ID NO: 11796 - RNA, 17 nt, Artificial Sequence
  Synthetic
ugguggaggcaggagga

SEQ ID NO: 11797 - RNA, 17 nt, Artificial Sequence
  Synthetic
acugcauggccugagga

SEQ ID NO: 11798 - RNA, 17 nt, Artificial Sequence
  Synthetic
ugggaggaguuggggga

SEQ ID NO: 11799 - RNA, 17 nt, Artificial Sequence
  Synthetic
ugacucugggaucuuga

SEQ ID NO: 11800 - RNA, 17 nt, Artificial Sequence
  Synthetic
  misc_feature (4)..(4): n is a, c, g, or u
  misc_feature (6)..(6): n is a, c, g, or u
uaangnucuuuguacua

SEQ ID NO: 11801 - RNA, 17 nt, Artificial Sequence
  Synthetic
agcaaaacaagcggcua

SEQ ID NO: 11802 - RNA, 17 nt, Artificial Sequence
  Synthetic
aaauggcacuaguaaac

SEQ ID NO: 11803 - RNA, 17 nt, Artificial Sequence
  Synthetic
aauccucacaauaccac

SEQ ID NO: 11804 - RNA, 17 nt, Artificial Sequence
  Synthetic
agccaagagaaacggac

SEQ ID NO: 11805 - RNA, 17 nt, Artificial Sequence
  Synthetic
  misc_feature (13)..(13): n is a, c, g, or u
caguugugaguangccc

SEQ ID NO: 11806 - RNA, 17 nt, Artificial Sequence
  Synthetic
aaacucuucaagauccc

SEQ ID NO: 11807 - RNA, 17 nt, Artificial Sequence
  Synthetic
  misc_feature (7)..(7): n is a, c, g, or u
ugaguangcccugagcc

SEQ ID NO: 11808 - RNA, 17 nt, Artificial Sequence
  Synthetic
acacagaauagcuugcc

SEQ ID NO: 11809 - RNA, 17 nt, Artificial Sequence
  Synthetic
  misc_feature (9)..(9): n is a, c, g, or u
aucaaaccnuauuaucc

SEQ ID NO: 11810 - RNA, 17 nt, Artificial Sequence
  Synthetic
acuaacauugagauucc

SEQ ID NO: 11811 - RNA, 17 nt, Artificial Sequence
  Synthetic
  misc_feature (4)..(4): n is a, c, g, or u
acangagaugauuaggc

SEQ ID NO: 11812 - RNA, 17 nt, Artificial Sequence
  Synthetic
  misc_feature (10)..(10): n is a, c, g, or u
acagaccagnccguugc

SEQ ID NO: 11813 - RNA, 17 nt, Artificial Sequence
  Synthetic
  misc_feature (11)..(12): n is a, c, g, or u
  misc_feature (16)..(16): n is a, c, g, or u
cggucgguacnncagnc

SEQ ID NO: 11814 - RNA, 17 nt, Artificial Sequence
  Synthetic
  misc_feature (4)..(4): n is a, c, g, or u
  misc_feature (9)..(9): n is a, c, g, or u
uggnagagncaguauuc

SEQ ID NO: 11815 - RNA, 17 nt, Artificial Sequence
  Synthetic
ucccaaucuggauuuuc

SEQ ID NO: 11816 - RNA, 17 nt, Artificial Sequence
  Synthetic
cuccaguucaggaacag

SEQ ID NO: 11817 - RNA, 17 nt, Artificial Sequence
  Synthetic
agccccaagcggccccg

SEQ ID NO: 11818 - RNA, 17 nt, Artificial Sequence
  Synthetic
ugagaaggcacagacgg

SEQ ID NO: 11819 - RNA, 17 nt, Artificial Sequence
  Synthetic
ccaacagucccccaugg

SEQ ID NO: 11820 - RNA, 17 nt, Artificial Sequence
  Synthetic
aaggccuuguaaguugg

SEQ ID NO: 11821 - RNA, 17 nt, Artificial Sequence
  Synthetic
  misc_feature (14)..(14): n is a, c, g, or u
  misc_feature (16)..(16): n is a, c, g, or u
uuagagguggaganang

SEQ ID NO: 11822 - RNA, 17 nt, Artificial Sequence
  Synthetic
  misc_feature (7)..(7): n is a, c, g, or u
acaagancuacagcaug

SEQ ID NO: 11823 - RNA, 17 nt, Artificial Sequence
  Synthetic
uucgcaaaauaccuaug

SEQ ID NO: 11824 - RNA, 17 nt, Artificial Sequence
  Synthetic
  misc_feature (2)..(2): n is a, c, g, or u
  misc_feature (5)..(5): n is a, c, g, or u
  misc_feature (13)..(13): n is a, c, g, or u
ungcnccagaccngcug

SEQ ID NO: 11825 - RNA, 17 nt, Artificial Sequence
  Synthetic
ccaacaaggugggagug

SEQ ID NO: 11826 - RNA, 17 nt, Artificial Sequence
  Synthetic
  misc_feature (11)..(11): n is a, c, g, or u
uguguguuuanugagug

SEQ ID NO: 11827 - RNA, 17 nt, Artificial Sequence
  Synthetic
  misc_feature (3)..(3): n is a, c, g, or u
uunccccuagaaaauug

SEQ ID NO: 11828 - RNA, 17 nt, Artificial Sequence
  Synthetic
uagacucugugguauug

SEQ ID NO: 11829 - RNA, 17 nt, Artificial Sequence
  Synthetic
agcugcuggcacaguug

SEQ ID NO: 11830 - RNA, 17 nt, Artificial Sequence
  Synthetic
  misc_feature (17)..(17): n is a, c, g, or u
aaagacuguguguuuan

SEQ ID NO: 11831 - RNA, 17 nt, Artificial Sequence
  Synthetic
  misc_feature (17)..(17): n is a, c, g, or u
aagauugacgauauggn

SEQ ID NO: 11832 - RNA, 17 nt, Artificial Sequence
  Synthetic
  misc_feature (17)..(17): n is a, c, g, or u
ccugucuuacuuuuggn

SEQ ID NO: 11833 - RNA, 17 nt, Artificial Sequence
  Synthetic
  misc_feature (17)..(17): n is a, c, g, or u
cccaucuuuuuguuuun

SEQ ID NO: 11834 - RNA, 17 nt, Artificial Sequence
  Synthetic
  misc_feature (5)..(5): n is a, c, g, or u
uguunccccuagaaaau

SEQ ID NO: 11835 - RNA, 17 nt, Artificial Sequence
  Synthetic
caacaugagggaaacau

SEQ ID NO: 11836 - RNA, 17 nt, Artificial Sequence
  Synthetic
ccaaggaauacuaacau

SEQ ID NO: 11837 - RNA, 17 nt, Artificial Sequence
  Synthetic
cucacuguuccugaacu

SEQ ID NO: 11838 - RNA, 17 nt, Artificial Sequence
  Synthetic
  misc_feature (3)..(3): n is a, c, g, or u
canguuggugagugacu

SEQ ID NO: 11839 - RNA, 17 nt, Artificial Sequence
  Synthetic
aagucuguacaacaucu

SEQ ID NO: 11840 - RNA, 17 nt, Artificial Sequence
  Synthetic
  misc_feature (1)..(1): n is a, c, g, or u
ncggagaagcgggcggu

SEQ ID NO: 11841 - RNA, 17 nt, Artificial Sequence
  Synthetic
ugggggacuguuggggu

SEQ ID NO: 11842 - RNA, 17 nt, Artificial Sequence
  Synthetic
ccugacugccgauuggu

SEQ ID NO: 11843 - RNA, 17 nt, Artificial Sequence
  Synthetic
cagagcagaggcggugu

SEQ ID NO: 11844 - RNA, 17 nt, Artificial Sequence
  Synthetic
uugaugauccuggaauu

SEQ ID NO: 11845 - RNA, 17 nt, Artificial Sequence
  Synthetic
cacccaaggcacagcuu

SEQ ID NO: 11846 - RNA, 17 nt, Artificial Sequence
  Synthetic
  misc_feature (15)..(15): n is a, c, g, or u
acuucuuuccuucunuu

SEQ ID NO: 11847 - RNA, 17 nt, Artificial Sequence
  Synthetic
  misc_feature (5)..(5): n is a, c, g, or u
acccnuauaaagaauuu

SEQ ID NO: 11848 - RNA, 17 nt, Artificial Sequence
  Synthetic
uuguccccaugccuuuu

SEQ ID NO: 11849 - RNA, 17 nt, Artificial Sequence
  Synthetic
  misc_feature (11)..(11): n is a, c, g, or u
aauauuuggunucuuuu

SEQ ID NO: 11850 - RNA, 20 nt, Artificial Sequence
  Synthetic
aagaagucagaaggcaaaaa

SEQ ID NO: 11851 - RNA, 20 nt, Artificial Sequence
  Synthetic
  misc_feature (8)..(8): n is a, c, g, or u
aggcgggnaucuuauauaaa

SEQ ID NO: 11852 - RNA, 20 nt, Artificial Sequence
  Synthetic
  misc_feature (8)..(8): n is a, c, g, or u
auaagauncccgccuuccaa

SEQ ID NO: 11853 - RNA, 20 nt, Artificial Sequence
  Synthetic
aaugaaugucaggaaaagaa

SEQ ID NO: 11854 - RNA, 20 nt, Artificial Sequence
  Synthetic
  misc_feature (4)..(4): n is a, c, g, or u
ccunacaguaaaugaaaaca

SEQ ID NO: 11855 - RNA, 20 nt, Artificial Sequence
  Synthetic
ugaacaguaggacaugaaca

SEQ ID NO: 11856 - RNA, 20 nt, Artificial Sequence
  Synthetic
aaauugagagaaguccacca

SEQ ID NO: 11857 - RNA, 20 nt, Artificial Sequence
  Synthetic
uugacauugcugaaagucca

SEQ ID NO: 11858 - RNA, 20 nt, Artificial Sequence
  Synthetic
acauagagguuccuugagca

SEQ ID NO: 11859 - RNA, 20 nt, Artificial Sequence
  Synthetic
acugccgauugguggaggca

SEQ ID NO: 11860 - RNA, 20 nt, Artificial Sequence
  Synthetic
cauuugguggucuauaugca

SEQ ID NO: 11861 - RNA, 20 nt, Artificial Sequence
  Synthetic
uuuccugacauucauuugca

SEQ ID NO: 11862 - RNA, 20 nt, Artificial Sequence
  Synthetic
cagaagaaccaacaagaaga

SEQ ID NO: 11863 - RNA, 20 nt, Artificial Sequence
  Synthetic
uugguggucuauaugcagga

SEQ ID NO: 11864 - RNA, 20 nt, Artificial Sequence
  Synthetic
  misc_feature (11)..(11): n is a, c, g, or u
uguguguuuanugaguggga

SEQ ID NO: 11865 - RNA, 20 nt, Artificial Sequence
  Synthetic
cccugacucugggaucuuga

SEQ ID NO: 11866 - RNA, 20 nt, Artificial Sequence
  Synthetic
ccugcccaaggucuugcaua

SEQ ID NO: 11867 - RNA, 20 nt, Artificial Sequence
  Synthetic
aacaaauggcacuaguaaac

SEQ ID NO: 11868 - RNA, 20 nt, Artificial Sequence
  Synthetic
aaaaauccucacaauaccac

SEQ ID NO: 11869 - RNA, 20 nt, Artificial Sequence
  Synthetic
cugagccaagagaaacggac

SEQ ID NO: 11870 - RNA, 20 nt, Artificial Sequence
  Synthetic
accaaacucuucaagauccc

SEQ ID NO: 11871 - RNA, 20 nt, Artificial Sequence
  Synthetic
  misc_feature (10)..(10): n is a, c, g, or u
uugugaguangcccugagcc

SEQ ID NO: 11872 - RNA, 20 nt, Artificial Sequence
  Synthetic
ccaacacagaauagcuugcc

SEQ ID NO: 11873 - RNA, 20 nt, Artificial Sequence
  Synthetic
aauacuaacauugagauucc

SEQ ID NO: 11874 - RNA, 20 nt, Artificial Sequence
  Synthetic
  misc_feature (7)..(7): n is a, c, g, or u
ugaacangagaugauuaggc

SEQ ID NO: 11875 - RNA, 20 nt, Artificial Sequence
  Synthetic
  misc_feature (7)..(7): n is a, c, g, or u
  misc_feature (12)..(12): n is a, c, g, or u
auauggnagagncaguauuc

SEQ ID NO: 11876 - RNA, 20 nt, Artificial Sequence
  Synthetic
uggcuccaguucaggaacag

SEQ ID NO: 11877 - RNA, 20 nt, Artificial Sequence
  Synthetic
agaugagaaggcacagacgg

SEQ ID NO: 11878 - RNA, 20 nt, Artificial Sequence
  Synthetic
  misc_feature (2)..(2): n is a, c, g, or u
anugagugggaggaguuggg

SEQ ID NO: 11879 - RNA, 20 nt, Artificial Sequence
  Synthetic
accccaacagucccccaugg

SEQ ID NO: 11880 - RNA, 20 nt, Artificial Sequence
  Synthetic
  misc_feature (15)..(15): n is a, c, g, or u
auuggaggacaacanguugg

SEQ ID NO: 11881 - RNA, 20 nt, Artificial Sequence
  Synthetic
  misc_feature (2)..(2): n is a, c, g, or u
  misc_feature (17)..(17): n is a, c, g, or u
  misc_feature (19)..(19): n is a, c, g, or u
cncuuagagguggaganang

SEQ ID NO: 11882 - RNA, 20 nt, Artificial Sequence
  Synthetic
aggagcugcuggcacaguug

SEQ ID NO: 11883 - RNA, 20 nt, Artificial Sequence
  Synthetic
  misc_feature (20)..(20): n is a, c, g, or u
uucaaagacuguguguuuan

SEQ ID NO: 11884 - RNA, 20 nt, Artificial Sequence
  Synthetic
  misc_feature (20)..(20): n is a, c, g, or u
uuuccugucuuacuuuuggn

SEQ ID NO: 11885 - RNA, 20 nt, Artificial Sequence
  Synthetic
  misc_feature (20)..(20): n is a, c, g, or u
auccccaucuuuuuguuuun

SEQ ID NO: 11886 - RNA, 20 nt, Artificial Sequence
  Synthetic
cagcaacaugagggaaacau

SEQ ID NO: 11887 - RNA, 20 nt, Artificial Sequence
  Synthetic
  misc_feature (1)..(1): n is a, c, g, or u
nguccaaggaauacuaacau

SEQ ID NO: 11888 - RNA, 20 nt, Artificial Sequence
  Synthetic
  misc_feature (6)..(6): n is a, c, g, or u
caacanguuggugagugacu

SEQ ID NO: 11889 - RNA, 20 nt, Artificial Sequence
  Synthetic
  misc_feature (4)..(4): n is a, c, g, or u
cagncggagaagcgggcggu

SEQ ID NO: 11890 - RNA, 20 nt, Artificial Sequence
  Synthetic
ccaugggggacuguuggggu

SEQ ID NO: 11891 - RNA, 20 nt, Artificial Sequence
  Synthetic
  misc_feature (16)..(16): n is a, c, g, or u
ccaguuguccuugugngggu

SEQ ID NO: 11892 - RNA, 20 nt, Artificial Sequence
  Synthetic
  misc_feature (15)..(15): n is a, c, g, or u
agaguuugguggaanguggu

SEQ ID NO: 11893 - RNA, 20 nt, Artificial Sequence
  Synthetic
cuuccugacugccgauuggu

SEQ ID NO: 11894 - RNA, 20 nt, Artificial Sequence
  Synthetic
aaagaauuuggagcuucugu

SEQ ID NO: 11895 - RNA, 20 nt, Artificial Sequence
  Synthetic
auacagagcagaggcggugu

SEQ ID NO: 11896 - RNA, 20 nt, Artificial Sequence
  Synthetic
  misc_feature (2)..(2): n is a, c, g, or u
unguugaugauccuggaauu

SEQ ID NO: 11897 - RNA, 20 nt, Artificial Sequence
  Synthetic
agccacccaaggcacagcuu

SEQ ID NO: 11898 - RNA, 20 nt, Artificial Sequence
  Synthetic
  misc_feature (17)..(17): n is a, c, g, or u
ccugaggaugagugucncuu

SEQ ID NO: 11899 - RNA, 20 nt, Artificial Sequence
  Synthetic
  misc_feature (18)..(18): n is a, c, g, or u
cugacuucuuuccuucunuu

SEQ ID NO: 11900 - RNA, 20 nt, Artificial Sequence
  Synthetic
  misc_feature (8)..(8): n is a, c, g, or u
uugacccnuauaaagaauuu

SEQ ID NO: 11901 - RNA, 20 nt, Artificial Sequence
  Synthetic
  misc_feature (14)..(14): n is a, c, g, or u
uugaauauuuggunucuuuu

SEQ ID NO: 11902 - RNA, 17 nt, Artificial Sequence
  Synthetic
  misc_feature (8)..(8): n is a, c, g, or u
acccucanaaaacaaaa

SEQ ID NO: 11903 - RNA, 17 nt, Artificial Sequence
  Synthetic
gacgggacguaaacaaa

SEQ ID NO: 11904 - RNA, 17 nt, Artificial Sequence
  Synthetic
guauacccaaagacaaa

SEQ ID NO: 11905 - RNA, 17 nt, Artificial Sequence
  Synthetic
uggaauuagaggacaaa

SEQ ID NO: 11906 - RNA, 17 nt, Artificial Sequence
  Synthetic
  misc_feature (5)..(5): n is a, c, g, or u
gggcngcaaaccccaaa

SEQ ID NO: 11907 - RNA, 17 nt, Artificial Sequence
  Synthetic
cgaauccacacuccaaa

SEQ ID NO: 11908 - RNA, 17 nt, Artificial Sequence
  Synthetic
caauguccuccugcaaa

SEQ ID NO: 11909 - RNA, 17 nt, Artificial Sequence
  Synthetic
aaaaguaagacaggaaa

SEQ ID NO: 11910 - RNA, 17 nt, Artificial Sequence
  Synthetic
aaaugaaugucaggaaa

SEQ ID NO: 11911 - RNA, 17 nt, Artificial Sequence
  Synthetic
ccuagcagccauggaaa

SEQ ID NO: 11912 - RNA, 17 nt, Artificial Sequence
  Synthetic
  misc_feature (2)..(2): n is a, c, g, or u
  misc_feature (11)..(11): n is a, c, g, or u
  misc_feature (14)..(14): n is a, c, g, or u
anccacauugngunaaa

SEQ ID NO: 11913 - RNA, 17 nt, Artificial Sequence
  Synthetic
  misc_feature (3)..(3): n is a, c, g, or u
  misc_feature (9)..(9): n is a, c, g, or u
ggnccccunacaguaaa

SEQ ID NO: 11914 - RNA, 17 nt, Artificial Sequence
  Synthetic
uggccggacgccaacaa

SEQ ID NO: 11915 - RNA, 17 nt, Artificial Sequence
  Synthetic
  misc_feature (12)..(12): n is a, c, g, or u
gaccucaacccncacaa

SEQ ID NO: 11916 - RNA, 17 nt, Artificial Sequence
  Synthetic
acagccuccuaguacaa

SEQ ID NO: 11917 - RNA, 17 nt, Artificial Sequence
  Synthetic
uuuaaauguauacccaa

SEQ ID NO: 11918 - RNA, 17 nt, Artificial Sequence
  Synthetic
  misc_feature (11)..(11): n is a, c, g, or u
ccaccuuaugnguccaa

SEQ ID NO: 11919 - RNA, 17 nt, Artificial Sequence
  Synthetic
  misc_feature (3)..(3): n is a, c, g, or u
agnccguugccgagcaa

SEQ ID NO: 11920 - RNA, 17 nt, Artificial Sequence
  Synthetic
  misc_feature (9)..(9): n is a, c, g, or u
  misc_feature (12)..(12): n is a, c, g, or u
auauguucnugnggcaa

SEQ ID NO: 11921 - RNA, 17 nt, Artificial Sequence
  Synthetic
  misc_feature (2)..(2): n is a, c, g, or u
  misc_feature (11)..(11): n is a, c, g, or u
  misc_feature (14)..(14): n is a, c, g, or u
cngccccuuunacncaa

SEQ ID NO: 11922 - RNA, 17 nt, Artificial Sequence
  Synthetic
  misc_feature (5)..(5): n is a, c, g, or u
gcacnacuccugcucaa

SEQ ID NO: 11923 - RNA, 17 nt, Artificial Sequence
  Synthetic
acuuucagcaaugucaa

SEQ ID NO: 11924 - RNA, 17 nt, Artificial Sequence
  Synthetic
  misc_feature (11)..(11): n is a, c, g, or u
auuggaaagunugucaa

SEQ ID NO: 11925 - RNA, 17 nt, Artificial Sequence
  Synthetic
cuugaggcauacuucaa

SEQ ID NO: 11926 - RNA, 17 nt, Artificial Sequence
  Synthetic
  misc_feature (2)..(2): n is a, c, g, or u
gnggauuggggacagaa

SEQ ID NO: 11927 - RNA, 17 nt, Artificial Sequence
  Synthetic
  misc_feature (2)..(2): n is a, c, g, or u
  misc_feature (13)..(13): n is a, c, g, or u
gnagaucucgaanagaa

SEQ ID NO: 11928 - RNA, 17 nt, Artificial Sequence
  Synthetic
  misc_feature (9)..(9): n is a, c, g, or u
aucucgaanagaaggaa

SEQ ID NO: 11929 - RNA, 17 nt, Artificial Sequence
  Synthetic
ugaagaguuugguggaa

SEQ ID NO: 11930 - RNA, 17 nt, Artificial Sequence
  Synthetic
  misc_feature (6)..(6): n is a, c, g, or u
uuacanacucuuuggaa

SEQ ID NO: 11931 - RNA, 17 nt, Artificial Sequence
  Synthetic
  misc_feature (3)..(3): n is a, c, g, or u
  misc_feature (12)..(12): n is a, c, g, or u
  misc_feature (15)..(15): n is a, c, g, or u
uanccacauugngunaa

SEQ ID NO: 11932 - RNA, 17 nt, Artificial Sequence
  Synthetic
  misc_feature (12)..(12): n is a, c, g, or u
auuccuuggacncauaa

SEQ ID NO: 11933 - RNA, 17 nt, Artificial Sequence
  Synthetic
  misc_feature (13)..(13): n is a, c, g, or u
ugguaacagcggnauaa

SEQ ID NO: 11934 - RNA, 17 nt, Artificial Sequence
  Synthetic
  misc_feature (12)..(12): n is a, c, g, or u
gacauugacccnuauaa

SEQ ID NO: 11935 - RNA, 17 nt, Artificial Sequence
  Synthetic
  misc_feature (4)..(5): n is a, c, g, or u
gucnngucuggaaguaa

SEQ ID NO: 11936 - RNA, 17 nt, Artificial Sequence
  Synthetic
  misc_feature (2)..(2): n is a, c, g, or u
cngcugcgagcaaaaca

SEQ ID NO: 11937 - RNA, 17 nt, Artificial Sequence
  Synthetic
guccagaagaaccaaca

SEQ ID NO: 11938 - RNA, 17 nt, Artificial Sequence
  Synthetic
gaggauuuuugucaaca

SEQ ID NO: 11939 - RNA, 17 nt, Artificial Sequence
  Synthetic
ccauauucuugggaaca

SEQ ID NO: 11940 - RNA, 17 nt, Artificial Sequence
  Synthetic
auuuuggccaagacaca

SEQ ID NO: 11941 - RNA, 17 nt, Artificial Sequence
  Synthetic
  misc_feature (3)..(3): n is a, c, g, or u
cunccaaaaguaagaca

SEQ ID NO: 11942 - RNA, 17 nt, Artificial Sequence
  Synthetic
gcuugaacaguaggaca

SEQ ID NO: 11943 - RNA, 17 nt, Artificial Sequence
  Synthetic
gaugggaugggaauaca

SEQ ID NO: 11944 - RNA, 17 nt, Artificial Sequence
  Synthetic
ccccugcucguguuaca

SEQ ID NO: 11945 - RNA, 17 nt, Artificial Sequence
  Synthetic
  misc_feature (8)..(8): n is a, c, g, or u
caauaggncuguuuaca

SEQ ID NO: 11946 - RNA, 17 nt, Artificial Sequence
  Synthetic
acauccagcgauaacca

SEQ ID NO: 11947 - RNA, 17 nt, Artificial Sequence
  Synthetic
  misc_feature (2)..(3): n is a, c, g, or u
gnnguaccgaccgacca

SEQ ID NO: 11948 - RNA, 17 nt, Artificial Sequence
  Synthetic
aaauuacuucccaccca

SEQ ID NO: 11949 - RNA, 17 nt, Artificial Sequence
  Synthetic
accccaacaguccccca

SEQ ID NO: 11950 - RNA, 17 nt, Artificial Sequence
  Synthetic
cgggcgguagagcccca

SEQ ID NO: 11951 - RNA, 17 nt, Artificial Sequence
  Synthetic
  misc_feature (8)..(9): n is a, c, g, or u
ggguucannccucccca

SEQ ID NO: 11952 - RNA, 17 nt, Artificial Sequence
  Synthetic
uauuuugcgaaagccca

SEQ ID NO: 11953 - RNA, 17 nt, Artificial Sequence
  Synthetic
  misc_feature (1)..(1): n is a, c, g, or u
nccaauuacauauccca

SEQ ID NO: 11954 - RNA, 17 nt, Artificial Sequence
  Synthetic
  misc_feature (6)..(6): n is a, c, g, or u
uguagnucuuguuccca

SEQ ID NO: 11955 - RNA, 17 nt, Artificial Sequence
  Synthetic
acugcgaauuuuggcca

SEQ ID NO: 11956 - RNA, 17 nt, Artificial Sequence
  Synthetic
  misc_feature (4)..(4): n is a, c, g, or u
cggncuggucugugcca

SEQ ID NO: 11957 - RNA, 17 nt, Artificial Sequence
  Synthetic
guucacgguggucucca

SEQ ID NO: 11958 - RNA, 17 nt, Artificial Sequence
  Synthetic
uuuguccucuaauucca

SEQ ID NO: 11959 - RNA, 17 nt, Artificial Sequence
  Synthetic
auaaaggcauuaaagca

SEQ ID NO: 11960 - RNA, 17 nt, Artificial Sequence
  Synthetic
  misc_feature (9)..(9): n is a, c, g, or u
gaacaagancuacagca

SEQ ID NO: 11961 - RNA, 17 nt, Artificial Sequence
  Synthetic
aacuggagccaccagca

SEQ ID NO: 11962 - RNA, 17 nt, Artificial Sequence
  Synthetic
gaugaggcauagcagca

SEQ ID NO: 11963 - RNA, 17 nt, Artificial Sequence
  Synthetic
cgccuguaacacgagca

SEQ ID NO: 11964 - RNA, 17 nt, Artificial Sequence
  Synthetic
cacaaagguuccacgca

SEQ ID NO: 11965 - RNA, 17 nt, Artificial Sequence
  Synthetic
  misc_feature (4)..(4): n is a, c, g, or u
caunggccaucagcgca

SEQ ID NO: 11966 - RNA, 17 nt, Artificial Sequence
  Synthetic
aaaggacgucccgcgca

SEQ ID NO: 11967 - RNA, 17 nt, Artificial Sequence
  Synthetic
caaaccucgaaaaggca

SEQ ID NO: 11968 - RNA, 17 nt, Artificial Sequence
  Synthetic
aagaguccucuuaugca

SEQ ID NO: 11969 - RNA, 17 nt, Artificial Sequence
  Synthetic
  misc_feature (9)..(9): n is a, c, g, or u
  misc_feature (15)..(15): n is a, c, g, or u
uggggcacnuugccnca

SEQ ID NO: 11970 - RNA, 17 nt, Artificial Sequence
  Synthetic
uggagaacaucgcauca

SEQ ID NO: 11971 - RNA, 17 nt, Artificial Sequence
  Synthetic
  misc_feature (4)..(4): n is a, c, g, or u
cggnauaaagggacuca

SEQ ID NO: 11972 - RNA, 17 nt, Artificial Sequence
  Synthetic
ccaccaaucggcaguca

SEQ ID NO: 11973 - RNA, 17 nt, Artificial Sequence
  Synthetic
ccugcaaaugaauguca

SEQ ID NO: 11974 - RNA, 17 nt, Artificial Sequence
  Synthetic
  misc_feature (5)..(5): n is a, c, g, or u
aaganaccaaauauuca

SEQ ID NO: 11975 - RNA, 17 nt, Artificial Sequence
  Synthetic
auauucccuuaacuuca

SEQ ID NO: 11976 - RNA, 17 nt, Artificial Sequence
  Synthetic
uuccaccaaacucuuca

SEQ ID NO: 11977 - RNA, 17 nt, Artificial Sequence
  Synthetic
cugguggcuccaguuca

SEQ ID NO: 11978 - RNA, 17 nt, Artificial Sequence
  Synthetic
  misc_feature (5)..(5): n is a, c, g, or u
cucanaaaacaaaaaga

SEQ ID NO: 11979 - RNA, 17 nt, Artificial Sequence
  Synthetic
cagaagaaccaacaaga

SEQ ID NO: 11980 - RNA, 17 nt, Artificial Sequence
  Synthetic
uuugcgaaagcccaaga

SEQ ID NO: 11981 - RNA, 17 nt, Artificial Sequence
  Synthetic
gcagguccccuagaaga

SEQ ID NO: 11982 - RNA, 17 nt, Artificial Sequence
  Synthetic
caggaugcagaggaaga

SEQ ID NO: 11983 - RNA, 17 nt, Artificial Sequence
  Synthetic
caaggucuugcauaaga

SEQ ID NO: 11984 - RNA, 17 nt, Artificial Sequence
  Synthetic
agaugagaaggcacaga

SEQ ID NO: 11985 - RNA, 17 nt, Artificial Sequence
  Synthetic
uaccuugauaguccaga

SEQ ID NO: 11986 - RNA, 17 nt, Artificial Sequence
  Synthetic
ucccgauacagagcaga

SEQ ID NO: 11987 - RNA, 17 nt, Artificial Sequence
  Synthetic
cucccucgccucgcaga

SEQ ID NO: 11988 - RNA, 17 nt, Artificial Sequence
  Synthetic
aaucgccgcgucgcaga

SEQ ID NO: 11989 - RNA, 17 nt, Artificial Sequence
  Synthetic
  misc_feature (1)..(1): n is a, c, g, or u
ngagaugauuaggcaga

SEQ ID NO: 11990 - RNA, 17 nt, Artificial Sequence
  Synthetic
uagcagcaggaugcaga

SEQ ID NO: 11991 - RNA, 17 nt, Artificial Sequence
  Synthetic
uccaugcgacgugcaga

SEQ ID NO: 11992 - RNA, 17 nt, Artificial Sequence
  Synthetic
gaguccgcguaaagaga

SEQ ID NO: 11993 - RNA, 17 nt, Artificial Sequence
  Synthetic
  misc_feature (6)..(7): n is a, c, g, or u
  misc_feature (11)..(11): n is a, c, g, or u
gguacnncagncggaga

SEQ ID NO: 11994 - RNA, 17 nt, Artificial Sequence
  Synthetic
  misc_feature (13)..(13): n is a, c, g, or u
aggacaugaacangaga

SEQ ID NO: 11995 - RNA, 17 nt, Artificial Sequence
  Synthetic
gaggcagguccccuaga

SEQ ID NO: 11996 - RNA, 17 nt, Artificial Sequence
  Synthetic
  misc_feature (4)..(5): n is a, c, g, or u
aagnnagguaccguaga

SEQ ID NO: 11997 - RNA, 17 nt, Artificial Sequence
  Synthetic
augauccuggaauuaga

SEQ ID NO: 11998 - RNA, 17 nt, Artificial Sequence
  Synthetic
  misc_feature (11)..(11): n is a, c, g, or u
gaugagugucncuuaga

SEQ ID NO: 11999 - RNA, 17 nt, Artificial Sequence
  Synthetic
aaacuacuguuguuaga

SEQ ID NO: 12000 - RNA, 17 nt, Artificial Sequence
  Synthetic
gcgggauucagcgccga

SEQ ID NO: 12001 - RNA, 17 nt, Artificial Sequence
  Synthetic
gugcagaggugaagcga

SEQ ID NO: 12002 - RNA, 17 nt, Artificial Sequence
  Synthetic
cgguggucuccaugcga

SEQ ID NO: 12003 - RNA, 17 nt, Artificial Sequence
  Synthetic
gagaccuucgucugcga

SEQ ID NO: 12004 - RNA, 17 nt, Artificial Sequence
  Synthetic
auugagaucuucugcga

SEQ ID NO: 12005 - RNA, 17 nt, Artificial Sequence
  Synthetic
aucgucaaucuuaucga

SEQ ID NO: 12006 - RNA, 17 nt, Artificial Sequence
  Synthetic
gacauucauuugcagga

SEQ ID NO: 12007 - RNA, 17 nt, Artificial Sequence
  Synthetic
cagcaggaugcagagga

SEQ ID NO: 12008 - RNA, 17 nt, Artificial Sequence
  Synthetic
caacaguaguuuccgga

SEQ ID NO: 12009 - RNA, 17 nt, Artificial Sequence
  Synthetic
gcgcugaaucccgcgga

SEQ ID NO: 12010 - RNA, 17 nt, Artificial Sequence
  Synthetic
cccaagcggccccggga

SEQ ID NO: 12011 - RNA, 17 nt, Artificial Sequence
  Synthetic
agcccaagaugauggga

SEQ ID NO: 12012 - RNA, 17 nt, Artificial Sequence
  Synthetic
gcuuucaguuauaugga

SEQ ID NO: 12013 - RNA, 17 nt, Artificial Sequence
  Synthetic
uccugguuaucgcugga

SEQ ID NO: 12014 - RNA, 17 nt, Artificial Sequence
  Synthetic
aaccaggacaaauugga

SEQ ID NO: 12015 - RNA, 17 nt, Artificial Sequence
  Synthetic
gugggaaguaauuugga

SEQ ID NO: 12016 - RNA, 17 nt, Artificial Sequence
  Synthetic
ccuuuucgagguuugga

SEQ ID NO: 12017 - RNA, 17 nt, Artificial Sequence
  Synthetic
ggugacccgcaaaauga

SEQ ID NO: 12018 - RNA, 17 nt, Artificial Sequence
  Synthetic
gcgaaagcccaagauga

SEQ ID NO: 12019 - RNA, 17 nt, Artificial Sequence
  Synthetic
uucaguuauauggauga

SEQ ID NO: 12020 - RNA, 17 nt, Artificial Sequence
  Synthetic
augcaggguccaacuga

SEQ ID NO: 12021 - RNA, 17 nt, Artificial Sequence
  Synthetic
uccacugcauggccuga

SEQ ID NO: 12022 - RNA, 17 nt, Artificial Sequence
  Synthetic
gguccuaggaguccuga

SEQ ID NO: 12023 - RNA, 17 nt, Artificial Sequence
  Synthetic
gcgacgugcagagguga

SEQ ID NO: 12024 - RNA, 17 nt, Artificial Sequence
  Synthetic
ugagugccguaugguga

SEQ ID NO: 12025 - RNA, 17 nt, Artificial Sequence
  Synthetic
acucugugguauuguga

SEQ ID NO: 12026 - RNA, 17 nt, Artificial Sequence
  Synthetic
gucuucgauaagauuga

SEQ ID NO: 12027 - RNA, 17 nt, Artificial Sequence
  Synthetic
  misc_feature (12)..(12): n is a, c, g, or u
ccggugcuggunguuga

SEQ ID NO: 12028 - RNA, 17 nt, Artificial Sequence
  Synthetic
  misc_feature (1)..(1): n is a, c, g, or u
  misc_feature (16)..(16): n is a, c, g, or u
ncuuagagguggagana

SEQ ID NO: 12029 - RNA, 17 nt, Artificial Sequence
  Synthetic
  misc_feature (4)..(4): n is a, c, g, or u
  misc_feature (13)..(13): n is a, c, g, or u
  misc_feature (16)..(16): n is a, c, g, or u
auanuugcggganagna

SEQ ID NO: 12030 - RNA, 17 nt, Artificial Sequence
  Synthetic
  misc_feature (16)..(16): n is a, c, g, or u
caacugaugaucgggna

SEQ ID NO: 12031 - RNA, 17 nt, Artificial Sequence
  Synthetic
  misc_feature (16)..(16): n is a, c, g, or u
guuuucauuuacuguna

SEQ ID NO: 12032 - RNA, 17 nt, Artificial Sequence
  Synthetic
  misc_feature (14)..(14): n is a, c, g, or u
  misc_feature (16)..(16): n is a, c, g, or u
aaggaguuugccanuna

SEQ ID NO: 12033 - RNA, 17 nt, Artificial Sequence
  Synthetic
  misc_feature (16)..(16): n is a, c, g, or u
guguuggggugaguuna

SEQ ID NO: 12034 - RNA, 17 nt, Artificial Sequence
  Synthetic
  misc_feature (10)..(10): n is a, c, g, or u
cuaugucaanguuaaua

SEQ ID NO: 12035 - RNA, 17 nt, Artificial Sequence
  Synthetic
gaaguguugauaagaua

SEQ ID NO: 12036 - RNA, 17 nt, Artificial Sequence
  Synthetic
guccccagucuucgaua

SEQ ID NO: 12037 - RNA, 17 nt, Artificial Sequence
  Synthetic
uuccggaaguguugaua

SEQ ID NO: 12038 - RNA, 17 nt, Artificial Sequence
  Synthetic
  misc_feature (1)..(1): n is a, c, g, or u
  misc_feature (3)..(3): n is a, c, g, or u
ngncucucuuuuauaua

SEQ ID NO: 12039 - RNA, 17 nt, Artificial Sequence
  Synthetic
gcuccaaauucuuuaua

SEQ ID NO: 12040 - RNA, 17 nt, Artificial Sequence
  Synthetic
cuuucgcaaaauaccua

SEQ ID NO: 12041 - RNA, 17 nt, Artificial Sequence
  Synthetic
agugggggaaagcccua

SEQ ID NO: 12042 - RNA, 17 nt, Artificial Sequence
  Synthetic
ucgcaucaggacuccua

SEQ ID NO: 12043 - RNA, 17 nt, Artificial Sequence
  Synthetic
cgcaaaaugaggcgcua

SEQ ID NO: 12044 - RNA, 17 nt, Artificial Sequence
  Synthetic
  misc_feature (7)..(7): n is a, c, g, or u
uuugaunccuuuaucua

SEQ ID NO: 12045 - RNA, 17 nt, Artificial Sequence
  Synthetic
agggaguucuucuucua

SEQ ID NO: 12046 - RNA, 17 nt, Artificial Sequence
  Synthetic
cuucucucaauuuucua

SEQ ID NO: 12047 - RNA, 17 nt, Artificial Sequence
  Synthetic
  misc_feature (8)..(8): n is a, c, g, or u
uuucucunccaaaagua

SEQ ID NO: 12048 - RNA, 17 nt, Artificial Sequence
  Synthetic
uggaggcuugaacagua

SEQ ID NO: 12049 - RNA, 17 nt, Artificial Sequence
  Synthetic
cauaucccaugaaguua

SEQ ID NO: 12050 - RNA, 17 nt, Artificial Sequence
  Synthetic
uaaggugggaaacuuua

SEQ ID NO: 12051 - RNA, 17 nt, Artificial Sequence
  Synthetic
gggcgcaccucucuuua

SEQ ID NO: 12052 - RNA, 17 nt, Artificial Sequence
  Synthetic
  misc_feature (8)..(10): n is a, c, g, or u
aaucaaannnuguuuua

SEQ ID NO: 12053 - RNA, 17 nt, Artificial Sequence
  Synthetic
acugagccaagagaaac

SEQ ID NO: 12054 - RNA, 17 nt, Artificial Sequence
  Synthetic
  misc_feature (7)..(7): n is a, c, g, or u
cagggcnuacucacaac

SEQ ID NO: 12055 - RNA, 17 nt, Artificial Sequence
  Synthetic
ugaaugcaggguccaac

SEQ ID NO: 12056 - RNA, 17 nt, Artificial Sequence
  Synthetic
  misc_feature (2)..(2): n is a, c, g, or u
gnccguugccgagcaac

SEQ ID NO: 12057 - RNA, 17 nt, Artificial Sequence
  Synthetic
ggcuccaguucaggaac

SEQ ID NO: 12058 - RNA, 17 nt, Artificial Sequence
  Synthetic
cacaucauccauauaac

SEQ ID NO: 12059 - RNA, 17 nt, Artificial Sequence
  Synthetic
aaaagaaaauugguaac

SEQ ID NO: 12060 - RNA, 17 nt, Artificial Sequence
  Synthetic
  misc_feature (2)..(2): n is a, c, g, or u
unaacucaccccaacac

SEQ ID NO: 12061 - RNA, 17 nt, Artificial Sequence
  Synthetic
aaagcccuacgaaccac

SEQ ID NO: 12062 - RNA, 17 nt, Artificial Sequence
  Synthetic
cgucgcauggagaccac

SEQ ID NO: 12063 - RNA, 17 nt, Artificial Sequence
  Synthetic
  misc_feature (1)..(2): n is a, c, g, or u
nnguaccgaccgaccac

SEQ ID NO: 12064 - RNA, 17 nt, Artificial Sequence
  Synthetic
aaagagaguaacuccac

SEQ ID NO: 12065 - RNA, 17 nt, Artificial Sequence
  Synthetic
  misc_feature (3)..(3): n is a, c, g, or u
ggnagaugagaaggcac

SEQ ID NO: 12066 - RNA, 17 nt, Artificial Sequence
  Synthetic
cagcaaacacuuggcac

SEQ ID NO: 12067 - RNA, 17 nt, Artificial Sequence
  Synthetic
  misc_feature (5)..(5): n is a, c, g, or u
uuccngugggcguucac

SEQ ID NO: 12068 - RNA, 17 nt, Artificial Sequence
  Synthetic
aggcauacuucaaagac

SEQ ID NO: 12069 - RNA, 17 nt, Artificial Sequence
  Synthetic
ucaaucuuaucgaagac

SEQ ID NO: 12070 - RNA, 17 nt, Artificial Sequence
  Synthetic
gaugagaaggcacagac

SEQ ID NO: 12071 - RNA, 17 nt, Artificial Sequence
  Synthetic
auaacugaaagccagac

SEQ ID NO: 12072 - RNA, 17 nt, Artificial Sequence
  Synthetic
ucagcaaugucaacgac

SEQ ID NO: 12073 - RNA, 17 nt, Artificial Sequence
  Synthetic
  misc_feature (9)..(9): n is a, c, g, or u
  misc_feature (12)..(12): n is a, c, g, or u
uugcggganagnacgac

SEQ ID NO: 12074 - RNA, 17 nt, Artificial Sequence
  Synthetic
  misc_feature (4)..(4): n is a, c, g, or u
  misc_feature (8)..(9): n is a, c, g, or u
ccgncugnnguaccgac

SEQ ID NO: 12075 - RNA, 17 nt, Artificial Sequence
  Synthetic
guacaaaaccuacggac

SEQ ID NO: 12076 - RNA, 17 nt, Artificial Sequence
  Synthetic
  misc_feature (11)..(11): n is a, c, g, or u
cuucucaucunccggac

SEQ ID NO: 12077 - RNA, 17 nt, Artificial Sequence
  Synthetic
  misc_feature (3)..(3): n is a, c, g, or u
gcnaaacucaucgggac

SEQ ID NO: 12078 - RNA, 17 nt, Artificial Sequence
  Synthetic
  misc_feature (6)..(6): n is a, c, g, or u
cccagnggauuggggac

SEQ ID NO: 12079 - RNA, 17 nt, Artificial Sequence
  Synthetic
gacuggagauuugggac

SEQ ID NO: 12080 - RNA, 17 nt, Artificial Sequence
  Synthetic
ccucugccgauccauac

SEQ ID NO: 12081 - RNA, 17 nt, Artificial Sequence
  Synthetic
ugcuguacaaaaccuac

SEQ ID NO: 12082 - RNA, 17 nt, Artificial Sequence
  Synthetic
uucuccauguucgguac

SEQ ID NO: 12083 - RNA, 17 nt, Artificial Sequence
  Synthetic
  misc_feature (8)..(8): n is a, c, g, or u
  misc_feature (12)..(13): n is a, c, g, or u
uucuccgncugnnguac

SEQ ID NO: 12084 - RNA, 17 nt, Artificial Sequence
  Synthetic
gacuggggacccuguac

SEQ ID NO: 12085 - RNA, 17 nt, Artificial Sequence
  Synthetic
gacucaagauguuguac

SEQ ID NO: 12086 - RNA, 17 nt, Artificial Sequence
  Synthetic
aaggugggaaacuuuac

SEQ ID NO: 12087 - RNA, 17 nt, Artificial Sequence
  Synthetic
auggccaagccccaacc

SEQ ID NO: 12088 - RNA, 17 nt, Artificial Sequence
  Synthetic
  misc_feature (11)..(11): n is a, c, g, or u
uuucuaggggnaacacc

SEQ ID NO: 12089 - RNA, 17 nt, Artificial Sequence
  Synthetic
  misc_feature (2)..(2): n is a, c, g, or u
unaugaaucuagccacc

SEQ ID NO: 12090 - RNA, 17 nt, Artificial Sequence
  Synthetic
  misc_feature (8)..(8): n is a, c, g, or u
caucaacnaccagcacc

SEQ ID NO: 12091 - RNA, 17 nt, Artificial Sequence
  Synthetic
uaaagagaggugcgccc

SEQ ID NO: 12092 - RNA, 17 nt, Artificial Sequence
  Synthetic
agagccccaagcggccc

SEQ ID NO: 12093 - RNA, 17 nt, Artificial Sequence
  Synthetic
  misc_feature (13)..(13): n is a, c, g, or u
aggaaaguacagngccc

SEQ ID NO: 12094 - RNA, 17 nt, Artificial Sequence
  Synthetic
cgcggacgaccccuccc

SEQ ID NO: 12095 - RNA, 17 nt, Artificial Sequence
  Synthetic
ccauauaacugaaagcc

SEQ ID NO: 12096 - RNA, 17 nt, Artificial Sequence
  Synthetic
gugggagcauucgggcc

SEQ ID NO: 12097 - RNA, 17 nt, Artificial Sequence
  Synthetic
cacaaggacaacuggcc

SEQ ID NO: 12098 - RNA, 17 nt, Artificial Sequence
  Synthetic
  misc_feature (4)..(5): n is a, c, g, or u
aggnnugaacccuggcc

SEQ ID NO: 12099 - RNA, 17 nt, Artificial Sequence
  Synthetic
  misc_feature (12)..(12): n is a, c, g, or u
  misc_feature (15)..(15): n is a, c, g, or u
ccgaugaguuungcncc

SEQ ID NO: 12100 - RNA, 17 nt, Artificial Sequence
  Synthetic
  misc_feature (15)..(15): n is a, c, g, or u
gugccuucucaucuncc

SEQ ID NO: 12101 - RNA, 17 nt, Artificial Sequence
  Synthetic
  misc_feature (3)..(3): n is a, c, g, or u
  misc_feature (15)..(15): n is a, c, g, or u
ccncugggauucuuncc

SEQ ID NO: 12102 - RNA, 17 nt, Artificial Sequence
  Synthetic
gccaacucagaaaaucc

SEQ ID NO: 12103 - RNA, 17 nt, Artificial Sequence
  Synthetic
ccgucggcgcugaaucc

SEQ ID NO: 12104 - RNA, 17 nt, Artificial Sequence
  Synthetic
acgccgcagacacaucc

SEQ ID NO: 12105 - RNA, 17 nt, Artificial Sequence
  Synthetic
uggaagauccagcaucc

SEQ ID NO: 12106 - RNA, 17 nt, Artificial Sequence
  Synthetic
ugcugccaacuggaucc

SEQ ID NO: 12107 - RNA, 17 nt, Artificial Sequence
  Synthetic
ccgcggacgaccccucc

SEQ ID NO: 12108 - RNA, 17 nt, Artificial Sequence
  Synthetic
gagacucuaaggccucc

SEQ ID NO: 12109 - RNA, 17 nt, Artificial Sequence
  Synthetic
gaggccuuagagucucc

SEQ ID NO: 12110 - RNA, 17 nt, Artificial Sequence
  Synthetic
gacagaauugucagucc

SEQ ID NO: 12111 - RNA, 17 nt, Artificial Sequence
  Synthetic
agggguccuaggagucc

SEQ ID NO: 12112 - RNA, 17 nt, Artificial Sequence
  Synthetic
acauaccuugauagucc

SEQ ID NO: 12113 - RNA, 17 nt, Artificial Sequence
  Synthetic
guaaacaaaggacgucc

SEQ ID NO: 12114 - RNA, 17 nt, Artificial Sequence
  Synthetic
cagguuuugcauggucc

SEQ ID NO: 12115 - RNA, 17 nt, Artificial Sequence
  Synthetic
aucuuaucaacacuucc

SEQ ID NO: 12116 - RNA, 17 nt, Artificial Sequence
  Synthetic
aguuaaucauuacuucc

SEQ ID NO: 12117 - RNA, 17 nt, Artificial Sequence
  Synthetic
ggaguaggcugccuucc

SEQ ID NO: 12118 - RNA, 17 nt, Artificial Sequence
  Synthetic
gaccuugggcagguucc

SEQ ID NO: 12119 - RNA, 17 nt, Artificial Sequence
  Synthetic
gcagggcucacuguucc

SEQ ID NO: 12120 - RNA, 17 nt, Artificial Sequence
  Synthetic
uaacaacaguaguuucc

SEQ ID NO: 12121 - RNA, 17 nt, Artificial Sequence
  Synthetic
caaacuccuucuuuucc

SEQ ID NO: 12122 - RNA, 17 nt, Artificial Sequence
  Synthetic
uguucaagccuccaagc

SEQ ID NO: 12123 - RNA, 17 nt, Artificial Sequence
  Synthetic
ccgccuguaacacgagc

SEQ ID NO: 12124 - RNA, 17 nt, Artificial Sequence
  Synthetic
  misc_feature (4)..(4): n is a, c, g, or u
gagncaguauucugagc

SEQ ID NO: 12125 - RNA, 17 nt, Artificial Sequence
  Synthetic
  misc_feature (7)..(7): n is a, c, g, or u
auuaacnuugacauagc

SEQ ID NO: 12126 - RNA, 17 nt, Artificial Sequence
  Synthetic
gagaucuucugcgacgc

SEQ ID NO: 12127 - RNA, 17 nt, Artificial Sequence
  Synthetic
cgcaccucucuuuacgc

SEQ ID NO: 12128 - RNA, 17 nt, Artificial Sequence
  Synthetic
ucggcgcugaaucccgc

SEQ ID NO: 12129 - RNA, 17 nt, Artificial Sequence
  Synthetic
agaugauaaaacgccgc

SEQ ID NO: 12130 - RNA, 17 nt, Artificial Sequence
  Synthetic
uccgcgggauucagcgc

SEQ ID NO: 12131 - RNA, 17 nt, Artificial Sequence
  Synthetic
uuacgucccgucggcgc

SEQ ID NO: 12132 - RNA, 17 nt, Artificial Sequence
  Synthetic
agguuccacgcaugcgc

SEQ ID NO: 12133 - RNA, 17 nt, Artificial Sequence
  Synthetic
acgaaggucucaaucgc

SEQ ID NO: 12134 - RNA, 17 nt, Artificial Sequence
  Synthetic
gaacucccucgccucgc

SEQ ID NO: 12135 - RNA, 17 nt, Artificial Sequence
  Synthetic
cucaaucgccgcgucgc

SEQ ID NO: 12136 - RNA, 17 nt, Artificial Sequence
  Synthetic
cugcucguguuacaggc

SEQ ID NO: 12137 - RNA, 17 nt, Artificial Sequence
  Synthetic
cgauacagagcagaggc

SEQ ID NO: 12138 - RNA, 17 nt, Artificial Sequence
  Synthetic
uuccauggcugcuaggc

SEQ ID NO: 12139 - RNA, 17 nt, Artificial Sequence
  Synthetic
  misc_feature (4)..(4): n is a, c, g, or u
  misc_feature (7)..(7): n is a, c, g, or u
  misc_feature (15)..(15): n is a, c, g, or u
uuungcnccagaccngc

SEQ ID NO: 12140 - RNA, 17 nt, Artificial Sequence
  Synthetic
gaguuggcuuugaaugc

SEQ ID NO: 12141 - RNA, 17 nt, Artificial Sequence
  Synthetic
ucauccucaggccaugc

SEQ ID NO: 12142 - RNA, 17 nt, Artificial Sequence
  Synthetic
gcugccuuccugacugc

SEQ ID NO: 12143 - RNA, 17 nt, Artificial Sequence
  Synthetic
cugccgauccauacugc

SEQ ID NO: 12144 - RNA, 17 nt, Artificial Sequence
  Synthetic
cuuugugucuccucugc

SEQ ID NO: 12145 - RNA, 17 nt, Artificial Sequence
  Synthetic
ucgcuggaugugucugc

SEQ ID NO: 12146 - RNA, 17 nt, Artificial Sequence
  Synthetic
ucggucguugacauugc

SEQ ID NO: 12147 - RNA, 17 nt, Artificial Sequence
  Synthetic
cugugccaaguguuugc

SEQ ID NO: 12148 - RNA, 17 nt, Artificial Sequence
  Synthetic
  misc_feature (16)..(16): n is a, c, g, or u
uucuguccccaauccnc

SEQ ID NO: 12149 - RNA, 17 nt, Artificial Sequence
  Synthetic
auaugggccuaaaaauc

SEQ ID NO: 12150 - RNA, 17 nt, Artificial Sequence
  Synthetic
  misc_feature (10)..(10): n is a, c, g, or u
cuuggccaunggccauc

SEQ ID NO: 12151 - RNA, 17 nt, Artificial Sequence
  Synthetic
  misc_feature (7)..(7): n is a, c, g, or u
  misc_feature (13)..(13): n is a, c, g, or u
ucuaagnaaacanuauc

SEQ ID NO: 12152 - RNA, 17 nt, Artificial Sequence
  Synthetic
gcauucaaagccaacuc

SEQ ID NO: 12153 - RNA, 17 nt, Artificial Sequence
  Synthetic
accacgagucuagacuc

SEQ ID NO: 12154 - RNA, 17 nt, Artificial Sequence
  Synthetic
  misc_feature (7)..(7): n is a, c, g, or u
guacagngcccugacuc

SEQ ID NO: 12155 - RNA, 17 nt, Artificial Sequence
  Synthetic
guggagcccucaggcuc

SEQ ID NO: 12156 - RNA, 17 nt, Artificial Sequence
  Synthetic
aacagugagcccugcuc

SEQ ID NO: 12157 - RNA, 17 nt, Artificial Sequence
  Synthetic
  misc_feature (2)..(2): n is a, c, g, or u
anagaaggaaagaaguc

SEQ ID NO: 12158 - RNA, 17 nt, Artificial Sequence
  Synthetic
uucaagaucccagaguc

SEQ ID NO: 12159 - RNA, 17 nt, Artificial Sequence
  Synthetic
ggcacagacggggaguc

SEQ ID NO: 12160 - RNA, 17 nt, Artificial Sequence
  Synthetic
uacgcggacuccccguc

SEQ ID NO: 12161 - RNA, 17 nt, Artificial Sequence
  Synthetic
uuuguuuacgucccguc

SEQ ID NO: 12162 - RNA, 17 nt, Artificial Sequence
  Synthetic
ccccgggaggggucguc

SEQ ID NO: 12163 - RNA, 17 nt, Artificial Sequence
  Synthetic
cgauugagaccuucguc

SEQ ID NO: 12164 - RNA, 17 nt, Artificial Sequence
  Synthetic
  misc_feature (11)..(11): n is a, c, g, or u
ucggcaacggncugguc

SEQ ID NO: 12165 - RNA, 17 nt, Artificial Sequence
  Synthetic
uuaucgcuggauguguc

SEQ ID NO: 12166 - RNA, 17 nt, Artificial Sequence
  Synthetic
  misc_feature (12)..(12): n is a, c, g, or u
aaaccacaauanuuguc

SEQ ID NO: 12167 - RNA, 17 nt, Artificial Sequence
  Synthetic
ggucguccgcgggauuc

SEQ ID NO: 12168 - RNA, 17 nt, Artificial Sequence
  Synthetic
acucaggcaagcuauuc

SEQ ID NO: 12169 - RNA, 17 nt, Artificial Sequence
  Synthetic
cucucuuuuuugccuuc

SEQ ID NO: 12170 - RNA, 17 nt, Artificial Sequence
  Synthetic
aaagaauuuggagcuuc

SEQ ID NO: 12171 - RNA, 17 nt, Artificial Sequence
  Synthetic
ccgagauugagaucuuc

SEQ ID NO: 12172 - RNA, 17 nt, Artificial Sequence
  Synthetic
caacgggguaaagguuc

SEQ ID NO: 12173 - RNA, 17 nt, Artificial Sequence
  Synthetic
acuagugccauuuguuc

SEQ ID NO: 12174 - RNA, 17 nt, Artificial Sequence
  Synthetic
  misc_feature (11)..(11): n is a, c, g, or u
guaacagcggnauaaag

SEQ ID NO: 12175 - RNA, 17 nt, Artificial Sequence
  Synthetic
uaguaaacugagccaag

SEQ ID NO: 12176 - RNA, 17 nt, Artificial Sequence
  Synthetic
  misc_feature (4)..(5): n is a, c, g, or u
  misc_feature (9)..(9): n is a, c, g, or u
uacnncagncggagaag

SEQ ID NO: 12177 - RNA, 17 nt, Artificial Sequence
  Synthetic
gacgugcagaggugaag

SEQ ID NO: 12178 - RNA, 17 nt, Artificial Sequence
  Synthetic
  misc_feature (1)..(1): n is a, c, g, or u
  misc_feature (3)..(3): n is a, c, g, or u
nunucuccaccucuaag

SEQ ID NO: 12179 - RNA, 17 nt, Artificial Sequence
  Synthetic
uaucccaugaaguuaag

SEQ ID NO: 12180 - RNA, 17 nt, Artificial Sequence
  Synthetic
aacugaaagccagacag

SEQ ID NO: 12181 - RNA, 17 nt, Artificial Sequence
  Synthetic
ggccaagccccaaccag

SEQ ID NO: 12182 - RNA, 17 nt, Artificial Sequence
  Synthetic
gccgcagacacauccag

SEQ ID NO: 12183 - RNA, 17 nt, Artificial Sequence
  Synthetic
gaagauccagcauccag

SEQ ID NO: 12184 - RNA, 17 nt, Artificial Sequence
  Synthetic
ucuauaugcaggaggag

SEQ ID NO: 12185 - RNA, 17 nt, Artificial Sequence
  Synthetic
caaaauaccuaugggag

SEQ ID NO: 12186 - RNA, 17 nt, Artificial Sequence
  Synthetic
cgccaacaaggugggag

SEQ ID NO: 12187 - RNA, 17 nt, Artificial Sequence
  Synthetic
  misc_feature (7)..(7): n is a, c, g, or u
uuuggunucuuuuggag

SEQ ID NO: 12188 - RNA, 17 nt, Artificial Sequence
  Synthetic
uuguacagcaacaugag

SEQ ID NO: 12189 - RNA, 17 nt, Artificial Sequence
  Synthetic
  misc_feature (8)..(8): n is a, c, g, or u
gacaacanguuggugag

SEQ ID NO: 12190 - RNA, 17 nt, Artificial Sequence
  Synthetic
  misc_feature (13)..(13): n is a, c, g, or u
acuguguguuuanugag

SEQ ID NO: 12191 - RNA, 17 nt, Artificial Sequence
  Synthetic
  misc_feature (1)..(1): n is a, c, g, or u
nccccuagaaaauugag

SEQ ID NO: 12192 - RNA, 17 nt, Artificial Sequence
  Synthetic
  misc_feature (15)..(15): n is a, c, g, or u
ugucuuacuuuuggnag

SEQ ID NO: 12193 - RNA, 17 nt, Artificial Sequence
  Synthetic
uuuggccaagacacacg

SEQ ID NO: 12194 - RNA, 17 nt, Artificial Sequence
  Synthetic
gggauucagcgccgacg

SEQ ID NO: 12195 - RNA, 17 nt, Artificial Sequence
  Synthetic
ucgcauggagaccaccg

SEQ ID NO: 12196 - RNA, 17 nt, Artificial Sequence
  Synthetic
  misc_feature (9)..(9): n is a, c, g, or u
ucucaucunccggaccg

SEQ ID NO: 12197 - RNA, 17 nt, Artificial Sequence
  Synthetic
  misc_feature (9)..(9): n is a, c, g, or u
ucuaggggnaacacccg

SEQ ID NO: 12198 - RNA, 17 nt, Artificial Sequence
  Synthetic
uaacauugagauucccg

SEQ ID NO: 12199 - RNA, 17 nt, Artificial Sequence
  Synthetic
ccgggaggggucguccg

SEQ ID NO: 12200 - RNA, 17 nt, Artificial Sequence
  Synthetic
  misc_feature (2)..(3): n is a, c, g, or u
  misc_feature (7)..(7): n is a, c, g, or u
cnncagncggagaagcg

SEQ ID NO: 12201 - RNA, 17 nt, Artificial Sequence
  Synthetic
gggaggggucguccgcg

SEQ ID NO: 12202 - RNA, 17 nt, Artificial Sequence
  Synthetic
caacuggauccugcgcg

SEQ ID NO: 12203 - RNA, 17 nt, Artificial Sequence
  Synthetic
ccuucgucugcgaggcg

SEQ ID NO: 12204 - RNA, 17 nt, Artificial Sequence
  Synthetic
ggccuuguaaguuggcg

SEQ ID NO: 12205 - RNA, 17 nt, Artificial Sequence
  Synthetic
gccaacuggauccugcg

SEQ ID NO: 12206 - RNA, 17 nt, Artificial Sequence
  Synthetic
  misc_feature (3)..(3): n is a, c, g, or u
  misc_feature (12)..(12): n is a, c, g, or u
aangauguauanuugcg

SEQ ID NO: 12207 - RNA, 17 nt, Artificial Sequence
  Synthetic
  misc_feature (4)..(4): n is a, c, g, or u
  misc_feature (7)..(7): n is a, c, g, or u
uggngcnaaacucaucg

SEQ ID NO: 12208 - RNA, 17 nt, Artificial Sequence
  Synthetic
agaagaucucaaucucg

SEQ ID NO: 12209 - RNA, 17 nt, Artificial Sequence
  Synthetic
  misc_feature (13)..(13): n is a, c, g, or u
uucuuuccuucunuucg

SEQ ID NO: 12210 - RNA, 17 nt, Artificial Sequence
  Synthetic
gccggacgccaacaagg

SEQ ID NO: 12211 - RNA, 17 nt, Artificial Sequence
  Synthetic
  misc_feature (4)..(4): n is a, c, g, or u
acanacucuuuggaagg

SEQ ID NO: 12212 - RNA, 17 nt, Artificial Sequence
  Synthetic
  misc_feature (10)..(10): n is a, c, g, or u
uccuuggacncauaagg

SEQ ID NO: 12213 - RNA, 17 nt, Artificial Sequence
  Synthetic
caguaaaugaaaacagg

SEQ ID NO: 12214 - RNA, 17 nt, Artificial Sequence
  Synthetic
ccugcucguguuacagg

SEQ ID NO: 12215 - RNA, 17 nt, Artificial Sequence
  Synthetic
agaugauuaggcagagg

SEQ ID NO: 12216 - RNA, 17 nt, Artificial Sequence
  Synthetic
guauggaucggcagagg

SEQ ID NO: 12217 - RNA, 17 nt, Artificial Sequence
  Synthetic
caugcgacgugcagagg

SEQ ID NO: 12218 - RNA, 17 nt, Artificial Sequence
  Synthetic
guccgcguaaagagagg

SEQ ID NO: 12219 - RNA, 17 nt, Artificial Sequence
  Synthetic
ggucuauaugcaggagg

SEQ ID NO: 12220 - RNA, 17 nt, Artificial Sequence
  Synthetic
agugccguauggugagg

SEQ ID NO: 12221 - RNA, 17 nt, Artificial Sequence
  Synthetic
ggaguucuucuucuagg

SEQ ID NO: 12222 - RNA, 17 nt, Artificial Sequence
  Synthetic
guaccgaccgaccacgg

SEQ ID NO: 12223 - RNA, 17 nt, Artificial Sequence
  Synthetic
ggugaacaauguuccgg

SEQ ID NO: 12224 - RNA, 17 nt, Artificial Sequence
  Synthetic
gaucuucugcgacgcgg

SEQ ID NO: 12225 - RNA, 17 nt, Artificial Sequence
  Synthetic
  misc_feature (9)..(10): n is a, c, g, or u
  misc_feature (14)..(14): n is a, c, g, or u
gucgguacnncagncgg

SEQ ID NO: 12226 - RNA, 17 nt, Artificial Sequence
  Synthetic
ccccaagcggccccggg

SEQ ID NO: 12227 - RNA, 17 nt, Artificial Sequence
  Synthetic
  misc_feature (4)..(5): n is a, c, g, or u
ucannccuccccauggg

SEQ ID NO: 12228 - RNA, 17 nt, Artificial Sequence
  Synthetic
cgcaaaauaccuauggg

SEQ ID NO: 12229 - RNA, 17 nt, Artificial Sequence
  Synthetic
gaaucuagccaccuggg

SEQ ID NO: 12230 - RNA, 17 nt, Artificial Sequence
  Synthetic
gaaagccagacaguggg

SEQ ID NO: 12231 - RNA, 17 nt, Artificial Sequence
  Synthetic
gacgccaacaagguggg

SEQ ID NO: 12232 - RNA, 17 nt, Artificial Sequence
  Synthetic
cccuguaccgaacaugg

SEQ ID NO: 12233 - RNA, 17 nt, Artificial Sequence
  Synthetic
cucugcacgucgcaugg

SEQ ID NO: 12234 - RNA, 17 nt, Artificial Sequence
  Synthetic
accucgaaaaggcaugg

SEQ ID NO: 12235 - RNA, 17 nt, Artificial Sequence
  Synthetic
  misc_feature (2)..(2): n is a, c, g, or u
anaaaacaaaaagaugg

SEQ ID NO: 12236 - RNA, 17 nt, Artificial Sequence
  Synthetic
uguucccaagaauaugg

SEQ ID NO: 12237 - RNA, 17 nt, Artificial Sequence
  Synthetic
aucuuaucgaagacugg

SEQ ID NO: 12238 - RNA, 17 nt, Artificial Sequence
  Synthetic
  misc_feature (1)..(1): n is a, c, g, or u
nguuggugagugacugg

SEQ ID NO: 12239 - RNA, 17 nt, Artificial Sequence
  Synthetic
aaguugcauggugcugg

SEQ ID NO: 12240 - RNA, 17 nt, Artificial Sequence
  Synthetic
  misc_feature (6)..(6): n is a, c, g, or u
gugucncuuagaggugg

SEQ ID NO: 12241 - RNA, 17 nt, Artificial Sequence
  Synthetic
  misc_feature (10)..(10): n is a, c, g, or u
gaaucccagnggauugg

SEQ ID NO: 12242 - RNA, 17 nt, Artificial Sequence
  Synthetic
ccaugggggacuguugg

SEQ ID NO: 12243 - RNA, 17 nt, Artificial Sequence
  Synthetic
aagcuauucuguguugg

SEQ ID NO: 12244 - RNA, 17 nt, Artificial Sequence
  Synthetic
  misc_feature (9)..(9): n is a, c, g, or u
uauuuggunucuuuugg

SEQ ID NO: 12245 - RNA, 17 nt, Artificial Sequence
  Synthetic
  misc_feature (16)..(16): n is a, c, g, or u
aguaggacaugaacang

SEQ ID NO: 12246 - RNA, 17 nt, Artificial Sequence
  Synthetic
  misc_feature (16)..(16): n is a, c, g, or u
ccuugggcagguuccng

SEQ ID NO: 12247 - RNA, 17 nt, Artificial Sequence
  Synthetic
aaguaagacaggaaaug

SEQ ID NO: 12248 - RNA, 17 nt, Artificial Sequence
  Synthetic
uuuuguacagcaacaug

SEQ ID NO: 12249 - RNA, 17 nt, Artificial Sequence
  Synthetic
  misc_feature (6)..(7): n is a, c, g, or u
guucannccuccccaug

SEQ ID NO: 12250 - RNA, 17 nt, Artificial Sequence
  Synthetic
ucacgguggucuccaug

SEQ ID NO: 12251 - RNA, 17 nt, Artificial Sequence
  Synthetic
  misc_feature (2)..(2): n is a, c, g, or u
unggccaucagcgcaug

SEQ ID NO: 12252 - RNA, 17 nt, Artificial Sequence
  Synthetic
auucccuuaacuucaug

SEQ ID NO: 12253 - RNA, 17 nt, Artificial Sequence
  Synthetic
  misc_feature (12)..(12): n is a, c, g, or u
acacgguccggnagaug

SEQ ID NO: 12254 - RNA, 17 nt, Artificial Sequence
  Synthetic
ugcauggccugaggaug

SEQ ID NO: 12255 - RNA, 17 nt, Artificial Sequence
  Synthetic
cccaagaugaugggaug

SEQ ID NO: 12256 - RNA, 17 nt, Artificial Sequence
  Synthetic
gaaagcccaagaugaug

SEQ ID NO: 12257 - RNA, 17 nt, Artificial Sequence
  Synthetic
uccuaggaguccugaug

SEQ ID NO: 12258 - RNA, 17 nt, Artificial Sequence
  Synthetic
gcauacuucaaagacug

SEQ ID NO: 12259 - RNA, 17 nt, Artificial Sequence
  Synthetic
cuggagauuugggacug

SEQ ID NO: 12260 - RNA, 17 nt, Artificial Sequence
  Synthetic
augaaucuagccaccug

SEQ ID NO: 12261 - RNA, 17 nt, Artificial Sequence
  Synthetic
  misc_feature (5)..(5): n is a, c, g, or u
aguangcccugagccug

SEQ ID NO: 12262 - RNA, 17 nt, Artificial Sequence
  Synthetic
acagaauagcuugccug

SEQ ID NO: 12263 - RNA, 17 nt, Artificial Sequence
  Synthetic
cugccaacuggauccug

SEQ ID NO: 12264 - RNA, 17 nt, Artificial Sequence
  Synthetic
  misc_feature (14)..(14): n is a, c, g, or u
cuguccccaauccncug

SEQ ID NO: 12265 - RNA, 17 nt, Artificial Sequence
  Synthetic
  misc_feature (5)..(5): n is a, c, g, or u
acagngcccugacucug

SEQ ID NO: 12266 - RNA, 17 nt, Artificial Sequence
  Synthetic
gagauugagaucuucug

SEQ ID NO: 12267 - RNA, 17 nt, Artificial Sequence
  Synthetic
cugaaagccagacagug

SEQ ID NO: 12268 - RNA, 17 nt, Artificial Sequence
  Synthetic
ccaagccccaaccagug

SEQ ID NO: 12269 - RNA, 17 nt, Artificial Sequence
  Synthetic
uauaugcaggaggagug

SEQ ID NO: 12270 - RNA, 17 nt, Artificial Sequence
  Synthetic
  misc_feature (8)..(8): n is a, c, g, or u
cuuggacncauaaggug

SEQ ID NO: 12271 - RNA, 17 nt, Artificial Sequence
  Synthetic
aucuagccaccugggug

SEQ ID NO: 12272 - RNA, 17 nt, Artificial Sequence
  Synthetic
  misc_feature (10)..(10): n is a, c, g, or u
aggacaacanguuggug

SEQ ID NO: 12273 - RNA, 17 nt, Artificial Sequence
  Synthetic
  misc_feature (14)..(14): n is a, c, g, or u
uugggcagguuccngug

SEQ ID NO: 12274 - RNA, 17 nt, Artificial Sequence
  Synthetic
ggccaguuguccuugug

SEQ ID NO: 12275 - RNA, 17 nt, Artificial Sequence
  Synthetic
  misc_feature (15)..(15): n is a, c, g, or u
agacuguguguuuanug

SEQ ID NO: 12276 - RNA, 17 nt, Artificial Sequence
  Synthetic
  misc_feature (15)..(15): n is a, c, g, or u
caucuuuuuguuuunug

SEQ ID NO: 12277 - RNA, 17 nt, Artificial Sequence
  Synthetic
  misc_feature (4)..(4): n is a, c, g, or u
agunugucaacgaauug

SEQ ID NO: 12278 - RNA, 17 nt, Artificial Sequence
  Synthetic
aaggaauacuaacauug

SEQ ID NO: 12279 - RNA, 17 nt, Artificial Sequence
  Synthetic
ucagaaaauccagauug

SEQ ID NO: 12280 - RNA, 17 nt, Artificial Sequence
  Synthetic
ugagauucccgagauug

SEQ ID NO: 12281 - RNA, 17 nt, Artificial Sequence
  Synthetic
cugcgacgcggcgauug

SEQ ID NO: 12282 - RNA, 17 nt, Artificial Sequence
  Synthetic
cuccaagcugugccuug

SEQ ID NO: 12283 - RNA, 17 nt, Artificial Sequence
  Synthetic
gggucaccauauucuug

SEQ ID NO: 12284 - RNA, 17 nt, Artificial Sequence
  Synthetic
  misc_feature (1)..(1): n is a, c, g, or u
nugagugggaggaguug

SEQ ID NO: 12285 - RNA, 17 nt, Artificial Sequence
  Synthetic
  misc_feature (5)..(5): n is a, c, g, or u
  misc_feature (14)..(14): n is a, c, g, or u
gaaangauguauanuug

SEQ ID NO: 12286 - RNA, 17 nt, Artificial Sequence
  Synthetic
  misc_feature (14)..(14): n is a, c, g, or u
uggaugauguggunuug

SEQ ID NO: 12287 - RNA, 17 nt, Artificial Sequence
  Synthetic
  misc_feature (4)..(4): n is a, c, g, or u
  misc_feature (10)..(10): n is a, c, g, or u
uagnuguaancaauuug

SEQ ID NO: 12288 - RNA, 17 nt, Artificial Sequence
  Synthetic
gagugacuggagauuug

SEQ ID NO: 12289 - RNA, 17 nt, Artificial Sequence
  Synthetic
cguagcgccucauuuug

SEQ ID NO: 12290 - RNA, 17 nt, Artificial Sequence
  Synthetic
cucccauagguauuuug

SEQ ID NO: 12291 - RNA, 17 nt, Artificial Sequence
  Synthetic
  misc_feature (6)..(6): n is a, c, g, or u
  misc_feature (17)..(17): n is a, c, g, or u
ucgagnagaucucgaan

SEQ ID NO: 12292 - RNA, 17 nt, Artificial Sequence
  Synthetic
  misc_feature (17)..(17): n is a, c, g, or u
caccgugaacgcccacn

SEQ ID NO: 12293 - RNA, 17 nt, Artificial Sequence
  Synthetic
  misc_feature (17)..(17): n is a, c, g, or u
aucauuacuuccagacn

SEQ ID NO: 12294 - RNA, 17 nt, Artificial Sequence
  Synthetic
  misc_feature (5)..(5): n is a, c, g, or u
  misc_feature (17)..(17): n is a, c, g, or u
cgggnaagaaucccagn

SEQ ID NO: 12295 - RNA, 17 nt, Artificial Sequence
  Synthetic
  misc_feature (17)..(17): n is a, c, g, or u
cagaggcggugucgagn

SEQ ID NO: 12296 - RNA, 17 nt, Artificial Sequence
  Synthetic
  misc_feature (17)..(17): n is a, c, g, or u
agugcacacgguccggn

SEQ ID NO: 12297 - RNA, 17 nt, Artificial Sequence
  Synthetic
  misc_feature (16)..(17): n is a, c, g, or u
ucccccauggggaggnn

SEQ ID NO: 12298 - RNA, 17 nt, Artificial Sequence
  Synthetic
  misc_feature (17)..(17): n is a, c, g, or u
uguuuucauuuacugun

SEQ ID NO: 12299 - RNA, 17 nt, Artificial Sequence
  Synthetic
  misc_feature (17)..(17): n is a, c, g, or u
aauauuuaguaacauun

SEQ ID NO: 12300 - RNA, 17 nt, Artificial Sequence
  Synthetic
  misc_feature (6)..(6): n is a, c, g, or u
aaagunugucaacgaau

SEQ ID NO: 12301 - RNA, 17 nt, Artificial Sequence
  Synthetic
  misc_feature (5)..(5): n is a, c, g, or u
cuuungggcauggacau

SEQ ID NO: 12302 - RNA, 17 nt, Artificial Sequence
  Synthetic
ccccaacagucccccau

SEQ ID NO: 12303 - RNA, 17 nt, Artificial Sequence
  Synthetic
  misc_feature (7)..(8): n is a, c, g, or u
gguucannccuccccau

SEQ ID NO: 12304 - RNA, 17 nt, Artificial Sequence
  Synthetic
cacagccuagcagccau

SEQ ID NO: 12305 - RNA, 17 nt, Artificial Sequence
  Synthetic
aaaccucgaaaaggcau

SEQ ID NO: 12306 - RNA, 17 nt, Artificial Sequence
  Synthetic
  misc_feature (11)..(11): n is a, c, g, or u
ggguggcuuungggcau

SEQ ID NO: 12307 - RNA, 17 nt, Artificial Sequence
  Synthetic
aggugaaaaaguugcau

SEQ ID NO: 12308 - RNA, 17 nt, Artificial Sequence
  Synthetic
  misc_feature (6)..(6): n is a, c, g, or u
  misc_feature (9)..(9): n is a, c, g, or u
ucuggngcnaaacucau

SEQ ID NO: 12309 - RNA, 17 nt, Artificial Sequence
  Synthetic
  misc_feature (4)..(4): n is a, c, g, or u
ucanaaaacaaaaagau

SEQ ID NO: 12310 - RNA, 17 nt, Artificial Sequence
  Synthetic
ccagucuucgauaagau

SEQ ID NO: 12311 - RNA, 17 nt, Artificial Sequence
  Synthetic
ggaaguguugauaagau

SEQ ID NO: 12312 - RNA, 17 nt, Artificial Sequence
  Synthetic
acucagaaaauccagau

SEQ ID NO: 12313 - RNA, 17 nt, Artificial Sequence
  Synthetic
  misc_feature (1)..(1): n is a, c, g, or u
  misc_feature (13)..(13): n is a, c, g, or u
naagaaucccagnggau

SEQ ID NO: 12314 - RNA, 17 nt, Artificial Sequence
  Synthetic
aggguccaacugaugau

SEQ ID NO: 12315 - RNA, 17 nt, Artificial Sequence
  Synthetic
cuuguucccaagaauau

SEQ ID NO: 12316 - RNA, 17 nt, Artificial Sequence
  Synthetic
gcacuccuccugcauau

SEQ ID NO: 12317 - RNA, 17 nt, Artificial Sequence
  Synthetic
cuggcuuucaguuauau

SEQ ID NO: 12318 - RNA, 17 nt, Artificial Sequence
  Synthetic
  misc_feature (12)..(12): n is a, c, g, or u
ccuguaaacagnccuau

SEQ ID NO: 12319 - RNA, 17 nt, Artificial Sequence
  Synthetic
uaggaguuccgcaguau

SEQ ID NO: 12320 - RNA, 17 nt, Artificial Sequence
  Synthetic
uugccugagugccguau

SEQ ID NO: 12321 - RNA, 17 nt, Artificial Sequence
  Synthetic
ucuagacucugugguau

SEQ ID NO: 12322 - RNA, 17 nt, Artificial Sequence
  Synthetic
ccgccucugcucuguau

SEQ ID NO: 12323 - RNA, 17 nt, Artificial Sequence
  Synthetic
  misc_feature (14)..(14): n is a, c, g, or u
aaaaaucagacaanuau

SEQ ID NO: 12324 - RNA, 17 nt, Artificial Sequence
  Synthetic
cauaucgucaaucuuau

SEQ ID NO: 12325 - RNA, 17 nt, Artificial Sequence
  Synthetic
aggcugugcugccaacu

SEQ ID NO: 12326 - RNA, 17 nt, Artificial Sequence
  Synthetic
caaucuuaucgaagacu

SEQ ID NO: 12327 - RNA, 17 nt, Artificial Sequence
  Synthetic
accacagagucuagacu

SEQ ID NO: 12328 - RNA, 17 nt, Artificial Sequence
  Synthetic
ucuuggcucaguuuacu

SEQ ID NO: 12329 - RNA, 17 nt, Artificial Sequence
  Synthetic
guuggucuuccaaaccu

SEQ ID NO: 12330 - RNA, 17 nt, Artificial Sequence
  Synthetic
ccucuuaugcaagaccu

SEQ ID NO: 12331 - RNA, 17 nt, Artificial Sequence
  Synthetic
aaacgggcaacauaccu

SEQ ID NO: 12332 - RNA, 17 nt, Artificial Sequence
  Synthetic
  misc_feature (12)..(12): n is a, c, g, or u
acacggguguunccccu

SEQ ID NO: 12333 - RNA, 17 nt, Artificial Sequence
  Synthetic
  misc_feature (3)..(3): n is a, c, g, or u
gangaggcagguccccu

SEQ ID NO: 12334 - RNA, 17 nt, Artificial Sequence
  Synthetic
cugacuacuaauucccu

SEQ ID NO: 12335 - RNA, 17 nt, Artificial Sequence
  Synthetic
gccuccaagcugugccu

SEQ ID NO: 12336 - RNA, 17 nt, Artificial Sequence
  Synthetic
  misc_feature (5)..(5): n is a, c, g, or u
uggunguugaugauccu

SEQ ID NO: 12337 - RNA, 17 nt, Artificial Sequence
  Synthetic
guccggccaguuguccu

SEQ ID NO: 12338 - RNA, 17 nt, Artificial Sequence
  Synthetic
ccccucccggggccgcu

SEQ ID NO: 12339 - RNA, 17 nt, Artificial Sequence
  Synthetic
uuguccugguuaucgcu

SEQ ID NO: 12340 - RNA, 17 nt, Artificial Sequence
  Synthetic
ggcacagcuuggaggcu

SEQ ID NO: 12341 - RNA, 17 nt, Artificial Sequence
  Synthetic
uucccacccagguggcu

SEQ ID NO: 12342 - RNA, 17 nt, Artificial Sequence
  Synthetic
cuaauucccuggaugcu

SEQ ID NO: 12343 - RNA, 17 nt, Artificial Sequence
  Synthetic
cuccuaggaccccugcu

SEQ ID NO: 12344 - RNA, 17 nt, Artificial Sequence
  Synthetic
  misc_feature (2)..(2): n is a, c, g, or u
cncuguacuuuccugcu

SEQ ID NO: 12345 - RNA, 17 nt, Artificial Sequence
  Synthetic
aaaaguugcauggugcu

SEQ ID NO: 12346 - RNA, 17 nt, Artificial Sequence
  Synthetic
  misc_feature (4)..(4): n is a, c, g, or u
  misc_feature (15)..(15): n is a, c, g, or u
ucunuucgagaucuncu

SEQ ID NO: 12347 - RNA, 17 nt, Artificial Sequence
  Synthetic
gguugaggucccaaucu

SEQ ID NO: 12348 - RNA, 17 nt, Artificial Sequence
  Synthetic
gcagaagaucucaaucu

SEQ ID NO: 12349 - RNA, 17 nt, Artificial Sequence
  Synthetic
uucccaucccaucaucu

SEQ ID NO: 12350 - RNA, 17 nt, Artificial Sequence
  Synthetic
  misc_feature (11)..(11): n is a, c, g, or u
cggugucgagnagaucu

SEQ ID NO: 12351 - RNA, 17 nt, Artificial Sequence
  Synthetic
cccugacucugggaucu

SEQ ID NO: 12352 - RNA, 17 nt, Artificial Sequence
  Synthetic
  misc_feature (13)..(13): n is a, c, g, or u
gauuaacuacauncucu

SEQ ID NO: 12353 - RNA, 17 nt, Artificial Sequence
  Synthetic
acaauaccacagagucu

SEQ ID NO: 12354 - RNA, 17 nt, Artificial Sequence
  Synthetic
aaguccaccacgagucu

SEQ ID NO: 12355 - RNA, 17 nt, Artificial Sequence
  Synthetic
  misc_feature (12)..(13): n is a, c, g, or u
uaaauaaugucnngucu

SEQ ID NO: 12356 - RNA, 17 nt, Artificial Sequence
  Synthetic
gcgggucaccauauucu

SEQ ID NO: 12357 - RNA, 17 nt, Artificial Sequence
  Synthetic
gagggaguucuucuucu

SEQ ID NO: 12358 - RNA, 17 nt, Artificial Sequence
  Synthetic
uucuuguugguucuucu

SEQ ID NO: 12359 - RNA, 17 nt, Artificial Sequence
  Synthetic
  misc_feature (3)..(3): n is a, c, g, or u
ggnagagaaacuguucu

SEQ ID NO: 12360 - RNA, 17 nt, Artificial Sequence
  Synthetic
acuucucucaauuuucu

SEQ ID NO: 12361 - RNA, 17 nt, Artificial Sequence
  Synthetic
ggagcugcuggcacagu

SEQ ID NO: 12362 - RNA, 17 nt, Artificial Sequence
  Synthetic
acugaaagccagacagu

SEQ ID NO: 12363 - RNA, 17 nt, Artificial Sequence
  Synthetic
gccaagccccaaccagu

SEQ ID NO: 12364 - RNA, 17 nt, Artificial Sequence
  Synthetic
uccucaggccaugcagu

SEQ ID NO: 12365 - RNA, 17 nt, Artificial Sequence
  Synthetic
guuccuugagcaggagu

SEQ ID NO: 12366 - RNA, 17 nt, Artificial Sequence
  Synthetic
  misc_feature (3)..(3): n is a, c, g, or u
uanugagugggaggagu

SEQ ID NO: 12367 - RNA, 17 nt, Artificial Sequence
  Synthetic
  misc_feature (9)..(9): n is a, c, g, or u
  misc_feature (11)..(11): n is a, c, g, or u
aaagagagncnacacgu

SEQ ID NO: 12368 - RNA, 17 nt, Artificial Sequence
  Synthetic
  misc_feature (7)..(8): n is a, c, g, or u
uuaaagnnagguaccgu

SEQ ID NO: 12369 - RNA, 17 nt, Artificial Sequence
  Synthetic
gccaucagcgcaugcgu

SEQ ID NO: 12370 - RNA, 17 nt, Artificial Sequence
  Synthetic
acagagucuagacucgu

SEQ ID NO: 12371 - RNA, 17 nt, Artificial Sequence
  Synthetic
gccucaaggucggucgu

SEQ ID NO: 12372 - RNA, 17 nt, Artificial Sequence
  Synthetic
aaagacccacaauucgu

SEQ ID NO: 12373 - RNA, 17 nt, Artificial Sequence
  Synthetic
uuuguucagugguucgu

SEQ ID NO: 12374 - RNA, 17 nt, Artificial Sequence
  Synthetic
ccccaaccagugggggu

SEQ ID NO: 12375 - RNA, 17 nt, Artificial Sequence
  Synthetic
acgcaacccccacuggu

SEQ ID NO: 12376 - RNA, 17 nt, Artificial Sequence
  Synthetic
gagucuagacucguggu

SEQ ID NO: 12377 - RNA, 17 nt, Artificial Sequence
  Synthetic
aucuugaagaguuuggu

SEQ ID NO: 12378 - RNA, 17 nt, Artificial Sequence
  Synthetic
  misc_feature (15)..(15): n is a, c, g, or u
agaguuugguggaangu

SEQ ID NO: 12379 - RNA, 17 nt, Artificial Sequence
  Synthetic
  misc_feature (14)..(15): n is a, c, g, or u
gauauguaauuggnngu

SEQ ID NO: 12380 - RNA, 17 nt, Artificial Sequence
  Synthetic
  misc_feature (15)..(15): n is a, c, g, or u
gguccggugcuggungu

SEQ ID NO: 12381 - RNA, 17 nt, Artificial Sequence
  Synthetic
uccccaugggggacugu

SEQ ID NO: 12382 - RNA, 17 nt, Artificial Sequence
  Synthetic
guaguuuccggaagugu

SEQ ID NO: 12383 - RNA, 17 nt, Artificial Sequence
  Synthetic
  misc_feature (4)..(4): n is a, c, g, or u
ggunucuuuuggagugu

SEQ ID NO: 12384 - RNA, 17 nt, Artificial Sequence
  Synthetic
ggcaagcuauucugugu

SEQ ID NO: 12385 - RNA, 17 nt, Artificial Sequence
  Synthetic
uugcaggaggacauugu

SEQ ID NO: 12386 - RNA, 17 nt, Artificial Sequence
  Synthetic
ggcgggguuuuucuugu

SEQ ID NO: 12387 - RNA, 17 nt, Artificial Sequence
  Synthetic
  misc_feature (7)..(7): n is a, c, g, or u
  misc_feature (16)..(16): n is a, c, g, or u
uggaaangauguauanu

SEQ ID NO: 12388 - RNA, 17 nt, Artificial Sequence
  Synthetic
  misc_feature (16)..(16): n is a, c, g, or u
uaggcccauauuaacnu

SEQ ID NO: 12389 - RNA, 17 nt, Artificial Sequence
  Synthetic
  misc_feature (16)..(16): n is a, c, g, or u
uauggaugauguggunu

SEQ ID NO: 12390 - RNA, 17 nt, Artificial Sequence
  Synthetic
  misc_feature (6)..(6): n is a, c, g, or u
  misc_feature (12)..(12): n is a, c, g, or u
gauagnuguaancaauu

SEQ ID NO: 12391 - RNA, 17 nt, Artificial Sequence
  Synthetic
gugggagugggagcauu

SEQ ID NO: 12392 - RNA, 17 nt, Artificial Sequence
  Synthetic
gugagugacuggagauu

SEQ ID NO: 12393 - RNA, 17 nt, Artificial Sequence
  Synthetic
cuuccugacugccgauu

SEQ ID NO: 12394 - RNA, 17 nt, Artificial Sequence
  Synthetic
  misc_feature (12)..(12): n is a, c, g, or u
aagaaucccagnggauu

SEQ ID NO: 12395 - RNA, 17 nt, Artificial Sequence
  Synthetic
  misc_feature (7)..(7): n is a, c, g, or u
aaacagnccuauugauu

SEQ ID NO: 12396 - RNA, 17 nt, Artificial Sequence
  Synthetic
cgcaugcguggaaccuu

SEQ ID NO: 12397 - RNA, 17 nt, Artificial Sequence
  Synthetic
acuaaauauuugcccuu

SEQ ID NO: 12398 - RNA, 17 nt, Artificial Sequence
  Synthetic
caauguuaguauuccuu

SEQ ID NO: 12399 - RNA, 17 nt, Artificial Sequence
  Synthetic
cccucccggggccgcuu

SEQ ID NO: 12400 - RNA, 17 nt, Artificial Sequence
  Synthetic
auuuucugaguuggcuu

SEQ ID NO: 12401 - RNA, 17 nt, Artificial Sequence
  Synthetic
  misc_feature (8)..(8): n is a, c, g, or u
  misc_feature (14)..(14): n is a, c, g, or u
ucagauanuguuuncuu

SEQ ID NO: 12402 - RNA, 17 nt, Artificial Sequence
  Synthetic
ugcauaagaggacucuu

SEQ ID NO: 12403 - RNA, 17 nt, Artificial Sequence
  Synthetic
  misc_feature (2)..(2): n is a, c, g, or u
anuaaacacacagucuu

SEQ ID NO: 12404 - RNA, 17 nt, Artificial Sequence
  Synthetic
acaggguccccagucuu

SEQ ID NO: 12405 - RNA, 17 nt, Artificial Sequence
  Synthetic
caauuuucuuuugucuu

SEQ ID NO: 12406 - RNA, 17 nt, Artificial Sequence
  Synthetic
gaaaggccuuguaaguu

SEQ ID NO: 12407 - RNA, 17 nt, Artificial Sequence
  Synthetic
  misc_feature (3)..(3): n is a, c, g, or u
uuncccgaucaucaguu

SEQ ID NO: 12408 - RNA, 17 nt, Artificial Sequence
  Synthetic
  misc_feature (2)..(2): n is a, c, g, or u
anugagugggaggaguu

SEQ ID NO: 12409 - RNA, 17 nt, Artificial Sequence
  Synthetic
  misc_feature (13)..(13): n is a, c, g, or u
cucuggauaauangguu

SEQ ID NO: 12410 - RNA, 17 nt, Artificial Sequence
  Synthetic
cgcaacccccacugguu

SEQ ID NO: 12411 - RNA, 17 nt, Artificial Sequence
  Synthetic
  misc_feature (14)..(14): n is a, c, g, or u
uuggaggacaacanguu

SEQ ID NO: 12412 - RNA, 17 nt, Artificial Sequence
  Synthetic
  misc_feature (13)..(14): n is a, c, g, or u
auauguaauuggnnguu

SEQ ID NO: 12413 - RNA, 17 nt, Artificial Sequence
  Synthetic
ccccaugggggacuguu

SEQ ID NO: 12414 - RNA, 17 nt, Artificial Sequence
  Synthetic
gcaagcuauucuguguu

SEQ ID NO: 12415 - RNA, 17 nt, Artificial Sequence
  Synthetic
cccacucccaccuuguu

SEQ ID NO: 12416 - RNA, 17 nt, Artificial Sequence
  Synthetic
cggaaacuacuguuguu

SEQ ID NO: 12417 - RNA, 17 nt, Artificial Sequence
  Synthetic
  misc_feature (13)..(15): n is a, c, g, or u
uuuccuaaaacannnuu

SEQ ID NO: 12418 - RNA, 17 nt, Artificial Sequence
  Synthetic
  misc_feature (15)..(15): n is a, c, g, or u
auggaugauguggunuu

SEQ ID NO: 12419 - RNA, 17 nt, Artificial Sequence
  Synthetic
ugggugggaaguaauuu

SEQ ID NO: 12420 - RNA, 17 nt, Artificial Sequence
  Synthetic
auaagauaggggcauuu

SEQ ID NO: 12421 - RNA, 17 nt, Artificial Sequence
  Synthetic
cacguagcgccucauuu

SEQ ID NO: 12422 - RNA, 17 nt, Artificial Sequence
  Synthetic
cacucccauagguauuu

SEQ ID NO: 12423 - RNA, 17 nt, Artificial Sequence
  Synthetic
gugccuuggguggcuuu

SEQ ID NO: 12424 - RNA, 17 nt, Artificial Sequence
  Synthetic
  misc_feature (10)..(10): n is a, c, g, or u
uuauuuacanacucuuu

SEQ ID NO: 12425 - RNA, 17 nt, Artificial Sequence
  Synthetic
acgaauugugggucuuu

SEQ ID NO: 12426 - RNA, 17 nt, Artificial Sequence
  Synthetic
gggaucuugaagaguuu

SEQ ID NO: 12427 - RNA, 17 nt, Artificial Sequence
  Synthetic
augccuuuucgagguuu

SEQ ID NO: 12428 - RNA, 17 nt, Artificial Sequence
  Synthetic
cgaauugugggucuuuu

SEQ ID NO: 12429 - RNA, 20 nt, Artificial Sequence
  Synthetic
  misc_feature (11)..(11): n is a, c, g, or u
uaaacccucanaaaacaaaa

SEQ ID NO: 12430 - RNA, 20 nt, Artificial Sequence
  Synthetic
gccgacgggacguaaacaaa

SEQ ID NO: 12431 - RNA, 20 nt, Artificial Sequence
  Synthetic
aauguauacccaaagacaaa

SEQ ID NO: 12432 - RNA, 20 nt, Artificial Sequence
  Synthetic
uccuggaauuagaggacaaa

SEQ ID NO: 12433 - RNA, 20 nt, Artificial Sequence
  Synthetic
  misc_feature (8)..(8): n is a, c, g, or u
aaggggcngcaaaccccaaa

SEQ ID NO: 12434 - RNA, 20 nt, Artificial Sequence
  Synthetic
gugcgaauccacacuccaaa

SEQ ID NO: 12435 - RNA, 20 nt, Artificial Sequence
  Synthetic
caacaauguccuccugcaaa

SEQ ID NO: 12436 - RNA, 20 nt, Artificial Sequence
  Synthetic
  misc_feature (1)..(1): n is a, c, g, or u
nccaaaaguaagacaggaaa

SEQ ID NO: 12437 - RNA, 20 nt, Artificial Sequence
  Synthetic
ugcaaaugaaugucaggaaa

SEQ ID NO: 12438 - RNA, 20 nt, Artificial Sequence
  Synthetic
cagccuagcagccauggaaa

SEQ ID NO: 12439 - RNA, 20 nt, Artificial Sequence
  Synthetic
  misc_feature (5)..(5): n is a, c, g, or u
  misc_feature (14)..(14): n is a, c, g, or u
  misc_feature (17)..(17): n is a, c, g, or u
gauanccacauugngunaaa

SEQ ID NO: 12440 - RNA, 20 nt, Artificial Sequence
  Synthetic
  misc_feature (6)..(6): n is a, c, g, or u
  misc_feature (12)..(12): n is a, c, g, or u
gugggnccccunacaguaaa

SEQ ID NO: 12441 - RNA, 20 nt, Artificial Sequence
  Synthetic
aacuggccggacgccaacaa

SEQ ID NO: 12442 - RNA, 20 nt, Artificial Sequence
  Synthetic
  misc_feature (15)..(15): n is a, c, g, or u
ugggaccucaacccncacaa

SEQ ID NO: 12443 - RNA, 20 nt, Artificial Sequence
  Synthetic
ccuacagccuccuaguacaa

SEQ ID NO: 12444 - RNA, 20 nt, Artificial Sequence
  Synthetic
ggguuuaaauguauacccaa

SEQ ID NO: 12445 - RNA, 20 nt, Artificial Sequence
  Synthetic
  misc_feature (14)..(14): n is a, c, g, or u
uucccaccuuaugnguccaa

SEQ ID NO: 12446 - RNA, 20 nt, Artificial Sequence
  Synthetic
  misc_feature (6)..(6): n is a, c, g, or u
accagnccguugccgagcaa

SEQ ID NO: 12447 - RNA, 20 nt, Artificial Sequence
  Synthetic
  misc_feature (12)..(12): n is a, c, g, or u
  misc_feature (15)..(15): n is a, c, g, or u
acaauauguucnugnggcaa

SEQ ID NO: 12448 - RNA, 20 nt, Artificial Sequence
  Synthetic
  misc_feature (5)..(5): n is a, c, g, or u
  misc_feature (14)..(14): n is a, c, g, or u
  misc_feature (17)..(17): n is a, c, g, or u
uugcngccccuuunacncaa

SEQ ID NO: 12449 - RNA, 20 nt, Artificial Sequence
  Synthetic
  misc_feature (8)..(8): n is a, c, g, or u
ccugcacnacuccugcucaa

SEQ ID NO: 12450 - RNA, 20 nt, Artificial Sequence
  Synthetic
uggacuuucagcaaugucaa

SEQ ID NO: 12451 - RNA, 20 nt, Artificial Sequence
  Synthetic
  misc_feature (14)..(14): n is a, c, g, or u
uugauuggaaagunugucaa

SEQ ID NO: 12452 - RNA, 20 nt, Artificial Sequence
  Synthetic
gaccuugaggcauacuucaa

SEQ ID NO: 12453 - RNA, 20 nt, Artificial Sequence
  Synthetic
  misc_feature (5)..(5): n is a, c, g, or u
ccagnggauuggggacagaa

SEQ ID NO: 12454 - RNA, 20 nt, Artificial Sequence
  Synthetic
  misc_feature (5)..(5): n is a, c, g, or u
  misc_feature (16)..(16): n is a, c, g, or u
cgagnagaucucgaanagaa

SEQ ID NO: 12455 - RNA, 20 nt, Artificial Sequence
  Synthetic
  misc_feature (1)..(1): n is a, c, g, or u
  misc_feature (12)..(12): n is a, c, g, or u
nagaucucgaanagaaggaa

SEQ ID NO: 12456 - RNA, 20 nt, Artificial Sequence
  Synthetic
ucuugaagaguuugguggaa

SEQ ID NO: 12457 - RNA, 20 nt, Artificial Sequence
  Synthetic
  misc_feature (9)..(9): n is a, c, g, or u
uauuuacanacucuuuggaa

SEQ ID NO: 12458 - RNA, 20 nt, Artificial Sequence
  Synthetic
  misc_feature (6)..(6): n is a, c, g, or u
  misc_feature (15)..(15): n is a, c, g, or u
  misc_feature (18)..(18): n is a, c, g, or u
ggauanccacauugngunaa

SEQ ID NO: 12459 - RNA, 20 nt, Artificial Sequence
  Synthetic
  misc_feature (15)..(15): n is a, c, g, or u
aguauuccuuggacncauaa

SEQ ID NO: 12460 - RNA, 20 nt, Artificial Sequence
  Synthetic
  misc_feature (16)..(16): n is a, c, g, or u
aauugguaacagcggnauaa

SEQ ID NO: 12461 - RNA, 20 nt, Artificial Sequence
  Synthetic
  misc_feature (15)..(15): n is a, c, g, or u
auggacauugacccnuauaa

SEQ ID NO: 12462 - RNA, 20 nt, Artificial Sequence
  Synthetic
  misc_feature (7)..(8): n is a, c, g, or u
aaugucnngucuggaaguaa

SEQ ID NO: 12463 - RNA, 20 nt, Artificial Sequence
  Synthetic
  misc_feature (5)..(5): n is a, c, g, or u
gaccngcugcgagcaaaaca

SEQ ID NO: 12464 - RNA, 20 nt, Artificial Sequence
  Synthetic
auaguccagaagaaccaaca

SEQ ID NO: 12465 - RNA, 20 nt, Artificial Sequence
  Synthetic
ugugaggauuuuugucaaca

SEQ ID NO: 12466 - RNA, 20 nt, Artificial Sequence
  Synthetic
ucaccauauucuugggaaca

SEQ ID NO: 12467 - RNA, 20 nt, Artificial Sequence
  Synthetic
cgaauuuuggccaagacaca

SEQ ID NO: 12468 - RNA, 20 nt, Artificial Sequence
  Synthetic
  misc_feature (6)..(6): n is a, c, g, or u
ucucunccaaaaguaagaca

SEQ ID NO: 12469 - RNA, 20 nt, Artificial Sequence
  Synthetic
gaggcuugaacaguaggaca

SEQ ID NO: 12470 - RNA, 20 nt, Artificial Sequence
  Synthetic
gaugaugggaugggaauaca

SEQ ID NO: 12471 - RNA, 20 nt, Artificial Sequence
  Synthetic
ggaccccugcucguguuaca

SEQ ID NO: 12472 - RNA, 20 nt, Artificial Sequence
  Synthetic
  misc_feature (11)..(11): n is a, c, g, or u
aaucaauaggncuguuuaca

SEQ ID NO: 12473 - RNA, 20 nt, Artificial Sequence
  Synthetic
gacacauccagcgauaacca

SEQ ID NO: 12474 - RNA, 20 nt, Artificial Sequence
  Synthetic
  misc_feature (1)..(1): n is a, c, g, or u
  misc_feature (5)..(6): n is a, c, g, or u
ncugnnguaccgaccgacca

SEQ ID NO: 12475 - RNA, 20 nt, Artificial Sequence
  Synthetic
uccaaauuacuucccaccca

SEQ ID NO: 12476 - RNA, 20 nt, Artificial Sequence
  Synthetic
uccaccccaacaguccccca

SEQ ID NO: 12477 - RNA, 20 nt, Artificial Sequence
  Synthetic
aagcgggcgguagagcccca

SEQ ID NO: 12478 - RNA, 20 nt, Artificial Sequence
  Synthetic
  misc_feature (11)..(12): n is a, c, g, or u
ccaggguucannccucccca

SEQ ID NO: 12479 - RNA, 20 nt, Artificial Sequence
  Synthetic
agguauuuugcgaaagccca

SEQ ID NO: 12480 - RNA, 20 nt, Artificial Sequence
  Synthetic
  misc_feature (3)..(4): n is a, c, g, or u
acnnccaauuacauauccca

SEQ ID NO: 12481 - RNA, 20 nt, Artificial Sequence
  Synthetic
  misc_feature (9)..(9): n is a, c, g, or u
ugcuguagnucuuguuccca

SEQ ID NO: 12482 - RNA, 20 nt, Artificial Sequence
  Synthetic
gggacugcgaauuuuggcca

SEQ ID NO: 12483 - RNA, 20 nt, Artificial Sequence
  Synthetic
  misc_feature (7)..(7): n is a, c, g, or u
caacggncuggucugugcca

SEQ ID NO: 12484 - RNA, 20 nt, Artificial Sequence
  Synthetic
ggcguucacgguggucucca

SEQ ID NO: 12485 - RNA, 20 nt, Artificial Sequence
  Synthetic
ccguuuguccucuaauucca

SEQ ID NO: 12486 - RNA, 20 nt, Artificial Sequence
  Synthetic
cauauaaaggcauuaaagca

SEQ ID NO: 12487 - RNA, 20 nt, Artificial Sequence
  Synthetic
  misc_feature (12)..(12): n is a, c, g, or u
ugggaacaagancuacagca

SEQ ID NO: 12488 - RNA, 20 nt, Artificial Sequence
  Synthetic
cugaacuggagccaccagca

SEQ ID NO: 12489 - RNA, 20 nt, Artificial Sequence
  Synthetic
gaagaugaggcauagcagca

SEQ ID NO: 12490 - RNA, 20 nt, Artificial Sequence
  Synthetic
ccccgccuguaacacgagca

SEQ ID NO: 12491 - RNA, 20 nt, Artificial Sequence
  Synthetic
agacacaaagguuccacgca

SEQ ID NO: 12492 - RNA, 20 nt, Artificial Sequence
  Synthetic
  misc_feature (7)..(7): n is a, c, g, or u
ggccaunggccaucagcgca

SEQ ID NO: 12493 - RNA, 20 nt, Artificial Sequence
  Synthetic
aacaaaggacgucccgcgca

SEQ ID NO: 12494 - RNA, 20 nt, Artificial Sequence
  Synthetic
uuccaaaccucgaaaaggca

SEQ ID NO: 12495 - RNA, 20 nt, Artificial Sequence
  Synthetic
uccaagaguccucuuaugca

SEQ ID NO: 12496 - RNA, 20 nt, Artificial Sequence
  Synthetic
  misc_feature (1)..(1): n is a, c, g, or u
  misc_feature (12)..(12): n is a, c, g, or u
  misc_feature (18)..(18): n is a, c, g, or u
nguuggggcacnuugccnca

SEQ ID NO: 12497 - RNA, 20 nt, Artificial Sequence
  Synthetic
acauggagaacaucgcauca

SEQ ID NO: 12498 - RNA, 20 nt, Artificial Sequence
  Synthetic
  misc_feature (7)..(7): n is a, c, g, or u
cagcggnauaaagggacuca

SEQ ID NO: 12499 - RNA, 20 nt, Artificial Sequence
  Synthetic
ccuccaccaaucggcaguca

SEQ ID NO: 12500 - RNA, 20 nt, Artificial Sequence
  Synthetic
ccuccugcaaaugaauguca

SEQ ID NO: 12501 - RNA, 20 nt, Artificial Sequence
  Synthetic
  misc_feature (8)..(8): n is a, c, g, or u
caaaaganaccaaauauuca

SEQ ID NO: 12502 - RNA, 20 nt, Artificial Sequence
  Synthetic
gggauauucccuuaacuuca

SEQ ID NO: 12503 - RNA, 20 nt, Artificial Sequence
  Synthetic
  misc_feature (3)..(3): n is a, c, g, or u
acnuuccaccaaacucuuca

SEQ ID NO: 12504 - RNA, 20 nt, Artificial Sequence
  Synthetic
cugcugguggcuccaguuca

SEQ ID NO: 12505 - RNA, 20 nt, Artificial Sequence
  Synthetic
  misc_feature (8)..(8): n is a, c, g, or u
acccucanaaaacaaaaaga

SEQ ID NO: 12506 - RNA, 20 nt, Artificial Sequence
  Synthetic
guccagaagaaccaacaaga

SEQ ID NO: 12507 - RNA, 20 nt, Artificial Sequence
  Synthetic
uauuuugcgaaagcccaaga

SEQ ID NO: 12508 - RNA, 20 nt, Artificial Sequence
  Synthetic
gaggcagguccccuagaaga

SEQ ID NO: 12509 - RNA, 20 nt, Artificial Sequence
  Synthetic
cagcaggaugcagaggaaga

SEQ ID NO: 12510 - RNA, 20 nt, Artificial Sequence
  Synthetic
gcccaaggucuugcauaaga

SEQ ID NO: 12511 - RNA, 20 nt, Artificial Sequence
  Synthetic
  misc_feature (3)..(3): n is a, c, g, or u
ggnagaugagaaggcacaga

SEQ ID NO: 12512 - RNA, 20 nt, Artificial Sequence
  Synthetic
acauaccuugauaguccaga

SEQ ID NO: 12513 - RNA, 20 nt, Artificial Sequence
  Synthetic
gccucccgauacagagcaga

SEQ ID NO: 12514 - RNA, 20 nt, Artificial Sequence
  Synthetic
gaacucccucgccucgcaga

SEQ ID NO: 12515 - RNA, 20 nt, Artificial Sequence
  Synthetic
cucaaucgccgcgucgcaga

SEQ ID NO: 12516 - RNA, 20 nt, Artificial Sequence
  Synthetic
  misc_feature (4)..(4): n is a, c, g, or u
acangagaugauuaggcaga

SEQ ID NO: 12517 - RNA, 20 nt, Artificial Sequence
  Synthetic
gcauagcagcaggaugcaga

SEQ ID NO: 12518 - RNA, 20 nt, Artificial Sequence
  Synthetic
gucuccaugcgacgugcaga

SEQ ID NO: 12519 - RNA, 20 nt, Artificial Sequence
  Synthetic
ggggaguccgcguaaagaga

SEQ ID NO: 12520 - RNA, 20 nt, Artificial Sequence
  Synthetic
  misc_feature (9)..(10): n is a, c, g, or u
  misc_feature (14)..(14): n is a, c, g, or u
gucgguacnncagncggaga

SEQ ID NO: 12521 - RNA, 20 nt, Artificial Sequence
  Synthetic
  misc_feature (16)..(16): n is a, c, g, or u
aguaggacaugaacangaga

SEQ ID NO: 12522 - RNA, 20 nt, Artificial Sequence
  Synthetic
  misc_feature (3)..(3): n is a, c, g, or u
gangaggcagguccccuaga

SEQ ID NO: 12523 - RNA, 20 nt, Artificial Sequence
  Synthetic
  misc_feature (7)..(8): n is a, c, g, or u
uuaaagnnagguaccguaga

SEQ ID NO: 12524 - RNA, 20 nt, Artificial Sequence
  Synthetic
uugaugauccuggaauuaga

SEQ ID NO: 12525 - RNA, 20 nt, Artificial Sequence
  Synthetic
  misc_feature (14)..(14): n is a, c, g, or u
gaggaugagugucncuuaga

SEQ ID NO: 12526 - RNA, 20 nt, Artificial Sequence
  Synthetic
cggaaacuacuguuguuaga

SEQ ID NO: 12527 - RNA, 20 nt, Artificial Sequence
  Synthetic
uccgcgggauucagcgccga

SEQ ID NO: 12528 - RNA, 20 nt, Artificial Sequence
  Synthetic
gacgugcagaggugaagcga

SEQ ID NO: 12529 - RNA, 20 nt, Artificial Sequence
  Synthetic
ucacgguggucuccaugcga

SEQ ID NO: 12530 - RNA, 20 nt, Artificial Sequence
  Synthetic
auugagaccuucgucugcga

SEQ ID NO: 12531 - RNA, 20 nt, Artificial Sequence
  Synthetic
gagauugagaucuucugcga

SEQ ID NO: 12532 - RNA, 20 nt, Artificial Sequence
  Synthetic
cauaucgucaaucuuaucga

SEQ ID NO: 12533 - RNA, 20 nt, Artificial Sequence
  Synthetic
ccugacauucauuugcagga

SEQ ID NO: 12534 - RNA, 20 nt, Artificial Sequence
  Synthetic
uagcagcaggaugcagagga

SEQ ID NO: 12535 - RNA, 20 nt, Artificial Sequence
  Synthetic
uaacaacaguaguuuccgga

SEQ ID NO: 12536 - RNA, 20 nt, Artificial Sequence
  Synthetic
ucggcgcugaaucccgcgga

SEQ ID NO: 12537 - RNA, 20 nt, Artificial Sequence
  Synthetic
agccccaagcggccccggga

SEQ ID NO: 12538 - RNA, 20 nt, Artificial Sequence
  Synthetic
gaaagcccaagaugauggga

SEQ ID NO: 12539 - RNA, 20 nt, Artificial Sequence
  Synthetic
cuggcuuucaguuauaugga

SEQ ID NO: 12540 - RNA, 20 nt, Artificial Sequence
  Synthetic
uuguccugguuaucgcugga

SEQ ID NO: 12541 - RNA, 20 nt, Artificial Sequence
  Synthetic
gauaaccaggacaaauugga

SEQ ID NO: 12542 - RNA, 20 nt, Artificial Sequence
  Synthetic
ugggugggaaguaauuugga

SEQ ID NO: 12543 - RNA, 20 nt, Artificial Sequence
  Synthetic
augccuuuucgagguuugga

SEQ ID NO: 12544 - RNA, 20 nt, Artificial Sequence
  Synthetic
uauggugacccgcaaaauga

SEQ ID NO: 12545 - RNA, 20 nt, Artificial Sequence
  Synthetic
uuugcgaaagcccaagauga

SEQ ID NO: 12546 - RNA, 20 nt, Artificial Sequence
  Synthetic
gcuuucaguuauauggauga

SEQ ID NO: 12547 - RNA, 20 nt, Artificial Sequence
  Synthetic
ugaaugcaggguccaacuga

SEQ ID NO: 12548 - RNA, 20 nt, Artificial Sequence
  Synthetic
agggguccuaggaguccuga

SEQ ID NO: 12549 - RNA, 20 nt, Artificial Sequence
  Synthetic
caugcgacgugcagagguga

SEQ ID NO: 12550 - RNA, 20 nt, Artificial Sequence
  Synthetic
gccugagugccguaugguga

SEQ ID NO: 12551 - RNA, 20 nt, Artificial Sequence
  Synthetic
uagacucugugguauuguga

SEQ ID NO: 12552 - RNA, 20 nt, Artificial Sequence
  Synthetic
ccagucuucgauaagauuga

SEQ ID NO: 12553 - RNA, 20 nt, Artificial Sequence
  Synthetic
  misc_feature (15)..(15): n is a, c, g, or u
gguccggugcuggunguuga

SEQ ID NO: 12554 - RNA, 20 nt, Artificial Sequence
  Synthetic
  misc_feature (4)..(4): n is a, c, g, or u
  misc_feature (19)..(19): n is a, c, g, or u
gucncuuagagguggagana

SEQ ID NO: 12555 - RNA, 20 nt, Artificial Sequence
  Synthetic
  misc_feature (7)..(7): n is a, c, g, or u
  misc_feature (16)..(16): n is a, c, g, or u
  misc_feature (19)..(19): n is a, c, g, or u
uguauanuugcggganagna

SEQ ID NO: 12556 - RNA, 20 nt, Artificial Sequence
  Synthetic
  misc_feature (19)..(19): n is a, c, g, or u
guccaacugaugaucgggna

SEQ ID NO: 12557 - RNA, 20 nt, Artificial Sequence
  Synthetic
  misc_feature (19)..(19): n is a, c, g, or u
ccuguuuucauuuacuguna

SEQ ID NO: 12558 - RNA, 20 nt, Artificial Sequence
  Synthetic
  misc_feature (17)..(17): n is a, c, g, or u
  misc_feature (19)..(19): n is a, c, g, or u
aagaaggaguuugccanuna

SEQ ID NO: 12559 - RNA, 20 nt, Artificial Sequence
  Synthetic
  misc_feature (19)..(19): n is a, c, g, or u
ucuguguuggggugaguuna

SEQ ID NO: 12560 - RNA, 20 nt, Artificial Sequence
  Synthetic
  misc_feature (13)..(13): n is a, c, g, or u
cagcuaugucaanguuaaua

SEQ ID NO: 12561 - RNA, 20 nt, Artificial Sequence
  Synthetic
ccggaaguguugauaagaua

SEQ ID NO: 12562 - RNA, 20 nt, Artificial Sequence
  Synthetic
aggguccccagucuucgaua

SEQ ID NO: 12563 - RNA, 20 nt, Artificial Sequence
  Synthetic
aguuuccggaaguguugaua

SEQ ID NO: 12564 - RNA, 20 nt, Artificial Sequence
  Synthetic
  misc_feature (4)..(4): n is a, c, g, or u
  misc_feature (6)..(6): n is a, c, g, or u
ugungncucucuuuuauaua

SEQ ID NO: 12565 - RNA, 20 nt, Artificial Sequence
  Synthetic
gaagcuccaaauucuuuaua

SEQ ID NO: 12566 - RNA, 20 nt, Artificial Sequence
  Synthetic
gggcuuucgcaaaauaccua

SEQ ID NO: 12567 - RNA, 20 nt, Artificial Sequence
  Synthetic
gacagugggggaaagcccua

SEQ ID NO: 12568 - RNA, 20 nt, Artificial Sequence
  Synthetic
acaucgcaucaggacuccua

SEQ ID NO: 12569 - RNA, 20 nt, Artificial Sequence
  Synthetic
acccgcaaaaugaggcgcua

SEQ ID NO: 12570 - RNA, 20 nt, Artificial Sequence
  Synthetic
  misc_feature (1)..(1): n is a, c, g, or u
  misc_feature (10)..(10): n is a, c, g, or u
ngguuugaunccuuuaucua

SEQ ID NO: 12571 - RNA, 20 nt, Artificial Sequence
  Synthetic
gcgagggaguucuucuucua

SEQ ID NO: 12572 - RNA, 20 nt, Artificial Sequence
  Synthetic
ggacuucucucaauuuucua

SEQ ID NO: 12573 - RNA, 20 nt, Artificial Sequence
  Synthetic
  misc_feature (11)..(11): n is a, c, g, or u
caguuucucunccaaaagua

SEQ ID NO: 12574 - RNA, 20 nt, Artificial Sequence
  Synthetic
gcuuggaggcuugaacagua

SEQ ID NO: 12575 - RNA, 20 nt, Artificial Sequence
  Synthetic
uuacauaucccaugaaguua

SEQ ID NO: 12576 - RNA, 20 nt, Artificial Sequence
  Synthetic
  misc_feature (1)..(1): n is a, c, g, or u
ncauaaggugggaaacuuua

SEQ ID NO: 12577 - RNA, 20 nt, Artificial Sequence
  Synthetic
acggggcgcaccucucuuua

SEQ ID NO: 12578 - RNA, 20 nt, Artificial Sequence
  Synthetic
  misc_feature (11)..(13): n is a, c, g, or u
aaaaaucaaannnuguuuua

SEQ ID NO: 12579 - RNA, 20 nt, Artificial Sequence
  Synthetic
uaaacugagccaagagaaac

SEQ ID NO: 12580 - RNA, 20 nt, Artificial Sequence
  Synthetic
  misc_feature (10)..(10): n is a, c, g, or u
gcucagggcnuacucacaac

SEQ ID NO: 12581 - RNA, 20 nt, Artificial Sequence
  Synthetic
cuuugaaugcaggguccaac

SEQ ID NO: 12582 - RNA, 20 nt, Artificial Sequence
  Synthetic
  misc_feature (5)..(5): n is a, c, g, or u
ccagnccguugccgagcaac

SEQ ID NO: 12583 - RNA, 20 nt, Artificial Sequence
  Synthetic
gguggcuccaguucaggaac

SEQ ID NO: 12584 - RNA, 20 nt, Artificial Sequence
  Synthetic
  misc_feature (1)..(1): n is a, c, g, or u
naccacaucauccauauaac

SEQ ID NO: 12585 - RNA, 20 nt, Artificial Sequence
  Synthetic
gacaaaagaaaauugguaac

SEQ ID NO: 12586 - RNA, 20 nt, Artificial Sequence
  Synthetic
  misc_feature (5)..(5): n is a, c, g, or u
ucaunaacucaccccaacac

SEQ ID NO: 12587 - RNA, 20 nt, Artificial Sequence
  Synthetic
gggaaagcccuacgaaccac

SEQ ID NO: 12588 - RNA, 20 nt, Artificial Sequence
  Synthetic
gcacgucgcauggagaccac

SEQ ID NO: 12589 - RNA, 20 nt, Artificial Sequence
  Synthetic
  misc_feature (4)..(5): n is a, c, g, or u
cugnnguaccgaccgaccac

SEQ ID NO: 12590 - RNA, 20 nt, Artificial Sequence
  Synthetic
aaaaaagagaguaacuccac

SEQ ID NO: 12591 - RNA, 20 nt, Artificial Sequence
  Synthetic
  misc_feature (6)..(6): n is a, c, g, or u
uccggnagaugagaaggcac

SEQ ID NO: 12592 - RNA, 20 nt, Artificial Sequence
  Synthetic
cgucagcaaacacuuggcac

SEQ ID NO: 12593 - RNA, 20 nt, Artificial Sequence
  Synthetic
  misc_feature (8)..(8): n is a, c, g, or u
agguuccngugggcguucac

SEQ ID NO: 12594 - RNA, 20 nt, Artificial Sequence
  Synthetic
uugaggcauacuucaaagac

SEQ ID NO: 12595 - RNA, 20 nt, Artificial Sequence
  Synthetic
ucgucaaucuuaucgaagac

SEQ ID NO: 12596 - RNA, 20 nt, Artificial Sequence
  Synthetic
  misc_feature (2)..(2): n is a, c, g, or u
gnagaugagaaggcacagac

SEQ ID NO: 12597 - RNA, 20 nt, Artificial Sequence
  Synthetic
cauauaacugaaagccagac

SEQ ID NO: 12598 - RNA, 20 nt, Artificial Sequence
  Synthetic
cuuucagcaaugucaacgac

SEQ ID NO: 12599 - RNA, 20 nt, Artificial Sequence
  Synthetic
  misc_feature (3)..(3): n is a, c, g, or u
  misc_feature (12)..(12): n is a, c, g, or u
  misc_feature (15)..(15): n is a, c, g, or u
uanuugcggganagnacgac

SEQ ID NO: 12600 - RNA, 20 nt, Artificial Sequence
  Synthetic
  misc_feature (7)..(7): n is a, c, g, or u
  misc_feature (11)..(12): n is a, c, g, or u
ucuccgncugnnguaccgac

SEQ ID NO: 12601 - RNA, 20 nt, Artificial Sequence
  Synthetic
gcuguacaaaaccuacggac

SEQ ID NO: 12602 - RNA, 20 nt, Artificial Sequence
  Synthetic
  misc_feature (14)..(14): n is a, c, g, or u
ugccuucucaucunccggac

SEQ ID NO: 12603 - RNA, 20 nt, Artificial Sequence
  Synthetic
  misc_feature (3)..(3): n is a, c, g, or u
  misc_feature (6)..(6): n is a, c, g, or u
ggngcnaaacucaucgggac

SEQ ID NO: 12604 - RNA, 20 nt, Artificial Sequence
  Synthetic
  misc_feature (9)..(9): n is a, c, g, or u
aaucccagnggauuggggac

SEQ ID NO: 12605 - RNA, 20 nt, Artificial Sequence
  Synthetic
agugacuggagauuugggac

SEQ ID NO: 12606 - RNA, 20 nt, Artificial Sequence
  Synthetic
ucuccucugccgauccauac

SEQ ID NO: 12607 - RNA, 20 nt, Artificial Sequence
  Synthetic
uguugcuguacaaaaccuac

SEQ ID NO: 12608 - RNA, 20 nt, Artificial Sequence
  Synthetic
auguucuccauguucgguac

SEQ ID NO: 12609 - RNA, 20 nt, Artificial Sequence
  Synthetic
  misc_feature (11)..(11): n is a, c, g, or u
  misc_feature (15)..(16): n is a, c, g, or u
cgcuucuccgncugnnguac

SEQ ID NO: 12610 - RNA, 20 nt, Artificial Sequence
  Synthetic
gaagacuggggacccuguac

SEQ ID NO: 12611 - RNA, 20 nt, Artificial Sequence
  Synthetic
agggacucaagauguuguac

SEQ ID NO: 12612 - RNA, 20 nt, Artificial Sequence
  Synthetic
cauaaggugggaaacuuuac

SEQ ID NO: 12613 - RNA, 20 nt, Artificial Sequence
  Synthetic
  misc_feature (3)..(3): n is a, c, g, or u
ccnauggccaagccccaacc

SEQ ID NO: 12614 - RNA, 20 nt, Artificial Sequence
  Synthetic
  misc_feature (14)..(14): n is a, c, g, or u
aauuuucuaggggnaacacc

SEQ ID NO: 12615 - RNA, 20 nt, Artificial Sequence
  Synthetic
  misc_feature (5)..(5): n is a, c, g, or u
aguunaugaaucuagccacc

SEQ ID NO: 12616 - RNA, 20 nt, Artificial Sequence
  Synthetic
  misc_feature (11)..(11): n is a, c, g, or u
gaucaucaacnaccagcacc

SEQ ID NO: 12617 - RNA, 20 nt, Artificial Sequence
  Synthetic
gcguaaagagaggugcgccc

SEQ ID NO: 12618 - RNA, 20 nt, Artificial Sequence
  Synthetic
gguagagccccaagcggccc

SEQ ID NO: 12619 - RNA, 20 nt, Artificial Sequence
  Synthetic
  misc_feature (16)..(16): n is a, c, g, or u
agcaggaaaguacagngccc

SEQ ID NO: 12620 - RNA, 20 nt, Artificial Sequence
  Synthetic
ucccgcggacgaccccuccc

SEQ ID NO: 12621 - RNA, 20 nt, Artificial Sequence
  Synthetic
cauccauauaacugaaagcc

SEQ ID NO: 12622 - RNA, 20 nt, Artificial Sequence
  Synthetic
ggagugggagcauucgggcc

SEQ ID NO: 12623 - RNA, 20 nt, Artificial Sequence
  Synthetic
  misc_feature (3)..(3): n is a, c, g, or u
ccncacaaggacaacuggcc

SEQ ID NO: 12624 - RNA, 20 nt, Artificial Sequence
  Synthetic
  misc_feature (7)..(8): n is a, c, g, or u
gggaggnnugaacccuggcc

SEQ ID NO: 12625 - RNA, 20 nt, Artificial Sequence
  Synthetic
  misc_feature (15)..(15): n is a, c, g, or u
  misc_feature (18)..(18): n is a, c, g, or u
gucccgaugaguuungcncc

SEQ ID NO: 12626 - RNA, 20 nt, Artificial Sequence
  Synthetic
  misc_feature (18)..(18): n is a, c, g, or u
ucugugccuucucaucuncc

SEQ ID NO: 12627 - RNA, 20 nt, Artificial Sequence
  Synthetic
  misc_feature (6)..(6): n is a, c, g, or u
  misc_feature (18)..(18): n is a, c, g, or u
aauccncugggauucuuncc

SEQ ID NO: 12628 - RNA, 20 nt, Artificial Sequence
  Synthetic
aaagccaacucagaaaaucc

SEQ ID NO: 12629 - RNA, 20 nt, Artificial Sequence
  Synthetic
gucccgucggcgcugaaucc

SEQ ID NO: 12630 - RNA, 20 nt, Artificial Sequence
  Synthetic
aaaacgccgcagacacaucc

SEQ ID NO: 12631 - RNA, 20 nt, Artificial Sequence
  Synthetic
auuuggaagauccagcaucc

SEQ ID NO: 12632 - RNA, 20 nt, Artificial Sequence
  Synthetic
cugugcugccaacuggaucc

SEQ ID NO: 12633 - RNA, 20 nt, Artificial Sequence
  Synthetic
aucccgcggacgaccccucc

SEQ ID NO: 12634 - RNA, 20 nt, Artificial Sequence
  Synthetic
ccggagacucuaaggccucc

SEQ ID NO: 12635 - RNA, 20 nt, Artificial Sequence
  Synthetic
cgggaggccuuagagucucc

SEQ ID NO: 12636 - RNA, 20 nt, Artificial Sequence
  Synthetic
  misc_feature (1)..(1): n is a, c, g, or u
nacgacagaauugucagucc

SEQ ID NO: 12637 - RNA, 20 nt, Artificial Sequence
  Synthetic
agcagggguccuaggagucc

SEQ ID NO: 12638 - RNA, 20 nt, Artificial Sequence
  Synthetic
gcaacauaccuugauagucc

SEQ ID NO: 12639 - RNA, 20 nt, Artificial Sequence
  Synthetic
gacguaaacaaaggacgucc

SEQ ID NO: 12640 - RNA, 20 nt, Artificial Sequence
  Synthetic
gugcagguuuugcauggucc

SEQ ID NO: 12641 - RNA, 20 nt, Artificial Sequence
  Synthetic
ccuaucuuaucaacacuucc

SEQ ID NO: 12642 - RNA, 20 nt, Artificial Sequence
  Synthetic
uguaguuaaucauuacuucc

SEQ ID NO: 12643 - RNA, 20 nt, Artificial Sequence
  Synthetic
  misc_feature (2)..(2): n is a, c, g, or u
angggaguaggcugccuucc

SEQ ID NO: 12644 - RNA, 20 nt, Artificial Sequence
  Synthetic
caagaccuugggcagguucc

SEQ ID NO: 12645 - RNA, 20 nt, Artificial Sequence
  Synthetic
ugagcagggcucacuguucc

SEQ ID NO: 12646 - RNA, 20 nt, Artificial Sequence
  Synthetic
gucuaacaacaguaguuucc

SEQ ID NO: 12647 - RNA, 20 nt, Artificial Sequence
  Synthetic
uggcaaacuccuucuuuucc

SEQ ID NO: 12648 - RNA, 20 nt, Artificial Sequence
  Synthetic
uacuguucaagccuccaagc

SEQ ID NO: 12649 - RNA, 20 nt, Artificial Sequence
  Synthetic
accccgccuguaacacgagc

SEQ ID NO: 12650 - RNA, 20 nt, Artificial Sequence
  Synthetic
  misc_feature (2)..(2): n is a, c, g, or u
  misc_feature (7)..(7): n is a, c, g, or u
gnagagncaguauucugagc

SEQ ID NO: 12651 - RNA, 20 nt, Artificial Sequence
  Synthetic
  misc_feature (10)..(10): n is a, c, g, or u
cauauuaacnuugacauagc

SEQ ID NO: 12652 - RNA, 20 nt, Artificial Sequence
  Synthetic
auugagaucuucugcgacgc

SEQ ID NO: 12653 - RNA, 20 nt, Artificial Sequence
  Synthetic
gggcgcaccucucuuuacgc

SEQ ID NO: 12654 - RNA, 20 nt, Artificial Sequence
  Synthetic
ccgucggcgcugaaucccgc

SEQ ID NO: 12655 - RNA, 20 nt, Artificial Sequence
  Synthetic
ggaagaugauaaaacgccgc

SEQ ID NO: 12656 - RNA, 20 nt, Artificial Sequence
  Synthetic
ucguccgcgggauucagcgc

SEQ ID NO: 12657 - RNA, 20 nt, Artificial Sequence
  Synthetic
uguuuacgucccgucggcgc

SEQ ID NO: 12658 - RNA, 20 nt, Artificial Sequence
  Synthetic
caaagguuccacgcaugcgc

SEQ ID NO: 12659 - RNA, 20 nt, Artificial Sequence
  Synthetic
cagacgaaggucucaaucgc

SEQ ID NO: 12660 - RNA, 20 nt, Artificial Sequence
  Synthetic
gaagaacucccucgccucgc

SEQ ID NO: 12661 - RNA, 20 nt, Artificial Sequence
  Synthetic
ggucucaaucgccgcgucgc

SEQ ID NO: 12662 - RNA, 20 nt, Artificial Sequence
  Synthetic
ccccugcucguguuacaggc

SEQ ID NO: 12663 - RNA, 20 nt, Artificial Sequence
  Synthetic
ucccgauacagagcagaggc

SEQ ID NO: 12664 - RNA, 20 nt, Artificial Sequence
  Synthetic
  misc_feature (2)..(2): n is a, c, g, or u
cnuuuccauggcugcuaggc

SEQ ID NO: 12665 - RNA, 20 nt, Artificial Sequence
  Synthetic
  misc_feature (7)..(7): n is a, c, g, or u
  misc_feature (10)..(10): n is a, c, g, or u
  misc_feature (18)..(18): n is a, c, g, or u
gaguuungcnccagaccngc

SEQ ID NO: 12666 - RNA, 20 nt, Artificial Sequence
  Synthetic
ucugaguuggcuuugaaugc

SEQ ID NO: 12667 - RNA, 20 nt, Artificial Sequence
  Synthetic
cacucauccucaggccaugc

SEQ ID NO: 12668 - RNA, 20 nt, Artificial Sequence
  Synthetic
uaggcugccuuccugacugc

SEQ ID NO: 12669 - RNA, 20 nt, Artificial Sequence
  Synthetic
ccucugccgauccauacugc

SEQ ID NO: 12670 - RNA, 20 nt, Artificial Sequence
  Synthetic
aaccuuugugucuccucugc

SEQ ID NO: 12671 - RNA, 20 nt, Artificial Sequence
  Synthetic
uuaucgcuggaugugucugc

SEQ ID NO: 12672 - RNA, 20 nt, Artificial Sequence
  Synthetic
aggucggucguugacauugc

SEQ ID NO: 12673 - RNA, 20 nt, Artificial Sequence
  Synthetic
ggucugugccaaguguuugc

SEQ ID NO: 12674 - RNA, 20 nt, Artificial Sequence
  Synthetic
  misc_feature (19)..(19): n is a, c, g, or u
ucuuucuguccccaauccnc

SEQ ID NO: 12675 - RNA, 20 nt, Artificial Sequence
  Synthetic
uuaauaugggccuaaaaauc

SEQ ID NO: 12676 - RNA, 20 nt, Artificial Sequence
  Synthetic
  misc_feature (13)..(13): n is a, c, g, or u
gggcuuggccaunggccauc

SEQ ID NO: 12677 - RNA, 20 nt, Artificial Sequence
  Synthetic
  misc_feature (10)..(10): n is a, c, g, or u
  misc_feature (16)..(16): n is a, c, g, or u
cuuucuaagnaaacanuauc

SEQ ID NO: 12678 - RNA, 20 nt, Artificial Sequence
  Synthetic
ccugcauucaaagccaacuc

SEQ ID NO: 12679 - RNA, 20 nt, Artificial Sequence
  Synthetic
uccaccacgagucuagacuc

SEQ ID NO: 12680 - RNA, 20 nt, Artificial Sequence
  Synthetic
  misc_feature (10)..(10): n is a, c, g, or u
aaaguacagngcccugacuc

SEQ ID NO: 12681 - RNA, 20 nt, Artificial Sequence
  Synthetic
gggguggagcccucaggcuc

SEQ ID NO: 12682 - RNA, 20 nt, Artificial Sequence
  Synthetic
aggaacagugagcccugcuc

SEQ ID NO: 12683 - RNA, 20 nt, Artificial Sequence
  Synthetic
  misc_feature (5)..(5): n is a, c, g, or u
cgaanagaaggaaagaaguc

SEQ ID NO: 12684 - RNA, 20 nt, Artificial Sequence
  Synthetic
cucuucaagaucccagaguc

SEQ ID NO: 12685 - RNA, 20 nt, Artificial Sequence
  Synthetic
gaaggcacagacggggaguc

SEQ ID NO: 12686 - RNA, 20 nt, Artificial Sequence
  Synthetic
cuuuacgcggacuccccguc

SEQ ID NO: 12687 - RNA, 20 nt, Artificial Sequence
  Synthetic
uccuuuguuuacgucccguc

SEQ ID NO: 12688 - RNA, 20 nt, Artificial Sequence
  Synthetic
cggccccgggaggggucguc

SEQ ID NO: 12689 - RNA, 20 nt, Artificial Sequence
  Synthetic
cggcgauugagaccuucguc

SEQ ID NO: 12690 - RNA, 20 nt, Artificial Sequence
  Synthetic
  misc_feature (14)..(14): n is a, c, g, or u
ugcucggcaacggncugguc

SEQ ID NO: 12691 - RNA, 20 nt, Artificial Sequence
  Synthetic
ugguuaucgcuggauguguc

SEQ ID NO: 12692 - RNA, 20 nt, Artificial Sequence
  Synthetic
  misc_feature (15)..(15): n is a, c, g, or u
gugaaaccacaauanuuguc

SEQ ID NO: 12693 - RNA, 20 nt, Artificial Sequence
  Synthetic
aggggucguccgcgggauuc

SEQ ID NO: 12694 - RNA, 20 nt, Artificial Sequence
  Synthetic
ggcacucaggcaagcuauuc

SEQ ID NO: 12695 - RNA, 20 nt, Artificial Sequence
  Synthetic
uuacucucuuuuuugccuuc

SEQ ID NO: 12696 - RNA, 20 nt, Artificial Sequence
  Synthetic
uauaaagaauuuggagcuuc

SEQ ID NO: 12697 - RNA, 20 nt, Artificial Sequence
  Synthetic
uucccgagauugagaucuuc

SEQ ID NO: 12698 - RNA, 20 nt, Artificial Sequence
  Synthetic
gagcaacgggguaaagguuc

SEQ ID NO: 12699 - RNA, 20 nt, Artificial Sequence
  Synthetic
uuuacuagugccauuuguuc

SEQ ID NO: 12700 - RNA, 20 nt, Artificial Sequence
  Synthetic
  misc_feature (14)..(14): n is a, c, g, or u
uugguaacagcggnauaaag

SEQ ID NO: 12701 - RNA, 20 nt, Artificial Sequence
  Synthetic
cacuaguaaacugagccaag

SEQ ID NO: 12702 - RNA, 20 nt, Artificial Sequence
  Synthetic
  misc_feature (7)..(8): n is a, c, g, or u
  misc_feature (12)..(12): n is a, c, g, or u
cgguacnncagncggagaag

SEQ ID NO: 12703 - RNA, 20 nt, Artificial Sequence
  Synthetic
ugcgacgugcagaggugaag

SEQ ID NO: 12704 - RNA, 20 nt, Artificial Sequence
  Synthetic
  misc_feature (4)..(4): n is a, c, g, or u
  misc_feature (6)..(6): n is a, c, g, or u
cccnunucuccaccucuaag

SEQ ID NO: 12705 - RNA, 20 nt, Artificial Sequence
  Synthetic
acauaucccaugaaguuaag

SEQ ID NO: 12706 - RNA, 20 nt, Artificial Sequence
  Synthetic
uauaacugaaagccagacag

SEQ ID NO: 12707 - RNA, 20 nt, Artificial Sequence
  Synthetic
  misc_feature (1)..(1): n is a, c, g, or u
nauggccaagccccaaccag

SEQ ID NO: 12708 - RNA, 20 nt, Artificial Sequence
  Synthetic
aacgccgcagacacauccag

SEQ ID NO: 12709 - RNA, 20 nt, Artificial Sequence
  Synthetic
uuggaagauccagcauccag

SEQ ID NO: 12710 - RNA, 20 nt, Artificial Sequence
  Synthetic
uggucuauaugcaggaggag

SEQ ID NO: 12711 - RNA, 20 nt, Artificial Sequence
  Synthetic
ucgcaaaauaccuaugggag

SEQ ID NO: 12712 - RNA, 20 nt, Artificial Sequence
  Synthetic
ggacgccaacaaggugggag

SEQ ID NO: 12713 - RNA, 20 nt, Artificial Sequence
  Synthetic
  misc_feature (10)..(10): n is a, c, g, or u
auauuuggunucuuuuggag

SEQ ID NO: 12714 - RNA, 20 nt, Artificial Sequence
  Synthetic
guuuuguacagcaacaugag

SEQ ID NO: 12715 - RNA, 20 nt, Artificial Sequence
  Synthetic
  misc_feature (11)..(11): n is a, c, g, or u
gaggacaacanguuggugag

SEQ ID NO: 12716 - RNA, 20 nt, Artificial Sequence
  Synthetic
  misc_feature (16)..(16): n is a, c, g, or u
aagacuguguguuuanugag

SEQ ID NO: 12717 - RNA, 20 nt, Artificial Sequence
  Synthetic
  misc_feature (4)..(4): n is a, c, g, or u
guunccccuagaaaauugag

SEQ ID NO: 12718 - RNA, 20 nt, Artificial Sequence
  Synthetic
  misc_feature (18)..(18): n is a, c, g, or u
uccugucuuacuuuuggnag

SEQ ID NO: 12719 - RNA, 20 nt, Artificial Sequence
  Synthetic
aauuuuggccaagacacacg

SEQ ID NO: 12720 - RNA, 20 nt, Artificial Sequence
  Synthetic
cgcgggauucagcgccgacg

SEQ ID NO: 12721 - RNA, 20 nt, Artificial Sequence
  Synthetic
acgucgcauggagaccaccg

SEQ ID NO: 12722 - RNA, 20 nt, Artificial Sequence
  Synthetic
  misc_feature (12)..(12): n is a, c, g, or u
ccuucucaucunccggaccg

SEQ ID NO: 12723 - RNA, 20 nt, Artificial Sequence
  Synthetic
  misc_feature (12)..(12): n is a, c, g, or u
uuuucuaggggnaacacccg

SEQ ID NO: 12724 - RNA, 20 nt, Artificial Sequence
  Synthetic
uacuaacauugagauucccg

SEQ ID NO: 12725 - RNA, 20 nt, Artificial Sequence
  Synthetic
gccccgggaggggucguccg

SEQ ID NO: 12726 - RNA, 20 nt, Artificial Sequence
  Synthetic
  misc_feature (5)..(6): n is a, c, g, or u
  misc_feature (10)..(10): n is a, c, g, or u
guacnncagncggagaagcg

SEQ ID NO: 12727 - RNA, 20 nt, Artificial Sequence
  Synthetic
cccgggaggggucguccgcg

SEQ ID NO: 12728 - RNA, 20 nt, Artificial Sequence
  Synthetic
ugccaacuggauccugcgcg

SEQ ID NO: 12729 - RNA, 20 nt, Artificial Sequence
  Synthetic
agaccuucgucugcgaggcg

SEQ ID NO: 12730 - RNA, 20 nt, Artificial Sequence
  Synthetic
aaaggccuuguaaguuggcg

SEQ ID NO: 12731 - RNA, 20 nt, Artificial Sequence
  Synthetic
gcugccaacuggauccugcg

SEQ ID NO: 12732 - RNA, 20 nt, Artificial Sequence
  Synthetic
  misc_feature (6)..(6): n is a, c, g, or u
  misc_feature (15)..(15): n is a, c, g, or u
ggaaangauguauanuugcg

SEQ ID NO: 12733 - RNA, 20 nt, Artificial Sequence
  Synthetic
  misc_feature (7)..(7): n is a, c, g, or u
  misc_feature (10)..(10): n is a, c, g, or u
gucuggngcnaaacucaucg

SEQ ID NO: 12734 - RNA, 20 nt, Artificial Sequence
  Synthetic
cgcagaagaucucaaucucg

SEQ ID NO: 12735 - RNA, 20 nt, Artificial Sequence
  Synthetic
  misc_feature (16)..(16): n is a, c, g, or u
gacuucuuuccuucunuucg

SEQ ID NO: 12736 - RNA, 20 nt, Artificial Sequence
  Synthetic
cuggccggacgccaacaagg

SEQ ID NO: 12737 - RNA, 20 nt, Artificial Sequence
  Synthetic
  misc_feature (7)..(7): n is a, c, g, or u
uuuacanacucuuuggaagg

SEQ ID NO: 12738 - RNA, 20 nt, Artificial Sequence
  Synthetic
  misc_feature (13)..(13): n is a, c, g, or u
uauuccuuggacncauaagg

SEQ ID NO: 12739 - RNA, 20 nt, Artificial Sequence
  Synthetic
  misc_feature (2)..(2): n is a, c, g, or u
unacaguaaaugaaaacagg

SEQ ID NO: 12740 - RNA, 20 nt, Artificial Sequence
  Synthetic
accccugcucguguuacagg

SEQ ID NO: 12741 - RNA, 20 nt, Artificial Sequence
  Synthetic
  misc_feature (2)..(2): n is a, c, g, or u
angagaugauuaggcagagg

SEQ ID NO: 12742 - RNA, 20 nt, Artificial Sequence
  Synthetic
gcaguauggaucggcagagg

SEQ ID NO: 12743 - RNA, 20 nt, Artificial Sequence
  Synthetic
cuccaugcgacgugcagagg

SEQ ID NO: 12744 - RNA, 20 nt, Artificial Sequence
  Synthetic
ggaguccgcguaaagagagg

SEQ ID NO: 12745 - RNA, 20 nt, Artificial Sequence
  Synthetic
gguggucuauaugcaggagg

SEQ ID NO: 12746 - RNA, 20 nt, Artificial Sequence
  Synthetic
cugagugccguauggugagg

SEQ ID NO: 12747 - RNA, 20 nt, Artificial Sequence
  Synthetic
gagggaguucuucuucuagg

SEQ ID NO: 12748 - RNA, 20 nt, Artificial Sequence
  Synthetic
  misc_feature (2)..(3): n is a, c, g, or u
gnnguaccgaccgaccacgg

SEQ ID NO: 12749 - RNA, 20 nt, Artificial Sequence
  Synthetic
ugaggugaacaauguuccgg

SEQ ID NO: 12750 - RNA, 20 nt, Artificial Sequence
  Synthetic
ugagaucuucugcgacgcgg

SEQ ID NO: 12751 - RNA, 20 nt, Artificial Sequence
  Synthetic
  misc_feature (12)..(13): n is a, c, g, or u
  misc_feature (17)..(17): n is a, c, g, or u
ucggucgguacnncagncgg

SEQ ID NO: 12752 - RNA, 20 nt, Artificial Sequence
  Synthetic
gagccccaagcggccccggg

SEQ ID NO: 12753 - RNA, 20 nt, Artificial Sequence
  Synthetic
  misc_feature (7)..(8): n is a, c, g, or u
gguucannccuccccauggg

SEQ ID NO: 12754 - RNA, 20 nt, Artificial Sequence
  Synthetic
uuucgcaaaauaccuauggg

SEQ ID NO: 12755 - RNA, 20 nt, Artificial Sequence
  Synthetic
  misc_feature (1)..(1): n is a, c, g, or u
naugaaucuagccaccuggg

SEQ ID NO: 12756 - RNA, 20 nt, Artificial Sequence
  Synthetic
acugaaagccagacaguggg

SEQ ID NO: 12757 - RNA, 20 nt, Artificial Sequence
  Synthetic
ccggacgccaacaagguggg

SEQ ID NO: 12758 - RNA, 20 nt, Artificial Sequence
  Synthetic
ggacccuguaccgaacaugg

SEQ ID NO: 12759 - RNA, 20 nt, Artificial Sequence
  Synthetic
caccucugcacgucgcaugg

SEQ ID NO: 12760 - RNA, 20 nt, Artificial Sequence
  Synthetic
caaaccucgaaaaggcaugg

SEQ ID NO: 12761 - RNA, 20 nt, Artificial Sequence
  Synthetic
  misc_feature (5)..(5): n is a, c, g, or u
cucanaaaacaaaaagaugg

SEQ ID NO: 12762 - RNA, 20 nt, Artificial Sequence
  Synthetic
ucuuguucccaagaauaugg

SEQ ID NO: 12763 - RNA, 20 nt, Artificial Sequence
  Synthetic
ucaaucuuaucgaagacugg

SEQ ID NO: 12764 - RNA, 20 nt, Artificial Sequence
  Synthetic
  misc_feature (4)..(4): n is a, c, g, or u
acanguuggugagugacugg

SEQ ID NO: 12765 - RNA, 20 nt, Artificial Sequence
  Synthetic
aaaaaguugcauggugcugg

SEQ ID NO: 12766 - RNA, 20 nt, Artificial Sequence
  Synthetic
  misc_feature (9)..(9): n is a, c, g, or u
ugagugucncuuagaggugg

SEQ ID NO: 12767 - RNA, 20 nt, Artificial Sequence
  Synthetic
  misc_feature (1)..(1): n is a, c, g, or u
  misc_feature (13)..(13): n is a, c, g, or u
naagaaucccagnggauugg

SEQ ID NO: 12768 - RNA, 20 nt, Artificial Sequence
  Synthetic
uccccaugggggacuguugg

SEQ ID NO: 12769 - RNA, 20 nt, Artificial Sequence
  Synthetic
ggcaagcuauucuguguugg

SEQ ID NO: 12770 - RNA, 20 nt, Artificial Sequence
  Synthetic
  misc_feature (12)..(12): n is a, c, g, or u
gaauauuuggunucuuuugg

SEQ ID NO: 12771 - RNA, 20 nt, Artificial Sequence
  Synthetic
  misc_feature (19)..(19): n is a, c, g, or u
aacaguaggacaugaacang

SEQ ID NO: 12772 - RNA, 20 nt, Artificial Sequence
  Synthetic
  misc_feature (19)..(19): n is a, c, g, or u
agaccuugggcagguuccng

SEQ ID NO: 12773 - RNA, 20 nt, Artificial Sequence
  Synthetic
caaaaguaagacaggaaaug

SEQ ID NO: 12774 - RNA, 20 nt, Artificial Sequence
  Synthetic
agguuuuguacagcaacaug

SEQ ID NO: 12775 - RNA, 20 nt, Artificial Sequence
  Synthetic
  misc_feature (9)..(10): n is a, c, g, or u
aggguucannccuccccaug

SEQ ID NO: 12776 - RNA, 20 nt, Artificial Sequence
  Synthetic
cguucacgguggucuccaug

SEQ ID NO: 12777 - RNA, 20 nt, Artificial Sequence
  Synthetic
  misc_feature (5)..(5): n is a, c, g, or u
ccaunggccaucagcgcaug

SEQ ID NO: 12778 - RNA, 20 nt, Artificial Sequence
  Synthetic
gauauucccuuaacuucaug

SEQ ID NO: 12779 - RNA, 20 nt, Artificial Sequence
  Synthetic
  misc_feature (15)..(15): n is a, c, g, or u
ugcacacgguccggnagaug

SEQ ID NO: 12780 - RNA, 20 nt, Artificial Sequence
  Synthetic
cacugcauggccugaggaug

SEQ ID NO: 12781 - RNA, 20 nt, Artificial Sequence
  Synthetic
aagcccaagaugaugggaug

SEQ ID NO: 12782 - RNA, 20 nt, Artificial Sequence
  Synthetic
ugcgaaagcccaagaugaug

SEQ ID NO: 12783 - RNA, 20 nt, Artificial Sequence
  Synthetic
ggguccuaggaguccugaug

SEQ ID NO: 12784 - RNA, 20 nt, Artificial Sequence
  Synthetic
gaggcauacuucaaagacug

SEQ ID NO: 12785 - RNA, 20 nt, Artificial Sequence
  Synthetic
ugacuggagauuugggacug

SEQ ID NO: 12786 - RNA, 20 nt, Artificial Sequence
  Synthetic
  misc_feature (3)..(3): n is a, c, g, or u
uunaugaaucuagccaccug

SEQ ID NO: 12787 - RNA, 20 nt, Artificial Sequence
  Synthetic
  misc_feature (8)..(8): n is a, c, g, or u
gugaguangcccugagccug

SEQ ID NO: 12788 - RNA, 20 nt, Artificial Sequence
  Synthetic
aacacagaauagcuugccug

SEQ ID NO: 12789 - RNA, 20 nt, Artificial Sequence
  Synthetic
gugcugccaacuggauccug

SEQ ID NO: 12790 - RNA, 20 nt, Artificial Sequence
  Synthetic
  misc_feature (17)..(17): n is a, c, g, or u
uuucuguccccaauccncug

SEQ ID NO: 12791 - RNA, 20 nt, Artificial Sequence
  Synthetic
  misc_feature (8)..(8): n is a, c, g, or u
aguacagngcccugacucug

SEQ ID NO: 12792 - RNA, 20 nt, Artificial Sequence
  Synthetic
cccgagauugagaucuucug

SEQ ID NO: 12793 - RNA, 20 nt, Artificial Sequence
  Synthetic
uaacugaaagccagacagug

SEQ ID NO: 12794 - RNA, 20 nt, Artificial Sequence
  Synthetic
uggccaagccccaaccagug

SEQ ID NO: 12795 - RNA, 20 nt, Artificial Sequence
  Synthetic
gucuauaugcaggaggagug

SEQ ID NO: 12796 - RNA, 20 nt, Artificial Sequence
  Synthetic
  misc_feature (11)..(11): n is a, c, g, or u
uuccuuggacncauaaggug

SEQ ID NO: 12797 - RNA, 20 nt, Artificial Sequence
  Synthetic
ugaaucuagccaccugggug

SEQ ID NO: 12798 - RNA, 20 nt, Artificial Sequence
  Synthetic
  misc_feature (13)..(13): n is a, c, g, or u
uggaggacaacanguuggug

SEQ ID NO: 12799 - RNA, 20 nt, Artificial Sequence
  Synthetic
  misc_feature (17)..(17): n is a, c, g, or u
accuugggcagguuccngug

SEQ ID NO: 12800 - RNA, 20 nt, Artificial Sequence
  Synthetic
uccggccaguuguccuugug

SEQ ID NO: 12801 - RNA, 20 nt, Artificial Sequence
  Synthetic
  misc_feature (18)..(18): n is a, c, g, or u
caaagacuguguguuuanug

SEQ ID NO: 12802 - RNA, 20 nt, Artificial Sequence
  Synthetic
  misc_feature (18)..(18): n is a, c, g, or u
ccccaucuuuuuguuuunug

SEQ ID NO: 12803 - RNA, 20 nt, Artificial Sequence
  Synthetic
  misc_feature (7)..(7): n is a, c, g, or u
gaaagunugucaacgaauug

SEQ ID NO: 12804 - RNA, 20 nt, Artificial Sequence
  Synthetic
uccaaggaauacuaacauug

SEQ ID NO: 12805 - RNA, 20 nt, Artificial Sequence
  Synthetic
aacucagaaaauccagauug

SEQ ID NO: 12806 - RNA, 20 nt, Artificial Sequence
  Synthetic
cauugagauucccgagauug

SEQ ID NO: 12807 - RNA, 20 nt, Artificial Sequence
  Synthetic
cuucugcgacgcggcgauug

SEQ ID NO: 12808 - RNA, 20 nt, Artificial Sequence
  Synthetic
agccuccaagcugugccuug

SEQ ID NO: 12809 - RNA, 20 nt, Artificial Sequence
  Synthetic
ugcgggucaccauauucuug

SEQ ID NO: 12810 - RNA, 20 nt, Artificial Sequence
  Synthetic
  misc_feature (4)..(4): n is a, c, g, or u
uuanugagugggaggaguug

SEQ ID NO: 12811 - RNA, 20 nt, Artificial Sequence
  Synthetic
  misc_feature (8)..(8): n is a, c, g, or u
  misc_feature (17)..(17): n is a, c, g, or u
auggaaangauguauanuug

SEQ ID NO: 12812 - RNA, 20 nt, Artificial Sequence
  Synthetic
  misc_feature (17)..(17): n is a, c, g, or u
auauggaugauguggunuug

SEQ ID NO: 12813 - RNA, 20 nt, Artificial Sequence
  Synthetic
  misc_feature (7)..(7): n is a, c, g, or u
  misc_feature (13)..(13): n is a, c, g, or u
ugauagnuguaancaauuug

SEQ ID NO: 12814 - RNA, 20 nt, Artificial Sequence
  Synthetic
ggugagugacuggagauuug

SEQ ID NO: 12815 - RNA, 20 nt, Artificial Sequence
  Synthetic
acacguagcgccucauuuug

SEQ ID NO: 12816 - RNA, 20 nt, Artificial Sequence
  Synthetic
ccacucccauagguauuuug

SEQ ID NO: 12817 - RNA, 20 nt, Artificial Sequence
  Synthetic
  misc_feature (9)..(9): n is a, c, g, or u
  misc_feature (20)..(20): n is a, c, g, or u
gugucgagnagaucucgaan

SEQ ID NO: 12818 - RNA, 20 nt, Artificial Sequence
  Synthetic
  misc_feature (20)..(20): n is a, c, g, or u
gaccaccgugaacgcccacn

SEQ ID NO: 12819 - RNA, 20 nt, Artificial Sequence
  Synthetic
  misc_feature (20)..(20): n is a, c, g, or u
uuaaucauuacuuccagacn

SEQ ID NO: 12820 - RNA, 20 nt, Artificial Sequence
  Synthetic
  misc_feature (8)..(8): n is a, c, g, or u
  misc_feature (20)..(20): n is a, c, g, or u
gaucgggnaagaaucccagn

SEQ ID NO: 12821 - RNA, 20 nt, Artificial Sequence
  Synthetic
  misc_feature (20)..(20): n is a, c, g, or u
gagcagaggcggugucgagn

SEQ ID NO: 12822 - RNA, 20 nt, Artificial Sequence
  Synthetic
  misc_feature (20)..(20): n is a, c, g, or u
cgaagugcacacgguccggn

SEQ ID NO: 12823 - RNA, 20 nt, Artificial Sequence
  Synthetic
  misc_feature (19)..(20): n is a, c, g, or u
cagucccccauggggaggnn

SEQ ID NO: 12824 - RNA, 20 nt, Artificial Sequence
  Synthetic
  misc_feature (20)..(20): n is a, c, g, or u
uccuguuuucauuuacugun

SEQ ID NO: 12825 - RNA, 20 nt, Artificial Sequence
  Synthetic
  misc_feature (20)..(20): n is a, c, g, or u
gcaaauauuuaguaacauun

SEQ ID NO: 12826 - RNA, 20 nt, Artificial Sequence
  Synthetic
  misc_feature (9)..(9): n is a, c, g, or u
uggaaagunugucaacgaau

SEQ ID NO: 12827 - RNA, 20 nt, Artificial Sequence
  Synthetic
  misc_feature (8)..(8): n is a, c, g, or u
uggcuuungggcauggacau

SEQ ID NO: 12828 - RNA, 20 nt, Artificial Sequence
  Synthetic
ccaccccaacagucccccau

SEQ ID NO: 12829 - RNA, 20 nt, Artificial Sequence
  Synthetic
  misc_feature (10)..(11): n is a, c, g, or u
caggguucannccuccccau

SEQ ID NO: 12830 - RNA, 20 nt, Artificial Sequence
  Synthetic
cagcacagccuagcagccau

SEQ ID NO: 12831 - RNA, 20 nt, Artificial Sequence
  Synthetic
uccaaaccucgaaaaggcau

SEQ ID NO: 12832 - RNA, 20 nt, Artificial Sequence
  Synthetic
  misc_feature (14)..(14): n is a, c, g, or u
cuuggguggcuuungggcau

SEQ ID NO: 12833 - RNA, 20 nt, Artificial Sequence
  Synthetic
cagaggugaaaaaguugcau

SEQ ID NO: 12834 - RNA, 20 nt, Artificial Sequence
  Synthetic
  misc_feature (1)..(1): n is a, c, g, or u
  misc_feature (9)..(9): n is a, c, g, or u
  misc_feature (12)..(12): n is a, c, g, or u
nggucuggngcnaaacucau

SEQ ID NO: 12835 - RNA, 20 nt, Artificial Sequence
  Synthetic
  misc_feature (7)..(7): n is a, c, g, or u
cccucanaaaacaaaaagau

SEQ ID NO: 12836 - RNA, 20 nt, Artificial Sequence
  Synthetic
uccccagucuucgauaagau

SEQ ID NO: 12837 - RNA, 20 nt, Artificial Sequence
  Synthetic
uccggaaguguugauaagau

SEQ ID NO: 12838 - RNA, 20 nt, Artificial Sequence
  Synthetic
ccaacucagaaaauccagau

SEQ ID NO: 12839 - RNA, 20 nt, Artificial Sequence
  Synthetic
  misc_feature (4)..(4): n is a, c, g, or u
  misc_feature (16)..(16): n is a, c, g, or u
gggnaagaaucccagnggau

SEQ ID NO: 12840 - RNA, 20 nt, Artificial Sequence
  Synthetic
ugcaggguccaacugaugau

SEQ ID NO: 12841 - RNA, 20 nt, Artificial Sequence
  Synthetic
  misc_feature (2)..(2): n is a, c, g, or u
gnucuuguucccaagaauau

SEQ ID NO: 12842 - RNA, 20 nt, Artificial Sequence
  Synthetic
uucgcacuccuccugcauau

SEQ ID NO: 12843 - RNA, 20 nt, Artificial Sequence
  Synthetic
ugucuggcuuucaguuauau

SEQ ID NO: 12844 - RNA, 20 nt, Artificial Sequence
  Synthetic
  misc_feature (15)..(15): n is a, c, g, or u
cuuccuguaaacagnccuau

SEQ ID NO: 12845 - RNA, 20 nt, Artificial Sequence
  Synthetic
ggcuaggaguuccgcaguau

SEQ ID NO: 12846 - RNA, 20 nt, Artificial Sequence
  Synthetic
agcuugccugagugccguau

SEQ ID NO: 12847 - RNA, 20 nt, Artificial Sequence
  Synthetic
gagucuagacucugugguau

SEQ ID NO: 12848 - RNA, 20 nt, Artificial Sequence
  Synthetic
acaccgccucugcucuguau

SEQ ID NO: 12849 - RNA, 20 nt, Artificial Sequence
  Synthetic
  misc_feature (17)..(17): n is a, c, g, or u
ccuaaaaaucagacaanuau

SEQ ID NO: 12850 - RNA, 20 nt, Artificial Sequence
  Synthetic
  misc_feature (2)..(2): n is a, c, g, or u
unccauaucgucaaucuuau

SEQ ID NO: 12851 - RNA, 20 nt, Artificial Sequence
  Synthetic
gcuaggcugugcugccaacu

SEQ ID NO: 12852 - RNA, 20 nt, Artificial Sequence
  Synthetic
cgucaaucuuaucgaagacu

SEQ ID NO: 12853 - RNA, 20 nt, Artificial Sequence
  Synthetic
aauaccacagagucuagacu

SEQ ID NO: 12854 - RNA, 20 nt, Artificial Sequence
  Synthetic
uucucuuggcucaguuuacu

SEQ ID NO: 12855 - RNA, 20 nt, Artificial Sequence
  Synthetic
gagguuggucuuccaaaccu

SEQ ID NO: 12856 - RNA, 20 nt, Artificial Sequence
  Synthetic
aguccucuuaugcaagaccu

SEQ ID NO: 12857 - RNA, 20 nt, Artificial Sequence
  Synthetic
gacaaacgggcaacauaccu

SEQ ID NO: 12858 - RNA, 20 nt, Artificial Sequence
  Synthetic
  misc_feature (15)..(15): n is a, c, g, or u
gacacacggguguunccccu

SEQ ID NO: 12859 - RNA, 20 nt, Artificial Sequence
  Synthetic
  misc_feature (6)..(6): n is a, c, g, or u
gacgangaggcagguccccu

SEQ ID NO: 12860 - RNA, 20 nt, Artificial Sequence
  Synthetic
uagcugacuacuaauucccu

SEQ ID NO: 12861 - RNA, 20 nt, Artificial Sequence
  Synthetic
caagccuccaagcugugccu

SEQ ID NO: 12862 - RNA, 20 nt, Artificial Sequence
  Synthetic
  misc_feature (8)..(8): n is a, c, g, or u
ugcuggunguugaugauccu

SEQ ID NO: 12863 - RNA, 20 nt, Artificial Sequence
  Synthetic
ggcguccggccaguuguccu

SEQ ID NO: 12864 - RNA, 20 nt, Artificial Sequence
  Synthetic
cgaccccucccggggccgcu

SEQ ID NO: 12865 - RNA, 20 nt, Artificial Sequence
  Synthetic
aauuuguccugguuaucgcu

SEQ ID NO: 12866 - RNA, 20 nt, Artificial Sequence
  Synthetic
caaggcacagcuuggaggcu

SEQ ID NO: 12867 - RNA, 20 nt, Artificial Sequence
  Synthetic
uacuucccacccagguggcu

SEQ ID NO: 12868 - RNA, 20 nt, Artificial Sequence
  Synthetic
cuacuaauucccuggaugcu

SEQ ID NO: 12869 - RNA, 20 nt, Artificial Sequence
  Synthetic
ggacuccuaggaccccugcu

SEQ ID NO: 12870 - RNA, 20 nt, Artificial Sequence
  Synthetic
  misc_feature (5)..(5): n is a, c, g, or u
gggcncuguacuuuccugcu

SEQ ID NO: 12871 - RNA, 20 nt, Artificial Sequence
  Synthetic
ugaaaaaguugcauggugcu

SEQ ID NO: 12872 - RNA, 20 nt, Artificial Sequence
  Synthetic
  misc_feature (7)..(7): n is a, c, g, or u
  misc_feature (18)..(18): n is a, c, g, or u
ccuucunuucgagaucuncu

SEQ ID NO: 12873 - RNA, 20 nt, Artificial Sequence
  Synthetic
  misc_feature (2)..(2): n is a, c, g, or u
gnggguugaggucccaaucu

SEQ ID NO: 12874 - RNA, 20 nt, Artificial Sequence
  Synthetic
gucgcagaagaucucaaucu

SEQ ID NO: 12875 - RNA, 20 nt, Artificial Sequence
  Synthetic
guauucccaucccaucaucu

SEQ ID NO: 12876 - RNA, 20 nt, Artificial Sequence
  Synthetic
  misc_feature (14)..(14): n is a, c, g, or u
aggcggugucgagnagaucu

SEQ ID NO: 12877 - RNA, 20 nt, Artificial Sequence
  Synthetic
  misc_feature (2)..(2): n is a, c, g, or u
gngcccugacucugggaucu

SEQ ID NO: 12878 - RNA, 20 nt, Artificial Sequence
  Synthetic
  misc_feature (16)..(16): n is a, c, g, or u
aaugauuaacuacauncucu

SEQ ID NO: 12879 - RNA, 20 nt, Artificial Sequence
  Synthetic
cucacaauaccacagagucu

SEQ ID NO: 12880 - RNA, 20 nt, Artificial Sequence
  Synthetic
gagaaguccaccacgagucu

SEQ ID NO: 12881 - RNA, 20 nt, Artificial Sequence
  Synthetic
  misc_feature (1)..(1): n is a, c, g, or u
  misc_feature (15)..(16): n is a, c, g, or u
nuguaaauaaugucnngucu

SEQ ID NO: 12882 - RNA, 20 nt, Artificial Sequence
  Synthetic
uuugcgggucaccauauucu

SEQ ID NO: 12883 - RNA, 20 nt, Artificial Sequence
  Synthetic
ggcgagggaguucuucuucu

SEQ ID NO: 12884 - RNA, 20 nt, Artificial Sequence
  Synthetic
aucuucuuguugguucuucu

SEQ ID NO: 12885 - RNA, 20 nt, Artificial Sequence
  Synthetic
  misc_feature (6)..(6): n is a, c, g, or u
uuuggnagagaaacuguucu

SEQ ID NO: 12886 - RNA, 20 nt, Artificial Sequence
  Synthetic
uggacuucucucaauuuucu

SEQ ID NO: 12887 - RNA, 20 nt, Artificial Sequence
  Synthetic
ggaggagcugcuggcacagu

SEQ ID NO: 12888 - RNA, 20 nt, Artificial Sequence
  Synthetic
auaacugaaagccagacagu

SEQ ID NO: 12889 - RNA, 20 nt, Artificial Sequence
  Synthetic
auggccaagccccaaccagu

SEQ ID NO: 12890 - RNA, 20 nt, Artificial Sequence
  Synthetic
ucauccucaggccaugcagu

SEQ ID NO: 12891 - RNA, 20 nt, Artificial Sequence
  Synthetic
gagguuccuugagcaggagu

SEQ ID NO: 12892 - RNA, 20 nt, Artificial Sequence
  Synthetic
  misc_feature (6)..(6): n is a, c, g, or u
guuuanugagugggaggagu

SEQ ID NO: 12893 - RNA, 20 nt, Artificial Sequence
  Synthetic
  misc_feature (12)..(12): n is a, c, g, or u
  misc_feature (14)..(14): n is a, c, g, or u
auaaaagagagncnacacgu

SEQ ID NO: 12894 - RNA, 20 nt, Artificial Sequence
  Synthetic
  misc_feature (10)..(11): n is a, c, g, or u
ggauuaaagnnagguaccgu

SEQ ID NO: 12895 - RNA, 20 nt, Artificial Sequence
  Synthetic
  misc_feature (2)..(2): n is a, c, g, or u
unggccaucagcgcaugcgu

SEQ ID NO: 12896 - RNA, 20 nt, Artificial Sequence
  Synthetic
accacagagucuagacucgu

SEQ ID NO: 12897 - RNA, 20 nt, Artificial Sequence
  Synthetic
uaugccucaaggucggucgu

SEQ ID NO: 12898 - RNA, 20 nt, Artificial Sequence
  Synthetic
ccaaaagacccacaauucgu

SEQ ID NO: 12899 - RNA, 20 nt, Artificial Sequence
  Synthetic
ccauuuguucagugguucgu

SEQ ID NO: 12900 - RNA, 20 nt, Artificial Sequence
  Synthetic
aagccccaaccagugggggu

SEQ ID NO: 12901 - RNA, 20 nt, Artificial Sequence
  Synthetic
cugacgcaacccccacuggu

SEQ ID NO: 12902 - RNA, 20 nt, Artificial Sequence
  Synthetic
acagagucuagacucguggu

SEQ ID NO: 12903 - RNA, 20 nt, Artificial Sequence
  Synthetic
gggaucuugaagaguuuggu

SEQ ID NO: 12904 - RNA, 20 nt, Artificial Sequence
  Synthetic
  misc_feature (18)..(18): n is a, c, g, or u
ugaagaguuugguggaangu

SEQ ID NO: 12905 - RNA, 20 nt, Artificial Sequence
  Synthetic
  misc_feature (17)..(18): n is a, c, g, or u
ugggauauguaauuggnngu

SEQ ID NO: 12906 - RNA, 20 nt, Artificial Sequence
  Synthetic
  misc_feature (18)..(18): n is a, c, g, or u
caugguccggugcuggungu

SEQ ID NO: 12907 - RNA, 20 nt, Artificial Sequence
  Synthetic
  misc_feature (1)..(1): n is a, c, g, or u
nccuccccaugggggacugu

SEQ ID NO: 12908 - RNA, 20 nt, Artificial Sequence
  Synthetic
acaguaguuuccggaagugu

SEQ ID NO: 12909 - RNA, 20 nt, Artificial Sequence
  Synthetic
  misc_feature (7)..(7): n is a, c, g, or u
uuuggunucuuuuggagugu

SEQ ID NO: 12910 - RNA, 20 nt, Artificial Sequence
  Synthetic
ucaggcaagcuauucugugu

SEQ ID NO: 12911 - RNA, 20 nt, Artificial Sequence
  Synthetic
cauuugcaggaggacauugu

SEQ ID NO: 12912 - RNA, 20 nt, Artificial Sequence
  Synthetic
acaggcgggguuuuucuugu

SEQ ID NO: 12913 - RNA, 20 nt, Artificial Sequence
  Synthetic
  misc_feature (10)..(10): n is a, c, g, or u
  misc_feature (19)..(19): n is a, c, g, or u
ccauggaaangauguauanu

SEQ ID NO: 12914 - RNA, 20 nt, Artificial Sequence
  Synthetic
  misc_feature (19)..(19): n is a, c, g, or u
uuuuaggcccauauuaacnu

SEQ ID NO: 12915 - RNA, 20 nt, Artificial Sequence
  Synthetic
  misc_feature (19)..(19): n is a, c, g, or u
uuauauggaugauguggunu

SEQ ID NO: 12916 - RNA, 20 nt, Artificial Sequence
  Synthetic
  misc_feature (9)..(9): n is a, c, g, or u
  misc_feature (15)..(15): n is a, c, g, or u
guugauagnuguaancaauu

SEQ ID NO: 12917 - RNA, 20 nt, Artificial Sequence
  Synthetic
aaggugggagugggagcauu

SEQ ID NO: 12918 - RNA, 20 nt, Artificial Sequence
  Synthetic
uuggugagugacuggagauu

SEQ ID NO: 12919 - RNA, 20 nt, Artificial Sequence
  Synthetic
ugccuuccugacugccgauu

SEQ ID NO: 12920 - RNA, 20 nt, Artificial Sequence
  Synthetic
  misc_feature (3)..(3): n is a, c, g, or u
  misc_feature (15)..(15): n is a, c, g, or u
ggnaagaaucccagnggauu

SEQ ID NO: 12921 - RNA, 20 nt, Artificial Sequence
  Synthetic
  misc_feature (10)..(10): n is a, c, g, or u
uguaaacagnccuauugauu

SEQ ID NO: 12922 - RNA, 20 nt, Artificial Sequence
  Synthetic
cagcgcaugcguggaaccuu

SEQ ID NO: 12923 - RNA, 20 nt, Artificial Sequence
  Synthetic
guuacuaaauauuugcccuu

SEQ ID NO: 12924 - RNA, 20 nt, Artificial Sequence
  Synthetic
ucucaauguuaguauuccuu

SEQ ID NO: 12925 - RNA, 20 nt, Artificial Sequence
  Synthetic
gaccccucccggggccgcuu

SEQ ID NO: 12926 - RNA, 20 nt, Artificial Sequence
  Synthetic
uggauuuucugaguuggcuu

SEQ ID NO: 12927 - RNA, 20 nt, Artificial Sequence
  Synthetic
  misc_feature (11)..(11): n is a, c, g, or u
  misc_feature (17)..(17): n is a, c, g, or u
gguucagauanuguuuncuu

SEQ ID NO: 12928 - RNA, 20 nt, Artificial Sequence
  Synthetic
ucuugcauaagaggacucuu

SEQ ID NO: 12929 - RNA, 20 nt, Artificial Sequence
  Synthetic
  misc_feature (5)..(5): n is a, c, g, or u
cucanuaaacacacagucuu

SEQ ID NO: 12930 - RNA, 20 nt, Artificial Sequence
  Synthetic
gguacaggguccccagucuu

SEQ ID NO: 12931 - RNA, 20 nt, Artificial Sequence
  Synthetic
uaccaauuuucuuuugucuu

SEQ ID NO: 12932 - RNA, 20 nt, Artificial Sequence
  Synthetic
uuagaaaggccuuguaaguu

SEQ ID NO: 12933 - RNA, 20 nt, Artificial Sequence
  Synthetic
  misc_feature (6)..(6): n is a, c, g, or u
uucuuncccgaucaucaguu

SEQ ID NO: 12934 - RNA, 20 nt, Artificial Sequence
  Synthetic
  misc_feature (5)..(5): n is a, c, g, or u
uuuanugagugggaggaguu

SEQ ID NO: 12935 - RNA, 20 nt, Artificial Sequence
  Synthetic
  misc_feature (3)..(3): n is a, c, g, or u
  misc_feature (16)..(16): n is a, c, g, or u
auncucuggauaauangguu

SEQ ID NO: 12936 - RNA, 20 nt, Artificial Sequence
  Synthetic
ugacgcaacccccacugguu

SEQ ID NO: 12937 - RNA, 20 nt, Artificial Sequence
  Synthetic
  misc_feature (17)..(17): n is a, c, g, or u
aaauuggaggacaacanguu

SEQ ID NO: 12938 - RNA, 20 nt, Artificial Sequence
  Synthetic
  misc_feature (16)..(17): n is a, c, g, or u
gggauauguaauuggnnguu

SEQ ID NO: 12939 - RNA, 20 nt, Artificial Sequence
  Synthetic
ccuccccaugggggacuguu

SEQ ID NO: 12940 - RNA, 20 nt, Artificial Sequence
  Synthetic
caggcaagcuauucuguguu

SEQ ID NO: 12941 - RNA, 20 nt, Artificial Sequence
  Synthetic
gcucccacucccaccuuguu

SEQ ID NO: 12942 - RNA, 20 nt, Artificial Sequence
  Synthetic
uuccggaaacuacuguuguu

SEQ ID NO: 12943 - RNA, 20 nt, Artificial Sequence
  Synthetic
  misc_feature (16)..(18): n is a, c, g, or u
aaguuuccuaaaacannnuu

SEQ ID NO: 12944 - RNA, 20 nt, Artificial Sequence
  Synthetic
  misc_feature (18)..(18): n is a, c, g, or u
uauauggaugauguggunuu

SEQ ID NO: 12945 - RNA, 20 nt, Artificial Sequence
  Synthetic
accugggugggaaguaauuu

SEQ ID NO: 12946 - RNA, 20 nt, Artificial Sequence
  Synthetic
uugauaagauaggggcauuu

SEQ ID NO: 12947 - RNA, 20 nt, Artificial Sequence
  Synthetic
  misc_feature (2)..(2): n is a, c, g, or u
cnacacguagcgccucauuu

SEQ ID NO: 12948 - RNA, 20 nt, Artificial Sequence
  Synthetic
gcccacucccauagguauuu

SEQ ID NO: 12949 - RNA, 20 nt, Artificial Sequence
  Synthetic
gcugugccuuggguggcuuu

SEQ ID NO: 12950 - RNA, 20 nt, Artificial Sequence
  Synthetic
  misc_feature (13)..(13): n is a, c, g, or u
acauuauuuacanacucuuu

SEQ ID NO: 12951 - RNA, 20 nt, Artificial Sequence
  Synthetic
ucaacgaauugugggucuuu

SEQ ID NO: 12952 - RNA, 20 nt, Artificial Sequence
  Synthetic
ucugggaucuugaagaguuu

SEQ ID NO: 12953 - RNA, 20 nt, Artificial Sequence
  Synthetic
cccaugccuuuucgagguuu

SEQ ID NO: 12954 - RNA, 20 nt, Artificial Sequence
  Synthetic
caacgaauugugggucuuuu

SEQ ID NO: 12955 - RNA, 17 nt, Artificial Sequence
  Synthetic
gagaccuucgucugcga

SEQ ID NO: 12956 - RNA, 17 nt, Artificial Sequence
  Synthetic
ggugacccgcaaaauga

SEQ ID NO: 12957 - RNA, 17 nt, Artificial Sequence
  Synthetic
gcgacgugcagagguga

SEQ ID NO: 12958 - RNA, 17 nt, Artificial Sequence
  Synthetic
gggcgcaccucucuuua

SEQ ID NO: 12959 - RNA, 17 nt, Artificial Sequence
  Synthetic
gacuggagauuugggac

SEQ ID NO: 12960 - RNA, 17 nt, Artificial Sequence
  Synthetic
guaaacaaaggacgucc

SEQ ID NO: 12961 - RNA, 17 nt, Artificial Sequence
  Synthetic
gagaucuucugcgacgc

SEQ ID NO: 12962 - RNA, 17 nt, Artificial Sequence
  Synthetic
ggcacagacggggaguc

SEQ ID NO: 12963 - RNA, 17 nt, Artificial Sequence
  Synthetic
ggucguccgcgggauuc

SEQ ID NO: 12964 - RNA, 17 nt, Artificial Sequence
  Synthetic
guccgcguaaagagagg

SEQ ID NO: 12965 - RNA, 17 nt, Artificial Sequence
  Synthetic
guaccgaccgaccacgg

SEQ ID NO: 12966 - RNA, 17 nt, Artificial Sequence
  Synthetic
gaaaggccuuguaaguu

SEQ ID NO: 12967 - RNA, 20 nt, Artificial Sequence
  Synthetic
  misc_feature (5)..(5): n is a, c, g, or u
gaccngcugcgagcaaaaca

SEQ ID NO: 12968 - RNA, 20 nt, Artificial Sequence
  Synthetic
ggaccccugcucguguuaca

SEQ ID NO: 12969 - RNA, 20 nt, Artificial Sequence
  Synthetic
ggcguucacgguggucucca

SEQ ID NO: 12970 - RNA, 20 nt, Artificial Sequence
  Synthetic
gccucccgauacagagcaga

SEQ ID NO: 12971 - RNA, 20 nt, Artificial Sequence
  Synthetic
gagauugagaucuucugcga

SEQ ID NO: 12972 - RNA, 20 nt, Artificial Sequence
  Synthetic
gucccgucggcgcugaaucc

SEQ ID NO: 12973 - RNA, 20 nt, Artificial Sequence
  Synthetic
gacguaaacaaaggacgucc

SEQ ID NO: 12974 - RNA, 20 nt, Artificial Sequence
  Synthetic
  misc_feature (13)..(13): n is a, c, g, or u
gggcuuggccaunggccauc

SEQ ID NO: 12975 - RNA, 20 nt, Artificial Sequence
  Synthetic
gaaggcacagacggggaguc

SEQ ID NO: 12976 - RNA, 20 nt, Artificial Sequence
  Synthetic
ggaguccgcguaaagagagg

SEQ ID NO: 12977 - RNA, 20 nt, Artificial Sequence
  Synthetic
  misc_feature (2)..(3): n is a, c, g, or u
gnnguaccgaccgaccacgg

SEQ ID NO: 12978 - RNA, 20 nt, Artificial Sequence
  Synthetic
gugcugccaacuggauccug

SEQ ID NO: 12979 - RNA, 17 nt, Artificial Sequence
  Synthetic
ccccugcucguguuaca

SEQ ID NO: 12980 - RNA, 17 nt, Artificial Sequence
  Synthetic
cacaaagguuccacgca

SEQ ID NO: 12981 - RNA, 17 nt, Artificial Sequence
  Synthetic
ucccgauacagagcaga

SEQ ID NO: 12982 - RNA, 17 nt, Artificial Sequence
  Synthetic
auugagaucuucugcga

SEQ ID NO: 12983 - RNA, 17 nt, Artificial Sequence
  Synthetic
ccucugccgauccauac

SEQ ID NO: 12984 - RNA, 17 nt, Artificial Sequence
  Synthetic
ccgucggcgcugaaucc

SEQ ID NO: 12985 - RNA, 17 nt, Artificial Sequence
  Synthetic
acgaaggucucaaucgc

SEQ ID NO: 12986 - RNA, 17 nt, Artificial Sequence
  Synthetic
uuuguuuacgucccguc

SEQ ID NO: 12987 - RNA, 17 nt, Artificial Sequence
  Synthetic
ccccgggaggggucguc

SEQ ID NO: 12988 - RNA, 17 nt, Artificial Sequence
  Synthetic
cgauugagaccuucguc

SEQ ID NO: 12989 - RNA, 17 nt, Artificial Sequence
  Synthetic
uuaucgcuggauguguc

SEQ ID NO: 12990 - RNA, 17 nt, Artificial Sequence
  Synthetic
ccgagauugagaucuuc

SEQ ID NO: 12991 - RNA, 17 nt, Artificial Sequence
  Synthetic
ccccaaccagugggggu

SEQ ID NO: 12992 - RNA, 17 nt, Artificial Sequence
  Synthetic
cacguagcgccucauuu

SEQ ID NO: 12993 - RNA, 20 nt, Artificial Sequence
  Synthetic
aagcgggcgguagagcccca

SEQ ID NO: 12994 - RNA, 20 nt, Artificial Sequence
  Synthetic
agacacaaagguuccacgca

SEQ ID NO: 12995 - RNA, 20 nt, Artificial Sequence
  Synthetic
auugagaccuucgucugcga

SEQ ID NO: 12996 - RNA, 20 nt, Artificial Sequence
  Synthetic
caugcgacgugcagagguga

SEQ ID NO: 12997 - RNA, 20 nt, Artificial Sequence
  Synthetic
acggggcgcaccucucuuua

SEQ ID NO: 12998 - RNA, 20 nt, Artificial Sequence
  Synthetic
ucuccucugccgauccauac

SEQ ID NO: 12999 - RNA, 20 nt, Artificial Sequence
  Synthetic
aaaacgccgcagacacaucc

SEQ ID NO: 13000 - RNA, 20 nt, Artificial Sequence
  Synthetic
cugugcugccaacuggaucc

SEQ ID NO: 13001 - RNA, 20 nt, Artificial Sequence
  Synthetic
auugagaucuucugcgacgc

SEQ ID NO: 13002 - RNA, 20 nt, Artificial Sequence
  Synthetic
cagacgaaggucucaaucgc

SEQ ID NO: 13003 - RNA, 20 nt, Artificial Sequence
  Synthetic
uuaucgcuggaugugucugc

SEQ ID NO: 13004 - RNA, 20 nt, Artificial Sequence
  Synthetic
uccuuuguuuacgucccguc

SEQ ID NO: 13005 - RNA, 20 nt, Artificial Sequence
  Synthetic
cggccccgggaggggucguc

SEQ ID NO: 13006 - RNA, 20 nt, Artificial Sequence
  Synthetic
cggcgauugagaccuucguc

SEQ ID NO: 13007 - RNA, 20 nt, Artificial Sequence
  Synthetic
ugguuaucgcuggauguguc

SEQ ID NO: 13008 - RNA, 20 nt, Artificial Sequence
  Synthetic
aggggucguccgcgggauuc

SEQ ID NO: 13009 - RNA, 20 nt, Artificial Sequence
  Synthetic
uucccgagauugagaucuuc

SEQ ID NO: 13010 - RNA, 20 nt, Artificial Sequence
  Synthetic
aagccccaaccagugggggu

SEQ ID NO: 13011 - RNA, 20 nt, Artificial Sequence
  Synthetic
uuagaaaggccuuguaaguu

SEQ ID NO: 13012 - RNA, 20 nt, Artificial Sequence
  Synthetic
  misc_feature (2)..(2): n is a, c, g, or u
cnacacguagcgccucauuu

SEQ ID NO: 13013 - RNA, 17 nt, Artificial Sequence
  Synthetic
guucacgguggucucca

SEQ ID NO: 13014 - RNA, 17 nt, Artificial Sequence
  Synthetic
  misc_feature (6)..(7): n is a, c, g, or u
  misc_feature (11)..(11): n is a, c, g, or u
gguacnncagncggaga

SEQ ID NO: 13015 - RNA, 17 nt, Artificial Sequence
  Synthetic
gguccuaggaguccuga

SEQ ID NO: 13016 - RNA, 20 nt, Artificial Sequence
  Synthetic
  misc_feature (7)..(7): n is a, c, g, or u
ggccaunggccaucagcgca

SEQ ID NO: 13017 - RNA, 20 nt, Artificial Sequence
  Synthetic
  misc_feature (9)..(10): n is a, c, g, or u
  misc_feature (14)..(14): n is a, c, g, or u
gucgguacnncagncggaga

SEQ ID NO: 13018 - RNA, 20 nt, Artificial Sequence
  Synthetic
gacaaaagaaaauugguaac

SEQ ID NO: 13019 - RNA, 20 nt, Artificial Sequence
  Synthetic
  misc_feature (7)..(7): n is a, c, g, or u
  misc_feature (10)..(10): n is a, c, g, or u
  misc_feature (18)..(18): n is a, c, g, or u
gaguuungcnccagaccngc

SEQ ID NO: 13020 - RNA, 20 nt, Artificial Sequence
  Synthetic
  misc_feature (5)..(6): n is a, c, g, or u
  misc_feature (10)..(10): n is a, c, g, or u
guacnncagncggagaagcg

SEQ ID NO: 13021 - RNA, 20 nt, Artificial Sequence
  Synthetic
gcucccacucccaccuuguu

SEQ ID NO: 13022 - RNA, 20 nt, Artificial Sequence
  Synthetic
gcccacucccauagguauuu

SEQ ID NO: 13023 - RNA, 17 nt, Artificial Sequence
  Synthetic
  misc_feature (6)..(6): n is a, c, g, or u
uuacanacucuuuggaa

SEQ ID NO: 13024 - RNA, 17 nt, Artificial Sequence
  Synthetic
  misc_feature (2)..(2): n is a, c, g, or u
cngcugcgagcaaaaca

SEQ ID NO: 13025 - RNA, 17 nt, Artificial Sequence
  Synthetic
cgggcgguagagcccca

SEQ ID NO: 13026 - RNA, 17 nt, Artificial Sequence
  Synthetic
  misc_feature (4)..(4): n is a, c, g, or u
caunggccaucagcgca

SEQ ID NO: 13027 - RNA, 17 nt, Artificial Sequence
  Synthetic
aaaagaaaauugguaac

SEQ ID NO: 13028 - RNA, 17 nt, Artificial Sequence
  Synthetic
acgccgcagacacaucc

SEQ ID NO: 13029 - RNA, 17 nt, Artificial Sequence
  Synthetic
ugcugccaacuggaucc

SEQ ID NO: 13030 - RNA, 17 nt, Artificial Sequence
  Synthetic
  misc_feature (4)..(4): n is a, c, g, or u
  misc_feature (7)..(7): n is a, c, g, or u
  misc_feature (15)..(15): n is a, c, g, or u
uuungcnccagaccngc

SEQ ID NO: 13031 - RNA, 17 nt, Artificial Sequence
  Synthetic
ucgcuggaugugucugc

SEQ ID NO: 13032 - RNA, 17 nt, Artificial Sequence
  Synthetic
  misc_feature (10)..(10): n is a, c, g, or u
cuuggccaunggccauc

SEQ ID NO: 13033 - RNA, 17 nt, Artificial Sequence
  Synthetic
ucuauaugcaggaggag

SEQ ID NO: 13034 - RNA, 17 nt, Artificial Sequence
  Synthetic
  misc_feature (2)..(3): n is a, c, g, or u
  misc_feature (7)..(7): n is a, c, g, or u
cnncagncggagaagcg

SEQ ID NO: 13035 - RNA, 17 nt, Artificial Sequence
  Synthetic
cugccaacuggauccug

SEQ ID NO: 13036 - RNA, 17 nt, Artificial Sequence
  Synthetic
  misc_feature (14)..(14): n is a, c, g, or u
uugggcagguuccngug

SEQ ID NO: 13037 - RNA, 17 nt, Artificial Sequence
  Synthetic
  misc_feature (9)..(9): n is a, c, g, or u
  misc_feature (11)..(11): n is a, c, g, or u
aaagagagncnacacgu

SEQ ID NO: 13038 - RNA, 17 nt, Artificial Sequence
  Synthetic
  misc_feature (7)..(7): n is a, c, g, or u
  misc_feature (16)..(16): n is a, c, g, or u
uggaaangauguauanu

SEQ ID NO: 13039 - RNA, 17 nt, Artificial Sequence
  Synthetic
cccacucccaccuuguu

SEQ ID NO: 13040 - RNA, 17 nt, Artificial Sequence
  Synthetic
cacucccauagguauuu

SEQ ID NO: 13041 - RNA, 20 nt, Artificial Sequence
  Synthetic
  misc_feature (9)..(9): n is a, c, g, or u
uauuuacanacucuuuggaa

SEQ ID NO: 13042 - RNA, 20 nt, Artificial Sequence
  Synthetic
uauggugacccgcaaaauga

SEQ ID NO: 13043 - RNA, 20 nt, Artificial Sequence
  Synthetic
agggguccuaggaguccuga

SEQ ID NO: 13044 - RNA, 20 nt, Artificial Sequence
  Synthetic
agugacuggagauuugggac

SEQ ID NO: 13045 - RNA, 20 nt, Artificial Sequence
  Synthetic
uggucuauaugcaggaggag

SEQ ID NO: 13046 - RNA, 20 nt, Artificial Sequence
  Synthetic
  misc_feature (17)..(17): n is a, c, g, or u
accuugggcagguuccngug

SEQ ID NO: 13047 - RNA, 20 nt, Artificial Sequence
  Synthetic
  misc_feature (12)..(12): n is a, c, g, or u
  misc_feature (14)..(14): n is a, c, g, or u
auaaaagagagncnacacgu

SEQ ID NO: 13048 - RNA, 20 nt, Artificial Sequence
  Synthetic
  misc_feature (10)..(10): n is a, c, g, or u
  misc_feature (19)..(19): n is a, c, g, or u
ccauggaaangauguauanu

SEQ ID NO: 13049 - RNA, 17 nt, Artificial Sequence
  Synthetic
cuuccaaaccucgaaaa

SEQ ID NO: 13050 - RNA, 17 nt, Artificial Sequence
  Synthetic
agaggaagaugauaaaa

SEQ ID NO: 13051 - RNA, 17 nt, Artificial Sequence
  Synthetic
gcauauagaccaccaaa

SEQ ID NO: 13052 - RNA, 17 nt, Artificial Sequence
  Synthetic
  misc_feature (3)..(3): n is a, c, g, or u
  misc_feature (9)..(9): n is a, c, g, or u
uanuguuuncuuagaaa

SEQ ID NO: 13053 - RNA, 17 nt, Artificial Sequence
  Synthetic
guauacaugcauauaaa

SEQ ID NO: 13054 - RNA, 17 nt, Artificial Sequence
  Synthetic
guuggcgagaaaguaaa

SEQ ID NO: 13055 - RNA, 17 nt, Artificial Sequence
  Synthetic
uucucgccaacuuacaa

SEQ ID NO: 13056 - RNA, 17 nt, Artificial Sequence
  Synthetic
  misc_feature (5)..(5): n is a, c, g, or u
gcccnaaagccacccaa

SEQ ID NO: 13057 - RNA, 17 nt, Artificial Sequence
  Synthetic
uuggacccugcauucaa

SEQ ID NO: 13058 - RNA, 17 nt, Artificial Sequence
  Synthetic
aaggaaagaagucagaa

SEQ ID NO: 13059 - RNA, 17 nt, Artificial Sequence
  Synthetic
  misc_feature (8)..(8): n is a, c, g, or u
gguccggnagaugagaa

SEQ ID NO: 13060 - RNA, 17 nt, Artificial Sequence
  Synthetic
  misc_feature (1)..(1): n is a, c, g, or u
nugaacccuggcccgaa

SEQ ID NO: 13061 - RNA, 17 nt, Artificial Sequence
  Synthetic
cauagguauuuugcgaa

SEQ ID NO: 13062 - RNA, 17 nt, Artificial Sequence
  Synthetic
caaucggcagucaggaa

SEQ ID NO: 13063 - RNA, 17 nt, Artificial Sequence
  Synthetic
gccagacagugggggaa

SEQ ID NO: 13064 - RNA, 17 nt, Artificial Sequence
  Synthetic
ucauccauauaacugaa

SEQ ID NO: 13065 - RNA, 17 nt, Artificial Sequence
  Synthetic
auggagaccaccgugaa

SEQ ID NO: 13066 - RNA, 17 nt, Artificial Sequence
  Synthetic
ucugaguuggcuuugaa

SEQ ID NO: 13067 - RNA, 17 nt, Artificial Sequence
  Synthetic
  misc_feature (15)..(15): n is a, c, g, or u
caauguccaugcccnaa

SEQ ID NO: 13068 - RNA, 17 nt, Artificial Sequence
  Synthetic
guaccguagaagaauaa

SEQ ID NO: 13069 - RNA, 17 nt, Artificial Sequence
  Synthetic
uguuccggagacucuaa

SEQ ID NO: 13070 - RNA, 17 nt, Artificial Sequence
  Synthetic
gcauauaaaggcauuaa

SEQ ID NO: 13071 - RNA, 17 nt, Artificial Sequence
  Synthetic
  misc_feature (4)..(4): n is a, c, g, or u
uggnuauccugcuuuaa

SEQ ID NO: 13072 - RNA, 17 nt, Artificial Sequence
  Synthetic
  misc_feature (12)..(12): n is a, c, g, or u
uguauacaagcnaaaca

SEQ ID NO: 13073 - RNA, 17 nt, Artificial Sequence
  Synthetic
uuauaugcauguauaca

SEQ ID NO: 13074 - RNA, 17 nt, Artificial Sequence
  Synthetic
  misc_feature (6)..(6): n is a, c, g, or u
uguuungcuuguauaca

SEQ ID NO: 13075 - RNA, 17 nt, Artificial Sequence
  Synthetic
  misc_feature (2)..(2): n is a, c, g, or u
unuguucaccagcacca

SEQ ID NO: 13076 - RNA, 17 nt, Artificial Sequence
  Synthetic
  misc_feature (2)..(2): n is a, c, g, or u
cnaccagcaccggacca

SEQ ID NO: 13077 - RNA, 17 nt, Artificial Sequence
  Synthetic
agaaagauuugucccca

SEQ ID NO: 13078 - RNA, 17 nt, Artificial Sequence
  Synthetic
ggaagaccaaccuccca

SEQ ID NO: 13079 - RNA, 17 nt, Artificial Sequence
  Synthetic
cacucauccucaggcca

SEQ ID NO: 13080 - RNA, 17 nt, Artificial Sequence
  Synthetic
  misc_feature (10)..(10): n is a, c, g, or u
cugauggccnauggcca

SEQ ID NO: 13081 - RNA, 17 nt, Artificial Sequence
  Synthetic
uacuguucaagccucca

SEQ ID NO: 13082 - RNA, 17 nt, Artificial Sequence
  Synthetic
  misc_feature (4)..(4): n is a, c, g, or u
auangggucaaugucca

SEQ ID NO: 13083 - RNA, 17 nt, Artificial Sequence
  Synthetic
gagacacaaagguucca

SEQ ID NO: 13084 - RNA, 17 nt, Artificial Sequence
  Synthetic
  misc_feature (2)..(2): n is a, c, g, or u
unggauaaaaccuagca

SEQ ID NO: 13085 - RNA, 17 nt, Artificial Sequence
  Synthetic
cauacggcacucaggca

SEQ ID NO: 13086 - RNA, 17 nt, Artificial Sequence
  Synthetic
ucaccauacggcacuca

SEQ ID NO: 13087 - RNA, 17 nt, Artificial Sequence
  Synthetic
uugggguggagcccuca

SEQ ID NO: 13088 - RNA, 17 nt, Artificial Sequence
  Synthetic
  misc_feature (3)..(3): n is a, c, g, or u
agngacacucauccuca

SEQ ID NO: 13089 - RNA, 17 nt, Artificial Sequence
  Synthetic
ucauguccuacuguuca

SEQ ID NO: 13090 - RNA, 17 nt, Artificial Sequence
  Synthetic
gagaguaacuccacaga

SEQ ID NO: 13091 - RNA, 17 nt, Artificial Sequence
  Synthetic
gaggcauagcagcagga

SEQ ID NO: 13092 - RNA, 17 nt, Artificial Sequence
  Synthetic
  misc_feature (1)..(1): n is a, c, g, or u
  misc_feature (3)..(3): n is a, c, g, or u
ngnucuuuguacuagga

SEQ ID NO: 13093 - RNA, 17 nt, Artificial Sequence
  Synthetic
aaggacaacuggccgga

SEQ ID NO: 13094 - RNA, 17 nt, Artificial Sequence
  Synthetic
ucugcucuguaucggga

SEQ ID NO: 13095 - RNA, 17 nt, Artificial Sequence
  Synthetic
acuacuaauucccugga

SEQ ID NO: 13096 - RNA, 17 nt, Artificial Sequence
  Synthetic
gacugccgauuggugga

SEQ ID NO: 13097 - RNA, 17 nt, Artificial Sequence
  Synthetic
ccaaggcacagcuugga

SEQ ID NO: 13098 - RNA, 17 nt, Artificial Sequence
  Synthetic
  misc_feature (15)..(15): n is a, c, g, or u
cuguuguuagacganga

SEQ ID NO: 13099 - RNA, 17 nt, Artificial Sequence
  Synthetic
aaccaacaagaagauga

SEQ ID NO: 13100 - RNA, 17 nt, Artificial Sequence
  Synthetic
caagagaaacggacuga

SEQ ID NO: 13101 - RNA, 17 nt, Artificial Sequence
  Synthetic
ugccaaguguuugcuga

SEQ ID NO: 13102 - RNA, 17 nt, Artificial Sequence
  Synthetic
ucaacgaccgaccuuga

SEQ ID NO: 13103 - RNA, 17 nt, Artificial Sequence
  Synthetic
gcauuugguggucuaua

SEQ ID NO: 13104 - RNA, 17 nt, Artificial Sequence
  Synthetic
gcuuuaaugccuuuaua

SEQ ID NO: 13105 - RNA, 17 nt, Artificial Sequence
  Synthetic
  misc_feature (2)..(2): n is a, c, g, or u
cnuuuccauggcugcua

SEQ ID NO: 13106 - RNA, 17 nt, Artificial Sequence
  Synthetic
ucugcauccugcugcua

SEQ ID NO: 13107 - RNA, 17 nt, Artificial Sequence
  Synthetic
acacagucuuugaagua

SEQ ID NO: 13108 - RNA, 17 nt, Artificial Sequence
  Synthetic
  misc_feature (8)..(8): n is a, c, g, or u
  misc_feature (10)..(10): n is a, c, g, or u
guggaganangggagua

SEQ ID NO: 13109 - RNA, 17 nt, Artificial Sequence
  Synthetic
uggcacaguugugagua

SEQ ID NO: 13110 - RNA, 17 nt, Artificial Sequence
  Synthetic
uguacuaggaggcugua

SEQ ID NO: 13111 - RNA, 17 nt, Artificial Sequence
  Synthetic
gagacuaaaauuaauua

SEQ ID NO: 13112 - RNA, 17 nt, Artificial Sequence
  Synthetic
  misc_feature (7)..(7): n is a, c, g, or u
ugaacangagaugauua

SEQ ID NO: 13113 - RNA, 17 nt, Artificial Sequence
  Synthetic
guccaagaguccucuua

SEQ ID NO: 13114 - RNA, 17 nt, Artificial Sequence
  Synthetic
  misc_feature (8)..(8): n is a, c, g, or u
gugaacanaccaauuua

SEQ ID NO: 13115 - RNA, 17 nt, Artificial Sequence
  Synthetic
  misc_feature (3)..(3): n is a, c, g, or u
uanuugucugauuuuua

SEQ ID NO: 13116 - RNA, 17 nt, Artificial Sequence
  Synthetic
aaccuacggacggaaac

SEQ ID NO: 13117 - RNA, 17 nt, Artificial Sequence
  Synthetic
  misc_feature (9)..(9): n is a, c, g, or u
cgagaucuncucgacac

SEQ ID NO: 13118 - RNA, 17 nt, Artificial Sequence
  Synthetic
gauccaguuggcagcac

SEQ ID NO: 13119 - RNA, 17 nt, Artificial Sequence
  Synthetic
aaagccacccaaggcac

SEQ ID NO: 13120 - RNA, 17 nt, Artificial Sequence
  Synthetic
uaggcugccuuccugac

SEQ ID NO: 13121 - RNA, 17 nt, Artificial Sequence
  Synthetic
uguucaccucaccauac

SEQ ID NO: 13122 - RNA, 17 nt, Artificial Sequence
  Synthetic
  misc_feature (1)..(1): n is a, c, g, or u
naccaauuuaugccuac

SEQ ID NO: 13123 - RNA, 17 nt, Artificial Sequence
  Synthetic
  misc_feature (13)..(13): n is a, c, g, or u
uugggaacaagancuac

SEQ ID NO: 13124 - RNA, 17 nt, Artificial Sequence
  Synthetic
gccgcuuggggcucuac

SEQ ID NO: 13125 - RNA, 17 nt, Artificial Sequence
  Synthetic
guccguagguuuuguac

SEQ ID NO: 13126 - RNA, 17 nt, Artificial Sequence
  Synthetic
ccggaccaugcaaaacc

SEQ ID NO: 13127 - RNA, 17 nt, Artificial Sequence
  Synthetic
  misc_feature (11)..(11): n is a, c, g, or u
gaacgcccacnggaacc

SEQ ID NO: 13128 - RNA, 17 nt, Artificial Sequence
  Synthetic
ccugaacuggagccacc

SEQ ID NO: 13129 - RNA, 17 nt, Artificial Sequence
  Synthetic
  misc_feature (9)..(9): n is a, c, g, or u
aaauuggunuguucacc

SEQ ID NO: 13130 - RNA, 17 nt, Artificial Sequence
  Synthetic
  misc_feature (7)..(7): n is a, c, g, or u
  misc_feature (10)..(10): n is a, c, g, or u
gaguuungcnccagacc

SEQ ID NO: 13131 - RNA, 17 nt, Artificial Sequence
  Synthetic
ucuucuucuaggggacc

SEQ ID NO: 13132 - RNA, 17 nt, Artificial Sequence
  Synthetic
ccaagaauauggugacc

SEQ ID NO: 13133 - RNA, 17 nt, Artificial Sequence
  Synthetic
  misc_feature (14)..(14): n is a, c, g, or u
caggaucaucaacnacc

SEQ ID NO: 13134 - RNA, 17 nt, Artificial Sequence
  Synthetic
gucaacaagaaaaaccc

SEQ ID NO: 13135 - RNA, 17 nt, Artificial Sequence
  Synthetic
gaucaucaguuggaccc

SEQ ID NO: 13136 - RNA, 17 nt, Artificial Sequence
  Synthetic
aggacuccuaggacccc

SEQ ID NO: 13137 - RNA, 17 nt, Artificial Sequence
  Synthetic
ucaggaacagugagccc

SEQ ID NO: 13138 - RNA, 17 nt, Artificial Sequence
  Synthetic
cuuggggcucuaccgcc

SEQ ID NO: 13139 - RNA, 17 nt, Artificial Sequence
  Synthetic
cuaaaauuaauuaugcc

SEQ ID NO: 13140 - RNA, 17 nt, Artificial Sequence
  Synthetic
  misc_feature (1)..(1): n is a, c, g, or u
nuacucacaacugugcc

SEQ ID NO: 13141 - RNA, 17 nt, Artificial Sequence
  Synthetic
  misc_feature (15)..(15): n is a, c, g, or u
cuuuuauauaagauncc

SEQ ID NO: 13142 - RNA, 17 nt, Artificial Sequence
  Synthetic
caucuuccucugcaucc

SEQ ID NO: 13143 - RNA, 17 nt, Artificial Sequence
  Synthetic
aguaauuuggaagaucc

SEQ ID NO: 13144 - RNA, 17 nt, Artificial Sequence
  Synthetic
  misc_feature (3)..(3): n is a, c, g, or u
  misc_feature (12)..(12): n is a, c, g, or u
acncaauguggnuaucc

SEQ ID NO: 13145 - RNA, 17 nt, Artificial Sequence
  Synthetic
  misc_feature (12)..(12): n is a, c, g, or u
aaaaccugcacnacucc

SEQ ID NO: 13146 - RNA, 17 nt, Artificial Sequence
  Synthetic
uggauucgcacuccucc

SEQ ID NO: 13147 - RNA, 17 nt, Artificial Sequence
  Synthetic
ccagcagcuccuccucc

SEQ ID NO: 13148 - RNA, 17 nt, Artificial Sequence
  Synthetic
uaucaacaauguccucc

SEQ ID NO: 13149 - RNA, 17 nt, Artificial Sequence
  Synthetic
ccaccuuguuggcgucc

SEQ ID NO: 13150 - RNA, 17 nt, Artificial Sequence
  Synthetic
  misc_feature (11)..(11): n is a, c, g, or u
  misc_feature (14)..(14): n is a, c, g, or u
auucugucguncunucc

SEQ ID NO: 13151 - RNA, 17 nt, Artificial Sequence
  Synthetic
  misc_feature (6)..(6): n is a, c, g, or u
agggcncuguacuuucc

SEQ ID NO: 13152 - RNA, 17 nt, Artificial Sequence
  Synthetic
cugcgagcaaaacaagc

SEQ ID NO: 13153 - RNA, 17 nt, Artificial Sequence
  Synthetic
gcgguagagccccaagc

SEQ ID NO: 13154 - RNA, 17 nt, Artificial Sequence
  Synthetic
cucacaacugugccagc

SEQ ID NO: 13155 - RNA, 17 nt, Artificial Sequence
  Synthetic
gaggcaggaggaggagc

SEQ ID NO: 13156 - RNA, 17 nt, Artificial Sequence
  Synthetic
agaagaugaggcauagc

SEQ ID NO: 13157 - RNA, 17 nt, Artificial Sequence
  Synthetic
uggcagcacagccuagc

SEQ ID NO: 13158 - RNA, 17 nt, Artificial Sequence
  Synthetic
acugcggaacuccuagc

SEQ ID NO: 13159 - RNA, 17 nt, Artificial Sequence
  Synthetic
ggaagaugauaaaacgc

SEQ ID NO: 13160 - RNA, 17 nt, Artificial Sequence
  Synthetic
ccgcuuguuuugcucgc

SEQ ID NO: 13161 - RNA, 17 nt, Artificial Sequence
  Synthetic
ucggcagucaggaaggc

SEQ ID NO: 13162 - RNA, 17 nt, Artificial Sequence
  Synthetic
  misc_feature (5)..(5): n is a, c, g, or u
  misc_feature (7)..(7): n is a, c, g, or u
gaganangggaguaggc

SEQ ID NO: 13163 - RNA, 17 nt, Artificial Sequence
  Synthetic
  misc_feature (6)..(6): n is a, c, g, or u
  misc_feature (9)..(9): n is a, c, g, or u
cauugngunaaaggggc

SEQ ID NO: 13164 - RNA, 17 nt, Artificial Sequence
  Synthetic
acgaccccucccggggc

SEQ ID NO: 13165 - RNA, 17 nt, Artificial Sequence
  Synthetic
  misc_feature (7)..(7): n is a, c, g, or u
uacaucnuuuccauggc

SEQ ID NO: 13166 - RNA, 17 nt, Artificial Sequence
  Synthetic
cgcaggauccaguuggc

SEQ ID NO: 13167 - RNA, 17 nt, Artificial Sequence
  Synthetic
cuuccucugcauccugc

SEQ ID NO: 13168 - RNA, 17 nt, Artificial Sequence
  Synthetic
uggcugcuaggcugugc

SEQ ID NO: 13169 - RNA, 17 nt, Artificial Sequence
  Synthetic
ggucuuuugggguuugc

SEQ ID NO: 13170 - RNA, 17 nt, Artificial Sequence
  Synthetic
  misc_feature (16)..(16): n is a, c, g, or u
cuugagucccuuuaunc

SEQ ID NO: 13171 - RNA, 17 nt, Artificial Sequence
  Synthetic
uccugccuccaccaauc

SEQ ID NO: 13172 - RNA, 17 nt, Artificial Sequence
  Synthetic
guuccgcaguauggauc

SEQ ID NO: 13173 - RNA, 17 nt, Artificial Sequence
  Synthetic
gcacuucgcuucaccuc

SEQ ID NO: 13174 - RNA, 17 nt, Artificial Sequence
  Synthetic
ugcaacuuuuucaccuc

SEQ ID NO: 13175 - RNA, 17 nt, Artificial Sequence
  Synthetic
  misc_feature (3)..(3): n is a, c, g, or u
cuncucgacaccgccuc

SEQ ID NO: 13176 - RNA, 17 nt, Artificial Sequence
  Synthetic
aaccuuugugucuccuc

SEQ ID NO: 13177 - RNA, 17 nt, Artificial Sequence
  Synthetic
guuuuaucaucuuccuc

SEQ ID NO: 13178 - RNA, 17 nt, Artificial Sequence
  Synthetic
ccuuuaccccguugcuc

SEQ ID NO: 13179 - RNA, 17 nt, Artificial Sequence
  Synthetic
ccagggaauuaguaguc

SEQ ID NO: 13180 - RNA, 17 nt, Artificial Sequence
  Synthetic
ccaguggggguugcguc

SEQ ID NO: 13181 - RNA, 17 nt, Artificial Sequence
  Synthetic
caagcggcuaggaguuc

SEQ ID NO: 13182 - RNA, 17 nt, Artificial Sequence
  Synthetic
aggacucuuggacuuuc

SEQ ID NO: 13183 - RNA, 17 nt, Artificial Sequence
  Synthetic
gcagaggugaagcgaag

SEQ ID NO: 13184 - RNA, 17 nt, Artificial Sequence
  Synthetic
  misc_feature (5)..(5): n is a, c, g, or u
ugaunccuuuaucuaag

SEQ ID NO: 13185 - RNA, 17 nt, Artificial Sequence
  Synthetic
aaggccucccgauacag

SEQ ID NO: 13186 - RNA, 17 nt, Artificial Sequence
  Synthetic
ccagcaggaaaguacag

SEQ ID NO: 13187 - RNA, 17 nt, Artificial Sequence
  Synthetic
  misc_feature (2)..(2): n is a, c, g, or u
gncaguauucugagcag

SEQ ID NO: 13188 - RNA, 17 nt, Artificial Sequence
  Synthetic
  misc_feature (8)..(8): n is a, c, g, or u
uggccaunggccaucag

SEQ ID NO: 13189 - RNA, 17 nt, Artificial Sequence
  Synthetic
ggagcccucaggcucag

SEQ ID NO: 13190 - RNA, 17 nt, Artificial Sequence
  Synthetic
caagaucccagagucag

SEQ ID NO: 13191 - RNA, 17 nt, Artificial Sequence
  Synthetic
ucguccgcgggauucag

SEQ ID NO: 13192 - RNA, 17 nt, Artificial Sequence
  Synthetic
  misc_feature (3)..(3): n is a, c, g, or u
uangcccugagccugag

SEQ ID NO: 13193 - RNA, 17 nt, Artificial Sequence
  Synthetic
agaauagcuugccugag

SEQ ID NO: 13194 - RNA, 17 nt, Artificial Sequence
  Synthetic
uuggcucaguuuacuag

SEQ ID NO: 13195 - RNA, 17 nt, Artificial Sequence
  Synthetic
  misc_feature (7)..(7): n is a, c, g, or u
  misc_feature (9)..(9): n is a, c, g, or u
agagagncnacacguag

SEQ ID NO: 13196 - RNA, 17 nt, Artificial Sequence
  Synthetic
uguucagugguucguag

SEQ ID NO: 13197 - RNA, 17 nt, Artificial Sequence
  Synthetic
ggagaagcgggcgguag

SEQ ID NO: 13198 - RNA, 17 nt, Artificial Sequence
  Synthetic
gaauuagaggacaaacg

SEQ ID NO: 13199 - RNA, 17 nt, Artificial Sequence
  Synthetic
accccgccuguaacacg

SEQ ID NO: 13200 - RNA, 17 nt, Artificial Sequence
  Synthetic
guggucuccaugcgacg

SEQ ID NO: 13201 - RNA, 17 nt, Artificial Sequence
  Synthetic
aaacaaaggacgucccg

SEQ ID NO: 13202 - RNA, 17 nt, Artificial Sequence
  Synthetic
  misc_feature (8)..(8): n is a, c, g, or u
agaccagnccguugccg

SEQ ID NO: 13203 - RNA, 17 nt, Artificial Sequence
  Synthetic
  misc_feature (3)..(3): n is a, c, g, or u
  misc_feature (11)..(11): n is a, c, g, or u
gcnccagaccngcugcg

SEQ ID NO: 13204 - RNA, 17 nt, Artificial Sequence
  Synthetic
gggagugggagcauucg

SEQ ID NO: 13205 - RNA, 17 nt, Artificial Sequence
  Synthetic
  misc_feature (9)..(9): n is a, c, g, or u
  misc_feature (12)..(12): n is a, c, g, or u
ccacauugngunaaagg

SEQ ID NO: 13206 - RNA, 17 nt, Artificial Sequence
  Synthetic
ugggaugggaauacagg

SEQ ID NO: 13207 - RNA, 17 nt, Artificial Sequence
  Synthetic
guggaggcaggaggagg

SEQ ID NO: 13208 - RNA, 17 nt, Artificial Sequence
  Synthetic
ugacccgcaaaaugagg

SEQ ID NO: 13209 - RNA, 17 nt, Artificial Sequence
  Synthetic
aguguugauaagauagg

SEQ ID NO: 13210 - RNA, 17 nt, Artificial Sequence
  Synthetic
ggugggaaacuuuacgg

SEQ ID NO: 13211 - RNA, 17 nt, Artificial Sequence
  Synthetic
cggacgaccccucccgg

SEQ ID NO: 13212 - RNA, 17 nt, Artificial Sequence
  Synthetic
gguuuugcaugguccgg

SEQ ID NO: 13213 - RNA, 17 nt, Artificial Sequence
  Synthetic
uguuuacgucccgucgg

SEQ ID NO: 13214 - RNA, 17 nt, Artificial Sequence
  Synthetic
accgaccgaccacgggg

SEQ ID NO: 13215 - RNA, 17 nt, Artificial Sequence
  Synthetic
aacaaggugggaguggg

SEQ ID NO: 13216 - RNA, 17 nt, Artificial Sequence
  Synthetic
  misc_feature (12)..(12): n is a, c, g, or u
gaugauguggunuuggg

SEQ ID NO: 13217 - RNA, 17 nt, Artificial Sequence
  Synthetic
gugaaaaaguugcaugg

SEQ ID NO: 13218 - RNA, 17 nt, Artificial Sequence
  Synthetic
cacuguuccugaacugg

SEQ ID NO: 13219 - RNA, 17 nt, Artificial Sequence
  Synthetic
  misc_feature (10)..(10): n is a, c, g, or u
gcucgcagcnggucugg

SEQ ID NO: 13220 - RNA, 17 nt, Artificial Sequence
  Synthetic
ggggacuguuggggugg

SEQ ID NO: 13221 - RNA, 17 nt, Artificial Sequence
  Synthetic
cucccggggccgcuugg

SEQ ID NO: 13222 - RNA, 17 nt, Artificial Sequence
  Synthetic
caacccccacugguugg

SEQ ID NO: 13223 - RNA, 17 nt, Artificial Sequence
  Synthetic
  misc_feature (11)..(12): n is a, c, g, or u
auguaauuggnnguugg

SEQ ID NO: 13224 - RNA, 17 nt, Artificial Sequence
  Synthetic
  misc_feature (3)..(3): n is a, c, g, or u
ccnuauaaagaauuugg

SEQ ID NO: 13225 - RNA, 17 nt, Artificial Sequence
  Synthetic
  misc_feature (7)..(7): n is a, c, g, or u
  misc_feature (10)..(10): n is a, c, g, or u
  misc_feature (16)..(16): n is a, c, g, or u
auguucnugnggcaang

SEQ ID NO: 13226 - RNA, 17 nt, Artificial Sequence
  Synthetic
  misc_feature (16)..(16): n is a, c, g, or u
uccuugagcaggagung

SEQ ID NO: 13227 - RNA, 17 nt, Artificial Sequence
  Synthetic
  misc_feature (16)..(16): n is a, c, g, or u
gccuuggguggcuuung

SEQ ID NO: 13228 - RNA, 17 nt, Artificial Sequence
  Synthetic
caaagguuccacgcaug

SEQ ID NO: 13229 - RNA, 17 nt, Artificial Sequence
  Synthetic
  misc_feature (8)..(8): n is a, c, g, or u
augucaanguuaauaug

SEQ ID NO: 13230 - RNA, 17 nt, Artificial Sequence
  Synthetic
auggcacuaguaaacug

SEQ ID NO: 13231 - RNA, 17 nt, Artificial Sequence
  Synthetic
  misc_feature (5)..(5): n is a, c, g, or u
gggcnuacucacaacug

SEQ ID NO: 13232 - RNA, 17 nt, Artificial Sequence
  Synthetic
  misc_feature (11)..(11): n is a, c, g, or u
guugugaguangcccug

SEQ ID NO: 13233 - RNA, 17 nt, Artificial Sequence
  Synthetic
uucaagccuccaagcug

SEQ ID NO: 13234 - RNA, 17 nt, Artificial Sequence
  Synthetic
ccauggcugcuaggcug

SEQ ID NO: 13235 - RNA, 17 nt, Artificial Sequence
  Synthetic
cgcggacuccccgucug

SEQ ID NO: 13236 - RNA, 17 nt, Artificial Sequence
  Synthetic
  misc_feature (9)..(9): n is a, c, g, or u
ggcaacggncuggucug

SEQ ID NO: 13237 - RNA, 17 nt, Artificial Sequence
  Synthetic
  misc_feature (2)..(2): n is a, c, g, or u
  misc_feature (7)..(7): n is a, c, g, or u
gnagagncaguauucug

SEQ ID NO: 13238 - RNA, 17 nt, Artificial Sequence
  Synthetic
ccaguucaggaacagug

SEQ ID NO: 13239 - RNA, 17 nt, Artificial Sequence
  Synthetic
aaauaccuaugggagug

SEQ ID NO: 13240 - RNA, 17 nt, Artificial Sequence
  Synthetic
  misc_feature (7)..(7): n is a, c, g, or u
ucaucunccggaccgug

SEQ ID NO: 13241 - RNA, 17 nt, Artificial Sequence
  Synthetic
ccgcguaaagagaggug

SEQ ID NO: 13242 - RNA, 17 nt, Artificial Sequence
  Synthetic
ucuuaugcaagaccuug

SEQ ID NO: 13243 - RNA, 17 nt, Artificial Sequence
  Synthetic
aacauagagguuccuug

SEQ ID NO: 13244 - RNA, 17 nt, Artificial Sequence
  Synthetic
cccaucccaucaucuug

SEQ ID NO: 13245 - RNA, 17 nt, Artificial Sequence
  Synthetic
  misc_feature (2)..(2): n is a, c, g, or u
  misc_feature (14)..(14): n is a, c, g, or u
  misc_feature (17)..(17): n is a, c, g, or u
gnacaauauguucnugn

SEQ ID NO: 13246 - RNA, 17 nt, Artificial Sequence
  Synthetic
  misc_feature (17)..(17): n is a, c, g, or u
guuggggcuuggccaun

SEQ ID NO: 13247 - RNA, 17 nt, Artificial Sequence
  Synthetic
cgaaccacugaacaaau

SEQ ID NO: 13248 - RNA, 17 nt, Artificial Sequence
  Synthetic
cagacgaaggucucaau

SEQ ID NO: 13249 - RNA, 17 nt, Artificial Sequence
  Synthetic
ucaccccaacacagaau

SEQ ID NO: 13250 - RNA, 17 nt, Artificial Sequence
  Synthetic
ccgaacauggagaacau

SEQ ID NO: 13251 - RNA, 17 nt, Artificial Sequence
  Synthetic
aggucggucguugacau

SEQ ID NO: 13252 - RNA, 17 nt, Artificial Sequence
  Synthetic
  misc_feature (10)..(10): n is a, c, g, or u
cauauuaacnuugacau

SEQ ID NO: 13253 - RNA, 17 nt, Artificial Sequence
  Synthetic
  misc_feature (1)..(1): n is a, c, g, or u
  misc_feature (10)..(10): n is a, c, g, or u
nuauacaucnuuuccau

SEQ ID NO: 13254 - RNA, 17 nt, Artificial Sequence
  Synthetic
acaagaagaugaggcau

SEQ ID NO: 13255 - RNA, 17 nt, Artificial Sequence
  Synthetic
uccacgcaugcgcugau

SEQ ID NO: 13256 - RNA, 17 nt, Artificial Sequence
  Synthetic
  misc_feature (15)..(15): n is a, c, g, or u
augcgcugauggccnau

SEQ ID NO: 13257 - RNA, 17 nt, Artificial Sequence
  Synthetic
caauuuguccugguuau

SEQ ID NO: 13258 - RNA, 17 nt, Artificial Sequence
  Synthetic
  misc_feature (4)..(4): n is a, c, g, or u
cccncacaaggacaacu

SEQ ID NO: 13259 - RNA, 17 nt, Artificial Sequence
  Synthetic
  misc_feature (6)..(6): n is a, c, g, or u
acauunggauaaaaccu

SEQ ID NO: 13260 - RNA, 17 nt, Artificial Sequence
  Synthetic
  misc_feature (8)..(9): n is a, c, g, or u
ggggaggnnugaacccu

SEQ ID NO: 13261 - RNA, 17 nt, Artificial Sequence
  Synthetic
uagaagaagaacucccu

SEQ ID NO: 13262 - RNA, 17 nt, Artificial Sequence
  Synthetic
aguuggcagcacagccu

SEQ ID NO: 13263 - RNA, 17 nt, Artificial Sequence
  Synthetic
gaagaacucccucgccu

SEQ ID NO: 13264 - RNA, 17 nt, Artificial Sequence
  Synthetic
cauacugcggaacuccu

SEQ ID NO: 13265 - RNA, 17 nt, Artificial Sequence
  Synthetic
cccaacacagaauagcu

SEQ ID NO: 13266 - RNA, 17 nt, Artificial Sequence
  Synthetic
caggaggaggagcugcu

SEQ ID NO: 13267 - RNA, 17 nt, Artificial Sequence
  Synthetic
uagccgcuuguuuugcu

SEQ ID NO: 13268 - RNA, 17 nt, Artificial Sequence
  Synthetic
  misc_feature (9)..(9): n is a, c, g, or u
ggugaguunaugaaucu

SEQ ID NO: 13269 - RNA, 17 nt, Artificial Sequence
  Synthetic
gaaccugcccaaggucu

SEQ ID NO: 13270 - RNA, 17 nt, Artificial Sequence
  Synthetic
gcuuucccccacugucu

SEQ ID NO: 13271 - RNA, 17 nt, Artificial Sequence
  Synthetic
acaggcuuuuacuuucu

SEQ ID NO: 13272 - RNA, 17 nt, Artificial Sequence
  Synthetic
ggcagaggugaaaaagu

SEQ ID NO: 13273 - RNA, 17 nt, Artificial Sequence
  Synthetic
gcuucaccucugcacgu

SEQ ID NO: 13274 - RNA, 17 nt, Artificial Sequence
  Synthetic
cugaaccuuuaccccgu

SEQ ID NO: 13275 - RNA, 17 nt, Artificial Sequence
  Synthetic
  misc_feature (13)..(13): n is a, c, g, or u
ggcacagaccagnccgu

SEQ ID NO: 13276 - RNA, 17 nt, Artificial Sequence
  Synthetic
ggucucaaucgccgcgu

SEQ ID NO: 13277 - RNA, 17 nt, Artificial Sequence
  Synthetic
uuacuucccacccaggu

SEQ ID NO: 13278 - RNA, 17 nt, Artificial Sequence
  Synthetic
caagcugugccuugggu

SEQ ID NO: 13279 - RNA, 17 nt, Artificial Sequence
  Synthetic
uguacuuuccugcuggu

SEQ ID NO: 13280 - RNA, 17 nt, Artificial Sequence
  Synthetic
cuauguuucccucaugu

SEQ ID NO: 13281 - RNA, 17 nt, Artificial Sequence
  Synthetic
ggacuaucaagguaugu

SEQ ID NO: 13282 - RNA, 17 nt, Artificial Sequence
  Synthetic
  misc_feature (2)..(3): n is a, c, g, or u
  misc_feature (14)..(14): n is a, c, g, or u
  misc_feature (16)..(16): n is a, c, g, or u
unncuuuaauccunanu

SEQ ID NO: 13283 - RNA, 17 nt, Artificial Sequence
  Synthetic
  misc_feature (4)..(5): n is a, c, g, or u
  misc_feature (16)..(16): n is a, c, g, or u
uggnnguuggggcacnu

SEQ ID NO: 13284 - RNA, 17 nt, Artificial Sequence
  Synthetic
gugucuuggccaaaauu

SEQ ID NO: 13285 - RNA, 17 nt, Artificial Sequence
  Synthetic
uuuuccugacauucauu

SEQ ID NO: 13286 - RNA, 17 nt, Artificial Sequence
  Synthetic
cuuuuggaguguggauu

SEQ ID NO: 13287 - RNA, 17 nt, Artificial Sequence
  Synthetic
  misc_feature (1)..(1): n is a, c, g, or u
naauguuacuaaauauu

SEQ ID NO: 13288 - RNA, 17 nt, Artificial Sequence
  Synthetic
ugcgucagcaaacacuu

SEQ ID NO: 13289 - RNA, 17 nt, Artificial Sequence
  Synthetic
ccggaccgugugcacuu

SEQ ID NO: 13290 - RNA, 17 nt, Artificial Sequence
  Synthetic
agauguuguacagacuu

SEQ ID NO: 13291 - RNA, 17 nt, Artificial Sequence
  Synthetic
cccacugguuggggcuu

SEQ ID NO: 13292 - RNA, 17 nt, Artificial Sequence
  Synthetic
cucaguccguuucucuu

SEQ ID NO: 13293 - RNA, 17 nt, Artificial Sequence
  Synthetic
  misc_feature (1)..(1): n is a, c, g, or u
naacacccgugugucuu

SEQ ID NO: 13294 - RNA, 17 nt, Artificial Sequence
  Synthetic
ccgcgcaggauccaguu

SEQ ID NO: 13295 - RNA, 17 nt, Artificial Sequence
  Synthetic
caggaaaagaaggaguu

SEQ ID NO: 13296 - RNA, 17 nt, Artificial Sequence
  Synthetic
ucuggauuuucugaguu

SEQ ID NO: 13297 - RNA, 17 nt, Artificial Sequence
  Synthetic
gugggucuuuugggguu

SEQ ID NO: 13298 - RNA, 17 nt, Artificial Sequence
  Synthetic
ggucugugccaaguguu

SEQ ID NO: 13299 - RNA, 17 nt, Artificial Sequence
  Synthetic
ccaucaucuugggcuuu

SEQ ID NO: 13300 - RNA, 17 nt, Artificial Sequence
  Synthetic
ucagucccgaugaguuu

SEQ ID NO: 13301 - RNA, 17 nt, Artificial Sequence
  Synthetic
  misc_feature (7)..(7): n is a, c, g, or u
aggagungugcagguuu

SEQ ID NO: 13302 - RNA, 17 nt, Artificial Sequence
  Synthetic
aaaguaaaagccuguuu

SEQ ID NO: 13303 - RNA, 17 nt, Artificial Sequence
  Synthetic
cuccuagccgcuuguuu

SEQ ID NO: 13304 - RNA, 17 nt, Artificial Sequence
  Synthetic
uugggacugcgaauuuu

SEQ ID NO: 13305 - RNA, 17 nt, Artificial Sequence
  Synthetic
ggaguuacucucuuuuu

SEQ ID NO: 13306 - RNA, 20 nt, Artificial Sequence
  Synthetic
ggucuuccaaaccucgaaaa

SEQ ID NO: 13307 - RNA, 20 nt, Artificial Sequence
  Synthetic
ugcagaggaagaugauaaaa

SEQ ID NO: 13308 - RNA, 20 nt, Artificial Sequence
  Synthetic
ccugcauauagaccaccaaa

SEQ ID NO: 13309 - RNA, 20 nt, Artificial Sequence
  Synthetic
  misc_feature (6)..(6): n is a, c, g, or u
  misc_feature (12)..(12): n is a, c, g, or u
agauanuguuuncuuagaaa

SEQ ID NO: 13310 - RNA, 20 nt, Artificial Sequence
  Synthetic
cuuguauacaugcauauaaa

SEQ ID NO: 13311 - RNA, 20 nt, Artificial Sequence
  Synthetic
uaaguuggcgagaaaguaaa

SEQ ID NO: 13312 - RNA, 20 nt, Artificial Sequence
  Synthetic
acuuucucgccaacuuacaa

SEQ ID NO: 13313 - RNA, 20 nt, Artificial Sequence
  Synthetic
  misc_feature (8)..(8): n is a, c, g, or u
caugcccnaaagccacccaa

SEQ ID NO: 13314 - RNA, 20 nt, Artificial Sequence
  Synthetic
caguuggacccugcauucaa

SEQ ID NO: 13315 - RNA, 20 nt, Artificial Sequence
  Synthetic
  misc_feature (1)..(1): n is a, c, g, or u
nagaaggaaagaagucagaa

SEQ ID NO: 13316 - RNA, 20 nt, Artificial Sequence
  Synthetic
  misc_feature (11)..(11): n is a, c, g, or u
cacgguccggnagaugagaa

SEQ ID NO: 13317 - RNA, 20 nt, Artificial Sequence
  Synthetic
  misc_feature (3)..(4): n is a, c, g, or u
ggnnugaacccuggcccgaa

SEQ ID NO: 13318 - RNA, 20 nt, Artificial Sequence
  Synthetic
ucccauagguauuuugcgaa

SEQ ID NO: 13319 - RNA, 20 nt, Artificial Sequence
  Synthetic
caccaaucggcagucaggaa

SEQ ID NO: 13320 - RNA, 20 nt, Artificial Sequence
  Synthetic
aaagccagacagugggggaa

SEQ ID NO: 13321 - RNA, 20 nt, Artificial Sequence
  Synthetic
acaucauccauauaacugaa

SEQ ID NO: 13322 - RNA, 20 nt, Artificial Sequence
  Synthetic
cgcauggagaccaccgugaa

SEQ ID NO: 13323 - RNA, 20 nt, Artificial Sequence
  Synthetic
uuuucugaguuggcuuugaa

SEQ ID NO: 13324 - RNA, 20 nt, Artificial Sequence
  Synthetic
  misc_feature (18)..(18): n is a, c, g, or u
ggucaauguccaugcccnaa

SEQ ID NO: 13325 - RNA, 20 nt, Artificial Sequence
  Synthetic
  misc_feature (1)..(1): n is a, c, g, or u
nagguaccguagaagaauaa

SEQ ID NO: 13326 - RNA, 20 nt, Artificial Sequence
  Synthetic
caauguuccggagacucuaa

SEQ ID NO: 13327 - RNA, 20 nt, Artificial Sequence
  Synthetic
caugcauauaaaggcauuaa

SEQ ID NO: 13328 - RNA, 20 nt, Artificial Sequence
  Synthetic
  misc_feature (7)..(7): n is a, c, g, or u
auguggnuauccugcuuuaa

SEQ ID NO: 13329 - RNA, 20 nt, Artificial Sequence
  Synthetic
  misc_feature (15)..(15): n is a, c, g, or u
gcauguauacaagcnaaaca

SEQ ID NO: 13330 - RNA, 20 nt, Artificial Sequence
  Synthetic
ccuuuauaugcauguauaca

SEQ ID NO: 13331 - RNA, 20 nt, Artificial Sequence
  Synthetic
  misc_feature (9)..(9): n is a, c, g, or u
gccuguuungcuuguauaca

SEQ ID NO: 13332 - RNA, 20 nt, Artificial Sequence
  Synthetic
  misc_feature (5)..(5): n is a, c, g, or u
uggunuguucaccagcacca

SEQ ID NO: 13333 - RNA, 20 nt, Artificial Sequence
  Synthetic
  misc_feature (5)..(5): n is a, c, g, or u
caacnaccagcaccggacca

SEQ ID NO: 13334 - RNA, 20 nt, Artificial Sequence
  Synthetic
gacagaaagauuugucccca

SEQ ID NO: 13335 - RNA, 20 nt, Artificial Sequence
  Synthetic
uuuggaagaccaaccuccca

SEQ ID NO: 13336 - RNA, 20 nt, Artificial Sequence
  Synthetic
  misc_feature (1)..(1): n is a, c, g, or u
ngacacucauccucaggcca

SEQ ID NO: 13337 - RNA, 20 nt, Artificial Sequence
  Synthetic
  misc_feature (13)..(13): n is a, c, g, or u
gcgcugauggccnauggcca

SEQ ID NO: 13338 - RNA, 20 nt, Artificial Sequence
  Synthetic
uccuacuguucaagccucca

SEQ ID NO: 13339 - RNA, 20 nt, Artificial Sequence
  Synthetic
  misc_feature (7)..(7): n is a, c, g, or u
uuuauangggucaaugucca

SEQ ID NO: 13340 - RNA, 20 nt, Artificial Sequence
  Synthetic
gaggagacacaaagguucca

SEQ ID NO: 13341 - RNA, 20 nt, Artificial Sequence
  Synthetic
  misc_feature (5)..(5): n is a, c, g, or u
cauunggauaaaaccuagca

SEQ ID NO: 13342 - RNA, 20 nt, Artificial Sequence
  Synthetic
caccauacggcacucaggca

SEQ ID NO: 13343 - RNA, 20 nt, Artificial Sequence
  Synthetic
accucaccauacggcacuca

SEQ ID NO: 13344 - RNA, 20 nt, Artificial Sequence
  Synthetic
cuguugggguggagcccuca

SEQ ID NO: 13345 - RNA, 20 nt, Artificial Sequence
  Synthetic
  misc_feature (6)..(6): n is a, c, g, or u
cuaagngacacucauccuca

SEQ ID NO: 13346 - RNA, 20 nt, Artificial Sequence
  Synthetic
uguucauguccuacuguuca

SEQ ID NO: 13347 - RNA, 20 nt, Artificial Sequence
  Synthetic
aaagagaguaacuccacaga

SEQ ID NO: 13348 - RNA, 20 nt, Artificial Sequence
  Synthetic
gaugaggcauagcagcagga

SEQ ID NO: 13349 - RNA, 20 nt, Artificial Sequence
  Synthetic
  misc_feature (4)..(4): n is a, c, g, or u
  misc_feature (6)..(6): n is a, c, g, or u
uaangnucuuuguacuagga

SEQ ID NO: 13350 - RNA, 20 nt, Artificial Sequence
  Synthetic
cacaaggacaacuggccgga

SEQ ID NO: 13351 - RNA, 20 nt, Artificial Sequence
  Synthetic
gccucugcucuguaucggga

SEQ ID NO: 13352 - RNA, 20 nt, Artificial Sequence
  Synthetic
cugacuacuaauucccugga

SEQ ID NO: 13353 - RNA, 20 nt, Artificial Sequence
  Synthetic
ccugacugccgauuggugga

SEQ ID NO: 13354 - RNA, 20 nt, Artificial Sequence
  Synthetic
cacccaaggcacagcuugga

SEQ ID NO: 13355 - RNA, 20 nt, Artificial Sequence
  Synthetic
  misc_feature (18)..(18): n is a, c, g, or u
cuacuguuguuagacganga

SEQ ID NO: 13356 - RNA, 20 nt, Artificial Sequence
  Synthetic
aagaaccaacaagaagauga

SEQ ID NO: 13357 - RNA, 20 nt, Artificial Sequence
  Synthetic
agccaagagaaacggacuga

SEQ ID NO: 13358 - RNA, 20 nt, Artificial Sequence
  Synthetic
cugugccaaguguuugcuga

SEQ ID NO: 13359 - RNA, 20 nt, Artificial Sequence
  Synthetic
augucaacgaccgaccuuga

SEQ ID NO: 13360 - RNA, 20 nt, Artificial Sequence
  Synthetic
ggggcauuugguggucuaua

SEQ ID NO: 13361 - RNA, 20 nt, Artificial Sequence
  Synthetic
ccugcuuuaaugccuuuaua

SEQ ID NO: 13362 - RNA, 20 nt, Artificial Sequence
  Synthetic
  misc_feature (5)..(5): n is a, c, g, or u
caucnuuuccauggcugcua

SEQ ID NO: 13363 - RNA, 20 nt, Artificial Sequence
  Synthetic
uccucugcauccugcugcua

SEQ ID NO: 13364 - RNA, 20 nt, Artificial Sequence
  Synthetic
aacacacagucuuugaagua

SEQ ID NO: 13365 - RNA, 20 nt, Artificial Sequence
  Synthetic
  misc_feature (11)..(11): n is a, c, g, or u
  misc_feature (13)..(13): n is a, c, g, or u
gagguggaganangggagua

SEQ ID NO: 13366 - RNA, 20 nt, Artificial Sequence
  Synthetic
ugcuggcacaguugugagua

SEQ ID NO: 13367 - RNA, 20 nt, Artificial Sequence
  Synthetic
cuuuguacuaggaggcugua

SEQ ID NO: 13368 - RNA, 20 nt, Artificial Sequence
  Synthetic
caggagacuaaaauuaauua

SEQ ID NO: 13369 - RNA, 20 nt, Artificial Sequence
  Synthetic
  misc_feature (10)..(10): n is a, c, g, or u
acaugaacangagaugauua

SEQ ID NO: 13370 - RNA, 20 nt, Artificial Sequence
  Synthetic
aaaguccaagaguccucuua

SEQ ID NO: 13371 - RNA, 20 nt, Artificial Sequence
  Synthetic
  misc_feature (11)..(11): n is a, c, g, or u
cuggugaacanaccaauuua

SEQ ID NO: 13372 - RNA, 20 nt, Artificial Sequence
  Synthetic
  misc_feature (6)..(6): n is a, c, g, or u
caauanuugucugauuuuua

SEQ ID NO: 13373 - RNA, 20 nt, Artificial Sequence
  Synthetic
caaaaccuacggacggaaac

SEQ ID NO: 13374 - RNA, 20 nt, Artificial Sequence
  Synthetic
  misc_feature (1)..(1): n is a, c, g, or u
  misc_feature (12)..(12): n is a, c, g, or u
nuucgagaucuncucgacac

SEQ ID NO: 13375 - RNA, 20 nt, Artificial Sequence
  Synthetic
caggauccaguuggcagcac

SEQ ID NO: 13376 - RNA, 20 nt, Artificial Sequence
  Synthetic
  misc_feature (3)..(3): n is a, c, g, or u
ccnaaagccacccaaggcac

SEQ ID NO: 13377 - RNA, 20 nt, Artificial Sequence
  Synthetic
gaguaggcugccuuccugac

SEQ ID NO: 13378 - RNA, 20 nt, Artificial Sequence
  Synthetic
cauuguucaccucaccauac

SEQ ID NO: 13379 - RNA, 20 nt, Artificial Sequence
  Synthetic
  misc_feature (4)..(4): n is a, c, g, or u
acanaccaauuuaugccuac

SEQ ID NO: 13380 - RNA, 20 nt, Artificial Sequence
  Synthetic
  misc_feature (16)..(16): n is a, c, g, or u
uucuugggaacaagancuac

SEQ ID NO: 13381 - RNA, 20 nt, Artificial Sequence
  Synthetic
ggggccgcuuggggcucuac

SEQ ID NO: 13382 - RNA, 20 nt, Artificial Sequence
  Synthetic
uccguccguagguuuuguac

SEQ ID NO: 13383 - RNA, 20 nt, Artificial Sequence
  Synthetic
gcaccggaccaugcaaaacc

SEQ ID NO: 13384 - RNA, 20 nt, Artificial Sequence
  Synthetic
  misc_feature (14)..(14): n is a, c, g, or u
cgugaacgcccacnggaacc

SEQ ID NO: 13385 - RNA, 20 nt, Artificial Sequence
  Synthetic
guuccugaacuggagccacc

SEQ ID NO: 13386 - RNA, 20 nt, Artificial Sequence
  Synthetic
  misc_feature (12)..(12): n is a, c, g, or u
cauaaauuggunuguucacc

SEQ ID NO: 13387 - RNA, 20 nt, Artificial Sequence
  Synthetic
  misc_feature (10)..(10): n is a, c, g, or u
  misc_feature (13)..(13): n is a, c, g, or u
gaugaguuungcnccagacc

SEQ ID NO: 13388 - RNA, 20 nt, Artificial Sequence
  Synthetic
aguucuucuucuaggggacc

SEQ ID NO: 13389 - RNA, 20 nt, Artificial Sequence
  Synthetic
uucccaagaauauggugacc

SEQ ID NO: 13390 - RNA, 20 nt, Artificial Sequence
  Synthetic
  misc_feature (17)..(17): n is a, c, g, or u
uuccaggaucaucaacnacc

SEQ ID NO: 13391 - RNA, 20 nt, Artificial Sequence
  Synthetic
uuugucaacaagaaaaaccc

SEQ ID NO: 13392 - RNA, 20 nt, Artificial Sequence
  Synthetic
cccgaucaucaguuggaccc

SEQ ID NO: 13393 - RNA, 20 nt, Artificial Sequence
  Synthetic
aucaggacuccuaggacccc

SEQ ID NO: 13394 - RNA, 20 nt, Artificial Sequence
  Synthetic
aguucaggaacagugagccc

SEQ ID NO: 13395 - RNA, 20 nt, Artificial Sequence
  Synthetic
ccgcuuggggcucuaccgcc

SEQ ID NO: 13396 - RNA, 20 nt, Artificial Sequence
  Synthetic
agacuaaaauuaauuaugcc

SEQ ID NO: 13397 - RNA, 20 nt, Artificial Sequence
  Synthetic
  misc_feature (4)..(4): n is a, c, g, or u
ggcnuacucacaacugugcc

SEQ ID NO: 13398 - RNA, 20 nt, Artificial Sequence
  Synthetic
  misc_feature (18)..(18): n is a, c, g, or u
ucucuuuuauauaagauncc

SEQ ID NO: 13399 - RNA, 20 nt, Artificial Sequence
  Synthetic
uaucaucuuccucugcaucc

SEQ ID NO: 13400 - RNA, 20 nt, Artificial Sequence
  Synthetic
ggaaguaauuuggaagaucc

SEQ ID NO: 13401 - RNA, 20 nt, Artificial Sequence
  Synthetic
  misc_feature (3)..(3): n is a, c, g, or u
  misc_feature (6)..(6): n is a, c, g, or u
  misc_feature (15)..(15): n is a, c, g, or u
uunacncaauguggnuaucc

SEQ ID NO: 13402 - RNA, 20 nt, Artificial Sequence
  Synthetic
  misc_feature (15)..(15): n is a, c, g, or u
ugcaaaaccugcacnacucc

SEQ ID NO: 13403 - RNA, 20 nt, Artificial Sequence
  Synthetic
guguggauucgcacuccucc

SEQ ID NO: 13404 - RNA, 20 nt, Artificial Sequence
  Synthetic
gugccagcagcuccuccucc

SEQ ID NO: 13405 - RNA, 20 nt, Artificial Sequence
  Synthetic
  misc_feature (2)..(2): n is a, c, g, or u
ancuaucaacaauguccucc

SEQ ID NO: 13406 - RNA, 20 nt, Artificial Sequence
  Synthetic
cucccaccuuguuggcgucc

SEQ ID NO: 13407 - RNA, 20 nt, Artificial Sequence
  Synthetic
  misc_feature (14)..(14): n is a, c, g, or u
  misc_feature (17)..(17): n is a, c, g, or u
acaauucugucguncunucc

SEQ ID NO: 13408 - RNA, 20 nt, Artificial Sequence
  Synthetic
  misc_feature (9)..(9): n is a, c, g, or u
gucagggcncuguacuuucc

SEQ ID NO: 13409 - RNA, 20 nt, Artificial Sequence
  Synthetic
  misc_feature (2)..(2): n is a, c, g, or u
cngcugcgagcaaaacaagc

SEQ ID NO: 13410 - RNA, 20 nt, Artificial Sequence
  Synthetic
cgggcgguagagccccaagc

SEQ ID NO: 13411 - RNA, 20 nt, Artificial Sequence
  Synthetic
  misc_feature (1)..(1): n is a, c, g, or u
nuacucacaacugugccagc

SEQ ID NO: 13412 - RNA, 20 nt, Artificial Sequence
  Synthetic
guggaggcaggaggaggagc

SEQ ID NO: 13413 - RNA, 20 nt, Artificial Sequence
  Synthetic
acaagaagaugaggcauagc

SEQ ID NO: 13414 - RNA, 20 nt, Artificial Sequence
  Synthetic
aguuggcagcacagccuagc

SEQ ID NO: 13415 - RNA, 20 nt, Artificial Sequence
  Synthetic
cauacugcggaacuccuagc

SEQ ID NO: 13416 - RNA, 20 nt, Artificial Sequence
  Synthetic
agaggaagaugauaaaacgc

SEQ ID NO: 13417 - RNA, 20 nt, Artificial Sequence
  Synthetic
uagccgcuuguuuugcucgc

SEQ ID NO: 13418 - RNA, 20 nt, Artificial Sequence
  Synthetic
caaucggcagucaggaaggc

SEQ ID NO: 13419 - RNA, 20 nt, Artificial Sequence
  Synthetic
  misc_feature (8)..(8): n is a, c, g, or u
  misc_feature (10)..(10): n is a, c, g, or u
guggaganangggaguaggc

SEQ ID NO: 13420 - RNA, 20 nt, Artificial Sequence
  Synthetic
  misc_feature (9)..(9): n is a, c, g, or u
  misc_feature (12)..(12): n is a, c, g, or u
ccacauugngunaaaggggc

SEQ ID NO: 13421 - RNA, 20 nt, Artificial Sequence
  Synthetic
cggacgaccccucccggggc

SEQ ID NO: 13422 - RNA, 20 nt, Artificial Sequence
  Synthetic
  misc_feature (1)..(1): n is a, c, g, or u
  misc_feature (10)..(10): n is a, c, g, or u
nuauacaucnuuuccauggc

SEQ ID NO: 13423 - RNA, 20 nt, Artificial Sequence
  Synthetic
ccgcgcaggauccaguuggc

SEQ ID NO: 13424 - RNA, 20 nt, Artificial Sequence
  Synthetic
caucuuccucugcauccugc

SEQ ID NO: 13425 - RNA, 20 nt, Artificial Sequence
  Synthetic
ccauggcugcuaggcugugc

SEQ ID NO: 13426 - RNA, 20 nt, Artificial Sequence
  Synthetic
gugggucuuuugggguuugc

SEQ ID NO: 13427 - RNA, 20 nt, Artificial Sequence
  Synthetic
  misc_feature (19)..(19): n is a, c, g, or u
caucuugagucccuuuaunc

SEQ ID NO: 13428 - RNA, 20 nt, Artificial Sequence
  Synthetic
uccuccugccuccaccaauc

SEQ ID NO: 13429 - RNA, 20 nt, Artificial Sequence
  Synthetic
ggaguuccgcaguauggauc

SEQ ID NO: 13430 - RNA, 20 nt, Artificial Sequence
  Synthetic
ugugcacuucgcuucaccuc

SEQ ID NO: 13431 - RNA, 20 nt, Artificial Sequence
  Synthetic
ccaugcaacuuuuucaccuc

SEQ ID NO: 13432 - RNA, 20 nt, Artificial Sequence
  Synthetic
  misc_feature (6)..(6): n is a, c, g, or u
gaucuncucgacaccgccuc

SEQ ID NO: 13433 - RNA, 20 nt, Artificial Sequence
  Synthetic
uggaaccuuugugucuccuc

SEQ ID NO: 13434 - RNA, 20 nt, Artificial Sequence
  Synthetic
ggcguuuuaucaucuuccuc

SEQ ID NO: 13435 - RNA, 20 nt, Artificial Sequence
  Synthetic
gaaccuuuaccccguugcuc

SEQ ID NO: 13436 - RNA, 20 nt, Artificial Sequence
  Synthetic
cauccagggaauuaguaguc

SEQ ID NO: 13437 - RNA, 20 nt, Artificial Sequence
  Synthetic
caaccaguggggguugcguc

SEQ ID NO: 13438 - RNA, 20 nt, Artificial Sequence
  Synthetic
aaacaagcggcuaggaguuc

SEQ ID NO: 13439 - RNA, 20 nt, Artificial Sequence
  Synthetic
aagaggacucuuggacuuuc

SEQ ID NO: 13440 - RNA, 20 nt, Artificial Sequence
  Synthetic
cgugcagaggugaagcgaag

SEQ ID NO: 13441 - RNA, 20 nt, Artificial Sequence
  Synthetic
  misc_feature (8)..(8): n is a, c, g, or u
guuugaunccuuuaucuaag

SEQ ID NO: 13442 - RNA, 20 nt, Artificial Sequence
  Synthetic
ucuaaggccucccgauacag

SEQ ID NO: 13443 - RNA, 20 nt, Artificial Sequence
  Synthetic
ccaccagcaggaaaguacag

SEQ ID NO: 13444 - RNA, 20 nt, Artificial Sequence
  Synthetic
  misc_feature (5)..(5): n is a, c, g, or u
agagncaguauucugagcag

SEQ ID NO: 13445 - RNA, 20 nt, Artificial Sequence
  Synthetic
  misc_feature (11)..(11): n is a, c, g, or u
gcuuggccaunggccaucag

SEQ ID NO: 13446 - RNA, 20 nt, Artificial Sequence
  Synthetic
gguggagcccucaggcucag

SEQ ID NO: 13447 - RNA, 20 nt, Artificial Sequence
  Synthetic
cuucaagaucccagagucag

SEQ ID NO: 13448 - RNA, 20 nt, Artificial Sequence
  Synthetic
gggucguccgcgggauucag

SEQ ID NO: 13449 - RNA, 20 nt, Artificial Sequence
  Synthetic
  misc_feature (6)..(6): n is a, c, g, or u
gaguangcccugagccugag

SEQ ID NO: 13450 - RNA, 20 nt, Artificial Sequence
  Synthetic
cacagaauagcuugccugag

SEQ ID NO: 13451 - RNA, 20 nt, Artificial Sequence
  Synthetic
cucuuggcucaguuuacuag

SEQ ID NO: 13452 - RNA, 20 nt, Artificial Sequence
  Synthetic
  misc_feature (10)..(10): n is a, c, g, or u
  misc_feature (12)..(12): n is a, c, g, or u
aaaagagagncnacacguag

SEQ ID NO: 13453 - RNA, 20 nt, Artificial Sequence
  Synthetic
auuuguucagugguucguag

SEQ ID NO: 13454 - RNA, 20 nt, Artificial Sequence
  Synthetic
  misc_feature (2)..(2): n is a, c, g, or u
gncggagaagcgggcgguag

SEQ ID NO: 13455 - RNA, 20 nt, Artificial Sequence
  Synthetic
cuggaauuagaggacaaacg

SEQ ID NO: 13456 - RNA, 20 nt, Artificial Sequence
  Synthetic
aaaaccccgccuguaacacg

SEQ ID NO: 13457 - RNA, 20 nt, Artificial Sequence
  Synthetic
acgguggucuccaugcgacg

SEQ ID NO: 13458 - RNA, 20 nt, Artificial Sequence
  Synthetic
cguaaacaaaggacgucccg

SEQ ID NO: 13459 - RNA, 20 nt, Artificial Sequence
  Synthetic
  misc_feature (11)..(11): n is a, c, g, or u
cacagaccagnccguugccg

SEQ ID NO: 13460 - RNA, 20 nt, Artificial Sequence
  Synthetic
  misc_feature (3)..(3): n is a, c, g, or u
  misc_feature (6)..(6): n is a, c, g, or u
  misc_feature (14)..(14): n is a, c, g, or u
uungcnccagaccngcugcg

SEQ ID NO: 13461 - RNA, 20 nt, Artificial Sequence
  Synthetic
ggugggagugggagcauucg

SEQ ID NO: 13462 - RNA, 20 nt, Artificial Sequence
  Synthetic
  misc_feature (3)..(3): n is a, c, g, or u
  misc_feature (12)..(12): n is a, c, g, or u
  misc_feature (15)..(15): n is a, c, g, or u
uanccacauugngunaaagg

SEQ ID NO: 13463 - RNA, 20 nt, Artificial Sequence
  Synthetic
ugaugggaugggaauacagg

SEQ ID NO: 13464 - RNA, 20 nt, Artificial Sequence
  Synthetic
uugguggaggcaggaggagg

SEQ ID NO: 13465 - RNA, 20 nt, Artificial Sequence
  Synthetic
uggugacccgcaaaaugagg

SEQ ID NO: 13466 - RNA, 20 nt, Artificial Sequence
  Synthetic
ggaaguguugauaagauagg

SEQ ID NO: 13467 - RNA, 20 nt, Artificial Sequence
  Synthetic
uaaggugggaaacuuuacgg

SEQ ID NO: 13468 - RNA, 20 nt, Artificial Sequence
  Synthetic
ccgcggacgaccccucccgg

SEQ ID NO: 13469 - RNA, 20 nt, Artificial Sequence
  Synthetic
gcagguuuugcaugguccgg

SEQ ID NO: 13470 - RNA, 20 nt, Artificial Sequence
  Synthetic
cuuuguuuacgucccgucgg

SEQ ID NO: 13471 - RNA, 20 nt, Artificial Sequence
  Synthetic
  misc_feature (1)..(1): n is a, c, g, or u
nguaccgaccgaccacgggg

SEQ ID NO: 13472 - RNA, 20 nt, Artificial Sequence
  Synthetic
gccaacaaggugggaguggg

SEQ ID NO: 13473 - RNA, 20 nt, Artificial Sequence
  Synthetic
  misc_feature (15)..(15): n is a, c, g, or u
auggaugauguggunuuggg

SEQ ID NO: 13474 - RNA, 20 nt, Artificial Sequence
  Synthetic
gaggugaaaaaguugcaugg

SEQ ID NO: 13475 - RNA, 20 nt, Artificial Sequence
  Synthetic
gcucacuguuccugaacugg

SEQ ID NO: 13476 - RNA, 20 nt, Artificial Sequence
  Synthetic
  misc_feature (13)..(13): n is a, c, g, or u
uuugcucgcagcnggucugg

SEQ ID NO: 13477 - RNA, 20 nt, Artificial Sequence
  Synthetic
augggggacuguuggggugg

SEQ ID NO: 13478 - RNA, 20 nt, Artificial Sequence
  Synthetic
ccccucccggggccgcuugg

SEQ ID NO: 13479 - RNA, 20 nt, Artificial Sequence
  Synthetic
acgcaacccccacugguugg

SEQ ID NO: 13480 - RNA, 20 nt, Artificial Sequence
  Synthetic
  misc_feature (14)..(15): n is a, c, g, or u
gauauguaauuggnnguugg

SEQ ID NO: 13481 - RNA, 20 nt, Artificial Sequence
  Synthetic
  misc_feature (6)..(6): n is a, c, g, or u
gacccnuauaaagaauuugg

SEQ ID NO: 13482 - RNA, 20 nt, Artificial Sequence
  Synthetic
  misc_feature (10)..(10): n is a, c, g, or u
  misc_feature (13)..(13): n is a, c, g, or u
  misc_feature (19)..(19): n is a, c, g, or u
aauauguucnugnggcaang

SEQ ID NO: 13483 - RNA, 20 nt, Artificial Sequence
  Synthetic
  misc_feature (19)..(19): n is a, c, g, or u
gguuccuugagcaggagung

SEQ ID NO: 13484 - RNA, 20 nt, Artificial Sequence
  Synthetic
  misc_feature (19)..(19): n is a, c, g, or u
ugugccuuggguggcuuung

SEQ ID NO: 13485 - RNA, 20 nt, Artificial Sequence
  Synthetic
acacaaagguuccacgcaug

SEQ ID NO: 13486 - RNA, 20 nt, Artificial Sequence
  Synthetic
  misc_feature (11)..(11): n is a, c, g, or u
gcuaugucaanguuaauaug

SEQ ID NO: 13487 - RNA, 20 nt, Artificial Sequence
  Synthetic
caaauggcacuaguaaacug

SEQ ID NO: 13488 - RNA, 20 nt, Artificial Sequence
  Synthetic
  misc_feature (8)..(8): n is a, c, g, or u
ucagggcnuacucacaacug

SEQ ID NO: 13489 - RNA, 20 nt, Artificial Sequence
  Synthetic
  misc_feature (14)..(14): n is a, c, g, or u
acaguugugaguangcccug

SEQ ID NO: 13490 - RNA, 20 nt, Artificial Sequence
  Synthetic
cuguucaagccuccaagcug

SEQ ID NO: 13491 - RNA, 20 nt, Artificial Sequence
  Synthetic
uuuccauggcugcuaggcug

SEQ ID NO: 13492 - RNA, 20 nt, Artificial Sequence
  Synthetic
uuacgcggacuccccgucug

SEQ ID NO: 13493 - RNA, 20 nt, Artificial Sequence
  Synthetic
  misc_feature (12)..(12): n is a, c, g, or u
cucggcaacggncuggucug

SEQ ID NO: 13494 - RNA, 20 nt, Artificial Sequence
  Synthetic
  misc_feature (5)..(5): n is a, c, g, or u
  misc_feature (10)..(10): n is a, c, g, or u
auggnagagncaguauucug

SEQ ID NO: 13495 - RNA, 20 nt, Artificial Sequence
  Synthetic
gcuccaguucaggaacagug

SEQ ID NO: 13496 - RNA, 20 nt, Artificial Sequence
  Synthetic
gcaaaauaccuaugggagug

SEQ ID NO: 13497 - RNA, 20 nt, Artificial Sequence
  Synthetic
  misc_feature (10)..(10): n is a, c, g, or u
uucucaucunccggaccgug

SEQ ID NO: 13498 - RNA, 20 nt, Artificial Sequence
  Synthetic
aguccgcguaaagagaggug

SEQ ID NO: 13499 - RNA, 20 nt, Artificial Sequence
  Synthetic
uccucuuaugcaagaccuug

SEQ ID NO: 13500 - RNA, 20 nt, Artificial Sequence
  Synthetic
ggaaacauagagguuccuug

SEQ ID NO: 13501 - RNA, 20 nt, Artificial Sequence
  Synthetic
auucccaucccaucaucuug

SEQ ID NO: 13502 - RNA, 20 nt, Artificial Sequence
  Synthetic
  misc_feature (5)..(5): n is a, c, g, or u
  misc_feature (17)..(17): n is a, c, g, or u
  misc_feature (20)..(20): n is a, c, g, or u
uuugnacaauauguucnugn

SEQ ID NO: 13503 - RNA, 20 nt, Artificial Sequence
  Synthetic
  misc_feature (20)..(20): n is a, c, g, or u
cugguuggggcuuggccaun

SEQ ID NO: 13504 - RNA, 20 nt, Artificial Sequence
  Synthetic
cuacgaaccacugaacaaau

SEQ ID NO: 13505 - RNA, 20 nt, Artificial Sequence
  Synthetic
ucgcagacgaaggucucaau

SEQ ID NO: 13506 - RNA, 20 nt, Artificial Sequence
  Synthetic
aacucaccccaacacagaau

SEQ ID NO: 13507 - RNA, 20 nt, Artificial Sequence
  Synthetic
guaccgaacauggagaacau

SEQ ID NO: 13508 - RNA, 20 nt, Artificial Sequence
  Synthetic
ucaaggucggucguugacau

SEQ ID NO: 13509 - RNA, 20 nt, Artificial Sequence
  Synthetic
  misc_feature (13)..(13): n is a, c, g, or u
gcccauauuaacnuugacau

SEQ ID NO: 13510 - RNA, 20 nt, Artificial Sequence
  Synthetic
  misc_feature (4)..(4): n is a, c, g, or u
  misc_feature (13)..(13): n is a, c, g, or u
caanuauacaucnuuuccau

SEQ ID NO: 13511 - RNA, 20 nt, Artificial Sequence
  Synthetic
ccaacaagaagaugaggcau

SEQ ID NO: 13512 - RNA, 20 nt, Artificial Sequence
  Synthetic
gguuccacgcaugcgcugau

SEQ ID NO: 13513 - RNA, 20 nt, Artificial Sequence
  Synthetic
  misc_feature (18)..(18): n is a, c, g, or u
cgcaugcgcugauggccnau

SEQ ID NO: 13514 - RNA, 20 nt, Artificial Sequence
  Synthetic
cuccaauuuguccugguuau

SEQ ID NO: 13515 - RNA, 20 nt, Artificial Sequence
  Synthetic
  misc_feature (7)..(7): n is a, c, g, or u
caacccncacaaggacaacu

SEQ ID NO: 13516 - RNA, 20 nt, Artificial Sequence
  Synthetic
  misc_feature (9)..(9): n is a, c, g, or u
guaacauunggauaaaaccu

SEQ ID NO: 13517 - RNA, 20 nt, Artificial Sequence
  Synthetic
  misc_feature (11)..(12): n is a, c, g, or u
cauggggaggnnugaacccu

SEQ ID NO: 13518 - RNA, 20 nt, Artificial Sequence
  Synthetic
cccuagaagaagaacucccu

SEQ ID NO: 13519 - RNA, 20 nt, Artificial Sequence
  Synthetic
uccaguuggcagcacagccu

SEQ ID NO: 13520 - RNA, 20 nt, Artificial Sequence
  Synthetic
gaagaagaacucccucgccu

SEQ ID NO: 13521 - RNA, 20 nt, Artificial Sequence
  Synthetic
auccauacugcggaacuccu

SEQ ID NO: 13522 - RNA, 20 nt, Artificial Sequence
  Synthetic
caccccaacacagaauagcu

SEQ ID NO: 13523 - RNA, 20 nt, Artificial Sequence
  Synthetic
aggcaggaggaggagcugcu

SEQ ID NO: 13524 - RNA, 20 nt, Artificial Sequence
  Synthetic
uccuagccgcuuguuuugcu

SEQ ID NO: 13525 - RNA, 20 nt, Artificial Sequence
  Synthetic
  misc_feature (12)..(12): n is a, c, g, or u
uggggugaguunaugaaucu

SEQ ID NO: 13526 - RNA, 20 nt, Artificial Sequence
  Synthetic
  misc_feature (2)..(2): n is a, c, g, or u
cnggaaccugcccaaggucu

SEQ ID NO: 13527 - RNA, 20 nt, Artificial Sequence
  Synthetic
agggcuuucccccacugucu

SEQ ID NO: 13528 - RNA, 20 nt, Artificial Sequence
  Synthetic
  misc_feature (1)..(1): n is a, c, g, or u
naaacaggcuuuuacuuucu

SEQ ID NO: 13529 - RNA, 20 nt, Artificial Sequence
  Synthetic
uuaggcagaggugaaaaagu

SEQ ID NO: 13530 - RNA, 20 nt, Artificial Sequence
  Synthetic
uucgcuucaccucugcacgu

SEQ ID NO: 13531 - RNA, 20 nt, Artificial Sequence
  Synthetic
uaucugaaccuuuaccccgu

SEQ ID NO: 13532 - RNA, 20 nt, Artificial Sequence
  Synthetic
  misc_feature (16)..(16): n is a, c, g, or u
cuuggcacagaccagnccgu

SEQ ID NO: 13533 - RNA, 20 nt, Artificial Sequence
  Synthetic
gaaggucucaaucgccgcgu

SEQ ID NO: 13534 - RNA, 20 nt, Artificial Sequence
  Synthetic
aaauuacuucccacccaggu

SEQ ID NO: 13535 - RNA, 20 nt, Artificial Sequence
  Synthetic
cuccaagcugugccuugggu

SEQ ID NO: 13536 - RNA, 20 nt, Artificial Sequence
  Synthetic
  misc_feature (2)..(2): n is a, c, g, or u
cncuguacuuuccugcuggu

SEQ ID NO: 13537 - RNA, 20 nt, Artificial Sequence
  Synthetic
ccucuauguuucccucaugu

SEQ ID NO: 13538 - RNA, 20 nt, Artificial Sequence
  Synthetic
ucuggacuaucaagguaugu

SEQ ID NO: 13539 - RNA, 20 nt, Artificial Sequence
  Synthetic
  misc_feature (5)..(6): n is a, c, g, or u
  misc_feature (17)..(17): n is a, c, g, or u
  misc_feature (19)..(19): n is a, c, g, or u
accunncuuuaauccunanu

SEQ ID NO: 13540 - RNA, 20 nt, Artificial Sequence
  Synthetic
  misc_feature (7)..(8): n is a, c, g, or u
  misc_feature (19)..(19): n is a, c, g, or u
aauuggnnguuggggcacnu

SEQ ID NO: 13541 - RNA, 20 nt, Artificial Sequence
  Synthetic
cgugugucuuggccaaaauu

SEQ ID NO: 13542 - RNA, 20 nt, Artificial Sequence
  Synthetic
uucuuuuccugacauucauu

SEQ ID NO: 13543 - RNA, 20 nt, Artificial Sequence
  Synthetic
  misc_feature (2)..(2): n is a, c, g, or u
unucuuuuggaguguggauu

SEQ ID NO: 13544 - RNA, 20 nt, Artificial Sequence
  Synthetic
  misc_feature (4)..(4): n is a, c, g, or u
uccnaauguuacuaaauauu

SEQ ID NO: 13545 - RNA, 20 nt, Artificial Sequence
  Synthetic
gguugcgucagcaaacacuu

SEQ ID NO: 13546 - RNA, 20 nt, Artificial Sequence
  Synthetic
  misc_feature (3)..(3): n is a, c, g, or u
cunccggaccgugugcacuu

SEQ ID NO: 13547 - RNA, 20 nt, Artificial Sequence
  Synthetic
ucaagauguuguacagacuu

SEQ ID NO: 13548 - RNA, 20 nt, Artificial Sequence
  Synthetic
acccccacugguuggggcuu

SEQ ID NO: 13549 - RNA, 20 nt, Artificial Sequence
  Synthetic
ggccucaguccguuucucuu

SEQ ID NO: 13550 - RNA, 20 nt, Artificial Sequence
  Synthetic
  misc_feature (4)..(4): n is a, c, g, or u
gggnaacacccgugugucuu

SEQ ID NO: 13551 - RNA, 20 nt, Artificial Sequence
  Synthetic
gucccgcgcaggauccaguu

SEQ ID NO: 13552 - RNA, 20 nt, Artificial Sequence
  Synthetic
ugucaggaaaagaaggaguu

SEQ ID NO: 13553 - RNA, 20 nt, Artificial Sequence
  Synthetic
caaucuggauuuucugaguu

SEQ ID NO: 13554 - RNA, 20 nt, Artificial Sequence
  Synthetic
auugugggucuuuugggguu

SEQ ID NO: 13555 - RNA, 20 nt, Artificial Sequence
  Synthetic
  misc_feature (1)..(1): n is a, c, g, or u
ncuggucugugccaaguguu

SEQ ID NO: 13556 - RNA, 20 nt, Artificial Sequence
  Synthetic
aucccaucaucuugggcuuu

SEQ ID NO: 13557 - RNA, 20 nt, Artificial Sequence
  Synthetic
uugucagucccgaugaguuu

SEQ ID NO: 13558 - RNA, 20 nt, Artificial Sequence
  Synthetic
  misc_feature (10)..(10): n is a, c, g, or u
agcaggagungugcagguuu

SEQ ID NO: 13559 - RNA, 20 nt, Artificial Sequence
  Synthetic
gagaaaguaaaagccuguuu

SEQ ID NO: 13560 - RNA, 20 nt, Artificial Sequence
  Synthetic
gaacuccuagccgcuuguuu

SEQ ID NO: 13561 - RNA, 20 nt, Artificial Sequence
  Synthetic
gauuugggacugcgaauuuu

SEQ ID NO: 13562 - RNA, 20 nt, Artificial Sequence
  Synthetic
uguggaguuacucucuuuuu

SEQ ID NO: 13563 - RNA, 17 nt, Artificial Sequence
  Synthetic
gcacacggaccggcaga

SEQ ID NO: 13564 - RNA, 17 nt, Artificial Sequence
  Synthetic
gucuccaugcaacgugc

SEQ ID NO: 13565 - RNA, 17 nt, Artificial Sequence
  Synthetic
ggucguugacauugcug

SEQ ID NO: 13566 - RNA, 20 nt, Artificial Sequence
  Synthetic
gugcgaauccacacuccgaa

SEQ ID NO: 13567 - RNA, 20 nt, Artificial Sequence
  Synthetic
gaaaaaccccgccuguaaca

SEQ ID NO: 13568 - RNA, 20 nt, Artificial Sequence
  Synthetic
ggcacuaguaaacugagcca

SEQ ID NO: 13569 - RNA, 20 nt, Artificial Sequence
  Synthetic
gcgagcaaaacaagcggcua

SEQ ID NO: 13570 - RNA, 20 nt, Artificial Sequence
  Synthetic
guuccgcaguauggaucggc

SEQ ID NO: 13571 - RNA, 20 nt, Artificial Sequence
  Synthetic
gacggggagaccgcguaaag

SEQ ID NO: 13572 - RNA, 20 nt, Artificial Sequence
  Synthetic
gcuuucgcaaaauaccuaug

SEQ ID NO: 13573 - RNA, 20 nt, Artificial Sequence
  Synthetic
gucggucguugacauugcug

SEQ ID NO: 13574 - RNA, 20 nt, Artificial Sequence
  Synthetic
  misc_feature (14)..(14): n is a, c, g, or u
gcgauugagaucuncgucug

SEQ ID NO: 13575 - RNA, 20 nt, Artificial Sequence
  Synthetic
gucuagacucugcgguauug

SEQ ID NO: 13576 - RNA, 20 nt, Artificial Sequence
  Synthetic
  misc_feature (6)..(6): n is a, c, g, or u
gggugnucccccuagaaaau

SEQ ID NO: 13577 - RNA, 20 nt, Artificial Sequence
  Synthetic
gcaaugucaacgaccgaccu

SEQ ID NO: 13578 - RNA, 20 nt, Artificial Sequence
  Synthetic
guuuugcucgcagccggucu

SEQ ID NO: 13579 - RNA, 20 nt, Artificial Sequence
  Synthetic
gaugacugucucuuagaggu

SEQ ID NO: 13580 - RNA, 20 nt, Artificial Sequence
  Synthetic
  misc_feature (12)..(12): n is a, c, g, or u
gcucuguaucgngaagccuu

SEQ ID NO: 13581 - RNA, 17 nt, Artificial Sequence
  Synthetic
cgaauccacacuccgaa

SEQ ID NO: 13582 - RNA, 17 nt, Artificial Sequence
  Synthetic
acggggagaccgcguaa

SEQ ID NO: 13583 - RNA, 17 nt, Artificial Sequence
  Synthetic
aaaccccgccuguaaca

SEQ ID NO: 13584 - RNA, 17 nt, Artificial Sequence
  Synthetic
caguauggaucggcaga

SEQ ID NO: 13585 - RNA, 17 nt, Artificial Sequence
  Synthetic
  misc_feature (14)..(14): n is a, c, g, or u
uuguuagacgacgngac

SEQ ID NO: 13586 - RNA, 17 nt, Artificial Sequence
  Synthetic
  misc_feature (11)..(11): n is a, c, g, or u
cuaaggcuucncgauac

SEQ ID NO: 13587 - RNA, 17 nt, Artificial Sequence
  Synthetic
ccgcaguauggaucggc

SEQ ID NO: 13588 - RNA, 17 nt, Artificial Sequence
  Synthetic
  misc_feature (2)..(2): n is a, c, g, or u
uncgucugcgaggcgag

SEQ ID NO: 13589 - RNA, 17 nt, Artificial Sequence
  Synthetic
agucccaagcggccccg

SEQ ID NO: 13590 - RNA, 17 nt, Artificial Sequence
  Synthetic
uugcuccagaccggcug

SEQ ID NO: 13591 - RNA, 17 nt, Artificial Sequence
  Synthetic
accucugcacguugcau

SEQ ID NO: 13592 - RNA, 17 nt, Artificial Sequence
  Synthetic
auugagauucccgagau

SEQ ID NO: 13593 - RNA, 17 nt, Artificial Sequence
  Synthetic
uucugcgacgcggcgau

SEQ ID NO: 13594 - RNA, 17 nt, Artificial Sequence
  Synthetic
augucaacgaccgaccu

SEQ ID NO: 13595 - RNA, 17 nt, Artificial Sequence
  Synthetic
uugguggucuauaggcu

SEQ ID NO: 13596 - RNA, 17 nt, Artificial Sequence
  Synthetic
uugcucgcagccggucu

SEQ ID NO: 13597 - RNA, 20 nt, Artificial Sequence
  Synthetic
cagacggggagaccgcguaa

SEQ ID NO: 13598 - RNA, 20 nt, Artificial Sequence
  Synthetic
acauagaguugccuugagca

SEQ ID NO: 13599 - RNA, 20 nt, Artificial Sequence
  Synthetic
agugcacacggaccggcaga

SEQ ID NO: 13600 - RNA, 20 nt, Artificial Sequence
  Synthetic
ccgcaguauggaucggcaga

SEQ ID NO: 13601 - RNA, 20 nt, Artificial Sequence
  Synthetic
  misc_feature (17)..(17): n is a, c, g, or u
cuguuguuagacgacgngac

SEQ ID NO: 13602 - RNA, 20 nt, Artificial Sequence
  Synthetic
  misc_feature (14)..(14): n is a, c, g, or u
acucuaaggcuucncgauac

SEQ ID NO: 13603 - RNA, 20 nt, Artificial Sequence
  Synthetic
ccagcagagaauggcuugcc

SEQ ID NO: 13604 - RNA, 20 nt, Artificial Sequence
  Synthetic
  misc_feature (9)..(9): n is a, c, g, or u
aaggcuucncgauacagagc

SEQ ID NO: 13605 - RNA, 20 nt, Artificial Sequence
  Synthetic
  misc_feature (5)..(5): n is a, c, g, or u
aucuncgucugcgaggcgag

SEQ ID NO: 13606 - RNA, 20 nt, Artificial Sequence
  Synthetic
  misc_feature (9)..(9): n is a, c, g, or u
ugagaucuncgucugcgagg

SEQ ID NO: 13607 - RNA, 20 nt, Artificial Sequence
  Synthetic
  misc_feature (14)..(14): n is a, c, g, or u
cuugccugagugcnguaugg

SEQ ID NO: 13608 - RNA, 20 nt, Artificial Sequence
  Synthetic
ugacugucucuuagaggugg

SEQ ID NO: 13609 - RNA, 20 nt, Artificial Sequence
  Synthetic
agaaaggccuuguaaguugg

SEQ ID NO: 13610 - RNA, 20 nt, Artificial Sequence
  Synthetic
  misc_feature (4)..(4): n is a, c, g, or u
ucgnggagauugacgagaug

SEQ ID NO: 13611 - RNA, 20 nt, Artificial Sequence
  Synthetic
aacauugagauucccgagau

SEQ ID NO: 13612 - RNA, 20 nt, Artificial Sequence
  Synthetic
aucuucugcgacgcggcgau

SEQ ID NO: 13613 - RNA, 20 nt, Artificial Sequence
  Synthetic
agggaaacauagaguugccu

SEQ ID NO: 13614 - RNA, 20 nt, Artificial Sequence
  Synthetic
cauuugguggucuauaggcu

SEQ ID NO: 13615 - RNA, 20 nt, Artificial Sequence
  Synthetic
agcgauaaccaggacaaauu

SEQ ID NO: 13616 - RNA, 17 nt, Artificial Sequence
  Synthetic
  misc_feature (5)..(5): n is a, c, g, or u
gaaunccagccuuccaa

SEQ ID NO: 13617 - RNA, 17 nt, Artificial Sequence
  Synthetic
  misc_feature (5)..(5): n is a, c, g, or u
  misc_feature (14)..(14): n is a, c, g, or u
gaaunuuaggaaangaa

SEQ ID NO: 13618 - RNA, 17 nt, Artificial Sequence
  Synthetic
gguuuuguacagcaaca

SEQ ID NO: 13619 - RNA, 17 nt, Artificial Sequence
  Synthetic
ggacaaauuggaggaca

SEQ ID NO: 13620 - RNA, 17 nt, Artificial Sequence
  Synthetic
gccgauugguggaggca

SEQ ID NO: 13621 - RNA, 17 nt, Artificial Sequence
  Synthetic
gaggugagcaaugcuca

SEQ ID NO: 13622 - RNA, 17 nt, Artificial Sequence
  Synthetic
gauugguggaggcagga

SEQ ID NO: 13623 - RNA, 17 nt, Artificial Sequence
  Synthetic
  misc_feature (9)..(9): n is a, c, g, or u
guguuuaangacuggga

SEQ ID NO: 13624 - RNA, 17 nt, Artificial Sequence
  Synthetic
guggucuauaggcugga

SEQ ID NO: 13625 - RNA, 17 nt, Artificial Sequence
  Synthetic
gcauagcagcaggauga

SEQ ID NO: 13626 - RNA, 17 nt, Artificial Sequence
  Synthetic
  misc_feature (8)..(8): n is a, c, g, or u
guccucgnggagauuga

SEQ ID NO: 13627 - RNA, 17 nt, Artificial Sequence
  Synthetic
gcccaaggucuuacaua

SEQ ID NO: 13628 - RNA, 17 nt, Artificial Sequence
  Synthetic
  misc_feature (7)..(7): n is a, c, g, or u
ggcuggnauucuauaua

SEQ ID NO: 13629 - RNA, 17 nt, Artificial Sequence
  Synthetic
gaucgggaaagaauccc

SEQ ID NO: 13630 - RNA, 17 nt, Artificial Sequence
  Synthetic
gcagagaauggcuugcc

SEQ ID NO: 13631 - RNA, 17 nt, Artificial Sequence
  Synthetic
gaagccuuagagucucc

SEQ ID NO: 13632 - RNA, 17 nt, Artificial Sequence
  Synthetic
  misc_feature (6)..(6): n is a, c, g, or u
gcuucncgauacagagc

SEQ ID NO: 13633 - RNA, 17 nt, Artificial Sequence
  Synthetic
ggggagaccgcguaaag

SEQ ID NO: 13634 - RNA, 17 nt, Artificial Sequence
  Synthetic
  misc_feature (6)..(6): n is a, c, g, or u
gaucuncgucugcgagg

SEQ ID NO: 13635 - RNA, 17 nt, Artificial Sequence
  Synthetic
  misc_feature (13)..(13): n is a, c, g, or u
gacugggaggagnuggg

SEQ ID NO: 13636 - RNA, 17 nt, Artificial Sequence
  Synthetic
  misc_feature (11)..(11): n is a, c, g, or u
gccugagugcnguaugg

SEQ ID NO: 13637 - RNA, 17 nt, Artificial Sequence
  Synthetic
ggaggacaggagguugg

SEQ ID NO: 13638 - RNA, 17 nt, Artificial Sequence
  Synthetic
  misc_feature (16)..(16): n is a, c, g, or u
gucagaaggcaaaaang

SEQ ID NO: 13639 - RNA, 17 nt, Artificial Sequence
  Synthetic
gagauugacgagaugug

SEQ ID NO: 13640 - RNA, 17 nt, Artificial Sequence
  Synthetic
  misc_feature (17)..(17): n is a, c, g, or u
ggguccccaguccucgn

SEQ ID NO: 13641 - RNA, 17 nt, Artificial Sequence
  Synthetic
  misc_feature (8)..(8): n is a, c, g, or u
  misc_feature (10)..(10): n is a, c, g, or u
gacccugngncgaacau

SEQ ID NO: 13642 - RNA, 17 nt, Artificial Sequence
  Synthetic
gaaacauagaguugccu

SEQ ID NO: 13643 - RNA, 17 nt, Artificial Sequence
  Synthetic
gacugucucuuagaggu

SEQ ID NO: 13644 - RNA, 17 nt, Artificial Sequence
  Synthetic
gaauuuggagcuacugu

SEQ ID NO: 13645 - RNA, 17 nt, Artificial Sequence
  Synthetic
gauaaccaggacaaauu

SEQ ID NO: 13646 - RNA, 17 nt, Artificial Sequence
  Synthetic
gagguuggugagugauu

SEQ ID NO: 13647 - RNA, 17 nt, Artificial Sequence
  Synthetic
gaggaugacugucucuu

SEQ ID NO: 13648 - RNA, 20 nt, Artificial Sequence
  Synthetic
guagguuuuguacagcaaca

SEQ ID NO: 13649 - RNA, 20 nt, Artificial Sequence
  Synthetic
ggugaggugagcaaugcuca

SEQ ID NO: 13650 - RNA, 20 nt, Artificial Sequence
  Synthetic
gccgauugguggaggcagga

SEQ ID NO: 13651 - RNA, 20 nt, Artificial Sequence
  Synthetic
  misc_feature (13)..(13): n is a, c, g, or u
gacugggaggagnuggggga

SEQ ID NO: 13652 - RNA, 20 nt, Artificial Sequence
  Synthetic
gaggcauagcagcaggauga

SEQ ID NO: 13653 - RNA, 20 nt, Artificial Sequence
  Synthetic
  misc_feature (10)..(10): n is a, c, g, or u
  misc_feature (16)..(16): n is a, c, g, or u
  misc_feature (19)..(19): n is a, c, g, or u
gacagaauunucagunccna

SEQ ID NO: 13654 - RNA, 20 nt, Artificial Sequence
  Synthetic
  misc_feature (10)..(10): n is a, c, g, or u
gaaggcuggnauucuauaua

SEQ ID NO: 13655 - RNA, 20 nt, Artificial Sequence
  Synthetic
  misc_feature (6)..(7): n is a, c, g, or u
ggccannagccaaccaggua

SEQ ID NO: 13656 - RNA, 20 nt, Artificial Sequence
  Synthetic
  misc_feature (7)..(7): n is a, c, g, or u
  misc_feature (9)..(9): n is a, c, g, or u
gguuaangnucuuuguauua

SEQ ID NO: 13657 - RNA, 20 nt, Artificial Sequence
  Synthetic
  misc_feature (7)..(8): n is a, c, g, or u
  misc_feature (11)..(11): n is a, c, g, or u
ggucggnnggnacggcagac

SEQ ID NO: 13658 - RNA, 20 nt, Artificial Sequence
  Synthetic
gaugaucgggaaagaauccc

SEQ ID NO: 13659 - RNA, 20 nt, Artificial Sequence
  Synthetic
guggucuccaugcaacgugc

SEQ ID NO: 13660 - RNA, 20 nt, Artificial Sequence
  Synthetic
  misc_feature (19)..(19): n is a, c, g, or u
gaagucagaaggcaaaaang

SEQ ID NO: 13661 - RNA, 20 nt, Artificial Sequence
  Synthetic
  misc_feature (16)..(16): n is a, c, g, or u
ggaacaagagcuacancaug

SEQ ID NO: 13662 - RNA, 20 nt, Artificial Sequence
  Synthetic
  misc_feature (15)..(15): n is a, c, g, or u
gacuguguguuuaangacug

SEQ ID NO: 13663 - RNA, 20 nt, Artificial Sequence
  Synthetic
  misc_feature (2)..(2): n is a, c, g, or u
gnuuugcuccagaccggcug

SEQ ID NO: 13664 - RNA, 20 nt, Artificial Sequence
  Synthetic
  misc_feature (2)..(2): n is a, c, g, or u
gnggagauugacgagaugug

SEQ ID NO: 13665 - RNA, 20 nt, Artificial Sequence
  Synthetic
  misc_feature (4)..(4): n is a, c, g, or u
gugnucccccuagaaaauug

SEQ ID NO: 13666 - RNA, 20 nt, Artificial Sequence
  Synthetic
gauucguccccaugccuuug

SEQ ID NO: 13667 - RNA, 20 nt, Artificial Sequence
  Synthetic
  misc_feature (15)..(15): n is a, c, g, or u
  misc_feature (20)..(20): n is a, c, g, or u
gccaagucuguacancaucn

SEQ ID NO: 13668 - RNA, 20 nt, Artificial Sequence
  Synthetic
  misc_feature (2)..(2): n is a, c, g, or u
  misc_feature (5)..(5): n is a, c, g, or u
gnuanccacauuguguaaau

SEQ ID NO: 13669 - RNA, 20 nt, Artificial Sequence
  Synthetic
  misc_feature (11)..(11): n is a, c, g, or u
  misc_feature (13)..(13): n is a, c, g, or u
ggggacccugngncgaacau

SEQ ID NO: 13670 - RNA, 20 nt, Artificial Sequence
  Synthetic
  misc_feature (6)..(6): n is a, c, g, or u
  misc_feature (8)..(8): n is a, c, g, or u
ggguunanuguuccugaacu

SEQ ID NO: 13671 - RNA, 17 nt, Artificial Sequence
  Synthetic
aagucagaaggcaaaaa

SEQ ID NO: 13672 - RNA, 17 nt, Artificial Sequence
  Synthetic
ccauauucuugggaaca

SEQ ID NO: 13673 - RNA, 17 nt, Artificial Sequence
  Synthetic
  misc_feature (2)..(2): n is a, c, g, or u
  misc_feature (14)..(14): n is a, c, g, or u
anagugggacaugnaca

SEQ ID NO: 13674 - RNA, 17 nt, Artificial Sequence
  Synthetic
uugagagaaguccacca

SEQ ID NO: 13675 - RNA, 17 nt, Artificial Sequence
  Synthetic
acuaguaaacugagcca

SEQ ID NO: 13676 - RNA, 17 nt, Artificial Sequence
  Synthetic
acauugcugggagucca

SEQ ID NO: 13677 - RNA, 17 nt, Artificial Sequence
  Synthetic
uagaguugccuugagca

SEQ ID NO: 13678 - RNA, 17 nt, Artificial Sequence
  Synthetic
aagaaccaauaagaaga

SEQ ID NO: 13679 - RNA, 17 nt, Artificial Sequence
  Synthetic
  misc_feature (10)..(10): n is a, c, g, or u
ugggaggagnuggggga

SEQ ID NO: 13680 - RNA, 17 nt, Artificial Sequence
  Synthetic
cuugccuuacuuuugga

SEQ ID NO: 13681 - RNA, 17 nt, Artificial Sequence
  Synthetic
  misc_feature (7)..(7): n is a, c, g, or u
  misc_feature (13)..(13): n is a, c, g, or u
  misc_feature (16)..(16): n is a, c, g, or u
agaauunucagunccna

SEQ ID NO: 13682 - RNA, 17 nt, Artificial Sequence
  Synthetic
agcaaaacaagcggcua

SEQ ID NO: 13683 - RNA, 17 nt, Artificial Sequence
  Synthetic
ccaucucuccaccucua

SEQ ID NO: 13684 - RNA, 17 nt, Artificial Sequence
  Synthetic
  misc_feature (3)..(4): n is a, c, g, or u
cannagccaaccaggua

SEQ ID NO: 13685 - RNA, 17 nt, Artificial Sequence
  Synthetic
  misc_feature (4)..(4): n is a, c, g, or u
  misc_feature (6)..(6): n is a, c, g, or u
uaangnucuuuguauua

SEQ ID NO: 13686 - RNA, 17 nt, Artificial Sequence
  Synthetic
  misc_feature (2)..(2): n is a, c, g, or u
  misc_feature (5)..(5): n is a, c, g, or u
unaanuuucccaccuua

SEQ ID NO: 13687 - RNA, 17 nt, Artificial Sequence
  Synthetic
aaauggcacuaguaaac

SEQ ID NO: 13688 - RNA, 17 nt, Artificial Sequence
  Synthetic
  misc_feature (4)..(5): n is a, c, g, or u
  misc_feature (8)..(8): n is a, c, g, or u
cggnnggnacggcagac

SEQ ID NO: 13689 - RNA, 17 nt, Artificial Sequence
  Synthetic
  misc_feature (6)..(6): n is a, c, g, or u
agccangagaaacggac

SEQ ID NO: 13690 - RNA, 17 nt, Artificial Sequence
  Synthetic
  misc_feature (5)..(5): n is a, c, g, or u
  misc_feature (7)..(7): n is a, c, g, or u
cugungncaauaugccc

SEQ ID NO: 13691 - RNA, 17 nt, Artificial Sequence
  Synthetic
  misc_feature (11)..(11): n is a, c, g, or u
aagcucugcangauccc

SEQ ID NO: 13692 - RNA, 17 nt, Artificial Sequence
  Synthetic
  misc_feature (1)..(1): n is a, c, g, or u
ncaauaugcccugagcc

SEQ ID NO: 13693 - RNA, 17 nt, Artificial Sequence
  Synthetic
acuaacauugagauucc

SEQ ID NO: 13694 - RNA, 17 nt, Artificial Sequence
  Synthetic
  misc_feature (4)..(4): n is a, c, g, or u
caunaauuccccccagc

SEQ ID NO: 13695 - RNA, 17 nt, Artificial Sequence
  Synthetic
aauccucacaauaccgc

SEQ ID NO: 13696 - RNA, 17 nt, Artificial Sequence
  Synthetic
acaagagaugauuaggc

SEQ ID NO: 13697 - RNA, 17 nt, Artificial Sequence
  Synthetic
  misc_feature (14)..(14): n is a, c, g, or u
ugacucugggaucnugc

SEQ ID NO: 13698 - RNA, 17 nt, Artificial Sequence
  Synthetic
aguuggacccugcauuc

SEQ ID NO: 13699 - RNA, 17 nt, Artificial Sequence
  Synthetic
  misc_feature (2)..(2): n is a, c, g, or u
anuauuuggucucuuuc

SEQ ID NO: 13700 - RNA, 17 nt, Artificial Sequence
  Synthetic
  misc_feature (4)..(4): n is a, c, g, or u
ucunuuuucauuuacag

SEQ ID NO: 13701 - RNA, 17 nt, Artificial Sequence
  Synthetic
  misc_feature (6)..(6): n is a, c, g, or u
agugcnguauggugagg

SEQ ID NO: 13702 - RNA, 17 nt, Artificial Sequence
  Synthetic
ugagaaggcacagacgg

SEQ ID NO: 13703 - RNA, 17 nt, Artificial Sequence
  Synthetic
cugucucuuagaggugg

SEQ ID NO: 13704 - RNA, 17 nt, Artificial Sequence
  Synthetic
aaggccuuguaaguugg

SEQ ID NO: 13705 - RNA, 17 nt, Artificial Sequence
  Synthetic
  misc_feature (13)..(13): n is a, c, g, or u
acaagagcuacancaug

SEQ ID NO: 13706 - RNA, 17 nt, Artificial Sequence
  Synthetic
uuagagguggagagaug

SEQ ID NO: 13707 - RNA, 17 nt, Artificial Sequence
  Synthetic
  misc_feature (1)..(1): n is a, c, g, or u
nggagauugacgagaug

SEQ ID NO: 13708 - RNA, 17 nt, Artificial Sequence
  Synthetic
uucgcaaaauaccuaug

SEQ ID NO: 13709 - RNA, 17 nt, Artificial Sequence
  Synthetic
  misc_feature (12)..(12): n is a, c, g, or u
uguguguuuaangacug

SEQ ID NO: 13710 - RNA, 17 nt, Artificial Sequence
  Synthetic
  misc_feature (11)..(11): n is a, c, g, or u
auugagaucuncgucug

SEQ ID NO: 13711 - RNA, 17 nt, Artificial Sequence
  Synthetic
  misc_feature (2)..(2): n is a, c, g, or u
unuuuucauuuacagug

SEQ ID NO: 13712 - RNA, 17 nt, Artificial Sequence
  Synthetic
ccaaccagguaggagug

SEQ ID NO: 13713 - RNA, 17 nt, Artificial Sequence
  Synthetic
  misc_feature (1)..(1): n is a, c, g, or u
nucccccuagaaaauug

SEQ ID NO: 13714 - RNA, 17 nt, Artificial Sequence
  Synthetic
uagacucugcgguauug

SEQ ID NO: 13715 - RNA, 17 nt, Artificial Sequence
  Synthetic
ucguccccaugccuuug

SEQ ID NO: 13716 - RNA, 17 nt, Artificial Sequence
  Synthetic
  misc_feature (17)..(17): n is a, c, g, or u
acggagaaggggacgan

SEQ ID NO: 13717 - RNA, 17 nt, Artificial Sequence
  Synthetic
  misc_feature (17)..(17): n is a, c, g, or u
caucucgucaaucuccn

SEQ ID NO: 13718 - RNA, 17 nt, Artificial Sequence
  Synthetic
  misc_feature (12)..(12): n is a, c, g, or u
  misc_feature (17)..(17): n is a, c, g, or u
aagucuguacancaucn

SEQ ID NO: 13719 - RNA, 17 nt, Artificial Sequence
  Synthetic
  misc_feature (3)..(3): n is a, c, g, or u
ugnucccccuagaaaau

SEQ ID NO: 13720 - RNA, 17 nt, Artificial Sequence
  Synthetic
  misc_feature (2)..(2): n is a, c, g, or u
anccacauuguguaaau

SEQ ID NO: 13721 - RNA, 17 nt, Artificial Sequence
  Synthetic
caacaugagggaaacau

SEQ ID NO: 13722 - RNA, 17 nt, Artificial Sequence
  Synthetic
ccaaggaauacuaacau

SEQ ID NO: 13723 - RNA, 17 nt, Artificial Sequence
  Synthetic
  misc_feature (3)..(3): n is a, c, g, or u
  misc_feature (5)..(5): n is a, c, g, or u
uunanuguuccugaacu

SEQ ID NO: 13724 - RNA, 17 nt, Artificial Sequence
  Synthetic
uacccacccagguagcu

SEQ ID NO: 13725 - RNA, 17 nt, Artificial Sequence
  Synthetic
  misc_feature (4)..(4): n is a, c, g, or u
  misc_feature (8)..(8): n is a, c, g, or u
cggnggunuuuuggggu

SEQ ID NO: 13726 - RNA, 17 nt, Artificial Sequence
  Synthetic
ccugacugccgauuggu

SEQ ID NO: 13727 - RNA, 17 nt, Artificial Sequence
  Synthetic
  misc_feature (5)..(5): n is a, c, g, or u
uugungauccuggaauu

SEQ ID NO: 13728 - RNA, 17 nt, Artificial Sequence
  Synthetic
  misc_feature (9)..(9): n is a, c, g, or u
cuguaucgngaagccuu

SEQ ID NO: 13729 - RNA, 17 nt, Artificial Sequence
  Synthetic
  misc_feature (3)..(3): n is a, c, g, or u
canccaaggcacagcuu

SEQ ID NO: 13730 - RNA, 17 nt, Artificial Sequence
  Synthetic
acccuuauaaagaauuu

SEQ ID NO: 13731 - RNA, 20 nt, Artificial Sequence
  Synthetic
aagaagucagaaggcaaaaa

SEQ ID NO: 13732 - RNA, 20 nt, Artificial Sequence
  Synthetic
  misc_feature (8)..(8): n is a, c, g, or u
auagaaunccagccuuccaa

SEQ ID NO: 13733 - RNA, 20 nt, Artificial Sequence
  Synthetic
  misc_feature (8)..(8): n is a, c, g, or u
  misc_feature (17)..(17): n is a, c, g, or u
aaugaaunuuaggaaangaa

SEQ ID NO: 13734 - RNA, 20 nt, Artificial Sequence
  Synthetic
ucaccauauucuugggaaca

SEQ ID NO: 13735 - RNA, 20 nt, Artificial Sequence
  Synthetic
ccaggacaaauuggaggaca

SEQ ID NO: 13736 - RNA, 20 nt, Artificial Sequence
  Synthetic
  misc_feature (5)..(5): n is a, c, g, or u
  misc_feature (17)..(17): n is a, c, g, or u
ugaanagugggacaugnaca

SEQ ID NO: 13737 - RNA, 20 nt, Artificial Sequence
  Synthetic
aaauugagagaaguccacca

SEQ ID NO: 13738 - RNA, 20 nt, Artificial Sequence
  Synthetic
uugacauugcugggagucca

SEQ ID NO: 13739 - RNA, 20 nt, Artificial Sequence
  Synthetic
acugccgauugguggaggca

SEQ ID NO: 13740 - RNA, 20 nt, Artificial Sequence
  Synthetic
cagaagaaccaauaagaaga

SEQ ID NO: 13741 - RNA, 20 nt, Artificial Sequence
  Synthetic
  misc_feature (12)..(12): n is a, c, g, or u
uguguguuuaangacuggga

SEQ ID NO: 13742 - RNA, 20 nt, Artificial Sequence
  Synthetic
uugguggucuauaggcugga

SEQ ID NO: 13743 - RNA, 20 nt, Artificial Sequence
  Synthetic
  misc_feature (2)..(2): n is a, c, g, or u
unucuugccuuacuuuugga

SEQ ID NO: 13744 - RNA, 20 nt, Artificial Sequence
  Synthetic
  misc_feature (11)..(11): n is a, c, g, or u
ccaguccucgnggagauuga

SEQ ID NO: 13745 - RNA, 20 nt, Artificial Sequence
  Synthetic
ccugcccaaggucuuacaua

SEQ ID NO: 13746 - RNA, 20 nt, Artificial Sequence
  Synthetic
cucccaucucuccaccucua

SEQ ID NO: 13747 - RNA, 20 nt, Artificial Sequence
  Synthetic
  misc_feature (2)..(2): n is a, c, g, or u
  misc_feature (5)..(5): n is a, c, g, or u
  misc_feature (8)..(8): n is a, c, g, or u
cngunaanuuucccaccuua

SEQ ID NO: 13748 - RNA, 20 nt, Artificial Sequence
  Synthetic
aacaaauggcacuaguaaac

SEQ ID NO: 13749 - RNA, 20 nt, Artificial Sequence
  Synthetic
  misc_feature (9)..(9): n is a, c, g, or u
cugagccangagaaacggac

SEQ ID NO: 13750 - RNA, 20 nt, Artificial Sequence
  Synthetic
  misc_feature (1)..(1): n is a, c, g, or u
  misc_feature (8)..(8): n is a, c, g, or u
  misc_feature (10)..(10): n is a, c, g, or u
ncacugungncaauaugccc

SEQ ID NO: 13751 - RNA, 20 nt, Artificial Sequence
  Synthetic
  misc_feature (14)..(14): n is a, c, g, or u
accaagcucugcangauccc

SEQ ID NO: 13752 - RNA, 20 nt, Artificial Sequence
  Synthetic
  misc_feature (2)..(2): n is a, c, g, or u
  misc_feature (4)..(4): n is a, c, g, or u
ungncaauaugcccugagcc

SEQ ID NO: 13753 - RNA, 20 nt, Artificial Sequence
  Synthetic
  misc_feature (3)..(3): n is a, c, g, or u
cgngaagccuuagagucucc

SEQ ID NO: 13754 - RNA, 20 nt, Artificial Sequence
  Synthetic
aauacuaacauugagauucc

SEQ ID NO: 13755 - RNA, 20 nt, Artificial Sequence
  Synthetic
  misc_feature (7)..(7): n is a, c, g, or u
agucaunaauuccccccagc

SEQ ID NO: 13756 - RNA, 20 nt, Artificial Sequence
  Synthetic
aagaauccucacaauaccgc

SEQ ID NO: 13757 - RNA, 20 nt, Artificial Sequence
  Synthetic
  misc_feature (3)..(3): n is a, c, g, or u
ugnacaagagaugauuaggc

SEQ ID NO: 13758 - RNA, 20 nt, Artificial Sequence
  Synthetic
  misc_feature (17)..(17): n is a, c, g, or u
cccugacucugggaucnugc

SEQ ID NO: 13759 - RNA, 20 nt, Artificial Sequence
  Synthetic
aucaguuggacccugcauuc

SEQ ID NO: 13760 - RNA, 20 nt, Artificial Sequence
  Synthetic
  misc_feature (5)..(5): n is a, c, g, or u
uuganuauuuggucucuuuc

SEQ ID NO: 13761 - RNA, 20 nt, Artificial Sequence
  Synthetic
  misc_feature (7)..(7): n is a, c, g, or u
ucuucunuuuucauuuacag

SEQ ID NO: 13762 - RNA, 20 nt, Artificial Sequence
  Synthetic
  misc_feature (1)..(1): n is a, c, g, or u
nagagucccaagcggccccg

SEQ ID NO: 13763 - RNA, 20 nt, Artificial Sequence
  Synthetic
  misc_feature (9)..(9): n is a, c, g, or u
cugagugcnguauggugagg

SEQ ID NO: 13764 - RNA, 20 nt, Artificial Sequence
  Synthetic
agaugagaaggcacagacgg

SEQ ID NO: 13765 - RNA, 20 nt, Artificial Sequence
  Synthetic
  misc_feature (3)..(3): n is a, c, g, or u
  misc_feature (16)..(16): n is a, c, g, or u
aangacugggaggagnuggg

SEQ ID NO: 13766 - RNA, 20 nt, Artificial Sequence
  Synthetic
auuggaggacaggagguugg

SEQ ID NO: 13767 - RNA, 20 nt, Artificial Sequence
  Synthetic
cucuuagagguggagagaug

SEQ ID NO: 13768 - RNA, 20 nt, Artificial Sequence
  Synthetic
  misc_feature (5)..(5): n is a, c, g, or u
uucunuuuucauuuacagug

SEQ ID NO: 13769 - RNA, 20 nt, Artificial Sequence
  Synthetic
  misc_feature (1)..(1): n is a, c, g, or u
nagccaaccagguaggagug

SEQ ID NO: 13770 - RNA, 20 nt, Artificial Sequence
  Synthetic
  misc_feature (20)..(20): n is a, c, g, or u
cagacggagaaggggacgan

SEQ ID NO: 13771 - RNA, 20 nt, Artificial Sequence
  Synthetic
  misc_feature (20)..(20): n is a, c, g, or u
ucacaucucgucaaucuccn

SEQ ID NO: 13772 - RNA, 20 nt, Artificial Sequence
  Synthetic
  misc_feature (1)..(1): n is a, c, g, or u
  misc_feature (20)..(20): n is a, c, g, or u
ncaggguccccaguccucgn

SEQ ID NO: 13773 - RNA, 20 nt, Artificial Sequence
  Synthetic
cagcaacaugagggaaacau

SEQ ID NO: 13774 - RNA, 20 nt, Artificial Sequence
  Synthetic
aguccaaggaauacuaacau

SEQ ID NO: 13775 - RNA, 20 nt, Artificial Sequence
  Synthetic
uucaccucugcacguugcau

SEQ ID NO: 13776 - RNA, 20 nt, Artificial Sequence
  Synthetic
uauuacccacccagguagcu

SEQ ID NO: 13777 - RNA, 20 nt, Artificial Sequence
  Synthetic
  misc_feature (7)..(7): n is a, c, g, or u
  misc_feature (11)..(11): n is a, c, g, or u
acacggnggunuuuuggggu

SEQ ID NO: 13778 - RNA, 20 nt, Artificial Sequence
  Synthetic
cuuccugacugccgauuggu

SEQ ID NO: 13779 - RNA, 20 nt, Artificial Sequence
  Synthetic
aaagaauuuggagcuacugu

SEQ ID NO: 13780 - RNA, 20 nt, Artificial Sequence
  Synthetic
  misc_feature (8)..(8): n is a, c, g, or u
uuguugungauccuggaauu

SEQ ID NO: 13781 - RNA, 20 nt, Artificial Sequence
  Synthetic
caggagguuggugagugauu

SEQ ID NO: 13782 - RNA, 20 nt, Artificial Sequence
  Synthetic
  misc_feature (6)..(6): n is a, c, g, or u
agccanccaaggcacagcuu

SEQ ID NO: 13783 - RNA, 20 nt, Artificial Sequence
  Synthetic
ccugaggaugacugucucuu

SEQ ID NO: 13784 - RNA, 20 nt, Artificial Sequence
  Synthetic
uugacccuuauaaagaauuu

SEQ ID NO: 13785 - RNA, 17 nt, Artificial Sequence
  Synthetic
uauggugacccgcaaaa

SEQ ID NO: 13786 - RNA, 17 nt, Artificial Sequence
  Synthetic
gacgggacguaaacaaa

SEQ ID NO: 13787 - RNA, 17 nt, Artificial Sequence
  Synthetic
  misc_feature (10)..(10): n is a, c, g, or u
guauacccanagacaaa

SEQ ID NO: 13788 - RNA, 17 nt, Artificial Sequence
  Synthetic
uggaauuagaggacaaa

SEQ ID NO: 13789 - RNA, 17 nt, Artificial Sequence
  Synthetic
  misc_feature (5)..(5): n is a, c, g, or u
gagcngcaaagcccaaa

SEQ ID NO: 13790 - RNA, 17 nt, Artificial Sequence
  Synthetic
  misc_feature (9)..(9): n is a, c, g, or u
aaaugaaunuuaggaaa

SEQ ID NO: 13791 - RNA, 17 nt, Artificial Sequence
  Synthetic
ccuagcagccauggaaa

SEQ ID NO: 13792 - RNA, 17 nt, Artificial Sequence
  Synthetic
ggcccucucacuguaaa

SEQ ID NO: 13793 - RNA, 17 nt, Artificial Sequence
  Synthetic
  misc_feature (8)..(8): n is a, c, g, or u
  misc_feature (11)..(11): n is a, c, g, or u
uaaugucnucnuguaaa

SEQ ID NO: 13794 - RNA, 17 nt, Artificial Sequence
  Synthetic
  misc_feature (2)..(2): n is a, c, g, or u
cngcuccauuuacacaa

SEQ ID NO: 13795 - RNA, 17 nt, Artificial Sequence
  Synthetic
acagccuccuaauacaa

SEQ ID NO: 13796 - RNA, 17 nt, Artificial Sequence
  Synthetic
ccaccuuaugaguccaa

SEQ ID NO: 13797 - RNA, 17 nt, Artificial Sequence
  Synthetic
  misc_feature (13)..(13): n is a, c, g, or u
aggccguugccgngcaa

SEQ ID NO: 13798 - RNA, 17 nt, Artificial Sequence
  Synthetic
cgguggucuccaugcaa

SEQ ID NO: 13799 - RNA, 17 nt, Artificial Sequence
  Synthetic
gacuucaaccccaucaa

SEQ ID NO: 13800 - RNA, 17 nt, Artificial Sequence
  Synthetic
acucccagcaaugucaa

SEQ ID NO: 13801 - RNA, 17 nt, Artificial Sequence
  Synthetic
cuugaggccuacuucaa

SEQ ID NO: 13802 - RNA, 17 nt, Artificial Sequence
  Synthetic
  misc_feature (5)..(5): n is a, c, g, or u
gaggnuugggaacagaa

SEQ ID NO: 13803 - RNA, 17 nt, Artificial Sequence
  Synthetic
  misc_feature (2)..(2): n is a, c, g, or u
gnacggcagacggagaa

SEQ ID NO: 13804 - RNA, 17 nt, Artificial Sequence
  Synthetic
  misc_feature (4)..(4): n is a, c, g, or u
  misc_feature (6)..(6): n is a, c, g, or u
aucncngacggaaggaa

SEQ ID NO: 13805 - RNA, 17 nt, Artificial Sequence
  Synthetic
  misc_feature (2)..(2): n is a, c, g, or u
  misc_feature (8)..(8): n is a, c, g, or u
  misc_feature (10)..(10): n is a, c, g, or u
gnagaucncngacggaa

SEQ ID NO: 13806 - RNA, 17 nt, Artificial Sequence
  Synthetic
caacugaugaucgggaa

SEQ ID NO: 13807 - RNA, 17 nt, Artificial Sequence
  Synthetic
auuccuuggacucauaa

SEQ ID NO: 13808 - RNA, 17 nt, Artificial Sequence
  Synthetic
ugguaacagcgguauaa

SEQ ID NO: 13809 - RNA, 17 nt, Artificial Sequence
  Synthetic
gacauugacccuuauaa

SEQ ID NO: 13810 - RNA, 17 nt, Artificial Sequence
  Synthetic
  misc_feature (4)..(4): n is a, c, g, or u
  misc_feature (8)..(8): n is a, c, g, or u
  misc_feature (11)..(11): n is a, c, g, or u
gucnggunugnaaguaa

SEQ ID NO: 13811 - RNA, 17 nt, Artificial Sequence
  Synthetic
uugccauucaggauuaa

SEQ ID NO: 13812 - RNA, 17 nt, Artificial Sequence
  Synthetic
aaagacuguguguuuaa

SEQ ID NO: 13813 - RNA, 17 nt, Artificial Sequence
  Synthetic
cggcugcgagcaaaaca

SEQ ID NO: 13814 - RNA, 17 nt, Artificial Sequence
  Synthetic
gaggauucuugucaaca

SEQ ID NO: 13815 - RNA, 17 nt, Artificial Sequence
  Synthetic
uuauguuaauacuaaca

SEQ ID NO: 13816 - RNA, 17 nt, Artificial Sequence
  Synthetic
auuuuggccaagacaca

SEQ ID NO: 13817 - RNA, 17 nt, Artificial Sequence
  Synthetic
  misc_feature (6)..(6): n is a, c, g, or u
  misc_feature (9)..(9): n is a, c, g, or u
uggggnacnuugccaca

SEQ ID NO: 13818 - RNA, 17 nt, Artificial Sequence
  Synthetic
gguuuuucuuguugaca

SEQ ID NO: 13819 - RNA, 17 nt, Artificial Sequence
  Synthetic
  misc_feature (8)..(8): n is a, c, g, or u
  misc_feature (10)..(11): n is a, c, g, or u
  misc_feature (14)..(14): n is a, c, g, or u
caauaggncnnuunaca

SEQ ID NO: 13820 - RNA, 17 nt, Artificial Sequence
  Synthetic
gaugggaugggaauaca

SEQ ID NO: 13821 - RNA, 17 nt, Artificial Sequence
  Synthetic
ccccugcucguguuaca

SEQ ID NO: 13822 - RNA, 17 nt, Artificial Sequence
  Synthetic
  misc_feature (6)..(6): n is a, c, g, or u
ccuaanauucauuuaca

SEQ ID NO: 13823 - RNA, 17 nt, Artificial Sequence
  Synthetic
acauccagcgauaacca

SEQ ID NO: 13824 - RNA, 17 nt, Artificial Sequence
  Synthetic
  misc_feature (6)..(6): n is a, c, g, or u
  misc_feature (9)..(10): n is a, c, g, or u
gccgunccnnccgacca

SEQ ID NO: 13825 - RNA, 17 nt, Artificial Sequence
  Synthetic
uauuuugcgaaagccca

SEQ ID NO: 13826 - RNA, 17 nt, Artificial Sequence
  Synthetic
  misc_feature (9)..(10): n is a, c, g, or u
  misc_feature (13)..(13): n is a, c, g, or u
uccaauuannuanccca

SEQ ID NO: 13827 - RNA, 17 nt, Artificial Sequence
  Synthetic
  misc_feature (8)..(8): n is a, c, g, or u
gggacganagaguccca

SEQ ID NO: 13828 - RNA, 17 nt, Artificial Sequence
  Synthetic
uguagcucuuguuccca

SEQ ID NO: 13829 - RNA, 17 nt, Artificial Sequence
  Synthetic
acugcgaauuuuggcca

SEQ ID NO: 13830 - RNA, 17 nt, Artificial Sequence
  Synthetic
cggccuggucugugcca

SEQ ID NO: 13831 - RNA, 17 nt, Artificial Sequence
  Synthetic
uuuguccucuaauucca

SEQ ID NO: 13832 - RNA, 17 nt, Artificial Sequence
  Synthetic
aacuggagccaccagca

SEQ ID NO: 13833 - RNA, 17 nt, Artificial Sequence
  Synthetic
gaugaggcauagcagca

SEQ ID NO: 13834 - RNA, 17 nt, Artificial Sequence
  Synthetic
cgccuguaacacgagca

SEQ ID NO: 13835 - RNA, 17 nt, Artificial Sequence
  Synthetic
cacaaagguuccacgca

SEQ ID NO: 13836 - RNA, 17 nt, Artificial Sequence
  Synthetic
  misc_feature (1)..(1): n is a, c, g, or u
  misc_feature (4)..(4): n is a, c, g, or u
naunggccaucagcgca

SEQ ID NO: 13837 - RNA, 17 nt, Artificial Sequence
  Synthetic
aaaaccucgcaaaggca

SEQ ID NO: 13838 - RNA, 17 nt, Artificial Sequence
  Synthetic
cuuccaaaaguaaggca

SEQ ID NO: 13839 - RNA, 17 nt, Artificial Sequence
  Synthetic
auguaagaccuugggca

SEQ ID NO: 13840 - RNA, 17 nt, Artificial Sequence
  Synthetic
  misc_feature (4)..(4): n is a, c, g, or u
accnugcaaaaccugca

SEQ ID NO: 13841 - RNA, 17 nt, Artificial Sequence
  Synthetic
uuccaccaagcucugca

SEQ ID NO: 13842 - RNA, 17 nt, Artificial Sequence
  Synthetic
  misc_feature (15)..(15): n is a, c, g, or u
gaacaagagcuacanca

SEQ ID NO: 13843 - RNA, 17 nt, Artificial Sequence
  Synthetic
uggagaacaucacauca

SEQ ID NO: 13844 - RNA, 17 nt, Artificial Sequence
  Synthetic
  misc_feature (13)..(13): n is a, c, g, or u
cgguauaaagggncuca

SEQ ID NO: 13845 - RNA, 17 nt, Artificial Sequence
  Synthetic
ccaccaaucggcaguca

SEQ ID NO: 13846 - RNA, 17 nt, Artificial Sequence
  Synthetic
  misc_feature (4)..(4): n is a, c, g, or u
gcangaucccagaguca

SEQ ID NO: 13847 - RNA, 17 nt, Artificial Sequence
  Synthetic
aaggaguuugccauuca

SEQ ID NO: 13848 - RNA, 17 nt, Artificial Sequence
  Synthetic
cugguggcuccaguuca

SEQ ID NO: 13849 - RNA, 17 nt, Artificial Sequence
  Synthetic
  misc_feature (13)..(13): n is a, c, g, or u
uuauucccuaaanuuca

SEQ ID NO: 13850 - RNA, 17 nt, Artificial Sequence
  Synthetic
gcagguccccuagaaga

SEQ ID NO: 13851 - RNA, 17 nt, Artificial Sequence
  Synthetic
uagcagcaggaugaaga

SEQ ID NO: 13852 - RNA, 17 nt, Artificial Sequence
  Synthetic
cagaagaaccaauaaga

SEQ ID NO: 13853 - RNA, 17 nt, Artificial Sequence
  Synthetic
caaggucuuacauaaga

SEQ ID NO: 13854 - RNA, 17 nt, Artificial Sequence
  Synthetic
agaugagaaggcacaga

SEQ ID NO: 13855 - RNA, 17 nt, Artificial Sequence
  Synthetic
uaccuugauaauccaga

SEQ ID NO: 13856 - RNA, 17 nt, Artificial Sequence
  Synthetic
aaucgccgcgucgcaga

SEQ ID NO: 13857 - RNA, 17 nt, Artificial Sequence
  Synthetic
agagaugauuaggcaga

SEQ ID NO: 13858 - RNA, 17 nt, Artificial Sequence
  Synthetic
uccaugcaacgugcaga

SEQ ID NO: 13859 - RNA, 17 nt, Artificial Sequence
  Synthetic
gagaccgcguaaagaga

SEQ ID NO: 13860 - RNA, 17 nt, Artificial Sequence
  Synthetic
  misc_feature (9)..(9): n is a, c, g, or u
gggacaugnacaagaga

SEQ ID NO: 13861 - RNA, 17 nt, Artificial Sequence
  Synthetic
ucuuagagguggagaga

SEQ ID NO: 13862 - RNA, 17 nt, Artificial Sequence
  Synthetic
  misc_feature (3)..(3): n is a, c, g, or u
cgnggagauugacgaga

SEQ ID NO: 13863 - RNA, 17 nt, Artificial Sequence
  Synthetic
  misc_feature (3)..(3): n is a, c, g, or u
ggnacggcagacggaga

SEQ ID NO: 13864 - RNA, 17 nt, Artificial Sequence
  Synthetic
  misc_feature (14)..(14): n is a, c, g, or u
cuguaaaugaaaanaga

SEQ ID NO: 13865 - RNA, 17 nt, Artificial Sequence
  Synthetic
  misc_feature (14)..(14): n is a, c, g, or u
cuaacaaaacaaanaga

SEQ ID NO: 13866 - RNA, 17 nt, Artificial Sequence
  Synthetic
gaggcagguccccuaga

SEQ ID NO: 13867 - RNA, 17 nt, Artificial Sequence
  Synthetic
  misc_feature (9)..(9): n is a, c, g, or u
  misc_feature (12)..(12): n is a, c, g, or u
aagauaggnacnguaga

SEQ ID NO: 13868 - RNA, 17 nt, Artificial Sequence
  Synthetic
  misc_feature (2)..(2): n is a, c, g, or u
ungauccuggaauuaga

SEQ ID NO: 13869 - RNA, 17 nt, Artificial Sequence
  Synthetic
gaugacugucucuuaga

SEQ ID NO: 13870 - RNA, 17 nt, Artificial Sequence
  Synthetic
aaacuacuguuguuaga

SEQ ID NO: 13871 - RNA, 17 nt, Artificial Sequence
  Synthetic
gcgggauucagcgccga

SEQ ID NO: 13872 - RNA, 17 nt, Artificial Sequence
  Synthetic
gugcagaggugaagcga

SEQ ID NO: 13873 - RNA, 17 nt, Artificial Sequence
  Synthetic
  misc_feature (8)..(8): n is a, c, g, or u
gagaucuncgucugcga

SEQ ID NO: 13874 - RNA, 17 nt, Artificial Sequence
  Synthetic
auugagaucuucugcga

SEQ ID NO: 13875 - RNA, 17 nt, Artificial Sequence
  Synthetic
  misc_feature (14)..(14): n is a, c, g, or u
cucgucaaucuccncga

SEQ ID NO: 13876 - RNA, 17 nt, Artificial Sequence
  Synthetic
gaggcauagcagcagga

SEQ ID NO: 13877 - RNA, 17 nt, Artificial Sequence
  Synthetic
ugguggaggcaggagga

SEQ ID NO: 13878 - RNA, 17 nt, Artificial Sequence
  Synthetic
acugcauggccugagga

SEQ ID NO: 13879 - RNA, 17 nt, Artificial Sequence
  Synthetic
  misc_feature (10)..(10): n is a, c, g, or u
  misc_feature (13)..(13): n is a, c, g, or u
auauuuccgnganagga

SEQ ID NO: 13880 - RNA, 17 nt, Artificial Sequence
  Synthetic
caacaguaguuuccgga

SEQ ID NO: 13881 - RNA, 17 nt, Artificial Sequence
  Synthetic
gcgcugaaucccgcgga

SEQ ID NO: 13882 - RNA, 17 nt, Artificial Sequence
  Synthetic
gcagacggagaagggga

SEQ ID NO: 13883 - RNA, 17 nt, Artificial Sequence
  Synthetic
ucgcaaaggcaugggga

SEQ ID NO: 13884 - RNA, 17 nt, Artificial Sequence
  Synthetic
  misc_feature (7)..(7): n is a, c, g, or u
  misc_feature (10)..(10): n is a, c, g, or u
agcccangangauggga

SEQ ID NO: 13885 - RNA, 17 nt, Artificial Sequence
  Synthetic
  misc_feature (9)..(9): n is a, c, g, or u
gcuuucagnuauaugga

SEQ ID NO: 13886 - RNA, 17 nt, Artificial Sequence
  Synthetic
uccugguuaucgcugga

SEQ ID NO: 13887 - RNA, 17 nt, Artificial Sequence
  Synthetic
aaccaggacaaauugga

SEQ ID NO: 13888 - RNA, 17 nt, Artificial Sequence
  Synthetic
  misc_feature (3)..(3): n is a, c, g, or u
  misc_feature (15)..(15): n is a, c, g, or u
aanauucauuuacanga

SEQ ID NO: 13889 - RNA, 17 nt, Artificial Sequence
  Synthetic
  misc_feature (15)..(15): n is a, c, g, or u
uuugcgaaagcccanga

SEQ ID NO: 13890 - RNA, 17 nt, Artificial Sequence
  Synthetic
  misc_feature (12)..(12): n is a, c, g, or u
  misc_feature (15)..(15): n is a, c, g, or u
gcgaaagcccanganga

SEQ ID NO: 13891 - RNA, 17 nt, Artificial Sequence
  Synthetic
  misc_feature (15)..(15): n is a, c, g, or u
cccaagcggccccgnga

SEQ ID NO: 13892 - RNA, 17 nt, Artificial Sequence
  Synthetic
ggugacccgcaaaauga

SEQ ID NO: 13893 - RNA, 17 nt, Artificial Sequence
  Synthetic
  misc_feature (6)..(6): n is a, c, g, or u
uucagnuauauggauga

SEQ ID NO: 13894 - RNA, 17 nt, Artificial Sequence
  Synthetic
augcaggguccaacuga

SEQ ID NO: 13895 - RNA, 17 nt, Artificial Sequence
  Synthetic
uccacugcauggccuga

SEQ ID NO: 13896 - RNA, 17 nt, Artificial Sequence
  Synthetic
gguccuaggaauccuga

SEQ ID NO: 13897 - RNA, 17 nt, Artificial Sequence
  Synthetic
ccuugggcaggaucuga

SEQ ID NO: 13898 - RNA, 17 nt, Artificial Sequence
  Synthetic
gcaacgugcagagguga

SEQ ID NO: 13899 - RNA, 17 nt, Artificial Sequence
  Synthetic
  misc_feature (8)..(8): n is a, c, g, or u
ugagugcnguaugguga

SEQ ID NO: 13900 - RNA, 17 nt, Artificial Sequence
  Synthetic
acucugcgguauuguga

SEQ ID NO: 13901 - RNA, 17 nt, Artificial Sequence
  Synthetic
uggccagugguccuuga

SEQ ID NO: 13902 - RNA, 17 nt, Artificial Sequence
  Synthetic
ccuuugcgagguuuuga

SEQ ID NO: 13903 - RNA, 17 nt, Artificial Sequence
  Synthetic
  misc_feature (13)..(13): n is a, c, g, or u
  misc_feature (16)..(16): n is a, c, g, or u
uguauauuuccgngana

SEQ ID NO: 13904 - RNA, 17 nt, Artificial Sequence
  Synthetic
  misc_feature (16)..(16): n is a, c, g, or u
ucuaaguaaacaguana

SEQ ID NO: 13905 - RNA, 17 nt, Artificial Sequence
  Synthetic
  misc_feature (16)..(16): n is a, c, g, or u
guggguaauaauuugna

SEQ ID NO: 13906 - RNA, 17 nt, Artificial Sequence
  Synthetic
  misc_feature (16)..(16): n is a, c, g, or u
cugcuggggggaauuna

SEQ ID NO: 13907 - RNA, 17 nt, Artificial Sequence
  Synthetic
  misc_feature (5)..(5): n is a, c, g, or u
ugaunuuuuguacaaua

SEQ ID NO: 13908 - RNA, 17 nt, Artificial Sequence
  Synthetic
auccagaagaaccaaua

SEQ ID NO: 13909 - RNA, 17 nt, Artificial Sequence
  Synthetic
caggaugaagaggaaua

SEQ ID NO: 13910 - RNA, 17 nt, Artificial Sequence
  Synthetic
  misc_feature (1)..(1): n is a, c, g, or u
  misc_feature (4)..(4): n is a, c, g, or u
ngangacauuauuaaua

SEQ ID NO: 13911 - RNA, 17 nt, Artificial Sequence
  Synthetic
gaaguguugauaagaua

SEQ ID NO: 13912 - RNA, 17 nt, Artificial Sequence
  Synthetic
uuccggaaguguugaua

SEQ ID NO: 13913 - RNA, 17 nt, Artificial Sequence
  Synthetic
  misc_feature (14)..(14): n is a, c, g, or u
aaguaaggcaaganaua

SEQ ID NO: 13914 - RNA, 17 nt, Artificial Sequence
  Synthetic
gcuccaaauucuuuaua

SEQ ID NO: 13915 - RNA, 17 nt, Artificial Sequence
  Synthetic
cuuucgcaaaauaccua

SEQ ID NO: 13916 - RNA, 17 nt, Artificial Sequence
  Synthetic
agugggggaaagcccua

SEQ ID NO: 13917 - RNA, 17 nt, Artificial Sequence
  Synthetic
cacgagcagggguccua

SEQ ID NO: 13918 - RNA, 17 nt, Artificial Sequence
  Synthetic
ucacaucaggauuccua

SEQ ID NO: 13919 - RNA, 17 nt, Artificial Sequence
  Synthetic
  misc_feature (11)..(11): n is a, c, g, or u
cgcaaaaugangcgcua

SEQ ID NO: 13920 - RNA, 17 nt, Artificial Sequence
  Synthetic
agggaguucuucuucua

SEQ ID NO: 13921 - RNA, 17 nt, Artificial Sequence
  Synthetic
cuucucucaauuuucua

SEQ ID NO: 13922 - RNA, 17 nt, Artificial Sequence
  Synthetic
  misc_feature (4)..(4): n is a, c, g, or u
aucnacaacaaccagua

SEQ ID NO: 13923 - RNA, 17 nt, Artificial Sequence
  Synthetic
aagaguccucuuaugua

SEQ ID NO: 13924 - RNA, 17 nt, Artificial Sequence
  Synthetic
  misc_feature (12)..(13): n is a, c, g, or u
  misc_feature (15)..(15): n is a, c, g, or u
aauauuuagugnngnua

SEQ ID NO: 13925 - RNA, 17 nt, Artificial Sequence
  Synthetic
  misc_feature (2)..(2): n is a, c, g, or u
  misc_feature (14)..(14): n is a, c, g, or u
cnuguaaaugaaunuua

SEQ ID NO: 13926 - RNA, 17 nt, Artificial Sequence
  Synthetic
gggcgcaccucucuuua

SEQ ID NO: 13927 - RNA, 17 nt, Artificial Sequence
  Synthetic
aggaaguuuucuaaaac

SEQ ID NO: 13928 - RNA, 17 nt, Artificial Sequence
  Synthetic
  misc_feature (4)..(4): n is a, c, g, or u
auancugaaagccaaac

SEQ ID NO: 13929 - RNA, 17 nt, Artificial Sequence
  Synthetic
  misc_feature (10)..(10): n is a, c, g, or u
acugagccangagaaac

SEQ ID NO: 13930 - RNA, 17 nt, Artificial Sequence
  Synthetic
cgaaugcaggguccaac

SEQ ID NO: 13931 - RNA, 17 nt, Artificial Sequence
  Synthetic
  misc_feature (12)..(12): n is a, c, g, or u
ggccguugccgngcaac

SEQ ID NO: 13932 - RNA, 17 nt, Artificial Sequence
  Synthetic
  misc_feature (9)..(9): n is a, c, g, or u
cccagaggnuugggaac

SEQ ID NO: 13933 - RNA, 17 nt, Artificial Sequence
  Synthetic
aaaagaaaauugguaac

SEQ ID NO: 13934 - RNA, 17 nt, Artificial Sequence
  Synthetic
ugaagcgaagugcacac

SEQ ID NO: 13935 - RNA, 17 nt, Artificial Sequence
  Synthetic
aaagcccuacgaaccac

SEQ ID NO: 13936 - RNA, 17 nt, Artificial Sequence
  Synthetic
cguugcauggagaccac

SEQ ID NO: 13937 - RNA, 17 nt, Artificial Sequence
  Synthetic
  misc_feature (5)..(5): n is a, c, g, or u
  misc_feature (8)..(9): n is a, c, g, or u
ccgunccnnccgaccac

SEQ ID NO: 13938 - RNA, 17 nt, Artificial Sequence
  Synthetic
ggcagaugagaaggcac

SEQ ID NO: 13939 - RNA, 17 nt, Artificial Sequence
  Synthetic
cagcaaacacuuggcac

SEQ ID NO: 13940 - RNA, 17 nt, Artificial Sequence
  Synthetic
aucugaugggcguucac

SEQ ID NO: 13941 - RNA, 17 nt, Artificial Sequence
  Synthetic
aggccuacuucaaagac

SEQ ID NO: 13942 - RNA, 17 nt, Artificial Sequence
  Synthetic
gaugagaaggcacagac

SEQ ID NO: 13943 - RNA, 17 nt, Artificial Sequence
  Synthetic
ggcacagacggggagac

SEQ ID NO: 13944 - RNA, 17 nt, Artificial Sequence
  Synthetic
ccagcaaugucaacgac

SEQ ID NO: 13945 - RNA, 17 nt, Artificial Sequence
  Synthetic
  misc_feature (6)..(6): n is a, c, g, or u
  misc_feature (9)..(9): n is a, c, g, or u
uuccgnganaggacgac

SEQ ID NO: 13946 - RNA, 17 nt, Artificial Sequence
  Synthetic
  misc_feature (10)..(10): n is a, c, g, or u
ucaaucuccncgaggac

SEQ ID NO: 13947 - RNA, 17 nt, Artificial Sequence
  Synthetic
gauuggagguuggggac

SEQ ID NO: 13948 - RNA, 17 nt, Artificial Sequence
  Synthetic
  misc_feature (14)..(14): n is a, c, g, or u
acuguguguuuaangac

SEQ ID NO: 13949 - RNA, 17 nt, Artificial Sequence
  Synthetic
  misc_feature (3)..(3): n is a, c, g, or u
  misc_feature (6)..(6): n is a, c, g, or u
  misc_feature (12)..(12): n is a, c, g, or u
  misc_feature (14)..(14): n is a, c, g, or u
ucnagnagaucncngac

SEQ ID NO: 13950 - RNA, 17 nt, Artificial Sequence
  Synthetic
  misc_feature (13)..(13): n is a, c, g, or u
  misc_feature (15)..(15): n is a, c, g, or u
cagggcauauugncnac

SEQ ID NO: 13951 - RNA, 17 nt, Artificial Sequence
  Synthetic
  misc_feature (6)..(6): n is a, c, g, or u
  misc_feature (12)..(12): n is a, c, g, or u
  misc_feature (15)..(15): n is a, c, g, or u
gcaaancucaunggnac

SEQ ID NO: 13952 - RNA, 17 nt, Artificial Sequence
  Synthetic
  misc_feature (12)..(12): n is a, c, g, or u
  misc_feature (15)..(15): n is a, c, g, or u
aaggugggaaanuunac

SEQ ID NO: 13953 - RNA, 17 nt, Artificial Sequence
  Synthetic
ccucugccgauccauac

SEQ ID NO: 13954 - RNA, 17 nt, Artificial Sequence
  Synthetic
ugcuguacaaaaccuac

SEQ ID NO: 13955 - RNA, 17 nt, Artificial Sequence
  Synthetic
aaagaauuuggagcuac

SEQ ID NO: 13956 - RNA, 17 nt, Artificial Sequence
  Synthetic
  misc_feature (2)..(2): n is a, c, g, or u
  misc_feature (7)..(7): n is a, c, g, or u
  misc_feature (12)..(12): n is a, c, g, or u
gncucangaugnuguac

SEQ ID NO: 13957 - RNA, 17 nt, Artificial Sequence
  Synthetic
  misc_feature (6)..(6): n is a, c, g, or u
cuucunuuuucauuuac

SEQ ID NO: 13958 - RNA, 17 nt, Artificial Sequence
  Synthetic
  misc_feature (13)..(13): n is a, c, g, or u
uuucuagggggancacc

SEQ ID NO: 13959 - RNA, 17 nt, Artificial Sequence
  Synthetic
  misc_feature (11)..(11): n is a, c, g, or u
  misc_feature (14)..(14): n is a, c, g, or u
aucauuacuuncanacc

SEQ ID NO: 13960 - RNA, 17 nt, Artificial Sequence
  Synthetic
  misc_feature (2)..(2): n is a, c, g, or u
unaugacucuagcuacc

SEQ ID NO: 13961 - RNA, 17 nt, Artificial Sequence
  Synthetic
  misc_feature (13)..(13): n is a, c, g, or u
aggaaaauacagncccc

SEQ ID NO: 13962 - RNA, 17 nt, Artificial Sequence
  Synthetic
uaaagagaggugcgccc

SEQ ID NO: 13963 - RNA, 17 nt, Artificial Sequence
  Synthetic
  misc_feature (3)..(3): n is a, c, g, or u
aungccaagccccagcc

SEQ ID NO: 13964 - RNA, 17 nt, Artificial Sequence
  Synthetic
gugggagcauucgggcc

SEQ ID NO: 13965 - RNA, 17 nt, Artificial Sequence
  Synthetic
  misc_feature (1)..(1): n is a, c, g, or u
  misc_feature (4)..(4): n is a, c, g, or u
  misc_feature (9)..(9): n is a, c, g, or u
nggngugancccuggcc

SEQ ID NO: 13966 - RNA, 17 nt, Artificial Sequence
  Synthetic
  misc_feature (11)..(12): n is a, c, g, or u
cugguuggcunnuggcc

SEQ ID NO: 13967 - RNA, 17 nt, Artificial Sequence
  Synthetic
  misc_feature (6)..(6): n is a, c, g, or u
gccaanucaaacaaucc

SEQ ID NO: 13968 - RNA, 17 nt, Artificial Sequence
  Synthetic
agggguccuaggaaucc

SEQ ID NO: 13969 - RNA, 17 nt, Artificial Sequence
  Synthetic
ccgucggcgcugaaucc

SEQ ID NO: 13970 - RNA, 17 nt, Artificial Sequence
  Synthetic
acauaccuugauaaucc

SEQ ID NO: 13971 - RNA, 17 nt, Artificial Sequence
  Synthetic
  misc_feature (3)..(3): n is a, c, g, or u
gunccuaucuuuaaucc

SEQ ID NO: 13972 - RNA, 17 nt, Artificial Sequence
  Synthetic
acgccgcagacacaucc

SEQ ID NO: 13973 - RNA, 17 nt, Artificial Sequence
  Synthetic
auuaaaccuuauuaucc

SEQ ID NO: 13974 - RNA, 17 nt, Artificial Sequence
  Synthetic
  misc_feature (3)..(3): n is a, c, g, or u
  misc_feature (9)..(9): n is a, c, g, or u
ccnaugagnuuugcucc

SEQ ID NO: 13975 - RNA, 17 nt, Artificial Sequence
  Synthetic
guaaacaaaggacgucc

SEQ ID NO: 13976 - RNA, 17 nt, Artificial Sequence
  Synthetic
aucuuaucaacacuucc

SEQ ID NO: 13977 - RNA, 17 nt, Artificial Sequence
  Synthetic
ggaguaggcugccuucc

SEQ ID NO: 13978 - RNA, 17 nt, Artificial Sequence
  Synthetic
  misc_feature (1)..(1): n is a, c, g, or u
  misc_feature (9)..(9): n is a, c, g, or u
  misc_feature (11)..(11): n is a, c, g, or u
ncaggguunanuguucc

SEQ ID NO: 13979 - RNA, 17 nt, Artificial Sequence
  Synthetic
ccucugggauucuuucc

SEQ ID NO: 13980 - RNA, 17 nt, Artificial Sequence
  Synthetic
uaacaacaguaguuucc

SEQ ID NO: 13981 - RNA, 17 nt, Artificial Sequence
  Synthetic
  misc_feature (2)..(2): n is a, c, g, or u
unuucaagccuccaagc

SEQ ID NO: 13982 - RNA, 17 nt, Artificial Sequence
  Synthetic
ccgccuguaacacgagc

SEQ ID NO: 13983 - RNA, 17 nt, Artificial Sequence
  Synthetic
gagaucuucugcgacgc

SEQ ID NO: 13984 - RNA, 17 nt, Artificial Sequence
  Synthetic
ucggcgcugaaucccgc

SEQ ID NO: 13985 - RNA, 17 nt, Artificial Sequence
  Synthetic
auaugauaaaacgccgc

SEQ ID NO: 13986 - RNA, 17 nt, Artificial Sequence
  Synthetic
uccgcgggauucagcgc

SEQ ID NO: 13987 - RNA, 17 nt, Artificial Sequence
  Synthetic
uuacgucccgucggcgc

SEQ ID NO: 13988 - RNA, 17 nt, Artificial Sequence
  Synthetic
agguuccacgcaugcgc

SEQ ID NO: 13989 - RNA, 17 nt, Artificial Sequence
  Synthetic
  misc_feature (6)..(6): n is a, c, g, or u
  misc_feature (9)..(9): n is a, c, g, or u
gcaugnugnuggugcgc

SEQ ID NO: 13990 - RNA, 17 nt, Artificial Sequence
  Synthetic
  misc_feature (4)..(4): n is a, c, g, or u
acgnagaucucaaucgc

SEQ ID NO: 13991 - RNA, 17 nt, Artificial Sequence
  Synthetic
gaacucccucgccucgc

SEQ ID NO: 13992 - RNA, 17 nt, Artificial Sequence
  Synthetic
cucaaucgccgcgucgc

SEQ ID NO: 13993 - RNA, 17 nt, Artificial Sequence
  Synthetic
cugcucguguuacaggc

SEQ ID NO: 13994 - RNA, 17 nt, Artificial Sequence
  Synthetic
  misc_feature (8)..(9): n is a, c, g, or u
  misc_feature (12)..(12): n is a, c, g, or u
uggucggnnggnacggc

SEQ ID NO: 13995 - RNA, 17 nt, Artificial Sequence
  Synthetic
  misc_feature (1)..(1): n is a, c, g, or u
nuuugcuccagaccggc

SEQ ID NO: 13996 - RNA, 17 nt, Artificial Sequence
  Synthetic
agugcacacggaccggc

SEQ ID NO: 13997 - RNA, 17 nt, Artificial Sequence
  Synthetic
acgcaacccccacuggc

SEQ ID NO: 13998 - RNA, 17 nt, Artificial Sequence
  Synthetic
  misc_feature (15)..(15): n is a, c, g, or u
agagcuugguggaangc

SEQ ID NO: 13999 - RNA, 17 nt, Artificial Sequence
  Synthetic
  misc_feature (3)..(3): n is a, c, g, or u
ganuuggcuccgaaugc

SEQ ID NO: 14000 - RNA, 17 nt, Artificial Sequence
  Synthetic
ucauccucaggccaugc

SEQ ID NO: 14001 - RNA, 17 nt, Artificial Sequence
  Synthetic
gcugccuuccugacugc

SEQ ID NO: 14002 - RNA, 17 nt, Artificial Sequence
  Synthetic
cugccgauccauacugc

SEQ ID NO: 14003 - RNA, 17 nt, Artificial Sequence
  Synthetic
cuuuguggcuccucugc

SEQ ID NO: 14004 - RNA, 17 nt, Artificial Sequence
  Synthetic
ggcaagccauucucugc

SEQ ID NO: 14005 - RNA, 17 nt, Artificial Sequence
  Synthetic
ucgcuggaugugucugc

SEQ ID NO: 14006 - RNA, 17 nt, Artificial Sequence
  Synthetic
ucggucguugacauugc

SEQ ID NO: 14007 - RNA, 17 nt, Artificial Sequence
  Synthetic
cugugccaaguguuugc

SEQ ID NO: 14008 - RNA, 17 nt, Artificial Sequence
  Synthetic
  misc_feature (12)..(12): n is a, c, g, or u
  misc_feature (16)..(16): n is a, c, g, or u
gaggcaauauungganc

SEQ ID NO: 14009 - RNA, 17 nt, Artificial Sequence
  Synthetic
  misc_feature (16)..(16): n is a, c, g, or u
cacaucauccauauanc

SEQ ID NO: 14010 - RNA, 17 nt, Artificial Sequence
  Synthetic
  misc_feature (12)..(12): n is a, c, g, or u
  misc_feature (16)..(16): n is a, c, g, or u
ccaccccaaaanaccnc

SEQ ID NO: 14011 - RNA, 17 nt, Artificial Sequence
  Synthetic
  misc_feature (14)..(14): n is a, c, g, or u
  misc_feature (16)..(16): n is a, c, g, or u
uucuccauguucgncnc

SEQ ID NO: 14012 - RNA, 17 nt, Artificial Sequence
  Synthetic
  misc_feature (1)..(1): n is a, c, g, or u
  misc_feature (4)..(4): n is a, c, g, or u
  misc_feature (7)..(7): n is a, c, g, or u
  misc_feature (10)..(10): n is a, c, g, or u
  misc_feature (16)..(16): n is a, c, g, or u
ngunucnagnagaucnc

SEQ ID NO: 14013 - RNA, 17 nt, Artificial Sequence
  Synthetic
  misc_feature (16)..(16): n is a, c, g, or u
cgcggacgaccccucnc

SEQ ID NO: 14014 - RNA, 17 nt, Artificial Sequence
  Synthetic
  misc_feature (13)..(13): n is a, c, g, or u
  misc_feature (16)..(16): n is a, c, g, or u
uucugucguccunucnc

SEQ ID NO: 14015 - RNA, 17 nt, Artificial Sequence
  Synthetic
  misc_feature (12)..(12): n is a, c, g, or u
  misc_feature (15)..(16): n is a, c, g, or u
ccgucugccgunccnnc

SEQ ID NO: 14016 - RNA, 17 nt, Artificial Sequence
  Synthetic
caccgugaacgcccauc

SEQ ID NO: 14017 - RNA, 17 nt, Artificial Sequence
  Synthetic
  misc_feature (7)..(7): n is a, c, g, or u
  misc_feature (10)..(10): n is a, c, g, or u
cuuggcnaunggccauc

SEQ ID NO: 14018 - RNA, 17 nt, Artificial Sequence
  Synthetic
agaccuugggcaggauc

SEQ ID NO: 14019 - RNA, 17 nt, Artificial Sequence
  Synthetic
agugcgaauccacacuc

SEQ ID NO: 14020 - RNA, 17 nt, Artificial Sequence
  Synthetic
accacgagucuagacuc

SEQ ID NO: 14021 - RNA, 17 nt, Artificial Sequence
  Synthetic
  misc_feature (7)..(7): n is a, c, g, or u
auacagnccccugacuc

SEQ ID NO: 14022 - RNA, 17 nt, Artificial Sequence
  Synthetic
  misc_feature (13)..(13): n is a, c, g, or u
uucuguucccaanccuc

SEQ ID NO: 14023 - RNA, 17 nt, Artificial Sequence
  Synthetic
guggagcccucaggcuc

SEQ ID NO: 14024 - RNA, 17 nt, Artificial Sequence
  Synthetic
  misc_feature (10)..(10): n is a, c, g, or u
auuguuuganuuggcuc

SEQ ID NO: 14025 - RNA, 17 nt, Artificial Sequence
  Synthetic
acggaaggaaagaaguc

SEQ ID NO: 14026 - RNA, 17 nt, Artificial Sequence
  Synthetic
  misc_feature (5)..(5): n is a, c, g, or u
ugcangaucccagaguc

SEQ ID NO: 14027 - RNA, 17 nt, Artificial Sequence
  Synthetic
uacgcggucuccccguc

SEQ ID NO: 14028 - RNA, 17 nt, Artificial Sequence
  Synthetic
uuuguuuacgucccguc

SEQ ID NO: 14029 - RNA, 17 nt, Artificial Sequence
  Synthetic
  misc_feature (13)..(13): n is a, c, g, or u
cgauugagaucuncguc

SEQ ID NO: 14030 - RNA, 17 nt, Artificial Sequence
  Synthetic
  misc_feature (6)..(6): n is a, c, g, or u
ccccgngaggggucguc

SEQ ID NO: 14031 - RNA, 17 nt, Artificial Sequence
  Synthetic
cuucucaucugccgguc

SEQ ID NO: 14032 - RNA, 17 nt, Artificial Sequence
  Synthetic
  misc_feature (1)..(1): n is a, c, g, or u
ncggcaacggccugguc

SEQ ID NO: 14033 - RNA, 17 nt, Artificial Sequence
  Synthetic
  misc_feature (8)..(8): n is a, c, g, or u
guaggcanaaauugguc

SEQ ID NO: 14034 - RNA, 17 nt, Artificial Sequence
  Synthetic
uuaucgcuggauguguc

SEQ ID NO: 14035 - RNA, 17 nt, Artificial Sequence
  Synthetic
ggucguccgcgggauuc

SEQ ID NO: 14036 - RNA, 17 nt, Artificial Sequence
  Synthetic
  misc_feature (6)..(6): n is a, c, g, or u
cucucnuuuuugccuuc

SEQ ID NO: 14037 - RNA, 17 nt, Artificial Sequence
  Synthetic
ccgagauugagaucuuc

SEQ ID NO: 14038 - RNA, 17 nt, Artificial Sequence
  Synthetic
acuagugccauuuguuc

SEQ ID NO: 14039 - RNA, 17 nt, Artificial Sequence
  Synthetic
aauccacacuccgaaag

SEQ ID NO: 14040 - RNA, 17 nt, Artificial Sequence
  Synthetic
  misc_feature (12)..(12): n is a, c, g, or u
agugggacaugnacaag

SEQ ID NO: 14041 - RNA, 17 nt, Artificial Sequence
  Synthetic
ugccuuacuuuuggaag

SEQ ID NO: 14042 - RNA, 17 nt, Artificial Sequence
  Synthetic
aacgugcagaggugaag

SEQ ID NO: 14043 - RNA, 17 nt, Artificial Sequence
  Synthetic
  misc_feature (5)..(5): n is a, c, g, or u
cuggnauucuauauaag

SEQ ID NO: 14044 - RNA, 17 nt, Artificial Sequence
  Synthetic
aucucuccaccucuaag

SEQ ID NO: 14045 - RNA, 17 nt, Artificial Sequence
  Synthetic
  misc_feature (2)..(2): n is a, c, g, or u
ancugaaagccaaacag

SEQ ID NO: 14046 - RNA, 17 nt, Artificial Sequence
  Synthetic
  misc_feature (1)..(1): n is a, c, g, or u
ngccaagccccagccag

SEQ ID NO: 14047 - RNA, 17 nt, Artificial Sequence
  Synthetic
gccgcagacacauccag

SEQ ID NO: 14048 - RNA, 17 nt, Artificial Sequence
  Synthetic
  misc_feature (2)..(2): n is a, c, g, or u
unaauuccccccagcag

SEQ ID NO: 14049 - RNA, 17 nt, Artificial Sequence
  Synthetic
  misc_feature (3)..(3): n is a, c, g, or u
ggnauucuauauaagag

SEQ ID NO: 14050 - RNA, 17 nt, Artificial Sequence
  Synthetic
ucuauaggcuggaggag

SEQ ID NO: 14051 - RNA, 17 nt, Artificial Sequence
  Synthetic
agccaaccagguaggag

SEQ ID NO: 14052 - RNA, 17 nt, Artificial Sequence
  Synthetic
uuuggucucuuucggag

SEQ ID NO: 14053 - RNA, 17 nt, Artificial Sequence
  Synthetic
caaaauaccuaugggag

SEQ ID NO: 14054 - RNA, 17 nt, Artificial Sequence
  Synthetic
gucucuuagagguggag

SEQ ID NO: 14055 - RNA, 17 nt, Artificial Sequence
  Synthetic
uuguacagcaacaugag

SEQ ID NO: 14056 - RNA, 17 nt, Artificial Sequence
  Synthetic
uuuucauuuacagugag

SEQ ID NO: 14057 - RNA, 17 nt, Artificial Sequence
  Synthetic
gacaggagguuggugag

SEQ ID NO: 14058 - RNA, 17 nt, Artificial Sequence
  Synthetic
cccccuagaaaauugag

SEQ ID NO: 14059 - RNA, 17 nt, Artificial Sequence
  Synthetic
  misc_feature (15)..(15): n is a, c, g, or u
cuuggaggcuugaanag

SEQ ID NO: 14060 - RNA, 17 nt, Artificial Sequence
  Synthetic
  misc_feature (1)..(1): n is a, c, g, or u
  misc_feature (15)..(15): n is a, c, g, or u
naagauccagcaucnag

SEQ ID NO: 14061 - RNA, 17 nt, Artificial Sequence
  Synthetic
uucucucaauuuucuag

SEQ ID NO: 14062 - RNA, 17 nt, Artificial Sequence
  Synthetic
  misc_feature (3)..(3): n is a, c, g, or u
  misc_feature (12)..(12): n is a, c, g, or u
uancccaugaanuuuag

SEQ ID NO: 14063 - RNA, 17 nt, Artificial Sequence
  Synthetic
uuuggccaagacacacg

SEQ ID NO: 14064 - RNA, 17 nt, Artificial Sequence
  Synthetic
acuguuguuagacgacg

SEQ ID NO: 14065 - RNA, 17 nt, Artificial Sequence
  Synthetic
gggauucagcgccgacg

SEQ ID NO: 14066 - RNA, 17 nt, Artificial Sequence
  Synthetic
  misc_feature (6)..(6): n is a, c, g, or u
ccucgnggagauugacg

SEQ ID NO: 14067 - RNA, 17 nt, Artificial Sequence
  Synthetic
  misc_feature (2)..(2): n is a, c, g, or u
cnacaacaaccaguacg

SEQ ID NO: 14068 - RNA, 17 nt, Artificial Sequence
  Synthetic
uugcauggagaccaccg

SEQ ID NO: 14069 - RNA, 17 nt, Artificial Sequence
  Synthetic
  misc_feature (11)..(11): n is a, c, g, or u
ucuagggggancacccg

SEQ ID NO: 14070 - RNA, 17 nt, Artificial Sequence
  Synthetic
aaacaaaggacgucccg

SEQ ID NO: 14071 - RNA, 17 nt, Artificial Sequence
  Synthetic
uaacauugagauucccg

SEQ ID NO: 14072 - RNA, 17 nt, Artificial Sequence
  Synthetic
  misc_feature (10)..(10): n is a, c, g, or u
  misc_feature (14)..(14): n is a, c, g, or u
accccaaaanaccnccg

SEQ ID NO: 14073 - RNA, 17 nt, Artificial Sequence
  Synthetic
  misc_feature (4)..(4): n is a, c, g, or u
ccgngaggggucguccg

SEQ ID NO: 14074 - RNA, 17 nt, Artificial Sequence
  Synthetic
ucucaucugccgguccg

SEQ ID NO: 14075 - RNA, 17 nt, Artificial Sequence
  Synthetic
  misc_feature (3)..(3): n is a, c, g, or u
aangauguauauuuccg

SEQ ID NO: 14076 - RNA, 17 nt, Artificial Sequence
  Synthetic
  misc_feature (2)..(2): n is a, c, g, or u
gngaggggucguccgcg

SEQ ID NO: 14077 - RNA, 17 nt, Artificial Sequence
  Synthetic
  misc_feature (10)..(10): n is a, c, g, or u
caacuggauncuucgcg

SEQ ID NO: 14078 - RNA, 17 nt, Artificial Sequence
  Synthetic
  misc_feature (4)..(4): n is a, c, g, or u
ucuncgucugcgaggcg

SEQ ID NO: 14079 - RNA, 17 nt, Artificial Sequence
  Synthetic
ggccuuguaaguuggcg

SEQ ID NO: 14080 - RNA, 17 nt, Artificial Sequence
  Synthetic
gguccaacugaugaucg

SEQ ID NO: 14081 - RNA, 17 nt, Artificial Sequence
  Synthetic
gccucagcucuguaucg

SEQ ID NO: 14082 - RNA, 17 nt, Artificial Sequence
  Synthetic
agaagaucucaaucucg

SEQ ID NO: 14083 - RNA, 17 nt, Artificial Sequence
  Synthetic
  misc_feature (12)..(12): n is a, c, g, or u
gccaacuggauncuucg

SEQ ID NO: 14084 - RNA, 17 nt, Artificial Sequence
  Synthetic
acggcagacggagaagg

SEQ ID NO: 14085 - RNA, 17 nt, Artificial Sequence
  Synthetic
uccuuggacucauaagg

SEQ ID NO: 14086 - RNA, 17 nt, Artificial Sequence
  Synthetic
ccugcucguguuacagg

SEQ ID NO: 14087 - RNA, 17 nt, Artificial Sequence
  Synthetic
ggugagcaaugcucagg

SEQ ID NO: 14088 - RNA, 17 nt, Artificial Sequence
  Synthetic
agaugauuaggcagagg

SEQ ID NO: 14089 - RNA, 17 nt, Artificial Sequence
  Synthetic
caugcaacgugcagagg

SEQ ID NO: 14090 - RNA, 17 nt, Artificial Sequence
  Synthetic
gaccgcguaaagagagg

SEQ ID NO: 14091 - RNA, 17 nt, Artificial Sequence
  Synthetic
  misc_feature (8)..(8): n is a, c, g, or u
ggaggagnugggggagg

SEQ ID NO: 14092 - RNA, 17 nt, Artificial Sequence
  Synthetic
ggucuauaggcuggagg

SEQ ID NO: 14093 - RNA, 17 nt, Artificial Sequence
  Synthetic
ggaguucuucuucuagg

SEQ ID NO: 14094 - RNA, 17 nt, Artificial Sequence
  Synthetic
  misc_feature (1)..(2): n is a, c, g, or u
nnagccaaccagguagg

SEQ ID NO: 14095 - RNA, 17 nt, Artificial Sequence
  Synthetic
  misc_feature (3)..(3): n is a, c, g, or u
  misc_feature (6)..(7): n is a, c, g, or u
gunccnnccgaccacgg

SEQ ID NO: 14096 - RNA, 17 nt, Artificial Sequence
  Synthetic
  misc_feature (2)..(3): n is a, c, g, or u
  misc_feature (6)..(6): n is a, c, g, or u
gnnggnacggcagacgg

SEQ ID NO: 14097 - RNA, 17 nt, Artificial Sequence
  Synthetic
gaucuucugcgacgcgg

SEQ ID NO: 14098 - RNA, 17 nt, Artificial Sequence
  Synthetic
uauuuggucucuuucgg

SEQ ID NO: 14099 - RNA, 17 nt, Artificial Sequence
  Synthetic
cucucaauuuucuaggg

SEQ ID NO: 14100 - RNA, 17 nt, Artificial Sequence
  Synthetic
agaaggcacagacgggg

SEQ ID NO: 14101 - RNA, 17 nt, Artificial Sequence
  Synthetic
gccauucucugcugggg

SEQ ID NO: 14102 - RNA, 17 nt, Artificial Sequence
  Synthetic
cgcaaaauaccuauggg

SEQ ID NO: 14103 - RNA, 17 nt, Artificial Sequence
  Synthetic
gacucuagcuaccuggg

SEQ ID NO: 14104 - RNA, 17 nt, Artificial Sequence
  Synthetic
gaaagccaaacaguggg

SEQ ID NO: 14105 - RNA, 17 nt, Artificial Sequence
  Synthetic
  misc_feature (15)..(15): n is a, c, g, or u
guccccaguccucgngg

SEQ ID NO: 14106 - RNA, 17 nt, Artificial Sequence
  Synthetic
  misc_feature (2)..(2): n is a, c, g, or u
  misc_feature (6)..(6): n is a, c, g, or u
  misc_feature (15)..(15): n is a, c, g, or u
anaccnccguguggngg

SEQ ID NO: 14107 - RNA, 17 nt, Artificial Sequence
  Synthetic
  misc_feature (6)..(6): n is a, c, g, or u
  misc_feature (8)..(8): n is a, c, g, or u
cccugngncgaacaugg

SEQ ID NO: 14108 - RNA, 17 nt, Artificial Sequence
  Synthetic
accucgcaaaggcaugg

SEQ ID NO: 14109 - RNA, 17 nt, Artificial Sequence
  Synthetic
cucugcacguugcaugg

SEQ ID NO: 14110 - RNA, 17 nt, Artificial Sequence
  Synthetic
uguucccaagaauaugg

SEQ ID NO: 14111 - RNA, 17 nt, Artificial Sequence
  Synthetic
  misc_feature (7)..(7): n is a, c, g, or u
aucuccncgaggacugg

SEQ ID NO: 14112 - RNA, 17 nt, Artificial Sequence
  Synthetic
aagccauucucugcugg

SEQ ID NO: 14113 - RNA, 17 nt, Artificial Sequence
  Synthetic
  misc_feature (11)..(11): n is a, c, g, or u
  misc_feature (14)..(14): n is a, c, g, or u
aaguugcaugnugnugg

SEQ ID NO: 14114 - RNA, 17 nt, Artificial Sequence
  Synthetic
gagugauuggagguugg

SEQ ID NO: 14115 - RNA, 17 nt, Artificial Sequence
  Synthetic
  misc_feature (7)..(7): n is a, c, g, or u
  misc_feature (11)..(11): n is a, c, g, or u
acacggnggunuuuugg

SEQ ID NO: 14116 - RNA, 17 nt, Artificial Sequence
  Synthetic
  misc_feature (16)..(16): n is a, c, g, or u
uaguaaacugagccang

SEQ ID NO: 14117 - RNA, 17 nt, Artificial Sequence
  Synthetic
  misc_feature (16)..(16): n is a, c, g, or u
uucuuuccuuccgucng

SEQ ID NO: 14118 - RNA, 17 nt, Artificial Sequence
  Synthetic
  misc_feature (16)..(16): n is a, c, g, or u
ucccaagcggccccgng

SEQ ID NO: 14119 - RNA, 17 nt, Artificial Sequence
  Synthetic
  misc_feature (4)..(4): n is a, c, g, or u
  misc_feature (13)..(13): n is a, c, g, or u
  misc_feature (16)..(16): n is a, c, g, or u
accnccguguggnggng

SEQ ID NO: 14120 - RNA, 17 nt, Artificial Sequence
  Synthetic
uuuuguacagcaacaug

SEQ ID NO: 14121 - RNA, 17 nt, Artificial Sequence
  Synthetic
  misc_feature (2)..(2): n is a, c, g, or u
unggccaucagcgcaug

SEQ ID NO: 14122 - RNA, 17 nt, Artificial Sequence
  Synthetic
acacggaccggcagaug

SEQ ID NO: 14123 - RNA, 17 nt, Artificial Sequence
  Synthetic
  misc_feature (5)..(5): n is a, c, g, or u
  misc_feature (8)..(8): n is a, c, g, or u
cccangangaugggaug

SEQ ID NO: 14124 - RNA, 17 nt, Artificial Sequence
  Synthetic
  misc_feature (10)..(10): n is a, c, g, or u
  misc_feature (13)..(13): n is a, c, g, or u
gaaagcccangangaug

SEQ ID NO: 14125 - RNA, 17 nt, Artificial Sequence
  Synthetic
uccuaggaauccugaug

SEQ ID NO: 14126 - RNA, 17 nt, Artificial Sequence
  Synthetic
uugggcaggaucugaug

SEQ ID NO: 14127 - RNA, 17 nt, Artificial Sequence
  Synthetic
gccuacuucaaagacug

SEQ ID NO: 14128 - RNA, 17 nt, Artificial Sequence
  Synthetic
uuggagguuggggacug

SEQ ID NO: 14129 - RNA, 17 nt, Artificial Sequence
  Synthetic
augacucuagcuaccug

SEQ ID NO: 14130 - RNA, 17 nt, Artificial Sequence
  Synthetic
aauaugcccugagccug

SEQ ID NO: 14131 - RNA, 17 nt, Artificial Sequence
  Synthetic
agagaauggcuugccug

SEQ ID NO: 14132 - RNA, 17 nt, Artificial Sequence
  Synthetic
caagccauucucugcug

SEQ ID NO: 14133 - RNA, 17 nt, Artificial Sequence
  Synthetic
  misc_feature (5)..(5): n is a, c, g, or u
acagnccccugacucug

SEQ ID NO: 14134 - RNA, 17 nt, Artificial Sequence
  Synthetic
  misc_feature (11)..(11): n is a, c, g, or u
cuguucccaanccucug

SEQ ID NO: 14135 - RNA, 17 nt, Artificial Sequence
  Synthetic
gagauugagaucuucug

SEQ ID NO: 14136 - RNA, 17 nt, Artificial Sequence
  Synthetic
cugaaagccaaacagug

SEQ ID NO: 14137 - RNA, 17 nt, Artificial Sequence
  Synthetic
ccaagccccagccagug

SEQ ID NO: 14138 - RNA, 17 nt, Artificial Sequence
  Synthetic
uauaggcuggaggagug

SEQ ID NO: 14139 - RNA, 17 nt, Artificial Sequence
  Synthetic
  misc_feature (13)..(13): n is a, c, g, or u
uggaggcuugaanagug

SEQ ID NO: 14140 - RNA, 17 nt, Artificial Sequence
  Synthetic
cuuggacucauaaggug

SEQ ID NO: 14141 - RNA, 17 nt, Artificial Sequence
  Synthetic
aggacaggagguuggug

SEQ ID NO: 14142 - RNA, 17 nt, Artificial Sequence
  Synthetic
  misc_feature (2)..(2): n is a, c, g, or u
  misc_feature (15)..(15): n is a, c, g, or u
angacugggaggagnug

SEQ ID NO: 14143 - RNA, 17 nt, Artificial Sequence
  Synthetic
aaggaauacuaacauug

SEQ ID NO: 14144 - RNA, 17 nt, Artificial Sequence
  Synthetic
ucaaacaauccagauug

SEQ ID NO: 14145 - RNA, 17 nt, Artificial Sequence
  Synthetic
ugagauucccgagauug

SEQ ID NO: 14146 - RNA, 17 nt, Artificial Sequence
  Synthetic
cugcgacgcggcgauug

SEQ ID NO: 14147 - RNA, 17 nt, Artificial Sequence
  Synthetic
  misc_feature (13)..(13): n is a, c, g, or u
aguaugucaaagnauug

SEQ ID NO: 14148 - RNA, 17 nt, Artificial Sequence
  Synthetic
uggaugaugugguauug

SEQ ID NO: 14149 - RNA, 17 nt, Artificial Sequence
  Synthetic
  misc_feature (5)..(5): n is a, c, g, or u
ccucncggggccgcuug

SEQ ID NO: 14150 - RNA, 17 nt, Artificial Sequence
  Synthetic
gggucaccauauucuug

SEQ ID NO: 14151 - RNA, 17 nt, Artificial Sequence
  Synthetic
  misc_feature (14)..(14): n is a, c, g, or u
agaaucccagaggnuug

SEQ ID NO: 14152 - RNA, 17 nt, Artificial Sequence
  Synthetic
  misc_feature (9)..(9): n is a, c, g, or u
cguagcgcnucauuuug

SEQ ID NO: 14153 - RNA, 17 nt, Artificial Sequence
  Synthetic
cucccauagguauuuug

SEQ ID NO: 14154 - RNA, 17 nt, Artificial Sequence
  Synthetic
  misc_feature (17)..(17): n is a, c, g, or u
ucacuguaaaugaaaan

SEQ ID NO: 14155 - RNA, 17 nt, Artificial Sequence
  Synthetic
  misc_feature (17)..(17): n is a, c, g, or u
acccuaacaaaacaaan

SEQ ID NO: 14156 - RNA, 17 nt, Artificial Sequence
  Synthetic
  misc_feature (17)..(17): n is a, c, g, or u
agcuuggaggcuugaan

SEQ ID NO: 14157 - RNA, 17 nt, Artificial Sequence
  Synthetic
  misc_feature (17)..(17): n is a, c, g, or u
uuuaaauguauacccan

SEQ ID NO: 14158 - RNA, 17 nt, Artificial Sequence
  Synthetic
  misc_feature (17)..(17): n is a, c, g, or u
aguaaugauuaacuacn

SEQ ID NO: 14159 - RNA, 17 nt, Artificial Sequence
  Synthetic
  misc_feature (3)..(3): n is a, c, g, or u
  misc_feature (17)..(17): n is a, c, g, or u
ugnaagauccagcaucn

SEQ ID NO: 14160 - RNA, 17 nt, Artificial Sequence
  Synthetic
  misc_feature (17)..(17): n is a, c, g, or u
uuuguacaauaugaucn

SEQ ID NO: 14161 - RNA, 17 nt, Artificial Sequence
  Synthetic
  misc_feature (11)..(11): n is a, c, g, or u
  misc_feature (17)..(17): n is a, c, g, or u
gauuaacuacnugaucn

SEQ ID NO: 14162 - RNA, 17 nt, Artificial Sequence
  Synthetic
  misc_feature (17)..(17): n is a, c, g, or u
ccgcggacgaccccucn

SEQ ID NO: 14163 - RNA, 17 nt, Artificial Sequence
  Synthetic
  misc_feature (14)..(14): n is a, c, g, or u
  misc_feature (17)..(17): n is a, c, g, or u
uucccaucccaucnucn

SEQ ID NO: 14164 - RNA, 17 nt, Artificial Sequence
  Synthetic
  misc_feature (17)..(17): n is a, c, g, or u
gagacucuaaggcuucn

SEQ ID NO: 14165 - RNA, 17 nt, Artificial Sequence
  Synthetic
  misc_feature (4)..(4): n is a, c, g, or u
  misc_feature (17)..(17): n is a, c, g, or u
uaangacugggaggagn

SEQ ID NO: 14166 - RNA, 17 nt, Artificial Sequence
  Synthetic
  misc_feature (8)..(8): n is a, c, g, or u
  misc_feature (11)..(11): n is a, c, g, or u
  misc_feature (14)..(14): n is a, c, g, or u
  misc_feature (17)..(17): n is a, c, g, or u
cugaggcngunucnagn

SEQ ID NO: 14167 - RNA, 17 nt, Artificial Sequence
  Synthetic
  misc_feature (17)..(17): n is a, c, g, or u
ccucgccucgcagacgn

SEQ ID NO: 14168 - RNA, 17 nt, Artificial Sequence
  Synthetic
  misc_feature (15)..(15): n is a, c, g, or u
  misc_feature (17)..(17): n is a, c, g, or u
gacuggggacccugngn

SEQ ID NO: 14169 - RNA, 17 nt, Artificial Sequence
  Synthetic
  misc_feature (8)..(8): n is a, c, g, or u
  misc_feature (17)..(17): n is a, c, g, or u
gagggccnacaaauugn

SEQ ID NO: 14170 - RNA, 17 nt, Artificial Sequence
  Synthetic
  misc_feature (17)..(17): n is a, c, g, or u
caauuuucuuuugucun

SEQ ID NO: 14171 - RNA, 17 nt, Artificial Sequence
  Synthetic
  misc_feature (17)..(17): n is a, c, g, or u
ugugagaggcaauauun

SEQ ID NO: 14172 - RNA, 17 nt, Artificial Sequence
  Synthetic
guuaguauuaacauaau

SEQ ID NO: 14173 - RNA, 17 nt, Artificial Sequence
  Synthetic
  misc_feature (2)..(2): n is a, c, g, or u
  misc_feature (8)..(8): n is a, c, g, or u
  misc_feature (11)..(11): n is a, c, g, or u
angcaggnuanccacau

SEQ ID NO: 14174 - RNA, 17 nt, Artificial Sequence
  Synthetic
cuuuggggcauggacau

SEQ ID NO: 14175 - RNA, 17 nt, Artificial Sequence
  Synthetic
  misc_feature (5)..(5): n is a, c, g, or u
uacanccuagcagccau

SEQ ID NO: 14176 - RNA, 17 nt, Artificial Sequence
  Synthetic
aaaccucgcaaaggcau

SEQ ID NO: 14177 - RNA, 17 nt, Artificial Sequence
  Synthetic
  misc_feature (3)..(3): n is a, c, g, or u
ggnuggcuuuggggcau

SEQ ID NO: 14178 - RNA, 17 nt, Artificial Sequence
  Synthetic
ggaaguguugauaagau

SEQ ID NO: 14179 - RNA, 17 nt, Artificial Sequence
  Synthetic
  misc_feature (2)..(2): n is a, c, g, or u
anucaaacaauccagau

SEQ ID NO: 14180 - RNA, 17 nt, Artificial Sequence
  Synthetic
  misc_feature (11)..(11): n is a, c, g, or u
ccaguccucgnggagau

SEQ ID NO: 14181 - RNA, 17 nt, Artificial Sequence
  Synthetic
  misc_feature (13)..(13): n is a, c, g, or u
uaacaaaacaaanagau

SEQ ID NO: 14182 - RNA, 17 nt, Artificial Sequence
  Synthetic
guacaaaaccuacggau

SEQ ID NO: 14183 - RNA, 17 nt, Artificial Sequence
  Synthetic
aggguccaacugaugau

SEQ ID NO: 14184 - RNA, 17 nt, Artificial Sequence
  Synthetic
ggccagugguccuugau

SEQ ID NO: 14185 - RNA, 17 nt, Artificial Sequence
  Synthetic
  misc_feature (15)..(15): n is a, c, g, or u
aaaguaugucaaagnau

SEQ ID NO: 14186 - RNA, 17 nt, Artificial Sequence
  Synthetic
cuuguucccaagaauau

SEQ ID NO: 14187 - RNA, 17 nt, Artificial Sequence
  Synthetic
  misc_feature (12)..(12): n is a, c, g, or u
uuggcuuucagnuauau

SEQ ID NO: 14188 - RNA, 17 nt, Artificial Sequence
  Synthetic
  misc_feature (2)..(2): n is a, c, g, or u
unguuucccucuuauau

SEQ ID NO: 14189 - RNA, 17 nt, Artificial Sequence
  Synthetic
  misc_feature (4)..(4): n is a, c, g, or u
  misc_feature (7)..(7): n is a, c, g, or u
aaanaunaggcaacuau

SEQ ID NO: 14190 - RNA, 17 nt, Artificial Sequence
  Synthetic
gcacuccuccagccuau

SEQ ID NO: 14191 - RNA, 17 nt, Artificial Sequence
  Synthetic
  misc_feature (6)..(6): n is a, c, g, or u
  misc_feature (9)..(10): n is a, c, g, or u
  misc_feature (12)..(12): n is a, c, g, or u
ccugunaanngnccuau

SEQ ID NO: 14192 - RNA, 17 nt, Artificial Sequence
  Synthetic
uaggaguuccgcaguau

SEQ ID NO: 14193 - RNA, 17 nt, Artificial Sequence
  Synthetic
ucuagacucugcgguau

SEQ ID NO: 14194 - RNA, 17 nt, Artificial Sequence
  Synthetic
uauggaugaugugguau

SEQ ID NO: 14195 - RNA, 17 nt, Artificial Sequence
  Synthetic
  misc_feature (13)..(13): n is a, c, g, or u
uugccugagugcnguau

SEQ ID NO: 14196 - RNA, 17 nt, Artificial Sequence
  Synthetic
  misc_feature (4)..(4): n is a, c, g, or u
aggnuguacugccaacu

SEQ ID NO: 14197 - RNA, 17 nt, Artificial Sequence
  Synthetic
accgcagagucuagacu

SEQ ID NO: 14198 - RNA, 17 nt, Artificial Sequence
  Synthetic
  misc_feature (9)..(9): n is a, c, g, or u
caaucuccncgaggacu

SEQ ID NO: 14199 - RNA, 17 nt, Artificial Sequence
  Synthetic
uaacauaauugacuacu

SEQ ID NO: 14200 - RNA, 17 nt, Artificial Sequence
  Synthetic
  misc_feature (3)..(3): n is a, c, g, or u
ucnuggcucaguuuacu

SEQ ID NO: 14201 - RNA, 17 nt, Artificial Sequence
  Synthetic
ccucuuauguaagaccu

SEQ ID NO: 14202 - RNA, 17 nt, Artificial Sequence
  Synthetic
aaacgggcaacauaccu

SEQ ID NO: 14203 - RNA, 17 nt, Artificial Sequence
  Synthetic
  misc_feature (10)..(10): n is a, c, g, or u
acacgggugnucccccu

SEQ ID NO: 14204 - RNA, 17 nt, Artificial Sequence
  Synthetic
accgaggcagguccccu

SEQ ID NO: 14205 - RNA, 17 nt, Artificial Sequence
  Synthetic
uugacuacuagaucccu

SEQ ID NO: 14206 - RNA, 17 nt, Artificial Sequence
  Synthetic
  misc_feature (11)..(11): n is a, c, g, or u
ugguuguugungauccu

SEQ ID NO: 14207 - RNA, 17 nt, Artificial Sequence
  Synthetic
  misc_feature (2)..(3): n is a, c, g, or u
unnuggccagugguccu

SEQ ID NO: 14208 - RNA, 17 nt, Artificial Sequence
  Synthetic
  misc_feature (7)..(7): n is a, c, g, or u
ccccucncggggccgcu

SEQ ID NO: 14209 - RNA, 17 nt, Artificial Sequence
  Synthetic
uuguccugguuaucgcu

SEQ ID NO: 14210 - RNA, 17 nt, Artificial Sequence
  Synthetic
ggcacagcuuggaggcu

SEQ ID NO: 14211 - RNA, 17 nt, Artificial Sequence
  Synthetic
cgcaacccccacuggcu

SEQ ID NO: 14212 - RNA, 17 nt, Artificial Sequence
  Synthetic
  misc_feature (11)..(11): n is a, c, g, or u
cuagaucccungaugcu

SEQ ID NO: 14213 - RNA, 17 nt, Artificial Sequence
  Synthetic
uuccuaggaccccugcu

SEQ ID NO: 14214 - RNA, 17 nt, Artificial Sequence
  Synthetic
aauuaauuaugccugcu

SEQ ID NO: 14215 - RNA, 17 nt, Artificial Sequence
  Synthetic
  misc_feature (2)..(2): n is a, c, g, or u
gncuguauuuuccugcu

SEQ ID NO: 14216 - RNA, 17 nt, Artificial Sequence
  Synthetic
gcaagccauucucugcu

SEQ ID NO: 14217 - RNA, 17 nt, Artificial Sequence
  Synthetic
  misc_feature (7)..(7): n is a, c, g, or u
  misc_feature (9)..(9): n is a, c, g, or u
  misc_feature (15)..(15): n is a, c, g, or u
uccgucngngaucuncu

SEQ ID NO: 14218 - RNA, 17 nt, Artificial Sequence
  Synthetic
  misc_feature (9)..(9): n is a, c, g, or u
  misc_feature (15)..(15): n is a, c, g, or u
ggaagaganacuguncu

SEQ ID NO: 14219 - RNA, 17 nt, Artificial Sequence
  Synthetic
gguugaagucccaaucu

SEQ ID NO: 14220 - RNA, 17 nt, Artificial Sequence
  Synthetic
gcagaagaucucaaucu

SEQ ID NO: 14221 - RNA, 17 nt, Artificial Sequence
  Synthetic
acaauaccgcagagucu

SEQ ID NO: 14222 - RNA, 17 nt, Artificial Sequence
  Synthetic
aaguccaccacgagucu

SEQ ID NO: 14223 - RNA, 17 nt, Artificial Sequence
  Synthetic
gcgggucaccauauucu

SEQ ID NO: 14224 - RNA, 17 nt, Artificial Sequence
  Synthetic
gagggaguucuucuucu

SEQ ID NO: 14225 - RNA, 17 nt, Artificial Sequence
  Synthetic
uucuuauugguucuucu

SEQ ID NO: 14226 - RNA, 17 nt, Artificial Sequence
  Synthetic
acuucucucaauuuucu

SEQ ID NO: 14227 - RNA, 17 nt, Artificial Sequence
  Synthetic
  misc_feature (2)..(2): n is a, c, g, or u
  misc_feature (5)..(6): n is a, c, g, or u
gnuannuaauuggaagu

SEQ ID NO: 14228 - RNA, 17 nt, Artificial Sequence
  Synthetic
  misc_feature (1)..(1): n is a, c, g, or u
ncugaaagccaaacagu

SEQ ID NO: 14229 - RNA, 17 nt, Artificial Sequence
  Synthetic
gccaagccccagccagu

SEQ ID NO: 14230 - RNA, 17 nt, Artificial Sequence
  Synthetic
uccucaggccaugcagu

SEQ ID NO: 14231 - RNA, 17 nt, Artificial Sequence
  Synthetic
uugccuugagcaggagu

SEQ ID NO: 14232 - RNA, 17 nt, Artificial Sequence
  Synthetic
  misc_feature (11)..(11): n is a, c, g, or u
agagggaaacnacacgu

SEQ ID NO: 14233 - RNA, 17 nt, Artificial Sequence
  Synthetic
gccaucagcgcaugcgu

SEQ ID NO: 14234 - RNA, 17 nt, Artificial Sequence
  Synthetic
gcagagucuagacucgu

SEQ ID NO: 14235 - RNA, 17 nt, Artificial Sequence
  Synthetic
gccucaaggucggucgu

SEQ ID NO: 14236 - RNA, 17 nt, Artificial Sequence
  Synthetic
uuuguucagugguucgu

SEQ ID NO: 14237 - RNA, 17 nt, Artificial Sequence
  Synthetic
ggugagugauuggaggu

SEQ ID NO: 14238 - RNA, 17 nt, Artificial Sequence
  Synthetic
ccccagccagugggggu

SEQ ID NO: 14239 - RNA, 17 nt, Artificial Sequence
  Synthetic
gugguccuugauggggu

SEQ ID NO: 14240 - RNA, 17 nt, Artificial Sequence
  Synthetic
gagucuagacucguggu

SEQ ID NO: 14241 - RNA, 17 nt, Artificial Sequence
  Synthetic
  misc_feature (4)..(4): n is a, c, g, or u
aucnugcagagcuuggu

SEQ ID NO: 14242 - RNA, 17 nt, Artificial Sequence
  Synthetic
  misc_feature (12)..(12): n is a, c, g, or u
  misc_feature (15)..(15): n is a, c, g, or u
uuaaagauaggnacngu

SEQ ID NO: 14243 - RNA, 17 nt, Artificial Sequence
  Synthetic
  misc_feature (12)..(12): n is a, c, g, or u
  misc_feature (15)..(15): n is a, c, g, or u
gcuugguggaangcngu

SEQ ID NO: 14244 - RNA, 17 nt, Artificial Sequence
  Synthetic
guaguuuccggaagugu

SEQ ID NO: 14245 - RNA, 17 nt, Artificial Sequence
  Synthetic
ggucucuuucggagugu

SEQ ID NO: 14246 - RNA, 17 nt, Artificial Sequence
  Synthetic
ggcgggguuuuucuugu

SEQ ID NO: 14247 - RNA, 17 nt, Artificial Sequence
  Synthetic
cccguacugguuguugu

SEQ ID NO: 14248 - RNA, 17 nt, Artificial Sequence
  Synthetic
  misc_feature (3)..(3): n is a, c, g, or u
  misc_feature (16)..(16): n is a, c, g, or u
aangacugggaggagnu

SEQ ID NO: 14249 - RNA, 17 nt, Artificial Sequence
  Synthetic
  misc_feature (16)..(16): n is a, c, g, or u
aaagaaucccagaggnu

SEQ ID NO: 14250 - RNA, 17 nt, Artificial Sequence
  Synthetic
  misc_feature (13)..(13): n is a, c, g, or u
  misc_feature (16)..(16): n is a, c, g, or u
aaaaguugcaugnugnu

SEQ ID NO: 14251 - RNA, 17 nt, Artificial Sequence
  Synthetic
  misc_feature (12)..(12): n is a, c, g, or u
  misc_feature (15)..(16): n is a, c, g, or u
acuaaauauuunccnnu

SEQ ID NO: 14252 - RNA, 17 nt, Artificial Sequence
  Synthetic
  misc_feature (8)..(8): n is a, c, g, or u
  misc_feature (11)..(12): n is a, c, g, or u
ucaugggnuannuaauu

SEQ ID NO: 14253 - RNA, 17 nt, Artificial Sequence
  Synthetic
guaggagugggagcauu

SEQ ID NO: 14254 - RNA, 17 nt, Artificial Sequence
  Synthetic
cuuccugacugccgauu

SEQ ID NO: 14255 - RNA, 17 nt, Artificial Sequence
  Synthetic
  misc_feature (1)..(1): n is a, c, g, or u
  misc_feature (4)..(5): n is a, c, g, or u
  misc_feature (7)..(7): n is a, c, g, or u
naanngnccuauugauu

SEQ ID NO: 14256 - RNA, 17 nt, Artificial Sequence
  Synthetic
auggaugaugugguauu

SEQ ID NO: 14257 - RNA, 17 nt, Artificial Sequence
  Synthetic
  misc_feature (5)..(5): n is a, c, g, or u
ucaunuacuguuuacuu

SEQ ID NO: 14258 - RNA, 17 nt, Artificial Sequence
  Synthetic
cgcaugcguggaaccuu

SEQ ID NO: 14259 - RNA, 17 nt, Artificial Sequence
  Synthetic
auucguccccaugccuu

SEQ ID NO: 14260 - RNA, 17 nt, Artificial Sequence
  Synthetic
caauguuaguauuccuu

SEQ ID NO: 14261 - RNA, 17 nt, Artificial Sequence
  Synthetic
  misc_feature (7)..(7): n is a, c, g, or u
gggaucnugcagagcuu

SEQ ID NO: 14262 - RNA, 17 nt, Artificial Sequence
  Synthetic
  misc_feature (11)..(11): n is a, c, g, or u
ugugccuuggnuggcuu

SEQ ID NO: 14263 - RNA, 17 nt, Artificial Sequence
  Synthetic
  misc_feature (14)..(14): n is a, c, g, or u
aaagacccacaauncuu

SEQ ID NO: 14264 - RNA, 17 nt, Artificial Sequence
  Synthetic
  misc_feature (14)..(14): n is a, c, g, or u
cugccaacuggauncuu

SEQ ID NO: 14265 - RNA, 17 nt, Artificial Sequence
  Synthetic
uacauaagaggacucuu

SEQ ID NO: 14266 - RNA, 17 nt, Artificial Sequence
  Synthetic
  misc_feature (1)..(1): n is a, c, g, or u
nuuaaacacacagucuu

SEQ ID NO: 14267 - RNA, 17 nt, Artificial Sequence
  Synthetic
  misc_feature (1)..(1): n is a, c, g, or u
  misc_feature (4)..(5): n is a, c, g, or u
nuannuaauuggaaguu

SEQ ID NO: 14268 - RNA, 17 nt, Artificial Sequence
  Synthetic
gaaaggccuuguaaguu

SEQ ID NO: 14269 - RNA, 17 nt, Artificial Sequence
  Synthetic
uuucccgaucaucaguu

SEQ ID NO: 14270 - RNA, 17 nt, Artificial Sequence
  Synthetic
uuggaggacaggagguu

SEQ ID NO: 14271 - RNA, 17 nt, Artificial Sequence
  Synthetic
gugagugauuggagguu

SEQ ID NO: 14272 - RNA, 17 nt, Artificial Sequence
  Synthetic
uuuucuaaaacaguguu

SEQ ID NO: 14273 - RNA, 17 nt, Artificial Sequence
  Synthetic
ucccaaucuggauuguu

SEQ ID NO: 14274 - RNA, 17 nt, Artificial Sequence
  Synthetic
cggaaacuacuguuguu

SEQ ID NO: 14275 - RNA, 17 nt, Artificial Sequence
  Synthetic
  misc_feature (6)..(6): n is a, c, g, or u
caucunuuuguuuuguu

SEQ ID NO: 14276 - RNA, 17 nt, Artificial Sequence
  Synthetic
auaagauaggggcauuu

SEQ ID NO: 14277 - RNA, 17 nt, Artificial Sequence
  Synthetic
  misc_feature (11)..(11): n is a, c, g, or u
cacguagcgcnucauuu

SEQ ID NO: 14278 - RNA, 17 nt, Artificial Sequence
  Synthetic
  misc_feature (5)..(6): n is a, c, g, or u
  misc_feature (9)..(9): n is a, c, g, or u
ucuannggnaaauauuu

SEQ ID NO: 14279 - RNA, 17 nt, Artificial Sequence
  Synthetic
cacucccauagguauuu

SEQ ID NO: 14280 - RNA, 17 nt, Artificial Sequence
  Synthetic
  misc_feature (10)..(10): n is a, c, g, or u
gugccuuggnuggcuuu

SEQ ID NO: 14281 - RNA, 17 nt, Artificial Sequence
  Synthetic
uuauuuacauacucuuu

SEQ ID NO: 14282 - RNA, 17 nt, Artificial Sequence
  Synthetic
  misc_feature (4)..(4): n is a, c, g, or u
aagnauugugggucuuu

SEQ ID NO: 14283 - RNA, 17 nt, Artificial Sequence
  Synthetic
augccuuugcgagguuu

SEQ ID NO: 14284 - RNA, 17 nt, Artificial Sequence
  Synthetic
  misc_feature (1)..(2): n is a, c, g, or u
  misc_feature (5)..(5): n is a, c, g, or u
  misc_feature (14)..(14): n is a, c, g, or u
nnuancccaugaanuuu

SEQ ID NO: 14285 - RNA, 17 nt, Artificial Sequence
  Synthetic
  misc_feature (1)..(1): n is a, c, g, or u
  misc_feature (10)..(10): n is a, c, g, or u
  misc_feature (14)..(14): n is a, c, g, or u
nccacacggnggunuuu

SEQ ID NO: 14286 - RNA, 17 nt, Artificial Sequence
  Synthetic
  misc_feature (2)..(2): n is a, c, g, or u
unucuugccuuacuuuu

SEQ ID NO: 14287 - RNA, 17 nt, Artificial Sequence
  Synthetic
  misc_feature (2)..(2): n is a, c, g, or u
anaucaaacacuguuuu

SEQ ID NO: 14288 - RNA, 17 nt, Artificial Sequence
  Synthetic
  misc_feature (9)..(9): n is a, c, g, or u
  misc_feature (13)..(13): n is a, c, g, or u
ccacacggnggunuuuu

SEQ ID NO: 14289 - RNA, 20 nt, Artificial Sequence
  Synthetic
gaauauggugacccgcaaaa

SEQ ID NO: 14290 - RNA, 20 nt, Artificial Sequence
  Synthetic
gccgacgggacguaaacaaa

SEQ ID NO: 14291 - RNA, 20 nt, Artificial Sequence
  Synthetic
  misc_feature (13)..(13): n is a, c, g, or u
aauguauacccanagacaaa

SEQ ID NO: 14292 - RNA, 20 nt, Artificial Sequence
  Synthetic
uccuggaauuagaggacaaa

SEQ ID NO: 14293 - RNA, 20 nt, Artificial Sequence
  Synthetic
  misc_feature (8)..(8): n is a, c, g, or u
auggagcngcaaagcccaaa

SEQ ID NO: 14294 - RNA, 20 nt, Artificial Sequence
  Synthetic
  misc_feature (12)..(12): n is a, c, g, or u
uguaaaugaaunuuaggaaa

SEQ ID NO: 14295 - RNA, 20 nt, Artificial Sequence
  Synthetic
  misc_feature (3)..(3): n is a, c, g, or u
canccuagcagccauggaaa

SEQ ID NO: 14296 - RNA, 20 nt, Artificial Sequence
  Synthetic
  misc_feature (3)..(3): n is a, c, g, or u
gunggcccucucacuguaaa

SEQ ID NO: 14297 - RNA, 20 nt, Artificial Sequence
  Synthetic
  misc_feature (11)..(11): n is a, c, g, or u
  misc_feature (14)..(14): n is a, c, g, or u
uaauaaugucnucnuguaaa

SEQ ID NO: 14298 - RNA, 20 nt, Artificial Sequence
  Synthetic
  misc_feature (5)..(5): n is a, c, g, or u
uugcngcuccauuuacacaa

SEQ ID NO: 14299 - RNA, 20 nt, Artificial Sequence
  Synthetic
ccuacagccuccuaauacaa

SEQ ID NO: 14300 - RNA, 20 nt, Artificial Sequence
  Synthetic
uucccaccuuaugaguccaa

SEQ ID NO: 14301 - RNA, 20 nt, Artificial Sequence
  Synthetic
  misc_feature (16)..(16): n is a, c, g, or u
accaggccguugccgngcaa

SEQ ID NO: 14302 - RNA, 20 nt, Artificial Sequence
  Synthetic
ucacgguggucuccaugcaa

SEQ ID NO: 14303 - RNA, 20 nt, Artificial Sequence
  Synthetic
ugggacuucaaccccaucaa

SEQ ID NO: 14304 - RNA, 20 nt, Artificial Sequence
  Synthetic
uggacucccagcaaugucaa

SEQ ID NO: 14305 - RNA, 20 nt, Artificial Sequence
  Synthetic
gaccuugaggccuacuucaa

SEQ ID NO: 14306 - RNA, 20 nt, Artificial Sequence
  Synthetic
  misc_feature (8)..(8): n is a, c, g, or u
ccagaggnuugggaacagaa

SEQ ID NO: 14307 - RNA, 20 nt, Artificial Sequence
  Synthetic
  misc_feature (1)..(2): n is a, c, g, or u
  misc_feature (5)..(5): n is a, c, g, or u
nnggnacggcagacggagaa

SEQ ID NO: 14308 - RNA, 20 nt, Artificial Sequence
  Synthetic
  misc_feature (1)..(1): n is a, c, g, or u
  misc_feature (7)..(7): n is a, c, g, or u
  misc_feature (9)..(9): n is a, c, g, or u
nagaucncngacggaaggaa

SEQ ID NO: 14309 - RNA, 20 nt, Artificial Sequence
  Synthetic
  misc_feature (2)..(2): n is a, c, g, or u
  misc_feature (5)..(5): n is a, c, g, or u
  misc_feature (11)..(11): n is a, c, g, or u
  misc_feature (13)..(13): n is a, c, g, or u
cnagnagaucncngacggaa

SEQ ID NO: 14310 - RNA, 20 nt, Artificial Sequence
  Synthetic
guccaacugaugaucgggaa

SEQ ID NO: 14311 - RNA, 20 nt, Artificial Sequence
  Synthetic
aguauuccuuggacucauaa

SEQ ID NO: 14312 - RNA, 20 nt, Artificial Sequence
  Synthetic
aauugguaacagcgguauaa

SEQ ID NO: 14313 - RNA, 20 nt, Artificial Sequence
  Synthetic
auggacauugacccuuauaa

SEQ ID NO: 14314 - RNA, 20 nt, Artificial Sequence
  Synthetic
  misc_feature (7)..(7): n is a, c, g, or u
  misc_feature (11)..(11): n is a, c, g, or u
  misc_feature (14)..(14): n is a, c, g, or u
aaugucnggunugnaaguaa

SEQ ID NO: 14315 - RNA, 20 nt, Artificial Sequence
  Synthetic
aguuugccauucaggauuaa

SEQ ID NO: 14316 - RNA, 20 nt, Artificial Sequence
  Synthetic
uucaaagacuguguguuuaa

SEQ ID NO: 14317 - RNA, 20 nt, Artificial Sequence
  Synthetic
gaccggcugcgagcaaaaca

SEQ ID NO: 14318 - RNA, 20 nt, Artificial Sequence
  Synthetic
ugugaggauucuugucaaca

SEQ ID NO: 14319 - RNA, 20 nt, Artificial Sequence
  Synthetic
caauuauguuaauacuaaca

SEQ ID NO: 14320 - RNA, 20 nt, Artificial Sequence
  Synthetic
cgaauuuuggccaagacaca

SEQ ID NO: 14321 - RNA, 20 nt, Artificial Sequence
  Synthetic
  misc_feature (9)..(9): n is a, c, g, or u
  misc_feature (12)..(12): n is a, c, g, or u
aguuggggnacnuugccaca

SEQ ID NO: 14322 - RNA, 20 nt, Artificial Sequence
  Synthetic
cgggguuuuucuuguugaca

SEQ ID NO: 14323 - RNA, 20 nt, Artificial Sequence
  Synthetic
  misc_feature (11)..(11): n is a, c, g, or u
  misc_feature (13)..(14): n is a, c, g, or u
  misc_feature (17)..(17): n is a, c, g, or u
aaucaauaggncnnuunaca

SEQ ID NO: 14324 - RNA, 20 nt, Artificial Sequence
  Synthetic
  misc_feature (3)..(3): n is a, c, g, or u
gangaugggaugggaauaca

SEQ ID NO: 14325 - RNA, 20 nt, Artificial Sequence
  Synthetic
ggaccccugcucguguuaca

SEQ ID NO: 14326 - RNA, 20 nt, Artificial Sequence
  Synthetic
  misc_feature (9)..(9): n is a, c, g, or u
uuuccuaanauucauuuaca

SEQ ID NO: 14327 - RNA, 20 nt, Artificial Sequence
  Synthetic
gacacauccagcgauaacca

SEQ ID NO: 14328 - RNA, 20 nt, Artificial Sequence
  Synthetic
  misc_feature (9)..(9): n is a, c, g, or u
  misc_feature (12)..(13): n is a, c, g, or u
ucugccgunccnnccgacca

SEQ ID NO: 14329 - RNA, 20 nt, Artificial Sequence
  Synthetic
agguauuuugcgaaagccca

SEQ ID NO: 14330 - RNA, 20 nt, Artificial Sequence
  Synthetic
  misc_feature (12)..(13): n is a, c, g, or u
  misc_feature (16)..(16): n is a, c, g, or u
acuuccaauuannuanccca

SEQ ID NO: 14331 - RNA, 20 nt, Artificial Sequence
  Synthetic
  misc_feature (11)..(11): n is a, c, g, or u
aaggggacganagaguccca

SEQ ID NO: 14332 - RNA, 20 nt, Artificial Sequence
  Synthetic
  misc_feature (3)..(3): n is a, c, g, or u
ugnuguagcucuuguuccca

SEQ ID NO: 14333 - RNA, 20 nt, Artificial Sequence
  Synthetic
gggacugcgaauuuuggcca

SEQ ID NO: 14334 - RNA, 20 nt, Artificial Sequence
  Synthetic
caacggccuggucugugcca

SEQ ID NO: 14335 - RNA, 20 nt, Artificial Sequence
  Synthetic
ccguuuguccucuaauucca

SEQ ID NO: 14336 - RNA, 20 nt, Artificial Sequence
  Synthetic
cugaacuggagccaccagca

SEQ ID NO: 14337 - RNA, 20 nt, Artificial Sequence
  Synthetic
gaagaugaggcauagcagca

SEQ ID NO: 14338 - RNA, 20 nt, Artificial Sequence
  Synthetic
ccccgccuguaacacgagca

SEQ ID NO: 14339 - RNA, 20 nt, Artificial Sequence
  Synthetic
agccacaaagguuccacgca

SEQ ID NO: 14340 - RNA, 20 nt, Artificial Sequence
  Synthetic
  misc_feature (4)..(4): n is a, c, g, or u
  misc_feature (7)..(7): n is a, c, g, or u
ggcnaunggccaucagcgca

SEQ ID NO: 14341 - RNA, 20 nt, Artificial Sequence
  Synthetic
aucaaaaccucgcaaaggca

SEQ ID NO: 14342 - RNA, 20 nt, Artificial Sequence
  Synthetic
ucucuuccaaaaguaaggca

SEQ ID NO: 14343 - RNA, 20 nt, Artificial Sequence
  Synthetic
cuuauguaagaccuugggca

SEQ ID NO: 14344 - RNA, 20 nt, Artificial Sequence
  Synthetic
  misc_feature (7)..(7): n is a, c, g, or u
gggaccnugcaaaaccugca

SEQ ID NO: 14345 - RNA, 20 nt, Artificial Sequence
  Synthetic
  misc_feature (3)..(3): n is a, c, g, or u
gcnuuccaccaagcucugca

SEQ ID NO: 14346 - RNA, 20 nt, Artificial Sequence
  Synthetic
  misc_feature (18)..(18): n is a, c, g, or u
ugggaacaagagcuacanca

SEQ ID NO: 14347 - RNA, 20 nt, Artificial Sequence
  Synthetic
acauggagaacaucacauca

SEQ ID NO: 14348 - RNA, 20 nt, Artificial Sequence
  Synthetic
  misc_feature (16)..(16): n is a, c, g, or u
cagcgguauaaagggncuca

SEQ ID NO: 14349 - RNA, 20 nt, Artificial Sequence
  Synthetic
ccuccaccaaucggcaguca

SEQ ID NO: 14350 - RNA, 20 nt, Artificial Sequence
  Synthetic
  misc_feature (7)..(7): n is a, c, g, or u
ucugcangaucccagaguca

SEQ ID NO: 14351 - RNA, 20 nt, Artificial Sequence
  Synthetic
  misc_feature (2)..(2): n is a, c, g, or u
angaaggaguuugccauuca

SEQ ID NO: 14352 - RNA, 20 nt, Artificial Sequence
  Synthetic
cugcugguggcuccaguuca

SEQ ID NO: 14353 - RNA, 20 nt, Artificial Sequence
  Synthetic
  misc_feature (16)..(16): n is a, c, g, or u
ggguuauucccuaaanuuca

SEQ ID NO: 14354 - RNA, 20 nt, Artificial Sequence
  Synthetic
gaggcagguccccuagaaga

SEQ ID NO: 14355 - RNA, 20 nt, Artificial Sequence
  Synthetic
gcauagcagcaggaugaaga

SEQ ID NO: 14356 - RNA, 20 nt, Artificial Sequence
  Synthetic
auccagaagaaccaauaaga

SEQ ID NO: 14357 - RNA, 20 nt, Artificial Sequence
  Synthetic
gcccaaggucuuacauaaga

SEQ ID NO: 14358 - RNA, 20 nt, Artificial Sequence
  Synthetic
ggcagaugagaaggcacaga

SEQ ID NO: 14359 - RNA, 20 nt, Artificial Sequence
  Synthetic
acauaccuugauaauccaga

SEQ ID NO: 14360 - RNA, 20 nt, Artificial Sequence
  Synthetic
cucaaucgccgcgucgcaga

SEQ ID NO: 14361 - RNA, 20 nt, Artificial Sequence
  Synthetic
acaagagaugauuaggcaga

SEQ ID NO: 14362 - RNA, 20 nt, Artificial Sequence
  Synthetic
gucuccaugcaacgugcaga

SEQ ID NO: 14363 - RNA, 20 nt, Artificial Sequence
  Synthetic
ggggagaccgcguaaagaga

SEQ ID NO: 14364 - RNA, 20 nt, Artificial Sequence
  Synthetic
  misc_feature (12)..(12): n is a, c, g, or u
agugggacaugnacaagaga

SEQ ID NO: 14365 - RNA, 20 nt, Artificial Sequence
  Synthetic
gucucuuagagguggagaga

SEQ ID NO: 14366 - RNA, 20 nt, Artificial Sequence
  Synthetic
  misc_feature (6)..(6): n is a, c, g, or u
ccucgnggagauugacgaga

SEQ ID NO: 14367 - RNA, 20 nt, Artificial Sequence
  Synthetic
  misc_feature (2)..(3): n is a, c, g, or u
  misc_feature (6)..(6): n is a, c, g, or u
gnnggnacggcagacggaga

SEQ ID NO: 14368 - RNA, 20 nt, Artificial Sequence
  Synthetic
  misc_feature (17)..(17): n is a, c, g, or u
ucacuguaaaugaaaanaga

SEQ ID NO: 14369 - RNA, 20 nt, Artificial Sequence
  Synthetic
  misc_feature (17)..(17): n is a, c, g, or u
acccuaacaaaacaaanaga

SEQ ID NO: 14370 - RNA, 20 nt, Artificial Sequence
  Synthetic
accgaggcagguccccuaga

SEQ ID NO: 14371 - RNA, 20 nt, Artificial Sequence
  Synthetic
  misc_feature (12)..(12): n is a, c, g, or u
  misc_feature (15)..(15): n is a, c, g, or u
uuaaagauaggnacnguaga

SEQ ID NO: 14372 - RNA, 20 nt, Artificial Sequence
  Synthetic
  misc_feature (5)..(5): n is a, c, g, or u
uugungauccuggaauuaga

SEQ ID NO: 14373 - RNA, 20 nt, Artificial Sequence
  Synthetic
gaggaugacugucucuuaga

SEQ ID NO: 14374 - RNA, 20 nt, Artificial Sequence
  Synthetic
cggaaacuacuguuguuaga

SEQ ID NO: 14375 - RNA, 20 nt, Artificial Sequence
  Synthetic
uccgcgggauucagcgccga

SEQ ID NO: 14376 - RNA, 20 nt, Artificial Sequence
  Synthetic
aacgugcagaggugaagcga

SEQ ID NO: 14377 - RNA, 20 nt, Artificial Sequence
  Synthetic
  misc_feature (11)..(11): n is a, c, g, or u
auugagaucuncgucugcga

SEQ ID NO: 14378 - RNA, 20 nt, Artificial Sequence
  Synthetic
gagauugagaucuucugcga

SEQ ID NO: 14379 - RNA, 20 nt, Artificial Sequence
  Synthetic
  misc_feature (17)..(17): n is a, c, g, or u
caucucgucaaucuccncga

SEQ ID NO: 14380 - RNA, 20 nt, Artificial Sequence
  Synthetic
gaugaggcauagcagcagga

SEQ ID NO: 14381 - RNA, 20 nt, Artificial Sequence
  Synthetic
gauugguggaggcaggagga

SEQ ID NO: 14382 - RNA, 20 nt, Artificial Sequence
  Synthetic
uccacugcauggccugagga

SEQ ID NO: 14383 - RNA, 20 nt, Artificial Sequence
  Synthetic
  misc_feature (13)..(13): n is a, c, g, or u
  misc_feature (16)..(16): n is a, c, g, or u
uguauauuuccgnganagga

SEQ ID NO: 14384 - RNA, 20 nt, Artificial Sequence
  Synthetic
uaacaacaguaguuuccgga

SEQ ID NO: 14385 - RNA, 20 nt, Artificial Sequence
  Synthetic
ucggcgcugaaucccgcgga

SEQ ID NO: 14386 - RNA, 20 nt, Artificial Sequence
  Synthetic
acggcagacggagaagggga

SEQ ID NO: 14387 - RNA, 20 nt, Artificial Sequence
  Synthetic
accucgcaaaggcaugggga

SEQ ID NO: 14388 - RNA, 20 nt, Artificial Sequence
  Synthetic
  misc_feature (10)..(10): n is a, c, g, or u
  misc_feature (13)..(13): n is a, c, g, or u
gaaagcccangangauggga

SEQ ID NO: 14389 - RNA, 20 nt, Artificial Sequence
  Synthetic
  misc_feature (12)..(12): n is a, c, g, or u
uuggcuuucagnuauaugga

SEQ ID NO: 14390 - RNA, 20 nt, Artificial Sequence
  Synthetic
uuguccugguuaucgcugga

SEQ ID NO: 14391 - RNA, 20 nt, Artificial Sequence
  Synthetic
gauaaccaggacaaauugga

SEQ ID NO: 14392 - RNA, 20 nt, Artificial Sequence
  Synthetic
  misc_feature (6)..(6): n is a, c, g, or u
  misc_feature (18)..(18): n is a, c, g, or u
ccuaanauucauuuacanga

SEQ ID NO: 14393 - RNA, 20 nt, Artificial Sequence
  Synthetic
  misc_feature (18)..(18): n is a, c, g, or u
uauuuugcgaaagcccanga

SEQ ID NO: 14394 - RNA, 20 nt, Artificial Sequence
  Synthetic
  misc_feature (15)..(15): n is a, c, g, or u
  misc_feature (18)..(18): n is a, c, g, or u
uuugcgaaagcccanganga

SEQ ID NO: 14395 - RNA, 20 nt, Artificial Sequence
  Synthetic
  misc_feature (18)..(18): n is a, c, g, or u
agucccaagcggccccgnga

SEQ ID NO: 14396 - RNA, 20 nt, Artificial Sequence
  Synthetic
uauggugacccgcaaaauga

SEQ ID NO: 14397 - RNA, 20 nt, Artificial Sequence
  Synthetic
  misc_feature (9)..(9): n is a, c, g, or u
gcuuucagnuauauggauga

SEQ ID NO: 14398 - RNA, 20 nt, Artificial Sequence
  Synthetic
cgaaugcaggguccaacuga

SEQ ID NO: 14399 - RNA, 20 nt, Artificial Sequence
  Synthetic
agggguccuaggaauccuga

SEQ ID NO: 14400 - RNA, 20 nt, Artificial Sequence
  Synthetic
agaccuugggcaggaucuga

SEQ ID NO: 14401 - RNA, 20 nt, Artificial Sequence
  Synthetic
caugcaacgugcagagguga

SEQ ID NO: 14402 - RNA, 20 nt, Artificial Sequence
  Synthetic
  misc_feature (11)..(11): n is a, c, g, or u
gccugagugcnguaugguga

SEQ ID NO: 14403 - RNA, 20 nt, Artificial Sequence
  Synthetic
uagacucugcgguauuguga

SEQ ID NO: 14404 - RNA, 20 nt, Artificial Sequence
  Synthetic
  misc_feature (2)..(3): n is a, c, g, or u
unnuggccagugguccuuga

SEQ ID NO: 14405 - RNA, 20 nt, Artificial Sequence
  Synthetic
augccuuugcgagguuuuga

SEQ ID NO: 14406 - RNA, 20 nt, Artificial Sequence
  Synthetic
  misc_feature (1)..(1): n is a, c, g, or u
  misc_feature (16)..(16): n is a, c, g, or u
  misc_feature (19)..(19): n is a, c, g, or u
ngauguauauuuccgngana

SEQ ID NO: 14407 - RNA, 20 nt, Artificial Sequence
  Synthetic
  misc_feature (19)..(19): n is a, c, g, or u
cuuucuaaguaaacaguana

SEQ ID NO: 14408 - RNA, 20 nt, Artificial Sequence
  Synthetic
  misc_feature (19)..(19): n is a, c, g, or u
uggguggguaauaauuugna

SEQ ID NO: 14409 - RNA, 20 nt, Artificial Sequence
  Synthetic
  misc_feature (19)..(19): n is a, c, g, or u
ucucugcuggggggaauuna

SEQ ID NO: 14410 - RNA, 20 nt, Artificial Sequence
  Synthetic
  misc_feature (8)..(8): n is a, c, g, or u
guuugaunuuuuguacaaua

SEQ ID NO: 14411 - RNA, 20 nt, Artificial Sequence
  Synthetic
auaauccagaagaaccaaua

SEQ ID NO: 14412 - RNA, 20 nt, Artificial Sequence
  Synthetic
cagcaggaugaagaggaaua

SEQ ID NO: 14413 - RNA, 20 nt, Artificial Sequence
  Synthetic
  misc_feature (4)..(4): n is a, c, g, or u
  misc_feature (7)..(7): n is a, c, g, or u
acangangacauuauuaaua

SEQ ID NO: 14414 - RNA, 20 nt, Artificial Sequence
  Synthetic
ccggaaguguugauaagaua

SEQ ID NO: 14415 - RNA, 20 nt, Artificial Sequence
  Synthetic
aguuuccggaaguguugaua

SEQ ID NO: 14416 - RNA, 20 nt, Artificial Sequence
  Synthetic
  misc_feature (17)..(17): n is a, c, g, or u
caaaaguaaggcaaganaua

SEQ ID NO: 14417 - RNA, 20 nt, Artificial Sequence
  Synthetic
guagcuccaaauucuuuaua

SEQ ID NO: 14418 - RNA, 20 nt, Artificial Sequence
  Synthetic
gggcuuucgcaaaauaccua

SEQ ID NO: 14419 - RNA, 20 nt, Artificial Sequence
  Synthetic
aacagugggggaaagcccua

SEQ ID NO: 14420 - RNA, 20 nt, Artificial Sequence
  Synthetic
uaacacgagcagggguccua

SEQ ID NO: 14421 - RNA, 20 nt, Artificial Sequence
  Synthetic
acaucacaucaggauuccua

SEQ ID NO: 14422 - RNA, 20 nt, Artificial Sequence
  Synthetic
  misc_feature (14)..(14): n is a, c, g, or u
acccgcaaaaugangcgcua

SEQ ID NO: 14423 - RNA, 20 nt, Artificial Sequence
  Synthetic
gcgagggaguucuucuucua

SEQ ID NO: 14424 - RNA, 20 nt, Artificial Sequence
  Synthetic
ggacuucucucaauuuucua

SEQ ID NO: 14425 - RNA, 20 nt, Artificial Sequence
  Synthetic
  misc_feature (7)..(7): n is a, c, g, or u
aggaucnacaacaaccagua

SEQ ID NO: 14426 - RNA, 20 nt, Artificial Sequence
  Synthetic
uccaagaguccucuuaugua

SEQ ID NO: 14427 - RNA, 20 nt, Artificial Sequence
  Synthetic
  misc_feature (2)..(2): n is a, c, g, or u
  misc_feature (15)..(16): n is a, c, g, or u
  misc_feature (18)..(18): n is a, c, g, or u
gnaaauauuuagugnngnua

SEQ ID NO: 14428 - RNA, 20 nt, Artificial Sequence
  Synthetic
  misc_feature (2)..(2): n is a, c, g, or u
  misc_feature (5)..(5): n is a, c, g, or u
  misc_feature (17)..(17): n is a, c, g, or u
cnucnuguaaaugaaunuua

SEQ ID NO: 14429 - RNA, 20 nt, Artificial Sequence
  Synthetic
acggggcgcaccucucuuua

SEQ ID NO: 14430 - RNA, 20 nt, Artificial Sequence
  Synthetic
  misc_feature (1)..(1): n is a, c, g, or u
nacaggaaguuuucuaaaac

SEQ ID NO: 14431 - RNA, 20 nt, Artificial Sequence
  Synthetic
  misc_feature (7)..(7): n is a, c, g, or u
cauauancugaaagccaaac

SEQ ID NO: 14432 - RNA, 20 nt, Artificial Sequence
  Synthetic
  misc_feature (13)..(13): n is a, c, g, or u
uaaacugagccangagaaac

SEQ ID NO: 14433 - RNA, 20 nt, Artificial Sequence
  Synthetic
cuccgaaugcaggguccaac

SEQ ID NO: 14434 - RNA, 20 nt, Artificial Sequence
  Synthetic
  misc_feature (15)..(15): n is a, c, g, or u
ccaggccguugccgngcaac

SEQ ID NO: 14435 - RNA, 20 nt, Artificial Sequence
  Synthetic
  misc_feature (12)..(12): n is a, c, g, or u
aaucccagaggnuugggaac

SEQ ID NO: 14436 - RNA, 20 nt, Artificial Sequence
  Synthetic
gacaaaagaaaauugguaac

SEQ ID NO: 14437 - RNA, 20 nt, Artificial Sequence
  Synthetic
aggugaagcgaagugcacac

SEQ ID NO: 14438 - RNA, 20 nt, Artificial Sequence
  Synthetic
gggaaagcccuacgaaccac

SEQ ID NO: 14439 - RNA, 20 nt, Artificial Sequence
  Synthetic
gcacguugcauggagaccac

SEQ ID NO: 14440 - RNA, 20 nt, Artificial Sequence
  Synthetic
  misc_feature (8)..(8): n is a, c, g, or u
  misc_feature (11)..(12): n is a, c, g, or u
cugccgunccnnccgaccac

SEQ ID NO: 14441 - RNA, 20 nt, Artificial Sequence
  Synthetic
accggcagaugagaaggcac

SEQ ID NO: 14442 - RNA, 20 nt, Artificial Sequence
  Synthetic
cgucagcaaacacuuggcac

SEQ ID NO: 14443 - RNA, 20 nt, Artificial Sequence
  Synthetic
aggaucugaugggcguucac

SEQ ID NO: 14444 - RNA, 20 nt, Artificial Sequence
  Synthetic
uugaggccuacuucaaagac

SEQ ID NO: 14445 - RNA, 20 nt, Artificial Sequence
  Synthetic
gcagaugagaaggcacagac

SEQ ID NO: 14446 - RNA, 20 nt, Artificial Sequence
  Synthetic
gaaggcacagacggggagac

SEQ ID NO: 14447 - RNA, 20 nt, Artificial Sequence
  Synthetic
cucccagcaaugucaacgac

SEQ ID NO: 14448 - RNA, 20 nt, Artificial Sequence
  Synthetic
  misc_feature (9)..(9): n is a, c, g, or u
  misc_feature (12)..(12): n is a, c, g, or u
uauuuccgnganaggacgac

SEQ ID NO: 14449 - RNA, 20 nt, Artificial Sequence
  Synthetic
  misc_feature (13)..(13): n is a, c, g, or u
ucgucaaucuccncgaggac

SEQ ID NO: 14450 - RNA, 20 nt, Artificial Sequence
  Synthetic
agugauuggagguuggggac

SEQ ID NO: 14451 - RNA, 20 nt, Artificial Sequence
  Synthetic
  misc_feature (17)..(17): n is a, c, g, or u
aagacuguguguuuaangac

SEQ ID NO: 14452 - RNA, 20 nt, Artificial Sequence
  Synthetic
  misc_feature (3)..(3): n is a, c, g, or u
  misc_feature (6)..(6): n is a, c, g, or u
  misc_feature (9)..(9): n is a, c, g, or u
  misc_feature (15)..(15): n is a, c, g, or u
  misc_feature (17)..(17): n is a, c, g, or u
gunucnagnagaucncngac

SEQ ID NO: 14453 - RNA, 20 nt, Artificial Sequence
  Synthetic
  misc_feature (16)..(16): n is a, c, g, or u
  misc_feature (18)..(18): n is a, c, g, or u
gcucagggcauauugncnac

SEQ ID NO: 14454 - RNA, 20 nt, Artificial Sequence
  Synthetic
  misc_feature (9)..(9): n is a, c, g, or u
  misc_feature (15)..(15): n is a, c, g, or u
  misc_feature (18)..(18): n is a, c, g, or u
ggagcaaancucaunggnac

SEQ ID NO: 14455 - RNA, 20 nt, Artificial Sequence
  Synthetic
  misc_feature (15)..(15): n is a, c, g, or u
  misc_feature (18)..(18): n is a, c, g, or u
cauaaggugggaaanuunac

SEQ ID NO: 14456 - RNA, 20 nt, Artificial Sequence
  Synthetic
gcuccucugccgauccauac

SEQ ID NO: 14457 - RNA, 20 nt, Artificial Sequence
  Synthetic
uguugcuguacaaaaccuac

SEQ ID NO: 14458 - RNA, 20 nt, Artificial Sequence
  Synthetic
uauaaagaauuuggagcuac

SEQ ID NO: 14459 - RNA, 20 nt, Artificial Sequence
  Synthetic
  misc_feature (5)..(5): n is a, c, g, or u
  misc_feature (10)..(10): n is a, c, g, or u
  misc_feature (15)..(15): n is a, c, g, or u
agggncucangaugnuguac

SEQ ID NO: 14460 - RNA, 20 nt, Artificial Sequence
  Synthetic
  misc_feature (9)..(9): n is a, c, g, or u
aaucuucunuuuucauuuac

SEQ ID NO: 14461 - RNA, 20 nt, Artificial Sequence
  Synthetic
  misc_feature (16)..(16): n is a, c, g, or u
aauuuucuagggggancacc

SEQ ID NO: 14462 - RNA, 20 nt, Artificial Sequence
  Synthetic
  misc_feature (14)..(14): n is a, c, g, or u
  misc_feature (17)..(17): n is a, c, g, or u
uuaaucauuacuuncanacc

SEQ ID NO: 14463 - RNA, 20 nt, Artificial Sequence
  Synthetic
  misc_feature (5)..(5): n is a, c, g, or u
aauunaugacucuagcuacc

SEQ ID NO: 14464 - RNA, 20 nt, Artificial Sequence
  Synthetic
  misc_feature (16)..(16): n is a, c, g, or u
agcaggaaaauacagncccc

SEQ ID NO: 14465 - RNA, 20 nt, Artificial Sequence
  Synthetic
gcguaaagagaggugcgccc

SEQ ID NO: 14466 - RNA, 20 nt, Artificial Sequence
  Synthetic
  misc_feature (3)..(3): n is a, c, g, or u
  misc_feature (6)..(6): n is a, c, g, or u
ccnaungccaagccccagcc

SEQ ID NO: 14467 - RNA, 20 nt, Artificial Sequence
  Synthetic
ggagugggagcauucgggcc

SEQ ID NO: 14468 - RNA, 20 nt, Artificial Sequence
  Synthetic
  misc_feature (4)..(4): n is a, c, g, or u
  misc_feature (7)..(7): n is a, c, g, or u
  misc_feature (12)..(12): n is a, c, g, or u
uggnggngugancccuggcc

SEQ ID NO: 14469 - RNA, 20 nt, Artificial Sequence
  Synthetic
  misc_feature (14)..(15): n is a, c, g, or u
uaccugguuggcunnuggcc

SEQ ID NO: 14470 - RNA, 20 nt, Artificial Sequence
  Synthetic
  misc_feature (9)..(9): n is a, c, g, or u
ggagccaanucaaacaaucc

SEQ ID NO: 14471 - RNA, 20 nt, Artificial Sequence
  Synthetic
agcagggguccuaggaaucc

SEQ ID NO: 14472 - RNA, 20 nt, Artificial Sequence
  Synthetic
gucccgucggcgcugaaucc

SEQ ID NO: 14473 - RNA, 20 nt, Artificial Sequence
  Synthetic
gcaacauaccuugauaaucc

SEQ ID NO: 14474 - RNA, 20 nt, Artificial Sequence
  Synthetic
  misc_feature (3)..(3): n is a, c, g, or u
  misc_feature (6)..(6): n is a, c, g, or u
acngunccuaucuuuaaucc

SEQ ID NO: 14475 - RNA, 20 nt, Artificial Sequence
  Synthetic
aaaacgccgcagacacaucc

SEQ ID NO: 14476 - RNA, 20 nt, Artificial Sequence
  Synthetic
  misc_feature (3)..(3): n is a, c, g, or u
ggnauuaaaccuuauuaucc

SEQ ID NO: 14477 - RNA, 20 nt, Artificial Sequence
  Synthetic
  misc_feature (3)..(3): n is a, c, g, or u
  misc_feature (6)..(6): n is a, c, g, or u
  misc_feature (12)..(12): n is a, c, g, or u
gunccnaugagnuuugcucc

SEQ ID NO: 14478 - RNA, 20 nt, Artificial Sequence
  Synthetic
gacguaaacaaaggacgucc

SEQ ID NO: 14479 - RNA, 20 nt, Artificial Sequence
  Synthetic
ccuaucuuaucaacacuucc

SEQ ID NO: 14480 - RNA, 20 nt, Artificial Sequence
  Synthetic
augggaguaggcugccuucc

SEQ ID NO: 14481 - RNA, 20 nt, Artificial Sequence
  Synthetic
  misc_feature (4)..(4): n is a, c, g, or u
  misc_feature (12)..(12): n is a, c, g, or u
  misc_feature (14)..(14): n is a, c, g, or u
ggancaggguunanuguucc

SEQ ID NO: 14482 - RNA, 20 nt, Artificial Sequence
  Synthetic
  misc_feature (3)..(3): n is a, c, g, or u
aanccucugggauucuuucc

SEQ ID NO: 14483 - RNA, 20 nt, Artificial Sequence
  Synthetic
gucuaacaacaguaguuucc

SEQ ID NO: 14484 - RNA, 20 nt, Artificial Sequence
  Synthetic
  misc_feature (5)..(5): n is a, c, g, or u
cacunuucaagccuccaagc

SEQ ID NO: 14485 - RNA, 20 nt, Artificial Sequence
  Synthetic
accccgccuguaacacgagc

SEQ ID NO: 14486 - RNA, 20 nt, Artificial Sequence
  Synthetic
auugagaucuucugcgacgc

SEQ ID NO: 14487 - RNA, 20 nt, Artificial Sequence
  Synthetic
ccgucggcgcugaaucccgc

SEQ ID NO: 14488 - RNA, 20 nt, Artificial Sequence
  Synthetic
ggaauaugauaaaacgccgc

SEQ ID NO: 14489 - RNA, 20 nt, Artificial Sequence
  Synthetic
ucguccgcgggauucagcgc

SEQ ID NO: 14490 - RNA, 20 nt, Artificial Sequence
  Synthetic
uguuuacgucccgucggcgc

SEQ ID NO: 14491 - RNA, 20 nt, Artificial Sequence
  Synthetic
caaagguuccacgcaugcgc

SEQ ID NO: 14492 - RNA, 20 nt, Artificial Sequence
  Synthetic
  misc_feature (9)..(9): n is a, c, g, or u
  misc_feature (12)..(12): n is a, c, g, or u
guugcaugnugnuggugcgc

SEQ ID NO: 14493 - RNA, 20 nt, Artificial Sequence
  Synthetic
  misc_feature (7)..(7): n is a, c, g, or u
cagacgnagaucucaaucgc

SEQ ID NO: 14494 - RNA, 20 nt, Artificial Sequence
  Synthetic
gaagaacucccucgccucgc

SEQ ID NO: 14495 - RNA, 20 nt, Artificial Sequence
  Synthetic
gaucucaaucgccgcgucgc

SEQ ID NO: 14496 - RNA, 20 nt, Artificial Sequence
  Synthetic
ccccugcucguguuacaggc

SEQ ID NO: 14497 - RNA, 20 nt, Artificial Sequence
  Synthetic
  misc_feature (11)..(12): n is a, c, g, or u
  misc_feature (15)..(15): n is a, c, g, or u
ccguggucggnnggnacggc

SEQ ID NO: 14498 - RNA, 20 nt, Artificial Sequence
  Synthetic
  misc_feature (4)..(4): n is a, c, g, or u
gagnuuugcuccagaccggc

SEQ ID NO: 14499 - RNA, 20 nt, Artificial Sequence
  Synthetic
cgaagugcacacggaccggc

SEQ ID NO: 14500 - RNA, 20 nt, Artificial Sequence
  Synthetic
cugacgcaacccccacuggc

SEQ ID NO: 14501 - RNA, 20 nt, Artificial Sequence
  Synthetic
  misc_feature (18)..(18): n is a, c, g, or u
ugcagagcuugguggaangc

SEQ ID NO: 14502 - RNA, 20 nt, Artificial Sequence
  Synthetic
  misc_feature (6)..(6): n is a, c, g, or u
uuuganuuggcuccgaaugc

SEQ ID NO: 14503 - RNA, 20 nt, Artificial Sequence
  Synthetic
cagucauccucaggccaugc

SEQ ID NO: 14504 - RNA, 20 nt, Artificial Sequence
  Synthetic
uaggcugccuuccugacugc

SEQ ID NO: 14505 - RNA, 20 nt, Artificial Sequence
  Synthetic
ccucugccgauccauacugc

SEQ ID NO: 14506 - RNA, 20 nt, Artificial Sequence
  Synthetic
aaccuuuguggcuccucugc

SEQ ID NO: 14507 - RNA, 20 nt, Artificial Sequence
  Synthetic
ucaggcaagccauucucugc

SEQ ID NO: 14508 - RNA, 20 nt, Artificial Sequence
  Synthetic
uuaucgcuggaugugucugc

SEQ ID NO: 14509 - RNA, 20 nt, Artificial Sequence
  Synthetic
aggucggucguugacauugc

SEQ ID NO: 14510 - RNA, 20 nt, Artificial Sequence
  Synthetic
ggucugugccaaguguuugc

SEQ ID NO: 14511 - RNA, 20 nt, Artificial Sequence
  Synthetic
  misc_feature (15)..(15): n is a, c, g, or u
  misc_feature (19)..(19): n is a, c, g, or u
ugagaggcaauauungganc

SEQ ID NO: 14512 - RNA, 20 nt, Artificial Sequence
  Synthetic
  misc_feature (19)..(19): n is a, c, g, or u
uaccacaucauccauauanc

SEQ ID NO: 14513 - RNA, 20 nt, Artificial Sequence
  Synthetic
  misc_feature (15)..(15): n is a, c, g, or u
  misc_feature (19)..(19): n is a, c, g, or u
gcuccaccccaaaanaccnc

SEQ ID NO: 14514 - RNA, 20 nt, Artificial Sequence
  Synthetic
  misc_feature (17)..(17): n is a, c, g, or u
  misc_feature (19)..(19): n is a, c, g, or u
auguucuccauguucgncnc

SEQ ID NO: 14515 - RNA, 20 nt, Artificial Sequence
  Synthetic
  misc_feature (4)..(4): n is a, c, g, or u
  misc_feature (7)..(7): n is a, c, g, or u
  misc_feature (10)..(10): n is a, c, g, or u
  misc_feature (13)..(13): n is a, c, g, or u
  misc_feature (19)..(19): n is a, c, g, or u
ggcngunucnagnagaucnc

SEQ ID NO: 14516 - RNA, 20 nt, Artificial Sequence
  Synthetic
  misc_feature (19)..(19): n is a, c, g, or u
ucccgcggacgaccccucnc

SEQ ID NO: 14517 - RNA, 20 nt, Artificial Sequence
  Synthetic
  misc_feature (1)..(1): n is a, c, g, or u
  misc_feature (16)..(16): n is a, c, g, or u
  misc_feature (19)..(19): n is a, c, g, or u
naauucugucguccunucnc

SEQ ID NO: 14518 - RNA, 20 nt, Artificial Sequence
  Synthetic
  misc_feature (15)..(15): n is a, c, g, or u
  misc_feature (18)..(19): n is a, c, g, or u
ucuccgucugccgunccnnc

SEQ ID NO: 14519 - RNA, 20 nt, Artificial Sequence
  Synthetic
gaccaccgugaacgcccauc

SEQ ID NO: 14520 - RNA, 20 nt, Artificial Sequence
  Synthetic
  misc_feature (10)..(10): n is a, c, g, or u
  misc_feature (13)..(13): n is a, c, g, or u
gggcuuggcnaunggccauc

SEQ ID NO: 14521 - RNA, 20 nt, Artificial Sequence
  Synthetic
guaagaccuugggcaggauc

SEQ ID NO: 14522 - RNA, 20 nt, Artificial Sequence
  Synthetic
aggagugcgaauccacacuc

SEQ ID NO: 14523 - RNA, 20 nt, Artificial Sequence
  Synthetic
uccaccacgagucuagacuc

SEQ ID NO: 14524 - RNA, 20 nt, Artificial Sequence
  Synthetic
  misc_feature (10)..(10): n is a, c, g, or u
aaaauacagnccccugacuc

SEQ ID NO: 14525 - RNA, 20 nt, Artificial Sequence
  Synthetic
  misc_feature (16)..(16): n is a, c, g, or u
ucuuucuguucccaanccuc

SEQ ID NO: 14526 - RNA, 20 nt, Artificial Sequence
  Synthetic
gggguggagcccucaggcuc

SEQ ID NO: 14527 - RNA, 20 nt, Artificial Sequence
  Synthetic
  misc_feature (13)..(13): n is a, c, g, or u
uggauuguuuganuuggcuc

SEQ ID NO: 14528 - RNA, 20 nt, Artificial Sequence
  Synthetic
  misc_feature (2)..(2): n is a, c, g, or u
cngacggaaggaaagaaguc

SEQ ID NO: 14529 - RNA, 20 nt, Artificial Sequence
  Synthetic
  misc_feature (8)..(8): n is a, c, g, or u
cucugcangaucccagaguc

SEQ ID NO: 14530 - RNA, 20 nt, Artificial Sequence
  Synthetic
cuuuacgcggucuccccguc

SEQ ID NO: 14531 - RNA, 20 nt, Artificial Sequence
  Synthetic
uccuuuguuuacgucccguc

SEQ ID NO: 14532 - RNA, 20 nt, Artificial Sequence
  Synthetic
  misc_feature (16)..(16): n is a, c, g, or u
cggcgauugagaucuncguc

SEQ ID NO: 14533 - RNA, 20 nt, Artificial Sequence
  Synthetic
  misc_feature (9)..(9): n is a, c, g, or u
cggccccgngaggggucguc

SEQ ID NO: 14534 - RNA, 20 nt, Artificial Sequence
  Synthetic
ugccuucucaucugccgguc

SEQ ID NO: 14535 - RNA, 20 nt, Artificial Sequence
  Synthetic
  misc_feature (4)..(4): n is a, c, g, or u
ugcncggcaacggccugguc

SEQ ID NO: 14536 - RNA, 20 nt, Artificial Sequence
  Synthetic
  misc_feature (11)..(11): n is a, c, g, or u
gcuguaggcanaaauugguc

SEQ ID NO: 14537 - RNA, 20 nt, Artificial Sequence
  Synthetic
ugguuaucgcuggauguguc

SEQ ID NO: 14538 - RNA, 20 nt, Artificial Sequence
  Synthetic
aggggucguccgcgggauuc

SEQ ID NO: 14539 - RNA, 20 nt, Artificial Sequence
  Synthetic
  misc_feature (9)..(9): n is a, c, g, or u
uuacucucnuuuuugccuuc

SEQ ID NO: 14540 - RNA, 20 nt, Artificial Sequence
  Synthetic
uucccgagauugagaucuuc

SEQ ID NO: 14541 - RNA, 20 nt, Artificial Sequence
  Synthetic
uuuacuagugccauuuguuc

SEQ ID NO: 14542 - RNA, 20 nt, Artificial Sequence
  Synthetic
gcgaauccacacuccgaaag

SEQ ID NO: 14543 - RNA, 20 nt, Artificial Sequence
  Synthetic
  misc_feature (3)..(3): n is a, c, g, or u
  misc_feature (15)..(15): n is a, c, g, or u
aanagugggacaugnacaag

SEQ ID NO: 14544 - RNA, 20 nt, Artificial Sequence
  Synthetic
ucuugccuuacuuuuggaag

SEQ ID NO: 14545 - RNA, 20 nt, Artificial Sequence
  Synthetic
ugcaacgugcagaggugaag

SEQ ID NO: 14546 - RNA, 20 nt, Artificial Sequence
  Synthetic
  misc_feature (8)..(8): n is a, c, g, or u
aggcuggnauucuauauaag

SEQ ID NO: 14547 - RNA, 20 nt, Artificial Sequence
  Synthetic
cccaucucuccaccucuaag

SEQ ID NO: 14548 - RNA, 20 nt, Artificial Sequence
  Synthetic
  misc_feature (5)..(5): n is a, c, g, or u
uauancugaaagccaaacag

SEQ ID NO: 14549 - RNA, 20 nt, Artificial Sequence
  Synthetic
  misc_feature (1)..(1): n is a, c, g, or u
  misc_feature (4)..(4): n is a, c, g, or u
naungccaagccccagccag

SEQ ID NO: 14550 - RNA, 20 nt, Artificial Sequence
  Synthetic
aacgccgcagacacauccag

SEQ ID NO: 14551 - RNA, 20 nt, Artificial Sequence
  Synthetic
  misc_feature (5)..(5): n is a, c, g, or u
ucaunaauuccccccagcag

SEQ ID NO: 14552 - RNA, 20 nt, Artificial Sequence
  Synthetic
  misc_feature (6)..(6): n is a, c, g, or u
gcuggnauucuauauaagag

SEQ ID NO: 14553 - RNA, 20 nt, Artificial Sequence
  Synthetic
uggucuauaggcuggaggag

SEQ ID NO: 14554 - RNA, 20 nt, Artificial Sequence
  Synthetic
  misc_feature (2)..(3): n is a, c, g, or u
annagccaaccagguaggag

SEQ ID NO: 14555 - RNA, 20 nt, Artificial Sequence
  Synthetic
  misc_feature (1)..(1): n is a, c, g, or u
nuauuuggucucuuucggag

SEQ ID NO: 14556 - RNA, 20 nt, Artificial Sequence
  Synthetic
ucgcaaaauaccuaugggag

SEQ ID NO: 14557 - RNA, 20 nt, Artificial Sequence
  Synthetic
acugucucuuagagguggag

SEQ ID NO: 14558 - RNA, 20 nt, Artificial Sequence
  Synthetic
guuuuguacagcaacaugag

SEQ ID NO: 14559 - RNA, 20 nt, Artificial Sequence
  Synthetic
  misc_feature (3)..(3): n is a, c, g, or u
cunuuuucauuuacagugag

SEQ ID NO: 14560 - RNA, 20 nt, Artificial Sequence
  Synthetic
gaggacaggagguuggugag

SEQ ID NO: 14561 - RNA, 20 nt, Artificial Sequence
  Synthetic
  misc_feature (2)..(2): n is a, c, g, or u
gnucccccuagaaaauugag

SEQ ID NO: 14562 - RNA, 20 nt, Artificial Sequence
  Synthetic
  misc_feature (18)..(18): n is a, c, g, or u
cagcuuggaggcuugaanag

SEQ ID NO: 14563 - RNA, 20 nt, Artificial Sequence
  Synthetic
  misc_feature (4)..(4): n is a, c, g, or u
  misc_feature (18)..(18): n is a, c, g, or u
uugnaagauccagcaucnag

SEQ ID NO: 14564 - RNA, 20 nt, Artificial Sequence
  Synthetic
gacuucucucaauuuucuag

SEQ ID NO: 14565 - RNA, 20 nt, Artificial Sequence
  Synthetic
  misc_feature (2)..(3): n is a, c, g, or u
  misc_feature (6)..(6): n is a, c, g, or u
  misc_feature (15)..(15): n is a, c, g, or u
annuancccaugaanuuuag

SEQ ID NO: 14566 - RNA, 20 nt, Artificial Sequence
  Synthetic
aauuuuggccaagacacacg

SEQ ID NO: 14567 - RNA, 20 nt, Artificial Sequence
  Synthetic
acuacuguuguuagacgacg

SEQ ID NO: 14568 - RNA, 20 nt, Artificial Sequence
  Synthetic
cgcgggauucagcgccgacg

SEQ ID NO: 14569 - RNA, 20 nt, Artificial Sequence
  Synthetic
  misc_feature (9)..(9): n is a, c, g, or u
aguccucgnggagauugacg

SEQ ID NO: 14570 - RNA, 20 nt, Artificial Sequence
  Synthetic
  misc_feature (5)..(5): n is a, c, g, or u
gaucnacaacaaccaguacg

SEQ ID NO: 14571 - RNA, 20 nt, Artificial Sequence
  Synthetic
acguugcauggagaccaccg

SEQ ID NO: 14572 - RNA, 20 nt, Artificial Sequence
  Synthetic
  misc_feature (14)..(14): n is a, c, g, or u
uuuucuagggggancacccg

SEQ ID NO: 14573 - RNA, 20 nt, Artificial Sequence
  Synthetic
cguaaacaaaggacgucccg

SEQ ID NO: 14574 - RNA, 20 nt, Artificial Sequence
  Synthetic
uacuaacauugagauucccg

SEQ ID NO: 14575 - RNA, 20 nt, Artificial Sequence
  Synthetic
  misc_feature (13)..(13): n is a, c, g, or u
  misc_feature (17)..(17): n is a, c, g, or u
uccaccccaaaanaccnccg

SEQ ID NO: 14576 - RNA, 20 nt, Artificial Sequence
  Synthetic
  misc_feature (7)..(7): n is a, c, g, or u
gccccgngaggggucguccg

SEQ ID NO: 14577 - RNA, 20 nt, Artificial Sequence
  Synthetic
ccuucucaucugccgguccg

SEQ ID NO: 14578 - RNA, 20 nt, Artificial Sequence
  Synthetic
  misc_feature (6)..(6): n is a, c, g, or u
ggaaangauguauauuuccg

SEQ ID NO: 14579 - RNA, 20 nt, Artificial Sequence
  Synthetic
  misc_feature (5)..(5): n is a, c, g, or u
cccgngaggggucguccgcg

SEQ ID NO: 14580 - RNA, 20 nt, Artificial Sequence
  Synthetic
  misc_feature (13)..(13): n is a, c, g, or u
ugccaacuggauncuucgcg

SEQ ID NO: 14581 - RNA, 20 nt, Artificial Sequence
  Synthetic
  misc_feature (7)..(7): n is a, c, g, or u
agaucuncgucugcgaggcg

SEQ ID NO: 14582 - RNA, 20 nt, Artificial Sequence
  Synthetic
aaaggccuuguaaguuggcg

SEQ ID NO: 14583 - RNA, 20 nt, Artificial Sequence
  Synthetic
caggguccaacugaugaucg

SEQ ID NO: 14584 - RNA, 20 nt, Artificial Sequence
  Synthetic
  misc_feature (3)..(3): n is a, c, g, or u
acngccucagcucuguaucg

SEQ ID NO: 14585 - RNA, 20 nt, Artificial Sequence
  Synthetic
cgcagaagaucucaaucucg

SEQ ID NO: 14586 - RNA, 20 nt, Artificial Sequence
  Synthetic
  misc_feature (15)..(15): n is a, c, g, or u
acugccaacuggauncuucg

SEQ ID NO: 14587 - RNA, 20 nt, Artificial Sequence
  Synthetic
  misc_feature (3)..(3): n is a, c, g, or u
ggnacggcagacggagaagg

SEQ ID NO: 14588 - RNA, 20 nt, Artificial Sequence
  Synthetic
uauuccuuggacucauaagg

SEQ ID NO: 14589 - RNA, 20 nt, Artificial Sequence
  Synthetic
accccugcucguguuacagg

SEQ ID NO: 14590 - RNA, 20 nt, Artificial Sequence
  Synthetic
ugaggugagcaaugcucagg

SEQ ID NO: 14591 - RNA, 20 nt, Artificial Sequence
  Synthetic
aagagaugauuaggcagagg

SEQ ID NO: 14592 - RNA, 20 nt, Artificial Sequence
  Synthetic
cuccaugcaacgugcagagg

SEQ ID NO: 14593 - RNA, 20 nt, Artificial Sequence
  Synthetic
ggagaccgcguaaagagagg

SEQ ID NO: 14594 - RNA, 20 nt, Artificial Sequence
  Synthetic
  misc_feature (11)..(11): n is a, c, g, or u
cugggaggagnugggggagg

SEQ ID NO: 14595 - RNA, 20 nt, Artificial Sequence
  Synthetic
gguggucuauaggcuggagg

SEQ ID NO: 14596 - RNA, 20 nt, Artificial Sequence
  Synthetic
gagggaguucuucuucuagg

SEQ ID NO: 14597 - RNA, 20 nt, Artificial Sequence
  Synthetic
  misc_feature (4)..(5): n is a, c, g, or u
ccannagccaaccagguagg

SEQ ID NO: 14598 - RNA, 20 nt, Artificial Sequence
  Synthetic
  misc_feature (6)..(6): n is a, c, g, or u
  misc_feature (9)..(10): n is a, c, g, or u
gccgunccnnccgaccacgg

SEQ ID NO: 14599 - RNA, 20 nt, Artificial Sequence
  Synthetic
  misc_feature (5)..(6): n is a, c, g, or u
  misc_feature (9)..(9): n is a, c, g, or u
ucggnnggnacggcagacgg

SEQ ID NO: 14600 - RNA, 20 nt, Artificial Sequence
  Synthetic
ugagaucuucugcgacgcgg

SEQ ID NO: 14601 - RNA, 20 nt, Artificial Sequence
  Synthetic
  misc_feature (3)..(3): n is a, c, g, or u
ganuauuuggucucuuucgg

SEQ ID NO: 14602 - RNA, 20 nt, Artificial Sequence
  Synthetic
cuucucucaauuuucuaggg

SEQ ID NO: 14603 - RNA, 20 nt, Artificial Sequence
  Synthetic
augagaaggcacagacgggg

SEQ ID NO: 14604 - RNA, 20 nt, Artificial Sequence
  Synthetic
caagccauucucugcugggg

SEQ ID NO: 14605 - RNA, 20 nt, Artificial Sequence
  Synthetic
uuucgcaaaauaccuauggg

SEQ ID NO: 14606 - RNA, 20 nt, Artificial Sequence
  Synthetic
  misc_feature (1)..(1): n is a, c, g, or u
naugacucuagcuaccuggg

SEQ ID NO: 14607 - RNA, 20 nt, Artificial Sequence
  Synthetic
  misc_feature (1)..(1): n is a, c, g, or u
ncugaaagccaaacaguggg

SEQ ID NO: 14608 - RNA, 20 nt, Artificial Sequence
  Synthetic
  misc_feature (18)..(18): n is a, c, g, or u
aggguccccaguccucgngg

SEQ ID NO: 14609 - RNA, 20 nt, Artificial Sequence
  Synthetic
  misc_feature (5)..(5): n is a, c, g, or u
  misc_feature (9)..(9): n is a, c, g, or u
  misc_feature (18)..(18): n is a, c, g, or u
aaaanaccnccguguggngg

SEQ ID NO: 14610 - RNA, 20 nt, Artificial Sequence
  Synthetic
  misc_feature (9)..(9): n is a, c, g, or u
  misc_feature (11)..(11): n is a, c, g, or u
ggacccugngncgaacaugg

SEQ ID NO: 14611 - RNA, 20 nt, Artificial Sequence
  Synthetic
aaaaccucgcaaaggcaugg

SEQ ID NO: 14612 - RNA, 20 nt, Artificial Sequence
  Synthetic
caccucugcacguugcaugg

SEQ ID NO: 14613 - RNA, 20 nt, Artificial Sequence
  Synthetic
ucuuguucccaagaauaugg

SEQ ID NO: 14614 - RNA, 20 nt, Artificial Sequence
  Synthetic
  misc_feature (10)..(10): n is a, c, g, or u
ucaaucuccncgaggacugg

SEQ ID NO: 14615 - RNA, 20 nt, Artificial Sequence
  Synthetic
ggcaagccauucucugcugg

SEQ ID NO: 14616 - RNA, 20 nt, Artificial Sequence
  Synthetic
  misc_feature (14)..(14): n is a, c, g, or u
  misc_feature (17)..(17): n is a, c, g, or u
aaaaaguugcaugnugnugg

SEQ ID NO: 14617 - RNA, 20 nt, Artificial Sequence
  Synthetic
ggugagugauuggagguugg

SEQ ID NO: 14618 - RNA, 20 nt, Artificial Sequence
  Synthetic
  misc_feature (1)..(1): n is a, c, g, or u
  misc_feature (10)..(10): n is a, c, g, or u
  misc_feature (14)..(14): n is a, c, g, or u
nccacacggnggunuuuugg

SEQ ID NO: 14619 - RNA, 20 nt, Artificial Sequence
  Synthetic
  misc_feature (19)..(19): n is a, c, g, or u
cacuaguaaacugagccang

SEQ ID NO: 14620 - RNA, 20 nt, Artificial Sequence
  Synthetic
  misc_feature (19)..(19): n is a, c, g, or u
gacuucuuuccuuccgucng

SEQ ID NO: 14621 - RNA, 20 nt, Artificial Sequence
  Synthetic
  misc_feature (19)..(19): n is a, c, g, or u
gagucccaagcggccccgng

SEQ ID NO: 14622 - RNA, 20 nt, Artificial Sequence
  Synthetic
  misc_feature (3)..(3): n is a, c, g, or u
  misc_feature (7)..(7): n is a, c, g, or u
  misc_feature (16)..(16): n is a, c, g, or u
  misc_feature (19)..(19): n is a, c, g, or u
aanaccnccguguggnggng

SEQ ID NO: 14623 - RNA, 20 nt, Artificial Sequence
  Synthetic
agguuuuguacagcaacaug

SEQ ID NO: 14624 - RNA, 20 nt, Artificial Sequence
  Synthetic
  misc_feature (2)..(2): n is a, c, g, or u
  misc_feature (5)..(5): n is a, c, g, or u
cnaunggccaucagcgcaug

SEQ ID NO: 14625 - RNA, 20 nt, Artificial Sequence
  Synthetic
ugcacacggaccggcagaug

SEQ ID NO: 14626 - RNA, 20 nt, Artificial Sequence
  Synthetic
  misc_feature (8)..(8): n is a, c, g, or u
  misc_feature (11)..(11): n is a, c, g, or u
aagcccangangaugggaug

SEQ ID NO: 14627 - RNA, 20 nt, Artificial Sequence
  Synthetic
  misc_feature (13)..(13): n is a, c, g, or u
  misc_feature (16)..(16): n is a, c, g, or u
ugcgaaagcccangangaug

SEQ ID NO: 14628 - RNA, 20 nt, Artificial Sequence
  Synthetic
ggguccuaggaauccugaug

SEQ ID NO: 14629 - RNA, 20 nt, Artificial Sequence
  Synthetic
accuugggcaggaucugaug

SEQ ID NO: 14630 - RNA, 20 nt, Artificial Sequence
  Synthetic
gaggccuacuucaaagacug

SEQ ID NO: 14631 - RNA, 20 nt, Artificial Sequence
  Synthetic
ugauuggagguuggggacug

SEQ ID NO: 14632 - RNA, 20 nt, Artificial Sequence
  Synthetic
  misc_feature (3)..(3): n is a, c, g, or u
uunaugacucuagcuaccug

SEQ ID NO: 14633 - RNA, 20 nt, Artificial Sequence
  Synthetic
  misc_feature (2)..(2): n is a, c, g, or u
gncaauaugcccugagccug

SEQ ID NO: 14634 - RNA, 20 nt, Artificial Sequence
  Synthetic
agcagagaauggcuugccug

SEQ ID NO: 14635 - RNA, 20 nt, Artificial Sequence
  Synthetic
aggcaagccauucucugcug

SEQ ID NO: 14636 - RNA, 20 nt, Artificial Sequence
  Synthetic
  misc_feature (8)..(8): n is a, c, g, or u
aauacagnccccugacucug

SEQ ID NO: 14637 - RNA, 20 nt, Artificial Sequence
  Synthetic
  misc_feature (14)..(14): n is a, c, g, or u
uuucuguucccaanccucug

SEQ ID NO: 14638 - RNA, 20 nt, Artificial Sequence
  Synthetic
cccgagauugagaucuucug

SEQ ID NO: 14639 - RNA, 20 nt, Artificial Sequence
  Synthetic
  misc_feature (3)..(3): n is a, c, g, or u
uancugaaagccaaacagug

SEQ ID NO: 14640 - RNA, 20 nt, Artificial Sequence
  Synthetic
  misc_feature (2)..(2): n is a, c, g, or u
ungccaagccccagccagug

SEQ ID NO: 14641 - RNA, 20 nt, Artificial Sequence
  Synthetic
gucuauaggcuggaggagug

SEQ ID NO: 14642 - RNA, 20 nt, Artificial Sequence
  Synthetic
  misc_feature (16)..(16): n is a, c, g, or u
gcuuggaggcuugaanagug

SEQ ID NO: 14643 - RNA, 20 nt, Artificial Sequence
  Synthetic
uuccuuggacucauaaggug

SEQ ID NO: 14644 - RNA, 20 nt, Artificial Sequence
  Synthetic
uggaggacaggagguuggug

SEQ ID NO: 14645 - RNA, 20 nt, Artificial Sequence
  Synthetic
  misc_feature (5)..(5): n is a, c, g, or u
  misc_feature (18)..(18): n is a, c, g, or u
uuaangacugggaggagnug

SEQ ID NO: 14646 - RNA, 20 nt, Artificial Sequence
  Synthetic
uccaaggaauacuaacauug

SEQ ID NO: 14647 - RNA, 20 nt, Artificial Sequence
  Synthetic
  misc_feature (3)..(3): n is a, c, g, or u
aanucaaacaauccagauug

SEQ ID NO: 14648 - RNA, 20 nt, Artificial Sequence
  Synthetic
cauugagauucccgagauug

SEQ ID NO: 14649 - RNA, 20 nt, Artificial Sequence
  Synthetic
cuucugcgacgcggcgauug

SEQ ID NO: 14650 - RNA, 20 nt, Artificial Sequence
  Synthetic
  misc_feature (16)..(16): n is a, c, g, or u
gaaaguaugucaaagnauug

SEQ ID NO: 14651 - RNA, 20 nt, Artificial Sequence
  Synthetic
auauggaugaugugguauug

SEQ ID NO: 14652 - RNA, 20 nt, Artificial Sequence
  Synthetic
  misc_feature (8)..(8): n is a, c, g, or u
accccucncggggccgcuug

SEQ ID NO: 14653 - RNA, 20 nt, Artificial Sequence
  Synthetic
ugcgggucaccauauucuug

SEQ ID NO: 14654 - RNA, 20 nt, Artificial Sequence
  Synthetic
  misc_feature (17)..(17): n is a, c, g, or u
gaaagaaucccagaggnuug

SEQ ID NO: 14655 - RNA, 20 nt, Artificial Sequence
  Synthetic
  misc_feature (12)..(12): n is a, c, g, or u
acacguagcgcnucauuuug

SEQ ID NO: 14656 - RNA, 20 nt, Artificial Sequence
  Synthetic
ccacucccauagguauuuug

SEQ ID NO: 14657 - RNA, 20 nt, Artificial Sequence
  Synthetic
  misc_feature (20)..(20): n is a, c, g, or u
cucucacuguaaaugaaaan

SEQ ID NO: 14658 - RNA, 20 nt, Artificial Sequence
  Synthetic
  misc_feature (20)..(20): n is a, c, g, or u
uaaacccuaacaaaacaaan

SEQ ID NO: 14659 - RNA, 20 nt, Artificial Sequence
  Synthetic
  misc_feature (20)..(20): n is a, c, g, or u
cacagcuuggaggcuugaan

SEQ ID NO: 14660 - RNA, 20 nt, Artificial Sequence
  Synthetic
  misc_feature (20)..(20): n is a, c, g, or u
ggguuuaaauguauacccan

SEQ ID NO: 14661 - RNA, 20 nt, Artificial Sequence
  Synthetic
  misc_feature (2)..(2): n is a, c, g, or u
  misc_feature (20)..(20): n is a, c, g, or u
gnaaguaaugauuaacuacn

SEQ ID NO: 14662 - RNA, 20 nt, Artificial Sequence
  Synthetic
  misc_feature (6)..(6): n is a, c, g, or u
  misc_feature (20)..(20): n is a, c, g, or u
auuugnaagauccagcaucn

SEQ ID NO: 14663 - RNA, 20 nt, Artificial Sequence
  Synthetic
  misc_feature (2)..(2): n is a, c, g, or u
  misc_feature (20)..(20): n is a, c, g, or u
unuuuuguacaauaugaucn

SEQ ID NO: 14664 - RNA, 20 nt, Artificial Sequence
  Synthetic
  misc_feature (14)..(14): n is a, c, g, or u
  misc_feature (20)..(20): n is a, c, g, or u
aaugauuaacuacnugaucn

SEQ ID NO: 14665 - RNA, 20 nt, Artificial Sequence
  Synthetic
  misc_feature (20)..(20): n is a, c, g, or u
aucccgcggacgaccccucn

SEQ ID NO: 14666 - RNA, 20 nt, Artificial Sequence
  Synthetic
  misc_feature (17)..(17): n is a, c, g, or u
  misc_feature (20)..(20): n is a, c, g, or u
guauucccaucccaucnucn

SEQ ID NO: 14667 - RNA, 20 nt, Artificial Sequence
  Synthetic
  misc_feature (20)..(20): n is a, c, g, or u
caggagacucuaaggcuucn

SEQ ID NO: 14668 - RNA, 20 nt, Artificial Sequence
  Synthetic
  misc_feature (7)..(7): n is a, c, g, or u
  misc_feature (20)..(20): n is a, c, g, or u
guuuaangacugggaggagn

SEQ ID NO: 14669 - RNA, 20 nt, Artificial Sequence
  Synthetic
  misc_feature (11)..(11): n is a, c, g, or u
  misc_feature (14)..(14): n is a, c, g, or u
  misc_feature (17)..(17): n is a, c, g, or u
  misc_feature (20)..(20): n is a, c, g, or u
gagcugaggcngunucnagn

SEQ ID NO: 14670 - RNA, 20 nt, Artificial Sequence
  Synthetic
  misc_feature (20)..(20): n is a, c, g, or u
cucccucgccucgcagacgn

SEQ ID NO: 14671 - RNA, 20 nt, Artificial Sequence
  Synthetic
  misc_feature (18)..(18): n is a, c, g, or u
  misc_feature (20)..(20): n is a, c, g, or u
gaggacuggggacccugngn

SEQ ID NO: 14672 - RNA, 20 nt, Artificial Sequence
  Synthetic
  misc_feature (11)..(11): n is a, c, g, or u
  misc_feature (20)..(20): n is a, c, g, or u
ugagagggccnacaaauugn

SEQ ID NO: 14673 - RNA, 20 nt, Artificial Sequence
  Synthetic
  misc_feature (20)..(20): n is a, c, g, or u
uaccaauuuucuuuugucun

SEQ ID NO: 14674 - RNA, 20 nt, Artificial Sequence
  Synthetic
  misc_feature (20)..(20): n is a, c, g, or u
agaugugagaggcaauauun

SEQ ID NO: 14675 - RNA, 20 nt, Artificial Sequence
  Synthetic
cauguuaguauuaacauaau

SEQ ID NO: 14676 - RNA, 20 nt, Artificial Sequence
  Synthetic
  misc_feature (5)..(5): n is a, c, g, or u
  misc_feature (11)..(11): n is a, c, g, or u
  misc_feature (14)..(14): n is a, c, g, or u
uuaangcaggnuanccacau

SEQ ID NO: 14677 - RNA, 20 nt, Artificial Sequence
  Synthetic
uggcuuuggggcauggacau

SEQ ID NO: 14678 - RNA, 20 nt, Artificial Sequence
  Synthetic
  misc_feature (8)..(8): n is a, c, g, or u
caguacanccuagcagccau

SEQ ID NO: 14679 - RNA, 20 nt, Artificial Sequence
  Synthetic
ucaaaaccucgcaaaggcau

SEQ ID NO: 14680 - RNA, 20 nt, Artificial Sequence
  Synthetic
  misc_feature (6)..(6): n is a, c, g, or u
cuuggnuggcuuuggggcau

SEQ ID NO: 14681 - RNA, 20 nt, Artificial Sequence
  Synthetic
uccggaaguguugauaagau

SEQ ID NO: 14682 - RNA, 20 nt, Artificial Sequence
  Synthetic
  misc_feature (5)..(5): n is a, c, g, or u
ccaanucaaacaauccagau

SEQ ID NO: 14683 - RNA, 20 nt, Artificial Sequence
  Synthetic
  misc_feature (14)..(14): n is a, c, g, or u
uccccaguccucgnggagau

SEQ ID NO: 14684 - RNA, 20 nt, Artificial Sequence
  Synthetic
  misc_feature (16)..(16): n is a, c, g, or u
cccuaacaaaacaaanagau

SEQ ID NO: 14685 - RNA, 20 nt, Artificial Sequence
  Synthetic
gcuguacaaaaccuacggau

SEQ ID NO: 14686 - RNA, 20 nt, Artificial Sequence
  Synthetic
ugcaggguccaacugaugau

SEQ ID NO: 14687 - RNA, 20 nt, Artificial Sequence
  Synthetic
  misc_feature (1)..(2): n is a, c, g, or u
nnuggccagugguccuugau

SEQ ID NO: 14688 - RNA, 20 nt, Artificial Sequence
  Synthetic
  misc_feature (18)..(18): n is a, c, g, or u
uggaaaguaugucaaagnau

SEQ ID NO: 14689 - RNA, 20 nt, Artificial Sequence
  Synthetic
gcucuuguucccaagaauau

SEQ ID NO: 14690 - RNA, 20 nt, Artificial Sequence
  Synthetic
  misc_feature (15)..(15): n is a, c, g, or u
uguuuggcuuucagnuauau

SEQ ID NO: 14691 - RNA, 20 nt, Artificial Sequence
  Synthetic
  misc_feature (5)..(5): n is a, c, g, or u
gugunguuucccucuuauau

SEQ ID NO: 14692 - RNA, 20 nt, Artificial Sequence
  Synthetic
  misc_feature (1)..(2): n is a, c, g, or u
  misc_feature (7)..(7): n is a, c, g, or u
  misc_feature (10)..(10): n is a, c, g, or u
nnuaaanaunaggcaacuau

SEQ ID NO: 14693 - RNA, 20 nt, Artificial Sequence
  Synthetic
uucgcacuccuccagccuau

SEQ ID NO: 14694 - RNA, 20 nt, Artificial Sequence
  Synthetic
  misc_feature (9)..(9): n is a, c, g, or u
  misc_feature (12)..(13): n is a, c, g, or u
  misc_feature (15)..(15): n is a, c, g, or u
cuuccugunaanngnccuau

SEQ ID NO: 14695 - RNA, 20 nt, Artificial Sequence
  Synthetic
ggcuaggaguuccgcaguau

SEQ ID NO: 14696 - RNA, 20 nt, Artificial Sequence
  Synthetic
gagucuagacucugcgguau

SEQ ID NO: 14697 - RNA, 20 nt, Artificial Sequence
  Synthetic
  misc_feature (1)..(1): n is a, c, g, or u
nuauauggaugaugugguau

SEQ ID NO: 14698 - RNA, 20 nt, Artificial Sequence
  Synthetic
  misc_feature (16)..(16): n is a, c, g, or u
ggcuugccugagugcnguau

SEQ ID NO: 14699 - RNA, 20 nt, Artificial Sequence
  Synthetic
  misc_feature (7)..(7): n is a, c, g, or u
gcuaggnuguacugccaacu

SEQ ID NO: 14700 - RNA, 20 nt, Artificial Sequence
  Synthetic
aauaccgcagagucuagacu

SEQ ID NO: 14701 - RNA, 20 nt, Artificial Sequence
  Synthetic
  misc_feature (12)..(12): n is a, c, g, or u
cgucaaucuccncgaggacu

SEQ ID NO: 14702 - RNA, 20 nt, Artificial Sequence
  Synthetic
uauuaacauaauugacuacu

SEQ ID NO: 14703 - RNA, 20 nt, Artificial Sequence
  Synthetic
  misc_feature (6)..(6): n is a, c, g, or u
uucucnuggcucaguuuacu

SEQ ID NO: 14704 - RNA, 20 nt, Artificial Sequence
  Synthetic
aguccucuuauguaagaccu

SEQ ID NO: 14705 - RNA, 20 nt, Artificial Sequence
  Synthetic
gacaaacgggcaacauaccu

SEQ ID NO: 14706 - RNA, 20 nt, Artificial Sequence
  Synthetic
  misc_feature (13)..(13): n is a, c, g, or u
gacacacgggugnucccccu

SEQ ID NO: 14707 - RNA, 20 nt, Artificial Sequence
  Synthetic
  misc_feature (2)..(2): n is a, c, g, or u
gngaccgaggcagguccccu

SEQ ID NO: 14708 - RNA, 20 nt, Artificial Sequence
  Synthetic
uaauugacuacuagaucccu

SEQ ID NO: 14709 - RNA, 20 nt, Artificial Sequence
  Synthetic
  misc_feature (14)..(14): n is a, c, g, or u
uacugguuguugungauccu

SEQ ID NO: 14710 - RNA, 20 nt, Artificial Sequence
  Synthetic
  misc_feature (5)..(6): n is a, c, g, or u
ggcunnuggccagugguccu

SEQ ID NO: 14711 - RNA, 20 nt, Artificial Sequence
  Synthetic
  misc_feature (10)..(10): n is a, c, g, or u
cgaccccucncggggccgcu

SEQ ID NO: 14712 - RNA, 20 nt, Artificial Sequence
  Synthetic
aauuuguccugguuaucgcu

SEQ ID NO: 14713 - RNA, 20 nt, Artificial Sequence
  Synthetic
caaggcacagcuuggaggcu

SEQ ID NO: 14714 - RNA, 20 nt, Artificial Sequence
  Synthetic
ugacgcaacccccacuggcu

SEQ ID NO: 14715 - RNA, 20 nt, Artificial Sequence
  Synthetic
  misc_feature (14)..(14): n is a, c, g, or u
cuacuagaucccungaugcu

SEQ ID NO: 14716 - RNA, 20 nt, Artificial Sequence
  Synthetic
ggauuccuaggaccccugcu

SEQ ID NO: 14717 - RNA, 20 nt, Artificial Sequence
  Synthetic
  misc_feature (2)..(2): n is a, c, g, or u
unaaauuaauuaugccugcu

SEQ ID NO: 14718 - RNA, 20 nt, Artificial Sequence
  Synthetic
  misc_feature (5)..(5): n is a, c, g, or u
ggggncuguauuuuccugcu

SEQ ID NO: 14719 - RNA, 20 nt, Artificial Sequence
  Synthetic
caggcaagccauucucugcu

SEQ ID NO: 14720 - RNA, 20 nt, Artificial Sequence
  Synthetic
  misc_feature (10)..(10): n is a, c, g, or u
  misc_feature (12)..(12): n is a, c, g, or u
  misc_feature (18)..(18): n is a, c, g, or u
ccuuccgucngngaucuncu

SEQ ID NO: 14721 - RNA, 20 nt, Artificial Sequence
  Synthetic
  misc_feature (12)..(12): n is a, c, g, or u
  misc_feature (18)..(18): n is a, c, g, or u
uuuggaagaganacuguncu

SEQ ID NO: 14722 - RNA, 20 nt, Artificial Sequence
  Synthetic
ugggguugaagucccaaucu

SEQ ID NO: 14723 - RNA, 20 nt, Artificial Sequence
  Synthetic
gucgcagaagaucucaaucu

SEQ ID NO: 14724 - RNA, 20 nt, Artificial Sequence
  Synthetic
cucacaauaccgcagagucu

SEQ ID NO: 14725 - RNA, 20 nt, Artificial Sequence
  Synthetic
gagaaguccaccacgagucu

SEQ ID NO: 14726 - RNA, 20 nt, Artificial Sequence
  Synthetic
uuugcgggucaccauauucu

SEQ ID NO: 14727 - RNA, 20 nt, Artificial Sequence
  Synthetic
ggcgagggaguucuucuucu

SEQ ID NO: 14728 - RNA, 20 nt, Artificial Sequence
  Synthetic
aucuucuuauugguucuucu

SEQ ID NO: 14729 - RNA, 20 nt, Artificial Sequence
  Synthetic
uggacuucucucaauuuucu

SEQ ID NO: 14730 - RNA, 20 nt, Artificial Sequence
  Synthetic
  misc_feature (5)..(5): n is a, c, g, or u
  misc_feature (8)..(9): n is a, c, g, or u
ugggnuannuaauuggaagu

SEQ ID NO: 14731 - RNA, 20 nt, Artificial Sequence
  Synthetic
  misc_feature (4)..(4): n is a, c, g, or u
auancugaaagccaaacagu

SEQ ID NO: 14732 - RNA, 20 nt, Artificial Sequence
  Synthetic
  misc_feature (3)..(3): n is a, c, g, or u
aungccaagccccagccagu

SEQ ID NO: 14733 - RNA, 20 nt, Artificial Sequence
  Synthetic
ucauccucaggccaugcagu

SEQ ID NO: 14734 - RNA, 20 nt, Artificial Sequence
  Synthetic
gaguugccuugagcaggagu

SEQ ID NO: 14735 - RNA, 20 nt, Artificial Sequence
  Synthetic
  misc_feature (14)..(14): n is a, c, g, or u
auaagagggaaacnacacgu

SEQ ID NO: 14736 - RNA, 20 nt, Artificial Sequence
  Synthetic
  misc_feature (2)..(2): n is a, c, g, or u
unggccaucagcgcaugcgu

SEQ ID NO: 14737 - RNA, 20 nt, Artificial Sequence
  Synthetic
accgcagagucuagacucgu

SEQ ID NO: 14738 - RNA, 20 nt, Artificial Sequence
  Synthetic
uaggccucaaggucggucgu

SEQ ID NO: 14739 - RNA, 20 nt, Artificial Sequence
  Synthetic
ccauuuguucagugguucgu

SEQ ID NO: 14740 - RNA, 20 nt, Artificial Sequence
  Synthetic
guuggugagugauuggaggu

SEQ ID NO: 14741 - RNA, 20 nt, Artificial Sequence
  Synthetic
aagccccagccagugggggu

SEQ ID NO: 14742 - RNA, 20 nt, Artificial Sequence
  Synthetic
ccagugguccuugauggggu

SEQ ID NO: 14743 - RNA, 20 nt, Artificial Sequence
  Synthetic
gcagagucuagacucguggu

SEQ ID NO: 14744 - RNA, 20 nt, Artificial Sequence
  Synthetic
  misc_feature (7)..(7): n is a, c, g, or u
gggaucnugcagagcuuggu

SEQ ID NO: 14745 - RNA, 20 nt, Artificial Sequence
  Synthetic
  misc_feature (15)..(15): n is a, c, g, or u
  misc_feature (18)..(18): n is a, c, g, or u
ggauuaaagauaggnacngu

SEQ ID NO: 14746 - RNA, 20 nt, Artificial Sequence
  Synthetic
  misc_feature (15)..(15): n is a, c, g, or u
  misc_feature (18)..(18): n is a, c, g, or u
agagcuugguggaangcngu

SEQ ID NO: 14747 - RNA, 20 nt, Artificial Sequence
  Synthetic
acaguaguuuccggaagugu

SEQ ID NO: 14748 - RNA, 20 nt, Artificial Sequence
  Synthetic
uuuggucucuuucggagugu

SEQ ID NO: 14749 - RNA, 20 nt, Artificial Sequence
  Synthetic
acaggcgggguuuuucuugu

SEQ ID NO: 14750 - RNA, 20 nt, Artificial Sequence
  Synthetic
ggucccguacugguuguugu

SEQ ID NO: 14751 - RNA, 20 nt, Artificial Sequence
  Synthetic
  misc_feature (6)..(6): n is a, c, g, or u
  misc_feature (19)..(19): n is a, c, g, or u
uuuaangacugggaggagnu

SEQ ID NO: 14752 - RNA, 20 nt, Artificial Sequence
  Synthetic
  misc_feature (19)..(19): n is a, c, g, or u
gggaaagaaucccagaggnu

SEQ ID NO: 14753 - RNA, 20 nt, Artificial Sequence
  Synthetic
  misc_feature (16)..(16): n is a, c, g, or u
  misc_feature (19)..(19): n is a, c, g, or u
ugaaaaaguugcaugnugnu

SEQ ID NO: 14754 - RNA, 20 nt, Artificial Sequence
  Synthetic
  misc_feature (1)..(2): n is a, c, g, or u
  misc_feature (15)..(15): n is a, c, g, or u
  misc_feature (18)..(19): n is a, c, g, or u
nncacuaaauauuunccnnu

SEQ ID NO: 14755 - RNA, 20 nt, Artificial Sequence
  Synthetic
  misc_feature (2)..(2): n is a, c, g, or u
  misc_feature (11)..(11): n is a, c, g, or u
  misc_feature (14)..(15): n is a, c, g, or u
anuucaugggnuannuaauu

SEQ ID NO: 14756 - RNA, 20 nt, Artificial Sequence
  Synthetic
cagguaggagugggagcauu

SEQ ID NO: 14757 - RNA, 20 nt, Artificial Sequence
  Synthetic
ugccuuccugacugccgauu

SEQ ID NO: 14758 - RNA, 20 nt, Artificial Sequence
  Synthetic
  misc_feature (4)..(4): n is a, c, g, or u
  misc_feature (7)..(8): n is a, c, g, or u
  misc_feature (10)..(10): n is a, c, g, or u
ugunaanngnccuauugauu

SEQ ID NO: 14759 - RNA, 20 nt, Artificial Sequence
  Synthetic
uauauggaugaugugguauu

SEQ ID NO: 14760 - RNA, 20 nt, Artificial Sequence
  Synthetic
  misc_feature (8)..(8): n is a, c, g, or u
gguucaunuacuguuuacuu

SEQ ID NO: 14761 - RNA, 20 nt, Artificial Sequence
  Synthetic
cagcgcaugcguggaaccuu

SEQ ID NO: 14762 - RNA, 20 nt, Artificial Sequence
  Synthetic
aagauucguccccaugccuu

SEQ ID NO: 14763 - RNA, 20 nt, Artificial Sequence
  Synthetic
ucucaauguuaguauuccuu

SEQ ID NO: 14764 - RNA, 20 nt, Artificial Sequence
  Synthetic
  misc_feature (10)..(10): n is a, c, g, or u
ucugggaucnugcagagcuu

SEQ ID NO: 14765 - RNA, 20 nt, Artificial Sequence
  Synthetic
  misc_feature (14)..(14): n is a, c, g, or u
agcugugccuuggnuggcuu

SEQ ID NO: 14766 - RNA, 20 nt, Artificial Sequence
  Synthetic
  misc_feature (17)..(17): n is a, c, g, or u
ccaaaagacccacaauncuu

SEQ ID NO: 14767 - RNA, 20 nt, Artificial Sequence
  Synthetic
  misc_feature (17)..(17): n is a, c, g, or u
guacugccaacuggauncuu

SEQ ID NO: 14768 - RNA, 20 nt, Artificial Sequence
  Synthetic
ucuuacauaagaggacucuu

SEQ ID NO: 14769 - RNA, 20 nt, Artificial Sequence
  Synthetic
  misc_feature (4)..(4): n is a, c, g, or u
gucnuuaaacacacagucuu

SEQ ID NO: 14770 - RNA, 20 nt, Artificial Sequence
  Synthetic
  misc_feature (4)..(4): n is a, c, g, or u
  misc_feature (7)..(8): n is a, c, g, or u
gggnuannuaauuggaaguu

SEQ ID NO: 14771 - RNA, 20 nt, Artificial Sequence
  Synthetic
uuagaaaggccuuguaaguu

SEQ ID NO: 14772 - RNA, 20 nt, Artificial Sequence
  Synthetic
uucuuucccgaucaucaguu

SEQ ID NO: 14773 - RNA, 20 nt, Artificial Sequence
  Synthetic
aaauuggaggacaggagguu

SEQ ID NO: 14774 - RNA, 20 nt, Artificial Sequence
  Synthetic
uuggugagugauuggagguu

SEQ ID NO: 14775 - RNA, 20 nt, Artificial Sequence
  Synthetic
aaguuuucuaaaacaguguu

SEQ ID NO: 14776 - RNA, 20 nt, Artificial Sequence
  Synthetic
aagucccaaucuggauuguu

SEQ ID NO: 14777 - RNA, 20 nt, Artificial Sequence
  Synthetic
uuccggaaacuacuguuguu

SEQ ID NO: 14778 - RNA, 20 nt, Artificial Sequence
  Synthetic
  misc_feature (9)..(9): n is a, c, g, or u
ccccaucunuuuguuuuguu

SEQ ID NO: 14779 - RNA, 20 nt, Artificial Sequence
  Synthetic
uugauaagauaggggcauuu

SEQ ID NO: 14780 - RNA, 20 nt, Artificial Sequence
  Synthetic
  misc_feature (2)..(2): n is a, c, g, or u
  misc_feature (14)..(14): n is a, c, g, or u
cnacacguagcgcnucauuu

SEQ ID NO: 14781 - RNA, 20 nt, Artificial Sequence
  Synthetic
  misc_feature (8)..(9): n is a, c, g, or u
  misc_feature (12)..(12): n is a, c, g, or u
uugucuannggnaaauauuu

SEQ ID NO: 14782 - RNA, 20 nt, Artificial Sequence
  Synthetic
gcccacucccauagguauuu

SEQ ID NO: 14783 - RNA, 20 nt, Artificial Sequence
  Synthetic
  misc_feature (13)..(13): n is a, c, g, or u
gcugugccuuggnuggcuuu

SEQ ID NO: 14784 - RNA, 20 nt, Artificial Sequence
  Synthetic
acauuauuuacauacucuuu

SEQ ID NO: 14785 - RNA, 20 nt, Artificial Sequence
  Synthetic
  misc_feature (7)..(7): n is a, c, g, or u
ucaaagnauugugggucuuu

SEQ ID NO: 14786 - RNA, 20 nt, Artificial Sequence
  Synthetic
cccaugccuuugcgagguuu

SEQ ID NO: 14787 - RNA, 20 nt, Artificial Sequence
  Synthetic
  misc_feature (4)..(5): n is a, c, g, or u
  misc_feature (8)..(8): n is a, c, g, or u
  misc_feature (17)..(17): n is a, c, g, or u
uuannuancccaugaanuuu

SEQ ID NO: 14788 - RNA, 20 nt, Artificial Sequence
  Synthetic
  misc_feature (1)..(1): n is a, c, g, or u
  misc_feature (4)..(4): n is a, c, g, or u
  misc_feature (13)..(13): n is a, c, g, or u
  misc_feature (17)..(17): n is a, c, g, or u
nccnccacacggnggunuuu

SEQ ID NO: 14789 - RNA, 20 nt, Artificial Sequence
  Synthetic
  misc_feature (5)..(5): n is a, c, g, or u
auaunucuugccuuacuuuu

SEQ ID NO: 14790 - RNA, 20 nt, Artificial Sequence
  Synthetic
  misc_feature (5)..(5): n is a, c, g, or u
aaaanaucaaacacuguuuu

SEQ ID NO: 14791 - RNA, 20 nt, Artificial Sequence
  Synthetic
  misc_feature (3)..(3): n is a, c, g, or u
  misc_feature (12)..(12): n is a, c, g, or u
  misc_feature (16)..(16): n is a, c, g, or u
ccnccacacggnggunuuuu

SEQ ID NO: 14792 - RNA, 17 nt, Artificial Sequence
  Synthetic
ggugacccgcaaaauga

SEQ ID NO: 14793 - RNA, 17 nt, Artificial Sequence
  Synthetic
gggcgcaccucucuuua

SEQ ID NO: 14794 - RNA, 17 nt, Artificial Sequence
  Synthetic
gauuggagguuggggac

SEQ ID NO: 14795 - RNA, 17 nt, Artificial Sequence
  Synthetic
guaaacaaaggacgucc

SEQ ID NO: 14796 - RNA, 17 nt, Artificial Sequence
  Synthetic
gagaucuucugcgacgc

SEQ ID NO: 14797 - RNA, 17 nt, Artificial Sequence
  Synthetic
ggucguccgcgggauuc

SEQ ID NO: 14798 - RNA, 17 nt, Artificial Sequence
  Synthetic
gaccgcguaaagagagg

SEQ ID NO: 14799 - RNA, 17 nt, Artificial Sequence
  Synthetic
gaaaggccuuguaaguu

SEQ ID NO: 14800 - RNA, 20 nt, Artificial Sequence
  Synthetic
gaccggcugcgagcaaaaca

SEQ ID NO: 14801 - RNA, 20 nt, Artificial Sequence
  Synthetic
ggaccccugcucguguuaca

SEQ ID NO: 14802 - RNA, 20 nt, Artificial Sequence
  Synthetic
gagauugagaucuucugcga

SEQ ID NO: 14803 - RNA, 20 nt, Artificial Sequence
  Synthetic
gaaggcacagacggggagac

SEQ ID NO: 14804 - RNA, 20 nt, Artificial Sequence
  Synthetic
gcuccucugccgauccauac

SEQ ID NO: 14805 - RNA, 20 nt, Artificial Sequence
  Synthetic
gucccgucggcgcugaaucc

SEQ ID NO: 14806 - RNA, 20 nt, Artificial Sequence
  Synthetic
gacguaaacaaaggacgucc

SEQ ID NO: 14807 - RNA, 20 nt, Artificial Sequence
  Synthetic
  misc_feature (11)..(11): n is a, c, g, or u
gcuguaggcanaaauugguc

SEQ ID NO: 14808 - RNA, 20 nt, Artificial Sequence
  Synthetic
ggagaccgcguaaagagagg

SEQ ID NO: 14809 - RNA, 20 nt, Artificial Sequence
  Synthetic
  misc_feature (17)..(17): n is a, c, g, or u
guacugccaacuggauncuu

SEQ ID NO: 14810 - RNA, 17 nt, Artificial Sequence
  Synthetic
cggcugcgagcaaaaca

SEQ ID NO: 14811 - RNA, 17 nt, Artificial Sequence
  Synthetic
ccccugcucguguuaca

SEQ ID NO: 14812 - RNA, 17 nt, Artificial Sequence
  Synthetic
cacaaagguuccacgca

SEQ ID NO: 14813 - RNA, 17 nt, Artificial Sequence
  Synthetic
auugagaucuucugcga

SEQ ID NO: 14814 - RNA, 17 nt, Artificial Sequence
  Synthetic
ccucugccgauccauac

SEQ ID NO: 14815 - RNA, 17 nt, Artificial Sequence
  Synthetic
ccgucggcgcugaaucc

SEQ ID NO: 14816 - RNA, 17 nt, Artificial Sequence
  Synthetic
  misc_feature (4)..(4): n is a, c, g, or u
acgnagaucucaaucgc

SEQ ID NO: 14817 - RNA, 17 nt, Artificial Sequence
  Synthetic
accacgagucuagacuc

SEQ ID NO: 14818 - RNA, 17 nt, Artificial Sequence
  Synthetic
uuuguuuacgucccguc

SEQ ID NO: 14819 - RNA, 17 nt, Artificial Sequence
  Synthetic
  misc_feature (13)..(13): n is a, c, g, or u
cgauugagaucuncguc

SEQ ID NO: 14820 - RNA, 17 nt, Artificial Sequence
  Synthetic
  misc_feature (6)..(6): n is a, c, g, or u
ccccgngaggggucguc

SEQ ID NO: 14821 - RNA, 17 nt, Artificial Sequence
  Synthetic
uuaucgcuggauguguc

SEQ ID NO: 14822 - RNA, 17 nt, Artificial Sequence
  Synthetic
ccgagauugagaucuuc

SEQ ID NO: 14823 - RNA, 17 nt, Artificial Sequence
  Synthetic
uugggcaggaucugaug

SEQ ID NO: 14824 - RNA, 17 nt, Artificial Sequence
  Synthetic
auucguccccaugccuu

SEQ ID NO: 14825 - RNA, 17 nt, Artificial Sequence
  Synthetic
  misc_feature (11)..(11): n is a, c, g, or u
cacguagcgcnucauuu

SEQ ID NO: 14826 - RNA, 20 nt, Artificial Sequence
  Synthetic
agccacaaagguuccacgca

SEQ ID NO: 14827 - RNA, 20 nt, Artificial Sequence
  Synthetic
acggggcgcaccucucuuua

SEQ ID NO: 14828 - RNA, 20 nt, Artificial Sequence
  Synthetic
aaaacgccgcagacacaucc

SEQ ID NO: 14829 - RNA, 20 nt, Artificial Sequence
  Synthetic
auugagaucuucugcgacgc

SEQ ID NO: 14830 - RNA, 20 nt, Artificial Sequence
  Synthetic
  misc_feature (7)..(7): n is a, c, g, or u
cagacgnagaucucaaucgc

SEQ ID NO: 14831 - RNA, 20 nt, Artificial Sequence
  Synthetic
uuaucgcuggaugugucugc

SEQ ID NO: 14832 - RNA, 20 nt, Artificial Sequence
  Synthetic
uccaccacgagucuagacuc

SEQ ID NO: 14833 - RNA, 20 nt, Artificial Sequence
  Synthetic
uccuuuguuuacgucccguc

SEQ ID NO: 14834 - RNA, 20 nt, Artificial Sequence
  Synthetic
  misc_feature (16)..(16): n is a, c, g, or u
cggcgauugagaucuncguc

SEQ ID NO: 14835 - RNA, 20 nt, Artificial Sequence
  Synthetic
  misc_feature (9)..(9): n is a, c, g, or u
cggccccgngaggggucguc

SEQ ID NO: 14836 - RNA, 20 nt, Artificial Sequence
  Synthetic
ugguuaucgcuggauguguc

SEQ ID NO: 14837 - RNA, 20 nt, Artificial Sequence
  Synthetic
aggggucguccgcgggauuc

SEQ ID NO: 14838 - RNA, 20 nt, Artificial Sequence
  Synthetic
uucccgagauugagaucuuc

SEQ ID NO: 14839 - RNA, 20 nt, Artificial Sequence
  Synthetic
uggucuauaggcuggaggag

SEQ ID NO: 14840 - RNA, 20 nt, Artificial Sequence
  Synthetic
  misc_feature (14)..(14): n is a, c, g, or u
auaagagggaaacnacacgu

SEQ ID NO: 14841 - RNA, 20 nt, Artificial Sequence
  Synthetic
aagauucguccccaugccuu

SEQ ID NO: 14842 - RNA, 20 nt, Artificial Sequence
  Synthetic
uuagaaaggccuuguaaguu

SEQ ID NO: 14843 - RNA, 20 nt, Artificial Sequence
  Synthetic
  misc_feature (2)..(2): n is a, c, g, or u
  misc_feature (14)..(14): n is a, c, g, or u
cnacacguagcgcnucauuu

SEQ ID NO: 14844 - RNA, 17 nt, Artificial Sequence
  Synthetic
  misc_feature (8)..(8): n is a, c, g, or u
gggacganagaguccca

SEQ ID NO: 14845 - RNA, 17 nt, Artificial Sequence
  Synthetic
  misc_feature (8)..(8): n is a, c, g, or u
gagaucuncgucugcga

SEQ ID NO: 14846 - RNA, 17 nt, Artificial Sequence
  Synthetic
gcaacgugcagagguga

SEQ ID NO: 14847 - RNA, 17 nt, Artificial Sequence
  Synthetic
ggcacagacggggagac

SEQ ID NO: 14848 - RNA, 17 nt, Artificial Sequence
  Synthetic
  misc_feature (8)..(8): n is a, c, g, or u
guaggcanaaauugguc

SEQ ID NO: 14849 - RNA, 17 nt, Artificial Sequence
  Synthetic
  misc_feature (3)..(3): n is a, c, g, or u
  misc_feature (6)..(7): n is a, c, g, or u
gunccnnccgaccacgg

SEQ ID NO: 14850 - RNA, 20 nt, Artificial Sequence
  Synthetic
  misc_feature (4)..(4): n is a, c, g, or u
  misc_feature (7)..(7): n is a, c, g, or u
ggcnaunggccaucagcgca

SEQ ID NO: 14851 - RNA, 20 nt, Artificial Sequence
  Synthetic
gacaaaagaaaauugguaac

SEQ ID NO: 14852 - RNA, 20 nt, Artificial Sequence
  Synthetic
  misc_feature (4)..(4): n is a, c, g, or u
gagnuuugcuccagaccggc

SEQ ID NO: 14853 - RNA, 20 nt, Artificial Sequence
  Synthetic
  misc_feature (10)..(10): n is a, c, g, or u
  misc_feature (13)..(13): n is a, c, g, or u
gggcuuggcnaunggccauc

SEQ ID NO: 14854 - RNA, 20 nt, Artificial Sequence
  Synthetic
  misc_feature (6)..(6): n is a, c, g, or u
  misc_feature (9)..(10): n is a, c, g, or u
gccgunccnnccgaccacgg

SEQ ID NO: 14855 - RNA, 20 nt, Artificial Sequence
  Synthetic
gcccacucccauagguauuu

SEQ ID NO: 14856 - RNA, 17 nt, Artificial Sequence
  Synthetic
  misc_feature (1)..(1): n is a, c, g, or u
  misc_feature (4)..(4): n is a, c, g, or u
naunggccaucagcgca

SEQ ID NO: 14857 - RNA, 17 nt, Artificial Sequence
  Synthetic
aaaagaaaauugguaac

SEQ ID NO: 14858 - RNA, 17 nt, Artificial Sequence
  Synthetic
acgccgcagacacaucc

SEQ ID NO: 14859 - RNA, 17 nt, Artificial Sequence
  Synthetic
  misc_feature (1)..(1): n is a, c, g, or u
nuuugcuccagaccggc

SEQ ID NO: 14860 - RNA, 17 nt, Artificial Sequence
  Synthetic
ucgcuggaugugucugc

SEQ ID NO: 14861 - RNA, 17 nt, Artificial Sequence
  Synthetic
  misc_feature (7)..(7): n is a, c, g, or u
  misc_feature (10)..(10): n is a, c, g, or u
cuuggcnaunggccauc

SEQ ID NO: 14862 - RNA, 17 nt, Artificial Sequence
  Synthetic
ucuauaggcuggaggag

SEQ ID NO: 14863 - RNA, 17 nt, Artificial Sequence
  Synthetic
  misc_feature (11)..(11): n is a, c, g, or u
  misc_feature (14)..(14): n is a, c, g, or u
aaguugcaugnugnugg

SEQ ID NO: 14864 - RNA, 17 nt, Artificial Sequence
  Synthetic
  misc_feature (11)..(11): n is a, c, g, or u
agagggaaacnacacgu

SEQ ID NO: 14865 - RNA, 17 nt, Artificial Sequence
  Synthetic
ccccagccagugggggu

SEQ ID NO: 14866 - RNA, 17 nt, Artificial Sequence
  Synthetic
  misc_feature (14)..(14): n is a, c, g, or u
cugccaacuggauncuu

SEQ ID NO: 14867 - RNA, 17 nt, Artificial Sequence
  Synthetic
cacucccauagguauuu

SEQ ID NO: 14868 - RNA, 20 nt, Artificial Sequence
  Synthetic
  misc_feature (11)..(11): n is a, c, g, or u
aaggggacganagaguccca

SEQ ID NO: 14869 - RNA, 20 nt, Artificial Sequence
  Synthetic
  misc_feature (11)..(11): n is a, c, g, or u
auugagaucuncgucugcga

SEQ ID NO: 14870 - RNA, 20 nt, Artificial Sequence
  Synthetic
uauggugacccgcaaaauga

SEQ ID NO: 14871 - RNA, 20 nt, Artificial Sequence
  Synthetic
caugcaacgugcagagguga

SEQ ID NO: 14872 - RNA, 20 nt, Artificial Sequence
  Synthetic
agugauuggagguuggggac

SEQ ID NO: 14873 - RNA, 20 nt, Artificial Sequence
  Synthetic
  misc_feature (14)..(14): n is a, c, g, or u
  misc_feature (17)..(17): n is a, c, g, or u
aaaaaguugcaugnugnugg

SEQ ID NO: 14874 - RNA, 20 nt, Artificial Sequence
  Synthetic
accuugggcaggaucugaug

SEQ ID NO: 14875 - RNA, 20 nt, Artificial Sequence
  Synthetic
aagccccagccagugggggu

SEQ ID NO: 14876 - RNA, 17 nt, Artificial Sequence
  Synthetic
agaggaauaugauaaaa

SEQ ID NO: 14877 - RNA, 17 nt, Artificial Sequence
  Synthetic
guauacaugcauacaaa

SEQ ID NO: 14878 - RNA, 17 nt, Artificial Sequence
  Synthetic
gccuauagaccaccaaa

SEQ ID NO: 14879 - RNA, 17 nt, Artificial Sequence
  Synthetic
caucaaaaccucgcaaa

SEQ ID NO: 14880 - RNA, 17 nt, Artificial Sequence
  Synthetic
uacuguuuacuuagaaa

SEQ ID NO: 14881 - RNA, 17 nt, Artificial Sequence
  Synthetic
uucucgccaacuuacaa

SEQ ID NO: 14882 - RNA, 17 nt, Artificial Sequence
  Synthetic
caauguccaugccccaa

SEQ ID NO: 14883 - RNA, 17 nt, Artificial Sequence
  Synthetic
  misc_feature (13)..(13): n is a, c, g, or u
gccccaaagccanccaa

SEQ ID NO: 14884 - RNA, 17 nt, Artificial Sequence
  Synthetic
uauggugaggugagcaa

SEQ ID NO: 14885 - RNA, 17 nt, Artificial Sequence
  Synthetic
  misc_feature (13)..(13): n is a, c, g, or u
uguaaauggagcngcaa

SEQ ID NO: 14886 - RNA, 17 nt, Artificial Sequence
  Synthetic
gcacgacuccugcucaa

SEQ ID NO: 14887 - RNA, 17 nt, Artificial Sequence
  Synthetic
aaggaaagaagucagaa

SEQ ID NO: 14888 - RNA, 17 nt, Artificial Sequence
  Synthetic
ggaccggcagaugagaa

SEQ ID NO: 14889 - RNA, 17 nt, Artificial Sequence
  Synthetic
  misc_feature (5)..(5): n is a, c, g, or u
gugancccuggcccgaa

SEQ ID NO: 14890 - RNA, 17 nt, Artificial Sequence
  Synthetic
  misc_feature (6)..(6): n is a, c, g, or u
uuuganuuggcuccgaa

SEQ ID NO: 14891 - RNA, 17 nt, Artificial Sequence
  Synthetic
cauagguauuuugcgaa

SEQ ID NO: 14892 - RNA, 17 nt, Artificial Sequence
  Synthetic
caaucggcagucaggaa

SEQ ID NO: 14893 - RNA, 17 nt, Artificial Sequence
  Synthetic
gccaaacagugggggaa

SEQ ID NO: 14894 - RNA, 17 nt, Artificial Sequence
  Synthetic
ugcagagcuugguggaa

SEQ ID NO: 14895 - RNA, 17 nt, Artificial Sequence
  Synthetic
uuacauacucuuuggaa

SEQ ID NO: 14896 - RNA, 17 nt, Artificial Sequence
  Synthetic
  misc_feature (12)..(12): n is a, c, g, or u
ucauccauauancugaa

SEQ ID NO: 14897 - RNA, 17 nt, Artificial Sequence
  Synthetic
auggagaccaccgugaa

SEQ ID NO: 14898 - RNA, 17 nt, Artificial Sequence
  Synthetic
  misc_feature (15)..(15): n is a, c, g, or u
guuggcgagaaagunaa

SEQ ID NO: 14899 - RNA, 17 nt, Artificial Sequence
  Synthetic
  misc_feature (2)..(2): n is a, c, g, or u
  misc_feature (5)..(5): n is a, c, g, or u
  misc_feature (11)..(11): n is a, c, g, or u
gnacnguagangaauaa

SEQ ID NO: 14900 - RNA, 17 nt, Artificial Sequence
  Synthetic
ugcucaggagacucuaa

SEQ ID NO: 14901 - RNA, 17 nt, Artificial Sequence
  Synthetic
  misc_feature (1)..(1): n is a, c, g, or u
nucucuuccaaaaguaa

SEQ ID NO: 14902 - RNA, 17 nt, Artificial Sequence
  Synthetic
gcauacaaaggcauuaa

SEQ ID NO: 14903 - RNA, 17 nt, Artificial Sequence
  Synthetic
  misc_feature (4)..(4): n is a, c, g, or u
  misc_feature (7)..(7): n is a, c, g, or u
  misc_feature (13)..(13): n is a, c, g, or u
uggnuanccugcnuuaa

SEQ ID NO: 14904 - RNA, 17 nt, Artificial Sequence
  Synthetic
  misc_feature (12)..(12): n is a, c, g, or u
uguauacaagcnaaaca

SEQ ID NO: 14905 - RNA, 17 nt, Artificial Sequence
  Synthetic
uuguaugcauguauaca

SEQ ID NO: 14906 - RNA, 17 nt, Artificial Sequence
  Synthetic
  misc_feature (6)..(6): n is a, c, g, or u
uguuungcuuguauaca

SEQ ID NO: 14907 - RNA, 17 nt, Artificial Sequence
  Synthetic
  misc_feature (6)..(6): n is a, c, g, or u
  misc_feature (9)..(9): n is a, c, g, or u
uccacngcnuuccacca

SEQ ID NO: 14908 - RNA, 17 nt, Artificial Sequence
  Synthetic
acacuuggcacagacca

SEQ ID NO: 14909 - RNA, 17 nt, Artificial Sequence
  Synthetic
agaaagauucgucccca

SEQ ID NO: 14910 - RNA, 17 nt, Artificial Sequence
  Synthetic
cagucauccucaggcca

SEQ ID NO: 14911 - RNA, 17 nt, Artificial Sequence
  Synthetic
  misc_feature (10)..(10): n is a, c, g, or u
  misc_feature (13)..(13): n is a, c, g, or u
cugauggccnaungcca

SEQ ID NO: 14912 - RNA, 17 nt, Artificial Sequence
  Synthetic
  misc_feature (5)..(5): n is a, c, g, or u
cacunuucaagccucca

SEQ ID NO: 14913 - RNA, 17 nt, Artificial Sequence
  Synthetic
guucacgguggucucca

SEQ ID NO: 14914 - RNA, 17 nt, Artificial Sequence
  Synthetic
auaagggucaaugucca

SEQ ID NO: 14915 - RNA, 17 nt, Artificial Sequence
  Synthetic
gagccacaaagguucca

SEQ ID NO: 14916 - RNA, 17 nt, Artificial Sequence
  Synthetic
  misc_feature (8)..(8): n is a, c, g, or u
uaggauanaaucuagca

SEQ ID NO: 14917 - RNA, 17 nt, Artificial Sequence
  Synthetic
  misc_feature (6)..(6): n is a, c, g, or u
cauacngcacucaggca

SEQ ID NO: 14918 - RNA, 17 nt, Artificial Sequence
  Synthetic
  misc_feature (12)..(12): n is a, c, g, or u
  misc_feature (15)..(15): n is a, c, g, or u
ucugcgcaccancanca

SEQ ID NO: 14919 - RNA, 17 nt, Artificial Sequence
  Synthetic
  misc_feature (10)..(10): n is a, c, g, or u
ucaccauacngcacuca

SEQ ID NO: 14920 - RNA, 17 nt, Artificial Sequence
  Synthetic
uugggguggagcccuca

SEQ ID NO: 14921 - RNA, 17 nt, Artificial Sequence
  Synthetic
agagacagucauccuca

SEQ ID NO: 14922 - RNA, 17 nt, Artificial Sequence
  Synthetic
  misc_feature (1)..(1): n is a, c, g, or u
  misc_feature (13)..(13): n is a, c, g, or u
ncaugucccacunuuca

SEQ ID NO: 14923 - RNA, 17 nt, Artificial Sequence
  Synthetic
auugacgagaugugaga

SEQ ID NO: 14924 - RNA, 17 nt, Artificial Sequence
  Synthetic
  misc_feature (11)..(11): n is a, c, g, or u
uuagacgacgngaccga

SEQ ID NO: 14925 - RNA, 17 nt, Artificial Sequence
  Synthetic
  misc_feature (1)..(1): n is a, c, g, or u
  misc_feature (3)..(3): n is a, c, g, or u
ngnucuuuguauuagga

SEQ ID NO: 14926 - RNA, 17 nt, Artificial Sequence
  Synthetic
gacugccgauuggugga

SEQ ID NO: 14927 - RNA, 17 nt, Artificial Sequence
  Synthetic
ccaaggcacagcuugga

SEQ ID NO: 14928 - RNA, 17 nt, Artificial Sequence
  Synthetic
  misc_feature (15)..(15): n is a, c, g, or u
ucagcucuguaucgnga

SEQ ID NO: 14929 - RNA, 17 nt, Artificial Sequence
  Synthetic
  misc_feature (15)..(15): n is a, c, g, or u
acuacuagaucccunga

SEQ ID NO: 14930 - RNA, 17 nt, Artificial Sequence
  Synthetic
aaccaauaagaagauga

SEQ ID NO: 14931 - RNA, 17 nt, Artificial Sequence
  Synthetic
  misc_feature (3)..(3): n is a, c, g, or u
cangagaaacggacuga

SEQ ID NO: 14932 - RNA, 17 nt, Artificial Sequence
  Synthetic
  misc_feature (3)..(3): n is a, c, g, or u
ucncgauacagagcuga

SEQ ID NO: 14933 - RNA, 17 nt, Artificial Sequence
  Synthetic
ugccaaguguuugcuga

SEQ ID NO: 14934 - RNA, 17 nt, Artificial Sequence
  Synthetic
ucaacgaccgaccuuga

SEQ ID NO: 14935 - RNA, 17 nt, Artificial Sequence
  Synthetic
  misc_feature (7)..(8): n is a, c, g, or u
  misc_feature (13)..(13): n is a, c, g, or u
  misc_feature (16)..(16): n is a, c, g, or u
caugggnnuaaanauna

SEQ ID NO: 14936 - RNA, 17 nt, Artificial Sequence
  Synthetic
  misc_feature (3)..(3): n is a, c, g, or u
  misc_feature (10)..(10): n is a, c, g, or u
  misc_feature (12)..(12): n is a, c, g, or u
ugncacugungncaaua

SEQ ID NO: 14937 - RNA, 17 nt, Artificial Sequence
  Synthetic
gcauuugguggucuaua

SEQ ID NO: 14938 - RNA, 17 nt, Artificial Sequence
  Synthetic
ucuucauccugcugcua

SEQ ID NO: 14939 - RNA, 17 nt, Artificial Sequence
  Synthetic
acacagucuuugaagua

SEQ ID NO: 14940 - RNA, 17 nt, Artificial Sequence
  Synthetic
guggagagaugggagua

SEQ ID NO: 14941 - RNA, 17 nt, Artificial Sequence
  Synthetic
uguauuaggaggcugua

SEQ ID NO: 14942 - RNA, 17 nt, Artificial Sequence
  Synthetic
  misc_feature (3)..(3): n is a, c, g, or u
gcnuuaaugccuuugua

SEQ ID NO: 14943 - RNA, 17 nt, Artificial Sequence
  Synthetic
  misc_feature (7)..(7): n is a, c, g, or u
aagauunaaauuaauua

SEQ ID NO: 14944 - RNA, 17 nt, Artificial Sequence
  Synthetic
  misc_feature (3)..(3): n is a, c, g, or u
ugnacaagagaugauua

SEQ ID NO: 14945 - RNA, 17 nt, Artificial Sequence
  Synthetic
  misc_feature (10)..(10): n is a, c, g, or u
ccccguugcncggcaac

SEQ ID NO: 14946 - RNA, 17 nt, Artificial Sequence
  Synthetic
  misc_feature (8)..(8): n is a, c, g, or u
aaagccanccaaggcac

SEQ ID NO: 14947 - RNA, 17 nt, Artificial Sequence
  Synthetic
uaggcugccuuccugac

SEQ ID NO: 14948 - RNA, 17 nt, Artificial Sequence
  Synthetic
  misc_feature (1)..(1): n is a, c, g, or u
  misc_feature (3)..(3): n is a, c, g, or u
  misc_feature (9)..(9): n is a, c, g, or u
  misc_feature (12)..(12): n is a, c, g, or u
  misc_feature (15)..(15): n is a, c, g, or u
ngngaucuncunganac

SEQ ID NO: 14949 - RNA, 17 nt, Artificial Sequence
  Synthetic
  misc_feature (11)..(12): n is a, c, g, or u
  misc_feature (15)..(15): n is a, c, g, or u
ccguggucggnnggnac

SEQ ID NO: 14950 - RNA, 17 nt, Artificial Sequence
  Synthetic
aagaauccucacaauac

SEQ ID NO: 14951 - RNA, 17 nt, Artificial Sequence
  Synthetic
ugcucaccucaccauac

SEQ ID NO: 14952 - RNA, 17 nt, Artificial Sequence
  Synthetic
  misc_feature (2)..(2): n is a, c, g, or u
  misc_feature (7)..(7): n is a, c, g, or u
cnugagncccuuuauac

SEQ ID NO: 14953 - RNA, 17 nt, Artificial Sequence
  Synthetic
  misc_feature (10)..(10): n is a, c, g, or u
gaccaauuunugccuac

SEQ ID NO: 14954 - RNA, 17 nt, Artificial Sequence
  Synthetic
  misc_feature (12)..(12): n is a, c, g, or u
uggcugcuaggnuguac

SEQ ID NO: 14955 - RNA, 17 nt, Artificial Sequence
  Synthetic
auccguagguuuuguac

SEQ ID NO: 14956 - RNA, 17 nt, Artificial Sequence
  Synthetic
  misc_feature (8)..(8): n is a, c, g, or u
cgggaccnugcaaaacc

SEQ ID NO: 14957 - RNA, 17 nt, Artificial Sequence
  Synthetic
ccugaacuggagccacc

SEQ ID NO: 14958 - RNA, 17 nt, Artificial Sequence
  Synthetic
  misc_feature (4)..(4): n is a, c, g, or u
gagnuuugcuccagacc

SEQ ID NO: 14959 - RNA, 17 nt, Artificial Sequence
  Synthetic
cgaagugcacacggacc

SEQ ID NO: 14960 - RNA, 17 nt, Artificial Sequence
  Synthetic
ucuucuucuaggggacc

SEQ ID NO: 14961 - RNA, 17 nt, Artificial Sequence
  Synthetic
ccaagaauauggugacc

SEQ ID NO: 14962 - RNA, 17 nt, Artificial Sequence
  Synthetic
gucaacaagaaaaaccc

SEQ ID NO: 14963 - RNA, 17 nt, Artificial Sequence
  Synthetic
gaucaucaguuggaccc

SEQ ID NO: 14964 - RNA, 17 nt, Artificial Sequence
  Synthetic
aggauuccuaggacccc

SEQ ID NO: 14965 - RNA, 17 nt, Artificial Sequence
  Synthetic
  misc_feature (7)..(7): n is a, c, g, or u
agucaunaauucccccc

SEQ ID NO: 14966 - RNA, 17 nt, Artificial Sequence
  Synthetic
  misc_feature (4)..(4): n is a, c, g, or u
  misc_feature (7)..(7): n is a, c, g, or u
gccnaungccaagcccc

SEQ ID NO: 14967 - RNA, 17 nt, Artificial Sequence
  Synthetic
aggacucuuggacuccc

SEQ ID NO: 14968 - RNA, 17 nt, Artificial Sequence
  Synthetic
  misc_feature (3)..(3): n is a, c, g, or u
uunaaauuaauuaugcc

SEQ ID NO: 14969 - RNA, 17 nt, Artificial Sequence
  Synthetic
  misc_feature (12)..(12): n is a, c, g, or u
  misc_feature (15)..(15): n is a, c, g, or u
acacaauguggnuancc

SEQ ID NO: 14970 - RNA, 17 nt, Artificial Sequence
  Synthetic
  misc_feature (15)..(15): n is a, c, g, or u
cucuuauauagaauncc

SEQ ID NO: 14971 - RNA, 17 nt, Artificial Sequence
  Synthetic
cauauuccucuucaucc

SEQ ID NO: 14972 - RNA, 17 nt, Artificial Sequence
  Synthetic
  misc_feature (10)..(10): n is a, c, g, or u
aauaauuugnaagaucc

SEQ ID NO: 14973 - RNA, 17 nt, Artificial Sequence
  Synthetic
gaacgcccaucagaucc

SEQ ID NO: 14974 - RNA, 17 nt, Artificial Sequence
  Synthetic
aaaaccugcacgacucc

SEQ ID NO: 14975 - RNA, 17 nt, Artificial Sequence
  Synthetic
uggauucgcacuccucc

SEQ ID NO: 14976 - RNA, 17 nt, Artificial Sequence
  Synthetic
  misc_feature (1)..(1): n is a, c, g, or u
  misc_feature (4)..(4): n is a, c, g, or u
  misc_feature (7)..(7): n is a, c, g, or u
ncancanuuccuccucc

SEQ ID NO: 14977 - RNA, 17 nt, Artificial Sequence
  Synthetic
  misc_feature (6)..(6): n is a, c, g, or u
aggggncuguauuuucc

SEQ ID NO: 14978 - RNA, 17 nt, Artificial Sequence
  Synthetic
cugcgagcaaaacaagc

SEQ ID NO: 14979 - RNA, 17 nt, Artificial Sequence
  Synthetic
  misc_feature (5)..(5): n is a, c, g, or u
acganagagucccaagc

SEQ ID NO: 14980 - RNA, 17 nt, Artificial Sequence
  Synthetic
cauuguguaaauggagc

SEQ ID NO: 14981 - RNA, 17 nt, Artificial Sequence
  Synthetic
agaagaugaggcauagc

SEQ ID NO: 14982 - RNA, 17 nt, Artificial Sequence
  Synthetic
  misc_feature (11)..(11): n is a, c, g, or u
uggcaguacanccuagc

SEQ ID NO: 14983 - RNA, 17 nt, Artificial Sequence
  Synthetic
acugcggaacuccuagc

SEQ ID NO: 14984 - RNA, 17 nt, Artificial Sequence
  Synthetic
ggaauaugauaaaacgc

SEQ ID NO: 14985 - RNA, 17 nt, Artificial Sequence
  Synthetic
ccgcuuguuuugcucgc

SEQ ID NO: 14986 - RNA, 17 nt, Artificial Sequence
  Synthetic
ucggcagucaggaaggc

SEQ ID NO: 14987 - RNA, 17 nt, Artificial Sequence
  Synthetic
gagagaugggaguaggc

SEQ ID NO: 14988 - RNA, 17 nt, Artificial Sequence
  Synthetic
  misc_feature (11)..(11): n is a, c, g, or u
acgaccccucncggggc

SEQ ID NO: 14989 - RNA, 17 nt, Artificial Sequence
  Synthetic
  misc_feature (7)..(7): n is a, c, g, or u
uacaucnuuuccauggc

SEQ ID NO: 14990 - RNA, 17 nt, Artificial Sequence
  Synthetic
auuccucuucauccugc

SEQ ID NO: 14991 - RNA, 17 nt, Artificial Sequence
  Synthetic
ggucuuuugggcuuugc

SEQ ID NO: 14992 - RNA, 17 nt, Artificial Sequence
  Synthetic
  misc_feature (16)..(16): n is a, c, g, or u
ccuuuaccccguugcnc

SEQ ID NO: 14993 - RNA, 17 nt, Artificial Sequence
  Synthetic
uccugccuccaccaauc

SEQ ID NO: 14994 - RNA, 17 nt, Artificial Sequence
  Synthetic
gucugugccuucucauc

SEQ ID NO: 14995 - RNA, 17 nt, Artificial Sequence
  Synthetic
guuccgcaguauggauc

SEQ ID NO: 14996 - RNA, 17 nt, Artificial Sequence
  Synthetic
gcacuucgcuucaccuc

SEQ ID NO: 14997 - RNA, 17 nt, Artificial Sequence
  Synthetic
ugcaacuuuuucaccuc

SEQ ID NO: 14998 - RNA, 17 nt, Artificial Sequence
  Synthetic
  misc_feature (3)..(3): n is a, c, g, or u
  misc_feature (6)..(6): n is a, c, g, or u
  misc_feature (9)..(9): n is a, c, g, or u
  misc_feature (12)..(12): n is a, c, g, or u
cuncunganacngccuc

SEQ ID NO: 14999 - RNA, 17 nt, Artificial Sequence
  Synthetic
aaccuuuguggcuccuc

SEQ ID NO: 15000 - RNA, 17 nt, Artificial Sequence
  Synthetic
  misc_feature (1)..(1): n is a, c, g, or u
  misc_feature (4)..(4): n is a, c, g, or u
ngcnuuccaccaagcuc

SEQ ID NO: 15001 - RNA, 17 nt, Artificial Sequence
  Synthetic
ucaggcaagccauucuc

SEQ ID NO: 15002 - RNA, 17 nt, Artificial Sequence
  Synthetic
ucguccccuucuccguc

SEQ ID NO: 15003 - RNA, 17 nt, Artificial Sequence
  Synthetic
ccaguggggguugcguc

SEQ ID NO: 15004 - RNA, 17 nt, Artificial Sequence
  Synthetic
caagcggcuaggaguuc

SEQ ID NO: 15005 - RNA, 17 nt, Artificial Sequence
  Synthetic
auauucuugggaacaag

SEQ ID NO: 15006 - RNA, 17 nt, Artificial Sequence
  Synthetic
gcagaggugaagcgaag

SEQ ID NO: 15007 - RNA, 17 nt, Artificial Sequence
  Synthetic
  misc_feature (9)..(9): n is a, c, g, or u
aaggcuucncgauacag

SEQ ID NO: 15008 - RNA, 17 nt, Artificial Sequence
  Synthetic
  misc_feature (12)..(12): n is a, c, g, or u
acucugggaucnugcag

SEQ ID NO: 15009 - RNA, 17 nt, Artificial Sequence
  Synthetic
  misc_feature (5)..(5): n is a, c, g, or u
  misc_feature (8)..(8): n is a, c, g, or u
uggcnaunggccaucag

SEQ ID NO: 15010 - RNA, 17 nt, Artificial Sequence
  Synthetic
ggagcccucaggcucag

SEQ ID NO: 15011 - RNA, 17 nt, Artificial Sequence
  Synthetic
ucguccgcgggauucag

SEQ ID NO: 15012 - RNA, 17 nt, Artificial Sequence
  Synthetic
uucauuuacagugagag

SEQ ID NO: 15013 - RNA, 17 nt, Artificial Sequence
  Synthetic
uaugcccugagccugag

SEQ ID NO: 15014 - RNA, 17 nt, Artificial Sequence
  Synthetic
agaauggcuugccugag

SEQ ID NO: 15015 - RNA, 17 nt, Artificial Sequence
  Synthetic
  misc_feature (1)..(1): n is a, c, g, or u
nuggcucaguuuacuag

SEQ ID NO: 15016 - RNA, 17 nt, Artificial Sequence
  Synthetic
  misc_feature (9)..(9): n is a, c, g, or u
agggaaacnacacguag

SEQ ID NO: 15017 - RNA, 17 nt, Artificial Sequence
  Synthetic
uguucagugguucguag

SEQ ID NO: 15018 - RNA, 17 nt, Artificial Sequence
  Synthetic
gaauuagaggacaaacg

SEQ ID NO: 15019 - RNA, 17 nt, Artificial Sequence
  Synthetic
guggucuccaugcaacg

SEQ ID NO: 15020 - RNA, 17 nt, Artificial Sequence
  Synthetic
accccgccuguaacacg

SEQ ID NO: 15021 - RNA, 17 nt, Artificial Sequence
  Synthetic
agaccaggccguugccg

SEQ ID NO: 15022 - RNA, 17 nt, Artificial Sequence
  Synthetic
gcuccagaccggcugcg

SEQ ID NO: 15023 - RNA, 17 nt, Artificial Sequence
  Synthetic
gccuugagcaggagucg

SEQ ID NO: 15024 - RNA, 17 nt, Artificial Sequence
  Synthetic
aggagugggagcauucg

SEQ ID NO: 15025 - RNA, 17 nt, Artificial Sequence
  Synthetic
ugggaugggaauacagg

SEQ ID NO: 15026 - RNA, 17 nt, Artificial Sequence
  Synthetic
guauggaucggcagagg

SEQ ID NO: 15027 - RNA, 17 nt, Artificial Sequence
  Synthetic
aguguugauaagauagg

SEQ ID NO: 15028 - RNA, 17 nt, Artificial Sequence
  Synthetic
  misc_feature (14)..(14): n is a, c, g, or u
cggacgaccccucncgg

SEQ ID NO: 15029 - RNA, 17 nt, Artificial Sequence
  Synthetic
uguuuacgucccgucgg

SEQ ID NO: 15030 - RNA, 17 nt, Artificial Sequence
  Synthetic
uuggacccugcauucgg

SEQ ID NO: 15031 - RNA, 17 nt, Artificial Sequence
  Synthetic
  misc_feature (1)..(1): n is a, c, g, or u
  misc_feature (4)..(5): n is a, c, g, or u
nccnnccgaccacgggg

SEQ ID NO: 15032 - RNA, 17 nt, Artificial Sequence
  Synthetic
aaccagguaggaguggg

SEQ ID NO: 15033 - RNA, 17 nt, Artificial Sequence
  Synthetic
gaugaugugguauuggg

SEQ ID NO: 15034 - RNA, 17 nt, Artificial Sequence
  Synthetic
ccacauuguguaaaugg

SEQ ID NO: 15035 - RNA, 17 nt, Artificial Sequence
  Synthetic
  misc_feature (1)..(1): n is a, c, g, or u
  misc_feature (3)..(3): n is a, c, g, or u
nanuguuccugaacugg

SEQ ID NO: 15036 - RNA, 17 nt, Artificial Sequence
  Synthetic
caacccccacuggcugg

SEQ ID NO: 15037 - RNA, 17 nt, Artificial Sequence
  Synthetic
gcucgcagccggucugg

SEQ ID NO: 15038 - RNA, 17 nt, Artificial Sequence
  Synthetic
  misc_feature (2)..(2): n is a, c, g, or u
  misc_feature (6)..(6): n is a, c, g, or u
gnggunuuuuggggugg

SEQ ID NO: 15039 - RNA, 17 nt, Artificial Sequence
  Synthetic
ccuuauaaagaauuugg

SEQ ID NO: 15040 - RNA, 17 nt, Artificial Sequence
  Synthetic
  misc_feature (8)..(8): n is a, c, g, or u
gccuuggnuggcuuugg

SEQ ID NO: 15041 - RNA, 17 nt, Artificial Sequence
  Synthetic
  misc_feature (16)..(16): n is a, c, g, or u
ugacccgcaaaaugang

SEQ ID NO: 15042 - RNA, 17 nt, Artificial Sequence
  Synthetic
  misc_feature (10)..(10): n is a, c, g, or u
  misc_feature (13)..(13): n is a, c, g, or u
  misc_feature (16)..(16): n is a, c, g, or u
ggugggaaanuunacng

SEQ ID NO: 15043 - RNA, 17 nt, Artificial Sequence
  Synthetic
caaagguuccacgcaug

SEQ ID NO: 15044 - RNA, 17 nt, Artificial Sequence
  Synthetic
auggcacuaguaaacug

SEQ ID NO: 15045 - RNA, 17 nt, Artificial Sequence
  Synthetic
  misc_feature (3)..(3): n is a, c, g, or u
  misc_feature (5)..(5): n is a, c, g, or u
gungncaauaugcccug

SEQ ID NO: 15046 - RNA, 17 nt, Artificial Sequence
  Synthetic
agccuuagagucuccug

SEQ ID NO: 15047 - RNA, 17 nt, Artificial Sequence
  Synthetic
uucaagccuccaagcug

SEQ ID NO: 15048 - RNA, 17 nt, Artificial Sequence
  Synthetic
cgcggucuccccgucug

SEQ ID NO: 15049 - RNA, 17 nt, Artificial Sequence
  Synthetic
ggcaacggccuggucug

SEQ ID NO: 15050 - RNA, 17 nt, Artificial Sequence
  Synthetic
  misc_feature (6)..(6): n is a, c, g, or u
aggcanaaauuggucug

SEQ ID NO: 15051 - RNA, 17 nt, Artificial Sequence
  Synthetic
aaauaccuaugggagug

SEQ ID NO: 15052 - RNA, 17 nt, Artificial Sequence
  Synthetic
ucaucugccgguccgug

SEQ ID NO: 15053 - RNA, 17 nt, Artificial Sequence
  Synthetic
ccgcguaaagagaggug

SEQ ID NO: 15054 - RNA, 17 nt, Artificial Sequence
  Synthetic
  misc_feature (4)..(4): n is a, c, g, or u
ugcnguauggugaggug

SEQ ID NO: 15055 - RNA, 17 nt, Artificial Sequence
  Synthetic
  misc_feature (9)..(9): n is a, c, g, or u
  misc_feature (12)..(12): n is a, c, g, or u
guugcaugnugnuggug

SEQ ID NO: 15056 - RNA, 17 nt, Artificial Sequence
  Synthetic
  misc_feature (12)..(12): n is a, c, g, or u
  misc_feature (15)..(15): n is a, c, g, or u
cccaucccaucnucnug

SEQ ID NO: 15057 - RNA, 17 nt, Artificial Sequence
  Synthetic
ucuuauguaagaccuug

SEQ ID NO: 15058 - RNA, 17 nt, Artificial Sequence
  Synthetic
aacauagaguugccuug

SEQ ID NO: 15059 - RNA, 17 nt, Artificial Sequence
  Synthetic
  misc_feature (2)..(2): n is a, c, g, or u
gnauugugggucuuuug

SEQ ID NO: 15060 - RNA, 17 nt, Artificial Sequence
  Synthetic
  misc_feature (17)..(17): n is a, c, g, or u
caaccaguacgggaccn

SEQ ID NO: 15061 - RNA, 17 nt, Artificial Sequence
  Synthetic
  misc_feature (17)..(17): n is a, c, g, or u
cccugacucugggaucn

SEQ ID NO: 15062 - RNA, 17 nt, Artificial Sequence
  Synthetic
  misc_feature (16)..(17): n is a, c, g, or u
aaggaccacuggccann

SEQ ID NO: 15063 - RNA, 17 nt, Artificial Sequence
  Synthetic
  misc_feature (14)..(14): n is a, c, g, or u
  misc_feature (17)..(17): n is a, c, g, or u
gcuggggcuuggcnaun

SEQ ID NO: 15064 - RNA, 17 nt, Artificial Sequence
  Synthetic
  misc_feature (8)..(8): n is a, c, g, or u
  misc_feature (17)..(17): n is a, c, g, or u
ggugucancaauuugun

SEQ ID NO: 15065 - RNA, 17 nt, Artificial Sequence
  Synthetic
  misc_feature (17)..(17): n is a, c, g, or u
gugcgcagaccaauuun

SEQ ID NO: 15066 - RNA, 17 nt, Artificial Sequence
  Synthetic
cgaaccacugaacaaau

SEQ ID NO: 15067 - RNA, 17 nt, Artificial Sequence
  Synthetic
aaccuacggauggaaau

SEQ ID NO: 15068 - RNA, 17 nt, Artificial Sequence
  Synthetic
  misc_feature (7)..(7): n is a, c, g, or u
cagacgnagaucucaau

SEQ ID NO: 15069 - RNA, 17 nt, Artificial Sequence
  Synthetic
uccccccagcagagaau

SEQ ID NO: 15070 - RNA, 17 nt, Artificial Sequence
  Synthetic
uaucuuuaauccugaau

SEQ ID NO: 15071 - RNA, 17 nt, Artificial Sequence
  Synthetic
aggucggucguugacau

SEQ ID NO: 15072 - RNA, 17 nt, Artificial Sequence
  Synthetic
  misc_feature (10)..(10): n is a, c, g, or u
auauacaucnuuuccau

SEQ ID NO: 15073 - RNA, 17 nt, Artificial Sequence
  Synthetic
uagagucuccugagcau

SEQ ID NO: 15074 - RNA, 17 nt, Artificial Sequence
  Synthetic
auaagaagaugaggcau

SEQ ID NO: 15075 - RNA, 17 nt, Artificial Sequence
  Synthetic
uccacgcaugcgcugau

SEQ ID NO: 15076 - RNA, 17 nt, Artificial Sequence
  Synthetic
  misc_feature (15)..(15): n is a, c, g, or u
augcgcugauggccnau

SEQ ID NO: 15077 - RNA, 17 nt, Artificial Sequence
  Synthetic
  misc_feature (8)..(8): n is a, c, g, or u
  misc_feature (12)..(12): n is a, c, g, or u
aacccugnuccnaauau

SEQ ID NO: 15078 - RNA, 17 nt, Artificial Sequence
  Synthetic
caauuuguccugguuau

SEQ ID NO: 15079 - RNA, 17 nt, Artificial Sequence
  Synthetic
ccccaucaaggaccacu

SEQ ID NO: 15080 - RNA, 17 nt, Artificial Sequence
  Synthetic
cugacgcaacccccacu

SEQ ID NO: 15081 - RNA, 17 nt, Artificial Sequence
  Synthetic
guuggucaucaaaaccu

SEQ ID NO: 15082 - RNA, 17 nt, Artificial Sequence
  Synthetic
  misc_feature (5)..(5): n is a, c, g, or u
  misc_feature (8)..(8): n is a, c, g, or u
  misc_feature (13)..(13): n is a, c, g, or u
guggnggngugancccu

SEQ ID NO: 15083 - RNA, 17 nt, Artificial Sequence
  Synthetic
uagaagaagaacucccu

SEQ ID NO: 15084 - RNA, 17 nt, Artificial Sequence
  Synthetic
gaagaacucccucgccu

SEQ ID NO: 15085 - RNA, 17 nt, Artificial Sequence
  Synthetic
  misc_feature (14)..(14): n is a, c, g, or u
aguuggcaguacanccu

SEQ ID NO: 15086 - RNA, 17 nt, Artificial Sequence
  Synthetic
cauacugcggaacuccu

SEQ ID NO: 15087 - RNA, 17 nt, Artificial Sequence
  Synthetic
cccagcagagaauggcu

SEQ ID NO: 15088 - RNA, 17 nt, Artificial Sequence
  Synthetic
uagccgcuuguuuugcu

SEQ ID NO: 15089 - RNA, 17 nt, Artificial Sequence
  Synthetic
  misc_feature (1)..(2): n is a, c, g, or u
  misc_feature (4)..(4): n is a, c, g, or u
  misc_feature (12)..(12): n is a, c, g, or u
nngnuaggauanaaucu

SEQ ID NO: 15090 - RNA, 17 nt, Artificial Sequence
  Synthetic
  misc_feature (9)..(9): n is a, c, g, or u
ggggaauunaugacucu

SEQ ID NO: 15091 - RNA, 17 nt, Artificial Sequence
  Synthetic
  misc_feature (14)..(14): n is a, c, g, or u
ugugguuucauaunucu

SEQ ID NO: 15092 - RNA, 17 nt, Artificial Sequence
  Synthetic
  misc_feature (10)..(10): n is a, c, g, or u
acaggcuuunacuuucu

SEQ ID NO: 15093 - RNA, 17 nt, Artificial Sequence
  Synthetic
ggcagaggugaaaaagu

SEQ ID NO: 15094 - RNA, 17 nt, Artificial Sequence
  Synthetic
gagaguaacuccacagu

SEQ ID NO: 15095 - RNA, 17 nt, Artificial Sequence
  Synthetic
ugagggaaacauagagu

SEQ ID NO: 15096 - RNA, 17 nt, Artificial Sequence
  Synthetic
uaugaaaccacaauagu

SEQ ID NO: 15097 - RNA, 17 nt, Artificial Sequence
  Synthetic
gcuucaccucugcacgu

SEQ ID NO: 15098 - RNA, 17 nt, Artificial Sequence
  Synthetic
augaaccuuuaccccgu

SEQ ID NO: 15099 - RNA, 17 nt, Artificial Sequence
  Synthetic
ggcacagaccaggccgu

SEQ ID NO: 15100 - RNA, 17 nt, Artificial Sequence
  Synthetic
gaucucaaucgccgcgu

SEQ ID NO: 15101 - RNA, 17 nt, Artificial Sequence
  Synthetic
uuauuacccacccaggu

SEQ ID NO: 15102 - RNA, 17 nt, Artificial Sequence
  Synthetic
uguauuuuccugcuggu

SEQ ID NO: 15103 - RNA, 17 nt, Artificial Sequence
  Synthetic
cuauguuucccucaugu

SEQ ID NO: 15104 - RNA, 17 nt, Artificial Sequence
  Synthetic
ggauuaucaagguaugu

SEQ ID NO: 15105 - RNA, 17 nt, Artificial Sequence
  Synthetic
  misc_feature (14)..(14): n is a, c, g, or u
guacaauaugaucnugu

SEQ ID NO: 15106 - RNA, 17 nt, Artificial Sequence
  Synthetic
  misc_feature (14)..(14): n is a, c, g, or u
ccaaccucccaugnugu

SEQ ID NO: 15107 - RNA, 17 nt, Artificial Sequence
  Synthetic
augcguggaaccuuugu

SEQ ID NO: 15108 - RNA, 17 nt, Artificial Sequence
  Synthetic
  misc_feature (13)..(13): n is a, c, g, or u
  misc_feature (16)..(16): n is a, c, g, or u
uggaaguuggggnacnu

SEQ ID NO: 15109 - RNA, 17 nt, Artificial Sequence
  Synthetic
  misc_feature (16)..(16): n is a, c, g, or u
cucaguccguuucucnu

SEQ ID NO: 15110 - RNA, 17 nt, Artificial Sequence
  Synthetic
  misc_feature (16)..(16): n is a, c, g, or u
caagcugugccuuggnu

SEQ ID NO: 15111 - RNA, 17 nt, Artificial Sequence
  Synthetic
  misc_feature (15)..(16): n is a, c, g, or u
cuaccugguuggcunnu

SEQ ID NO: 15112 - RNA, 17 nt, Artificial Sequence
  Synthetic
gugucuuggccaaaauu

SEQ ID NO: 15113 - RNA, 17 nt, Artificial Sequence
  Synthetic
cuuucggaguguggauu

SEQ ID NO: 15114 - RNA, 17 nt, Artificial Sequence
  Synthetic
ugcgucagcaaacacuu

SEQ ID NO: 15115 - RNA, 17 nt, Artificial Sequence
  Synthetic
ccgguccgugugcacuu

SEQ ID NO: 15116 - RNA, 17 nt, Artificial Sequence
  Synthetic
  misc_feature (1)..(1): n is a, c, g, or u
  misc_feature (6)..(6): n is a, c, g, or u
ngaugnuguacagacuu

SEQ ID NO: 15117 - RNA, 17 nt, Artificial Sequence
  Synthetic
cccacuggcuggggcuu

SEQ ID NO: 15118 - RNA, 17 nt, Artificial Sequence
  Synthetic
gugggucuuuugggcuu

SEQ ID NO: 15119 - RNA, 17 nt, Artificial Sequence
  Synthetic
  misc_feature (3)..(3): n is a, c, g, or u
gancacccgugugucuu

SEQ ID NO: 15120 - RNA, 17 nt, Artificial Sequence
  Synthetic
  misc_feature (9)..(9): n is a, c, g, or u
ccgcgaagnauccaguu

SEQ ID NO: 15121 - RNA, 17 nt, Artificial Sequence
  Synthetic
  misc_feature (8)..(8): n is a, c, g, or u
uaggaaangaaggaguu

SEQ ID NO: 15122 - RNA, 17 nt, Artificial Sequence
  Synthetic
cccacuccuaccugguu

SEQ ID NO: 15123 - RNA, 17 nt, Artificial Sequence
  Synthetic
ggucugugccaaguguu

SEQ ID NO: 15124 - RNA, 17 nt, Artificial Sequence
  Synthetic
  misc_feature (15)..(15): n is a, c, g, or u
ucuggauuguuuganuu

SEQ ID NO: 15125 - RNA, 17 nt, Artificial Sequence
  Synthetic
  misc_feature (6)..(6): n is a, c, g, or u
  misc_feature (9)..(9): n is a, c, g, or u
  misc_feature (15)..(15): n is a, c, g, or u
ucagunccnaugagnuu

SEQ ID NO: 15126 - RNA, 17 nt, Artificial Sequence
  Synthetic
  misc_feature (6)..(6): n is a, c, g, or u
  misc_feature (9)..(9): n is a, c, g, or u
ccaucnucnugggcuuu

SEQ ID NO: 15127 - RNA, 17 nt, Artificial Sequence
  Synthetic
aggagucgugcagguuu

SEQ ID NO: 15128 - RNA, 17 nt, Artificial Sequence
  Synthetic
gcuuucccccacuguuu

SEQ ID NO: 15129 - RNA, 17 nt, Artificial Sequence
  Synthetic
  misc_feature (6)..(6): n is a, c, g, or u
aaagunaaagccuguuu

SEQ ID NO: 15130 - RNA, 17 nt, Artificial Sequence
  Synthetic
cuccuagccgcuuguuu

SEQ ID NO: 15131 - RNA, 17 nt, Artificial Sequence
  Synthetic
uggggacugcgaauuuu

SEQ ID NO: 15132 - RNA, 17 nt, Artificial Sequence
  Synthetic
  misc_feature (13)..(13): n is a, c, g, or u
ggaguuacucucnuuuu

SEQ ID NO: 15133 - RNA, 20 nt, Artificial Sequence
  Synthetic
ugaagaggaauaugauaaaa

SEQ ID NO: 15134 - RNA, 20 nt, Artificial Sequence
  Synthetic
cuuguauacaugcauacaaa

SEQ ID NO: 15135 - RNA, 20 nt, Artificial Sequence
  Synthetic
ccagccuauagaccaccaaa

SEQ ID NO: 15136 - RNA, 20 nt, Artificial Sequence
  Synthetic
ggucaucaaaaccucgcaaa

SEQ ID NO: 15137 - RNA, 20 nt, Artificial Sequence
  Synthetic
  misc_feature (3)..(3): n is a, c, g, or u
aunuacuguuuacuuagaaa

SEQ ID NO: 15138 - RNA, 20 nt, Artificial Sequence
  Synthetic
acuuucucgccaacuuacaa

SEQ ID NO: 15139 - RNA, 20 nt, Artificial Sequence
  Synthetic
ggucaauguccaugccccaa

SEQ ID NO: 15140 - RNA, 20 nt, Artificial Sequence
  Synthetic
  misc_feature (16)..(16): n is a, c, g, or u
caugccccaaagccanccaa

SEQ ID NO: 15141 - RNA, 20 nt, Artificial Sequence
  Synthetic
  misc_feature (2)..(2): n is a, c, g, or u
cnguauggugaggugagcaa

SEQ ID NO: 15142 - RNA, 20 nt, Artificial Sequence
  Synthetic
  misc_feature (16)..(16): n is a, c, g, or u
uuguguaaauggagcngcaa

SEQ ID NO: 15143 - RNA, 20 nt, Artificial Sequence
  Synthetic
ccugcacgacuccugcucaa

SEQ ID NO: 15144 - RNA, 20 nt, Artificial Sequence
  Synthetic
cggaaggaaagaagucagaa

SEQ ID NO: 15145 - RNA, 20 nt, Artificial Sequence
  Synthetic
cacggaccggcagaugagaa

SEQ ID NO: 15146 - RNA, 20 nt, Artificial Sequence
  Synthetic
  misc_feature (3)..(3): n is a, c, g, or u
  misc_feature (8)..(8): n is a, c, g, or u
ggngugancccuggcccgaa

SEQ ID NO: 15147 - RNA, 20 nt, Artificial Sequence
  Synthetic
  misc_feature (9)..(9): n is a, c, g, or u
uuguuuganuuggcuccgaa

SEQ ID NO: 15148 - RNA, 20 nt, Artificial Sequence
  Synthetic
ucccauagguauuuugcgaa

SEQ ID NO: 15149 - RNA, 20 nt, Artificial Sequence
  Synthetic
caccaaucggcagucaggaa

SEQ ID NO: 15150 - RNA, 20 nt, Artificial Sequence
  Synthetic
aaagccaaacagugggggaa

SEQ ID NO: 15151 - RNA, 20 nt, Artificial Sequence
  Synthetic
  misc_feature (3)..(3): n is a, c, g, or u
ucnugcagagcuugguggaa

SEQ ID NO: 15152 - RNA, 20 nt, Artificial Sequence
  Synthetic
uauuuacauacucuuuggaa

SEQ ID NO: 15153 - RNA, 20 nt, Artificial Sequence
  Synthetic
  misc_feature (15)..(15): n is a, c, g, or u
acaucauccauauancugaa

SEQ ID NO: 15154 - RNA, 20 nt, Artificial Sequence
  Synthetic
ugcauggagaccaccgugaa

SEQ ID NO: 15155 - RNA, 20 nt, Artificial Sequence
  Synthetic
  misc_feature (18)..(18): n is a, c, g, or u
uaaguuggcgagaaagunaa

SEQ ID NO: 15156 - RNA, 20 nt, Artificial Sequence
  Synthetic
  misc_feature (5)..(5): n is a, c, g, or u
  misc_feature (8)..(8): n is a, c, g, or u
  misc_feature (14)..(14): n is a, c, g, or u
uaggnacnguagangaauaa

SEQ ID NO: 15157 - RNA, 20 nt, Artificial Sequence
  Synthetic
caaugcucaggagacucuaa

SEQ ID NO: 15158 - RNA, 20 nt, Artificial Sequence
  Synthetic
  misc_feature (4)..(4): n is a, c, g, or u
agunucucuuccaaaaguaa

SEQ ID NO: 15159 - RNA, 20 nt, Artificial Sequence
  Synthetic
caugcauacaaaggcauuaa

SEQ ID NO: 15160 - RNA, 20 nt, Artificial Sequence
  Synthetic
  misc_feature (7)..(7): n is a, c, g, or u
  misc_feature (10)..(10): n is a, c, g, or u
  misc_feature (16)..(16): n is a, c, g, or u
auguggnuanccugcnuuaa

SEQ ID NO: 15161 - RNA, 20 nt, Artificial Sequence
  Synthetic
  misc_feature (15)..(15): n is a, c, g, or u
gcauguauacaagcnaaaca

SEQ ID NO: 15162 - RNA, 20 nt, Artificial Sequence
  Synthetic
ccuuuguaugcauguauaca

SEQ ID NO: 15163 - RNA, 20 nt, Artificial Sequence
  Synthetic
  misc_feature (9)..(9): n is a, c, g, or u
gccuguuungcuuguauaca

SEQ ID NO: 15164 - RNA, 20 nt, Artificial Sequence
  Synthetic
caaacacuuggcacagacca

SEQ ID NO: 15165 - RNA, 20 nt, Artificial Sequence
  Synthetic
aacagaaagauucgucccca

SEQ ID NO: 15166 - RNA, 20 nt, Artificial Sequence
  Synthetic
agacagucauccucaggcca

SEQ ID NO: 15167 - RNA, 20 nt, Artificial Sequence
  Synthetic
  misc_feature (13)..(13): n is a, c, g, or u
  misc_feature (16)..(16): n is a, c, g, or u
gcgcugauggccnaungcca

SEQ ID NO: 15168 - RNA, 20 nt, Artificial Sequence
  Synthetic
  misc_feature (8)..(8): n is a, c, g, or u
ucccacunuucaagccucca

SEQ ID NO: 15169 - RNA, 20 nt, Artificial Sequence
  Synthetic
ggcguucacgguggucucca

SEQ ID NO: 15170 - RNA, 20 nt, Artificial Sequence
  Synthetic
uuuauaagggucaaugucca

SEQ ID NO: 15171 - RNA, 20 nt, Artificial Sequence
  Synthetic
gaggagccacaaagguucca

SEQ ID NO: 15172 - RNA, 20 nt, Artificial Sequence
  Synthetic
  misc_feature (1)..(1): n is a, c, g, or u
  misc_feature (3)..(3): n is a, c, g, or u
  misc_feature (11)..(11): n is a, c, g, or u
ngnuaggauanaaucuagca

SEQ ID NO: 15173 - RNA, 20 nt, Artificial Sequence
  Synthetic
  misc_feature (9)..(9): n is a, c, g, or u
caccauacngcacucaggca

SEQ ID NO: 15174 - RNA, 20 nt, Artificial Sequence
  Synthetic
  misc_feature (15)..(15): n is a, c, g, or u
  misc_feature (18)..(18): n is a, c, g, or u
uggucugcgcaccancanca

SEQ ID NO: 15175 - RNA, 20 nt, Artificial Sequence
  Synthetic
  misc_feature (13)..(13): n is a, c, g, or u
accucaccauacngcacuca

SEQ ID NO: 15176 - RNA, 20 nt, Artificial Sequence
  Synthetic
  misc_feature (1)..(1): n is a, c, g, or u
nuuuugggguggagcccuca

SEQ ID NO: 15177 - RNA, 20 nt, Artificial Sequence
  Synthetic
cuaagagacagucauccuca

SEQ ID NO: 15178 - RNA, 20 nt, Artificial Sequence
  Synthetic
  misc_feature (4)..(4): n is a, c, g, or u
  misc_feature (16)..(16): n is a, c, g, or u
uguncaugucccacunuuca

SEQ ID NO: 15179 - RNA, 20 nt, Artificial Sequence
  Synthetic
gagauugacgagaugugaga

SEQ ID NO: 15180 - RNA, 20 nt, Artificial Sequence
  Synthetic
  misc_feature (14)..(14): n is a, c, g, or u
uuguuagacgacgngaccga

SEQ ID NO: 15181 - RNA, 20 nt, Artificial Sequence
  Synthetic
  misc_feature (4)..(4): n is a, c, g, or u
  misc_feature (6)..(6): n is a, c, g, or u
uaangnucuuuguauuagga

SEQ ID NO: 15182 - RNA, 20 nt, Artificial Sequence
  Synthetic
ccugacugccgauuggugga

SEQ ID NO: 15183 - RNA, 20 nt, Artificial Sequence
  Synthetic
  misc_feature (3)..(3): n is a, c, g, or u
canccaaggcacagcuugga

SEQ ID NO: 15184 - RNA, 20 nt, Artificial Sequence
  Synthetic
  misc_feature (18)..(18): n is a, c, g, or u
gccucagcucuguaucgnga

SEQ ID NO: 15185 - RNA, 20 nt, Artificial Sequence
  Synthetic
  misc_feature (18)..(18): n is a, c, g, or u
uugacuacuagaucccunga

SEQ ID NO: 15186 - RNA, 20 nt, Artificial Sequence
  Synthetic
aagaaccaauaagaagauga

SEQ ID NO: 15187 - RNA, 20 nt, Artificial Sequence
  Synthetic
  misc_feature (6)..(6): n is a, c, g, or u
agccangagaaacggacuga

SEQ ID NO: 15188 - RNA, 20 nt, Artificial Sequence
  Synthetic
  misc_feature (6)..(6): n is a, c, g, or u
gcuucncgauacagagcuga

SEQ ID NO: 15189 - RNA, 20 nt, Artificial Sequence
  Synthetic
cugugccaaguguuugcuga

SEQ ID NO: 15190 - RNA, 20 nt, Artificial Sequence
  Synthetic
augucaacgaccgaccuuga

SEQ ID NO: 15191 - RNA, 20 nt, Artificial Sequence
  Synthetic
  misc_feature (10)..(11): n is a, c, g, or u
  misc_feature (16)..(16): n is a, c, g, or u
  misc_feature (19)..(19): n is a, c, g, or u
uaacaugggnnuaaanauna

SEQ ID NO: 15192 - RNA, 20 nt, Artificial Sequence
  Synthetic
  misc_feature (3)..(3): n is a, c, g, or u
  misc_feature (6)..(6): n is a, c, g, or u
  misc_feature (13)..(13): n is a, c, g, or u
  misc_feature (15)..(15): n is a, c, g, or u
ugnugncacugungncaaua

SEQ ID NO: 15193 - RNA, 20 nt, Artificial Sequence
  Synthetic
ggggcauuugguggucuaua

SEQ ID NO: 15194 - RNA, 20 nt, Artificial Sequence
  Synthetic
uccucuucauccugcugcua

SEQ ID NO: 15195 - RNA, 20 nt, Artificial Sequence
  Synthetic
aacacacagucuuugaagua

SEQ ID NO: 15196 - RNA, 20 nt, Artificial Sequence
  Synthetic
gagguggagagaugggagua

SEQ ID NO: 15197 - RNA, 20 nt, Artificial Sequence
  Synthetic
cuuuguauuaggaggcugua

SEQ ID NO: 15198 - RNA, 20 nt, Artificial Sequence
  Synthetic
  misc_feature (6)..(6): n is a, c, g, or u
ccugcnuuaaugccuuugua

SEQ ID NO: 15199 - RNA, 20 nt, Artificial Sequence
  Synthetic
  misc_feature (1)..(1): n is a, c, g, or u
  misc_feature (10)..(10): n is a, c, g, or u
nagaagauunaaauuaauua

SEQ ID NO: 15200 - RNA, 20 nt, Artificial Sequence
  Synthetic
  misc_feature (6)..(6): n is a, c, g, or u
acaugnacaagagaugauua

SEQ ID NO: 15201 - RNA, 20 nt, Artificial Sequence
  Synthetic
  misc_feature (13)..(13): n is a, c, g, or u
uuaccccguugcncggcaac

SEQ ID NO: 15202 - RNA, 20 nt, Artificial Sequence
  Synthetic
  misc_feature (11)..(11): n is a, c, g, or u
cccaaagccanccaaggcac

SEQ ID NO: 15203 - RNA, 20 nt, Artificial Sequence
  Synthetic
gaguaggcugccuuccugac

SEQ ID NO: 15204 - RNA, 20 nt, Artificial Sequence
  Synthetic
  misc_feature (4)..(4): n is a, c, g, or u
  misc_feature (6)..(6): n is a, c, g, or u
  misc_feature (12)..(12): n is a, c, g, or u
  misc_feature (15)..(15): n is a, c, g, or u
  misc_feature (18)..(18): n is a, c, g, or u
gucngngaucuncunganac

SEQ ID NO: 15205 - RNA, 20 nt, Artificial Sequence
  Synthetic
  misc_feature (14)..(15): n is a, c, g, or u
  misc_feature (18)..(18): n is a, c, g, or u
gccccguggucggnnggnac

SEQ ID NO: 15206 - RNA, 20 nt, Artificial Sequence
  Synthetic
gacaagaauccucacaauac

SEQ ID NO: 15207 - RNA, 20 nt, Artificial Sequence
  Synthetic
cauugcucaccucaccauac

SEQ ID NO: 15208 - RNA, 20 nt, Artificial Sequence
  Synthetic
  misc_feature (5)..(5): n is a, c, g, or u
  misc_feature (10)..(10): n is a, c, g, or u
caucnugagncccuuuauac

SEQ ID NO: 15209 - RNA, 20 nt, Artificial Sequence
  Synthetic
  misc_feature (13)..(13): n is a, c, g, or u
gcagaccaauuunugccuac

SEQ ID NO: 15210 - RNA, 20 nt, Artificial Sequence
  Synthetic
  misc_feature (15)..(15): n is a, c, g, or u
ccauggcugcuaggnuguac

SEQ ID NO: 15211 - RNA, 20 nt, Artificial Sequence
  Synthetic
uccauccguagguuuuguac

SEQ ID NO: 15212 - RNA, 20 nt, Artificial Sequence
  Synthetic
  misc_feature (11)..(11): n is a, c, g, or u
guacgggaccnugcaaaacc

SEQ ID NO: 15213 - RNA, 20 nt, Artificial Sequence
  Synthetic
guuccugaacuggagccacc

SEQ ID NO: 15214 - RNA, 20 nt, Artificial Sequence
  Synthetic
  misc_feature (1)..(1): n is a, c, g, or u
  misc_feature (7)..(7): n is a, c, g, or u
naugagnuuugcuccagacc

SEQ ID NO: 15215 - RNA, 20 nt, Artificial Sequence
  Synthetic
aagcgaagugcacacggacc

SEQ ID NO: 15216 - RNA, 20 nt, Artificial Sequence
  Synthetic
aguucuucuucuaggggacc

SEQ ID NO: 15217 - RNA, 20 nt, Artificial Sequence
  Synthetic
uucccaagaauauggugacc

SEQ ID NO: 15218 - RNA, 20 nt, Artificial Sequence
  Synthetic
cuugucaacaagaaaaaccc

SEQ ID NO: 15219 - RNA, 20 nt, Artificial Sequence
  Synthetic
cccgaucaucaguuggaccc

SEQ ID NO: 15220 - RNA, 20 nt, Artificial Sequence
  Synthetic
aucaggauuccuaggacccc

SEQ ID NO: 15221 - RNA, 20 nt, Artificial Sequence
  Synthetic
  misc_feature (10)..(10): n is a, c, g, or u
uagagucaunaauucccccc

SEQ ID NO: 15222 - RNA, 20 nt, Artificial Sequence
  Synthetic
  misc_feature (7)..(7): n is a, c, g, or u
  misc_feature (10)..(10): n is a, c, g, or u
auggccnaungccaagcccc

SEQ ID NO: 15223 - RNA, 20 nt, Artificial Sequence
  Synthetic
aagaggacucuuggacuccc

SEQ ID NO: 15224 - RNA, 20 nt, Artificial Sequence
  Synthetic
  misc_feature (6)..(6): n is a, c, g, or u
agauunaaauuaauuaugcc

SEQ ID NO: 15225 - RNA, 20 nt, Artificial Sequence
  Synthetic
  misc_feature (15)..(15): n is a, c, g, or u
  misc_feature (18)..(18): n is a, c, g, or u
uuuacacaauguggnuancc

SEQ ID NO: 15226 - RNA, 20 nt, Artificial Sequence
  Synthetic
  misc_feature (18)..(18): n is a, c, g, or u
ucccucuuauauagaauncc

SEQ ID NO: 15227 - RNA, 20 nt, Artificial Sequence
  Synthetic
uaucauauuccucuucaucc

SEQ ID NO: 15228 - RNA, 20 nt, Artificial Sequence
  Synthetic
  misc_feature (13)..(13): n is a, c, g, or u
gguaauaauuugnaagaucc

SEQ ID NO: 15229 - RNA, 20 nt, Artificial Sequence
  Synthetic
cgugaacgcccaucagaucc

SEQ ID NO: 15230 - RNA, 20 nt, Artificial Sequence
  Synthetic
ugcaaaaccugcacgacucc

SEQ ID NO: 15231 - RNA, 20 nt, Artificial Sequence
  Synthetic
guguggauucgcacuccucc

SEQ ID NO: 15232 - RNA, 20 nt, Artificial Sequence
  Synthetic
  misc_feature (4)..(4): n is a, c, g, or u
  misc_feature (7)..(7): n is a, c, g, or u
  misc_feature (10)..(10): n is a, c, g, or u
gugncancanuuccuccucc

SEQ ID NO: 15233 - RNA, 20 nt, Artificial Sequence
  Synthetic
  misc_feature (9)..(9): n is a, c, g, or u
gucaggggncuguauuuucc

SEQ ID NO: 15234 - RNA, 20 nt, Artificial Sequence
  Synthetic
cggcugcgagcaaaacaagc

SEQ ID NO: 15235 - RNA, 20 nt, Artificial Sequence
  Synthetic
  misc_feature (8)..(8): n is a, c, g, or u
gggacganagagucccaagc

SEQ ID NO: 15236 - RNA, 20 nt, Artificial Sequence
  Synthetic
ccacauuguguaaauggagc

SEQ ID NO: 15237 - RNA, 20 nt, Artificial Sequence
  Synthetic
auaagaagaugaggcauagc

SEQ ID NO: 15238 - RNA, 20 nt, Artificial Sequence
  Synthetic
  misc_feature (14)..(14): n is a, c, g, or u
aguuggcaguacanccuagc

SEQ ID NO: 15239 - RNA, 20 nt, Artificial Sequence
  Synthetic
cauacugcggaacuccuagc

SEQ ID NO: 15240 - RNA, 20 nt, Artificial Sequence
  Synthetic
agaggaauaugauaaaacgc

SEQ ID NO: 15241 - RNA, 20 nt, Artificial Sequence
  Synthetic
uagccgcuuguuuugcucgc

SEQ ID NO: 15242 - RNA, 20 nt, Artificial Sequence
  Synthetic
caaucggcagucaggaaggc

SEQ ID NO: 15243 - RNA, 20 nt, Artificial Sequence
  Synthetic
guggagagaugggaguaggc

SEQ ID NO: 15244 - RNA, 20 nt, Artificial Sequence
  Synthetic
  misc_feature (14)..(14): n is a, c, g, or u
cggacgaccccucncggggc

SEQ ID NO: 15245 - RNA, 20 nt, Artificial Sequence
  Synthetic
  misc_feature (10)..(10): n is a, c, g, or u
auauacaucnuuuccauggc

SEQ ID NO: 15246 - RNA, 20 nt, Artificial Sequence
  Synthetic
cauauuccucuucauccugc

SEQ ID NO: 15247 - RNA, 20 nt, Artificial Sequence
  Synthetic
gugggucuuuugggcuuugc

SEQ ID NO: 15248 - RNA, 20 nt, Artificial Sequence
  Synthetic
  misc_feature (19)..(19): n is a, c, g, or u
gaaccuuuaccccguugcnc

SEQ ID NO: 15249 - RNA, 20 nt, Artificial Sequence
  Synthetic
uccuccugccuccaccaauc

SEQ ID NO: 15250 - RNA, 20 nt, Artificial Sequence
  Synthetic
cccgucugugccuucucauc

SEQ ID NO: 15251 - RNA, 20 nt, Artificial Sequence
  Synthetic
ggaguuccgcaguauggauc

SEQ ID NO: 15252 - RNA, 20 nt, Artificial Sequence
  Synthetic
ugugcacuucgcuucaccuc

SEQ ID NO: 15253 - RNA, 20 nt, Artificial Sequence
  Synthetic
  misc_feature (1)..(1): n is a, c, g, or u
ncaugcaacuuuuucaccuc

SEQ ID NO: 15254 - RNA, 20 nt, Artificial Sequence
  Synthetic
  misc_feature (6)..(6): n is a, c, g, or u
  misc_feature (9)..(9): n is a, c, g, or u
  misc_feature (12)..(12): n is a, c, g, or u
  misc_feature (15)..(15): n is a, c, g, or u
gaucuncunganacngccuc

SEQ ID NO: 15255 - RNA, 20 nt, Artificial Sequence
  Synthetic
uggaaccuuuguggcuccuc

SEQ ID NO: 15256 - RNA, 20 nt, Artificial Sequence
  Synthetic
  misc_feature (4)..(4): n is a, c, g, or u
  misc_feature (7)..(7): n is a, c, g, or u
cacngcnuuccaccaagcuc

SEQ ID NO: 15257 - RNA, 20 nt, Artificial Sequence
  Synthetic
cacucaggcaagccauucuc

SEQ ID NO: 15258 - RNA, 20 nt, Artificial Sequence
  Synthetic
  misc_feature (3)..(3): n is a, c, g, or u
cunucguccccuucuccguc

SEQ ID NO: 15259 - RNA, 20 nt, Artificial Sequence
  Synthetic
cagccaguggggguugcguc

SEQ ID NO: 15260 - RNA, 20 nt, Artificial Sequence
  Synthetic
aaacaagcggcuaggaguuc

SEQ ID NO: 15261 - RNA, 20 nt, Artificial Sequence
  Synthetic
accauauucuugggaacaag

SEQ ID NO: 15262 - RNA, 20 nt, Artificial Sequence
  Synthetic
cgugcagaggugaagcgaag

SEQ ID NO: 15263 - RNA, 20 nt, Artificial Sequence
  Synthetic
  misc_feature (12)..(12): n is a, c, g, or u
ucuaaggcuucncgauacag

SEQ ID NO: 15264 - RNA, 20 nt, Artificial Sequence
  Synthetic
  misc_feature (15)..(15): n is a, c, g, or u
cugacucugggaucnugcag

SEQ ID NO: 15265 - RNA, 20 nt, Artificial Sequence
  Synthetic
  misc_feature (8)..(8): n is a, c, g, or u
  misc_feature (11)..(11): n is a, c, g, or u
gcuuggcnaunggccaucag

SEQ ID NO: 15266 - RNA, 20 nt, Artificial Sequence
  Synthetic
gguggagcccucaggcucag

SEQ ID NO: 15267 - RNA, 20 nt, Artificial Sequence
  Synthetic
gggucguccgcgggauucag

SEQ ID NO: 15268 - RNA, 20 nt, Artificial Sequence
  Synthetic
  misc_feature (1)..(1): n is a, c, g, or u
nuuuucauuuacagugagag

SEQ ID NO: 15269 - RNA, 20 nt, Artificial Sequence
  Synthetic
caauaugcccugagccugag

SEQ ID NO: 15270 - RNA, 20 nt, Artificial Sequence
  Synthetic
cagagaauggcuugccugag

SEQ ID NO: 15271 - RNA, 20 nt, Artificial Sequence
  Synthetic
  misc_feature (4)..(4): n is a, c, g, or u
cucnuggcucaguuuacuag

SEQ ID NO: 15272 - RNA, 20 nt, Artificial Sequence
  Synthetic
  misc_feature (12)..(12): n is a, c, g, or u
aagagggaaacnacacguag

SEQ ID NO: 15273 - RNA, 20 nt, Artificial Sequence
  Synthetic
auuuguucagugguucguag

SEQ ID NO: 15274 - RNA, 20 nt, Artificial Sequence
  Synthetic
cuggaauuagaggacaaacg

SEQ ID NO: 15275 - RNA, 20 nt, Artificial Sequence
  Synthetic
acgguggucuccaugcaacg

SEQ ID NO: 15276 - RNA, 20 nt, Artificial Sequence
  Synthetic
aaaaccccgccuguaacacg

SEQ ID NO: 15277 - RNA, 20 nt, Artificial Sequence
  Synthetic
cacagaccaggccguugccg

SEQ ID NO: 15278 - RNA, 20 nt, Artificial Sequence
  Synthetic
uuugcuccagaccggcugcg

SEQ ID NO: 15279 - RNA, 20 nt, Artificial Sequence
  Synthetic
guugccuugagcaggagucg

SEQ ID NO: 15280 - RNA, 20 nt, Artificial Sequence
  Synthetic
gguaggagugggagcauucg

SEQ ID NO: 15281 - RNA, 20 nt, Artificial Sequence
  Synthetic
  misc_feature (1)..(1): n is a, c, g, or u
ngaugggaugggaauacagg

SEQ ID NO: 15282 - RNA, 20 nt, Artificial Sequence
  Synthetic
gcaguauggaucggcagagg

SEQ ID NO: 15283 - RNA, 20 nt, Artificial Sequence
  Synthetic
ggaaguguugauaagauagg

SEQ ID NO: 15284 - RNA, 20 nt, Artificial Sequence
  Synthetic
  misc_feature (17)..(17): n is a, c, g, or u
ccgcggacgaccccucncgg

SEQ ID NO: 15285 - RNA, 20 nt, Artificial Sequence
  Synthetic
cuuuguuuacgucccgucgg

SEQ ID NO: 15286 - RNA, 20 nt, Artificial Sequence
  Synthetic
caguuggacccugcauucgg

SEQ ID NO: 15287 - RNA, 20 nt, Artificial Sequence
  Synthetic
  misc_feature (4)..(4): n is a, c, g, or u
  misc_feature (7)..(8): n is a, c, g, or u
cgunccnnccgaccacgggg

SEQ ID NO: 15288 - RNA, 20 nt, Artificial Sequence
  Synthetic
gccaaccagguaggaguggg

SEQ ID NO: 15289 - RNA, 20 nt, Artificial Sequence
  Synthetic
auggaugaugugguauuggg

SEQ ID NO: 15290 - RNA, 20 nt, Artificial Sequence
  Synthetic
  misc_feature (3)..(3): n is a, c, g, or u
uanccacauuguguaaaugg

SEQ ID NO: 15291 - RNA, 20 nt, Artificial Sequence
  Synthetic
  misc_feature (4)..(4): n is a, c, g, or u
  misc_feature (6)..(6): n is a, c, g, or u
guunanuguuccugaacugg

SEQ ID NO: 15292 - RNA, 20 nt, Artificial Sequence
  Synthetic
acgcaacccccacuggcugg

SEQ ID NO: 15293 - RNA, 20 nt, Artificial Sequence
  Synthetic
uuugcucgcagccggucugg

SEQ ID NO: 15294 - RNA, 20 nt, Artificial Sequence
  Synthetic
  misc_feature (5)..(5): n is a, c, g, or u
  misc_feature (9)..(9): n is a, c, g, or u
acggnggunuuuuggggugg

SEQ ID NO: 15295 - RNA, 20 nt, Artificial Sequence
  Synthetic
gacccuuauaaagaauuugg

SEQ ID NO: 15296 - RNA, 20 nt, Artificial Sequence
  Synthetic
  misc_feature (11)..(11): n is a, c, g, or u
ugugccuuggnuggcuuugg

SEQ ID NO: 15297 - RNA, 20 nt, Artificial Sequence
  Synthetic
  misc_feature (19)..(19): n is a, c, g, or u
uggugacccgcaaaaugang

SEQ ID NO: 15298 - RNA, 20 nt, Artificial Sequence
  Synthetic
  misc_feature (13)..(13): n is a, c, g, or u
  misc_feature (16)..(16): n is a, c, g, or u
  misc_feature (19)..(19): n is a, c, g, or u
uaaggugggaaanuunacng

SEQ ID NO: 15299 - RNA, 20 nt, Artificial Sequence
  Synthetic
ccacaaagguuccacgcaug

SEQ ID NO: 15300 - RNA, 20 nt, Artificial Sequence
  Synthetic
caaauggcacuaguaaacug

SEQ ID NO: 15301 - RNA, 20 nt, Artificial Sequence
  Synthetic
  misc_feature (6)..(6): n is a, c, g, or u
  misc_feature (8)..(8): n is a, c, g, or u
acugungncaauaugcccug

SEQ ID NO: 15302 - RNA, 20 nt, Artificial Sequence
  Synthetic
  misc_feature (1)..(1): n is a, c, g, or u
ngaagccuuagagucuccug

SEQ ID NO: 15303 - RNA, 20 nt, Artificial Sequence
  Synthetic
  misc_feature (3)..(3): n is a, c, g, or u
cunuucaagccuccaagcug

SEQ ID NO: 15304 - RNA, 20 nt, Artificial Sequence
  Synthetic
uuacgcggucuccccgucug

SEQ ID NO: 15305 - RNA, 20 nt, Artificial Sequence
  Synthetic
  misc_feature (2)..(2): n is a, c, g, or u
cncggcaacggccuggucug

SEQ ID NO: 15306 - RNA, 20 nt, Artificial Sequence
  Synthetic
  misc_feature (9)..(9): n is a, c, g, or u
uguaggcanaaauuggucug

SEQ ID NO: 15307 - RNA, 20 nt, Artificial Sequence
  Synthetic
gcaaaauaccuaugggagug

SEQ ID NO: 15308 - RNA, 20 nt, Artificial Sequence
  Synthetic
uucucaucugccgguccgug

SEQ ID NO: 15309 - RNA, 20 nt, Artificial Sequence
  Synthetic
agaccgcguaaagagaggug

SEQ ID NO: 15310 - RNA, 20 nt, Artificial Sequence
  Synthetic
  misc_feature (7)..(7): n is a, c, g, or u
gagugcnguauggugaggug

SEQ ID NO: 15311 - RNA, 20 nt, Artificial Sequence
  Synthetic
  misc_feature (12)..(12): n is a, c, g, or u
  misc_feature (15)..(15): n is a, c, g, or u
aaaguugcaugnugnuggug

SEQ ID NO: 15312 - RNA, 20 nt, Artificial Sequence
  Synthetic
  misc_feature (15)..(15): n is a, c, g, or u
  misc_feature (18)..(18): n is a, c, g, or u
auucccaucccaucnucnug

SEQ ID NO: 15313 - RNA, 20 nt, Artificial Sequence
  Synthetic
uccucuuauguaagaccuug

SEQ ID NO: 15314 - RNA, 20 nt, Artificial Sequence
  Synthetic
ggaaacauagaguugccuug

SEQ ID NO: 15315 - RNA, 20 nt, Artificial Sequence
  Synthetic
  misc_feature (5)..(5): n is a, c, g, or u
aaagnauugugggucuuuug

SEQ ID NO: 15316 - RNA, 20 nt, Artificial Sequence
  Synthetic
  misc_feature (20)..(20): n is a, c, g, or u
caacaaccaguacgggaccn

SEQ ID NO: 15317 - RNA, 20 nt, Artificial Sequence
  Synthetic
  misc_feature (2)..(2): n is a, c, g, or u
  misc_feature (20)..(20): n is a, c, g, or u
gnccccugacucugggaucn

SEQ ID NO: 15318 - RNA, 20 nt, Artificial Sequence
  Synthetic
  misc_feature (19)..(20): n is a, c, g, or u
aucaaggaccacuggccann

SEQ ID NO: 15319 - RNA, 20 nt, Artificial Sequence
  Synthetic
  misc_feature (17)..(17): n is a, c, g, or u
  misc_feature (20)..(20): n is a, c, g, or u
cuggcuggggcuuggcnaun

SEQ ID NO: 15320 - RNA, 20 nt, Artificial Sequence
  Synthetic
  misc_feature (11)..(11): n is a, c, g, or u
  misc_feature (20)..(20): n is a, c, g, or u
auaggugucancaauuugun

SEQ ID NO: 15321 - RNA, 20 nt, Artificial Sequence
  Synthetic
  misc_feature (1)..(1): n is a, c, g, or u
  misc_feature (20)..(20): n is a, c, g, or u
nuggugcgcagaccaauuun

SEQ ID NO: 15322 - RNA, 20 nt, Artificial Sequence
  Synthetic
cuacgaaccacugaacaaau

SEQ ID NO: 15323 - RNA, 20 nt, Artificial Sequence
  Synthetic
caaaaccuacggauggaaau

SEQ ID NO: 15324 - RNA, 20 nt, Artificial Sequence
  Synthetic
  misc_feature (10)..(10): n is a, c, g, or u
ucgcagacgnagaucucaau

SEQ ID NO: 15325 - RNA, 20 nt, Artificial Sequence
  Synthetic
aauuccccccagcagagaau

SEQ ID NO: 15326 - RNA, 20 nt, Artificial Sequence
  Synthetic
  misc_feature (1)..(1): n is a, c, g, or u
nccuaucuuuaauccugaau

SEQ ID NO: 15327 - RNA, 20 nt, Artificial Sequence
  Synthetic
ucaaggucggucguugacau

SEQ ID NO: 15328 - RNA, 20 nt, Artificial Sequence
  Synthetic
  misc_feature (13)..(13): n is a, c, g, or u
gaaauauacaucnuuuccau

SEQ ID NO: 15329 - RNA, 20 nt, Artificial Sequence
  Synthetic
ccuuagagucuccugagcau

SEQ ID NO: 15330 - RNA, 20 nt, Artificial Sequence
  Synthetic
ccaauaagaagaugaggcau

SEQ ID NO: 15331 - RNA, 20 nt, Artificial Sequence
  Synthetic
gguuccacgcaugcgcugau

SEQ ID NO: 15332 - RNA, 20 nt, Artificial Sequence
  Synthetic
  misc_feature (18)..(18): n is a, c, g, or u
cgcaugcgcugauggccnau

SEQ ID NO: 15333 - RNA, 20 nt, Artificial Sequence
  Synthetic
  misc_feature (1)..(1): n is a, c, g, or u
  misc_feature (3)..(3): n is a, c, g, or u
  misc_feature (11)..(11): n is a, c, g, or u
  misc_feature (15)..(15): n is a, c, g, or u
nunaacccugnuccnaauau

SEQ ID NO: 15334 - RNA, 20 nt, Artificial Sequence
  Synthetic
cuccaauuuguccugguuau

SEQ ID NO: 15335 - RNA, 20 nt, Artificial Sequence
  Synthetic
caaccccaucaaggaccacu

SEQ ID NO: 15336 - RNA, 20 nt, Artificial Sequence
  Synthetic
uugcugacgcaacccccacu

SEQ ID NO: 15337 - RNA, 20 nt, Artificial Sequence
  Synthetic
gagguuggucaucaaaaccu

SEQ ID NO: 15338 - RNA, 20 nt, Artificial Sequence
  Synthetic
  misc_feature (8)..(8): n is a, c, g, or u
  misc_feature (11)..(11): n is a, c, g, or u
  misc_feature (16)..(16): n is a, c, g, or u
cguguggnggngugancccu

SEQ ID NO: 15339 - RNA, 20 nt, Artificial Sequence
  Synthetic
cccuagaagaagaacucccu

SEQ ID NO: 15340 - RNA, 20 nt, Artificial Sequence
  Synthetic
gaagaagaacucccucgccu

SEQ ID NO: 15341 - RNA, 20 nt, Artificial Sequence
  Synthetic
  misc_feature (17)..(17): n is a, c, g, or u
uccaguuggcaguacanccu

SEQ ID NO: 15342 - RNA, 20 nt, Artificial Sequence
  Synthetic
auccauacugcggaacuccu

SEQ ID NO: 15343 - RNA, 20 nt, Artificial Sequence
  Synthetic
ccccccagcagagaauggcu

SEQ ID NO: 15344 - RNA, 20 nt, Artificial Sequence
  Synthetic
uccuagccgcuuguuuugcu

SEQ ID NO: 15345 - RNA, 20 nt, Artificial Sequence
  Synthetic
  misc_feature (4)..(5): n is a, c, g, or u
  misc_feature (7)..(7): n is a, c, g, or u
  misc_feature (15)..(15): n is a, c, g, or u
gugnngnuaggauanaaucu

SEQ ID NO: 15346 - RNA, 20 nt, Artificial Sequence
  Synthetic
  misc_feature (12)..(12): n is a, c, g, or u
uggggggaauunaugacucu

SEQ ID NO: 15347 - RNA, 20 nt, Artificial Sequence
  Synthetic
  misc_feature (17)..(17): n is a, c, g, or u
uauugugguuucauaunucu

SEQ ID NO: 15348 - RNA, 20 nt, Artificial Sequence
  Synthetic
  misc_feature (1)..(1): n is a, c, g, or u
  misc_feature (13)..(13): n is a, c, g, or u
naaacaggcuuunacuuucu

SEQ ID NO: 15349 - RNA, 20 nt, Artificial Sequence
  Synthetic
uuaggcagaggugaaaaagu

SEQ ID NO: 15350 - RNA, 20 nt, Artificial Sequence
  Synthetic
  misc_feature (3)..(3): n is a, c, g, or u
aangagaguaacuccacagu

SEQ ID NO: 15351 - RNA, 20 nt, Artificial Sequence
  Synthetic
acaugagggaaacauagagu

SEQ ID NO: 15352 - RNA, 20 nt, Artificial Sequence
  Synthetic
  misc_feature (2)..(2): n is a, c, g, or u
anauaugaaaccacaauagu

SEQ ID NO: 15353 - RNA, 20 nt, Artificial Sequence
  Synthetic
uucgcuucaccucugcacgu

SEQ ID NO: 15354 - RNA, 20 nt, Artificial Sequence
  Synthetic
  misc_feature (3)..(3): n is a, c, g, or u
uanaugaaccuuuaccccgu

SEQ ID NO: 15355 - RNA, 20 nt, Artificial Sequence
  Synthetic
cuuggcacagaccaggccgu

SEQ ID NO: 15356 - RNA, 20 nt, Artificial Sequence
  Synthetic
  misc_feature (2)..(2): n is a, c, g, or u
gnagaucucaaucgccgcgu

SEQ ID NO: 15357 - RNA, 20 nt, Artificial Sequence
  Synthetic
aaauuauuacccacccaggu

SEQ ID NO: 15358 - RNA, 20 nt, Artificial Sequence
  Synthetic
  misc_feature (2)..(2): n is a, c, g, or u
gncuguauuuuccugcuggu

SEQ ID NO: 15359 - RNA, 20 nt, Artificial Sequence
  Synthetic
acucuauguuucccucaugu

SEQ ID NO: 15360 - RNA, 20 nt, Artificial Sequence
  Synthetic
ucuggauuaucaagguaugu

SEQ ID NO: 15361 - RNA, 20 nt, Artificial Sequence
  Synthetic
  misc_feature (17)..(17): n is a, c, g, or u
uuuguacaauaugaucnugu

SEQ ID NO: 15362 - RNA, 20 nt, Artificial Sequence
  Synthetic
  misc_feature (17)..(17): n is a, c, g, or u
ugaccaaccucccaugnugu

SEQ ID NO: 15363 - RNA, 20 nt, Artificial Sequence
  Synthetic
cgcaugcguggaaccuuugu

SEQ ID NO: 15364 - RNA, 20 nt, Artificial Sequence
  Synthetic
  misc_feature (16)..(16): n is a, c, g, or u
  misc_feature (19)..(19): n is a, c, g, or u
aauuggaaguuggggnacnu

SEQ ID NO: 15365 - RNA, 20 nt, Artificial Sequence
  Synthetic
  misc_feature (19)..(19): n is a, c, g, or u
ggccucaguccguuucucnu

SEQ ID NO: 15366 - RNA, 20 nt, Artificial Sequence
  Synthetic
  misc_feature (19)..(19): n is a, c, g, or u
cuccaagcugugccuuggnu

SEQ ID NO: 15367 - RNA, 20 nt, Artificial Sequence
  Synthetic
  misc_feature (18)..(19): n is a, c, g, or u
cuccuaccugguuggcunnu

SEQ ID NO: 15368 - RNA, 20 nt, Artificial Sequence
  Synthetic
cgugugucuuggccaaaauu

SEQ ID NO: 15369 - RNA, 20 nt, Artificial Sequence
  Synthetic
ucucuuucggaguguggauu

SEQ ID NO: 15370 - RNA, 20 nt, Artificial Sequence
  Synthetic
gguugcgucagcaaacacuu

SEQ ID NO: 15371 - RNA, 20 nt, Artificial Sequence
  Synthetic
cugccgguccgugugcacuu

SEQ ID NO: 15372 - RNA, 20 nt, Artificial Sequence
  Synthetic
  misc_feature (4)..(4): n is a, c, g, or u
  misc_feature (9)..(9): n is a, c, g, or u
ucangaugnuguacagacuu

SEQ ID NO: 15373 - RNA, 20 nt, Artificial Sequence
  Synthetic
acccccacuggcuggggcuu

SEQ ID NO: 15374 - RNA, 20 nt, Artificial Sequence
  Synthetic
auugugggucuuuugggcuu

SEQ ID NO: 15375 - RNA, 20 nt, Artificial Sequence
  Synthetic
  misc_feature (6)..(6): n is a, c, g, or u
ggggancacccgugugucuu

SEQ ID NO: 15376 - RNA, 20 nt, Artificial Sequence
  Synthetic
  misc_feature (12)..(12): n is a, c, g, or u
gucccgcgaagnauccaguu

SEQ ID NO: 15377 - RNA, 20 nt, Artificial Sequence
  Synthetic
  misc_feature (2)..(2): n is a, c, g, or u
  misc_feature (11)..(11): n is a, c, g, or u
unuuaggaaangaaggaguu

SEQ ID NO: 15378 - RNA, 20 nt, Artificial Sequence
  Synthetic
gcucccacuccuaccugguu

SEQ ID NO: 15379 - RNA, 20 nt, Artificial Sequence
  Synthetic
ccuggucugugccaaguguu

SEQ ID NO: 15380 - RNA, 20 nt, Artificial Sequence
  Synthetic
  misc_feature (18)..(18): n is a, c, g, or u
caaucuggauuguuuganuu

SEQ ID NO: 15381 - RNA, 20 nt, Artificial Sequence
  Synthetic
  misc_feature (3)..(3): n is a, c, g, or u
  misc_feature (9)..(9): n is a, c, g, or u
  misc_feature (12)..(12): n is a, c, g, or u
  misc_feature (18)..(18): n is a, c, g, or u
uunucagunccnaugagnuu

SEQ ID NO: 15382 - RNA, 20 nt, Artificial Sequence
  Synthetic
  misc_feature (9)..(9): n is a, c, g, or u
  misc_feature (12)..(12): n is a, c, g, or u
aucccaucnucnugggcuuu

SEQ ID NO: 15383 - RNA, 20 nt, Artificial Sequence
  Synthetic
agcaggagucgugcagguuu

SEQ ID NO: 15384 - RNA, 20 nt, Artificial Sequence
  Synthetic
agggcuuucccccacuguuu

SEQ ID NO: 15385 - RNA, 20 nt, Artificial Sequence
  Synthetic
  misc_feature (9)..(9): n is a, c, g, or u
gagaaagunaaagccuguuu

SEQ ID NO: 15386 - RNA, 20 nt, Artificial Sequence
  Synthetic
gaacuccuagccgcuuguuu

SEQ ID NO: 15387 - RNA, 20 nt, Artificial Sequence
  Synthetic
gguuggggacugcgaauuuu

SEQ ID NO: 15388 - RNA, 20 nt, Artificial Sequence
  Synthetic
  misc_feature (16)..(16): n is a, c, g, or u
uguggaguuacucucnuuuu

SEQ ID NO: 15389 - RNA, 17 nt, Artificial Sequence
  Synthetic
guuggauccgagaguaa

SEQ ID NO: 15390 - RNA, 17 nt, Artificial Sequence
  Synthetic
gugcaauuuccguccga

SEQ ID NO: 15391 - RNA, 17 nt, Artificial Sequence
  Synthetic
ggccguugccgagcaac

SEQ ID NO: 15392 - RNA, 17 nt, Artificial Sequence
  Synthetic
gcugacgcaacccccac

SEQ ID NO: 15393 - RNA, 17 nt, Artificial Sequence
  Synthetic
guaggucccggacagac

SEQ ID NO: 15394 - RNA, 17 nt, Artificial Sequence
  Synthetic
guaccacccgggugucc

SEQ ID NO: 15395 - RNA, 17 nt, Artificial Sequence
  Synthetic
gaggcaauagucggagc

SEQ ID NO: 15396 - RNA, 17 nt, Artificial Sequence
  Synthetic
gcgaagugcacacgggc

SEQ ID NO: 15397 - RNA, 17 nt, Artificial Sequence
  Synthetic
gucccaaucgggacugc

SEQ ID NO: 15398 - RNA, 17 nt, Artificial Sequence
  Synthetic
gccuguaacacgagaag

SEQ ID NO: 15399 - RNA, 17 nt, Artificial Sequence
  Synthetic
gcaguauggaucggcag

SEQ ID NO: 15400 - RNA, 17 nt, Artificial Sequence
  Synthetic
ggaguccgcguaaagag

SEQ ID NO: 15401 - RNA, 17 nt, Artificial Sequence
  Synthetic
ggccaucagcgcaugcg

SEQ ID NO: 15402 - RNA, 17 nt, Artificial Sequence
  Synthetic
gccaacuggauccugcg

SEQ ID NO: 15403 - RNA, 17 nt, Artificial Sequence
  Synthetic
gcggacgaccccucucg

SEQ ID NO: 15404 - RNA, 17 nt, Artificial Sequence
  Synthetic
gucggcgcugaauccug

SEQ ID NO: 15405 - RNA, 17 nt, Artificial Sequence
  Synthetic
gucaacgaccuggauug

SEQ ID NO: 15406 - RNA, 17 nt, Artificial Sequence
  Synthetic
gaggugcgacccgucgu

SEQ ID NO: 15407 - RNA, 20 nt, Artificial Sequence
  Synthetic
gaucggcagaggagccacaa

SEQ ID NO: 15408 - RNA, 20 nt, Artificial Sequence
  Synthetic
gcgguaauacaggcauacaa

SEQ ID NO: 15409 - RNA, 20 nt, Artificial Sequence
  Synthetic
gccuggccguugccgagcaa

SEQ ID NO: 15410 - RNA, 20 nt, Artificial Sequence
  Synthetic
guugccgagcaacgggguaa

SEQ ID NO: 15411 - RNA, 20 nt, Artificial Sequence
  Synthetic
gaucuucgucugcgaggcga

SEQ ID NO: 15412 - RNA, 20 nt, Artificial Sequence
  Synthetic
gaauagacccauugauugga

SEQ ID NO: 15413 - RNA, 20 nt, Artificial Sequence
  Synthetic
gcgagggaguucuucuucua

SEQ ID NO: 15414 - RNA, 20 nt, Artificial Sequence
  Synthetic
ggacuucucucaauuuucua

SEQ ID NO: 15415 - RNA, 20 nt, Artificial Sequence
  Synthetic
ggaucuacaaccaccagcac

SEQ ID NO: 15416 - RNA, 20 nt, Artificial Sequence
  Synthetic
ggggacugcgaauuuuggcc

SEQ ID NO: 15417 - RNA, 20 nt, Artificial Sequence
  Synthetic
gugcuggugguuguagaucc

SEQ ID NO: 15418 - RNA, 20 nt, Artificial Sequence
  Synthetic
gggguaccacccgggugucc

SEQ ID NO: 15419 - RNA, 20 nt, Artificial Sequence
  Synthetic
gaccuccgauugguggaagc

SEQ ID NO: 15420 - RNA, 20 nt, Artificial Sequence
  Synthetic
gaagcgaagugcacacgggc

SEQ ID NO: 15421 - RNA, 20 nt, Artificial Sequence
  Synthetic
gaagucccaaucgggacugc

SEQ ID NO: 15422 - RNA, 20 nt, Artificial Sequence
  Synthetic
gguuuugcagggucccgugc

SEQ ID NO: 15423 - RNA, 20 nt, Artificial Sequence
  Synthetic
ggucuccaugcgacgugcag

SEQ ID NO: 15424 - RNA, 20 nt, Artificial Sequence
  Synthetic
gccccaagcgaccacgagag

SEQ ID NO: 15425 - RNA, 20 nt, Artificial Sequence
  Synthetic
gagccccaagcgaccacgag

SEQ ID NO: 15426 - RNA, 20 nt, Artificial Sequence
  Synthetic
gauugagaucuucugcgacg

SEQ ID NO: 15427 - RNA, 20 nt, Artificial Sequence
  Synthetic
gggucgcaccucucuuuacg

SEQ ID NO: 15428 - RNA, 20 nt, Artificial Sequence
  Synthetic
gauugagaucuucgucugcg

SEQ ID NO: 15429 - RNA, 20 nt, Artificial Sequence
  Synthetic
ggguucacacccccacacgg

SEQ ID NO: 15430 - RNA, 20 nt, Artificial Sequence
  Synthetic
gacgcaacccccacuggcug

SEQ ID NO: 15431 - RNA, 20 nt, Artificial Sequence
  Synthetic
gcgcaugcgcggaaccuuug

SEQ ID NO: 15432 - RNA, 20 nt, Artificial Sequence
  Synthetic
gggaacaagagcuacagcau

SEQ ID NO: 15433 - RNA, 20 nt, Artificial Sequence
  Synthetic
ggcuuucggaaaauaccuau

SEQ ID NO: 15434 - RNA, 20 nt, Artificial Sequence
  Synthetic
ggguugcgucagcaaacacu

SEQ ID NO: 15435 - RNA, 20 nt, Artificial Sequence
  Synthetic
guaacacgagaagggguccu

SEQ ID NO: 15436 - RNA, 20 nt, Artificial Sequence
  Synthetic
guauucccaucccaucaucu

SEQ ID NO: 15437 - RNA, 20 nt, Artificial Sequence
  Synthetic
guccuuugucuacgucccgu

SEQ ID NO: 15438 - RNA, 20 nt, Artificial Sequence
  Synthetic
guugauaggauaggggcauu

SEQ ID NO: 15439 - RNA, 20 nt, Artificial Sequence
  Synthetic
gaccccucucguggucgcuu

SEQ ID NO: 15440 - RNA, 20 nt, Artificial Sequence
  Synthetic
gcaauuuccguccgaagguu

SEQ ID NO: 15441 - RNA, 17 nt, Artificial Sequence
  Synthetic
cgacgggacguagacaa

SEQ ID NO: 15442 - RNA, 17 nt, Artificial Sequence
  Synthetic
uggccguugccgagcaa

SEQ ID NO: 15443 - RNA, 17 nt, Artificial Sequence
  Synthetic
accccguugcucggcaa

SEQ ID NO: 15444 - RNA, 17 nt, Artificial Sequence
  Synthetic
cgccuguaacacgagaa

SEQ ID NO: 15445 - RNA, 17 nt, Artificial Sequence
  Synthetic
ucucucaacggcgagaa

SEQ ID NO: 15446 - RNA, 17 nt, Artificial Sequence
  Synthetic
ugguaacagcgguauaa

SEQ ID NO: 15447 - RNA, 17 nt, Artificial Sequence
  Synthetic
aggcaauagucggagca

SEQ ID NO: 15448 - RNA, 17 nt, Artificial Sequence
  Synthetic
caccucugcacgucgca

SEQ ID NO: 15449 - RNA, 17 nt, Artificial Sequence
  Synthetic
uguuagacaacgaggca

SEQ ID NO: 15450 - RNA, 17 nt, Artificial Sequence
  Synthetic
aacggcgagaaggggca

SEQ ID NO: 15451 - RNA, 17 nt, Artificial Sequence
  Synthetic
ccgccuguaacacgaga

SEQ ID NO: 15452 - RNA, 17 nt, Artificial Sequence
  Synthetic
cccaagcgaccacgaga

SEQ ID NO: 15453 - RNA, 17 nt, Artificial Sequence
  Synthetic
cucucucaacggcgaga

SEQ ID NO: 15454 - RNA, 17 nt, Artificial Sequence
  Synthetic
uaaggcaucucgguaga

SEQ ID NO: 15455 - RNA, 17 nt, Artificial Sequence
  Synthetic
  misc_feature (1)..(2): n is a, c, g, or u
nncguuccggccgacga

SEQ ID NO: 15456 - RNA, 17 nt, Artificial Sequence
  Synthetic
cuucgucugcgaggcga

SEQ ID NO: 15457 - RNA, 17 nt, Artificial Sequence
  Synthetic
uguaccaaaccuucgga

SEQ ID NO: 15458 - RNA, 17 nt, Artificial Sequence
  Synthetic
uagacccauugauugga

SEQ ID NO: 15459 - RNA, 17 nt, Artificial Sequence
  Synthetic
cuuucggaaaauaccua

SEQ ID NO: 15460 - RNA, 17 nt, Artificial Sequence
  Synthetic
cuaggaguuccgcagua

SEQ ID NO: 15461 - RNA, 17 nt, Artificial Sequence
  Synthetic
  misc_feature (1)..(1): n is a, c, g, or u
ncguuccggccgacgac

SEQ ID NO: 15462 - RNA, 17 nt, Artificial Sequence
  Synthetic
caggauucagcgccgac

SEQ ID NO: 15463 - RNA, 17 nt, Artificial Sequence
  Synthetic
cugcuuagcgguaauac

SEQ ID NO: 15464 - RNA, 17 nt, Artificial Sequence
  Synthetic
accccuucucguguuac

SEQ ID NO: 15465 - RNA, 17 nt, Artificial Sequence
  Synthetic
cgccccggucaacgacc

SEQ ID NO: 15466 - RNA, 17 nt, Artificial Sequence
  Synthetic
aauccaggucguugacc

SEQ ID NO: 15467 - RNA, 17 nt, Artificial Sequence
  Synthetic
cuggugguuguagaucc

SEQ ID NO: 15468 - RNA, 17 nt, Artificial Sequence
  Synthetic
cggugucgaguaggucc

SEQ ID NO: 15469 - RNA, 17 nt, Artificial Sequence
  Synthetic
cuccgauugguggaagc

SEQ ID NO: 15470 - RNA, 17 nt, Artificial Sequence
  Synthetic
cgagaggggucguccgc

SEQ ID NO: 15471 - RNA, 17 nt, Artificial Sequence
  Synthetic
caaaggacgucccgcgc

SEQ ID NO: 15472 - RNA, 17 nt, Artificial Sequence
  Synthetic
uuguuagacaacgaggc

SEQ ID NO: 15473 - RNA, 17 nt, Artificial Sequence
  Synthetic
ugcgacccgucgucggc

SEQ ID NO: 15474 - RNA, 17 nt, Artificial Sequence
  Synthetic
acgcaacccccacuggc

SEQ ID NO: 15475 - RNA, 17 nt, Artificial Sequence
  Synthetic
uuugcagggucccgugc

SEQ ID NO: 15476 - RNA, 17 nt, Artificial Sequence
  Synthetic
uccaccaaucggagguc

SEQ ID NO: 15477 - RNA, 17 nt, Artificial Sequence
  Synthetic
  misc_feature (13)..(13): n is a, c, g, or u
uucgcucgcagcngguc

SEQ ID NO: 15478 - RNA, 17 nt, Artificial Sequence
  Synthetic
cccacacgguggccuuc

SEQ ID NO: 15479 - RNA, 17 nt, Artificial Sequence
  Synthetic
cucucaacggcgagaag

SEQ ID NO: 15480 - RNA, 17 nt, Artificial Sequence
  Synthetic
uuggauccgagaguaag

SEQ ID NO: 15481 - RNA, 17 nt, Artificial Sequence
  Synthetic
cuccaugcgacgugcag

SEQ ID NO: 15482 - RNA, 17 nt, Artificial Sequence
  Synthetic
ccaagcgaccacgagag

SEQ ID NO: 15483 - RNA, 17 nt, Artificial Sequence
  Synthetic
cuucucgccguugagag

SEQ ID NO: 15484 - RNA, 17 nt, Artificial Sequence
  Synthetic
ccccaagcgaccacgag

SEQ ID NO: 15485 - RNA, 17 nt, Artificial Sequence
  Synthetic
cuaaggcaucucgguag

SEQ ID NO: 15486 - RNA, 17 nt, Artificial Sequence
  Synthetic
acuguuguuagacaacg

SEQ ID NO: 15487 - RNA, 17 nt, Artificial Sequence
  Synthetic
ugagaucuucugcgacg

SEQ ID NO: 15488 - RNA, 17 nt, Artificial Sequence
  Synthetic
ucgcaccucucuuuacg

SEQ ID NO: 15489 - RNA, 17 nt, Artificial Sequence
  Synthetic
auccaggucguugaccg

SEQ ID NO: 15490 - RNA, 17 nt, Artificial Sequence
  Synthetic
ucuucgucugcgaggcg

SEQ ID NO: 15491 - RNA, 17 nt, Artificial Sequence
  Synthetic
ugagaucuucgucugcg

SEQ ID NO: 15492 - RNA, 17 nt, Artificial Sequence
  Synthetic
ccuucucguguuacagg

SEQ ID NO: 15493 - RNA, 17 nt, Artificial Sequence
  Synthetic
cgauugguggaagcagg

SEQ ID NO: 15494 - RNA, 17 nt, Artificial Sequence
  Synthetic
uucacacccccacacgg

SEQ ID NO: 15495 - RNA, 17 nt, Artificial Sequence
  Synthetic
cugcuuccaccaaucgg

SEQ ID NO: 15496 - RNA, 17 nt, Artificial Sequence
  Synthetic
agagucuagacucgugg

SEQ ID NO: 15497 - RNA, 17 nt, Artificial Sequence
  Synthetic
ucugccgauccauacug

SEQ ID NO: 15498 - RNA, 17 nt, Artificial Sequence
  Synthetic
ccucucguggucgcuug

SEQ ID NO: 15499 - RNA, 17 nt, Artificial Sequence
  Synthetic
caugcgcggaaccuuug

SEQ ID NO: 15500 - RNA, 17 nt, Artificial Sequence
  Synthetic
  misc_feature (16)..(17): n is a, c, g, or u
ucgucggccggaacgnn

SEQ ID NO: 15501 - RNA, 17 nt, Artificial Sequence
  Synthetic
acggcgagaaggggcau

SEQ ID NO: 15502 - RNA, 17 nt, Artificial Sequence
  Synthetic
auuccagcagucccgau

SEQ ID NO: 15503 - RNA, 17 nt, Artificial Sequence
  Synthetic
aguuccgcaguauggau

SEQ ID NO: 15504 - RNA, 17 nt, Artificial Sequence
  Synthetic
cgaaagcccaagaugau

SEQ ID NO: 15505 - RNA, 17 nt, Artificial Sequence
  Synthetic
ucuccggaaguguugau

SEQ ID NO: 15506 - RNA, 17 nt, Artificial Sequence
  Synthetic
uugcgucagcaaacacu

SEQ ID NO: 15507 - RNA, 17 nt, Artificial Sequence
  Synthetic
ccaccgugaacgccccu

SEQ ID NO: 15508 - RNA, 17 nt, Artificial Sequence
  Synthetic
ucggauccaacagugcu

SEQ ID NO: 15509 - RNA, 17 nt, Artificial Sequence
  Synthetic
cccgcgcaggauccagu

SEQ ID NO: 15510 - RNA, 17 nt, Artificial Sequence
  Synthetic
cugaagcggugucgagu

SEQ ID NO: 15511 - RNA, 17 nt, Artificial Sequence
  Synthetic
cuuugucuacgucccgu

SEQ ID NO: 15512 - RNA, 17 nt, Artificial Sequence
  Synthetic
uuuguucaguggugcgu

SEQ ID NO: 15513 - RNA, 17 nt, Artificial Sequence
  Synthetic
uuccagcagucccgauu

SEQ ID NO: 15514 - RNA, 17 nt, Artificial Sequence
  Synthetic
cccucucguggucgcuu

SEQ ID NO: 15515 - RNA, 17 nt, Artificial Sequence
  Synthetic
auuuccguccgaagguu

SEQ ID NO: 15516 - RNA, 20 nt, Artificial Sequence
  Synthetic
auugguaacagcgguauaaa

SEQ ID NO: 15517 - RNA, 20 nt, Artificial Sequence
  Synthetic
cgccgacgggacguagacaa

SEQ ID NO: 15518 - RNA, 20 nt, Artificial Sequence
  Synthetic
uuuaccccguugcucggcaa

SEQ ID NO: 15519 - RNA, 20 nt, Artificial Sequence
  Synthetic
caugggagcaccucucucaa

SEQ ID NO: 15520 - RNA, 20 nt, Artificial Sequence
  Synthetic
caccgccuguaacacgagaa

SEQ ID NO: 15521 - RNA, 20 nt, Artificial Sequence
  Synthetic
accucucucaacggcgagaa

SEQ ID NO: 15522 - RNA, 20 nt, Artificial Sequence
  Synthetic
aauugguaacagcgguauaa

SEQ ID NO: 15523 - RNA, 20 nt, Artificial Sequence
  Synthetic
acuguuggauccgagaguaa

SEQ ID NO: 15524 - RNA, 20 nt, Artificial Sequence
  Synthetic
agcgguaauacaggcauaca

SEQ ID NO: 15525 - RNA, 20 nt, Artificial Sequence
  Synthetic
ccaaucaaugggucuauuca

SEQ ID NO: 15526 - RNA, 20 nt, Artificial Sequence
  Synthetic
ucgaguaggucccggacaga

SEQ ID NO: 15527 - RNA, 20 nt, Artificial Sequence
  Synthetic
acaccgccuguaacacgaga

SEQ ID NO: 15528 - RNA, 20 nt, Artificial Sequence
  Synthetic
agccccaagcgaccacgaga

SEQ ID NO: 15529 - RNA, 20 nt, Artificial Sequence
  Synthetic
caccucucucaacggcgaga

SEQ ID NO: 15530 - RNA, 20 nt, Artificial Sequence
  Synthetic
uucuaaggcaucucgguaga

SEQ ID NO: 15531 - RNA, 20 nt, Artificial Sequence
  Synthetic
  misc_feature (4)..(5): n is a, c, g, or u
ccunncguuccggccgacga

SEQ ID NO: 15532 - RNA, 20 nt, Artificial Sequence
  Synthetic
uccgcaggauucagcgccga

SEQ ID NO: 15533 - RNA, 20 nt, Artificial Sequence
  Synthetic
caggugcaauuuccguccga

SEQ ID NO: 15534 - RNA, 20 nt, Artificial Sequence
  Synthetic
uuuccgaaagcccaagauga

SEQ ID NO: 15535 - RNA, 20 nt, Artificial Sequence
  Synthetic
agguuccgcgcaugcgcuga

SEQ ID NO: 15536 - RNA, 20 nt, Artificial Sequence
  Synthetic
ccggaaguguugauaggaua

SEQ ID NO: 15537 - RNA, 20 nt, Artificial Sequence
  Synthetic
  misc_feature (2)..(2): n is a, c, g, or u
cngcuaggaguuccgcagua

SEQ ID NO: 15538 - RNA, 20 nt, Artificial Sequence
  Synthetic
cacuguuggauccgagagua

SEQ ID NO: 15539 - RNA, 20 nt, Artificial Sequence
  Synthetic
accacauucucuggauagua

SEQ ID NO: 15540 - RNA, 20 nt, Artificial Sequence
  Synthetic
aauuuguucaguggugcgua

SEQ ID NO: 15541 - RNA, 20 nt, Artificial Sequence
  Synthetic
aaccagucaggauugaaaac

SEQ ID NO: 15542 - RNA, 20 nt, Artificial Sequence
  Synthetic
ccuggccguugccgagcaac

SEQ ID NO: 15543 - RNA, 20 nt, Artificial Sequence
  Synthetic
aggugaagcgaagugcacac

SEQ ID NO: 15544 - RNA, 20 nt, Artificial Sequence
  Synthetic
uuugcugacgcaacccccac

SEQ ID NO: 15545 - RNA, 20 nt, Artificial Sequence
  Synthetic
caaucaaugggucuauucac

SEQ ID NO: 15546 - RNA, 20 nt, Artificial Sequence
  Synthetic
ucaucaaucuucucgaagac

SEQ ID NO: 15547 - RNA, 20 nt, Artificial Sequence
  Synthetic
cgaguaggucccggacagac

SEQ ID NO: 15548 - RNA, 20 nt, Artificial Sequence
  Synthetic
ucccuuagagguggagagac

SEQ ID NO: 15549 - RNA, 20 nt, Artificial Sequence
  Synthetic
  misc_feature (3)..(4): n is a, c, g, or u
cunncguuccggccgacgac

SEQ ID NO: 15550 - RNA, 20 nt, Artificial Sequence
  Synthetic
ccgcaggauucagcgccgac

SEQ ID NO: 15551 - RNA, 20 nt, Artificial Sequence
  Synthetic
uaccuguuuucaauccugac

SEQ ID NO: 15552 - RNA, 20 nt, Artificial Sequence
  Synthetic
agccugcuuagcgguaauac

SEQ ID NO: 15553 - RNA, 20 nt, Artificial Sequence
  Synthetic
aggaccccuucucguguuac

SEQ ID NO: 15554 - RNA, 20 nt, Artificial Sequence
  Synthetic
aauuuucuagggguaccacc

SEQ ID NO: 15555 - RNA, 20 nt, Artificial Sequence
  Synthetic
uuucgccccggucaacgacc

SEQ ID NO: 15556 - RNA, 20 nt, Artificial Sequence
  Synthetic
cucaauccaggucguugacc

SEQ ID NO: 15557 - RNA, 20 nt, Artificial Sequence
  Synthetic
auuuucuagggguaccaccc

SEQ ID NO: 15558 - RNA, 20 nt, Artificial Sequence
  Synthetic
cucuaaauuauugcccaccc

SEQ ID NO: 15559 - RNA, 20 nt, Artificial Sequence
  Synthetic
agacacauccaacgauagcc

SEQ ID NO: 15560 - RNA, 20 nt, Artificial Sequence
  Synthetic
cccguugcucggcaacggcc

SEQ ID NO: 15561 - RNA, 20 nt, Artificial Sequence
  Synthetic
aagcggugucgaguaggucc

SEQ ID NO: 15562 - RNA, 20 nt, Artificial Sequence
  Synthetic
ugccuguauuaccgcuaagc

SEQ ID NO: 15563 - RNA, 20 nt, Artificial Sequence
  Synthetic
agagaggcaauagucggagc

SEQ ID NO: 15564 - RNA, 20 nt, Artificial Sequence
  Synthetic
acuuugggauaaaaccuagc

SEQ ID NO: 15565 - RNA, 20 nt, Artificial Sequence
  Synthetic
ccacgagaggggucguccgc

SEQ ID NO: 15566 - RNA, 20 nt, Artificial Sequence
  Synthetic
agacaaaggacgucccgcgc

SEQ ID NO: 15567 - RNA, 20 nt, Artificial Sequence
  Synthetic
cuguuguuagacaacgaggc

SEQ ID NO: 15568 - RNA, 20 nt, Artificial Sequence
  Synthetic
aggugcgacccgucgucggc

SEQ ID NO: 15569 - RNA, 20 nt, Artificial Sequence
  Synthetic
cugacgcaacccccacuggc

SEQ ID NO: 15570 - RNA, 20 nt, Artificial Sequence
  Synthetic
uccuugagcaagaguggugc

SEQ ID NO: 15571 - RNA, 20 nt, Artificial Sequence
  Synthetic
aagaguggugcagguuuugc

SEQ ID NO: 15572 - RNA, 20 nt, Artificial Sequence
  Synthetic
uuuaaggacugggaggaguc

SEQ ID NO: 15573 - RNA, 20 nt, Artificial Sequence
  Synthetic
  misc_feature (16)..(16): n is a, c, g, or u
uguuucgcucgcagcngguc

SEQ ID NO: 15574 - RNA, 20 nt, Artificial Sequence
  Synthetic
cugacuucuucccgucuguc

SEQ ID NO: 15575 - RNA, 20 nt, Artificial Sequence
  Synthetic
accgccuguaacacgagaag

SEQ ID NO: 15576 - RNA, 20 nt, Artificial Sequence
  Synthetic
ccucucucaacggcgagaag

SEQ ID NO: 15577 - RNA, 20 nt, Artificial Sequence
  Synthetic
aucucgguagagggcugaag

SEQ ID NO: 15578 - RNA, 20 nt, Artificial Sequence
  Synthetic
cuguuggauccgagaguaag

SEQ ID NO: 15579 - RNA, 20 nt, Artificial Sequence
  Synthetic
uccgcaguauggaucggcag

SEQ ID NO: 15580 - RNA, 20 nt, Artificial Sequence
  Synthetic
uacuagugcaauuuguucag

SEQ ID NO: 15581 - RNA, 20 nt, Artificial Sequence
  Synthetic
cggggaguccgcguaaagag

SEQ ID NO: 15582 - RNA, 20 nt, Artificial Sequence
  Synthetic
ccccuucucgccguugagag

SEQ ID NO: 15583 - RNA, 20 nt, Artificial Sequence
  Synthetic
ucggaaaauaccuaugggag

SEQ ID NO: 15584 - RNA, 20 nt, Artificial Sequence
  Synthetic
auucuaaggcaucucgguag

SEQ ID NO: 15585 - RNA, 20 nt, Artificial Sequence
  Synthetic
acuacuguuguuagacaacg

SEQ ID NO: 15586 - RNA, 20 nt, Artificial Sequence
  Synthetic
cuggccguugccgagcaacg

SEQ ID NO: 15587 - RNA, 20 nt, Artificial Sequence
  Synthetic
agaucuucgucugcgaggcg

SEQ ID NO: 15588 - RNA, 20 nt, Artificial Sequence
  Synthetic
auuggccaucagcgcaugcg

SEQ ID NO: 15589 - RNA, 20 nt, Artificial Sequence
  Synthetic
  misc_feature (6)..(6): n is a, c, g, or u
uaccanagagucuagacucg

SEQ ID NO: 15590 - RNA, 20 nt, Artificial Sequence
  Synthetic
ccugcggacgaccccucucg

SEQ ID NO: 15591 - RNA, 20 nt, Artificial Sequence
  Synthetic
uuaaggacugggaggagucg

SEQ ID NO: 15592 - RNA, 20 nt, Artificial Sequence
  Synthetic
accccuucucguguuacagg

SEQ ID NO: 15593 - RNA, 20 nt, Artificial Sequence
  Synthetic
cuccgauugguggaagcagg

SEQ ID NO: 15594 - RNA, 20 nt, Artificial Sequence
  Synthetic
agguuugguacagcagcagg

SEQ ID NO: 15595 - RNA, 20 nt, Artificial Sequence
  Synthetic
cuccugcuuccaccaaucgg

SEQ ID NO: 15596 - RNA, 20 nt, Artificial Sequence
  Synthetic
uaaggacugggaggagucgg

SEQ ID NO: 15597 - RNA, 20 nt, Artificial Sequence
  Synthetic
cccagaaggccaccgugugg

SEQ ID NO: 15598 - RNA, 20 nt, Artificial Sequence
  Synthetic
cgauagccaggacaaguugg

SEQ ID NO: 15599 - RNA, 20 nt, Artificial Sequence
  Synthetic
uccucugccgauccauacug

SEQ ID NO: 15600 - RNA, 20 nt, Artificial Sequence
  Synthetic
cccgucggcgcugaauccug

SEQ ID NO: 15601 - RNA, 20 nt, Artificial Sequence
  Synthetic
ccggucaacgaccuggauug

SEQ ID NO: 15602 - RNA, 20 nt, Artificial Sequence
  Synthetic
accccucucguggucgcuug

SEQ ID NO: 15603 - RNA, 20 nt, Artificial Sequence
  Synthetic
acacauagcgccucauuuug

SEQ ID NO: 15604 - RNA, 20 nt, Artificial Sequence
  Synthetic
  misc_feature (19)..(20): n is a, c, g, or u
ccgucgucggccggaacgnn

SEQ ID NO: 15605 - RNA, 20 nt, Artificial Sequence
  Synthetic
aggaggcuguaggcauaaau

SEQ ID NO: 15606 - RNA, 20 nt, Artificial Sequence
  Synthetic
ugacaaaccuuccaaucaau

SEQ ID NO: 15607 - RNA, 20 nt, Artificial Sequence
  Synthetic
ucaacggcgagaaggggcau

SEQ ID NO: 15608 - RNA, 20 nt, Artificial Sequence
  Synthetic
caaauuccagcagucccgau

SEQ ID NO: 15609 - RNA, 20 nt, Artificial Sequence
  Synthetic
uccggaaguguugauaggau

SEQ ID NO: 15610 - RNA, 20 nt, Artificial Sequence
  Synthetic
aggaguuccgcaguauggau

SEQ ID NO: 15611 - RNA, 20 nt, Artificial Sequence
  Synthetic
uuccgaaagcccaagaugau

SEQ ID NO: 15612 - RNA, 20 nt, Artificial Sequence
  Synthetic
uagucuccggaaguguugau

SEQ ID NO: 15613 - RNA, 20 nt, Artificial Sequence
  Synthetic
caucaaucuucucgaagacu

SEQ ID NO: 15614 - RNA, 20 nt, Artificial Sequence
  Synthetic
agaccaccgugaacgccccu

SEQ ID NO: 15615 - RNA, 20 nt, Artificial Sequence
  Synthetic
cgaccccucucguggucgcu

SEQ ID NO: 15616 - RNA, 20 nt, Artificial Sequence
  Synthetic
ugacgcaacccccacuggcu

SEQ ID NO: 15617 - RNA, 20 nt, Artificial Sequence
  Synthetic
cucucggauccaacagugcu

SEQ ID NO: 15618 - RNA, 20 nt, Artificial Sequence
  Synthetic
ugaaccuuuaccccguugcu

SEQ ID NO: 15619 - RNA, 20 nt, Artificial Sequence
  Synthetic
cccccacacgguggccuucu

SEQ ID NO: 15620 - RNA, 20 nt, Artificial Sequence
  Synthetic
caacgauagccaggacaagu

SEQ ID NO: 15621 - RNA, 20 nt, Artificial Sequence
  Synthetic
aucgccaagccccagccagu

SEQ ID NO: 15622 - RNA, 20 nt, Artificial Sequence
  Synthetic
cgucccgcgcaggauccagu

SEQ ID NO: 15623 - RNA, 20 nt, Artificial Sequence
  Synthetic
cggaaaauaccuaugggagu

SEQ ID NO: 15624 - RNA, 20 nt, Artificial Sequence
  Synthetic
caacuuguccuggcuaucgu

SEQ ID NO: 15625 - RNA, 20 nt, Artificial Sequence
  Synthetic
agagaggugcgacccgucgu

SEQ ID NO: 15626 - RNA, 20 nt, Artificial Sequence
  Synthetic
auuccuuggacucauaaggu

SEQ ID NO: 15627 - RNA, 20 nt, Artificial Sequence
  Synthetic
ucuuuguauuaggaggcugu

SEQ ID NO: 15628 - RNA, 20 nt, Artificial Sequence
  Synthetic
cacauagcgccucauuuugu

SEQ ID NO: 15629 - RNA, 20 nt, Artificial Sequence
  Synthetic
uugguaagugauuggagauu

SEQ ID NO: 15630 - RNA, 20 nt, Artificial Sequence
  Synthetic
aaauuccagcagucccgauu

SEQ ID NO: 15631 - RNA, 20 nt, Artificial Sequence
  Synthetic
agauuggggacugcgaauuu

SEQ ID NO: 15632 - RNA, 17 nt, Artificial Sequence
  Synthetic
gguaacagcgguauaaa

SEQ ID NO: 15633 - RNA, 17 nt, Artificial Sequence
  Synthetic
guaauacaggcauacaa

SEQ ID NO: 15634 - RNA, 17 nt, Artificial Sequence
  Synthetic
gggagcaccucucucaa

SEQ ID NO: 15635 - RNA, 17 nt, Artificial Sequence
  Synthetic
guauuguuuacagagaa

SEQ ID NO: 15636 - RNA, 17 nt, Artificial Sequence
  Synthetic
gccgagcaacgggguaa

SEQ ID NO: 15637 - RNA, 17 nt, Artificial Sequence
  Synthetic
ggaggaguugagguuaa

SEQ ID NO: 15638 - RNA, 17 nt, Artificial Sequence
  Synthetic
ggacuucaacacaaaca

SEQ ID NO: 15639 - RNA, 17 nt, Artificial Sequence
  Synthetic
  misc_feature (9)..(9): n is a, c, g, or u
ggacccugnuaugaaca

SEQ ID NO: 15640 - RNA, 17 nt, Artificial Sequence
  Synthetic
ggguucacacccccaca

SEQ ID NO: 15641 - RNA, 17 nt, Artificial Sequence
  Synthetic
gugaagcgaagugcaca

SEQ ID NO: 15642 - RNA, 17 nt, Artificial Sequence
  Synthetic
gguaauacaggcauaca

SEQ ID NO: 15643 - RNA, 17 nt, Artificial Sequence
  Synthetic
  misc_feature (6)..(6): n is a, c, g, or u
gcacanccuagcagcca

SEQ ID NO: 15644 - RNA, 17 nt, Artificial Sequence
  Synthetic
gaacaagagcuacagca

SEQ ID NO: 15645 - RNA, 17 nt, Artificial Sequence
  Synthetic
gaggugaaaaaguugca

SEQ ID NO: 15646 - RNA, 17 nt, Artificial Sequence
  Synthetic
guggugcagguuuugca

SEQ ID NO: 15647 - RNA, 17 nt, Artificial Sequence
  Synthetic
guucuucuggacuauca

SEQ ID NO: 15648 - RNA, 17 nt, Artificial Sequence
  Synthetic
  misc_feature (2)..(2): n is a, c, g, or u
  misc_feature (6)..(6): n is a, c, g, or u
gnuccnaggggcguuca

SEQ ID NO: 15649 - RNA, 17 nt, Artificial Sequence
  Synthetic
gagggcuccaccccaga

SEQ ID NO: 15650 - RNA, 17 nt, Artificial Sequence
  Synthetic
gacgggaagaagucaga

SEQ ID NO: 15651 - RNA, 17 nt, Artificial Sequence
  Synthetic
gcaggauucagcgccga

SEQ ID NO: 15652 - RNA, 17 nt, Artificial Sequence
  Synthetic
gaaugcccugugccuga

SEQ ID NO: 15653 - RNA, 17 nt, Artificial Sequence
  Synthetic
gaaguguugauaggaua

SEQ ID NO: 15654 - RNA, 17 nt, Artificial Sequence
  Synthetic
gcuccaaauucuuuaua

SEQ ID NO: 15655 - RNA, 17 nt, Artificial Sequence
  Synthetic
guucuguguuucugaac

SEQ ID NO: 15656 - RNA, 17 nt, Artificial Sequence
  Synthetic
ggaaguagaggacacac

SEQ ID NO: 15657 - RNA, 17 nt, Artificial Sequence
  Synthetic
ggcagaugagaaggcac

SEQ ID NO: 15658 - RNA, 17 nt, Artificial Sequence
  Synthetic
guggagcccucaggcac

SEQ ID NO: 15659 - RNA, 17 nt, Artificial Sequence
  Synthetic
guugcucggcaacggcc

SEQ ID NO: 15660 - RNA, 17 nt, Artificial Sequence
  Synthetic
gacugcgaauuuuggcc

SEQ ID NO: 15661 - RNA, 17 nt, Artificial Sequence
  Synthetic
gauguauuccucaaucc

SEQ ID NO: 15662 - RNA, 17 nt, Artificial Sequence
  Synthetic
gugggaggcuucggucc

SEQ ID NO: 15663 - RNA, 17 nt, Artificial Sequence
  Synthetic
gugggucaccauauucc

SEQ ID NO: 15664 - RNA, 17 nt, Artificial Sequence
  Synthetic
guguguccucuacuucc

SEQ ID NO: 15665 - RNA, 17 nt, Artificial Sequence
  Synthetic
gaacuggagccaccagc

SEQ ID NO: 15666 - RNA, 17 nt, Artificial Sequence
  Synthetic
gaugagaaggcacaggc

SEQ ID NO: 15667 - RNA, 17 nt, Artificial Sequence
  Synthetic
  misc_feature (3)..(3): n is a, c, g, or u
ggncuguauuuuccugc

SEQ ID NO: 15668 - RNA, 17 nt, Artificial Sequence
  Synthetic
ggcaagcuauuuugugc

SEQ ID NO: 15669 - RNA, 17 nt, Artificial Sequence
  Synthetic
guguugaagucccaauc

SEQ ID NO: 15670 - RNA, 17 nt, Artificial Sequence
  Synthetic
gaagcaggagguggauc

SEQ ID NO: 15671 - RNA, 17 nt, Artificial Sequence
  Synthetic
gaaggaguuaaccaguc

SEQ ID NO: 15672 - RNA, 17 nt, Artificial Sequence
  Synthetic
ggauccaacuggugguc

SEQ ID NO: 15673 - RNA, 17 nt, Artificial Sequence
  Synthetic
ggcuuucccccacuguc

SEQ ID NO: 15674 - RNA, 17 nt, Artificial Sequence
  Synthetic
gguuccuugagcaagag

SEQ ID NO: 15675 - RNA, 17 nt, Artificial Sequence
  Synthetic
gauugaugaugugagag

SEQ ID NO: 15676 - RNA, 17 nt, Artificial Sequence
  Synthetic
ggcaaacaagguaggag

SEQ ID NO: 15677 - RNA, 17 nt, Artificial Sequence
  Synthetic
gaaaauaccuaugggag

SEQ ID NO: 15678 - RNA, 17 nt, Artificial Sequence
  Synthetic
gaauuugcucugaauag

SEQ ID NO: 15679 - RNA, 17 nt, Artificial Sequence
  Synthetic
gcaggagggaaacauag

SEQ ID NO: 15680 - RNA, 17 nt, Artificial Sequence
  Synthetic
gggaguucuucuucuag

SEQ ID NO: 15681 - RNA, 17 nt, Artificial Sequence
  Synthetic
guagauccuggaaguag

SEQ ID NO: 15682 - RNA, 17 nt, Artificial Sequence
  Synthetic
  misc_feature (12)..(12): n is a, c, g, or u
gaaaacagguanaguag

SEQ ID NO: 15683 - RNA, 17 nt, Artificial Sequence
  Synthetic
ggaugugugucccuuag

SEQ ID NO: 15684 - RNA, 17 nt, Artificial Sequence
  Synthetic
ggugggcaauaauuuag

SEQ ID NO: 15685 - RNA, 17 nt, Artificial Sequence
  Synthetic
gccguugccgagcaacg

SEQ ID NO: 15686 - RNA, 17 nt, Artificial Sequence
  Synthetic
  misc_feature (9)..(9): n is a, c, g, or u
gguggucunuaagcagg

SEQ ID NO: 15687 - RNA, 17 nt, Artificial Sequence
  Synthetic
ggacugggaggagucgg

SEQ ID NO: 15688 - RNA, 17 nt, Artificial Sequence
  Synthetic
  misc_feature (4)..(4): n is a, c, g, or u
gacnuuggcuuccuggg

SEQ ID NO: 15689 - RNA, 17 nt, Artificial Sequence
  Synthetic
gcagggucccgugcugg

SEQ ID NO: 15690 - RNA, 17 nt, Artificial Sequence
  Synthetic
gcaggagguggaucugg

SEQ ID NO: 15691 - RNA, 17 nt, Artificial Sequence
  Synthetic
  misc_feature (8)..(8): n is a, c, g, or u
ggaugaunugguauugg

SEQ ID NO: 15692 - RNA, 17 nt, Artificial Sequence
  Synthetic
gauccaacagugcuugg

SEQ ID NO: 15693 - RNA, 17 nt, Artificial Sequence
  Synthetic
  misc_feature (10)..(10): n is a, c, g, or u
gagagcagunugguugg

SEQ ID NO: 15694 - RNA, 17 nt, Artificial Sequence
  Synthetic
gccccuuuuacucaaug

SEQ ID NO: 15695 - RNA, 17 nt, Artificial Sequence
  Synthetic
gaaccaacaagaagaug

SEQ ID NO: 15696 - RNA, 17 nt, Artificial Sequence
  Synthetic
gcaacccccacuggcug

SEQ ID NO: 15697 - RNA, 17 nt, Artificial Sequence
  Synthetic
gcuaaaacaaaauggug

SEQ ID NO: 15698 - RNA, 17 nt, Artificial Sequence
  Synthetic
  misc_feature (7)..(7): n is a, c, g, or u
gacucunugguauugug

SEQ ID NO: 15699 - RNA, 17 nt, Artificial Sequence
  Synthetic
  misc_feature (13)..(13): n is a, c, g, or u
gguuugucaacgnauug

SEQ ID NO: 15700 - RNA, 17 nt, Artificial Sequence
  Synthetic
  misc_feature (13)..(13): n is a, c, g, or u
  misc_feature (17)..(17): n is a, c, g, or u
guuguuggcaagnuccn

SEQ ID NO: 15701 - RNA, 17 nt, Artificial Sequence
  Synthetic
gguaagugauuggagau

SEQ ID NO: 15702 - RNA, 17 nt, Artificial Sequence
  Synthetic
ggcuggggcuuggcgau

SEQ ID NO: 15703 - RNA, 17 nt, Artificial Sequence
  Synthetic
ggaaguguugauaggau

SEQ ID NO: 15704 - RNA, 17 nt, Artificial Sequence
  Synthetic
gcccaagaugaugggau

SEQ ID NO: 15705 - RNA, 17 nt, Artificial Sequence
  Synthetic
ggagguugguaagugau

SEQ ID NO: 15706 - RNA, 17 nt, Artificial Sequence
  Synthetic
gccuccaagcugugccu

SEQ ID NO: 15707 - RNA, 17 nt, Artificial Sequence
  Synthetic
  misc_feature (7)..(7): n is a, c, g, or u
gaugacnuuggcuuccu

SEQ ID NO: 15708 - RNA, 17 nt, Artificial Sequence
  Synthetic
  misc_feature (14)..(14): n is a, c, g, or u
gagcgaaacaagcngcu

SEQ ID NO: 15709 - RNA, 17 nt, Artificial Sequence
  Synthetic
gcaagcuauuuugugcu

SEQ ID NO: 15710 - RNA, 17 nt, Artificial Sequence
  Synthetic
gugauucuaaggcaucu

SEQ ID NO: 15711 - RNA, 17 nt, Artificial Sequence
  Synthetic
gagggaguucuucuucu

SEQ ID NO: 15712 - RNA, 17 nt, Artificial Sequence
  Synthetic
gccaagccccagccagu

SEQ ID NO: 15713 - RNA, 17 nt, Artificial Sequence
  Synthetic
gcaaacaagguaggagu

SEQ ID NO: 15714 - RNA, 17 nt, Artificial Sequence
  Synthetic
  misc_feature (8)..(8): n is a, c, g, or u
guuauaunauugggagu

SEQ ID NO: 15715 - RNA, 17 nt, Artificial Sequence
  Synthetic
gugagagaggcaauagu

SEQ ID NO: 15716 - RNA, 17 nt, Artificial Sequence
  Synthetic
guuggaggacaggaggu

SEQ ID NO: 15717 - RNA, 17 nt, Artificial Sequence
  Synthetic
gguggagagacuggggu

SEQ ID NO: 15718 - RNA, 17 nt, Artificial Sequence
  Synthetic
guuccaccaagcacugu

SEQ ID NO: 15719 - RNA, 17 nt, Artificial Sequence
  Synthetic
  misc_feature (12)..(12): n is a, c, g, or u
guuugucaacgnauugu

SEQ ID NO: 15720 - RNA, 17 nt, Artificial Sequence
  Synthetic
  misc_feature (16)..(16): n is a, c, g, or u
gggugaguugaugacnu

SEQ ID NO: 15721 - RNA, 17 nt, Artificial Sequence
  Synthetic
gacccuuauaaagaauu

SEQ ID NO: 15722 - RNA, 17 nt, Artificial Sequence
  Synthetic
gauaggauaggggcauu

SEQ ID NO: 15723 - RNA, 17 nt, Artificial Sequence
  Synthetic
guaagugauuggagauu

SEQ ID NO: 15724 - RNA, 17 nt, Artificial Sequence
  Synthetic
gaaguauuuaguaacuu

SEQ ID NO: 15725 - RNA, 17 nt, Artificial Sequence
  Synthetic
guaggagugggaggcuu

SEQ ID NO: 15726 - RNA, 17 nt, Artificial Sequence
  Synthetic
gugccuuggguggcuuu

SEQ ID NO: 15727 - RNA, 17 nt, Artificial Sequence
  Synthetic
gaguauuuggugucuuu

SEQ ID NO: 15728 - RNA, 20 nt, Artificial Sequence
  Synthetic
gauaaccacauugaguaaaa

SEQ ID NO: 15729 - RNA, 20 nt, Artificial Sequence
  Synthetic
  misc_feature (2)..(2): n is a, c, g, or u
gnuuaauaccuuuauccaaa

SEQ ID NO: 15730 - RNA, 20 nt, Artificial Sequence
  Synthetic
guaaacugagccaagagaaa

SEQ ID NO: 15731 - RNA, 20 nt, Artificial Sequence
  Synthetic
ggauaaccacauugaguaaa

SEQ ID NO: 15732 - RNA, 20 nt, Artificial Sequence
  Synthetic
  misc_feature (3)..(3): n is a, c, g, or u
ggnuuaauaccuuuauccaa

SEQ ID NO: 15733 - RNA, 20 nt, Artificial Sequence
  Synthetic
  misc_feature (13)..(13): n is a, c, g, or u
gcccacucacuanaaaugaa

SEQ ID NO: 15734 - RNA, 20 nt, Artificial Sequence
  Synthetic
gggggaggaguugagguuaa

SEQ ID NO: 15735 - RNA, 20 nt, Artificial Sequence
  Synthetic
ggguggagcccucaggcaca

SEQ ID NO: 15736 - RNA, 20 nt, Artificial Sequence
  Synthetic
gaggugaagcgaagugcaca

SEQ ID NO: 15737 - RNA, 20 nt, Artificial Sequence
  Synthetic
ggaaguacaccuccuuccca

SEQ ID NO: 15738 - RNA, 20 nt, Artificial Sequence
  Synthetic
  misc_feature (9)..(9): n is a, c, g, or u
gcagcacanccuagcagcca

SEQ ID NO: 15739 - RNA, 20 nt, Artificial Sequence
  Synthetic
gagugggaggcuucggucca

SEQ ID NO: 15740 - RNA, 20 nt, Artificial Sequence
  Synthetic
gagaggcaauagucggagca

SEQ ID NO: 15741 - RNA, 20 nt, Artificial Sequence
  Synthetic
gcagaggugaaaaaguugca

SEQ ID NO: 15742 - RNA, 20 nt, Artificial Sequence
  Synthetic
gguuugguacagcagcagga

SEQ ID NO: 15743 - RNA, 20 nt, Artificial Sequence
  Synthetic
gaaagcccaagaugauggga

SEQ ID NO: 15744 - RNA, 20 nt, Artificial Sequence
  Synthetic
gaagcuccaaauucuuuaua

SEQ ID NO: 15745 - RNA, 20 nt, Artificial Sequence
  Synthetic
gggcuuucggaaaauaccua

SEQ ID NO: 15746 - RNA, 20 nt, Artificial Sequence
  Synthetic
  misc_feature (10)..(10): n is a, c, g, or u
gcaauguucnggugauucua

SEQ ID NO: 15747 - RNA, 20 nt, Artificial Sequence
  Synthetic
  misc_feature (11)..(11): n is a, c, g, or u
  misc_feature (13)..(13): n is a, c, g, or u
ggguuauuccnuncacuuua

SEQ ID NO: 15748 - RNA, 20 nt, Artificial Sequence
  Synthetic
gccggcagaugagaaggcac

SEQ ID NO: 15749 - RNA, 20 nt, Artificial Sequence
  Synthetic
gggguggagcccucaggcac

SEQ ID NO: 15750 - RNA, 20 nt, Artificial Sequence
  Synthetic
gccaggacaaguuggaggac

SEQ ID NO: 15751 - RNA, 20 nt, Artificial Sequence
  Synthetic
gaauuuuggccaggacaccc

SEQ ID NO: 15752 - RNA, 20 nt, Artificial Sequence
  Synthetic
ggacucuuggacuuucgccc

SEQ ID NO: 15753 - RNA, 20 nt, Artificial Sequence
  Synthetic
gcaaacacuuggcaaaggcc

SEQ ID NO: 15754 - RNA, 20 nt, Artificial Sequence
  Synthetic
ggagugggaggcuucggucc

SEQ ID NO: 15755 - RNA, 20 nt, Artificial Sequence
  Synthetic
gaauacuaacauugggaagc

SEQ ID NO: 15756 - RNA, 20 nt, Artificial Sequence
  Synthetic
  misc_feature (15)..(15): n is a, c, g, or u
gcauuugguggucunuaagc

SEQ ID NO: 15757 - RNA, 20 nt, Artificial Sequence
  Synthetic
gcauacaagggcaugagagc

SEQ ID NO: 15758 - RNA, 20 nt, Artificial Sequence
  Synthetic
gcagaugagaaggcacaggc

SEQ ID NO: 15759 - RNA, 20 nt, Artificial Sequence
  Synthetic
gccugugccuucucaucugc

SEQ ID NO: 15760 - RNA, 20 nt, Artificial Sequence
  Synthetic
gugaaaaaguugcauggugc

SEQ ID NO: 15761 - RNA, 20 nt, Artificial Sequence
  Synthetic
guggaagcaggagguggauc

SEQ ID NO: 15762 - RNA, 20 nt, Artificial Sequence
  Synthetic
  misc_feature (13)..(13): n is a, c, g, or u
gaguugggggacnuugccuc

SEQ ID NO: 15763 - RNA, 20 nt, Artificial Sequence
  Synthetic
gcuuccaccaaucggagguc

SEQ ID NO: 15764 - RNA, 20 nt, Artificial Sequence
  Synthetic
ggcauagcagcaggaugaag

SEQ ID NO: 15765 - RNA, 20 nt, Artificial Sequence
  Synthetic
gaagauugaugaugugagag

SEQ ID NO: 15766 - RNA, 20 nt, Artificial Sequence
  Synthetic
  misc_feature (14)..(14): n is a, c, g, or u
  misc_feature (18)..(18): n is a, c, g, or u
gguuguuggcaagnuccnag

SEQ ID NO: 15767 - RNA, 20 nt, Artificial Sequence
  Synthetic
gcagcaggagggaaacauag

SEQ ID NO: 15768 - RNA, 20 nt, Artificial Sequence
  Synthetic
gacuucucucaauuuucuag

SEQ ID NO: 15769 - RNA, 20 nt, Artificial Sequence
  Synthetic
guuguagauccuggaaguag

SEQ ID NO: 15770 - RNA, 20 nt, Artificial Sequence
  Synthetic
gaaaacaaaagccugcuuag

SEQ ID NO: 15771 - RNA, 20 nt, Artificial Sequence
  Synthetic
gcugccaacuggauccugcg

SEQ ID NO: 15772 - RNA, 20 nt, Artificial Sequence
  Synthetic
ggcagaugagaaggcacagg

SEQ ID NO: 15773 - RNA, 20 nt, Artificial Sequence
  Synthetic
ggaugugugucccuuagagg

SEQ ID NO: 15774 - RNA, 20 nt, Artificial Sequence
  Synthetic
  misc_feature (2)..(2): n is a, c, g, or u
  misc_feature (6)..(6): n is a, c, g, or u
gnuccnaggggcguucacgg

SEQ ID NO: 15775 - RNA, 20 nt, Artificial Sequence
  Synthetic
ggacugggaggagucggggg

SEQ ID NO: 15776 - RNA, 20 nt, Artificial Sequence
  Synthetic
  misc_feature (7)..(7): n is a, c, g, or u
gaugacnuuggcuuccuggg

SEQ ID NO: 15777 - RNA, 20 nt, Artificial Sequence
  Synthetic
gcaaacaagguaggaguggg

SEQ ID NO: 15778 - RNA, 20 nt, Artificial Sequence
  Synthetic
  misc_feature (3)..(3): n is a, c, g, or u
ggncuguauuuuccugcugg

SEQ ID NO: 15779 - RNA, 20 nt, Artificial Sequence
  Synthetic
gaagcaggagguggaucugg

SEQ ID NO: 15780 - RNA, 20 nt, Artificial Sequence
  Synthetic
  misc_feature (8)..(8): n is a, c, g, or u
guuauaunauugggaguugg

SEQ ID NO: 15781 - RNA, 20 nt, Artificial Sequence
  Synthetic
gauaggauaggggcauuugg

SEQ ID NO: 15782 - RNA, 20 nt, Artificial Sequence
  Synthetic
gcagccccuuuuacucaaug

SEQ ID NO: 15783 - RNA, 20 nt, Artificial Sequence
  Synthetic
gaagaaccaacaagaagaug

SEQ ID NO: 15784 - RNA, 20 nt, Artificial Sequence
  Synthetic
  misc_feature (3)..(3): n is a, c, g, or u
gunagaaugcccugugccug

SEQ ID NO: 15785 - RNA, 20 nt, Artificial Sequence
  Synthetic
gagccaagagaaacgggcug

SEQ ID NO: 15786 - RNA, 20 nt, Artificial Sequence
  Synthetic
gcuaucguuggaugugucug

SEQ ID NO: 15787 - RNA, 20 nt, Artificial Sequence
  Synthetic
  misc_feature (16)..(16): n is a, c, g, or u
gaagguuugucaacgnauug

SEQ ID NO: 15788 - RNA, 20 nt, Artificial Sequence
  Synthetic
  misc_feature (9)..(9): n is a, c, g, or u
gguuauaunauugggaguug

SEQ ID NO: 15789 - RNA, 20 nt, Artificial Sequence
  Synthetic
  misc_feature (14)..(14): n is a, c, g, or u
gccugagagcagunugguug

SEQ ID NO: 15790 - RNA, 20 nt, Artificial Sequence
  Synthetic
  misc_feature (5)..(5): n is a, c, g, or u
gacanuauuuacauacuuug

SEQ ID NO: 15791 - RNA, 20 nt, Artificial Sequence
  Synthetic
  misc_feature (7)..(8): n is a, c, g, or u
  misc_feature (20)..(20): n is a, c, g, or u
ggaacgnnaggcggagaagn

SEQ ID NO: 15792 - RNA, 20 nt, Artificial Sequence
  Synthetic
gcccacagauaacaaaaaau

SEQ ID NO: 15793 - RNA, 20 nt, Artificial Sequence
  Synthetic
guuuguguugaagucccaau

SEQ ID NO: 15794 - RNA, 20 nt, Artificial Sequence
  Synthetic
gggcugaggcccacucccau

SEQ ID NO: 15795 - RNA, 20 nt, Artificial Sequence
  Synthetic
guugguaagugauuggagau

SEQ ID NO: 15796 - RNA, 20 nt, Artificial Sequence
  Synthetic
  misc_feature (10)..(10): n is a, c, g, or u
  misc_feature (12)..(12): n is a, c, g, or u
gguuauuccnuncacuuuau

SEQ ID NO: 15797 - RNA, 20 nt, Artificial Sequence
  Synthetic
  misc_feature (10)..(10): n is a, c, g, or u
guugaugacnuuggcuuccu

SEQ ID NO: 15798 - RNA, 20 nt, Artificial Sequence
  Synthetic
gggccucagcccguuucucu

SEQ ID NO: 15799 - RNA, 20 nt, Artificial Sequence
  Synthetic
ggcgagggaguucuucuucu

SEQ ID NO: 15800 - RNA, 20 nt, Artificial Sequence
  Synthetic
gggcugaagcggugucgagu

SEQ ID NO: 15801 - RNA, 20 nt, Artificial Sequence
  Synthetic
gaugugagagaggcaauagu

SEQ ID NO: 15802 - RNA, 20 nt, Artificial Sequence
  Synthetic
gcuaugccucaucuucuugu

SEQ ID NO: 15803 - RNA, 20 nt, Artificial Sequence
  Synthetic
guccucuuauguaagguugu

SEQ ID NO: 15804 - RNA, 20 nt, Artificial Sequence
  Synthetic
guccaaggaauacuaacauu

SEQ ID NO: 15805 - RNA, 20 nt, Artificial Sequence
  Synthetic
ggaaagaaucccagaggauu

SEQ ID NO: 15806 - RNA, 20 nt, Artificial Sequence
  Synthetic
gacaugaacaaaagaugauu

SEQ ID NO: 15807 - RNA, 20 nt, Artificial Sequence
  Synthetic
  misc_feature (10)..(10): n is a, c, g, or u
ggguuauaunauugggaguu

SEQ ID NO: 15808 - RNA, 20 nt, Artificial Sequence
  Synthetic
gggaaguauuuaguaacuuu

SEQ ID NO: 15809 - RNA, 20 nt, Artificial Sequence
  Synthetic
gcugugccuuggguggcuuu

SEQ ID NO: 15810 - RNA, 17 nt, Artificial Sequence
  Synthetic
acacagcuaaaacaaaa

SEQ ID NO: 15811 - RNA, 17 nt, Artificial Sequence
  Synthetic
aaccacauugaguaaaa

SEQ ID NO: 15812 - RNA, 17 nt, Artificial Sequence
  Synthetic
uaauaccuuuauccaaa

SEQ ID NO: 15813 - RNA, 17 nt, Artificial Sequence
  Synthetic
uuuuagcuguguucaaa

SEQ ID NO: 15814 - RNA, 17 nt, Artificial Sequence
  Synthetic
aacugagccaagagaaa

SEQ ID NO: 15815 - RNA, 17 nt, Artificial Sequence
  Synthetic
uaaccacauugaguaaa

SEQ ID NO: 15816 - RNA, 17 nt, Artificial Sequence
  Synthetic
cggcagaggagccacaa

SEQ ID NO: 15817 - RNA, 17 nt, Artificial Sequence
  Synthetic
caaggacaauuggccaa

SEQ ID NO: 15818 - RNA, 17 nt, Artificial Sequence
  Synthetic
uuaauaccuuuauccaa

SEQ ID NO: 15819 - RNA, 17 nt, Artificial Sequence
  Synthetic
cagcaaacacuuggcaa

SEQ ID NO: 15820 - RNA, 17 nt, Artificial Sequence
  Synthetic
acaaaccuuccaaucaa

SEQ ID NO: 15821 - RNA, 17 nt, Artificial Sequence
  Synthetic
agguguacuuccgagaa

SEQ ID NO: 15822 - RNA, 17 nt, Artificial Sequence
  Synthetic
  misc_feature (10)..(10): n is a, c, g, or u
cacucacuanaaaugaa

SEQ ID NO: 15823 - RNA, 17 nt, Artificial Sequence
  Synthetic
uacuucccuuuggauaa

SEQ ID NO: 15824 - RNA, 17 nt, Artificial Sequence
  Synthetic
cuccaaauucuuuauaa

SEQ ID NO: 15825 - RNA, 17 nt, Artificial Sequence
  Synthetic
agucucuccaccucuaa

SEQ ID NO: 15826 - RNA, 17 nt, Artificial Sequence
  Synthetic
uuggccaauggcaaaca

SEQ ID NO: 15827 - RNA, 17 nt, Artificial Sequence
  Synthetic
uggaaguagaggacaca

SEQ ID NO: 15828 - RNA, 17 nt, Artificial Sequence
  Synthetic
uggagcccucaggcaca

SEQ ID NO: 15829 - RNA, 17 nt, Artificial Sequence
  Synthetic
uuucucgccaacuuaca

SEQ ID NO: 15830 - RNA, 17 nt, Artificial Sequence
  Synthetic
ugccccaaagccaccca

SEQ ID NO: 15831 - RNA, 17 nt, Artificial Sequence
  Synthetic
aguacaccuccuuccca

SEQ ID NO: 15832 - RNA, 17 nt, Artificial Sequence
  Synthetic
cccaccuuaugagucca

SEQ ID NO: 15833 - RNA, 17 nt, Artificial Sequence
  Synthetic
ugggaggcuucggucca

SEQ ID NO: 15834 - RNA, 17 nt, Artificial Sequence
  Synthetic
aucuacaaccaccagca

SEQ ID NO: 15835 - RNA, 17 nt, Artificial Sequence
  Synthetic
uggguggcuuuggggca

SEQ ID NO: 15836 - RNA, 17 nt, Artificial Sequence
  Synthetic
  misc_feature (15)..(15): n is a, c, g, or u
ucuccauguucauanca

SEQ ID NO: 15837 - RNA, 17 nt, Artificial Sequence
  Synthetic
ugcaccacucuugcuca

SEQ ID NO: 15838 - RNA, 17 nt, Artificial Sequence
  Synthetic
aucaaugggucuauuca

SEQ ID NO: 15839 - RNA, 17 nt, Artificial Sequence
  Synthetic
ugaaugucaggaaaaga

SEQ ID NO: 15840 - RNA, 17 nt, Artificial Sequence
  Synthetic
aguaggucccggacaga

SEQ ID NO: 15841 - RNA, 17 nt, Artificial Sequence
  Synthetic
cgggccggcagaugaga

SEQ ID NO: 15842 - RNA, 17 nt, Artificial Sequence
  Synthetic
uugguacagcagcagga

SEQ ID NO: 15843 - RNA, 17 nt, Artificial Sequence
  Synthetic
  misc_feature (1)..(1): n is a, c, g, or u
nccuagcagccauggga

SEQ ID NO: 15844 - RNA, 17 nt, Artificial Sequence
  Synthetic
agcccaagaugauggga

SEQ ID NO: 15845 - RNA, 17 nt, Artificial Sequence
  Synthetic
uuuacauacuuugugga

SEQ ID NO: 15846 - RNA, 17 nt, Artificial Sequence
  Synthetic
ccgaaagcccaagauga

SEQ ID NO: 15847 - RNA, 17 nt, Artificial Sequence
  Synthetic
uuccgcgcaugcgcuga

SEQ ID NO: 15848 - RNA, 17 nt, Artificial Sequence
  Synthetic
  misc_feature (16)..(16): n is a, c, g, or u
uuaugucaauacuaana

SEQ ID NO: 15849 - RNA, 17 nt, Artificial Sequence
  Synthetic
  misc_feature (12)..(12): n is a, c, g, or u
  misc_feature (16)..(16): n is a, c, g, or u
uuguuggcaagnuccna

SEQ ID NO: 15850 - RNA, 17 nt, Artificial Sequence
  Synthetic
  misc_feature (16)..(16): n is a, c, g, or u
auaacccauaaagugna

SEQ ID NO: 15851 - RNA, 17 nt, Artificial Sequence
  Synthetic
ucuuguucccaggaaua

SEQ ID NO: 15852 - RNA, 17 nt, Artificial Sequence
  Synthetic
uauuccuuggacucaua

SEQ ID NO: 15853 - RNA, 17 nt, Artificial Sequence
  Synthetic
ucuggcuuuuaguuaua

SEQ ID NO: 15854 - RNA, 17 nt, Artificial Sequence
  Synthetic
cagucucuccaccucua

SEQ ID NO: 15855 - RNA, 17 nt, Artificial Sequence
  Synthetic
  misc_feature (7)..(7): n is a, c, g, or u
auguucnggugauucua

SEQ ID NO: 15856 - RNA, 17 nt, Artificial Sequence
  Synthetic
agggaguucuucuucua

SEQ ID NO: 15857 - RNA, 17 nt, Artificial Sequence
  Synthetic
cuucucucaauuuucua

SEQ ID NO: 15858 - RNA, 17 nt, Artificial Sequence
  Synthetic
uguuggauccgagagua

SEQ ID NO: 15859 - RNA, 17 nt, Artificial Sequence
  Synthetic
acauucucuggauagua

SEQ ID NO: 15860 - RNA, 17 nt, Artificial Sequence
  Synthetic
uuguucaguggugcgua

SEQ ID NO: 15861 - RNA, 17 nt, Artificial Sequence
  Synthetic
uuucucuuccaaaugua

SEQ ID NO: 15862 - RNA, 17 nt, Artificial Sequence
  Synthetic
aagaguccucuuaugua

SEQ ID NO: 15863 - RNA, 17 nt, Artificial Sequence
  Synthetic
aaauuagacaauuauua

SEQ ID NO: 15864 - RNA, 17 nt, Artificial Sequence
  Synthetic
caaagacuguguauuua

SEQ ID NO: 15865 - RNA, 17 nt, Artificial Sequence
  Synthetic
  misc_feature (8)..(8): n is a, c, g, or u
  misc_feature (10)..(10): n is a, c, g, or u
uuauuccnuncacuuua

SEQ ID NO: 15866 - RNA, 17 nt, Artificial Sequence
  Synthetic
cagucaggauugaaaac

SEQ ID NO: 15867 - RNA, 17 nt, Artificial Sequence
  Synthetic
acugagccaagagaaac

SEQ ID NO: 15868 - RNA, 17 nt, Artificial Sequence
  Synthetic
  misc_feature (5)..(5): n is a, c, g, or u
uaggnugugcugccaac

SEQ ID NO: 15869 - RNA, 17 nt, Artificial Sequence
  Synthetic
ugaauaguggauccaac

SEQ ID NO: 15870 - RNA, 17 nt, Artificial Sequence
  Synthetic
ugaagcgaagugcacac

SEQ ID NO: 15871 - RNA, 17 nt, Artificial Sequence
  Synthetic
aagggacacacauccac

SEQ ID NO: 15872 - RNA, 17 nt, Artificial Sequence
  Synthetic
ucuacaaccaccagcac

SEQ ID NO: 15873 - RNA, 17 nt, Artificial Sequence
  Synthetic
ucaaugggucuauucac

SEQ ID NO: 15874 - RNA, 17 nt, Artificial Sequence
  Synthetic
aguagaggaguaaagac

SEQ ID NO: 15875 - RNA, 17 nt, Artificial Sequence
  Synthetic
ucaaucuucucgaagac

SEQ ID NO: 15876 - RNA, 17 nt, Artificial Sequence
  Synthetic
cuuagagguggagagac

SEQ ID NO: 15877 - RNA, 17 nt, Artificial Sequence
  Synthetic
acuguguauuuaaggac

SEQ ID NO: 15878 - RNA, 17 nt, Artificial Sequence
  Synthetic
aggacaaguuggaggac

SEQ ID NO: 15879 - RNA, 17 nt, Artificial Sequence
  Synthetic
cuguuuucaauccugac

SEQ ID NO: 15880 - RNA, 17 nt, Artificial Sequence
  Synthetic
caauccaggucguugac

SEQ ID NO: 15881 - RNA, 17 nt, Artificial Sequence
  Synthetic
ugaugggaugggaauac

SEQ ID NO: 15882 - RNA, 17 nt, Artificial Sequence
  Synthetic
aaggugggaaacuuuac

SEQ ID NO: 15883 - RNA, 17 nt, Artificial Sequence
  Synthetic
auuuuggccaggacacc

SEQ ID NO: 15884 - RNA, 17 nt, Artificial Sequence
  Synthetic
uuucuagggguaccacc

SEQ ID NO: 15885 - RNA, 17 nt, Artificial Sequence
  Synthetic
ugugggggugugaaccc

SEQ ID NO: 15886 - RNA, 17 nt, Artificial Sequence
  Synthetic
uuuuggccaggacaccc

SEQ ID NO: 15887 - RNA, 17 nt, Artificial Sequence
  Synthetic
uucuagggguaccaccc

SEQ ID NO: 15888 - RNA, 17 nt, Artificial Sequence
  Synthetic
uaaauuauugcccaccc

SEQ ID NO: 15889 - RNA, 17 nt, Artificial Sequence
  Synthetic
cucuuggacuuucgccc

SEQ ID NO: 15890 - RNA, 17 nt, Artificial Sequence
  Synthetic
cuguagcucuuguuccc

SEQ ID NO: 15891 - RNA, 17 nt, Artificial Sequence
  Synthetic
cacauccaacgauagcc

SEQ ID NO: 15892 - RNA, 17 nt, Artificial Sequence
  Synthetic
aacacuuggcaaaggcc

SEQ ID NO: 15893 - RNA, 17 nt, Artificial Sequence
  Synthetic
cuucuucccgucugucc

SEQ ID NO: 15894 - RNA, 17 nt, Artificial Sequence
  Synthetic
uguccuccaacuugucc

SEQ ID NO: 15895 - RNA, 17 nt, Artificial Sequence
  Synthetic
  misc_feature (8)..(8): n is a, c, g, or u
ugaugacnuuggcuucc

SEQ ID NO: 15896 - RNA, 17 nt, Artificial Sequence
  Synthetic
uacuaacauugggaagc

SEQ ID NO: 15897 - RNA, 17 nt, Artificial Sequence
  Synthetic
cuguauuaccgcuaagc

SEQ ID NO: 15898 - RNA, 17 nt, Artificial Sequence
  Synthetic
  misc_feature (12)..(12): n is a, c, g, or u
uuugguggucunuaagc

SEQ ID NO: 15899 - RNA, 17 nt, Artificial Sequence
  Synthetic
agguuugguacagcagc

SEQ ID NO: 15900 - RNA, 17 nt, Artificial Sequence
  Synthetic
agaugaggcauagcagc

SEQ ID NO: 15901 - RNA, 17 nt, Artificial Sequence
  Synthetic
cuuguuucgcucgcagc

SEQ ID NO: 15902 - RNA, 17 nt, Artificial Sequence
  Synthetic
uacaagggcaugagagc

SEQ ID NO: 15903 - RNA, 17 nt, Artificial Sequence
  Synthetic
uugggauaaaaccuagc

SEQ ID NO: 15904 - RNA, 17 nt, Artificial Sequence
  Synthetic
ccaacuggauccugcgc

SEQ ID NO: 15905 - RNA, 17 nt, Artificial Sequence
  Synthetic
cauacuuuguggaaggc

SEQ ID NO: 15906 - RNA, 17 nt, Artificial Sequence
  Synthetic
  misc_feature (12)..(12): n is a, c, g, or u
acuagaucucungcugc

SEQ ID NO: 15907 - RNA, 17 nt, Artificial Sequence
  Synthetic
ugugccuucucaucugc

SEQ ID NO: 15908 - RNA, 17 nt, Artificial Sequence
  Synthetic
aaaaaguugcauggugc

SEQ ID NO: 15909 - RNA, 17 nt, Artificial Sequence
  Synthetic
uugagcaagaguggugc

SEQ ID NO: 15910 - RNA, 17 nt, Artificial Sequence
  Synthetic
aguggugcagguuuugc

SEQ ID NO: 15911 - RNA, 17 nt, Artificial Sequence
  Synthetic
  misc_feature (16)..(16): n is a, c, g, or u
uucuccauguucauanc

SEQ ID NO: 15912 - RNA, 17 nt, Artificial Sequence
  Synthetic
auggagaacaucacauc

SEQ ID NO: 15913 - RNA, 17 nt, Artificial Sequence
  Synthetic
ucugggguggagcccuc

SEQ ID NO: 15914 - RNA, 17 nt, Artificial Sequence
  Synthetic
  misc_feature (10)..(10): n is a, c, g, or u
uugggggacnuugccuc

SEQ ID NO: 15915 - RNA, 17 nt, Artificial Sequence
  Synthetic
uucugugcccaauccuc

SEQ ID NO: 15916 - RNA, 17 nt, Artificial Sequence
  Synthetic
  misc_feature (8)..(8): n is a, c, g, or u
ccaaccanacugcucuc

SEQ ID NO: 15917 - RNA, 17 nt, Artificial Sequence
  Synthetic
cuaacaacaguagucuc

SEQ ID NO: 15918 - RNA, 17 nt, Artificial Sequence
  Synthetic
ugauuaaccacauucuc

SEQ ID NO: 15919 - RNA, 17 nt, Artificial Sequence
  Synthetic
aaggacugggaggaguc

SEQ ID NO: 15920 - RNA, 17 nt, Artificial Sequence
  Synthetic
ugaugcaagugaauguc

SEQ ID NO: 15921 - RNA, 17 nt, Artificial Sequence
  Synthetic
acuucuucccgucuguc

SEQ ID NO: 15922 - RNA, 17 nt, Artificial Sequence
  Synthetic
uauccuaucaacacuuc

SEQ ID NO: 15923 - RNA, 17 nt, Artificial Sequence
  Synthetic
cuucuuguugguucuuc

SEQ ID NO: 15924 - RNA, 17 nt, Artificial Sequence
  Synthetic
  misc_feature (11)..(12): n is a, c, g, or u
uucuccgccunncguuc

SEQ ID NO: 15925 - RNA, 17 nt, Artificial Sequence
  Synthetic
uugggggugcaauguuc

SEQ ID NO: 15926 - RNA, 17 nt, Artificial Sequence
  Synthetic
accacauugaguaaaag

SEQ ID NO: 15927 - RNA, 17 nt, Artificial Sequence
  Synthetic
  misc_feature (5)..(6): n is a, c, g, or u
aacgnnaggcggagaag

SEQ ID NO: 15928 - RNA, 17 nt, Artificial Sequence
  Synthetic
auagcagcaggaugaag

SEQ ID NO: 15929 - RNA, 17 nt, Artificial Sequence
  Synthetic
ucgguagagggcugaag

SEQ ID NO: 15930 - RNA, 17 nt, Artificial Sequence
  Synthetic
caacaaccuuacauaag

SEQ ID NO: 15931 - RNA, 17 nt, Artificial Sequence
  Synthetic
cuuggaggcuugaacag

SEQ ID NO: 15932 - RNA, 17 nt, Artificial Sequence
  Synthetic
caaaaaauugguaacag

SEQ ID NO: 15933 - RNA, 17 nt, Artificial Sequence
  Synthetic
aacuaaaagccagacag

SEQ ID NO: 15934 - RNA, 17 nt, Artificial Sequence
  Synthetic
ucuggaaagaaucccag

SEQ ID NO: 15935 - RNA, 17 nt, Artificial Sequence
  Synthetic
cgccaagccccagccag

SEQ ID NO: 15936 - RNA, 17 nt, Artificial Sequence
  Synthetic
aaaagaugauuaggcag

SEQ ID NO: 15937 - RNA, 17 nt, Artificial Sequence
  Synthetic
auccacaggccaugcag

SEQ ID NO: 15938 - RNA, 17 nt, Artificial Sequence
  Synthetic
uagugcaauuuguucag

SEQ ID NO: 15939 - RNA, 17 nt, Artificial Sequence
  Synthetic
  misc_feature (8)..(8): n is a, c, g, or u
ucgcagcnggucuggag

SEQ ID NO: 15940 - RNA, 17 nt, Artificial Sequence
  Synthetic
  misc_feature (10)..(10): n is a, c, g, or u
cuuucauuunuagugag

SEQ ID NO: 15941 - RNA, 17 nt, Artificial Sequence
  Synthetic
  misc_feature (11)..(11): n is a, c, g, or u
  misc_feature (15)..(15): n is a, c, g, or u
uguuggcaagnuccnag

SEQ ID NO: 15942 - RNA, 17 nt, Artificial Sequence
  Synthetic
aaguguugauaggauag

SEQ ID NO: 15943 - RNA, 17 nt, Artificial Sequence
  Synthetic
uucucucaauuuucuag

SEQ ID NO: 15944 - RNA, 17 nt, Artificial Sequence
  Synthetic
aacaaaagccugcuuag

SEQ ID NO: 15945 - RNA, 17 nt, Artificial Sequence
  Synthetic
augagaaggcacaggcg

SEQ ID NO: 15946 - RNA, 17 nt, Artificial Sequence
  Synthetic
agguggaucugguggcg

SEQ ID NO: 15947 - RNA, 17 nt, Artificial Sequence
  Synthetic
  misc_feature (3)..(3): n is a, c, g, or u
canagagucuagacucg

SEQ ID NO: 15948 - RNA, 17 nt, Artificial Sequence
  Synthetic
aggacugggaggagucg

SEQ ID NO: 15949 - RNA, 17 nt, Artificial Sequence
  Synthetic
uagcagccaugggaagg

SEQ ID NO: 15950 - RNA, 17 nt, Artificial Sequence
  Synthetic
uccuuggacucauaagg

SEQ ID NO: 15951 - RNA, 17 nt, Artificial Sequence
  Synthetic
agaugagaaggcacagg

SEQ ID NO: 15952 - RNA, 17 nt, Artificial Sequence
  Synthetic
acaaguuggaggacagg

SEQ ID NO: 15953 - RNA, 17 nt, Artificial Sequence
  Synthetic
uuugguacagcagcagg

SEQ ID NO: 15954 - RNA, 17 nt, Artificial Sequence
  Synthetic
ugugugucccuuagagg

SEQ ID NO: 15955 - RNA, 17 nt, Artificial Sequence
  Synthetic
uugguggaagcaggagg

SEQ ID NO: 15956 - RNA, 17 nt, Artificial Sequence
  Synthetic
  misc_feature (13)..(14): n is a, c, g, or u
ucggccggaacgnnagg

SEQ ID NO: 15957 - RNA, 17 nt, Artificial Sequence
  Synthetic
aaggucuuuguauuagg

SEQ ID NO: 15958 - RNA, 17 nt, Artificial Sequence
  Synthetic
  misc_feature (3)..(3): n is a, c, g, or u
ccnaggggcguucacgg

SEQ ID NO: 15959 - RNA, 17 nt, Artificial Sequence
  Synthetic
uggccaggacacccggg

SEQ ID NO: 15960 - RNA, 17 nt, Artificial Sequence
  Synthetic
cugggaggagucggggg

SEQ ID NO: 15961 - RNA, 17 nt, Artificial Sequence
  Synthetic
acgguggccuucugggg

SEQ ID NO: 15962 - RNA, 17 nt, Artificial Sequence
  Synthetic
  misc_feature (1)..(2): n is a, c, g, or u
  misc_feature (14)..(14): n is a, c, g, or u
nnaggcggagaagnggg

SEQ ID NO: 15963 - RNA, 17 nt, Artificial Sequence
  Synthetic
uguauuuaaggacuggg

SEQ ID NO: 15964 - RNA, 17 nt, Artificial Sequence
  Synthetic
aacaagguaggaguggg

SEQ ID NO: 15965 - RNA, 17 nt, Artificial Sequence
  Synthetic
ccaagcugugccuuggg

SEQ ID NO: 15966 - RNA, 17 nt, Artificial Sequence
  Synthetic
cagcuaaaacaaaaugg

SEQ ID NO: 15967 - RNA, 17 nt, Artificial Sequence
  Synthetic
auaguggauccaacugg

SEQ ID NO: 15968 - RNA, 17 nt, Artificial Sequence
  Synthetic
cuguauuuuccugcugg

SEQ ID NO: 15969 - RNA, 17 nt, Artificial Sequence
  Synthetic
uaaaagccagacagugg

SEQ ID NO: 15970 - RNA, 17 nt, Artificial Sequence
  Synthetic
caagccccagccagugg

SEQ ID NO: 15971 - RNA, 17 nt, Artificial Sequence
  Synthetic
agaaggccaccgugugg

SEQ ID NO: 15972 - RNA, 17 nt, Artificial Sequence
  Synthetic
uccugaccuccgauugg

SEQ ID NO: 15973 - RNA, 17 nt, Artificial Sequence
  Synthetic
cccaaggcacagcuugg

SEQ ID NO: 15974 - RNA, 17 nt, Artificial Sequence
  Synthetic
uagccaggacaaguugg

SEQ ID NO: 15975 - RNA, 17 nt, Artificial Sequence
  Synthetic
  misc_feature (5)..(5): n is a, c, g, or u
auaunauugggaguugg

SEQ ID NO: 15976 - RNA, 17 nt, Artificial Sequence
  Synthetic
aggauaggggcauuugg

SEQ ID NO: 15977 - RNA, 17 nt, Artificial Sequence
  Synthetic
uggugacccacaaaaug

SEQ ID NO: 15978 - RNA, 17 nt, Artificial Sequence
  Synthetic
uuacuauccagagaaug

SEQ ID NO: 15979 - RNA, 17 nt, Artificial Sequence
  Synthetic
aaucuucucgaagacug

SEQ ID NO: 15980 - RNA, 17 nt, Artificial Sequence
  Synthetic
uagagguggagagacug

SEQ ID NO: 15981 - RNA, 17 nt, Artificial Sequence
  Synthetic
uuccacugcauggccug

SEQ ID NO: 15982 - RNA, 17 nt, Artificial Sequence
  Synthetic
agaaugcccugugccug

SEQ ID NO: 15983 - RNA, 17 nt, Artificial Sequence
  Synthetic
ugcacaauauguuccug

SEQ ID NO: 15984 - RNA, 17 nt, Artificial Sequence
  Synthetic
ccaagagaaacgggcug

SEQ ID NO: 15985 - RNA, 17 nt, Artificial Sequence
  Synthetic
caagcuauuuugugcug

SEQ ID NO: 15986 - RNA, 17 nt, Artificial Sequence
  Synthetic
caauuuuuuguuaucug

SEQ ID NO: 15987 - RNA, 17 nt, Artificial Sequence
  Synthetic
aucguuggaugugucug

SEQ ID NO: 15988 - RNA, 17 nt, Artificial Sequence
  Synthetic
cacacgguggccuucug

SEQ ID NO: 15989 - RNA, 17 nt, Artificial Sequence
  Synthetic
agaauuuggagcuucug

SEQ ID NO: 15990 - RNA, 17 nt, Artificial Sequence
  Synthetic
cuaaaagccagacagug

SEQ ID NO: 15991 - RNA, 17 nt, Artificial Sequence
  Synthetic
ccaagccccagccagug

SEQ ID NO: 15992 - RNA, 17 nt, Artificial Sequence
  Synthetic
uggugucuuuuggagug

SEQ ID NO: 15993 - RNA, 17 nt, Artificial Sequence
  Synthetic
cccagaaggccaccgug

SEQ ID NO: 15994 - RNA, 17 nt, Artificial Sequence
  Synthetic
aaaugaggcgcuaugug

SEQ ID NO: 15995 - RNA, 17 nt, Artificial Sequence
  Synthetic
cagaaggccaccgugug

SEQ ID NO: 15996 - RNA, 17 nt, Artificial Sequence
  Synthetic
uaagugauuggagauug

SEQ ID NO: 15997 - RNA, 17 nt, Artificial Sequence
  Synthetic
  misc_feature (9)..(9): n is a, c, g, or u
uggaugaunugguauug

SEQ ID NO: 15998 - RNA, 17 nt, Artificial Sequence
  Synthetic
agucgggggaggaguug

SEQ ID NO: 15999 - RNA, 17 nt, Artificial Sequence
  Synthetic
  misc_feature (6)..(6): n is a, c, g, or u
uauaunauugggaguug

SEQ ID NO: 16000 - RNA, 17 nt, Artificial Sequence
  Synthetic
  misc_feature (11)..(11): n is a, c, g, or u
ugagagcagunugguug

SEQ ID NO: 16001 - RNA, 17 nt, Artificial Sequence
  Synthetic
  misc_feature (2)..(2): n is a, c, g, or u
anuauuuacauacuuug

SEQ ID NO: 16002 - RNA, 17 nt, Artificial Sequence
  Synthetic
ugccuuggguggcuuug

SEQ ID NO: 16003 - RNA, 17 nt, Artificial Sequence
  Synthetic
cauagcgccucauuuug

SEQ ID NO: 16004 - RNA, 17 nt, Artificial Sequence
  Synthetic
  misc_feature (4)..(5): n is a, c, g, or u
  misc_feature (17)..(17): n is a, c, g, or u
acgnnaggcggagaagn

SEQ ID NO: 16005 - RNA, 17 nt, Artificial Sequence
  Synthetic
  misc_feature (17)..(17): n is a, c, g, or u
uaguuauauggaugaun

SEQ ID NO: 16006 - RNA, 17 nt, Artificial Sequence
  Synthetic
  misc_feature (17)..(17): n is a, c, g, or u
cacgagucuagacucun

SEQ ID NO: 16007 - RNA, 17 nt, Artificial Sequence
  Synthetic
  misc_feature (17)..(17): n is a, c, g, or u
cuugccugagagcagun

SEQ ID NO: 16008 - RNA, 17 nt, Artificial Sequence
  Synthetic
cacagauaacaaaaaau

SEQ ID NO: 16009 - RNA, 17 nt, Artificial Sequence
  Synthetic
aggcuguaggcauaaau

SEQ ID NO: 16010 - RNA, 17 nt, Artificial Sequence
  Synthetic
acacaaacaaggacaau

SEQ ID NO: 16011 - RNA, 17 nt, Artificial Sequence
  Synthetic
cuccugcuuccaccaau

SEQ ID NO: 16012 - RNA, 17 nt, Artificial Sequence
  Synthetic
uguguugaagucccaau

SEQ ID NO: 16013 - RNA, 17 nt, Artificial Sequence
  Synthetic
caaaccuuccaaucaau

SEQ ID NO: 16014 - RNA, 17 nt, Artificial Sequence
  Synthetic
ccaaggaauacuaacau

SEQ ID NO: 16015 - RNA, 17 nt, Artificial Sequence
  Synthetic
cugaggcccacucccau

SEQ ID NO: 16016 - RNA, 17 nt, Artificial Sequence
  Synthetic
  misc_feature (5)..(5): n is a, c, g, or u
cacanccuagcagccau

SEQ ID NO: 16017 - RNA, 17 nt, Artificial Sequence
  Synthetic
ccuaccuuguuugccau

SEQ ID NO: 16018 - RNA, 17 nt, Artificial Sequence
  Synthetic
aacaagagcuacagcau

SEQ ID NO: 16019 - RNA, 17 nt, Artificial Sequence
  Synthetic
ucuuccugaccuccgau

SEQ ID NO: 16020 - RNA, 17 nt, Artificial Sequence
  Synthetic
aaagaaucccagaggau

SEQ ID NO: 16021 - RNA, 17 nt, Artificial Sequence
  Synthetic
ugaauagacccauugau

SEQ ID NO: 16022 - RNA, 17 nt, Artificial Sequence
  Synthetic
  misc_feature (15)..(15): n is a, c, g, or u
uaugucaauacuaanau

SEQ ID NO: 16023 - RNA, 17 nt, Artificial Sequence
  Synthetic
  misc_feature (15)..(15): n is a, c, g, or u
uuuauggguuauaunau

SEQ ID NO: 16024 - RNA, 17 nt, Artificial Sequence
  Synthetic
uuucggaaaauaccuau

SEQ ID NO: 16025 - RNA, 17 nt, Artificial Sequence
  Synthetic
  misc_feature (11)..(11): n is a, c, g, or u
uauggaugaunugguau

SEQ ID NO: 16026 - RNA, 17 nt, Artificial Sequence
  Synthetic
  misc_feature (13)..(13): n is a, c, g, or u
ucuggagcggacnuuau

SEQ ID NO: 16027 - RNA, 17 nt, Artificial Sequence
  Synthetic
  misc_feature (7)..(7): n is a, c, g, or u
  misc_feature (9)..(9): n is a, c, g, or u
uauuccnuncacuuuau

SEQ ID NO: 16028 - RNA, 17 nt, Artificial Sequence
  Synthetic
caaucuucucgaagacu

SEQ ID NO: 16029 - RNA, 17 nt, Artificial Sequence
  Synthetic
uuagagguggagagacu

SEQ ID NO: 16030 - RNA, 17 nt, Artificial Sequence
  Synthetic
cuguguauuuaaggacu

SEQ ID NO: 16031 - RNA, 17 nt, Artificial Sequence
  Synthetic
aucacaucaggacuccu

SEQ ID NO: 16032 - RNA, 17 nt, Artificial Sequence
  Synthetic
acacgagaagggguccu

SEQ ID NO: 16033 - RNA, 17 nt, Artificial Sequence
  Synthetic
ugggucaccauauuccu

SEQ ID NO: 16034 - RNA, 17 nt, Artificial Sequence
  Synthetic
ccaauguuaguauuccu

SEQ ID NO: 16035 - RNA, 17 nt, Artificial Sequence
  Synthetic
ccacccaaggcacagcu

SEQ ID NO: 16036 - RNA, 17 nt, Artificial Sequence
  Synthetic
  misc_feature (3)..(3): n is a, c, g, or u
aanuaauuaugccagcu

SEQ ID NO: 16037 - RNA, 17 nt, Artificial Sequence
  Synthetic
ccccucucguggucgcu

SEQ ID NO: 16038 - RNA, 17 nt, Artificial Sequence
  Synthetic
ccccacuggcuggggcu

SEQ ID NO: 16039 - RNA, 17 nt, Artificial Sequence
  Synthetic
cgcaacccccacuggcu

SEQ ID NO: 16040 - RNA, 17 nt, Artificial Sequence
  Synthetic
uccuucccauggcugcu

SEQ ID NO: 16041 - RNA, 17 nt, Artificial Sequence
  Synthetic
accuuuaccccguugcu

SEQ ID NO: 16042 - RNA, 17 nt, Artificial Sequence
  Synthetic
uucccaucccaucaucu

SEQ ID NO: 16043 - RNA, 17 nt, Artificial Sequence
  Synthetic
uuacauaagaggacucu

SEQ ID NO: 16044 - RNA, 17 nt, Artificial Sequence
  Synthetic
  misc_feature (6)..(6): n is a, c, g, or u
uacagnccccuuacucu

SEQ ID NO: 16045 - RNA, 17 nt, Artificial Sequence
  Synthetic
ucugugcccaauccucu

SEQ ID NO: 16046 - RNA, 17 nt, Artificial Sequence
  Synthetic
ccucagcccguuucucu

SEQ ID NO: 16047 - RNA, 17 nt, Artificial Sequence
  Synthetic
ccacacgguggccuucu

SEQ ID NO: 16048 - RNA, 17 nt, Artificial Sequence
  Synthetic
  misc_feature (5)..(5): n is a, c, g, or u
acucnguuguccuuucu

SEQ ID NO: 16049 - RNA, 17 nt, Artificial Sequence
  Synthetic
acuucucucaauuuucu

SEQ ID NO: 16050 - RNA, 17 nt, Artificial Sequence
  Synthetic
cgauagccaggacaagu

SEQ ID NO: 16051 - RNA, 17 nt, Artificial Sequence
  Synthetic
agaaaggccuuguaagu

SEQ ID NO: 16052 - RNA, 17 nt, Artificial Sequence
  Synthetic
uuggaggcuugaacagu

SEQ ID NO: 16053 - RNA, 17 nt, Artificial Sequence
  Synthetic
acuaaaagccagacagu

SEQ ID NO: 16054 - RNA, 17 nt, Artificial Sequence
  Synthetic
cuuuccagaccaccagu

SEQ ID NO: 16055 - RNA, 17 nt, Artificial Sequence
  Synthetic
uaaggacugggaggagu

SEQ ID NO: 16056 - RNA, 17 nt, Artificial Sequence
  Synthetic
aaaauaccuaugggagu

SEQ ID NO: 16057 - RNA, 17 nt, Artificial Sequence
  Synthetic
  misc_feature (9)..(9): n is a, c, g, or u
uuucauuunuagugagu

SEQ ID NO: 16058 - RNA, 17 nt, Artificial Sequence
  Synthetic
cuuguccuggcuaucgu

SEQ ID NO: 16059 - RNA, 17 nt, Artificial Sequence
  Synthetic
ccaauggcaaacaaggu

SEQ ID NO: 16060 - RNA, 17 nt, Artificial Sequence
  Synthetic
ccuuggacucauaaggu

SEQ ID NO: 16061 - RNA, 17 nt, Artificial Sequence
  Synthetic
  misc_feature (3)..(3): n is a, c, g, or u
acnuuggcuuccugggu

SEQ ID NO: 16062 - RNA, 17 nt, Artificial Sequence
  Synthetic
agcuaaaacaaaauggu

SEQ ID NO: 16063 - RNA, 17 nt, Artificial Sequence
  Synthetic
  misc_feature (13)..(13): n is a, c, g, or u
ccugagagcagunuggu

SEQ ID NO: 16064 - RNA, 17 nt, Artificial Sequence
  Synthetic
uuguauuaggaggcugu

SEQ ID NO: 16065 - RNA, 17 nt, Artificial Sequence
  Synthetic
aauuuuuuguuaucugu

SEQ ID NO: 16066 - RNA, 17 nt, Artificial Sequence
  Synthetic
ccagaaggccaccgugu

SEQ ID NO: 16067 - RNA, 17 nt, Artificial Sequence
  Synthetic
augccucaucuucuugu

SEQ ID NO: 16068 - RNA, 17 nt, Artificial Sequence
  Synthetic
cucuuauguaagguugu

SEQ ID NO: 16069 - RNA, 17 nt, Artificial Sequence
  Synthetic
aaaugugaacaauuugu

SEQ ID NO: 16070 - RNA, 17 nt, Artificial Sequence
  Synthetic
auagcgccucauuuugu

SEQ ID NO: 16071 - RNA, 17 nt, Artificial Sequence
  Synthetic
caaggaauacuaacauu

SEQ ID NO: 16072 - RNA, 17 nt, Artificial Sequence
  Synthetic
  misc_feature (6)..(6): n is a, c, g, or u
auuucnugccuuacauu

SEQ ID NO: 16073 - RNA, 17 nt, Artificial Sequence
  Synthetic
aagaugcugcacagauu

SEQ ID NO: 16074 - RNA, 17 nt, Artificial Sequence
  Synthetic
aagaaucccagaggauu

SEQ ID NO: 16075 - RNA, 17 nt, Artificial Sequence
  Synthetic
augaacaaaagaugauu

SEQ ID NO: 16076 - RNA, 17 nt, Artificial Sequence
  Synthetic
  misc_feature (14)..(14): n is a, c, g, or u
uuauggguuauaunauu

SEQ ID NO: 16077 - RNA, 17 nt, Artificial Sequence
  Synthetic
  misc_feature (7)..(7): n is a, c, g, or u
aacuguncuugaguauu

SEQ ID NO: 16078 - RNA, 17 nt, Artificial Sequence
  Synthetic
  misc_feature (10)..(10): n is a, c, g, or u
auggaugaunugguauu

SEQ ID NO: 16079 - RNA, 17 nt, Artificial Sequence
  Synthetic
uuaaaggucuuuguauu

SEQ ID NO: 16080 - RNA, 17 nt, Artificial Sequence
  Synthetic
cugcuguaccaaaccuu

SEQ ID NO: 16081 - RNA, 17 nt, Artificial Sequence
  Synthetic
uacuaaauacuucccuu

SEQ ID NO: 16082 - RNA, 17 nt, Artificial Sequence
  Synthetic
ccuccaagcugugccuu

SEQ ID NO: 16083 - RNA, 17 nt, Artificial Sequence
  Synthetic
ugugccuuggguggcuu

SEQ ID NO: 16084 - RNA, 17 nt, Artificial Sequence
  Synthetic
ucccaucccaucaucuu

SEQ ID NO: 16085 - RNA, 17 nt, Artificial Sequence
  Synthetic
  misc_feature (7)..(7): n is a, c, g, or u
uuauaunauugggaguu

SEQ ID NO: 16086 - RNA, 17 nt, Artificial Sequence
  Synthetic
  misc_feature (12)..(12): n is a, c, g, or u
cugagagcagunugguu

SEQ ID NO: 16087 - RNA, 17 nt, Artificial Sequence
  Synthetic
uuggggacugcgaauuu

SEQ ID NO: 16088 - RNA, 17 nt, Artificial Sequence
  Synthetic
aaguauuuaguaacuuu

SEQ ID NO: 16089 - RNA, 17 nt, Artificial Sequence
  Synthetic
ccaucaucuugggcuuu

SEQ ID NO: 16090 - RNA, 17 nt, Artificial Sequence
  Synthetic
  misc_feature (4)..(4): n is a, c, g, or u
acgnauugugggucuuu

SEQ ID NO: 16091 - RNA, 17 nt, Artificial Sequence
  Synthetic
  misc_feature (3)..(3): n is a, c, g, or u
cgnauugugggucuuuu

SEQ ID NO: 16092 - RNA, 20 nt, Artificial Sequence
  Synthetic
ugaacacagcuaaaacaaaa

SEQ ID NO: 16093 - RNA, 20 nt, Artificial Sequence
  Synthetic
uuguuuuagcuguguucaaa

SEQ ID NO: 16094 - RNA, 20 nt, Artificial Sequence
  Synthetic
aaacaaggacaauuggccaa

SEQ ID NO: 16095 - RNA, 20 nt, Artificial Sequence
  Synthetic
cgucagcaaacacuuggcaa

SEQ ID NO: 16096 - RNA, 20 nt, Artificial Sequence
  Synthetic
uugacaaaccuuccaaucaa

SEQ ID NO: 16097 - RNA, 20 nt, Artificial Sequence
  Synthetic
  misc_feature (3)..(3): n is a, c, g, or u
canguauuguuuacagagaa

SEQ ID NO: 16098 - RNA, 20 nt, Artificial Sequence
  Synthetic
aggagguguacuuccgagaa

SEQ ID NO: 16099 - RNA, 20 nt, Artificial Sequence
  Synthetic
aaauacuucccuuuggauaa

SEQ ID NO: 16100 - RNA, 20 nt, Artificial Sequence
  Synthetic
aagcuccaaauucuuuauaa

SEQ ID NO: 16101 - RNA, 20 nt, Artificial Sequence
  Synthetic
cccagucucuccaccucuaa

SEQ ID NO: 16102 - RNA, 20 nt, Artificial Sequence
  Synthetic
uugggacuucaacacaaaca

SEQ ID NO: 16103 - RNA, 20 nt, Artificial Sequence
  Synthetic
caauuggccaauggcaaaca

SEQ ID NO: 16104 - RNA, 20 nt, Artificial Sequence
  Synthetic
  misc_feature (12)..(12): n is a, c, g, or u
uggggacccugnuaugaaca

SEQ ID NO: 16105 - RNA, 20 nt, Artificial Sequence
  Synthetic
uccuggaaguagaggacaca

SEQ ID NO: 16106 - RNA, 20 nt, Artificial Sequence
  Synthetic
ccaggguucacacccccaca

SEQ ID NO: 16107 - RNA, 20 nt, Artificial Sequence
  Synthetic
uguuuucucgccaacuuaca

SEQ ID NO: 16108 - RNA, 20 nt, Artificial Sequence
  Synthetic
ccaugccccaaagccaccca

SEQ ID NO: 16109 - RNA, 20 nt, Artificial Sequence
  Synthetic
uuucccaccuuaugagucca

SEQ ID NO: 16110 - RNA, 20 nt, Artificial Sequence
  Synthetic
ugggaacaagagcuacagca

SEQ ID NO: 16111 - RNA, 20 nt, Artificial Sequence
  Synthetic
aggaucuacaaccaccagca

SEQ ID NO: 16112 - RNA, 20 nt, Artificial Sequence
  Synthetic
cuucaccucugcacgucgca

SEQ ID NO: 16113 - RNA, 20 nt, Artificial Sequence
  Synthetic
uguuguuagacaacgaggca

SEQ ID NO: 16114 - RNA, 20 nt, Artificial Sequence
  Synthetic
cucaacggcgagaaggggca

SEQ ID NO: 16115 - RNA, 20 nt, Artificial Sequence
  Synthetic
ccuuggguggcuuuggggca

SEQ ID NO: 16116 - RNA, 20 nt, Artificial Sequence
  Synthetic
agaguggugcagguuuugca

SEQ ID NO: 16117 - RNA, 20 nt, Artificial Sequence
  Synthetic
  misc_feature (18)..(18): n is a, c, g, or u
uguucuccauguucauanca

SEQ ID NO: 16118 - RNA, 20 nt, Artificial Sequence
  Synthetic
uugguucuucuggacuauca

SEQ ID NO: 16119 - RNA, 20 nt, Artificial Sequence
  Synthetic
accugcaccacucuugcuca

SEQ ID NO: 16120 - RNA, 20 nt, Artificial Sequence
  Synthetic
  misc_feature (5)..(5): n is a, c, g, or u
  misc_feature (9)..(9): n is a, c, g, or u
caagnuccnaggggcguuca

SEQ ID NO: 16121 - RNA, 20 nt, Artificial Sequence
  Synthetic
aagugaaugucaggaaaaga

SEQ ID NO: 16122 - RNA, 20 nt, Artificial Sequence
  Synthetic
ccugagggcuccaccccaga

SEQ ID NO: 16123 - RNA, 20 nt, Artificial Sequence
  Synthetic
acagacgggaagaagucaga

SEQ ID NO: 16124 - RNA, 20 nt, Artificial Sequence
  Synthetic
acacgggccggcagaugaga

SEQ ID NO: 16125 - RNA, 20 nt, Artificial Sequence
  Synthetic
ugcuguaccaaaccuucgga

SEQ ID NO: 16126 - RNA, 20 nt, Artificial Sequence
  Synthetic
  misc_feature (4)..(4): n is a, c, g, or u
acanccuagcagccauggga

SEQ ID NO: 16127 - RNA, 20 nt, Artificial Sequence
  Synthetic
  misc_feature (1)..(1): n is a, c, g, or u
nuauuuacauacuuugugga

SEQ ID NO: 16128 - RNA, 20 nt, Artificial Sequence
  Synthetic
  misc_feature (2)..(2): n is a, c, g, or u
unagaaugcccugugccuga

SEQ ID NO: 16129 - RNA, 20 nt, Artificial Sequence
  Synthetic
  misc_feature (19)..(19): n is a, c, g, or u
uaauuaugucaauacuaana

SEQ ID NO: 16130 - RNA, 20 nt, Artificial Sequence
  Synthetic
  misc_feature (15)..(15): n is a, c, g, or u
  misc_feature (19)..(19): n is a, c, g, or u
agguuguuggcaagnuccna

SEQ ID NO: 16131 - RNA, 20 nt, Artificial Sequence
  Synthetic
  misc_feature (1)..(1): n is a, c, g, or u
  misc_feature (19)..(19): n is a, c, g, or u
nauauaacccauaaagugna

SEQ ID NO: 16132 - RNA, 20 nt, Artificial Sequence
  Synthetic
agcucuuguucccaggaaua

SEQ ID NO: 16133 - RNA, 20 nt, Artificial Sequence
  Synthetic
uaguauuccuuggacucaua

SEQ ID NO: 16134 - RNA, 20 nt, Artificial Sequence
  Synthetic
cugucuggcuuuuaguuaua

SEQ ID NO: 16135 - RNA, 20 nt, Artificial Sequence
  Synthetic
ccccagucucuccaccucua

SEQ ID NO: 16136 - RNA, 20 nt, Artificial Sequence
  Synthetic
caguuucucuuccaaaugua

SEQ ID NO: 16137 - RNA, 20 nt, Artificial Sequence
  Synthetic
uccaagaguccucuuaugua

SEQ ID NO: 16138 - RNA, 20 nt, Artificial Sequence
  Synthetic
uaaaaauuagacaauuauua

SEQ ID NO: 16139 - RNA, 20 nt, Artificial Sequence
  Synthetic
caucaaagacuguguauuua

SEQ ID NO: 16140 - RNA, 20 nt, Artificial Sequence
  Synthetic
uaaacugagccaagagaaac

SEQ ID NO: 16141 - RNA, 20 nt, Artificial Sequence
  Synthetic
  misc_feature (8)..(8): n is a, c, g, or u
ugcuaggnugugcugccaac

SEQ ID NO: 16142 - RNA, 20 nt, Artificial Sequence
  Synthetic
cucugaauaguggauccaac

SEQ ID NO: 16143 - RNA, 20 nt, Artificial Sequence
  Synthetic
aggguucuguguuucugaac

SEQ ID NO: 16144 - RNA, 20 nt, Artificial Sequence
  Synthetic
ccuggaaguagaggacacac

SEQ ID NO: 16145 - RNA, 20 nt, Artificial Sequence
  Synthetic
ucuaagggacacacauccac

SEQ ID NO: 16146 - RNA, 20 nt, Artificial Sequence
  Synthetic
  misc_feature (3)..(3): n is a, c, g, or u
uanaguagaggaguaaagac

SEQ ID NO: 16147 - RNA, 20 nt, Artificial Sequence
  Synthetic
aagacuguguauuuaaggac

SEQ ID NO: 16148 - RNA, 20 nt, Artificial Sequence
  Synthetic
ccucaauccaggucguugac

SEQ ID NO: 16149 - RNA, 20 nt, Artificial Sequence
  Synthetic
agaugaugggaugggaauac

SEQ ID NO: 16150 - RNA, 20 nt, Artificial Sequence
  Synthetic
cauaaggugggaaacuuuac

SEQ ID NO: 16151 - RNA, 20 nt, Artificial Sequence
  Synthetic
cgaauuuuggccaggacacc

SEQ ID NO: 16152 - RNA, 20 nt, Artificial Sequence
  Synthetic
ccgugugggggugugaaccc

SEQ ID NO: 16153 - RNA, 20 nt, Artificial Sequence
  Synthetic
augcuguagcucuuguuccc

SEQ ID NO: 16154 - RNA, 20 nt, Artificial Sequence
  Synthetic
uuugauguauuccucaaucc

SEQ ID NO: 16155 - RNA, 20 nt, Artificial Sequence
  Synthetic
ugacuucuucccgucugucc

SEQ ID NO: 16156 - RNA, 20 nt, Artificial Sequence
  Synthetic
uccuguccuccaacuugucc

SEQ ID NO: 16157 - RNA, 20 nt, Artificial Sequence
  Synthetic
uuugugggucaccauauucc

SEQ ID NO: 16158 - RNA, 20 nt, Artificial Sequence
  Synthetic
cccguguguccucuacuucc

SEQ ID NO: 16159 - RNA, 20 nt, Artificial Sequence
  Synthetic
  misc_feature (11)..(11): n is a, c, g, or u
aguugaugacnuuggcuucc

SEQ ID NO: 16160 - RNA, 20 nt, Artificial Sequence
  Synthetic
ucugaacuggagccaccagc

SEQ ID NO: 16161 - RNA, 20 nt, Artificial Sequence
  Synthetic
cgaagguuugguacagcagc

SEQ ID NO: 16162 - RNA, 20 nt, Artificial Sequence
  Synthetic
agaagaugaggcauagcagc

SEQ ID NO: 16163 - RNA, 20 nt, Artificial Sequence
  Synthetic
  misc_feature (2)..(2): n is a, c, g, or u
cngcuuguuucgcucgcagc

SEQ ID NO: 16164 - RNA, 20 nt, Artificial Sequence
  Synthetic
cugccaacuggauccugcgc

SEQ ID NO: 16165 - RNA, 20 nt, Artificial Sequence
  Synthetic
uuacauacuuuguggaaggc

SEQ ID NO: 16166 - RNA, 20 nt, Artificial Sequence
  Synthetic
  misc_feature (6)..(6): n is a, c, g, or u
aggggncuguauuuuccugc

SEQ ID NO: 16167 - RNA, 20 nt, Artificial Sequence
  Synthetic
  misc_feature (15)..(15): n is a, c, g, or u
acuacuagaucucungcugc

SEQ ID NO: 16168 - RNA, 20 nt, Artificial Sequence
  Synthetic
ucaggcaagcuauuuugugc

SEQ ID NO: 16169 - RNA, 20 nt, Artificial Sequence
  Synthetic
  misc_feature (19)..(19): n is a, c, g, or u
auguucuccauguucauanc

SEQ ID NO: 16170 - RNA, 20 nt, Artificial Sequence
  Synthetic
uuuguguugaagucccaauc

SEQ ID NO: 16171 - RNA, 20 nt, Artificial Sequence
  Synthetic
aacauggagaacaucacauc

SEQ ID NO: 16172 - RNA, 20 nt, Artificial Sequence
  Synthetic
ccuucugggguggagcccuc

SEQ ID NO: 16173 - RNA, 20 nt, Artificial Sequence
  Synthetic
  misc_feature (1)..(1): n is a, c, g, or u
ncuuucugugcccaauccuc

SEQ ID NO: 16174 - RNA, 20 nt, Artificial Sequence
  Synthetic
  misc_feature (11)..(11): n is a, c, g, or u
cccccaaccanacugcucuc

SEQ ID NO: 16175 - RNA, 20 nt, Artificial Sequence
  Synthetic
ugucuaacaacaguagucuc

SEQ ID NO: 16176 - RNA, 20 nt, Artificial Sequence
  Synthetic
uaaugauuaaccacauucuc

SEQ ID NO: 16177 - RNA, 20 nt, Artificial Sequence
  Synthetic
aaagaaggaguuaaccaguc

SEQ ID NO: 16178 - RNA, 20 nt, Artificial Sequence
  Synthetic
aguggauccaacuggugguc

SEQ ID NO: 16179 - RNA, 20 nt, Artificial Sequence
  Synthetic
ucuugaugcaagugaauguc

SEQ ID NO: 16180 - RNA, 20 nt, Artificial Sequence
  Synthetic
uagggcuuucccccacuguc

SEQ ID NO: 16181 - RNA, 20 nt, Artificial Sequence
  Synthetic
cccuauccuaucaacacuuc

SEQ ID NO: 16182 - RNA, 20 nt, Artificial Sequence
  Synthetic
acccccacacgguggccuuc

SEQ ID NO: 16183 - RNA, 20 nt, Artificial Sequence
  Synthetic
caucuucuuguugguucuuc

SEQ ID NO: 16184 - RNA, 20 nt, Artificial Sequence
  Synthetic
  misc_feature (2)..(2): n is a, c, g, or u
  misc_feature (14)..(15): n is a, c, g, or u
cncuucuccgccunncguuc

SEQ ID NO: 16185 - RNA, 20 nt, Artificial Sequence
  Synthetic
ugguugggggugcaauguuc

SEQ ID NO: 16186 - RNA, 20 nt, Artificial Sequence
  Synthetic
auaaccacauugaguaaaag

SEQ ID NO: 16187 - RNA, 20 nt, Artificial Sequence
  Synthetic
  misc_feature (8)..(9): n is a, c, g, or u
cggaacgnnaggcggagaag

SEQ ID NO: 16188 - RNA, 20 nt, Artificial Sequence
  Synthetic
ugccaacaaccuuacauaag

SEQ ID NO: 16189 - RNA, 20 nt, Artificial Sequence
  Synthetic
cagcuuggaggcuugaacag

SEQ ID NO: 16190 - RNA, 20 nt, Artificial Sequence
  Synthetic
uaacaaaaaauugguaacag

SEQ ID NO: 16191 - RNA, 20 nt, Artificial Sequence
  Synthetic
uauaacuaaaagccagacag

SEQ ID NO: 16192 - RNA, 20 nt, Artificial Sequence
  Synthetic
uggucuggaaagaaucccag

SEQ ID NO: 16193 - RNA, 20 nt, Artificial Sequence
  Synthetic
aaucgccaagccccagccag

SEQ ID NO: 16194 - RNA, 20 nt, Artificial Sequence
  Synthetic
aacaaaagaugauuaggcag

SEQ ID NO: 16195 - RNA, 20 nt, Artificial Sequence
  Synthetic
cacauccacaggccaugcag

SEQ ID NO: 16196 - RNA, 20 nt, Artificial Sequence
  Synthetic
agagguuccuugagcaagag

SEQ ID NO: 16197 - RNA, 20 nt, Artificial Sequence
  Synthetic
aauggcaaacaagguaggag

SEQ ID NO: 16198 - RNA, 20 nt, Artificial Sequence
  Synthetic
  misc_feature (11)..(11): n is a, c, g, or u
cgcucgcagcnggucuggag

SEQ ID NO: 16199 - RNA, 20 nt, Artificial Sequence
  Synthetic
  misc_feature (13)..(13): n is a, c, g, or u
cuccuuucauuunuagugag

SEQ ID NO: 16200 - RNA, 20 nt, Artificial Sequence
  Synthetic
cuggaauuugcucugaauag

SEQ ID NO: 16201 - RNA, 20 nt, Artificial Sequence
  Synthetic
cggaaguguugauaggauag

SEQ ID NO: 16202 - RNA, 20 nt, Artificial Sequence
  Synthetic
cgagggaguucuucuucuag

SEQ ID NO: 16203 - RNA, 20 nt, Artificial Sequence
  Synthetic
  misc_feature (15)..(15): n is a, c, g, or u
auugaaaacagguanaguag

SEQ ID NO: 16204 - RNA, 20 nt, Artificial Sequence
  Synthetic
uguggaugugugucccuuag

SEQ ID NO: 16205 - RNA, 20 nt, Artificial Sequence
  Synthetic
cugggugggcaauaauuuag

SEQ ID NO: 16206 - RNA, 20 nt, Artificial Sequence
  Synthetic
ucaauccaggucguugaccg

SEQ ID NO: 16207 - RNA, 20 nt, Artificial Sequence
  Synthetic
cagaugagaaggcacaggcg

SEQ ID NO: 16208 - RNA, 20 nt, Artificial Sequence
  Synthetic
aggagguggaucugguggcg

SEQ ID NO: 16209 - RNA, 20 nt, Artificial Sequence
  Synthetic
  misc_feature (1)..(1): n is a, c, g, or u
nccuagcagccaugggaagg

SEQ ID NO: 16210 - RNA, 20 nt, Artificial Sequence
  Synthetic
uauuccuuggacucauaagg

SEQ ID NO: 16211 - RNA, 20 nt, Artificial Sequence
  Synthetic
aggacaaguuggaggacagg

SEQ ID NO: 16212 - RNA, 20 nt, Artificial Sequence
  Synthetic
  misc_feature (12)..(12): n is a, c, g, or u
uuugguggucunuaagcagg

SEQ ID NO: 16213 - RNA, 20 nt, Artificial Sequence
  Synthetic
cgauugguggaagcaggagg

SEQ ID NO: 16214 - RNA, 20 nt, Artificial Sequence
  Synthetic
  misc_feature (16)..(17): n is a, c, g, or u
ucgucggccggaacgnnagg

SEQ ID NO: 16215 - RNA, 20 nt, Artificial Sequence
  Synthetic
uuaaaggucuuuguauuagg

SEQ ID NO: 16216 - RNA, 20 nt, Artificial Sequence
  Synthetic
uuuuggccaggacacccggg

SEQ ID NO: 16217 - RNA, 20 nt, Artificial Sequence
  Synthetic
cacacgguggccuucugggg

SEQ ID NO: 16218 - RNA, 20 nt, Artificial Sequence
  Synthetic
  misc_feature (4)..(5): n is a, c, g, or u
  misc_feature (17)..(17): n is a, c, g, or u
acgnnaggcggagaagnggg

SEQ ID NO: 16219 - RNA, 20 nt, Artificial Sequence
  Synthetic
cuguguauuuaaggacuggg

SEQ ID NO: 16220 - RNA, 20 nt, Artificial Sequence
  Synthetic
ccuccaagcugugccuuggg

SEQ ID NO: 16221 - RNA, 20 nt, Artificial Sequence
  Synthetic
acacagcuaaaacaaaaugg

SEQ ID NO: 16222 - RNA, 20 nt, Artificial Sequence
  Synthetic
ugaauaguggauccaacugg

SEQ ID NO: 16223 - RNA, 20 nt, Artificial Sequence
  Synthetic
uuugcagggucccgugcugg

SEQ ID NO: 16224 - RNA, 20 nt, Artificial Sequence
  Synthetic
aacuaaaagccagacagugg

SEQ ID NO: 16225 - RNA, 20 nt, Artificial Sequence
  Synthetic
cgccaagccccagccagugg

SEQ ID NO: 16226 - RNA, 20 nt, Artificial Sequence
  Synthetic
  misc_feature (3)..(3): n is a, c, g, or u
canagagucuagacucgugg

SEQ ID NO: 16227 - RNA, 20 nt, Artificial Sequence
  Synthetic
ucuuccugaccuccgauugg

SEQ ID NO: 16228 - RNA, 20 nt, Artificial Sequence
  Synthetic
  misc_feature (11)..(11): n is a, c, g, or u
uauggaugaunugguauugg

SEQ ID NO: 16229 - RNA, 20 nt, Artificial Sequence
  Synthetic
ccacccaaggcacagcuugg

SEQ ID NO: 16230 - RNA, 20 nt, Artificial Sequence
  Synthetic
ucggauccaacagugcuugg

SEQ ID NO: 16231 - RNA, 20 nt, Artificial Sequence
  Synthetic
  misc_feature (13)..(13): n is a, c, g, or u
ccugagagcagunugguugg

SEQ ID NO: 16232 - RNA, 20 nt, Artificial Sequence
  Synthetic
auauggugacccacaaaaug

SEQ ID NO: 16233 - RNA, 20 nt, Artificial Sequence
  Synthetic
  misc_feature (1)..(1): n is a, c, g, or u
nccuuacuauccagagaaug

SEQ ID NO: 16234 - RNA, 20 nt, Artificial Sequence
  Synthetic
aucaaucuucucgaagacug

SEQ ID NO: 16235 - RNA, 20 nt, Artificial Sequence
  Synthetic
ccuuagagguggagagacug

SEQ ID NO: 16236 - RNA, 20 nt, Artificial Sequence
  Synthetic
uuaugcacaauauguuccug

SEQ ID NO: 16237 - RNA, 20 nt, Artificial Sequence
  Synthetic
aggcaagcuauuuugugcug

SEQ ID NO: 16238 - RNA, 20 nt, Artificial Sequence
  Synthetic
uaccaauuuuuuguuaucug

SEQ ID NO: 16239 - RNA, 20 nt, Artificial Sequence
  Synthetic
ccccacacgguggccuucug

SEQ ID NO: 16240 - RNA, 20 nt, Artificial Sequence
  Synthetic
uaaagaauuuggagcuucug

SEQ ID NO: 16241 - RNA, 20 nt, Artificial Sequence
  Synthetic
uaacuaaaagccagacagug

SEQ ID NO: 16242 - RNA, 20 nt, Artificial Sequence
  Synthetic
ucgccaagccccagccagug

SEQ ID NO: 16243 - RNA, 20 nt, Artificial Sequence
  Synthetic
auuuggugucuuuuggagug

SEQ ID NO: 16244 - RNA, 20 nt, Artificial Sequence
  Synthetic
caccccagaaggccaccgug

SEQ ID NO: 16245 - RNA, 20 nt, Artificial Sequence
  Synthetic
acagcuaaaacaaaauggug

SEQ ID NO: 16246 - RNA, 20 nt, Artificial Sequence
  Synthetic
acaaaaugaggcgcuaugug

SEQ ID NO: 16247 - RNA, 20 nt, Artificial Sequence
  Synthetic
ccccagaaggccaccgugug

SEQ ID NO: 16248 - RNA, 20 nt, Artificial Sequence
  Synthetic
  misc_feature (10)..(10): n is a, c, g, or u
cuagacucunugguauugug

SEQ ID NO: 16249 - RNA, 20 nt, Artificial Sequence
  Synthetic
ugguaagugauuggagauug

SEQ ID NO: 16250 - RNA, 20 nt, Artificial Sequence
  Synthetic
  misc_feature (12)..(12): n is a, c, g, or u
auauggaugaunugguauug

SEQ ID NO: 16251 - RNA, 20 nt, Artificial Sequence
  Synthetic
aggagucgggggaggaguug

SEQ ID NO: 16252 - RNA, 20 nt, Artificial Sequence
  Synthetic
cugugccuuggguggcuuug

SEQ ID NO: 16253 - RNA, 20 nt, Artificial Sequence
  Synthetic
  misc_feature (16)..(16): n is a, c, g, or u
  misc_feature (20)..(20): n is a, c, g, or u
aagguuguuggcaagnuccn

SEQ ID NO: 16254 - RNA, 20 nt, Artificial Sequence
  Synthetic
  misc_feature (20)..(20): n is a, c, g, or u
uuuuaguuauauggaugaun

SEQ ID NO: 16255 - RNA, 20 nt, Artificial Sequence
  Synthetic
  misc_feature (20)..(20): n is a, c, g, or u
caccacgagucuagacucun

SEQ ID NO: 16256 - RNA, 20 nt, Artificial Sequence
  Synthetic
  misc_feature (20)..(20): n is a, c, g, or u
uagcuugccugagagcagun

SEQ ID NO: 16257 - RNA, 20 nt, Artificial Sequence
  Synthetic
ucaacacaaacaaggacaau

SEQ ID NO: 16258 - RNA, 20 nt, Artificial Sequence
  Synthetic
caccuccugcuuccaccaau

SEQ ID NO: 16259 - RNA, 20 nt, Artificial Sequence
  Synthetic
aguccaaggaauacuaacau

SEQ ID NO: 16260 - RNA, 20 nt, Artificial Sequence
  Synthetic
  misc_feature (8)..(8): n is a, c, g, or u
cagcacanccuagcagccau

SEQ ID NO: 16261 - RNA, 20 nt, Artificial Sequence
  Synthetic
acuccuaccuuguuugccau

SEQ ID NO: 16262 - RNA, 20 nt, Artificial Sequence
  Synthetic
cuuucuuccugaccuccgau

SEQ ID NO: 16263 - RNA, 20 nt, Artificial Sequence
  Synthetic
acuggcuggggcuuggcgau

SEQ ID NO: 16264 - RNA, 20 nt, Artificial Sequence
  Synthetic
uggaaagaaucccagaggau

SEQ ID NO: 16265 - RNA, 20 nt, Artificial Sequence
  Synthetic
aaagcccaagaugaugggau

SEQ ID NO: 16266 - RNA, 20 nt, Artificial Sequence
  Synthetic
acaggagguugguaagugau

SEQ ID NO: 16267 - RNA, 20 nt, Artificial Sequence
  Synthetic
ccgugaauagacccauugau

SEQ ID NO: 16268 - RNA, 20 nt, Artificial Sequence
  Synthetic
  misc_feature (18)..(18): n is a, c, g, or u
aauuaugucaauacuaanau

SEQ ID NO: 16269 - RNA, 20 nt, Artificial Sequence
  Synthetic
  misc_feature (18)..(18): n is a, c, g, or u
cacuuuauggguuauaunau

SEQ ID NO: 16270 - RNA, 20 nt, Artificial Sequence
  Synthetic
  misc_feature (14)..(14): n is a, c, g, or u
uuauauggaugaunugguau

SEQ ID NO: 16271 - RNA, 20 nt, Artificial Sequence
  Synthetic
  misc_feature (1)..(1): n is a, c, g, or u
  misc_feature (16)..(16): n is a, c, g, or u
nggucuggagcggacnuuau

SEQ ID NO: 16272 - RNA, 20 nt, Artificial Sequence
  Synthetic
cccuuagagguggagagacu

SEQ ID NO: 16273 - RNA, 20 nt, Artificial Sequence
  Synthetic
agacuguguauuuaaggacu

SEQ ID NO: 16274 - RNA, 20 nt, Artificial Sequence
  Synthetic
caagccuccaagcugugccu

SEQ ID NO: 16275 - RNA, 20 nt, Artificial Sequence
  Synthetic
aacaucacaucaggacuccu

SEQ ID NO: 16276 - RNA, 20 nt, Artificial Sequence
  Synthetic
uugugggucaccauauuccu

SEQ ID NO: 16277 - RNA, 20 nt, Artificial Sequence
  Synthetic
uucccaauguuaguauuccu

SEQ ID NO: 16278 - RNA, 20 nt, Artificial Sequence
  Synthetic
aagccacccaaggcacagcu

SEQ ID NO: 16279 - RNA, 20 nt, Artificial Sequence
  Synthetic
  misc_feature (6)..(6): n is a, c, g, or u
ugaaanuaauuaugccagcu

SEQ ID NO: 16280 - RNA, 20 nt, Artificial Sequence
  Synthetic
aacccccacuggcuggggcu

SEQ ID NO: 16281 - RNA, 20 nt, Artificial Sequence
  Synthetic
  misc_feature (17)..(17): n is a, c, g, or u
ugcgagcgaaacaagcngcu

SEQ ID NO: 16282 - RNA, 20 nt, Artificial Sequence
  Synthetic
accuccuucccauggcugcu

SEQ ID NO: 16283 - RNA, 20 nt, Artificial Sequence
  Synthetic
caggcaagcuauuuugugcu

SEQ ID NO: 16284 - RNA, 20 nt, Artificial Sequence
  Synthetic
  misc_feature (2)..(2): n is a, c, g, or u
cnggugauucuaaggcaucu

SEQ ID NO: 16285 - RNA, 20 nt, Artificial Sequence
  Synthetic
accuuacauaagaggacucu

SEQ ID NO: 16286 - RNA, 20 nt, Artificial Sequence
  Synthetic
  misc_feature (9)..(9): n is a, c, g, or u
aaauacagnccccuuacucu

SEQ ID NO: 16287 - RNA, 20 nt, Artificial Sequence
  Synthetic
cuuucugugcccaauccucu

SEQ ID NO: 16288 - RNA, 20 nt, Artificial Sequence
  Synthetic
  misc_feature (8)..(8): n is a, c, g, or u
acaacucnguuguccuuucu

SEQ ID NO: 16289 - RNA, 20 nt, Artificial Sequence
  Synthetic
uggacuucucucaauuuucu

SEQ ID NO: 16290 - RNA, 20 nt, Artificial Sequence
  Synthetic
cagagaaaggccuuguaagu

SEQ ID NO: 16291 - RNA, 20 nt, Artificial Sequence
  Synthetic
agcuuggaggcuugaacagu

SEQ ID NO: 16292 - RNA, 20 nt, Artificial Sequence
  Synthetic
auaacuaaaagccagacagu

SEQ ID NO: 16293 - RNA, 20 nt, Artificial Sequence
  Synthetic
auucuuuccagaccaccagu

SEQ ID NO: 16294 - RNA, 20 nt, Artificial Sequence
  Synthetic
auuuaaggacugggaggagu

SEQ ID NO: 16295 - RNA, 20 nt, Artificial Sequence
  Synthetic
auggcaaacaagguaggagu

SEQ ID NO: 16296 - RNA, 20 nt, Artificial Sequence
  Synthetic
  misc_feature (11)..(11): n is a, c, g, or u
uggguuauaunauugggagu

SEQ ID NO: 16297 - RNA, 20 nt, Artificial Sequence
  Synthetic
  misc_feature (12)..(12): n is a, c, g, or u
uccuuucauuunuagugagu

SEQ ID NO: 16298 - RNA, 20 nt, Artificial Sequence
  Synthetic
caauuuguucaguggugcgu

SEQ ID NO: 16299 - RNA, 20 nt, Artificial Sequence
  Synthetic
uggccaauggcaaacaaggu

SEQ ID NO: 16300 - RNA, 20 nt, Artificial Sequence
  Synthetic
caaguuggaggacaggaggu

SEQ ID NO: 16301 - RNA, 20 nt, Artificial Sequence
  Synthetic
agagguggagagacuggggu

SEQ ID NO: 16302 - RNA, 20 nt, Artificial Sequence
  Synthetic
  misc_feature (6)..(6): n is a, c, g, or u
augacnuuggcuuccugggu

SEQ ID NO: 16303 - RNA, 20 nt, Artificial Sequence
  Synthetic
cacagcuaaaacaaaauggu

SEQ ID NO: 16304 - RNA, 20 nt, Artificial Sequence
  Synthetic
  misc_feature (16)..(16): n is a, c, g, or u
uugccugagagcagunuggu

SEQ ID NO: 16305 - RNA, 20 nt, Artificial Sequence
  Synthetic
acaguuccaccaagcacugu

SEQ ID NO: 16306 - RNA, 20 nt, Artificial Sequence
  Synthetic
accaauuuuuuguuaucugu

SEQ ID NO: 16307 - RNA, 20 nt, Artificial Sequence
  Synthetic
accccagaaggccaccgugu

SEQ ID NO: 16308 - RNA, 20 nt, Artificial Sequence
  Synthetic
  misc_feature (15)..(15): n is a, c, g, or u
aagguuugucaacgnauugu

SEQ ID NO: 16309 - RNA, 20 nt, Artificial Sequence
  Synthetic
caaaaaugugaacaauuugu

SEQ ID NO: 16310 - RNA, 20 nt, Artificial Sequence
  Synthetic
  misc_feature (19)..(19): n is a, c, g, or u
cuggggugaguugaugacnu

SEQ ID NO: 16311 - RNA, 20 nt, Artificial Sequence
  Synthetic
auugacccuuauaaagaauu

SEQ ID NO: 16312 - RNA, 20 nt, Artificial Sequence
  Synthetic
  misc_feature (3)..(3): n is a, c, g, or u
  misc_feature (9)..(9): n is a, c, g, or u
canauuucnugccuuacauu

SEQ ID NO: 16313 - RNA, 20 nt, Artificial Sequence
  Synthetic
cucaagaugcugcacagauu

SEQ ID NO: 16314 - RNA, 20 nt, Artificial Sequence
  Synthetic
  misc_feature (17)..(17): n is a, c, g, or u
acuuuauggguuauaunauu

SEQ ID NO: 16315 - RNA, 20 nt, Artificial Sequence
  Synthetic
  misc_feature (10)..(10): n is a, c, g, or u
agaaacuguncuugaguauu

SEQ ID NO: 16316 - RNA, 20 nt, Artificial Sequence
  Synthetic
  misc_feature (13)..(13): n is a, c, g, or u
uauauggaugaunugguauu

SEQ ID NO: 16317 - RNA, 20 nt, Artificial Sequence
  Synthetic
agguuaaaggucuuuguauu

SEQ ID NO: 16318 - RNA, 20 nt, Artificial Sequence
  Synthetic
agggaaguauuuaguaacuu

SEQ ID NO: 16319 - RNA, 20 nt, Artificial Sequence
  Synthetic
cugcugcuguaccaaaccuu

SEQ ID NO: 16320 - RNA, 20 nt, Artificial Sequence
  Synthetic
aguuacuaaauacuucccuu

SEQ ID NO: 16321 - RNA, 20 nt, Artificial Sequence
  Synthetic
aagccuccaagcugugccuu

SEQ ID NO: 16322 - RNA, 20 nt, Artificial Sequence
  Synthetic
aagguaggagugggaggcuu

SEQ ID NO: 16323 - RNA, 20 nt, Artificial Sequence
  Synthetic
agcugugccuuggguggcuu

SEQ ID NO: 16324 - RNA, 20 nt, Artificial Sequence
  Synthetic
uauucccaucccaucaucuu

SEQ ID NO: 16325 - RNA, 20 nt, Artificial Sequence
  Synthetic
  misc_feature (15)..(15): n is a, c, g, or u
ugccugagagcagunugguu

SEQ ID NO: 16326 - RNA, 20 nt, Artificial Sequence
  Synthetic
aucccaucaucuugggcuuu

SEQ ID NO: 16327 - RNA, 20 nt, Artificial Sequence
  Synthetic
  misc_feature (7)..(7): n is a, c, g, or u
ucaacgnauugugggucuuu

SEQ ID NO: 16328 - RNA, 20 nt, Artificial Sequence
  Synthetic
cuugaguauuuggugucuuu

SEQ ID NO: 16329 - RNA, 20 nt, Artificial Sequence
  Synthetic
  misc_feature (6)..(6): n is a, c, g, or u
caacgnauugugggucuuuu

SEQ ID NO: 16330 - RNA, 20 nt, Artificial Sequence
  Synthetic
guacuuccgagaaaggacaa

SEQ ID NO: 16331 - RNA, 22 nt, Artificial Sequence
  Synthetic
guguacuuccgagaaaggacaa

SEQ ID NO: 16332 - RNA, 23 nt, Artificial Sequence
  Synthetic
gguguacuuccgagaaaggacaa

SEQ ID NO: 16333 - RNA, 20 nt, Artificial Sequence
  Synthetic
gccuggccguugccgagcaa

SEQ ID NO: 16334 - RNA, 21 nt, Artificial Sequence
  Synthetic
ggccuggccguugccgagcaa

SEQ ID NO: 16335 - RNA, 22 nt, Artificial Sequence
  Synthetic
gcaugagagcaggauaaccaca

SEQ ID NO: 16336 - RNA, 23 nt, Artificial Sequence
  Synthetic
ggcaugagagcaggauaaccaca

SEQ ID NO: 16337 - RNA, 24 nt, Artificial Sequence
  Synthetic
gggcaugagagcaggauaaccaca

SEQ ID NO: 16338 - RNA, 18 nt, Artificial Sequence
  Synthetic
ggucuggaaagaauccca

SEQ ID NO: 16339 - RNA, 20 nt, Artificial Sequence
  Synthetic
guggucuggaaagaauccca

SEQ ID NO: 16340 - RNA, 21 nt, Artificial Sequence
  Synthetic
gguggucuggaaagaauccca

SEQ ID NO: 16341 - RNA, 21 nt, Artificial Sequence
  Synthetic
guuucccaccuuaugagucca

SEQ ID NO: 16342 - RNA, 22 nt, Artificial Sequence
  Synthetic
gcaagugaaugucaggaaaaga

SEQ ID NO: 16343 - RNA, 20 nt, Artificial Sequence
  Synthetic
gaucuucgucugcgaggcga

SEQ ID NO: 16344 - RNA, 22 nt, Artificial Sequence
  Synthetic
gagaucuucgucugcgaggcga

SEQ ID NO: 16345 - RNA, 20 nt, Artificial Sequence
  Synthetic
gauccaacugguggucugga

SEQ ID NO: 16346 - RNA, 21 nt, Artificial Sequence
  Synthetic
ggauccaacugguggucugga

SEQ ID NO: 16347 - RNA, 23 nt, Artificial Sequence
  Synthetic
guggauccaacugguggucugga

SEQ ID NO: 16348 - RNA, 24 nt, Artificial Sequence
  Synthetic
guauuuuccgaaagcccaagauga

SEQ ID NO: 16349 - RNA, 20 nt, Artificial Sequence
  Synthetic
guagucuccggaaguguuga

SEQ ID NO: 16350 - RNA, 20 nt, Artificial Sequence
  Synthetic
gcuggaauuugcucugaaua

SEQ ID NO: 16351 - RNA, 24 nt, Artificial Sequence
  Synthetic
gacugcuggaauuugcucugaaua

SEQ ID NO: 16352 - RNA, 24 nt, Artificial Sequence
  Synthetic
gcuauguguggauucucucuuaua

SEQ ID NO: 16353 - RNA, 18 nt, Artificial Sequence
  Synthetic
gaauuuuggccaggacac

SEQ ID NO: 16354 - RNA, 20 nt, Artificial Sequence
  Synthetic
gcgaauuuuggccaggacac

SEQ ID NO: 16355 - RNA, 24 nt, Artificial Sequence
  Synthetic
gacugcgaauuuuggccaggacac

SEQ ID NO: 16356 - RNA, 21 nt, Artificial Sequence
  Synthetic
gucccuuagagguggagagac

SEQ ID NO: 16357 - RNA, 23 nt, Artificial Sequence
  Synthetic
gugucccuuagagguggagagac

SEQ ID NO: 16358 - RNA, 21 nt, Artificial Sequence
  Synthetic
gaaaauugagagaaguccacc

SEQ ID NO: 16359 - RNA, 20 nt, Artificial Sequence
  Synthetic
guugaccggggcgaaagucc

SEQ ID NO: 16360 - RNA, 23 nt, Artificial Sequence
  Synthetic
gucguugaccggggcgaaagucc

SEQ ID NO: 16361 - RNA, 24 nt, Artificial Sequence
  Synthetic
ggucguugaccggggcgaaagucc

SEQ ID NO: 16362 - RNA, 22 nt, Artificial Sequence
  Synthetic
gaaacauagagguuccuugagc

SEQ ID NO: 16363 - RNA, 23 nt, Artificial Sequence
  Synthetic
ggaaacauagagguuccuugagc

SEQ ID NO: 16364 - RNA, 24 nt, Artificial Sequence
  Synthetic
gggaaacauagagguuccuugagc

SEQ ID NO: 16365 - RNA, 20 nt, Artificial Sequence
  Synthetic
gaagucccaaucgggacugc

SEQ ID NO: 16366 - RNA, 23 nt, Artificial Sequence
  Synthetic
guugaagucccaaucgggacugc

SEQ ID NO: 16367 - RNA, 21 nt, Artificial Sequence
  Synthetic
  misc_feature (11)..(11): n is a, c, g, or u
gaaaauacagnccccuuacuc

SEQ ID NO: 16368 - RNA, 22 nt, Artificial Sequence
  Synthetic
  misc_feature (12)..(12): n is a, c, g, or u
ggaaaauacagnccccuuacuc

SEQ ID NO: 16369 - RNA, 18 nt, Artificial Sequence
  Synthetic
gccccaagcgaccacgag

SEQ ID NO: 16370 - RNA, 20 nt, Artificial Sequence
  Synthetic
gagccccaagcgaccacgag

SEQ ID NO: 16371 - RNA, 23 nt, Artificial Sequence
  Synthetic
gcagagccccaagcgaccacgag

SEQ ID NO: 16372 - RNA, 24 nt, Artificial Sequence
  Synthetic
ggcagagccccaagcgaccacgag

SEQ ID NO: 16373 - RNA, 18 nt, Artificial Sequence
  Synthetic
gagaggcaauagucggag

SEQ ID NO: 16374 - RNA, 20 nt, Artificial Sequence
  Synthetic
gagagaggcaauagucggag

SEQ ID NO: 16375 - RNA, 22 nt, Artificial Sequence
  Synthetic
gugagagaggcaauagucggag

SEQ ID NO: 16376 - RNA, 21 nt, Artificial Sequence
  Synthetic
  misc_feature (16)..(16): n is a, c, g, or u
gauugaaaacagguanaguag

SEQ ID NO: 16377 - RNA, 22 nt, Artificial Sequence
  Synthetic
  misc_feature (17)..(17): n is a, c, g, or u
ggauugaaaacagguanaguag

SEQ ID NO: 16378 - RNA, 21 nt, Artificial Sequence
  Synthetic
gaccacgagaggggucguccg

SEQ ID NO: 16379 - RNA, 23 nt, Artificial Sequence
  Synthetic
gcgaccacgagaggggucguccg

SEQ ID NO: 16380 - RNA, 18 nt, Artificial Sequence
  Synthetic
gacaaaggacgucccgcg

SEQ ID NO: 16381 - RNA, 21 nt, Artificial Sequence
  Synthetic
guagacaaaggacgucccgcg

SEQ ID NO: 16382 - RNA, 24 nt, Artificial Sequence
  Synthetic
gacguagacaaaggacgucccgcg

SEQ ID NO: 16383 - RNA, 21 nt, Artificial Sequence
  Synthetic
gcagaugagaaggcacaggcg

SEQ ID NO: 16384 - RNA, 22 nt, Artificial Sequence
  Synthetic
ggcagaugagaaggcacaggcg

SEQ ID NO: 16385 - RNA, 23 nt, Artificial Sequence
  Synthetic
  misc_feature (15)..(15): n is a, c, g, or u
gcauuugguggucunuaagcagg

SEQ ID NO: 16386 - RNA, 24 nt, Artificial Sequence
  Synthetic
  misc_feature (16)..(16): n is a, c, g, or u
ggcauuugguggucunuaagcagg

SEQ ID NO: 16387 - RNA, 21 nt, Artificial Sequence
  Synthetic
gcaagaguggugcagguuuug

SEQ ID NO: 16388 - RNA, 23 nt, Artificial Sequence
  Synthetic
gagcaagaguggugcagguuuug

SEQ ID NO: 16389 - RNA, 20 nt, Artificial Sequence
  Synthetic
  misc_feature (20)..(20): n is a, c, g, or u
gauguucuccauguucauan

SEQ ID NO: 16390 - RNA, 22 nt, Artificial Sequence
  Synthetic
  misc_feature (22)..(22): n is a, c, g, or u
gugauguucuccauguucauan

SEQ ID NO: 16391 - RNA, 22 nt, Artificial Sequence
  Synthetic
gaagaagucagaaggcaaaaau

SEQ ID NO: 16392 - RNA, 23 nt, Artificial Sequence
  Synthetic
ggaagaagucagaaggcaaaaau

SEQ ID NO: 16393 - RNA, 24 nt, Artificial Sequence
  Synthetic
gggaagaagucagaaggcaaaaau

SEQ ID NO: 16394 - RNA, 21 nt, Artificial Sequence
  Synthetic
gaaagcccaagaugaugggau

SEQ ID NO: 16395 - RNA, 24 nt, Artificial Sequence
  Synthetic
guaagugauuggagauuggggacu

SEQ ID NO: 16396 - RNA, 20 nt, Artificial Sequence
  Synthetic
guaacacgagaagggguccu

SEQ ID NO: 16397 - RNA, 24 nt, Artificial Sequence
  Synthetic
gccuguaacacgagaagggguccu

SEQ ID NO: 16398 - RNA, 19 nt, Artificial Sequence
  Synthetic
  misc_feature (16)..(16): n is a, c, g, or u
gcgagcgaaacaagcngcu

SEQ ID NO: 16399 - RNA, 22 nt, Artificial Sequence
  Synthetic
  misc_feature (19)..(19): n is a, c, g, or u
gcugcgagcgaaacaagcngcu

SEQ ID NO: 16400 - RNA, 20 nt, Artificial Sequence
  Synthetic
guaaugauuaaccacauucu

SEQ ID NO: 16401 - RNA, 21 nt, Artificial Sequence
  Synthetic
gaaaagaaggaguuaaccagu

SEQ ID NO: 16402 - RNA, 22 nt, Artificial Sequence
  Synthetic
ggaaaagaaggaguuaaccagu

SEQ ID NO: 16403 - RNA, 24 nt, Artificial Sequence
  Synthetic
gccaaucgccaagccccagccagu

SEQ ID NO: 16404 - RNA, 24 nt, Artificial Sequence
  Synthetic
gacccacaaaaugaggcgcuaugu

SEQ ID NO: 16405 - RNA, 21 nt, Artificial Sequence
  Synthetic
  misc_feature (12)..(12): n is a, c, g, or u
gucuagacucunugguauugu

SEQ ID NO: 16406 - RNA, 23 nt, Artificial Sequence
  Synthetic
  misc_feature (14)..(14): n is a, c, g, or u
gagucuagacucunugguauugu

SEQ ID NO: 16407 - RNA, 22 nt, Artificial Sequence
  Synthetic
guggaucugguggcgagguugu

SEQ ID NO: 16408 - RNA, 23 nt, Artificial Sequence
  Synthetic
gguggaucugguggcgagguugu

SEQ ID NO: 16409 - RNA, 22 nt, Artificial Sequence
  Synthetic
gaccgguaaaguuucccaccuu

SEQ ID NO: 16410 - RNA, 23 nt, Artificial Sequence
  Synthetic
  misc_feature (18)..(18): n is a, c, g, or u
gcuugccugagagcagunugguu

SEQ ID NO: 16411 - RNA, 21 nt, Artificial Sequence
  Synthetic
  misc_feature (10)..(10): n is a, c, g, or u
gcugcuaggnugugcugccaa

SEQ ID NO: 16412 - RNA, 22 nt, Artificial Sequence
  Synthetic
  misc_feature (11)..(11): n is a, c, g, or u
ggcugcuaggnugugcugccaa

SEQ ID NO: 16413 - RNA, 22 nt, Artificial Sequence
  Synthetic
gacaaaaauccucacaauacca

SEQ ID NO: 16414 - RNA, 20 nt, Artificial Sequence
  Synthetic
  misc_feature (8)..(8): n is a, c, g, or u
guauuaanccuuacuaucca

SEQ ID NO: 16415 - RNA, 21 nt, Artificial Sequence
  Synthetic
  misc_feature (9)..(9): n is a, c, g, or u
gguauuaanccuuacuaucca

SEQ ID NO: 16416 - RNA, 23 nt, Artificial Sequence
  Synthetic
gaaggcaggaauucuauauaaga

SEQ ID NO: 16417 - RNA, 24 nt, Artificial Sequence
  Synthetic
ggaaggcaggaauucuauauaaga

SEQ ID NO: 16418 - RNA, 21 nt, Artificial Sequence
  Synthetic
gcauggacauugacccuuaua

SEQ ID NO: 16419 - RNA, 22 nt, Artificial Sequence
  Synthetic
ggcauggacauugacccuuaua

SEQ ID NO: 16420 - RNA, 23 nt, Artificial Sequence
  Synthetic
gggcauggacauugacccuuaua

SEQ ID NO: 16421 - RNA, 24 nt, Artificial Sequence
  Synthetic
ggggcauggacauugacccuuaua

SEQ ID NO: 16422 - RNA, 24 nt, Artificial Sequence
  Synthetic
gcuuccugggugggcaauaauuua

SEQ ID NO: 16423 - RNA, 22 nt, Artificial Sequence
  Synthetic
gacuuucgccccggucaacgac

SEQ ID NO: 16424 - RNA, 23 nt, Artificial Sequence
  Synthetic
ggacuuucgccccggucaacgac

SEQ ID NO: 16425 - RNA, 21 nt, Artificial Sequence
  Synthetic
gauugcuuucgcaaacuuccc

SEQ ID NO: 16426 - RNA, 22 nt, Artificial Sequence
  Synthetic
guucaagccuccaagcugugcc

SEQ ID NO: 16427 - RNA, 24 nt, Artificial Sequence
  Synthetic
gcucucaggcaagcuauuuugugc

SEQ ID NO: 16428 - RNA, 19 nt, Artificial Sequence
  Synthetic
gccaaaucugugcagcauc

SEQ ID NO: 16429 - RNA, 20 nt, Artificial Sequence
  Synthetic
ggccaaaucugugcagcauc

SEQ ID NO: 16430 - RNA, 21 nt, Artificial Sequence
  Synthetic
gggccaaaucugugcagcauc

SEQ ID NO: 16431 - RNA, 22 nt, Artificial Sequence
  Synthetic
ggggccaaaucugugcagcauc

SEQ ID NO: 16432 - RNA, 23 nt, Artificial Sequence
  Synthetic
gggggccaaaucugugcagcauc

SEQ ID NO: 16433 - RNA, 23 nt, Artificial Sequence
  Synthetic
  misc_feature (4)..(4): n is a, c, g, or u
gaancuuucugugcccaauccuc

SEQ ID NO: 16434 - RNA, 18 nt, Artificial Sequence
  Synthetic
gagugggaggcuucgguc

SEQ ID NO: 16435 - RNA, 19 nt, Artificial Sequence
  Synthetic
ggagugggaggcuucgguc

SEQ ID NO: 16436 - RNA, 22 nt, Artificial Sequence
  Synthetic
guaggagugggaggcuucgguc

SEQ ID NO: 16437 - RNA, 23 nt, Artificial Sequence
  Synthetic
gguaggagugggaggcuucgguc

SEQ ID NO: 16438 - RNA, 20 nt, Artificial Sequence
  Synthetic
gcccguguguccucuacuuc

SEQ ID NO: 16439 - RNA, 23 nt, Artificial Sequence
  Synthetic
guugcccguguguccucuacuuc

SEQ ID NO: 16440 - RNA, 22 nt, Artificial Sequence
  Synthetic
  misc_feature (14)..(14): n is a, c, g, or u
gugaguugaugacnuuggcuuc

SEQ ID NO: 16441 - RNA, 23 nt, Artificial Sequence
  Synthetic
  misc_feature (15)..(15): n is a, c, g, or u
ggugaguugaugacnuuggcuuc

SEQ ID NO: 16442 - RNA, 24 nt, Artificial Sequence
  Synthetic
  misc_feature (16)..(16): n is a, c, g, or u
gggugaguugaugacnuuggcuuc

SEQ ID NO: 16443 - RNA, 20 nt, Artificial Sequence
  Synthetic
gauucuuuccagaccaccag

SEQ ID NO: 16444 - RNA, 21 nt, Artificial Sequence
  Synthetic
ggauucuuuccagaccaccag

SEQ ID NO: 16445 - RNA, 22 nt, Artificial Sequence
  Synthetic
gggauucuuuccagaccaccag

SEQ ID NO: 16446 - RNA, 20 nt, Artificial Sequence
  Synthetic
  misc_feature (5)..(6): n is a, c, g, or u
gccunncguuccggccgacg

SEQ ID NO: 16447 - RNA, 18 nt, Artificial Sequence
  Synthetic
gucuacgucccgucggcg

SEQ ID NO: 16448 - RNA, 22 nt, Artificial Sequence
  Synthetic
gacuguguauuuaaggacuggg

SEQ ID NO: 16449 - RNA, 20 nt, Artificial Sequence
  Synthetic
gcaagcuauuuugugcuggg

SEQ ID NO: 16450 - RNA, 21 nt, Artificial Sequence
  Synthetic
ggcaagcuauuuugugcuggg

SEQ ID NO: 16451 - RNA, 22 nt, Artificial Sequence
  Synthetic
gaacacagcuaaaacaaaaugg

SEQ ID NO: 16452 - RNA, 18 nt, Artificial Sequence
  Synthetic
ggucaacgaccuggauug

SEQ ID NO: 16453 - RNA, 23 nt, Artificial Sequence
  Synthetic
gccccggucaacgaccuggauug

SEQ ID NO: 16454 - RNA, 19 nt, Artificial Sequence
  Synthetic
gcuuucggaaaauaccuau

SEQ ID NO: 16455 - RNA, 20 nt, Artificial Sequence
  Synthetic
ggcuuucggaaaauaccuau

SEQ ID NO: 16456 - RNA, 21 nt, Artificial Sequence
  Synthetic
gggcuuucggaaaauaccuau

SEQ ID NO: 16457 - RNA, 18 nt, Artificial Sequence
  Synthetic
guuacuaaauacuucccu

SEQ ID NO: 16458 - RNA, 19 nt, Artificial Sequence
  Synthetic
gcccucuaccgagaugccu

SEQ ID NO: 16459 - RNA, 21 nt, Artificial Sequence
  Synthetic
guggacuucucucaauuuucu

SEQ ID NO: 16460 - RNA, 22 nt, Artificial Sequence
  Synthetic
gguggacuucucucaauuuucu

SEQ ID NO: 16461 - RNA, 24 nt, Artificial Sequence
  Synthetic
gugguggacuucucucaauuuucu

SEQ ID NO: 16462 - RNA, 21 nt, Artificial Sequence
  Synthetic
guauuuggugucuuuuggagu

SEQ ID NO: 16463 - RNA, 23 nt, Artificial Sequence
  Synthetic
gaguauuuggugucuuuuggagu

SEQ ID NO: 16464 - RNA, 24 nt, Artificial Sequence
  Synthetic
  misc_feature (21)..(21): n is a, c, g, or u
gauuggaagguuugucaacgnauu

SEQ ID NO: 16465 - RNA, 23 nt, Artificial Sequence
  Synthetic
  misc_feature (3)..(3): n is a, c, g, or u
guncuugaguauuuggugucuuu

SEQ ID NO: 16466 - RNA, 18 nt, Artificial Sequence
  Synthetic
acuuccgagaaaggacaa

SEQ ID NO: 16467 - RNA, 19 nt, Artificial Sequence
  Synthetic
uacuuccgagaaaggacaa

SEQ ID NO: 16468 - RNA, 21 nt, Artificial Sequence
  Synthetic
uguacuuccgagaaaggacaa

SEQ ID NO: 16469 - RNA, 24 nt, Artificial Sequence
  Synthetic
agguguacuuccgagaaaggacaa

SEQ ID NO: 16470 - RNA, 18 nt, Artificial Sequence
  Synthetic
cuggccguugccgagcaa

SEQ ID NO: 16471 - RNA, 19 nt, Artificial Sequence
  Synthetic
ccuggccguugccgagcaa

SEQ ID NO: 16472 - RNA, 22 nt, Artificial Sequence
  Synthetic
aggccuggccguugccgagcaa

SEQ ID NO: 16473 - RNA, 23 nt, Artificial Sequence
  Synthetic
aaggccuggccguugccgagcaa

SEQ ID NO: 16474 - RNA, 24 nt, Artificial Sequence
  Synthetic
aaaggccuggccguugccgagcaa

SEQ ID NO: 16475 - RNA, 21 nt, Artificial Sequence
  Synthetic
  misc_feature (9)..(9): n is a, c, g, or u
uuguaucanaucuugaugcaa

SEQ ID NO: 16476 - RNA, 22 nt, Artificial Sequence
  Synthetic
  misc_feature (10)..(10): n is a, c, g, or u
uuuguaucanaucuugaugcaa

SEQ ID NO: 16477 - RNA, 23 nt, Artificial Sequence
  Synthetic
  misc_feature (11)..(11): n is a, c, g, or u
uuuuguaucanaucuugaugcaa

SEQ ID NO: 16478 - RNA, 24 nt, Artificial Sequence
  Synthetic
  misc_feature (12)..(12): n is a, c, g, or u
uuuuuguaucanaucuugaugcaa

SEQ ID NO: 16479 - RNA, 21 nt, Artificial Sequence
  Synthetic
uuuuguuuuagcuguguucaa

SEQ ID NO: 16480 - RNA, 22 nt, Artificial Sequence
  Synthetic
auuuuguuuuagcuguguucaa

SEQ ID NO: 16481 - RNA, 23 nt, Artificial Sequence
  Synthetic
cauuuuguuuuagcuguguucaa

SEQ ID NO: 16482 - RNA, 24 nt, Artificial Sequence
  Synthetic
ccauuuuguuuuagcuguguucaa

SEQ ID NO: 16483 - RNA, 21 nt, Artificial Sequence
  Synthetic
caugagagcaggauaaccaca

SEQ ID NO: 16484 - RNA, 19 nt, Artificial Sequence
  Synthetic
uggucuggaaagaauccca

SEQ ID NO: 16485 - RNA, 22 nt, Artificial Sequence
  Synthetic
ugguggucuggaaagaauccca

SEQ ID NO: 16486 - RNA, 23 nt, Artificial Sequence
  Synthetic
cugguggucuggaaagaauccca

SEQ ID NO: 16487 - RNA, 24 nt, Artificial Sequence
  Synthetic
acugguggucuggaaagaauccca

SEQ ID NO: 16488 - RNA, 22 nt, Artificial Sequence
  Synthetic
aguuucccaccuuaugagucca

SEQ ID NO: 16489 - RNA, 23 nt, Artificial Sequence
  Synthetic
aaguuucccaccuuaugagucca

SEQ ID NO: 16490 - RNA, 24 nt, Artificial Sequence
  Synthetic
aaaguuucccaccuuaugagucca

SEQ ID NO: 16491 - RNA, 21 nt, Artificial Sequence
  Synthetic
cguugacaaaccuuccaauca

SEQ ID NO: 16492 - RNA, 22 nt, Artificial Sequence
  Synthetic
  misc_feature (1)..(1): n is a, c, g, or u
ncguugacaaaccuuccaauca

SEQ ID NO: 16493 - RNA, 23 nt, Artificial Sequence
  Synthetic
  misc_feature (2)..(2): n is a, c, g, or u
uncguugacaaaccuuccaauca

SEQ ID NO: 16494 - RNA, 24 nt, Artificial Sequence
  Synthetic
  misc_feature (3)..(3): n is a, c, g, or u
auncguugacaaaccuuccaauca

SEQ ID NO: 16495 - RNA, 21 nt, Artificial Sequence
  Synthetic
caagugaaugucaggaaaaga

SEQ ID NO: 16496 - RNA, 23 nt, Artificial Sequence
  Synthetic
ugcaagugaaugucaggaaaaga

SEQ ID NO: 16497 - RNA, 24 nt, Artificial Sequence
  Synthetic
augcaagugaaugucaggaaaaga

SEQ ID NO: 16498 - RNA, 18 nt, Artificial Sequence
  Synthetic
accgccuguaacacgaga

SEQ ID NO: 16499 - RNA, 19 nt, Artificial Sequence
  Synthetic
caccgccuguaacacgaga

SEQ ID NO: 16500 - RNA, 20 nt, Artificial Sequence
  Synthetic
acaccgccuguaacacgaga

SEQ ID NO: 16501 - RNA, 21 nt, Artificial Sequence
  Synthetic
cacaccgccuguaacacgaga

SEQ ID NO: 16502 - RNA, 22 nt, Artificial Sequence
  Synthetic
acacaccgccuguaacacgaga

SEQ ID NO: 16503 - RNA, 23 nt, Artificial Sequence
  Synthetic
aacacaccgccuguaacacgaga

SEQ ID NO: 16504 - RNA, 24 nt, Artificial Sequence
  Synthetic
aaacacaccgccuguaacacgaga

SEQ ID NO: 16505 - RNA, 18 nt, Artificial Sequence
  Synthetic
ucuucgucugcgaggcga

SEQ ID NO: 16506 - RNA, 19 nt, Artificial Sequence
  Synthetic
aucuucgucugcgaggcga

SEQ ID NO: 16507 - RNA, 21 nt, Artificial Sequence
  Synthetic
agaucuucgucugcgaggcga

SEQ ID NO: 16508 - RNA, 23 nt, Artificial Sequence
  Synthetic
ugagaucuucgucugcgaggcga

SEQ ID NO: 16509 - RNA, 24 nt, Artificial Sequence
  Synthetic
uugagaucuucgucugcgaggcga

SEQ ID NO: 16510 - RNA, 18 nt, Artificial Sequence
  Synthetic
uccaacugguggucugga

SEQ ID NO: 16511 - RNA, 19 nt, Artificial Sequence
  Synthetic
auccaacugguggucugga

SEQ ID NO: 16512 - RNA, 22 nt, Artificial Sequence
  Synthetic
uggauccaacugguggucugga

SEQ ID NO: 16513 - RNA, 24 nt, Artificial Sequence
  Synthetic
aguggauccaacugguggucugga

SEQ ID NO: 16514 - RNA, 18 nt, Artificial Sequence
  Synthetic
uccgaaagcccaagauga

SEQ ID NO: 16515 - RNA, 19 nt, Artificial Sequence
  Synthetic
uuccgaaagcccaagauga

SEQ ID NO: 16516 - RNA, 20 nt, Artificial Sequence
  Synthetic
uuuccgaaagcccaagauga

SEQ ID NO: 16517 - RNA, 21 nt, Artificial Sequence
  Synthetic
uuuuccgaaagcccaagauga

SEQ ID NO: 16518 - RNA, 22 nt, Artificial Sequence
  Synthetic
auuuuccgaaagcccaagauga

SEQ ID NO: 16519 - RNA, 23 nt, Artificial Sequence
  Synthetic
uauuuuccgaaagcccaagauga

SEQ ID NO: 16520 - RNA, 18 nt, Artificial Sequence
  Synthetic
agucuccggaaguguuga

SEQ ID NO: 16521 - RNA, 19 nt, Artificial Sequence
  Synthetic
uagucuccggaaguguuga

SEQ ID NO: 16522 - RNA, 21 nt, Artificial Sequence
  Synthetic
aguagucuccggaaguguuga

SEQ ID NO: 16523 - RNA, 22 nt, Artificial Sequence
  Synthetic
caguagucuccggaaguguuga

SEQ ID NO: 16524 - RNA, 23 nt, Artificial Sequence
  Synthetic
acaguagucuccggaaguguuga

SEQ ID NO: 16525 - RNA, 24 nt, Artificial Sequence
  Synthetic
aacaguagucuccggaaguguuga

SEQ ID NO: 16526 - RNA, 21 nt, Artificial Sequence
  Synthetic
  misc_feature (2)..(2): n is a, c, g, or u
  misc_feature (20)..(20): n is a, c, g, or u
unauauaacccauaaagugna

SEQ ID NO: 16527 - RNA, 22 nt, Artificial Sequence
  Synthetic
  misc_feature (3)..(3): n is a, c, g, or u
  misc_feature (21)..(21): n is a, c, g, or u
aunauauaacccauaaagugna

SEQ ID NO: 16528 - RNA, 23 nt, Artificial Sequence
  Synthetic
  misc_feature (4)..(4): n is a, c, g, or u
  misc_feature (22)..(22): n is a, c, g, or u
aaunauauaacccauaaagugna

SEQ ID NO: 16529 - RNA, 24 nt, Artificial Sequence
  Synthetic
  misc_feature (5)..(5): n is a, c, g, or u
  misc_feature (23)..(23): n is a, c, g, or u
caaunauauaacccauaaagugna

SEQ ID NO: 16530 - RNA, 18 nt, Artificial Sequence
  Synthetic
uggaauuugcucugaaua

SEQ ID NO: 16531 - RNA, 19 nt, Artificial Sequence
  Synthetic
cuggaauuugcucugaaua

SEQ ID NO: 16532 - RNA, 21 nt, Artificial Sequence
  Synthetic
ugcuggaauuugcucugaaua

SEQ ID NO: 16533 - RNA, 22 nt, Artificial Sequence
  Synthetic
cugcuggaauuugcucugaaua

SEQ ID NO: 16534 - RNA, 23 nt, Artificial Sequence
  Synthetic
acugcuggaauuugcucugaaua

SEQ ID NO: 16535 - RNA, 21 nt, Artificial Sequence
  Synthetic
auguguggauucucucuuaua

SEQ ID NO: 16536 - RNA, 22 nt, Artificial Sequence
  Synthetic
uauguguggauucucucuuaua

SEQ ID NO: 16537 - RNA, 23 nt, Artificial Sequence
  Synthetic
cuauguguggauucucucuuaua

SEQ ID NO: 16538 - RNA, 21 nt, Artificial Sequence
  Synthetic
  misc_feature (19)..(19): n is a, c, g, or u
aaucgucuccuuucauuunua

SEQ ID NO: 16539 - RNA, 22 nt, Artificial Sequence
  Synthetic
  misc_feature (20)..(20): n is a, c, g, or u
caaucgucuccuuucauuunua

SEQ ID NO: 16540 - RNA, 23 nt, Artificial Sequence
  Synthetic
  misc_feature (21)..(21): n is a, c, g, or u
ucaaucgucuccuuucauuunua

SEQ ID NO: 16541 - RNA, 24 nt, Artificial Sequence
  Synthetic
  misc_feature (22)..(22): n is a, c, g, or u
uucaaucgucuccuuucauuunua

SEQ ID NO: 16542 - RNA, 19 nt, Artificial Sequence
  Synthetic
cgaauuuuggccaggacac

SEQ ID NO: 16543 - RNA, 21 nt, Artificial Sequence
  Synthetic
ugcgaauuuuggccaggacac

SEQ ID NO: 16544 - RNA, 22 nt, Artificial Sequence
  Synthetic
cugcgaauuuuggccaggacac

SEQ ID NO: 16545 - RNA, 23 nt, Artificial Sequence
  Synthetic
acugcgaauuuuggccaggacac

SEQ ID NO: 16546 - RNA, 18 nt, Artificial Sequence
  Synthetic
ccuuagagguggagagac

SEQ ID NO: 16547 - RNA, 19 nt, Artificial Sequence
  Synthetic
cccuuagagguggagagac

SEQ ID NO: 16548 - RNA, 20 nt, Artificial Sequence
  Synthetic
ucccuuagagguggagagac

SEQ ID NO: 16549 - RNA, 22 nt, Artificial Sequence
  Synthetic
ugucccuuagagguggagagac

SEQ ID NO: 16550 - RNA, 24 nt, Artificial Sequence
  Synthetic
ugugucccuuagagguggagagac

SEQ ID NO: 16551 - RNA, 22 nt, Artificial Sequence
  Synthetic
agaaaauugagagaaguccacc

SEQ ID NO: 16552 - RNA, 23 nt, Artificial Sequence
  Synthetic
uagaaaauugagagaaguccacc

SEQ ID NO: 16553 - RNA, 24 nt, Artificial Sequence
  Synthetic
cuagaaaauugagagaaguccacc

SEQ ID NO: 16554 - RNA, 21 nt, Artificial Sequence
  Synthetic
caugcuguagcucuuguuccc

SEQ ID NO: 16555 - RNA, 22 nt, Artificial Sequence
  Synthetic
ccaugcuguagcucuuguuccc

SEQ ID NO: 16556 - RNA, 23 nt, Artificial Sequence
  Synthetic
cccaugcuguagcucuuguuccc

SEQ ID NO: 16557 - RNA, 24 nt, Artificial Sequence
  Synthetic
ucccaugcuguagcucuuguuccc

SEQ ID NO: 16558 - RNA, 18 nt, Artificial Sequence
  Synthetic
ugaccggggcgaaagucc

SEQ ID NO: 16559 - RNA, 19 nt, Artificial Sequence
  Synthetic
uugaccggggcgaaagucc

SEQ ID NO: 16560 - RNA, 21 nt, Artificial Sequence
  Synthetic
cguugaccggggcgaaagucc

SEQ ID NO: 16561 - RNA, 22 nt, Artificial Sequence
  Synthetic
ucguugaccggggcgaaagucc

SEQ ID NO: 16562 - RNA, 18 nt, Artificial Sequence
  Synthetic
cauagagguuccuugagc

SEQ ID NO: 16563 - RNA, 19 nt, Artificial Sequence
  Synthetic
acauagagguuccuugagc

SEQ ID NO: 16564 - RNA, 20 nt, Artificial Sequence
  Synthetic
aacauagagguuccuugagc

SEQ ID NO: 16565 - RNA, 21 nt, Artificial Sequence
  Synthetic
aaacauagagguuccuugagc

SEQ ID NO: 16566 - RNA, 18 nt, Artificial Sequence
  Synthetic
agucccaaucgggacugc

SEQ ID NO: 16567 - RNA, 19 nt, Artificial Sequence
  Synthetic
aagucccaaucgggacugc

SEQ ID NO: 16568 - RNA, 21 nt, Artificial Sequence
  Synthetic
ugaagucccaaucgggacugc

SEQ ID NO: 16569 - RNA, 22 nt, Artificial Sequence
  Synthetic
uugaagucccaaucgggacugc

SEQ ID NO: 16570 - RNA, 24 nt, Artificial Sequence
  Synthetic
uguugaagucccaaucgggacugc

SEQ ID NO: 16571 - RNA, 18 nt, Artificial Sequence
  Synthetic
  misc_feature (8)..(8): n is a, c, g, or u
aauacagnccccuuacuc

SEQ ID NO: 16572 - RNA, 19 nt, Artificial Sequence
  Synthetic
  misc_feature (9)..(9): n is a, c, g, or u
aaauacagnccccuuacuc

SEQ ID NO: 16573 - RNA, 20 nt, Artificial Sequence
  Synthetic
  misc_feature (10)..(10): n is a, c, g, or u
aaaauacagnccccuuacuc

SEQ ID NO: 16574 - RNA, 23 nt, Artificial Sequence
  Synthetic
  misc_feature (13)..(13): n is a, c, g, or u
aggaaaauacagnccccuuacuc

SEQ ID NO: 16575 - RNA, 24 nt, Artificial Sequence
  Synthetic
  misc_feature (14)..(14): n is a, c, g, or u
caggaaaauacagnccccuuacuc

SEQ ID NO: 16576 - RNA, 21 nt, Artificial Sequence
  Synthetic
caagaagaugaggcauagcag

SEQ ID NO: 16577 - RNA, 22 nt, Artificial Sequence
  Synthetic
acaagaagaugaggcauagcag

SEQ ID NO: 16578 - RNA, 23 nt, Artificial Sequence
  Synthetic
aacaagaagaugaggcauagcag

SEQ ID NO: 16579 - RNA, 24 nt, Artificial Sequence
  Synthetic
caacaagaagaugaggcauagcag

SEQ ID NO: 16580 - RNA, 21 nt, Artificial Sequence
  Synthetic
aggcauacaagggcaugagag

SEQ ID NO: 16581 - RNA, 22 nt, Artificial Sequence
  Synthetic
caggcauacaagggcaugagag

SEQ ID NO: 16582 - RNA, 23 nt, Artificial Sequence
  Synthetic
acaggcauacaagggcaugagag

SEQ ID NO: 16583 - RNA, 24 nt, Artificial Sequence
  Synthetic
uacaggcauacaagggcaugagag

SEQ ID NO: 16584 - RNA, 19 nt, Artificial Sequence
  Synthetic
agccccaagcgaccacgag

SEQ ID NO: 16585 - RNA, 21 nt, Artificial Sequence
  Synthetic
agagccccaagcgaccacgag

SEQ ID NO: 16586 - RNA, 22 nt, Artificial Sequence
  Synthetic
cagagccccaagcgaccacgag

SEQ ID NO: 16587 - RNA, 21 nt, Artificial Sequence
  Synthetic
uccgauugguggaagcaggag

SEQ ID NO: 16588 - RNA, 22 nt, Artificial Sequence
  Synthetic
cuccgauugguggaagcaggag

SEQ ID NO: 16589 - RNA, 23 nt, Artificial Sequence
  Synthetic
ccuccgauugguggaagcaggag

SEQ ID NO: 16590 - RNA, 24 nt, Artificial Sequence
  Synthetic
accuccgauugguggaagcaggag

SEQ ID NO: 16591 - RNA, 19 nt, Artificial Sequence
  Synthetic
agagaggcaauagucggag

SEQ ID NO: 16592 - RNA, 21 nt, Artificial Sequence
  Synthetic
ugagagaggcaauagucggag

SEQ ID NO: 16593 - RNA, 23 nt, Artificial Sequence
  Synthetic
ugugagagaggcaauagucggag

SEQ ID NO: 16594 - RNA, 24 nt, Artificial Sequence
  Synthetic
augugagagaggcaauagucggag

SEQ ID NO: 16595 - RNA, 23 nt, Artificial Sequence
  Synthetic
  misc_feature (18)..(18): n is a, c, g, or u
aggauugaaaacagguanaguag

SEQ ID NO: 16596 - RNA, 24 nt, Artificial Sequence
  Synthetic
  misc_feature (19)..(19): n is a, c, g, or u
caggauugaaaacagguanaguag

SEQ ID NO: 16597 - RNA, 18 nt, Artificial Sequence
  Synthetic
cacgagaggggucguccg

SEQ ID NO: 16598 - RNA, 19 nt, Artificial Sequence
  Synthetic
ccacgagaggggucguccg

SEQ ID NO: 16599 - RNA, 20 nt, Artificial Sequence
  Synthetic
accacgagaggggucguccg

SEQ ID NO: 16600 - RNA, 22 nt, Artificial Sequence
  Synthetic
cgaccacgagaggggucguccg

SEQ ID NO: 16601 - RNA, 24 nt, Artificial Sequence
  Synthetic
agcgaccacgagaggggucguccg

SEQ ID NO: 16602 - RNA, 19 nt, Artificial Sequence
  Synthetic
agacaaaggacgucccgcg

SEQ ID NO: 16603 - RNA, 20 nt, Artificial Sequence
  Synthetic
uagacaaaggacgucccgcg

SEQ ID NO: 16604 - RNA, 22 nt, Artificial Sequence
  Synthetic
cguagacaaaggacgucccgcg

SEQ ID NO: 16605 - RNA, 23 nt, Artificial Sequence
  Synthetic
acguagacaaaggacgucccgcg

SEQ ID NO: 16606 - RNA, 23 nt, Artificial Sequence
  Synthetic
cggcagaugagaaggcacaggcg

SEQ ID NO: 16607 - RNA, 24 nt, Artificial Sequence
  Synthetic
ccggcagaugagaaggcacaggcg

SEQ ID NO: 16608 - RNA, 21 nt, Artificial Sequence
  Synthetic
  misc_feature (13)..(13): n is a, c, g, or u
auuugguggucunuaagcagg

SEQ ID NO: 16609 - RNA, 22 nt, Artificial Sequence
  Synthetic
  misc_feature (14)..(14): n is a, c, g, or u
cauuugguggucunuaagcagg

SEQ ID NO: 16610 - RNA, 21 nt, Artificial Sequence
  Synthetic
  misc_feature (17)..(17): n is a, c, g, or u
uaacuacuagaucucungcug

SEQ ID NO: 16611 - RNA, 22 nt, Artificial Sequence
  Synthetic
  misc_feature (18)..(18): n is a, c, g, or u
uuaacuacuagaucucungcug

SEQ ID NO: 16612 - RNA, 23 nt, Artificial Sequence
  Synthetic
  misc_feature (19)..(19): n is a, c, g, or u
auuaacuacuagaucucungcug

SEQ ID NO: 16613 - RNA, 24 nt, Artificial Sequence
  Synthetic
  misc_feature (20)..(20): n is a, c, g, or u
aauuaacuacuagaucucungcug

SEQ ID NO: 16614 - RNA, 21 nt, Artificial Sequence
  Synthetic
cgguagagggcugaagcggug

SEQ ID NO: 16615 - RNA, 22 nt, Artificial Sequence
  Synthetic
ucgguagagggcugaagcggug

SEQ ID NO: 16616 - RNA, 23 nt, Artificial Sequence
  Synthetic
cucgguagagggcugaagcggug

SEQ ID NO: 16617 - RNA, 24 nt, Artificial Sequence
  Synthetic
ucucgguagagggcugaagcggug

SEQ ID NO: 16618 - RNA, 18 nt, Artificial Sequence
  Synthetic
agaguggugcagguuuug

SEQ ID NO: 16619 - RNA, 19 nt, Artificial Sequence
  Synthetic
aagaguggugcagguuuug

SEQ ID NO: 16620 - RNA, 20 nt, Artificial Sequence
  Synthetic
caagaguggugcagguuuug

SEQ ID NO: 16621 - RNA, 22 nt, Artificial Sequence
  Synthetic
agcaagaguggugcagguuuug

SEQ ID NO: 16622 - RNA, 24 nt, Artificial Sequence
  Synthetic
ugagcaagaguggugcagguuuug

SEQ ID NO: 16623 - RNA, 18 nt, Artificial Sequence
  Synthetic
  misc_feature (18)..(18): n is a, c, g, or u
uguucuccauguucauan

SEQ ID NO: 16624 - RNA, 19 nt, Artificial Sequence
  Synthetic
  misc_feature (19)..(19): n is a, c, g, or u
auguucuccauguucauan

SEQ ID NO: 16625 - RNA, 21 nt, Artificial Sequence
  Synthetic
  misc_feature (21)..(21): n is a, c, g, or u
ugauguucuccauguucauan

SEQ ID NO: 16626 - RNA, 23 nt, Artificial Sequence
  Synthetic
  misc_feature (23)..(23): n is a, c, g, or u
ugugauguucuccauguucauan

SEQ ID NO: 16627 - RNA, 24 nt, Artificial Sequence
  Synthetic
  misc_feature (24)..(24): n is a, c, g, or u
augugauguucuccauguucauan

SEQ ID NO: 16628 - RNA, 21 nt, Artificial Sequence
  Synthetic
aagaagucagaaggcaaaaau

SEQ ID NO: 16629 - RNA, 22 nt, Artificial Sequence
  Synthetic
cgaaagcccaagaugaugggau

SEQ ID NO: 16630 - RNA, 23 nt, Artificial Sequence
  Synthetic
ccgaaagcccaagaugaugggau

SEQ ID NO: 16631 - RNA, 24 nt, Artificial Sequence
  Synthetic
uccgaaagcccaagaugaugggau

SEQ ID NO: 16632 - RNA, 21 nt, Artificial Sequence
  Synthetic
cagaagcuccaaauucuuuau

SEQ ID NO: 16633 - RNA, 22 nt, Artificial Sequence
  Synthetic
acagaagcuccaaauucuuuau

SEQ ID NO: 16634 - RNA, 23 nt, Artificial Sequence
  Synthetic
cacagaagcuccaaauucuuuau

SEQ ID NO: 16635 - RNA, 24 nt, Artificial Sequence
  Synthetic
ccacagaagcuccaaauucuuuau

SEQ ID NO: 16636 - RNA, 21 nt, Artificial Sequence
  Synthetic
agugauuggagauuggggacu

SEQ ID NO: 16637 - RNA, 22 nt, Artificial Sequence
  Synthetic
aagugauuggagauuggggacu

SEQ ID NO: 16638 - RNA, 23 nt, Artificial Sequence
  Synthetic
uaagugauuggagauuggggacu

SEQ ID NO: 16639 - RNA, 18 nt, Artificial Sequence
  Synthetic
aacacgagaagggguccu

SEQ ID NO: 16640 - RNA, 19 nt, Artificial Sequence
  Synthetic
uaacacgagaagggguccu

SEQ ID NO: 16641 - RNA, 21 nt, Artificial Sequence
  Synthetic
uguaacacgagaagggguccu

SEQ ID NO: 16642 - RNA, 22 nt, Artificial Sequence
  Synthetic
cuguaacacgagaagggguccu

SEQ ID NO: 16643 - RNA, 23 nt, Artificial Sequence
  Synthetic
ccuguaacacgagaagggguccu

SEQ ID NO: 16644 - RNA, 18 nt, Artificial Sequence
  Synthetic
  misc_feature (15)..(15): n is a, c, g, or u
cgagcgaaacaagcngcu

SEQ ID NO: 16645 - RNA, 20 nt, Artificial Sequence
  Synthetic
  misc_feature (17)..(17): n is a, c, g, or u
ugcgagcgaaacaagcngcu

SEQ ID NO: 16646 - RNA, 21 nt, Artificial Sequence
  Synthetic
  misc_feature (18)..(18): n is a, c, g, or u
cugcgagcgaaacaagcngcu

SEQ ID NO: 16647 - RNA, 23 nt, Artificial Sequence
  Synthetic
  misc_feature (1)..(1): n is a, c, g, or u
  misc_feature (20)..(20): n is a, c, g, or u
ngcugcgagcgaaacaagcngcu

SEQ ID NO: 16648 - RNA, 24 nt, Artificial Sequence
  Synthetic
  misc_feature (2)..(2): n is a, c, g, or u
  misc_feature (21)..(21): n is a, c, g, or u
cngcugcgagcgaaacaagcngcu

SEQ ID NO: 16649 - RNA, 21 nt, Artificial Sequence
  Synthetic
ucgggacugcuggaauuugcu

SEQ ID NO: 16650 - RNA, 22 nt, Artificial Sequence
  Synthetic
aucgggacugcuggaauuugcu

SEQ ID NO: 16651 - RNA, 23 nt, Artificial Sequence
  Synthetic
aaucgggacugcuggaauuugcu

SEQ ID NO: 16652 - RNA, 24 nt, Artificial Sequence
  Synthetic
caaucgggacugcuggaauuugcu

SEQ ID NO: 16653 - RNA, 18 nt, Artificial Sequence
  Synthetic
aaugauuaaccacauucu

SEQ ID NO: 16654 - RNA, 19 nt, Artificial Sequence
  Synthetic
uaaugauuaaccacauucu

SEQ ID NO: 16655 - RNA, 21 nt, Artificial Sequence
  Synthetic
aguaaugauuaaccacauucu

SEQ ID NO: 16656 - RNA, 22 nt, Artificial Sequence
  Synthetic
aaguaaugauuaaccacauucu

SEQ ID NO: 16657 - RNA, 23 nt, Artificial Sequence
  Synthetic
  misc_feature (1)..(1): n is a, c, g, or u
naaguaaugauuaaccacauucu

SEQ ID NO: 16658 - RNA, 24 nt, Artificial Sequence
  Synthetic
  misc_feature (2)..(2): n is a, c, g, or u
unaaguaaugauuaaccacauucu

SEQ ID NO: 16659 - RNA, 23 nt, Artificial Sequence
  Synthetic
aggaaaagaaggaguuaaccagu

SEQ ID NO: 16660 - RNA, 24 nt, Artificial Sequence
  Synthetic
caggaaaagaaggaguuaaccagu

SEQ ID NO: 16661 - RNA, 18 nt, Artificial Sequence
  Synthetic
cgccaagccccagccagu

SEQ ID NO: 16662 - RNA, 19 nt, Artificial Sequence
  Synthetic
ucgccaagccccagccagu

SEQ ID NO: 16663 - RNA, 20 nt, Artificial Sequence
  Synthetic
aucgccaagccccagccagu

SEQ ID NO: 16664 - RNA, 21 nt, Artificial Sequence
  Synthetic
aaucgccaagccccagccagu

SEQ ID NO: 16665 - RNA, 22 nt, Artificial Sequence
  Synthetic
caaucgccaagccccagccagu

SEQ ID NO: 16666 - RNA, 23 nt, Artificial Sequence
  Synthetic
ccaaucgccaagccccagccagu

SEQ ID NO: 16667 - RNA, 21 nt, Artificial Sequence
  Synthetic
  misc_feature (4)..(4): n is a, c, g, or u
agcngcuaggaguuccgcagu

SEQ ID NO: 16668 - RNA, 22 nt, Artificial Sequence
  Synthetic
  misc_feature (5)..(5): n is a, c, g, or u
aagcngcuaggaguuccgcagu

SEQ ID NO: 16669 - RNA, 23 nt, Artificial Sequence
  Synthetic
  misc_feature (6)..(6): n is a, c, g, or u
caagcngcuaggaguuccgcagu

SEQ ID NO: 16670 - RNA, 24 nt, Artificial Sequence
  Synthetic
  misc_feature (7)..(7): n is a, c, g, or u
acaagcngcuaggaguuccgcagu

SEQ ID NO: 16671 - RNA, 21 nt, Artificial Sequence
  Synthetic
ccacaaaaugaggcgcuaugu

SEQ ID NO: 16672 - RNA, 22 nt, Artificial Sequence
  Synthetic
cccacaaaaugaggcgcuaugu

SEQ ID NO: 16673 - RNA, 23 nt, Artificial Sequence
  Synthetic
acccacaaaaugaggcgcuaugu

SEQ ID NO: 16674 - RNA, 21 nt, Artificial Sequence
  Synthetic
caccccagaaggccaccgugu

SEQ ID NO: 16675 - RNA, 22 nt, Artificial Sequence
  Synthetic
ccaccccagaaggccaccgugu

SEQ ID NO: 16676 - RNA, 23 nt, Artificial Sequence
  Synthetic
uccaccccagaaggccaccgugu

SEQ ID NO: 16677 - RNA, 24 nt, Artificial Sequence
  Synthetic
cuccaccccagaaggccaccgugu

SEQ ID NO: 16678 - RNA, 22 nt, Artificial Sequence
  Synthetic
  misc_feature (13)..(13): n is a, c, g, or u
agucuagacucunugguauugu

SEQ ID NO: 16679 - RNA, 24 nt, Artificial Sequence
  Synthetic
  misc_feature (15)..(15): n is a, c, g, or u
cgagucuagacucunugguauugu

SEQ ID NO: 16680 - RNA, 21 nt, Artificial Sequence
  Synthetic
uggaucugguggcgagguugu

SEQ ID NO: 16681 - RNA, 24 nt, Artificial Sequence
  Synthetic
agguggaucugguggcgagguugu

SEQ ID NO: 16682 - RNA, 21 nt, Artificial Sequence
  Synthetic
aagggaaguauuuaguaacuu

SEQ ID NO: 16683 - RNA, 22 nt, Artificial Sequence
  Synthetic
aaagggaaguauuuaguaacuu

SEQ ID NO: 16684 - RNA, 23 nt, Artificial Sequence
  Synthetic
caaagggaaguauuuaguaacuu

SEQ ID NO: 16685 - RNA, 24 nt, Artificial Sequence
  Synthetic
ccaaagggaaguauuuaguaacuu

SEQ ID NO: 16686 - RNA, 21 nt, Artificial Sequence
  Synthetic
accgguaaaguuucccaccuu

SEQ ID NO: 16687 - RNA, 23 nt, Artificial Sequence
  Synthetic
agaccgguaaaguuucccaccuu

SEQ ID NO: 16688 - RNA, 24 nt, Artificial Sequence
  Synthetic
aagaccgguaaaguuucccaccuu

SEQ ID NO: 16689 - RNA, 21 nt, Artificial Sequence
  Synthetic
  misc_feature (16)..(16): n is a, c, g, or u
uugccugagagcagunugguu

SEQ ID NO: 16690 - RNA, 22 nt, Artificial Sequence
  Synthetic
  misc_feature (17)..(17): n is a, c, g, or u
cuugccugagagcagunugguu

SEQ ID NO: 16691 - RNA, 24 nt, Artificial Sequence
  Synthetic
  misc_feature (19)..(19): n is a, c, g, or u
agcuugccugagagcagunugguu

SEQ ID NO: 16692 - RNA, 23 nt, Artificial Sequence
  Synthetic
  misc_feature (12)..(12): n is a, c, g, or u
uggcugcuaggnugugcugccaa

SEQ ID NO: 16693 - RNA, 24 nt, Artificial Sequence
  Synthetic
  misc_feature (13)..(13): n is a, c, g, or u
auggcugcuaggnugugcugccaa

SEQ ID NO: 16694 - RNA, 21 nt, Artificial Sequence
  Synthetic
acaaaaauccucacaauacca

SEQ ID NO: 16695 - RNA, 23 nt, Artificial Sequence
  Synthetic
ugacaaaaauccucacaauacca

SEQ ID NO: 16696 - RNA, 24 nt, Artificial Sequence
  Synthetic
uugacaaaaauccucacaauacca

SEQ ID NO: 16697 - RNA, 18 nt, Artificial Sequence
  Synthetic
  misc_feature (6)..(6): n is a, c, g, or u
auuaanccuuacuaucca

SEQ ID NO: 16698 - RNA, 19 nt, Artificial Sequence
  Synthetic
  misc_feature (7)..(7): n is a, c, g, or u
uauuaanccuuacuaucca

SEQ ID NO: 16699 - RNA, 22 nt, Artificial Sequence
  Synthetic
  misc_feature (10)..(10): n is a, c, g, or u
agguauuaanccuuacuaucca

SEQ ID NO: 16700 - RNA, 23 nt, Artificial Sequence
  Synthetic
  misc_feature (11)..(11): n is a, c, g, or u
aagguauuaanccuuacuaucca

SEQ ID NO: 16701 - RNA, 24 nt, Artificial Sequence
  Synthetic
  misc_feature (12)..(12): n is a, c, g, or u
aaagguauuaanccuuacuaucca

SEQ ID NO: 16702 - RNA, 21 nt, Artificial Sequence
  Synthetic
aggcaggaauucuauauaaga

SEQ ID NO: 16703 - RNA, 22 nt, Artificial Sequence
  Synthetic
aaggcaggaauucuauauaaga

SEQ ID NO: 16704 - RNA, 18 nt, Artificial Sequence
  Synthetic
uggacauugacccuuaua

SEQ ID NO: 16705 - RNA, 19 nt, Artificial Sequence
  Synthetic
auggacauugacccuuaua

SEQ ID NO: 16706 - RNA, 20 nt, Artificial Sequence
  Synthetic
cauggacauugacccuuaua

SEQ ID NO: 16707 - RNA, 21 nt, Artificial Sequence
  Synthetic
uccugggugggcaauaauuua

SEQ ID NO: 16708 - RNA, 22 nt, Artificial Sequence
  Synthetic
uuccugggugggcaauaauuua

SEQ ID NO: 16709 - RNA, 23 nt, Artificial Sequence
  Synthetic
cuuccugggugggcaauaauuua

SEQ ID NO: 16710 - RNA, 18 nt, Artificial Sequence
  Synthetic
auuuucuagggguaccac

SEQ ID NO: 16711 - RNA, 19 nt, Artificial Sequence
  Synthetic
aauuuucuagggguaccac

SEQ ID NO: 16712 - RNA, 20 nt, Artificial Sequence
  Synthetic
caauuuucuagggguaccac

SEQ ID NO: 16713 - RNA, 21 nt, Artificial Sequence
  Synthetic
ucaauuuucuagggguaccac

SEQ ID NO: 16714 - RNA, 22 nt, Artificial Sequence
  Synthetic
cucaauuuucuagggguaccac

SEQ ID NO: 16715 - RNA, 23 nt, Artificial Sequence
  Synthetic
ucucaauuuucuagggguaccac

SEQ ID NO: 16716 - RNA, 24 nt, Artificial Sequence
  Synthetic
cucucaauuuucuagggguaccac

SEQ ID NO: 16717 - RNA, 18 nt, Artificial Sequence
  Synthetic
uucgccccggucaacgac

SEQ ID NO: 16718 - RNA, 19 nt, Artificial Sequence
  Synthetic
uuucgccccggucaacgac

SEQ ID NO: 16719 - RNA, 20 nt, Artificial Sequence
  Synthetic
cuuucgccccggucaacgac

SEQ ID NO: 16720 - RNA, 21 nt, Artificial Sequence
  Synthetic
acuuucgccccggucaacgac

SEQ ID NO: 16721 - RNA, 24 nt, Artificial Sequence
  Synthetic
uggacuuucgccccggucaacgac

SEQ ID NO: 16722 - RNA, 18 nt, Artificial Sequence
  Synthetic
ugcuuucgcaaacuuccc

SEQ ID NO: 16723 - RNA, 19 nt, Artificial Sequence
  Synthetic
uugcuuucgcaaacuuccc

SEQ ID NO: 16724 - RNA, 20 nt, Artificial Sequence
  Synthetic
auugcuuucgcaaacuuccc

SEQ ID NO: 16725 - RNA, 22 nt, Artificial Sequence
  Synthetic
agauugcuuucgcaaacuuccc

SEQ ID NO: 16726 - RNA, 23 nt, Artificial Sequence
  Synthetic
aagauugcuuucgcaaacuuccc

SEQ ID NO: 16727 - RNA, 24 nt, Artificial Sequence
  Synthetic
aaagauugcuuucgcaaacuuccc

SEQ ID NO: 16728 - RNA, 18 nt, Artificial Sequence
  Synthetic
aagccuccaagcugugcc

SEQ ID NO: 16729 - RNA, 19 nt, Artificial Sequence
  Synthetic
caagccuccaagcugugcc

SEQ ID NO: 16730 - RNA, 20 nt, Artificial Sequence
  Synthetic
ucaagccuccaagcugugcc

SEQ ID NO: 16731 - RNA, 21 nt, Artificial Sequence
  Synthetic
uucaagccuccaagcugugcc

SEQ ID NO: 16732 - RNA, 23 nt, Artificial Sequence
  Synthetic
uguucaagccuccaagcugugcc

SEQ ID NO: 16733 - RNA, 24 nt, Artificial Sequence
  Synthetic
cuguucaagccuccaagcugugcc

SEQ ID NO: 16734 - RNA, 21 nt, Artificial Sequence
  Synthetic
uuuacauacuuuguggaaggc

SEQ ID NO: 16735 - RNA, 22 nt, Artificial Sequence
  Synthetic
auuuacauacuuuguggaaggc

SEQ ID NO: 16736 - RNA, 23 nt, Artificial Sequence
  Synthetic
uauuuacauacuuuguggaaggc

SEQ ID NO: 16737 - RNA, 24 nt, Artificial Sequence
  Synthetic
  misc_feature (1)..(1): n is a, c, g, or u
nuauuuacauacuuuguggaaggc

SEQ ID NO: 16738 - RNA, 21 nt, Artificial Sequence
  Synthetic
cucaggcaagcuauuuugugc

SEQ ID NO: 16739 - RNA, 22 nt, Artificial Sequence
  Synthetic
ucucaggcaagcuauuuugugc

SEQ ID NO: 16740 - RNA, 23 nt, Artificial Sequence
  Synthetic
cucucaggcaagcuauuuugugc

SEQ ID NO: 16741 - RNA, 21 nt, Artificial Sequence
  Synthetic
  misc_feature (20)..(20): n is a, c, g, or u
cauuuggaagagaaacugunc

SEQ ID NO: 16742 - RNA, 22 nt, Artificial Sequence
  Synthetic
  misc_feature (21)..(21): n is a, c, g, or u
acauuuggaagagaaacugunc

SEQ ID NO: 16743 - RNA, 23 nt, Artificial Sequence
  Synthetic
  misc_feature (22)..(22): n is a, c, g, or u
uacauuuggaagagaaacugunc

SEQ ID NO: 16744 - RNA, 24 nt, Artificial Sequence
  Synthetic
  misc_feature (23)..(23): n is a, c, g, or u
uuacauuuggaagagaaacugunc

SEQ ID NO: 16745 - RNA, 18 nt, Artificial Sequence
  Synthetic
ccaaaucugugcagcauc

SEQ ID NO: 16746 - RNA, 24 nt, Artificial Sequence
  Synthetic
ugggggccaaaucugugcagcauc

SEQ ID NO: 16747 - RNA, 21 nt, Artificial Sequence
  Synthetic
  misc_feature (2)..(2): n is a, c, g, or u
ancuuucugugcccaauccuc

SEQ ID NO: 16748 - RNA, 22 nt, Artificial Sequence
  Synthetic
  misc_feature (3)..(3): n is a, c, g, or u
aancuuucugugcccaauccuc

SEQ ID NO: 16749 - RNA, 24 nt, Artificial Sequence
  Synthetic
  misc_feature (5)..(5): n is a, c, g, or u
agaancuuucugugcccaauccuc

SEQ ID NO: 16750 - RNA, 20 nt, Artificial Sequence
  Synthetic
aggagugggaggcuucgguc

SEQ ID NO: 16751 - RNA, 21 nt, Artificial Sequence
  Synthetic
uaggagugggaggcuucgguc

SEQ ID NO: 16752 - RNA, 24 nt, Artificial Sequence
  Synthetic
agguaggagugggaggcuucgguc

SEQ ID NO: 16753 - RNA, 18 nt, Artificial Sequence
  Synthetic
ccguguguccucuacuuc

SEQ ID NO: 16754 - RNA, 19 nt, Artificial Sequence
  Synthetic
cccguguguccucuacuuc

SEQ ID NO: 16755 - RNA, 21 nt, Artificial Sequence
  Synthetic
ugcccguguguccucuacuuc

SEQ ID NO: 16756 - RNA, 22 nt, Artificial Sequence
  Synthetic
uugcccguguguccucuacuuc

SEQ ID NO: 16757 - RNA, 24 nt, Artificial Sequence
  Synthetic
uguugcccguguguccucuacuuc

SEQ ID NO: 16758 - RNA, 21 nt, Artificial Sequence
  Synthetic
cacccccacacgguggccuuc

SEQ ID NO: 16759 - RNA, 22 nt, Artificial Sequence
  Synthetic
acacccccacacgguggccuuc

SEQ ID NO: 16760 - RNA, 23 nt, Artificial Sequence
  Synthetic
cacacccccacacgguggccuuc

SEQ ID NO: 16761 - RNA, 24 nt, Artificial Sequence
  Synthetic
ucacacccccacacgguggccuuc

SEQ ID NO: 16762 - RNA, 21 nt, Artificial Sequence
  Synthetic
  misc_feature (13)..(13): n is a, c, g, or u
ugaguugaugacnuuggcuuc

SEQ ID NO: 16763 - RNA, 18 nt, Artificial Sequence
  Synthetic
uucuuuccagaccaccag

SEQ ID NO: 16764 - RNA, 19 nt, Artificial Sequence
  Synthetic
auucuuuccagaccaccag

SEQ ID NO: 16765 - RNA, 23 nt, Artificial Sequence
  Synthetic
ugggauucuuuccagaccaccag

SEQ ID NO: 16766 - RNA, 24 nt, Artificial Sequence
  Synthetic
cugggauucuuuccagaccaccag

SEQ ID NO: 16767 - RNA, 18 nt, Artificial Sequence
  Synthetic
  misc_feature (3)..(4): n is a, c, g, or u
cunncguuccggccgacg

SEQ ID NO: 16768 - RNA, 19 nt, Artificial Sequence
  Synthetic
  misc_feature (4)..(5): n is a, c, g, or u
ccunncguuccggccgacg

SEQ ID NO: 16769 - RNA, 21 nt, Artificial Sequence
  Synthetic
  misc_feature (6)..(7): n is a, c, g, or u
cgccunncguuccggccgacg

SEQ ID NO: 16770 - RNA, 22 nt, Artificial Sequence
  Synthetic
  misc_feature (7)..(8): n is a, c, g, or u
ccgccunncguuccggccgacg

SEQ ID NO: 16771 - RNA, 23 nt, Artificial Sequence
  Synthetic
  misc_feature (8)..(9): n is a, c, g, or u
uccgccunncguuccggccgacg

SEQ ID NO: 16772 - RNA, 24 nt, Artificial Sequence
  Synthetic
  misc_feature (9)..(10): n is a, c, g, or u
cuccgccunncguuccggccgacg

SEQ ID NO: 16773 - RNA, 19 nt, Artificial Sequence
  Synthetic
ugucuacgucccgucggcg

SEQ ID NO: 16774 - RNA, 20 nt, Artificial Sequence
  Synthetic
uugucuacgucccgucggcg

SEQ ID NO: 16775 - RNA, 21 nt, Artificial Sequence
  Synthetic
uuugucuacgucccgucggcg

SEQ ID NO: 16776 - RNA, 22 nt, Artificial Sequence
  Synthetic
cuuugucuacgucccgucggcg

SEQ ID NO: 16777 - RNA, 23 nt, Artificial Sequence
  Synthetic
ccuuugucuacgucccgucggcg

SEQ ID NO: 16778 - RNA, 24 nt, Artificial Sequence
  Synthetic
uccuuugucuacgucccgucggcg

SEQ ID NO: 16779 - RNA, 18 nt, Artificial Sequence
  Synthetic
aacuuguccuggcuaucg

SEQ ID NO: 16780 - RNA, 19 nt, Artificial Sequence
  Synthetic
caacuuguccuggcuaucg

SEQ ID NO: 16781 - RNA, 20 nt, Artificial Sequence
  Synthetic
ccaacuuguccuggcuaucg

SEQ ID NO: 16782 - RNA, 21 nt, Artificial Sequence
  Synthetic
uccaacuuguccuggcuaucg

SEQ ID NO: 16783 - RNA, 22 nt, Artificial Sequence
  Synthetic
cuccaacuuguccuggcuaucg

SEQ ID NO: 16784 - RNA, 23 nt, Artificial Sequence
  Synthetic
ccuccaacuuguccuggcuaucg

SEQ ID NO: 16785 - RNA, 24 nt, Artificial Sequence
  Synthetic
uccuccaacuuguccuggcuaucg

SEQ ID NO: 16786 - RNA, 21 nt, Artificial Sequence
  Synthetic
aggacugggaggagucggggg

SEQ ID NO: 16787 - RNA, 22 nt, Artificial Sequence
  Synthetic
aaggacugggaggagucggggg

SEQ ID NO: 16788 - RNA, 23 nt, Artificial Sequence
  Synthetic
uaaggacugggaggagucggggg

SEQ ID NO: 16789 - RNA, 24 nt, Artificial Sequence
  Synthetic
uuaaggacugggaggagucggggg

SEQ ID NO: 16790 - RNA, 21 nt, Artificial Sequence
  Synthetic
acuguguauuuaaggacuggg

SEQ ID NO: 16791 - RNA, 23 nt, Artificial Sequence
  Synthetic
agacuguguauuuaaggacuggg

SEQ ID NO: 16792 - RNA, 24 nt, Artificial Sequence
  Synthetic
aagacuguguauuuaaggacuggg

SEQ ID NO: 16793 - RNA, 18 nt, Artificial Sequence
  Synthetic
aagcuauuuugugcuggg

SEQ ID NO: 16794 - RNA, 19 nt, Artificial Sequence
  Synthetic
caagcuauuuugugcuggg

SEQ ID NO: 16795 - RNA, 22 nt, Artificial Sequence
  Synthetic
aggcaagcuauuuugugcuggg

SEQ ID NO: 16796 - RNA, 23 nt, Artificial Sequence
  Synthetic
caggcaagcuauuuugugcuggg

SEQ ID NO: 16797 - RNA, 24 nt, Artificial Sequence
  Synthetic
ucaggcaagcuauuuugugcuggg

SEQ ID NO: 16798 - RNA, 21 nt, Artificial Sequence
  Synthetic
aacacagcuaaaacaaaaugg

SEQ ID NO: 16799 - RNA, 23 nt, Artificial Sequence
  Synthetic
ugaacacagcuaaaacaaaaugg

SEQ ID NO: 16800 - RNA, 24 nt, Artificial Sequence
  Synthetic
uugaacacagcuaaaacaaaaugg

SEQ ID NO: 16801 - RNA, 21 nt, Artificial Sequence
  Synthetic
acacaguuccaccaagcacug

SEQ ID NO: 16802 - RNA, 22 nt, Artificial Sequence
  Synthetic
aacacaguuccaccaagcacug

SEQ ID NO: 16803 - RNA, 23 nt, Artificial Sequence
  Synthetic
caacacaguuccaccaagcacug

SEQ ID NO: 16804 - RNA, 24 nt, Artificial Sequence
  Synthetic
ucaacacaguuccaccaagcacug

SEQ ID NO: 16805 - RNA, 18 nt, Artificial Sequence
  Synthetic
aagaauuuggagcuucug

SEQ ID NO: 16806 - RNA, 19 nt, Artificial Sequence
  Synthetic
aaagaauuuggagcuucug

SEQ ID NO: 16807 - RNA, 20 nt, Artificial Sequence
  Synthetic
uaaagaauuuggagcuucug

SEQ ID NO: 16808 - RNA, 21 nt, Artificial Sequence
  Synthetic
auaaagaauuuggagcuucug

SEQ ID NO: 16809 - RNA, 22 nt, Artificial Sequence
  Synthetic
uauaaagaauuuggagcuucug

SEQ ID NO: 16810 - RNA, 23 nt, Artificial Sequence
  Synthetic
uuauaaagaauuuggagcuucug

SEQ ID NO: 16811 - RNA, 24 nt, Artificial Sequence
  Synthetic
cuuauaaagaauuuggagcuucug

SEQ ID NO: 16812 - RNA, 19 nt, Artificial Sequence
  Synthetic
cggucaacgaccuggauug

SEQ ID NO: 16813 - RNA, 20 nt, Artificial Sequence
  Synthetic
ccggucaacgaccuggauug

SEQ ID NO: 16814 - RNA, 21 nt, Artificial Sequence
  Synthetic
cccggucaacgaccuggauug

SEQ ID NO: 16815 - RNA, 22 nt, Artificial Sequence
  Synthetic
ccccggucaacgaccuggauug

SEQ ID NO: 16816 - RNA, 24 nt, Artificial Sequence
  Synthetic
cgccccggucaacgaccuggauug

SEQ ID NO: 16817 - RNA, 18 nt, Artificial Sequence
  Synthetic
cuuucggaaaauaccuau

SEQ ID NO: 16818 - RNA, 22 nt, Artificial Sequence
  Synthetic
ugggcuuucggaaaauaccuau

SEQ ID NO: 16819 - RNA, 23 nt, Artificial Sequence
  Synthetic
uugggcuuucggaaaauaccuau

SEQ ID NO: 16820 - RNA, 24 nt, Artificial Sequence
  Synthetic
cuugggcuuucggaaaauaccuau

SEQ ID NO: 16821 - RNA, 18 nt, Artificial Sequence
  Synthetic
ugucuggcuuuuaguuau

SEQ ID NO: 16822 - RNA, 19 nt, Artificial Sequence
  Synthetic
cugucuggcuuuuaguuau

SEQ ID NO: 16823 - RNA, 20 nt, Artificial Sequence
  Synthetic
acugucuggcuuuuaguuau

SEQ ID NO: 16824 - RNA, 21 nt, Artificial Sequence
  Synthetic
cacugucuggcuuuuaguuau

SEQ ID NO: 16825 - RNA, 22 nt, Artificial Sequence
  Synthetic
ccacugucuggcuuuuaguuau

SEQ ID NO: 16826 - RNA, 23 nt, Artificial Sequence
  Synthetic
cccacugucuggcuuuuaguuau

SEQ ID NO: 16827 - RNA, 24 nt, Artificial Sequence
  Synthetic
ccccacugucuggcuuuuaguuau

SEQ ID NO: 16828 - RNA, 19 nt, Artificial Sequence
  Synthetic
aguuacuaaauacuucccu

SEQ ID NO: 16829 - RNA, 20 nt, Artificial Sequence
  Synthetic
aaguuacuaaauacuucccu

SEQ ID NO: 16830 - RNA, 21 nt, Artificial Sequence
  Synthetic
aaaguuacuaaauacuucccu

SEQ ID NO: 16831 - RNA, 22 nt, Artificial Sequence
  Synthetic
caaaguuacuaaauacuucccu

SEQ ID NO: 16832 - RNA, 23 nt, Artificial Sequence
  Synthetic
ccaaaguuacuaaauacuucccu

SEQ ID NO: 16833 - RNA, 24 nt, Artificial Sequence
  Synthetic
cccaaaguuacuaaauacuucccu

SEQ ID NO: 16834 - RNA, 18 nt, Artificial Sequence
  Synthetic
cccucuaccgagaugccu

SEQ ID NO: 16835 - RNA, 20 nt, Artificial Sequence
  Synthetic
agcccucuaccgagaugccu

SEQ ID NO: 16836 - RNA, 21 nt, Artificial Sequence
  Synthetic
cagcccucuaccgagaugccu

SEQ ID NO: 16837 - RNA, 22 nt, Artificial Sequence
  Synthetic
ucagcccucuaccgagaugccu

SEQ ID NO: 16838 - RNA, 23 nt, Artificial Sequence
  Synthetic
uucagcccucuaccgagaugccu

SEQ ID NO: 16839 - RNA, 24 nt, Artificial Sequence
  Synthetic
cuucagcccucuaccgagaugccu

SEQ ID NO: 16840 - RNA, 23 nt, Artificial Sequence
  Synthetic
ugguggacuucucucaauuuucu

SEQ ID NO: 16841 - RNA, 22 nt, Artificial Sequence
  Synthetic
aguauuuggugucuuuuggagu

SEQ ID NO: 16842 - RNA, 24 nt, Artificial Sequence
  Synthetic
ugaguauuuggugucuuuuggagu

SEQ ID NO: 16843 - RNA, 21 nt, Artificial Sequence
  Synthetic
uuggccaauggcaaacaaggu

SEQ ID NO: 16844 - RNA, 22 nt, Artificial Sequence
  Synthetic
auuggccaauggcaaacaaggu

SEQ ID NO: 16845 - RNA, 23 nt, Artificial Sequence
  Synthetic
aauuggccaauggcaaacaaggu

SEQ ID NO: 16846 - RNA, 24 nt, Artificial Sequence
  Synthetic
caauuggccaauggcaaacaaggu

SEQ ID NO: 16847 - RNA, 21 nt, Artificial Sequence
  Synthetic
  misc_feature (18)..(18): n is a, c, g, or u
uggaagguuugucaacgnauu

SEQ ID NO: 16848 - RNA, 22 nt, Artificial Sequence
  Synthetic
  misc_feature (19)..(19): n is a, c, g, or u
uuggaagguuugucaacgnauu

SEQ ID NO: 16849 - RNA, 23 nt, Artificial Sequence
  Synthetic
  misc_feature (20)..(20): n is a, c, g, or u
auuggaagguuugucaacgnauu

SEQ ID NO: 16850 - RNA, 21 nt, Artificial Sequence
  Synthetic
  misc_feature (18)..(18): n is a, c, g, or u
cacuuuauggguuauaunauu

SEQ ID NO: 16851 - RNA, 22 nt, Artificial Sequence
  Synthetic
  misc_feature (1)..(1): n is a, c, g, or u
  misc_feature (19)..(19): n is a, c, g, or u
ncacuuuauggguuauaunauu

SEQ ID NO: 16852 - RNA, 23 nt, Artificial Sequence
  Synthetic
  misc_feature (2)..(2): n is a, c, g, or u
  misc_feature (20)..(20): n is a, c, g, or u
uncacuuuauggguuauaunauu

SEQ ID NO: 16853 - RNA, 24 nt, Artificial Sequence
  Synthetic
  misc_feature (1)..(1): n is a, c, g, or u
  misc_feature (3)..(3): n is a, c, g, or u
  misc_feature (21)..(21): n is a, c, g, or u
nuncacuuuauggguuauaunauu

SEQ ID NO: 16854 - RNA, 21 nt, Artificial Sequence
  Synthetic
  misc_feature (1)..(1): n is a, c, g, or u
ncuugaguauuuggugucuuu

SEQ ID NO: 16855 - RNA, 22 nt, Artificial Sequence
  Synthetic
  misc_feature (2)..(2): n is a, c, g, or u
uncuugaguauuuggugucuuu

SEQ ID NO: 16856 - RNA, 24 nt, Artificial Sequence
  Synthetic
  misc_feature (4)..(4): n is a, c, g, or u
uguncuugaguauuuggugucuuu

SEQ ID NO: 16857 - RNA, 21 nt, Artificial Sequence
  Synthetic
ccacacauagcgccucauuuu

SEQ ID NO: 16858 - RNA, 22 nt, Artificial Sequence
  Synthetic
uccacacauagcgccucauuuu

SEQ ID NO: 16859 - RNA, 23 nt, Artificial Sequence
  Synthetic
auccacacauagcgccucauuuu

SEQ ID NO: 16860 - RNA, 24 nt, Artificial Sequence
  Synthetic
aauccacacauagcgccucauuuu

SEQ ID NO: 16861 - RNA, 18 nt, Artificial Sequence
  Synthetic
  misc_feature (6)..(6): n is a, c, g, or u
uaucanaucuugaugcaa

SEQ ID NO: 16862 - RNA, 19 nt, Artificial Sequence
  Synthetic
  misc_feature (7)..(7): n is a, c, g, or u
guaucanaucuugaugcaa

SEQ ID NO: 16863 - RNA, 20 nt, Artificial Sequence
  Synthetic
  misc_feature (8)..(8): n is a, c, g, or u
uguaucanaucuugaugcaa

SEQ ID NO: 16864 - RNA, 18 nt, Artificial Sequence
  Synthetic
uguuuuagcuguguucaa

SEQ ID NO: 16865 - RNA, 19 nt, Artificial Sequence
  Synthetic
uuguuuuagcuguguucaa

SEQ ID NO: 16866 - RNA, 20 nt, Artificial Sequence
  Synthetic
uuuguuuuagcuguguucaa

SEQ ID NO: 16867 - RNA, 18 nt, Artificial Sequence
  Synthetic
gagagcaggauaaccaca

SEQ ID NO: 16868 - RNA, 19 nt, Artificial Sequence
  Synthetic
ugagagcaggauaaccaca

SEQ ID NO: 16869 - RNA, 20 nt, Artificial Sequence
  Synthetic
augagagcaggauaaccaca

SEQ ID NO: 16870 - RNA, 18 nt, Artificial Sequence
  Synthetic
ucccaccuuaugagucca

SEQ ID NO: 16871 - RNA, 19 nt, Artificial Sequence
  Synthetic
uucccaccuuaugagucca

SEQ ID NO: 16872 - RNA, 20 nt, Artificial Sequence
  Synthetic
uuucccaccuuaugagucca

SEQ ID NO: 16873 - RNA, 18 nt, Artificial Sequence
  Synthetic
ugacaaaccuuccaauca

SEQ ID NO: 16874 - RNA, 19 nt, Artificial Sequence
  Synthetic
uugacaaaccuuccaauca

SEQ ID NO: 16875 - RNA, 20 nt, Artificial Sequence
  Synthetic
guugacaaaccuuccaauca

SEQ ID NO: 16876 - RNA, 18 nt, Artificial Sequence
  Synthetic
gugaaugucaggaaaaga

SEQ ID NO: 16877 - RNA, 19 nt, Artificial Sequence
  Synthetic
agugaaugucaggaaaaga

SEQ ID NO: 16878 - RNA, 20 nt, Artificial Sequence
  Synthetic
aagugaaugucaggaaaaga

SEQ ID NO: 16879 - RNA, 18 nt, Artificial Sequence
  Synthetic
  misc_feature (17)..(17): n is a, c, g, or u
uauaacccauaaagugna

SEQ ID NO: 16880 - RNA, 19 nt, Artificial Sequence
  Synthetic
  misc_feature (18)..(18): n is a, c, g, or u
auauaacccauaaagugna

SEQ ID NO: 16881 - RNA, 20 nt, Artificial Sequence
  Synthetic
  misc_feature (1)..(1): n is a, c, g, or u
  misc_feature (19)..(19): n is a, c, g, or u
nauauaacccauaaagugna

SEQ ID NO: 16882 - RNA, 18 nt, Artificial Sequence
  Synthetic
uguggauucucucuuaua

SEQ ID NO: 16883 - RNA, 19 nt, Artificial Sequence
  Synthetic
guguggauucucucuuaua

SEQ ID NO: 16884 - RNA, 20 nt, Artificial Sequence
  Synthetic
uguguggauucucucuuaua

SEQ ID NO: 16885 - RNA, 18 nt, Artificial Sequence
  Synthetic
  misc_feature (16)..(16): n is a, c, g, or u
cgucuccuuucauuunua

SEQ ID NO: 16886 - RNA, 19 nt, Artificial Sequence
  Synthetic
  misc_feature (17)..(17): n is a, c, g, or u
ucgucuccuuucauuunua

SEQ ID NO: 16887 - RNA, 20 nt, Artificial Sequence
  Synthetic
  misc_feature (18)..(18): n is a, c, g, or u
aucgucuccuuucauuunua

SEQ ID NO: 16888 - RNA, 18 nt, Artificial Sequence
  Synthetic
aauugagagaaguccacc

SEQ ID NO: 16889 - RNA, 19 nt, Artificial Sequence
  Synthetic
aaauugagagaaguccacc

SEQ ID NO: 16890 - RNA, 20 nt, Artificial Sequence
  Synthetic
aaaauugagagaaguccacc

SEQ ID NO: 16891 - RNA, 18 nt, Artificial Sequence
  Synthetic
gcuguagcucuuguuccc

SEQ ID NO: 16892 - RNA, 19 nt, Artificial Sequence
  Synthetic
ugcuguagcucuuguuccc

SEQ ID NO: 16893 - RNA, 20 nt, Artificial Sequence
  Synthetic
augcuguagcucuuguuccc

SEQ ID NO: 16894 - RNA, 18 nt, Artificial Sequence
  Synthetic
gaagaugaggcauagcag

SEQ ID NO: 16895 - RNA, 19 nt, Artificial Sequence
  Synthetic
agaagaugaggcauagcag

SEQ ID NO: 16896 - RNA, 20 nt, Artificial Sequence
  Synthetic
aagaagaugaggcauagcag

SEQ ID NO: 16897 - RNA, 18 nt, Artificial Sequence
  Synthetic
cauacaagggcaugagag

SEQ ID NO: 16898 - RNA, 19 nt, Artificial Sequence
  Synthetic
gcauacaagggcaugagag

SEQ ID NO: 16899 - RNA, 20 nt, Artificial Sequence
  Synthetic
ggcauacaagggcaugagag

SEQ ID NO: 16900 - RNA, 18 nt, Artificial Sequence
  Synthetic
gauugguggaagcaggag

SEQ ID NO: 16901 - RNA, 19 nt, Artificial Sequence
  Synthetic
cgauugguggaagcaggag

SEQ ID NO: 16902 - RNA, 20 nt, Artificial Sequence
  Synthetic
ccgauugguggaagcaggag

SEQ ID NO: 16903 - RNA, 18 nt, Artificial Sequence
  Synthetic
  misc_feature (13)..(13): n is a, c, g, or u
ugaaaacagguanaguag

SEQ ID NO: 16904 - RNA, 19 nt, Artificial Sequence
  Synthetic
  misc_feature (14)..(14): n is a, c, g, or u
uugaaaacagguanaguag

SEQ ID NO: 16905 - RNA, 20 nt, Artificial Sequence
  Synthetic
  misc_feature (15)..(15): n is a, c, g, or u
auugaaaacagguanaguag

SEQ ID NO: 16906 - RNA, 18 nt, Artificial Sequence
  Synthetic
gaugagaaggcacaggcg

SEQ ID NO: 16907 - RNA, 19 nt, Artificial Sequence
  Synthetic
agaugagaaggcacaggcg

SEQ ID NO: 16908 - RNA, 20 nt, Artificial Sequence
  Synthetic
cagaugagaaggcacaggcg

SEQ ID NO: 16909 - RNA, 18 nt, Artificial Sequence
  Synthetic
  misc_feature (10)..(10): n is a, c, g, or u
ugguggucunuaagcagg

SEQ ID NO: 16910 - RNA, 19 nt, Artificial Sequence
  Synthetic
  misc_feature (11)..(11): n is a, c, g, or u
uugguggucunuaagcagg

SEQ ID NO: 16911 - RNA, 20 nt, Artificial Sequence
  Synthetic
  misc_feature (12)..(12): n is a, c, g, or u
uuugguggucunuaagcagg

SEQ ID NO: 16912 - RNA, 18 nt, Artificial Sequence
  Synthetic
  misc_feature (14)..(14): n is a, c, g, or u
cuacuagaucucungcug

SEQ ID NO: 16913 - RNA, 19 nt, Artificial Sequence
  Synthetic
  misc_feature (15)..(15): n is a, c, g, or u
acuacuagaucucungcug

SEQ ID NO: 16914 - RNA, 20 nt, Artificial Sequence
  Synthetic
  misc_feature (16)..(16): n is a, c, g, or u
aacuacuagaucucungcug

SEQ ID NO: 16915 - RNA, 18 nt, Artificial Sequence
  Synthetic
uagagggcugaagcggug

SEQ ID NO: 16916 - RNA, 19 nt, Artificial Sequence
  Synthetic
guagagggcugaagcggug

SEQ ID NO: 16917 - RNA, 20 nt, Artificial Sequence
  Synthetic
gguagagggcugaagcggug

SEQ ID NO: 16918 - RNA, 18 nt, Artificial Sequence
  Synthetic
aagucagaaggcaaaaau

SEQ ID NO: 16919 - RNA, 19 nt, Artificial Sequence
  Synthetic
gaagucagaaggcaaaaau

SEQ ID NO: 16920 - RNA, 20 nt, Artificial Sequence
  Synthetic
agaagucagaaggcaaaaau

SEQ ID NO: 16921 - RNA, 18 nt, Artificial Sequence
  Synthetic
agcccaagaugaugggau

SEQ ID NO: 16922 - RNA, 19 nt, Artificial Sequence
  Synthetic
aagcccaagaugaugggau

SEQ ID NO: 16923 - RNA, 20 nt, Artificial Sequence
  Synthetic
aaagcccaagaugaugggau

SEQ ID NO: 16924 - RNA, 18 nt, Artificial Sequence
  Synthetic
aagcuccaaauucuuuau

SEQ ID NO: 16925 - RNA, 19 nt, Artificial Sequence
  Synthetic
gaagcuccaaauucuuuau

SEQ ID NO: 16926 - RNA, 20 nt, Artificial Sequence
  Synthetic
agaagcuccaaauucuuuau

SEQ ID NO: 16927 - RNA, 18 nt, Artificial Sequence
  Synthetic
gauuggagauuggggacu

SEQ ID NO: 16928 - RNA, 19 nt, Artificial Sequence
  Synthetic
ugauuggagauuggggacu

SEQ ID NO: 16929 - RNA, 20 nt, Artificial Sequence
  Synthetic
gugauuggagauuggggacu

SEQ ID NO: 16930 - RNA, 18 nt, Artificial Sequence
  Synthetic
ggacugcuggaauuugcu

SEQ ID NO: 16931 - RNA, 19 nt, Artificial Sequence
  Synthetic
gggacugcuggaauuugcu

SEQ ID NO: 16932 - RNA, 20 nt, Artificial Sequence
  Synthetic
cgggacugcuggaauuugcu

SEQ ID NO: 16933 - RNA, 18 nt, Artificial Sequence
  Synthetic
aagaaggaguuaaccagu

SEQ ID NO: 16934 - RNA, 19 nt, Artificial Sequence
  Synthetic
aaagaaggaguuaaccagu

SEQ ID NO: 16935 - RNA, 20 nt, Artificial Sequence
  Synthetic
aaaagaaggaguuaaccagu

SEQ ID NO: 16936 - RNA, 18 nt, Artificial Sequence
  Synthetic
  misc_feature (1)..(1): n is a, c, g, or u
ngcuaggaguuccgcagu

SEQ ID NO: 16937 - RNA, 19 nt, Artificial Sequence
  Synthetic
  misc_feature (2)..(2): n is a, c, g, or u
cngcuaggaguuccgcagu

SEQ ID NO: 16938 - RNA, 20 nt, Artificial Sequence
  Synthetic
  misc_feature (3)..(3): n is a, c, g, or u
gcngcuaggaguuccgcagu

SEQ ID NO: 16939 - RNA, 18 nt, Artificial Sequence
  Synthetic
caaaaugaggcgcuaugu

SEQ ID NO: 16940 - RNA, 19 nt, Artificial Sequence
  Synthetic
acaaaaugaggcgcuaugu

SEQ ID NO: 16941 - RNA, 20 nt, Artificial Sequence
  Synthetic
cacaaaaugaggcgcuaugu

SEQ ID NO: 16942 - RNA, 18 nt, Artificial Sequence
  Synthetic
cccagaaggccaccgugu

SEQ ID NO: 16943 - RNA, 19 nt, Artificial Sequence
  Synthetic
ccccagaaggccaccgugu

SEQ ID NO: 16944 - RNA, 20 nt, Artificial Sequence
  Synthetic
accccagaaggccaccgugu

SEQ ID NO: 16945 - RNA, 18 nt, Artificial Sequence
  Synthetic
  misc_feature (9)..(9): n is a, c, g, or u
uagacucunugguauugu

SEQ ID NO: 16946 - RNA, 19 nt, Artificial Sequence
  Synthetic
  misc_feature (10)..(10): n is a, c, g, or u
cuagacucunugguauugu

SEQ ID NO: 16947 - RNA, 20 nt, Artificial Sequence
  Synthetic
  misc_feature (11)..(11): n is a, c, g, or u
ucuagacucunugguauugu

SEQ ID NO: 16948 - RNA, 18 nt, Artificial Sequence
  Synthetic
aucugguggcgagguugu

SEQ ID NO: 16949 - RNA, 19 nt, Artificial Sequence
  Synthetic
gaucugguggcgagguugu

SEQ ID NO: 16950 - RNA, 20 nt, Artificial Sequence
  Synthetic
ggaucugguggcgagguugu

SEQ ID NO: 16951 - RNA, 18 nt, Artificial Sequence
  Synthetic
ggaaguauuuaguaacuu

SEQ ID NO: 16952 - RNA, 19 nt, Artificial Sequence
  Synthetic
gggaaguauuuaguaacuu

SEQ ID NO: 16953 - RNA, 20 nt, Artificial Sequence
  Synthetic
agggaaguauuuaguaacuu

SEQ ID NO: 16954 - RNA, 18 nt, Artificial Sequence
  Synthetic
gguaaaguuucccaccuu

SEQ ID NO: 16955 - RNA, 19 nt, Artificial Sequence
  Synthetic
cgguaaaguuucccaccuu

SEQ ID NO: 16956 - RNA, 20 nt, Artificial Sequence
  Synthetic
ccgguaaaguuucccaccuu

SEQ ID NO: 16957 - RNA, 18 nt, Artificial Sequence
  Synthetic
  misc_feature (13)..(13): n is a, c, g, or u
ccugagagcagunugguu

SEQ ID NO: 16958 - RNA, 19 nt, Artificial Sequence
  Synthetic
  misc_feature (14)..(14): n is a, c, g, or u
gccugagagcagunugguu

SEQ ID NO: 16959 - RNA, 20 nt, Artificial Sequence
  Synthetic
  misc_feature (15)..(15): n is a, c, g, or u
ugccugagagcagunugguu

SEQ ID NO: 16960 - RNA, 18 nt, Artificial Sequence
  Synthetic
  misc_feature (7)..(7): n is a, c, g, or u
gcuaggnugugcugccaa

SEQ ID NO: 16961 - RNA, 19 nt, Artificial Sequence
  Synthetic
  misc_feature (8)..(8): n is a, c, g, or u
ugcuaggnugugcugccaa

SEQ ID NO: 16962 - RNA, 20 nt, Artificial Sequence
  Synthetic
  misc_feature (9)..(9): n is a, c, g, or u
cugcuaggnugugcugccaa

SEQ ID NO: 16963 - RNA, 18 nt, Artificial Sequence
  Synthetic
aaaauccucacaauacca

SEQ ID NO: 16964 - RNA, 19 nt, Artificial Sequence
  Synthetic
aaaaauccucacaauacca

SEQ ID NO: 16965 - RNA, 20 nt, Artificial Sequence
  Synthetic
caaaaauccucacaauacca

SEQ ID NO: 16966 - RNA, 18 nt, Artificial Sequence
  Synthetic
caggaauucuauauaaga

SEQ ID NO: 16967 - RNA, 19 nt, Artificial Sequence
  Synthetic
gcaggaauucuauauaaga

SEQ ID NO: 16968 - RNA, 20 nt, Artificial Sequence
  Synthetic
ggcaggaauucuauauaaga

SEQ ID NO: 16969 - RNA, 18 nt, Artificial Sequence
  Synthetic
ugggugggcaauaauuua

SEQ ID NO: 16970 - RNA, 19 nt, Artificial Sequence
  Synthetic
cugggugggcaauaauuua

SEQ ID NO: 16971 - RNA, 20 nt, Artificial Sequence
  Synthetic
ccugggugggcaauaauuua

SEQ ID NO: 16972 - RNA, 18 nt, Artificial Sequence
  Synthetic
ccaagcacuguuggaucc

SEQ ID NO: 16973 - RNA, 19 nt, Artificial Sequence
  Synthetic
accaagcacuguuggaucc

SEQ ID NO: 16974 - RNA, 20 nt, Artificial Sequence
  Synthetic
caccaagcacuguuggaucc

SEQ ID NO: 16975 - RNA, 21 nt, Artificial Sequence
  Synthetic
ccaccaagcacuguuggaucc

SEQ ID NO: 16976 - RNA, 22 nt, Artificial Sequence
  Synthetic
uccaccaagcacuguuggaucc

SEQ ID NO: 16977 - RNA, 23 nt, Artificial Sequence
  Synthetic
uuccaccaagcacuguuggaucc

SEQ ID NO: 16978 - RNA, 24 nt, Artificial Sequence
  Synthetic
guuccaccaagcacuguuggaucc

SEQ ID NO: 16979 - RNA, 18 nt, Artificial Sequence
  Synthetic
acauacuuuguggaaggc

SEQ ID NO: 16980 - RNA, 19 nt, Artificial Sequence
  Synthetic
uacauacuuuguggaaggc

SEQ ID NO: 16981 - RNA, 20 nt, Artificial Sequence
  Synthetic
uuacauacuuuguggaaggc

SEQ ID NO: 16982 - RNA, 18 nt, Artificial Sequence
  Synthetic
aggcaagcuauuuugugc

SEQ ID NO: 16983 - RNA, 19 nt, Artificial Sequence
  Synthetic
caggcaagcuauuuugugc

SEQ ID NO: 16984 - RNA, 20 nt, Artificial Sequence
  Synthetic
ucaggcaagcuauuuugugc

SEQ ID NO: 16985 - RNA, 18 nt, Artificial Sequence
  Synthetic
  misc_feature (17)..(17): n is a, c, g, or u
uuggaagagaaacugunc

SEQ ID NO: 16986 - RNA, 19 nt, Artificial Sequence
  Synthetic
  misc_feature (18)..(18): n is a, c, g, or u
uuuggaagagaaacugunc

SEQ ID NO: 16987 - RNA, 20 nt, Artificial Sequence
  Synthetic
  misc_feature (19)..(19): n is a, c, g, or u
auuuggaagagaaacugunc

SEQ ID NO: 16988 - RNA, 18 nt, Artificial Sequence
  Synthetic
uuucugugcccaauccuc

SEQ ID NO: 16989 - RNA, 19 nt, Artificial Sequence
  Synthetic
cuuucugugcccaauccuc

SEQ ID NO: 16990 - RNA, 20 nt, Artificial Sequence
  Synthetic
  misc_feature (1)..(1): n is a, c, g, or u
ncuuucugugcccaauccuc

SEQ ID NO: 16991 - RNA, 18 nt, Artificial Sequence
  Synthetic
ccccacacgguggccuuc

SEQ ID NO: 16992 - RNA, 19 nt, Artificial Sequence
  Synthetic
cccccacacgguggccuuc

SEQ ID NO: 16993 - RNA, 20 nt, Artificial Sequence
  Synthetic
acccccacacgguggccuuc

SEQ ID NO: 16994 - RNA, 18 nt, Artificial Sequence
  Synthetic
  misc_feature (10)..(10): n is a, c, g, or u
guugaugacnuuggcuuc

SEQ ID NO: 16995 - RNA, 19 nt, Artificial Sequence
  Synthetic
  misc_feature (11)..(11): n is a, c, g, or u
aguugaugacnuuggcuuc

SEQ ID NO: 16996 - RNA, 20 nt, Artificial Sequence
  Synthetic
  misc_feature (12)..(12): n is a, c, g, or u
gaguugaugacnuuggcuuc

SEQ ID NO: 16997 - RNA, 18 nt, Artificial Sequence
  Synthetic
acugggaggagucggggg

SEQ ID NO: 16998 - RNA, 19 nt, Artificial Sequence
  Synthetic
gacugggaggagucggggg

SEQ ID NO: 16999 - RNA, 20 nt, Artificial Sequence
  Synthetic
ggacugggaggagucggggg

SEQ ID NO: 17000 - RNA, 18 nt, Artificial Sequence
  Synthetic
guguauuuaaggacuggg

SEQ ID NO: 17001 - RNA, 19 nt, Artificial Sequence
  Synthetic
uguguauuuaaggacuggg

SEQ ID NO: 17002 - RNA, 20 nt, Artificial Sequence
  Synthetic
cuguguauuuaaggacuggg

SEQ ID NO: 17003 - RNA, 18 nt, Artificial Sequence
  Synthetic
acagcuaaaacaaaaugg

SEQ ID NO: 17004 - RNA, 19 nt, Artificial Sequence
  Synthetic
cacagcuaaaacaaaaugg

SEQ ID NO: 17005 - RNA, 20 nt, Artificial Sequence
  Synthetic
acacagcuaaaacaaaaugg

SEQ ID NO: 17006 - RNA, 18 nt, Artificial Sequence
  Synthetic
caguuccaccaagcacug

SEQ ID NO: 17007 - RNA, 19 nt, Artificial Sequence
  Synthetic
acaguuccaccaagcacug

SEQ ID NO: 17008 - RNA, 20 nt, Artificial Sequence
  Synthetic
cacaguuccaccaagcacug

SEQ ID NO: 17009 - RNA, 18 nt, Artificial Sequence
  Synthetic
gacuucucucaauuuucu

SEQ ID NO: 17010 - RNA, 19 nt, Artificial Sequence
  Synthetic
ggacuucucucaauuuucu

SEQ ID NO: 17011 - RNA, 20 nt, Artificial Sequence
  Synthetic
uggacuucucucaauuuucu

SEQ ID NO: 17012 - RNA, 18 nt, Artificial Sequence
  Synthetic
uuuggugucuuuuggagu

SEQ ID NO: 17013 - RNA, 19 nt, Artificial Sequence
  Synthetic
auuuggugucuuuuggagu

SEQ ID NO: 17014 - RNA, 20 nt, Artificial Sequence
  Synthetic
uauuuggugucuuuuggagu

SEQ ID NO: 17015 - RNA, 18 nt, Artificial Sequence
  Synthetic
gccaauggcaaacaaggu

SEQ ID NO: 17016 - RNA, 19 nt, Artificial Sequence
  Synthetic
ggccaauggcaaacaaggu

SEQ ID NO: 17017 - RNA, 20 nt, Artificial Sequence
  Synthetic
uggccaauggcaaacaaggu

SEQ ID NO: 17018 - RNA, 18 nt, Artificial Sequence
  Synthetic
  misc_feature (15)..(15): n is a, c, g, or u
aagguuugucaacgnauu

SEQ ID NO: 17019 - RNA, 19 nt, Artificial Sequence
  Synthetic
  misc_feature (16)..(16): n is a, c, g, or u
gaagguuugucaacgnauu

SEQ ID NO: 17020 - RNA, 20 nt, Artificial Sequence
  Synthetic
  misc_feature (17)..(17): n is a, c, g, or u
ggaagguuugucaacgnauu

SEQ ID NO: 17021 - RNA, 18 nt, Artificial Sequence
  Synthetic
  misc_feature (15)..(15): n is a, c, g, or u
uuuauggguuauaunauu

SEQ ID NO: 17022 - RNA, 19 nt, Artificial Sequence
  Synthetic
  misc_feature (16)..(16): n is a, c, g, or u
cuuuauggguuauaunauu

SEQ ID NO: 17023 - RNA, 20 nt, Artificial Sequence
  Synthetic
  misc_feature (17)..(17): n is a, c, g, or u
acuuuauggguuauaunauu

SEQ ID NO: 17024 - RNA, 18 nt, Artificial Sequence
  Synthetic
  misc_feature (10)..(10): n is a, c, g, or u
  misc_feature (12)..(12): n is a, c, g, or u
gguuauuccnuncacuuu

SEQ ID NO: 17025 - RNA, 19 nt, Artificial Sequence
  Synthetic
  misc_feature (11)..(11): n is a, c, g, or u
  misc_feature (13)..(13): n is a, c, g, or u
ggguuauuccnuncacuuu

SEQ ID NO: 17026 - RNA, 20 nt, Artificial Sequence
  Synthetic
  misc_feature (12)..(12): n is a, c, g, or u
  misc_feature (14)..(14): n is a, c, g, or u
gggguuauuccnuncacuuu

SEQ ID NO: 17027 - RNA, 21 nt, Artificial Sequence
  Synthetic
  misc_feature (13)..(13): n is a, c, g, or u
  misc_feature (15)..(15): n is a, c, g, or u
ugggguuauuccnuncacuuu

SEQ ID NO: 17028 - RNA, 22 nt, Artificial Sequence
  Synthetic
  misc_feature (14)..(14): n is a, c, g, or u
  misc_feature (16)..(16): n is a, c, g, or u
gugggguuauuccnuncacuuu

SEQ ID NO: 17029 - RNA, 23 nt, Artificial Sequence
  Synthetic
  misc_feature (15)..(15): n is a, c, g, or u
  misc_feature (17)..(17): n is a, c, g, or u
ggugggguuauuccnuncacuuu

SEQ ID NO: 17030 - RNA, 24 nt, Artificial Sequence
  Synthetic
  misc_feature (16)..(16): n is a, c, g, or u
  misc_feature (18)..(18): n is a, c, g, or u
uggugggguuauuccnuncacuuu

SEQ ID NO: 17031 - RNA, 18 nt, Artificial Sequence
  Synthetic
ugaguauuuggugucuuu

SEQ ID NO: 17032 - RNA, 19 nt, Artificial Sequence
  Synthetic
uugaguauuuggugucuuu

SEQ ID NO: 17033 - RNA, 20 nt, Artificial Sequence
  Synthetic
cuugaguauuuggugucuuu

SEQ ID NO: 17034 - RNA, 18 nt, Artificial Sequence
  Synthetic
cacauagcgccucauuuu

SEQ ID NO: 17035 - RNA, 19 nt, Artificial Sequence
  Synthetic
acacauagcgccucauuuu

SEQ ID NO: 17036 - RNA, 20 nt, Artificial Sequence
  Synthetic
cacacauagcgccucauuuu

SEQ ID NO: 17037 - RNA, 18 nt, Artificial Sequence
  Synthetic
agaagucagaaggcaaaa

SEQ ID NO: 17038 - RNA, 19 nt, Artificial Sequence
  Synthetic
aagaagucagaaggcaaaa

SEQ ID NO: 17039 - RNA, 20 nt, Artificial Sequence
  Synthetic
gaagaagucagaaggcaaaa

SEQ ID NO: 17040 - RNA, 21 nt, Artificial Sequence
  Synthetic
ggaagaagucagaaggcaaaa

SEQ ID NO: 17041 - RNA, 22 nt, Artificial Sequence
  Synthetic
gggaagaagucagaaggcaaaa

SEQ ID NO: 17042 - RNA, 23 nt, Artificial Sequence
  Synthetic
cgggaagaagucagaaggcaaaa

SEQ ID NO: 17043 - RNA, 24 nt, Artificial Sequence
  Synthetic
acgggaagaagucagaaggcaaaa

SEQ ID NO: 17044 - RNA, 18 nt, Artificial Sequence
  Synthetic
ggugguaccccuagaaaa

SEQ ID NO: 17045 - RNA, 19 nt, Artificial Sequence
  Synthetic
gggugguaccccuagaaaa

SEQ ID NO: 17046 - RNA, 20 nt, Artificial Sequence
  Synthetic
cgggugguaccccuagaaaa

SEQ ID NO: 17047 - RNA, 21 nt, Artificial Sequence
  Synthetic
ccgggugguaccccuagaaaa

SEQ ID NO: 17048 - RNA, 22 nt, Artificial Sequence
  Synthetic
cccgggugguaccccuagaaaa

SEQ ID NO: 17049 - RNA, 23 nt, Artificial Sequence
  Synthetic
acccgggugguaccccuagaaaa

SEQ ID NO: 17050 - RNA, 24 nt, Artificial Sequence
  Synthetic
cacccgggugguaccccuagaaaa

SEQ ID NO: 17051 - RNA, 18 nt, Artificial Sequence
  Synthetic
aauauggugacccacaaa

SEQ ID NO: 17052 - RNA, 19 nt, Artificial Sequence
  Synthetic
gaauauggugacccacaaa

SEQ ID NO: 17053 - RNA, 20 nt, Artificial Sequence
  Synthetic
ggaauauggugacccacaaa

SEQ ID NO: 17054 - RNA, 21 nt, Artificial Sequence
  Synthetic
aggaauauggugacccacaaa

SEQ ID NO: 17055 - RNA, 22 nt, Artificial Sequence
  Synthetic
caggaauauggugacccacaaa

SEQ ID NO: 17056 - RNA, 23 nt, Artificial Sequence
  Synthetic
ccaggaauauggugacccacaaa

SEQ ID NO: 17057 - RNA, 24 nt, Artificial Sequence
  Synthetic
cccaggaauauggugacccacaaa

SEQ ID NO: 17058 - RNA, 18 nt, Artificial Sequence
  Synthetic
uuaauaccuuuauccaaa

SEQ ID NO: 17059 - RNA, 19 nt, Artificial Sequence
  Synthetic
  misc_feature (1)..(1): n is a, c, g, or u
nuuaauaccuuuauccaaa

SEQ ID NO: 17060 - RNA, 20 nt, Artificial Sequence
  Synthetic
  misc_feature (2)..(2): n is a, c, g, or u
gnuuaauaccuuuauccaaa

SEQ ID NO: 17061 - RNA, 21 nt, Artificial Sequence
  Synthetic
  misc_feature (3)..(3): n is a, c, g, or u
ggnuuaauaccuuuauccaaa

SEQ ID NO: 17062 - RNA, 22 nt, Artificial Sequence
  Synthetic
  misc_feature (4)..(4): n is a, c, g, or u
aggnuuaauaccuuuauccaaa

SEQ ID NO: 17063 - RNA, 23 nt, Artificial Sequence
  Synthetic
  misc_feature (5)..(5): n is a, c, g, or u
aaggnuuaauaccuuuauccaaa

SEQ ID NO: 17064 - RNA, 24 nt, Artificial Sequence
  Synthetic
  misc_feature (6)..(6): n is a, c, g, or u
uaaggnuuaauaccuuuauccaaa

SEQ ID NO: 17065 - RNA, 18 nt, Artificial Sequence
  Synthetic
auaaccacauugaguaaa

SEQ ID NO: 17066 - RNA, 19 nt, Artificial Sequence
  Synthetic
gauaaccacauugaguaaa

SEQ ID NO: 17067 - RNA, 20 nt, Artificial Sequence
  Synthetic
ggauaaccacauugaguaaa

SEQ ID NO: 17068 - RNA, 21 nt, Artificial Sequence
  Synthetic
aggauaaccacauugaguaaa

SEQ ID NO: 17069 - RNA, 22 nt, Artificial Sequence
  Synthetic
caggauaaccacauugaguaaa

SEQ ID NO: 17070 - RNA, 23 nt, Artificial Sequence
  Synthetic
gcaggauaaccacauugaguaaa

SEQ ID NO: 17071 - RNA, 24 nt, Artificial Sequence
  Synthetic
agcaggauaaccacauugaguaaa

SEQ ID NO: 17072 - RNA, 18 nt, Artificial Sequence
  Synthetic
acaaauugcacuaguaaa

SEQ ID NO: 17073 - RNA, 19 nt, Artificial Sequence
  Synthetic
aacaaauugcacuaguaaa

SEQ ID NO: 17074 - RNA, 20 nt, Artificial Sequence
  Synthetic
gaacaaauugcacuaguaaa

SEQ ID NO: 17075 - RNA, 21 nt, Artificial Sequence
  Synthetic
ugaacaaauugcacuaguaaa

SEQ ID NO: 17076 - RNA, 22 nt, Artificial Sequence
  Synthetic
cugaacaaauugcacuaguaaa

SEQ ID NO: 17077 - RNA, 23 nt, Artificial Sequence
  Synthetic
acugaacaaauugcacuaguaaa

SEQ ID NO: 17078 - RNA, 24 nt, Artificial Sequence
  Synthetic
cacugaacaaauugcacuaguaaa

SEQ ID NO: 17079 - RNA, 18 nt, Artificial Sequence
  Synthetic
gcggggaguccgcguaaa

SEQ ID NO: 17080 - RNA, 19 nt, Artificial Sequence
  Synthetic
ggcggggaguccgcguaaa

SEQ ID NO: 17081 - RNA, 20 nt, Artificial Sequence
  Synthetic
aggcggggaguccgcguaaa

SEQ ID NO: 17082 - RNA, 21 nt, Artificial Sequence
  Synthetic
caggcggggaguccgcguaaa

SEQ ID NO: 17083 - RNA, 22 nt, Artificial Sequence
  Synthetic
acaggcggggaguccgcguaaa

SEQ ID NO: 17084 - RNA, 23 nt, Artificial Sequence
  Synthetic
cacaggcggggaguccgcguaaa

SEQ ID NO: 17085 - RNA, 24 nt, Artificial Sequence
  Synthetic
gcacaggcggggaguccgcguaaa

SEQ ID NO: 17086 - RNA, 18 nt, Artificial Sequence
  Synthetic
uuuguguugaagucccaa

SEQ ID NO: 17087 - RNA, 19 nt, Artificial Sequence
  Synthetic
guuuguguugaagucccaa

SEQ ID NO: 17088 - RNA, 20 nt, Artificial Sequence
  Synthetic
uguuuguguugaagucccaa

SEQ ID NO: 17089 - RNA, 21 nt, Artificial Sequence
  Synthetic
uuguuuguguugaagucccaa

SEQ ID NO: 17090 - RNA, 22 nt, Artificial Sequence
  Synthetic
cuuguuuguguugaagucccaa

SEQ ID NO: 17091 - RNA, 23 nt, Artificial Sequence
  Synthetic
ccuuguuuguguugaagucccaa

SEQ ID NO: 17092 - RNA, 24 nt, Artificial Sequence
  Synthetic
uccuuguuuguguugaagucccaa

SEQ ID NO: 17093 - RNA, 18 nt, Artificial Sequence
  Synthetic
acuaguaaacugagccaa

SEQ ID NO: 17094 - RNA, 19 nt, Artificial Sequence
  Synthetic
cacuaguaaacugagccaa

SEQ ID NO: 17095 - RNA, 20 nt, Artificial Sequence
  Synthetic
gcacuaguaaacugagccaa

SEQ ID NO: 17096 - RNA, 21 nt, Artificial Sequence
  Synthetic
ugcacuaguaaacugagccaa

SEQ ID NO: 17097 - RNA, 22 nt, Artificial Sequence
  Synthetic
uugcacuaguaaacugagccaa

SEQ ID NO: 17098 - RNA, 23 nt, Artificial Sequence
  Synthetic
auugcacuaguaaacugagccaa

SEQ ID NO: 17099 - RNA, 24 nt, Artificial Sequence
  Synthetic
aauugcacuaguaaacugagccaa

SEQ ID NO: 17100 - RNA, 18 nt, Artificial Sequence
  Synthetic
  misc_feature (1)..(1): n is a, c, g, or u
nuuaauaccuuuauccaa

SEQ ID NO: 17101 - RNA, 19 nt, Artificial Sequence
  Synthetic
  misc_feature (2)..(2): n is a, c, g, or u
gnuuaauaccuuuauccaa

SEQ ID NO: 17102 - RNA, 20 nt, Artificial Sequence
  Synthetic
  misc_feature (3)..(3): n is a, c, g, or u
ggnuuaauaccuuuauccaa

SEQ ID NO: 17103 - RNA, 21 nt, Artificial Sequence
  Synthetic
  misc_feature (4)..(4): n is a, c, g, or u
aggnuuaauaccuuuauccaa

SEQ ID NO: 17104 - RNA, 22 nt, Artificial Sequence
  Synthetic
  misc_feature (5)..(5): n is a, c, g, or u
aaggnuuaauaccuuuauccaa

SEQ ID NO: 17105 - RNA, 23 nt, Artificial Sequence
  Synthetic
  misc_feature (6)..(6): n is a, c, g, or u
uaaggnuuaauaccuuuauccaa

SEQ ID NO: 17106 - RNA, 24 nt, Artificial Sequence
  Synthetic
  misc_feature (7)..(7): n is a, c, g, or u
guaaggnuuaauaccuuuauccaa

SEQ ID NO: 17107 - RNA, 18 nt, Artificial Sequence
  Synthetic
uaaacugagccaagagaa

SEQ ID NO: 17108 - RNA, 19 nt, Artificial Sequence
  Synthetic
guaaacugagccaagagaa

SEQ ID NO: 17109 - RNA, 20 nt, Artificial Sequence
  Synthetic
aguaaacugagccaagagaa

SEQ ID NO: 17110 - RNA, 21 nt, Artificial Sequence
  Synthetic
uaguaaacugagccaagagaa

SEQ ID NO: 17111 - RNA, 22 nt, Artificial Sequence
  Synthetic
cuaguaaacugagccaagagaa

SEQ ID NO: 17112 - RNA, 23 nt, Artificial Sequence
  Synthetic
acuaguaaacugagccaagagaa

SEQ ID NO: 17113 - RNA, 24 nt, Artificial Sequence
  Synthetic
cacuaguaaacugagccaagagaa

SEQ ID NO: 17114 - RNA, 18 nt, Artificial Sequence
  Synthetic
  misc_feature (7)..(8): n is a, c, g, or u
ggaacgnnaggcggagaa

SEQ ID NO: 17115 - RNA, 19 nt, Artificial Sequence
  Synthetic
  misc_feature (8)..(9): n is a, c, g, or u
cggaacgnnaggcggagaa

SEQ ID NO: 17116 - RNA, 20 nt, Artificial Sequence
  Synthetic
  misc_feature (9)..(10): n is a, c, g, or u
ccggaacgnnaggcggagaa

SEQ ID NO: 17117 - RNA, 21 nt, Artificial Sequence
  Synthetic
  misc_feature (10)..(11): n is a, c, g, or u
gccggaacgnnaggcggagaa

SEQ ID NO: 17118 - RNA, 22 nt, Artificial Sequence
  Synthetic
  misc_feature (11)..(12): n is a, c, g, or u
ggccggaacgnnaggcggagaa

SEQ ID NO: 17119 - RNA, 23 nt, Artificial Sequence
  Synthetic
  misc_feature (12)..(13): n is a, c, g, or u
cggccggaacgnnaggcggagaa

SEQ ID NO: 17120 - RNA, 24 nt, Artificial Sequence
  Synthetic
  misc_feature (13)..(14): n is a, c, g, or u
ucggccggaacgnnaggcggagaa

SEQ ID NO: 17121 - RNA, 18 nt, Artificial Sequence
  Synthetic
gcaagugaaugucaggaa

SEQ ID NO: 17122 - RNA, 19 nt, Artificial Sequence
  Synthetic
ugcaagugaaugucaggaa

SEQ ID NO: 17123 - RNA, 20 nt, Artificial Sequence
  Synthetic
augcaagugaaugucaggaa

SEQ ID NO: 17124 - RNA, 21 nt, Artificial Sequence
  Synthetic
gaugcaagugaaugucaggaa

SEQ ID NO: 17125 - RNA, 22 nt, Artificial Sequence
  Synthetic
ugaugcaagugaaugucaggaa

SEQ ID NO: 17126 - RNA, 23 nt, Artificial Sequence
  Synthetic
uugaugcaagugaaugucaggaa

SEQ ID NO: 17127 - RNA, 24 nt, Artificial Sequence
  Synthetic
cuugaugcaagugaaugucaggaa

SEQ ID NO: 17128 - RNA, 18 nt, Artificial Sequence
  Synthetic
gcauagcagcaggaugaa

SEQ ID NO: 17129 - RNA, 19 nt, Artificial Sequence
  Synthetic
ggcauagcagcaggaugaa

SEQ ID NO: 17130 - RNA, 20 nt, Artificial Sequence
  Synthetic
aggcauagcagcaggaugaa

SEQ ID NO: 17131 - RNA, 21 nt, Artificial Sequence
  Synthetic
gaggcauagcagcaggaugaa

SEQ ID NO: 17132 - RNA, 22 nt, Artificial Sequence
  Synthetic
ugaggcauagcagcaggaugaa

SEQ ID NO: 17133 - RNA, 23 nt, Artificial Sequence
  Synthetic
augaggcauagcagcaggaugaa

SEQ ID NO: 17134 - RNA, 24 nt, Artificial Sequence
  Synthetic
gaugaggcauagcagcaggaugaa

SEQ ID NO: 17135 - RNA, 18 nt, Artificial Sequence
  Synthetic
ggguucuguguuucugaa

SEQ ID NO: 17136 - RNA, 19 nt, Artificial Sequence
  Synthetic
aggguucuguguuucugaa

SEQ ID NO: 17137 - RNA, 20 nt, Artificial Sequence
  Synthetic
caggguucuguguuucugaa

SEQ ID NO: 17138 - RNA, 21 nt, Artificial Sequence
  Synthetic
gcaggguucuguguuucugaa

SEQ ID NO: 17139 - RNA, 22 nt, Artificial Sequence
  Synthetic
agcaggguucuguguuucugaa

SEQ ID NO: 17140 - RNA, 23 nt, Artificial Sequence
  Synthetic
gagcaggguucuguguuucugaa

SEQ ID NO: 17141 - RNA, 24 nt, Artificial Sequence
  Synthetic
ggagcaggguucuguguuucugaa

SEQ ID NO: 17142 - RNA, 18 nt, Artificial Sequence
  Synthetic
gcgacgugcagaggugaa

SEQ ID NO: 17143 - RNA, 19 nt, Artificial Sequence
  Synthetic
ugcgacgugcagaggugaa

SEQ ID NO: 17144 - RNA, 20 nt, Artificial Sequence
  Synthetic
augcgacgugcagaggugaa

SEQ ID NO: 17145 - RNA, 21 nt, Artificial Sequence
  Synthetic
caugcgacgugcagaggugaa

SEQ ID NO: 17146 - RNA, 22 nt, Artificial Sequence
  Synthetic
ccaugcgacgugcagaggugaa

SEQ ID NO: 17147 - RNA, 23 nt, Artificial Sequence
  Synthetic
uccaugcgacgugcagaggugaa

SEQ ID NO: 17148 - RNA, 24 nt, Artificial Sequence
  Synthetic
cuccaugcgacgugcagaggugaa

SEQ ID NO: 17149 - RNA, 18 nt, Artificial Sequence
  Synthetic
uugguaacagcgguauaa

SEQ ID NO: 17150 - RNA, 19 nt, Artificial Sequence
  Synthetic
auugguaacagcgguauaa

SEQ ID NO: 17151 - RNA, 20 nt, Artificial Sequence
  Synthetic
aauugguaacagcgguauaa

SEQ ID NO: 17152 - RNA, 21 nt, Artificial Sequence
  Synthetic
aaauugguaacagcgguauaa

SEQ ID NO: 17153 - RNA, 22 nt, Artificial Sequence
  Synthetic
aaaauugguaacagcgguauaa

SEQ ID NO: 17154 - RNA, 23 nt, Artificial Sequence
  Synthetic
aaaaauugguaacagcgguauaa

SEQ ID NO: 17155 - RNA, 24 nt, Artificial Sequence
  Synthetic
aaaaaauugguaacagcgguauaa

SEQ ID NO: 17156 - RNA, 18 nt, Artificial Sequence
  Synthetic
gauaaccacauugaguaa

SEQ ID NO: 17157 - RNA, 19 nt, Artificial Sequence
  Synthetic
ggauaaccacauugaguaa

SEQ ID NO: 17158 - RNA, 20 nt, Artificial Sequence
  Synthetic
aggauaaccacauugaguaa

SEQ ID NO: 17159 - RNA, 21 nt, Artificial Sequence
  Synthetic
caggauaaccacauugaguaa

SEQ ID NO: 17160 - RNA, 22 nt, Artificial Sequence
  Synthetic
gcaggauaaccacauugaguaa

SEQ ID NO: 17161 - RNA, 23 nt, Artificial Sequence
  Synthetic
agcaggauaaccacauugaguaa

SEQ ID NO: 17162 - RNA, 24 nt, Artificial Sequence
  Synthetic
gagcaggauaaccacauugaguaa

SEQ ID NO: 17163 - RNA, 18 nt, Artificial Sequence
  Synthetic
agcagcaggagggaaaca

SEQ ID NO: 17164 - RNA, 19 nt, Artificial Sequence
  Synthetic
cagcagcaggagggaaaca

SEQ ID NO: 17165 - RNA, 20 nt, Artificial Sequence
  Synthetic
acagcagcaggagggaaaca

SEQ ID NO: 17166 - RNA, 21 nt, Artificial Sequence
  Synthetic
uacagcagcaggagggaaaca

SEQ ID NO: 17167 - RNA, 22 nt, Artificial Sequence
  Synthetic
guacagcagcaggagggaaaca

SEQ ID NO: 17168 - RNA, 23 nt, Artificial Sequence
  Synthetic
gguacagcagcaggagggaaaca

SEQ ID NO: 17169 - RNA, 24 nt, Artificial Sequence
  Synthetic
ugguacagcagcaggagggaaaca

SEQ ID NO: 17170 - RNA, 18 nt, Artificial Sequence
  Synthetic
agcuuggaggcuugaaca

SEQ ID NO: 17171 - RNA, 19 nt, Artificial Sequence
  Synthetic
cagcuuggaggcuugaaca

SEQ ID NO: 17172 - RNA, 20 nt, Artificial Sequence
  Synthetic
acagcuuggaggcuugaaca

SEQ ID NO: 17173 - RNA, 21 nt, Artificial Sequence
  Synthetic
cacagcuuggaggcuugaaca

SEQ ID NO: 17174 - RNA, 22 nt, Artificial Sequence
  Synthetic
gcacagcuuggaggcuugaaca

SEQ ID NO: 17175 - RNA, 23 nt, Artificial Sequence
  Synthetic
ggcacagcuuggaggcuugaaca

SEQ ID NO: 17176 - RNA, 24 nt, Artificial Sequence
  Synthetic
aggcacagcuuggaggcuugaaca

SEQ ID NO: 17177 - RNA, 18 nt, Artificial Sequence
  Synthetic
guccaaggaauacuaaca

SEQ ID NO: 17178 - RNA, 19 nt, Artificial Sequence
  Synthetic
aguccaaggaauacuaaca

SEQ ID NO: 17179 - RNA, 20 nt, Artificial Sequence
  Synthetic
gaguccaaggaauacuaaca

SEQ ID NO: 17180 - RNA, 21 nt, Artificial Sequence
  Synthetic
ugaguccaaggaauacuaaca

SEQ ID NO: 17181 - RNA, 22 nt, Artificial Sequence
  Synthetic
augaguccaaggaauacuaaca

SEQ ID NO: 17182 - RNA, 23 nt, Artificial Sequence
  Synthetic
uaugaguccaaggaauacuaaca

SEQ ID NO: 17183 - RNA, 24 nt, Artificial Sequence
  Synthetic
uuaugaguccaaggaauacuaaca

SEQ ID NO: 17184 - RNA, 18 nt, Artificial Sequence
  Synthetic
auaacuaaaagccagaca

SEQ ID NO: 17185 - RNA, 19 nt, Artificial Sequence
  Synthetic
uauaacuaaaagccagaca

SEQ ID NO: 17186 - RNA, 20 nt, Artificial Sequence
  Synthetic
auauaacuaaaagccagaca

SEQ ID NO: 17187 - RNA, 21 nt, Artificial Sequence
  Synthetic
cauauaacuaaaagccagaca

SEQ ID NO: 17188 - RNA, 22 nt, Artificial Sequence
  Synthetic
ccauauaacuaaaagccagaca

SEQ ID NO: 17189 - RNA, 23 nt, Artificial Sequence
  Synthetic
uccauauaacuaaaagccagaca

SEQ ID NO: 17190 - RNA, 24 nt, Artificial Sequence
  Synthetic
auccauauaacuaaaagccagaca

SEQ ID NO: 17191 - RNA, 18 nt, Artificial Sequence
  Synthetic
gccgacgggacguagaca

SEQ ID NO: 17192 - RNA, 19 nt, Artificial Sequence
  Synthetic
cgccgacgggacguagaca

SEQ ID NO: 17193 - RNA, 20 nt, Artificial Sequence
  Synthetic
gcgccgacgggacguagaca

SEQ ID NO: 17194 - RNA, 21 nt, Artificial Sequence
  Synthetic
agcgccgacgggacguagaca

SEQ ID NO: 17195 - RNA, 22 nt, Artificial Sequence
  Synthetic
cagcgccgacgggacguagaca

SEQ ID NO: 17196 - RNA, 23 nt, Artificial Sequence
  Synthetic
ucagcgccgacgggacguagaca

SEQ ID NO: 17197 - RNA, 24 nt, Artificial Sequence
  Synthetic
uucagcgccgacgggacguagaca

SEQ ID NO: 17198 - RNA, 18 nt, Artificial Sequence
  Synthetic
  misc_feature (6)..(6): n is a, c, g, or u
guucanguauuguuuaca

SEQ ID NO: 17199 - RNA, 19 nt, Artificial Sequence
  Synthetic
  misc_feature (7)..(7): n is a, c, g, or u
gguucanguauuguuuaca

SEQ ID NO: 17200 - RNA, 20 nt, Artificial Sequence
  Synthetic
  misc_feature (8)..(8): n is a, c, g, or u
agguucanguauuguuuaca

SEQ ID NO: 17201 - RNA, 21 nt, Artificial Sequence
  Synthetic
  misc_feature (9)..(9): n is a, c, g, or u
aagguucanguauuguuuaca

SEQ ID NO: 17202 - RNA, 22 nt, Artificial Sequence
  Synthetic
  misc_feature (10)..(10): n is a, c, g, or u
aaagguucanguauuguuuaca

SEQ ID NO: 17203 - RNA, 23 nt, Artificial Sequence
  Synthetic
  misc_feature (11)..(11): n is a, c, g, or u
uaaagguucanguauuguuuaca

SEQ ID NO: 17204 - RNA, 24 nt, Artificial Sequence
  Synthetic
  misc_feature (12)..(12): n is a, c, g, or u
guaaagguucanguauuguuuaca

SEQ ID NO: 17205 - RNA, 18 nt, Artificial Sequence
  Synthetic
ggaaagcccuacgcacca

SEQ ID NO: 17206 - RNA, 19 nt, Artificial Sequence
  Synthetic
gggaaagcccuacgcacca

SEQ ID NO: 17207 - RNA, 20 nt, Artificial Sequence
  Synthetic
ggggaaagcccuacgcacca

SEQ ID NO: 17208 - RNA, 21 nt, Artificial Sequence
  Synthetic
gggggaaagcccuacgcacca

SEQ ID NO: 17209 - RNA, 22 nt, Artificial Sequence
  Synthetic
ugggggaaagcccuacgcacca

SEQ ID NO: 17210 - RNA, 23 nt, Artificial Sequence
  Synthetic
gugggggaaagcccuacgcacca

SEQ ID NO: 17211 - RNA, 24 nt, Artificial Sequence
  Synthetic
agugggggaaagcccuacgcacca

SEQ ID NO: 17212 - RNA, 18 nt, Artificial Sequence
  Synthetic
aucgccaagccccagcca

SEQ ID NO: 17213 - RNA, 19 nt, Artificial Sequence
  Synthetic
aaucgccaagccccagcca

SEQ ID NO: 17214 - RNA, 20 nt, Artificial Sequence
  Synthetic
caaucgccaagccccagcca

SEQ ID NO: 17215 - RNA, 21 nt, Artificial Sequence
  Synthetic
ccaaucgccaagccccagcca

SEQ ID NO: 17216 - RNA, 22 nt, Artificial Sequence
  Synthetic
gccaaucgccaagccccagcca

SEQ ID NO: 17217 - RNA, 23 nt, Artificial Sequence
  Synthetic
ggccaaucgccaagccccagcca

SEQ ID NO: 17218 - RNA, 24 nt, Artificial Sequence
  Synthetic
uggccaaucgccaagccccagcca

SEQ ID NO: 17219 - RNA, 18 nt, Artificial Sequence
  Synthetic
  misc_feature (7)..(7): n is a, c, g, or u
agcacanccuagcagcca

SEQ ID NO: 17220 - RNA, 19 nt, Artificial Sequence
  Synthetic
  misc_feature (8)..(8): n is a, c, g, or u
cagcacanccuagcagcca

SEQ ID NO: 17221 - RNA, 20 nt, Artificial Sequence
  Synthetic
  misc_feature (9)..(9): n is a, c, g, or u
gcagcacanccuagcagcca

SEQ ID NO: 17222 - RNA, 21 nt, Artificial Sequence
  Synthetic
  misc_feature (10)..(10): n is a, c, g, or u
ggcagcacanccuagcagcca

SEQ ID NO: 17223 - RNA, 22 nt, Artificial Sequence
  Synthetic
  misc_feature (11)..(11): n is a, c, g, or u
uggcagcacanccuagcagcca

SEQ ID NO: 17224 - RNA, 23 nt, Artificial Sequence
  Synthetic
  misc_feature (12)..(12): n is a, c, g, or u
uuggcagcacanccuagcagcca

SEQ ID NO: 17225 - RNA, 24 nt, Artificial Sequence
  Synthetic
  misc_feature (13)..(13): n is a, c, g, or u
guuggcagcacanccuagcagcca

SEQ ID NO: 17226 - RNA, 18 nt, Artificial Sequence
  Synthetic
  misc_feature (2)..(2): n is a, c, g, or u
gnuuaauaccuuuaucca

SEQ ID NO: 17227 - RNA, 19 nt, Artificial Sequence
  Synthetic
  misc_feature (3)..(3): n is a, c, g, or u
ggnuuaauaccuuuaucca

SEQ ID NO: 17228 - RNA, 20 nt, Artificial Sequence
  Synthetic
  misc_feature (4)..(4): n is a, c, g, or u
aggnuuaauaccuuuaucca

SEQ ID NO: 17229 - RNA, 21 nt, Artificial Sequence
  Synthetic
  misc_feature (5)..(5): n is a, c, g, or u
aaggnuuaauaccuuuaucca

SEQ ID NO: 17230 - RNA, 22 nt, Artificial Sequence
  Synthetic
  misc_feature (6)..(6): n is a, c, g, or u
uaaggnuuaauaccuuuaucca

SEQ ID NO: 17231 - RNA, 23 nt, Artificial Sequence
  Synthetic
  misc_feature (7)..(7): n is a, c, g, or u
guaaggnuuaauaccuuuaucca

SEQ ID NO: 17232 - RNA, 24 nt, Artificial Sequence
  Synthetic
  misc_feature (8)..(8): n is a, c, g, or u
aguaaggnuuaauaccuuuaucca

SEQ ID NO: 17233 - RNA, 18 nt, Artificial Sequence
  Synthetic
aaaaugagaguaacucca

SEQ ID NO: 17234 - RNA, 19 nt, Artificial Sequence
  Synthetic
aaaaaugagaguaacucca

SEQ ID NO: 17235 - RNA, 20 nt, Artificial Sequence
  Synthetic
caaaaaugagaguaacucca

SEQ ID NO: 17236 - RNA, 21 nt, Artificial Sequence
  Synthetic
gcaaaaaugagaguaacucca

SEQ ID NO: 17237 - RNA, 22 nt, Artificial Sequence
  Synthetic
ggcaaaaaugagaguaacucca

SEQ ID NO: 17238 - RNA, 23 nt, Artificial Sequence
  Synthetic
aggcaaaaaugagaguaacucca

SEQ ID NO: 17239 - RNA, 24 nt, Artificial Sequence
  Synthetic
aaggcaaaaaugagaguaacucca

SEQ ID NO: 17240 - RNA, 18 nt, Artificial Sequence
  Synthetic
ccuggccguugccgagca

SEQ ID NO: 17241 - RNA, 19 nt, Artificial Sequence
  Synthetic
gccuggccguugccgagca

SEQ ID NO: 17242 - RNA, 20 nt, Artificial Sequence
  Synthetic
ggccuggccguugccgagca

SEQ ID NO: 17243 - RNA, 21 nt, Artificial Sequence
  Synthetic
aggccuggccguugccgagca

SEQ ID NO: 17244 - RNA, 22 nt, Artificial Sequence
  Synthetic
aaggccuggccguugccgagca

SEQ ID NO: 17245 - RNA, 23 nt, Artificial Sequence
  Synthetic
aaaggccuggccguugccgagca

SEQ ID NO: 17246 - RNA, 24 nt, Artificial Sequence
  Synthetic
caaaggccuggccguugccgagca

SEQ ID NO: 17247 - RNA, 18 nt, Artificial Sequence
  Synthetic
ccgcaguauggaucggca

SEQ ID NO: 17248 - RNA, 19 nt, Artificial Sequence
  Synthetic
uccgcaguauggaucggca

SEQ ID NO: 17249 - RNA, 20 nt, Artificial Sequence
  Synthetic
uuccgcaguauggaucggca

SEQ ID NO: 17250 - RNA, 21 nt, Artificial Sequence
  Synthetic
guuccgcaguauggaucggca

SEQ ID NO: 17251 - RNA, 22 nt, Artificial Sequence
  Synthetic
aguuccgcaguauggaucggca

SEQ ID NO: 17252 - RNA, 23 nt, Artificial Sequence
  Synthetic
gaguuccgcaguauggaucggca

SEQ ID NO: 17253 - RNA, 24 nt, Artificial Sequence
  Synthetic
ggaguuccgcaguauggaucggca

SEQ ID NO: 17254 - RNA, 18 nt, Artificial Sequence
  Synthetic
aucccagaggauugggca

SEQ ID NO: 17255 - RNA, 19 nt, Artificial Sequence
  Synthetic
aaucccagaggauugggca

SEQ ID NO: 17256 - RNA, 20 nt, Artificial Sequence
  Synthetic
gaaucccagaggauugggca

SEQ ID NO: 17257 - RNA, 21 nt, Artificial Sequence
  Synthetic
agaaucccagaggauugggca

SEQ ID NO: 17258 - RNA, 22 nt, Artificial Sequence
  Synthetic
aagaaucccagaggauugggca

SEQ ID NO: 17259 - RNA, 23 nt, Artificial Sequence
  Synthetic
aaagaaucccagaggauugggca

SEQ ID NO: 17260 - RNA, 24 nt, Artificial Sequence
  Synthetic
gaaagaaucccagaggauugggca

SEQ ID NO: 17261 - RNA, 18 nt, Artificial Sequence
  Synthetic
aaucaaugggucuauuca

SEQ ID NO: 17262 - RNA, 19 nt, Artificial Sequence
  Synthetic
caaucaaugggucuauuca

SEQ ID NO: 17263 - RNA, 20 nt, Artificial Sequence
  Synthetic
ccaaucaaugggucuauuca

SEQ ID NO: 17264 - RNA, 21 nt, Artificial Sequence
  Synthetic
uccaaucaaugggucuauuca

SEQ ID NO: 17265 - RNA, 22 nt, Artificial Sequence
  Synthetic
uuccaaucaaugggucuauuca

SEQ ID NO: 17266 - RNA, 23 nt, Artificial Sequence
  Synthetic
cuuccaaucaaugggucuauuca

SEQ ID NO: 17267 - RNA, 24 nt, Artificial Sequence
  Synthetic
ccuuccaaucaaugggucuauuca

SEQ ID NO: 17268 - RNA, 18 nt, Artificial Sequence
  Synthetic
gaguaggucccggacaga

SEQ ID NO: 17269 - RNA, 19 nt, Artificial Sequence
  Synthetic
cgaguaggucccggacaga

SEQ ID NO: 17270 - RNA, 20 nt, Artificial Sequence
  Synthetic
ucgaguaggucccggacaga

SEQ ID NO: 17271 - RNA, 21 nt, Artificial Sequence
  Synthetic
gucgaguaggucccggacaga

SEQ ID NO: 17272 - RNA, 22 nt, Artificial Sequence
  Synthetic
ugucgaguaggucccggacaga

SEQ ID NO: 17273 - RNA, 23 nt, Artificial Sequence
  Synthetic
gugucgaguaggucccggacaga

SEQ ID NO: 17274 - RNA, 24 nt, Artificial Sequence
  Synthetic
ggugucgaguaggucccggacaga

SEQ ID NO: 17275 - RNA, 18 nt, Artificial Sequence
  Synthetic
cccuuagagguggagaga

SEQ ID NO: 17276 - RNA, 19 nt, Artificial Sequence
  Synthetic
ucccuuagagguggagaga

SEQ ID NO: 17277 - RNA, 20 nt, Artificial Sequence
  Synthetic
gucccuuagagguggagaga

SEQ ID NO: 17278 - RNA, 21 nt, Artificial Sequence
  Synthetic
ugucccuuagagguggagaga

SEQ ID NO: 17279 - RNA, 22 nt, Artificial Sequence
  Synthetic
gugucccuuagagguggagaga

SEQ ID NO: 17280 - RNA, 23 nt, Artificial Sequence
  Synthetic
ugugucccuuagagguggagaga

SEQ ID NO: 17281 - RNA, 24 nt, Artificial Sequence
  Synthetic
gugugucccuuagagguggagaga

SEQ ID NO: 17282 - RNA, 18 nt, Artificial Sequence
  Synthetic
ggagguguacuuccgaga

SEQ ID NO: 17283 - RNA, 19 nt, Artificial Sequence
  Synthetic
aggagguguacuuccgaga

SEQ ID NO: 17284 - RNA, 20 nt, Artificial Sequence
  Synthetic
aaggagguguacuuccgaga

SEQ ID NO: 17285 - RNA, 21 nt, Artificial Sequence
  Synthetic
gaaggagguguacuuccgaga

SEQ ID NO: 17286 - RNA, 22 nt, Artificial Sequence
  Synthetic
ggaaggagguguacuuccgaga

SEQ ID NO: 17287 - RNA, 23 nt, Artificial Sequence
  Synthetic
gggaaggagguguacuuccgaga

SEQ ID NO: 17288 - RNA, 24 nt, Artificial Sequence
  Synthetic
ugggaaggagguguacuuccgaga

SEQ ID NO: 17289 - RNA, 18 nt, Artificial Sequence
  Synthetic
acauugggaagcuggaga

SEQ ID NO: 17290 - RNA, 19 nt, Artificial Sequence
  Synthetic
aacauugggaagcuggaga

SEQ ID NO: 17291 - RNA, 20 nt, Artificial Sequence
  Synthetic
uaacauugggaagcuggaga

SEQ ID NO: 17292 - RNA, 21 nt, Artificial Sequence
  Synthetic
cuaacauugggaagcuggaga

SEQ ID NO: 17293 - RNA, 22 nt, Artificial Sequence
  Synthetic
acuaacauugggaagcuggaga

SEQ ID NO: 17294 - RNA, 23 nt, Artificial Sequence
  Synthetic
uacuaacauugggaagcuggaga

SEQ ID NO: 17295 - RNA, 24 nt, Artificial Sequence
  Synthetic
auacuaacauugggaagcuggaga

SEQ ID NO: 17296 - RNA, 18 nt, Artificial Sequence
  Synthetic
uugguaagugauuggaga

SEQ ID NO: 17297 - RNA, 19 nt, Artificial Sequence
  Synthetic
guugguaagugauuggaga

SEQ ID NO: 17298 - RNA, 20 nt, Artificial Sequence
  Synthetic
gguugguaagugauuggaga

SEQ ID NO: 17299 - RNA, 21 nt, Artificial Sequence
  Synthetic
agguugguaagugauuggaga

SEQ ID NO: 17300 - RNA, 22 nt, Artificial Sequence
  Synthetic
gagguugguaagugauuggaga

SEQ ID NO: 17301 - RNA, 23 nt, Artificial Sequence
  Synthetic
ggagguugguaagugauuggaga

SEQ ID NO: 17302 - RNA, 24 nt, Artificial Sequence
  Synthetic
aggagguugguaagugauuggaga

SEQ ID NO: 17303 - RNA, 18 nt, Artificial Sequence
  Synthetic
agccccaagcgaccacga

SEQ ID NO: 17304 - RNA, 19 nt, Artificial Sequence
  Synthetic
gagccccaagcgaccacga

SEQ ID NO: 17305 - RNA, 20 nt, Artificial Sequence
  Synthetic
agagccccaagcgaccacga

SEQ ID NO: 17306 - RNA, 21 nt, Artificial Sequence
  Synthetic
cagagccccaagcgaccacga

SEQ ID NO: 17307 - RNA, 22 nt, Artificial Sequence
  Synthetic
gcagagccccaagcgaccacga

SEQ ID NO: 17308 - RNA, 23 nt, Artificial Sequence
  Synthetic
ggcagagccccaagcgaccacga

SEQ ID NO: 17309 - RNA, 24 nt, Artificial Sequence
  Synthetic
cggcagagccccaagcgaccacga

SEQ ID NO: 17310 - RNA, 18 nt, Artificial Sequence
  Synthetic
cgcaggauucagcgccga

SEQ ID NO: 17311 - RNA, 19 nt, Artificial Sequence
  Synthetic
ccgcaggauucagcgccga

SEQ ID NO: 17312 - RNA, 20 nt, Artificial Sequence
  Synthetic
uccgcaggauucagcgccga

SEQ ID NO: 17313 - RNA, 21 nt, Artificial Sequence
  Synthetic
guccgcaggauucagcgccga

SEQ ID NO: 17314 - RNA, 22 nt, Artificial Sequence
  Synthetic
cguccgcaggauucagcgccga

SEQ ID NO: 17315 - RNA, 23 nt, Artificial Sequence
  Synthetic
ucguccgcaggauucagcgccga

SEQ ID NO: 17316 - RNA, 24 nt, Artificial Sequence
  Synthetic
gucguccgcaggauucagcgccga

SEQ ID NO: 17317 - RNA, 18 nt, Artificial Sequence
  Synthetic
  misc_feature (11)..(11): n is a, c, g, or u
gcuccagaccngcugcga

SEQ ID NO: 17318 - RNA, 19 nt, Artificial Sequence
  Synthetic
  misc_feature (12)..(12): n is a, c, g, or u
cgcuccagaccngcugcga

SEQ ID NO: 17319 - RNA, 20 nt, Artificial Sequence
  Synthetic
  misc_feature (13)..(13): n is a, c, g, or u
ccgcuccagaccngcugcga

SEQ ID NO: 17320 - RNA, 21 nt, Artificial Sequence
  Synthetic
  misc_feature (14)..(14): n is a, c, g, or u
uccgcuccagaccngcugcga

SEQ ID NO: 17321 - RNA, 22 nt, Artificial Sequence
  Synthetic
  misc_feature (15)..(15): n is a, c, g, or u
guccgcuccagaccngcugcga

SEQ ID NO: 17322 - RNA, 23 nt, Artificial Sequence
  Synthetic
  misc_feature (1)..(1): n is a, c, g, or u
  misc_feature (16)..(16): n is a, c, g, or u
nguccgcuccagaccngcugcga

SEQ ID NO: 17323 - RNA, 24 nt, Artificial Sequence
  Synthetic
  misc_feature (2)..(2): n is a, c, g, or u
  misc_feature (17)..(17): n is a, c, g, or u
anguccgcuccagaccngcugcga

SEQ ID NO: 17324 - RNA, 18 nt, Artificial Sequence
  Synthetic
uuugguacagcagcagga

SEQ ID NO: 17325 - RNA, 19 nt, Artificial Sequence
  Synthetic
guuugguacagcagcagga

SEQ ID NO: 17326 - RNA, 20 nt, Artificial Sequence
  Synthetic
gguuugguacagcagcagga

SEQ ID NO: 17327 - RNA, 21 nt, Artificial Sequence
  Synthetic
agguuugguacagcagcagga

SEQ ID NO: 17328 - RNA, 22 nt, Artificial Sequence
  Synthetic
aagguuugguacagcagcagga

SEQ ID NO: 17329 - RNA, 23 nt, Artificial Sequence
  Synthetic
gaagguuugguacagcagcagga

SEQ ID NO: 17330 - RNA, 24 nt, Artificial Sequence
  Synthetic
cgaagguuugguacagcagcagga

SEQ ID NO: 17331 - RNA, 18 nt, Artificial Sequence
  Synthetic
ggaguuaaccagucagga

SEQ ID NO: 17332 - RNA, 19 nt, Artificial Sequence
  Synthetic
aggaguuaaccagucagga

SEQ ID NO: 17333 - RNA, 20 nt, Artificial Sequence
  Synthetic
aaggaguuaaccagucagga

SEQ ID NO: 17334 - RNA, 21 nt, Artificial Sequence
  Synthetic
gaaggaguuaaccagucagga

SEQ ID NO: 17335 - RNA, 22 nt, Artificial Sequence
  Synthetic
agaaggaguuaaccagucagga

SEQ ID NO: 17336 - RNA, 23 nt, Artificial Sequence
  Synthetic
aagaaggaguuaaccagucagga

SEQ ID NO: 17337 - RNA, 24 nt, Artificial Sequence
  Synthetic
aaagaaggaguuaaccagucagga

SEQ ID NO: 17338 - RNA, 18 nt, Artificial Sequence
  Synthetic
ggaaagaaucccagagga

SEQ ID NO: 17339 - RNA, 19 nt, Artificial Sequence
  Synthetic
uggaaagaaucccagagga

SEQ ID NO: 17340 - RNA, 20 nt, Artificial Sequence
  Synthetic
cuggaaagaaucccagagga

SEQ ID NO: 17341 - RNA, 21 nt, Artificial Sequence
  Synthetic
ucuggaaagaaucccagagga

SEQ ID NO: 17342 - RNA, 22 nt, Artificial Sequence
  Synthetic
gucuggaaagaaucccagagga

SEQ ID NO: 17343 - RNA, 23 nt, Artificial Sequence
  Synthetic
ggucuggaaagaaucccagagga

SEQ ID NO: 17344 - RNA, 24 nt, Artificial Sequence
  Synthetic
uggucuggaaagaaucccagagga

SEQ ID NO: 17345 - RNA, 18 nt, Artificial Sequence
  Synthetic
ccaggacaaguuggagga

SEQ ID NO: 17346 - RNA, 19 nt, Artificial Sequence
  Synthetic
gccaggacaaguuggagga

SEQ ID NO: 17347 - RNA, 20 nt, Artificial Sequence
  Synthetic
agccaggacaaguuggagga

SEQ ID NO: 17348 - RNA, 21 nt, Artificial Sequence
  Synthetic
uagccaggacaaguuggagga

SEQ ID NO: 17349 - RNA, 22 nt, Artificial Sequence
  Synthetic
auagccaggacaaguuggagga

SEQ ID NO: 17350 - RNA, 23 nt, Artificial Sequence
  Synthetic
gauagccaggacaaguuggagga

SEQ ID NO: 17351 - RNA, 24 nt, Artificial Sequence
  Synthetic
cgauagccaggacaaguuggagga

SEQ ID NO: 17352 - RNA, 18 nt, Artificial Sequence
  Synthetic
ccggaaguguugauagga

SEQ ID NO: 17353 - RNA, 19 nt, Artificial Sequence
  Synthetic
uccggaaguguugauagga

SEQ ID NO: 17354 - RNA, 20 nt, Artificial Sequence
  Synthetic
cuccggaaguguugauagga

SEQ ID NO: 17355 - RNA, 21 nt, Artificial Sequence
  Synthetic
ucuccggaaguguugauagga

SEQ ID NO: 17356 - RNA, 22 nt, Artificial Sequence
  Synthetic
gucuccggaaguguugauagga

SEQ ID NO: 17357 - RNA, 23 nt, Artificial Sequence
  Synthetic
agucuccggaaguguugauagga

SEQ ID NO: 17358 - RNA, 24 nt, Artificial Sequence
  Synthetic
uagucuccggaaguguugauagga

SEQ ID NO: 17359 - RNA, 18 nt, Artificial Sequence
  Synthetic
  misc_feature (2)..(2): n is a, c, g, or u
anccuagcagccauggga

SEQ ID NO: 17360 - RNA, 19 nt, Artificial Sequence
  Synthetic
  misc_feature (3)..(3): n is a, c, g, or u
canccuagcagccauggga

SEQ ID NO: 17361 - RNA, 20 nt, Artificial Sequence
  Synthetic
  misc_feature (4)..(4): n is a, c, g, or u
acanccuagcagccauggga

SEQ ID NO: 17362 - RNA, 21 nt, Artificial Sequence
  Synthetic
  misc_feature (5)..(5): n is a, c, g, or u
cacanccuagcagccauggga

SEQ ID NO: 17363 - RNA, 22 nt, Artificial Sequence
  Synthetic
  misc_feature (6)..(6): n is a, c, g, or u
gcacanccuagcagccauggga

SEQ ID NO: 17364 - RNA, 23 nt, Artificial Sequence
  Synthetic
  misc_feature (7)..(7): n is a, c, g, or u
agcacanccuagcagccauggga

SEQ ID NO: 17365 - RNA, 24 nt, Artificial Sequence
  Synthetic
  misc_feature (8)..(8): n is a, c, g, or u
cagcacanccuagcagccauggga

SEQ ID NO: 17366 - RNA, 18 nt, Artificial Sequence
  Synthetic
aagcccaagaugauggga

SEQ ID NO: 17367 - RNA, 19 nt, Artificial Sequence
  Synthetic
aaagcccaagaugauggga

SEQ ID NO: 17368 - RNA, 20 nt, Artificial Sequence
  Synthetic
gaaagcccaagaugauggga

SEQ ID NO: 17369 - RNA, 21 nt, Artificial Sequence
  Synthetic
cgaaagcccaagaugauggga

SEQ ID NO: 17370 - RNA, 22 nt, Artificial Sequence
  Synthetic
ccgaaagcccaagaugauggga

SEQ ID NO: 17371 - RNA, 23 nt, Artificial Sequence
  Synthetic
uccgaaagcccaagaugauggga

SEQ ID NO: 17372 - RNA, 24 nt, Artificial Sequence
  Synthetic
uuccgaaagcccaagaugauggga

SEQ ID NO: 17373 - RNA, 18 nt, Artificial Sequence
  Synthetic
gggggugugaacccugga

SEQ ID NO: 17374 - RNA, 19 nt, Artificial Sequence
  Synthetic
ugggggugugaacccugga

SEQ ID NO: 17375 - RNA, 20 nt, Artificial Sequence
  Synthetic
gugggggugugaacccugga

SEQ ID NO: 17376 - RNA, 21 nt, Artificial Sequence
  Synthetic
ugugggggugugaacccugga

SEQ ID NO: 17377 - RNA, 22 nt, Artificial Sequence
  Synthetic
gugugggggugugaacccugga

SEQ ID NO: 17378 - RNA, 23 nt, Artificial Sequence
  Synthetic
cgugugggggugugaacccugga

SEQ ID NO: 17379 - RNA, 24 nt, Artificial Sequence
  Synthetic
ccgugugggggugugaacccugga

SEQ ID NO: 17380 - RNA, 18 nt, Artificial Sequence
  Synthetic
  misc_feature (16)..(16): n is a, c, g, or u
ucuucugcgacgcggnga

SEQ ID NO: 17381 - RNA, 19 nt, Artificial Sequence
  Synthetic
  misc_feature (17)..(17): n is a, c, g, or u
aucuucugcgacgcggnga

SEQ ID NO: 17382 - RNA, 20 nt, Artificial Sequence
  Synthetic
  misc_feature (18)..(18): n is a, c, g, or u
gaucuucugcgacgcggnga

SEQ ID NO: 17383 - RNA, 21 nt, Artificial Sequence
  Synthetic
  misc_feature (19)..(19): n is a, c, g, or u
agaucuucugcgacgcggnga

SEQ ID NO: 17384 - RNA, 22 nt, Artificial Sequence
  Synthetic
  misc_feature (20)..(20): n is a, c, g, or u
gagaucuucugcgacgcggnga

SEQ ID NO: 17385 - RNA, 23 nt, Artificial Sequence
  Synthetic
  misc_feature (21)..(21): n is a, c, g, or u
ugagaucuucugcgacgcggnga

SEQ ID NO: 17386 - RNA, 24 nt, Artificial Sequence
  Synthetic
  misc_feature (22)..(22): n is a, c, g, or u
uugagaucuucugcgacgcggnga

SEQ ID NO: 17387 - RNA, 18 nt, Artificial Sequence
  Synthetic
caggagguugguaaguga

SEQ ID NO: 17388 - RNA, 19 nt, Artificial Sequence
  Synthetic
acaggagguugguaaguga

SEQ ID NO: 17389 - RNA, 20 nt, Artificial Sequence
  Synthetic
gacaggagguugguaaguga

SEQ ID NO: 17390 - RNA, 21 nt, Artificial Sequence
  Synthetic
ggacaggagguugguaaguga

SEQ ID NO: 17391 - RNA, 22 nt, Artificial Sequence
  Synthetic
aggacaggagguugguaaguga

SEQ ID NO: 17392 - RNA, 23 nt, Artificial Sequence
  Synthetic
gaggacaggagguugguaaguga

SEQ ID NO: 17393 - RNA, 24 nt, Artificial Sequence
  Synthetic
ggaggacaggagguugguaaguga

SEQ ID NO: 17394 - RNA, 18 nt, Artificial Sequence
  Synthetic
  misc_feature (12)..(12): n is a, c, g, or u
uccuuucauuunuaguga

SEQ ID NO: 17395 - RNA, 19 nt, Artificial Sequence
  Synthetic
  misc_feature (13)..(13): n is a, c, g, or u
cuccuuucauuunuaguga

SEQ ID NO: 17396 - RNA, 20 nt, Artificial Sequence
  Synthetic
  misc_feature (14)..(14): n is a, c, g, or u
ucuccuuucauuunuaguga

SEQ ID NO: 17397 - RNA, 21 nt, Artificial Sequence
  Synthetic
  misc_feature (15)..(15): n is a, c, g, or u
gucuccuuucauuunuaguga

SEQ ID NO: 17398 - RNA, 22 nt, Artificial Sequence
  Synthetic
  misc_feature (16)..(16): n is a, c, g, or u
cgucuccuuucauuunuaguga

SEQ ID NO: 17399 - RNA, 23 nt, Artificial Sequence
  Synthetic
  misc_feature (17)..(17): n is a, c, g, or u
ucgucuccuuucauuunuaguga

SEQ ID NO: 17400 - RNA, 24 nt, Artificial Sequence
  Synthetic
  misc_feature (18)..(18): n is a, c, g, or u
aucgucuccuuucauuunuaguga

SEQ ID NO: 17401 - RNA, 18 nt, Artificial Sequence
  Synthetic
agaagauugaugauguga

SEQ ID NO: 17402 - RNA, 19 nt, Artificial Sequence
  Synthetic
gagaagauugaugauguga

SEQ ID NO: 17403 - RNA, 20 nt, Artificial Sequence
  Synthetic
cgagaagauugaugauguga

SEQ ID NO: 17404 - RNA, 21 nt, Artificial Sequence
  Synthetic
ucgagaagauugaugauguga

SEQ ID NO: 17405 - RNA, 22 nt, Artificial Sequence
  Synthetic
uucgagaagauugaugauguga

SEQ ID NO: 17406 - RNA, 23 nt, Artificial Sequence
  Synthetic
cuucgagaagauugaugauguga

SEQ ID NO: 17407 - RNA, 24 nt, Artificial Sequence
  Synthetic
ucuucgagaagauugaugauguga

SEQ ID NO: 17408 - RNA, 18 nt, Artificial Sequence
  Synthetic
guaccccuagaaaauuga

SEQ ID NO: 17409 - RNA, 19 nt, Artificial Sequence
  Synthetic
gguaccccuagaaaauuga

SEQ ID NO: 17410 - RNA, 20 nt, Artificial Sequence
  Synthetic
ugguaccccuagaaaauuga

SEQ ID NO: 17411 - RNA, 21 nt, Artificial Sequence
  Synthetic
gugguaccccuagaaaauuga

SEQ ID NO: 17412 - RNA, 22 nt, Artificial Sequence
  Synthetic
ggugguaccccuagaaaauuga

SEQ ID NO: 17413 - RNA, 23 nt, Artificial Sequence
  Synthetic
gggugguaccccuagaaaauuga

SEQ ID NO: 17414 - RNA, 24 nt, Artificial Sequence
  Synthetic
cgggugguaccccuagaaaauuga

SEQ ID NO: 17415 - RNA, 18 nt, Artificial Sequence
  Synthetic
gccccuucucgccguuga

SEQ ID NO: 17416 - RNA, 19 nt, Artificial Sequence
  Synthetic
ugccccuucucgccguuga

SEQ ID NO: 17417 - RNA, 20 nt, Artificial Sequence
  Synthetic
augccccuucucgccguuga

SEQ ID NO: 17418 - RNA, 21 nt, Artificial Sequence
  Synthetic
caugccccuucucgccguuga

SEQ ID NO: 17419 - RNA, 22 nt, Artificial Sequence
  Synthetic
ccaugccccuucucgccguuga

SEQ ID NO: 17420 - RNA, 23 nt, Artificial Sequence
  Synthetic
cccaugccccuucucgccguuga

SEQ ID NO: 17421 - RNA, 24 nt, Artificial Sequence
  Synthetic
ucccaugccccuucucgccguuga

SEQ ID NO: 17422 - RNA, 18 nt, Artificial Sequence
  Synthetic
cucaauccaggucguuga

SEQ ID NO: 17423 - RNA, 19 nt, Artificial Sequence
  Synthetic
ccucaauccaggucguuga

SEQ ID NO: 17424 - RNA, 20 nt, Artificial Sequence
  Synthetic
uccucaauccaggucguuga

SEQ ID NO: 17425 - RNA, 21 nt, Artificial Sequence
  Synthetic
uuccucaauccaggucguuga

SEQ ID NO: 17426 - RNA, 22 nt, Artificial Sequence
  Synthetic
auuccucaauccaggucguuga

SEQ ID NO: 17427 - RNA, 23 nt, Artificial Sequence
  Synthetic
uauuccucaauccaggucguuga

SEQ ID NO: 17428 - RNA, 24 nt, Artificial Sequence
  Synthetic
guauuccucaauccaggucguuga

SEQ ID NO: 17429 - RNA, 18 nt, Artificial Sequence
  Synthetic
auugguaacagcgguaua

SEQ ID NO: 17430 - RNA, 19 nt, Artificial Sequence
  Synthetic
aauugguaacagcgguaua

SEQ ID NO: 17431 - RNA, 20 nt, Artificial Sequence
  Synthetic
aaauugguaacagcgguaua

SEQ ID NO: 17432 - RNA, 21 nt, Artificial Sequence
  Synthetic
aaaauugguaacagcgguaua

SEQ ID NO: 17433 - RNA, 22 nt, Artificial Sequence
  Synthetic
aaaaauugguaacagcgguaua

SEQ ID NO: 17434 - RNA, 23 nt, Artificial Sequence
  Synthetic
aaaaaauugguaacagcgguaua

SEQ ID NO: 17435 - RNA, 24 nt, Artificial Sequence
  Synthetic
caaaaaauugguaacagcgguaua

SEQ ID NO: 17436 - RNA, 18 nt, Artificial Sequence
  Synthetic
uuguagauccuggaagua

SEQ ID NO: 17437 - RNA, 19 nt, Artificial Sequence
  Synthetic
guuguagauccuggaagua

SEQ ID NO: 17438 - RNA, 20 nt, Artificial Sequence
  Synthetic
gguuguagauccuggaagua

SEQ ID NO: 17439 - RNA, 21 nt, Artificial Sequence
  Synthetic
ugguuguagauccuggaagua

SEQ ID NO: 17440 - RNA, 22 nt, Artificial Sequence
  Synthetic
gugguuguagauccuggaagua

SEQ ID NO: 17441 - RNA, 23 nt, Artificial Sequence
  Synthetic
ggugguuguagauccuggaagua

SEQ ID NO: 17442 - RNA, 24 nt, Artificial Sequence
  Synthetic
uggugguuguagauccuggaagua

SEQ ID NO: 17443 - RNA, 18 nt, Artificial Sequence
  Synthetic
  misc_feature (14)..(14): n is a, c, g, or u
uugaaaacagguanagua

SEQ ID NO: 17444 - RNA, 19 nt, Artificial Sequence
  Synthetic
  misc_feature (15)..(15): n is a, c, g, or u
auugaaaacagguanagua

SEQ ID NO: 17445 - RNA, 20 nt, Artificial Sequence
  Synthetic
  misc_feature (16)..(16): n is a, c, g, or u
gauugaaaacagguanagua

SEQ ID NO: 17446 - RNA, 21 nt, Artificial Sequence
  Synthetic
  misc_feature (17)..(17): n is a, c, g, or u
ggauugaaaacagguanagua

SEQ ID NO: 17447 - RNA, 22 nt, Artificial Sequence
  Synthetic
  misc_feature (18)..(18): n is a, c, g, or u
aggauugaaaacagguanagua

SEQ ID NO: 17448 - RNA, 23 nt, Artificial Sequence
  Synthetic
  misc_feature (19)..(19): n is a, c, g, or u
caggauugaaaacagguanagua

SEQ ID NO: 17449 - RNA, 24 nt, Artificial Sequence
  Synthetic
  misc_feature (20)..(20): n is a, c, g, or u
ucaggauugaaaacagguanagua

SEQ ID NO: 17450 - RNA, 18 nt, Artificial Sequence
  Synthetic
aggcggggaguccgcgua

SEQ ID NO: 17451 - RNA, 19 nt, Artificial Sequence
  Synthetic
caggcggggaguccgcgua

SEQ ID NO: 17452 - RNA, 20 nt, Artificial Sequence
  Synthetic
acaggcggggaguccgcgua

SEQ ID NO: 17453 - RNA, 21 nt, Artificial Sequence
  Synthetic
cacaggcggggaguccgcgua

SEQ ID NO: 17454 - RNA, 22 nt, Artificial Sequence
  Synthetic
gcacaggcggggaguccgcgua

SEQ ID NO: 17455 - RNA, 23 nt, Artificial Sequence
  Synthetic
ggcacaggcggggaguccgcgua

SEQ ID NO: 17456 - RNA, 24 nt, Artificial Sequence
  Synthetic
aggcacaggcggggaguccgcgua

SEQ ID NO: 17457 - RNA, 18 nt, Artificial Sequence
  Synthetic
uucuaaggcaucucggua

SEQ ID NO: 17458 - RNA, 19 nt, Artificial Sequence
  Synthetic
auucuaaggcaucucggua

SEQ ID NO: 17459 - RNA, 20 nt, Artificial Sequence
  Synthetic
gauucuaaggcaucucggua

SEQ ID NO: 17460 - RNA, 21 nt, Artificial Sequence
  Synthetic
ugauucuaaggcaucucggua

SEQ ID NO: 17461 - RNA, 22 nt, Artificial Sequence
  Synthetic
gugauucuaaggcaucucggua

SEQ ID NO: 17462 - RNA, 23 nt, Artificial Sequence
  Synthetic
ggugauucuaaggcaucucggua

SEQ ID NO: 17463 - RNA, 24 nt, Artificial Sequence
  Synthetic
  misc_feature (1)..(1): n is a, c, g, or u
nggugauucuaaggcaucucggua

SEQ ID NO: 17464 - RNA, 18 nt, Artificial Sequence
  Synthetic
  misc_feature (8)..(8): n is a, c, g, or u
agguucanguauuguuua

SEQ ID NO: 17465 - RNA, 19 nt, Artificial Sequence
  Synthetic
  misc_feature (9)..(9): n is a, c, g, or u
aagguucanguauuguuua

SEQ ID NO: 17466 - RNA, 20 nt, Artificial Sequence
  Synthetic
  misc_feature (10)..(10): n is a, c, g, or u
aaagguucanguauuguuua

SEQ ID NO: 17467 - RNA, 21 nt, Artificial Sequence
  Synthetic
  misc_feature (11)..(11): n is a, c, g, or u
uaaagguucanguauuguuua

SEQ ID NO: 17468 - RNA, 22 nt, Artificial Sequence
  Synthetic
  misc_feature (12)..(12): n is a, c, g, or u
guaaagguucanguauuguuua

SEQ ID NO: 17469 - RNA, 23 nt, Artificial Sequence
  Synthetic
  misc_feature (13)..(13): n is a, c, g, or u
gguaaagguucanguauuguuua

SEQ ID NO: 17470 - RNA, 24 nt, Artificial Sequence
  Synthetic
  misc_feature (14)..(14): n is a, c, g, or u
ggguaaagguucanguauuguuua

SEQ ID NO: 17471 - RNA, 18 nt, Artificial Sequence
  Synthetic
uaguccagaagaaccaac

SEQ ID NO: 17472 - RNA, 19 nt, Artificial Sequence
  Synthetic
auaguccagaagaaccaac

SEQ ID NO: 17473 - RNA, 20 nt, Artificial Sequence
  Synthetic
gauaguccagaagaaccaac

SEQ ID NO: 17474 - RNA, 21 nt, Artificial Sequence
  Synthetic
ugauaguccagaagaaccaac

SEQ ID NO: 17475 - RNA, 22 nt, Artificial Sequence
  Synthetic
uugauaguccagaagaaccaac

SEQ ID NO: 17476 - RNA, 23 nt, Artificial Sequence
  Synthetic
cuugauaguccagaagaaccaac

SEQ ID NO: 17477 - RNA, 24 nt, Artificial Sequence
  Synthetic
ccuugauaguccagaagaaccaac

SEQ ID NO: 17478 - RNA, 18 nt, Artificial Sequence
  Synthetic
gugaggauuuuugucaac

SEQ ID NO: 17479 - RNA, 19 nt, Artificial Sequence
  Synthetic
ugugaggauuuuugucaac

SEQ ID NO: 17480 - RNA, 20 nt, Artificial Sequence
  Synthetic
uugugaggauuuuugucaac

SEQ ID NO: 17481 - RNA, 21 nt, Artificial Sequence
  Synthetic
auugugaggauuuuugucaac

SEQ ID NO: 17482 - RNA, 22 nt, Artificial Sequence
  Synthetic
uauugugaggauuuuugucaac

SEQ ID NO: 17483 - RNA, 23 nt, Artificial Sequence
  Synthetic
guauugugaggauuuuugucaac

SEQ ID NO: 17484 - RNA, 24 nt, Artificial Sequence
  Synthetic
gguauugugaggauuuuugucaac

SEQ ID NO: 17485 - RNA, 18 nt, Artificial Sequence
  Synthetic
gguucuguguuucugaac

SEQ ID NO: 17486 - RNA, 19 nt, Artificial Sequence
  Synthetic
ggguucuguguuucugaac

SEQ ID NO: 17487 - RNA, 20 nt, Artificial Sequence
  Synthetic
aggguucuguguuucugaac

SEQ ID NO: 17488 - RNA, 21 nt, Artificial Sequence
  Synthetic
caggguucuguguuucugaac

SEQ ID NO: 17489 - RNA, 22 nt, Artificial Sequence
  Synthetic
gcaggguucuguguuucugaac

SEQ ID NO: 17490 - RNA, 23 nt, Artificial Sequence
  Synthetic
agcaggguucuguguuucugaac

SEQ ID NO: 17491 - RNA, 24 nt, Artificial Sequence
  Synthetic
gagcaggguucuguguuucugaac

SEQ ID NO: 17492 - RNA, 18 nt, Artificial Sequence
  Synthetic
aaacacaccgccuguaac

SEQ ID NO: 17493 - RNA, 19 nt, Artificial Sequence
  Synthetic
gaaacacaccgccuguaac

SEQ ID NO: 17494 - RNA, 20 nt, Artificial Sequence
  Synthetic
agaaacacaccgccuguaac

SEQ ID NO: 17495 - RNA, 21 nt, Artificial Sequence
  Synthetic
aagaaacacaccgccuguaac

SEQ ID NO: 17496 - RNA, 22 nt, Artificial Sequence
  Synthetic
caagaaacacaccgccuguaac

SEQ ID NO: 17497 - RNA, 23 nt, Artificial Sequence
  Synthetic
acaagaaacacaccgccuguaac

SEQ ID NO: 17498 - RNA, 24 nt, Artificial Sequence
  Synthetic
aacaagaaacacaccgccuguaac

SEQ ID NO: 17499 - RNA, 18 nt, Artificial Sequence
  Synthetic
acacaccgccuguaacac

SEQ ID NO: 17500 - RNA, 19 nt, Artificial Sequence
  Synthetic
aacacaccgccuguaacac

SEQ ID NO: 17501 - RNA, 20 nt, Artificial Sequence
  Synthetic
aaacacaccgccuguaacac

SEQ ID NO: 17502 - RNA, 21 nt, Artificial Sequence
  Synthetic
gaaacacaccgccuguaacac

SEQ ID NO: 17503 - RNA, 22 nt, Artificial Sequence
  Synthetic
agaaacacaccgccuguaacac

SEQ ID NO: 17504 - RNA, 23 nt, Artificial Sequence
  Synthetic
aagaaacacaccgccuguaacac

SEQ ID NO: 17505 - RNA, 24 nt, Artificial Sequence
  Synthetic
caagaaacacaccgccuguaacac

SEQ ID NO: 17506 - RNA, 18 nt, Artificial Sequence
  Synthetic
ccuggaaguagaggacac

SEQ ID NO: 17507 - RNA, 19 nt, Artificial Sequence
  Synthetic
uccuggaaguagaggacac

SEQ ID NO: 17508 - RNA, 20 nt, Artificial Sequence
  Synthetic
auccuggaaguagaggacac

SEQ ID NO: 17509 - RNA, 21 nt, Artificial Sequence
  Synthetic
gauccuggaaguagaggacac

SEQ ID NO: 17510 - RNA, 22 nt, Artificial Sequence
  Synthetic
agauccuggaaguagaggacac

SEQ ID NO: 17511 - RNA, 23 nt, Artificial Sequence
  Synthetic
uagauccuggaaguagaggacac

SEQ ID NO: 17512 - RNA, 24 nt, Artificial Sequence
  Synthetic
guagauccuggaaguagaggacac

SEQ ID NO: 17513 - RNA, 18 nt, Artificial Sequence
  Synthetic
agagccccaagcgaccac

SEQ ID NO: 17514 - RNA, 19 nt, Artificial Sequence
  Synthetic
cagagccccaagcgaccac

SEQ ID NO: 17515 - RNA, 20 nt, Artificial Sequence
  Synthetic
gcagagccccaagcgaccac

SEQ ID NO: 17516 - RNA, 21 nt, Artificial Sequence
  Synthetic
ggcagagccccaagcgaccac

SEQ ID NO: 17517 - RNA, 22 nt, Artificial Sequence
  Synthetic
cggcagagccccaagcgaccac

SEQ ID NO: 17518 - RNA, 23 nt, Artificial Sequence
  Synthetic
gcggcagagccccaagcgaccac

SEQ ID NO: 17519 - RNA, 24 nt, Artificial Sequence
  Synthetic
ggcggcagagccccaagcgaccac

SEQ ID NO: 17520 - RNA, 18 nt, Artificial Sequence
  Synthetic
aggugaagcgaagugcac

SEQ ID NO: 17521 - RNA, 19 nt, Artificial Sequence
  Synthetic
gaggugaagcgaagugcac

SEQ ID NO: 17522 - RNA, 20 nt, Artificial Sequence
  Synthetic
agaggugaagcgaagugcac

SEQ ID NO: 17523 - RNA, 21 nt, Artificial Sequence
  Synthetic
cagaggugaagcgaagugcac

SEQ ID NO: 17524 - RNA, 22 nt, Artificial Sequence
  Synthetic
gcagaggugaagcgaagugcac

SEQ ID NO: 17525 - RNA, 23 nt, Artificial Sequence
  Synthetic
ugcagaggugaagcgaagugcac

SEQ ID NO: 17526 - RNA, 24 nt, Artificial Sequence
  Synthetic
gugcagaggugaagcgaagugcac

SEQ ID NO: 17527 - RNA, 18 nt, Artificial Sequence
  Synthetic
aucaaugggucuauucac

SEQ ID NO: 17528 - RNA, 19 nt, Artificial Sequence
  Synthetic
aaucaaugggucuauucac

SEQ ID NO: 17529 - RNA, 20 nt, Artificial Sequence
  Synthetic
caaucaaugggucuauucac

SEQ ID NO: 17530 - RNA, 21 nt, Artificial Sequence
  Synthetic
ccaaucaaugggucuauucac

SEQ ID NO: 17531 - RNA, 22 nt, Artificial Sequence
  Synthetic
uccaaucaaugggucuauucac

SEQ ID NO: 17532 - RNA, 23 nt, Artificial Sequence
  Synthetic
uuccaaucaaugggucuauucac

SEQ ID NO: 17533 - RNA, 24 nt, Artificial Sequence
  Synthetic
cuuccaaucaaugggucuauucac

SEQ ID NO: 17534 - RNA, 18 nt, Artificial Sequence
  Synthetic
aguaggucccggacagac

SEQ ID NO: 17535 - RNA, 19 nt, Artificial Sequence
  Synthetic
gaguaggucccggacagac

SEQ ID NO: 17536 - RNA, 20 nt, Artificial Sequence
  Synthetic
cgaguaggucccggacagac

SEQ ID NO: 17537 - RNA, 21 nt, Artificial Sequence
  Synthetic
ucgaguaggucccggacagac

SEQ ID NO: 17538 - RNA, 22 nt, Artificial Sequence
  Synthetic
gucgaguaggucccggacagac

SEQ ID NO: 17539 - RNA, 23 nt, Artificial Sequence
  Synthetic
ugucgaguaggucccggacagac

SEQ ID NO: 17540 - RNA, 24 nt, Artificial Sequence
  Synthetic
gugucgaguaggucccggacagac

SEQ ID NO: 17541 - RNA, 18 nt, Artificial Sequence
  Synthetic
caggacaaguuggaggac

SEQ ID NO: 17542 - RNA, 19 nt, Artificial Sequence
  Synthetic
ccaggacaaguuggaggac

SEQ ID NO: 17543 - RNA, 20 nt, Artificial Sequence
  Synthetic
gccaggacaaguuggaggac

SEQ ID NO: 17544 - RNA, 21 nt, Artificial Sequence
  Synthetic
agccaggacaaguuggaggac

SEQ ID NO: 17545 - RNA, 22 nt, Artificial Sequence
  Synthetic
uagccaggacaaguuggaggac

SEQ ID NO: 17546 - RNA, 23 nt, Artificial Sequence
  Synthetic
auagccaggacaaguuggaggac

SEQ ID NO: 17547 - RNA, 24 nt, Artificial Sequence
  Synthetic
gauagccaggacaaguuggaggac

SEQ ID NO: 17548 - RNA, 18 nt, Artificial Sequence
  Synthetic
aggcuugaacagugggac

SEQ ID NO: 17549 - RNA, 19 nt, Artificial Sequence
  Synthetic
gaggcuugaacagugggac

SEQ ID NO: 17550 - RNA, 20 nt, Artificial Sequence
  Synthetic
ggaggcuugaacagugggac

SEQ ID NO: 17551 - RNA, 21 nt, Artificial Sequence
  Synthetic
uggaggcuugaacagugggac

SEQ ID NO: 17552 - RNA, 22 nt, Artificial Sequence
  Synthetic
uuggaggcuugaacagugggac

SEQ ID NO: 17553 - RNA, 23 nt, Artificial Sequence
  Synthetic
cuuggaggcuugaacagugggac

SEQ ID NO: 17554 - RNA, 24 nt, Artificial Sequence
  Synthetic
gcuuggaggcuugaacagugggac

SEQ ID NO: 17555 - RNA, 18 nt, Artificial Sequence
  Synthetic
ucaauccaggucguugac

SEQ ID NO: 17556 - RNA, 19 nt, Artificial Sequence
  Synthetic
cucaauccaggucguugac

SEQ ID NO: 17557 - RNA, 20 nt, Artificial Sequence
  Synthetic
ccucaauccaggucguugac

SEQ ID NO: 17558 - RNA, 21 nt, Artificial Sequence
  Synthetic
uccucaauccaggucguugac

SEQ ID NO: 17559 - RNA, 22 nt, Artificial Sequence
  Synthetic
uuccucaauccaggucguugac

SEQ ID NO: 17560 - RNA, 23 nt, Artificial Sequence
  Synthetic
auuccucaauccaggucguugac

SEQ ID NO: 17561 - RNA, 24 nt, Artificial Sequence
  Synthetic
uauuccucaauccaggucguugac

SEQ ID NO: 17562 - RNA, 18 nt, Artificial Sequence
  Synthetic
gcgguaauacaggcauac

SEQ ID NO: 17563 - RNA, 19 nt, Artificial Sequence
  Synthetic
agcgguaauacaggcauac

SEQ ID NO: 17564 - RNA, 20 nt, Artificial Sequence
  Synthetic
uagcgguaauacaggcauac

SEQ ID NO: 17565 - RNA, 21 nt, Artificial Sequence
  Synthetic
uuagcgguaauacaggcauac

SEQ ID NO: 17566 - RNA, 22 nt, Artificial Sequence
  Synthetic
cuuagcgguaauacaggcauac

SEQ ID NO: 17567 - RNA, 23 nt, Artificial Sequence
  Synthetic
gcuuagcgguaauacaggcauac

SEQ ID NO: 17568 - RNA, 24 nt, Artificial Sequence
  Synthetic
ugcuuagcgguaauacaggcauac

SEQ ID NO: 17569 - RNA, 18 nt, Artificial Sequence
  Synthetic
cgugugggggugugaacc

SEQ ID NO: 17570 - RNA, 19 nt, Artificial Sequence
  Synthetic
ccgugugggggugugaacc

SEQ ID NO: 17571 - RNA, 20 nt, Artificial Sequence
  Synthetic
accgugugggggugugaacc

SEQ ID NO: 17572 - RNA, 21 nt, Artificial Sequence
  Synthetic
caccgugugggggugugaacc

SEQ ID NO: 17573 - RNA, 22 nt, Artificial Sequence
  Synthetic
ccaccgugugggggugugaacc

SEQ ID NO: 17574 - RNA, 23 nt, Artificial Sequence
  Synthetic
gccaccgugugggggugugaacc

SEQ ID NO: 17575 - RNA, 24 nt, Artificial Sequence
  Synthetic
ggccaccgugugggggugugaacc

SEQ ID NO: 17576 - RNA, 18 nt, Artificial Sequence
  Synthetic
ucuaaauuauugcccacc

SEQ ID NO: 17577 - RNA, 19 nt, Artificial Sequence
  Synthetic
cucuaaauuauugcccacc

SEQ ID NO: 17578 - RNA, 20 nt, Artificial Sequence
  Synthetic
ccucuaaauuauugcccacc

SEQ ID NO: 17579 - RNA, 21 nt, Artificial Sequence
  Synthetic
uccucuaaauuauugcccacc

SEQ ID NO: 17580 - RNA, 22 nt, Artificial Sequence
  Synthetic
auccucuaaauuauugcccacc

SEQ ID NO: 17581 - RNA, 23 nt, Artificial Sequence
  Synthetic
gauccucuaaauuauugcccacc

SEQ ID NO: 17582 - RNA, 24 nt, Artificial Sequence
  Synthetic
ggauccucuaaauuauugcccacc

SEQ ID NO: 17583 - RNA, 18 nt, Artificial Sequence
  Synthetic
gcagagccccaagcgacc

SEQ ID NO: 17584 - RNA, 19 nt, Artificial Sequence
  Synthetic
ggcagagccccaagcgacc

SEQ ID NO: 17585 - RNA, 20 nt, Artificial Sequence
  Synthetic
cggcagagccccaagcgacc

SEQ ID NO: 17586 - RNA, 21 nt, Artificial Sequence
  Synthetic
gcggcagagccccaagcgacc

SEQ ID NO: 17587 - RNA, 22 nt, Artificial Sequence
  Synthetic
ggcggcagagccccaagcgacc

SEQ ID NO: 17588 - RNA, 23 nt, Artificial Sequence
  Synthetic
gggcggcagagccccaagcgacc

SEQ ID NO: 17589 - RNA, 24 nt, Artificial Sequence
  Synthetic
  misc_feature (1)..(1): n is a, c, g, or u
ngggcggcagagccccaagcgacc

SEQ ID NO: 17590 - RNA, 18 nt, Artificial Sequence
  Synthetic
cuaaauuauugcccaccc

SEQ ID NO: 17591 - RNA, 19 nt, Artificial Sequence
  Synthetic
ucuaaauuauugcccaccc

SEQ ID NO: 17592 - RNA, 20 nt, Artificial Sequence
  Synthetic
cucuaaauuauugcccaccc

SEQ ID NO: 17593 - RNA, 21 nt, Artificial Sequence
  Synthetic
ccucuaaauuauugcccaccc

SEQ ID NO: 17594 - RNA, 22 nt, Artificial Sequence
  Synthetic
uccucuaaauuauugcccaccc

SEQ ID NO: 17595 - RNA, 23 nt, Artificial Sequence
  Synthetic
auccucuaaauuauugcccaccc

SEQ ID NO: 17596 - RNA, 24 nt, Artificial Sequence
  Synthetic
gauccucuaaauuauugcccaccc

SEQ ID NO: 17597 - RNA, 18 nt, Artificial Sequence
  Synthetic
ugccugagggcuccaccc

SEQ ID NO: 17598 - RNA, 19 nt, Artificial Sequence
  Synthetic
gugccugagggcuccaccc

SEQ ID NO: 17599 - RNA, 20 nt, Artificial Sequence
  Synthetic
ugugccugagggcuccaccc

SEQ ID NO: 17600 - RNA, 21 nt, Artificial Sequence
  Synthetic
cugugccugagggcuccaccc

SEQ ID NO: 17601 - RNA, 22 nt, Artificial Sequence
  Synthetic
ccugugccugagggcuccaccc

SEQ ID NO: 17602 - RNA, 23 nt, Artificial Sequence
  Synthetic
cccugugccugagggcuccaccc

SEQ ID NO: 17603 - RNA, 24 nt, Artificial Sequence
  Synthetic
gcccugugccugagggcuccaccc

SEQ ID NO: 17604 - RNA, 18 nt, Artificial Sequence
  Synthetic
acacccgggugguacccc

SEQ ID NO: 17605 - RNA, 19 nt, Artificial Sequence
  Synthetic
gacacccgggugguacccc

SEQ ID NO: 17606 - RNA, 20 nt, Artificial Sequence
  Synthetic
ggacacccgggugguacccc

SEQ ID NO: 17607 - RNA, 21 nt, Artificial Sequence
  Synthetic
aggacacccgggugguacccc

SEQ ID NO: 17608 - RNA, 22 nt, Artificial Sequence
  Synthetic
caggacacccgggugguacccc

SEQ ID NO: 17609 - RNA, 23 nt, Artificial Sequence
  Synthetic
ccaggacacccgggugguacccc

SEQ ID NO: 17610 - RNA, 24 nt, Artificial Sequence
  Synthetic
gccaggacacccgggugguacccc

SEQ ID NO: 17611 - RNA, 18 nt, Artificial Sequence
  Synthetic
  misc_feature (8)..(8): n is a, c, g, or u
cagcacanccuagcagcc

SEQ ID NO: 17612 - RNA, 19 nt, Artificial Sequence
  Synthetic
  misc_feature (9)..(9): n is a, c, g, or u
gcagcacanccuagcagcc

SEQ ID NO: 17613 - RNA, 20 nt, Artificial Sequence
  Synthetic
  misc_feature (10)..(10): n is a, c, g, or u
ggcagcacanccuagcagcc

SEQ ID NO: 17614 - RNA, 21 nt, Artificial Sequence
  Synthetic
  misc_feature (11)..(11): n is a, c, g, or u
uggcagcacanccuagcagcc

SEQ ID NO: 17615 - RNA, 22 nt, Artificial Sequence
  Synthetic
  misc_feature (12)..(12): n is a, c, g, or u
uuggcagcacanccuagcagcc

SEQ ID NO: 17616 - RNA, 23 nt, Artificial Sequence
  Synthetic
  misc_feature (13)..(13): n is a, c, g, or u
guuggcagcacanccuagcagcc

SEQ ID NO: 17617 - RNA, 24 nt, Artificial Sequence
  Synthetic
  misc_feature (14)..(14): n is a, c, g, or u
aguuggcagcacanccuagcagcc

SEQ ID NO: 17618 - RNA, 18 nt, Artificial Sequence
  Synthetic
gcacuaguaaacugagcc

SEQ ID NO: 17619 - RNA, 19 nt, Artificial Sequence
  Synthetic
ugcacuaguaaacugagcc

SEQ ID NO: 17620 - RNA, 20 nt, Artificial Sequence
  Synthetic
uugcacuaguaaacugagcc

SEQ ID NO: 17621 - RNA, 21 nt, Artificial Sequence
  Synthetic
auugcacuaguaaacugagcc

SEQ ID NO: 17622 - RNA, 22 nt, Artificial Sequence
  Synthetic
aauugcacuaguaaacugagcc

SEQ ID NO: 17623 - RNA, 23 nt, Artificial Sequence
  Synthetic
aaauugcacuaguaaacugagcc

SEQ ID NO: 17624 - RNA, 24 nt, Artificial Sequence
  Synthetic
caaauugcacuaguaaacugagcc

SEQ ID NO: 17625 - RNA, 18 nt, Artificial Sequence
  Synthetic
guggucuggaaagaaucc

SEQ ID NO: 17626 - RNA, 19 nt, Artificial Sequence
  Synthetic
gguggucuggaaagaaucc

SEQ ID NO: 17627 - RNA, 20 nt, Artificial Sequence
  Synthetic
ugguggucuggaaagaaucc

SEQ ID NO: 17628 - RNA, 21 nt, Artificial Sequence
  Synthetic
cugguggucuggaaagaaucc

SEQ ID NO: 17629 - RNA, 22 nt, Artificial Sequence
  Synthetic
acugguggucuggaaagaaucc

SEQ ID NO: 17630 - RNA, 23 nt, Artificial Sequence
  Synthetic
aacugguggucuggaaagaaucc

SEQ ID NO: 17631 - RNA, 24 nt, Artificial Sequence
  Synthetic
caacugguggucuggaaagaaucc

SEQ ID NO: 17632 - RNA, 18 nt, Artificial Sequence
  Synthetic
gcuggugguuguagaucc

SEQ ID NO: 17633 - RNA, 19 nt, Artificial Sequence
  Synthetic
ugcuggugguuguagaucc

SEQ ID NO: 17634 - RNA, 20 nt, Artificial Sequence
  Synthetic
gugcuggugguuguagaucc

SEQ ID NO: 17635 - RNA, 21 nt, Artificial Sequence
  Synthetic
cgugcuggugguuguagaucc

SEQ ID NO: 17636 - RNA, 22 nt, Artificial Sequence
  Synthetic
ccgugcuggugguuguagaucc

SEQ ID NO: 17637 - RNA, 23 nt, Artificial Sequence
  Synthetic
cccgugcuggugguuguagaucc

SEQ ID NO: 17638 - RNA, 24 nt, Artificial Sequence
  Synthetic
ucccgugcuggugguuguagaucc

SEQ ID NO: 17639 - RNA, 18 nt, Artificial Sequence
  Synthetic
uucccaccuuaugagucc

SEQ ID NO: 17640 - RNA, 19 nt, Artificial Sequence
  Synthetic
uuucccaccuuaugagucc

SEQ ID NO: 17641 - RNA, 20 nt, Artificial Sequence
  Synthetic
guuucccaccuuaugagucc

SEQ ID NO: 17642 - RNA, 21 nt, Artificial Sequence
  Synthetic
aguuucccaccuuaugagucc

SEQ ID NO: 17643 - RNA, 22 nt, Artificial Sequence
  Synthetic
aaguuucccaccuuaugagucc

SEQ ID NO: 17644 - RNA, 23 nt, Artificial Sequence
  Synthetic
aaaguuucccaccuuaugagucc

SEQ ID NO: 17645 - RNA, 24 nt, Artificial Sequence
  Synthetic
uaaaguuucccaccuuaugagucc

SEQ ID NO: 17646 - RNA, 18 nt, Artificial Sequence
  Synthetic
uaacacgagaaggggucc

SEQ ID NO: 17647 - RNA, 19 nt, Artificial Sequence
  Synthetic
guaacacgagaaggggucc

SEQ ID NO: 17648 - RNA, 20 nt, Artificial Sequence
  Synthetic
uguaacacgagaaggggucc

SEQ ID NO: 17649 - RNA, 21 nt, Artificial Sequence
  Synthetic
cuguaacacgagaaggggucc

SEQ ID NO: 17650 - RNA, 22 nt, Artificial Sequence
  Synthetic
ccuguaacacgagaaggggucc

SEQ ID NO: 17651 - RNA, 23 nt, Artificial Sequence
  Synthetic
gccuguaacacgagaaggggucc

SEQ ID NO: 17652 - RNA, 24 nt, Artificial Sequence
  Synthetic
cgccuguaacacgagaaggggucc

SEQ ID NO: 17653 - RNA, 18 nt, Artificial Sequence
  Synthetic
  misc_feature (15)..(15): n is a, c, g, or u
agguuguuggcaagnucc

SEQ ID NO: 17654 - RNA, 19 nt, Artificial Sequence
  Synthetic
  misc_feature (16)..(16): n is a, c, g, or u
aagguuguuggcaagnucc

SEQ ID NO: 17655 - RNA, 20 nt, Artificial Sequence
  Synthetic
  misc_feature (17)..(17): n is a, c, g, or u
uaagguuguuggcaagnucc

SEQ ID NO: 17656 - RNA, 21 nt, Artificial Sequence
  Synthetic
  misc_feature (18)..(18): n is a, c, g, or u
guaagguuguuggcaagnucc

SEQ ID NO: 17657 - RNA, 22 nt, Artificial Sequence
  Synthetic
  misc_feature (19)..(19): n is a, c, g, or u
uguaagguuguuggcaagnucc

SEQ ID NO: 17658 - RNA, 23 nt, Artificial Sequence
  Synthetic
  misc_feature (20)..(20): n is a, c, g, or u
auguaagguuguuggcaagnucc

SEQ ID NO: 17659 - RNA, 24 nt, Artificial Sequence
  Synthetic
  misc_feature (21)..(21): n is a, c, g, or u
uauguaagguuguuggcaagnucc

SEQ ID NO: 17660 - RNA, 18 nt, Artificial Sequence
  Synthetic
ggaaggagguguacuucc

SEQ ID NO: 17661 - RNA, 19 nt, Artificial Sequence
  Synthetic
gggaaggagguguacuucc

SEQ ID NO: 17662 - RNA, 20 nt, Artificial Sequence
  Synthetic
ugggaaggagguguacuucc

SEQ ID NO: 17663 - RNA, 21 nt, Artificial Sequence
  Synthetic
augggaaggagguguacuucc

SEQ ID NO: 17664 - RNA, 22 nt, Artificial Sequence
  Synthetic
caugggaaggagguguacuucc

SEQ ID NO: 17665 - RNA, 23 nt, Artificial Sequence
  Synthetic
ccaugggaaggagguguacuucc

SEQ ID NO: 17666 - RNA, 24 nt, Artificial Sequence
  Synthetic
gccaugggaaggagguguacuucc

SEQ ID NO: 17667 - RNA, 18 nt, Artificial Sequence
  Synthetic
gggaaacauagagguucc

SEQ ID NO: 17668 - RNA, 19 nt, Artificial Sequence
  Synthetic
agggaaacauagagguucc

SEQ ID NO: 17669 - RNA, 20 nt, Artificial Sequence
  Synthetic
gagggaaacauagagguucc

SEQ ID NO: 17670 - RNA, 21 nt, Artificial Sequence
  Synthetic
ggagggaaacauagagguucc

SEQ ID NO: 17671 - RNA, 22 nt, Artificial Sequence
  Synthetic
aggagggaaacauagagguucc

SEQ ID NO: 17672 - RNA, 23 nt, Artificial Sequence
  Synthetic
caggagggaaacauagagguucc

SEQ ID NO: 17673 - RNA, 24 nt, Artificial Sequence
  Synthetic
gcaggagggaaacauagagguucc

SEQ ID NO: 17674 - RNA, 18 nt, Artificial Sequence
  Synthetic
ugcuguagcucuuguucc

SEQ ID NO: 17675 - RNA, 19 nt, Artificial Sequence
  Synthetic
augcuguagcucuuguucc

SEQ ID NO: 17676 - RNA, 20 nt, Artificial Sequence
  Synthetic
caugcuguagcucuuguucc

SEQ ID NO: 17677 - RNA, 21 nt, Artificial Sequence
  Synthetic
ccaugcuguagcucuuguucc

SEQ ID NO: 17678 - RNA, 22 nt, Artificial Sequence
  Synthetic
cccaugcuguagcucuuguucc

SEQ ID NO: 17679 - RNA, 23 nt, Artificial Sequence
  Synthetic
ucccaugcuguagcucuuguucc

SEQ ID NO: 17680 - RNA, 24 nt, Artificial Sequence
  Synthetic
cucccaugcuguagcucuuguucc

SEQ ID NO: 17681 - RNA, 18 nt, Artificial Sequence
  Synthetic
auacuaacauugggaagc

SEQ ID NO: 17682 - RNA, 19 nt, Artificial Sequence
  Synthetic
aauacuaacauugggaagc

SEQ ID NO: 17683 - RNA, 20 nt, Artificial Sequence
  Synthetic
gaauacuaacauugggaagc

SEQ ID NO: 17684 - RNA, 21 nt, Artificial Sequence
  Synthetic
ggaauacuaacauugggaagc

SEQ ID NO: 17685 - RNA, 22 nt, Artificial Sequence
  Synthetic
aggaauacuaacauugggaagc

SEQ ID NO: 17686 - RNA, 23 nt, Artificial Sequence
  Synthetic
aaggaauacuaacauugggaagc

SEQ ID NO: 17687 - RNA, 24 nt, Artificial Sequence
  Synthetic
caaggaauacuaacauugggaagc

SEQ ID NO: 17688 - RNA, 18 nt, Artificial Sequence
  Synthetic
ccuccgauugguggaagc

SEQ ID NO: 17689 - RNA, 19 nt, Artificial Sequence
  Synthetic
accuccgauugguggaagc

SEQ ID NO: 17690 - RNA, 20 nt, Artificial Sequence
  Synthetic
gaccuccgauugguggaagc

SEQ ID NO: 17691 - RNA, 21 nt, Artificial Sequence
  Synthetic
ugaccuccgauugguggaagc

SEQ ID NO: 17692 - RNA, 22 nt, Artificial Sequence
  Synthetic
cugaccuccgauugguggaagc

SEQ ID NO: 17693 - RNA, 23 nt, Artificial Sequence
  Synthetic
ccugaccuccgauugguggaagc

SEQ ID NO: 17694 - RNA, 24 nt, Artificial Sequence
  Synthetic
uccugaccuccgauugguggaagc

SEQ ID NO: 17695 - RNA, 18 nt, Artificial Sequence
  Synthetic
agccacccaaggcacagc

SEQ ID NO: 17696 - RNA, 19 nt, Artificial Sequence
  Synthetic
aagccacccaaggcacagc

SEQ ID NO: 17697 - RNA, 20 nt, Artificial Sequence
  Synthetic
aaagccacccaaggcacagc

SEQ ID NO: 17698 - RNA, 21 nt, Artificial Sequence
  Synthetic
caaagccacccaaggcacagc

SEQ ID NO: 17699 - RNA, 22 nt, Artificial Sequence
  Synthetic
ccaaagccacccaaggcacagc

SEQ ID NO: 17700 - RNA, 23 nt, Artificial Sequence
  Synthetic
cccaaagccacccaaggcacagc

SEQ ID NO: 17701 - RNA, 24 nt, Artificial Sequence
  Synthetic
ccccaaagccacccaaggcacagc

SEQ ID NO: 17702 - RNA, 18 nt, Artificial Sequence
  Synthetic
ugaacuggagccaccagc

SEQ ID NO: 17703 - RNA, 19 nt, Artificial Sequence
  Synthetic
cugaacuggagccaccagc

SEQ ID NO: 17704 - RNA, 20 nt, Artificial Sequence
  Synthetic
ucugaacuggagccaccagc

SEQ ID NO: 17705 - RNA, 21 nt, Artificial Sequence
  Synthetic
uucugaacuggagccaccagc

SEQ ID NO: 17706 - RNA, 22 nt, Artificial Sequence
  Synthetic
uuucugaacuggagccaccagc

SEQ ID NO: 17707 - RNA, 23 nt, Artificial Sequence
  Synthetic
guuucugaacuggagccaccagc

SEQ ID NO: 17708 - RNA, 24 nt, Artificial Sequence
  Synthetic
uguuucugaacuggagccaccagc

SEQ ID NO: 17709 - RNA, 18 nt, Artificial Sequence
  Synthetic
aagguuugguacagcagc

SEQ ID NO: 17710 - RNA, 19 nt, Artificial Sequence
  Synthetic
gaagguuugguacagcagc

SEQ ID NO: 17711 - RNA, 20 nt, Artificial Sequence
  Synthetic
cgaagguuugguacagcagc

SEQ ID NO: 17712 - RNA, 21 nt, Artificial Sequence
  Synthetic
ccgaagguuugguacagcagc

SEQ ID NO: 17713 - RNA, 22 nt, Artificial Sequence
  Synthetic
uccgaagguuugguacagcagc

SEQ ID NO: 17714 - RNA, 23 nt, Artificial Sequence
  Synthetic
guccgaagguuugguacagcagc

SEQ ID NO: 17715 - RNA, 24 nt, Artificial Sequence
  Synthetic
cguccgaagguuugguacagcagc

SEQ ID NO: 17716 - RNA, 18 nt, Artificial Sequence
  Synthetic
gacacauccaacgauagc

SEQ ID NO: 17717 - RNA, 19 nt, Artificial Sequence
  Synthetic
agacacauccaacgauagc

SEQ ID NO: 17718 - RNA, 20 nt, Artificial Sequence
  Synthetic
cagacacauccaacgauagc

SEQ ID NO: 17719 - RNA, 21 nt, Artificial Sequence
  Synthetic
gcagacacauccaacgauagc

SEQ ID NO: 17720 - RNA, 22 nt, Artificial Sequence
  Synthetic
cgcagacacauccaacgauagc

SEQ ID NO: 17721 - RNA, 23 nt, Artificial Sequence
  Synthetic
ccgcagacacauccaacgauagc

SEQ ID NO: 17722 - RNA, 24 nt, Artificial Sequence
  Synthetic
gccgcagacacauccaacgauagc

SEQ ID NO: 17723 - RNA, 18 nt, Artificial Sequence
  Synthetic
cucuuccaaauguaaggc

SEQ ID NO: 17724 - RNA, 19 nt, Artificial Sequence
  Synthetic
ucucuuccaaauguaaggc

SEQ ID NO: 17725 - RNA, 20 nt, Artificial Sequence
  Synthetic
uucucuuccaaauguaaggc

SEQ ID NO: 17726 - RNA, 21 nt, Artificial Sequence
  Synthetic
uuucucuuccaaauguaaggc

SEQ ID NO: 17727 - RNA, 22 nt, Artificial Sequence
  Synthetic
guuucucuuccaaauguaaggc

SEQ ID NO: 17728 - RNA, 23 nt, Artificial Sequence
  Synthetic
aguuucucuuccaaauguaaggc

SEQ ID NO: 17729 - RNA, 24 nt, Artificial Sequence
  Synthetic
caguuucucuuccaaauguaaggc

SEQ ID NO: 17730 - RNA, 18 nt, Artificial Sequence
  Synthetic
agaugagaaggcacaggc

SEQ ID NO: 17731 - RNA, 19 nt, Artificial Sequence
  Synthetic
cagaugagaaggcacaggc

SEQ ID NO: 17732 - RNA, 20 nt, Artificial Sequence
  Synthetic
gcagaugagaaggcacaggc

SEQ ID NO: 17733 - RNA, 21 nt, Artificial Sequence
  Synthetic
ggcagaugagaaggcacaggc

SEQ ID NO: 17734 - RNA, 22 nt, Artificial Sequence
  Synthetic
cggcagaugagaaggcacaggc

SEQ ID NO: 17735 - RNA, 23 nt, Artificial Sequence
  Synthetic
ccggcagaugagaaggcacaggc

SEQ ID NO: 17736 - RNA, 24 nt, Artificial Sequence
  Synthetic
gccggcagaugagaaggcacaggc

SEQ ID NO: 17737 - RNA, 18 nt, Artificial Sequence
  Synthetic
gaucuucgucugcgaggc

SEQ ID NO: 17738 - RNA, 19 nt, Artificial Sequence
  Synthetic
agaucuucgucugcgaggc

SEQ ID NO: 17739 - RNA, 20 nt, Artificial Sequence
  Synthetic
gagaucuucgucugcgaggc

SEQ ID NO: 17740 - RNA, 21 nt, Artificial Sequence
  Synthetic
ugagaucuucgucugcgaggc

SEQ ID NO: 17741 - RNA, 22 nt, Artificial Sequence
  Synthetic
uugagaucuucgucugcgaggc

SEQ ID NO: 17742 - RNA, 23 nt, Artificial Sequence
  Synthetic
auugagaucuucgucugcgaggc

SEQ ID NO: 17743 - RNA, 24 nt, Artificial Sequence
  Synthetic
gauugagaucuucgucugcgaggc

SEQ ID NO: 17744 - RNA, 18 nt, Artificial Sequence
  Synthetic
aaggcacagcuuggaggc

SEQ ID NO: 17745 - RNA, 19 nt, Artificial Sequence
  Synthetic
caaggcacagcuuggaggc

SEQ ID NO: 17746 - RNA, 20 nt, Artificial Sequence
  Synthetic
ccaaggcacagcuuggaggc

SEQ ID NO: 17747 - RNA, 21 nt, Artificial Sequence
  Synthetic
cccaaggcacagcuuggaggc

SEQ ID NO: 17748 - RNA, 22 nt, Artificial Sequence
  Synthetic
acccaaggcacagcuuggaggc

SEQ ID NO: 17749 - RNA, 23 nt, Artificial Sequence
  Synthetic
cacccaaggcacagcuuggaggc

SEQ ID NO: 17750 - RNA, 24 nt, Artificial Sequence
  Synthetic
ccacccaaggcacagcuuggaggc

SEQ ID NO: 17751 - RNA, 18 nt, Artificial Sequence
  Synthetic
gugcgacccgucgucggc

SEQ ID NO: 17752 - RNA, 19 nt, Artificial Sequence
  Synthetic
ggugcgacccgucgucggc

SEQ ID NO: 17753 - RNA, 20 nt, Artificial Sequence
  Synthetic
aggugcgacccgucgucggc

SEQ ID NO: 17754 - RNA, 21 nt, Artificial Sequence
  Synthetic
gaggugcgacccgucgucggc

SEQ ID NO: 17755 - RNA, 22 nt, Artificial Sequence
  Synthetic
agaggugcgacccgucgucggc

SEQ ID NO: 17756 - RNA, 23 nt, Artificial Sequence
  Synthetic
gagaggugcgacccgucgucggc

SEQ ID NO: 17757 - RNA, 24 nt, Artificial Sequence
  Synthetic
agagaggugcgacccgucgucggc

SEQ ID NO: 17758 - RNA, 18 nt, Artificial Sequence
  Synthetic
auacaggcauacaagggc

SEQ ID NO: 17759 - RNA, 19 nt, Artificial Sequence
  Synthetic
aauacaggcauacaagggc

SEQ ID NO: 17760 - RNA, 20 nt, Artificial Sequence
  Synthetic
uaauacaggcauacaagggc

SEQ ID NO: 17761 - RNA, 21 nt, Artificial Sequence
  Synthetic
guaauacaggcauacaagggc

SEQ ID NO: 17762 - RNA, 22 nt, Artificial Sequence
  Synthetic
gguaauacaggcauacaagggc

SEQ ID NO: 17763 - RNA, 23 nt, Artificial Sequence
  Synthetic
cgguaauacaggcauacaagggc

SEQ ID NO: 17764 - RNA, 24 nt, Artificial Sequence
  Synthetic
gcgguaauacaggcauacaagggc

SEQ ID NO: 17765 - RNA, 18 nt, Artificial Sequence
  Synthetic
aaggccuuguaaguuggc

SEQ ID NO: 17766 - RNA, 19 nt, Artificial Sequence
  Synthetic
aaaggccuuguaaguuggc

SEQ ID NO: 17767 - RNA, 20 nt, Artificial Sequence
  Synthetic
gaaaggccuuguaaguuggc

SEQ ID NO: 17768 - RNA, 21 nt, Artificial Sequence
  Synthetic
agaaaggccuuguaaguuggc

SEQ ID NO: 17769 - RNA, 22 nt, Artificial Sequence
  Synthetic
gagaaaggccuuguaaguuggc

SEQ ID NO: 17770 - RNA, 23 nt, Artificial Sequence
  Synthetic
agagaaaggccuuguaaguuggc

SEQ ID NO: 17771 - RNA, 24 nt, Artificial Sequence
  Synthetic
cagagaaaggccuuguaaguuggc

SEQ ID NO: 17772 - RNA, 18 nt, Artificial Sequence
  Synthetic
gggacugcgaauuuuggc

SEQ ID NO: 17773 - RNA, 19 nt, Artificial Sequence
  Synthetic
ggggacugcgaauuuuggc

SEQ ID NO: 17774 - RNA, 20 nt, Artificial Sequence
  Synthetic
uggggacugcgaauuuuggc

SEQ ID NO: 17775 - RNA, 21 nt, Artificial Sequence
  Synthetic
uuggggacugcgaauuuuggc

SEQ ID NO: 17776 - RNA, 22 nt, Artificial Sequence
  Synthetic
auuggggacugcgaauuuuggc

SEQ ID NO: 17777 - RNA, 23 nt, Artificial Sequence
  Synthetic
gauuggggacugcgaauuuuggc

SEQ ID NO: 17778 - RNA, 24 nt, Artificial Sequence
  Synthetic
agauuggggacugcgaauuuuggc

SEQ ID NO: 17779 - RNA, 18 nt, Artificial Sequence
  Synthetic
  misc_feature (16)..(16): n is a, c, g, or u
gcgagcgaaacaagcngc

SEQ ID NO: 17780 - RNA, 19 nt, Artificial Sequence
  Synthetic
  misc_feature (17)..(17): n is a, c, g, or u
ugcgagcgaaacaagcngc

SEQ ID NO: 17781 - RNA, 20 nt, Artificial Sequence
  Synthetic
  misc_feature (18)..(18): n is a, c, g, or u
cugcgagcgaaacaagcngc

SEQ ID NO: 17782 - RNA, 21 nt, Artificial Sequence
  Synthetic
  misc_feature (19)..(19): n is a, c, g, or u
gcugcgagcgaaacaagcngc

SEQ ID NO: 17783 - RNA, 22 nt, Artificial Sequence
  Synthetic
  misc_feature (1)..(1): n is a, c, g, or u
  misc_feature (20)..(20): n is a, c, g, or u
ngcugcgagcgaaacaagcngc

SEQ ID NO: 17784 - RNA, 23 nt, Artificial Sequence
  Synthetic
  misc_feature (2)..(2): n is a, c, g, or u
  misc_feature (21)..(21): n is a, c, g, or u
cngcugcgagcgaaacaagcngc

SEQ ID NO: 17785 - RNA, 24 nt, Artificial Sequence
  Synthetic
  misc_feature (3)..(3): n is a, c, g, or u
  misc_feature (22)..(22): n is a, c, g, or u
ccngcugcgagcgaaacaagcngc

SEQ ID NO: 17786 - RNA, 18 nt, Artificial Sequence
  Synthetic
  misc_feature (4)..(4): n is a, c, g, or u
ugunagaaugcccugugc

SEQ ID NO: 17787 - RNA, 19 nt, Artificial Sequence
  Synthetic
  misc_feature (5)..(5): n is a, c, g, or u
uugunagaaugcccugugc

SEQ ID NO: 17788 - RNA, 20 nt, Artificial Sequence
  Synthetic
  misc_feature (6)..(6): n is a, c, g, or u
guugunagaaugcccugugc

SEQ ID NO: 17789 - RNA, 21 nt, Artificial Sequence
  Synthetic
  misc_feature (7)..(7): n is a, c, g, or u
gguugunagaaugcccugugc

SEQ ID NO: 17790 - RNA, 22 nt, Artificial Sequence
  Synthetic
  misc_feature (8)..(8): n is a, c, g, or u
agguugunagaaugcccugugc

SEQ ID NO: 17791 - RNA, 23 nt, Artificial Sequence
  Synthetic
  misc_feature (9)..(9): n is a, c, g, or u
gagguugunagaaugcccugugc

SEQ ID NO: 17792 - RNA, 24 nt, Artificial Sequence
  Synthetic
  misc_feature (10)..(10): n is a, c, g, or u
cgagguugunagaaugcccugugc

SEQ ID NO: 17793 - RNA, 18 nt, Artificial Sequence
  Synthetic
cagcacaaaauagcuugc

SEQ ID NO: 17794 - RNA, 19 nt, Artificial Sequence
  Synthetic
ccagcacaaaauagcuugc

SEQ ID NO: 17795 - RNA, 20 nt, Artificial Sequence
  Synthetic
cccagcacaaaauagcuugc

SEQ ID NO: 17796 - RNA, 21 nt, Artificial Sequence
  Synthetic
ccccagcacaaaauagcuugc

SEQ ID NO: 17797 - RNA, 22 nt, Artificial Sequence
  Synthetic
accccagcacaaaauagcuugc

SEQ ID NO: 17798 - RNA, 23 nt, Artificial Sequence
  Synthetic
caccccagcacaaaauagcuugc

SEQ ID NO: 17799 - RNA, 24 nt, Artificial Sequence
  Synthetic
ucaccccagcacaaaauagcuugc

SEQ ID NO: 17800 - RNA, 18 nt, Artificial Sequence
  Synthetic
ugcuggugguuguagauc

SEQ ID NO: 17801 - RNA, 19 nt, Artificial Sequence
  Synthetic
gugcuggugguuguagauc

SEQ ID NO: 17802 - RNA, 20 nt, Artificial Sequence
  Synthetic
cgugcuggugguuguagauc

SEQ ID NO: 17803 - RNA, 21 nt, Artificial Sequence
  Synthetic
ccgugcuggugguuguagauc

SEQ ID NO: 17804 - RNA, 22 nt, Artificial Sequence
  Synthetic
cccgugcuggugguuguagauc

SEQ ID NO: 17805 - RNA, 23 nt, Artificial Sequence
  Synthetic
ucccgugcuggugguuguagauc

SEQ ID NO: 17806 - RNA, 24 nt, Artificial Sequence
  Synthetic
gucccgugcuggugguuguagauc

SEQ ID NO: 17807 - RNA, 18 nt, Artificial Sequence
  Synthetic
ucuaacaacaguagucuc

SEQ ID NO: 17808 - RNA, 19 nt, Artificial Sequence
  Synthetic
gucuaacaacaguagucuc

SEQ ID NO: 17809 - RNA, 20 nt, Artificial Sequence
  Synthetic
ugucuaacaacaguagucuc

SEQ ID NO: 17810 - RNA, 21 nt, Artificial Sequence
  Synthetic
uugucuaacaacaguagucuc

SEQ ID NO: 17811 - RNA, 22 nt, Artificial Sequence
  Synthetic
guugucuaacaacaguagucuc

SEQ ID NO: 17812 - RNA, 23 nt, Artificial Sequence
  Synthetic
cguugucuaacaacaguagucuc

SEQ ID NO: 17813 - RNA, 24 nt, Artificial Sequence
  Synthetic
ucguugucuaacaacaguagucuc

SEQ ID NO: 17814 - RNA, 18 nt, Artificial Sequence
  Synthetic
caacauaccuugauaguc

SEQ ID NO: 17815 - RNA, 19 nt, Artificial Sequence
  Synthetic
gcaacauaccuugauaguc

SEQ ID NO: 17816 - RNA, 20 nt, Artificial Sequence
  Synthetic
ggcaacauaccuugauaguc

SEQ ID NO: 17817 - RNA, 21 nt, Artificial Sequence
  Synthetic
gggcaacauaccuugauaguc

SEQ ID NO: 17818 - RNA, 22 nt, Artificial Sequence
  Synthetic
cgggcaacauaccuugauaguc

SEQ ID NO: 17819 - RNA, 23 nt, Artificial Sequence
  Synthetic
acgggcaacauaccuugauaguc

SEQ ID NO: 17820 - RNA, 24 nt, Artificial Sequence
  Synthetic
cacgggcaacauaccuugauaguc

SEQ ID NO: 17821 - RNA, 18 nt, Artificial Sequence
  Synthetic
agcggugucgaguagguc

SEQ ID NO: 17822 - RNA, 19 nt, Artificial Sequence
  Synthetic
aagcggugucgaguagguc

SEQ ID NO: 17823 - RNA, 20 nt, Artificial Sequence
  Synthetic
gaagcggugucgaguagguc

SEQ ID NO: 17824 - RNA, 21 nt, Artificial Sequence
  Synthetic
ugaagcggugucgaguagguc

SEQ ID NO: 17825 - RNA, 22 nt, Artificial Sequence
  Synthetic
cugaagcggugucgaguagguc

SEQ ID NO: 17826 - RNA, 23 nt, Artificial Sequence
  Synthetic
gcugaagcggugucgaguagguc

SEQ ID NO: 17827 - RNA, 24 nt, Artificial Sequence
  Synthetic
ggcugaagcggugucgaguagguc

SEQ ID NO: 17828 - RNA, 18 nt, Artificial Sequence
  Synthetic
uggauccaacuggugguc

SEQ ID NO: 17829 - RNA, 19 nt, Artificial Sequence
  Synthetic
guggauccaacuggugguc

SEQ ID NO: 17830 - RNA, 20 nt, Artificial Sequence
  Synthetic
aguggauccaacuggugguc

SEQ ID NO: 17831 - RNA, 21 nt, Artificial Sequence
  Synthetic
uaguggauccaacuggugguc

SEQ ID NO: 17832 - RNA, 22 nt, Artificial Sequence
  Synthetic
auaguggauccaacuggugguc

SEQ ID NO: 17833 - RNA, 23 nt, Artificial Sequence
  Synthetic
aauaguggauccaacuggugguc

SEQ ID NO: 17834 - RNA, 24 nt, Artificial Sequence
  Synthetic
gaauaguggauccaacuggugguc

SEQ ID NO: 17835 - RNA, 18 nt, Artificial Sequence
  Synthetic
uugaugcaagugaauguc

SEQ ID NO: 17836 - RNA, 19 nt, Artificial Sequence
  Synthetic
cuugaugcaagugaauguc

SEQ ID NO: 17837 - RNA, 20 nt, Artificial Sequence
  Synthetic
ucuugaugcaagugaauguc

SEQ ID NO: 17838 - RNA, 21 nt, Artificial Sequence
  Synthetic
aucuugaugcaagugaauguc

SEQ ID NO: 17839 - RNA, 22 nt, Artificial Sequence
  Synthetic
  misc_feature (1)..(1): n is a, c, g, or u
naucuugaugcaagugaauguc

SEQ ID NO: 17840 - RNA, 23 nt, Artificial Sequence
  Synthetic
  misc_feature (2)..(2): n is a, c, g, or u
anaucuugaugcaagugaauguc

SEQ ID NO: 17841 - RNA, 24 nt, Artificial Sequence
  Synthetic
  misc_feature (3)..(3): n is a, c, g, or u
canaucuugaugcaagugaauguc

SEQ ID NO: 17842 - RNA, 18 nt, Artificial Sequence
  Synthetic
caaucaaugggucuauuc

SEQ ID NO: 17843 - RNA, 19 nt, Artificial Sequence
  Synthetic
ccaaucaaugggucuauuc

SEQ ID NO: 17844 - RNA, 20 nt, Artificial Sequence
  Synthetic
uccaaucaaugggucuauuc

SEQ ID NO: 17845 - RNA, 21 nt, Artificial Sequence
  Synthetic
uuccaaucaaugggucuauuc

SEQ ID NO: 17846 - RNA, 22 nt, Artificial Sequence
  Synthetic
cuuccaaucaaugggucuauuc

SEQ ID NO: 17847 - RNA, 23 nt, Artificial Sequence
  Synthetic
ccuuccaaucaaugggucuauuc

SEQ ID NO: 17848 - RNA, 24 nt, Artificial Sequence
  Synthetic
accuuccaaucaaugggucuauuc

SEQ ID NO: 17849 - RNA, 18 nt, Artificial Sequence
  Synthetic
  misc_feature (1)..(1): n is a, c, g, or u
ncaggguccccagucuuc

SEQ ID NO: 17850 - RNA, 19 nt, Artificial Sequence
  Synthetic
  misc_feature (2)..(2): n is a, c, g, or u
ancaggguccccagucuuc

SEQ ID NO: 17851 - RNA, 20 nt, Artificial Sequence
  Synthetic
  misc_feature (3)..(3): n is a, c, g, or u
uancaggguccccagucuuc

SEQ ID NO: 17852 - RNA, 21 nt, Artificial Sequence
  Synthetic
  misc_feature (4)..(4): n is a, c, g, or u
auancaggguccccagucuuc

SEQ ID NO: 17853 - RNA, 22 nt, Artificial Sequence
  Synthetic
  misc_feature (5)..(5): n is a, c, g, or u
cauancaggguccccagucuuc

SEQ ID NO: 17854 - RNA, 23 nt, Artificial Sequence
  Synthetic
  misc_feature (6)..(6): n is a, c, g, or u
ucauancaggguccccagucuuc

SEQ ID NO: 17855 - RNA, 24 nt, Artificial Sequence
  Synthetic
  misc_feature (7)..(7): n is a, c, g, or u
uucauancaggguccccagucuuc

SEQ ID NO: 17856 - RNA, 18 nt, Artificial Sequence
  Synthetic
gcgagggaguucuucuuc

SEQ ID NO: 17857 - RNA, 19 nt, Artificial Sequence
  Synthetic
ggcgagggaguucuucuuc

SEQ ID NO: 17858 - RNA, 20 nt, Artificial Sequence
  Synthetic
aggcgagggaguucuucuuc

SEQ ID NO: 17859 - RNA, 21 nt, Artificial Sequence
  Synthetic
gaggcgagggaguucuucuuc

SEQ ID NO: 17860 - RNA, 22 nt, Artificial Sequence
  Synthetic
cgaggcgagggaguucuucuuc

SEQ ID NO: 17861 - RNA, 23 nt, Artificial Sequence
  Synthetic
gcgaggcgagggaguucuucuuc

SEQ ID NO: 17862 - RNA, 24 nt, Artificial Sequence
  Synthetic
ugcgaggcgagggaguucuucuuc

SEQ ID NO: 17863 - RNA, 18 nt, Artificial Sequence
  Synthetic
uuuaugcacaauauguuc

SEQ ID NO: 17864 - RNA, 19 nt, Artificial Sequence
  Synthetic
uuuuaugcacaauauguuc

SEQ ID NO: 17865 - RNA, 20 nt, Artificial Sequence
  Synthetic
auuuuaugcacaauauguuc

SEQ ID NO: 17866 - RNA, 21 nt, Artificial Sequence
  Synthetic
gauuuuaugcacaauauguuc

SEQ ID NO: 17867 - RNA, 22 nt, Artificial Sequence
  Synthetic
ugauuuuaugcacaauauguuc

SEQ ID NO: 17868 - RNA, 23 nt, Artificial Sequence
  Synthetic
uugauuuuaugcacaauauguuc

SEQ ID NO: 17869 - RNA, 24 nt, Artificial Sequence
  Synthetic
uuugauuuuaugcacaauauguuc

SEQ ID NO: 17870 - RNA, 18 nt, Artificial Sequence
  Synthetic
agugaaugucaggaaaag

SEQ ID NO: 17871 - RNA, 19 nt, Artificial Sequence
  Synthetic
aagugaaugucaggaaaag

SEQ ID NO: 17872 - RNA, 20 nt, Artificial Sequence
  Synthetic
caagugaaugucaggaaaag

SEQ ID NO: 17873 - RNA, 21 nt, Artificial Sequence
  Synthetic
gcaagugaaugucaggaaaag

SEQ ID NO: 17874 - RNA, 22 nt, Artificial Sequence
  Synthetic
ugcaagugaaugucaggaaaag

SEQ ID NO: 17875 - RNA, 23 nt, Artificial Sequence
  Synthetic
augcaagugaaugucaggaaaag

SEQ ID NO: 17876 - RNA, 24 nt, Artificial Sequence
  Synthetic
gaugcaagugaaugucaggaaaag

SEQ ID NO: 17877 - RNA, 18 nt, Artificial Sequence
  Synthetic
aacgauagccaggacaag

SEQ ID NO: 17878 - RNA, 19 nt, Artificial Sequence
  Synthetic
caacgauagccaggacaag

SEQ ID NO: 17879 - RNA, 20 nt, Artificial Sequence
  Synthetic
ccaacgauagccaggacaag

SEQ ID NO: 17880 - RNA, 21 nt, Artificial Sequence
  Synthetic
uccaacgauagccaggacaag

SEQ ID NO: 17881 - RNA, 22 nt, Artificial Sequence
  Synthetic
auccaacgauagccaggacaag

SEQ ID NO: 17882 - RNA, 23 nt, Artificial Sequence
  Synthetic
cauccaacgauagccaggacaag

SEQ ID NO: 17883 - RNA, 24 nt, Artificial Sequence
  Synthetic
acauccaacgauagccaggacaag

SEQ ID NO: 17884 - RNA, 18 nt, Artificial Sequence
  Synthetic
agaagaaccaacaagaag

SEQ ID NO: 17885 - RNA, 19 nt, Artificial Sequence
  Synthetic
cagaagaaccaacaagaag

SEQ ID NO: 17886 - RNA, 20 nt, Artificial Sequence
  Synthetic
ccagaagaaccaacaagaag

SEQ ID NO: 17887 - RNA, 21 nt, Artificial Sequence
  Synthetic
uccagaagaaccaacaagaag

SEQ ID NO: 17888 - RNA, 22 nt, Artificial Sequence
  Synthetic
guccagaagaaccaacaagaag

SEQ ID NO: 17889 - RNA, 23 nt, Artificial Sequence
  Synthetic
aguccagaagaaccaacaagaag

SEQ ID NO: 17890 - RNA, 24 nt, Artificial Sequence
  Synthetic
uaguccagaagaaccaacaagaag

SEQ ID NO: 17891 - RNA, 18 nt, Artificial Sequence
  Synthetic
aauacuaacauugggaag

SEQ ID NO: 17892 - RNA, 19 nt, Artificial Sequence
  Synthetic
gaauacuaacauugggaag

SEQ ID NO: 17893 - RNA, 20 nt, Artificial Sequence
  Synthetic
ggaauacuaacauugggaag

SEQ ID NO: 17894 - RNA, 21 nt, Artificial Sequence
  Synthetic
aggaauacuaacauugggaag

SEQ ID NO: 17895 - RNA, 22 nt, Artificial Sequence
  Synthetic
aaggaauacuaacauugggaag

SEQ ID NO: 17896 - RNA, 23 nt, Artificial Sequence
  Synthetic
caaggaauacuaacauugggaag

SEQ ID NO: 17897 - RNA, 24 nt, Artificial Sequence
  Synthetic
ccaaggaauacuaacauugggaag

SEQ ID NO: 17898 - RNA, 18 nt, Artificial Sequence
  Synthetic
gguuguagauccuggaag

SEQ ID NO: 17899 - RNA, 19 nt, Artificial Sequence
  Synthetic
ugguuguagauccuggaag

SEQ ID NO: 17900 - RNA, 20 nt, Artificial Sequence
  Synthetic
gugguuguagauccuggaag

SEQ ID NO: 17901 - RNA, 21 nt, Artificial Sequence
  Synthetic
ggugguuguagauccuggaag

SEQ ID NO: 17902 - RNA, 22 nt, Artificial Sequence
  Synthetic
uggugguuguagauccuggaag

SEQ ID NO: 17903 - RNA, 23 nt, Artificial Sequence
  Synthetic
cuggugguuguagauccuggaag

SEQ ID NO: 17904 - RNA, 24 nt, Artificial Sequence
  Synthetic
gcuggugguuguagauccuggaag

SEQ ID NO: 17905 - RNA, 18 nt, Artificial Sequence
  Synthetic
accuccgauugguggaag

SEQ ID NO: 17906 - RNA, 19 nt, Artificial Sequence
  Synthetic
gaccuccgauugguggaag

SEQ ID NO: 17907 - RNA, 20 nt, Artificial Sequence
  Synthetic
ugaccuccgauugguggaag

SEQ ID NO: 17908 - RNA, 21 nt, Artificial Sequence
  Synthetic
cugaccuccgauugguggaag

SEQ ID NO: 17909 - RNA, 22 nt, Artificial Sequence
  Synthetic
ccugaccuccgauugguggaag

SEQ ID NO: 17910 - RNA, 23 nt, Artificial Sequence
  Synthetic
uccugaccuccgauugguggaag

SEQ ID NO: 17911 - RNA, 24 nt, Artificial Sequence
  Synthetic
uuccugaccuccgauugguggaag

SEQ ID NO: 17912 - RNA, 18 nt, Artificial Sequence
  Synthetic
cauagcagcaggaugaag

SEQ ID NO: 17913 - RNA, 19 nt, Artificial Sequence
  Synthetic
gcauagcagcaggaugaag

SEQ ID NO: 17914 - RNA, 20 nt, Artificial Sequence
  Synthetic
ggcauagcagcaggaugaag

SEQ ID NO: 17915 - RNA, 21 nt, Artificial Sequence
  Synthetic
aggcauagcagcaggaugaag

SEQ ID NO: 17916 - RNA, 22 nt, Artificial Sequence
  Synthetic
gaggcauagcagcaggaugaag

SEQ ID NO: 17917 - RNA, 23 nt, Artificial Sequence
  Synthetic
ugaggcauagcagcaggaugaag

SEQ ID NO: 17918 - RNA, 24 nt, Artificial Sequence
  Synthetic
augaggcauagcagcaggaugaag

SEQ ID NO: 17919 - RNA, 18 nt, Artificial Sequence
  Synthetic
gcuuggaggcuugaacag

SEQ ID NO: 17920 - RNA, 19 nt, Artificial Sequence
  Synthetic
agcuuggaggcuugaacag

SEQ ID NO: 17921 - RNA, 20 nt, Artificial Sequence
  Synthetic
cagcuuggaggcuugaacag

SEQ ID NO: 17922 - RNA, 21 nt, Artificial Sequence
  Synthetic
acagcuuggaggcuugaacag

SEQ ID NO: 17923 - RNA, 22 nt, Artificial Sequence
  Synthetic
cacagcuuggaggcuugaacag

SEQ ID NO: 17924 - RNA, 23 nt, Artificial Sequence
  Synthetic
gcacagcuuggaggcuugaacag

SEQ ID NO: 17925 - RNA, 24 nt, Artificial Sequence
  Synthetic
ggcacagcuuggaggcuugaacag

SEQ ID NO: 17926 - RNA, 18 nt, Artificial Sequence
  Synthetic
gcagaugagaaggcacag

SEQ ID NO: 17927 - RNA, 19 nt, Artificial Sequence
  Synthetic
ggcagaugagaaggcacag

SEQ ID NO: 17928 - RNA, 20 nt, Artificial Sequence
  Synthetic
cggcagaugagaaggcacag

SEQ ID NO: 17929 - RNA, 21 nt, Artificial Sequence
  Synthetic
ccggcagaugagaaggcacag

SEQ ID NO: 17930 - RNA, 22 nt, Artificial Sequence
  Synthetic
gccggcagaugagaaggcacag

SEQ ID NO: 17931 - RNA, 23 nt, Artificial Sequence
  Synthetic
ggccggcagaugagaaggcacag

SEQ ID NO: 17932 - RNA, 24 nt, Artificial Sequence
  Synthetic
gggccggcagaugagaaggcacag

SEQ ID NO: 17933 - RNA, 18 nt, Artificial Sequence
  Synthetic
uaacuaaaagccagacag

SEQ ID NO: 17934 - RNA, 19 nt, Artificial Sequence
  Synthetic
auaacuaaaagccagacag

SEQ ID NO: 17935 - RNA, 20 nt, Artificial Sequence
  Synthetic
uauaacuaaaagccagacag

SEQ ID NO: 17936 - RNA, 21 nt, Artificial Sequence
  Synthetic
auauaacuaaaagccagacag

SEQ ID NO: 17937 - RNA, 22 nt, Artificial Sequence
  Synthetic
cauauaacuaaaagccagacag

SEQ ID NO: 17938 - RNA, 23 nt, Artificial Sequence
  Synthetic
ccauauaacuaaaagccagacag

SEQ ID NO: 17939 - RNA, 24 nt, Artificial Sequence
  Synthetic
uccauauaacuaaaagccagacag

SEQ ID NO: 17940 - RNA, 18 nt, Artificial Sequence
  Synthetic
cgaguaggucccggacag

SEQ ID NO: 17941 - RNA, 19 nt, Artificial Sequence
  Synthetic
ucgaguaggucccggacag

SEQ ID NO: 17942 - RNA, 20 nt, Artificial Sequence
  Synthetic
gucgaguaggucccggacag

SEQ ID NO: 17943 - RNA, 21 nt, Artificial Sequence
  Synthetic
ugucgaguaggucccggacag

SEQ ID NO: 17944 - RNA, 22 nt, Artificial Sequence
  Synthetic
gugucgaguaggucccggacag

SEQ ID NO: 17945 - RNA, 23 nt, Artificial Sequence
  Synthetic
ggugucgaguaggucccggacag

SEQ ID NO: 17946 - RNA, 24 nt, Artificial Sequence
  Synthetic
cggugucgaguaggucccggacag

SEQ ID NO: 17947 - RNA, 18 nt, Artificial Sequence
  Synthetic
cugaacuggagccaccag

SEQ ID NO: 17948 - RNA, 19 nt, Artificial Sequence
  Synthetic
ucugaacuggagccaccag

SEQ ID NO: 17949 - RNA, 20 nt, Artificial Sequence
  Synthetic
uucugaacuggagccaccag

SEQ ID NO: 17950 - RNA, 21 nt, Artificial Sequence
  Synthetic
uuucugaacuggagccaccag

SEQ ID NO: 17951 - RNA, 22 nt, Artificial Sequence
  Synthetic
guuucugaacuggagccaccag

SEQ ID NO: 17952 - RNA, 23 nt, Artificial Sequence
  Synthetic
uguuucugaacuggagccaccag

SEQ ID NO: 17953 - RNA, 24 nt, Artificial Sequence
  Synthetic
guguuucugaacuggagccaccag

SEQ ID NO: 17954 - RNA, 18 nt, Artificial Sequence
  Synthetic
ucgccaagccccagccag

SEQ ID NO: 17955 - RNA, 19 nt, Artificial Sequence
  Synthetic
aucgccaagccccagccag

SEQ ID NO: 17956 - RNA, 20 nt, Artificial Sequence
  Synthetic
aaucgccaagccccagccag

SEQ ID NO: 17957 - RNA, 21 nt, Artificial Sequence
  Synthetic
caaucgccaagccccagccag

SEQ ID NO: 17958 - RNA, 22 nt, Artificial Sequence
  Synthetic
ccaaucgccaagccccagccag

SEQ ID NO: 17959 - RNA, 23 nt, Artificial Sequence
  Synthetic
gccaaucgccaagccccagccag

SEQ ID NO: 17960 - RNA, 24 nt, Artificial Sequence
  Synthetic
ggccaaucgccaagccccagccag

SEQ ID NO: 17961 - RNA, 18 nt, Artificial Sequence
  Synthetic
cauaccuugauaguccag

SEQ ID NO: 17962 - RNA, 19 nt, Artificial Sequence
  Synthetic
acauaccuugauaguccag

SEQ ID NO: 17963 - RNA, 20 nt, Artificial Sequence
  Synthetic
aacauaccuugauaguccag

SEQ ID NO: 17964 - RNA, 21 nt, Artificial Sequence
  Synthetic
caacauaccuugauaguccag

SEQ ID NO: 17965 - RNA, 22 nt, Artificial Sequence
  Synthetic
gcaacauaccuugauaguccag

SEQ ID NO: 17966 - RNA, 23 nt, Artificial Sequence
  Synthetic
ggcaacauaccuugauaguccag

SEQ ID NO: 17967 - RNA, 24 nt, Artificial Sequence
  Synthetic
gggcaacauaccuugauaguccag

SEQ ID NO: 17968 - RNA, 18 nt, Artificial Sequence
  Synthetic
  misc_feature (11)..(11): n is a, c, g, or u
uugguggucunuaagcag

SEQ ID NO: 17969 - RNA, 19 nt, Artificial Sequence
  Synthetic
  misc_feature (12)..(12): n is a, c, g, or u
uuugguggucunuaagcag

SEQ ID NO: 17970 - RNA, 20 nt, Artificial Sequence
  Synthetic
  misc_feature (13)..(13): n is a, c, g, or u
auuugguggucunuaagcag

SEQ ID NO: 17971 - RNA, 21 nt, Artificial Sequence
  Synthetic
  misc_feature (14)..(14): n is a, c, g, or u
cauuugguggucunuaagcag

SEQ ID NO: 17972 - RNA, 22 nt, Artificial Sequence
  Synthetic
  misc_feature (15)..(15): n is a, c, g, or u
gcauuugguggucunuaagcag

SEQ ID NO: 17973 - RNA, 23 nt, Artificial Sequence
  Synthetic
  misc_feature (16)..(16): n is a, c, g, or u
ggcauuugguggucunuaagcag

SEQ ID NO: 17974 - RNA, 24 nt, Artificial Sequence
  Synthetic
  misc_feature (17)..(17): n is a, c, g, or u
gggcauuugguggucunuaagcag

SEQ ID NO: 17975 - RNA, 18 nt, Artificial Sequence
  Synthetic
gaagguuugguacagcag

SEQ ID NO: 17976 - RNA, 19 nt, Artificial Sequence
  Synthetic
cgaagguuugguacagcag

SEQ ID NO: 17977 - RNA, 20 nt, Artificial Sequence
  Synthetic
ccgaagguuugguacagcag

SEQ ID NO: 17978 - RNA, 21 nt, Artificial Sequence
  Synthetic
uccgaagguuugguacagcag

SEQ ID NO: 17979 - RNA, 22 nt, Artificial Sequence
  Synthetic
guccgaagguuugguacagcag

SEQ ID NO: 17980 - RNA, 23 nt, Artificial Sequence
  Synthetic
cguccgaagguuugguacagcag

SEQ ID NO: 17981 - RNA, 24 nt, Artificial Sequence
  Synthetic
ccguccgaagguuugguacagcag

SEQ ID NO: 17982 - RNA, 18 nt, Artificial Sequence
  Synthetic
gguuugguacagcagcag

SEQ ID NO: 17983 - RNA, 19 nt, Artificial Sequence
  Synthetic
agguuugguacagcagcag

SEQ ID NO: 17984 - RNA, 20 nt, Artificial Sequence
  Synthetic
aagguuugguacagcagcag

SEQ ID NO: 17985 - RNA, 21 nt, Artificial Sequence
  Synthetic
gaagguuugguacagcagcag

SEQ ID NO: 17986 - RNA, 22 nt, Artificial Sequence
  Synthetic
cgaagguuugguacagcagcag

SEQ ID NO: 17987 - RNA, 23 nt, Artificial Sequence
  Synthetic
ccgaagguuugguacagcagcag

SEQ ID NO: 17988 - RNA, 24 nt, Artificial Sequence
  Synthetic
uccgaagguuugguacagcagcag

SEQ ID NO: 17989 - RNA, 18 nt, Artificial Sequence
  Synthetic
gugcacacgggccggcag

SEQ ID NO: 17990 - RNA, 19 nt, Artificial Sequence
  Synthetic
agugcacacgggccggcag

SEQ ID NO: 17991 - RNA, 20 nt, Artificial Sequence
  Synthetic
aagugcacacgggccggcag

SEQ ID NO: 17992 - RNA, 21 nt, Artificial Sequence
  Synthetic
gaagugcacacgggccggcag

SEQ ID NO: 17993 - RNA, 22 nt, Artificial Sequence
  Synthetic
cgaagugcacacgggccggcag

SEQ ID NO: 17994 - RNA, 23 nt, Artificial Sequence
  Synthetic
gcgaagugcacacgggccggcag

SEQ ID NO: 17995 - RNA, 24 nt, Artificial Sequence
  Synthetic
agcgaagugcacacgggccggcag

SEQ ID NO: 17996 - RNA, 18 nt, Artificial Sequence
  Synthetic
cgcaguauggaucggcag

SEQ ID NO: 17997 - RNA, 19 nt, Artificial Sequence
  Synthetic
ccgcaguauggaucggcag

SEQ ID NO: 17998 - RNA, 20 nt, Artificial Sequence
  Synthetic
uccgcaguauggaucggcag

SEQ ID NO: 17999 - RNA, 21 nt, Artificial Sequence
  Synthetic
uuccgcaguauggaucggcag

SEQ ID NO: 18000 - RNA, 22 nt, Artificial Sequence
  Synthetic
guuccgcaguauggaucggcag

SEQ ID NO: 18001 - RNA, 23 nt, Artificial Sequence
  Synthetic
aguuccgcaguauggaucggcag

SEQ ID NO: 18002 - RNA, 24 nt, Artificial Sequence
  Synthetic
gaguuccgcaguauggaucggcag

SEQ ID NO: 18003 - RNA, 18 nt, Artificial Sequence
  Synthetic
aaagaugauuaggcagag

SEQ ID NO: 18004 - RNA, 19 nt, Artificial Sequence
  Synthetic
aaaagaugauuaggcagag

SEQ ID NO: 18005 - RNA, 20 nt, Artificial Sequence
  Synthetic
caaaagaugauuaggcagag

SEQ ID NO: 18006 - RNA, 21 nt, Artificial Sequence
  Synthetic
acaaaagaugauuaggcagag

SEQ ID NO: 18007 - RNA, 22 nt, Artificial Sequence
  Synthetic
aacaaaagaugauuaggcagag

SEQ ID NO: 18008 - RNA, 23 nt, Artificial Sequence
  Synthetic
gaacaaaagaugauuaggcagag

SEQ ID NO: 18009 - RNA, 24 nt, Artificial Sequence
  Synthetic
ugaacaaaagaugauuaggcagag

SEQ ID NO: 18010 - RNA, 18 nt, Artificial Sequence
  Synthetic
uccaugcgacgugcagag

SEQ ID NO: 18011 - RNA, 19 nt, Artificial Sequence
  Synthetic
cuccaugcgacgugcagag

SEQ ID NO: 18012 - RNA, 20 nt, Artificial Sequence
  Synthetic
ucuccaugcgacgugcagag

SEQ ID NO: 18013 - RNA, 21 nt, Artificial Sequence
  Synthetic
gucuccaugcgacgugcagag

SEQ ID NO: 18014 - RNA, 22 nt, Artificial Sequence
  Synthetic
ggucuccaugcgacgugcagag

SEQ ID NO: 18015 - RNA, 23 nt, Artificial Sequence
  Synthetic
uggucuccaugcgacgugcagag

SEQ ID NO: 18016 - RNA, 24 nt, Artificial Sequence
  Synthetic
guggucuccaugcgacgugcagag

SEQ ID NO: 18017 - RNA, 18 nt, Artificial Sequence
  Synthetic
gaugugugucccuuagag

SEQ ID NO: 18018 - RNA, 19 nt, Artificial Sequence
  Synthetic
ggaugugugucccuuagag

SEQ ID NO: 18019 - RNA, 20 nt, Artificial Sequence
  Synthetic
uggaugugugucccuuagag

SEQ ID NO: 18020 - RNA, 21 nt, Artificial Sequence
  Synthetic
guggaugugugucccuuagag

SEQ ID NO: 18021 - RNA, 22 nt, Artificial Sequence
  Synthetic
uguggaugugugucccuuagag

SEQ ID NO: 18022 - RNA, 23 nt, Artificial Sequence
  Synthetic
cuguggaugugugucccuuagag

SEQ ID NO: 18023 - RNA, 24 nt, Artificial Sequence
  Synthetic
ccuguggaugugugucccuuagag

SEQ ID NO: 18024 - RNA, 18 nt, Artificial Sequence
  Synthetic
caccgccuguaacacgag

SEQ ID NO: 18025 - RNA, 19 nt, Artificial Sequence
  Synthetic
acaccgccuguaacacgag

SEQ ID NO: 18026 - RNA, 20 nt, Artificial Sequence
  Synthetic
cacaccgccuguaacacgag

SEQ ID NO: 18027 - RNA, 21 nt, Artificial Sequence
  Synthetic
acacaccgccuguaacacgag

SEQ ID NO: 18028 - RNA, 22 nt, Artificial Sequence
  Synthetic
aacacaccgccuguaacacgag

SEQ ID NO: 18029 - RNA, 23 nt, Artificial Sequence
  Synthetic
aaacacaccgccuguaacacgag

SEQ ID NO: 18030 - RNA, 24 nt, Artificial Sequence
  Synthetic
gaaacacaccgccuguaacacgag

SEQ ID NO: 18031 - RNA, 18 nt, Artificial Sequence
  Synthetic
gagaucuucgucugcgag

SEQ ID NO: 18032 - RNA, 19 nt, Artificial Sequence
  Synthetic
ugagaucuucgucugcgag

SEQ ID NO: 18033 - RNA, 20 nt, Artificial Sequence
  Synthetic
uugagaucuucgucugcgag

SEQ ID NO: 18034 - RNA, 21 nt, Artificial Sequence
  Synthetic
auugagaucuucgucugcgag

SEQ ID NO: 18035 - RNA, 22 nt, Artificial Sequence
  Synthetic
gauugagaucuucgucugcgag

SEQ ID NO: 18036 - RNA, 23 nt, Artificial Sequence
  Synthetic
  misc_feature (1)..(1): n is a, c, g, or u
ngauugagaucuucgucugcgag

SEQ ID NO: 18037 - RNA, 24 nt, Artificial Sequence
  Synthetic
  misc_feature (2)..(2): n is a, c, g, or u
gngauugagaucuucgucugcgag

SEQ ID NO: 18038 - RNA, 18 nt, Artificial Sequence
  Synthetic
  misc_feature (16)..(16): n is a, c, g, or u
gauugaaaacagguanag

SEQ ID NO: 18039 - RNA, 19 nt, Artificial Sequence
  Synthetic
  misc_feature (17)..(17): n is a, c, g, or u
ggauugaaaacagguanag

SEQ ID NO: 18040 - RNA, 20 nt, Artificial Sequence
  Synthetic
  misc_feature (18)..(18): n is a, c, g, or u
aggauugaaaacagguanag

SEQ ID NO: 18041 - RNA, 21 nt, Artificial Sequence
  Synthetic
  misc_feature (19)..(19): n is a, c, g, or u
caggauugaaaacagguanag

SEQ ID NO: 18042 - RNA, 22 nt, Artificial Sequence
  Synthetic
  misc_feature (20)..(20): n is a, c, g, or u
ucaggauugaaaacagguanag

SEQ ID NO: 18043 - RNA, 23 nt, Artificial Sequence
  Synthetic
  misc_feature (21)..(21): n is a, c, g, or u
gucaggauugaaaacagguanag

SEQ ID NO: 18044 - RNA, 24 nt, Artificial Sequence
  Synthetic
  misc_feature (22)..(22): n is a, c, g, or u
agucaggauugaaaacagguanag

SEQ ID NO: 18045 - RNA, 18 nt, Artificial Sequence
  Synthetic
  misc_feature (15)..(16): n is a, c, g, or u
cgucggccggaacgnnag

SEQ ID NO: 18046 - RNA, 19 nt, Artificial Sequence
  Synthetic
  misc_feature (16)..(17): n is a, c, g, or u
ucgucggccggaacgnnag

SEQ ID NO: 18047 - RNA, 20 nt, Artificial Sequence
  Synthetic
  misc_feature (17)..(18): n is a, c, g, or u
gucgucggccggaacgnnag

SEQ ID NO: 18048 - RNA, 21 nt, Artificial Sequence
  Synthetic
  misc_feature (18)..(19): n is a, c, g, or u
cgucgucggccggaacgnnag

SEQ ID NO: 18049 - RNA, 22 nt, Artificial Sequence
  Synthetic
  misc_feature (19)..(20): n is a, c, g, or u
ccgucgucggccggaacgnnag

SEQ ID NO: 18050 - RNA, 23 nt, Artificial Sequence
  Synthetic
  misc_feature (20)..(21): n is a, c, g, or u
cccgucgucggccggaacgnnag

SEQ ID NO: 18051 - RNA, 24 nt, Artificial Sequence
  Synthetic
  misc_feature (21)..(22): n is a, c, g, or u
acccgucgucggccggaacgnnag

SEQ ID NO: 18052 - RNA, 18 nt, Artificial Sequence
  Synthetic
augugagagaggcaauag

SEQ ID NO: 18053 - RNA, 19 nt, Artificial Sequence
  Synthetic
gaugugagagaggcaauag

SEQ ID NO: 18054 - RNA, 20 nt, Artificial Sequence
  Synthetic
ugaugugagagaggcaauag

SEQ ID NO: 18055 - RNA, 21 nt, Artificial Sequence
  Synthetic
augaugugagagaggcaauag

SEQ ID NO: 18056 - RNA, 22 nt, Artificial Sequence
  Synthetic
gaugaugugagagaggcaauag

SEQ ID NO: 18057 - RNA, 23 nt, Artificial Sequence
  Synthetic
ugaugaugugagagaggcaauag

SEQ ID NO: 18058 - RNA, 24 nt, Artificial Sequence
  Synthetic
uugaugaugugagagaggcaauag

SEQ ID NO: 18059 - RNA, 18 nt, Artificial Sequence
  Synthetic
ccgcaggauucagcgccg

SEQ ID NO: 18060 - RNA, 19 nt, Artificial Sequence
  Synthetic
uccgcaggauucagcgccg

SEQ ID NO: 18061 - RNA, 20 nt, Artificial Sequence
  Synthetic
guccgcaggauucagcgccg

SEQ ID NO: 18062 - RNA, 21 nt, Artificial Sequence
  Synthetic
cguccgcaggauucagcgccg

SEQ ID NO: 18063 - RNA, 22 nt, Artificial Sequence
  Synthetic
ucguccgcaggauucagcgccg

SEQ ID NO: 18064 - RNA, 23 nt, Artificial Sequence
  Synthetic
gucguccgcaggauucagcgccg

SEQ ID NO: 18065 - RNA, 24 nt, Artificial Sequence
  Synthetic
ggucguccgcaggauucagcgccg

SEQ ID NO: 18066 - RNA, 18 nt, Artificial Sequence
  Synthetic
ccaugccccuucucgccg

SEQ ID NO: 18067 - RNA, 19 nt, Artificial Sequence
  Synthetic
cccaugccccuucucgccg

SEQ ID NO: 18068 - RNA, 20 nt, Artificial Sequence
  Synthetic
ucccaugccccuucucgccg

SEQ ID NO: 18069 - RNA, 21 nt, Artificial Sequence
  Synthetic
gucccaugccccuucucgccg

SEQ ID NO: 18070 - RNA, 22 nt, Artificial Sequence
  Synthetic
ugucccaugccccuucucgccg

SEQ ID NO: 18071 - RNA, 23 nt, Artificial Sequence
  Synthetic
cugucccaugccccuucucgccg

SEQ ID NO: 18072 - RNA, 24 nt, Artificial Sequence
  Synthetic
ucugucccaugccccuucucgccg

SEQ ID NO: 18073 - RNA, 18 nt, Artificial Sequence
  Synthetic
aucuucgucugcgaggcg

SEQ ID NO: 18074 - RNA, 19 nt, Artificial Sequence
  Synthetic
gaucuucgucugcgaggcg

SEQ ID NO: 18075 - RNA, 20 nt, Artificial Sequence
  Synthetic
agaucuucgucugcgaggcg

SEQ ID NO: 18076 - RNA, 21 nt, Artificial Sequence
  Synthetic
gagaucuucgucugcgaggcg

SEQ ID NO: 18077 - RNA, 22 nt, Artificial Sequence
  Synthetic
ugagaucuucgucugcgaggcg

SEQ ID NO: 18078 - RNA, 23 nt, Artificial Sequence
  Synthetic
uugagaucuucgucugcgaggcg

SEQ ID NO: 18079 - RNA, 24 nt, Artificial Sequence
  Synthetic
auugagaucuucgucugcgaggcg

SEQ ID NO: 18080 - RNA, 18 nt, Artificial Sequence
  Synthetic
  misc_feature (12)..(13): n is a, c, g, or u
cggccggaacgnnaggcg

SEQ ID NO: 18081 - RNA, 19 nt, Artificial Sequence
  Synthetic
  misc_feature (13)..(14): n is a, c, g, or u
ucggccggaacgnnaggcg

SEQ ID NO: 18082 - RNA, 20 nt, Artificial Sequence
  Synthetic
  misc_feature (14)..(15): n is a, c, g, or u
gucggccggaacgnnaggcg

SEQ ID NO: 18083 - RNA, 21 nt, Artificial Sequence
  Synthetic
  misc_feature (15)..(16): n is a, c, g, or u
cgucggccggaacgnnaggcg

SEQ ID NO: 18084 - RNA, 22 nt, Artificial Sequence
  Synthetic
  misc_feature (16)..(17): n is a, c, g, or u
ucgucggccggaacgnnaggcg

SEQ ID NO: 18085 - RNA, 23 nt, Artificial Sequence
  Synthetic
  misc_feature (17)..(18): n is a, c, g, or u
gucgucggccggaacgnnaggcg

SEQ ID NO: 18086 - RNA, 24 nt, Artificial Sequence
  Synthetic
  misc_feature (18)..(19): n is a, c, g, or u
cgucgucggccggaacgnnaggcg

SEQ ID NO: 18087 - RNA, 18 nt, Artificial Sequence
  Synthetic
cagaugagaaggcacagg

SEQ ID NO: 18088 - RNA, 19 nt, Artificial Sequence
  Synthetic
gcagaugagaaggcacagg

SEQ ID NO: 18089 - RNA, 20 nt, Artificial Sequence
  Synthetic
ggcagaugagaaggcacagg

SEQ ID NO: 18090 - RNA, 21 nt, Artificial Sequence
  Synthetic
cggcagaugagaaggcacagg

SEQ ID NO: 18091 - RNA, 22 nt, Artificial Sequence
  Synthetic
ccggcagaugagaaggcacagg

SEQ ID NO: 18092 - RNA, 23 nt, Artificial Sequence
  Synthetic
gccggcagaugagaaggcacagg

SEQ ID NO: 18093 - RNA, 24 nt, Artificial Sequence
  Synthetic
ggccggcagaugagaaggcacagg

SEQ ID NO: 18094 - RNA, 18 nt, Artificial Sequence
  Synthetic
guuugguacagcagcagg

SEQ ID NO: 18095 - RNA, 19 nt, Artificial Sequence
  Synthetic
gguuugguacagcagcagg

SEQ ID NO: 18096 - RNA, 20 nt, Artificial Sequence
  Synthetic
agguuugguacagcagcagg

SEQ ID NO: 18097 - RNA, 21 nt, Artificial Sequence
  Synthetic
aagguuugguacagcagcagg

SEQ ID NO: 18098 - RNA, 22 nt, Artificial Sequence
  Synthetic
gaagguuugguacagcagcagg

SEQ ID NO: 18099 - RNA, 23 nt, Artificial Sequence
  Synthetic
cgaagguuugguacagcagcagg

SEQ ID NO: 18100 - RNA, 24 nt, Artificial Sequence
  Synthetic
ccgaagguuugguacagcagcagg

SEQ ID NO: 18101 - RNA, 18 nt, Artificial Sequence
  Synthetic
augaggcauagcagcagg

SEQ ID NO: 18102 - RNA, 19 nt, Artificial Sequence
  Synthetic
gaugaggcauagcagcagg

SEQ ID NO: 18103 - RNA, 20 nt, Artificial Sequence
  Synthetic
agaugaggcauagcagcagg

SEQ ID NO: 18104 - RNA, 21 nt, Artificial Sequence
  Synthetic
aagaugaggcauagcagcagg

SEQ ID NO: 18105 - RNA, 22 nt, Artificial Sequence
  Synthetic
gaagaugaggcauagcagcagg

SEQ ID NO: 18106 - RNA, 23 nt, Artificial Sequence
  Synthetic
agaagaugaggcauagcagcagg

SEQ ID NO: 18107 - RNA, 24 nt, Artificial Sequence
  Synthetic
aagaagaugaggcauagcagcagg

SEQ ID NO: 18108 - RNA, 18 nt, Artificial Sequence
  Synthetic
augugugucccuuagagg

SEQ ID NO: 18109 - RNA, 19 nt, Artificial Sequence
  Synthetic
gaugugugucccuuagagg

SEQ ID NO: 18110 - RNA, 20 nt, Artificial Sequence
  Synthetic
ggaugugugucccuuagagg

SEQ ID NO: 18111 - RNA, 21 nt, Artificial Sequence
  Synthetic
uggaugugugucccuuagagg

SEQ ID NO: 18112 - RNA, 22 nt, Artificial Sequence
  Synthetic
guggaugugugucccuuagagg

SEQ ID NO: 18113 - RNA, 23 nt, Artificial Sequence
  Synthetic
uguggaugugugucccuuagagg

SEQ ID NO: 18114 - RNA, 24 nt, Artificial Sequence
  Synthetic
cuguggaugugugucccuuagagg

SEQ ID NO: 18115 - RNA, 18 nt, Artificial Sequence
  Synthetic
  misc_feature (14)..(15): n is a, c, g, or u
gucggccggaacgnnagg

SEQ ID NO: 18116 - RNA, 19 nt, Artificial Sequence
  Synthetic
  misc_feature (15)..(16): n is a, c, g, or u
cgucggccggaacgnnagg

SEQ ID NO: 18117 - RNA, 20 nt, Artificial Sequence
  Synthetic
  misc_feature (16)..(17): n is a, c, g, or u
ucgucggccggaacgnnagg

SEQ ID NO: 18118 - RNA, 21 nt, Artificial Sequence
  Synthetic
  misc_feature (17)..(18): n is a, c, g, or u
gucgucggccggaacgnnagg

SEQ ID NO: 18119 - RNA, 22 nt, Artificial Sequence
  Synthetic
  misc_feature (18)..(19): n is a, c, g, or u
cgucgucggccggaacgnnagg

SEQ ID NO: 18120 - RNA, 23 nt, Artificial Sequence
  Synthetic
  misc_feature (19)..(20): n is a, c, g, or u
ccgucgucggccggaacgnnagg

SEQ ID NO: 18121 - RNA, 24 nt, Artificial Sequence
  Synthetic
  misc_feature (20)..(21): n is a, c, g, or u
cccgucgucggccggaacgnnagg

SEQ ID NO: 18122 - RNA, 18 nt, Artificial Sequence
  Synthetic
gaacaaaagaugauuagg

SEQ ID NO: 18123 - RNA, 19 nt, Artificial Sequence
  Synthetic
ugaacaaaagaugauuagg

SEQ ID NO: 18124 - RNA, 20 nt, Artificial Sequence
  Synthetic
augaacaaaagaugauuagg

SEQ ID NO: 18125 - RNA, 21 nt, Artificial Sequence
  Synthetic
caugaacaaaagaugauuagg

SEQ ID NO: 18126 - RNA, 22 nt, Artificial Sequence
  Synthetic
acaugaacaaaagaugauuagg

SEQ ID NO: 18127 - RNA, 23 nt, Artificial Sequence
  Synthetic
gacaugaacaaaagaugauuagg

SEQ ID NO: 18128 - RNA, 24 nt, Artificial Sequence
  Synthetic
ggacaugaacaaaagaugauuagg

SEQ ID NO: 18129 - RNA, 18 nt, Artificial Sequence
  Synthetic
  misc_feature (12)..(12): n is a, c, g, or u
aggcggagaagngggcgg

SEQ ID NO: 18130 - RNA, 19 nt, Artificial Sequence
  Synthetic
  misc_feature (1)..(1): n is a, c, g, or u
  misc_feature (13)..(13): n is a, c, g, or u
naggcggagaagngggcgg

SEQ ID NO: 18131 - RNA, 20 nt, Artificial Sequence
  Synthetic
  misc_feature (1)..(2): n is a, c, g, or u
  misc_feature (14)..(14): n is a, c, g, or u
nnaggcggagaagngggcgg

SEQ ID NO: 18132 - RNA, 21 nt, Artificial Sequence
  Synthetic
  misc_feature (2)..(3): n is a, c, g, or u
  misc_feature (15)..(15): n is a, c, g, or u
gnnaggcggagaagngggcgg

SEQ ID NO: 18133 - RNA, 22 nt, Artificial Sequence
  Synthetic
  misc_feature (3)..(4): n is a, c, g, or u
  misc_feature (16)..(16): n is a, c, g, or u
cgnnaggcggagaagngggcgg

SEQ ID NO: 18134 - RNA, 23 nt, Artificial Sequence
  Synthetic
  misc_feature (4)..(5): n is a, c, g, or u
  misc_feature (17)..(17): n is a, c, g, or u
acgnnaggcggagaagngggcgg

SEQ ID NO: 18135 - RNA, 24 nt, Artificial Sequence
  Synthetic
  misc_feature (5)..(6): n is a, c, g, or u
  misc_feature (18)..(18): n is a, c, g, or u
aacgnnaggcggagaagngggcgg

SEQ ID NO: 18136 - RNA, 18 nt, Artificial Sequence
  Synthetic
uuccgcaguauggaucgg

SEQ ID NO: 18137 - RNA, 19 nt, Artificial Sequence
  Synthetic
guuccgcaguauggaucgg

SEQ ID NO: 18138 - RNA, 20 nt, Artificial Sequence
  Synthetic
aguuccgcaguauggaucgg

SEQ ID NO: 18139 - RNA, 21 nt, Artificial Sequence
  Synthetic
gaguuccgcaguauggaucgg

SEQ ID NO: 18140 - RNA, 22 nt, Artificial Sequence
  Synthetic
ggaguuccgcaguauggaucgg

SEQ ID NO: 18141 - RNA, 23 nt, Artificial Sequence
  Synthetic
aggaguuccgcaguauggaucgg

SEQ ID NO: 18142 - RNA, 24 nt, Artificial Sequence
  Synthetic
uaggaguuccgcaguauggaucgg

SEQ ID NO: 18143 - RNA, 18 nt, Artificial Sequence
  Synthetic
gauucuaaggcaucucgg

SEQ ID NO: 18144 - RNA, 19 nt, Artificial Sequence
  Synthetic
ugauucuaaggcaucucgg

SEQ ID NO: 18145 - RNA, 20 nt, Artificial Sequence
  Synthetic
gugauucuaaggcaucucgg

SEQ ID NO: 18146 - RNA, 21 nt, Artificial Sequence
  Synthetic
ggugauucuaaggcaucucgg

SEQ ID NO: 18147 - RNA, 22 nt, Artificial Sequence
  Synthetic
  misc_feature (1)..(1): n is a, c, g, or u
nggugauucuaaggcaucucgg

SEQ ID NO: 18148 - RNA, 23 nt, Artificial Sequence
  Synthetic
  misc_feature (2)..(2): n is a, c, g, or u
cnggugauucuaaggcaucucgg

SEQ ID NO: 18149 - RNA, 24 nt, Artificial Sequence
  Synthetic
  misc_feature (3)..(3): n is a, c, g, or u
ucnggugauucuaaggcaucucgg

SEQ ID NO: 18150 - RNA, 18 nt, Artificial Sequence
  Synthetic
ggugcgacccgucgucgg

SEQ ID NO: 18151 - RNA, 19 nt, Artificial Sequence
  Synthetic
aggugcgacccgucgucgg

SEQ ID NO: 18152 - RNA, 20 nt, Artificial Sequence
  Synthetic
gaggugcgacccgucgucgg

SEQ ID NO: 18153 - RNA, 21 nt, Artificial Sequence
  Synthetic
agaggugcgacccgucgucgg

SEQ ID NO: 18154 - RNA, 22 nt, Artificial Sequence
  Synthetic
gagaggugcgacccgucgucgg

SEQ ID NO: 18155 - RNA, 23 nt, Artificial Sequence
  Synthetic
agagaggugcgacccgucgucgg

SEQ ID NO: 18156 - RNA, 24 nt, Artificial Sequence
  Synthetic
aagagaggugcgacccgucgucgg

SEQ ID NO: 18157 - RNA, 18 nt, Artificial Sequence
  Synthetic
aggcaucucgguagaggg

SEQ ID NO: 18158 - RNA, 19 nt, Artificial Sequence
  Synthetic
aaggcaucucgguagaggg

SEQ ID NO: 18159 - RNA, 20 nt, Artificial Sequence
  Synthetic
uaaggcaucucgguagaggg

SEQ ID NO: 18160 - RNA, 21 nt, Artificial Sequence
  Synthetic
cuaaggcaucucgguagaggg

SEQ ID NO: 18161 - RNA, 22 nt, Artificial Sequence
  Synthetic
ucuaaggcaucucgguagaggg

SEQ ID NO: 18162 - RNA, 23 nt, Artificial Sequence
  Synthetic
uucuaaggcaucucgguagaggg

SEQ ID NO: 18163 - RNA, 24 nt, Artificial Sequence
  Synthetic
auucuaaggcaucucgguagaggg

SEQ ID NO: 18164 - RNA, 18 nt, Artificial Sequence
  Synthetic
ugagccaagagaaacggg

SEQ ID NO: 18165 - RNA, 19 nt, Artificial Sequence
  Synthetic
cugagccaagagaaacggg

SEQ ID NO: 18166 - RNA, 20 nt, Artificial Sequence
  Synthetic
acugagccaagagaaacggg

SEQ ID NO: 18167 - RNA, 21 nt, Artificial Sequence
  Synthetic
aacugagccaagagaaacggg

SEQ ID NO: 18168 - RNA, 22 nt, Artificial Sequence
  Synthetic
aaacugagccaagagaaacggg

SEQ ID NO: 18169 - RNA, 23 nt, Artificial Sequence
  Synthetic
uaaacugagccaagagaaacggg

SEQ ID NO: 18170 - RNA, 24 nt, Artificial Sequence
  Synthetic
guaaacugagccaagagaaacggg

SEQ ID NO: 18171 - RNA, 18 nt, Artificial Sequence
  Synthetic
aggucccggacagacggg

SEQ ID NO: 18172 - RNA, 19 nt, Artificial Sequence
  Synthetic
uaggucccggacagacggg

SEQ ID NO: 18173 - RNA, 20 nt, Artificial Sequence
  Synthetic
guaggucccggacagacggg

SEQ ID NO: 18174 - RNA, 21 nt, Artificial Sequence
  Synthetic
aguaggucccggacagacggg

SEQ ID NO: 18175 - RNA, 22 nt, Artificial Sequence
  Synthetic
gaguaggucccggacagacggg

SEQ ID NO: 18176 - RNA, 23 nt, Artificial Sequence
  Synthetic
cgaguaggucccggacagacggg

SEQ ID NO: 18177 - RNA, 24 nt, Artificial Sequence
  Synthetic
ucgaguaggucccggacagacggg

SEQ ID NO: 18178 - RNA, 18 nt, Artificial Sequence
  Synthetic
uccaggucguugaccggg

SEQ ID NO: 18179 - RNA, 19 nt, Artificial Sequence
  Synthetic
auccaggucguugaccggg

SEQ ID NO: 18180 - RNA, 20 nt, Artificial Sequence
  Synthetic
aauccaggucguugaccggg

SEQ ID NO: 18181 - RNA, 21 nt, Artificial Sequence
  Synthetic
caauccaggucguugaccggg

SEQ ID NO: 18182 - RNA, 22 nt, Artificial Sequence
  Synthetic
ucaauccaggucguugaccggg

SEQ ID NO: 18183 - RNA, 23 nt, Artificial Sequence
  Synthetic
cucaauccaggucguugaccggg

SEQ ID NO: 18184 - RNA, 24 nt, Artificial Sequence
  Synthetic
ccucaauccaggucguugaccggg

SEQ ID NO: 18185 - RNA, 18 nt, Artificial Sequence
  Synthetic
  misc_feature (3)..(3): n is a, c, g, or u
canccuagcagccauggg

SEQ ID NO: 18186 - RNA, 19 nt, Artificial Sequence
  Synthetic
  misc_feature (4)..(4): n is a, c, g, or u
acanccuagcagccauggg

SEQ ID NO: 18187 - RNA, 20 nt, Artificial Sequence
  Synthetic
  misc_feature (5)..(5): n is a, c, g, or u
cacanccuagcagccauggg

SEQ ID NO: 18188 - RNA, 21 nt, Artificial Sequence
  Synthetic
  misc_feature (6)..(6): n is a, c, g, or u
gcacanccuagcagccauggg

SEQ ID NO: 18189 - RNA, 22 nt, Artificial Sequence
  Synthetic
  misc_feature (7)..(7): n is a, c, g, or u
agcacanccuagcagccauggg

SEQ ID NO: 18190 - RNA, 23 nt, Artificial Sequence
  Synthetic
  misc_feature (8)..(8): n is a, c, g, or u
cagcacanccuagcagccauggg

SEQ ID NO: 18191 - RNA, 24 nt, Artificial Sequence
  Synthetic
  misc_feature (9)..(9): n is a, c, g, or u
gcagcacanccuagcagccauggg

SEQ ID NO: 18192 - RNA, 18 nt, Artificial Sequence
  Synthetic
aaagcccaagaugauggg

SEQ ID NO: 18193 - RNA, 19 nt, Artificial Sequence
  Synthetic
gaaagcccaagaugauggg

SEQ ID NO: 18194 - RNA, 20 nt, Artificial Sequence
  Synthetic
cgaaagcccaagaugauggg

SEQ ID NO: 18195 - RNA, 21 nt, Artificial Sequence
  Synthetic
ccgaaagcccaagaugauggg

SEQ ID NO: 18196 - RNA, 22 nt, Artificial Sequence
  Synthetic
uccgaaagcccaagaugauggg

SEQ ID NO: 18197 - RNA, 23 nt, Artificial Sequence
  Synthetic
uuccgaaagcccaagaugauggg

SEQ ID NO: 18198 - RNA, 24 nt, Artificial Sequence
  Synthetic
uuuccgaaagcccaagaugauggg

SEQ ID NO: 18199 - RNA, 18 nt, Artificial Sequence
  Synthetic
cuaaaagccagacagugg

SEQ ID NO: 18200 - RNA, 19 nt, Artificial Sequence
  Synthetic
acuaaaagccagacagugg

SEQ ID NO: 18201 - RNA, 20 nt, Artificial Sequence
  Synthetic
aacuaaaagccagacagugg

SEQ ID NO: 18202 - RNA, 21 nt, Artificial Sequence
  Synthetic
uaacuaaaagccagacagugg

SEQ ID NO: 18203 - RNA, 22 nt, Artificial Sequence
  Synthetic
auaacuaaaagccagacagugg

SEQ ID NO: 18204 - RNA, 23 nt, Artificial Sequence
  Synthetic
uauaacuaaaagccagacagugg

SEQ ID NO: 18205 - RNA, 24 nt, Artificial Sequence
  Synthetic
auauaacuaaaagccagacagugg

SEQ ID NO: 18206 - RNA, 18 nt, Artificial Sequence
  Synthetic
  misc_feature (15)..(15): n is a, c, g, or u
ugccugagagcagunugg

SEQ ID NO: 18207 - RNA, 19 nt, Artificial Sequence
  Synthetic
  misc_feature (16)..(16): n is a, c, g, or u
uugccugagagcagunugg

SEQ ID NO: 18208 - RNA, 20 nt, Artificial Sequence
  Synthetic
  misc_feature (17)..(17): n is a, c, g, or u
cuugccugagagcagunugg

SEQ ID NO: 18209 - RNA, 21 nt, Artificial Sequence
  Synthetic
  misc_feature (18)..(18): n is a, c, g, or u
gcuugccugagagcagunugg

SEQ ID NO: 18210 - RNA, 22 nt, Artificial Sequence
  Synthetic
  misc_feature (19)..(19): n is a, c, g, or u
agcuugccugagagcagunugg

SEQ ID NO: 18211 - RNA, 23 nt, Artificial Sequence
  Synthetic
  misc_feature (20)..(20): n is a, c, g, or u
uagcuugccugagagcagunugg

SEQ ID NO: 18212 - RNA, 24 nt, Artificial Sequence
  Synthetic
  misc_feature (21)..(21): n is a, c, g, or u
auagcuugccugagagcagunugg

SEQ ID NO: 18213 - RNA, 18 nt, Artificial Sequence
  Synthetic
uuccugaccuccgauugg

SEQ ID NO: 18214 - RNA, 19 nt, Artificial Sequence
  Synthetic
cuuccugaccuccgauugg

SEQ ID NO: 18215 - RNA, 20 nt, Artificial Sequence
  Synthetic
ucuuccugaccuccgauugg

SEQ ID NO: 18216 - RNA, 21 nt, Artificial Sequence
  Synthetic
uucuuccugaccuccgauugg

SEQ ID NO: 18217 - RNA, 22 nt, Artificial Sequence
  Synthetic
uuucuuccugaccuccgauugg

SEQ ID NO: 18218 - RNA, 23 nt, Artificial Sequence
  Synthetic
cuuucuuccugaccuccgauugg

SEQ ID NO: 18219 - RNA, 24 nt, Artificial Sequence
  Synthetic
gcuuucuuccugaccuccgauugg

SEQ ID NO: 18220 - RNA, 18 nt, Artificial Sequence
  Synthetic
ggauccaacagugcuugg

SEQ ID NO: 18221 - RNA, 19 nt, Artificial Sequence
  Synthetic
cggauccaacagugcuugg

SEQ ID NO: 18222 - RNA, 20 nt, Artificial Sequence
  Synthetic
ucggauccaacagugcuugg

SEQ ID NO: 18223 - RNA, 21 nt, Artificial Sequence
  Synthetic
cucggauccaacagugcuugg

SEQ ID NO: 18224 - RNA, 22 nt, Artificial Sequence
  Synthetic
ucucggauccaacagugcuugg

SEQ ID NO: 18225 - RNA, 23 nt, Artificial Sequence
  Synthetic
cucucggauccaacagugcuugg

SEQ ID NO: 18226 - RNA, 24 nt, Artificial Sequence
  Synthetic
acucucggauccaacagugcuugg

SEQ ID NO: 18227 - RNA, 18 nt, Artificial Sequence
  Synthetic
uuccgaaagcccaagaug

SEQ ID NO: 18228 - RNA, 19 nt, Artificial Sequence
  Synthetic
uuuccgaaagcccaagaug

SEQ ID NO: 18229 - RNA, 20 nt, Artificial Sequence
  Synthetic
uuuuccgaaagcccaagaug

SEQ ID NO: 18230 - RNA, 21 nt, Artificial Sequence
  Synthetic
auuuuccgaaagcccaagaug

SEQ ID NO: 18231 - RNA, 22 nt, Artificial Sequence
  Synthetic
uauuuuccgaaagcccaagaug

SEQ ID NO: 18232 - RNA, 23 nt, Artificial Sequence
  Synthetic
guauuuuccgaaagcccaagaug

SEQ ID NO: 18233 - RNA, 24 nt, Artificial Sequence
  Synthetic
gguauuuuccgaaagcccaagaug

SEQ ID NO: 18234 - RNA, 18 nt, Artificial Sequence
  Synthetic
aggcauagcagcaggaug

SEQ ID NO: 18235 - RNA, 19 nt, Artificial Sequence
  Synthetic
gaggcauagcagcaggaug

SEQ ID NO: 18236 - RNA, 20 nt, Artificial Sequence
  Synthetic
ugaggcauagcagcaggaug

SEQ ID NO: 18237 - RNA, 21 nt, Artificial Sequence
  Synthetic
augaggcauagcagcaggaug

SEQ ID NO: 18238 - RNA, 22 nt, Artificial Sequence
  Synthetic
gaugaggcauagcagcaggaug

SEQ ID NO: 18239 - RNA, 23 nt, Artificial Sequence
  Synthetic
agaugaggcauagcagcaggaug

SEQ ID NO: 18240 - RNA, 24 nt, Artificial Sequence
  Synthetic
aagaugaggcauagcagcaggaug

SEQ ID NO: 18241 - RNA, 18 nt, Artificial Sequence
  Synthetic
aagucccaaucgggacug

SEQ ID NO: 18242 - RNA, 19 nt, Artificial Sequence
  Synthetic
gaagucccaaucgggacug

SEQ ID NO: 18243 - RNA, 20 nt, Artificial Sequence
  Synthetic
ugaagucccaaucgggacug

SEQ ID NO: 18244 - RNA, 21 nt, Artificial Sequence
  Synthetic
uugaagucccaaucgggacug

SEQ ID NO: 18245 - RNA, 22 nt, Artificial Sequence
  Synthetic
guugaagucccaaucgggacug

SEQ ID NO: 18246 - RNA, 23 nt, Artificial Sequence
  Synthetic
uguugaagucccaaucgggacug

SEQ ID NO: 18247 - RNA, 24 nt, Artificial Sequence
  Synthetic
guguugaagucccaaucgggacug

SEQ ID NO: 18248 - RNA, 18 nt, Artificial Sequence
  Synthetic
aaaaguugcauggugcug

SEQ ID NO: 18249 - RNA, 19 nt, Artificial Sequence
  Synthetic
aaaaaguugcauggugcug

SEQ ID NO: 18250 - RNA, 20 nt, Artificial Sequence
  Synthetic
gaaaaaguugcauggugcug

SEQ ID NO: 18251 - RNA, 21 nt, Artificial Sequence
  Synthetic
ugaaaaaguugcauggugcug

SEQ ID NO: 18252 - RNA, 22 nt, Artificial Sequence
  Synthetic
gugaaaaaguugcauggugcug

SEQ ID NO: 18253 - RNA, 23 nt, Artificial Sequence
  Synthetic
ggugaaaaaguugcauggugcug

SEQ ID NO: 18254 - RNA, 24 nt, Artificial Sequence
  Synthetic
aggugaaaaaguugcauggugcug

SEQ ID NO: 18255 - RNA, 18 nt, Artificial Sequence
  Synthetic
acuaaaagccagacagug

SEQ ID NO: 18256 - RNA, 19 nt, Artificial Sequence
  Synthetic
aacuaaaagccagacagug

SEQ ID NO: 18257 - RNA, 20 nt, Artificial Sequence
  Synthetic
uaacuaaaagccagacagug

SEQ ID NO: 18258 - RNA, 21 nt, Artificial Sequence
  Synthetic
auaacuaaaagccagacagug

SEQ ID NO: 18259 - RNA, 22 nt, Artificial Sequence
  Synthetic
uauaacuaaaagccagacagug

SEQ ID NO: 18260 - RNA, 23 nt, Artificial Sequence
  Synthetic
auauaacuaaaagccagacagug

SEQ ID NO: 18261 - RNA, 24 nt, Artificial Sequence
  Synthetic
cauauaacuaaaagccagacagug

SEQ ID NO: 18262 - RNA, 18 nt, Artificial Sequence
  Synthetic
uggucuccaugcgacgug

SEQ ID NO: 18263 - RNA, 19 nt, Artificial Sequence
  Synthetic
guggucuccaugcgacgug

SEQ ID NO: 18264 - RNA, 20 nt, Artificial Sequence
  Synthetic
gguggucuccaugcgacgug

SEQ ID NO: 18265 - RNA, 21 nt, Artificial Sequence
  Synthetic
cgguggucuccaugcgacgug

SEQ ID NO: 18266 - RNA, 22 nt, Artificial Sequence
  Synthetic
acgguggucuccaugcgacgug

SEQ ID NO: 18267 - RNA, 23 nt, Artificial Sequence
  Synthetic
cacgguggucuccaugcgacgug

SEQ ID NO: 18268 - RNA, 24 nt, Artificial Sequence
  Synthetic
ucacgguggucuccaugcgacgug

SEQ ID NO: 18269 - RNA, 18 nt, Artificial Sequence
  Synthetic
ccccagaaggccaccgug

SEQ ID NO: 18270 - RNA, 19 nt, Artificial Sequence
  Synthetic
accccagaaggccaccgug

SEQ ID NO: 18271 - RNA, 20 nt, Artificial Sequence
  Synthetic
caccccagaaggccaccgug

SEQ ID NO: 18272 - RNA, 21 nt, Artificial Sequence
  Synthetic
ccaccccagaaggccaccgug

SEQ ID NO: 18273 - RNA, 22 nt, Artificial Sequence
  Synthetic
uccaccccagaaggccaccgug

SEQ ID NO: 18274 - RNA, 23 nt, Artificial Sequence
  Synthetic
cuccaccccagaaggccaccgug

SEQ ID NO: 18275 - RNA, 24 nt, Artificial Sequence
  Synthetic
gcuccaccccagaaggccaccgug

SEQ ID NO: 18276 - RNA, 18 nt, Artificial Sequence
  Synthetic
gugugucccuuagaggug

SEQ ID NO: 18277 - RNA, 19 nt, Artificial Sequence
  Synthetic
ugugugucccuuagaggug

SEQ ID NO: 18278 - RNA, 20 nt, Artificial Sequence
  Synthetic
augugugucccuuagaggug

SEQ ID NO: 18279 - RNA, 21 nt, Artificial Sequence
  Synthetic
gaugugugucccuuagaggug

SEQ ID NO: 18280 - RNA, 22 nt, Artificial Sequence
  Synthetic
ggaugugugucccuuagaggug

SEQ ID NO: 18281 - RNA, 23 nt, Artificial Sequence
  Synthetic
uggaugugugucccuuagaggug

SEQ ID NO: 18282 - RNA, 24 nt, Artificial Sequence
  Synthetic
guggaugugugucccuuagaggug

SEQ ID NO: 18283 - RNA, 18 nt, Artificial Sequence
  Synthetic
caggagguggaucuggug

SEQ ID NO: 18284 - RNA, 19 nt, Artificial Sequence
  Synthetic
gcaggagguggaucuggug

SEQ ID NO: 18285 - RNA, 20 nt, Artificial Sequence
  Synthetic
agcaggagguggaucuggug

SEQ ID NO: 18286 - RNA, 21 nt, Artificial Sequence
  Synthetic
aagcaggagguggaucuggug

SEQ ID NO: 18287 - RNA, 22 nt, Artificial Sequence
  Synthetic
gaagcaggagguggaucuggug

SEQ ID NO: 18288 - RNA, 23 nt, Artificial Sequence
  Synthetic
ggaagcaggagguggaucuggug

SEQ ID NO: 18289 - RNA, 24 nt, Artificial Sequence
  Synthetic
uggaagcaggagguggaucuggug

SEQ ID NO: 18290 - RNA, 18 nt, Artificial Sequence
  Synthetic
gugcuugguggaacugug

SEQ ID NO: 18291 - RNA, 19 nt, Artificial Sequence
  Synthetic
agugcuugguggaacugug

SEQ ID NO: 18292 - RNA, 20 nt, Artificial Sequence
  Synthetic
cagugcuugguggaacugug

SEQ ID NO: 18293 - RNA, 21 nt, Artificial Sequence
  Synthetic
acagugcuugguggaacugug

SEQ ID NO: 18294 - RNA, 22 nt, Artificial Sequence
  Synthetic
aacagugcuugguggaacugug

SEQ ID NO: 18295 - RNA, 23 nt, Artificial Sequence
  Synthetic
caacagugcuugguggaacugug

SEQ ID NO: 18296 - RNA, 24 nt, Artificial Sequence
  Synthetic
ccaacagugcuugguggaacugug

SEQ ID NO: 18297 - RNA, 18 nt, Artificial Sequence
  Synthetic
caauuguccuuguuugug

SEQ ID NO: 18298 - RNA, 19 nt, Artificial Sequence
  Synthetic
ccaauuguccuuguuugug

SEQ ID NO: 18299 - RNA, 20 nt, Artificial Sequence
  Synthetic
gccaauuguccuuguuugug

SEQ ID NO: 18300 - RNA, 21 nt, Artificial Sequence
  Synthetic
ggccaauuguccuuguuugug

SEQ ID NO: 18301 - RNA, 22 nt, Artificial Sequence
  Synthetic
uggccaauuguccuuguuugug

SEQ ID NO: 18302 - RNA, 23 nt, Artificial Sequence
  Synthetic
uuggccaauuguccuuguuugug

SEQ ID NO: 18303 - RNA, 24 nt, Artificial Sequence
  Synthetic
auuggccaauuguccuuguuugug

SEQ ID NO: 18304 - RNA, 18 nt, Artificial Sequence
  Synthetic
cuuccugaccuccgauug

SEQ ID NO: 18305 - RNA, 19 nt, Artificial Sequence
  Synthetic
ucuuccugaccuccgauug

SEQ ID NO: 18306 - RNA, 20 nt, Artificial Sequence
  Synthetic
uucuuccugaccuccgauug

SEQ ID NO: 18307 - RNA, 21 nt, Artificial Sequence
  Synthetic
uuucuuccugaccuccgauug

SEQ ID NO: 18308 - RNA, 22 nt, Artificial Sequence
  Synthetic
cuuucuuccugaccuccgauug

SEQ ID NO: 18309 - RNA, 23 nt, Artificial Sequence
  Synthetic
gcuuucuuccugaccuccgauug

SEQ ID NO: 18310 - RNA, 24 nt, Artificial Sequence
  Synthetic
ggcuuucuuccugaccuccgauug

SEQ ID NO: 18311 - RNA, 18 nt, Artificial Sequence
  Synthetic
cggauccaacagugcuug

SEQ ID NO: 18312 - RNA, 19 nt, Artificial Sequence
  Synthetic
ucggauccaacagugcuug

SEQ ID NO: 18313 - RNA, 20 nt, Artificial Sequence
  Synthetic
cucggauccaacagugcuug

SEQ ID NO: 18314 - RNA, 21 nt, Artificial Sequence
  Synthetic
ucucggauccaacagugcuug

SEQ ID NO: 18315 - RNA, 22 nt, Artificial Sequence
  Synthetic
cucucggauccaacagugcuug

SEQ ID NO: 18316 - RNA, 23 nt, Artificial Sequence
  Synthetic
acucucggauccaacagugcuug

SEQ ID NO: 18317 - RNA, 24 nt, Artificial Sequence
  Synthetic
uacucucggauccaacagugcuug

SEQ ID NO: 18318 - RNA, 18 nt, Artificial Sequence
  Synthetic
gauagccaggacaaguug

SEQ ID NO: 18319 - RNA, 19 nt, Artificial Sequence
  Synthetic
cgauagccaggacaaguug

SEQ ID NO: 18320 - RNA, 20 nt, Artificial Sequence
  Synthetic
acgauagccaggacaaguug

SEQ ID NO: 18321 - RNA, 21 nt, Artificial Sequence
  Synthetic
aacgauagccaggacaaguug

SEQ ID NO: 18322 - RNA, 22 nt, Artificial Sequence
  Synthetic
caacgauagccaggacaaguug

SEQ ID NO: 18323 - RNA, 23 nt, Artificial Sequence
  Synthetic
ccaacgauagccaggacaaguug

SEQ ID NO: 18324 - RNA, 24 nt, Artificial Sequence
  Synthetic
uccaacgauagccaggacaaguug

SEQ ID NO: 18325 - RNA, 18 nt, Artificial Sequence
  Synthetic
gaaaggccuuguaaguug

SEQ ID NO: 18326 - RNA, 19 nt, Artificial Sequence
  Synthetic
agaaaggccuuguaaguug

SEQ ID NO: 18327 - RNA, 20 nt, Artificial Sequence
  Synthetic
gagaaaggccuuguaaguug

SEQ ID NO: 18328 - RNA, 21 nt, Artificial Sequence
  Synthetic
agagaaaggccuuguaaguug

SEQ ID NO: 18329 - RNA, 22 nt, Artificial Sequence
  Synthetic
cagagaaaggccuuguaaguug

SEQ ID NO: 18330 - RNA, 23 nt, Artificial Sequence
  Synthetic
acagagaaaggccuuguaaguug

SEQ ID NO: 18331 - RNA, 24 nt, Artificial Sequence
  Synthetic
uacagagaaaggccuuguaaguug

SEQ ID NO: 18332 - RNA, 18 nt, Artificial Sequence
  Synthetic
gcaaaggccuggccguug

SEQ ID NO: 18333 - RNA, 19 nt, Artificial Sequence
  Synthetic
ggcaaaggccuggccguug

SEQ ID NO: 18334 - RNA, 20 nt, Artificial Sequence
  Synthetic
uggcaaaggccuggccguug

SEQ ID NO: 18335 - RNA, 21 nt, Artificial Sequence
  Synthetic
uuggcaaaggccuggccguug

SEQ ID NO: 18336 - RNA, 22 nt, Artificial Sequence
  Synthetic
cuuggcaaaggccuggccguug

SEQ ID NO: 18337 - RNA, 23 nt, Artificial Sequence
  Synthetic
acuuggcaaaggccuggccguug

SEQ ID NO: 18338 - RNA, 24 nt, Artificial Sequence
  Synthetic
cacuuggcaaaggccuggccguug

SEQ ID NO: 18339 - RNA, 18 nt, Artificial Sequence
  Synthetic
  misc_feature (14)..(14): n is a, c, g, or u
  misc_feature (18)..(18): n is a, c, g, or u
gguuguuggcaagnuccn

SEQ ID NO: 18340 - RNA, 19 nt, Artificial Sequence
  Synthetic
  misc_feature (15)..(15): n is a, c, g, or u
  misc_feature (19)..(19): n is a, c, g, or u
agguuguuggcaagnuccn

SEQ ID NO: 18341 - RNA, 20 nt, Artificial Sequence
  Synthetic
  misc_feature (16)..(16): n is a, c, g, or u
  misc_feature (20)..(20): n is a, c, g, or u
aagguuguuggcaagnuccn

SEQ ID NO: 18342 - RNA, 21 nt, Artificial Sequence
  Synthetic
  misc_feature (17)..(17): n is a, c, g, or u
  misc_feature (21)..(21): n is a, c, g, or u
uaagguuguuggcaagnuccn

SEQ ID NO: 18343 - RNA, 22 nt, Artificial Sequence
  Synthetic
  misc_feature (18)..(18): n is a, c, g, or u
  misc_feature (22)..(22): n is a, c, g, or u
guaagguuguuggcaagnuccn

SEQ ID NO: 18344 - RNA, 23 nt, Artificial Sequence
  Synthetic
  misc_feature (19)..(19): n is a, c, g, or u
  misc_feature (23)..(23): n is a, c, g, or u
uguaagguuguuggcaagnuccn

SEQ ID NO: 18345 - RNA, 24 nt, Artificial Sequence
  Synthetic
  misc_feature (20)..(20): n is a, c, g, or u
  misc_feature (24)..(24): n is a, c, g, or u
auguaagguuguuggcaagnuccn

SEQ ID NO: 18346 - RNA, 18 nt, Artificial Sequence
  Synthetic
  misc_feature (18)..(18): n is a, c, g, or u
auauaacccauaaagugn

SEQ ID NO: 18347 - RNA, 19 nt, Artificial Sequence
  Synthetic
  misc_feature (1)..(1): n is a, c, g, or u
  misc_feature (19)..(19): n is a, c, g, or u
nauauaacccauaaagugn

SEQ ID NO: 18348 - RNA, 20 nt, Artificial Sequence
  Synthetic
  misc_feature (2)..(2): n is a, c, g, or u
  misc_feature (20)..(20): n is a, c, g, or u
unauauaacccauaaagugn

SEQ ID NO: 18349 - RNA, 21 nt, Artificial Sequence
  Synthetic
  misc_feature (3)..(3): n is a, c, g, or u
  misc_feature (21)..(21): n is a, c, g, or u
aunauauaacccauaaagugn

SEQ ID NO: 18350 - RNA, 22 nt, Artificial Sequence
  Synthetic
  misc_feature (4)..(4): n is a, c, g, or u
  misc_feature (22)..(22): n is a, c, g, or u
aaunauauaacccauaaagugn

SEQ ID NO: 18351 - RNA, 23 nt, Artificial Sequence
  Synthetic
  misc_feature (5)..(5): n is a, c, g, or u
  misc_feature (23)..(23): n is a, c, g, or u
caaunauauaacccauaaagugn

SEQ ID NO: 18352 - RNA, 24 nt, Artificial Sequence
  Synthetic
  misc_feature (6)..(6): n is a, c, g, or u
  misc_feature (24)..(24): n is a, c, g, or u
ccaaunauauaacccauaaagugn

SEQ ID NO: 18353 - RNA, 18 nt, Artificial Sequence
  Synthetic
  misc_feature (13)..(13): n is a, c, g, or u
aaauguaaggcangaaau

SEQ ID NO: 18354 - RNA, 19 nt, Artificial Sequence
  Synthetic
  misc_feature (14)..(14): n is a, c, g, or u
caaauguaaggcangaaau

SEQ ID NO: 18355 - RNA, 20 nt, Artificial Sequence
  Synthetic
  misc_feature (15)..(15): n is a, c, g, or u
ccaaauguaaggcangaaau

SEQ ID NO: 18356 - RNA, 21 nt, Artificial Sequence
  Synthetic
  misc_feature (16)..(16): n is a, c, g, or u
uccaaauguaaggcangaaau

SEQ ID NO: 18357 - RNA, 22 nt, Artificial Sequence
  Synthetic
  misc_feature (17)..(17): n is a, c, g, or u
uuccaaauguaaggcangaaau

SEQ ID NO: 18358 - RNA, 23 nt, Artificial Sequence
  Synthetic
  misc_feature (18)..(18): n is a, c, g, or u
cuuccaaauguaaggcangaaau

SEQ ID NO: 18359 - RNA, 24 nt, Artificial Sequence
  Synthetic
  misc_feature (19)..(19): n is a, c, g, or u
ucuuccaaauguaaggcangaaau

SEQ ID NO: 18360 - RNA, 18 nt, Artificial Sequence
  Synthetic
uuguguugaagucccaau

SEQ ID NO: 18361 - RNA, 19 nt, Artificial Sequence
  Synthetic
uuuguguugaagucccaau

SEQ ID NO: 18362 - RNA, 20 nt, Artificial Sequence
  Synthetic
guuuguguugaagucccaau

SEQ ID NO: 18363 - RNA, 21 nt, Artificial Sequence
  Synthetic
uguuuguguugaagucccaau

SEQ ID NO: 18364 - RNA, 22 nt, Artificial Sequence
  Synthetic
uuguuuguguugaagucccaau

SEQ ID NO: 18365 - RNA, 23 nt, Artificial Sequence
  Synthetic
cuuguuuguguugaagucccaau

SEQ ID NO: 18366 - RNA, 24 nt, Artificial Sequence
  Synthetic
ccuuguuuguguugaagucccaau

SEQ ID NO: 18367 - RNA, 18 nt, Artificial Sequence
  Synthetic
uccaaggaauacuaacau

SEQ ID NO: 18368 - RNA, 19 nt, Artificial Sequence
  Synthetic
guccaaggaauacuaacau

SEQ ID NO: 18369 - RNA, 20 nt, Artificial Sequence
  Synthetic
aguccaaggaauacuaacau

SEQ ID NO: 18370 - RNA, 21 nt, Artificial Sequence
  Synthetic
gaguccaaggaauacuaacau

SEQ ID NO: 18371 - RNA, 22 nt, Artificial Sequence
  Synthetic
ugaguccaaggaauacuaacau

SEQ ID NO: 18372 - RNA, 23 nt, Artificial Sequence
  Synthetic
augaguccaaggaauacuaacau

SEQ ID NO: 18373 - RNA, 24 nt, Artificial Sequence
  Synthetic
uaugaguccaaggaauacuaacau

SEQ ID NO: 18374 - RNA, 18 nt, Artificial Sequence
  Synthetic
  misc_feature (6)..(6): n is a, c, g, or u
gcacanccuagcagccau

SEQ ID NO: 18375 - RNA, 19 nt, Artificial Sequence
  Synthetic
  misc_feature (7)..(7): n is a, c, g, or u
agcacanccuagcagccau

SEQ ID NO: 18376 - RNA, 20 nt, Artificial Sequence
  Synthetic
  misc_feature (8)..(8): n is a, c, g, or u
cagcacanccuagcagccau

SEQ ID NO: 18377 - RNA, 21 nt, Artificial Sequence
  Synthetic
  misc_feature (9)..(9): n is a, c, g, or u
gcagcacanccuagcagccau

SEQ ID NO: 18378 - RNA, 22 nt, Artificial Sequence
  Synthetic
  misc_feature (10)..(10): n is a, c, g, or u
ggcagcacanccuagcagccau

SEQ ID NO: 18379 - RNA, 23 nt, Artificial Sequence
  Synthetic
  misc_feature (11)..(11): n is a, c, g, or u
uggcagcacanccuagcagccau

SEQ ID NO: 18380 - RNA, 24 nt, Artificial Sequence
  Synthetic
  misc_feature (12)..(12): n is a, c, g, or u
uuggcagcacanccuagcagccau

SEQ ID NO: 18381 - RNA, 18 nt, Artificial Sequence
  Synthetic
acaggcauacaagggcau

SEQ ID NO: 18382 - RNA, 19 nt, Artificial Sequence
  Synthetic
uacaggcauacaagggcau

SEQ ID NO: 18383 - RNA, 20 nt, Artificial Sequence
  Synthetic
auacaggcauacaagggcau

SEQ ID NO: 18384 - RNA, 21 nt, Artificial Sequence
  Synthetic
aauacaggcauacaagggcau

SEQ ID NO: 18385 - RNA, 22 nt, Artificial Sequence
  Synthetic
uaauacaggcauacaagggcau

SEQ ID NO: 18386 - RNA, 23 nt, Artificial Sequence
  Synthetic
guaauacaggcauacaagggcau

SEQ ID NO: 18387 - RNA, 24 nt, Artificial Sequence
  Synthetic
gguaauacaggcauacaagggcau

SEQ ID NO: 18388 - RNA, 18 nt, Artificial Sequence
  Synthetic
gcacacgggccggcagau

SEQ ID NO: 18389 - RNA, 19 nt, Artificial Sequence
  Synthetic
ugcacacgggccggcagau

SEQ ID NO: 18390 - RNA, 20 nt, Artificial Sequence
  Synthetic
gugcacacgggccggcagau

SEQ ID NO: 18391 - RNA, 21 nt, Artificial Sequence
  Synthetic
agugcacacgggccggcagau

SEQ ID NO: 18392 - RNA, 22 nt, Artificial Sequence
  Synthetic
aagugcacacgggccggcagau

SEQ ID NO: 18393 - RNA, 23 nt, Artificial Sequence
  Synthetic
gaagugcacacgggccggcagau

SEQ ID NO: 18394 - RNA, 24 nt, Artificial Sequence
  Synthetic
cgaagugcacacgggccggcagau

SEQ ID NO: 18395 - RNA, 18 nt, Artificial Sequence
  Synthetic
ugguaagugauuggagau

SEQ ID NO: 18396 - RNA, 19 nt, Artificial Sequence
  Synthetic
uugguaagugauuggagau

SEQ ID NO: 18397 - RNA, 20 nt, Artificial Sequence
  Synthetic
guugguaagugauuggagau

SEQ ID NO: 18398 - RNA, 21 nt, Artificial Sequence
  Synthetic
gguugguaagugauuggagau

SEQ ID NO: 18399 - RNA, 22 nt, Artificial Sequence
  Synthetic
agguugguaagugauuggagau

SEQ ID NO: 18400 - RNA, 23 nt, Artificial Sequence
  Synthetic
gagguugguaagugauuggagau

SEQ ID NO: 18401 - RNA, 24 nt, Artificial Sequence
  Synthetic
ggagguugguaagugauuggagau

SEQ ID NO: 18402 - RNA, 18 nt, Artificial Sequence
  Synthetic
cggaaguguugauaggau

SEQ ID NO: 18403 - RNA, 19 nt, Artificial Sequence
  Synthetic
ccggaaguguugauaggau

SEQ ID NO: 18404 - RNA, 20 nt, Artificial Sequence
  Synthetic
uccggaaguguugauaggau

SEQ ID NO: 18405 - RNA, 21 nt, Artificial Sequence
  Synthetic
cuccggaaguguugauaggau

SEQ ID NO: 18406 - RNA, 22 nt, Artificial Sequence
  Synthetic
ucuccggaaguguugauaggau

SEQ ID NO: 18407 - RNA, 23 nt, Artificial Sequence
  Synthetic
gucuccggaaguguugauaggau

SEQ ID NO: 18408 - RNA, 24 nt, Artificial Sequence
  Synthetic
agucuccggaaguguugauaggau

SEQ ID NO: 18409 - RNA, 18 nt, Artificial Sequence
  Synthetic
uucgagaagauugaugau

SEQ ID NO: 18410 - RNA, 19 nt, Artificial Sequence
  Synthetic
cuucgagaagauugaugau

SEQ ID NO: 18411 - RNA, 20 nt, Artificial Sequence
  Synthetic
ucuucgagaagauugaugau

SEQ ID NO: 18412 - RNA, 21 nt, Artificial Sequence
  Synthetic
gucuucgagaagauugaugau

SEQ ID NO: 18413 - RNA, 22 nt, Artificial Sequence
  Synthetic
agucuucgagaagauugaugau

SEQ ID NO: 18414 - RNA, 23 nt, Artificial Sequence
  Synthetic
cagucuucgagaagauugaugau

SEQ ID NO: 18415 - RNA, 24 nt, Artificial Sequence
  Synthetic
ccagucuucgagaagauugaugau

SEQ ID NO: 18416 - RNA, 18 nt, Artificial Sequence
  Synthetic
aggagguugguaagugau

SEQ ID NO: 18417 - RNA, 19 nt, Artificial Sequence
  Synthetic
caggagguugguaagugau

SEQ ID NO: 18418 - RNA, 20 nt, Artificial Sequence
  Synthetic
acaggagguugguaagugau

SEQ ID NO: 18419 - RNA, 21 nt, Artificial Sequence
  Synthetic
gacaggagguugguaagugau

SEQ ID NO: 18420 - RNA, 22 nt, Artificial Sequence
  Synthetic
ggacaggagguugguaagugau

SEQ ID NO: 18421 - RNA, 23 nt, Artificial Sequence
  Synthetic
aggacaggagguugguaagugau

SEQ ID NO: 18422 - RNA, 24 nt, Artificial Sequence
  Synthetic
gaggacaggagguugguaagugau

SEQ ID NO: 18423 - RNA, 18 nt, Artificial Sequence
  Synthetic
gggaaguauuuaguaacu

SEQ ID NO: 18424 - RNA, 19 nt, Artificial Sequence
  Synthetic
agggaaguauuuaguaacu

SEQ ID NO: 18425 - RNA, 20 nt, Artificial Sequence
  Synthetic
aagggaaguauuuaguaacu

SEQ ID NO: 18426 - RNA, 21 nt, Artificial Sequence
  Synthetic
aaagggaaguauuuaguaacu

SEQ ID NO: 18427 - RNA, 22 nt, Artificial Sequence
  Synthetic
caaagggaaguauuuaguaacu

SEQ ID NO: 18428 - RNA, 23 nt, Artificial Sequence
  Synthetic
ccaaagggaaguauuuaguaacu

SEQ ID NO: 18429 - RNA, 24 nt, Artificial Sequence
  Synthetic
uccaaagggaaguauuuaguaacu

SEQ ID NO: 18430 - RNA, 18 nt, Artificial Sequence
  Synthetic
cuguggaugugugucccu

SEQ ID NO: 18431 - RNA, 19 nt, Artificial Sequence
  Synthetic
ccuguggaugugugucccu

SEQ ID NO: 18432 - RNA, 20 nt, Artificial Sequence
  Synthetic
gccuguggaugugugucccu

SEQ ID NO: 18433 - RNA, 21 nt, Artificial Sequence
  Synthetic
ggccuguggaugugugucccu

SEQ ID NO: 18434 - RNA, 22 nt, Artificial Sequence
  Synthetic
uggccuguggaugugugucccu

SEQ ID NO: 18435 - RNA, 23 nt, Artificial Sequence
  Synthetic
auggccuguggaugugugucccu

SEQ ID NO: 18436 - RNA, 24 nt, Artificial Sequence
  Synthetic
cauggccuguggaugugugucccu

SEQ ID NO: 18437 - RNA, 18 nt, Artificial Sequence
  Synthetic
  misc_feature (2)..(2): n is a, c, g, or u
unagaaugcccugugccu

SEQ ID NO: 18438 - RNA, 19 nt, Artificial Sequence
  Synthetic
  misc_feature (3)..(3): n is a, c, g, or u
gunagaaugcccugugccu

SEQ ID NO: 18439 - RNA, 20 nt, Artificial Sequence
  Synthetic
  misc_feature (4)..(4): n is a, c, g, or u
ugunagaaugcccugugccu

SEQ ID NO: 18440 - RNA, 21 nt, Artificial Sequence
  Synthetic
  misc_feature (5)..(5): n is a, c, g, or u
uugunagaaugcccugugccu

SEQ ID NO: 18441 - RNA, 22 nt, Artificial Sequence
  Synthetic
  misc_feature (6)..(6): n is a, c, g, or u
guugunagaaugcccugugccu

SEQ ID NO: 18442 - RNA, 23 nt, Artificial Sequence
  Synthetic
  misc_feature (7)..(7): n is a, c, g, or u
gguugunagaaugcccugugccu

SEQ ID NO: 18443 - RNA, 24 nt, Artificial Sequence
  Synthetic
  misc_feature (8)..(8): n is a, c, g, or u
agguugunagaaugcccugugccu

SEQ ID NO: 18444 - RNA, 18 nt, Artificial Sequence
  Synthetic
gcacaaaauagcuugccu

SEQ ID NO: 18445 - RNA, 19 nt, Artificial Sequence
  Synthetic
agcacaaaauagcuugccu

SEQ ID NO: 18446 - RNA, 20 nt, Artificial Sequence
  Synthetic
cagcacaaaauagcuugccu

SEQ ID NO: 18447 - RNA, 21 nt, Artificial Sequence
  Synthetic
ccagcacaaaauagcuugccu

SEQ ID NO: 18448 - RNA, 22 nt, Artificial Sequence
  Synthetic
cccagcacaaaauagcuugccu

SEQ ID NO: 18449 - RNA, 23 nt, Artificial Sequence
  Synthetic
ccccagcacaaaauagcuugccu

SEQ ID NO: 18450 - RNA, 24 nt, Artificial Sequence
  Synthetic
accccagcacaaaauagcuugccu

SEQ ID NO: 18451 - RNA, 18 nt, Artificial Sequence
  Synthetic
gccacccaaggcacagcu

SEQ ID NO: 18452 - RNA, 19 nt, Artificial Sequence
  Synthetic
agccacccaaggcacagcu

SEQ ID NO: 18453 - RNA, 20 nt, Artificial Sequence
  Synthetic
aagccacccaaggcacagcu

SEQ ID NO: 18454 - RNA, 21 nt, Artificial Sequence
  Synthetic
aaagccacccaaggcacagcu

SEQ ID NO: 18455 - RNA, 22 nt, Artificial Sequence
  Synthetic
caaagccacccaaggcacagcu

SEQ ID NO: 18456 - RNA, 23 nt, Artificial Sequence
  Synthetic
ccaaagccacccaaggcacagcu

SEQ ID NO: 18457 - RNA, 24 nt, Artificial Sequence
  Synthetic
cccaaagccacccaaggcacagcu

SEQ ID NO: 18458 - RNA, 18 nt, Artificial Sequence
  Synthetic
  misc_feature (15)..(15): n is a, c, g, or u
guccgcuccagaccngcu

SEQ ID NO: 18459 - RNA, 19 nt, Artificial Sequence
  Synthetic
  misc_feature (1)..(1): n is a, c, g, or u
  misc_feature (16)..(16): n is a, c, g, or u
nguccgcuccagaccngcu

SEQ ID NO: 18460 - RNA, 20 nt, Artificial Sequence
  Synthetic
  misc_feature (2)..(2): n is a, c, g, or u
  misc_feature (17)..(17): n is a, c, g, or u
anguccgcuccagaccngcu

SEQ ID NO: 18461 - RNA, 21 nt, Artificial Sequence
  Synthetic
  misc_feature (3)..(3): n is a, c, g, or u
  misc_feature (18)..(18): n is a, c, g, or u
aanguccgcuccagaccngcu

SEQ ID NO: 18462 - RNA, 22 nt, Artificial Sequence
  Synthetic
  misc_feature (4)..(4): n is a, c, g, or u
  misc_feature (19)..(19): n is a, c, g, or u
uaanguccgcuccagaccngcu

SEQ ID NO: 18463 - RNA, 23 nt, Artificial Sequence
  Synthetic
  misc_feature (5)..(5): n is a, c, g, or u
  misc_feature (20)..(20): n is a, c, g, or u
auaanguccgcuccagaccngcu

SEQ ID NO: 18464 - RNA, 24 nt, Artificial Sequence
  Synthetic
  misc_feature (6)..(6): n is a, c, g, or u
  misc_feature (21)..(21): n is a, c, g, or u
gauaanguccgcuccagaccngcu

SEQ ID NO: 18465 - RNA, 18 nt, Artificial Sequence
  Synthetic
  misc_feature (3)..(3): n is a, c, g, or u
uancaggguccccagucu

SEQ ID NO: 18466 - RNA, 19 nt, Artificial Sequence
  Synthetic
  misc_feature (4)..(4): n is a, c, g, or u
auancaggguccccagucu

SEQ ID NO: 18467 - RNA, 20 nt, Artificial Sequence
  Synthetic
  misc_feature (5)..(5): n is a, c, g, or u
cauancaggguccccagucu

SEQ ID NO: 18468 - RNA, 21 nt, Artificial Sequence
  Synthetic
  misc_feature (6)..(6): n is a, c, g, or u
ucauancaggguccccagucu

SEQ ID NO: 18469 - RNA, 22 nt, Artificial Sequence
  Synthetic
  misc_feature (7)..(7): n is a, c, g, or u
uucauancaggguccccagucu

SEQ ID NO: 18470 - RNA, 23 nt, Artificial Sequence
  Synthetic
  misc_feature (8)..(8): n is a, c, g, or u
guucauancaggguccccagucu

SEQ ID NO: 18471 - RNA, 24 nt, Artificial Sequence
  Synthetic
  misc_feature (9)..(9): n is a, c, g, or u
uguucauancaggguccccagucu

SEQ ID NO: 18472 - RNA, 18 nt, Artificial Sequence
  Synthetic
gucuaacaacaguagucu

SEQ ID NO: 18473 - RNA, 19 nt, Artificial Sequence
  Synthetic
ugucuaacaacaguagucu

SEQ ID NO: 18474 - RNA, 20 nt, Artificial Sequence
  Synthetic
uugucuaacaacaguagucu

SEQ ID NO: 18475 - RNA, 21 nt, Artificial Sequence
  Synthetic
guugucuaacaacaguagucu

SEQ ID NO: 18476 - RNA, 22 nt, Artificial Sequence
  Synthetic
cguugucuaacaacaguagucu

SEQ ID NO: 18477 - RNA, 23 nt, Artificial Sequence
  Synthetic
ucguugucuaacaacaguagucu

SEQ ID NO: 18478 - RNA, 24 nt, Artificial Sequence
  Synthetic
cucguugucuaacaacaguagucu

SEQ ID NO: 18479 - RNA, 18 nt, Artificial Sequence
  Synthetic
  misc_feature (1)..(1): n is a, c, g, or u
ngauugagaucuucgucu

SEQ ID NO: 18480 - RNA, 19 nt, Artificial Sequence
  Synthetic
  misc_feature (2)..(2): n is a, c, g, or u
gngauugagaucuucgucu

SEQ ID NO: 18481 - RNA, 20 nt, Artificial Sequence
  Synthetic
  misc_feature (3)..(3): n is a, c, g, or u
ggngauugagaucuucgucu

SEQ ID NO: 18482 - RNA, 21 nt, Artificial Sequence
  Synthetic
  misc_feature (4)..(4): n is a, c, g, or u
cggngauugagaucuucgucu

SEQ ID NO: 18483 - RNA, 22 nt, Artificial Sequence
  Synthetic
  misc_feature (5)..(5): n is a, c, g, or u
gcggngauugagaucuucgucu

SEQ ID NO: 18484 - RNA, 23 nt, Artificial Sequence
  Synthetic
  misc_feature (6)..(6): n is a, c, g, or u
cgcggngauugagaucuucgucu

SEQ ID NO: 18485 - RNA, 24 nt, Artificial Sequence
  Synthetic
  misc_feature (7)..(7): n is a, c, g, or u
acgcggngauugagaucuucgucu

SEQ ID NO: 18486 - RNA, 18 nt, Artificial Sequence
  Synthetic
cgagggaguucuucuucu

SEQ ID NO: 18487 - RNA, 19 nt, Artificial Sequence
  Synthetic
gcgagggaguucuucuucu

SEQ ID NO: 18488 - RNA, 20 nt, Artificial Sequence
  Synthetic
ggcgagggaguucuucuucu

SEQ ID NO: 18489 - RNA, 21 nt, Artificial Sequence
  Synthetic
aggcgagggaguucuucuucu

SEQ ID NO: 18490 - RNA, 22 nt, Artificial Sequence
  Synthetic
gaggcgagggaguucuucuucu

SEQ ID NO: 18491 - RNA, 23 nt, Artificial Sequence
  Synthetic
cgaggcgagggaguucuucuucu

SEQ ID NO: 18492 - RNA, 24 nt, Artificial Sequence
  Synthetic
gcgaggcgagggaguucuucuucu

SEQ ID NO: 18493 - RNA, 18 nt, Artificial Sequence
  Synthetic
acgauagccaggacaagu

SEQ ID NO: 18494 - RNA, 19 nt, Artificial Sequence
  Synthetic
aacgauagccaggacaagu

SEQ ID NO: 18495 - RNA, 20 nt, Artificial Sequence
  Synthetic
caacgauagccaggacaagu

SEQ ID NO: 18496 - RNA, 21 nt, Artificial Sequence
  Synthetic
ccaacgauagccaggacaagu

SEQ ID NO: 18497 - RNA, 22 nt, Artificial Sequence
  Synthetic
uccaacgauagccaggacaagu

SEQ ID NO: 18498 - RNA, 23 nt, Artificial Sequence
  Synthetic
auccaacgauagccaggacaagu

SEQ ID NO: 18499 - RNA, 24 nt, Artificial Sequence
  Synthetic
cauccaacgauagccaggacaagu

SEQ ID NO: 18500 - RNA, 18 nt, Artificial Sequence
  Synthetic
ggacagacgggaagaagu

SEQ ID NO: 18501 - RNA, 19 nt, Artificial Sequence
  Synthetic
cggacagacgggaagaagu

SEQ ID NO: 18502 - RNA, 20 nt, Artificial Sequence
  Synthetic
ccggacagacgggaagaagu

SEQ ID NO: 18503 - RNA, 21 nt, Artificial Sequence
  Synthetic
cccggacagacgggaagaagu

SEQ ID NO: 18504 - RNA, 22 nt, Artificial Sequence
  Synthetic
ucccggacagacgggaagaagu

SEQ ID NO: 18505 - RNA, 23 nt, Artificial Sequence
  Synthetic
gucccggacagacgggaagaagu

SEQ ID NO: 18506 - RNA, 24 nt, Artificial Sequence
  Synthetic
ggucccggacagacgggaagaagu

SEQ ID NO: 18507 - RNA, 18 nt, Artificial Sequence
  Synthetic
aacuaaaagccagacagu

SEQ ID NO: 18508 - RNA, 19 nt, Artificial Sequence
  Synthetic
uaacuaaaagccagacagu

SEQ ID NO: 18509 - RNA, 20 nt, Artificial Sequence
  Synthetic
auaacuaaaagccagacagu

SEQ ID NO: 18510 - RNA, 21 nt, Artificial Sequence
  Synthetic
uauaacuaaaagccagacagu

SEQ ID NO: 18511 - RNA, 22 nt, Artificial Sequence
  Synthetic
auauaacuaaaagccagacagu

SEQ ID NO: 18512 - RNA, 23 nt, Artificial Sequence
  Synthetic
cauauaacuaaaagccagacagu

SEQ ID NO: 18513 - RNA, 24 nt, Artificial Sequence
  Synthetic
ccauauaacuaaaagccagacagu

SEQ ID NO: 18514 - RNA, 18 nt, Artificial Sequence
  Synthetic
ugugagagaggcaauagu

SEQ ID NO: 18515 - RNA, 19 nt, Artificial Sequence
  Synthetic
augugagagaggcaauagu

SEQ ID NO: 18516 - RNA, 20 nt, Artificial Sequence
  Synthetic
gaugugagagaggcaauagu

SEQ ID NO: 18517 - RNA, 21 nt, Artificial Sequence
  Synthetic
ugaugugagagaggcaauagu

SEQ ID NO: 18518 - RNA, 22 nt, Artificial Sequence
  Synthetic
augaugugagagaggcaauagu

SEQ ID NO: 18519 - RNA, 23 nt, Artificial Sequence
  Synthetic
gaugaugugagagaggcaauagu

SEQ ID NO: 18520 - RNA, 24 nt, Artificial Sequence
  Synthetic
ugaugaugugagagaggcaauagu

SEQ ID NO: 18521 - RNA, 18 nt, Artificial Sequence
  Synthetic
accccagaaggccaccgu

SEQ ID NO: 18522 - RNA, 19 nt, Artificial Sequence
  Synthetic
caccccagaaggccaccgu

SEQ ID NO: 18523 - RNA, 20 nt, Artificial Sequence
  Synthetic
ccaccccagaaggccaccgu

SEQ ID NO: 18524 - RNA, 21 nt, Artificial Sequence
  Synthetic
uccaccccagaaggccaccgu

SEQ ID NO: 18525 - RNA, 22 nt, Artificial Sequence
  Synthetic
cuccaccccagaaggccaccgu

SEQ ID NO: 18526 - RNA, 23 nt, Artificial Sequence
  Synthetic
gcuccaccccagaaggccaccgu

SEQ ID NO: 18527 - RNA, 24 nt, Artificial Sequence
  Synthetic
ggcuccaccccagaaggccaccgu

SEQ ID NO: 18528 - RNA, 18 nt, Artificial Sequence
  Synthetic
uacaggugcaauuuccgu

SEQ ID NO: 18529 - RNA, 19 nt, Artificial Sequence
  Synthetic
auacaggugcaauuuccgu

SEQ ID NO: 18530 - RNA, 20 nt, Artificial Sequence
  Synthetic
aauacaggugcaauuuccgu

SEQ ID NO: 18531 - RNA, 21 nt, Artificial Sequence
  Synthetic
gaauacaggugcaauuuccgu

SEQ ID NO: 18532 - RNA, 22 nt, Artificial Sequence
  Synthetic
ggaauacaggugcaauuuccgu

SEQ ID NO: 18533 - RNA, 23 nt, Artificial Sequence
  Synthetic
gggaauacaggugcaauuuccgu

SEQ ID NO: 18534 - RNA, 24 nt, Artificial Sequence
  Synthetic
ugggaauacaggugcaauuuccgu

SEQ ID NO: 18535 - RNA, 18 nt, Artificial Sequence
  Synthetic
aggccaccgugugggggu

SEQ ID NO: 18536 - RNA, 19 nt, Artificial Sequence
  Synthetic
aaggccaccgugugggggu

SEQ ID NO: 18537 - RNA, 20 nt, Artificial Sequence
  Synthetic
gaaggccaccgugugggggu

SEQ ID NO: 18538 - RNA, 21 nt, Artificial Sequence
  Synthetic
agaaggccaccgugugggggu

SEQ ID NO: 18539 - RNA, 22 nt, Artificial Sequence
  Synthetic
cagaaggccaccgugugggggu

SEQ ID NO: 18540 - RNA, 23 nt, Artificial Sequence
  Synthetic
ccagaaggccaccgugugggggu

SEQ ID NO: 18541 - RNA, 24 nt, Artificial Sequence
  Synthetic
cccagaaggccaccgugugggggu

SEQ ID NO: 18542 - RNA, 18 nt, Artificial Sequence
  Synthetic
guggauccaacugguggu

SEQ ID NO: 18543 - RNA, 19 nt, Artificial Sequence
  Synthetic
aguggauccaacugguggu

SEQ ID NO: 18544 - RNA, 20 nt, Artificial Sequence
  Synthetic
uaguggauccaacugguggu

SEQ ID NO: 18545 - RNA, 21 nt, Artificial Sequence
  Synthetic
auaguggauccaacugguggu

SEQ ID NO: 18546 - RNA, 22 nt, Artificial Sequence
  Synthetic
aauaguggauccaacugguggu

SEQ ID NO: 18547 - RNA, 23 nt, Artificial Sequence
  Synthetic
gaauaguggauccaacugguggu

SEQ ID NO: 18548 - RNA, 24 nt, Artificial Sequence
  Synthetic
ugaauaguggauccaacugguggu

SEQ ID NO: 18549 - RNA, 18 nt, Artificial Sequence
  Synthetic
  misc_feature (14)..(14): n is a, c, g, or u
gccugagagcagunuggu

SEQ ID NO: 18550 - RNA, 19 nt, Artificial Sequence
  Synthetic
  misc_feature (15)..(15): n is a, c, g, or u
ugccugagagcagunuggu

SEQ ID NO: 18551 - RNA, 20 nt, Artificial Sequence
  Synthetic
  misc_feature (16)..(16): n is a, c, g, or u
uugccugagagcagunuggu

SEQ ID NO: 18552 - RNA, 21 nt, Artificial Sequence
  Synthetic
  misc_feature (17)..(17): n is a, c, g, or u
cuugccugagagcagunuggu

SEQ ID NO: 18553 - RNA, 22 nt, Artificial Sequence
  Synthetic
  misc_feature (18)..(18): n is a, c, g, or u
gcuugccugagagcagunuggu

SEQ ID NO: 18554 - RNA, 23 nt, Artificial Sequence
  Synthetic
  misc_feature (19)..(19): n is a, c, g, or u
agcuugccugagagcagunuggu

SEQ ID NO: 18555 - RNA, 24 nt, Artificial Sequence
  Synthetic
  misc_feature (20)..(20): n is a, c, g, or u
uagcuugccugagagcagunuggu

SEQ ID NO: 18556 - RNA, 18 nt, Artificial Sequence
  Synthetic
cuugaugcaagugaaugu

SEQ ID NO: 18557 - RNA, 19 nt, Artificial Sequence
  Synthetic
ucuugaugcaagugaaugu

SEQ ID NO: 18558 - RNA, 20 nt, Artificial Sequence
  Synthetic
aucuugaugcaagugaaugu

SEQ ID NO: 18559 - RNA, 21 nt, Artificial Sequence
  Synthetic
  misc_feature (1)..(1): n is a, c, g, or u
naucuugaugcaagugaaugu

SEQ ID NO: 18560 - RNA, 22 nt, Artificial Sequence
  Synthetic
  misc_feature (2)..(2): n is a, c, g, or u
anaucuugaugcaagugaaugu

SEQ ID NO: 18561 - RNA, 23 nt, Artificial Sequence
  Synthetic
  misc_feature (3)..(3): n is a, c, g, or u
canaucuugaugcaagugaaugu

SEQ ID NO: 18562 - RNA, 24 nt, Artificial Sequence
  Synthetic
  misc_feature (4)..(4): n is a, c, g, or u
ucanaucuugaugcaagugaaugu

SEQ ID NO: 18563 - RNA, 18 nt, Artificial Sequence
  Synthetic
cgagaagauugaugaugu

SEQ ID NO: 18564 - RNA, 19 nt, Artificial Sequence
  Synthetic
ucgagaagauugaugaugu

SEQ ID NO: 18565 - RNA, 20 nt, Artificial Sequence
  Synthetic
uucgagaagauugaugaugu

SEQ ID NO: 18566 - RNA, 21 nt, Artificial Sequence
  Synthetic
cuucgagaagauugaugaugu

SEQ ID NO: 18567 - RNA, 22 nt, Artificial Sequence
  Synthetic
ucuucgagaagauugaugaugu

SEQ ID NO: 18568 - RNA, 23 nt, Artificial Sequence
  Synthetic
gucuucgagaagauugaugaugu

SEQ ID NO: 18569 - RNA, 24 nt, Artificial Sequence
  Synthetic
agucuucgagaagauugaugaugu

SEQ ID NO: 18570 - RNA, 18 nt, Artificial Sequence
  Synthetic
ugguaccccuagaaaauu

SEQ ID NO: 18571 - RNA, 19 nt, Artificial Sequence
  Synthetic
gugguaccccuagaaaauu

SEQ ID NO: 18572 - RNA, 20 nt, Artificial Sequence
  Synthetic
ggugguaccccuagaaaauu

SEQ ID NO: 18573 - RNA, 21 nt, Artificial Sequence
  Synthetic
gggugguaccccuagaaaauu

SEQ ID NO: 18574 - RNA, 22 nt, Artificial Sequence
  Synthetic
cgggugguaccccuagaaaauu

SEQ ID NO: 18575 - RNA, 23 nt, Artificial Sequence
  Synthetic
ccgggugguaccccuagaaaauu

SEQ ID NO: 18576 - RNA, 24 nt, Artificial Sequence
  Synthetic
cccgggugguaccccuagaaaauu

SEQ ID NO: 18577 - RNA, 18 nt, Artificial Sequence
  Synthetic
ccaaggaauacuaacauu

SEQ ID NO: 18578 - RNA, 19 nt, Artificial Sequence
  Synthetic
uccaaggaauacuaacauu

SEQ ID NO: 18579 - RNA, 20 nt, Artificial Sequence
  Synthetic
guccaaggaauacuaacauu

SEQ ID NO: 18580 - RNA, 21 nt, Artificial Sequence
  Synthetic
aguccaaggaauacuaacauu

SEQ ID NO: 18581 - RNA, 22 nt, Artificial Sequence
  Synthetic
gaguccaaggaauacuaacauu

SEQ ID NO: 18582 - RNA, 23 nt, Artificial Sequence
  Synthetic
ugaguccaaggaauacuaacauu

SEQ ID NO: 18583 - RNA, 24 nt, Artificial Sequence
  Synthetic
augaguccaaggaauacuaacauu

SEQ ID NO: 18584 - RNA, 18 nt, Artificial Sequence
  Synthetic
gguaagugauuggagauu

SEQ ID NO: 18585 - RNA, 19 nt, Artificial Sequence
  Synthetic
ugguaagugauuggagauu

SEQ ID NO: 18586 - RNA, 20 nt, Artificial Sequence
  Synthetic
uugguaagugauuggagauu

SEQ ID NO: 18587 - RNA, 21 nt, Artificial Sequence
  Synthetic
guugguaagugauuggagauu

SEQ ID NO: 18588 - RNA, 22 nt, Artificial Sequence
  Synthetic
gguugguaagugauuggagauu

SEQ ID NO: 18589 - RNA, 23 nt, Artificial Sequence
  Synthetic
agguugguaagugauuggagauu

SEQ ID NO: 18590 - RNA, 24 nt, Artificial Sequence
  Synthetic
gagguugguaagugauuggagauu

SEQ ID NO: 18591 - RNA, 18 nt, Artificial Sequence
  Synthetic
  misc_feature (11)..(11): n is a, c, g, or u
ucuagacucunugguauu

SEQ ID NO: 18592 - RNA, 19 nt, Artificial Sequence
  Synthetic
  misc_feature (12)..(12): n is a, c, g, or u
gucuagacucunugguauu

SEQ ID NO: 18593 - RNA, 20 nt, Artificial Sequence
  Synthetic
  misc_feature (13)..(13): n is a, c, g, or u
agucuagacucunugguauu

SEQ ID NO: 18594 - RNA, 21 nt, Artificial Sequence
  Synthetic
  misc_feature (14)..(14): n is a, c, g, or u
gagucuagacucunugguauu

SEQ ID NO: 18595 - RNA, 22 nt, Artificial Sequence
  Synthetic
  misc_feature (15)..(15): n is a, c, g, or u
cgagucuagacucunugguauu

SEQ ID NO: 18596 - RNA, 23 nt, Artificial Sequence
  Synthetic
  misc_feature (16)..(16): n is a, c, g, or u
acgagucuagacucunugguauu

SEQ ID NO: 18597 - RNA, 24 nt, Artificial Sequence
  Synthetic
  misc_feature (17)..(17): n is a, c, g, or u
cacgagucuagacucunugguauu

SEQ ID NO: 18598 - RNA, 18 nt, Artificial Sequence
  Synthetic
ugggaaggagguguacuu

SEQ ID NO: 18599 - RNA, 19 nt, Artificial Sequence
  Synthetic
augggaaggagguguacuu

SEQ ID NO: 18600 - RNA, 20 nt, Artificial Sequence
  Synthetic
caugggaaggagguguacuu

SEQ ID NO: 18601 - RNA, 21 nt, Artificial Sequence
  Synthetic
ccaugggaaggagguguacuu

SEQ ID NO: 18602 - RNA, 22 nt, Artificial Sequence
  Synthetic
gccaugggaaggagguguacuu

SEQ ID NO: 18603 - RNA, 23 nt, Artificial Sequence
  Synthetic
agccaugggaaggagguguacuu

SEQ ID NO: 18604 - RNA, 24 nt, Artificial Sequence
  Synthetic
cagccaugggaaggagguguacuu

SEQ ID NO: 18605 - RNA, 18 nt, Artificial Sequence
  Synthetic
augccccuucucgccguu

SEQ ID NO: 18606 - RNA, 19 nt, Artificial Sequence
  Synthetic
caugccccuucucgccguu

SEQ ID NO: 18607 - RNA, 20 nt, Artificial Sequence
  Synthetic
ccaugccccuucucgccguu

SEQ ID NO: 18608 - RNA, 21 nt, Artificial Sequence
  Synthetic
cccaugccccuucucgccguu

SEQ ID NO: 18609 - RNA, 22 nt, Artificial Sequence
  Synthetic
ucccaugccccuucucgccguu

SEQ ID NO: 18610 - RNA, 23 nt, Artificial Sequence
  Synthetic
gucccaugccccuucucgccguu

SEQ ID NO: 18611 - RNA, 24 nt, Artificial Sequence
  Synthetic
ugucccaugccccuucucgccguu

SEQ ID NO: 18612 - RNA, 18 nt, Artificial Sequence
  Synthetic
ucuauucacgggaaguuu

SEQ ID NO: 18613 - RNA, 19 nt, Artificial Sequence
  Synthetic
gucuauucacgggaaguuu

SEQ ID NO: 18614 - RNA, 20 nt, Artificial Sequence
  Synthetic
ggucuauucacgggaaguuu

SEQ ID NO: 18615 - RNA, 21 nt, Artificial Sequence
  Synthetic
gggucuauucacgggaaguuu

SEQ ID NO: 18616 - RNA, 22 nt, Artificial Sequence
  Synthetic
ugggucuauucacgggaaguuu

SEQ ID NO: 18617 - RNA, 23 nt, Artificial Sequence
  Synthetic
augggucuauucacgggaaguuu

SEQ ID NO: 18618 - RNA, 24 nt, Artificial Sequence
  Synthetic
aaugggucuauucacgggaaguuu

SEQ ID NO: 18619 - RNA, 18 nt, Artificial Sequence
  Synthetic
gagcaggguucuguguuu

SEQ ID NO: 18620 - RNA, 19 nt, Artificial Sequence
  Synthetic
ggagcaggguucuguguuu

SEQ ID NO: 18621 - RNA, 20 nt, Artificial Sequence
  Synthetic
cggagcaggguucuguguuu

SEQ ID NO: 18622 - RNA, 21 nt, Artificial Sequence
  Synthetic
ucggagcaggguucuguguuu

SEQ ID NO: 18623 - RNA, 22 nt, Artificial Sequence
  Synthetic
gucggagcaggguucuguguuu

SEQ ID NO: 18624 - RNA, 23 nt, Artificial Sequence
  Synthetic
agucggagcaggguucuguguuu

SEQ ID NO: 18625 - RNA, 24 nt, Artificial Sequence
  Synthetic
uagucggagcaggguucuguguuu

SEQ ID NO: 18626 - RNA, 18 nt, Artificial Sequence
  Synthetic
cacucccauagguauuuu

SEQ ID NO: 18627 - RNA, 19 nt, Artificial Sequence
  Synthetic
ccacucccauagguauuuu

SEQ ID NO: 18628 - RNA, 20 nt, Artificial Sequence
  Synthetic
cccacucccauagguauuuu

SEQ ID NO: 18629 - RNA, 21 nt, Artificial Sequence
  Synthetic
gcccacucccauagguauuuu

SEQ ID NO: 18630 - RNA, 22 nt, Artificial Sequence
  Synthetic
ggcccacucccauagguauuuu

SEQ ID NO: 18631 - RNA, 23 nt, Artificial Sequence
  Synthetic
aggcccacucccauagguauuuu

SEQ ID NO: 18632 - RNA, 24 nt, Artificial Sequence
  Synthetic
gaggcccacucccauagguauuuu

SEQ ID NO: 18633 - RNA, 18 nt, Artificial Sequence
  Synthetic
accuccugcuuccaccaa

SEQ ID NO: 18634 - RNA, 19 nt, Artificial Sequence
  Synthetic
caccuccugcuuccaccaa

SEQ ID NO: 18635 - RNA, 20 nt, Artificial Sequence
  Synthetic
ccaccuccugcuuccaccaa

SEQ ID NO: 18636 - RNA, 21 nt, Artificial Sequence
  Synthetic
uccaccuccugcuuccaccaa

SEQ ID NO: 18637 - RNA, 22 nt, Artificial Sequence
  Synthetic
auccaccuccugcuuccaccaa

SEQ ID NO: 18638 - RNA, 23 nt, Artificial Sequence
  Synthetic
gauccaccuccugcuuccaccaa

SEQ ID NO: 18639 - RNA, 24 nt, Artificial Sequence
  Synthetic
agauccaccuccugcuuccaccaa

SEQ ID NO: 18640 - RNA, 18 nt, Artificial Sequence
  Synthetic
  misc_feature (2)..(2): n is a, c, g, or u
cnugccuuacauuuggaa

SEQ ID NO: 18641 - RNA, 19 nt, Artificial Sequence
  Synthetic
  misc_feature (3)..(3): n is a, c, g, or u
ucnugccuuacauuuggaa

SEQ ID NO: 18642 - RNA, 20 nt, Artificial Sequence
  Synthetic
  misc_feature (4)..(4): n is a, c, g, or u
uucnugccuuacauuuggaa

SEQ ID NO: 18643 - RNA, 21 nt, Artificial Sequence
  Synthetic
  misc_feature (5)..(5): n is a, c, g, or u
uuucnugccuuacauuuggaa

SEQ ID NO: 18644 - RNA, 22 nt, Artificial Sequence
  Synthetic
  misc_feature (6)..(6): n is a, c, g, or u
auuucnugccuuacauuuggaa

SEQ ID NO: 18645 - RNA, 23 nt, Artificial Sequence
  Synthetic
  misc_feature (1)..(1): n is a, c, g, or u
  misc_feature (7)..(7): n is a, c, g, or u
nauuucnugccuuacauuuggaa

SEQ ID NO: 18646 - RNA, 24 nt, Artificial Sequence
  Synthetic
  misc_feature (2)..(2): n is a, c, g, or u
  misc_feature (8)..(8): n is a, c, g, or u
anauuucnugccuuacauuuggaa

SEQ ID NO: 18647 - RNA, 18 nt, Artificial Sequence
  Synthetic
  misc_feature (11)..(11): n is a, c, g, or u
ccacucacuanaaaugaa

SEQ ID NO: 18648 - RNA, 19 nt, Artificial Sequence
  Synthetic
  misc_feature (12)..(12): n is a, c, g, or u
cccacucacuanaaaugaa

SEQ ID NO: 18649 - RNA, 20 nt, Artificial Sequence
  Synthetic
  misc_feature (13)..(13): n is a, c, g, or u
gcccacucacuanaaaugaa

SEQ ID NO: 18650 - RNA, 21 nt, Artificial Sequence
  Synthetic
  misc_feature (14)..(14): n is a, c, g, or u
ggcccacucacuanaaaugaa

SEQ ID NO: 18651 - RNA, 22 nt, Artificial Sequence
  Synthetic
  misc_feature (1)..(1): n is a, c, g, or u
  misc_feature (15)..(15): n is a, c, g, or u
nggcccacucacuanaaaugaa

SEQ ID NO: 18652 - RNA, 23 nt, Artificial Sequence
  Synthetic
  misc_feature (2)..(2): n is a, c, g, or u
  misc_feature (16)..(16): n is a, c, g, or u
unggcccacucacuanaaaugaa

SEQ ID NO: 18653 - RNA, 24 nt, Artificial Sequence
  Synthetic
  misc_feature (3)..(3): n is a, c, g, or u
  misc_feature (17)..(17): n is a, c, g, or u
gunggcccacucacuanaaaugaa

SEQ ID NO: 18654 - RNA, 18 nt, Artificial Sequence
  Synthetic
  misc_feature (2)..(2): n is a, c, g, or u
  misc_feature (16)..(16): n is a, c, g, or u
unggcccacucacuanaa

SEQ ID NO: 18655 - RNA, 19 nt, Artificial Sequence
  Synthetic
  misc_feature (3)..(3): n is a, c, g, or u
  misc_feature (17)..(17): n is a, c, g, or u
gunggcccacucacuanaa

SEQ ID NO: 18656 - RNA, 20 nt, Artificial Sequence
  Synthetic
  misc_feature (4)..(4): n is a, c, g, or u
  misc_feature (18)..(18): n is a, c, g, or u
ugunggcccacucacuanaa

SEQ ID NO: 18657 - RNA, 21 nt, Artificial Sequence
  Synthetic
  misc_feature (5)..(5): n is a, c, g, or u
  misc_feature (19)..(19): n is a, c, g, or u
uugunggcccacucacuanaa

SEQ ID NO: 18658 - RNA, 22 nt, Artificial Sequence
  Synthetic
  misc_feature (6)..(6): n is a, c, g, or u
  misc_feature (20)..(20): n is a, c, g, or u
uuugunggcccacucacuanaa

SEQ ID NO: 18659 - RNA, 23 nt, Artificial Sequence
  Synthetic
  misc_feature (7)..(7): n is a, c, g, or u
  misc_feature (21)..(21): n is a, c, g, or u
auuugunggcccacucacuanaa

SEQ ID NO: 18660 - RNA, 24 nt, Artificial Sequence
  Synthetic
  misc_feature (8)..(8): n is a, c, g, or u
  misc_feature (22)..(22): n is a, c, g, or u
aauuugunggcccacucacuanaa

SEQ ID NO: 18661 - RNA, 18 nt, Artificial Sequence
  Synthetic
gccaacaaccuuacauaa

SEQ ID NO: 18662 - RNA, 19 nt, Artificial Sequence
  Synthetic
ugccaacaaccuuacauaa

SEQ ID NO: 18663 - RNA, 20 nt, Artificial Sequence
  Synthetic
uugccaacaaccuuacauaa

SEQ ID NO: 18664 - RNA, 21 nt, Artificial Sequence
  Synthetic
cuugccaacaaccuuacauaa

SEQ ID NO: 18665 - RNA, 22 nt, Artificial Sequence
  Synthetic
  misc_feature (1)..(1): n is a, c, g, or u
ncuugccaacaaccuuacauaa

SEQ ID NO: 18666 - RNA, 23 nt, Artificial Sequence
  Synthetic
  misc_feature (2)..(2): n is a, c, g, or u
ancuugccaacaaccuuacauaa

SEQ ID NO: 18667 - RNA, 24 nt, Artificial Sequence
  Synthetic
  misc_feature (3)..(3): n is a, c, g, or u
gancuugccaacaaccuuacauaa

SEQ ID NO: 18668 - RNA, 18 nt, Artificial Sequence
  Synthetic
ggcaggaauucuauauaa

SEQ ID NO: 18669 - RNA, 19 nt, Artificial Sequence
  Synthetic
aggcaggaauucuauauaa

SEQ ID NO: 18670 - RNA, 20 nt, Artificial Sequence
  Synthetic
aaggcaggaauucuauauaa

SEQ ID NO: 18671 - RNA, 21 nt, Artificial Sequence
  Synthetic
gaaggcaggaauucuauauaa

SEQ ID NO: 18672 - RNA, 22 nt, Artificial Sequence
  Synthetic
ggaaggcaggaauucuauauaa

SEQ ID NO: 18673 - RNA, 23 nt, Artificial Sequence
  Synthetic
uggaaggcaggaauucuauauaa

SEQ ID NO: 18674 - RNA, 24 nt, Artificial Sequence
  Synthetic
guggaaggcaggaauucuauauaa

SEQ ID NO: 18675 - RNA, 18 nt, Artificial Sequence
  Synthetic
ggcuccaguucagaaaca

SEQ ID NO: 18676 - RNA, 19 nt, Artificial Sequence
  Synthetic
uggcuccaguucagaaaca

SEQ ID NO: 18677 - RNA, 20 nt, Artificial Sequence
  Synthetic
guggcuccaguucagaaaca

SEQ ID NO: 18678 - RNA, 21 nt, Artificial Sequence
  Synthetic
gguggcuccaguucagaaaca

SEQ ID NO: 18679 - RNA, 22 nt, Artificial Sequence
  Synthetic
ugguggcuccaguucagaaaca

SEQ ID NO: 18680 - RNA, 23 nt, Artificial Sequence
  Synthetic
cugguggcuccaguucagaaaca

SEQ ID NO: 18681 - RNA, 24 nt, Artificial Sequence
  Synthetic
gcugguggcuccaguucagaaaca

SEQ ID NO: 18682 - RNA, 18 nt, Artificial Sequence
  Synthetic
  misc_feature (10)..(10): n is a, c, g, or u
gggacccugnuaugaaca

SEQ ID NO: 18683 - RNA, 19 nt, Artificial Sequence
  Synthetic
  misc_feature (11)..(11): n is a, c, g, or u
ggggacccugnuaugaaca

SEQ ID NO: 18684 - RNA, 20 nt, Artificial Sequence
  Synthetic
  misc_feature (12)..(12): n is a, c, g, or u
uggggacccugnuaugaaca

SEQ ID NO: 18685 - RNA, 21 nt, Artificial Sequence
  Synthetic
  misc_feature (13)..(13): n is a, c, g, or u
cuggggacccugnuaugaaca

SEQ ID NO: 18686 - RNA, 22 nt, Artificial Sequence
  Synthetic
  misc_feature (14)..(14): n is a, c, g, or u
acuggggacccugnuaugaaca

SEQ ID NO: 18687 - RNA, 23 nt, Artificial Sequence
  Synthetic
  misc_feature (15)..(15): n is a, c, g, or u
gacuggggacccugnuaugaaca

SEQ ID NO: 18688 - RNA, 24 nt, Artificial Sequence
  Synthetic
  misc_feature (16)..(16): n is a, c, g, or u
agacuggggacccugnuaugaaca

SEQ ID NO: 18689 - RNA, 18 nt, Artificial Sequence
  Synthetic
gacuacuguuguuagaca

SEQ ID NO: 18690 - RNA, 19 nt, Artificial Sequence
  Synthetic
agacuacuguuguuagaca

SEQ ID NO: 18691 - RNA, 20 nt, Artificial Sequence
  Synthetic
gagacuacuguuguuagaca

SEQ ID NO: 18692 - RNA, 21 nt, Artificial Sequence
  Synthetic
ggagacuacuguuguuagaca

SEQ ID NO: 18693 - RNA, 22 nt, Artificial Sequence
  Synthetic
cggagacuacuguuguuagaca

SEQ ID NO: 18694 - RNA, 23 nt, Artificial Sequence
  Synthetic
ccggagacuacuguuguuagaca

SEQ ID NO: 18695 - RNA, 24 nt, Artificial Sequence
  Synthetic
uccggagacuacuguuguuagaca

SEQ ID NO: 18696 - RNA, 18 nt, Artificial Sequence
  Synthetic
ggaacaagagcuacagca

SEQ ID NO: 18697 - RNA, 19 nt, Artificial Sequence
  Synthetic
gggaacaagagcuacagca

SEQ ID NO: 18698 - RNA, 20 nt, Artificial Sequence
  Synthetic
ugggaacaagagcuacagca

SEQ ID NO: 18699 - RNA, 21 nt, Artificial Sequence
  Synthetic
cugggaacaagagcuacagca

SEQ ID NO: 18700 - RNA, 22 nt, Artificial Sequence
  Synthetic
ccugggaacaagagcuacagca

SEQ ID NO: 18701 - RNA, 23 nt, Artificial Sequence
  Synthetic
uccugggaacaagagcuacagca

SEQ ID NO: 18702 - RNA, 24 nt, Artificial Sequence
  Synthetic
uuccugggaacaagagcuacagca

SEQ ID NO: 18703 - RNA, 18 nt, Artificial Sequence
  Synthetic
gaucuacaaccaccagca

SEQ ID NO: 18704 - RNA, 19 nt, Artificial Sequence
  Synthetic
ggaucuacaaccaccagca

SEQ ID NO: 18705 - RNA, 20 nt, Artificial Sequence
  Synthetic
aggaucuacaaccaccagca

SEQ ID NO: 18706 - RNA, 21 nt, Artificial Sequence
  Synthetic
caggaucuacaaccaccagca

SEQ ID NO: 18707 - RNA, 22 nt, Artificial Sequence
  Synthetic
ccaggaucuacaaccaccagca

SEQ ID NO: 18708 - RNA, 23 nt, Artificial Sequence
  Synthetic
uccaggaucuacaaccaccagca

SEQ ID NO: 18709 - RNA, 24 nt, Artificial Sequence
  Synthetic
uuccaggaucuacaaccaccagca

SEQ ID NO: 18710 - RNA, 18 nt, Artificial Sequence
  Synthetic
ucaccucugcacgucgca

SEQ ID NO: 18711 - RNA, 19 nt, Artificial Sequence
  Synthetic
uucaccucugcacgucgca

SEQ ID NO: 18712 - RNA, 20 nt, Artificial Sequence
  Synthetic
cuucaccucugcacgucgca

SEQ ID NO: 18713 - RNA, 21 nt, Artificial Sequence
  Synthetic
gcuucaccucugcacgucgca

SEQ ID NO: 18714 - RNA, 22 nt, Artificial Sequence
  Synthetic
cgcuucaccucugcacgucgca

SEQ ID NO: 18715 - RNA, 23 nt, Artificial Sequence
  Synthetic
ucgcuucaccucugcacgucgca

SEQ ID NO: 18716 - RNA, 24 nt, Artificial Sequence
  Synthetic
uucgcuucaccucugcacgucgca

SEQ ID NO: 18717 - RNA, 18 nt, Artificial Sequence
  Synthetic
ggguggagcccucaggca

SEQ ID NO: 18718 - RNA, 19 nt, Artificial Sequence
  Synthetic
gggguggagcccucaggca

SEQ ID NO: 18719 - RNA, 20 nt, Artificial Sequence
  Synthetic
ugggguggagcccucaggca

SEQ ID NO: 18720 - RNA, 21 nt, Artificial Sequence
  Synthetic
cugggguggagcccucaggca

SEQ ID NO: 18721 - RNA, 22 nt, Artificial Sequence
  Synthetic
ucugggguggagcccucaggca

SEQ ID NO: 18722 - RNA, 23 nt, Artificial Sequence
  Synthetic
uucugggguggagcccucaggca

SEQ ID NO: 18723 - RNA, 24 nt, Artificial Sequence
  Synthetic
cuucugggguggagcccucaggca

SEQ ID NO: 18724 - RNA, 18 nt, Artificial Sequence
  Synthetic
caacggcgagaaggggca

SEQ ID NO: 18725 - RNA, 19 nt, Artificial Sequence
  Synthetic
ucaacggcgagaaggggca

SEQ ID NO: 18726 - RNA, 20 nt, Artificial Sequence
  Synthetic
cucaacggcgagaaggggca

SEQ ID NO: 18727 - RNA, 21 nt, Artificial Sequence
  Synthetic
ucucaacggcgagaaggggca

SEQ ID NO: 18728 - RNA, 22 nt, Artificial Sequence
  Synthetic
cucucaacggcgagaaggggca

SEQ ID NO: 18729 - RNA, 23 nt, Artificial Sequence
  Synthetic
ucucucaacggcgagaaggggca

SEQ ID NO: 18730 - RNA, 24 nt, Artificial Sequence
  Synthetic
cucucucaacggcgagaaggggca

SEQ ID NO: 18731 - RNA, 18 nt, Artificial Sequence
  Synthetic
acauccacaggccaugca

SEQ ID NO: 18732 - RNA, 19 nt, Artificial Sequence
  Synthetic
cacauccacaggccaugca

SEQ ID NO: 18733 - RNA, 20 nt, Artificial Sequence
  Synthetic
acacauccacaggccaugca

SEQ ID NO: 18734 - RNA, 21 nt, Artificial Sequence
  Synthetic
cacacauccacaggccaugca

SEQ ID NO: 18735 - RNA, 22 nt, Artificial Sequence
  Synthetic
acacacauccacaggccaugca

SEQ ID NO: 18736 - RNA, 23 nt, Artificial Sequence
  Synthetic
gacacacauccacaggccaugca

SEQ ID NO: 18737 - RNA, 24 nt, Artificial Sequence
  Synthetic
ggacacacauccacaggccaugca

SEQ ID NO: 18738 - RNA, 18 nt, Artificial Sequence
  Synthetic
cugcaccacucuugcuca

SEQ ID NO: 18739 - RNA, 19 nt, Artificial Sequence
  Synthetic
ccugcaccacucuugcuca

SEQ ID NO: 18740 - RNA, 20 nt, Artificial Sequence
  Synthetic
accugcaccacucuugcuca

SEQ ID NO: 18741 - RNA, 21 nt, Artificial Sequence
  Synthetic
aaccugcaccacucuugcuca

SEQ ID NO: 18742 - RNA, 22 nt, Artificial Sequence
  Synthetic
aaaccugcaccacucuugcuca

SEQ ID NO: 18743 - RNA, 23 nt, Artificial Sequence
  Synthetic
aaaaccugcaccacucuugcuca

SEQ ID NO: 18744 - RNA, 24 nt, Artificial Sequence
  Synthetic
caaaaccugcaccacucuugcuca

SEQ ID NO: 18745 - RNA, 18 nt, Artificial Sequence
  Synthetic
caucaaucuucucgaaga

SEQ ID NO: 18746 - RNA, 19 nt, Artificial Sequence
  Synthetic
ucaucaaucuucucgaaga

SEQ ID NO: 18747 - RNA, 20 nt, Artificial Sequence
  Synthetic
aucaucaaucuucucgaaga

SEQ ID NO: 18748 - RNA, 21 nt, Artificial Sequence
  Synthetic
caucaucaaucuucucgaaga

SEQ ID NO: 18749 - RNA, 22 nt, Artificial Sequence
  Synthetic
acaucaucaaucuucucgaaga

SEQ ID NO: 18750 - RNA, 23 nt, Artificial Sequence
  Synthetic
cacaucaucaaucuucucgaaga

SEQ ID NO: 18751 - RNA, 24 nt, Artificial Sequence
  Synthetic
ucacaucaucaaucuucucgaaga

SEQ ID NO: 18752 - RNA, 18 nt, Artificial Sequence
  Synthetic
ccucucucaacggcgaga

SEQ ID NO: 18753 - RNA, 19 nt, Artificial Sequence
  Synthetic
accucucucaacggcgaga

SEQ ID NO: 18754 - RNA, 20 nt, Artificial Sequence
  Synthetic
caccucucucaacggcgaga

SEQ ID NO: 18755 - RNA, 21 nt, Artificial Sequence
  Synthetic
gcaccucucucaacggcgaga

SEQ ID NO: 18756 - RNA, 22 nt, Artificial Sequence
  Synthetic
agcaccucucucaacggcgaga

SEQ ID NO: 18757 - RNA, 23 nt, Artificial Sequence
  Synthetic
gagcaccucucucaacggcgaga

SEQ ID NO: 18758 - RNA, 24 nt, Artificial Sequence
  Synthetic
ggagcaccucucucaacggcgaga

SEQ ID NO: 18759 - RNA, 18 nt, Artificial Sequence
  Synthetic
  misc_feature (2)..(2): n is a, c, g, or u
anaaaugaaaggagacga

SEQ ID NO: 18760 - RNA, 19 nt, Artificial Sequence
  Synthetic
  misc_feature (3)..(3): n is a, c, g, or u
uanaaaugaaaggagacga

SEQ ID NO: 18761 - RNA, 20 nt, Artificial Sequence
  Synthetic
  misc_feature (4)..(4): n is a, c, g, or u
cuanaaaugaaaggagacga

SEQ ID NO: 18762 - RNA, 21 nt, Artificial Sequence
  Synthetic
  misc_feature (5)..(5): n is a, c, g, or u
acuanaaaugaaaggagacga

SEQ ID NO: 18763 - RNA, 22 nt, Artificial Sequence
  Synthetic
  misc_feature (6)..(6): n is a, c, g, or u
cacuanaaaugaaaggagacga

SEQ ID NO: 18764 - RNA, 23 nt, Artificial Sequence
  Synthetic
  misc_feature (7)..(7): n is a, c, g, or u
ucacuanaaaugaaaggagacga

SEQ ID NO: 18765 - RNA, 24 nt, Artificial Sequence
  Synthetic
  misc_feature (8)..(8): n is a, c, g, or u
cucacuanaaaugaaaggagacga

SEQ ID NO: 18766 - RNA, 18 nt, Artificial Sequence
  Synthetic
aaauuccagcagucccga

SEQ ID NO: 18767 - RNA, 19 nt, Artificial Sequence
  Synthetic
caaauuccagcagucccga

SEQ ID NO: 18768 - RNA, 20 nt, Artificial Sequence
  Synthetic
gcaaauuccagcagucccga

SEQ ID NO: 18769 - RNA, 21 nt, Artificial Sequence
  Synthetic
agcaaauuccagcagucccga

SEQ ID NO: 18770 - RNA, 22 nt, Artificial Sequence
  Synthetic
gagcaaauuccagcagucccga

SEQ ID NO: 18771 - RNA, 23 nt, Artificial Sequence
  Synthetic
agagcaaauuccagcagucccga

SEQ ID NO: 18772 - RNA, 24 nt, Artificial Sequence
  Synthetic
cagagcaaauuccagcagucccga

SEQ ID NO: 18773 - RNA, 18 nt, Artificial Sequence
  Synthetic
agacuguguauuuaagga

SEQ ID NO: 18774 - RNA, 19 nt, Artificial Sequence
  Synthetic
aagacuguguauuuaagga

SEQ ID NO: 18775 - RNA, 20 nt, Artificial Sequence
  Synthetic
aaagacuguguauuuaagga

SEQ ID NO: 18776 - RNA, 21 nt, Artificial Sequence
  Synthetic
caaagacuguguauuuaagga

SEQ ID NO: 18777 - RNA, 22 nt, Artificial Sequence
  Synthetic
ucaaagacuguguauuuaagga

SEQ ID NO: 18778 - RNA, 23 nt, Artificial Sequence
  Synthetic
aucaaagacuguguauuuaagga

SEQ ID NO: 18779 - RNA, 24 nt, Artificial Sequence
  Synthetic
caucaaagacuguguauuuaagga

SEQ ID NO: 18780 - RNA, 18 nt, Artificial Sequence
  Synthetic
auggcaaacaagguagga

SEQ ID NO: 18781 - RNA, 19 nt, Artificial Sequence
  Synthetic
aauggcaaacaagguagga

SEQ ID NO: 18782 - RNA, 20 nt, Artificial Sequence
  Synthetic
caauggcaaacaagguagga

SEQ ID NO: 18783 - RNA, 21 nt, Artificial Sequence
  Synthetic
ccaauggcaaacaagguagga

SEQ ID NO: 18784 - RNA, 22 nt, Artificial Sequence
  Synthetic
gccaauggcaaacaagguagga

SEQ ID NO: 18785 - RNA, 23 nt, Artificial Sequence
  Synthetic
ggccaauggcaaacaagguagga

SEQ ID NO: 18786 - RNA, 24 nt, Artificial Sequence
  Synthetic
uggccaauggcaaacaagguagga

SEQ ID NO: 18787 - RNA, 18 nt, Artificial Sequence
  Synthetic
cuguaccaaaccuucgga

SEQ ID NO: 18788 - RNA, 19 nt, Artificial Sequence
  Synthetic
gcuguaccaaaccuucgga

SEQ ID NO: 18789 - RNA, 20 nt, Artificial Sequence
  Synthetic
ugcuguaccaaaccuucgga

SEQ ID NO: 18790 - RNA, 21 nt, Artificial Sequence
  Synthetic
cugcuguaccaaaccuucgga

SEQ ID NO: 18791 - RNA, 22 nt, Artificial Sequence
  Synthetic
gcugcuguaccaaaccuucgga

SEQ ID NO: 18792 - RNA, 23 nt, Artificial Sequence
  Synthetic
ugcugcuguaccaaaccuucgga

SEQ ID NO: 18793 - RNA, 24 nt, Artificial Sequence
  Synthetic
cugcugcuguaccaaaccuucgga

SEQ ID NO: 18794 - RNA, 18 nt, Artificial Sequence
  Synthetic
gcgagaaggggcauggga

SEQ ID NO: 18795 - RNA, 19 nt, Artificial Sequence
  Synthetic
ggcgagaaggggcauggga

SEQ ID NO: 18796 - RNA, 20 nt, Artificial Sequence
  Synthetic
cggcgagaaggggcauggga

SEQ ID NO: 18797 - RNA, 21 nt, Artificial Sequence
  Synthetic
acggcgagaaggggcauggga

SEQ ID NO: 18798 - RNA, 22 nt, Artificial Sequence
  Synthetic
aacggcgagaaggggcauggga

SEQ ID NO: 18799 - RNA, 23 nt, Artificial Sequence
  Synthetic
caacggcgagaaggggcauggga

SEQ ID NO: 18800 - RNA, 24 nt, Artificial Sequence
  Synthetic
ucaacggcgagaaggggcauggga

SEQ ID NO: 18801 - RNA, 18 nt, Artificial Sequence
  Synthetic
cggaaaauaccuauggga

SEQ ID NO: 18802 - RNA, 19 nt, Artificial Sequence
  Synthetic
ucggaaaauaccuauggga

SEQ ID NO: 18803 - RNA, 20 nt, Artificial Sequence
  Synthetic
uucggaaaauaccuauggga

SEQ ID NO: 18804 - RNA, 21 nt, Artificial Sequence
  Synthetic
uuucggaaaauaccuauggga

SEQ ID NO: 18805 - RNA, 22 nt, Artificial Sequence
  Synthetic
cuuucggaaaauaccuauggga

SEQ ID NO: 18806 - RNA, 23 nt, Artificial Sequence
  Synthetic
gcuuucggaaaauaccuauggga

SEQ ID NO: 18807 - RNA, 24 nt, Artificial Sequence
  Synthetic
ggcuuucggaaaauaccuauggga

SEQ ID NO: 18808 - RNA, 18 nt, Artificial Sequence
  Synthetic
cccggucaacgaccugga

SEQ ID NO: 18809 - RNA, 19 nt, Artificial Sequence
  Synthetic
ccccggucaacgaccugga

SEQ ID NO: 18810 - RNA, 20 nt, Artificial Sequence
  Synthetic
gccccggucaacgaccugga

SEQ ID NO: 18811 - RNA, 21 nt, Artificial Sequence
  Synthetic
cgccccggucaacgaccugga

SEQ ID NO: 18812 - RNA, 22 nt, Artificial Sequence
  Synthetic
ucgccccggucaacgaccugga

SEQ ID NO: 18813 - RNA, 23 nt, Artificial Sequence
  Synthetic
uucgccccggucaacgaccugga

SEQ ID NO: 18814 - RNA, 24 nt, Artificial Sequence
  Synthetic
uuucgccccggucaacgaccugga

SEQ ID NO: 18815 - RNA, 18 nt, Artificial Sequence
  Synthetic
  misc_feature (10)..(10): n is a, c, g, or u
gcucgcagcnggucugga

SEQ ID NO: 18816 - RNA, 19 nt, Artificial Sequence
  Synthetic
  misc_feature (11)..(11): n is a, c, g, or u
cgcucgcagcnggucugga

SEQ ID NO: 18817 - RNA, 20 nt, Artificial Sequence
  Synthetic
  misc_feature (12)..(12): n is a, c, g, or u
ucgcucgcagcnggucugga

SEQ ID NO: 18818 - RNA, 21 nt, Artificial Sequence
  Synthetic
  misc_feature (13)..(13): n is a, c, g, or u
uucgcucgcagcnggucugga

SEQ ID NO: 18819 - RNA, 22 nt, Artificial Sequence
  Synthetic
  misc_feature (14)..(14): n is a, c, g, or u
uuucgcucgcagcnggucugga

SEQ ID NO: 18820 - RNA, 23 nt, Artificial Sequence
  Synthetic
  misc_feature (15)..(15): n is a, c, g, or u
guuucgcucgcagcnggucugga

SEQ ID NO: 18821 - RNA, 24 nt, Artificial Sequence
  Synthetic
  misc_feature (16)..(16): n is a, c, g, or u
uguuucgcucgcagcnggucugga

SEQ ID NO: 18822 - RNA, 18 nt, Artificial Sequence
  Synthetic
  misc_feature (12)..(12): n is a, c, g, or u
cccacucacuanaaauga

SEQ ID NO: 18823 - RNA, 19 nt, Artificial Sequence
  Synthetic
  misc_feature (13)..(13): n is a, c, g, or u
gcccacucacuanaaauga

SEQ ID NO: 18824 - RNA, 20 nt, Artificial Sequence
  Synthetic
  misc_feature (14)..(14): n is a, c, g, or u
ggcccacucacuanaaauga

SEQ ID NO: 18825 - RNA, 21 nt, Artificial Sequence
  Synthetic
  misc_feature (1)..(1): n is a, c, g, or u
  misc_feature (15)..(15): n is a, c, g, or u
nggcccacucacuanaaauga

SEQ ID NO: 18826 - RNA, 22 nt, Artificial Sequence
  Synthetic
  misc_feature (2)..(2): n is a, c, g, or u
  misc_feature (16)..(16): n is a, c, g, or u
unggcccacucacuanaaauga

SEQ ID NO: 18827 - RNA, 23 nt, Artificial Sequence
  Synthetic
  misc_feature (3)..(3): n is a, c, g, or u
  misc_feature (17)..(17): n is a, c, g, or u
gunggcccacucacuanaaauga

SEQ ID NO: 18828 - RNA, 24 nt, Artificial Sequence
  Synthetic
  misc_feature (4)..(4): n is a, c, g, or u
  misc_feature (18)..(18): n is a, c, g, or u
ugunggcccacucacuanaaauga

SEQ ID NO: 18829 - RNA, 18 nt, Artificial Sequence
  Synthetic
cgugaauagacccauuga

SEQ ID NO: 18830 - RNA, 19 nt, Artificial Sequence
  Synthetic
ccgugaauagacccauuga

SEQ ID NO: 18831 - RNA, 20 nt, Artificial Sequence
  Synthetic
cccgugaauagacccauuga

SEQ ID NO: 18832 - RNA, 21 nt, Artificial Sequence
  Synthetic
ucccgugaauagacccauuga

SEQ ID NO: 18833 - RNA, 22 nt, Artificial Sequence
  Synthetic
uucccgugaauagacccauuga

SEQ ID NO: 18834 - RNA, 23 nt, Artificial Sequence
  Synthetic
cuucccgugaauagacccauuga

SEQ ID NO: 18835 - RNA, 24 nt, Artificial Sequence
  Synthetic
acuucccgugaauagacccauuga

SEQ ID NO: 18836 - RNA, 18 nt, Artificial Sequence
  Synthetic
  misc_feature (17)..(17): n is a, c, g, or u
acuuuauggguuauauna

SEQ ID NO: 18837 - RNA, 19 nt, Artificial Sequence
  Synthetic
  misc_feature (18)..(18): n is a, c, g, or u
cacuuuauggguuauauna

SEQ ID NO: 18838 - RNA, 20 nt, Artificial Sequence
  Synthetic
  misc_feature (1)..(1): n is a, c, g, or u
  misc_feature (19)..(19): n is a, c, g, or u
ncacuuuauggguuauauna

SEQ ID NO: 18839 - RNA, 21 nt, Artificial Sequence
  Synthetic
  misc_feature (2)..(2): n is a, c, g, or u
  misc_feature (20)..(20): n is a, c, g, or u
uncacuuuauggguuauauna

SEQ ID NO: 18840 - RNA, 22 nt, Artificial Sequence
  Synthetic
  misc_feature (1)..(1): n is a, c, g, or u
  misc_feature (3)..(3): n is a, c, g, or u
  misc_feature (21)..(21): n is a, c, g, or u
nuncacuuuauggguuauauna

SEQ ID NO: 18841 - RNA, 23 nt, Artificial Sequence
  Synthetic
  misc_feature (2)..(2): n is a, c, g, or u
  misc_feature (4)..(4): n is a, c, g, or u
  misc_feature (22)..(22): n is a, c, g, or u
cnuncacuuuauggguuauauna

SEQ ID NO: 18842 - RNA, 24 nt, Artificial Sequence
  Synthetic
  misc_feature (3)..(3): n is a, c, g, or u
  misc_feature (5)..(5): n is a, c, g, or u
  misc_feature (23)..(23): n is a, c, g, or u
ccnuncacuuuauggguuauauna

SEQ ID NO: 18843 - RNA, 18 nt, Artificial Sequence
  Synthetic
gcuuucggaaaauaccua

SEQ ID NO: 18844 - RNA, 19 nt, Artificial Sequence
  Synthetic
ggcuuucggaaaauaccua

SEQ ID NO: 18845 - RNA, 20 nt, Artificial Sequence
  Synthetic
gggcuuucggaaaauaccua

SEQ ID NO: 18846 - RNA, 21 nt, Artificial Sequence
  Synthetic
ugggcuuucggaaaauaccua

SEQ ID NO: 18847 - RNA, 22 nt, Artificial Sequence
  Synthetic
uugggcuuucggaaaauaccua

SEQ ID NO: 18848 - RNA, 23 nt, Artificial Sequence
  Synthetic
cuugggcuuucggaaaauaccua

SEQ ID NO: 18849 - RNA, 24 nt, Artificial Sequence
  Synthetic
ucuugggcuuucggaaaauaccua

SEQ ID NO: 18850 - RNA, 18 nt, Artificial Sequence
  Synthetic
ccagucucuccaccucua

SEQ ID NO: 18851 - RNA, 19 nt, Artificial Sequence
  Synthetic
cccagucucuccaccucua

SEQ ID NO: 18852 - RNA, 20 nt, Artificial Sequence
  Synthetic
ccccagucucuccaccucua

SEQ ID NO: 18853 - RNA, 21 nt, Artificial Sequence
  Synthetic
accccagucucuccaccucua

SEQ ID NO: 18854 - RNA, 22 nt, Artificial Sequence
  Synthetic
aaccccagucucuccaccucua

SEQ ID NO: 18855 - RNA, 23 nt, Artificial Sequence
  Synthetic
caaccccagucucuccaccucua

SEQ ID NO: 18856 - RNA, 24 nt, Artificial Sequence
  Synthetic
ccaaccccagucucuccaccucua

SEQ ID NO: 18857 - RNA, 18 nt, Artificial Sequence
  Synthetic
caccgcuucagcccucua

SEQ ID NO: 18858 - RNA, 19 nt, Artificial Sequence
  Synthetic
acaccgcuucagcccucua

SEQ ID NO: 18859 - RNA, 20 nt, Artificial Sequence
  Synthetic
gacaccgcuucagcccucua

SEQ ID NO: 18860 - RNA, 21 nt, Artificial Sequence
  Synthetic
cgacaccgcuucagcccucua

SEQ ID NO: 18861 - RNA, 22 nt, Artificial Sequence
  Synthetic
ucgacaccgcuucagcccucua

SEQ ID NO: 18862 - RNA, 23 nt, Artificial Sequence
  Synthetic
cucgacaccgcuucagcccucua

SEQ ID NO: 18863 - RNA, 24 nt, Artificial Sequence
  Synthetic
acucgacaccgcuucagcccucua

SEQ ID NO: 18864 - RNA, 18 nt, Artificial Sequence
  Synthetic
cuguuggauccgagagua

SEQ ID NO: 18865 - RNA, 19 nt, Artificial Sequence
  Synthetic
acuguuggauccgagagua

SEQ ID NO: 18866 - RNA, 20 nt, Artificial Sequence
  Synthetic
cacuguuggauccgagagua

SEQ ID NO: 18867 - RNA, 21 nt, Artificial Sequence
  Synthetic
gcacuguuggauccgagagua

SEQ ID NO: 18868 - RNA, 22 nt, Artificial Sequence
  Synthetic
agcacuguuggauccgagagua

SEQ ID NO: 18869 - RNA, 23 nt, Artificial Sequence
  Synthetic
aagcacuguuggauccgagagua

SEQ ID NO: 18870 - RNA, 24 nt, Artificial Sequence
  Synthetic
caagcacuguuggauccgagagua

SEQ ID NO: 18871 - RNA, 18 nt, Artificial Sequence
  Synthetic
  misc_feature (13)..(13): n is a, c, g, or u
uauauggaugaunuggua

SEQ ID NO: 18872 - RNA, 19 nt, Artificial Sequence
  Synthetic
  misc_feature (14)..(14): n is a, c, g, or u
uuauauggaugaunuggua

SEQ ID NO: 18873 - RNA, 20 nt, Artificial Sequence
  Synthetic
  misc_feature (15)..(15): n is a, c, g, or u
guuauauggaugaunuggua

SEQ ID NO: 18874 - RNA, 21 nt, Artificial Sequence
  Synthetic
  misc_feature (16)..(16): n is a, c, g, or u
aguuauauggaugaunuggua

SEQ ID NO: 18875 - RNA, 22 nt, Artificial Sequence
  Synthetic
  misc_feature (17)..(17): n is a, c, g, or u
uaguuauauggaugaunuggua

SEQ ID NO: 18876 - RNA, 23 nt, Artificial Sequence
  Synthetic
  misc_feature (18)..(18): n is a, c, g, or u
uuaguuauauggaugaunuggua

SEQ ID NO: 18877 - RNA, 24 nt, Artificial Sequence
  Synthetic
  misc_feature (19)..(19): n is a, c, g, or u
uuuaguuauauggaugaunuggua

SEQ ID NO: 18878 - RNA, 18 nt, Artificial Sequence
  Synthetic
ugggacuucaacacaaac

SEQ ID NO: 18879 - RNA, 19 nt, Artificial Sequence
  Synthetic
uugggacuucaacacaaac

SEQ ID NO: 18880 - RNA, 20 nt, Artificial Sequence
  Synthetic
auugggacuucaacacaaac

SEQ ID NO: 18881 - RNA, 21 nt, Artificial Sequence
  Synthetic
gauugggacuucaacacaaac

SEQ ID NO: 18882 - RNA, 22 nt, Artificial Sequence
  Synthetic
cgauugggacuucaacacaaac

SEQ ID NO: 18883 - RNA, 23 nt, Artificial Sequence
  Synthetic
ccgauugggacuucaacacaaac

SEQ ID NO: 18884 - RNA, 24 nt, Artificial Sequence
  Synthetic
cccgauugggacuucaacacaaac

SEQ ID NO: 18885 - RNA, 18 nt, Artificial Sequence
  Synthetic
caccauauuccugggaac

SEQ ID NO: 18886 - RNA, 19 nt, Artificial Sequence
  Synthetic
ucaccauauuccugggaac

SEQ ID NO: 18887 - RNA, 20 nt, Artificial Sequence
  Synthetic
gucaccauauuccugggaac

SEQ ID NO: 18888 - RNA, 21 nt, Artificial Sequence
  Synthetic
ggucaccauauuccugggaac

SEQ ID NO: 18889 - RNA, 22 nt, Artificial Sequence
  Synthetic
gggucaccauauuccugggaac

SEQ ID NO: 18890 - RNA, 23 nt, Artificial Sequence
  Synthetic
ugggucaccauauuccugggaac

SEQ ID NO: 18891 - RNA, 24 nt, Artificial Sequence
  Synthetic
gugggucaccauauuccugggaac

SEQ ID NO: 18892 - RNA, 18 nt, Artificial Sequence
  Synthetic
  misc_feature (11)..(11): n is a, c, g, or u
ggggacccugnuaugaac

SEQ ID NO: 18893 - RNA, 19 nt, Artificial Sequence
  Synthetic
  misc_feature (12)..(12): n is a, c, g, or u
uggggacccugnuaugaac

SEQ ID NO: 18894 - RNA, 20 nt, Artificial Sequence
  Synthetic
  misc_feature (13)..(13): n is a, c, g, or u
cuggggacccugnuaugaac

SEQ ID NO: 18895 - RNA, 21 nt, Artificial Sequence
  Synthetic
  misc_feature (14)..(14): n is a, c, g, or u
acuggggacccugnuaugaac

SEQ ID NO: 18896 - RNA, 22 nt, Artificial Sequence
  Synthetic
  misc_feature (15)..(15): n is a, c, g, or u
gacuggggacccugnuaugaac

SEQ ID NO: 18897 - RNA, 23 nt, Artificial Sequence
  Synthetic
  misc_feature (16)..(16): n is a, c, g, or u
agacuggggacccugnuaugaac

SEQ ID NO: 18898 - RNA, 24 nt, Artificial Sequence
  Synthetic
  misc_feature (17)..(17): n is a, c, g, or u
aagacuggggacccugnuaugaac

SEQ ID NO: 18899 - RNA, 18 nt, Artificial Sequence
  Synthetic
gagaugccuuagaaucac

SEQ ID NO: 18900 - RNA, 19 nt, Artificial Sequence
  Synthetic
cgagaugccuuagaaucac

SEQ ID NO: 18901 - RNA, 20 nt, Artificial Sequence
  Synthetic
ccgagaugccuuagaaucac

SEQ ID NO: 18902 - RNA, 21 nt, Artificial Sequence
  Synthetic
accgagaugccuuagaaucac

SEQ ID NO: 18903 - RNA, 22 nt, Artificial Sequence
  Synthetic
uaccgagaugccuuagaaucac

SEQ ID NO: 18904 - RNA, 23 nt, Artificial Sequence
  Synthetic
cuaccgagaugccuuagaaucac

SEQ ID NO: 18905 - RNA, 24 nt, Artificial Sequence
  Synthetic
ucuaccgagaugccuuagaaucac

SEQ ID NO: 18906 - RNA, 18 nt, Artificial Sequence
  Synthetic
aucaaucuucucgaagac

SEQ ID NO: 18907 - RNA, 19 nt, Artificial Sequence
  Synthetic
caucaaucuucucgaagac

SEQ ID NO: 18908 - RNA, 20 nt, Artificial Sequence
  Synthetic
ucaucaaucuucucgaagac

SEQ ID NO: 18909 - RNA, 21 nt, Artificial Sequence
  Synthetic
aucaucaaucuucucgaagac

SEQ ID NO: 18910 - RNA, 22 nt, Artificial Sequence
  Synthetic
caucaucaaucuucucgaagac

SEQ ID NO: 18911 - RNA, 23 nt, Artificial Sequence
  Synthetic
acaucaucaaucuucucgaagac

SEQ ID NO: 18912 - RNA, 24 nt, Artificial Sequence
  Synthetic
cacaucaucaaucuucucgaagac

SEQ ID NO: 18913 - RNA, 18 nt, Artificial Sequence
  Synthetic
gacuguguauuuaaggac

SEQ ID NO: 18914 - RNA, 19 nt, Artificial Sequence
  Synthetic
agacuguguauuuaaggac

SEQ ID NO: 18915 - RNA, 20 nt, Artificial Sequence
  Synthetic
aagacuguguauuuaaggac

SEQ ID NO: 18916 - RNA, 21 nt, Artificial Sequence
  Synthetic
aaagacuguguauuuaaggac

SEQ ID NO: 18917 - RNA, 22 nt, Artificial Sequence
  Synthetic
caaagacuguguauuuaaggac

SEQ ID NO: 18918 - RNA, 23 nt, Artificial Sequence
  Synthetic
ucaaagacuguguauuuaaggac

SEQ ID NO: 18919 - RNA, 24 nt, Artificial Sequence
  Synthetic
aucaaagacuguguauuuaaggac

SEQ ID NO: 18920 - RNA, 18 nt, Artificial Sequence
  Synthetic
uuucucuguaaacaauac

SEQ ID NO: 18921 - RNA, 19 nt, Artificial Sequence
  Synthetic
cuuucucuguaaacaauac

SEQ ID NO: 18922 - RNA, 20 nt, Artificial Sequence
  Synthetic
ccuuucucuguaaacaauac

SEQ ID NO: 18923 - RNA, 21 nt, Artificial Sequence
  Synthetic
gccuuucucuguaaacaauac

SEQ ID NO: 18924 - RNA, 22 nt, Artificial Sequence
  Synthetic
ggccuuucucuguaaacaauac

SEQ ID NO: 18925 - RNA, 23 nt, Artificial Sequence
  Synthetic
aggccuuucucuguaaacaauac

SEQ ID NO: 18926 - RNA, 24 nt, Artificial Sequence
  Synthetic
aaggccuuucucuguaaacaauac

SEQ ID NO: 18927 - RNA, 18 nt, Artificial Sequence
  Synthetic
ggucgcaccucucuuuac

SEQ ID NO: 18928 - RNA, 19 nt, Artificial Sequence
  Synthetic
gggucgcaccucucuuuac

SEQ ID NO: 18929 - RNA, 20 nt, Artificial Sequence
  Synthetic
cgggucgcaccucucuuuac

SEQ ID NO: 18930 - RNA, 21 nt, Artificial Sequence
  Synthetic
acgggucgcaccucucuuuac

SEQ ID NO: 18931 - RNA, 22 nt, Artificial Sequence
  Synthetic
gacgggucgcaccucucuuuac

SEQ ID NO: 18932 - RNA, 23 nt, Artificial Sequence
  Synthetic
cgacgggucgcaccucucuuuac

SEQ ID NO: 18933 - RNA, 24 nt, Artificial Sequence
  Synthetic
acgacgggucgcaccucucuuuac

SEQ ID NO: 18934 - RNA, 18 nt, Artificial Sequence
  Synthetic
cgucgcauggagaccacc

SEQ ID NO: 18935 - RNA, 19 nt, Artificial Sequence
  Synthetic
acgucgcauggagaccacc

SEQ ID NO: 18936 - RNA, 20 nt, Artificial Sequence
  Synthetic
cacgucgcauggagaccacc

SEQ ID NO: 18937 - RNA, 21 nt, Artificial Sequence
  Synthetic
gcacgucgcauggagaccacc

SEQ ID NO: 18938 - RNA, 22 nt, Artificial Sequence
  Synthetic
ugcacgucgcauggagaccacc

SEQ ID NO: 18939 - RNA, 23 nt, Artificial Sequence
  Synthetic
cugcacgucgcauggagaccacc

SEQ ID NO: 18940 - RNA, 24 nt, Artificial Sequence
  Synthetic
ucugcacgucgcauggagaccacc

SEQ ID NO: 18941 - RNA, 18 nt, Artificial Sequence
  Synthetic
gaccaccgugaacgcccc

SEQ ID NO: 18942 - RNA, 19 nt, Artificial Sequence
  Synthetic
agaccaccgugaacgcccc

SEQ ID NO: 18943 - RNA, 20 nt, Artificial Sequence
  Synthetic
gagaccaccgugaacgcccc

SEQ ID NO: 18944 - RNA, 21 nt, Artificial Sequence
  Synthetic
ggagaccaccgugaacgcccc

SEQ ID NO: 18945 - RNA, 22 nt, Artificial Sequence
  Synthetic
uggagaccaccgugaacgcccc

SEQ ID NO: 18946 - RNA, 23 nt, Artificial Sequence
  Synthetic
auggagaccaccgugaacgcccc

SEQ ID NO: 18947 - RNA, 24 nt, Artificial Sequence
  Synthetic
cauggagaccaccgugaacgcccc

SEQ ID NO: 18948 - RNA, 18 nt, Artificial Sequence
  Synthetic
acaacgaggcagggcccc

SEQ ID NO: 18949 - RNA, 19 nt, Artificial Sequence
  Synthetic
gacaacgaggcagggcccc

SEQ ID NO: 18950 - RNA, 20 nt, Artificial Sequence
  Synthetic
agacaacgaggcagggcccc

SEQ ID NO: 18951 - RNA, 21 nt, Artificial Sequence
  Synthetic
uagacaacgaggcagggcccc

SEQ ID NO: 18952 - RNA, 22 nt, Artificial Sequence
  Synthetic
uuagacaacgaggcagggcccc

SEQ ID NO: 18953 - RNA, 23 nt, Artificial Sequence
  Synthetic
guuagacaacgaggcagggcccc

SEQ ID NO: 18954 - RNA, 24 nt, Artificial Sequence
  Synthetic
uguuagacaacgaggcagggcccc

SEQ ID NO: 18955 - RNA, 18 nt, Artificial Sequence
  Synthetic
acaucacaucaggacucc

SEQ ID NO: 18956 - RNA, 19 nt, Artificial Sequence
  Synthetic
aacaucacaucaggacucc

SEQ ID NO: 18957 - RNA, 20 nt, Artificial Sequence
  Synthetic
gaacaucacaucaggacucc

SEQ ID NO: 18958 - RNA, 21 nt, Artificial Sequence
  Synthetic
agaacaucacaucaggacucc

SEQ ID NO: 18959 - RNA, 22 nt, Artificial Sequence
  Synthetic
gagaacaucacaucaggacucc

SEQ ID NO: 18960 - RNA, 23 nt, Artificial Sequence
  Synthetic
ggagaacaucacaucaggacucc

SEQ ID NO: 18961 - RNA, 24 nt, Artificial Sequence
  Synthetic
uggagaacaucacaucaggacucc

SEQ ID NO: 18962 - RNA, 18 nt, Artificial Sequence
  Synthetic
ugugggucaccauauucc

SEQ ID NO: 18963 - RNA, 19 nt, Artificial Sequence
  Synthetic
uugugggucaccauauucc

SEQ ID NO: 18964 - RNA, 20 nt, Artificial Sequence
  Synthetic
uuugugggucaccauauucc

SEQ ID NO: 18965 - RNA, 21 nt, Artificial Sequence
  Synthetic
uuuugugggucaccauauucc

SEQ ID NO: 18966 - RNA, 22 nt, Artificial Sequence
  Synthetic
auuuugugggucaccauauucc

SEQ ID NO: 18967 - RNA, 23 nt, Artificial Sequence
  Synthetic
cauuuugugggucaccauauucc

SEQ ID NO: 18968 - RNA, 24 nt, Artificial Sequence
  Synthetic
ucauuuugugggucaccauauucc

SEQ ID NO: 18969 - RNA, 18 nt, Artificial Sequence
  Synthetic
ucccaauguuaguauucc

SEQ ID NO: 18970 - RNA, 19 nt, Artificial Sequence
  Synthetic
uucccaauguuaguauucc

SEQ ID NO: 18971 - RNA, 20 nt, Artificial Sequence
  Synthetic
cuucccaauguuaguauucc

SEQ ID NO: 18972 - RNA, 21 nt, Artificial Sequence
  Synthetic
gcuucccaauguuaguauucc

SEQ ID NO: 18973 - RNA, 22 nt, Artificial Sequence
  Synthetic
agcuucccaauguuaguauucc

SEQ ID NO: 18974 - RNA, 23 nt, Artificial Sequence
  Synthetic
cagcuucccaauguuaguauucc

SEQ ID NO: 18975 - RNA, 24 nt, Artificial Sequence
  Synthetic
ccagcuucccaauguuaguauucc

SEQ ID NO: 18976 - RNA, 18 nt, Artificial Sequence
  Synthetic
gggaacaagagcuacagc

SEQ ID NO: 18977 - RNA, 19 nt, Artificial Sequence
  Synthetic
ugggaacaagagcuacagc

SEQ ID NO: 18978 - RNA, 20 nt, Artificial Sequence
  Synthetic
cugggaacaagagcuacagc

SEQ ID NO: 18979 - RNA, 21 nt, Artificial Sequence
  Synthetic
ccugggaacaagagcuacagc

SEQ ID NO: 18980 - RNA, 22 nt, Artificial Sequence
  Synthetic
uccugggaacaagagcuacagc

SEQ ID NO: 18981 - RNA, 23 nt, Artificial Sequence
  Synthetic
uuccugggaacaagagcuacagc

SEQ ID NO: 18982 - RNA, 24 nt, Artificial Sequence
  Synthetic
auuccugggaacaagagcuacagc

SEQ ID NO: 18983 - RNA, 18 nt, Artificial Sequence
  Synthetic
ggaucuacaaccaccagc

SEQ ID NO: 18984 - RNA, 19 nt, Artificial Sequence
  Synthetic
aggaucuacaaccaccagc

SEQ ID NO: 18985 - RNA, 20 nt, Artificial Sequence
  Synthetic
caggaucuacaaccaccagc

SEQ ID NO: 18986 - RNA, 21 nt, Artificial Sequence
  Synthetic
ccaggaucuacaaccaccagc

SEQ ID NO: 18987 - RNA, 22 nt, Artificial Sequence
  Synthetic
uccaggaucuacaaccaccagc

SEQ ID NO: 18988 - RNA, 23 nt, Artificial Sequence
  Synthetic
uuccaggaucuacaaccaccagc

SEQ ID NO: 18989 - RNA, 24 nt, Artificial Sequence
  Synthetic
cuuccaggaucuacaaccaccagc

SEQ ID NO: 18990 - RNA, 18 nt, Artificial Sequence
  Synthetic
uuuagaggauccugcagc

SEQ ID NO: 18991 - RNA, 19 nt, Artificial Sequence
  Synthetic
auuuagaggauccugcagc

SEQ ID NO: 18992 - RNA, 20 nt, Artificial Sequence
  Synthetic
aauuuagaggauccugcagc

SEQ ID NO: 18993 - RNA, 21 nt, Artificial Sequence
  Synthetic
uaauuuagaggauccugcagc

SEQ ID NO: 18994 - RNA, 22 nt, Artificial Sequence
  Synthetic
auaauuuagaggauccugcagc

SEQ ID NO: 18995 - RNA, 23 nt, Artificial Sequence
  Synthetic
aauaauuuagaggauccugcagc

SEQ ID NO: 18996 - RNA, 24 nt, Artificial Sequence
  Synthetic
caauaauuuagaggauccugcagc

SEQ ID NO: 18997 - RNA, 18 nt, Artificial Sequence
  Synthetic
uucaccucugcacgucgc

SEQ ID NO: 18998 - RNA, 19 nt, Artificial Sequence
  Synthetic
cuucaccucugcacgucgc

SEQ ID NO: 18999 - RNA, 20 nt, Artificial Sequence
  Synthetic
gcuucaccucugcacgucgc

SEQ ID NO: 19000 - RNA, 21 nt, Artificial Sequence
  Synthetic
cgcuucaccucugcacgucgc

SEQ ID NO: 19001 - RNA, 22 nt, Artificial Sequence
  Synthetic
ucgcuucaccucugcacgucgc

SEQ ID NO: 19002 - RNA, 23 nt, Artificial Sequence
  Synthetic
uucgcuucaccucugcacgucgc

SEQ ID NO: 19003 - RNA, 24 nt, Artificial Sequence
  Synthetic
cuucgcuucaccucugcacgucgc

SEQ ID NO: 19004 - RNA, 18 nt, Artificial Sequence
  Synthetic
gaccccucucguggucgc

SEQ ID NO: 19005 - RNA, 19 nt, Artificial Sequence
  Synthetic
cgaccccucucguggucgc

SEQ ID NO: 19006 - RNA, 20 nt, Artificial Sequence
  Synthetic
acgaccccucucguggucgc

SEQ ID NO: 19007 - RNA, 21 nt, Artificial Sequence
  Synthetic
gacgaccccucucguggucgc

SEQ ID NO: 19008 - RNA, 22 nt, Artificial Sequence
  Synthetic
ggacgaccccucucguggucgc

SEQ ID NO: 19009 - RNA, 23 nt, Artificial Sequence
  Synthetic
cggacgaccccucucguggucgc

SEQ ID NO: 19010 - RNA, 24 nt, Artificial Sequence
  Synthetic
gcggacgaccccucucguggucgc

SEQ ID NO: 19011 - RNA, 18 nt, Artificial Sequence
  Synthetic
agcaccucucucaacggc

SEQ ID NO: 19012 - RNA, 19 nt, Artificial Sequence
  Synthetic
gagcaccucucucaacggc

SEQ ID NO: 19013 - RNA, 20 nt, Artificial Sequence
  Synthetic
ggagcaccucucucaacggc

SEQ ID NO: 19014 - RNA, 21 nt, Artificial Sequence
  Synthetic
gggagcaccucucucaacggc

SEQ ID NO: 19015 - RNA, 22 nt, Artificial Sequence
  Synthetic
ugggagcaccucucucaacggc

SEQ ID NO: 19016 - RNA, 23 nt, Artificial Sequence
  Synthetic
augggagcaccucucucaacggc

SEQ ID NO: 19017 - RNA, 24 nt, Artificial Sequence
  Synthetic
caugggagcaccucucucaacggc

SEQ ID NO: 19018 - RNA, 18 nt, Artificial Sequence
  Synthetic
ucaacggcgagaaggggc

SEQ ID NO: 19019 - RNA, 19 nt, Artificial Sequence
  Synthetic
cucaacggcgagaaggggc

SEQ ID NO: 19020 - RNA, 20 nt, Artificial Sequence
  Synthetic
ucucaacggcgagaaggggc

SEQ ID NO: 19021 - RNA, 21 nt, Artificial Sequence
  Synthetic
cucucaacggcgagaaggggc

SEQ ID NO: 19022 - RNA, 22 nt, Artificial Sequence
  Synthetic
ucucucaacggcgagaaggggc

SEQ ID NO: 19023 - RNA, 23 nt, Artificial Sequence
  Synthetic
cucucucaacggcgagaaggggc

SEQ ID NO: 19024 - RNA, 24 nt, Artificial Sequence
  Synthetic
ccucucucaacggcgagaaggggc

SEQ ID NO: 19025 - RNA, 18 nt, Artificial Sequence
  Synthetic
cuuggguggcuuuggggc

SEQ ID NO: 19026 - RNA, 19 nt, Artificial Sequence
  Synthetic
ccuuggguggcuuuggggc

SEQ ID NO: 19027 - RNA, 20 nt, Artificial Sequence
  Synthetic
gccuuggguggcuuuggggc

SEQ ID NO: 19028 - RNA, 21 nt, Artificial Sequence
  Synthetic
ugccuuggguggcuuuggggc

SEQ ID NO: 19029 - RNA, 22 nt, Artificial Sequence
  Synthetic
gugccuuggguggcuuuggggc

SEQ ID NO: 19030 - RNA, 23 nt, Artificial Sequence
  Synthetic
ugugccuuggguggcuuuggggc

SEQ ID NO: 19031 - RNA, 24 nt, Artificial Sequence
  Synthetic
cugugccuuggguggcuuuggggc

SEQ ID NO: 19032 - RNA, 18 nt, Artificial Sequence
  Synthetic
gacgcaacccccacuggc

SEQ ID NO: 19033 - RNA, 19 nt, Artificial Sequence
  Synthetic
ugacgcaacccccacuggc

SEQ ID NO: 19034 - RNA, 20 nt, Artificial Sequence
  Synthetic
cugacgcaacccccacuggc

SEQ ID NO: 19035 - RNA, 21 nt, Artificial Sequence
  Synthetic
gcugacgcaacccccacuggc

SEQ ID NO: 19036 - RNA, 22 nt, Artificial Sequence
  Synthetic
ugcugacgcaacccccacuggc

SEQ ID NO: 19037 - RNA, 23 nt, Artificial Sequence
  Synthetic
uugcugacgcaacccccacuggc

SEQ ID NO: 19038 - RNA, 24 nt, Artificial Sequence
  Synthetic
uuugcugacgcaacccccacuggc

SEQ ID NO: 19039 - RNA, 18 nt, Artificial Sequence
  Synthetic
uuggccaucagcgcaugc

SEQ ID NO: 19040 - RNA, 19 nt, Artificial Sequence
  Synthetic
auuggccaucagcgcaugc

SEQ ID NO: 19041 - RNA, 20 nt, Artificial Sequence
  Synthetic
gauuggccaucagcgcaugc

SEQ ID NO: 19042 - RNA, 21 nt, Artificial Sequence
  Synthetic
cgauuggccaucagcgcaugc

SEQ ID NO: 19043 - RNA, 22 nt, Artificial Sequence
  Synthetic
gcgauuggccaucagcgcaugc

SEQ ID NO: 19044 - RNA, 23 nt, Artificial Sequence
  Synthetic
ggcgauuggccaucagcgcaugc

SEQ ID NO: 19045 - RNA, 24 nt, Artificial Sequence
  Synthetic
uggcgauuggccaucagcgcaugc

SEQ ID NO: 19046 - RNA, 18 nt, Artificial Sequence
  Synthetic
cugccaacuggauccugc

SEQ ID NO: 19047 - RNA, 19 nt, Artificial Sequence
  Synthetic
gcugccaacuggauccugc

SEQ ID NO: 19048 - RNA, 20 nt, Artificial Sequence
  Synthetic
ugcugccaacuggauccugc

SEQ ID NO: 19049 - RNA, 21 nt, Artificial Sequence
  Synthetic
gugcugccaacuggauccugc

SEQ ID NO: 19050 - RNA, 22 nt, Artificial Sequence
  Synthetic
ugugcugccaacuggauccugc

SEQ ID NO: 19051 - RNA, 23 nt, Artificial Sequence
  Synthetic
  misc_feature (1)..(1): n is a, c, g, or u
nugugcugccaacuggauccugc

SEQ ID NO: 19052 - RNA, 24 nt, Artificial Sequence
  Synthetic
  misc_feature (2)..(2): n is a, c, g, or u
gnugugcugccaacuggauccugc

SEQ ID NO: 19053 - RNA, 18 nt, Artificial Sequence
  Synthetic
uauucccaucccaucauc

SEQ ID NO: 19054 - RNA, 19 nt, Artificial Sequence
  Synthetic
guauucccaucccaucauc

SEQ ID NO: 19055 - RNA, 20 nt, Artificial Sequence
  Synthetic
uguauucccaucccaucauc

SEQ ID NO: 19056 - RNA, 21 nt, Artificial Sequence
  Synthetic
cuguauucccaucccaucauc

SEQ ID NO: 19057 - RNA, 22 nt, Artificial Sequence
  Synthetic
ccuguauucccaucccaucauc

SEQ ID NO: 19058 - RNA, 23 nt, Artificial Sequence
  Synthetic
accuguauucccaucccaucauc

SEQ ID NO: 19059 - RNA, 24 nt, Artificial Sequence
  Synthetic
caccuguauucccaucccaucauc

SEQ ID NO: 19060 - RNA, 18 nt, Artificial Sequence
  Synthetic
  misc_feature (8)..(8): n is a, c, g, or u
guauuaanccuuacuauc

SEQ ID NO: 19061 - RNA, 19 nt, Artificial Sequence
  Synthetic
  misc_feature (9)..(9): n is a, c, g, or u
gguauuaanccuuacuauc

SEQ ID NO: 19062 - RNA, 20 nt, Artificial Sequence
  Synthetic
  misc_feature (10)..(10): n is a, c, g, or u
agguauuaanccuuacuauc

SEQ ID NO: 19063 - RNA, 21 nt, Artificial Sequence
  Synthetic
  misc_feature (11)..(11): n is a, c, g, or u
aagguauuaanccuuacuauc

SEQ ID NO: 19064 - RNA, 22 nt, Artificial Sequence
  Synthetic
  misc_feature (12)..(12): n is a, c, g, or u
aaagguauuaanccuuacuauc

SEQ ID NO: 19065 - RNA, 23 nt, Artificial Sequence
  Synthetic
  misc_feature (13)..(13): n is a, c, g, or u
uaaagguauuaanccuuacuauc

SEQ ID NO: 19066 - RNA, 24 nt, Artificial Sequence
  Synthetic
  misc_feature (14)..(14): n is a, c, g, or u
auaaagguauuaanccuuacuauc

SEQ ID NO: 19067 - RNA, 18 nt, Artificial Sequence
  Synthetic
ccuuacauaagaggacuc

SEQ ID NO: 19068 - RNA, 19 nt, Artificial Sequence
  Synthetic
accuuacauaagaggacuc

SEQ ID NO: 19069 - RNA, 20 nt, Artificial Sequence
  Synthetic
aaccuuacauaagaggacuc

SEQ ID NO: 19070 - RNA, 21 nt, Artificial Sequence
  Synthetic
caaccuuacauaagaggacuc

SEQ ID NO: 19071 - RNA, 22 nt, Artificial Sequence
  Synthetic
acaaccuuacauaagaggacuc

SEQ ID NO: 19072 - RNA, 23 nt, Artificial Sequence
  Synthetic
aacaaccuuacauaagaggacuc

SEQ ID NO: 19073 - RNA, 24 nt, Artificial Sequence
  Synthetic
caacaaccuuacauaagaggacuc

SEQ ID NO: 19074 - RNA, 18 nt, Artificial Sequence
  Synthetic
  misc_feature (11)..(11): n is a, c, g, or u
guugggggacnuugccuc

SEQ ID NO: 19075 - RNA, 19 nt, Artificial Sequence
  Synthetic
  misc_feature (12)..(12): n is a, c, g, or u
aguugggggacnuugccuc

SEQ ID NO: 19076 - RNA, 20 nt, Artificial Sequence
  Synthetic
  misc_feature (13)..(13): n is a, c, g, or u
gaguugggggacnuugccuc

SEQ ID NO: 19077 - RNA, 21 nt, Artificial Sequence
  Synthetic
  misc_feature (14)..(14): n is a, c, g, or u
ggaguugggggacnuugccuc

SEQ ID NO: 19078 - RNA, 22 nt, Artificial Sequence
  Synthetic
  misc_feature (15)..(15): n is a, c, g, or u
gggaguugggggacnuugccuc

SEQ ID NO: 19079 - RNA, 23 nt, Artificial Sequence
  Synthetic
  misc_feature (16)..(16): n is a, c, g, or u
ugggaguugggggacnuugccuc

SEQ ID NO: 19080 - RNA, 24 nt, Artificial Sequence
  Synthetic
  misc_feature (17)..(17): n is a, c, g, or u
uugggaguugggggacnuugccuc

SEQ ID NO: 19081 - RNA, 18 nt, Artificial Sequence
  Synthetic
ccugcaccacucuugcuc

SEQ ID NO: 19082 - RNA, 19 nt, Artificial Sequence
  Synthetic
accugcaccacucuugcuc

SEQ ID NO: 19083 - RNA, 20 nt, Artificial Sequence
  Synthetic
aaccugcaccacucuugcuc

SEQ ID NO: 19084 - RNA, 21 nt, Artificial Sequence
  Synthetic
aaaccugcaccacucuugcuc

SEQ ID NO: 19085 - RNA, 22 nt, Artificial Sequence
  Synthetic
aaaaccugcaccacucuugcuc

SEQ ID NO: 19086 - RNA, 23 nt, Artificial Sequence
  Synthetic
caaaaccugcaccacucuugcuc

SEQ ID NO: 19087 - RNA, 24 nt, Artificial Sequence
  Synthetic
gcaaaaccugcaccacucuugcuc

SEQ ID NO: 19088 - RNA, 18 nt, Artificial Sequence
  Synthetic
uaaggacugggaggaguc

SEQ ID NO: 19089 - RNA, 19 nt, Artificial Sequence
  Synthetic
uuaaggacugggaggaguc

SEQ ID NO: 19090 - RNA, 20 nt, Artificial Sequence
  Synthetic
uuuaaggacugggaggaguc

SEQ ID NO: 19091 - RNA, 21 nt, Artificial Sequence
  Synthetic
auuuaaggacugggaggaguc

SEQ ID NO: 19092 - RNA, 22 nt, Artificial Sequence
  Synthetic
uauuuaaggacugggaggaguc

SEQ ID NO: 19093 - RNA, 23 nt, Artificial Sequence
  Synthetic
guauuuaaggacugggaggaguc

SEQ ID NO: 19094 - RNA, 24 nt, Artificial Sequence
  Synthetic
uguauuuaaggacugggaggaguc

SEQ ID NO: 19095 - RNA, 18 nt, Artificial Sequence
  Synthetic
uuccaccaaucggagguc

SEQ ID NO: 19096 - RNA, 19 nt, Artificial Sequence
  Synthetic
cuuccaccaaucggagguc

SEQ ID NO: 19097 - RNA, 20 nt, Artificial Sequence
  Synthetic
gcuuccaccaaucggagguc

SEQ ID NO: 19098 - RNA, 21 nt, Artificial Sequence
  Synthetic
ugcuuccaccaaucggagguc

SEQ ID NO: 19099 - RNA, 22 nt, Artificial Sequence
  Synthetic
cugcuuccaccaaucggagguc

SEQ ID NO: 19100 - RNA, 23 nt, Artificial Sequence
  Synthetic
ccugcuuccaccaaucggagguc

SEQ ID NO: 19101 - RNA, 24 nt, Artificial Sequence
  Synthetic
uccugcuuccaccaaucggagguc

SEQ ID NO: 19102 - RNA, 18 nt, Artificial Sequence
  Synthetic
  misc_feature (14)..(14): n is a, c, g, or u
uuucgcucgcagcngguc

SEQ ID NO: 19103 - RNA, 19 nt, Artificial Sequence
  Synthetic
  misc_feature (15)..(15): n is a, c, g, or u
guuucgcucgcagcngguc

SEQ ID NO: 19104 - RNA, 20 nt, Artificial Sequence
  Synthetic
  misc_feature (16)..(16): n is a, c, g, or u
uguuucgcucgcagcngguc

SEQ ID NO: 19105 - RNA, 21 nt, Artificial Sequence
  Synthetic
  misc_feature (17)..(17): n is a, c, g, or u
uuguuucgcucgcagcngguc

SEQ ID NO: 19106 - RNA, 22 nt, Artificial Sequence
  Synthetic
  misc_feature (18)..(18): n is a, c, g, or u
cuuguuucgcucgcagcngguc

SEQ ID NO: 19107 - RNA, 23 nt, Artificial Sequence
  Synthetic
  misc_feature (19)..(19): n is a, c, g, or u
gcuuguuucgcucgcagcngguc

SEQ ID NO: 19108 - RNA, 24 nt, Artificial Sequence
  Synthetic
  misc_feature (1)..(1): n is a, c, g, or u
  misc_feature (20)..(20): n is a, c, g, or u
ngcuuguuucgcucgcagcngguc

SEQ ID NO: 19109 - RNA, 18 nt, Artificial Sequence
  Synthetic
gacuucuucccgucuguc

SEQ ID NO: 19110 - RNA, 19 nt, Artificial Sequence
  Synthetic
ugacuucuucccgucuguc

SEQ ID NO: 19111 - RNA, 20 nt, Artificial Sequence
  Synthetic
cugacuucuucccgucuguc

SEQ ID NO: 19112 - RNA, 21 nt, Artificial Sequence
  Synthetic
ucugacuucuucccgucuguc

SEQ ID NO: 19113 - RNA, 22 nt, Artificial Sequence
  Synthetic
uucugacuucuucccgucuguc

SEQ ID NO: 19114 - RNA, 23 nt, Artificial Sequence
  Synthetic
cuucugacuucuucccgucuguc

SEQ ID NO: 19115 - RNA, 24 nt, Artificial Sequence
  Synthetic
ccuucugacuucuucccgucuguc

SEQ ID NO: 19116 - RNA, 18 nt, Artificial Sequence
  Synthetic
uugugggucaccauauuc

SEQ ID NO: 19117 - RNA, 19 nt, Artificial Sequence
  Synthetic
uuugugggucaccauauuc

SEQ ID NO: 19118 - RNA, 20 nt, Artificial Sequence
  Synthetic
uuuugugggucaccauauuc

SEQ ID NO: 19119 - RNA, 21 nt, Artificial Sequence
  Synthetic
auuuugugggucaccauauuc

SEQ ID NO: 19120 - RNA, 22 nt, Artificial Sequence
  Synthetic
cauuuugugggucaccauauuc

SEQ ID NO: 19121 - RNA, 23 nt, Artificial Sequence
  Synthetic
ucauuuugugggucaccauauuc

SEQ ID NO: 19122 - RNA, 24 nt, Artificial Sequence
  Synthetic
cucauuuugugggucaccauauuc

SEQ ID NO: 19123 - RNA, 18 nt, Artificial Sequence
  Synthetic
cuauccuaucaacacuuc

SEQ ID NO: 19124 - RNA, 19 nt, Artificial Sequence
  Synthetic
ccuauccuaucaacacuuc

SEQ ID NO: 19125 - RNA, 20 nt, Artificial Sequence
  Synthetic
cccuauccuaucaacacuuc

SEQ ID NO: 19126 - RNA, 21 nt, Artificial Sequence
  Synthetic
ccccuauccuaucaacacuuc

SEQ ID NO: 19127 - RNA, 22 nt, Artificial Sequence
  Synthetic
gccccuauccuaucaacacuuc

SEQ ID NO: 19128 - RNA, 23 nt, Artificial Sequence
  Synthetic
ugccccuauccuaucaacacuuc

SEQ ID NO: 19129 - RNA, 24 nt, Artificial Sequence
  Synthetic
augccccuauccuaucaacacuuc

SEQ ID NO: 19130 - RNA, 18 nt, Artificial Sequence
  Synthetic
cucacaucaucaaucuuc

SEQ ID NO: 19131 - RNA, 19 nt, Artificial Sequence
  Synthetic
ucucacaucaucaaucuuc

SEQ ID NO: 19132 - RNA, 20 nt, Artificial Sequence
  Synthetic
cucucacaucaucaaucuuc

SEQ ID NO: 19133 - RNA, 21 nt, Artificial Sequence
  Synthetic
ucucucacaucaucaaucuuc

SEQ ID NO: 19134 - RNA, 22 nt, Artificial Sequence
  Synthetic
cucucucacaucaucaaucuuc

SEQ ID NO: 19135 - RNA, 23 nt, Artificial Sequence
  Synthetic
ccucucucacaucaucaaucuuc

SEQ ID NO: 19136 - RNA, 24 nt, Artificial Sequence
  Synthetic
gccucucucacaucaucaaucuuc

SEQ ID NO: 19137 - RNA, 18 nt, Artificial Sequence
  Synthetic
  misc_feature (7)..(7): n is a, c, g, or u
caacucnguuguccuuuc

SEQ ID NO: 19138 - RNA, 19 nt, Artificial Sequence
  Synthetic
  misc_feature (8)..(8): n is a, c, g, or u
acaacucnguuguccuuuc

SEQ ID NO: 19139 - RNA, 20 nt, Artificial Sequence
  Synthetic
  misc_feature (9)..(9): n is a, c, g, or u
gacaacucnguuguccuuuc

SEQ ID NO: 19140 - RNA, 21 nt, Artificial Sequence
  Synthetic
  misc_feature (10)..(10): n is a, c, g, or u
ugacaacucnguuguccuuuc

SEQ ID NO: 19141 - RNA, 22 nt, Artificial Sequence
  Synthetic
  misc_feature (11)..(11): n is a, c, g, or u
cugacaacucnguuguccuuuc

SEQ ID NO: 19142 - RNA, 23 nt, Artificial Sequence
  Synthetic
  misc_feature (12)..(12): n is a, c, g, or u
acugacaacucnguuguccuuuc

SEQ ID NO: 19143 - RNA, 24 nt, Artificial Sequence
  Synthetic
  misc_feature (13)..(13): n is a, c, g, or u
cacugacaacucnguuguccuuuc

SEQ ID NO: 19144 - RNA, 18 nt, Artificial Sequence
  Synthetic
ggacuucucucaauuuuc

SEQ ID NO: 19145 - RNA, 19 nt, Artificial Sequence
  Synthetic
uggacuucucucaauuuuc

SEQ ID NO: 19146 - RNA, 20 nt, Artificial Sequence
  Synthetic
guggacuucucucaauuuuc

SEQ ID NO: 19147 - RNA, 21 nt, Artificial Sequence
  Synthetic
gguggacuucucucaauuuuc

SEQ ID NO: 19148 - RNA, 22 nt, Artificial Sequence
  Synthetic
ugguggacuucucucaauuuuc

SEQ ID NO: 19149 - RNA, 23 nt, Artificial Sequence
  Synthetic
gugguggacuucucucaauuuuc

SEQ ID NO: 19150 - RNA, 24 nt, Artificial Sequence
  Synthetic
cgugguggacuucucucaauuuuc

SEQ ID NO: 19151 - RNA, 18 nt, Artificial Sequence
  Synthetic
aggcagggccccuagaag

SEQ ID NO: 19152 - RNA, 19 nt, Artificial Sequence
  Synthetic
gaggcagggccccuagaag

SEQ ID NO: 19153 - RNA, 20 nt, Artificial Sequence
  Synthetic
cgaggcagggccccuagaag

SEQ ID NO: 19154 - RNA, 21 nt, Artificial Sequence
  Synthetic
acgaggcagggccccuagaag

SEQ ID NO: 19155 - RNA, 22 nt, Artificial Sequence
  Synthetic
aacgaggcagggccccuagaag

SEQ ID NO: 19156 - RNA, 23 nt, Artificial Sequence
  Synthetic
caacgaggcagggccccuagaag

SEQ ID NO: 19157 - RNA, 24 nt, Artificial Sequence
  Synthetic
acaacgaggcagggccccuagaag

SEQ ID NO: 19158 - RNA, 18 nt, Artificial Sequence
  Synthetic
auuccuuggacucauaag

SEQ ID NO: 19159 - RNA, 19 nt, Artificial Sequence
  Synthetic
uauuccuuggacucauaag

SEQ ID NO: 19160 - RNA, 20 nt, Artificial Sequence
  Synthetic
guauuccuuggacucauaag

SEQ ID NO: 19161 - RNA, 21 nt, Artificial Sequence
  Synthetic
aguauuccuuggacucauaag

SEQ ID NO: 19162 - RNA, 22 nt, Artificial Sequence
  Synthetic
uaguauuccuuggacucauaag

SEQ ID NO: 19163 - RNA, 23 nt, Artificial Sequence
  Synthetic
uuaguauuccuuggacucauaag

SEQ ID NO: 19164 - RNA, 24 nt, Artificial Sequence
  Synthetic
guuaguauuccuuggacucauaag

SEQ ID NO: 19165 - RNA, 18 nt, Artificial Sequence
  Synthetic
aacucccucgccucgcag

SEQ ID NO: 19166 - RNA, 19 nt, Artificial Sequence
  Synthetic
gaacucccucgccucgcag

SEQ ID NO: 19167 - RNA, 20 nt, Artificial Sequence
  Synthetic
agaacucccucgccucgcag

SEQ ID NO: 19168 - RNA, 21 nt, Artificial Sequence
  Synthetic
aagaacucccucgccucgcag

SEQ ID NO: 19169 - RNA, 22 nt, Artificial Sequence
  Synthetic
gaagaacucccucgccucgcag

SEQ ID NO: 19170 - RNA, 23 nt, Artificial Sequence
  Synthetic
agaagaacucccucgccucgcag

SEQ ID NO: 19171 - RNA, 24 nt, Artificial Sequence
  Synthetic
aagaagaacucccucgccucgcag

SEQ ID NO: 19172 - RNA, 18 nt, Artificial Sequence
  Synthetic
cauccacaggccaugcag

SEQ ID NO: 19173 - RNA, 19 nt, Artificial Sequence
  Synthetic
acauccacaggccaugcag

SEQ ID NO: 19174 - RNA, 20 nt, Artificial Sequence
  Synthetic
cacauccacaggccaugcag

SEQ ID NO: 19175 - RNA, 21 nt, Artificial Sequence
  Synthetic
acacauccacaggccaugcag

SEQ ID NO: 19176 - RNA, 22 nt, Artificial Sequence
  Synthetic
cacacauccacaggccaugcag

SEQ ID NO: 19177 - RNA, 23 nt, Artificial Sequence
  Synthetic
acacacauccacaggccaugcag

SEQ ID NO: 19178 - RNA, 24 nt, Artificial Sequence
  Synthetic
gacacacauccacaggccaugcag

SEQ ID NO: 19179 - RNA, 18 nt, Artificial Sequence
  Synthetic
accucucucaacggcgag

SEQ ID NO: 19180 - RNA, 19 nt, Artificial Sequence
  Synthetic
caccucucucaacggcgag

SEQ ID NO: 19181 - RNA, 20 nt, Artificial Sequence
  Synthetic
gcaccucucucaacggcgag

SEQ ID NO: 19182 - RNA, 21 nt, Artificial Sequence
  Synthetic
agcaccucucucaacggcgag

SEQ ID NO: 19183 - RNA, 22 nt, Artificial Sequence
  Synthetic
gagcaccucucucaacggcgag

SEQ ID NO: 19184 - RNA, 23 nt, Artificial Sequence
  Synthetic
ggagcaccucucucaacggcgag

SEQ ID NO: 19185 - RNA, 24 nt, Artificial Sequence
  Synthetic
gggagcaccucucucaacggcgag

SEQ ID NO: 19186 - RNA, 18 nt, Artificial Sequence
  Synthetic
gaggagucgggggaggag

SEQ ID NO: 19187 - RNA, 19 nt, Artificial Sequence
  Synthetic
ggaggagucgggggaggag

SEQ ID NO: 19188 - RNA, 20 nt, Artificial Sequence
  Synthetic
gggaggagucgggggaggag

SEQ ID NO: 19189 - RNA, 21 nt, Artificial Sequence
  Synthetic
ugggaggagucgggggaggag

SEQ ID NO: 19190 - RNA, 22 nt, Artificial Sequence
  Synthetic
cugggaggagucgggggaggag

SEQ ID NO: 19191 - RNA, 23 nt, Artificial Sequence
  Synthetic
acugggaggagucgggggaggag

SEQ ID NO: 19192 - RNA, 24 nt, Artificial Sequence
  Synthetic
gacugggaggagucgggggaggag

SEQ ID NO: 19193 - RNA, 18 nt, Artificial Sequence
  Synthetic
uuuaaggacugggaggag

SEQ ID NO: 19194 - RNA, 19 nt, Artificial Sequence
  Synthetic
auuuaaggacugggaggag

SEQ ID NO: 19195 - RNA, 20 nt, Artificial Sequence
  Synthetic
uauuuaaggacugggaggag

SEQ ID NO: 19196 - RNA, 21 nt, Artificial Sequence
  Synthetic
guauuuaaggacugggaggag

SEQ ID NO: 19197 - RNA, 22 nt, Artificial Sequence
  Synthetic
uguauuuaaggacugggaggag

SEQ ID NO: 19198 - RNA, 23 nt, Artificial Sequence
  Synthetic
guguauuuaaggacugggaggag

SEQ ID NO: 19199 - RNA, 24 nt, Artificial Sequence
  Synthetic
uguguauuuaaggacugggaggag

SEQ ID NO: 19200 - RNA, 18 nt, Artificial Sequence
  Synthetic
uggcaaacaagguaggag

SEQ ID NO: 19201 - RNA, 19 nt, Artificial Sequence
  Synthetic
auggcaaacaagguaggag

SEQ ID NO: 19202 - RNA, 20 nt, Artificial Sequence
  Synthetic
aauggcaaacaagguaggag

SEQ ID NO: 19203 - RNA, 21 nt, Artificial Sequence
  Synthetic
caauggcaaacaagguaggag

SEQ ID NO: 19204 - RNA, 22 nt, Artificial Sequence
  Synthetic
ccaauggcaaacaagguaggag

SEQ ID NO: 19205 - RNA, 23 nt, Artificial Sequence
  Synthetic
gccaauggcaaacaagguaggag

SEQ ID NO: 19206 - RNA, 24 nt, Artificial Sequence
  Synthetic
ggccaauggcaaacaagguaggag

SEQ ID NO: 19207 - RNA, 18 nt, Artificial Sequence
  Synthetic
  misc_feature (10)..(10): n is a, c, g, or u
ggguuauaunauugggag

SEQ ID NO: 19208 - RNA, 19 nt, Artificial Sequence
  Synthetic
  misc_feature (11)..(11): n is a, c, g, or u
uggguuauaunauugggag

SEQ ID NO: 19209 - RNA, 20 nt, Artificial Sequence
  Synthetic
  misc_feature (12)..(12): n is a, c, g, or u
auggguuauaunauugggag

SEQ ID NO: 19210 - RNA, 21 nt, Artificial Sequence
  Synthetic
  misc_feature (13)..(13): n is a, c, g, or u
uauggguuauaunauugggag

SEQ ID NO: 19211 - RNA, 22 nt, Artificial Sequence
  Synthetic
  misc_feature (14)..(14): n is a, c, g, or u
uuauggguuauaunauugggag

SEQ ID NO: 19212 - RNA, 23 nt, Artificial Sequence
  Synthetic
  misc_feature (15)..(15): n is a, c, g, or u
uuuauggguuauaunauugggag

SEQ ID NO: 19213 - RNA, 24 nt, Artificial Sequence
  Synthetic
  misc_feature (16)..(16): n is a, c, g, or u
cuuuauggguuauaunauugggag

SEQ ID NO: 19214 - RNA, 18 nt, Artificial Sequence
  Synthetic
acgaggcagggccccuag

SEQ ID NO: 19215 - RNA, 19 nt, Artificial Sequence
  Synthetic
aacgaggcagggccccuag

SEQ ID NO: 19216 - RNA, 20 nt, Artificial Sequence
  Synthetic
caacgaggcagggccccuag

SEQ ID NO: 19217 - RNA, 21 nt, Artificial Sequence
  Synthetic
acaacgaggcagggccccuag

SEQ ID NO: 19218 - RNA, 22 nt, Artificial Sequence
  Synthetic
gacaacgaggcagggccccuag

SEQ ID NO: 19219 - RNA, 23 nt, Artificial Sequence
  Synthetic
agacaacgaggcagggccccuag

SEQ ID NO: 19220 - RNA, 24 nt, Artificial Sequence
  Synthetic
uagacaacgaggcagggccccuag

SEQ ID NO: 19221 - RNA, 18 nt, Artificial Sequence
  Synthetic
ggagcaccucucucaacg

SEQ ID NO: 19222 - RNA, 19 nt, Artificial Sequence
  Synthetic
gggagcaccucucucaacg

SEQ ID NO: 19223 - RNA, 20 nt, Artificial Sequence
  Synthetic
ugggagcaccucucucaacg

SEQ ID NO: 19224 - RNA, 21 nt, Artificial Sequence
  Synthetic
augggagcaccucucucaacg

SEQ ID NO: 19225 - RNA, 22 nt, Artificial Sequence
  Synthetic
caugggagcaccucucucaacg

SEQ ID NO: 19226 - RNA, 23 nt, Artificial Sequence
  Synthetic
gcaugggagcaccucucucaacg

SEQ ID NO: 19227 - RNA, 24 nt, Artificial Sequence
  Synthetic
agcaugggagcaccucucucaacg

SEQ ID NO: 19228 - RNA, 18 nt, Artificial Sequence
  Synthetic
uggccaucagcgcaugcg

SEQ ID NO: 19229 - RNA, 19 nt, Artificial Sequence
  Synthetic
uuggccaucagcgcaugcg

SEQ ID NO: 19230 - RNA, 20 nt, Artificial Sequence
  Synthetic
auuggccaucagcgcaugcg

SEQ ID NO: 19231 - RNA, 21 nt, Artificial Sequence
  Synthetic
gauuggccaucagcgcaugcg

SEQ ID NO: 19232 - RNA, 22 nt, Artificial Sequence
  Synthetic
cgauuggccaucagcgcaugcg

SEQ ID NO: 19233 - RNA, 23 nt, Artificial Sequence
  Synthetic
gcgauuggccaucagcgcaugcg

SEQ ID NO: 19234 - RNA, 24 nt, Artificial Sequence
  Synthetic
ggcgauuggccaucagcgcaugcg

SEQ ID NO: 19235 - RNA, 18 nt, Artificial Sequence
  Synthetic
ugccaacuggauccugcg

SEQ ID NO: 19236 - RNA, 19 nt, Artificial Sequence
  Synthetic
cugccaacuggauccugcg

SEQ ID NO: 19237 - RNA, 20 nt, Artificial Sequence
  Synthetic
gcugccaacuggauccugcg

SEQ ID NO: 19238 - RNA, 21 nt, Artificial Sequence
  Synthetic
ugcugccaacuggauccugcg

SEQ ID NO: 19239 - RNA, 22 nt, Artificial Sequence
  Synthetic
gugcugccaacuggauccugcg

SEQ ID NO: 19240 - RNA, 23 nt, Artificial Sequence
  Synthetic
ugugcugccaacuggauccugcg

SEQ ID NO: 19241 - RNA, 24 nt, Artificial Sequence
  Synthetic
  misc_feature (1)..(1): n is a, c, g, or u
nugugcugccaacuggauccugcg

SEQ ID NO: 19242 - RNA, 18 nt, Artificial Sequence
  Synthetic
aauuuguucaguggugcg

SEQ ID NO: 19243 - RNA, 19 nt, Artificial Sequence
  Synthetic
caauuuguucaguggugcg

SEQ ID NO: 19244 - RNA, 20 nt, Artificial Sequence
  Synthetic
gcaauuuguucaguggugcg

SEQ ID NO: 19245 - RNA, 21 nt, Artificial Sequence
  Synthetic
ugcaauuuguucaguggugcg

SEQ ID NO: 19246 - RNA, 22 nt, Artificial Sequence
  Synthetic
gugcaauuuguucaguggugcg

SEQ ID NO: 19247 - RNA, 23 nt, Artificial Sequence
  Synthetic
agugcaauuuguucaguggugcg

SEQ ID NO: 19248 - RNA, 24 nt, Artificial Sequence
  Synthetic
uagugcaauuuguucaguggugcg

SEQ ID NO: 19249 - RNA, 18 nt, Artificial Sequence
  Synthetic
aaggacugggaggagucg

SEQ ID NO: 19250 - RNA, 19 nt, Artificial Sequence
  Synthetic
uaaggacugggaggagucg

SEQ ID NO: 19251 - RNA, 20 nt, Artificial Sequence
  Synthetic
uuaaggacugggaggagucg

SEQ ID NO: 19252 - RNA, 21 nt, Artificial Sequence
  Synthetic
uuuaaggacugggaggagucg

SEQ ID NO: 19253 - RNA, 22 nt, Artificial Sequence
  Synthetic
auuuaaggacugggaggagucg

SEQ ID NO: 19254 - RNA, 23 nt, Artificial Sequence
  Synthetic
uauuuaaggacugggaggagucg

SEQ ID NO: 19255 - RNA, 24 nt, Artificial Sequence
  Synthetic
guauuuaaggacugggaggagucg

SEQ ID NO: 19256 - RNA, 18 nt, Artificial Sequence
  Synthetic
  misc_feature (10)..(10): n is a, c, g, or u
aucucaaucnccgcgucg

SEQ ID NO: 19257 - RNA, 19 nt, Artificial Sequence
  Synthetic
  misc_feature (11)..(11): n is a, c, g, or u
gaucucaaucnccgcgucg

SEQ ID NO: 19258 - RNA, 20 nt, Artificial Sequence
  Synthetic
  misc_feature (12)..(12): n is a, c, g, or u
agaucucaaucnccgcgucg

SEQ ID NO: 19259 - RNA, 21 nt, Artificial Sequence
  Synthetic
  misc_feature (13)..(13): n is a, c, g, or u
aagaucucaaucnccgcgucg

SEQ ID NO: 19260 - RNA, 22 nt, Artificial Sequence
  Synthetic
  misc_feature (14)..(14): n is a, c, g, or u
gaagaucucaaucnccgcgucg

SEQ ID NO: 19261 - RNA, 23 nt, Artificial Sequence
  Synthetic
  misc_feature (15)..(15): n is a, c, g, or u
cgaagaucucaaucnccgcgucg

SEQ ID NO: 19262 - RNA, 24 nt, Artificial Sequence
  Synthetic
  misc_feature (16)..(16): n is a, c, g, or u
acgaagaucucaaucnccgcgucg

SEQ ID NO: 19263 - RNA, 18 nt, Artificial Sequence
  Synthetic
ggccaauggcaaacaagg

SEQ ID NO: 19264 - RNA, 19 nt, Artificial Sequence
  Synthetic
uggccaauggcaaacaagg

SEQ ID NO: 19265 - RNA, 20 nt, Artificial Sequence
  Synthetic
uuggccaauggcaaacaagg

SEQ ID NO: 19266 - RNA, 21 nt, Artificial Sequence
  Synthetic
auuggccaauggcaaacaagg

SEQ ID NO: 19267 - RNA, 22 nt, Artificial Sequence
  Synthetic
aauuggccaauggcaaacaagg

SEQ ID NO: 19268 - RNA, 23 nt, Artificial Sequence
  Synthetic
caauuggccaauggcaaacaagg

SEQ ID NO: 19269 - RNA, 24 nt, Artificial Sequence
  Synthetic
acaauuggccaauggcaaacaagg

SEQ ID NO: 19270 - RNA, 18 nt, Artificial Sequence
  Synthetic
uacauacuuuguggaagg

SEQ ID NO: 19271 - RNA, 19 nt, Artificial Sequence
  Synthetic
uuacauacuuuguggaagg

SEQ ID NO: 19272 - RNA, 20 nt, Artificial Sequence
  Synthetic
uuuacauacuuuguggaagg

SEQ ID NO: 19273 - RNA, 21 nt, Artificial Sequence
  Synthetic
auuuacauacuuuguggaagg

SEQ ID NO: 19274 - RNA, 22 nt, Artificial Sequence
  Synthetic
uauuuacauacuuuguggaagg

SEQ ID NO: 19275 - RNA, 23 nt, Artificial Sequence
  Synthetic
  misc_feature (1)..(1): n is a, c, g, or u
nuauuuacauacuuuguggaagg

SEQ ID NO: 19276 - RNA, 24 nt, Artificial Sequence
  Synthetic
  misc_feature (2)..(2): n is a, c, g, or u
anuauuuacauacuuuguggaagg

SEQ ID NO: 19277 - RNA, 18 nt, Artificial Sequence
  Synthetic
uuccuuggacucauaagg

SEQ ID NO: 19278 - RNA, 19 nt, Artificial Sequence
  Synthetic
auuccuuggacucauaagg

SEQ ID NO: 19279 - RNA, 20 nt, Artificial Sequence
  Synthetic
uauuccuuggacucauaagg

SEQ ID NO: 19280 - RNA, 21 nt, Artificial Sequence
  Synthetic
guauuccuuggacucauaagg

SEQ ID NO: 19281 - RNA, 22 nt, Artificial Sequence
  Synthetic
aguauuccuuggacucauaagg

SEQ ID NO: 19282 - RNA, 23 nt, Artificial Sequence
  Synthetic
uaguauuccuuggacucauaagg

SEQ ID NO: 19283 - RNA, 24 nt, Artificial Sequence
  Synthetic
uuaguauuccuuggacucauaagg

SEQ ID NO: 19284 - RNA, 18 nt, Artificial Sequence
  Synthetic
caccaaucggaggucagg

SEQ ID NO: 19285 - RNA, 19 nt, Artificial Sequence
  Synthetic
ccaccaaucggaggucagg

SEQ ID NO: 19286 - RNA, 20 nt, Artificial Sequence
  Synthetic
uccaccaaucggaggucagg

SEQ ID NO: 19287 - RNA, 21 nt, Artificial Sequence
  Synthetic
uuccaccaaucggaggucagg

SEQ ID NO: 19288 - RNA, 22 nt, Artificial Sequence
  Synthetic
cuuccaccaaucggaggucagg

SEQ ID NO: 19289 - RNA, 23 nt, Artificial Sequence
  Synthetic
gcuuccaccaaucggaggucagg

SEQ ID NO: 19290 - RNA, 24 nt, Artificial Sequence
  Synthetic
ugcuuccaccaaucggaggucagg

SEQ ID NO: 19291 - RNA, 18 nt, Artificial Sequence
  Synthetic
uguuguuagacaacgagg

SEQ ID NO: 19292 - RNA, 19 nt, Artificial Sequence
  Synthetic
cuguuguuagacaacgagg

SEQ ID NO: 19293 - RNA, 20 nt, Artificial Sequence
  Synthetic
acuguuguuagacaacgagg

SEQ ID NO: 19294 - RNA, 21 nt, Artificial Sequence
  Synthetic
uacuguuguuagacaacgagg

SEQ ID NO: 19295 - RNA, 22 nt, Artificial Sequence
  Synthetic
cuacuguuguuagacaacgagg

SEQ ID NO: 19296 - RNA, 23 nt, Artificial Sequence
  Synthetic
acuacuguuguuagacaacgagg

SEQ ID NO: 19297 - RNA, 24 nt, Artificial Sequence
  Synthetic
gacuacuguuguuagacaacgagg

SEQ ID NO: 19298 - RNA, 18 nt, Artificial Sequence
  Synthetic
aggacugggaggagucgg

SEQ ID NO: 19299 - RNA, 19 nt, Artificial Sequence
  Synthetic
aaggacugggaggagucgg

SEQ ID NO: 19300 - RNA, 20 nt, Artificial Sequence
  Synthetic
uaaggacugggaggagucgg

SEQ ID NO: 19301 - RNA, 21 nt, Artificial Sequence
  Synthetic
uuaaggacugggaggagucgg

SEQ ID NO: 19302 - RNA, 22 nt, Artificial Sequence
  Synthetic
uuuaaggacugggaggagucgg

SEQ ID NO: 19303 - RNA, 23 nt, Artificial Sequence
  Synthetic
auuuaaggacugggaggagucgg

SEQ ID NO: 19304 - RNA, 24 nt, Artificial Sequence
  Synthetic
uauuuaaggacugggaggagucgg

SEQ ID NO: 19305 - RNA, 18 nt, Artificial Sequence
  Synthetic
gcuguaccaaaccuucgg

SEQ ID NO: 19306 - RNA, 19 nt, Artificial Sequence
  Synthetic
ugcuguaccaaaccuucgg

SEQ ID NO: 19307 - RNA, 20 nt, Artificial Sequence
  Synthetic
cugcuguaccaaaccuucgg

SEQ ID NO: 19308 - RNA, 21 nt, Artificial Sequence
  Synthetic
gcugcuguaccaaaccuucgg

SEQ ID NO: 19309 - RNA, 22 nt, Artificial Sequence
  Synthetic
ugcugcuguaccaaaccuucgg

SEQ ID NO: 19310 - RNA, 23 nt, Artificial Sequence
  Synthetic
cugcugcuguaccaaaccuucgg

SEQ ID NO: 19311 - RNA, 24 nt, Artificial Sequence
  Synthetic
ccugcugcuguaccaaaccuucgg

SEQ ID NO: 19312 - RNA, 18 nt, Artificial Sequence
  Synthetic
gacugggaggagucgggg

SEQ ID NO: 19313 - RNA, 19 nt, Artificial Sequence
  Synthetic
ggacugggaggagucgggg

SEQ ID NO: 19314 - RNA, 20 nt, Artificial Sequence
  Synthetic
aggacugggaggagucgggg

SEQ ID NO: 19315 - RNA, 21 nt, Artificial Sequence
  Synthetic
aaggacugggaggagucgggg

SEQ ID NO: 19316 - RNA, 22 nt, Artificial Sequence
  Synthetic
uaaggacugggaggagucgggg

SEQ ID NO: 19317 - RNA, 23 nt, Artificial Sequence
  Synthetic
uuaaggacugggaggagucgggg

SEQ ID NO: 19318 - RNA, 24 nt, Artificial Sequence
  Synthetic
uuuaaggacugggaggagucgggg

SEQ ID NO: 19319 - RNA, 18 nt, Artificial Sequence
  Synthetic
cacgguggccuucugggg

SEQ ID NO: 19320 - RNA, 19 nt, Artificial Sequence
  Synthetic
acacgguggccuucugggg

SEQ ID NO: 19321 - RNA, 20 nt, Artificial Sequence
  Synthetic
cacacgguggccuucugggg

SEQ ID NO: 19322 - RNA, 21 nt, Artificial Sequence
  Synthetic
ccacacgguggccuucugggg

SEQ ID NO: 19323 - RNA, 22 nt, Artificial Sequence
  Synthetic
cccacacgguggccuucugggg

SEQ ID NO: 19324 - RNA, 23 nt, Artificial Sequence
  Synthetic
ccccacacgguggccuucugggg

SEQ ID NO: 19325 - RNA, 24 nt, Artificial Sequence
  Synthetic
cccccacacgguggccuucugggg

SEQ ID NO: 19326 - RNA, 18 nt, Artificial Sequence
  Synthetic
acacgguggccuucuggg

SEQ ID NO: 19327 - RNA, 19 nt, Artificial Sequence
  Synthetic
cacacgguggccuucuggg

SEQ ID NO: 19328 - RNA, 20 nt, Artificial Sequence
  Synthetic
ccacacgguggccuucuggg

SEQ ID NO: 19329 - RNA, 21 nt, Artificial Sequence
  Synthetic
cccacacgguggccuucuggg

SEQ ID NO: 19330 - RNA, 22 nt, Artificial Sequence
  Synthetic
ccccacacgguggccuucuggg

SEQ ID NO: 19331 - RNA, 23 nt, Artificial Sequence
  Synthetic
cccccacacgguggccuucuggg

SEQ ID NO: 19332 - RNA, 24 nt, Artificial Sequence
  Synthetic
acccccacacgguggccuucuggg

SEQ ID NO: 19333 - RNA, 18 nt, Artificial Sequence
  Synthetic
ugacgcaacccccacugg

SEQ ID NO: 19334 - RNA, 19 nt, Artificial Sequence
  Synthetic
cugacgcaacccccacugg

SEQ ID NO: 19335 - RNA, 20 nt, Artificial Sequence
  Synthetic
gcugacgcaacccccacugg

SEQ ID NO: 19336 - RNA, 21 nt, Artificial Sequence
  Synthetic
ugcugacgcaacccccacugg

SEQ ID NO: 19337 - RNA, 22 nt, Artificial Sequence
  Synthetic
uugcugacgcaacccccacugg

SEQ ID NO: 19338 - RNA, 23 nt, Artificial Sequence
  Synthetic
uuugcugacgcaacccccacugg

SEQ ID NO: 19339 - RNA, 24 nt, Artificial Sequence
  Synthetic
guuugcugacgcaacccccacugg

SEQ ID NO: 19340 - RNA, 18 nt, Artificial Sequence
  Synthetic
uguguauuuaaggacugg

SEQ ID NO: 19341 - RNA, 19 nt, Artificial Sequence
  Synthetic
cuguguauuuaaggacugg

SEQ ID NO: 19342 - RNA, 20 nt, Artificial Sequence
  Synthetic
acuguguauuuaaggacugg

SEQ ID NO: 19343 - RNA, 21 nt, Artificial Sequence
  Synthetic
gacuguguauuuaaggacugg

SEQ ID NO: 19344 - RNA, 22 nt, Artificial Sequence
  Synthetic
agacuguguauuuaaggacugg

SEQ ID NO: 19345 - RNA, 23 nt, Artificial Sequence
  Synthetic
aagacuguguauuuaaggacugg

SEQ ID NO: 19346 - RNA, 24 nt, Artificial Sequence
  Synthetic
aaagacuguguauuuaaggacugg

SEQ ID NO: 19347 - RNA, 18 nt, Artificial Sequence
  Synthetic
  misc_feature (6)..(6): n is a, c, g, or u
augacnuuggcuuccugg

SEQ ID NO: 19348 - RNA, 19 nt, Artificial Sequence
  Synthetic
  misc_feature (7)..(7): n is a, c, g, or u
gaugacnuuggcuuccugg

SEQ ID NO: 19349 - RNA, 20 nt, Artificial Sequence
  Synthetic
  misc_feature (8)..(8): n is a, c, g, or u
ugaugacnuuggcuuccugg

SEQ ID NO: 19350 - RNA, 21 nt, Artificial Sequence
  Synthetic
  misc_feature (9)..(9): n is a, c, g, or u
uugaugacnuuggcuuccugg

SEQ ID NO: 19351 - RNA, 22 nt, Artificial Sequence
  Synthetic
  misc_feature (10)..(10): n is a, c, g, or u
guugaugacnuuggcuuccugg

SEQ ID NO: 19352 - RNA, 23 nt, Artificial Sequence
  Synthetic
  misc_feature (11)..(11): n is a, c, g, or u
aguugaugacnuuggcuuccugg

SEQ ID NO: 19353 - RNA, 24 nt, Artificial Sequence
  Synthetic
  misc_feature (12)..(12): n is a, c, g, or u
gaguugaugacnuuggcuuccugg

SEQ ID NO: 19354 - RNA, 18 nt, Artificial Sequence
  Synthetic
  misc_feature (4)..(4): n is a, c, g, or u
uucnugccuuacauuugg

SEQ ID NO: 19355 - RNA, 19 nt, Artificial Sequence
  Synthetic
  misc_feature (5)..(5): n is a, c, g, or u
uuucnugccuuacauuugg

SEQ ID NO: 19356 - RNA, 20 nt, Artificial Sequence
  Synthetic
  misc_feature (6)..(6): n is a, c, g, or u
auuucnugccuuacauuugg

SEQ ID NO: 19357 - RNA, 21 nt, Artificial Sequence
  Synthetic
  misc_feature (1)..(1): n is a, c, g, or u
  misc_feature (7)..(7): n is a, c, g, or u
nauuucnugccuuacauuugg

SEQ ID NO: 19358 - RNA, 22 nt, Artificial Sequence
  Synthetic
  misc_feature (2)..(2): n is a, c, g, or u
  misc_feature (8)..(8): n is a, c, g, or u
anauuucnugccuuacauuugg

SEQ ID NO: 19359 - RNA, 23 nt, Artificial Sequence
  Synthetic
  misc_feature (3)..(3): n is a, c, g, or u
  misc_feature (9)..(9): n is a, c, g, or u
canauuucnugccuuacauuugg

SEQ ID NO: 19360 - RNA, 24 nt, Artificial Sequence
  Synthetic
  misc_feature (4)..(4): n is a, c, g, or u
  misc_feature (10)..(10): n is a, c, g, or u
ucanauuucnugccuuacauuugg

SEQ ID NO: 19361 - RNA, 18 nt, Artificial Sequence
  Synthetic
cacagcuaaaacaaaaug

SEQ ID NO: 19362 - RNA, 19 nt, Artificial Sequence
  Synthetic
acacagcuaaaacaaaaug

SEQ ID NO: 19363 - RNA, 20 nt, Artificial Sequence
  Synthetic
aacacagcuaaaacaaaaug

SEQ ID NO: 19364 - RNA, 21 nt, Artificial Sequence
  Synthetic
gaacacagcuaaaacaaaaug

SEQ ID NO: 19365 - RNA, 22 nt, Artificial Sequence
  Synthetic
ugaacacagcuaaaacaaaaug

SEQ ID NO: 19366 - RNA, 23 nt, Artificial Sequence
  Synthetic
uugaacacagcuaaaacaaaaug

SEQ ID NO: 19367 - RNA, 24 nt, Artificial Sequence
  Synthetic
uuugaacacagcuaaaacaaaaug

SEQ ID NO: 19368 - RNA, 18 nt, Artificial Sequence
  Synthetic
  misc_feature (8)..(8): n is a, c, g, or u
gacccugnuaugaacaug

SEQ ID NO: 19369 - RNA, 19 nt, Artificial Sequence
  Synthetic
  misc_feature (9)..(9): n is a, c, g, or u
ggacccugnuaugaacaug

SEQ ID NO: 19370 - RNA, 20 nt, Artificial Sequence
  Synthetic
  misc_feature (10)..(10): n is a, c, g, or u
gggacccugnuaugaacaug

SEQ ID NO: 19371 - RNA, 21 nt, Artificial Sequence
  Synthetic
  misc_feature (11)..(11): n is a, c, g, or u
ggggacccugnuaugaacaug

SEQ ID NO: 19372 - RNA, 22 nt, Artificial Sequence
  Synthetic
  misc_feature (12)..(12): n is a, c, g, or u
uggggacccugnuaugaacaug

SEQ ID NO: 19373 - RNA, 23 nt, Artificial Sequence
  Synthetic
  misc_feature (13)..(13): n is a, c, g, or u
cuggggacccugnuaugaacaug

SEQ ID NO: 19374 - RNA, 24 nt, Artificial Sequence
  Synthetic
  misc_feature (14)..(14): n is a, c, g, or u
acuggggacccugnuaugaacaug

SEQ ID NO: 19375 - RNA, 18 nt, Artificial Sequence
  Synthetic
cucugccgauccauacug

SEQ ID NO: 19376 - RNA, 19 nt, Artificial Sequence
  Synthetic
ccucugccgauccauacug

SEQ ID NO: 19377 - RNA, 20 nt, Artificial Sequence
  Synthetic
uccucugccgauccauacug

SEQ ID NO: 19378 - RNA, 21 nt, Artificial Sequence
  Synthetic
cuccucugccgauccauacug

SEQ ID NO: 19379 - RNA, 22 nt, Artificial Sequence
  Synthetic
gcuccucugccgauccauacug

SEQ ID NO: 19380 - RNA, 23 nt, Artificial Sequence
  Synthetic
ggcuccucugccgauccauacug

SEQ ID NO: 19381 - RNA, 24 nt, Artificial Sequence
  Synthetic
uggcuccucugccgauccauacug

SEQ ID NO: 19382 - RNA, 18 nt, Artificial Sequence
  Synthetic
  misc_feature (2)..(2): n is a, c, g, or u
anagagucuagacucgug

SEQ ID NO: 19383 - RNA, 19 nt, Artificial Sequence
  Synthetic
  misc_feature (3)..(3): n is a, c, g, or u
canagagucuagacucgug

SEQ ID NO: 19384 - RNA, 20 nt, Artificial Sequence
  Synthetic
  misc_feature (4)..(4): n is a, c, g, or u
ccanagagucuagacucgug

SEQ ID NO: 19385 - RNA, 21 nt, Artificial Sequence
  Synthetic
  misc_feature (5)..(5): n is a, c, g, or u
accanagagucuagacucgug

SEQ ID NO: 19386 - RNA, 22 nt, Artificial Sequence
  Synthetic
  misc_feature (6)..(6): n is a, c, g, or u
uaccanagagucuagacucgug

SEQ ID NO: 19387 - RNA, 23 nt, Artificial Sequence
  Synthetic
  misc_feature (7)..(7): n is a, c, g, or u
auaccanagagucuagacucgug

SEQ ID NO: 19388 - RNA, 24 nt, Artificial Sequence
  Synthetic
  misc_feature (8)..(8): n is a, c, g, or u
aauaccanagagucuagacucgug

SEQ ID NO: 19389 - RNA, 18 nt, Artificial Sequence
  Synthetic
caggcaagcuauuuugug

SEQ ID NO: 19390 - RNA, 19 nt, Artificial Sequence
  Synthetic
ucaggcaagcuauuuugug

SEQ ID NO: 19391 - RNA, 20 nt, Artificial Sequence
  Synthetic
cucaggcaagcuauuuugug

SEQ ID NO: 19392 - RNA, 21 nt, Artificial Sequence
  Synthetic
ucucaggcaagcuauuuugug

SEQ ID NO: 19393 - RNA, 22 nt, Artificial Sequence
  Synthetic
cucucaggcaagcuauuuugug

SEQ ID NO: 19394 - RNA, 23 nt, Artificial Sequence
  Synthetic
gcucucaggcaagcuauuuugug

SEQ ID NO: 19395 - RNA, 24 nt, Artificial Sequence
  Synthetic
ugcucucaggcaagcuauuuugug

SEQ ID NO: 19396 - RNA, 18 nt, Artificial Sequence
  Synthetic
  misc_feature (7)..(7): n is a, c, g, or u
uuauaunauugggaguug

SEQ ID NO: 19397 - RNA, 19 nt, Artificial Sequence
  Synthetic
  misc_feature (8)..(8): n is a, c, g, or u
guuauaunauugggaguug

SEQ ID NO: 19398 - RNA, 20 nt, Artificial Sequence
  Synthetic
  misc_feature (9)..(9): n is a, c, g, or u
gguuauaunauugggaguug

SEQ ID NO: 19399 - RNA, 21 nt, Artificial Sequence
  Synthetic
  misc_feature (10)..(10): n is a, c, g, or u
ggguuauaunauugggaguug

SEQ ID NO: 19400 - RNA, 22 nt, Artificial Sequence
  Synthetic
  misc_feature (11)..(11): n is a, c, g, or u
uggguuauaunauugggaguug

SEQ ID NO: 19401 - RNA, 23 nt, Artificial Sequence
  Synthetic
  misc_feature (12)..(12): n is a, c, g, or u
auggguuauaunauugggaguug

SEQ ID NO: 19402 - RNA, 24 nt, Artificial Sequence
  Synthetic
  misc_feature (13)..(13): n is a, c, g, or u
uauggguuauaunauugggaguug

SEQ ID NO: 19403 - RNA, 18 nt, Artificial Sequence
  Synthetic
  misc_feature (3)..(3): n is a, c, g, or u
canuauuuacauacuuug

SEQ ID NO: 19404 - RNA, 19 nt, Artificial Sequence
  Synthetic
  misc_feature (4)..(4): n is a, c, g, or u
acanuauuuacauacuuug

SEQ ID NO: 19405 - RNA, 20 nt, Artificial Sequence
  Synthetic
  misc_feature (5)..(5): n is a, c, g, or u
gacanuauuuacauacuuug

SEQ ID NO: 19406 - RNA, 21 nt, Artificial Sequence
  Synthetic
  misc_feature (6)..(6): n is a, c, g, or u
agacanuauuuacauacuuug

SEQ ID NO: 19407 - RNA, 22 nt, Artificial Sequence
  Synthetic
  misc_feature (7)..(7): n is a, c, g, or u
uagacanuauuuacauacuuug

SEQ ID NO: 19408 - RNA, 23 nt, Artificial Sequence
  Synthetic
  misc_feature (8)..(8): n is a, c, g, or u
cuagacanuauuuacauacuuug

SEQ ID NO: 19409 - RNA, 24 nt, Artificial Sequence
  Synthetic
  misc_feature (9)..(9): n is a, c, g, or u
acuagacanuauuuacauacuuug

SEQ ID NO: 19410 - RNA, 18 nt, Artificial Sequence
  Synthetic
  misc_feature (18)..(18): n is a, c, g, or u
aauuaugucaauacuaan

SEQ ID NO: 19411 - RNA, 19 nt, Artificial Sequence
  Synthetic
  misc_feature (19)..(19): n is a, c, g, or u
uaauuaugucaauacuaan

SEQ ID NO: 19412 - RNA, 20 nt, Artificial Sequence
  Synthetic
  misc_feature (20)..(20): n is a, c, g, or u
uuaauuaugucaauacuaan

SEQ ID NO: 19413 - RNA, 21 nt, Artificial Sequence
  Synthetic
  misc_feature (21)..(21): n is a, c, g, or u
guuaauuaugucaauacuaan

SEQ ID NO: 19414 - RNA, 22 nt, Artificial Sequence
  Synthetic
  misc_feature (22)..(22): n is a, c, g, or u
aguuaauuaugucaauacuaan

SEQ ID NO: 19415 - RNA, 23 nt, Artificial Sequence
  Synthetic
  misc_feature (23)..(23): n is a, c, g, or u
uaguuaauuaugucaauacuaan

SEQ ID NO: 19416 - RNA, 24 nt, Artificial Sequence
  Synthetic
  misc_feature (24)..(24): n is a, c, g, or u
guaguuaauuaugucaauacuaan

SEQ ID NO: 19417 - RNA, 18 nt, Artificial Sequence
  Synthetic
  misc_feature (6)..(6): n is a, c, g, or u
aagaunugauacaaaaau

SEQ ID NO: 19418 - RNA, 19 nt, Artificial Sequence
  Synthetic
  misc_feature (7)..(7): n is a, c, g, or u
caagaunugauacaaaaau

SEQ ID NO: 19419 - RNA, 20 nt, Artificial Sequence
  Synthetic
  misc_feature (8)..(8): n is a, c, g, or u
ucaagaunugauacaaaaau

SEQ ID NO: 19420 - RNA, 21 nt, Artificial Sequence
  Synthetic
  misc_feature (9)..(9): n is a, c, g, or u
aucaagaunugauacaaaaau

SEQ ID NO: 19421 - RNA, 22 nt, Artificial Sequence
  Synthetic
  misc_feature (10)..(10): n is a, c, g, or u
caucaagaunugauacaaaaau

SEQ ID NO: 19422 - RNA, 23 nt, Artificial Sequence
  Synthetic
  misc_feature (11)..(11): n is a, c, g, or u
gcaucaagaunugauacaaaaau

SEQ ID NO: 19423 - RNA, 24 nt, Artificial Sequence
  Synthetic
  misc_feature (12)..(12): n is a, c, g, or u
ugcaucaagaunugauacaaaaau

SEQ ID NO: 19424 - RNA, 18 nt, Artificial Sequence
  Synthetic
ccuccugcuuccaccaau

SEQ ID NO: 19425 - RNA, 19 nt, Artificial Sequence
  Synthetic
accuccugcuuccaccaau

SEQ ID NO: 19426 - RNA, 20 nt, Artificial Sequence
  Synthetic
caccuccugcuuccaccaau

SEQ ID NO: 19427 - RNA, 21 nt, Artificial Sequence
  Synthetic
ccaccuccugcuuccaccaau

SEQ ID NO: 19428 - RNA, 22 nt, Artificial Sequence
  Synthetic
uccaccuccugcuuccaccaau

SEQ ID NO: 19429 - RNA, 23 nt, Artificial Sequence
  Synthetic
auccaccuccugcuuccaccaau

SEQ ID NO: 19430 - RNA, 24 nt, Artificial Sequence
  Synthetic
gauccaccuccugcuuccaccaau

SEQ ID NO: 19431 - RNA, 18 nt, Artificial Sequence
  Synthetic
uugacccuuauaaagaau

SEQ ID NO: 19432 - RNA, 19 nt, Artificial Sequence
  Synthetic
auugacccuuauaaagaau

SEQ ID NO: 19433 - RNA, 20 nt, Artificial Sequence
  Synthetic
cauugacccuuauaaagaau

SEQ ID NO: 19434 - RNA, 21 nt, Artificial Sequence
  Synthetic
acauugacccuuauaaagaau

SEQ ID NO: 19435 - RNA, 22 nt, Artificial Sequence
  Synthetic
gacauugacccuuauaaagaau

SEQ ID NO: 19436 - RNA, 23 nt, Artificial Sequence
  Synthetic
ggacauugacccuuauaaagaau

SEQ ID NO: 19437 - RNA, 24 nt, Artificial Sequence
  Synthetic
uggacauugacccuuauaaagaau

SEQ ID NO: 19438 - RNA, 18 nt, Artificial Sequence
  Synthetic
acauggagaacaucacau

SEQ ID NO: 19439 - RNA, 19 nt, Artificial Sequence
  Synthetic
aacauggagaacaucacau

SEQ ID NO: 19440 - RNA, 20 nt, Artificial Sequence
  Synthetic
gaacauggagaacaucacau

SEQ ID NO: 19441 - RNA, 21 nt, Artificial Sequence
  Synthetic
ugaacauggagaacaucacau

SEQ ID NO: 19442 - RNA, 22 nt, Artificial Sequence
  Synthetic
augaacauggagaacaucacau

SEQ ID NO: 19443 - RNA, 23 nt, Artificial Sequence
  Synthetic
uaugaacauggagaacaucacau

SEQ ID NO: 19444 - RNA, 24 nt, Artificial Sequence
  Synthetic
  misc_feature (1)..(1): n is a, c, g, or u
nuaugaacauggagaacaucacau

SEQ ID NO: 19445 - RNA, 18 nt, Artificial Sequence
  Synthetic
uugccaacaaccuuacau

SEQ ID NO: 19446 - RNA, 19 nt, Artificial Sequence
  Synthetic
cuugccaacaaccuuacau

SEQ ID NO: 19447 - RNA, 20 nt, Artificial Sequence
  Synthetic
  misc_feature (1)..(1): n is a, c, g, or u
ncuugccaacaaccuuacau

SEQ ID NO: 19448 - RNA, 21 nt, Artificial Sequence
  Synthetic
  misc_feature (2)..(2): n is a, c, g, or u
ancuugccaacaaccuuacau

SEQ ID NO: 19449 - RNA, 22 nt, Artificial Sequence
  Synthetic
  misc_feature (3)..(3): n is a, c, g, or u
gancuugccaacaaccuuacau

SEQ ID NO: 19450 - RNA, 23 nt, Artificial Sequence
  Synthetic
  misc_feature (4)..(4): n is a, c, g, or u
ggancuugccaacaaccuuacau

SEQ ID NO: 19451 - RNA, 24 nt, Artificial Sequence
  Synthetic
  misc_feature (1)..(1): n is a, c, g, or u
  misc_feature (5)..(5): n is a, c, g, or u
nggancuugccaacaaccuuacau

SEQ ID NO: 19452 - RNA, 18 nt, Artificial Sequence
  Synthetic
  misc_feature (2)..(2): n is a, c, g, or u
  misc_feature (8)..(8): n is a, c, g, or u
anauuucnugccuuacau

SEQ ID NO: 19453 - RNA, 19 nt, Artificial Sequence
  Synthetic
  misc_feature (3)..(3): n is a, c, g, or u
  misc_feature (9)..(9): n is a, c, g, or u
canauuucnugccuuacau

SEQ ID NO: 19454 - RNA, 20 nt, Artificial Sequence
  Synthetic
  misc_feature (4)..(4): n is a, c, g, or u
  misc_feature (10)..(10): n is a, c, g, or u
ucanauuucnugccuuacau

SEQ ID NO: 19455 - RNA, 21 nt, Artificial Sequence
  Synthetic
  misc_feature (5)..(5): n is a, c, g, or u
  misc_feature (11)..(11): n is a, c, g, or u
uucanauuucnugccuuacau

SEQ ID NO: 19456 - RNA, 22 nt, Artificial Sequence
  Synthetic
  misc_feature (6)..(6): n is a, c, g, or u
  misc_feature (12)..(12): n is a, c, g, or u
uuucanauuucnugccuuacau

SEQ ID NO: 19457 - RNA, 23 nt, Artificial Sequence
  Synthetic
  misc_feature (7)..(7): n is a, c, g, or u
  misc_feature (13)..(13): n is a, c, g, or u
guuucanauuucnugccuuacau

SEQ ID NO: 19458 - RNA, 24 nt, Artificial Sequence
  Synthetic
  misc_feature (8)..(8): n is a, c, g, or u
  misc_feature (14)..(14): n is a, c, g, or u
gguuucanauuucnugccuuacau

SEQ ID NO: 19459 - RNA, 18 nt, Artificial Sequence
  Synthetic
uuaucugugggcauccau

SEQ ID NO: 19460 - RNA, 19 nt, Artificial Sequence
  Synthetic
guuaucugugggcauccau

SEQ ID NO: 19461 - RNA, 20 nt, Artificial Sequence
  Synthetic
uguuaucugugggcauccau

SEQ ID NO: 19462 - RNA, 21 nt, Artificial Sequence
  Synthetic
uuguuaucugugggcauccau

SEQ ID NO: 19463 - RNA, 22 nt, Artificial Sequence
  Synthetic
uuuguuaucugugggcauccau

SEQ ID NO: 19464 - RNA, 23 nt, Artificial Sequence
  Synthetic
uuuuguuaucugugggcauccau

SEQ ID NO: 19465 - RNA, 24 nt, Artificial Sequence
  Synthetic
uuuuuguuaucugugggcauccau

SEQ ID NO: 19466 - RNA, 18 nt, Artificial Sequence
  Synthetic
gaacaagagcuacagcau

SEQ ID NO: 19467 - RNA, 19 nt, Artificial Sequence
  Synthetic
ggaacaagagcuacagcau

SEQ ID NO: 19468 - RNA, 20 nt, Artificial Sequence
  Synthetic
gggaacaagagcuacagcau

SEQ ID NO: 19469 - RNA, 21 nt, Artificial Sequence
  Synthetic
ugggaacaagagcuacagcau

SEQ ID NO: 19470 - RNA, 22 nt, Artificial Sequence
  Synthetic
cugggaacaagagcuacagcau

SEQ ID NO: 19471 - RNA, 23 nt, Artificial Sequence
  Synthetic
ccugggaacaagagcuacagcau

SEQ ID NO: 19472 - RNA, 24 nt, Artificial Sequence
  Synthetic
uccugggaacaagagcuacagcau

SEQ ID NO: 19473 - RNA, 18 nt, Artificial Sequence
  Synthetic
aauuccagcagucccgau

SEQ ID NO: 19474 - RNA, 19 nt, Artificial Sequence
  Synthetic
aaauuccagcagucccgau

SEQ ID NO: 19475 - RNA, 20 nt, Artificial Sequence
  Synthetic
caaauuccagcagucccgau

SEQ ID NO: 19476 - RNA, 21 nt, Artificial Sequence
  Synthetic
gcaaauuccagcagucccgau

SEQ ID NO: 19477 - RNA, 22 nt, Artificial Sequence
  Synthetic
agcaaauuccagcagucccgau

SEQ ID NO: 19478 - RNA, 23 nt, Artificial Sequence
  Synthetic
gagcaaauuccagcagucccgau

SEQ ID NO: 19479 - RNA, 24 nt, Artificial Sequence
  Synthetic
agagcaaauuccagcagucccgau

SEQ ID NO: 19480 - RNA, 18 nt, Artificial Sequence
  Synthetic
caccaagcacuguuggau

SEQ ID NO: 19481 - RNA, 19 nt, Artificial Sequence
  Synthetic
ccaccaagcacuguuggau

SEQ ID NO: 19482 - RNA, 20 nt, Artificial Sequence
  Synthetic
uccaccaagcacuguuggau

SEQ ID NO: 19483 - RNA, 21 nt, Artificial Sequence
  Synthetic
uuccaccaagcacuguuggau

SEQ ID NO: 19484 - RNA, 22 nt, Artificial Sequence
  Synthetic
guuccaccaagcacuguuggau

SEQ ID NO: 19485 - RNA, 23 nt, Artificial Sequence
  Synthetic
aguuccaccaagcacuguuggau

SEQ ID NO: 19486 - RNA, 24 nt, Artificial Sequence
  Synthetic
caguuccaccaagcacuguuggau

SEQ ID NO: 19487 - RNA, 18 nt, Artificial Sequence
  Synthetic
gugaauagacccauugau

SEQ ID NO: 19488 - RNA, 19 nt, Artificial Sequence
  Synthetic
cgugaauagacccauugau

SEQ ID NO: 19489 - RNA, 20 nt, Artificial Sequence
  Synthetic
ccgugaauagacccauugau

SEQ ID NO: 19490 - RNA, 21 nt, Artificial Sequence
  Synthetic
cccgugaauagacccauugau

SEQ ID NO: 19491 - RNA, 22 nt, Artificial Sequence
  Synthetic
ucccgugaauagacccauugau

SEQ ID NO: 19492 - RNA, 23 nt, Artificial Sequence
  Synthetic
uucccgugaauagacccauugau

SEQ ID NO: 19493 - RNA, 24 nt, Artificial Sequence
  Synthetic
cuucccgugaauagacccauugau

SEQ ID NO: 19494 - RNA, 18 nt, Artificial Sequence
  Synthetic
  misc_feature (16)..(16): n is a, c, g, or u
cuuuauggguuauaunau

SEQ ID NO: 19495 - RNA, 19 nt, Artificial Sequence
  Synthetic
  misc_feature (17)..(17): n is a, c, g, or u
acuuuauggguuauaunau

SEQ ID NO: 19496 - RNA, 20 nt, Artificial Sequence
  Synthetic
  misc_feature (18)..(18): n is a, c, g, or u
cacuuuauggguuauaunau

SEQ ID NO: 19497 - RNA, 21 nt, Artificial Sequence
  Synthetic
  misc_feature (1)..(1): n is a, c, g, or u
  misc_feature (19)..(19): n is a, c, g, or u
ncacuuuauggguuauaunau

SEQ ID NO: 19498 - RNA, 22 nt, Artificial Sequence
  Synthetic
  misc_feature (2)..(2): n is a, c, g, or u
  misc_feature (20)..(20): n is a, c, g, or u
uncacuuuauggguuauaunau

SEQ ID NO: 19499 - RNA, 23 nt, Artificial Sequence
  Synthetic
  misc_feature (1)..(1): n is a, c, g, or u
  misc_feature (3)..(3): n is a, c, g, or u
  misc_feature (21)..(21): n is a, c, g, or u
nuncacuuuauggguuauaunau

SEQ ID NO: 19500 - RNA, 24 nt, Artificial Sequence
  Synthetic
  misc_feature (2)..(2): n is a, c, g, or u
  misc_feature (4)..(4): n is a, c, g, or u
  misc_feature (22)..(22): n is a, c, g, or u
cnuncacuuuauggguuauaunau

SEQ ID NO: 19501 - RNA, 18 nt, Artificial Sequence
  Synthetic
aaggcaggaauucuauau

SEQ ID NO: 19502 - RNA, 19 nt, Artificial Sequence
  Synthetic
gaaggcaggaauucuauau

SEQ ID NO: 19503 - RNA, 20 nt, Artificial Sequence
  Synthetic
ggaaggcaggaauucuauau

SEQ ID NO: 19504 - RNA, 21 nt, Artificial Sequence
  Synthetic
uggaaggcaggaauucuauau

SEQ ID NO: 19505 - RNA, 22 nt, Artificial Sequence
  Synthetic
guggaaggcaggaauucuauau

SEQ ID NO: 19506 - RNA, 23 nt, Artificial Sequence
  Synthetic
uguggaaggcaggaauucuauau

SEQ ID NO: 19507 - RNA, 24 nt, Artificial Sequence
  Synthetic
uuguggaaggcaggaauucuauau

SEQ ID NO: 19508 - RNA, 18 nt, Artificial Sequence
  Synthetic
  misc_feature (12)..(12): n is a, c, g, or u
auauggaugaunugguau

SEQ ID NO: 19509 - RNA, 19 nt, Artificial Sequence
  Synthetic
  misc_feature (13)..(13): n is a, c, g, or u
uauauggaugaunugguau

SEQ ID NO: 19510 - RNA, 20 nt, Artificial Sequence
  Synthetic
  misc_feature (14)..(14): n is a, c, g, or u
uuauauggaugaunugguau

SEQ ID NO: 19511 - RNA, 21 nt, Artificial Sequence
  Synthetic
  misc_feature (15)..(15): n is a, c, g, or u
guuauauggaugaunugguau

SEQ ID NO: 19512 - RNA, 22 nt, Artificial Sequence
  Synthetic
  misc_feature (16)..(16): n is a, c, g, or u
aguuauauggaugaunugguau

SEQ ID NO: 19513 - RNA, 23 nt, Artificial Sequence
  Synthetic
  misc_feature (17)..(17): n is a, c, g, or u
uaguuauauggaugaunugguau

SEQ ID NO: 19514 - RNA, 24 nt, Artificial Sequence
  Synthetic
  misc_feature (18)..(18): n is a, c, g, or u
uuaguuauauggaugaunugguau

SEQ ID NO: 19515 - RNA, 18 nt, Artificial Sequence
  Synthetic
gguuaaaggucuuuguau

SEQ ID NO: 19516 - RNA, 19 nt, Artificial Sequence
  Synthetic
agguuaaaggucuuuguau

SEQ ID NO: 19517 - RNA, 20 nt, Artificial Sequence
  Synthetic
gagguuaaaggucuuuguau

SEQ ID NO: 19518 - RNA, 21 nt, Artificial Sequence
  Synthetic
ugagguuaaaggucuuuguau

SEQ ID NO: 19519 - RNA, 22 nt, Artificial Sequence
  Synthetic
uugagguuaaaggucuuuguau

SEQ ID NO: 19520 - RNA, 23 nt, Artificial Sequence
  Synthetic
guugagguuaaaggucuuuguau

SEQ ID NO: 19521 - RNA, 24 nt, Artificial Sequence
  Synthetic
aguugagguuaaaggucuuuguau

SEQ ID NO: 19522 - RNA, 18 nt, Artificial Sequence
  Synthetic
ucaaucuucucgaagacu

SEQ ID NO: 19523 - RNA, 19 nt, Artificial Sequence
  Synthetic
aucaaucuucucgaagacu

SEQ ID NO: 19524 - RNA, 20 nt, Artificial Sequence
  Synthetic
caucaaucuucucgaagacu

SEQ ID NO: 19525 - RNA, 21 nt, Artificial Sequence
  Synthetic
ucaucaaucuucucgaagacu

SEQ ID NO: 19526 - RNA, 22 nt, Artificial Sequence
  Synthetic
aucaucaaucuucucgaagacu

SEQ ID NO: 19527 - RNA, 23 nt, Artificial Sequence
  Synthetic
caucaucaaucuucucgaagacu

SEQ ID NO: 19528 - RNA, 24 nt, Artificial Sequence
  Synthetic
acaucaucaaucuucucgaagacu

SEQ ID NO: 19529 - RNA, 18 nt, Artificial Sequence
  Synthetic
acuguguauuuaaggacu

SEQ ID NO: 19530 - RNA, 19 nt, Artificial Sequence
  Synthetic
gacuguguauuuaaggacu

SEQ ID NO: 19531 - RNA, 20 nt, Artificial Sequence
  Synthetic
agacuguguauuuaaggacu

SEQ ID NO: 19532 - RNA, 21 nt, Artificial Sequence
  Synthetic
aagacuguguauuuaaggacu

SEQ ID NO: 19533 - RNA, 22 nt, Artificial Sequence
  Synthetic
aaagacuguguauuuaaggacu

SEQ ID NO: 19534 - RNA, 23 nt, Artificial Sequence
  Synthetic
caaagacuguguauuuaaggacu

SEQ ID NO: 19535 - RNA, 24 nt, Artificial Sequence
  Synthetic
ucaaagacuguguauuuaaggacu

SEQ ID NO: 19536 - RNA, 18 nt, Artificial Sequence
  Synthetic
ccucugccgauccauacu

SEQ ID NO: 19537 - RNA, 19 nt, Artificial Sequence
  Synthetic
uccucugccgauccauacu

SEQ ID NO: 19538 - RNA, 20 nt, Artificial Sequence
  Synthetic
cuccucugccgauccauacu

SEQ ID NO: 19539 - RNA, 21 nt, Artificial Sequence
  Synthetic
gcuccucugccgauccauacu

SEQ ID NO: 19540 - RNA, 22 nt, Artificial Sequence
  Synthetic
ggcuccucugccgauccauacu

SEQ ID NO: 19541 - RNA, 23 nt, Artificial Sequence
  Synthetic
uggcuccucugccgauccauacu

SEQ ID NO: 19542 - RNA, 24 nt, Artificial Sequence
  Synthetic
guggcuccucugccgauccauacu

SEQ ID NO: 19543 - RNA, 18 nt, Artificial Sequence
  Synthetic
ugcugcuguaccaaaccu

SEQ ID NO: 19544 - RNA, 19 nt, Artificial Sequence
  Synthetic
cugcugcuguaccaaaccu

SEQ ID NO: 19545 - RNA, 20 nt, Artificial Sequence
  Synthetic
ccugcugcuguaccaaaccu

SEQ ID NO: 19546 - RNA, 21 nt, Artificial Sequence
  Synthetic
uccugcugcuguaccaaaccu

SEQ ID NO: 19547 - RNA, 22 nt, Artificial Sequence
  Synthetic
cuccugcugcuguaccaaaccu

SEQ ID NO: 19548 - RNA, 23 nt, Artificial Sequence
  Synthetic
ccuccugcugcuguaccaaaccu

SEQ ID NO: 19549 - RNA, 24 nt, Artificial Sequence
  Synthetic
cccuccugcugcuguaccaaaccu

SEQ ID NO: 19550 - RNA, 18 nt, Artificial Sequence
  Synthetic
ggcuuucggaaaauaccu

SEQ ID NO: 19551 - RNA, 19 nt, Artificial Sequence
  Synthetic
gggcuuucggaaaauaccu

SEQ ID NO: 19552 - RNA, 20 nt, Artificial Sequence
  Synthetic
ugggcuuucggaaaauaccu

SEQ ID NO: 19553 - RNA, 21 nt, Artificial Sequence
  Synthetic
uugggcuuucggaaaauaccu

SEQ ID NO: 19554 - RNA, 22 nt, Artificial Sequence
  Synthetic
cuugggcuuucggaaaauaccu

SEQ ID NO: 19555 - RNA, 23 nt, Artificial Sequence
  Synthetic
ucuugggcuuucggaaaauaccu

SEQ ID NO: 19556 - RNA, 24 nt, Artificial Sequence
  Synthetic
aucuugggcuuucggaaaauaccu

SEQ ID NO: 19557 - RNA, 18 nt, Artificial Sequence
  Synthetic
  misc_feature (12)..(12): n is a, c, g, or u
aguugggggacnuugccu

SEQ ID NO: 19558 - RNA, 19 nt, Artificial Sequence
  Synthetic
  misc_feature (13)..(13): n is a, c, g, or u
gaguugggggacnuugccu

SEQ ID NO: 19559 - RNA, 20 nt, Artificial Sequence
  Synthetic
  misc_feature (14)..(14): n is a, c, g, or u
ggaguugggggacnuugccu

SEQ ID NO: 19560 - RNA, 21 nt, Artificial Sequence
  Synthetic
  misc_feature (15)..(15): n is a, c, g, or u
gggaguugggggacnuugccu

SEQ ID NO: 19561 - RNA, 22 nt, Artificial Sequence
  Synthetic
  misc_feature (16)..(16): n is a, c, g, or u
ugggaguugggggacnuugccu

SEQ ID NO: 19562 - RNA, 23 nt, Artificial Sequence
  Synthetic
  misc_feature (17)..(17): n is a, c, g, or u
uugggaguugggggacnuugccu

SEQ ID NO: 19563 - RNA, 24 nt, Artificial Sequence
  Synthetic
  misc_feature (18)..(18): n is a, c, g, or u
auugggaguugggggacnuugccu

SEQ ID NO: 19564 - RNA, 18 nt, Artificial Sequence
  Synthetic
cuuucugugcccaauccu

SEQ ID NO: 19565 - RNA, 19 nt, Artificial Sequence
  Synthetic
  misc_feature (1)..(1): n is a, c, g, or u
ncuuucugugcccaauccu

SEQ ID NO: 19566 - RNA, 20 nt, Artificial Sequence
  Synthetic
  misc_feature (2)..(2): n is a, c, g, or u
ancuuucugugcccaauccu

SEQ ID NO: 19567 - RNA, 21 nt, Artificial Sequence
  Synthetic
  misc_feature (3)..(3): n is a, c, g, or u
aancuuucugugcccaauccu

SEQ ID NO: 19568 - RNA, 22 nt, Artificial Sequence
  Synthetic
  misc_feature (4)..(4): n is a, c, g, or u
gaancuuucugugcccaauccu

SEQ ID NO: 19569 - RNA, 23 nt, Artificial Sequence
  Synthetic
  misc_feature (5)..(5): n is a, c, g, or u
agaancuuucugugcccaauccu

SEQ ID NO: 19570 - RNA, 24 nt, Artificial Sequence
  Synthetic
  misc_feature (6)..(6): n is a, c, g, or u
cagaancuuucugugcccaauccu

SEQ ID NO: 19571 - RNA, 18 nt, Artificial Sequence
  Synthetic
ccgucggcgcugaauccu

SEQ ID NO: 19572 - RNA, 19 nt, Artificial Sequence
  Synthetic
cccgucggcgcugaauccu

SEQ ID NO: 19573 - RNA, 20 nt, Artificial Sequence
  Synthetic
ucccgucggcgcugaauccu

SEQ ID NO: 19574 - RNA, 21 nt, Artificial Sequence
  Synthetic
gucccgucggcgcugaauccu

SEQ ID NO: 19575 - RNA, 22 nt, Artificial Sequence
  Synthetic
cgucccgucggcgcugaauccu

SEQ ID NO: 19576 - RNA, 23 nt, Artificial Sequence
  Synthetic
acgucccgucggcgcugaauccu

SEQ ID NO: 19577 - RNA, 24 nt, Artificial Sequence
  Synthetic
uacgucccgucggcgcugaauccu

SEQ ID NO: 19578 - RNA, 18 nt, Artificial Sequence
  Synthetic
gugggucaccauauuccu

SEQ ID NO: 19579 - RNA, 19 nt, Artificial Sequence
  Synthetic
ugugggucaccauauuccu

SEQ ID NO: 19580 - RNA, 20 nt, Artificial Sequence
  Synthetic
uugugggucaccauauuccu

SEQ ID NO: 19581 - RNA, 21 nt, Artificial Sequence
  Synthetic
uuugugggucaccauauuccu

SEQ ID NO: 19582 - RNA, 22 nt, Artificial Sequence
  Synthetic
uuuugugggucaccauauuccu

SEQ ID NO: 19583 - RNA, 23 nt, Artificial Sequence
  Synthetic
auuuugugggucaccauauuccu

SEQ ID NO: 19584 - RNA, 24 nt, Artificial Sequence
  Synthetic
cauuuugugggucaccauauuccu

SEQ ID NO: 19585 - RNA, 18 nt, Artificial Sequence
  Synthetic
accccucucguggucgcu

SEQ ID NO: 19586 - RNA, 19 nt, Artificial Sequence
  Synthetic
gaccccucucguggucgcu

SEQ ID NO: 19587 - RNA, 20 nt, Artificial Sequence
  Synthetic
cgaccccucucguggucgcu

SEQ ID NO: 19588 - RNA, 21 nt, Artificial Sequence
  Synthetic
acgaccccucucguggucgcu

SEQ ID NO: 19589 - RNA, 22 nt, Artificial Sequence
  Synthetic
gacgaccccucucguggucgcu

SEQ ID NO: 19590 - RNA, 23 nt, Artificial Sequence
  Synthetic
ggacgaccccucucguggucgcu

SEQ ID NO: 19591 - RNA, 24 nt, Artificial Sequence
  Synthetic
cggacgaccccucucguggucgcu

SEQ ID NO: 19592 - RNA, 18 nt, Artificial Sequence
  Synthetic
gcugugccuuggguggcu

SEQ ID NO: 19593 - RNA, 19 nt, Artificial Sequence
  Synthetic
agcugugccuuggguggcu

SEQ ID NO: 19594 - RNA, 20 nt, Artificial Sequence
  Synthetic
aagcugugccuuggguggcu

SEQ ID NO: 19595 - RNA, 21 nt, Artificial Sequence
  Synthetic
caagcugugccuuggguggcu

SEQ ID NO: 19596 - RNA, 22 nt, Artificial Sequence
  Synthetic
ccaagcugugccuuggguggcu

SEQ ID NO: 19597 - RNA, 23 nt, Artificial Sequence
  Synthetic
uccaagcugugccuuggguggcu

SEQ ID NO: 19598 - RNA, 24 nt, Artificial Sequence
  Synthetic
cuccaagcugugccuuggguggcu

SEQ ID NO: 19599 - RNA, 18 nt, Artificial Sequence
  Synthetic
accaauuuuuuguuaucu

SEQ ID NO: 19600 - RNA, 19 nt, Artificial Sequence
  Synthetic
uaccaauuuuuuguuaucu

SEQ ID NO: 19601 - RNA, 20 nt, Artificial Sequence
  Synthetic
uuaccaauuuuuuguuaucu

SEQ ID NO: 19602 - RNA, 21 nt, Artificial Sequence
  Synthetic
guuaccaauuuuuuguuaucu

SEQ ID NO: 19603 - RNA, 22 nt, Artificial Sequence
  Synthetic
uguuaccaauuuuuuguuaucu

SEQ ID NO: 19604 - RNA, 23 nt, Artificial Sequence
  Synthetic
cuguuaccaauuuuuuguuaucu

SEQ ID NO: 19605 - RNA, 24 nt, Artificial Sequence
  Synthetic
gcuguuaccaauuuuuuguuaucu

SEQ ID NO: 19606 - RNA, 18 nt, Artificial Sequence
  Synthetic
cccagucucuccaccucu

SEQ ID NO: 19607 - RNA, 19 nt, Artificial Sequence
  Synthetic
ccccagucucuccaccucu

SEQ ID NO: 19608 - RNA, 20 nt, Artificial Sequence
  Synthetic
accccagucucuccaccucu

SEQ ID NO: 19609 - RNA, 21 nt, Artificial Sequence
  Synthetic
aaccccagucucuccaccucu

SEQ ID NO: 19610 - RNA, 22 nt, Artificial Sequence
  Synthetic
caaccccagucucuccaccucu

SEQ ID NO: 19611 - RNA, 23 nt, Artificial Sequence
  Synthetic
ccaaccccagucucuccaccucu

SEQ ID NO: 19612 - RNA, 24 nt, Artificial Sequence
  Synthetic
gccaaccccagucucuccaccucu

SEQ ID NO: 19613 - RNA, 18 nt, Artificial Sequence
  Synthetic
aaagaauuuggagcuucu

SEQ ID NO: 19614 - RNA, 19 nt, Artificial Sequence
  Synthetic
uaaagaauuuggagcuucu

SEQ ID NO: 19615 - RNA, 20 nt, Artificial Sequence
  Synthetic
auaaagaauuuggagcuucu

SEQ ID NO: 19616 - RNA, 21 nt, Artificial Sequence
  Synthetic
uauaaagaauuuggagcuucu

SEQ ID NO: 19617 - RNA, 22 nt, Artificial Sequence
  Synthetic
uuauaaagaauuuggagcuucu

SEQ ID NO: 19618 - RNA, 23 nt, Artificial Sequence
  Synthetic
cuuauaaagaauuuggagcuucu

SEQ ID NO: 19619 - RNA, 24 nt, Artificial Sequence
  Synthetic
ccuuauaaagaauuuggagcuucu

SEQ ID NO: 19620 - RNA, 18 nt, Artificial Sequence
  Synthetic
  misc_feature (6)..(6): n is a, c, g, or u
aacucnguuguccuuucu

SEQ ID NO: 19621 - RNA, 19 nt, Artificial Sequence
  Synthetic
  misc_feature (7)..(7): n is a, c, g, or u
caacucnguuguccuuucu

SEQ ID NO: 19622 - RNA, 20 nt, Artificial Sequence
  Synthetic
  misc_feature (8)..(8): n is a, c, g, or u
acaacucnguuguccuuucu

SEQ ID NO: 19623 - RNA, 21 nt, Artificial Sequence
  Synthetic
  misc_feature (9)..(9): n is a, c, g, or u
gacaacucnguuguccuuucu

SEQ ID NO: 19624 - RNA, 22 nt, Artificial Sequence
  Synthetic
  misc_feature (10)..(10): n is a, c, g, or u
ugacaacucnguuguccuuucu

SEQ ID NO: 19625 - RNA, 23 nt, Artificial Sequence
  Synthetic
  misc_feature (11)..(11): n is a, c, g, or u
cugacaacucnguuguccuuucu

SEQ ID NO: 19626 - RNA, 24 nt, Artificial Sequence
  Synthetic
  misc_feature (12)..(12): n is a, c, g, or u
acugacaacucnguuguccuuucu

SEQ ID NO: 19627 - RNA, 18 nt, Artificial Sequence
  Synthetic
acuguuggauccgagagu

SEQ ID NO: 19628 - RNA, 19 nt, Artificial Sequence
  Synthetic
cacuguuggauccgagagu

SEQ ID NO: 19629 - RNA, 20 nt, Artificial Sequence
  Synthetic
gcacuguuggauccgagagu

SEQ ID NO: 19630 - RNA, 21 nt, Artificial Sequence
  Synthetic
agcacuguuggauccgagagu

SEQ ID NO: 19631 - RNA, 22 nt, Artificial Sequence
  Synthetic
aagcacuguuggauccgagagu

SEQ ID NO: 19632 - RNA, 23 nt, Artificial Sequence
  Synthetic
caagcacuguuggauccgagagu

SEQ ID NO: 19633 - RNA, 24 nt, Artificial Sequence
  Synthetic
ccaagcacuguuggauccgagagu

SEQ ID NO: 19634 - RNA, 18 nt, Artificial Sequence
  Synthetic
uuaaggacugggaggagu

SEQ ID NO: 19635 - RNA, 19 nt, Artificial Sequence
  Synthetic
uuuaaggacugggaggagu

SEQ ID NO: 19636 - RNA, 20 nt, Artificial Sequence
  Synthetic
auuuaaggacugggaggagu

SEQ ID NO: 19637 - RNA, 21 nt, Artificial Sequence
  Synthetic
uauuuaaggacugggaggagu

SEQ ID NO: 19638 - RNA, 22 nt, Artificial Sequence
  Synthetic
guauuuaaggacugggaggagu

SEQ ID NO: 19639 - RNA, 23 nt, Artificial Sequence
  Synthetic
uguauuuaaggacugggaggagu

SEQ ID NO: 19640 - RNA, 24 nt, Artificial Sequence
  Synthetic
guguauuuaaggacugggaggagu

SEQ ID NO: 19641 - RNA, 18 nt, Artificial Sequence
  Synthetic
ggcaaacaagguaggagu

SEQ ID NO: 19642 - RNA, 19 nt, Artificial Sequence
  Synthetic
uggcaaacaagguaggagu

SEQ ID NO: 19643 - RNA, 20 nt, Artificial Sequence
  Synthetic
auggcaaacaagguaggagu

SEQ ID NO: 19644 - RNA, 21 nt, Artificial Sequence
  Synthetic
aauggcaaacaagguaggagu

SEQ ID NO: 19645 - RNA, 22 nt, Artificial Sequence
  Synthetic
caauggcaaacaagguaggagu

SEQ ID NO: 19646 - RNA, 23 nt, Artificial Sequence
  Synthetic
ccaauggcaaacaagguaggagu

SEQ ID NO: 19647 - RNA, 24 nt, Artificial Sequence
  Synthetic
gccaauggcaaacaagguaggagu

SEQ ID NO: 19648 - RNA, 18 nt, Artificial Sequence
  Synthetic
  misc_feature (9)..(9): n is a, c, g, or u
gguuauaunauugggagu

SEQ ID NO: 19649 - RNA, 19 nt, Artificial Sequence
  Synthetic
  misc_feature (10)..(10): n is a, c, g, or u
ggguuauaunauugggagu

SEQ ID NO: 19650 - RNA, 20 nt, Artificial Sequence
  Synthetic
  misc_feature (11)..(11): n is a, c, g, or u
uggguuauaunauugggagu

SEQ ID NO: 19651 - RNA, 21 nt, Artificial Sequence
  Synthetic
  misc_feature (12)..(12): n is a, c, g, or u
auggguuauaunauugggagu

SEQ ID NO: 19652 - RNA, 22 nt, Artificial Sequence
  Synthetic
  misc_feature (13)..(13): n is a, c, g, or u
uauggguuauaunauugggagu

SEQ ID NO: 19653 - RNA, 23 nt, Artificial Sequence
  Synthetic
  misc_feature (14)..(14): n is a, c, g, or u
uuauggguuauaunauugggagu

SEQ ID NO: 19654 - RNA, 24 nt, Artificial Sequence
  Synthetic
  misc_feature (15)..(15): n is a, c, g, or u
uuuauggguuauaunauugggagu

SEQ ID NO: 19655 - RNA, 18 nt, Artificial Sequence
  Synthetic
uccuuggacucauaaggu

SEQ ID NO: 19656 - RNA, 19 nt, Artificial Sequence
  Synthetic
uuccuuggacucauaaggu

SEQ ID NO: 19657 - RNA, 20 nt, Artificial Sequence
  Synthetic
auuccuuggacucauaaggu

SEQ ID NO: 19658 - RNA, 21 nt, Artificial Sequence
  Synthetic
uauuccuuggacucauaaggu

SEQ ID NO: 19659 - RNA, 22 nt, Artificial Sequence
  Synthetic
guauuccuuggacucauaaggu

SEQ ID NO: 19660 - RNA, 23 nt, Artificial Sequence
  Synthetic
aguauuccuuggacucauaaggu

SEQ ID NO: 19661 - RNA, 24 nt, Artificial Sequence
  Synthetic
uaguauuccuuggacucauaaggu

SEQ ID NO: 19662 - RNA, 18 nt, Artificial Sequence
  Synthetic
cuuccaccaaucggaggu

SEQ ID NO: 19663 - RNA, 19 nt, Artificial Sequence
  Synthetic
gcuuccaccaaucggaggu

SEQ ID NO: 19664 - RNA, 20 nt, Artificial Sequence
  Synthetic
ugcuuccaccaaucggaggu

SEQ ID NO: 19665 - RNA, 21 nt, Artificial Sequence
  Synthetic
cugcuuccaccaaucggaggu

SEQ ID NO: 19666 - RNA, 22 nt, Artificial Sequence
  Synthetic
ccugcuuccaccaaucggaggu

SEQ ID NO: 19667 - RNA, 23 nt, Artificial Sequence
  Synthetic
uccugcuuccaccaaucggaggu

SEQ ID NO: 19668 - RNA, 24 nt, Artificial Sequence
  Synthetic
cuccugcuuccaccaaucggaggu

SEQ ID NO: 19669 - RNA, 18 nt, Artificial Sequence
  Synthetic
  misc_feature (15)..(15): n is a, c, g, or u
guuucgcucgcagcnggu

SEQ ID NO: 19670 - RNA, 19 nt, Artificial Sequence
  Synthetic
  misc_feature (16)..(16): n is a, c, g, or u
uguuucgcucgcagcnggu

SEQ ID NO: 19671 - RNA, 20 nt, Artificial Sequence
  Synthetic
  misc_feature (17)..(17): n is a, c, g, or u
uuguuucgcucgcagcnggu

SEQ ID NO: 19672 - RNA, 21 nt, Artificial Sequence
  Synthetic
  misc_feature (18)..(18): n is a, c, g, or u
cuuguuucgcucgcagcnggu

SEQ ID NO: 19673 - RNA, 22 nt, Artificial Sequence
  Synthetic
  misc_feature (19)..(19): n is a, c, g, or u
gcuuguuucgcucgcagcnggu

SEQ ID NO: 19674 - RNA, 23 nt, Artificial Sequence
  Synthetic
  misc_feature (1)..(1): n is a, c, g, or u
  misc_feature (20)..(20): n is a, c, g, or u
ngcuuguuucgcucgcagcnggu

SEQ ID NO: 19675 - RNA, 24 nt, Artificial Sequence
  Synthetic
  misc_feature (2)..(2): n is a, c, g, or u
  misc_feature (21)..(21): n is a, c, g, or u
cngcuuguuucgcucgcagcnggu

SEQ ID NO: 19676 - RNA, 18 nt, Artificial Sequence
  Synthetic
ugacuucuucccgucugu

SEQ ID NO: 19677 - RNA, 19 nt, Artificial Sequence
  Synthetic
cugacuucuucccgucugu

SEQ ID NO: 19678 - RNA, 20 nt, Artificial Sequence
  Synthetic
ucugacuucuucccgucugu

SEQ ID NO: 19679 - RNA, 21 nt, Artificial Sequence
  Synthetic
uucugacuucuucccgucugu

SEQ ID NO: 19680 - RNA, 22 nt, Artificial Sequence
  Synthetic
cuucugacuucuucccgucugu

SEQ ID NO: 19681 - RNA, 23 nt, Artificial Sequence
  Synthetic
ccuucugacuucuucccgucugu

SEQ ID NO: 19682 - RNA, 24 nt, Artificial Sequence
  Synthetic
gccuucugacuucuucccgucugu

SEQ ID NO: 19683 - RNA, 18 nt, Artificial Sequence
  Synthetic
  misc_feature (17)..(17): n is a, c, g, or u
aagacuggggacccugnu

SEQ ID NO: 19684 - RNA, 19 nt, Artificial Sequence
  Synthetic
  misc_feature (18)..(18): n is a, c, g, or u
gaagacuggggacccugnu

SEQ ID NO: 19685 - RNA, 20 nt, Artificial Sequence
  Synthetic
  misc_feature (19)..(19): n is a, c, g, or u
cgaagacuggggacccugnu

SEQ ID NO: 19686 - RNA, 21 nt, Artificial Sequence
  Synthetic
  misc_feature (20)..(20): n is a, c, g, or u
ucgaagacuggggacccugnu

SEQ ID NO: 19687 - RNA, 22 nt, Artificial Sequence
  Synthetic
  misc_feature (21)..(21): n is a, c, g, or u
cucgaagacuggggacccugnu

SEQ ID NO: 19688 - RNA, 23 nt, Artificial Sequence
  Synthetic
  misc_feature (22)..(22): n is a, c, g, or u
ucucgaagacuggggacccugnu

SEQ ID NO: 19689 - RNA, 24 nt, Artificial Sequence
  Synthetic
  misc_feature (23)..(23): n is a, c, g, or u
uucucgaagacuggggacccugnu

SEQ ID NO: 19690 - RNA, 18 nt, Artificial Sequence
  Synthetic
ugacccuuauaaagaauu

SEQ ID NO: 19691 - RNA, 19 nt, Artificial Sequence
  Synthetic
uugacccuuauaaagaauu

SEQ ID NO: 19692 - RNA, 20 nt, Artificial Sequence
  Synthetic
auugacccuuauaaagaauu

SEQ ID NO: 19693 - RNA, 21 nt, Artificial Sequence
  Synthetic
cauugacccuuauaaagaauu

SEQ ID NO: 19694 - RNA, 22 nt, Artificial Sequence
  Synthetic
acauugacccuuauaaagaauu

SEQ ID NO: 19695 - RNA, 23 nt, Artificial Sequence
  Synthetic
gacauugacccuuauaaagaauu

SEQ ID NO: 19696 - RNA, 24 nt, Artificial Sequence
  Synthetic
ggacauugacccuuauaaagaauu

SEQ ID NO: 19697 - RNA, 18 nt, Artificial Sequence
  Synthetic
ccugggugggcaauaauu

SEQ ID NO: 19698 - RNA, 19 nt, Artificial Sequence
  Synthetic
uccugggugggcaauaauu

SEQ ID NO: 19699 - RNA, 20 nt, Artificial Sequence
  Synthetic
uuccugggugggcaauaauu

SEQ ID NO: 19700 - RNA, 21 nt, Artificial Sequence
  Synthetic
cuuccugggugggcaauaauu

SEQ ID NO: 19701 - RNA, 22 nt, Artificial Sequence
  Synthetic
gcuuccugggugggcaauaauu

SEQ ID NO: 19702 - RNA, 23 nt, Artificial Sequence
  Synthetic
ggcuuccugggugggcaauaauu

SEQ ID NO: 19703 - RNA, 24 nt, Artificial Sequence
  Synthetic
uggcuuccugggugggcaauaauu

SEQ ID NO: 19704 - RNA, 18 nt, Artificial Sequence
  Synthetic
  misc_feature (1)..(1): n is a, c, g, or u
  misc_feature (7)..(7): n is a, c, g, or u
nauuucnugccuuacauu

SEQ ID NO: 19705 - RNA, 19 nt, Artificial Sequence
  Synthetic
  misc_feature (2)..(2): n is a, c, g, or u
  misc_feature (8)..(8): n is a, c, g, or u
anauuucnugccuuacauu

SEQ ID NO: 19706 - RNA, 20 nt, Artificial Sequence
  Synthetic
  misc_feature (3)..(3): n is a, c, g, or u
  misc_feature (9)..(9): n is a, c, g, or u
canauuucnugccuuacauu

SEQ ID NO: 19707 - RNA, 21 nt, Artificial Sequence
  Synthetic
  misc_feature (4)..(4): n is a, c, g, or u
  misc_feature (10)..(10): n is a, c, g, or u
ucanauuucnugccuuacauu

SEQ ID NO: 19708 - RNA, 22 nt, Artificial Sequence
  Synthetic
  misc_feature (5)..(5): n is a, c, g, or u
  misc_feature (11)..(11): n is a, c, g, or u
uucanauuucnugccuuacauu

SEQ ID NO: 19709 - RNA, 23 nt, Artificial Sequence
  Synthetic
  misc_feature (6)..(6): n is a, c, g, or u
  misc_feature (12)..(12): n is a, c, g, or u
uuucanauuucnugccuuacauu

SEQ ID NO: 19710 - RNA, 24 nt, Artificial Sequence
  Synthetic
  misc_feature (7)..(7): n is a, c, g, or u
  misc_feature (13)..(13): n is a, c, g, or u
guuucanauuucnugccuuacauu

SEQ ID NO: 19711 - RNA, 18 nt, Artificial Sequence
  Synthetic
cggucaacgaccuggauu

SEQ ID NO: 19712 - RNA, 19 nt, Artificial Sequence
  Synthetic
ccggucaacgaccuggauu

SEQ ID NO: 19713 - RNA, 20 nt, Artificial Sequence
  Synthetic
cccggucaacgaccuggauu

SEQ ID NO: 19714 - RNA, 21 nt, Artificial Sequence
  Synthetic
ccccggucaacgaccuggauu

SEQ ID NO: 19715 - RNA, 22 nt, Artificial Sequence
  Synthetic
gccccggucaacgaccuggauu

SEQ ID NO: 19716 - RNA, 23 nt, Artificial Sequence
  Synthetic
cgccccggucaacgaccuggauu

SEQ ID NO: 19717 - RNA, 24 nt, Artificial Sequence
  Synthetic
ucgccccggucaacgaccuggauu

SEQ ID NO: 19718 - RNA, 18 nt, Artificial Sequence
  Synthetic
ccaguuggauccacuauu

SEQ ID NO: 19719 - RNA, 19 nt, Artificial Sequence
  Synthetic
accaguuggauccacuauu

SEQ ID NO: 19720 - RNA, 20 nt, Artificial Sequence
  Synthetic
caccaguuggauccacuauu

SEQ ID NO: 19721 - RNA, 21 nt, Artificial Sequence
  Synthetic
ccaccaguuggauccacuauu

SEQ ID NO: 19722 - RNA, 22 nt, Artificial Sequence
  Synthetic
accaccaguuggauccacuauu

SEQ ID NO: 19723 - RNA, 23 nt, Artificial Sequence
  Synthetic
gaccaccaguuggauccacuauu

SEQ ID NO: 19724 - RNA, 24 nt, Artificial Sequence
  Synthetic
agaccaccaguuggauccacuauu

SEQ ID NO: 19725 - RNA, 18 nt, Artificial Sequence
  Synthetic
  misc_feature (11)..(11): n is a, c, g, or u
uauggaugaunugguauu

SEQ ID NO: 19726 - RNA, 19 nt, Artificial Sequence
  Synthetic
  misc_feature (12)..(12): n is a, c, g, or u
auauggaugaunugguauu

SEQ ID NO: 19727 - RNA, 20 nt, Artificial Sequence
  Synthetic
  misc_feature (13)..(13): n is a, c, g, or u
uauauggaugaunugguauu

SEQ ID NO: 19728 - RNA, 21 nt, Artificial Sequence
  Synthetic
  misc_feature (14)..(14): n is a, c, g, or u
uuauauggaugaunugguauu

SEQ ID NO: 19729 - RNA, 22 nt, Artificial Sequence
  Synthetic
  misc_feature (15)..(15): n is a, c, g, or u
guuauauggaugaunugguauu

SEQ ID NO: 19730 - RNA, 23 nt, Artificial Sequence
  Synthetic
  misc_feature (16)..(16): n is a, c, g, or u
aguuauauggaugaunugguauu

SEQ ID NO: 19731 - RNA, 24 nt, Artificial Sequence
  Synthetic
  misc_feature (17)..(17): n is a, c, g, or u
uaguuauauggaugaunugguauu

SEQ ID NO: 19732 - RNA, 18 nt, Artificial Sequence
  Synthetic
guuaaaggucuuuguauu

SEQ ID NO: 19733 - RNA, 19 nt, Artificial Sequence
  Synthetic
gguuaaaggucuuuguauu

SEQ ID NO: 19734 - RNA, 20 nt, Artificial Sequence
  Synthetic
agguuaaaggucuuuguauu

SEQ ID NO: 19735 - RNA, 21 nt, Artificial Sequence
  Synthetic
gagguuaaaggucuuuguauu

SEQ ID NO: 19736 - RNA, 22 nt, Artificial Sequence
  Synthetic
ugagguuaaaggucuuuguauu

SEQ ID NO: 19737 - RNA, 23 nt, Artificial Sequence
  Synthetic
uugagguuaaaggucuuuguauu

SEQ ID NO: 19738 - RNA, 24 nt, Artificial Sequence
  Synthetic
guugagguuaaaggucuuuguauu

SEQ ID NO: 19739 - RNA, 18 nt, Artificial Sequence
  Synthetic
ccuauccuaucaacacuu

SEQ ID NO: 19740 - RNA, 19 nt, Artificial Sequence
  Synthetic
cccuauccuaucaacacuu

SEQ ID NO: 19741 - RNA, 20 nt, Artificial Sequence
  Synthetic
ccccuauccuaucaacacuu

SEQ ID NO: 19742 - RNA, 21 nt, Artificial Sequence
  Synthetic
gccccuauccuaucaacacuu

SEQ ID NO: 19743 - RNA, 22 nt, Artificial Sequence
  Synthetic
ugccccuauccuaucaacacuu

SEQ ID NO: 19744 - RNA, 23 nt, Artificial Sequence
  Synthetic
augccccuauccuaucaacacuu

SEQ ID NO: 19745 - RNA, 24 nt, Artificial Sequence
  Synthetic
aaugccccuauccuaucaacacuu

SEQ ID NO: 19746 - RNA, 18 nt, Artificial Sequence
  Synthetic
cccccacacgguggccuu

SEQ ID NO: 19747 - RNA, 19 nt, Artificial Sequence
  Synthetic
acccccacacgguggccuu

SEQ ID NO: 19748 - RNA, 20 nt, Artificial Sequence
  Synthetic
cacccccacacgguggccuu

SEQ ID NO: 19749 - RNA, 21 nt, Artificial Sequence
  Synthetic
acacccccacacgguggccuu

SEQ ID NO: 19750 - RNA, 22 nt, Artificial Sequence
  Synthetic
cacacccccacacgguggccuu

SEQ ID NO: 19751 - RNA, 23 nt, Artificial Sequence
  Synthetic
ucacacccccacacgguggccuu

SEQ ID NO: 19752 - RNA, 24 nt, Artificial Sequence
  Synthetic
uucacacccccacacgguggccuu

SEQ ID NO: 19753 - RNA, 18 nt, Artificial Sequence
  Synthetic
ucccaucaucuugggcuu

SEQ ID NO: 19754 - RNA, 19 nt, Artificial Sequence
  Synthetic
aucccaucaucuugggcuu

SEQ ID NO: 19755 - RNA, 20 nt, Artificial Sequence
  Synthetic
caucccaucaucuugggcuu

SEQ ID NO: 19756 - RNA, 21 nt, Artificial Sequence
  Synthetic
ccaucccaucaucuugggcuu

SEQ ID NO: 19757 - RNA, 22 nt, Artificial Sequence
  Synthetic
cccaucccaucaucuugggcuu

SEQ ID NO: 19758 - RNA, 23 nt, Artificial Sequence
  Synthetic
ucccaucccaucaucuugggcuu

SEQ ID NO: 19759 - RNA, 24 nt, Artificial Sequence
  Synthetic
uucccaucccaucaucuugggcuu

SEQ ID NO: 19760 - RNA, 18 nt, Artificial Sequence
  Synthetic
cugugccuuggguggcuu

SEQ ID NO: 19761 - RNA, 19 nt, Artificial Sequence
  Synthetic
gcugugccuuggguggcuu

SEQ ID NO: 19762 - RNA, 20 nt, Artificial Sequence
  Synthetic
agcugugccuuggguggcuu

SEQ ID NO: 19763 - RNA, 21 nt, Artificial Sequence
  Synthetic
aagcugugccuuggguggcuu

SEQ ID NO: 19764 - RNA, 22 nt, Artificial Sequence
  Synthetic
caagcugugccuuggguggcuu

SEQ ID NO: 19765 - RNA, 23 nt, Artificial Sequence
  Synthetic
ccaagcugugccuuggguggcuu

SEQ ID NO: 19766 - RNA, 24 nt, Artificial Sequence
  Synthetic
uccaagcugugccuuggguggcuu

SEQ ID NO: 19767 - RNA, 18 nt, Artificial Sequence
  Synthetic
  misc_feature (6)..(6): n is a, c, g, or u
caacgnauugugggucuu

SEQ ID NO: 19768 - RNA, 19 nt, Artificial Sequence
  Synthetic
  misc_feature (7)..(7): n is a, c, g, or u
ucaacgnauugugggucuu

SEQ ID NO: 19769 - RNA, 20 nt, Artificial Sequence
  Synthetic
  misc_feature (8)..(8): n is a, c, g, or u
gucaacgnauugugggucuu

SEQ ID NO: 19770 - RNA, 21 nt, Artificial Sequence
  Synthetic
  misc_feature (9)..(9): n is a, c, g, or u
ugucaacgnauugugggucuu

SEQ ID NO: 19771 - RNA, 22 nt, Artificial Sequence
  Synthetic
  misc_feature (10)..(10): n is a, c, g, or u
uugucaacgnauugugggucuu

SEQ ID NO: 19772 - RNA, 23 nt, Artificial Sequence
  Synthetic
  misc_feature (11)..(11): n is a, c, g, or u
uuugucaacgnauugugggucuu

SEQ ID NO: 19773 - RNA, 24 nt, Artificial Sequence
  Synthetic
  misc_feature (12)..(12): n is a, c, g, or u
guuugucaacgnauugugggucuu

SEQ ID NO: 19774 - RNA, 18 nt, Artificial Sequence
  Synthetic
uugaguauuuggugucuu

SEQ ID NO: 19775 - RNA, 19 nt, Artificial Sequence
  Synthetic
cuugaguauuuggugucuu

SEQ ID NO: 19776 - RNA, 20 nt, Artificial Sequence
  Synthetic
  misc_feature (1)..(1): n is a, c, g, or u
ncuugaguauuuggugucuu

SEQ ID NO: 19777 - RNA, 21 nt, Artificial Sequence
  Synthetic
  misc_feature (2)..(2): n is a, c, g, or u
uncuugaguauuuggugucuu

SEQ ID NO: 19778 - RNA, 22 nt, Artificial Sequence
  Synthetic
  misc_feature (3)..(3): n is a, c, g, or u
guncuugaguauuuggugucuu

SEQ ID NO: 19779 - RNA, 23 nt, Artificial Sequence
  Synthetic
  misc_feature (4)..(4): n is a, c, g, or u
uguncuugaguauuuggugucuu

SEQ ID NO: 19780 - RNA, 24 nt, Artificial Sequence
  Synthetic
  misc_feature (5)..(5): n is a, c, g, or u
cuguncuugaguauuuggugucuu

SEQ ID NO: 19781 - RNA, 18 nt, Artificial Sequence
  Synthetic
aucuucuuguugguucuu

SEQ ID NO: 19782 - RNA, 19 nt, Artificial Sequence
  Synthetic
caucuucuuguugguucuu

SEQ ID NO: 19783 - RNA, 20 nt, Artificial Sequence
  Synthetic
ucaucuucuuguugguucuu

SEQ ID NO: 19784 - RNA, 21 nt, Artificial Sequence
  Synthetic
cucaucuucuuguugguucuu

SEQ ID NO: 19785 - RNA, 22 nt, Artificial Sequence
  Synthetic
ccucaucuucuuguugguucuu

SEQ ID NO: 19786 - RNA, 23 nt, Artificial Sequence
  Synthetic
gccucaucuucuuguugguucuu

SEQ ID NO: 19787 - RNA, 24 nt, Artificial Sequence
  Synthetic
ugccucaucuucuuguugguucuu

SEQ ID NO: 19788 - RNA, 18 nt, Artificial Sequence
  Synthetic
cugcugguggcuccaguu

SEQ ID NO: 19789 - RNA, 19 nt, Artificial Sequence
  Synthetic
ccugcugguggcuccaguu

SEQ ID NO: 19790 - RNA, 20 nt, Artificial Sequence
  Synthetic
uccugcugguggcuccaguu

SEQ ID NO: 19791 - RNA, 21 nt, Artificial Sequence
  Synthetic
uuccugcugguggcuccaguu

SEQ ID NO: 19792 - RNA, 22 nt, Artificial Sequence
  Synthetic
uuuccugcugguggcuccaguu

SEQ ID NO: 19793 - RNA, 23 nt, Artificial Sequence
  Synthetic
uuuuccugcugguggcuccaguu

SEQ ID NO: 19794 - RNA, 24 nt, Artificial Sequence
  Synthetic
auuuuccugcugguggcuccaguu

SEQ ID NO: 19795 - RNA, 18 nt, Artificial Sequence
  Synthetic
  misc_feature (8)..(8): n is a, c, g, or u
guuauaunauugggaguu

SEQ ID NO: 19796 - RNA, 19 nt, Artificial Sequence
  Synthetic
  misc_feature (9)..(9): n is a, c, g, or u
gguuauaunauugggaguu

SEQ ID NO: 19797 - RNA, 20 nt, Artificial Sequence
  Synthetic
  misc_feature (10)..(10): n is a, c, g, or u
ggguuauaunauugggaguu

SEQ ID NO: 19798 - RNA, 21 nt, Artificial Sequence
  Synthetic
  misc_feature (11)..(11): n is a, c, g, or u
uggguuauaunauugggaguu

SEQ ID NO: 19799 - RNA, 22 nt, Artificial Sequence
  Synthetic
  misc_feature (12)..(12): n is a, c, g, or u
auggguuauaunauugggaguu

SEQ ID NO: 19800 - RNA, 23 nt, Artificial Sequence
  Synthetic
  misc_feature (13)..(13): n is a, c, g, or u
uauggguuauaunauugggaguu

SEQ ID NO: 19801 - RNA, 24 nt, Artificial Sequence
  Synthetic
  misc_feature (14)..(14): n is a, c, g, or u
uuauggguuauaunauugggaguu

SEQ ID NO: 19802 - RNA, 18 nt, Artificial Sequence
  Synthetic
aucaaagacuguguauuu

SEQ ID NO: 19803 - RNA, 19 nt, Artificial Sequence
  Synthetic
caucaaagacuguguauuu

SEQ ID NO: 19804 - RNA, 20 nt, Artificial Sequence
  Synthetic
acaucaaagacuguguauuu

SEQ ID NO: 19805 - RNA, 21 nt, Artificial Sequence
  Synthetic
uacaucaaagacuguguauuu

SEQ ID NO: 19806 - RNA, 22 nt, Artificial Sequence
  Synthetic
auacaucaaagacuguguauuu

SEQ ID NO: 19807 - RNA, 23 nt, Artificial Sequence
  Synthetic
aauacaucaaagacuguguauuu

SEQ ID NO: 19808 - RNA, 24 nt, Artificial Sequence
  Synthetic
gaauacaucaaagacuguguauuu

SEQ ID NO: 19809 - RNA, 18 nt, Artificial Sequence
  Synthetic
  misc_feature (4)..(4): n is a, c, g, or u
acanuauuuacauacuuu

SEQ ID NO: 19810 - RNA, 19 nt, Artificial Sequence
  Synthetic
  misc_feature (5)..(5): n is a, c, g, or u
gacanuauuuacauacuuu

SEQ ID NO: 19811 - RNA, 20 nt, Artificial Sequence
  Synthetic
  misc_feature (6)..(6): n is a, c, g, or u
agacanuauuuacauacuuu

SEQ ID NO: 19812 - RNA, 21 nt, Artificial Sequence
  Synthetic
  misc_feature (7)..(7): n is a, c, g, or u
uagacanuauuuacauacuuu

SEQ ID NO: 19813 - RNA, 22 nt, Artificial Sequence
  Synthetic
  misc_feature (8)..(8): n is a, c, g, or u
cuagacanuauuuacauacuuu

SEQ ID NO: 19814 - RNA, 23 nt, Artificial Sequence
  Synthetic
  misc_feature (9)..(9): n is a, c, g, or u
acuagacanuauuuacauacuuu

SEQ ID NO: 19815 - RNA, 24 nt, Artificial Sequence
  Synthetic
  misc_feature (10)..(10): n is a, c, g, or u
aacuagacanuauuuacauacuuu

SEQ ID NO: 19816 - RNA, 18 nt, Artificial Sequence
  Synthetic
cccaucaucuugggcuuu

SEQ ID NO: 19817 - RNA, 19 nt, Artificial Sequence
  Synthetic
ucccaucaucuugggcuuu

SEQ ID NO: 19818 - RNA, 20 nt, Artificial Sequence
  Synthetic
aucccaucaucuugggcuuu

SEQ ID NO: 19819 - RNA, 21 nt, Artificial Sequence
  Synthetic
caucccaucaucuugggcuuu

SEQ ID NO: 19820 - RNA, 22 nt, Artificial Sequence
  Synthetic
ccaucccaucaucuugggcuuu

SEQ ID NO: 19821 - RNA, 23 nt, Artificial Sequence
  Synthetic
cccaucccaucaucuugggcuuu

SEQ ID NO: 19822 - RNA, 24 nt, Artificial Sequence
  Synthetic
ucccaucccaucaucuugggcuuu

SEQ ID NO: 19823 - RNA, 22 nt, Artificial Sequence
  Synthetic
gauaguccagaagaaccaacaa

SEQ ID NO: 19824 - RNA, 20 nt, Artificial Sequence
  Synthetic
guacuuccgagaaaggacaa

SEQ ID NO: 19825 - RNA, 22 nt, Artificial Sequence
  Synthetic
guguacuuccgagaaaggacaa

SEQ ID NO: 19826 - RNA, 23 nt, Artificial Sequence
  Synthetic
gguguacuuccgagaaaggacaa

SEQ ID NO: 19827 - RNA, 21 nt, Artificial Sequence
  Synthetic
ggccuggccguugccgagcaa

SEQ ID NO: 19828 - RNA, 23 nt, Artificial Sequence
  Synthetic
gcuguagcucuuguucccaggaa

SEQ ID NO: 19829 - RNA, 21 nt, Artificial Sequence
  Synthetic
  misc_feature (18)..(18): n is a, c, g, or u
ggggcauuugguggucunuaa

SEQ ID NO: 19830 - RNA, 23 nt, Artificial Sequence
  Synthetic
gcuugaacagugggacaugaaca

SEQ ID NO: 19831 - RNA, 24 nt, Artificial Sequence
  Synthetic
ggcuugaacagugggacaugaaca

SEQ ID NO: 19832 - RNA, 22 nt, Artificial Sequence
  Synthetic
gcaugagagcaggauaaccaca

SEQ ID NO: 19833 - RNA, 23 nt, Artificial Sequence
  Synthetic
ggcaugagagcaggauaaccaca

SEQ ID NO: 19834 - RNA, 24 nt, Artificial Sequence
  Synthetic
gggcaugagagcaggauaaccaca

SEQ ID NO: 19835 - RNA, 21 nt, Artificial Sequence
  Synthetic
  misc_feature (2)..(2): n is a, c, g, or u
gnauccacacuccaaaagaca

SEQ ID NO: 19836 - RNA, 23 nt, Artificial Sequence
  Synthetic
  misc_feature (4)..(4): n is a, c, g, or u
gcgnauccacacuccaaaagaca

SEQ ID NO: 19837 - RNA, 21 nt, Artificial Sequence
  Synthetic
gccaggacaaguuggaggaca

SEQ ID NO: 19838 - RNA, 23 nt, Artificial Sequence
  Synthetic
guucccaggaauauggugaccca

SEQ ID NO: 19839 - RNA, 22 nt, Artificial Sequence
  Synthetic
gauggccaaucgccaagcccca

SEQ ID NO: 19840 - RNA, 21 nt, Artificial Sequence
  Synthetic
guuucccaccuuaugagucca

SEQ ID NO: 19841 - RNA, 21 nt, Artificial Sequence
  Synthetic
gaccuccgauugguggaagca

SEQ ID NO: 19842 - RNA, 21 nt, Artificial Sequence
  Synthetic
gaagauugaugaugugagaga

SEQ ID NO: 19843 - RNA, 23 nt, Artificial Sequence
  Synthetic
gagaagauugaugaugugagaga

SEQ ID NO: 19844 - RNA, 18 nt, Artificial Sequence
  Synthetic
gggcugaagcggugucga

SEQ ID NO: 19845 - RNA, 20 nt, Artificial Sequence
  Synthetic
gagggcugaagcggugucga

SEQ ID NO: 19846 - RNA, 23 nt, Artificial Sequence
  Synthetic
guagagggcugaagcggugucga

SEQ ID NO: 19847 - RNA, 24 nt, Artificial Sequence
  Synthetic
gguagagggcugaagcggugucga

SEQ ID NO: 19848 - RNA, 21 nt, Artificial Sequence
  Synthetic
ggauccaacugguggucugga

SEQ ID NO: 19849 - RNA, 23 nt, Artificial Sequence
  Synthetic
guggauccaacugguggucugga

SEQ ID NO: 19850 - RNA, 24 nt, Artificial Sequence
  Synthetic
guauuuuccgaaagcccaagauga

SEQ ID NO: 19851 - RNA, 21 nt, Artificial Sequence
  Synthetic
gaaagcccuacgcaccacuga

SEQ ID NO: 19852 - RNA, 22 nt, Artificial Sequence
  Synthetic
ggaaagcccuacgcaccacuga

SEQ ID NO: 19853 - RNA, 23 nt, Artificial Sequence
  Synthetic
gggaaagcccuacgcaccacuga

SEQ ID NO: 19854 - RNA, 24 nt, Artificial Sequence
  Synthetic
ggggaaagcccuacgcaccacuga

SEQ ID NO: 19855 - RNA, 22 nt, Artificial Sequence
  Synthetic
gaagggguccuaggaguccuga

SEQ ID NO: 19856 - RNA, 24 nt, Artificial Sequence
  Synthetic
gagaagggguccuaggaguccuga

SEQ ID NO: 19857 - RNA, 21 nt, Artificial Sequence
  Synthetic
ggcaucucgguagagggcuga

SEQ ID NO: 19858 - RNA, 20 nt, Artificial Sequence
  Synthetic
guagucuccggaaguguuga

SEQ ID NO: 19859 - RNA, 22 nt, Artificial Sequence
  Synthetic
gacuccucccaguccuuaaaua

SEQ ID NO: 19860 - RNA, 24 nt, Artificial Sequence
  Synthetic
gacugcuggaauuugcucugaaua

SEQ ID NO: 19861 - RNA, 24 nt, Artificial Sequence
  Synthetic
gcuauguguggauucucucuuaua

SEQ ID NO: 19862 - RNA, 18 nt, Artificial Sequence
  Synthetic
gccucguugucuaacaac

SEQ ID NO: 19863 - RNA, 23 nt, Artificial Sequence
  Synthetic
gcccugccucguugucuaacaac

SEQ ID NO: 19864 - RNA, 24 nt, Artificial Sequence
  Synthetic
ggcccugccucguugucuaacaac

SEQ ID NO: 19865 - RNA, 20 nt, Artificial Sequence
  Synthetic
gcccugccucguugucuaac

SEQ ID NO: 19866 - RNA, 23 nt, Artificial Sequence
  Synthetic
guauggaucggcagaggagccac

SEQ ID NO: 19867 - RNA, 21 nt, Artificial Sequence
  Synthetic
gaaaauugagagaaguccacc

SEQ ID NO: 19868 - RNA, 21 nt, Artificial Sequence
  Synthetic
gcuguguucaaauggaugccc

SEQ ID NO: 19869 - RNA, 23 nt, Artificial Sequence
  Synthetic
gaaacgggcugaggcccacuccc

SEQ ID NO: 19870 - RNA, 23 nt, Artificial Sequence
  Synthetic
gauaaaacgccgcagacacaucc

SEQ ID NO: 19871 - RNA, 23 nt, Artificial Sequence
  Synthetic
guugucuaacaacaguagucucc

SEQ ID NO: 19872 - RNA, 20 nt, Artificial Sequence
  Synthetic
guugaccggggcgaaagucc

SEQ ID NO: 19873 - RNA, 22 nt, Artificial Sequence
  Synthetic
gaaacauagagguuccuugagc

SEQ ID NO: 19874 - RNA, 23 nt, Artificial Sequence
  Synthetic
ggaaacauagagguuccuugagc

SEQ ID NO: 19875 - RNA, 24 nt, Artificial Sequence
  Synthetic
gggaaacauagagguuccuugagc

SEQ ID NO: 19876 - RNA, 24 nt, Artificial Sequence
  Synthetic
gacaugaacaaaagaugauuaggc

SEQ ID NO: 19877 - RNA, 22 nt, Artificial Sequence
  Synthetic
gccacaaagguuccgcgcaugc

SEQ ID NO: 19878 - RNA, 24 nt, Artificial Sequence
  Synthetic
gagccacaaagguuccgcgcaugc

SEQ ID NO: 19879 - RNA, 20 nt, Artificial Sequence
  Synthetic
gaagucccaaucgggacugc

SEQ ID NO: 19880 - RNA, 23 nt, Artificial Sequence
  Synthetic
guugaagucccaaucgggacugc

SEQ ID NO: 19881 - RNA, 24 nt, Artificial Sequence
  Synthetic
guauaaagggacucaagaugcugc

SEQ ID NO: 19882 - RNA, 18 nt, Artificial Sequence
  Synthetic
ggucuccaugcgacgugc

SEQ ID NO: 19883 - RNA, 20 nt, Artificial Sequence
  Synthetic
guggucuccaugcgacgugc

SEQ ID NO: 19884 - RNA, 19 nt, Artificial Sequence
  Synthetic
gcaccacugaacaaauugc

SEQ ID NO: 19885 - RNA, 21 nt, Artificial Sequence
  Synthetic
gggaaguuugcgaaagcaauc

SEQ ID NO: 19886 - RNA, 19 nt, Artificial Sequence
  Synthetic
gcggggaguccgcguaaag

SEQ ID NO: 19887 - RNA, 20 nt, Artificial Sequence
  Synthetic
ggcggggaguccgcguaaag

SEQ ID NO: 19888 - RNA, 19 nt, Artificial Sequence
  Synthetic
gcgacgugcagaggugaag

SEQ ID NO: 19889 - RNA, 22 nt, Artificial Sequence
  Synthetic
guugcauggugcuggugaacag

SEQ ID NO: 19890 - RNA, 18 nt, Artificial Sequence
  Synthetic
gccccaagcgaccacgag

SEQ ID NO: 19891 - RNA, 20 nt, Artificial Sequence
  Synthetic
gagccccaagcgaccacgag

SEQ ID NO: 19892 - RNA, 23 nt, Artificial Sequence
  Synthetic
gcagagccccaagcgaccacgag

SEQ ID NO: 19893 - RNA, 24 nt, Artificial Sequence
  Synthetic
ggcagagccccaagcgaccacgag

SEQ ID NO: 19894 - RNA, 22 nt, Artificial Sequence
  Synthetic
gugguaccccuagaaaauugag

SEQ ID NO: 19895 - RNA, 23 nt, Artificial Sequence
  Synthetic
ggugguaccccuagaaaauugag

SEQ ID NO: 19896 - RNA, 24 nt, Artificial Sequence
  Synthetic
gggugguaccccuagaaaauugag

SEQ ID NO: 19897 - RNA, 19 nt, Artificial Sequence
  Synthetic
gccccuucucgccguugag

SEQ ID NO: 19898 - RNA, 19 nt, Artificial Sequence
  Synthetic
gcgaagugcacacgggccg

SEQ ID NO: 19899 - RNA, 22 nt, Artificial Sequence
  Synthetic
gaagcgaagugcacacgggccg

SEQ ID NO: 19900 - RNA, 24 nt, Artificial Sequence
  Synthetic
gugaagcgaagugcacacgggccg

SEQ ID NO: 19901 - RNA, 18 nt, Artificial Sequence
  Synthetic
gacaaaggacgucccgcg

SEQ ID NO: 19902 - RNA, 21 nt, Artificial Sequence
  Synthetic
gcagaugagaaggcacaggcg

SEQ ID NO: 19903 - RNA, 22 nt, Artificial Sequence
  Synthetic
ggcagaugagaaggcacaggcg

SEQ ID NO: 19904 - RNA, 18 nt, Artificial Sequence
  Synthetic
gcaauuuccguccgaagg

SEQ ID NO: 19905 - RNA, 20 nt, Artificial Sequence
  Synthetic
gugcaauuuccguccgaagg

SEQ ID NO: 19906 - RNA, 21 nt, Artificial Sequence
  Synthetic
ggugcaauuuccguccgaagg

SEQ ID NO: 19907 - RNA, 23 nt, Artificial Sequence
  Synthetic
gaagcuccaaauucuuuauaagg

SEQ ID NO: 19908 - RNA, 24 nt, Artificial Sequence
  Synthetic
  misc_feature (4)..(4): n is a, c, g, or u
guanaguagaggaguaaagaccgg

SEQ ID NO: 19909 - RNA, 20 nt, Artificial Sequence
  Synthetic
guuccgcgcaugcgcugaug

SEQ ID NO: 19910 - RNA, 22 nt, Artificial Sequence
  Synthetic
gaaagcaaucuuugauuuuaug

SEQ ID NO: 19911 - RNA, 24 nt, Artificial Sequence
  Synthetic
gcgaaagcaaucuuugauuuuaug

SEQ ID NO: 19912 - RNA, 21 nt, Artificial Sequence
  Synthetic
ggacugcuggaauuugcucug

SEQ ID NO: 19913 - RNA, 22 nt, Artificial Sequence
  Synthetic
gggacugcuggaauuugcucug

SEQ ID NO: 19914 - RNA, 23 nt, Artificial Sequence
  Synthetic
guaaugauuaaccacauucucug

SEQ ID NO: 19915 - RNA, 24 nt, Artificial Sequence
  Synthetic
gacaaguuggaggacaggagguug

SEQ ID NO: 19916 - RNA, 21 nt, Artificial Sequence
  Synthetic
gcaagaguggugcagguuuug

SEQ ID NO: 19917 - RNA, 23 nt, Artificial Sequence
  Synthetic
gagcaagaguggugcagguuuug

SEQ ID NO: 19918 - RNA, 21 nt, Artificial Sequence
  Synthetic
  misc_feature (18)..(18): n is a, c, g, or u
gaucuucugcgacgcggngau

SEQ ID NO: 19919 - RNA, 23 nt, Artificial Sequence
  Synthetic
  misc_feature (20)..(20): n is a, c, g, or u
gagaucuucugcgacgcggngau

SEQ ID NO: 19920 - RNA, 22 nt, Artificial Sequence
  Synthetic
guaacagcgguauaaagggacu

SEQ ID NO: 19921 - RNA, 23 nt, Artificial Sequence
  Synthetic
gguaacagcgguauaaagggacu

SEQ ID NO: 19922 - RNA, 24 nt, Artificial Sequence
  Synthetic
  misc_feature (11)..(11): n is a, c, g, or u
gacccacaauncguugacaaaccu

SEQ ID NO: 19923 - RNA, 19 nt, Artificial Sequence
  Synthetic
gcuggugguuguagauccu

SEQ ID NO: 19924 - RNA, 21 nt, Artificial Sequence
  Synthetic
gugcuggugguuguagauccu

SEQ ID NO: 19925 - RNA, 21 nt, Artificial Sequence
  Synthetic
  misc_feature (8)..(8): n is a, c, g, or u
gaucucungcugcaggauccu

SEQ ID NO: 19926 - RNA, 20 nt, Artificial Sequence
  Synthetic
guaacacgagaagggguccu

SEQ ID NO: 19927 - RNA, 19 nt, Artificial Sequence
  Synthetic
  misc_feature (16)..(16): n is a, c, g, or u
gcgagcgaaacaagcngcu

SEQ ID NO: 19928 - RNA, 22 nt, Artificial Sequence
  Synthetic
  misc_feature (19)..(19): n is a, c, g, or u
gcugcgagcgaaacaagcngcu

SEQ ID NO: 19929 - RNA, 24 nt, Artificial Sequence
  Synthetic
gccaaucgccaagccccagccagu

SEQ ID NO: 19930 - RNA, 18 nt, Artificial Sequence
  Synthetic
gguuuugcagggucccgu

SEQ ID NO: 19931 - RNA, 21 nt, Artificial Sequence
  Synthetic
gcagguuuugcagggucccgu

SEQ ID NO: 19932 - RNA, 23 nt, Artificial Sequence
  Synthetic
gugcagguuuugcagggucccgu

SEQ ID NO: 19933 - RNA, 24 nt, Artificial Sequence
  Synthetic
ggugcagguuuugcagggucccgu

SEQ ID NO: 19934 - RNA, 18 nt, Artificial Sequence
  Synthetic
guugccgagcaacggggu

SEQ ID NO: 19935 - RNA, 21 nt, Artificial Sequence
  Synthetic
gaggugaaaaaguugcauggu

SEQ ID NO: 19936 - RNA, 24 nt, Artificial Sequence
  Synthetic
gcagaggugaaaaaguugcauggu

SEQ ID NO: 19937 - RNA, 21 nt, Artificial Sequence
  Synthetic
gccaauuguccuuguuugugu

SEQ ID NO: 19938 - RNA, 22 nt, Artificial Sequence
  Synthetic
ggccaauuguccuuguuugugu

SEQ ID NO: 19939 - RNA, 21 nt, Artificial Sequence
  Synthetic
  misc_feature (12)..(12): n is a, c, g, or u
gucuagacucunugguauugu

SEQ ID NO: 19940 - RNA, 23 nt, Artificial Sequence
  Synthetic
  misc_feature (14)..(14): n is a, c, g, or u
gagucuagacucunugguauugu

SEQ ID NO: 19941 - RNA, 22 nt, Artificial Sequence
  Synthetic
guggaucugguggcgagguugu

SEQ ID NO: 19942 - RNA, 23 nt, Artificial Sequence
  Synthetic
gguggaucugguggcgagguugu

SEQ ID NO: 19943 - RNA, 22 nt, Artificial Sequence
  Synthetic
guccccagucuucgagaagauu

SEQ ID NO: 19944 - RNA, 23 nt, Artificial Sequence
  Synthetic
gguccccagucuucgagaagauu

SEQ ID NO: 19945 - RNA, 24 nt, Artificial Sequence
  Synthetic
ggguccccagucuucgagaagauu

SEQ ID NO: 19946 - RNA, 22 nt, Artificial Sequence
  Synthetic
gaccgguaaaguuucccaccuu

SEQ ID NO: 19947 - RNA, 21 nt, Artificial Sequence
  Synthetic
gacacacgggcaacauaccuu

SEQ ID NO: 19948 - RNA, 22 nt, Artificial Sequence
  Synthetic
ggacacacgggcaacauaccuu

SEQ ID NO: 19949 - RNA, 24 nt, Artificial Sequence
  Synthetic
gaggacacacgggcaacauaccuu

SEQ ID NO: 19950 - RNA, 22 nt, Artificial Sequence
  Synthetic
gcgagaaaacaaaagccugcuu

SEQ ID NO: 19951 - RNA, 23 nt, Artificial Sequence
  Synthetic
ggcgagaaaacaaaagccugcuu

SEQ ID NO: 19952 - RNA, 22 nt, Artificial Sequence
  Synthetic
gcagggucccgugcuggugguu

SEQ ID NO: 19953 - RNA, 18 nt, Artificial Sequence
  Synthetic
gauaggauaggggcauuu

SEQ ID NO: 19954 - RNA, 21 nt, Artificial Sequence
  Synthetic
guugauaggauaggggcauuu

SEQ ID NO: 19955 - RNA, 23 nt, Artificial Sequence
  Synthetic
guguugauaggauaggggcauuu

SEQ ID NO: 19956 - RNA, 21 nt, Artificial Sequence
  Synthetic
ggacaauuggccaauggcaaa

SEQ ID NO: 19957 - RNA, 23 nt, Artificial Sequence
  Synthetic
gcuuugcagccccuuuuacucaa

SEQ ID NO: 19958 - RNA, 24 nt, Artificial Sequence
  Synthetic
ggcuuugcagccccuuuuacucaa

SEQ ID NO: 19959 - RNA, 23 nt, Artificial Sequence
  Synthetic
guauuaggaggcuguaggcauaa

SEQ ID NO: 19960 - RNA, 21 nt, Artificial Sequence
  Synthetic
gguccaggguucacaccccca

SEQ ID NO: 19961 - RNA, 21 nt, Artificial Sequence
  Synthetic
gggacacacauccacaggcca

SEQ ID NO: 19962 - RNA, 19 nt, Artificial Sequence
  Synthetic
  misc_feature (3)..(3): n is a, c, g, or u
gcngcuuguuucgcucgca

SEQ ID NO: 19963 - RNA, 21 nt, Artificial Sequence
  Synthetic
  misc_feature (11)..(11): n is a, c, g, or u
gaucucaaucnccgcgucgca

SEQ ID NO: 19964 - RNA, 24 nt, Artificial Sequence
  Synthetic
  misc_feature (14)..(14): n is a, c, g, or u
gaagaucucaaucnccgcgucgca

SEQ ID NO: 19965 - RNA, 21 nt, Artificial Sequence
  Synthetic
gcauggacauugacccuuaua

SEQ ID NO: 19966 - RNA, 22 nt, Artificial Sequence
  Synthetic
ggcauggacauugacccuuaua

SEQ ID NO: 19967 - RNA, 23 nt, Artificial Sequence
  Synthetic
gggcauggacauugacccuuaua

SEQ ID NO: 19968 - RNA, 24 nt, Artificial Sequence
  Synthetic
ggggcauggacauugacccuuaua

SEQ ID NO: 19969 - RNA, 24 nt, Artificial Sequence
  Synthetic
  misc_feature (12)..(12): n is a, c, g, or u
gauccugcagcnagagaucuagua

SEQ ID NO: 19970 - RNA, 22 nt, Artificial Sequence
  Synthetic
gcuagguuuuaucccaaaguua

SEQ ID NO: 19971 - RNA, 24 nt, Artificial Sequence
  Synthetic
gcuuccugggugggcaauaauuua

SEQ ID NO: 19972 - RNA, 21 nt, Artificial Sequence
  Synthetic
gaggucaggaagaaagccaac

SEQ ID NO: 19973 - RNA, 22 nt, Artificial Sequence
  Synthetic
ggaggucaggaagaaagccaac

SEQ ID NO: 19974 - RNA, 21 nt, Artificial Sequence
  Synthetic
gaacucccucgccucgcagac

SEQ ID NO: 19975 - RNA, 24 nt, Artificial Sequence
  Synthetic
gaagaacucccucgccucgcagac

SEQ ID NO: 19976 - RNA, 20 nt, Artificial Sequence
  Synthetic
gcuguaccaaaccuucggac

SEQ ID NO: 19977 - RNA, 21 nt, Artificial Sequence
  Synthetic
gacaccgcuucagcccucuac

SEQ ID NO: 19978 - RNA, 21 nt, Artificial Sequence
  Synthetic
gauugcuuucgcaaacuuccc

SEQ ID NO: 19979 - RNA, 22 nt, Artificial Sequence
  Synthetic
guucaagccuccaagcugugcc

SEQ ID NO: 19980 - RNA, 18 nt, Artificial Sequence
  Synthetic
gccagcuagguuuuaucc

SEQ ID NO: 19981 - RNA, 24 nt, Artificial Sequence
  Synthetic
gauccacuauucagagcaaauucc

SEQ ID NO: 19982 - RNA, 24 nt, Artificial Sequence
  Synthetic
gcaaacaagguaggagugggaggc

SEQ ID NO: 19983 - RNA, 21 nt, Artificial Sequence
  Synthetic
gaacauauugugcauaaaauc

SEQ ID NO: 19984 - RNA, 22 nt, Artificial Sequence
  Synthetic
ggaacauauugugcauaaaauc

SEQ ID NO: 19985 - RNA, 23 nt, Artificial Sequence
  Synthetic
gccaaaauucgcaguccccaauc

SEQ ID NO: 19986 - RNA, 24 nt, Artificial Sequence
  Synthetic
ggccaaaauucgcaguccccaauc

SEQ ID NO: 19987 - RNA, 21 nt, Artificial Sequence
  Synthetic
gggccaaaucugugcagcauc

SEQ ID NO: 19988 - RNA, 22 nt, Artificial Sequence
  Synthetic
ggggccaaaucugugcagcauc

SEQ ID NO: 19989 - RNA, 23 nt, Artificial Sequence
  Synthetic
gggggccaaaucugugcagcauc

SEQ ID NO: 19990 - RNA, 22 nt, Artificial Sequence
  Synthetic
guccuggccaaaauucgcaguc

SEQ ID NO: 19991 - RNA, 24 nt, Artificial Sequence
  Synthetic
guguccuggccaaaauucgcaguc

SEQ ID NO: 19992 - RNA, 23 nt, Artificial Sequence
  Synthetic
guugcccguguguccucuacuuc

SEQ ID NO: 19993 - RNA, 21 nt, Artificial Sequence
  Synthetic
guuuacuagugcaauuuguuc

SEQ ID NO: 19994 - RNA, 24 nt, Artificial Sequence
  Synthetic
gauugggacuucaacacaaacaag

SEQ ID NO: 19995 - RNA, 21 nt, Artificial Sequence
  Synthetic
  misc_feature (9)..(9): n is a, c, g, or u
gauugaaanuaauuaugccag

SEQ ID NO: 19996 - RNA, 24 nt, Artificial Sequence
  Synthetic
  misc_feature (12)..(12): n is a, c, g, or u
gacgauugaaanuaauuaugccag

SEQ ID NO: 19997 - RNA, 18 nt, Artificial Sequence
  Synthetic
gucuacgucccgucggcg

SEQ ID NO: 19998 - RNA, 18 nt, Artificial Sequence
  Synthetic
ggucaacgaccuggauug

SEQ ID NO: 19999 - RNA, 23 nt, Artificial Sequence
  Synthetic
gcucaguuuacuagugcaauuug

SEQ ID NO: 20000 - RNA, 24 nt, Artificial Sequence
  Synthetic
ggcucaguuuacuagugcaauuug

SEQ ID NO: 20001 - RNA, 18 nt, Artificial Sequence
  Synthetic
gcaacggccaggccuuug

SEQ ID NO: 20002 - RNA, 19 nt, Artificial Sequence
  Synthetic
ggcaacggccaggccuuug

SEQ ID NO: 20003 - RNA, 23 nt, Artificial Sequence
  Synthetic
gcucggcaacggccaggccuuug

SEQ ID NO: 20004 - RNA, 24 nt, Artificial Sequence
  Synthetic
gaucucaaucuccagcuucccaau

SEQ ID NO: 20005 - RNA, 24 nt, Artificial Sequence
  Synthetic
guuacuaaauacuucccuuuggau

SEQ ID NO: 20006 - RNA, 21 nt, Artificial Sequence
  Synthetic
gggcuuucggaaaauaccuau

SEQ ID NO: 20007 - RNA, 22 nt, Artificial Sequence
  Synthetic
guuucuuguugacaaaaauccu

SEQ ID NO: 20008 - RNA, 24 nt, Artificial Sequence
  Synthetic
guguuucuuguugacaaaaauccu

SEQ ID NO: 20009 - RNA, 21 nt, Artificial Sequence
  Synthetic
gcuuucccccacugucuggcu

SEQ ID NO: 20010 - RNA, 22 nt, Artificial Sequence
  Synthetic
ggcuuucccccacugucuggcu

SEQ ID NO: 20011 - RNA, 23 nt, Artificial Sequence
  Synthetic
gggcuuucccccacugucuggcu

SEQ ID NO: 20012 - RNA, 22 nt, Artificial Sequence
  Synthetic
gaauccugcggacgaccccucu

SEQ ID NO: 20013 - RNA, 22 nt, Artificial Sequence
  Synthetic
gcggaaccuuuguggcuccucu

SEQ ID NO: 20014 - RNA, 24 nt, Artificial Sequence
  Synthetic
gcgcggaaccuuuguggcuccucu

SEQ ID NO: 20015 - RNA, 18 nt, Artificial Sequence
  Synthetic
gacucgugguggacuucu

SEQ ID NO: 20016 - RNA, 23 nt, Artificial Sequence
  Synthetic
gucuagacucgugguggacuucu

SEQ ID NO: 20017 - RNA, 21 nt, Artificial Sequence
  Synthetic
guggacuucucucaauuuucu

SEQ ID NO: 20018 - RNA, 22 nt, Artificial Sequence
  Synthetic
gguggacuucucucaauuuucu

SEQ ID NO: 20019 - RNA, 24 nt, Artificial Sequence
  Synthetic
gugguggacuucucucaauuuucu

SEQ ID NO: 20020 - RNA, 18 nt, Artificial Sequence
  Synthetic
gguguccuggccaaaauu

SEQ ID NO: 20021 - RNA, 19 nt, Artificial Sequence
  Synthetic
ggguguccuggccaaaauu

SEQ ID NO: 20022 - RNA, 21 nt, Artificial Sequence
  Synthetic
gaagaucucaaucuccagcuu

SEQ ID NO: 20023 - RNA, 24 nt, Artificial Sequence
  Synthetic
gcagaagaucucaaucuccagcuu

SEQ ID NO: 20024 - RNA, 23 nt, Artificial Sequence
  Synthetic
gcaacccccacuggcuggggcuu

SEQ ID NO: 20025 - RNA, 21 nt, Artificial Sequence
  Synthetic
gcugcuaugccucaucuucuu

SEQ ID NO: 20026 - RNA, 22 nt, Artificial Sequence
  Synthetic
gacucauaaggugggaaacuuu

SEQ ID NO: 20027 - RNA, 23 nt, Artificial Sequence
  Synthetic
ggacucauaaggugggaaacuuu

SEQ ID NO: 20028 - RNA, 23 nt, Artificial Sequence
  Synthetic
gcccguuucucuuggcucaguuu

SEQ ID NO: 20029 - RNA, 21 nt, Artificial Sequence
  Synthetic
aacagugggacaugaacaaaa

SEQ ID NO: 20030 - RNA, 23 nt, Artificial Sequence
  Synthetic
ugaacagugggacaugaacaaaa

SEQ ID NO: 20031 - RNA, 24 nt, Artificial Sequence
  Synthetic
uugaacagugggacaugaacaaaa

SEQ ID NO: 20032 - RNA, 21 nt, Artificial Sequence
  Synthetic
auaguccagaagaaccaacaa

SEQ ID NO: 20033 - RNA, 23 nt, Artificial Sequence
  Synthetic
ugauaguccagaagaaccaacaa

SEQ ID NO: 20034 - RNA, 24 nt, Artificial Sequence
  Synthetic
uugauaguccagaagaaccaacaa

SEQ ID NO: 20035 - RNA, 18 nt, Artificial Sequence
  Synthetic
acuuccgagaaaggacaa

SEQ ID NO: 20036 - RNA, 19 nt, Artificial Sequence
  Synthetic
uacuuccgagaaaggacaa

SEQ ID NO: 20037 - RNA, 21 nt, Artificial Sequence
  Synthetic
uguacuuccgagaaaggacaa

SEQ ID NO: 20038 - RNA, 24 nt, Artificial Sequence
  Synthetic
agguguacuuccgagaaaggacaa

SEQ ID NO: 20039 - RNA, 22 nt, Artificial Sequence
  Synthetic
aggccuggccguugccgagcaa

SEQ ID NO: 20040 - RNA, 23 nt, Artificial Sequence
  Synthetic
aaggccuggccguugccgagcaa

SEQ ID NO: 20041 - RNA, 24 nt, Artificial Sequence
  Synthetic
aaaggccuggccguugccgagcaa

SEQ ID NO: 20042 - RNA, 18 nt, Artificial Sequence
  Synthetic
ucacgggaaguuugcgaa

SEQ ID NO: 20043 - RNA, 19 nt, Artificial Sequence
  Synthetic
uucacgggaaguuugcgaa

SEQ ID NO: 20044 - RNA, 20 nt, Artificial Sequence
  Synthetic
auucacgggaaguuugcgaa

SEQ ID NO: 20045 - RNA, 21 nt, Artificial Sequence
  Synthetic
uguagcucuuguucccaggaa

SEQ ID NO: 20046 - RNA, 22 nt, Artificial Sequence
  Synthetic
cuguagcucuuguucccaggaa

SEQ ID NO: 20047 - RNA, 24 nt, Artificial Sequence
  Synthetic
ugcuguagcucuuguucccaggaa

SEQ ID NO: 20048 - RNA, 22 nt, Artificial Sequence
  Synthetic
  misc_feature (19)..(19): n is a, c, g, or u
aggggcauuugguggucunuaa

SEQ ID NO: 20049 - RNA, 23 nt, Artificial Sequence
  Synthetic
  misc_feature (20)..(20): n is a, c, g, or u
uaggggcauuugguggucunuaa

SEQ ID NO: 20050 - RNA, 24 nt, Artificial Sequence
  Synthetic
  misc_feature (21)..(21): n is a, c, g, or u
auaggggcauuugguggucunuaa

SEQ ID NO: 20051 - RNA, 21 nt, Artificial Sequence
  Synthetic
uugaacagugggacaugaaca

SEQ ID NO: 20052 - RNA, 22 nt, Artificial Sequence
  Synthetic
cuugaacagugggacaugaaca

SEQ ID NO: 20053 - RNA, 21 nt, Artificial Sequence
  Synthetic
aauggaugcccacagauaaca

SEQ ID NO: 20054 - RNA, 22 nt, Artificial Sequence
  Synthetic
aaauggaugcccacagauaaca

SEQ ID NO: 20055 - RNA, 23 nt, Artificial Sequence
  Synthetic
caaauggaugcccacagauaaca

SEQ ID NO: 20056 - RNA, 24 nt, Artificial Sequence
  Synthetic
ucaaauggaugcccacagauaaca

SEQ ID NO: 20057 - RNA, 21 nt, Artificial Sequence
  Synthetic
caugagagcaggauaaccaca

SEQ ID NO: 20058 - RNA, 22 nt, Artificial Sequence
  Synthetic
  misc_feature (3)..(3): n is a, c, g, or u
cgnauccacacuccaaaagaca

SEQ ID NO: 20059 - RNA, 24 nt, Artificial Sequence
  Synthetic
  misc_feature (5)..(5): n is a, c, g, or u
ugcgnauccacacuccaaaagaca

SEQ ID NO: 20060 - RNA, 22 nt, Artificial Sequence
  Synthetic
agccaggacaaguuggaggaca

SEQ ID NO: 20061 - RNA, 23 nt, Artificial Sequence
  Synthetic
uagccaggacaaguuggaggaca

SEQ ID NO: 20062 - RNA, 24 nt, Artificial Sequence
  Synthetic
auagccaggacaaguuggaggaca

SEQ ID NO: 20063 - RNA, 21 nt, Artificial Sequence
  Synthetic
ucccaggaauauggugaccca

SEQ ID NO: 20064 - RNA, 22 nt, Artificial Sequence
  Synthetic
uucccaggaauauggugaccca

SEQ ID NO: 20065 - RNA, 24 nt, Artificial Sequence
  Synthetic
uguucccaggaauauggugaccca

SEQ ID NO: 20066 - RNA, 21 nt, Artificial Sequence
  Synthetic
auggccaaucgccaagcccca

SEQ ID NO: 20067 - RNA, 23 nt, Artificial Sequence
  Synthetic
ugauggccaaucgccaagcccca

SEQ ID NO: 20068 - RNA, 24 nt, Artificial Sequence
  Synthetic
cugauggccaaucgccaagcccca

SEQ ID NO: 20069 - RNA, 22 nt, Artificial Sequence
  Synthetic
aguuucccaccuuaugagucca

SEQ ID NO: 20070 - RNA, 23 nt, Artificial Sequence
  Synthetic
aaguuucccaccuuaugagucca

SEQ ID NO: 20071 - RNA, 24 nt, Artificial Sequence
  Synthetic
aaaguuucccaccuuaugagucca

SEQ ID NO: 20072 - RNA, 21 nt, Artificial Sequence
  Synthetic
  misc_feature (4)..(4): n is a, c, g, or u
aauncguugacaaaccuucca

SEQ ID NO: 20073 - RNA, 22 nt, Artificial Sequence
  Synthetic
  misc_feature (5)..(5): n is a, c, g, or u
caauncguugacaaaccuucca

SEQ ID NO: 20074 - RNA, 23 nt, Artificial Sequence
  Synthetic
  misc_feature (6)..(6): n is a, c, g, or u
acaauncguugacaaaccuucca

SEQ ID NO: 20075 - RNA, 24 nt, Artificial Sequence
  Synthetic
  misc_feature (7)..(7): n is a, c, g, or u
cacaauncguugacaaaccuucca

SEQ ID NO: 20076 - RNA, 22 nt, Artificial Sequence
  Synthetic
ugaccuccgauugguggaagca

SEQ ID NO: 20077 - RNA, 23 nt, Artificial Sequence
  Synthetic
cugaccuccgauugguggaagca

SEQ ID NO: 20078 - RNA, 24 nt, Artificial Sequence
  Synthetic
ccugaccuccgauugguggaagca

SEQ ID NO: 20079 - RNA, 22 nt, Artificial Sequence
  Synthetic
agaagauugaugaugugagaga

SEQ ID NO: 20080 - RNA, 24 nt, Artificial Sequence
  Synthetic
cgagaagauugaugaugugagaga

SEQ ID NO: 20081 - RNA, 18 nt, Artificial Sequence
  Synthetic
accgccuguaacacgaga

SEQ ID NO: 20082 - RNA, 19 nt, Artificial Sequence
  Synthetic
caccgccuguaacacgaga

SEQ ID NO: 20083 - RNA, 20 nt, Artificial Sequence
  Synthetic
acaccgccuguaacacgaga

SEQ ID NO: 20084 - RNA, 21 nt, Artificial Sequence
  Synthetic
cacaccgccuguaacacgaga

SEQ ID NO: 20085 - RNA, 22 nt, Artificial Sequence
  Synthetic
acacaccgccuguaacacgaga

SEQ ID NO: 20086 - RNA, 23 nt, Artificial Sequence
  Synthetic
aacacaccgccuguaacacgaga

SEQ ID NO: 20087 - RNA, 24 nt, Artificial Sequence
  Synthetic
aaacacaccgccuguaacacgaga

SEQ ID NO: 20088 - RNA, 19 nt, Artificial Sequence
  Synthetic
agggcugaagcggugucga

SEQ ID NO: 20089 - RNA, 21 nt, Artificial Sequence
  Synthetic
agagggcugaagcggugucga

SEQ ID NO: 20090 - RNA, 22 nt, Artificial Sequence
  Synthetic
uagagggcugaagcggugucga

SEQ ID NO: 20091 - RNA, 21 nt, Artificial Sequence
  Synthetic
  misc_feature (2)..(2): n is a, c, g, or u
ancaggguccccagucuucga

SEQ ID NO: 20092 - RNA, 22 nt, Artificial Sequence
  Synthetic
  misc_feature (3)..(3): n is a, c, g, or u
uancaggguccccagucuucga

SEQ ID NO: 20093 - RNA, 23 nt, Artificial Sequence
  Synthetic
  misc_feature (4)..(4): n is a, c, g, or u
auancaggguccccagucuucga

SEQ ID NO: 20094 - RNA, 24 nt, Artificial Sequence
  Synthetic
  misc_feature (5)..(5): n is a, c, g, or u
cauancaggguccccagucuucga

SEQ ID NO: 20095 - RNA, 18 nt, Artificial Sequence
  Synthetic
aggacgucccgcgcagga

SEQ ID NO: 20096 - RNA, 19 nt, Artificial Sequence
  Synthetic
aaggacgucccgcgcagga

SEQ ID NO: 20097 - RNA, 20 nt, Artificial Sequence
  Synthetic
aaaggacgucccgcgcagga

SEQ ID NO: 20098 - RNA, 22 nt, Artificial Sequence
  Synthetic
uggauccaacugguggucugga

SEQ ID NO: 20099 - RNA, 24 nt, Artificial Sequence
  Synthetic
aguggauccaacugguggucugga

SEQ ID NO: 20100 - RNA, 18 nt, Artificial Sequence
  Synthetic
uccgaaagcccaagauga

SEQ ID NO: 20101 - RNA, 19 nt, Artificial Sequence
  Synthetic
uuccgaaagcccaagauga

SEQ ID NO: 20102 - RNA, 20 nt, Artificial Sequence
  Synthetic
uuuccgaaagcccaagauga

SEQ ID NO: 20103 - RNA, 21 nt, Artificial Sequence
  Synthetic
uuuuccgaaagcccaagauga

SEQ ID NO: 20104 - RNA, 22 nt, Artificial Sequence
  Synthetic
auuuuccgaaagcccaagauga

SEQ ID NO: 20105 - RNA, 23 nt, Artificial Sequence
  Synthetic
uauuuuccgaaagcccaagauga

SEQ ID NO: 20106 - RNA, 21 nt, Artificial Sequence
  Synthetic
aagggguccuaggaguccuga

SEQ ID NO: 20107 - RNA, 23 nt, Artificial Sequence
  Synthetic
agaagggguccuaggaguccuga

SEQ ID NO: 20108 - RNA, 22 nt, Artificial Sequence
  Synthetic
aggcaucucgguagagggcuga

SEQ ID NO: 20109 - RNA, 23 nt, Artificial Sequence
  Synthetic
aaggcaucucgguagagggcuga

SEQ ID NO: 20110 - RNA, 24 nt, Artificial Sequence
  Synthetic
uaaggcaucucgguagagggcuga

SEQ ID NO: 20111 - RNA, 18 nt, Artificial Sequence
  Synthetic
agucuccggaaguguuga

SEQ ID NO: 20112 - RNA, 19 nt, Artificial Sequence
  Synthetic
uagucuccggaaguguuga

SEQ ID NO: 20113 - RNA, 21 nt, Artificial Sequence
  Synthetic
aguagucuccggaaguguuga

SEQ ID NO: 20114 - RNA, 22 nt, Artificial Sequence
  Synthetic
caguagucuccggaaguguuga

SEQ ID NO: 20115 - RNA, 23 nt, Artificial Sequence
  Synthetic
acaguagucuccggaaguguuga

SEQ ID NO: 20116 - RNA, 24 nt, Artificial Sequence
  Synthetic
aacaguagucuccggaaguguuga

SEQ ID NO: 20117 - RNA, 21 nt, Artificial Sequence
  Synthetic
acuccucccaguccuuaaaua

SEQ ID NO: 20118 - RNA, 23 nt, Artificial Sequence
  Synthetic
cgacuccucccaguccuuaaaua

SEQ ID NO: 20119 - RNA, 24 nt, Artificial Sequence
  Synthetic
ccgacuccucccaguccuuaaaua

SEQ ID NO: 20120 - RNA, 21 nt, Artificial Sequence
  Synthetic
ugcuggaauuugcucugaaua

SEQ ID NO: 20121 - RNA, 22 nt, Artificial Sequence
  Synthetic
cugcuggaauuugcucugaaua

SEQ ID NO: 20122 - RNA, 23 nt, Artificial Sequence
  Synthetic
acugcuggaauuugcucugaaua

SEQ ID NO: 20123 - RNA, 21 nt, Artificial Sequence
  Synthetic
auguguggauucucucuuaua

SEQ ID NO: 20124 - RNA, 22 nt, Artificial Sequence
  Synthetic
uauguguggauucucucuuaua

SEQ ID NO: 20125 - RNA, 23 nt, Artificial Sequence
  Synthetic
cuauguguggauucucucuuaua

SEQ ID NO: 20126 - RNA, 18 nt, Artificial Sequence
  Synthetic
acccgggugguaccccua

SEQ ID NO: 20127 - RNA, 19 nt, Artificial Sequence
  Synthetic
cacccgggugguaccccua

SEQ ID NO: 20128 - RNA, 20 nt, Artificial Sequence
  Synthetic
acacccgggugguaccccua

SEQ ID NO: 20129 - RNA, 19 nt, Artificial Sequence
  Synthetic
ugccucguugucuaacaac

SEQ ID NO: 20130 - RNA, 20 nt, Artificial Sequence
  Synthetic
cugccucguugucuaacaac

SEQ ID NO: 20131 - RNA, 21 nt, Artificial Sequence
  Synthetic
ccugccucguugucuaacaac

SEQ ID NO: 20132 - RNA, 22 nt, Artificial Sequence
  Synthetic
cccugccucguugucuaacaac

SEQ ID NO: 20133 - RNA, 18 nt, Artificial Sequence
  Synthetic
ccugccucguugucuaac

SEQ ID NO: 20134 - RNA, 19 nt, Artificial Sequence
  Synthetic
cccugccucguugucuaac

SEQ ID NO: 20135 - RNA, 21 nt, Artificial Sequence
  Synthetic
auggaucggcagaggagccac

SEQ ID NO: 20136 - RNA, 22 nt, Artificial Sequence
  Synthetic
uauggaucggcagaggagccac

SEQ ID NO: 20137 - RNA, 24 nt, Artificial Sequence
  Synthetic
aguauggaucggcagaggagccac

SEQ ID NO: 20138 - RNA, 22 nt, Artificial Sequence
  Synthetic
agaaaauugagagaaguccacc

SEQ ID NO: 20139 - RNA, 23 nt, Artificial Sequence
  Synthetic
uagaaaauugagagaaguccacc

SEQ ID NO: 20140 - RNA, 24 nt, Artificial Sequence
  Synthetic
cuagaaaauugagagaaguccacc

SEQ ID NO: 20141 - RNA, 22 nt, Artificial Sequence
  Synthetic
agcuguguucaaauggaugccc

SEQ ID NO: 20142 - RNA, 23 nt, Artificial Sequence
  Synthetic
uagcuguguucaaauggaugccc

SEQ ID NO: 20143 - RNA, 24 nt, Artificial Sequence
  Synthetic
uuagcuguguucaaauggaugccc

SEQ ID NO: 20144 - RNA, 21 nt, Artificial Sequence
  Synthetic
aacgggcugaggcccacuccc

SEQ ID NO: 20145 - RNA, 22 nt, Artificial Sequence
  Synthetic
aaacgggcugaggcccacuccc

SEQ ID NO: 20146 - RNA, 24 nt, Artificial Sequence
  Synthetic
agaaacgggcugaggcccacuccc

SEQ ID NO: 20147 - RNA, 21 nt, Artificial Sequence
  Synthetic
caugcuguagcucuuguuccc

SEQ ID NO: 20148 - RNA, 22 nt, Artificial Sequence
  Synthetic
ccaugcuguagcucuuguuccc

SEQ ID NO: 20149 - RNA, 23 nt, Artificial Sequence
  Synthetic
cccaugcuguagcucuuguuccc

SEQ ID NO: 20150 - RNA, 24 nt, Artificial Sequence
  Synthetic
ucccaugcuguagcucuuguuccc

SEQ ID NO: 20151 - RNA, 21 nt, Artificial Sequence
  Synthetic
cauagguauuuuccgaaagcc

SEQ ID NO: 20152 - RNA, 22 nt, Artificial Sequence
  Synthetic
ccauagguauuuuccgaaagcc

SEQ ID NO: 20153 - RNA, 23 nt, Artificial Sequence
  Synthetic
cccauagguauuuuccgaaagcc

SEQ ID NO: 20154 - RNA, 24 nt, Artificial Sequence
  Synthetic
ucccauagguauuuuccgaaagcc

SEQ ID NO: 20155 - RNA, 21 nt, Artificial Sequence
  Synthetic
agaugcugcacagauuuggcc

SEQ ID NO: 20156 - RNA, 22 nt, Artificial Sequence
  Synthetic
aagaugcugcacagauuuggcc

SEQ ID NO: 20157 - RNA, 23 nt, Artificial Sequence
  Synthetic
caagaugcugcacagauuuggcc

SEQ ID NO: 20158 - RNA, 24 nt, Artificial Sequence
  Synthetic
ucaagaugcugcacagauuuggcc

SEQ ID NO: 20159 - RNA, 18 nt, Artificial Sequence
  Synthetic
aacgccgcagacacaucc

SEQ ID NO: 20160 - RNA, 19 nt, Artificial Sequence
  Synthetic
aaacgccgcagacacaucc

SEQ ID NO: 20161 - RNA, 20 nt, Artificial Sequence
  Synthetic
aaaacgccgcagacacaucc

SEQ ID NO: 20162 - RNA, 21 nt, Artificial Sequence
  Synthetic
uaaaacgccgcagacacaucc

SEQ ID NO: 20163 - RNA, 22 nt, Artificial Sequence
  Synthetic
auaaaacgccgcagacacaucc

SEQ ID NO: 20164 - RNA, 24 nt, Artificial Sequence
  Synthetic
ugauaaaacgccgcagacacaucc

SEQ ID NO: 20165 - RNA, 21 nt, Artificial Sequence
  Synthetic
ugucuaacaacaguagucucc

SEQ ID NO: 20166 - RNA, 22 nt, Artificial Sequence
  Synthetic
uugucuaacaacaguagucucc

SEQ ID NO: 20167 - RNA, 24 nt, Artificial Sequence
  Synthetic
cguugucuaacaacaguagucucc

SEQ ID NO: 20168 - RNA, 18 nt, Artificial Sequence
  Synthetic
ugaccggggcgaaagucc

SEQ ID NO: 20169 - RNA, 19 nt, Artificial Sequence
  Synthetic
uugaccggggcgaaagucc

SEQ ID NO: 20170 - RNA, 21 nt, Artificial Sequence
  Synthetic
aaacauagagguuccuugagc

SEQ ID NO: 20171 - RNA, 18 nt, Artificial Sequence
  Synthetic
ugagaucuucugcgacgc

SEQ ID NO: 20172 - RNA, 19 nt, Artificial Sequence
  Synthetic
uugagaucuucugcgacgc

SEQ ID NO: 20173 - RNA, 20 nt, Artificial Sequence
  Synthetic
auugagaucuucugcgacgc

SEQ ID NO: 20174 - RNA, 21 nt, Artificial Sequence
  Synthetic
augaacaaaagaugauuaggc

SEQ ID NO: 20175 - RNA, 22 nt, Artificial Sequence
  Synthetic
caugaacaaaagaugauuaggc

SEQ ID NO: 20176 - RNA, 23 nt, Artificial Sequence
  Synthetic
acaugaacaaaagaugauuaggc

SEQ ID NO: 20177 - RNA, 18 nt, Artificial Sequence
  Synthetic
caggucguugaccggggc

SEQ ID NO: 20178 - RNA, 19 nt, Artificial Sequence
  Synthetic
ccaggucguugaccggggc

SEQ ID NO: 20179 - RNA, 20 nt, Artificial Sequence
  Synthetic
uccaggucguugaccggggc

SEQ ID NO: 20180 - RNA, 21 nt, Artificial Sequence
  Synthetic
auccaggucguugaccggggc

SEQ ID NO: 20181 - RNA, 22 nt, Artificial Sequence
  Synthetic
aauccaggucguugaccggggc

SEQ ID NO: 20182 - RNA, 23 nt, Artificial Sequence
  Synthetic
caauccaggucguugaccggggc

SEQ ID NO: 20183 - RNA, 24 nt, Artificial Sequence
  Synthetic
ucaauccaggucguugaccggggc

SEQ ID NO: 20184 - RNA, 21 nt, Artificial Sequence
  Synthetic
ccacaaagguuccgcgcaugc

SEQ ID NO: 20185 - RNA, 23 nt, Artificial Sequence
  Synthetic
agccacaaagguuccgcgcaugc

SEQ ID NO: 20186 - RNA, 18 nt, Artificial Sequence
  Synthetic
agucccaaucgggacugc

SEQ ID NO: 20187 - RNA, 19 nt, Artificial Sequence
  Synthetic
aagucccaaucgggacugc

SEQ ID NO: 20188 - RNA, 21 nt, Artificial Sequence
  Synthetic
ugaagucccaaucgggacugc

SEQ ID NO: 20189 - RNA, 22 nt, Artificial Sequence
  Synthetic
uugaagucccaaucgggacugc

SEQ ID NO: 20190 - RNA, 24 nt, Artificial Sequence
  Synthetic
uguugaagucccaaucgggacugc

SEQ ID NO: 20191 - RNA, 21 nt, Artificial Sequence
  Synthetic
uaaagggacucaagaugcugc

SEQ ID NO: 20192 - RNA, 22 nt, Artificial Sequence
  Synthetic
auaaagggacucaagaugcugc

SEQ ID NO: 20193 - RNA, 23 nt, Artificial Sequence
  Synthetic
uauaaagggacucaagaugcugc

SEQ ID NO: 20194 - RNA, 19 nt, Artificial Sequence
  Synthetic
uggucuccaugcgacgugc

SEQ ID NO: 20195 - RNA, 18 nt, Artificial Sequence
  Synthetic
caccacugaacaaauugc

SEQ ID NO: 20196 - RNA, 20 nt, Artificial Sequence
  Synthetic
cgcaccacugaacaaauugc

SEQ ID NO: 20197 - RNA, 22 nt, Artificial Sequence
  Synthetic
cgggaaguuugcgaaagcaauc

SEQ ID NO: 20198 - RNA, 23 nt, Artificial Sequence
  Synthetic
acgggaaguuugcgaaagcaauc

SEQ ID NO: 20199 - RNA, 24 nt, Artificial Sequence
  Synthetic
cacgggaaguuugcgaaagcaauc

SEQ ID NO: 20200 - RNA, 18 nt, Artificial Sequence
  Synthetic
caccacgagucuagacuc

SEQ ID NO: 20201 - RNA, 19 nt, Artificial Sequence
  Synthetic
ccaccacgagucuagacuc

SEQ ID NO: 20202 - RNA, 20 nt, Artificial Sequence
  Synthetic
uccaccacgagucuagacuc

SEQ ID NO: 20203 - RNA, 18 nt, Artificial Sequence
  Synthetic
cggggaguccgcguaaag

SEQ ID NO: 20204 - RNA, 21 nt, Artificial Sequence
  Synthetic
aggcggggaguccgcguaaag

SEQ ID NO: 20205 - RNA, 22 nt, Artificial Sequence
  Synthetic
caggcggggaguccgcguaaag

SEQ ID NO: 20206 - RNA, 23 nt, Artificial Sequence
  Synthetic
acaggcggggaguccgcguaaag

SEQ ID NO: 20207 - RNA, 24 nt, Artificial Sequence
  Synthetic
cacaggcggggaguccgcguaaag

SEQ ID NO: 20208 - RNA, 18 nt, Artificial Sequence
  Synthetic
cgacgugcagaggugaag

SEQ ID NO: 20209 - RNA, 20 nt, Artificial Sequence
  Synthetic
ugcgacgugcagaggugaag

SEQ ID NO: 20210 - RNA, 21 nt, Artificial Sequence
  Synthetic
augcgacgugcagaggugaag

SEQ ID NO: 20211 - RNA, 22 nt, Artificial Sequence
  Synthetic
caugcgacgugcagaggugaag

SEQ ID NO: 20212 - RNA, 23 nt, Artificial Sequence
  Synthetic
ccaugcgacgugcagaggugaag

SEQ ID NO: 20213 - RNA, 24 nt, Artificial Sequence
  Synthetic
uccaugcgacgugcagaggugaag

SEQ ID NO: 20214 - RNA, 21 nt, Artificial Sequence
  Synthetic
uugcauggugcuggugaacag

SEQ ID NO: 20215 - RNA, 23 nt, Artificial Sequence
  Synthetic
aguugcauggugcuggugaacag

SEQ ID NO: 20216 - RNA, 24 nt, Artificial Sequence
  Synthetic
aaguugcauggugcuggugaacag

SEQ ID NO: 20217 - RNA, 21 nt, Artificial Sequence
  Synthetic
aaauagcuugccugagagcag

SEQ ID NO: 20218 - RNA, 22 nt, Artificial Sequence
  Synthetic
aaaauagcuugccugagagcag

SEQ ID NO: 20219 - RNA, 23 nt, Artificial Sequence
  Synthetic
caaaauagcuugccugagagcag

SEQ ID NO: 20220 - RNA, 24 nt, Artificial Sequence
  Synthetic
acaaaauagcuugccugagagcag

SEQ ID NO: 20221 - RNA, 21 nt, Artificial Sequence
  Synthetic
caagaagaugaggcauagcag

SEQ ID NO: 20222 - RNA, 22 nt, Artificial Sequence
  Synthetic
acaagaagaugaggcauagcag

SEQ ID NO: 20223 - RNA, 23 nt, Artificial Sequence
  Synthetic
aacaagaagaugaggcauagcag

SEQ ID NO: 20224 - RNA, 24 nt, Artificial Sequence
  Synthetic
caacaagaagaugaggcauagcag

SEQ ID NO: 20225 - RNA, 21 nt, Artificial Sequence
  Synthetic
aggcauacaagggcaugagag

SEQ ID NO: 20226 - RNA, 22 nt, Artificial Sequence
  Synthetic
caggcauacaagggcaugagag

SEQ ID NO: 20227 - RNA, 23 nt, Artificial Sequence
  Synthetic
acaggcauacaagggcaugagag

SEQ ID NO: 20228 - RNA, 24 nt, Artificial Sequence
  Synthetic
uacaggcauacaagggcaugagag

SEQ ID NO: 20229 - RNA, 19 nt, Artificial Sequence
  Synthetic
agccccaagcgaccacgag

SEQ ID NO: 20230 - RNA, 21 nt, Artificial Sequence
  Synthetic
agagccccaagcgaccacgag

SEQ ID NO: 20231 - RNA, 22 nt, Artificial Sequence
  Synthetic
cagagccccaagcgaccacgag

SEQ ID NO: 20232 - RNA, 21 nt, Artificial Sequence
  Synthetic
ugguaccccuagaaaauugag

SEQ ID NO: 20233 - RNA, 18 nt, Artificial Sequence
  Synthetic
ccccuucucgccguugag

SEQ ID NO: 20234 - RNA, 20 nt, Artificial Sequence
  Synthetic
ugccccuucucgccguugag

SEQ ID NO: 20235 - RNA, 21 nt, Artificial Sequence
  Synthetic
augccccuucucgccguugag

SEQ ID NO: 20236 - RNA, 22 nt, Artificial Sequence
  Synthetic
caugccccuucucgccguugag

SEQ ID NO: 20237 - RNA, 23 nt, Artificial Sequence
  Synthetic
ccaugccccuucucgccguugag

SEQ ID NO: 20238 - RNA, 24 nt, Artificial Sequence
  Synthetic
cccaugccccuucucgccguugag

SEQ ID NO: 20239 - RNA, 18 nt, Artificial Sequence
  Synthetic
ucaaugggucuauucacg

SEQ ID NO: 20240 - RNA, 19 nt, Artificial Sequence
  Synthetic
aucaaugggucuauucacg

SEQ ID NO: 20241 - RNA, 20 nt, Artificial Sequence
  Synthetic
aaucaaugggucuauucacg

SEQ ID NO: 20242 - RNA, 21 nt, Artificial Sequence
  Synthetic
caaucaaugggucuauucacg

SEQ ID NO: 20243 - RNA, 22 nt, Artificial Sequence
  Synthetic
ccaaucaaugggucuauucacg

SEQ ID NO: 20244 - RNA, 23 nt, Artificial Sequence
  Synthetic
uccaaucaaugggucuauucacg

SEQ ID NO: 20245 - RNA, 24 nt, Artificial Sequence
  Synthetic
uuccaaucaaugggucuauucacg

SEQ ID NO: 20246 - RNA, 18 nt, Artificial Sequence
  Synthetic
uuuuggccaggacacccg

SEQ ID NO: 20247 - RNA, 19 nt, Artificial Sequence
  Synthetic
auuuuggccaggacacccg

SEQ ID NO: 20248 - RNA, 20 nt, Artificial Sequence
  Synthetic
aauuuuggccaggacacccg

SEQ ID NO: 20249 - RNA, 18 nt, Artificial Sequence
  Synthetic
cgaagugcacacgggccg

SEQ ID NO: 20250 - RNA, 20 nt, Artificial Sequence
  Synthetic
agcgaagugcacacgggccg

SEQ ID NO: 20251 - RNA, 21 nt, Artificial Sequence
  Synthetic
aagcgaagugcacacgggccg

SEQ ID NO: 20252 - RNA, 23 nt, Artificial Sequence
  Synthetic
ugaagcgaagugcacacgggccg

SEQ ID NO: 20253 - RNA, 18 nt, Artificial Sequence
  Synthetic
cacgagaggggucguccg

SEQ ID NO: 20254 - RNA, 19 nt, Artificial Sequence
  Synthetic
ccacgagaggggucguccg

SEQ ID NO: 20255 - RNA, 20 nt, Artificial Sequence
  Synthetic
accacgagaggggucguccg

SEQ ID NO: 20256 - RNA, 19 nt, Artificial Sequence
  Synthetic
agacaaaggacgucccgcg

SEQ ID NO: 20257 - RNA, 20 nt, Artificial Sequence
  Synthetic
uagacaaaggacgucccgcg

SEQ ID NO: 20258 - RNA, 23 nt, Artificial Sequence
  Synthetic
cggcagaugagaaggcacaggcg

SEQ ID NO: 20259 - RNA, 24 nt, Artificial Sequence
  Synthetic
ccggcagaugagaaggcacaggcg

SEQ ID NO: 20260 - RNA, 19 nt, Artificial Sequence
  Synthetic
ugcaauuuccguccgaagg

SEQ ID NO: 20261 - RNA, 22 nt, Artificial Sequence
  Synthetic
aggugcaauuuccguccgaagg

SEQ ID NO: 20262 - RNA, 23 nt, Artificial Sequence
  Synthetic
caggugcaauuuccguccgaagg

SEQ ID NO: 20263 - RNA, 24 nt, Artificial Sequence
  Synthetic
acaggugcaauuuccguccgaagg

SEQ ID NO: 20264 - RNA, 21 nt, Artificial Sequence
  Synthetic
agcuccaaauucuuuauaagg

SEQ ID NO: 20265 - RNA, 22 nt, Artificial Sequence
  Synthetic
aagcuccaaauucuuuauaagg

SEQ ID NO: 20266 - RNA, 24 nt, Artificial Sequence
  Synthetic
agaagcuccaaauucuuuauaagg

SEQ ID NO: 20267 - RNA, 21 nt, Artificial Sequence
  Synthetic
cacauucucuggauaguaagg

SEQ ID NO: 20268 - RNA, 22 nt, Artificial Sequence
  Synthetic
ccacauucucuggauaguaagg

SEQ ID NO: 20269 - RNA, 23 nt, Artificial Sequence
  Synthetic
accacauucucuggauaguaagg

SEQ ID NO: 20270 - RNA, 24 nt, Artificial Sequence
  Synthetic
aaccacauucucuggauaguaagg

SEQ ID NO: 20271 - RNA, 21 nt, Artificial Sequence
  Synthetic
  misc_feature (1)..(1): n is a, c, g, or u
naguagaggaguaaagaccgg

SEQ ID NO: 20272 - RNA, 22 nt, Artificial Sequence
  Synthetic
  misc_feature (2)..(2): n is a, c, g, or u
anaguagaggaguaaagaccgg

SEQ ID NO: 20273 - RNA, 23 nt, Artificial Sequence
  Synthetic
  misc_feature (3)..(3): n is a, c, g, or u
uanaguagaggaguaaagaccgg

SEQ ID NO: 20274 - RNA, 21 nt, Artificial Sequence
  Synthetic
uuugggauaaaaccuagcugg

SEQ ID NO: 20275 - RNA, 22 nt, Artificial Sequence
  Synthetic
cuuugggauaaaaccuagcugg

SEQ ID NO: 20276 - RNA, 23 nt, Artificial Sequence
  Synthetic
acuuugggauaaaaccuagcugg

SEQ ID NO: 20277 - RNA, 24 nt, Artificial Sequence
  Synthetic
aacuuugggauaaaaccuagcugg

SEQ ID NO: 20278 - RNA, 18 nt, Artificial Sequence
  Synthetic
uccgcgcaugcgcugaug

SEQ ID NO: 20279 - RNA, 19 nt, Artificial Sequence
  Synthetic
uuccgcgcaugcgcugaug

SEQ ID NO: 20280 - RNA, 21 nt, Artificial Sequence
  Synthetic
aaagcaaucuuugauuuuaug

SEQ ID NO: 20281 - RNA, 23 nt, Artificial Sequence
  Synthetic
cgaaagcaaucuuugauuuuaug

SEQ ID NO: 20282 - RNA, 23 nt, Artificial Sequence
  Synthetic
cgggacugcuggaauuugcucug

SEQ ID NO: 20283 - RNA, 24 nt, Artificial Sequence
  Synthetic
ucgggacugcuggaauuugcucug

SEQ ID NO: 20284 - RNA, 21 nt, Artificial Sequence
  Synthetic
aaugauuaaccacauucucug

SEQ ID NO: 20285 - RNA, 22 nt, Artificial Sequence
  Synthetic
uaaugauuaaccacauucucug

SEQ ID NO: 20286 - RNA, 24 nt, Artificial Sequence
  Synthetic
aguaaugauuaaccacauucucug

SEQ ID NO: 20287 - RNA, 18 nt, Artificial Sequence
  Synthetic
cucucggauccaacagug

SEQ ID NO: 20288 - RNA, 19 nt, Artificial Sequence
  Synthetic
acucucggauccaacagug

SEQ ID NO: 20289 - RNA, 20 nt, Artificial Sequence
  Synthetic
uacucucggauccaacagug

SEQ ID NO: 20290 - RNA, 21 nt, Artificial Sequence
  Synthetic
uuacucucggauccaacagug

SEQ ID NO: 20291 - RNA, 22 nt, Artificial Sequence
  Synthetic
cuuacucucggauccaacagug

SEQ ID NO: 20292 - RNA, 23 nt, Artificial Sequence
  Synthetic
ccuuacucucggauccaacagug

SEQ ID NO: 20293 - RNA, 24 nt, Artificial Sequence
  Synthetic
cccuuacucucggauccaacagug

SEQ ID NO: 20294 - RNA, 21 nt, Artificial Sequence
  Synthetic
aaguuggaggacaggagguug

SEQ ID NO: 20295 - RNA, 22 nt, Artificial Sequence
  Synthetic
caaguuggaggacaggagguug

SEQ ID NO: 20296 - RNA, 23 nt, Artificial Sequence
  Synthetic
acaaguuggaggacaggagguug

SEQ ID NO: 20297 - RNA, 22 nt, Artificial Sequence
  Synthetic
agcaagaguggugcagguuuug

SEQ ID NO: 20298 - RNA, 24 nt, Artificial Sequence
  Synthetic
ugagcaagaguggugcagguuuug

SEQ ID NO: 20299 - RNA, 22 nt, Artificial Sequence
  Synthetic
  misc_feature (19)..(19): n is a, c, g, or u
agaucuucugcgacgcggngau

SEQ ID NO: 20300 - RNA, 24 nt, Artificial Sequence
  Synthetic
  misc_feature (21)..(21): n is a, c, g, or u
ugagaucuucugcgacgcggngau

SEQ ID NO: 20301 - RNA, 21 nt, Artificial Sequence
  Synthetic
cagaagcuccaaauucuuuau

SEQ ID NO: 20302 - RNA, 22 nt, Artificial Sequence
  Synthetic
acagaagcuccaaauucuuuau

SEQ ID NO: 20303 - RNA, 23 nt, Artificial Sequence
  Synthetic
cacagaagcuccaaauucuuuau

SEQ ID NO: 20304 - RNA, 24 nt, Artificial Sequence
  Synthetic
ccacagaagcuccaaauucuuuau

SEQ ID NO: 20305 - RNA, 18 nt, Artificial Sequence
  Synthetic
cagcgguauaaagggacu

SEQ ID NO: 20306 - RNA, 19 nt, Artificial Sequence
  Synthetic
acagcgguauaaagggacu

SEQ ID NO: 20307 - RNA, 20 nt, Artificial Sequence
  Synthetic
aacagcgguauaaagggacu

SEQ ID NO: 20308 - RNA, 21 nt, Artificial Sequence
  Synthetic
uaacagcgguauaaagggacu

SEQ ID NO: 20309 - RNA, 24 nt, Artificial Sequence
  Synthetic
ugguaacagcgguauaaagggacu

SEQ ID NO: 20310 - RNA, 21 nt, Artificial Sequence
  Synthetic
  misc_feature (8)..(8): n is a, c, g, or u
ccacaauncguugacaaaccu

SEQ ID NO: 20311 - RNA, 22 nt, Artificial Sequence
  Synthetic
  misc_feature (9)..(9): n is a, c, g, or u
cccacaauncguugacaaaccu

SEQ ID NO: 20312 - RNA, 23 nt, Artificial Sequence
  Synthetic
  misc_feature (10)..(10): n is a, c, g, or u
acccacaauncguugacaaaccu

SEQ ID NO: 20313 - RNA, 18 nt, Artificial Sequence
  Synthetic
aauuuaugccuacagccu

SEQ ID NO: 20314 - RNA, 19 nt, Artificial Sequence
  Synthetic
caauuuaugccuacagccu

SEQ ID NO: 20315 - RNA, 20 nt, Artificial Sequence
  Synthetic
ccaauuuaugccuacagccu

SEQ ID NO: 20316 - RNA, 18 nt, Artificial Sequence
  Synthetic
cuggugguuguagauccu

SEQ ID NO: 20317 - RNA, 20 nt, Artificial Sequence
  Synthetic
ugcuggugguuguagauccu

SEQ ID NO: 20318 - RNA, 22 nt, Artificial Sequence
  Synthetic
cgugcuggugguuguagauccu

SEQ ID NO: 20319 - RNA, 23 nt, Artificial Sequence
  Synthetic
ccgugcuggugguuguagauccu

SEQ ID NO: 20320 - RNA, 24 nt, Artificial Sequence
  Synthetic
cccgugcuggugguuguagauccu

SEQ ID NO: 20321 - RNA, 22 nt, Artificial Sequence
  Synthetic
  misc_feature (9)..(9): n is a, c, g, or u
agaucucungcugcaggauccu

SEQ ID NO: 20322 - RNA, 23 nt, Artificial Sequence
  Synthetic
  misc_feature (10)..(10): n is a, c, g, or u
uagaucucungcugcaggauccu

SEQ ID NO: 20323 - RNA, 24 nt, Artificial Sequence
  Synthetic
  misc_feature (11)..(11): n is a, c, g, or u
cuagaucucungcugcaggauccu

SEQ ID NO: 20324 - RNA, 18 nt, Artificial Sequence
  Synthetic
aacacgagaagggguccu

SEQ ID NO: 20325 - RNA, 19 nt, Artificial Sequence
  Synthetic
uaacacgagaagggguccu

SEQ ID NO: 20326 - RNA, 18 nt, Artificial Sequence
  Synthetic
  misc_feature (15)..(15): n is a, c, g, or u
cgagcgaaacaagcngcu

SEQ ID NO: 20327 - RNA, 20 nt, Artificial Sequence
  Synthetic
  misc_feature (17)..(17): n is a, c, g, or u
ugcgagcgaaacaagcngcu

SEQ ID NO: 20328 - RNA, 21 nt, Artificial Sequence
  Synthetic
  misc_feature (18)..(18): n is a, c, g, or u
cugcgagcgaaacaagcngcu

SEQ ID NO: 20329 - RNA, 23 nt, Artificial Sequence
  Synthetic
  misc_feature (1)..(1): n is a, c, g, or u
  misc_feature (20)..(20): n is a, c, g, or u
ngcugcgagcgaaacaagcngcu

SEQ ID NO: 20330 - RNA, 24 nt, Artificial Sequence
  Synthetic
  misc_feature (2)..(2): n is a, c, g, or u
  misc_feature (21)..(21): n is a, c, g, or u
cngcugcgagcgaaacaagcngcu

SEQ ID NO: 20331 - RNA, 21 nt, Artificial Sequence
  Synthetic
ucgggacugcuggaauuugcu

SEQ ID NO: 20332 - RNA, 22 nt, Artificial Sequence
  Synthetic
aucgggacugcuggaauuugcu

SEQ ID NO: 20333 - RNA, 23 nt, Artificial Sequence
  Synthetic
aaucgggacugcuggaauuugcu

SEQ ID NO: 20334 - RNA, 24 nt, Artificial Sequence
  Synthetic
caaucgggacugcuggaauuugcu

SEQ ID NO: 20335 - RNA, 21 nt, Artificial Sequence
  Synthetic
aaucgccaagccccagccagu

SEQ ID NO: 20336 - RNA, 22 nt, Artificial Sequence
  Synthetic
caaucgccaagccccagccagu

SEQ ID NO: 20337 - RNA, 23 nt, Artificial Sequence
  Synthetic
ccaaucgccaagccccagccagu

SEQ ID NO: 20338 - RNA, 21 nt, Artificial Sequence
  Synthetic
  misc_feature (4)..(4): n is a, c, g, or u
agcngcuaggaguuccgcagu

SEQ ID NO: 20339 - RNA, 22 nt, Artificial Sequence
  Synthetic
  misc_feature (5)..(5): n is a, c, g, or u
aagcngcuaggaguuccgcagu

SEQ ID NO: 20340 - RNA, 23 nt, Artificial Sequence
  Synthetic
  misc_feature (6)..(6): n is a, c, g, or u
caagcngcuaggaguuccgcagu

SEQ ID NO: 20341 - RNA, 24 nt, Artificial Sequence
  Synthetic
  misc_feature (7)..(7): n is a, c, g, or u
acaagcngcuaggaguuccgcagu

SEQ ID NO: 20342 - RNA, 21 nt, Artificial Sequence
  Synthetic
acgagaagggguccuaggagu

SEQ ID NO: 20343 - RNA, 22 nt, Artificial Sequence
  Synthetic
cacgagaagggguccuaggagu

SEQ ID NO: 20344 - RNA, 23 nt, Artificial Sequence
  Synthetic
acacgagaagggguccuaggagu

SEQ ID NO: 20345 - RNA, 24 nt, Artificial Sequence
  Synthetic
aacacgagaagggguccuaggagu

SEQ ID NO: 20346 - RNA, 19 nt, Artificial Sequence
  Synthetic
agguuuugcagggucccgu

SEQ ID NO: 20347 - RNA, 20 nt, Artificial Sequence
  Synthetic
cagguuuugcagggucccgu

SEQ ID NO: 20348 - RNA, 22 nt, Artificial Sequence
  Synthetic
ugcagguuuugcagggucccgu

SEQ ID NO: 20349 - RNA, 19 nt, Artificial Sequence
  Synthetic
cguugccgagcaacggggu

SEQ ID NO: 20350 - RNA, 20 nt, Artificial Sequence
  Synthetic
ccguugccgagcaacggggu

SEQ ID NO: 20351 - RNA, 22 nt, Artificial Sequence
  Synthetic
agaggugaaaaaguugcauggu

SEQ ID NO: 20352 - RNA, 23 nt, Artificial Sequence
  Synthetic
cagaggugaaaaaguugcauggu

SEQ ID NO: 20353 - RNA, 21 nt, Artificial Sequence
  Synthetic
caccccagaaggccaccgugu

SEQ ID NO: 20354 - RNA, 22 nt, Artificial Sequence
  Synthetic
ccaccccagaaggccaccgugu

SEQ ID NO: 20355 - RNA, 23 nt, Artificial Sequence
  Synthetic
uccaccccagaaggccaccgugu

SEQ ID NO: 20356 - RNA, 24 nt, Artificial Sequence
  Synthetic
cuccaccccagaaggccaccgugu

SEQ ID NO: 20357 - RNA, 21 nt, Artificial Sequence
  Synthetic
accauuuuguuuuagcugugu

SEQ ID NO: 20358 - RNA, 22 nt, Artificial Sequence
  Synthetic
caccauuuuguuuuagcugugu

SEQ ID NO: 20359 - RNA, 23 nt, Artificial Sequence
  Synthetic
ccaccauuuuguuuuagcugugu

SEQ ID NO: 20360 - RNA, 24 nt, Artificial Sequence
  Synthetic
cccaccauuuuguuuuagcugugu

SEQ ID NO: 20361 - RNA, 23 nt, Artificial Sequence
  Synthetic
uggccaauuguccuuguuugugu

SEQ ID NO: 20362 - RNA, 24 nt, Artificial Sequence
  Synthetic
uuggccaauuguccuuguuugugu

SEQ ID NO: 20363 - RNA, 22 nt, Artificial Sequence
  Synthetic
  misc_feature (13)..(13): n is a, c, g, or u
agucuagacucunugguauugu

SEQ ID NO: 20364 - RNA, 24 nt, Artificial Sequence
  Synthetic
  misc_feature (15)..(15): n is a, c, g, or u
cgagucuagacucunugguauugu

SEQ ID NO: 20365 - RNA, 21 nt, Artificial Sequence
  Synthetic
uggaucugguggcgagguugu

SEQ ID NO: 20366 - RNA, 24 nt, Artificial Sequence
  Synthetic
agguggaucugguggcgagguugu

SEQ ID NO: 20367 - RNA, 18 nt, Artificial Sequence
  Synthetic
ccagucuucgagaagauu

SEQ ID NO: 20368 - RNA, 19 nt, Artificial Sequence
  Synthetic
cccagucuucgagaagauu

SEQ ID NO: 20369 - RNA, 20 nt, Artificial Sequence
  Synthetic
ccccagucuucgagaagauu

SEQ ID NO: 20370 - RNA, 21 nt, Artificial Sequence
  Synthetic
uccccagucuucgagaagauu

SEQ ID NO: 20371 - RNA, 21 nt, Artificial Sequence
  Synthetic
aagggaaguauuuaguaacuu

SEQ ID NO: 20372 - RNA, 22 nt, Artificial Sequence
  Synthetic
aaagggaaguauuuaguaacuu

SEQ ID NO: 20373 - RNA, 23 nt, Artificial Sequence
  Synthetic
caaagggaaguauuuaguaacuu

SEQ ID NO: 20374 - RNA, 24 nt, Artificial Sequence
  Synthetic
ccaaagggaaguauuuaguaacuu

SEQ ID NO: 20375 - RNA, 21 nt, Artificial Sequence
  Synthetic
accgguaaaguuucccaccuu

SEQ ID NO: 20376 - RNA, 23 nt, Artificial Sequence
  Synthetic
agaccgguaaaguuucccaccuu

SEQ ID NO: 20377 - RNA, 24 nt, Artificial Sequence
  Synthetic
aagaccgguaaaguuucccaccuu

SEQ ID NO: 20378 - RNA, 18 nt, Artificial Sequence
  Synthetic
acacgggcaacauaccuu

SEQ ID NO: 20379 - RNA, 19 nt, Artificial Sequence
  Synthetic
cacacgggcaacauaccuu

SEQ ID NO: 20380 - RNA, 20 nt, Artificial Sequence
  Synthetic
acacacgggcaacauaccuu

SEQ ID NO: 20381 - RNA, 23 nt, Artificial Sequence
  Synthetic
aggacacacgggcaacauaccuu

SEQ ID NO: 20382 - RNA, 21 nt, Artificial Sequence
  Synthetic
cgagaaaacaaaagccugcuu

SEQ ID NO: 20383 - RNA, 24 nt, Artificial Sequence
  Synthetic
uggcgagaaaacaaaagccugcuu

SEQ ID NO: 20384 - RNA, 21 nt, Artificial Sequence
  Synthetic
cagggucccgugcuggugguu

SEQ ID NO: 20385 - RNA, 23 nt, Artificial Sequence
  Synthetic
ugcagggucccgugcuggugguu

SEQ ID NO: 20386 - RNA, 24 nt, Artificial Sequence
  Synthetic
uugcagggucccgugcuggugguu

SEQ ID NO: 20387 - RNA, 19 nt, Artificial Sequence
  Synthetic
ugauaggauaggggcauuu

SEQ ID NO: 20388 - RNA, 20 nt, Artificial Sequence
  Synthetic
uugauaggauaggggcauuu

SEQ ID NO: 20389 - RNA, 22 nt, Artificial Sequence
  Synthetic
uguugauaggauaggggcauuu

SEQ ID NO: 20390 - RNA, 24 nt, Artificial Sequence
  Synthetic
aguguugauaggauaggggcauuu

SEQ ID NO: 20391 - RNA, 22 nt, Artificial Sequence
  Synthetic
aggacaauuggccaauggcaaa

SEQ ID NO: 20392 - RNA, 23 nt, Artificial Sequence
  Synthetic
aaggacaauuggccaauggcaaa

SEQ ID NO: 20393 - RNA, 24 nt, Artificial Sequence
  Synthetic
caaggacaauuggccaauggcaaa

SEQ ID NO: 20394 - RNA, 21 nt, Artificial Sequence
  Synthetic
uuugcagccccuuuuacucaa

SEQ ID NO: 20395 - RNA, 22 nt, Artificial Sequence
  Synthetic
cuuugcagccccuuuuacucaa

SEQ ID NO: 20396 - RNA, 21 nt, Artificial Sequence
  Synthetic
auuaggaggcuguaggcauaa

SEQ ID NO: 20397 - RNA, 22 nt, Artificial Sequence
  Synthetic
uauuaggaggcuguaggcauaa

SEQ ID NO: 20398 - RNA, 24 nt, Artificial Sequence
  Synthetic
uguauuaggaggcuguaggcauaa

SEQ ID NO: 20399 - RNA, 22 nt, Artificial Sequence
  Synthetic
cgguccaggguucacaccccca

SEQ ID NO: 20400 - RNA, 23 nt, Artificial Sequence
  Synthetic
ucgguccaggguucacaccccca

SEQ ID NO: 20401 - RNA, 24 nt, Artificial Sequence
  Synthetic
uucgguccaggguucacaccccca

SEQ ID NO: 20402 - RNA, 22 nt, Artificial Sequence
  Synthetic
agggacacacauccacaggcca

SEQ ID NO: 20403 - RNA, 23 nt, Artificial Sequence
  Synthetic
aagggacacacauccacaggcca

SEQ ID NO: 20404 - RNA, 24 nt, Artificial Sequence
  Synthetic
uaagggacacacauccacaggcca

SEQ ID NO: 20405 - RNA, 18 nt, Artificial Sequence
  Synthetic
  misc_feature (2)..(2): n is a, c, g, or u
cngcuuguuucgcucgca

SEQ ID NO: 20406 - RNA, 20 nt, Artificial Sequence
  Synthetic
  misc_feature (4)..(4): n is a, c, g, or u
agcngcuuguuucgcucgca

SEQ ID NO: 20407 - RNA, 21 nt, Artificial Sequence
  Synthetic
  misc_feature (5)..(5): n is a, c, g, or u
uagcngcuuguuucgcucgca

SEQ ID NO: 20408 - RNA, 22 nt, Artificial Sequence
  Synthetic
  misc_feature (6)..(6): n is a, c, g, or u
cuagcngcuuguuucgcucgca

SEQ ID NO: 20409 - RNA, 23 nt, Artificial Sequence
  Synthetic
  misc_feature (7)..(7): n is a, c, g, or u
ccuagcngcuuguuucgcucgca

SEQ ID NO: 20410 - RNA, 24 nt, Artificial Sequence
  Synthetic
  misc_feature (8)..(8): n is a, c, g, or u
uccuagcngcuuguuucgcucgca

SEQ ID NO: 20411 - RNA, 22 nt, Artificial Sequence
  Synthetic
  misc_feature (12)..(12): n is a, c, g, or u
agaucucaaucnccgcgucgca

SEQ ID NO: 20412 - RNA, 23 nt, Artificial Sequence
  Synthetic
  misc_feature (13)..(13): n is a, c, g, or u
aagaucucaaucnccgcgucgca

SEQ ID NO: 20413 - RNA, 21 nt, Artificial Sequence
  Synthetic
uguuaguauuccuuggacuca

SEQ ID NO: 20414 - RNA, 22 nt, Artificial Sequence
  Synthetic
auguuaguauuccuuggacuca

SEQ ID NO: 20415 - RNA, 23 nt, Artificial Sequence
  Synthetic
aauguuaguauuccuuggacuca

SEQ ID NO: 20416 - RNA, 24 nt, Artificial Sequence
  Synthetic
caauguuaguauuccuuggacuca

SEQ ID NO: 20417 - RNA, 21 nt, Artificial Sequence
  Synthetic
ugacauucacuugcaucaaga

SEQ ID NO: 20418 - RNA, 22 nt, Artificial Sequence
  Synthetic
cugacauucacuugcaucaaga

SEQ ID NO: 20419 - RNA, 23 nt, Artificial Sequence
  Synthetic
ccugacauucacuugcaucaaga

SEQ ID NO: 20420 - RNA, 24 nt, Artificial Sequence
  Synthetic
uccugacauucacuugcaucaaga

SEQ ID NO: 20421 - RNA, 21 nt, Artificial Sequence
  Synthetic
caguuggauccacuauucaga

SEQ ID NO: 20422 - RNA, 22 nt, Artificial Sequence
  Synthetic
ccaguuggauccacuauucaga

SEQ ID NO: 20423 - RNA, 23 nt, Artificial Sequence
  Synthetic
accaguuggauccacuauucaga

SEQ ID NO: 20424 - RNA, 24 nt, Artificial Sequence
  Synthetic
caccaguuggauccacuauucaga

SEQ ID NO: 20425 - RNA, 21 nt, Artificial Sequence
  Synthetic
  misc_feature (9)..(9): n is a, c, g, or u
ccugcagcnagagaucuagua

SEQ ID NO: 20426 - RNA, 22 nt, Artificial Sequence
  Synthetic
  misc_feature (10)..(10): n is a, c, g, or u
uccugcagcnagagaucuagua

SEQ ID NO: 20427 - RNA, 23 nt, Artificial Sequence
  Synthetic
  misc_feature (11)..(11): n is a, c, g, or u
auccugcagcnagagaucuagua

SEQ ID NO: 20428 - RNA, 21 nt, Artificial Sequence
  Synthetic
cuuacaaggccuuucucugua

SEQ ID NO: 20429 - RNA, 22 nt, Artificial Sequence
  Synthetic
acuuacaaggccuuucucugua

SEQ ID NO: 20430 - RNA, 23 nt, Artificial Sequence
  Synthetic
aacuuacaaggccuuucucugua

SEQ ID NO: 20431 - RNA, 24 nt, Artificial Sequence
  Synthetic
caacuuacaaggccuuucucugua

SEQ ID NO: 20432 - RNA, 21 nt, Artificial Sequence
  Synthetic
cuagguuuuaucccaaaguua

SEQ ID NO: 20433 - RNA, 23 nt, Artificial Sequence
  Synthetic
agcuagguuuuaucccaaaguua

SEQ ID NO: 20434 - RNA, 24 nt, Artificial Sequence
  Synthetic
cagcuagguuuuaucccaaaguua

SEQ ID NO: 20435 - RNA, 21 nt, Artificial Sequence
  Synthetic
uccugggugggcaauaauuua

SEQ ID NO: 20436 - RNA, 22 nt, Artificial Sequence
  Synthetic
uuccugggugggcaauaauuua

SEQ ID NO: 20437 - RNA, 23 nt, Artificial Sequence
  Synthetic
cuuccugggugggcaauaauuua

SEQ ID NO: 20438 - RNA, 21 nt, Artificial Sequence
  Synthetic
ugggcuuugcagccccuuuua

SEQ ID NO: 20439 - RNA, 22 nt, Artificial Sequence
  Synthetic
uugggcuuugcagccccuuuua

SEQ ID NO: 20440 - RNA, 23 nt, Artificial Sequence
  Synthetic
uuugggcuuugcagccccuuuua

SEQ ID NO: 20441 - RNA, 24 nt, Artificial Sequence
  Synthetic
uuuugggcuuugcagccccuuuua

SEQ ID NO: 20442 - RNA, 23 nt, Artificial Sequence
  Synthetic
cggaggucaggaagaaagccaac

SEQ ID NO: 20443 - RNA, 24 nt, Artificial Sequence
  Synthetic
ucggaggucaggaagaaagccaac

SEQ ID NO: 20444 - RNA, 21 nt, Artificial Sequence
  Synthetic
ucaauuuucuagggguaccac

SEQ ID NO: 20445 - RNA, 22 nt, Artificial Sequence
  Synthetic
cucaauuuucuagggguaccac

SEQ ID NO: 20446 - RNA, 23 nt, Artificial Sequence
  Synthetic
ucucaauuuucuagggguaccac

SEQ ID NO: 20447 - RNA, 24 nt, Artificial Sequence
  Synthetic
cucucaauuuucuagggguaccac

SEQ ID NO: 20448 - RNA, 18 nt, Artificial Sequence
  Synthetic
cucccucgccucgcagac

SEQ ID NO: 20449 - RNA, 19 nt, Artificial Sequence
  Synthetic
acucccucgccucgcagac

SEQ ID NO: 20450 - RNA, 20 nt, Artificial Sequence
  Synthetic
aacucccucgccucgcagac

SEQ ID NO: 20451 - RNA, 22 nt, Artificial Sequence
  Synthetic
agaacucccucgccucgcagac

SEQ ID NO: 20452 - RNA, 23 nt, Artificial Sequence
  Synthetic
aagaacucccucgccucgcagac

SEQ ID NO: 20453 - RNA, 18 nt, Artificial Sequence
  Synthetic
uucgccccggucaacgac

SEQ ID NO: 20454 - RNA, 19 nt, Artificial Sequence
  Synthetic
uuucgccccggucaacgac

SEQ ID NO: 20455 - RNA, 20 nt, Artificial Sequence
  Synthetic
cuuucgccccggucaacgac

SEQ ID NO: 20456 - RNA, 18 nt, Artificial Sequence
  Synthetic
uguaccaaaccuucggac

SEQ ID NO: 20457 - RNA, 19 nt, Artificial Sequence
  Synthetic
cuguaccaaaccuucggac

SEQ ID NO: 20458 - RNA, 22 nt, Artificial Sequence
  Synthetic
cgacaccgcuucagcccucuac

SEQ ID NO: 20459 - RNA, 23 nt, Artificial Sequence
  Synthetic
ucgacaccgcuucagcccucuac

SEQ ID NO: 20460 - RNA, 24 nt, Artificial Sequence
  Synthetic
cucgacaccgcuucagcccucuac

SEQ ID NO: 20461 - RNA, 21 nt, Artificial Sequence
  Synthetic
cucugggauucuuuccagacc

SEQ ID NO: 20462 - RNA, 22 nt, Artificial Sequence
  Synthetic
ccucugggauucuuuccagacc

SEQ ID NO: 20463 - RNA, 23 nt, Artificial Sequence
  Synthetic
uccucugggauucuuuccagacc

SEQ ID NO: 20464 - RNA, 24 nt, Artificial Sequence
  Synthetic
auccucugggauucuuuccagacc

SEQ ID NO: 20465 - RNA, 22 nt, Artificial Sequence
  Synthetic
agauugcuuucgcaaacuuccc

SEQ ID NO: 20466 - RNA, 23 nt, Artificial Sequence
  Synthetic
aagauugcuuucgcaaacuuccc

SEQ ID NO: 20467 - RNA, 24 nt, Artificial Sequence
  Synthetic
aaagauugcuuucgcaaacuuccc

SEQ ID NO: 20468 - RNA, 21 nt, Artificial Sequence
  Synthetic
uucaagccuccaagcugugcc

SEQ ID NO: 20469 - RNA, 23 nt, Artificial Sequence
  Synthetic
uguucaagccuccaagcugugcc

SEQ ID NO: 20470 - RNA, 24 nt, Artificial Sequence
  Synthetic
cuguucaagccuccaagcugugcc

SEQ ID NO: 20471 - RNA, 19 nt, Artificial Sequence
  Synthetic
ugccagcuagguuuuaucc

SEQ ID NO: 20472 - RNA, 20 nt, Artificial Sequence
  Synthetic
augccagcuagguuuuaucc

SEQ ID NO: 20473 - RNA, 21 nt, Artificial Sequence
  Synthetic
uaugccagcuagguuuuaucc

SEQ ID NO: 20474 - RNA, 22 nt, Artificial Sequence
  Synthetic
uuaugccagcuagguuuuaucc

SEQ ID NO: 20475 - RNA, 23 nt, Artificial Sequence
  Synthetic
auuaugccagcuagguuuuaucc

SEQ ID NO: 20476 - RNA, 24 nt, Artificial Sequence
  Synthetic
aauuaugccagcuagguuuuaucc

SEQ ID NO: 20477 - RNA, 21 nt, Artificial Sequence
  Synthetic
ccacuauucagagcaaauucc

SEQ ID NO: 20478 - RNA, 22 nt, Artificial Sequence
  Synthetic
uccacuauucagagcaaauucc

SEQ ID NO: 20479 - RNA, 23 nt, Artificial Sequence
  Synthetic
auccacuauucagagcaaauucc

SEQ ID NO: 20480 - RNA, 21 nt, Artificial Sequence
  Synthetic
ccagauccaccuccugcuucc

SEQ ID NO: 20481 - RNA, 22 nt, Artificial Sequence
  Synthetic
accagauccaccuccugcuucc

SEQ ID NO: 20482 - RNA, 23 nt, Artificial Sequence
  Synthetic
caccagauccaccuccugcuucc

SEQ ID NO: 20483 - RNA, 24 nt, Artificial Sequence
  Synthetic
ccaccagauccaccuccugcuucc

SEQ ID NO: 20484 - RNA, 21 nt, Artificial Sequence
  Synthetic
agaggacucuuggacuuucgc

SEQ ID NO: 20485 - RNA, 22 nt, Artificial Sequence
  Synthetic
aagaggacucuuggacuuucgc

SEQ ID NO: 20486 - RNA, 23 nt, Artificial Sequence
  Synthetic
uaagaggacucuuggacuuucgc

SEQ ID NO: 20487 - RNA, 24 nt, Artificial Sequence
  Synthetic
auaagaggacucuuggacuuucgc

SEQ ID NO: 20488 - RNA, 21 nt, Artificial Sequence
  Synthetic
aacaagguaggagugggaggc

SEQ ID NO: 20489 - RNA, 22 nt, Artificial Sequence
  Synthetic
aaacaagguaggagugggaggc

SEQ ID NO: 20490 - RNA, 23 nt, Artificial Sequence
  Synthetic
caaacaagguaggagugggaggc

SEQ ID NO: 20491 - RNA, 21 nt, Artificial Sequence
  Synthetic
uuguauuaggaggcuguaggc

SEQ ID NO: 20492 - RNA, 22 nt, Artificial Sequence
  Synthetic
uuuguauuaggaggcuguaggc

SEQ ID NO: 20493 - RNA, 23 nt, Artificial Sequence
  Synthetic
cuuuguauuaggaggcuguaggc

SEQ ID NO: 20494 - RNA, 24 nt, Artificial Sequence
  Synthetic
ucuuuguauuaggaggcuguaggc

SEQ ID NO: 20495 - RNA, 23 nt, Artificial Sequence
  Synthetic
aggaacauauugugcauaaaauc

SEQ ID NO: 20496 - RNA, 24 nt, Artificial Sequence
  Synthetic
caggaacauauugugcauaaaauc

SEQ ID NO: 20497 - RNA, 21 nt, Artificial Sequence
  Synthetic
caccuccugcuuccaccaauc

SEQ ID NO: 20498 - RNA, 22 nt, Artificial Sequence
  Synthetic
ccaccuccugcuuccaccaauc

SEQ ID NO: 20499 - RNA, 23 nt, Artificial Sequence
  Synthetic
uccaccuccugcuuccaccaauc

SEQ ID NO: 20500 - RNA, 24 nt, Artificial Sequence
  Synthetic
auccaccuccugcuuccaccaauc

SEQ ID NO: 20501 - RNA, 18 nt, Artificial Sequence
  Synthetic
aauucgcaguccccaauc

SEQ ID NO: 20502 - RNA, 19 nt, Artificial Sequence
  Synthetic
aaauucgcaguccccaauc

SEQ ID NO: 20503 - RNA, 20 nt, Artificial Sequence
  Synthetic
aaaauucgcaguccccaauc

SEQ ID NO: 20504 - RNA, 21 nt, Artificial Sequence
  Synthetic
caaaauucgcaguccccaauc

SEQ ID NO: 20505 - RNA, 22 nt, Artificial Sequence
  Synthetic
ccaaaauucgcaguccccaauc

SEQ ID NO: 20506 - RNA, 24 nt, Artificial Sequence
  Synthetic
ugggggccaaaucugugcagcauc

SEQ ID NO: 20507 - RNA, 21 nt, Artificial Sequence
  Synthetic
uccuggccaaaauucgcaguc

SEQ ID NO: 20508 - RNA, 23 nt, Artificial Sequence
  Synthetic
uguccuggccaaaauucgcaguc

SEQ ID NO: 20509 - RNA, 21 nt, Artificial Sequence
  Synthetic
ugcccguguguccucuacuuc

SEQ ID NO: 20510 - RNA, 22 nt, Artificial Sequence
  Synthetic
uugcccguguguccucuacuuc

SEQ ID NO: 20511 - RNA, 24 nt, Artificial Sequence
  Synthetic
uguugcccguguguccucuacuuc

SEQ ID NO: 20512 - RNA, 21 nt, Artificial Sequence
  Synthetic
cacccccacacgguggccuuc

SEQ ID NO: 20513 - RNA, 22 nt, Artificial Sequence
  Synthetic
acacccccacacgguggccuuc

SEQ ID NO: 20514 - RNA, 23 nt, Artificial Sequence
  Synthetic
cacacccccacacgguggccuuc

SEQ ID NO: 20515 - RNA, 24 nt, Artificial Sequence
  Synthetic
ucacacccccacacgguggccuuc

SEQ ID NO: 20516 - RNA, 22 nt, Artificial Sequence
  Synthetic
aguuuacuagugcaauuuguuc

SEQ ID NO: 20517 - RNA, 23 nt, Artificial Sequence
  Synthetic
caguuuacuagugcaauuuguuc

SEQ ID NO: 20518 - RNA, 24 nt, Artificial Sequence
  Synthetic
ucaguuuacuagugcaauuuguuc

SEQ ID NO: 20519 - RNA, 21 nt, Artificial Sequence
  Synthetic
ugggacuucaacacaaacaag

SEQ ID NO: 20520 - RNA, 22 nt, Artificial Sequence
  Synthetic
uugggacuucaacacaaacaag

SEQ ID NO: 20521 - RNA, 23 nt, Artificial Sequence
  Synthetic
auugggacuucaacacaaacaag

SEQ ID NO: 20522 - RNA, 22 nt, Artificial Sequence
  Synthetic
  misc_feature (10)..(10): n is a, c, g, or u
cgauugaaanuaauuaugccag

SEQ ID NO: 20523 - RNA, 23 nt, Artificial Sequence
  Synthetic
  misc_feature (11)..(11): n is a, c, g, or u
acgauugaaanuaauuaugccag

SEQ ID NO: 20524 - RNA, 21 nt, Artificial Sequence
  Synthetic
  misc_feature (6)..(7): n is a, c, g, or u
cgccunncguuccggccgacg

SEQ ID NO: 20525 - RNA, 22 nt, Artificial Sequence
  Synthetic
  misc_feature (7)..(8): n is a, c, g, or u
ccgccunncguuccggccgacg

SEQ ID NO: 20526 - RNA, 23 nt, Artificial Sequence
  Synthetic
  misc_feature (8)..(9): n is a, c, g, or u
uccgccunncguuccggccgacg

SEQ ID NO: 20527 - RNA, 24 nt, Artificial Sequence
  Synthetic
  misc_feature (9)..(10): n is a, c, g, or u
cuccgccunncguuccggccgacg

SEQ ID NO: 20528 - RNA, 19 nt, Artificial Sequence
  Synthetic
ugucuacgucccgucggcg

SEQ ID NO: 20529 - RNA, 20 nt, Artificial Sequence
  Synthetic
uugucuacgucccgucggcg

SEQ ID NO: 20530 - RNA, 18 nt, Artificial Sequence
  Synthetic
aacuuguccuggcuaucg

SEQ ID NO: 20531 - RNA, 19 nt, Artificial Sequence
  Synthetic
caacuuguccuggcuaucg

SEQ ID NO: 20532 - RNA, 20 nt, Artificial Sequence
  Synthetic
ccaacuuguccuggcuaucg

SEQ ID NO: 20533 - RNA, 18 nt, Artificial Sequence
  Synthetic
caucaucuugggcuuucg

SEQ ID NO: 20534 - RNA, 19 nt, Artificial Sequence
  Synthetic
ccaucaucuugggcuuucg

SEQ ID NO: 20535 - RNA, 20 nt, Artificial Sequence
  Synthetic
cccaucaucuugggcuuucg

SEQ ID NO: 20536 - RNA, 21 nt, Artificial Sequence
  Synthetic
ucccaucaucuugggcuuucg

SEQ ID NO: 20537 - RNA, 22 nt, Artificial Sequence
  Synthetic
aucccaucaucuugggcuuucg

SEQ ID NO: 20538 - RNA, 23 nt, Artificial Sequence
  Synthetic
caucccaucaucuugggcuuucg

SEQ ID NO: 20539 - RNA, 24 nt, Artificial Sequence
  Synthetic
ccaucccaucaucuugggcuuucg

SEQ ID NO: 20540 - RNA, 21 nt, Artificial Sequence
  Synthetic
acacaguuccaccaagcacug

SEQ ID NO: 20541 - RNA, 22 nt, Artificial Sequence
  Synthetic
aacacaguuccaccaagcacug

SEQ ID NO: 20542 - RNA, 23 nt, Artificial Sequence
  Synthetic
caacacaguuccaccaagcacug

SEQ ID NO: 20543 - RNA, 24 nt, Artificial Sequence
  Synthetic
ucaacacaguuccaccaagcacug

SEQ ID NO: 20544 - RNA, 21 nt, Artificial Sequence
  Synthetic
caugcaacuuuuucaccucug

SEQ ID NO: 20545 - RNA, 22 nt, Artificial Sequence
  Synthetic
ccaugcaacuuuuucaccucug

SEQ ID NO: 20546 - RNA, 23 nt, Artificial Sequence
  Synthetic
accaugcaacuuuuucaccucug

SEQ ID NO: 20547 - RNA, 24 nt, Artificial Sequence
  Synthetic
caccaugcaacuuuuucaccucug

SEQ ID NO: 20548 - RNA, 21 nt, Artificial Sequence
  Synthetic
caacacaaacaaggacaauug

SEQ ID NO: 20549 - RNA, 22 nt, Artificial Sequence
  Synthetic
ucaacacaaacaaggacaauug

SEQ ID NO: 20550 - RNA, 23 nt, Artificial Sequence
  Synthetic
uucaacacaaacaaggacaauug

SEQ ID NO: 20551 - RNA, 24 nt, Artificial Sequence
  Synthetic
cuucaacacaaacaaggacaauug

SEQ ID NO: 20552 - RNA, 19 nt, Artificial Sequence
  Synthetic
cggucaacgaccuggauug

SEQ ID NO: 20553 - RNA, 20 nt, Artificial Sequence
  Synthetic
ccggucaacgaccuggauug

SEQ ID NO: 20554 - RNA, 21 nt, Artificial Sequence
  Synthetic
cgugaauagacccauugauug

SEQ ID NO: 20555 - RNA, 22 nt, Artificial Sequence
  Synthetic
ccgugaauagacccauugauug

SEQ ID NO: 20556 - RNA, 23 nt, Artificial Sequence
  Synthetic
cccgugaauagacccauugauug

SEQ ID NO: 20557 - RNA, 24 nt, Artificial Sequence
  Synthetic
ucccgugaauagacccauugauug

SEQ ID NO: 20558 - RNA, 21 nt, Artificial Sequence
  Synthetic
ucaguuuacuagugcaauuug

SEQ ID NO: 20559 - RNA, 22 nt, Artificial Sequence
  Synthetic
cucaguuuacuagugcaauuug

SEQ ID NO: 20560 - RNA, 20 nt, Artificial Sequence
  Synthetic
cggcaacggccaggccuuug

SEQ ID NO: 20561 - RNA, 21 nt, Artificial Sequence
  Synthetic
ucggcaacggccaggccuuug

SEQ ID NO: 20562 - RNA, 22 nt, Artificial Sequence
  Synthetic
cucggcaacggccaggccuuug

SEQ ID NO: 20563 - RNA, 24 nt, Artificial Sequence
  Synthetic
ugcucggcaacggccaggccuuug

SEQ ID NO: 20564 - RNA, 21 nt, Artificial Sequence
  Synthetic
cucaaucuccagcuucccaau

SEQ ID NO: 20565 - RNA, 22 nt, Artificial Sequence
  Synthetic
ucucaaucuccagcuucccaau

SEQ ID NO: 20566 - RNA, 23 nt, Artificial Sequence
  Synthetic
aucucaaucuccagcuucccaau

SEQ ID NO: 20567 - RNA, 18 nt, Artificial Sequence
  Synthetic
  misc_feature (2)..(2): n is a, c, g, or u
cnccgcgucgcagaagau

SEQ ID NO: 20568 - RNA, 19 nt, Artificial Sequence
  Synthetic
  misc_feature (3)..(3): n is a, c, g, or u
ucnccgcgucgcagaagau

SEQ ID NO: 20569 - RNA, 20 nt, Artificial Sequence
  Synthetic
  misc_feature (4)..(4): n is a, c, g, or u
aucnccgcgucgcagaagau

SEQ ID NO: 20570 - RNA, 21 nt, Artificial Sequence
  Synthetic
  misc_feature (5)..(5): n is a, c, g, or u
aaucnccgcgucgcagaagau

SEQ ID NO: 20571 - RNA, 22 nt, Artificial Sequence
  Synthetic
  misc_feature (6)..(6): n is a, c, g, or u
caaucnccgcgucgcagaagau

SEQ ID NO: 20572 - RNA, 23 nt, Artificial Sequence
  Synthetic
  misc_feature (7)..(7): n is a, c, g, or u
ucaaucnccgcgucgcagaagau

SEQ ID NO: 20573 - RNA, 24 nt, Artificial Sequence
  Synthetic
  misc_feature (8)..(8): n is a, c, g, or u
cucaaucnccgcgucgcagaagau

SEQ ID NO: 20574 - RNA, 18 nt, Artificial Sequence
  Synthetic
cgccucgcagacgaagau

SEQ ID NO: 20575 - RNA, 19 nt, Artificial Sequence
  Synthetic
ucgccucgcagacgaagau

SEQ ID NO: 20576 - RNA, 20 nt, Artificial Sequence
  Synthetic
cucgccucgcagacgaagau

SEQ ID NO: 20577 - RNA, 21 nt, Artificial Sequence
  Synthetic
acuaaauacuucccuuuggau

SEQ ID NO: 20578 - RNA, 22 nt, Artificial Sequence
  Synthetic
uacuaaauacuucccuuuggau

SEQ ID NO: 20579 - RNA, 23 nt, Artificial Sequence
  Synthetic
uuacuaaauacuucccuuuggau

SEQ ID NO: 20580 - RNA, 22 nt, Artificial Sequence
  Synthetic
ugggcuuucggaaaauaccuau

SEQ ID NO: 20581 - RNA, 23 nt, Artificial Sequence
  Synthetic
uugggcuuucggaaaauaccuau

SEQ ID NO: 20582 - RNA, 24 nt, Artificial Sequence
  Synthetic
cuugggcuuucggaaaauaccuau

SEQ ID NO: 20583 - RNA, 21 nt, Artificial Sequence
  Synthetic
aaaguuacuaaauacuucccu

SEQ ID NO: 20584 - RNA, 22 nt, Artificial Sequence
  Synthetic
caaaguuacuaaauacuucccu

SEQ ID NO: 20585 - RNA, 23 nt, Artificial Sequence
  Synthetic
ccaaaguuacuaaauacuucccu

SEQ ID NO: 20586 - RNA, 24 nt, Artificial Sequence
  Synthetic
cccaaaguuacuaaauacuucccu

SEQ ID NO: 20587 - RNA, 21 nt, Artificial Sequence
  Synthetic
uuucuuguugacaaaaauccu

SEQ ID NO: 20588 - RNA, 23 nt, Artificial Sequence
  Synthetic
uguuucuuguugacaaaaauccu

SEQ ID NO: 20589 - RNA, 24 nt, Artificial Sequence
  Synthetic
agggcuuucccccacugucuggcu

SEQ ID NO: 20590 - RNA, 18 nt, Artificial Sequence
  Synthetic
ccugcggacgaccccucu

SEQ ID NO: 20591 - RNA, 19 nt, Artificial Sequence
  Synthetic
uccugcggacgaccccucu

SEQ ID NO: 20592 - RNA, 20 nt, Artificial Sequence
  Synthetic
auccugcggacgaccccucu

SEQ ID NO: 20593 - RNA, 21 nt, Artificial Sequence
  Synthetic
aauccugcggacgaccccucu

SEQ ID NO: 20594 - RNA, 23 nt, Artificial Sequence
  Synthetic
ugaauccugcggacgaccccucu

SEQ ID NO: 20595 - RNA, 24 nt, Artificial Sequence
  Synthetic
cugaauccugcggacgaccccucu

SEQ ID NO: 20596 - RNA, 21 nt, Artificial Sequence
  Synthetic
cggaaccuuuguggcuccucu

SEQ ID NO: 20597 - RNA, 23 nt, Artificial Sequence
  Synthetic
cgcggaaccuuuguggcuccucu

SEQ ID NO: 20598 - RNA, 19 nt, Artificial Sequence
  Synthetic
agacucgugguggacuucu

SEQ ID NO: 20599 - RNA, 20 nt, Artificial Sequence
  Synthetic
uagacucgugguggacuucu

SEQ ID NO: 20600 - RNA, 21 nt, Artificial Sequence
  Synthetic
cuagacucgugguggacuucu

SEQ ID NO: 20601 - RNA, 22 nt, Artificial Sequence
  Synthetic
ucuagacucgugguggacuucu

SEQ ID NO: 20602 - RNA, 24 nt, Artificial Sequence
  Synthetic
agucuagacucgugguggacuucu

SEQ ID NO: 20603 - RNA, 23 nt, Artificial Sequence
  Synthetic
ugguggacuucucucaauuuucu

SEQ ID NO: 20604 - RNA, 21 nt, Artificial Sequence
  Synthetic
uucagagcaaauuccagcagu

SEQ ID NO: 20605 - RNA, 22 nt, Artificial Sequence
  Synthetic
auucagagcaaauuccagcagu

SEQ ID NO: 20606 - RNA, 23 nt, Artificial Sequence
  Synthetic
uauucagagcaaauuccagcagu

SEQ ID NO: 20607 - RNA, 24 nt, Artificial Sequence
  Synthetic
cuauucagagcaaauuccagcagu

SEQ ID NO: 20608 - RNA, 20 nt, Artificial Sequence
  Synthetic
cggguguccuggccaaaauu

SEQ ID NO: 20609 - RNA, 22 nt, Artificial Sequence
  Synthetic
agaagaucucaaucuccagcuu

SEQ ID NO: 20610 - RNA, 23 nt, Artificial Sequence
  Synthetic
cagaagaucucaaucuccagcuu

SEQ ID NO: 20611 - RNA, 21 nt, Artificial Sequence
  Synthetic
aacccccacuggcuggggcuu

SEQ ID NO: 20612 - RNA, 22 nt, Artificial Sequence
  Synthetic
caacccccacuggcuggggcuu

SEQ ID NO: 20613 - RNA, 24 nt, Artificial Sequence
  Synthetic
cgcaacccccacuggcuggggcuu

SEQ ID NO: 20614 - RNA, 22 nt, Artificial Sequence
  Synthetic
ugcugcuaugccucaucuucuu

SEQ ID NO: 20615 - RNA, 23 nt, Artificial Sequence
  Synthetic
cugcugcuaugccucaucuucuu

SEQ ID NO: 20616 - RNA, 24 nt, Artificial Sequence
  Synthetic
ccugcugcuaugccucaucuucuu

SEQ ID NO: 20617 - RNA, 21 nt, Artificial Sequence
  Synthetic
acucauaaggugggaaacuuu

SEQ ID NO: 20618 - RNA, 24 nt, Artificial Sequence
  Synthetic
uggacucauaaggugggaaacuuu

SEQ ID NO: 20619 - RNA, 21 nt, Artificial Sequence
  Synthetic
ccguuucucuuggcucaguuu

SEQ ID NO: 20620 - RNA, 22 nt, Artificial Sequence
  Synthetic
cccguuucucuuggcucaguuu

SEQ ID NO: 20621 - RNA, 24 nt, Artificial Sequence
  Synthetic
agcccguuucucuuggcucaguuu

SEQ ID NO: 20622 - RNA, 21 nt, Artificial Sequence
  Synthetic
ccacacauagcgccucauuuu

SEQ ID NO: 20623 - RNA, 22 nt, Artificial Sequence
  Synthetic
uccacacauagcgccucauuuu

SEQ ID NO: 20624 - RNA, 23 nt, Artificial Sequence
  Synthetic
auccacacauagcgccucauuuu

SEQ ID NO: 20625 - RNA, 24 nt, Artificial Sequence
  Synthetic
aauccacacauagcgccucauuuu

SEQ ID NO: 20626 - RNA, 18 nt, Artificial Sequence
  Synthetic
gcccacagauaacaaaaa

SEQ ID NO: 20627 - RNA, 21 nt, Artificial Sequence
  Synthetic
gaugcccacagauaacaaaaa

SEQ ID NO: 20628 - RNA, 22 nt, Artificial Sequence
  Synthetic
ggaugcccacagauaacaaaaa

SEQ ID NO: 20629 - RNA, 21 nt, Artificial Sequence
  Synthetic
guuaaccagucaggauugaaa

SEQ ID NO: 20630 - RNA, 23 nt, Artificial Sequence
  Synthetic
gaguuaaccagucaggauugaaa

SEQ ID NO: 20631 - RNA, 24 nt, Artificial Sequence
  Synthetic
ggaguuaaccagucaggauugaaa

SEQ ID NO: 20632 - RNA, 18 nt, Artificial Sequence
  Synthetic
guccagaagaaccaacaa

SEQ ID NO: 20633 - RNA, 19 nt, Artificial Sequence
  Synthetic
guauuuuccgaaagcccaa

SEQ ID NO: 20634 - RNA, 20 nt, Artificial Sequence
  Synthetic
gguauuuuccgaaagcccaa

SEQ ID NO: 20635 - RNA, 20 nt, Artificial Sequence
  Synthetic
gccuggccguugccgagcaa

SEQ ID NO: 20636 - RNA, 19 nt, Artificial Sequence
  Synthetic
  misc_feature (7)..(7): n is a, c, g, or u
guaucanaucuugaugcaa

SEQ ID NO: 20637 - RNA, 20 nt, Artificial Sequence
  Synthetic
guagcucuuguucccaggaa

SEQ ID NO: 20638 - RNA, 19 nt, Artificial Sequence
  Synthetic
gcagcaggaugaagaggaa

SEQ ID NO: 20639 - RNA, 24 nt, Artificial Sequence
  Synthetic
gcauagcagcaggaugaagaggaa

SEQ ID NO: 20640 - RNA, 23 nt, Artificial Sequence
  Synthetic
  misc_feature (6)..(6): n is a, c, g, or u
gcacanccuagcagccaugggaa

SEQ ID NO: 20641 - RNA, 18 nt, Artificial Sequence
  Synthetic
  misc_feature (15)..(15): n is a, c, g, or u
gcauuugguggucunuaa

SEQ ID NO: 20642 - RNA, 19 nt, Artificial Sequence
  Synthetic
  misc_feature (16)..(16): n is a, c, g, or u
ggcauuugguggucunuaa

SEQ ID NO: 20643 - RNA, 20 nt, Artificial Sequence
  Synthetic
  misc_feature (17)..(17): n is a, c, g, or u
gggcauuugguggucunuaa

SEQ ID NO: 20644 - RNA, 19 nt, Artificial Sequence
  Synthetic
gaacagugggacaugaaca

SEQ ID NO: 20645 - RNA, 18 nt, Artificial Sequence
  Synthetic
ggaugcccacagauaaca

SEQ ID NO: 20646 - RNA, 18 nt, Artificial Sequence
  Synthetic
gagagcaggauaaccaca

SEQ ID NO: 20647 - RNA, 18 nt, Artificial Sequence
  Synthetic
gccaaucgccaagcccca

SEQ ID NO: 20648 - RNA, 19 nt, Artificial Sequence
  Synthetic
ggccaaucgccaagcccca

SEQ ID NO: 20649 - RNA, 18 nt, Artificial Sequence
  Synthetic
ggucuggaaagaauccca

SEQ ID NO: 20650 - RNA, 20 nt, Artificial Sequence
  Synthetic
guggucuggaaagaauccca

SEQ ID NO: 20651 - RNA, 21 nt, Artificial Sequence
  Synthetic
gguggucuggaaagaauccca

SEQ ID NO: 20652 - RNA, 19 nt, Artificial Sequence
  Synthetic
gcucugaauaguggaucca

SEQ ID NO: 20653 - RNA, 20 nt, Artificial Sequence
  Synthetic
gucaucaacucaccccagca

SEQ ID NO: 20654 - RNA, 23 nt, Artificial Sequence
  Synthetic
guuucucuuccaaauguaaggca

SEQ ID NO: 20655 - RNA, 18 nt, Artificial Sequence
  Synthetic
guugauaggauaggggca

SEQ ID NO: 20656 - RNA, 20 nt, Artificial Sequence
  Synthetic
guguugauaggauaggggca

SEQ ID NO: 20657 - RNA, 23 nt, Artificial Sequence
  Synthetic
gaaguguugauaggauaggggca

SEQ ID NO: 20658 - RNA, 24 nt, Artificial Sequence
  Synthetic
ggaaguguugauaggauaggggca

SEQ ID NO: 20659 - RNA, 20 nt, Artificial Sequence
  Synthetic
guugacaaaccuuccaauca

SEQ ID NO: 20660 - RNA, 18 nt, Artificial Sequence
  Synthetic
gugaaugucaggaaaaga

SEQ ID NO: 20661 - RNA, 22 nt, Artificial Sequence
  Synthetic
gcaagugaaugucaggaaaaga

SEQ ID NO: 20662 - RNA, 18 nt, Artificial Sequence
  Synthetic
gauugaugaugugagaga

SEQ ID NO: 20663 - RNA, 20 nt, Artificial Sequence
  Synthetic
gaucuucgucugcgaggcga

SEQ ID NO: 20664 - RNA, 18 nt, Artificial Sequence
  Synthetic
ggucccggacagacggga

SEQ ID NO: 20665 - RNA, 20 nt, Artificial Sequence
  Synthetic
gauccaacugguggucugga

SEQ ID NO: 20666 - RNA, 18 nt, Artificial Sequence
  Synthetic
guggaagcaggaggugga

SEQ ID NO: 20667 - RNA, 19 nt, Artificial Sequence
  Synthetic
gguggaagcaggaggugga

SEQ ID NO: 20668 - RNA, 23 nt, Artificial Sequence
  Synthetic
gauugguggaagcaggaggugga

SEQ ID NO: 20669 - RNA, 18 nt, Artificial Sequence
  Synthetic
ggguccuaggaguccuga

SEQ ID NO: 20670 - RNA, 19 nt, Artificial Sequence
  Synthetic
gggguccuaggaguccuga

SEQ ID NO: 20671 - RNA, 20 nt, Artificial Sequence
  Synthetic
gcaucucgguagagggcuga

SEQ ID NO: 20672 - RNA, 19 nt, Artificial Sequence
  Synthetic
gaugauuaggcagagguga

SEQ ID NO: 20673 - RNA, 18 nt, Artificial Sequence
  Synthetic
  misc_feature (2)..(2): n is a, c, g, or u
  misc_feature (8)..(8): n is a, c, g, or u
gncccaunuuaguauuga

SEQ ID NO: 20674 - RNA, 21 nt, Artificial Sequence
  Synthetic
  misc_feature (8)..(8): n is a, c, g, or u
  misc_feature (20)..(20): n is a, c, g, or u
guaaauanugucuaguuuuna

SEQ ID NO: 20675 - RNA, 20 nt, Artificial Sequence
  Synthetic
gcuggaauuugcucugaaua

SEQ ID NO: 20676 - RNA, 19 nt, Artificial Sequence
  Synthetic
guguggauucucucuuaua

SEQ ID NO: 20677 - RNA, 19 nt, Artificial Sequence
  Synthetic
guauugacauaauuaacua

SEQ ID NO: 20678 - RNA, 18 nt, Artificial Sequence
  Synthetic
gaggacaggagguuggua

SEQ ID NO: 20679 - RNA, 19 nt, Artificial Sequence
  Synthetic
ggaggacaggagguuggua

SEQ ID NO: 20680 - RNA, 22 nt, Artificial Sequence
  Synthetic
guuggaggacaggagguuggua

SEQ ID NO: 20681 - RNA, 20 nt, Artificial Sequence
  Synthetic
gucaggaaaagaaggaguua

SEQ ID NO: 20682 - RNA, 24 nt, Artificial Sequence
  Synthetic
gaaugucaggaaaagaaggaguua

SEQ ID NO: 20683 - RNA, 21 nt, Artificial Sequence
  Synthetic
  misc_feature (9)..(9): n is a, c, g, or u
  misc_feature (15)..(15): n is a, c, g, or u
guaaggcangaaaunugaaac

SEQ ID NO: 20684 - RNA, 20 nt, Artificial Sequence
  Synthetic
gauaacaaaaaauugguaac

SEQ ID NO: 20685 - RNA, 18 nt, Artificial Sequence
  Synthetic
gaauuuuggccaggacac

SEQ ID NO: 20686 - RNA, 20 nt, Artificial Sequence
  Synthetic
gcgaauuuuggccaggacac

SEQ ID NO: 20687 - RNA, 24 nt, Artificial Sequence
  Synthetic
gacugcgaauuuuggccaggacac

SEQ ID NO: 20688 - RNA, 18 nt, Artificial Sequence
  Synthetic
gaucggcagaggagccac

SEQ ID NO: 20689 - RNA, 19 nt, Artificial Sequence
  Synthetic
ggaucggcagaggagccac

SEQ ID NO: 20690 - RNA, 18 nt, Artificial Sequence
  Synthetic
  misc_feature (2)..(2): n is a, c, g, or u
  misc_feature (6)..(6): n is a, c, g, or u
gnuccnaggggcguucac

SEQ ID NO: 20691 - RNA, 22 nt, Artificial Sequence
  Synthetic
  misc_feature (6)..(6): n is a, c, g, or u
  misc_feature (10)..(10): n is a, c, g, or u
gcaagnuccnaggggcguucac

SEQ ID NO: 20692 - RNA, 23 nt, Artificial Sequence
  Synthetic
  misc_feature (7)..(7): n is a, c, g, or u
  misc_feature (11)..(11): n is a, c, g, or u
ggcaagnuccnaggggcguucac

SEQ ID NO: 20693 - RNA, 21 nt, Artificial Sequence
  Synthetic
gucccuuagagguggagagac

SEQ ID NO: 20694 - RNA, 23 nt, Artificial Sequence
  Synthetic
gugucccuuagagguggagagac

SEQ ID NO: 20695 - RNA, 18 nt, Artificial Sequence
  Synthetic
gacacacgggcaacauac

SEQ ID NO: 20696 - RNA, 19 nt, Artificial Sequence
  Synthetic
ggacacacgggcaacauac

SEQ ID NO: 20697 - RNA, 21 nt, Artificial Sequence
  Synthetic
gaggacacacgggcaacauac

SEQ ID NO: 20698 - RNA, 24 nt, Artificial Sequence
  Synthetic
guagaggacacacgggcaacauac

SEQ ID NO: 20699 - RNA, 20 nt, Artificial Sequence
  Synthetic
gcugcaaagcccaaaagacc

SEQ ID NO: 20700 - RNA, 21 nt, Artificial Sequence
  Synthetic
ggcugcaaagcccaaaagacc

SEQ ID NO: 20701 - RNA, 22 nt, Artificial Sequence
  Synthetic
gggcugcaaagcccaaaagacc

SEQ ID NO: 20702 - RNA, 23 nt, Artificial Sequence
  Synthetic
ggggcugcaaagcccaaaagacc

SEQ ID NO: 20703 - RNA, 19 nt, Artificial Sequence
  Synthetic
guuggcuuucuuccugacc

SEQ ID NO: 20704 - RNA, 20 nt, Artificial Sequence
  Synthetic
gguuggcuuucuuccugacc

SEQ ID NO: 20705 - RNA, 21 nt, Artificial Sequence
  Synthetic
ggguuggcuuucuuccugacc

SEQ ID NO: 20706 - RNA, 22 nt, Artificial Sequence
  Synthetic
gggguuggcuuucuuccugacc

SEQ ID NO: 20707 - RNA, 18 nt, Artificial Sequence
  Synthetic
guguucaaauggaugccc

SEQ ID NO: 20708 - RNA, 18 nt, Artificial Sequence
  Synthetic
gggcugaggcccacuccc

SEQ ID NO: 20709 - RNA, 18 nt, Artificial Sequence
  Synthetic
gcuguagcucuuguuccc

SEQ ID NO: 20710 - RNA, 20 nt, Artificial Sequence
  Synthetic
gaugcugcacagauuuggcc

SEQ ID NO: 20711 - RNA, 20 nt, Artificial Sequence
  Synthetic
  misc_feature (2)..(2): n is a, c, g, or u
gnccccuuacucucggaucc

SEQ ID NO: 20712 - RNA, 20 nt, Artificial Sequence
  Synthetic
gucuaacaacaguagucucc

SEQ ID NO: 20713 - RNA, 23 nt, Artificial Sequence
  Synthetic
gaauacaggugcaauuuccgucc

SEQ ID NO: 20714 - RNA, 24 nt, Artificial Sequence
  Synthetic
ggaauacaggugcaauuuccgucc

SEQ ID NO: 20715 - RNA, 21 nt, Artificial Sequence
  Synthetic
gaaaacaaaagccugcuuagc

SEQ ID NO: 20716 - RNA, 23 nt, Artificial Sequence
  Synthetic
gagaaaacaaaagccugcuuagc

SEQ ID NO: 20717 - RNA, 18 nt, Artificial Sequence
  Synthetic
gggaagaagucagaaggc

SEQ ID NO: 20718 - RNA, 21 nt, Artificial Sequence
  Synthetic
gacgggaagaagucagaaggc

SEQ ID NO: 20719 - RNA, 21 nt, Artificial Sequence
  Synthetic
gauugaugaugugagagaggc

SEQ ID NO: 20720 - RNA, 24 nt, Artificial Sequence
  Synthetic
gaagauugaugaugugagagaggc

SEQ ID NO: 20721 - RNA, 19 nt, Artificial Sequence
  Synthetic
gaacaaaagaugauuaggc

SEQ ID NO: 20722 - RNA, 19 nt, Artificial Sequence
  Synthetic
gaaguuugcgaaagcaauc

SEQ ID NO: 20723 - RNA, 20 nt, Artificial Sequence
  Synthetic
ggaaguuugcgaaagcaauc

SEQ ID NO: 20724 - RNA, 21 nt, Artificial Sequence
  Synthetic
  misc_feature (11)..(11): n is a, c, g, or u
gaaaauacagnccccuuacuc

SEQ ID NO: 20725 - RNA, 22 nt, Artificial Sequence
  Synthetic
  misc_feature (12)..(12): n is a, c, g, or u
ggaaaauacagnccccuuacuc

SEQ ID NO: 20726 - RNA, 18 nt, Artificial Sequence
  Synthetic
guccuuaaauacacaguc

SEQ ID NO: 20727 - RNA, 24 nt, Artificial Sequence
  Synthetic
  misc_feature (17)..(17): n is a, c, g, or u
guucuccauguucauancaggguc

SEQ ID NO: 20728 - RNA, 21 nt, Artificial Sequence
  Synthetic
  misc_feature (10)..(10): n is a, c, g, or u
gaaacaagcngcuaggaguuc

SEQ ID NO: 20729 - RNA, 23 nt, Artificial Sequence
  Synthetic
  misc_feature (12)..(12): n is a, c, g, or u
gcgaaacaagcngcuaggaguuc

SEQ ID NO: 20730 - RNA, 21 nt, Artificial Sequence
  Synthetic
  misc_feature (2)..(2): n is a, c, g, or u
gnuuaauaccuuuauccaaag

SEQ ID NO: 20731 - RNA, 22 nt, Artificial Sequence
  Synthetic
  misc_feature (3)..(3): n is a, c, g, or u
ggnuuaauaccuuuauccaaag

SEQ ID NO: 20732 - RNA, 19 nt, Artificial Sequence
  Synthetic
  misc_feature (4)..(4): n is a, c, g, or u
guanaguagaggaguaaag

SEQ ID NO: 20733 - RNA, 20 nt, Artificial Sequence
  Synthetic
  misc_feature (5)..(5): n is a, c, g, or u
gguanaguagaggaguaaag

SEQ ID NO: 20734 - RNA, 19 nt, Artificial Sequence
  Synthetic
guccccagucuucgagaag

SEQ ID NO: 20735 - RNA, 20 nt, Artificial Sequence
  Synthetic
gguccccagucuucgagaag

SEQ ID NO: 20736 - RNA, 21 nt, Artificial Sequence
  Synthetic
ggguccccagucuucgagaag

SEQ ID NO: 20737 - RNA, 19 nt, Artificial Sequence
  Synthetic
gcauggugcuggugaacag

SEQ ID NO: 20738 - RNA, 19 nt, Artificial Sequence
  Synthetic
gaacuggagccaccagcag

SEQ ID NO: 20739 - RNA, 18 nt, Artificial Sequence
  Synthetic
gaagaugaggcauagcag

SEQ ID NO: 20740 - RNA, 21 nt, Artificial Sequence
  Synthetic
gcauagcagcaggaugaagag

SEQ ID NO: 20741 - RNA, 22 nt, Artificial Sequence
  Synthetic
ggcauagcagcaggaugaagag

SEQ ID NO: 20742 - RNA, 24 nt, Artificial Sequence
  Synthetic
gaggcauagcagcaggaugaagag

SEQ ID NO: 20743 - RNA, 19 nt, Artificial Sequence
  Synthetic
gcauacaagggcaugagag

SEQ ID NO: 20744 - RNA, 20 nt, Artificial Sequence
  Synthetic
ggcauacaagggcaugagag

SEQ ID NO: 20745 - RNA, 20 nt, Artificial Sequence
  Synthetic
gacaaguuggaggacaggag

SEQ ID NO: 20746 - RNA, 21 nt, Artificial Sequence
  Synthetic
ggacaaguuggaggacaggag

SEQ ID NO: 20747 - RNA, 18 nt, Artificial Sequence
  Synthetic
gauugguggaagcaggag

SEQ ID NO: 20748 - RNA, 18 nt, Artificial Sequence
  Synthetic
gagaggcaauagucggag

SEQ ID NO: 20749 - RNA, 20 nt, Artificial Sequence
  Synthetic
gagagaggcaauagucggag

SEQ ID NO: 20750 - RNA, 22 nt, Artificial Sequence
  Synthetic
gugagagaggcaauagucggag

SEQ ID NO: 20751 - RNA, 21 nt, Artificial Sequence
  Synthetic
gcacaaaauagcuugccugag

SEQ ID NO: 20752 - RNA, 19 nt, Artificial Sequence
  Synthetic
guaccccuagaaaauugag

SEQ ID NO: 20753 - RNA, 20 nt, Artificial Sequence
  Synthetic
gguaccccuagaaaauugag

SEQ ID NO: 20754 - RNA, 21 nt, Artificial Sequence
  Synthetic
  misc_feature (16)..(16): n is a, c, g, or u
gauugaaaacagguanaguag

SEQ ID NO: 20755 - RNA, 22 nt, Artificial Sequence
  Synthetic
  misc_feature (17)..(17): n is a, c, g, or u
ggauugaaaacagguanaguag

SEQ ID NO: 20756 - RNA, 19 nt, Artificial Sequence
  Synthetic
gcuuucuuccugaccuccg

SEQ ID NO: 20757 - RNA, 20 nt, Artificial Sequence
  Synthetic
ggcuuucuuccugaccuccg

SEQ ID NO: 20758 - RNA, 23 nt, Artificial Sequence
  Synthetic
guuggcuuucuuccugaccuccg

SEQ ID NO: 20759 - RNA, 24 nt, Artificial Sequence
  Synthetic
gguuggcuuucuuccugaccuccg

SEQ ID NO: 20760 - RNA, 18 nt, Artificial Sequence
  Synthetic
gaugagaaggcacaggcg

SEQ ID NO: 20761 - RNA, 20 nt, Artificial Sequence
  Synthetic
gcuccaaauucuuuauaagg

SEQ ID NO: 20762 - RNA, 18 nt, Artificial Sequence
  Synthetic
gucaggauugaaaacagg

SEQ ID NO: 20763 - RNA, 19 nt, Artificial Sequence
  Synthetic
gaugggaugggaauacagg

SEQ ID NO: 20764 - RNA, 22 nt, Artificial Sequence
  Synthetic
gaugaugggaugggaauacagg

SEQ ID NO: 20765 - RNA, 22 nt, Artificial Sequence
  Synthetic
gacacauccaacgauagccagg

SEQ ID NO: 20766 - RNA, 23 nt, Artificial Sequence
  Synthetic
  misc_feature (15)..(15): n is a, c, g, or u
gcauuugguggucunuaagcagg

SEQ ID NO: 20767 - RNA, 24 nt, Artificial Sequence
  Synthetic
  misc_feature (16)..(16): n is a, c, g, or u
ggcauuugguggucunuaagcagg

SEQ ID NO: 20768 - RNA, 19 nt, Artificial Sequence
  Synthetic
guagaggaguaaagaccgg

SEQ ID NO: 20769 - RNA, 18 nt, Artificial Sequence
  Synthetic
  misc_feature (8)..(8): n is a, c, g, or u
gagcagunugguuggggg

SEQ ID NO: 20770 - RNA, 20 nt, Artificial Sequence
  Synthetic
  misc_feature (10)..(10): n is a, c, g, or u
gagagcagunugguuggggg

SEQ ID NO: 20771 - RNA, 24 nt, Artificial Sequence
  Synthetic
  misc_feature (14)..(14): n is a, c, g, or u
gccugagagcagunugguuggggg

SEQ ID NO: 20772 - RNA, 18 nt, Artificial Sequence
  Synthetic
gggauaaaaccuagcugg

SEQ ID NO: 20773 - RNA, 20 nt, Artificial Sequence
  Synthetic
gcaggagguggaucuggugg

SEQ ID NO: 20774 - RNA, 23 nt, Artificial Sequence
  Synthetic
gaagcaggagguggaucuggugg

SEQ ID NO: 20775 - RNA, 24 nt, Artificial Sequence
  Synthetic
ggaagcaggagguggaucuggugg

SEQ ID NO: 20776 - RNA, 19 nt, Artificial Sequence
  Synthetic
guccaagaguccucuuaug

SEQ ID NO: 20777 - RNA, 18 nt, Artificial Sequence
  Synthetic
gcaaucuuugauuuuaug

SEQ ID NO: 20778 - RNA, 20 nt, Artificial Sequence
  Synthetic
gacugcuggaauuugcucug

SEQ ID NO: 20779 - RNA, 18 nt, Artificial Sequence
  Synthetic
gauuaaccacauucucug

SEQ ID NO: 20780 - RNA, 19 nt, Artificial Sequence
  Synthetic
guagagggcugaagcggug

SEQ ID NO: 20781 - RNA, 20 nt, Artificial Sequence
  Synthetic
gguagagggcugaagcggug

SEQ ID NO: 20782 - RNA, 23 nt, Artificial Sequence
  Synthetic
  misc_feature (6)..(6): n is a, c, g, or u
gaaaunugaaaccauaauaauug

SEQ ID NO: 20783 - RNA, 18 nt, Artificial Sequence
  Synthetic
gcacagcuuggaggcuug

SEQ ID NO: 20784 - RNA, 19 nt, Artificial Sequence
  Synthetic
ggcacagcuuggaggcuug

SEQ ID NO: 20785 - RNA, 18 nt, Artificial Sequence
  Synthetic
gcagaggugaaaaaguug

SEQ ID NO: 20786 - RNA, 19 nt, Artificial Sequence
  Synthetic
ggcagaggugaaaaaguug

SEQ ID NO: 20787 - RNA, 24 nt, Artificial Sequence
  Synthetic
gauuaggcagaggugaaaaaguug

SEQ ID NO: 20788 - RNA, 19 nt, Artificial Sequence
  Synthetic
guuggaggacaggagguug

SEQ ID NO: 20789 - RNA, 20 nt, Artificial Sequence
  Synthetic
  misc_feature (20)..(20): n is a, c, g, or u
gauguucuccauguucauan

SEQ ID NO: 20790 - RNA, 22 nt, Artificial Sequence
  Synthetic
  misc_feature (22)..(22): n is a, c, g, or u
gugauguucuccauguucauan

SEQ ID NO: 20791 - RNA, 19 nt, Artificial Sequence
  Synthetic
  misc_feature (19)..(19): n is a, c, g, or u
guugggggugcaauguucn

SEQ ID NO: 20792 - RNA, 20 nt, Artificial Sequence
  Synthetic
  misc_feature (20)..(20): n is a, c, g, or u
gguugggggugcaauguucn

SEQ ID NO: 20793 - RNA, 24 nt, Artificial Sequence
  Synthetic
  misc_feature (3)..(3): n is a, c, g, or u
  misc_feature (24)..(24): n is a, c, g, or u
gunugguugggggugcaauguucn

SEQ ID NO: 20794 - RNA, 19 nt, Artificial Sequence
  Synthetic
gaagucagaaggcaaaaau

SEQ ID NO: 20795 - RNA, 22 nt, Artificial Sequence
  Synthetic
gaagaagucagaaggcaaaaau

SEQ ID NO: 20796 - RNA, 23 nt, Artificial Sequence
  Synthetic
ggaagaagucagaaggcaaaaau

SEQ ID NO: 20797 - RNA, 24 nt, Artificial Sequence
  Synthetic
gggaagaagucagaaggcaaaaau

SEQ ID NO: 20798 - RNA, 21 nt, Artificial Sequence
  Synthetic
gucuuugauguauuccucaau

SEQ ID NO: 20799 - RNA, 23 nt, Artificial Sequence
  Synthetic
gcccaagaugaugggaugggaau

SEQ ID NO: 20800 - RNA, 18 nt, Artificial Sequence
  Synthetic
gcagcaggagggaaacau

SEQ ID NO: 20801 - RNA, 23 nt, Artificial Sequence
  Synthetic
guacagcagcaggagggaaacau

SEQ ID NO: 20802 - RNA, 24 nt, Artificial Sequence
  Synthetic
gguacagcagcaggagggaaacau

SEQ ID NO: 20803 - RNA, 19 nt, Artificial Sequence
  Synthetic
  misc_feature (4)..(4): n is a, c, g, or u
  misc_feature (10)..(10): n is a, c, g, or u
gcangaaaunugaaaccau

SEQ ID NO: 20804 - RNA, 20 nt, Artificial Sequence
  Synthetic
  misc_feature (5)..(5): n is a, c, g, or u
  misc_feature (11)..(11): n is a, c, g, or u
ggcangaaaunugaaaccau

SEQ ID NO: 20805 - RNA, 24 nt, Artificial Sequence
  Synthetic
  misc_feature (9)..(9): n is a, c, g, or u
  misc_feature (15)..(15): n is a, c, g, or u
guaaggcangaaaunugaaaccau

SEQ ID NO: 20806 - RNA, 19 nt, Artificial Sequence
  Synthetic
  misc_feature (14)..(14): n is a, c, g, or u
gucuaauuuuuagncccau

SEQ ID NO: 20807 - RNA, 21 nt, Artificial Sequence
  Synthetic
  misc_feature (5)..(5): n is a, c, g, or u
guucnggugauucuaaggcau

SEQ ID NO: 20808 - RNA, 21 nt, Artificial Sequence
  Synthetic
gaaagcccaagaugaugggau

SEQ ID NO: 20809 - RNA, 21 nt, Artificial Sequence
  Synthetic
  misc_feature (19)..(19): n is a, c, g, or u
guucacauuuuuguaucanau

SEQ ID NO: 20810 - RNA, 24 nt, Artificial Sequence
  Synthetic
gaauuccugccuuccacaaaguau

SEQ ID NO: 20811 - RNA, 19 nt, Artificial Sequence
  Synthetic
gaagcuccaaauucuuuau

SEQ ID NO: 20812 - RNA, 19 nt, Artificial Sequence
  Synthetic
  misc_feature (8)..(8): n is a, c, g, or u
gaggcaangucccccaacu

SEQ ID NO: 20813 - RNA, 22 nt, Artificial Sequence
  Synthetic
gcucugaauaguggauccaacu

SEQ ID NO: 20814 - RNA, 18 nt, Artificial Sequence
  Synthetic
gauuggagauuggggacu

SEQ ID NO: 20815 - RNA, 20 nt, Artificial Sequence
  Synthetic
gugauuggagauuggggacu

SEQ ID NO: 20816 - RNA, 24 nt, Artificial Sequence
  Synthetic
guaagugauuggagauuggggacu

SEQ ID NO: 20817 - RNA, 22 nt, Artificial Sequence
  Synthetic
gaccaauuuaugccuacagccu

SEQ ID NO: 20818 - RNA, 19 nt, Artificial Sequence
  Synthetic
gaguaacuccacagaagcu

SEQ ID NO: 20819 - RNA, 21 nt, Artificial Sequence
  Synthetic
gagaguaacuccacagaagcu

SEQ ID NO: 20820 - RNA, 21 nt, Artificial Sequence
  Synthetic
gaauacuaacauugggaagcu

SEQ ID NO: 20821 - RNA, 22 nt, Artificial Sequence
  Synthetic
ggaauacuaacauugggaagcu

SEQ ID NO: 20822 - RNA, 20 nt, Artificial Sequence
  Synthetic
guuuugcagggucccgugcu

SEQ ID NO: 20823 - RNA, 21 nt, Artificial Sequence
  Synthetic
gguuuugcagggucccgugcu

SEQ ID NO: 20824 - RNA, 24 nt, Artificial Sequence
  Synthetic
gcagguuuugcagggucccgugcu

SEQ ID NO: 20825 - RNA, 18 nt, Artificial Sequence
  Synthetic
ggacugcuggaauuugcu

SEQ ID NO: 20826 - RNA, 19 nt, Artificial Sequence
  Synthetic
gggacugcuggaauuugcu

SEQ ID NO: 20827 - RNA, 20 nt, Artificial Sequence
  Synthetic
guaaugauuaaccacauucu

SEQ ID NO: 20828 - RNA, 20 nt, Artificial Sequence
  Synthetic
guccuuguuuguguugaagu

SEQ ID NO: 20829 - RNA, 24 nt, Artificial Sequence
  Synthetic
  misc_feature (8)..(8): n is a, c, g, or u
  misc_feature (20)..(20): n is a, c, g, or u
guaaauanugucuaguuuunaagu

SEQ ID NO: 20830 - RNA, 21 nt, Artificial Sequence
  Synthetic
gaaaagaaggaguuaaccagu

SEQ ID NO: 20831 - RNA, 22 nt, Artificial Sequence
  Synthetic
ggaaaagaaggaguuaaccagu

SEQ ID NO: 20832 - RNA, 20 nt, Artificial Sequence
  Synthetic
  misc_feature (3)..(3): n is a, c, g, or u
gcngcuaggaguuccgcagu

SEQ ID NO: 20833 - RNA, 18 nt, Artificial Sequence
  Synthetic
  misc_feature (7)..(7): n is a, c, g, or u
gacaacngaguugucagu

SEQ ID NO: 20834 - RNA, 19 nt, Artificial Sequence
  Synthetic
  misc_feature (8)..(8): n is a, c, g, or u
ggacaacngaguugucagu

SEQ ID NO: 20835 - RNA, 23 nt, Artificial Sequence
  Synthetic
  misc_feature (12)..(12): n is a, c, g, or u
gaaaggacaacngaguugucagu

SEQ ID NO: 20836 - RNA, 19 nt, Artificial Sequence
  Synthetic
gagaagggguccuaggagu

SEQ ID NO: 20837 - RNA, 18 nt, Artificial Sequence
  Synthetic
gugaaaaaguugcauggu

SEQ ID NO: 20838 - RNA, 19 nt, Artificial Sequence
  Synthetic
ggugaaaaaguugcauggu

SEQ ID NO: 20839 - RNA, 20 nt, Artificial Sequence
  Synthetic
guuccuugagcaagaguggu

SEQ ID NO: 20840 - RNA, 21 nt, Artificial Sequence
  Synthetic
gguuccuugagcaagaguggu

SEQ ID NO: 20841 - RNA, 23 nt, Artificial Sequence
  Synthetic
gagguuccuugagcaagaguggu

SEQ ID NO: 20842 - RNA, 21 nt, Artificial Sequence
  Synthetic
  misc_feature (3)..(3): n is a, c, g, or u
gunugguugggggugcaaugu

SEQ ID NO: 20843 - RNA, 24 nt, Artificial Sequence
  Synthetic
  misc_feature (6)..(6): n is a, c, g, or u
gcagunugguugggggugcaaugu

SEQ ID NO: 20844 - RNA, 19 nt, Artificial Sequence
  Synthetic
gaucugguggcgagguugu

SEQ ID NO: 20845 - RNA, 20 nt, Artificial Sequence
  Synthetic
ggaucugguggcgagguugu

SEQ ID NO: 20846 - RNA, 18 nt, Artificial Sequence
  Synthetic
ggagguugguaagugauu

SEQ ID NO: 20847 - RNA, 22 nt, Artificial Sequence
  Synthetic
gacaggagguugguaagugauu

SEQ ID NO: 20848 - RNA, 23 nt, Artificial Sequence
  Synthetic
ggacaggagguugguaagugauu

SEQ ID NO: 20849 - RNA, 18 nt, Artificial Sequence
  Synthetic
ggaaguauuuaguaacuu

SEQ ID NO: 20850 - RNA, 19 nt, Artificial Sequence
  Synthetic
gggaaguauuuaguaacuu

SEQ ID NO: 20851 - RNA, 18 nt, Artificial Sequence
  Synthetic
gguaaaguuucccaccuu

SEQ ID NO: 20852 - RNA, 21 nt, Artificial Sequence
  Synthetic
gccuguggaugugugucccuu

SEQ ID NO: 20853 - RNA, 22 nt, Artificial Sequence
  Synthetic
ggccuguggaugugugucccuu

SEQ ID NO: 20854 - RNA, 19 nt, Artificial Sequence
  Synthetic
guuuacagagaaaggccuu

SEQ ID NO: 20855 - RNA, 24 nt, Artificial Sequence
  Synthetic
guauuguuuacagagaaaggccuu

SEQ ID NO: 20856 - RNA, 18 nt, Artificial Sequence
  Synthetic
gaaaacaaaagccugcuu

SEQ ID NO: 20857 - RNA, 20 nt, Artificial Sequence
  Synthetic
gagaaaacaaaagccugcuu

SEQ ID NO: 20858 - RNA, 19 nt, Artificial Sequence
  Synthetic
  misc_feature (14)..(14): n is a, c, g, or u
gagaaaggacaacngaguu

SEQ ID NO: 20859 - RNA, 19 nt, Artificial Sequence
  Synthetic
  misc_feature (6)..(6): n is a, c, g, or u
  misc_feature (10)..(10): n is a, c, g, or u
gcaagnuccnaggggcguu

SEQ ID NO: 20860 - RNA, 20 nt, Artificial Sequence
  Synthetic
  misc_feature (7)..(7): n is a, c, g, or u
  misc_feature (11)..(11): n is a, c, g, or u
ggcaagnuccnaggggcguu

SEQ ID NO: 20861 - RNA, 23 nt, Artificial Sequence
  Synthetic
  misc_feature (10)..(10): n is a, c, g, or u
  misc_feature (14)..(14): n is a, c, g, or u
guuggcaagnuccnaggggcguu

SEQ ID NO: 20862 - RNA, 18 nt, Artificial Sequence
  Synthetic
ggucccgugcuggugguu

SEQ ID NO: 20863 - RNA, 19 nt, Artificial Sequence
  Synthetic
gggucccgugcuggugguu

SEQ ID NO: 20864 - RNA, 19 nt, Artificial Sequence
  Synthetic
  misc_feature (14)..(14): n is a, c, g, or u
gccugagagcagunugguu

SEQ ID NO: 20865 - RNA, 23 nt, Artificial Sequence
  Synthetic
  misc_feature (18)..(18): n is a, c, g, or u
gcuugccugagagcagunugguu

SEQ ID NO: 20866 - RNA, 18 nt, Artificial Sequence
  Synthetic
  misc_feature (8)..(8): n is a, c, g, or u
guaaauanugucuaguuu

SEQ ID NO: 20867 - RNA, 22 nt, Artificial Sequence
  Synthetic
  misc_feature (12)..(12): n is a, c, g, or u
guauguaaauanugucuaguuu

SEQ ID NO: 20868 - RNA, 24 nt, Artificial Sequence
  Synthetic
gcauccauuugaacacagcuaaaa

SEQ ID NO: 20869 - RNA, 20 nt, Artificial Sequence
  Synthetic
gacaauuggccaauggcaaa

SEQ ID NO: 20870 - RNA, 18 nt, Artificial Sequence
  Synthetic
  misc_feature (7)..(7): n is a, c, g, or u
gcuaggnugugcugccaa

SEQ ID NO: 20871 - RNA, 21 nt, Artificial Sequence
  Synthetic
  misc_feature (10)..(10): n is a, c, g, or u
gcugcuaggnugugcugccaa

SEQ ID NO: 20872 - RNA, 22 nt, Artificial Sequence
  Synthetic
  misc_feature (11)..(11): n is a, c, g, or u
ggcugcuaggnugugcugccaa

SEQ ID NO: 20873 - RNA, 18 nt, Artificial Sequence
  Synthetic
gcagccccuuuuacucaa

SEQ ID NO: 20874 - RNA, 19 nt, Artificial Sequence
  Synthetic
gaccccuucucguguuaca

SEQ ID NO: 20875 - RNA, 20 nt, Artificial Sequence
  Synthetic
ggaccccuucucguguuaca

SEQ ID NO: 20876 - RNA, 23 nt, Artificial Sequence
  Synthetic
  misc_feature (17)..(17): n is a, c, g, or u
gcacuccaccugcuuanagacca

SEQ ID NO: 20877 - RNA, 22 nt, Artificial Sequence
  Synthetic
gacaaaaauccucacaauacca

SEQ ID NO: 20878 - RNA, 20 nt, Artificial Sequence
  Synthetic
guccaggguucacaccccca

SEQ ID NO: 20879 - RNA, 20 nt, Artificial Sequence
  Synthetic
  misc_feature (8)..(8): n is a, c, g, or u
gcauucunacaaccucgcca

SEQ ID NO: 20880 - RNA, 21 nt, Artificial Sequence
  Synthetic
  misc_feature (9)..(9): n is a, c, g, or u
ggcauucunacaaccucgcca

SEQ ID NO: 20881 - RNA, 22 nt, Artificial Sequence
  Synthetic
  misc_feature (10)..(10): n is a, c, g, or u
gggcauucunacaaccucgcca

SEQ ID NO: 20882 - RNA, 19 nt, Artificial Sequence
  Synthetic
gacacacauccacaggcca

SEQ ID NO: 20883 - RNA, 20 nt, Artificial Sequence
  Synthetic
ggacacacauccacaggcca

SEQ ID NO: 20884 - RNA, 20 nt, Artificial Sequence
  Synthetic
  misc_feature (8)..(8): n is a, c, g, or u
guauuaanccuuacuaucca

SEQ ID NO: 20885 - RNA, 21 nt, Artificial Sequence
  Synthetic
  misc_feature (9)..(9): n is a, c, g, or u
gguauuaanccuuacuaucca

SEQ ID NO: 20886 - RNA, 21 nt, Artificial Sequence
  Synthetic
gccucaggaacauauugugca

SEQ ID NO: 20887 - RNA, 20 nt, Artificial Sequence
  Synthetic
guuaguauuccuuggacuca

SEQ ID NO: 20888 - RNA, 20 nt, Artificial Sequence
  Synthetic
gacauucacuugcaucaaga

SEQ ID NO: 20889 - RNA, 19 nt, Artificial Sequence
  Synthetic
gcaggaauucuauauaaga

SEQ ID NO: 20890 - RNA, 20 nt, Artificial Sequence
  Synthetic
ggcaggaauucuauauaaga

SEQ ID NO: 20891 - RNA, 23 nt, Artificial Sequence
  Synthetic
gaaggcaggaauucuauauaaga

SEQ ID NO: 20892 - RNA, 24 nt, Artificial Sequence
  Synthetic
ggaaggcaggaauucuauauaaga

SEQ ID NO: 20893 - RNA, 19 nt, Artificial Sequence
  Synthetic
guuggauccacuauucaga

SEQ ID NO: 20894 - RNA, 18 nt, Artificial Sequence
  Synthetic
  misc_feature (13)..(13): n is a, c, g, or u
ggauccugcagcnagaga

SEQ ID NO: 20895 - RNA, 20 nt, Artificial Sequence
  Synthetic
  misc_feature (15)..(15): n is a, c, g, or u
gaggauccugcagcnagaga

SEQ ID NO: 20896 - RNA, 24 nt, Artificial Sequence
  Synthetic
  misc_feature (13)..(13): n is a, c, g, or u
gcccacucacuanaaaugaaagga

SEQ ID NO: 20897 - RNA, 20 nt, Artificial Sequence
  Synthetic
gcuuuuaguuauauggauga

SEQ ID NO: 20898 - RNA, 21 nt, Artificial Sequence
  Synthetic
ggcuuuuaguuauauggauga

SEQ ID NO: 20899 - RNA, 20 nt, Artificial Sequence
  Synthetic
gcuauuuugugcugggguga

SEQ ID NO: 20900 - RNA, 24 nt, Artificial Sequence
  Synthetic
gcaagcuauuuugugcugggguga

SEQ ID NO: 20901 - RNA, 19 nt, Artificial Sequence
  Synthetic
  misc_feature (11)..(11): n is a, c, g, or u
gagaaacuguncuugagua

SEQ ID NO: 20902 - RNA, 22 nt, Artificial Sequence
  Synthetic
  misc_feature (14)..(14): n is a, c, g, or u
gaagagaaacuguncuugagua

SEQ ID NO: 20903 - RNA, 23 nt, Artificial Sequence
  Synthetic
  misc_feature (15)..(15): n is a, c, g, or u
ggaagagaaacuguncuugagua

SEQ ID NO: 20904 - RNA, 18 nt, Artificial Sequence
  Synthetic
  misc_feature (6)..(6): n is a, c, g, or u
gcagcnagagaucuagua

SEQ ID NO: 20905 - RNA, 18 nt, Artificial Sequence
  Synthetic
gguuuuaucccaaaguua

SEQ ID NO: 20906 - RNA, 18 nt, Artificial Sequence
  Synthetic
gcuuugcagccccuuuua

SEQ ID NO: 20907 - RNA, 19 nt, Artificial Sequence
  Synthetic
ggcuuugcagccccuuuua

SEQ ID NO: 20908 - RNA, 20 nt, Artificial Sequence
  Synthetic
gggcuuugcagccccuuuua

SEQ ID NO: 20909 - RNA, 18 nt, Artificial Sequence
  Synthetic
gucaggaagaaagccaac

SEQ ID NO: 20910 - RNA, 19 nt, Artificial Sequence
  Synthetic
ggucaggaagaaagccaac

SEQ ID NO: 20911 - RNA, 18 nt, Artificial Sequence
  Synthetic
gguguguuucuuguugac

SEQ ID NO: 20912 - RNA, 20 nt, Artificial Sequence
  Synthetic
gcgguguguuucuuguugac

SEQ ID NO: 20913 - RNA, 21 nt, Artificial Sequence
  Synthetic
ggcgguguguuucuuguugac

SEQ ID NO: 20914 - RNA, 24 nt, Artificial Sequence
  Synthetic
guuccaccaagcacuguuggaucc

SEQ ID NO: 20915 - RNA, 18 nt, Artificial Sequence
  Synthetic
gauccaccuccugcuucc

SEQ ID NO: 20916 - RNA, 18 nt, Artificial Sequence
  Synthetic
ggacucuuggacuuucgc

SEQ ID NO: 20917 - RNA, 20 nt, Artificial Sequence
  Synthetic
gaggacucuuggacuuucgc

SEQ ID NO: 20918 - RNA, 19 nt, Artificial Sequence
  Synthetic
guauuaggaggcuguaggc

SEQ ID NO: 20919 - RNA, 22 nt, Artificial Sequence
  Synthetic
  misc_feature (4)..(4): n is a, c, g, or u
gacnuuggcuuccugggugggc

SEQ ID NO: 20920 - RNA, 21 nt, Artificial Sequence
  Synthetic
guaccacccggguguccuggc

SEQ ID NO: 20921 - RNA, 22 nt, Artificial Sequence
  Synthetic
gguaccacccggguguccuggc

SEQ ID NO: 20922 - RNA, 23 nt, Artificial Sequence
  Synthetic
ggguaccacccggguguccuggc

SEQ ID NO: 20923 - RNA, 24 nt, Artificial Sequence
  Synthetic
gggguaccacccggguguccuggc

SEQ ID NO: 20924 - RNA, 19 nt, Artificial Sequence
  Synthetic
guauuuuccugcugguggc

SEQ ID NO: 20925 - RNA, 23 nt, Artificial Sequence
  Synthetic
  misc_feature (2)..(2): n is a, c, g, or u
gncuguauuuuccugcugguggc

SEQ ID NO: 20926 - RNA, 24 nt, Artificial Sequence
  Synthetic
  misc_feature (3)..(3): n is a, c, g, or u
ggncuguauuuuccugcugguggc

SEQ ID NO: 20927 - RNA, 24 nt, Artificial Sequence
  Synthetic
gcucucaggcaagcuauuuugugc

SEQ ID NO: 20928 - RNA, 21 nt, Artificial Sequence
  Synthetic
gacuauugccucucucacauc

SEQ ID NO: 20929 - RNA, 19 nt, Artificial Sequence
  Synthetic
gccaaaucugugcagcauc

SEQ ID NO: 20930 - RNA, 20 nt, Artificial Sequence
  Synthetic
ggccaaaucugugcagcauc

SEQ ID NO: 20931 - RNA, 23 nt, Artificial Sequence
  Synthetic
  misc_feature (4)..(4): n is a, c, g, or u
gaancuuucugugcccaauccuc

SEQ ID NO: 20932 - RNA, 22 nt, Artificial Sequence
  Synthetic
  misc_feature (9)..(9): n is a, c, g, or u
gacaacucnguuguccuuucuc

SEQ ID NO: 20933 - RNA, 18 nt, Artificial Sequence
  Synthetic
gagugggaggcuucgguc

SEQ ID NO: 20934 - RNA, 19 nt, Artificial Sequence
  Synthetic
ggagugggaggcuucgguc

SEQ ID NO: 20935 - RNA, 22 nt, Artificial Sequence
  Synthetic
guaggagugggaggcuucgguc

SEQ ID NO: 20936 - RNA, 23 nt, Artificial Sequence
  Synthetic
gguaggagugggaggcuucgguc

SEQ ID NO: 20937 - RNA, 20 nt, Artificial Sequence
  Synthetic
gcccguguguccucuacuuc

SEQ ID NO: 20938 - RNA, 18 nt, Artificial Sequence
  Synthetic
  misc_feature (10)..(10): n is a, c, g, or u
guugaugacnuuggcuuc

SEQ ID NO: 20939 - RNA, 20 nt, Artificial Sequence
  Synthetic
  misc_feature (12)..(12): n is a, c, g, or u
gaguugaugacnuuggcuuc

SEQ ID NO: 20940 - RNA, 22 nt, Artificial Sequence
  Synthetic
  misc_feature (14)..(14): n is a, c, g, or u
gugaguugaugacnuuggcuuc

SEQ ID NO: 20941 - RNA, 23 nt, Artificial Sequence
  Synthetic
  misc_feature (15)..(15): n is a, c, g, or u
ggugaguugaugacnuuggcuuc

SEQ ID NO: 20942 - RNA, 24 nt, Artificial Sequence
  Synthetic
  misc_feature (16)..(16): n is a, c, g, or u
gggugaguugaugacnuuggcuuc

SEQ ID NO: 20943 - RNA, 18 nt, Artificial Sequence
  Synthetic
gacuucaacacaaacaag

SEQ ID NO: 20944 - RNA, 19 nt, Artificial Sequence
  Synthetic
ggacuucaacacaaacaag

SEQ ID NO: 20945 - RNA, 20 nt, Artificial Sequence
  Synthetic
gggacuucaacacaaacaag

SEQ ID NO: 20946 - RNA, 20 nt, Artificial Sequence
  Synthetic
gauucuuuccagaccaccag

SEQ ID NO: 20947 - RNA, 21 nt, Artificial Sequence
  Synthetic
ggauucuuuccagaccaccag

SEQ ID NO: 20948 - RNA, 22 nt, Artificial Sequence
  Synthetic
gggauucuuuccagaccaccag

SEQ ID NO: 20949 - RNA, 24 nt, Artificial Sequence
  Synthetic
guuucucuuggcucaguuuacuag

SEQ ID NO: 20950 - RNA, 20 nt, Artificial Sequence
  Synthetic
  misc_feature (5)..(6): n is a, c, g, or u
gccunncguuccggccgacg

SEQ ID NO: 20951 - RNA, 19 nt, Artificial Sequence
  Synthetic
gacugggaggagucggggg

SEQ ID NO: 20952 - RNA, 20 nt, Artificial Sequence
  Synthetic
ggacugggaggagucggggg

SEQ ID NO: 20953 - RNA, 19 nt, Artificial Sequence
  Synthetic
  misc_feature (7)..(7): n is a, c, g, or u
gaugaunugguauuggggg

SEQ ID NO: 20954 - RNA, 20 nt, Artificial Sequence
  Synthetic
  misc_feature (8)..(8): n is a, c, g, or u
ggaugaunugguauuggggg

SEQ ID NO: 20955 - RNA, 18 nt, Artificial Sequence
  Synthetic
guguauuuaaggacuggg

SEQ ID NO: 20956 - RNA, 22 nt, Artificial Sequence
  Synthetic
gacuguguauuuaaggacuggg

SEQ ID NO: 20957 - RNA, 20 nt, Artificial Sequence
  Synthetic
gcaagcuauuuugugcuggg

SEQ ID NO: 20958 - RNA, 21 nt, Artificial Sequence
  Synthetic
ggcaagcuauuuugugcuggg

SEQ ID NO: 20959 - RNA, 22 nt, Artificial Sequence
  Synthetic
gaacacagcuaaaacaaaaugg

SEQ ID NO: 20960 - RNA, 21 nt, Artificial Sequence
  Synthetic
gccucagcccguuucucuugg

SEQ ID NO: 20961 - RNA, 22 nt, Artificial Sequence
  Synthetic
ggccucagcccguuucucuugg

SEQ ID NO: 20962 - RNA, 23 nt, Artificial Sequence
  Synthetic
gggccucagcccguuucucuugg

SEQ ID NO: 20963 - RNA, 20 nt, Artificial Sequence
  Synthetic
gucuggcuuuuaguuauaug

SEQ ID NO: 20964 - RNA, 18 nt, Artificial Sequence
  Synthetic
gcaacuuuuucaccucug

SEQ ID NO: 20965 - RNA, 19 nt, Artificial Sequence
  Synthetic
  misc_feature (4)..(4): n is a, c, g, or u
gacnuuggcuuccugggug

SEQ ID NO: 20966 - RNA, 22 nt, Artificial Sequence
  Synthetic
  misc_feature (7)..(7): n is a, c, g, or u
gaugacnuuggcuuccugggug

SEQ ID NO: 20967 - RNA, 19 nt, Artificial Sequence
  Synthetic
  misc_feature (4)..(4): n is a, c, g, or u
gaunugauacaaaaaugug

SEQ ID NO: 20968 - RNA, 18 nt, Artificial Sequence
  Synthetic
  misc_feature (9)..(9): n is a, c, g, or u
ggacagaancuuucugug

SEQ ID NO: 20969 - RNA, 19 nt, Artificial Sequence
  Synthetic
  misc_feature (10)..(10): n is a, c, g, or u
gggacagaancuuucugug

SEQ ID NO: 20970 - RNA, 23 nt, Artificial Sequence
  Synthetic
  misc_feature (14)..(14): n is a, c, g, or u
gcaugggacagaancuuucugug

SEQ ID NO: 20971 - RNA, 24 nt, Artificial Sequence
  Synthetic
  misc_feature (15)..(15): n is a, c, g, or u
ggcaugggacagaancuuucugug

SEQ ID NO: 20972 - RNA, 18 nt, Artificial Sequence
  Synthetic
gaauagacccauugauug

SEQ ID NO: 20973 - RNA, 20 nt, Artificial Sequence
  Synthetic
gugaauagacccauugauug

SEQ ID NO: 20974 - RNA, 18 nt, Artificial Sequence
  Synthetic
guuuacuagugcaauuug

SEQ ID NO: 20975 - RNA, 19 nt, Artificial Sequence
  Synthetic
guugguucuucuggacuau

SEQ ID NO: 20976 - RNA, 19 nt, Artificial Sequence
  Synthetic
gcuuucggaaaauaccuau

SEQ ID NO: 20977 - RNA, 20 nt, Artificial Sequence
  Synthetic
ggcuuucggaaaauaccuau

SEQ ID NO: 20978 - RNA, 21 nt, Artificial Sequence
  Synthetic
  misc_feature (2)..(2): n is a, c, g, or u
gncuaaaaauuagacaauuau

SEQ ID NO: 20979 - RNA, 22 nt, Artificial Sequence
  Synthetic
  misc_feature (3)..(3): n is a, c, g, or u
ggncuaaaaauuagacaauuau

SEQ ID NO: 20980 - RNA, 23 nt, Artificial Sequence
  Synthetic
  misc_feature (4)..(4): n is a, c, g, or u
gggncuaaaaauuagacaauuau

SEQ ID NO: 20981 - RNA, 18 nt, Artificial Sequence
  Synthetic
gaucuaguaguuaauuau

SEQ ID NO: 20982 - RNA, 20 nt, Artificial Sequence
  Synthetic
gagaucuaguaguuaauuau

SEQ ID NO: 20983 - RNA, 24 nt, Artificial Sequence
  Synthetic
  misc_feature (3)..(3): n is a, c, g, or u
gcnagagaucuaguaguuaauuau

SEQ ID NO: 20984 - RNA, 24 nt, Artificial Sequence
  Synthetic
  misc_feature (12)..(12): n is a, c, g, or u
gaacaauuugunggcccacucacu

SEQ ID NO: 20985 - RNA, 18 nt, Artificial Sequence
  Synthetic
guuacuaaauacuucccu

SEQ ID NO: 20986 - RNA, 19 nt, Artificial Sequence
  Synthetic
gcccucuaccgagaugccu

SEQ ID NO: 20987 - RNA, 21 nt, Artificial Sequence
  Synthetic
  misc_feature (9)..(9): n is a, c, g, or u
guaaggggncuguauuuuccu

SEQ ID NO: 20988 - RNA, 23 nt, Artificial Sequence
  Synthetic
  misc_feature (11)..(11): n is a, c, g, or u
gaguaaggggncuguauuuuccu

SEQ ID NO: 20989 - RNA, 20 nt, Artificial Sequence
  Synthetic
  misc_feature (12)..(12): n is a, c, g, or u
  misc_feature (18)..(18): n is a, c, g, or u
gucaauacuaanaugggncu

SEQ ID NO: 20990 - RNA, 20 nt, Artificial Sequence
  Synthetic
  misc_feature (12)..(12): n is a, c, g, or u
gauccugcagcnagagaucu

SEQ ID NO: 20991 - RNA, 21 nt, Artificial Sequence
  Synthetic
  misc_feature (13)..(13): n is a, c, g, or u
ggauccugcagcnagagaucu

SEQ ID NO: 20992 - RNA, 23 nt, Artificial Sequence
  Synthetic
  misc_feature (15)..(15): n is a, c, g, or u
gaggauccugcagcnagagaucu

SEQ ID NO: 20993 - RNA, 19 nt, Artificial Sequence
  Synthetic
gaaccuuuguggcuccucu

SEQ ID NO: 20994 - RNA, 20 nt, Artificial Sequence
  Synthetic
ggaaccuuuguggcuccucu

SEQ ID NO: 20995 - RNA, 18 nt, Artificial Sequence
  Synthetic
gacuucucucaauuuucu

SEQ ID NO: 20996 - RNA, 19 nt, Artificial Sequence
  Synthetic
ggacuucucucaauuuucu

SEQ ID NO: 20997 - RNA, 19 nt, Artificial Sequence
  Synthetic
gaggagucgggggaggagu

SEQ ID NO: 20998 - RNA, 20 nt, Artificial Sequence
  Synthetic
ggaggagucgggggaggagu

SEQ ID NO: 20999 - RNA, 21 nt, Artificial Sequence
  Synthetic
gggaggagucgggggaggagu

SEQ ID NO: 21000 - RNA, 21 nt, Artificial Sequence
  Synthetic
guauuuggugucuuuuggagu

SEQ ID NO: 21001 - RNA, 23 nt, Artificial Sequence
  Synthetic
gaguauuuggugucuuuuggagu

SEQ ID NO: 21002 - RNA, 18 nt, Artificial Sequence
  Synthetic
gccaauggcaaacaaggu

SEQ ID NO: 21003 - RNA, 19 nt, Artificial Sequence
  Synthetic
ggccaauggcaaacaaggu

SEQ ID NO: 21004 - RNA, 19 nt, Artificial Sequence
  Synthetic
  misc_feature (16)..(16): n is a, c, g, or u
gaagguuugucaacgnauu

SEQ ID NO: 21005 - RNA, 20 nt, Artificial Sequence
  Synthetic
  misc_feature (17)..(17): n is a, c, g, or u
ggaagguuugucaacgnauu

SEQ ID NO: 21006 - RNA, 24 nt, Artificial Sequence
  Synthetic
  misc_feature (21)..(21): n is a, c, g, or u
gauuggaagguuugucaacgnauu

SEQ ID NO: 21007 - RNA, 18 nt, Artificial Sequence
  Synthetic
gaucucaaucuccagcuu

SEQ ID NO: 21008 - RNA, 18 nt, Artificial Sequence
  Synthetic
gcuaugccucaucuucuu

SEQ ID NO: 21009 - RNA, 18 nt, Artificial Sequence
  Synthetic
gggggaggaguugagguu

SEQ ID NO: 21010 - RNA, 21 nt, Artificial Sequence
  Synthetic
gucgggggaggaguugagguu

SEQ ID NO: 21011 - RNA, 23 nt, Artificial Sequence
  Synthetic
gagucgggggaggaguugagguu

SEQ ID NO: 21012 - RNA, 24 nt, Artificial Sequence
  Synthetic
ggagucgggggaggaguugagguu

SEQ ID NO: 21013 - RNA, 19 nt, Artificial Sequence
  Synthetic
gucccuuuauaccgcuguu

SEQ ID NO: 21014 - RNA, 21 nt, Artificial Sequence
  Synthetic
gagucccuuuauaccgcuguu

SEQ ID NO: 21015 - RNA, 18 nt, Artificial Sequence
  Synthetic
  misc_feature (10)..(10): n is a, c, g, or u
  misc_feature (12)..(12): n is a, c, g, or u
gguuauuccnuncacuuu

SEQ ID NO: 21016 - RNA, 19 nt, Artificial Sequence
  Synthetic
  misc_feature (11)..(11): n is a, c, g, or u
  misc_feature (13)..(13): n is a, c, g, or u
ggguuauuccnuncacuuu

SEQ ID NO: 21017 - RNA, 20 nt, Artificial Sequence
  Synthetic
  misc_feature (12)..(12): n is a, c, g, or u
  misc_feature (14)..(14): n is a, c, g, or u
gggguuauuccnuncacuuu

SEQ ID NO: 21018 - RNA, 22 nt, Artificial Sequence
  Synthetic
  misc_feature (14)..(14): n is a, c, g, or u
  misc_feature (16)..(16): n is a, c, g, or u
gugggguuauuccnuncacuuu

SEQ ID NO: 21019 - RNA, 23 nt, Artificial Sequence
  Synthetic
  misc_feature (15)..(15): n is a, c, g, or u
  misc_feature (17)..(17): n is a, c, g, or u
ggugggguuauuccnuncacuuu

SEQ ID NO: 21020 - RNA, 23 nt, Artificial Sequence
  Synthetic
  misc_feature (3)..(3): n is a, c, g, or u
guncuugaguauuuggugucuuu

SEQ ID NO: 21021 - RNA, 19 nt, Artificial Sequence
  Synthetic
guuucucuuggcucaguuu

SEQ ID NO: 21022 - RNA, 19 nt, Artificial Sequence
  Synthetic
ugcccacagauaacaaaaa

SEQ ID NO: 21023 - RNA, 20 nt, Artificial Sequence
  Synthetic
augcccacagauaacaaaaa

SEQ ID NO: 21024 - RNA, 23 nt, Artificial Sequence
  Synthetic
uggaugcccacagauaacaaaaa

SEQ ID NO: 21025 - RNA, 24 nt, Artificial Sequence
  Synthetic
auggaugcccacagauaacaaaaa

SEQ ID NO: 21026 - RNA, 18 nt, Artificial Sequence
  Synthetic
agugggacaugaacaaaa

SEQ ID NO: 21027 - RNA, 19 nt, Artificial Sequence
  Synthetic
cagugggacaugaacaaaa

SEQ ID NO: 21028 - RNA, 20 nt, Artificial Sequence
  Synthetic
acagugggacaugaacaaaa

SEQ ID NO: 21029 - RNA, 18 nt, Artificial Sequence
  Synthetic
aaccagucaggauugaaa

SEQ ID NO: 21030 - RNA, 19 nt, Artificial Sequence
  Synthetic
uaaccagucaggauugaaa

SEQ ID NO: 21031 - RNA, 20 nt, Artificial Sequence
  Synthetic
uuaaccagucaggauugaaa

SEQ ID NO: 21032 - RNA, 22 nt, Artificial Sequence
  Synthetic
aguuaaccagucaggauugaaa

SEQ ID NO: 21033 - RNA, 19 nt, Artificial Sequence
  Synthetic
aguccagaagaaccaacaa

SEQ ID NO: 21034 - RNA, 20 nt, Artificial Sequence
  Synthetic
uaguccagaagaaccaacaa

SEQ ID NO: 21035 - RNA, 18 nt, Artificial Sequence
  Synthetic
uauuuuccgaaagcccaa

SEQ ID NO: 21036 - RNA, 21 nt, Artificial Sequence
  Synthetic
agguauuuuccgaaagcccaa

SEQ ID NO: 21037 - RNA, 22 nt, Artificial Sequence
  Synthetic
uagguauuuuccgaaagcccaa

SEQ ID NO: 21038 - RNA, 23 nt, Artificial Sequence
  Synthetic
auagguauuuuccgaaagcccaa

SEQ ID NO: 21039 - RNA, 24 nt, Artificial Sequence
  Synthetic
cauagguauuuuccgaaagcccaa

SEQ ID NO: 21040 - RNA, 18 nt, Artificial Sequence
  Synthetic
cuggccguugccgagcaa

SEQ ID NO: 21041 - RNA, 19 nt, Artificial Sequence
  Synthetic
ccuggccguugccgagcaa

SEQ ID NO: 21042 - RNA, 18 nt, Artificial Sequence
  Synthetic
  misc_feature (6)..(6): n is a, c, g, or u
uaucanaucuugaugcaa

SEQ ID NO: 21043 - RNA, 20 nt, Artificial Sequence
  Synthetic
  misc_feature (8)..(8): n is a, c, g, or u
uguaucanaucuugaugcaa

SEQ ID NO: 21044 - RNA, 21 nt, Artificial Sequence
  Synthetic
  misc_feature (9)..(9): n is a, c, g, or u
uuguaucanaucuugaugcaa

SEQ ID NO: 21045 - RNA, 22 nt, Artificial Sequence
  Synthetic
  misc_feature (10)..(10): n is a, c, g, or u
uuuguaucanaucuugaugcaa

SEQ ID NO: 21046 - RNA, 23 nt, Artificial Sequence
  Synthetic
  misc_feature (11)..(11): n is a, c, g, or u
uuuuguaucanaucuugaugcaa

SEQ ID NO: 21047 - RNA, 24 nt, Artificial Sequence
  Synthetic
  misc_feature (12)..(12): n is a, c, g, or u
uuuuuguaucanaucuugaugcaa

SEQ ID NO: 21048 - RNA, 18 nt, Artificial Sequence
  Synthetic
uguuuuagcuguguucaa

SEQ ID NO: 21049 - RNA, 19 nt, Artificial Sequence
  Synthetic
uuguuuuagcuguguucaa

SEQ ID NO: 21050 - RNA, 20 nt, Artificial Sequence
  Synthetic
uuuguuuuagcuguguucaa

SEQ ID NO: 21051 - RNA, 21 nt, Artificial Sequence
  Synthetic
uuuuguuuuagcuguguucaa

SEQ ID NO: 21052 - RNA, 22 nt, Artificial Sequence
  Synthetic
auuuuguuuuagcuguguucaa

SEQ ID NO: 21053 - RNA, 23 nt, Artificial Sequence
  Synthetic
cauuuuguuuuagcuguguucaa

SEQ ID NO: 21054 - RNA, 24 nt, Artificial Sequence
  Synthetic
ccauuuuguuuuagcuguguucaa

SEQ ID NO: 21055 - RNA, 18 nt, Artificial Sequence
  Synthetic
agcucuuguucccaggaa

SEQ ID NO: 21056 - RNA, 19 nt, Artificial Sequence
  Synthetic
uagcucuuguucccaggaa

SEQ ID NO: 21057 - RNA, 18 nt, Artificial Sequence
  Synthetic
cagcaggaugaagaggaa

SEQ ID NO: 21058 - RNA, 20 nt, Artificial Sequence
  Synthetic
agcagcaggaugaagaggaa

SEQ ID NO: 21059 - RNA, 21 nt, Artificial Sequence
  Synthetic
uagcagcaggaugaagaggaa

SEQ ID NO: 21060 - RNA, 22 nt, Artificial Sequence
  Synthetic
auagcagcaggaugaagaggaa

SEQ ID NO: 21061 - RNA, 23 nt, Artificial Sequence
  Synthetic
cauagcagcaggaugaagaggaa

SEQ ID NO: 21062 - RNA, 18 nt, Artificial Sequence
  Synthetic
  misc_feature (1)..(1): n is a, c, g, or u
nccuagcagccaugggaa

SEQ ID NO: 21063 - RNA, 19 nt, Artificial Sequence
  Synthetic
  misc_feature (2)..(2): n is a, c, g, or u
anccuagcagccaugggaa

SEQ ID NO: 21064 - RNA, 20 nt, Artificial Sequence
  Synthetic
  misc_feature (3)..(3): n is a, c, g, or u
canccuagcagccaugggaa

SEQ ID NO: 21065 - RNA, 21 nt, Artificial Sequence
  Synthetic
  misc_feature (4)..(4): n is a, c, g, or u
acanccuagcagccaugggaa

SEQ ID NO: 21066 - RNA, 22 nt, Artificial Sequence
  Synthetic
  misc_feature (5)..(5): n is a, c, g, or u
cacanccuagcagccaugggaa

SEQ ID NO: 21067 - RNA, 24 nt, Artificial Sequence
  Synthetic
  misc_feature (7)..(7): n is a, c, g, or u
agcacanccuagcagccaugggaa

SEQ ID NO: 21068 - RNA, 18 nt, Artificial Sequence
  Synthetic
aacagugggacaugaaca

SEQ ID NO: 21069 - RNA, 20 nt, Artificial Sequence
  Synthetic
ugaacagugggacaugaaca

SEQ ID NO: 21070 - RNA, 19 nt, Artificial Sequence
  Synthetic
uggaugcccacagauaaca

SEQ ID NO: 21071 - RNA, 20 nt, Artificial Sequence
  Synthetic
auggaugcccacagauaaca

SEQ ID NO: 21072 - RNA, 19 nt, Artificial Sequence
  Synthetic
ugagagcaggauaaccaca

SEQ ID NO: 21073 - RNA, 20 nt, Artificial Sequence
  Synthetic
augagagcaggauaaccaca

SEQ ID NO: 21074 - RNA, 18 nt, Artificial Sequence
  Synthetic
uccacacuccaaaagaca

SEQ ID NO: 21075 - RNA, 19 nt, Artificial Sequence
  Synthetic
auccacacuccaaaagaca

SEQ ID NO: 21076 - RNA, 20 nt, Artificial Sequence
  Synthetic
  misc_feature (1)..(1): n is a, c, g, or u
nauccacacuccaaaagaca

SEQ ID NO: 21077 - RNA, 18 nt, Artificial Sequence
  Synthetic
aggacaaguuggaggaca

SEQ ID NO: 21078 - RNA, 19 nt, Artificial Sequence
  Synthetic
caggacaaguuggaggaca

SEQ ID NO: 21079 - RNA, 20 nt, Artificial Sequence
  Synthetic
ccaggacaaguuggaggaca

SEQ ID NO: 21080 - RNA, 18 nt, Artificial Sequence
  Synthetic
  misc_feature (8)..(8): n is a, c, g, or u
ucccaaunauauaaccca

SEQ ID NO: 21081 - RNA, 19 nt, Artificial Sequence
  Synthetic
  misc_feature (9)..(9): n is a, c, g, or u
cucccaaunauauaaccca

SEQ ID NO: 21082 - RNA, 20 nt, Artificial Sequence
  Synthetic
  misc_feature (10)..(10): n is a, c, g, or u
acucccaaunauauaaccca

SEQ ID NO: 21083 - RNA, 21 nt, Artificial Sequence
  Synthetic
  misc_feature (11)..(11): n is a, c, g, or u
aacucccaaunauauaaccca

SEQ ID NO: 21084 - RNA, 22 nt, Artificial Sequence
  Synthetic
  misc_feature (12)..(12): n is a, c, g, or u
caacucccaaunauauaaccca

SEQ ID NO: 21085 - RNA, 23 nt, Artificial Sequence
  Synthetic
  misc_feature (13)..(13): n is a, c, g, or u
ccaacucccaaunauauaaccca

SEQ ID NO: 21086 - RNA, 24 nt, Artificial Sequence
  Synthetic
  misc_feature (14)..(14): n is a, c, g, or u
cccaacucccaaunauauaaccca

SEQ ID NO: 21087 - RNA, 18 nt, Artificial Sequence
  Synthetic
caggaauauggugaccca

SEQ ID NO: 21088 - RNA, 19 nt, Artificial Sequence
  Synthetic
ccaggaauauggugaccca

SEQ ID NO: 21089 - RNA, 20 nt, Artificial Sequence
  Synthetic
cccaggaauauggugaccca

SEQ ID NO: 21090 - RNA, 20 nt, Artificial Sequence
  Synthetic
uggccaaucgccaagcccca

SEQ ID NO: 21091 - RNA, 19 nt, Artificial Sequence
  Synthetic
uggucuggaaagaauccca

SEQ ID NO: 21092 - RNA, 22 nt, Artificial Sequence
  Synthetic
ugguggucuggaaagaauccca

SEQ ID NO: 21093 - RNA, 23 nt, Artificial Sequence
  Synthetic
cugguggucuggaaagaauccca

SEQ ID NO: 21094 - RNA, 24 nt, Artificial Sequence
  Synthetic
acugguggucuggaaagaauccca

SEQ ID NO: 21095 - RNA, 18 nt, Artificial Sequence
  Synthetic
ccauauaacuaaaagcca

SEQ ID NO: 21096 - RNA, 19 nt, Artificial Sequence
  Synthetic
uccauauaacuaaaagcca

SEQ ID NO: 21097 - RNA, 20 nt, Artificial Sequence
  Synthetic
auccauauaacuaaaagcca

SEQ ID NO: 21098 - RNA, 21 nt, Artificial Sequence
  Synthetic
cauccauauaacuaaaagcca

SEQ ID NO: 21099 - RNA, 22 nt, Artificial Sequence
  Synthetic
ucauccauauaacuaaaagcca

SEQ ID NO: 21100 - RNA, 23 nt, Artificial Sequence
  Synthetic
aucauccauauaacuaaaagcca

SEQ ID NO: 21101 - RNA, 24 nt, Artificial Sequence
  Synthetic
  misc_feature (1)..(1): n is a, c, g, or u
naucauccauauaacuaaaagcca

SEQ ID NO: 21102 - RNA, 18 nt, Artificial Sequence
  Synthetic
cucugaauaguggaucca

SEQ ID NO: 21103 - RNA, 20 nt, Artificial Sequence
  Synthetic
ugcucugaauaguggaucca

SEQ ID NO: 21104 - RNA, 21 nt, Artificial Sequence
  Synthetic
uugcucugaauaguggaucca

SEQ ID NO: 21105 - RNA, 22 nt, Artificial Sequence
  Synthetic
uuugcucugaauaguggaucca

SEQ ID NO: 21106 - RNA, 23 nt, Artificial Sequence
  Synthetic
auuugcucugaauaguggaucca

SEQ ID NO: 21107 - RNA, 24 nt, Artificial Sequence
  Synthetic
aauuugcucugaauaguggaucca

SEQ ID NO: 21108 - RNA, 18 nt, Artificial Sequence
  Synthetic
ucccaccuuaugagucca

SEQ ID NO: 21109 - RNA, 19 nt, Artificial Sequence
  Synthetic
uucccaccuuaugagucca

SEQ ID NO: 21110 - RNA, 20 nt, Artificial Sequence
  Synthetic
uuucccaccuuaugagucca

SEQ ID NO: 21111 - RNA, 18 nt, Artificial Sequence
  Synthetic
  misc_feature (1)..(1): n is a, c, g, or u
ncguugacaaaccuucca

SEQ ID NO: 21112 - RNA, 19 nt, Artificial Sequence
  Synthetic
  misc_feature (2)..(2): n is a, c, g, or u
uncguugacaaaccuucca

SEQ ID NO: 21113 - RNA, 20 nt, Artificial Sequence
  Synthetic
  misc_feature (3)..(3): n is a, c, g, or u
auncguugacaaaccuucca

SEQ ID NO: 21114 - RNA, 18 nt, Artificial Sequence
  Synthetic
uagaauuccugccuucca

SEQ ID NO: 21115 - RNA, 19 nt, Artificial Sequence
  Synthetic
auagaauuccugccuucca

SEQ ID NO: 21116 - RNA, 20 nt, Artificial Sequence
  Synthetic
uauagaauuccugccuucca

SEQ ID NO: 21117 - RNA, 21 nt, Artificial Sequence
  Synthetic
auauagaauuccugccuucca

SEQ ID NO: 21118 - RNA, 22 nt, Artificial Sequence
  Synthetic
uauauagaauuccugccuucca

SEQ ID NO: 21119 - RNA, 23 nt, Artificial Sequence
  Synthetic
uuauauagaauuccugccuucca

SEQ ID NO: 21120 - RNA, 24 nt, Artificial Sequence
  Synthetic
cuuauauagaauuccugccuucca

SEQ ID NO: 21121 - RNA, 18 nt, Artificial Sequence
  Synthetic
cuccgauugguggaagca

SEQ ID NO: 21122 - RNA, 19 nt, Artificial Sequence
  Synthetic
ccuccgauugguggaagca

SEQ ID NO: 21123 - RNA, 20 nt, Artificial Sequence
  Synthetic
accuccgauugguggaagca

SEQ ID NO: 21124 - RNA, 18 nt, Artificial Sequence
  Synthetic
caucaacucaccccagca

SEQ ID NO: 21125 - RNA, 19 nt, Artificial Sequence
  Synthetic
ucaucaacucaccccagca

SEQ ID NO: 21126 - RNA, 21 nt, Artificial Sequence
  Synthetic
  misc_feature (1)..(1): n is a, c, g, or u
ngucaucaacucaccccagca

SEQ ID NO: 21127 - RNA, 22 nt, Artificial Sequence
  Synthetic
  misc_feature (2)..(2): n is a, c, g, or u
angucaucaacucaccccagca

SEQ ID NO: 21128 - RNA, 23 nt, Artificial Sequence
  Synthetic
  misc_feature (3)..(3): n is a, c, g, or u
aangucaucaacucaccccagca

SEQ ID NO: 21129 - RNA, 24 nt, Artificial Sequence
  Synthetic
  misc_feature (4)..(4): n is a, c, g, or u
caangucaucaacucaccccagca

SEQ ID NO: 21130 - RNA, 18 nt, Artificial Sequence
  Synthetic
ucuuccaaauguaaggca

SEQ ID NO: 21131 - RNA, 19 nt, Artificial Sequence
  Synthetic
cucuuccaaauguaaggca

SEQ ID NO: 21132 - RNA, 20 nt, Artificial Sequence
  Synthetic
ucucuuccaaauguaaggca

SEQ ID NO: 21133 - RNA, 21 nt, Artificial Sequence
  Synthetic
uucucuuccaaauguaaggca

SEQ ID NO: 21134 - RNA, 22 nt, Artificial Sequence
  Synthetic
uuucucuuccaaauguaaggca

SEQ ID NO: 21135 - RNA, 24 nt, Artificial Sequence
  Synthetic
aguuucucuuccaaauguaaggca

SEQ ID NO: 21136 - RNA, 19 nt, Artificial Sequence
  Synthetic
uguugauaggauaggggca

SEQ ID NO: 21137 - RNA, 21 nt, Artificial Sequence
  Synthetic
aguguugauaggauaggggca

SEQ ID NO: 21138 - RNA, 22 nt, Artificial Sequence
  Synthetic
aaguguugauaggauaggggca

SEQ ID NO: 21139 - RNA, 18 nt, Artificial Sequence
  Synthetic
ugacaaaccuuccaauca

SEQ ID NO: 21140 - RNA, 19 nt, Artificial Sequence
  Synthetic
uugacaaaccuuccaauca

SEQ ID NO: 21141 - RNA, 21 nt, Artificial Sequence
  Synthetic
cguugacaaaccuuccaauca

SEQ ID NO: 21142 - RNA, 22 nt, Artificial Sequence
  Synthetic
  misc_feature (1)..(1): n is a, c, g, or u
ncguugacaaaccuuccaauca

SEQ ID NO: 21143 - RNA, 23 nt, Artificial Sequence
  Synthetic
  misc_feature (2)..(2): n is a, c, g, or u
uncguugacaaaccuuccaauca

SEQ ID NO: 21144 - RNA, 24 nt, Artificial Sequence
  Synthetic
  misc_feature (3)..(3): n is a, c, g, or u
auncguugacaaaccuuccaauca

SEQ ID NO: 21145 - RNA, 19 nt, Artificial Sequence
  Synthetic
agugaaugucaggaaaaga

SEQ ID NO: 21146 - RNA, 20 nt, Artificial Sequence
  Synthetic
aagugaaugucaggaaaaga

SEQ ID NO: 21147 - RNA, 21 nt, Artificial Sequence
  Synthetic
caagugaaugucaggaaaaga

SEQ ID NO: 21148 - RNA, 23 nt, Artificial Sequence
  Synthetic
ugcaagugaaugucaggaaaaga

SEQ ID NO: 21149 - RNA, 24 nt, Artificial Sequence
  Synthetic
augcaagugaaugucaggaaaaga

SEQ ID NO: 21150 - RNA, 19 nt, Artificial Sequence
  Synthetic
agauugaugaugugagaga

SEQ ID NO: 21151 - RNA, 20 nt, Artificial Sequence
  Synthetic
aagauugaugaugugagaga

SEQ ID NO: 21152 - RNA, 18 nt, Artificial Sequence
  Synthetic
ucuucgucugcgaggcga

SEQ ID NO: 21153 - RNA, 19 nt, Artificial Sequence
  Synthetic
aucuucgucugcgaggcga

SEQ ID NO: 21154 - RNA, 18 nt, Artificial Sequence
  Synthetic
aggguccccagucuucga

SEQ ID NO: 21155 - RNA, 19 nt, Artificial Sequence
  Synthetic
caggguccccagucuucga

SEQ ID NO: 21156 - RNA, 20 nt, Artificial Sequence
  Synthetic
  misc_feature (1)..(1): n is a, c, g, or u
ncaggguccccagucuucga

SEQ ID NO: 21157 - RNA, 19 nt, Artificial Sequence
  Synthetic
aggucccggacagacggga

SEQ ID NO: 21158 - RNA, 20 nt, Artificial Sequence
  Synthetic
uaggucccggacagacggga

SEQ ID NO: 21159 - RNA, 18 nt, Artificial Sequence
  Synthetic
uccaacugguggucugga

SEQ ID NO: 21160 - RNA, 19 nt, Artificial Sequence
  Synthetic
auccaacugguggucugga

SEQ ID NO: 21161 - RNA, 20 nt, Artificial Sequence
  Synthetic
ugguggaagcaggaggugga

SEQ ID NO: 21162 - RNA, 21 nt, Artificial Sequence
  Synthetic
uugguggaagcaggaggugga

SEQ ID NO: 21163 - RNA, 22 nt, Artificial Sequence
  Synthetic
auugguggaagcaggaggugga

SEQ ID NO: 21164 - RNA, 24 nt, Artificial Sequence
  Synthetic
cgauugguggaagcaggaggugga

SEQ ID NO: 21165 - RNA, 18 nt, Artificial Sequence
  Synthetic
agcccuacgcaccacuga

SEQ ID NO: 21166 - RNA, 19 nt, Artificial Sequence
  Synthetic
aagcccuacgcaccacuga

SEQ ID NO: 21167 - RNA, 20 nt, Artificial Sequence
  Synthetic
aaagcccuacgcaccacuga

SEQ ID NO: 21168 - RNA, 20 nt, Artificial Sequence
  Synthetic
agggguccuaggaguccuga

SEQ ID NO: 21169 - RNA, 18 nt, Artificial Sequence
  Synthetic
aucucgguagagggcuga

SEQ ID NO: 21170 - RNA, 19 nt, Artificial Sequence
  Synthetic
caucucgguagagggcuga

SEQ ID NO: 21171 - RNA, 18 nt, Artificial Sequence
  Synthetic
augauuaggcagagguga

SEQ ID NO: 21172 - RNA, 20 nt, Artificial Sequence
  Synthetic
agaugauuaggcagagguga

SEQ ID NO: 21173 - RNA, 21 nt, Artificial Sequence
  Synthetic
aagaugauuaggcagagguga

SEQ ID NO: 21174 - RNA, 22 nt, Artificial Sequence
  Synthetic
aaagaugauuaggcagagguga

SEQ ID NO: 21175 - RNA, 23 nt, Artificial Sequence
  Synthetic
aaaagaugauuaggcagagguga

SEQ ID NO: 21176 - RNA, 24 nt, Artificial Sequence
  Synthetic
caaaagaugauuaggcagagguga

SEQ ID NO: 21177 - RNA, 19 nt, Artificial Sequence
  Synthetic
  misc_feature (3)..(3): n is a, c, g, or u
  misc_feature (9)..(9): n is a, c, g, or u
agncccaunuuaguauuga

SEQ ID NO: 21178 - RNA, 20 nt, Artificial Sequence
  Synthetic
  misc_feature (4)..(4): n is a, c, g, or u
  misc_feature (10)..(10): n is a, c, g, or u
uagncccaunuuaguauuga

SEQ ID NO: 21179 - RNA, 21 nt, Artificial Sequence
  Synthetic
  misc_feature (5)..(5): n is a, c, g, or u
  misc_feature (11)..(11): n is a, c, g, or u
uuagncccaunuuaguauuga

SEQ ID NO: 21180 - RNA, 22 nt, Artificial Sequence
  Synthetic
  misc_feature (6)..(6): n is a, c, g, or u
  misc_feature (12)..(12): n is a, c, g, or u
uuuagncccaunuuaguauuga

SEQ ID NO: 21181 - RNA, 23 nt, Artificial Sequence
  Synthetic
  misc_feature (7)..(7): n is a, c, g, or u
  misc_feature (13)..(13): n is a, c, g, or u
uuuuagncccaunuuaguauuga

SEQ ID NO: 21182 - RNA, 24 nt, Artificial Sequence
  Synthetic
  misc_feature (8)..(8): n is a, c, g, or u
  misc_feature (14)..(14): n is a, c, g, or u
uuuuuagncccaunuuaguauuga

SEQ ID NO: 21183 - RNA, 18 nt, Artificial Sequence
  Synthetic
  misc_feature (17)..(17): n is a, c, g, or u
uauaacccauaaagugna

SEQ ID NO: 21184 - RNA, 19 nt, Artificial Sequence
  Synthetic
  misc_feature (18)..(18): n is a, c, g, or u
auauaacccauaaagugna

SEQ ID NO: 21185 - RNA, 20 nt, Artificial Sequence
  Synthetic
  misc_feature (1)..(1): n is a, c, g, or u
  misc_feature (19)..(19): n is a, c, g, or u
nauauaacccauaaagugna

SEQ ID NO: 21186 - RNA, 21 nt, Artificial Sequence
  Synthetic
  misc_feature (2)..(2): n is a, c, g, or u
  misc_feature (20)..(20): n is a, c, g, or u
unauauaacccauaaagugna

SEQ ID NO: 21187 - RNA, 22 nt, Artificial Sequence
  Synthetic
  misc_feature (3)..(3): n is a, c, g, or u
  misc_feature (21)..(21): n is a, c, g, or u
aunauauaacccauaaagugna

SEQ ID NO: 21188 - RNA, 23 nt, Artificial Sequence
  Synthetic
  misc_feature (4)..(4): n is a, c, g, or u
  misc_feature (22)..(22): n is a, c, g, or u
aaunauauaacccauaaagugna

SEQ ID NO: 21189 - RNA, 24 nt, Artificial Sequence
  Synthetic
  misc_feature (5)..(5): n is a, c, g, or u
  misc_feature (23)..(23): n is a, c, g, or u
caaunauauaacccauaaagugna

SEQ ID NO: 21190 - RNA, 18 nt, Artificial Sequence
  Synthetic
  misc_feature (5)..(5): n is a, c, g, or u
  misc_feature (17)..(17): n is a, c, g, or u
aauanugucuaguuuuna

SEQ ID NO: 21191 - RNA, 19 nt, Artificial Sequence
  Synthetic
  misc_feature (6)..(6): n is a, c, g, or u
  misc_feature (18)..(18): n is a, c, g, or u
aaauanugucuaguuuuna

SEQ ID NO: 21192 - RNA, 20 nt, Artificial Sequence
  Synthetic
  misc_feature (7)..(7): n is a, c, g, or u
  misc_feature (19)..(19): n is a, c, g, or u
uaaauanugucuaguuuuna

SEQ ID NO: 21193 - RNA, 22 nt, Artificial Sequence
  Synthetic
  misc_feature (9)..(9): n is a, c, g, or u
  misc_feature (21)..(21): n is a, c, g, or u
uguaaauanugucuaguuuuna

SEQ ID NO: 21194 - RNA, 23 nt, Artificial Sequence
  Synthetic
  misc_feature (10)..(10): n is a, c, g, or u
  misc_feature (22)..(22): n is a, c, g, or u
auguaaauanugucuaguuuuna

SEQ ID NO: 21195 - RNA, 24 nt, Artificial Sequence
  Synthetic
  misc_feature (11)..(11): n is a, c, g, or u
  misc_feature (23)..(23): n is a, c, g, or u
uauguaaauanugucuaguuuuna

SEQ ID NO: 21196 - RNA, 18 nt, Artificial Sequence
  Synthetic
ccucccaguccuuaaaua

SEQ ID NO: 21197 - RNA, 19 nt, Artificial Sequence
  Synthetic
uccucccaguccuuaaaua

SEQ ID NO: 21198 - RNA, 20 nt, Artificial Sequence
  Synthetic
cuccucccaguccuuaaaua

SEQ ID NO: 21199 - RNA, 18 nt, Artificial Sequence
  Synthetic
uggaauuugcucugaaua

SEQ ID NO: 21200 - RNA, 19 nt, Artificial Sequence
  Synthetic
cuggaauuugcucugaaua

SEQ ID NO: 21201 - RNA, 18 nt, Artificial Sequence
  Synthetic
uguggauucucucuuaua

SEQ ID NO: 21202 - RNA, 20 nt, Artificial Sequence
  Synthetic
uguguggauucucucuuaua

SEQ ID NO: 21203 - RNA, 18 nt, Artificial Sequence
  Synthetic
uauugacauaauuaacua

SEQ ID NO: 21204 - RNA, 20 nt, Artificial Sequence
  Synthetic
aguauugacauaauuaacua

SEQ ID NO: 21205 - RNA, 21 nt, Artificial Sequence
  Synthetic
uaguauugacauaauuaacua

SEQ ID NO: 21206 - RNA, 22 nt, Artificial Sequence
  Synthetic
uuaguauugacauaauuaacua

SEQ ID NO: 21207 - RNA, 23 nt, Artificial Sequence
  Synthetic
  misc_feature (1)..(1): n is a, c, g, or u
nuuaguauugacauaauuaacua

SEQ ID NO: 21208 - RNA, 24 nt, Artificial Sequence
  Synthetic
  misc_feature (2)..(2): n is a, c, g, or u
unuuaguauugacauaauuaacua

SEQ ID NO: 21209 - RNA, 18 nt, Artificial Sequence
  Synthetic
uuuauccaaagggaagua

SEQ ID NO: 21210 - RNA, 19 nt, Artificial Sequence
  Synthetic
cuuuauccaaagggaagua

SEQ ID NO: 21211 - RNA, 20 nt, Artificial Sequence
  Synthetic
ccuuuauccaaagggaagua

SEQ ID NO: 21212 - RNA, 21 nt, Artificial Sequence
  Synthetic
accuuuauccaaagggaagua

SEQ ID NO: 21213 - RNA, 22 nt, Artificial Sequence
  Synthetic
uaccuuuauccaaagggaagua

SEQ ID NO: 21214 - RNA, 23 nt, Artificial Sequence
  Synthetic
auaccuuuauccaaagggaagua

SEQ ID NO: 21215 - RNA, 24 nt, Artificial Sequence
  Synthetic
aauaccuuuauccaaagggaagua

SEQ ID NO: 21216 - RNA, 20 nt, Artificial Sequence
  Synthetic
uggaggacaggagguuggua

SEQ ID NO: 21217 - RNA, 21 nt, Artificial Sequence
  Synthetic
uuggaggacaggagguuggua

SEQ ID NO: 21218 - RNA, 23 nt, Artificial Sequence
  Synthetic
aguuggaggacaggagguuggua

SEQ ID NO: 21219 - RNA, 24 nt, Artificial Sequence
  Synthetic
aaguuggaggacaggagguuggua

SEQ ID NO: 21220 - RNA, 18 nt, Artificial Sequence
  Synthetic
  misc_feature (16)..(16): n is a, c, g, or u
cgucuccuuucauuunua

SEQ ID NO: 21221 - RNA, 19 nt, Artificial Sequence
  Synthetic
  misc_feature (17)..(17): n is a, c, g, or u
ucgucuccuuucauuunua

SEQ ID NO: 21222 - RNA, 20 nt, Artificial Sequence
  Synthetic
  misc_feature (18)..(18): n is a, c, g, or u
aucgucuccuuucauuunua

SEQ ID NO: 21223 - RNA, 21 nt, Artificial Sequence
  Synthetic
  misc_feature (19)..(19): n is a, c, g, or u
aaucgucuccuuucauuunua

SEQ ID NO: 21224 - RNA, 22 nt, Artificial Sequence
  Synthetic
  misc_feature (20)..(20): n is a, c, g, or u
caaucgucuccuuucauuunua

SEQ ID NO: 21225 - RNA, 23 nt, Artificial Sequence
  Synthetic
  misc_feature (21)..(21): n is a, c, g, or u
ucaaucgucuccuuucauuunua

SEQ ID NO: 21226 - RNA, 24 nt, Artificial Sequence
  Synthetic
  misc_feature (22)..(22): n is a, c, g, or u
uucaaucgucuccuuucauuunua

SEQ ID NO: 21227 - RNA, 18 nt, Artificial Sequence
  Synthetic
caggaaaagaaggaguua

SEQ ID NO: 21228 - RNA, 19 nt, Artificial Sequence
  Synthetic
ucaggaaaagaaggaguua

SEQ ID NO: 21229 - RNA, 21 nt, Artificial Sequence
  Synthetic
ugucaggaaaagaaggaguua

SEQ ID NO: 21230 - RNA, 22 nt, Artificial Sequence
  Synthetic
augucaggaaaagaaggaguua

SEQ ID NO: 21231 - RNA, 23 nt, Artificial Sequence
  Synthetic
aaugucaggaaaagaaggaguua

SEQ ID NO: 21232 - RNA, 18 nt, Artificial Sequence
  Synthetic
  misc_feature (6)..(6): n is a, c, g, or u
  misc_feature (12)..(12): n is a, c, g, or u
aggcangaaaunugaaac

SEQ ID NO: 21233 - RNA, 19 nt, Artificial Sequence
  Synthetic
  misc_feature (7)..(7): n is a, c, g, or u
  misc_feature (13)..(13): n is a, c, g, or u
aaggcangaaaunugaaac

SEQ ID NO: 21234 - RNA, 20 nt, Artificial Sequence
  Synthetic
  misc_feature (8)..(8): n is a, c, g, or u
  misc_feature (14)..(14): n is a, c, g, or u
uaaggcangaaaunugaaac

SEQ ID NO: 21235 - RNA, 22 nt, Artificial Sequence
  Synthetic
  misc_feature (10)..(10): n is a, c, g, or u
  misc_feature (16)..(16): n is a, c, g, or u
uguaaggcangaaaunugaaac

SEQ ID NO: 21236 - RNA, 23 nt, Artificial Sequence
  Synthetic
  misc_feature (11)..(11): n is a, c, g, or u
  misc_feature (17)..(17): n is a, c, g, or u
auguaaggcangaaaunugaaac

SEQ ID NO: 21237 - RNA, 24 nt, Artificial Sequence
  Synthetic
  misc_feature (12)..(12): n is a, c, g, or u
  misc_feature (18)..(18): n is a, c, g, or u
aauguaaggcangaaaunugaaac

SEQ ID NO: 21238 - RNA, 18 nt, Artificial Sequence
  Synthetic
uaacaaaaaauugguaac

SEQ ID NO: 21239 - RNA, 19 nt, Artificial Sequence
  Synthetic
auaacaaaaaauugguaac

SEQ ID NO: 21240 - RNA, 21 nt, Artificial Sequence
  Synthetic
agauaacaaaaaauugguaac

SEQ ID NO: 21241 - RNA, 22 nt, Artificial Sequence
  Synthetic
cagauaacaaaaaauugguaac

SEQ ID NO: 21242 - RNA, 23 nt, Artificial Sequence
  Synthetic
acagauaacaaaaaauugguaac

SEQ ID NO: 21243 - RNA, 24 nt, Artificial Sequence
  Synthetic
cacagauaacaaaaaauugguaac

SEQ ID NO: 21244 - RNA, 19 nt, Artificial Sequence
  Synthetic
cgaauuuuggccaggacac

SEQ ID NO: 21245 - RNA, 21 nt, Artificial Sequence
  Synthetic
ugcgaauuuuggccaggacac

SEQ ID NO: 21246 - RNA, 22 nt, Artificial Sequence
  Synthetic
cugcgaauuuuggccaggacac

SEQ ID NO: 21247 - RNA, 23 nt, Artificial Sequence
  Synthetic
acugcgaauuuuggccaggacac

SEQ ID NO: 21248 - RNA, 20 nt, Artificial Sequence
  Synthetic
uggaucggcagaggagccac

SEQ ID NO: 21249 - RNA, 19 nt, Artificial Sequence
  Synthetic
  misc_feature (3)..(3): n is a, c, g, or u
  misc_feature (7)..(7): n is a, c, g, or u
agnuccnaggggcguucac

SEQ ID NO: 21250 - RNA, 20 nt, Artificial Sequence
  Synthetic
  misc_feature (4)..(4): n is a, c, g, or u
  misc_feature (8)..(8): n is a, c, g, or u
aagnuccnaggggcguucac

SEQ ID NO: 21251 - RNA, 21 nt, Artificial Sequence
  Synthetic
  misc_feature (5)..(5): n is a, c, g, or u
  misc_feature (9)..(9): n is a, c, g, or u
caagnuccnaggggcguucac

SEQ ID NO: 21252 - RNA, 24 nt, Artificial Sequence
  Synthetic
  misc_feature (8)..(8): n is a, c, g, or u
  misc_feature (12)..(12): n is a, c, g, or u
uggcaagnuccnaggggcguucac

SEQ ID NO: 21253 - RNA, 18 nt, Artificial Sequence
  Synthetic
ccuuagagguggagagac

SEQ ID NO: 21254 - RNA, 19 nt, Artificial Sequence
  Synthetic
cccuuagagguggagagac

SEQ ID NO: 21255 - RNA, 20 nt, Artificial Sequence
  Synthetic
ucccuuagagguggagagac

SEQ ID NO: 21256 - RNA, 22 nt, Artificial Sequence
  Synthetic
ugucccuuagagguggagagac

SEQ ID NO: 21257 - RNA, 24 nt, Artificial Sequence
  Synthetic
ugugucccuuagagguggagagac

SEQ ID NO: 21258 - RNA, 20 nt, Artificial Sequence
  Synthetic
aggacacacgggcaacauac

SEQ ID NO: 21259 - RNA, 22 nt, Artificial Sequence
  Synthetic
agaggacacacgggcaacauac

SEQ ID NO: 21260 - RNA, 23 nt, Artificial Sequence
  Synthetic
uagaggacacacgggcaacauac

SEQ ID NO: 21261 - RNA, 18 nt, Artificial Sequence
  Synthetic
aauugagagaaguccacc

SEQ ID NO: 21262 - RNA, 19 nt, Artificial Sequence
  Synthetic
aaauugagagaaguccacc

SEQ ID NO: 21263 - RNA, 20 nt, Artificial Sequence
  Synthetic
aaaauugagagaaguccacc

SEQ ID NO: 21264 - RNA, 18 nt, Artificial Sequence
  Synthetic
ugcaaagcccaaaagacc

SEQ ID NO: 21265 - RNA, 19 nt, Artificial Sequence
  Synthetic
cugcaaagcccaaaagacc

SEQ ID NO: 21266 - RNA, 24 nt, Artificial Sequence
  Synthetic
aggggcugcaaagcccaaaagacc

SEQ ID NO: 21267 - RNA, 18 nt, Artificial Sequence
  Synthetic
uuggcuuucuuccugacc

SEQ ID NO: 21268 - RNA, 23 nt, Artificial Sequence
  Synthetic
ugggguuggcuuucuuccugacc

SEQ ID NO: 21269 - RNA, 24 nt, Artificial Sequence
  Synthetic
cugggguuggcuuucuuccugacc

SEQ ID NO: 21270 - RNA, 19 nt, Artificial Sequence
  Synthetic
uguguucaaauggaugccc

SEQ ID NO: 21271 - RNA, 20 nt, Artificial Sequence
  Synthetic
cuguguucaaauggaugccc

SEQ ID NO: 21272 - RNA, 19 nt, Artificial Sequence
  Synthetic
cgggcugaggcccacuccc

SEQ ID NO: 21273 - RNA, 20 nt, Artificial Sequence
  Synthetic
acgggcugaggcccacuccc

SEQ ID NO: 21274 - RNA, 19 nt, Artificial Sequence
  Synthetic
ugcuguagcucuuguuccc

SEQ ID NO: 21275 - RNA, 20 nt, Artificial Sequence
  Synthetic
augcuguagcucuuguuccc

SEQ ID NO: 21276 - RNA, 18 nt, Artificial Sequence
  Synthetic
agguauuuuccgaaagcc

SEQ ID NO: 21277 - RNA, 19 nt, Artificial Sequence
  Synthetic
uagguauuuuccgaaagcc

SEQ ID NO: 21278 - RNA, 20 nt, Artificial Sequence
  Synthetic
auagguauuuuccgaaagcc

SEQ ID NO: 21279 - RNA, 18 nt, Artificial Sequence
  Synthetic
ugcugcacagauuuggcc

SEQ ID NO: 21280 - RNA, 19 nt, Artificial Sequence
  Synthetic
augcugcacagauuuggcc

SEQ ID NO: 21281 - RNA, 18 nt, Artificial Sequence
  Synthetic
ccccuuacucucggaucc

SEQ ID NO: 21282 - RNA, 19 nt, Artificial Sequence
  Synthetic
  misc_feature (1)..(1): n is a, c, g, or u
nccccuuacucucggaucc

SEQ ID NO: 21283 - RNA, 21 nt, Artificial Sequence
  Synthetic
  misc_feature (3)..(3): n is a, c, g, or u
agnccccuuacucucggaucc

SEQ ID NO: 21284 - RNA, 22 nt, Artificial Sequence
  Synthetic
  misc_feature (4)..(4): n is a, c, g, or u
cagnccccuuacucucggaucc

SEQ ID NO: 21285 - RNA, 23 nt, Artificial Sequence
  Synthetic
  misc_feature (5)..(5): n is a, c, g, or u
acagnccccuuacucucggaucc

SEQ ID NO: 21286 - RNA, 24 nt, Artificial Sequence
  Synthetic
  misc_feature (6)..(6): n is a, c, g, or u
uacagnccccuuacucucggaucc

SEQ ID NO: 21287 - RNA, 18 nt, Artificial Sequence
  Synthetic
cuaacaacaguagucucc

SEQ ID NO: 21288 - RNA, 19 nt, Artificial Sequence
  Synthetic
ucuaacaacaguagucucc

SEQ ID NO: 21289 - RNA, 18 nt, Artificial Sequence
  Synthetic
cccgacuccucccagucc

SEQ ID NO: 21290 - RNA, 19 nt, Artificial Sequence
  Synthetic
ccccgacuccucccagucc

SEQ ID NO: 21291 - RNA, 20 nt, Artificial Sequence
  Synthetic
cccccgacuccucccagucc

SEQ ID NO: 21292 - RNA, 21 nt, Artificial Sequence
  Synthetic
ucccccgacuccucccagucc

SEQ ID NO: 21293 - RNA, 22 nt, Artificial Sequence
  Synthetic
cucccccgacuccucccagucc

SEQ ID NO: 21294 - RNA, 23 nt, Artificial Sequence
  Synthetic
ccucccccgacuccucccagucc

SEQ ID NO: 21295 - RNA, 24 nt, Artificial Sequence
  Synthetic
uccucccccgacuccucccagucc

SEQ ID NO: 21296 - RNA, 18 nt, Artificial Sequence
  Synthetic
caggugcaauuuccgucc

SEQ ID NO: 21297 - RNA, 19 nt, Artificial Sequence
  Synthetic
acaggugcaauuuccgucc

SEQ ID NO: 21298 - RNA, 20 nt, Artificial Sequence
  Synthetic
uacaggugcaauuuccgucc

SEQ ID NO: 21299 - RNA, 21 nt, Artificial Sequence
  Synthetic
auacaggugcaauuuccgucc

SEQ ID NO: 21300 - RNA, 22 nt, Artificial Sequence
  Synthetic
aauacaggugcaauuuccgucc

SEQ ID NO: 21301 - RNA, 18 nt, Artificial Sequence
  Synthetic
cauagagguuccuugagc

SEQ ID NO: 21302 - RNA, 19 nt, Artificial Sequence
  Synthetic
acauagagguuccuugagc

SEQ ID NO: 21303 - RNA, 20 nt, Artificial Sequence
  Synthetic
aacauagagguuccuugagc

SEQ ID NO: 21304 - RNA, 18 nt, Artificial Sequence
  Synthetic
aacaaaagccugcuuagc

SEQ ID NO: 21305 - RNA, 19 nt, Artificial Sequence
  Synthetic
aaacaaaagccugcuuagc

SEQ ID NO: 21306 - RNA, 20 nt, Artificial Sequence
  Synthetic
aaaacaaaagccugcuuagc

SEQ ID NO: 21307 - RNA, 22 nt, Artificial Sequence
  Synthetic
agaaaacaaaagccugcuuagc

SEQ ID NO: 21308 - RNA, 24 nt, Artificial Sequence
  Synthetic
cgagaaaacaaaagccugcuuagc

SEQ ID NO: 21309 - RNA, 19 nt, Artificial Sequence
  Synthetic
cgggaagaagucagaaggc

SEQ ID NO: 21310 - RNA, 20 nt, Artificial Sequence
  Synthetic
acgggaagaagucagaaggc

SEQ ID NO: 21311 - RNA, 22 nt, Artificial Sequence
  Synthetic
agacgggaagaagucagaaggc

SEQ ID NO: 21312 - RNA, 23 nt, Artificial Sequence
  Synthetic
cagacgggaagaagucagaaggc

SEQ ID NO: 21313 - RNA, 24 nt, Artificial Sequence
  Synthetic
acagacgggaagaagucagaaggc

SEQ ID NO: 21314 - RNA, 18 nt, Artificial Sequence
  Synthetic
ugaugaugugagagaggc

SEQ ID NO: 21315 - RNA, 19 nt, Artificial Sequence
  Synthetic
uugaugaugugagagaggc

SEQ ID NO: 21316 - RNA, 20 nt, Artificial Sequence
  Synthetic
auugaugaugugagagaggc

SEQ ID NO: 21317 - RNA, 22 nt, Artificial Sequence
  Synthetic
agauugaugaugugagagaggc

SEQ ID NO: 21318 - RNA, 23 nt, Artificial Sequence
  Synthetic
aagauugaugaugugagagaggc

SEQ ID NO: 21319 - RNA, 18 nt, Artificial Sequence
  Synthetic
aacaaaagaugauuaggc

SEQ ID NO: 21320 - RNA, 20 nt, Artificial Sequence
  Synthetic
ugaacaaaagaugauuaggc

SEQ ID NO: 21321 - RNA, 18 nt, Artificial Sequence
  Synthetic
caaagguuccgcgcaugc

SEQ ID NO: 21322 - RNA, 19 nt, Artificial Sequence
  Synthetic
acaaagguuccgcgcaugc

SEQ ID NO: 21323 - RNA, 20 nt, Artificial Sequence
  Synthetic
cacaaagguuccgcgcaugc

SEQ ID NO: 21324 - RNA, 18 nt, Artificial Sequence
  Synthetic
agggacucaagaugcugc

SEQ ID NO: 21325 - RNA, 19 nt, Artificial Sequence
  Synthetic
aagggacucaagaugcugc

SEQ ID NO: 21326 - RNA, 20 nt, Artificial Sequence
  Synthetic
aaagggacucaagaugcugc

SEQ ID NO: 21327 - RNA, 18 nt, Artificial Sequence
  Synthetic
aaguuugcgaaagcaauc

SEQ ID NO: 21328 - RNA, 18 nt, Artificial Sequence
  Synthetic
  misc_feature (8)..(8): n is a, c, g, or u
aauacagnccccuuacuc

SEQ ID NO: 21329 - RNA, 19 nt, Artificial Sequence
  Synthetic
  misc_feature (9)..(9): n is a, c, g, or u
aaauacagnccccuuacuc

SEQ ID NO: 21330 - RNA, 20 nt, Artificial Sequence
  Synthetic
  misc_feature (10)..(10): n is a, c, g, or u
aaaauacagnccccuuacuc

SEQ ID NO: 21331 - RNA, 23 nt, Artificial Sequence
  Synthetic
  misc_feature (13)..(13): n is a, c, g, or u
aggaaaauacagnccccuuacuc

SEQ ID NO: 21332 - RNA, 24 nt, Artificial Sequence
  Synthetic
  misc_feature (14)..(14): n is a, c, g, or u
caggaaaauacagnccccuuacuc

SEQ ID NO: 21333 - RNA, 19 nt, Artificial Sequence
  Synthetic
aguccuuaaauacacaguc

SEQ ID NO: 21334 - RNA, 20 nt, Artificial Sequence
  Synthetic
caguccuuaaauacacaguc

SEQ ID NO: 21335 - RNA, 21 nt, Artificial Sequence
  Synthetic
ccaguccuuaaauacacaguc

SEQ ID NO: 21336 - RNA, 22 nt, Artificial Sequence
  Synthetic
cccaguccuuaaauacacaguc

SEQ ID NO: 21337 - RNA, 23 nt, Artificial Sequence
  Synthetic
ucccaguccuuaaauacacaguc

SEQ ID NO: 21338 - RNA, 24 nt, Artificial Sequence
  Synthetic
cucccaguccuuaaauacacaguc

SEQ ID NO: 21339 - RNA, 18 nt, Artificial Sequence
  Synthetic
  misc_feature (11)..(11): n is a, c, g, or u
cauguucauancaggguc

SEQ ID NO: 21340 - RNA, 19 nt, Artificial Sequence
  Synthetic
  misc_feature (12)..(12): n is a, c, g, or u
ccauguucauancaggguc

SEQ ID NO: 21341 - RNA, 20 nt, Artificial Sequence
  Synthetic
  misc_feature (13)..(13): n is a, c, g, or u
uccauguucauancaggguc

SEQ ID NO: 21342 - RNA, 21 nt, Artificial Sequence
  Synthetic
  misc_feature (14)..(14): n is a, c, g, or u
cuccauguucauancaggguc

SEQ ID NO: 21343 - RNA, 22 nt, Artificial Sequence
  Synthetic
  misc_feature (15)..(15): n is a, c, g, or u
ucuccauguucauancaggguc

SEQ ID NO: 21344 - RNA, 23 nt, Artificial Sequence
  Synthetic
  misc_feature (16)..(16): n is a, c, g, or u
uucuccauguucauancaggguc

SEQ ID NO: 21345 - RNA, 18 nt, Artificial Sequence
  Synthetic
acagucuuugauguauuc

SEQ ID NO: 21346 - RNA, 19 nt, Artificial Sequence
  Synthetic
cacagucuuugauguauuc

SEQ ID NO: 21347 - RNA, 20 nt, Artificial Sequence
  Synthetic
acacagucuuugauguauuc

SEQ ID NO: 21348 - RNA, 21 nt, Artificial Sequence
  Synthetic
uacacagucuuugauguauuc

SEQ ID NO: 21349 - RNA, 22 nt, Artificial Sequence
  Synthetic
auacacagucuuugauguauuc

SEQ ID NO: 21350 - RNA, 23 nt, Artificial Sequence
  Synthetic
aauacacagucuuugauguauuc

SEQ ID NO: 21351 - RNA, 24 nt, Artificial Sequence
  Synthetic
aaauacacagucuuugauguauuc

SEQ ID NO: 21352 - RNA, 18 nt, Artificial Sequence
  Synthetic
  misc_feature (7)..(7): n is a, c, g, or u
acaagcngcuaggaguuc

SEQ ID NO: 21353 - RNA, 19 nt, Artificial Sequence
  Synthetic
  misc_feature (8)..(8): n is a, c, g, or u
aacaagcngcuaggaguuc

SEQ ID NO: 21354 - RNA, 20 nt, Artificial Sequence
  Synthetic
  misc_feature (9)..(9): n is a, c, g, or u
aaacaagcngcuaggaguuc

SEQ ID NO: 21355 - RNA, 22 nt, Artificial Sequence
  Synthetic
  misc_feature (11)..(11): n is a, c, g, or u
cgaaacaagcngcuaggaguuc

SEQ ID NO: 21356 - RNA, 24 nt, Artificial Sequence
  Synthetic
  misc_feature (13)..(13): n is a, c, g, or u
agcgaaacaagcngcuaggaguuc

SEQ ID NO: 21357 - RNA, 18 nt, Artificial Sequence
  Synthetic
uaauaccuuuauccaaag

SEQ ID NO: 21358 - RNA, 19 nt, Artificial Sequence
  Synthetic
uuaauaccuuuauccaaag

SEQ ID NO: 21359 - RNA, 20 nt, Artificial Sequence
  Synthetic
  misc_feature (1)..(1): n is a, c, g, or u
nuuaauaccuuuauccaaag

SEQ ID NO: 21360 - RNA, 23 nt, Artificial Sequence
  Synthetic
  misc_feature (4)..(4): n is a, c, g, or u
aggnuuaauaccuuuauccaaag

SEQ ID NO: 21361 - RNA, 24 nt, Artificial Sequence
  Synthetic
  misc_feature (5)..(5): n is a, c, g, or u
aaggnuuaauaccuuuauccaaag

SEQ ID NO: 21362 - RNA, 18 nt, Artificial Sequence
  Synthetic
  misc_feature (3)..(3): n is a, c, g, or u
uanaguagaggaguaaag

SEQ ID NO: 21363 - RNA, 21 nt, Artificial Sequence
  Synthetic
  misc_feature (6)..(6): n is a, c, g, or u
agguanaguagaggaguaaag

SEQ ID NO: 21364 - RNA, 22 nt, Artificial Sequence
  Synthetic
  misc_feature (7)..(7): n is a, c, g, or u
cagguanaguagaggaguaaag

SEQ ID NO: 21365 - RNA, 23 nt, Artificial Sequence
  Synthetic
  misc_feature (8)..(8): n is a, c, g, or u
acagguanaguagaggaguaaag

SEQ ID NO: 21366 - RNA, 24 nt, Artificial Sequence
  Synthetic
  misc_feature (9)..(9): n is a, c, g, or u
aacagguanaguagaggaguaaag

SEQ ID NO: 21367 - RNA, 18 nt, Artificial Sequence
  Synthetic
agagguuccuugagcaag

SEQ ID NO: 21368 - RNA, 19 nt, Artificial Sequence
  Synthetic
uagagguuccuugagcaag

SEQ ID NO: 21369 - RNA, 20 nt, Artificial Sequence
  Synthetic
auagagguuccuugagcaag

SEQ ID NO: 21370 - RNA, 21 nt, Artificial Sequence
  Synthetic
cauagagguuccuugagcaag

SEQ ID NO: 21371 - RNA, 22 nt, Artificial Sequence
  Synthetic
acauagagguuccuugagcaag

SEQ ID NO: 21372 - RNA, 23 nt, Artificial Sequence
  Synthetic
aacauagagguuccuugagcaag

SEQ ID NO: 21373 - RNA, 24 nt, Artificial Sequence
  Synthetic
aaacauagagguuccuugagcaag

SEQ ID NO: 21374 - RNA, 18 nt, Artificial Sequence
  Synthetic
agacaccaaauacucaag

SEQ ID NO: 21375 - RNA, 19 nt, Artificial Sequence
  Synthetic
aagacaccaaauacucaag

SEQ ID NO: 21376 - RNA, 20 nt, Artificial Sequence
  Synthetic
aaagacaccaaauacucaag

SEQ ID NO: 21377 - RNA, 21 nt, Artificial Sequence
  Synthetic
aaaagacaccaaauacucaag

SEQ ID NO: 21378 - RNA, 22 nt, Artificial Sequence
  Synthetic
caaaagacaccaaauacucaag

SEQ ID NO: 21379 - RNA, 23 nt, Artificial Sequence
  Synthetic
ccaaaagacaccaaauacucaag

SEQ ID NO: 21380 - RNA, 24 nt, Artificial Sequence
  Synthetic
uccaaaagacaccaaauacucaag

SEQ ID NO: 21381 - RNA, 18 nt, Artificial Sequence
  Synthetic
uccccagucuucgagaag

SEQ ID NO: 21382 - RNA, 22 nt, Artificial Sequence
  Synthetic
aggguccccagucuucgagaag

SEQ ID NO: 21383 - RNA, 23 nt, Artificial Sequence
  Synthetic
caggguccccagucuucgagaag

SEQ ID NO: 21384 - RNA, 24 nt, Artificial Sequence
  Synthetic
  misc_feature (1)..(1): n is a, c, g, or u
ncaggguccccagucuucgagaag

SEQ ID NO: 21385 - RNA, 18 nt, Artificial Sequence
  Synthetic
cauggugcuggugaacag

SEQ ID NO: 21386 - RNA, 20 nt, Artificial Sequence
  Synthetic
ugcauggugcuggugaacag

SEQ ID NO: 21387 - RNA, 18 nt, Artificial Sequence
  Synthetic
aacuggagccaccagcag

SEQ ID NO: 21388 - RNA, 20 nt, Artificial Sequence
  Synthetic
ugaacuggagccaccagcag

SEQ ID NO: 21389 - RNA, 21 nt, Artificial Sequence
  Synthetic
cugaacuggagccaccagcag

SEQ ID NO: 21390 - RNA, 22 nt, Artificial Sequence
  Synthetic
ucugaacuggagccaccagcag

SEQ ID NO: 21391 - RNA, 23 nt, Artificial Sequence
  Synthetic
uucugaacuggagccaccagcag

SEQ ID NO: 21392 - RNA, 24 nt, Artificial Sequence
  Synthetic
uuucugaacuggagccaccagcag

SEQ ID NO: 21393 - RNA, 18 nt, Artificial Sequence
  Synthetic
uagcuugccugagagcag

SEQ ID NO: 21394 - RNA, 19 nt, Artificial Sequence
  Synthetic
auagcuugccugagagcag

SEQ ID NO: 21395 - RNA, 20 nt, Artificial Sequence
  Synthetic
aauagcuugccugagagcag

SEQ ID NO: 21396 - RNA, 19 nt, Artificial Sequence
  Synthetic
agaagaugaggcauagcag

SEQ ID NO: 21397 - RNA, 20 nt, Artificial Sequence
  Synthetic
aagaagaugaggcauagcag

SEQ ID NO: 21398 - RNA, 18 nt, Artificial Sequence
  Synthetic
uagcagcaggaugaagag

SEQ ID NO: 21399 - RNA, 19 nt, Artificial Sequence
  Synthetic
auagcagcaggaugaagag

SEQ ID NO: 21400 - RNA, 20 nt, Artificial Sequence
  Synthetic
cauagcagcaggaugaagag

SEQ ID NO: 21401 - RNA, 23 nt, Artificial Sequence
  Synthetic
aggcauagcagcaggaugaagag

SEQ ID NO: 21402 - RNA, 18 nt, Artificial Sequence
  Synthetic
cauacaagggcaugagag

SEQ ID NO: 21403 - RNA, 18 nt, Artificial Sequence
  Synthetic
caaguuggaggacaggag

SEQ ID NO: 21404 - RNA, 19 nt, Artificial Sequence
  Synthetic
acaaguuggaggacaggag

SEQ ID NO: 21405 - RNA, 22 nt, Artificial Sequence
  Synthetic
aggacaaguuggaggacaggag

SEQ ID NO: 21406 - RNA, 23 nt, Artificial Sequence
  Synthetic
caggacaaguuggaggacaggag

SEQ ID NO: 21407 - RNA, 24 nt, Artificial Sequence
  Synthetic
ccaggacaaguuggaggacaggag

SEQ ID NO: 21408 - RNA, 19 nt, Artificial Sequence
  Synthetic
cgauugguggaagcaggag

SEQ ID NO: 21409 - RNA, 20 nt, Artificial Sequence
  Synthetic
ccgauugguggaagcaggag

SEQ ID NO: 21410 - RNA, 21 nt, Artificial Sequence
  Synthetic
uccgauugguggaagcaggag

SEQ ID NO: 21411 - RNA, 22 nt, Artificial Sequence
  Synthetic
cuccgauugguggaagcaggag

SEQ ID NO: 21412 - RNA, 23 nt, Artificial Sequence
  Synthetic
ccuccgauugguggaagcaggag

SEQ ID NO: 21413 - RNA, 24 nt, Artificial Sequence
  Synthetic
accuccgauugguggaagcaggag

SEQ ID NO: 21414 - RNA, 19 nt, Artificial Sequence
  Synthetic
agagaggcaauagucggag

SEQ ID NO: 21415 - RNA, 21 nt, Artificial Sequence
  Synthetic
ugagagaggcaauagucggag

SEQ ID NO: 21416 - RNA, 23 nt, Artificial Sequence
  Synthetic
ugugagagaggcaauagucggag

SEQ ID NO: 21417 - RNA, 24 nt, Artificial Sequence
  Synthetic
augugagagaggcaauagucggag

SEQ ID NO: 21418 - RNA, 18 nt, Artificial Sequence
  Synthetic
caaaauagcuugccugag

SEQ ID NO: 21419 - RNA, 19 nt, Artificial Sequence
  Synthetic
acaaaauagcuugccugag

SEQ ID NO: 21420 - RNA, 20 nt, Artificial Sequence
  Synthetic
cacaaaauagcuugccugag

SEQ ID NO: 21421 - RNA, 22 nt, Artificial Sequence
  Synthetic
agcacaaaauagcuugccugag

SEQ ID NO: 21422 - RNA, 23 nt, Artificial Sequence
  Synthetic
cagcacaaaauagcuugccugag

SEQ ID NO: 21423 - RNA, 24 nt, Artificial Sequence
  Synthetic
ccagcacaaaauagcuugccugag

SEQ ID NO: 21424 - RNA, 18 nt, Artificial Sequence
  Synthetic
uaccccuagaaaauugag

SEQ ID NO: 21425 - RNA, 18 nt, Artificial Sequence
  Synthetic
  misc_feature (13)..(13): n is a, c, g, or u
ugaaaacagguanaguag

SEQ ID NO: 21426 - RNA, 19 nt, Artificial Sequence
  Synthetic
  misc_feature (14)..(14): n is a, c, g, or u
uugaaaacagguanaguag

SEQ ID NO: 21427 - RNA, 20 nt, Artificial Sequence
  Synthetic
  misc_feature (15)..(15): n is a, c, g, or u
auugaaaacagguanaguag

SEQ ID NO: 21428 - RNA, 23 nt, Artificial Sequence
  Synthetic
  misc_feature (18)..(18): n is a, c, g, or u
aggauugaaaacagguanaguag

SEQ ID NO: 21429 - RNA, 24 nt, Artificial Sequence
  Synthetic
  misc_feature (19)..(19): n is a, c, g, or u
caggauugaaaacagguanaguag

SEQ ID NO: 21430 - RNA, 18 nt, Artificial Sequence
  Synthetic
cuuucuuccugaccuccg

SEQ ID NO: 21431 - RNA, 21 nt, Artificial Sequence
  Synthetic
uggcuuucuuccugaccuccg

SEQ ID NO: 21432 - RNA, 22 nt, Artificial Sequence
  Synthetic
uuggcuuucuuccugaccuccg

SEQ ID NO: 21433 - RNA, 19 nt, Artificial Sequence
  Synthetic
agaugagaaggcacaggcg

SEQ ID NO: 21434 - RNA, 20 nt, Artificial Sequence
  Synthetic
cagaugagaaggcacaggcg

SEQ ID NO: 21435 - RNA, 18 nt, Artificial Sequence
  Synthetic
uccaaauucuuuauaagg

SEQ ID NO: 21436 - RNA, 19 nt, Artificial Sequence
  Synthetic
cuccaaauucuuuauaagg

SEQ ID NO: 21437 - RNA, 18 nt, Artificial Sequence
  Synthetic
auucucuggauaguaagg

SEQ ID NO: 21438 - RNA, 19 nt, Artificial Sequence
  Synthetic
cauucucuggauaguaagg

SEQ ID NO: 21439 - RNA, 20 nt, Artificial Sequence
  Synthetic
acauucucuggauaguaagg

SEQ ID NO: 21440 - RNA, 19 nt, Artificial Sequence
  Synthetic
agucaggauugaaaacagg

SEQ ID NO: 21441 - RNA, 20 nt, Artificial Sequence
  Synthetic
cagucaggauugaaaacagg

SEQ ID NO: 21442 - RNA, 21 nt, Artificial Sequence
  Synthetic
ccagucaggauugaaaacagg

SEQ ID NO: 21443 - RNA, 22 nt, Artificial Sequence
  Synthetic
accagucaggauugaaaacagg

SEQ ID NO: 21444 - RNA, 23 nt, Artificial Sequence
  Synthetic
aaccagucaggauugaaaacagg

SEQ ID NO: 21445 - RNA, 24 nt, Artificial Sequence
  Synthetic
uaaccagucaggauugaaaacagg

SEQ ID NO: 21446 - RNA, 18 nt, Artificial Sequence
  Synthetic
augggaugggaauacagg

SEQ ID NO: 21447 - RNA, 20 nt, Artificial Sequence
  Synthetic
ugaugggaugggaauacagg

SEQ ID NO: 21448 - RNA, 21 nt, Artificial Sequence
  Synthetic
augaugggaugggaauacagg

SEQ ID NO: 21449 - RNA, 23 nt, Artificial Sequence
  Synthetic
agaugaugggaugggaauacagg

SEQ ID NO: 21450 - RNA, 24 nt, Artificial Sequence
  Synthetic
aagaugaugggaugggaauacagg

SEQ ID NO: 21451 - RNA, 18 nt, Artificial Sequence
  Synthetic
cauccaacgauagccagg

SEQ ID NO: 21452 - RNA, 19 nt, Artificial Sequence
  Synthetic
acauccaacgauagccagg

SEQ ID NO: 21453 - RNA, 20 nt, Artificial Sequence
  Synthetic
cacauccaacgauagccagg

SEQ ID NO: 21454 - RNA, 21 nt, Artificial Sequence
  Synthetic
acacauccaacgauagccagg

SEQ ID NO: 21455 - RNA, 23 nt, Artificial Sequence
  Synthetic
agacacauccaacgauagccagg

SEQ ID NO: 21456 - RNA, 24 nt, Artificial Sequence
  Synthetic
cagacacauccaacgauagccagg

SEQ ID NO: 21457 - RNA, 18 nt, Artificial Sequence
  Synthetic
  misc_feature (10)..(10): n is a, c, g, or u
ugguggucunuaagcagg

SEQ ID NO: 21458 - RNA, 19 nt, Artificial Sequence
  Synthetic
  misc_feature (11)..(11): n is a, c, g, or u
uugguggucunuaagcagg

SEQ ID NO: 21459 - RNA, 20 nt, Artificial Sequence
  Synthetic
  misc_feature (12)..(12): n is a, c, g, or u
uuugguggucunuaagcagg

SEQ ID NO: 21460 - RNA, 21 nt, Artificial Sequence
  Synthetic
  misc_feature (13)..(13): n is a, c, g, or u
auuugguggucunuaagcagg

SEQ ID NO: 21461 - RNA, 22 nt, Artificial Sequence
  Synthetic
  misc_feature (14)..(14): n is a, c, g, or u
cauuugguggucunuaagcagg

SEQ ID NO: 21462 - RNA, 18 nt, Artificial Sequence
  Synthetic
uagaggaguaaagaccgg

SEQ ID NO: 21463 - RNA, 20 nt, Artificial Sequence
  Synthetic
aguagaggaguaaagaccgg

SEQ ID NO: 21464 - RNA, 19 nt, Artificial Sequence
  Synthetic
  misc_feature (9)..(9): n is a, c, g, or u
agagcagunugguuggggg

SEQ ID NO: 21465 - RNA, 21 nt, Artificial Sequence
  Synthetic
  misc_feature (11)..(11): n is a, c, g, or u
ugagagcagunugguuggggg

SEQ ID NO: 21466 - RNA, 22 nt, Artificial Sequence
  Synthetic
  misc_feature (12)..(12): n is a, c, g, or u
cugagagcagunugguuggggg

SEQ ID NO: 21467 - RNA, 23 nt, Artificial Sequence
  Synthetic
  misc_feature (13)..(13): n is a, c, g, or u
ccugagagcagunugguuggggg

SEQ ID NO: 21468 - RNA, 19 nt, Artificial Sequence
  Synthetic
ugggauaaaaccuagcugg

SEQ ID NO: 21469 - RNA, 20 nt, Artificial Sequence
  Synthetic
uugggauaaaaccuagcugg

SEQ ID NO: 21470 - RNA, 18 nt, Artificial Sequence
  Synthetic
aggagguggaucuggugg

SEQ ID NO: 21471 - RNA, 19 nt, Artificial Sequence
  Synthetic
caggagguggaucuggugg

SEQ ID NO: 21472 - RNA, 21 nt, Artificial Sequence
  Synthetic
agcaggagguggaucuggugg

SEQ ID NO: 21473 - RNA, 22 nt, Artificial Sequence
  Synthetic
aagcaggagguggaucuggugg

SEQ ID NO: 21474 - RNA, 18 nt, Artificial Sequence
  Synthetic
uccaagaguccucuuaug

SEQ ID NO: 21475 - RNA, 20 nt, Artificial Sequence
  Synthetic
aguccaagaguccucuuaug

SEQ ID NO: 21476 - RNA, 19 nt, Artificial Sequence
  Synthetic
agcaaucuuugauuuuaug

SEQ ID NO: 21477 - RNA, 20 nt, Artificial Sequence
  Synthetic
aagcaaucuuugauuuuaug

SEQ ID NO: 21478 - RNA, 18 nt, Artificial Sequence
  Synthetic
  misc_feature (14)..(14): n is a, c, g, or u
cuacuagaucucungcug

SEQ ID NO: 21479 - RNA, 19 nt, Artificial Sequence
  Synthetic
  misc_feature (15)..(15): n is a, c, g, or u
acuacuagaucucungcug

SEQ ID NO: 21480 - RNA, 20 nt, Artificial Sequence
  Synthetic
  misc_feature (16)..(16): n is a, c, g, or u
aacuacuagaucucungcug

SEQ ID NO: 21481 - RNA, 21 nt, Artificial Sequence
  Synthetic
  misc_feature (17)..(17): n is a, c, g, or u
uaacuacuagaucucungcug

SEQ ID NO: 21482 - RNA, 22 nt, Artificial Sequence
  Synthetic
  misc_feature (18)..(18): n is a, c, g, or u
uuaacuacuagaucucungcug

SEQ ID NO: 21483 - RNA, 23 nt, Artificial Sequence
  Synthetic
  misc_feature (19)..(19): n is a, c, g, or u
auuaacuacuagaucucungcug

SEQ ID NO: 21484 - RNA, 24 nt, Artificial Sequence
  Synthetic
  misc_feature (20)..(20): n is a, c, g, or u
aauuaacuacuagaucucungcug

SEQ ID NO: 21485 - RNA, 18 nt, Artificial Sequence
  Synthetic
cugcuggaauuugcucug

SEQ ID NO: 21486 - RNA, 19 nt, Artificial Sequence
  Synthetic
acugcuggaauuugcucug

SEQ ID NO: 21487 - RNA, 19 nt, Artificial Sequence
  Synthetic
ugauuaaccacauucucug

SEQ ID NO: 21488 - RNA, 20 nt, Artificial Sequence
  Synthetic
augauuaaccacauucucug

SEQ ID NO: 21489 - RNA, 18 nt, Artificial Sequence
  Synthetic
uagagggcugaagcggug

SEQ ID NO: 21490 - RNA, 21 nt, Artificial Sequence
  Synthetic
cgguagagggcugaagcggug

SEQ ID NO: 21491 - RNA, 22 nt, Artificial Sequence
  Synthetic
ucgguagagggcugaagcggug

SEQ ID NO: 21492 - RNA, 23 nt, Artificial Sequence
  Synthetic
cucgguagagggcugaagcggug

SEQ ID NO: 21493 - RNA, 24 nt, Artificial Sequence
  Synthetic
ucucgguagagggcugaagcggug

SEQ ID NO: 21494 - RNA, 18 nt, Artificial Sequence
  Synthetic
  misc_feature (16)..(16): n is a, c, g, or u
caaaguauguaaauanug

SEQ ID NO: 21495 - RNA, 19 nt, Artificial Sequence
  Synthetic
  misc_feature (17)..(17): n is a, c, g, or u
acaaaguauguaaauanug

SEQ ID NO: 21496 - RNA, 20 nt, Artificial Sequence
  Synthetic
  misc_feature (18)..(18): n is a, c, g, or u
cacaaaguauguaaauanug

SEQ ID NO: 21497 - RNA, 21 nt, Artificial Sequence
  Synthetic
  misc_feature (19)..(19): n is a, c, g, or u
ccacaaaguauguaaauanug

SEQ ID NO: 21498 - RNA, 22 nt, Artificial Sequence
  Synthetic
  misc_feature (20)..(20): n is a, c, g, or u
uccacaaaguauguaaauanug

SEQ ID NO: 21499 - RNA, 23 nt, Artificial Sequence
  Synthetic
  misc_feature (21)..(21): n is a, c, g, or u
uuccacaaaguauguaaauanug

SEQ ID NO: 21500 - RNA, 24 nt, Artificial Sequence
  Synthetic
  misc_feature (22)..(22): n is a, c, g, or u
cuuccacaaaguauguaaauanug

SEQ ID NO: 21501 - RNA, 18 nt, Artificial Sequence
  Synthetic
  misc_feature (1)..(1): n is a, c, g, or u
nugaaaccauaauaauug

SEQ ID NO: 21502 - RNA, 19 nt, Artificial Sequence
  Synthetic
  misc_feature (2)..(2): n is a, c, g, or u
unugaaaccauaauaauug

SEQ ID NO: 21503 - RNA, 20 nt, Artificial Sequence
  Synthetic
  misc_feature (3)..(3): n is a, c, g, or u
aunugaaaccauaauaauug

SEQ ID NO: 21504 - RNA, 21 nt, Artificial Sequence
  Synthetic
  misc_feature (4)..(4): n is a, c, g, or u
aaunugaaaccauaauaauug

SEQ ID NO: 21505 - RNA, 22 nt, Artificial Sequence
  Synthetic
  misc_feature (5)..(5): n is a, c, g, or u
aaaunugaaaccauaauaauug

SEQ ID NO: 21506 - RNA, 24 nt, Artificial Sequence
  Synthetic
  misc_feature (1)..(1): n is a, c, g, or u
  misc_feature (7)..(7): n is a, c, g, or u
ngaaaunugaaaccauaauaauug

SEQ ID NO: 21507 - RNA, 18 nt, Artificial Sequence
  Synthetic
cuaccuuguuugccauug

SEQ ID NO: 21508 - RNA, 19 nt, Artificial Sequence
  Synthetic
ccuaccuuguuugccauug

SEQ ID NO: 21509 - RNA, 20 nt, Artificial Sequence
  Synthetic
uccuaccuuguuugccauug

SEQ ID NO: 21510 - RNA, 21 nt, Artificial Sequence
  Synthetic
cuccuaccuuguuugccauug

SEQ ID NO: 21511 - RNA, 22 nt, Artificial Sequence
  Synthetic
acuccuaccuuguuugccauug

SEQ ID NO: 21512 - RNA, 23 nt, Artificial Sequence
  Synthetic
cacuccuaccuuguuugccauug

SEQ ID NO: 21513 - RNA, 24 nt, Artificial Sequence
  Synthetic
ccacuccuaccuuguuugccauug

SEQ ID NO: 21514 - RNA, 20 nt, Artificial Sequence
  Synthetic
aggcacagcuuggaggcuug

SEQ ID NO: 21515 - RNA, 21 nt, Artificial Sequence
  Synthetic
aaggcacagcuuggaggcuug

SEQ ID NO: 21516 - RNA, 22 nt, Artificial Sequence
  Synthetic
caaggcacagcuuggaggcuug

SEQ ID NO: 21517 - RNA, 23 nt, Artificial Sequence
  Synthetic
ccaaggcacagcuuggaggcuug

SEQ ID NO: 21518 - RNA, 24 nt, Artificial Sequence
  Synthetic
cccaaggcacagcuuggaggcuug

SEQ ID NO: 21519 - RNA, 20 nt, Artificial Sequence
  Synthetic
aggcagaggugaaaaaguug

SEQ ID NO: 21520 - RNA, 21 nt, Artificial Sequence
  Synthetic
uaggcagaggugaaaaaguug

SEQ ID NO: 21521 - RNA, 22 nt, Artificial Sequence
  Synthetic
uuaggcagaggugaaaaaguug

SEQ ID NO: 21522 - RNA, 23 nt, Artificial Sequence
  Synthetic
auuaggcagaggugaaaaaguug

SEQ ID NO: 21523 - RNA, 18 nt, Artificial Sequence
  Synthetic
uuggaggacaggagguug

SEQ ID NO: 21524 - RNA, 20 nt, Artificial Sequence
  Synthetic
aguuggaggacaggagguug

SEQ ID NO: 21525 - RNA, 18 nt, Artificial Sequence
  Synthetic
agaguggugcagguuuug

SEQ ID NO: 21526 - RNA, 19 nt, Artificial Sequence
  Synthetic
aagaguggugcagguuuug

SEQ ID NO: 21527 - RNA, 20 nt, Artificial Sequence
  Synthetic
caagaguggugcagguuuug

SEQ ID NO: 21528 - RNA, 18 nt, Artificial Sequence
  Synthetic
  misc_feature (18)..(18): n is a, c, g, or u
uguucuccauguucauan

SEQ ID NO: 21529 - RNA, 19 nt, Artificial Sequence
  Synthetic
  misc_feature (19)..(19): n is a, c, g, or u
auguucuccauguucauan

SEQ ID NO: 21530 - RNA, 21 nt, Artificial Sequence
  Synthetic
  misc_feature (21)..(21): n is a, c, g, or u
ugauguucuccauguucauan

SEQ ID NO: 21531 - RNA, 23 nt, Artificial Sequence
  Synthetic
  misc_feature (23)..(23): n is a, c, g, or u
ugugauguucuccauguucauan

SEQ ID NO: 21532 - RNA, 24 nt, Artificial Sequence
  Synthetic
  misc_feature (24)..(24): n is a, c, g, or u
augugauguucuccauguucauan

SEQ ID NO: 21533 - RNA, 18 nt, Artificial Sequence
  Synthetic
  misc_feature (4)..(4): n is a, c, g, or u
  misc_feature (18)..(18): n is a, c, g, or u
uuunuagugagugggccn

SEQ ID NO: 21534 - RNA, 19 nt, Artificial Sequence
  Synthetic
  misc_feature (5)..(5): n is a, c, g, or u
  misc_feature (19)..(19): n is a, c, g, or u
auuunuagugagugggccn

SEQ ID NO: 21535 - RNA, 20 nt, Artificial Sequence
  Synthetic
  misc_feature (6)..(6): n is a, c, g, or u
  misc_feature (20)..(20): n is a, c, g, or u
cauuunuagugagugggccn

SEQ ID NO: 21536 - RNA, 21 nt, Artificial Sequence
  Synthetic
  misc_feature (7)..(7): n is a, c, g, or u
  misc_feature (21)..(21): n is a, c, g, or u
ucauuunuagugagugggccn

SEQ ID NO: 21537 - RNA, 22 nt, Artificial Sequence
  Synthetic
  misc_feature (8)..(8): n is a, c, g, or u
  misc_feature (22)..(22): n is a, c, g, or u
uucauuunuagugagugggccn

SEQ ID NO: 21538 - RNA, 23 nt, Artificial Sequence
  Synthetic
  misc_feature (9)..(9): n is a, c, g, or u
  misc_feature (23)..(23): n is a, c, g, or u
uuucauuunuagugagugggccn

SEQ ID NO: 21539 - RNA, 24 nt, Artificial Sequence
  Synthetic
  misc_feature (10)..(10): n is a, c, g, or u
  misc_feature (24)..(24): n is a, c, g, or u
cuuucauuunuagugagugggccn

SEQ ID NO: 21540 - RNA, 18 nt, Artificial Sequence
  Synthetic
  misc_feature (18)..(18): n is a, c, g, or u
uugggggugcaauguucn

SEQ ID NO: 21541 - RNA, 21 nt, Artificial Sequence
  Synthetic
  misc_feature (21)..(21): n is a, c, g, or u
ugguugggggugcaauguucn

SEQ ID NO: 21542 - RNA, 22 nt, Artificial Sequence
  Synthetic
  misc_feature (1)..(1): n is a, c, g, or u
  misc_feature (22)..(22): n is a, c, g, or u
nugguugggggugcaauguucn

SEQ ID NO: 21543 - RNA, 23 nt, Artificial Sequence
  Synthetic
  misc_feature (2)..(2): n is a, c, g, or u
  misc_feature (23)..(23): n is a, c, g, or u
unugguugggggugcaauguucn

SEQ ID NO: 21544 - RNA, 18 nt, Artificial Sequence
  Synthetic
aagucagaaggcaaaaau

SEQ ID NO: 21545 - RNA, 20 nt, Artificial Sequence
  Synthetic
agaagucagaaggcaaaaau

SEQ ID NO: 21546 - RNA, 21 nt, Artificial Sequence
  Synthetic
aagaagucagaaggcaaaaau

SEQ ID NO: 21547 - RNA, 18 nt, Artificial Sequence
  Synthetic
uuugauguauuccucaau

SEQ ID NO: 21548 - RNA, 19 nt, Artificial Sequence
  Synthetic
cuuugauguauuccucaau

SEQ ID NO: 21549 - RNA, 20 nt, Artificial Sequence
  Synthetic
ucuuugauguauuccucaau

SEQ ID NO: 21550 - RNA, 22 nt, Artificial Sequence
  Synthetic
agucuuugauguauuccucaau

SEQ ID NO: 21551 - RNA, 23 nt, Artificial Sequence
  Synthetic
cagucuuugauguauuccucaau

SEQ ID NO: 21552 - RNA, 24 nt, Artificial Sequence
  Synthetic
acagucuuugauguauuccucaau

SEQ ID NO: 21553 - RNA, 18 nt, Artificial Sequence
  Synthetic
agaugaugggaugggaau

SEQ ID NO: 21554 - RNA, 19 nt, Artificial Sequence
  Synthetic
aagaugaugggaugggaau

SEQ ID NO: 21555 - RNA, 20 nt, Artificial Sequence
  Synthetic
caagaugaugggaugggaau

SEQ ID NO: 21556 - RNA, 21 nt, Artificial Sequence
  Synthetic
ccaagaugaugggaugggaau

SEQ ID NO: 21557 - RNA, 22 nt, Artificial Sequence
  Synthetic
cccaagaugaugggaugggaau

SEQ ID NO: 21558 - RNA, 24 nt, Artificial Sequence
  Synthetic
agcccaagaugaugggaugggaau

SEQ ID NO: 21559 - RNA, 19 nt, Artificial Sequence
  Synthetic
agcagcaggagggaaacau

SEQ ID NO: 21560 - RNA, 20 nt, Artificial Sequence
  Synthetic
cagcagcaggagggaaacau

SEQ ID NO: 21561 - RNA, 21 nt, Artificial Sequence
  Synthetic
acagcagcaggagggaaacau

SEQ ID NO: 21562 - RNA, 22 nt, Artificial Sequence
  Synthetic
uacagcagcaggagggaaacau

SEQ ID NO: 21563 - RNA, 18 nt, Artificial Sequence
  Synthetic
  misc_feature (3)..(3): n is a, c, g, or u
  misc_feature (9)..(9): n is a, c, g, or u
cangaaaunugaaaccau

SEQ ID NO: 21564 - RNA, 21 nt, Artificial Sequence
  Synthetic
  misc_feature (6)..(6): n is a, c, g, or u
  misc_feature (12)..(12): n is a, c, g, or u
aggcangaaaunugaaaccau

SEQ ID NO: 21565 - RNA, 22 nt, Artificial Sequence
  Synthetic
  misc_feature (7)..(7): n is a, c, g, or u
  misc_feature (13)..(13): n is a, c, g, or u
aaggcangaaaunugaaaccau

SEQ ID NO: 21566 - RNA, 23 nt, Artificial Sequence
  Synthetic
  misc_feature (8)..(8): n is a, c, g, or u
  misc_feature (14)..(14): n is a, c, g, or u
uaaggcangaaaunugaaaccau

SEQ ID NO: 21567 - RNA, 18 nt, Artificial Sequence
  Synthetic
  misc_feature (13)..(13): n is a, c, g, or u
ucuaauuuuuagncccau

SEQ ID NO: 21568 - RNA, 20 nt, Artificial Sequence
  Synthetic
  misc_feature (15)..(15): n is a, c, g, or u
ugucuaauuuuuagncccau

SEQ ID NO: 21569 - RNA, 21 nt, Artificial Sequence
  Synthetic
  misc_feature (16)..(16): n is a, c, g, or u
uugucuaauuuuuagncccau

SEQ ID NO: 21570 - RNA, 22 nt, Artificial Sequence
  Synthetic
  misc_feature (17)..(17): n is a, c, g, or u
auugucuaauuuuuagncccau

SEQ ID NO: 21571 - RNA, 23 nt, Artificial Sequence
  Synthetic
  misc_feature (18)..(18): n is a, c, g, or u
aauugucuaauuuuuagncccau

SEQ ID NO: 21572 - RNA, 24 nt, Artificial Sequence
  Synthetic
  misc_feature (19)..(19): n is a, c, g, or u
uaauugucuaauuuuuagncccau

SEQ ID NO: 21573 - RNA, 18 nt, Artificial Sequence
  Synthetic
  misc_feature (2)..(2): n is a, c, g, or u
cnggugauucuaaggcau

SEQ ID NO: 21574 - RNA, 19 nt, Artificial Sequence
  Synthetic
  misc_feature (3)..(3): n is a, c, g, or u
ucnggugauucuaaggcau

SEQ ID NO: 21575 - RNA, 20 nt, Artificial Sequence
  Synthetic
  misc_feature (4)..(4): n is a, c, g, or u
uucnggugauucuaaggcau

SEQ ID NO: 21576 - RNA, 22 nt, Artificial Sequence
  Synthetic
  misc_feature (6)..(6): n is a, c, g, or u
uguucnggugauucuaaggcau

SEQ ID NO: 21577 - RNA, 23 nt, Artificial Sequence
  Synthetic
  misc_feature (7)..(7): n is a, c, g, or u
auguucnggugauucuaaggcau

SEQ ID NO: 21578 - RNA, 24 nt, Artificial Sequence
  Synthetic
  misc_feature (8)..(8): n is a, c, g, or u
aauguucnggugauucuaaggcau

SEQ ID NO: 21579 - RNA, 18 nt, Artificial Sequence
  Synthetic
cauugggaagcuggagau

SEQ ID NO: 21580 - RNA, 19 nt, Artificial Sequence
  Synthetic
acauugggaagcuggagau

SEQ ID NO: 21581 - RNA, 20 nt, Artificial Sequence
  Synthetic
aacauugggaagcuggagau

SEQ ID NO: 21582 - RNA, 21 nt, Artificial Sequence
  Synthetic
uaacauugggaagcuggagau

SEQ ID NO: 21583 - RNA, 22 nt, Artificial Sequence
  Synthetic
cuaacauugggaagcuggagau

SEQ ID NO: 21584 - RNA, 23 nt, Artificial Sequence
  Synthetic
acuaacauugggaagcuggagau

SEQ ID NO: 21585 - RNA, 24 nt, Artificial Sequence
  Synthetic
uacuaacauugggaagcuggagau

SEQ ID NO: 21586 - RNA, 18 nt, Artificial Sequence
  Synthetic
agcccaagaugaugggau

SEQ ID NO: 21587 - RNA, 19 nt, Artificial Sequence
  Synthetic
aagcccaagaugaugggau

SEQ ID NO: 21588 - RNA, 20 nt, Artificial Sequence
  Synthetic
aaagcccaagaugaugggau

SEQ ID NO: 21589 - RNA, 22 nt, Artificial Sequence
  Synthetic
cgaaagcccaagaugaugggau

SEQ ID NO: 21590 - RNA, 23 nt, Artificial Sequence
  Synthetic
ccgaaagcccaagaugaugggau

SEQ ID NO: 21591 - RNA, 24 nt, Artificial Sequence
  Synthetic
uccgaaagcccaagaugaugggau

SEQ ID NO: 21592 - RNA, 18 nt, Artificial Sequence
  Synthetic
  misc_feature (15)..(15): n is a, c, g, or u
cuucugcgacgcggngau

SEQ ID NO: 21593 - RNA, 19 nt, Artificial Sequence
  Synthetic
  misc_feature (16)..(16): n is a, c, g, or u
ucuucugcgacgcggngau

SEQ ID NO: 21594 - RNA, 20 nt, Artificial Sequence
  Synthetic
  misc_feature (17)..(17): n is a, c, g, or u
aucuucugcgacgcggngau

SEQ ID NO: 21595 - RNA, 18 nt, Artificial Sequence
  Synthetic
  misc_feature (10)..(10): n is a, c, g, or u
uuuguaucanaucuugau

SEQ ID NO: 21596 - RNA, 19 nt, Artificial Sequence
  Synthetic
  misc_feature (11)..(11): n is a, c, g, or u
uuuuguaucanaucuugau

SEQ ID NO: 21597 - RNA, 20 nt, Artificial Sequence
  Synthetic
  misc_feature (12)..(12): n is a, c, g, or u
uuuuuguaucanaucuugau

SEQ ID NO: 21598 - RNA, 21 nt, Artificial Sequence
  Synthetic
  misc_feature (13)..(13): n is a, c, g, or u
auuuuuguaucanaucuugau

SEQ ID NO: 21599 - RNA, 22 nt, Artificial Sequence
  Synthetic
  misc_feature (14)..(14): n is a, c, g, or u
cauuuuuguaucanaucuugau

SEQ ID NO: 21600 - RNA, 23 nt, Artificial Sequence
  Synthetic
  misc_feature (15)..(15): n is a, c, g, or u
acauuuuuguaucanaucuugau

SEQ ID NO: 21601 - RNA, 24 nt, Artificial Sequence
  Synthetic
  misc_feature (16)..(16): n is a, c, g, or u
cacauuuuuguaucanaucuugau

SEQ ID NO: 21602 - RNA, 18 nt, Artificial Sequence
  Synthetic
  misc_feature (16)..(16): n is a, c, g, or u
cacauuuuuguaucanau

SEQ ID NO: 21603 - RNA, 19 nt, Artificial Sequence
  Synthetic
  misc_feature (17)..(17): n is a, c, g, or u
ucacauuuuuguaucanau

SEQ ID NO: 21604 - RNA, 20 nt, Artificial Sequence
  Synthetic
  misc_feature (18)..(18): n is a, c, g, or u
uucacauuuuuguaucanau

SEQ ID NO: 21605 - RNA, 22 nt, Artificial Sequence
  Synthetic
  misc_feature (20)..(20): n is a, c, g, or u
uguucacauuuuuguaucanau

SEQ ID NO: 21606 - RNA, 23 nt, Artificial Sequence
  Synthetic
  misc_feature (21)..(21): n is a, c, g, or u
uuguucacauuuuuguaucanau

SEQ ID NO: 21607 - RNA, 24 nt, Artificial Sequence
  Synthetic
  misc_feature (22)..(22): n is a, c, g, or u
auuguucacauuuuuguaucanau

SEQ ID NO: 21608 - RNA, 18 nt, Artificial Sequence
  Synthetic
cugccuuccacaaaguau

SEQ ID NO: 21609 - RNA, 19 nt, Artificial Sequence
  Synthetic
ccugccuuccacaaaguau

SEQ ID NO: 21610 - RNA, 20 nt, Artificial Sequence
  Synthetic
uccugccuuccacaaaguau

SEQ ID NO: 21611 - RNA, 21 nt, Artificial Sequence
  Synthetic
uuccugccuuccacaaaguau

SEQ ID NO: 21612 - RNA, 22 nt, Artificial Sequence
  Synthetic
auuccugccuuccacaaaguau

SEQ ID NO: 21613 - RNA, 23 nt, Artificial Sequence
  Synthetic
aauuccugccuuccacaaaguau

SEQ ID NO: 21614 - RNA, 18 nt, Artificial Sequence
  Synthetic
aagcuccaaauucuuuau

SEQ ID NO: 21615 - RNA, 20 nt, Artificial Sequence
  Synthetic
agaagcuccaaauucuuuau

SEQ ID NO: 21616 - RNA, 18 nt, Artificial Sequence
  Synthetic
  misc_feature (7)..(7): n is a, c, g, or u
aggcaangucccccaacu

SEQ ID NO: 21617 - RNA, 20 nt, Artificial Sequence
  Synthetic
  misc_feature (9)..(9): n is a, c, g, or u
ugaggcaangucccccaacu

SEQ ID NO: 21618 - RNA, 21 nt, Artificial Sequence
  Synthetic
  misc_feature (10)..(10): n is a, c, g, or u
cugaggcaangucccccaacu

SEQ ID NO: 21619 - RNA, 22 nt, Artificial Sequence
  Synthetic
  misc_feature (11)..(11): n is a, c, g, or u
ccugaggcaangucccccaacu

SEQ ID NO: 21620 - RNA, 23 nt, Artificial Sequence
  Synthetic
  misc_feature (12)..(12): n is a, c, g, or u
uccugaggcaangucccccaacu

SEQ ID NO: 21621 - RNA, 24 nt, Artificial Sequence
  Synthetic
  misc_feature (13)..(13): n is a, c, g, or u
uuccugaggcaangucccccaacu

SEQ ID NO: 21622 - RNA, 18 nt, Artificial Sequence
  Synthetic
ugaauaguggauccaacu

SEQ ID NO: 21623 - RNA, 19 nt, Artificial Sequence
  Synthetic
cugaauaguggauccaacu

SEQ ID NO: 21624 - RNA, 20 nt, Artificial Sequence
  Synthetic
ucugaauaguggauccaacu

SEQ ID NO: 21625 - RNA, 21 nt, Artificial Sequence
  Synthetic
cucugaauaguggauccaacu

SEQ ID NO: 21626 - RNA, 23 nt, Artificial Sequence
  Synthetic
ugcucugaauaguggauccaacu

SEQ ID NO: 21627 - RNA, 24 nt, Artificial Sequence
  Synthetic
uugcucugaauaguggauccaacu

SEQ ID NO: 21628 - RNA, 19 nt, Artificial Sequence
  Synthetic
ugauuggagauuggggacu

SEQ ID NO: 21629 - RNA, 21 nt, Artificial Sequence
  Synthetic
agugauuggagauuggggacu

SEQ ID NO: 21630 - RNA, 22 nt, Artificial Sequence
  Synthetic
aagugauuggagauuggggacu

SEQ ID NO: 21631 - RNA, 23 nt, Artificial Sequence
  Synthetic
uaagugauuggagauuggggacu

SEQ ID NO: 21632 - RNA, 18 nt, Artificial Sequence
  Synthetic
  misc_feature (5)..(5): n is a, c, g, or u
caauncguugacaaaccu

SEQ ID NO: 21633 - RNA, 19 nt, Artificial Sequence
  Synthetic
  misc_feature (6)..(6): n is a, c, g, or u
acaauncguugacaaaccu

SEQ ID NO: 21634 - RNA, 20 nt, Artificial Sequence
  Synthetic
  misc_feature (7)..(7): n is a, c, g, or u
cacaauncguugacaaaccu

SEQ ID NO: 21635 - RNA, 21 nt, Artificial Sequence
  Synthetic
accaauuuaugccuacagccu

SEQ ID NO: 21636 - RNA, 23 nt, Artificial Sequence
  Synthetic
agaccaauuuaugccuacagccu

SEQ ID NO: 21637 - RNA, 24 nt, Artificial Sequence
  Synthetic
cagaccaauuuaugccuacagccu

SEQ ID NO: 21638 - RNA, 18 nt, Artificial Sequence
  Synthetic
  misc_feature (5)..(5): n is a, c, g, or u
cucungcugcaggauccu

SEQ ID NO: 21639 - RNA, 19 nt, Artificial Sequence
  Synthetic
  misc_feature (6)..(6): n is a, c, g, or u
ucucungcugcaggauccu

SEQ ID NO: 21640 - RNA, 20 nt, Artificial Sequence
  Synthetic
  misc_feature (7)..(7): n is a, c, g, or u
aucucungcugcaggauccu

SEQ ID NO: 21641 - RNA, 18 nt, Artificial Sequence
  Synthetic
acuccucccccgacuccu

SEQ ID NO: 21642 - RNA, 19 nt, Artificial Sequence
  Synthetic
aacuccucccccgacuccu

SEQ ID NO: 21643 - RNA, 20 nt, Artificial Sequence
  Synthetic
caacuccucccccgacuccu

SEQ ID NO: 21644 - RNA, 21 nt, Artificial Sequence
  Synthetic
ucaacuccucccccgacuccu

SEQ ID NO: 21645 - RNA, 22 nt, Artificial Sequence
  Synthetic
cucaacuccucccccgacuccu

SEQ ID NO: 21646 - RNA, 23 nt, Artificial Sequence
  Synthetic
ccucaacuccucccccgacuccu

SEQ ID NO: 21647 - RNA, 24 nt, Artificial Sequence
  Synthetic
accucaacuccucccccgacuccu

SEQ ID NO: 21648 - RNA, 18 nt, Artificial Sequence
  Synthetic
aguaacuccacagaagcu

SEQ ID NO: 21649 - RNA, 20 nt, Artificial Sequence
  Synthetic
agaguaacuccacagaagcu

SEQ ID NO: 21650 - RNA, 22 nt, Artificial Sequence
  Synthetic
ugagaguaacuccacagaagcu

SEQ ID NO: 21651 - RNA, 23 nt, Artificial Sequence
  Synthetic
augagaguaacuccacagaagcu

SEQ ID NO: 21652 - RNA, 24 nt, Artificial Sequence
  Synthetic
aaugagaguaacuccacagaagcu

SEQ ID NO: 21653 - RNA, 18 nt, Artificial Sequence
  Synthetic
uacuaacauugggaagcu

SEQ ID NO: 21654 - RNA, 19 nt, Artificial Sequence
  Synthetic
auacuaacauugggaagcu

SEQ ID NO: 21655 - RNA, 20 nt, Artificial Sequence
  Synthetic
aauacuaacauugggaagcu

SEQ ID NO: 21656 - RNA, 23 nt, Artificial Sequence
  Synthetic
aggaauacuaacauugggaagcu

SEQ ID NO: 21657 - RNA, 24 nt, Artificial Sequence
  Synthetic
aaggaauacuaacauugggaagcu

SEQ ID NO: 21658 - RNA, 18 nt, Artificial Sequence
  Synthetic
uuugcagggucccgugcu

SEQ ID NO: 21659 - RNA, 19 nt, Artificial Sequence
  Synthetic
uuuugcagggucccgugcu

SEQ ID NO: 21660 - RNA, 22 nt, Artificial Sequence
  Synthetic
agguuuugcagggucccgugcu

SEQ ID NO: 21661 - RNA, 23 nt, Artificial Sequence
  Synthetic
cagguuuugcagggucccgugcu

SEQ ID NO: 21662 - RNA, 20 nt, Artificial Sequence
  Synthetic
cgggacugcuggaauuugcu

SEQ ID NO: 21663 - RNA, 18 nt, Artificial Sequence
  Synthetic
aaugauuaaccacauucu

SEQ ID NO: 21664 - RNA, 19 nt, Artificial Sequence
  Synthetic
uaaugauuaaccacauucu

SEQ ID NO: 21665 - RNA, 21 nt, Artificial Sequence
  Synthetic
aguaaugauuaaccacauucu

SEQ ID NO: 21666 - RNA, 22 nt, Artificial Sequence
  Synthetic
aaguaaugauuaaccacauucu

SEQ ID NO: 21667 - RNA, 23 nt, Artificial Sequence
  Synthetic
  misc_feature (1)..(1): n is a, c, g, or u
naaguaaugauuaaccacauucu

SEQ ID NO: 21668 - RNA, 24 nt, Artificial Sequence
  Synthetic
  misc_feature (2)..(2): n is a, c, g, or u
unaaguaaugauuaaccacauucu

SEQ ID NO: 21669 - RNA, 18 nt, Artificial Sequence
  Synthetic
acaguagucuccggaagu

SEQ ID NO: 21670 - RNA, 19 nt, Artificial Sequence
  Synthetic
aacaguagucuccggaagu

SEQ ID NO: 21671 - RNA, 20 nt, Artificial Sequence
  Synthetic
caacaguagucuccggaagu

SEQ ID NO: 21672 - RNA, 21 nt, Artificial Sequence
  Synthetic
acaacaguagucuccggaagu

SEQ ID NO: 21673 - RNA, 22 nt, Artificial Sequence
  Synthetic
aacaacaguagucuccggaagu

SEQ ID NO: 21674 - RNA, 23 nt, Artificial Sequence
  Synthetic
uaacaacaguagucuccggaagu

SEQ ID NO: 21675 - RNA, 24 nt, Artificial Sequence
  Synthetic
cuaacaacaguagucuccggaagu

SEQ ID NO: 21676 - RNA, 18 nt, Artificial Sequence
  Synthetic
ccuuguuuguguugaagu

SEQ ID NO: 21677 - RNA, 19 nt, Artificial Sequence
  Synthetic
uccuuguuuguguugaagu

SEQ ID NO: 21678 - RNA, 21 nt, Artificial Sequence
  Synthetic
uguccuuguuuguguugaagu

SEQ ID NO: 21679 - RNA, 22 nt, Artificial Sequence
  Synthetic
uuguccuuguuuguguugaagu

SEQ ID NO: 21680 - RNA, 23 nt, Artificial Sequence
  Synthetic
auuguccuuguuuguguugaagu

SEQ ID NO: 21681 - RNA, 24 nt, Artificial Sequence
  Synthetic
aauuguccuuguuuguguugaagu

SEQ ID NO: 21682 - RNA, 18 nt, Artificial Sequence
  Synthetic
  misc_feature (2)..(2): n is a, c, g, or u
  misc_feature (14)..(14): n is a, c, g, or u
anugucuaguuuunaagu

SEQ ID NO: 21683 - RNA, 19 nt, Artificial Sequence
  Synthetic
  misc_feature (3)..(3): n is a, c, g, or u
  misc_feature (15)..(15): n is a, c, g, or u
uanugucuaguuuunaagu

SEQ ID NO: 21684 - RNA, 20 nt, Artificial Sequence
  Synthetic
  misc_feature (4)..(4): n is a, c, g, or u
  misc_feature (16)..(16): n is a, c, g, or u
auanugucuaguuuunaagu

SEQ ID NO: 21685 - RNA, 21 nt, Artificial Sequence
  Synthetic
  misc_feature (5)..(5): n is a, c, g, or u
  misc_feature (17)..(17): n is a, c, g, or u
aauanugucuaguuuunaagu

SEQ ID NO: 21686 - RNA, 22 nt, Artificial Sequence
  Synthetic
  misc_feature (6)..(6): n is a, c, g, or u
  misc_feature (18)..(18): n is a, c, g, or u
aaauanugucuaguuuunaagu

SEQ ID NO: 21687 - RNA, 23 nt, Artificial Sequence
  Synthetic
  misc_feature (7)..(7): n is a, c, g, or u
  misc_feature (19)..(19): n is a, c, g, or u
uaaauanugucuaguuuunaagu

SEQ ID NO: 21688 - RNA, 18 nt, Artificial Sequence
  Synthetic
aagaaggaguuaaccagu

SEQ ID NO: 21689 - RNA, 19 nt, Artificial Sequence
  Synthetic
aaagaaggaguuaaccagu

SEQ ID NO: 21690 - RNA, 20 nt, Artificial Sequence
  Synthetic
aaaagaaggaguuaaccagu

SEQ ID NO: 21691 - RNA, 23 nt, Artificial Sequence
  Synthetic
aggaaaagaaggaguuaaccagu

SEQ ID NO: 21692 - RNA, 24 nt, Artificial Sequence
  Synthetic
caggaaaagaaggaguuaaccagu

SEQ ID NO: 21693 - RNA, 18 nt, Artificial Sequence
  Synthetic
cgccaagccccagccagu

SEQ ID NO: 21694 - RNA, 19 nt, Artificial Sequence
  Synthetic
ucgccaagccccagccagu

SEQ ID NO: 21695 - RNA, 20 nt, Artificial Sequence
  Synthetic
aucgccaagccccagccagu

SEQ ID NO: 21696 - RNA, 18 nt, Artificial Sequence
  Synthetic
  misc_feature (1)..(1): n is a, c, g, or u
ngcuaggaguuccgcagu

SEQ ID NO: 21697 - RNA, 19 nt, Artificial Sequence
  Synthetic
  misc_feature (2)..(2): n is a, c, g, or u
cngcuaggaguuccgcagu

SEQ ID NO: 21698 - RNA, 20 nt, Artificial Sequence
  Synthetic
  misc_feature (9)..(9): n is a, c, g, or u
aggacaacngaguugucagu

SEQ ID NO: 21699 - RNA, 21 nt, Artificial Sequence
  Synthetic
  misc_feature (10)..(10): n is a, c, g, or u
aaggacaacngaguugucagu

SEQ ID NO: 21700 - RNA, 22 nt, Artificial Sequence
  Synthetic
  misc_feature (11)..(11): n is a, c, g, or u
aaaggacaacngaguugucagu

SEQ ID NO: 21701 - RNA, 24 nt, Artificial Sequence
  Synthetic
  misc_feature (13)..(13): n is a, c, g, or u
agaaaggacaacngaguugucagu

SEQ ID NO: 21702 - RNA, 18 nt, Artificial Sequence
  Synthetic
agaagggguccuaggagu

SEQ ID NO: 21703 - RNA, 20 nt, Artificial Sequence
  Synthetic
cgagaagggguccuaggagu

SEQ ID NO: 21704 - RNA, 20 nt, Artificial Sequence
  Synthetic
aggugaaaaaguugcauggu

SEQ ID NO: 21705 - RNA, 18 nt, Artificial Sequence
  Synthetic
uccuugagcaagaguggu

SEQ ID NO: 21706 - RNA, 19 nt, Artificial Sequence
  Synthetic
uuccuugagcaagaguggu

SEQ ID NO: 21707 - RNA, 22 nt, Artificial Sequence
  Synthetic
agguuccuugagcaagaguggu

SEQ ID NO: 21708 - RNA, 24 nt, Artificial Sequence
  Synthetic
agagguuccuugagcaagaguggu

SEQ ID NO: 21709 - RNA, 18 nt, Artificial Sequence
  Synthetic
ugguugggggugcaaugu

SEQ ID NO: 21710 - RNA, 19 nt, Artificial Sequence
  Synthetic
  misc_feature (1)..(1): n is a, c, g, or u
nugguugggggugcaaugu

SEQ ID NO: 21711 - RNA, 20 nt, Artificial Sequence
  Synthetic
  misc_feature (2)..(2): n is a, c, g, or u
unugguugggggugcaaugu

SEQ ID NO: 21712 - RNA, 22 nt, Artificial Sequence
  Synthetic
  misc_feature (4)..(4): n is a, c, g, or u
agunugguugggggugcaaugu

SEQ ID NO: 21713 - RNA, 23 nt, Artificial Sequence
  Synthetic
  misc_feature (5)..(5): n is a, c, g, or u
cagunugguugggggugcaaugu

SEQ ID NO: 21714 - RNA, 18 nt, Artificial Sequence
  Synthetic
caaaaugaggcgcuaugu

SEQ ID NO: 21715 - RNA, 19 nt, Artificial Sequence
  Synthetic
acaaaaugaggcgcuaugu

SEQ ID NO: 21716 - RNA, 20 nt, Artificial Sequence
  Synthetic
cacaaaaugaggcgcuaugu

SEQ ID NO: 21717 - RNA, 18 nt, Artificial Sequence
  Synthetic
cccagaaggccaccgugu

SEQ ID NO: 21718 - RNA, 19 nt, Artificial Sequence
  Synthetic
ccccagaaggccaccgugu

SEQ ID NO: 21719 - RNA, 20 nt, Artificial Sequence
  Synthetic
accccagaaggccaccgugu

SEQ ID NO: 21720 - RNA, 18 nt, Artificial Sequence
  Synthetic
auuuuguuuuagcugugu

SEQ ID NO: 21721 - RNA, 19 nt, Artificial Sequence
  Synthetic
cauuuuguuuuagcugugu

SEQ ID NO: 21722 - RNA, 20 nt, Artificial Sequence
  Synthetic
ccauuuuguuuuagcugugu

SEQ ID NO: 21723 - RNA, 18 nt, Artificial Sequence
  Synthetic
aauuguccuuguuugugu

SEQ ID NO: 21724 - RNA, 19 nt, Artificial Sequence
  Synthetic
caauuguccuuguuugugu

SEQ ID NO: 21725 - RNA, 20 nt, Artificial Sequence
  Synthetic
ccaauuguccuuguuugugu

SEQ ID NO: 21726 - RNA, 18 nt, Artificial Sequence
  Synthetic
  misc_feature (9)..(9): n is a, c, g, or u
uagacucunugguauugu

SEQ ID NO: 21727 - RNA, 19 nt, Artificial Sequence
  Synthetic
  misc_feature (10)..(10): n is a, c, g, or u
cuagacucunugguauugu

SEQ ID NO: 21728 - RNA, 20 nt, Artificial Sequence
  Synthetic
  misc_feature (11)..(11): n is a, c, g, or u
ucuagacucunugguauugu

SEQ ID NO: 21729 - RNA, 18 nt, Artificial Sequence
  Synthetic
aucugguggcgagguugu

SEQ ID NO: 21730 - RNA, 18 nt, Artificial Sequence
  Synthetic
  misc_feature (17)..(17): n is a, c, g, or u
cuagcuggcauaauuanu

SEQ ID NO: 21731 - RNA, 19 nt, Artificial Sequence
  Synthetic
  misc_feature (18)..(18): n is a, c, g, or u
ccuagcuggcauaauuanu

SEQ ID NO: 21732 - RNA, 20 nt, Artificial Sequence
  Synthetic
  misc_feature (19)..(19): n is a, c, g, or u
accuagcuggcauaauuanu

SEQ ID NO: 21733 - RNA, 21 nt, Artificial Sequence
  Synthetic
  misc_feature (20)..(20): n is a, c, g, or u
aaccuagcuggcauaauuanu

SEQ ID NO: 21734 - RNA, 22 nt, Artificial Sequence
  Synthetic
  misc_feature (21)..(21): n is a, c, g, or u
aaaccuagcuggcauaauuanu

SEQ ID NO: 21735 - RNA, 23 nt, Artificial Sequence
  Synthetic
  misc_feature (22)..(22): n is a, c, g, or u
aaaaccuagcuggcauaauuanu

SEQ ID NO: 21736 - RNA, 24 nt, Artificial Sequence
  Synthetic
  misc_feature (23)..(23): n is a, c, g, or u
uaaaaccuagcuggcauaauuanu

SEQ ID NO: 21737 - RNA, 18 nt, Artificial Sequence
  Synthetic
caaucgucuccuuucauu

SEQ ID NO: 21738 - RNA, 19 nt, Artificial Sequence
  Synthetic
ucaaucgucuccuuucauu

SEQ ID NO: 21739 - RNA, 20 nt, Artificial Sequence
  Synthetic
uucaaucgucuccuuucauu

SEQ ID NO: 21740 - RNA, 21 nt, Artificial Sequence
  Synthetic
uuucaaucgucuccuuucauu

SEQ ID NO: 21741 - RNA, 22 nt, Artificial Sequence
  Synthetic
  misc_feature (1)..(1): n is a, c, g, or u
nuuucaaucgucuccuuucauu

SEQ ID NO: 21742 - RNA, 23 nt, Artificial Sequence
  Synthetic
  misc_feature (2)..(2): n is a, c, g, or u
anuuucaaucgucuccuuucauu

SEQ ID NO: 21743 - RNA, 24 nt, Artificial Sequence
  Synthetic
  misc_feature (3)..(3): n is a, c, g, or u
uanuuucaaucgucuccuuucauu

SEQ ID NO: 21744 - RNA, 19 nt, Artificial Sequence
  Synthetic
aggagguugguaagugauu

SEQ ID NO: 21745 - RNA, 20 nt, Artificial Sequence
  Synthetic
caggagguugguaagugauu

SEQ ID NO: 21746 - RNA, 21 nt, Artificial Sequence
  Synthetic
acaggagguugguaagugauu

SEQ ID NO: 21747 - RNA, 24 nt, Artificial Sequence
  Synthetic
aggacaggagguugguaagugauu

SEQ ID NO: 21748 - RNA, 20 nt, Artificial Sequence
  Synthetic
agggaaguauuuaguaacuu

SEQ ID NO: 21749 - RNA, 19 nt, Artificial Sequence
  Synthetic
cgguaaaguuucccaccuu

SEQ ID NO: 21750 - RNA, 20 nt, Artificial Sequence
  Synthetic
ccgguaaaguuucccaccuu

SEQ ID NO: 21751 - RNA, 18 nt, Artificial Sequence
  Synthetic
uguggaugugugucccuu

SEQ ID NO: 21752 - RNA, 19 nt, Artificial Sequence
  Synthetic
cuguggaugugugucccuu

SEQ ID NO: 21753 - RNA, 20 nt, Artificial Sequence
  Synthetic
ccuguggaugugugucccuu

SEQ ID NO: 21754 - RNA, 23 nt, Artificial Sequence
  Synthetic
uggccuguggaugugugucccuu

SEQ ID NO: 21755 - RNA, 24 nt, Artificial Sequence
  Synthetic
auggccuguggaugugugucccuu

SEQ ID NO: 21756 - RNA, 18 nt, Artificial Sequence
  Synthetic
uuuacagagaaaggccuu

SEQ ID NO: 21757 - RNA, 20 nt, Artificial Sequence
  Synthetic
uguuuacagagaaaggccuu

SEQ ID NO: 21758 - RNA, 21 nt, Artificial Sequence
  Synthetic
uuguuuacagagaaaggccuu

SEQ ID NO: 21759 - RNA, 22 nt, Artificial Sequence
  Synthetic
auuguuuacagagaaaggccuu

SEQ ID NO: 21760 - RNA, 23 nt, Artificial Sequence
  Synthetic
uauuguuuacagagaaaggccuu

SEQ ID NO: 21761 - RNA, 19 nt, Artificial Sequence
  Synthetic
agaaaacaaaagccugcuu

SEQ ID NO: 21762 - RNA, 18 nt, Artificial Sequence
  Synthetic
  misc_feature (6)..(6): n is a, c, g, or u
ucaagnacaguuucucuu

SEQ ID NO: 21763 - RNA, 19 nt, Artificial Sequence
  Synthetic
  misc_feature (7)..(7): n is a, c, g, or u
cucaagnacaguuucucuu

SEQ ID NO: 21764 - RNA, 20 nt, Artificial Sequence
  Synthetic
  misc_feature (8)..(8): n is a, c, g, or u
acucaagnacaguuucucuu

SEQ ID NO: 21765 - RNA, 21 nt, Artificial Sequence
  Synthetic
  misc_feature (9)..(9): n is a, c, g, or u
uacucaagnacaguuucucuu

SEQ ID NO: 21766 - RNA, 22 nt, Artificial Sequence
  Synthetic
  misc_feature (10)..(10): n is a, c, g, or u
auacucaagnacaguuucucuu

SEQ ID NO: 21767 - RNA, 23 nt, Artificial Sequence
  Synthetic
  misc_feature (11)..(11): n is a, c, g, or u
aauacucaagnacaguuucucuu

SEQ ID NO: 21768 - RNA, 24 nt, Artificial Sequence
  Synthetic
  misc_feature (12)..(12): n is a, c, g, or u
aaauacucaagnacaguuucucuu

SEQ ID NO: 21769 - RNA, 18 nt, Artificial Sequence
  Synthetic
  misc_feature (13)..(13): n is a, c, g, or u
agaaaggacaacngaguu

SEQ ID NO: 21770 - RNA, 20 nt, Artificial Sequence
  Synthetic
  misc_feature (15)..(15): n is a, c, g, or u
cgagaaaggacaacngaguu

SEQ ID NO: 21771 - RNA, 21 nt, Artificial Sequence
  Synthetic
  misc_feature (16)..(16): n is a, c, g, or u
ccgagaaaggacaacngaguu

SEQ ID NO: 21772 - RNA, 22 nt, Artificial Sequence
  Synthetic
  misc_feature (17)..(17): n is a, c, g, or u
uccgagaaaggacaacngaguu

SEQ ID NO: 21773 - RNA, 23 nt, Artificial Sequence
  Synthetic
  misc_feature (18)..(18): n is a, c, g, or u
uuccgagaaaggacaacngaguu

SEQ ID NO: 21774 - RNA, 24 nt, Artificial Sequence
  Synthetic
  misc_feature (19)..(19): n is a, c, g, or u
cuuccgagaaaggacaacngaguu

SEQ ID NO: 21775 - RNA, 18 nt, Artificial Sequence
  Synthetic
  misc_feature (5)..(5): n is a, c, g, or u
  misc_feature (9)..(9): n is a, c, g, or u
caagnuccnaggggcguu

SEQ ID NO: 21776 - RNA, 21 nt, Artificial Sequence
  Synthetic
  misc_feature (8)..(8): n is a, c, g, or u
  misc_feature (12)..(12): n is a, c, g, or u
uggcaagnuccnaggggcguu

SEQ ID NO: 21777 - RNA, 22 nt, Artificial Sequence
  Synthetic
  misc_feature (9)..(9): n is a, c, g, or u
  misc_feature (13)..(13): n is a, c, g, or u
uuggcaagnuccnaggggcguu

SEQ ID NO: 21778 - RNA, 24 nt, Artificial Sequence
  Synthetic
  misc_feature (11)..(11): n is a, c, g, or u
  misc_feature (15)..(15): n is a, c, g, or u
uguuggcaagnuccnaggggcguu

SEQ ID NO: 21779 - RNA, 20 nt, Artificial Sequence
  Synthetic
agggucccgugcuggugguu

SEQ ID NO: 21780 - RNA, 18 nt, Artificial Sequence
  Synthetic
  misc_feature (13)..(13): n is a, c, g, or u
ccugagagcagunugguu

SEQ ID NO: 21781 - RNA, 20 nt, Artificial Sequence
  Synthetic
  misc_feature (15)..(15): n is a, c, g, or u
ugccugagagcagunugguu

SEQ ID NO: 21782 - RNA, 21 nt, Artificial Sequence
  Synthetic
  misc_feature (16)..(16): n is a, c, g, or u
uugccugagagcagunugguu

SEQ ID NO: 21783 - RNA, 22 nt, Artificial Sequence
  Synthetic
  misc_feature (17)..(17): n is a, c, g, or u
cuugccugagagcagunugguu

SEQ ID NO: 21784 - RNA, 24 nt, Artificial Sequence
  Synthetic
  misc_feature (19)..(19): n is a, c, g, or u
agcuugccugagagcagunugguu

SEQ ID NO: 21785 - RNA, 19 nt, Artificial Sequence
  Synthetic
  misc_feature (9)..(9): n is a, c, g, or u
uguaaauanugucuaguuu

SEQ ID NO: 21786 - RNA, 20 nt, Artificial Sequence
  Synthetic
  misc_feature (10)..(10): n is a, c, g, or u
auguaaauanugucuaguuu

SEQ ID NO: 21787 - RNA, 21 nt, Artificial Sequence
  Synthetic
  misc_feature (11)..(11): n is a, c, g, or u
uauguaaauanugucuaguuu

SEQ ID NO: 21788 - RNA, 23 nt, Artificial Sequence
  Synthetic
  misc_feature (13)..(13): n is a, c, g, or u
aguauguaaauanugucuaguuu

SEQ ID NO: 21789 - RNA, 24 nt, Artificial Sequence
  Synthetic
  misc_feature (14)..(14): n is a, c, g, or u
aaguauguaaauanugucuaguuu

SEQ ID NO: 21790 - RNA, 18 nt, Artificial Sequence
  Synthetic
auuugaacacagcuaaaa

SEQ ID NO: 21791 - RNA, 19 nt, Artificial Sequence
  Synthetic
cauuugaacacagcuaaaa

SEQ ID NO: 21792 - RNA, 20 nt, Artificial Sequence
  Synthetic
ccauuugaacacagcuaaaa

SEQ ID NO: 21793 - RNA, 21 nt, Artificial Sequence
  Synthetic
uccauuugaacacagcuaaaa

SEQ ID NO: 21794 - RNA, 22 nt, Artificial Sequence
  Synthetic
auccauuugaacacagcuaaaa

SEQ ID NO: 21795 - RNA, 23 nt, Artificial Sequence
  Synthetic
cauccauuugaacacagcuaaaa

SEQ ID NO: 21796 - RNA, 18 nt, Artificial Sequence
  Synthetic
caauuggccaauggcaaa

SEQ ID NO: 21797 - RNA, 19 nt, Artificial Sequence
  Synthetic
acaauuggccaauggcaaa

SEQ ID NO: 21798 - RNA, 18 nt, Artificial Sequence
  Synthetic
ugaacacagcuaaaacaa

SEQ ID NO: 21799 - RNA, 19 nt, Artificial Sequence
  Synthetic
uugaacacagcuaaaacaa

SEQ ID NO: 21800 - RNA, 20 nt, Artificial Sequence
  Synthetic
uuugaacacagcuaaaacaa

SEQ ID NO: 21801 - RNA, 21 nt, Artificial Sequence
  Synthetic
auuugaacacagcuaaaacaa

SEQ ID NO: 21802 - RNA, 22 nt, Artificial Sequence
  Synthetic
cauuugaacacagcuaaaacaa

SEQ ID NO: 21803 - RNA, 23 nt, Artificial Sequence
  Synthetic
ccauuugaacacagcuaaaacaa

SEQ ID NO: 21804 - RNA, 24 nt, Artificial Sequence
  Synthetic
uccauuugaacacagcuaaaacaa

SEQ ID NO: 21805 - RNA, 19 nt, Artificial Sequence
  Synthetic
  misc_feature (8)..(8): n is a, c, g, or u
ugcuaggnugugcugccaa

SEQ ID NO: 21806 - RNA, 20 nt, Artificial Sequence
  Synthetic
  misc_feature (9)..(9): n is a, c, g, or u
cugcuaggnugugcugccaa

SEQ ID NO: 21807 - RNA, 23 nt, Artificial Sequence
  Synthetic
  misc_feature (12)..(12): n is a, c, g, or u
uggcugcuaggnugugcugccaa

SEQ ID NO: 21808 - RNA, 24 nt, Artificial Sequence
  Synthetic
  misc_feature (13)..(13): n is a, c, g, or u
auggcugcuaggnugugcugccaa

SEQ ID NO: 21809 - RNA, 19 nt, Artificial Sequence
  Synthetic
ugcagccccuuuuacucaa

SEQ ID NO: 21810 - RNA, 20 nt, Artificial Sequence
  Synthetic
uugcagccccuuuuacucaa

SEQ ID NO: 21811 - RNA, 18 nt, Artificial Sequence
  Synthetic
  misc_feature (1)..(1): n is a, c, g, or u
nccuuacuauccagagaa

SEQ ID NO: 21812 - RNA, 19 nt, Artificial Sequence
  Synthetic
  misc_feature (2)..(2): n is a, c, g, or u
anccuuacuauccagagaa

SEQ ID NO: 21813 - RNA, 20 nt, Artificial Sequence
  Synthetic
  misc_feature (3)..(3): n is a, c, g, or u
aanccuuacuauccagagaa

SEQ ID NO: 21814 - RNA, 21 nt, Artificial Sequence
  Synthetic
  misc_feature (4)..(4): n is a, c, g, or u
uaanccuuacuauccagagaa

SEQ ID NO: 21815 - RNA, 22 nt, Artificial Sequence
  Synthetic
  misc_feature (5)..(5): n is a, c, g, or u
uuaanccuuacuauccagagaa

SEQ ID NO: 21816 - RNA, 23 nt, Artificial Sequence
  Synthetic
  misc_feature (6)..(6): n is a, c, g, or u
auuaanccuuacuauccagagaa

SEQ ID NO: 21817 - RNA, 24 nt, Artificial Sequence
  Synthetic
  misc_feature (7)..(7): n is a, c, g, or u
uauuaanccuuacuauccagagaa

SEQ ID NO: 21818 - RNA, 18 nt, Artificial Sequence
  Synthetic
ugaaaggagacgauugaa

SEQ ID NO: 21819 - RNA, 19 nt, Artificial Sequence
  Synthetic
augaaaggagacgauugaa

SEQ ID NO: 21820 - RNA, 20 nt, Artificial Sequence
  Synthetic
aaugaaaggagacgauugaa

SEQ ID NO: 21821 - RNA, 21 nt, Artificial Sequence
  Synthetic
aaaugaaaggagacgauugaa

SEQ ID NO: 21822 - RNA, 22 nt, Artificial Sequence
  Synthetic
  misc_feature (1)..(1): n is a, c, g, or u
naaaugaaaggagacgauugaa

SEQ ID NO: 21823 - RNA, 23 nt, Artificial Sequence
  Synthetic
  misc_feature (2)..(2): n is a, c, g, or u
anaaaugaaaggagacgauugaa

SEQ ID NO: 21824 - RNA, 24 nt, Artificial Sequence
  Synthetic
  misc_feature (3)..(3): n is a, c, g, or u
uanaaaugaaaggagacgauugaa

SEQ ID NO: 21825 - RNA, 18 nt, Artificial Sequence
  Synthetic
aggaggcuguaggcauaa

SEQ ID NO: 21826 - RNA, 19 nt, Artificial Sequence
  Synthetic
uaggaggcuguaggcauaa

SEQ ID NO: 21827 - RNA, 20 nt, Artificial Sequence
  Synthetic
uuaggaggcuguaggcauaa

SEQ ID NO: 21828 - RNA, 18 nt, Artificial Sequence
  Synthetic
accccuucucguguuaca

SEQ ID NO: 21829 - RNA, 18 nt, Artificial Sequence
  Synthetic
  misc_feature (12)..(12): n is a, c, g, or u
ccaccugcuuanagacca

SEQ ID NO: 21830 - RNA, 19 nt, Artificial Sequence
  Synthetic
  misc_feature (13)..(13): n is a, c, g, or u
uccaccugcuuanagacca

SEQ ID NO: 21831 - RNA, 20 nt, Artificial Sequence
  Synthetic
  misc_feature (14)..(14): n is a, c, g, or u
cuccaccugcuuanagacca

SEQ ID NO: 21832 - RNA, 21 nt, Artificial Sequence
  Synthetic
  misc_feature (15)..(15): n is a, c, g, or u
acuccaccugcuuanagacca

SEQ ID NO: 21833 - RNA, 22 nt, Artificial Sequence
  Synthetic
  misc_feature (16)..(16): n is a, c, g, or u
cacuccaccugcuuanagacca

SEQ ID NO: 21834 - RNA, 24 nt, Artificial Sequence
  Synthetic
  misc_feature (18)..(18): n is a, c, g, or u
cgcacuccaccugcuuanagacca

SEQ ID NO: 21835 - RNA, 18 nt, Artificial Sequence
  Synthetic
aaaauccucacaauacca

SEQ ID NO: 21836 - RNA, 19 nt, Artificial Sequence
  Synthetic
aaaaauccucacaauacca

SEQ ID NO: 21837 - RNA, 20 nt, Artificial Sequence
  Synthetic
caaaaauccucacaauacca

SEQ ID NO: 21838 - RNA, 21 nt, Artificial Sequence
  Synthetic
acaaaaauccucacaauacca

SEQ ID NO: 21839 - RNA, 23 nt, Artificial Sequence
  Synthetic
ugacaaaaauccucacaauacca

SEQ ID NO: 21840 - RNA, 24 nt, Artificial Sequence
  Synthetic
uugacaaaaauccucacaauacca

SEQ ID NO: 21841 - RNA, 18 nt, Artificial Sequence
  Synthetic
ccaggguucacaccccca

SEQ ID NO: 21842 - RNA, 19 nt, Artificial Sequence
  Synthetic
uccaggguucacaccccca

SEQ ID NO: 21843 - RNA, 18 nt, Artificial Sequence
  Synthetic
  misc_feature (6)..(6): n is a, c, g, or u
auucunacaaccucgcca

SEQ ID NO: 21844 - RNA, 19 nt, Artificial Sequence
  Synthetic
  misc_feature (7)..(7): n is a, c, g, or u
cauucunacaaccucgcca

SEQ ID NO: 21845 - RNA, 23 nt, Artificial Sequence
  Synthetic
  misc_feature (11)..(11): n is a, c, g, or u
agggcauucunacaaccucgcca

SEQ ID NO: 21846 - RNA, 24 nt, Artificial Sequence
  Synthetic
  misc_feature (12)..(12): n is a, c, g, or u
cagggcauucunacaaccucgcca

SEQ ID NO: 21847 - RNA, 18 nt, Artificial Sequence
  Synthetic
acacacauccacaggcca

SEQ ID NO: 21848 - RNA, 18 nt, Artificial Sequence
  Synthetic
  misc_feature (6)..(6): n is a, c, g, or u
auuaanccuuacuaucca

SEQ ID NO: 21849 - RNA, 19 nt, Artificial Sequence
  Synthetic
  misc_feature (7)..(7): n is a, c, g, or u
uauuaanccuuacuaucca

SEQ ID NO: 21850 - RNA, 22 nt, Artificial Sequence
  Synthetic
  misc_feature (10)..(10): n is a, c, g, or u
agguauuaanccuuacuaucca

SEQ ID NO: 21851 - RNA, 23 nt, Artificial Sequence
  Synthetic
  misc_feature (11)..(11): n is a, c, g, or u
aagguauuaanccuuacuaucca

SEQ ID NO: 21852 - RNA, 24 nt, Artificial Sequence
  Synthetic
  misc_feature (12)..(12): n is a, c, g, or u
aaagguauuaanccuuacuaucca

SEQ ID NO: 21853 - RNA, 18 nt, Artificial Sequence
  Synthetic
  misc_feature (8)..(8): n is a, c, g, or u
cucaaucnccgcgucgca

SEQ ID NO: 21854 - RNA, 19 nt, Artificial Sequence
  Synthetic
  misc_feature (9)..(9): n is a, c, g, or u
ucucaaucnccgcgucgca

SEQ ID NO: 21855 - RNA, 20 nt, Artificial Sequence
  Synthetic
  misc_feature (10)..(10): n is a, c, g, or u
aucucaaucnccgcgucgca

SEQ ID NO: 21856 - RNA, 18 nt, Artificial Sequence
  Synthetic
ucaggaacauauugugca

SEQ ID NO: 21857 - RNA, 19 nt, Artificial Sequence
  Synthetic
cucaggaacauauugugca

SEQ ID NO: 21858 - RNA, 20 nt, Artificial Sequence
  Synthetic
ccucaggaacauauugugca

SEQ ID NO: 21859 - RNA, 22 nt, Artificial Sequence
  Synthetic
ugccucaggaacauauugugca

SEQ ID NO: 21860 - RNA, 23 nt, Artificial Sequence
  Synthetic
uugccucaggaacauauugugca

SEQ ID NO: 21861 - RNA, 24 nt, Artificial Sequence
  Synthetic
  misc_feature (1)..(1): n is a, c, g, or u
nuugccucaggaacauauugugca

SEQ ID NO: 21862 - RNA, 18 nt, Artificial Sequence
  Synthetic
uaguauuccuuggacuca

SEQ ID NO: 21863 - RNA, 19 nt, Artificial Sequence
  Synthetic
uuaguauuccuuggacuca

SEQ ID NO: 21864 - RNA, 18 nt, Artificial Sequence
  Synthetic
cauucacuugcaucaaga

SEQ ID NO: 21865 - RNA, 19 nt, Artificial Sequence
  Synthetic
acauucacuugcaucaaga

SEQ ID NO: 21866 - RNA, 18 nt, Artificial Sequence
  Synthetic
caggaauucuauauaaga

SEQ ID NO: 21867 - RNA, 21 nt, Artificial Sequence
  Synthetic
aggcaggaauucuauauaaga

SEQ ID NO: 21868 - RNA, 22 nt, Artificial Sequence
  Synthetic
aaggcaggaauucuauauaaga

SEQ ID NO: 21869 - RNA, 18 nt, Artificial Sequence
  Synthetic
uuggauccacuauucaga

SEQ ID NO: 21870 - RNA, 20 nt, Artificial Sequence
  Synthetic
aguuggauccacuauucaga

SEQ ID NO: 21871 - RNA, 19 nt, Artificial Sequence
  Synthetic
  misc_feature (14)..(14): n is a, c, g, or u
aggauccugcagcnagaga

SEQ ID NO: 21872 - RNA, 21 nt, Artificial Sequence
  Synthetic
  misc_feature (16)..(16): n is a, c, g, or u
agaggauccugcagcnagaga

SEQ ID NO: 21873 - RNA, 22 nt, Artificial Sequence
  Synthetic
  misc_feature (17)..(17): n is a, c, g, or u
uagaggauccugcagcnagaga

SEQ ID NO: 21874 - RNA, 23 nt, Artificial Sequence
  Synthetic
  misc_feature (18)..(18): n is a, c, g, or u
uuagaggauccugcagcnagaga

SEQ ID NO: 21875 - RNA, 24 nt, Artificial Sequence
  Synthetic
  misc_feature (19)..(19): n is a, c, g, or u
uuuagaggauccugcagcnagaga

SEQ ID NO: 21876 - RNA, 18 nt, Artificial Sequence
  Synthetic
  misc_feature (7)..(7): n is a, c, g, or u
ucacuanaaaugaaagga

SEQ ID NO: 21877 - RNA, 19 nt, Artificial Sequence
  Synthetic
  misc_feature (8)..(8): n is a, c, g, or u
cucacuanaaaugaaagga

SEQ ID NO: 21878 - RNA, 20 nt, Artificial Sequence
  Synthetic
  misc_feature (9)..(9): n is a, c, g, or u
acucacuanaaaugaaagga

SEQ ID NO: 21879 - RNA, 21 nt, Artificial Sequence
  Synthetic
  misc_feature (10)..(10): n is a, c, g, or u
cacucacuanaaaugaaagga

SEQ ID NO: 21880 - RNA, 22 nt, Artificial Sequence
  Synthetic
  misc_feature (11)..(11): n is a, c, g, or u
ccacucacuanaaaugaaagga

SEQ ID NO: 21881 - RNA, 23 nt, Artificial Sequence
  Synthetic
  misc_feature (12)..(12): n is a, c, g, or u
cccacucacuanaaaugaaagga

SEQ ID NO: 21882 - RNA, 18 nt, Artificial Sequence
  Synthetic
uuuuaguuauauggauga

SEQ ID NO: 21883 - RNA, 19 nt, Artificial Sequence
  Synthetic
cuuuuaguuauauggauga

SEQ ID NO: 21884 - RNA, 22 nt, Artificial Sequence
  Synthetic
uggcuuuuaguuauauggauga

SEQ ID NO: 21885 - RNA, 23 nt, Artificial Sequence
  Synthetic
cuggcuuuuaguuauauggauga

SEQ ID NO: 21886 - RNA, 24 nt, Artificial Sequence
  Synthetic
ucuggcuuuuaguuauauggauga

SEQ ID NO: 21887 - RNA, 18 nt, Artificial Sequence
  Synthetic
uauuuugugcugggguga

SEQ ID NO: 21888 - RNA, 19 nt, Artificial Sequence
  Synthetic
cuauuuugugcugggguga

SEQ ID NO: 21889 - RNA, 21 nt, Artificial Sequence
  Synthetic
agcuauuuugugcugggguga

SEQ ID NO: 21890 - RNA, 22 nt, Artificial Sequence
  Synthetic
aagcuauuuugugcugggguga

SEQ ID NO: 21891 - RNA, 23 nt, Artificial Sequence
  Synthetic
caagcuauuuugugcugggguga

SEQ ID NO: 21892 - RNA, 18 nt, Artificial Sequence
  Synthetic
uggacauugacccuuaua

SEQ ID NO: 21893 - RNA, 19 nt, Artificial Sequence
  Synthetic
auggacauugacccuuaua

SEQ ID NO: 21894 - RNA, 20 nt, Artificial Sequence
  Synthetic
cauggacauugacccuuaua

SEQ ID NO: 21895 - RNA, 18 nt, Artificial Sequence
  Synthetic
  misc_feature (10)..(10): n is a, c, g, or u
agaaacuguncuugagua

SEQ ID NO: 21896 - RNA, 20 nt, Artificial Sequence
  Synthetic
  misc_feature (12)..(12): n is a, c, g, or u
agagaaacuguncuugagua

SEQ ID NO: 21897 - RNA, 21 nt, Artificial Sequence
  Synthetic
  misc_feature (13)..(13): n is a, c, g, or u
aagagaaacuguncuugagua

SEQ ID NO: 21898 - RNA, 24 nt, Artificial Sequence
  Synthetic
  misc_feature (16)..(16): n is a, c, g, or u
uggaagagaaacuguncuugagua

SEQ ID NO: 21899 - RNA, 19 nt, Artificial Sequence
  Synthetic
  misc_feature (7)..(7): n is a, c, g, or u
ugcagcnagagaucuagua

SEQ ID NO: 21900 - RNA, 20 nt, Artificial Sequence
  Synthetic
  misc_feature (8)..(8): n is a, c, g, or u
cugcagcnagagaucuagua

SEQ ID NO: 21901 - RNA, 18 nt, Artificial Sequence
  Synthetic
acaaggccuuucucugua

SEQ ID NO: 21902 - RNA, 19 nt, Artificial Sequence
  Synthetic
uacaaggccuuucucugua

SEQ ID NO: 21903 - RNA, 20 nt, Artificial Sequence
  Synthetic
uuacaaggccuuucucugua

SEQ ID NO: 21904 - RNA, 18 nt, Artificial Sequence
  Synthetic
  misc_feature (2)..(2): n is a, c, g, or u
  misc_feature (8)..(8): n is a, c, g, or u
anaugggncuaaaaauua

SEQ ID NO: 21905 - RNA, 19 nt, Artificial Sequence
  Synthetic
  misc_feature (3)..(3): n is a, c, g, or u
  misc_feature (9)..(9): n is a, c, g, or u
aanaugggncuaaaaauua

SEQ ID NO: 21906 - RNA, 20 nt, Artificial Sequence
  Synthetic
  misc_feature (4)..(4): n is a, c, g, or u
  misc_feature (10)..(10): n is a, c, g, or u
uaanaugggncuaaaaauua

SEQ ID NO: 21907 - RNA, 21 nt, Artificial Sequence
  Synthetic
  misc_feature (5)..(5): n is a, c, g, or u
  misc_feature (11)..(11): n is a, c, g, or u
cuaanaugggncuaaaaauua

SEQ ID NO: 21908 - RNA, 22 nt, Artificial Sequence
  Synthetic
  misc_feature (6)..(6): n is a, c, g, or u
  misc_feature (12)..(12): n is a, c, g, or u
acuaanaugggncuaaaaauua

SEQ ID NO: 21909 - RNA, 23 nt, Artificial Sequence
  Synthetic
  misc_feature (7)..(7): n is a, c, g, or u
  misc_feature (13)..(13): n is a, c, g, or u
uacuaanaugggncuaaaaauua

SEQ ID NO: 21910 - RNA, 24 nt, Artificial Sequence
  Synthetic
  misc_feature (8)..(8): n is a, c, g, or u
  misc_feature (14)..(14): n is a, c, g, or u
auacuaanaugggncuaaaaauua

SEQ ID NO: 21911 - RNA, 19 nt, Artificial Sequence
  Synthetic
agguuuuaucccaaaguua

SEQ ID NO: 21912 - RNA, 20 nt, Artificial Sequence
  Synthetic
uagguuuuaucccaaaguua

SEQ ID NO: 21913 - RNA, 18 nt, Artificial Sequence
  Synthetic
ugggugggcaauaauuua

SEQ ID NO: 21914 - RNA, 19 nt, Artificial Sequence
  Synthetic
cugggugggcaauaauuua

SEQ ID NO: 21915 - RNA, 20 nt, Artificial Sequence
  Synthetic
ccugggugggcaauaauuua

SEQ ID NO: 21916 - RNA, 20 nt, Artificial Sequence
  Synthetic
aggucaggaagaaagccaac

SEQ ID NO: 21917 - RNA, 18 nt, Artificial Sequence
  Synthetic
auuuucuagggguaccac

SEQ ID NO: 21918 - RNA, 19 nt, Artificial Sequence
  Synthetic
aauuuucuagggguaccac

SEQ ID NO: 21919 - RNA, 20 nt, Artificial Sequence
  Synthetic
caauuuucuagggguaccac

SEQ ID NO: 21920 - RNA, 19 nt, Artificial Sequence
  Synthetic
cgguguguuucuuguugac

SEQ ID NO: 21921 - RNA, 22 nt, Artificial Sequence
  Synthetic
aggcgguguguuucuuguugac

SEQ ID NO: 21922 - RNA, 23 nt, Artificial Sequence
  Synthetic
caggcgguguguuucuuguugac

SEQ ID NO: 21923 - RNA, 24 nt, Artificial Sequence
  Synthetic
acaggcgguguguuucuuguugac

SEQ ID NO: 21924 - RNA, 18 nt, Artificial Sequence
  Synthetic
  misc_feature (12)..(12): n is a, c, g, or u
ugcaucaagaunugauac

SEQ ID NO: 21925 - RNA, 19 nt, Artificial Sequence
  Synthetic
  misc_feature (13)..(13): n is a, c, g, or u
uugcaucaagaunugauac

SEQ ID NO: 21926 - RNA, 20 nt, Artificial Sequence
  Synthetic
  misc_feature (14)..(14): n is a, c, g, or u
cuugcaucaagaunugauac

SEQ ID NO: 21927 - RNA, 21 nt, Artificial Sequence
  Synthetic
  misc_feature (15)..(15): n is a, c, g, or u
acuugcaucaagaunugauac

SEQ ID NO: 21928 - RNA, 22 nt, Artificial Sequence
  Synthetic
  misc_feature (16)..(16): n is a, c, g, or u
cacuugcaucaagaunugauac

SEQ ID NO: 21929 - RNA, 23 nt, Artificial Sequence
  Synthetic
  misc_feature (17)..(17): n is a, c, g, or u
ucacuugcaucaagaunugauac

SEQ ID NO: 21930 - RNA, 24 nt, Artificial Sequence
  Synthetic
  misc_feature (18)..(18): n is a, c, g, or u
uucacuugcaucaagaunugauac

SEQ ID NO: 21931 - RNA, 18 nt, Artificial Sequence
  Synthetic
accgcuucagcccucuac

SEQ ID NO: 21932 - RNA, 19 nt, Artificial Sequence
  Synthetic
caccgcuucagcccucuac

SEQ ID NO: 21933 - RNA, 20 nt, Artificial Sequence
  Synthetic
acaccgcuucagcccucuac

SEQ ID NO: 21934 - RNA, 18 nt, Artificial Sequence
  Synthetic
ugggauucuuuccagacc

SEQ ID NO: 21935 - RNA, 19 nt, Artificial Sequence
  Synthetic
cugggauucuuuccagacc

SEQ ID NO: 21936 - RNA, 20 nt, Artificial Sequence
  Synthetic
ucugggauucuuuccagacc

SEQ ID NO: 21937 - RNA, 18 nt, Artificial Sequence
  Synthetic
cuucccgugaauagaccc

SEQ ID NO: 21938 - RNA, 19 nt, Artificial Sequence
  Synthetic
acuucccgugaauagaccc

SEQ ID NO: 21939 - RNA, 20 nt, Artificial Sequence
  Synthetic
aacuucccgugaauagaccc

SEQ ID NO: 21940 - RNA, 18 nt, Artificial Sequence
  Synthetic
ugcuuucgcaaacuuccc

SEQ ID NO: 21941 - RNA, 19 nt, Artificial Sequence
  Synthetic
uugcuuucgcaaacuuccc

SEQ ID NO: 21942 - RNA, 20 nt, Artificial Sequence
  Synthetic
auugcuuucgcaaacuuccc

SEQ ID NO: 21943 - RNA, 18 nt, Artificial Sequence
  Synthetic
aagccuccaagcugugcc

SEQ ID NO: 21944 - RNA, 19 nt, Artificial Sequence
  Synthetic
caagccuccaagcugugcc

SEQ ID NO: 21945 - RNA, 20 nt, Artificial Sequence
  Synthetic
ucaagccuccaagcugugcc

SEQ ID NO: 21946 - RNA, 18 nt, Artificial Sequence
  Synthetic
ccaagcacuguuggaucc

SEQ ID NO: 21947 - RNA, 19 nt, Artificial Sequence
  Synthetic
accaagcacuguuggaucc

SEQ ID NO: 21948 - RNA, 20 nt, Artificial Sequence
  Synthetic
caccaagcacuguuggaucc

SEQ ID NO: 21949 - RNA, 21 nt, Artificial Sequence
  Synthetic
ccaccaagcacuguuggaucc

SEQ ID NO: 21950 - RNA, 22 nt, Artificial Sequence
  Synthetic
uccaccaagcacuguuggaucc

SEQ ID NO: 21951 - RNA, 23 nt, Artificial Sequence
  Synthetic
uuccaccaagcacuguuggaucc

SEQ ID NO: 21952 - RNA, 18 nt, Artificial Sequence
  Synthetic
cuauucagagcaaauucc

SEQ ID NO: 21953 - RNA, 19 nt, Artificial Sequence
  Synthetic
acuauucagagcaaauucc

SEQ ID NO: 21954 - RNA, 20 nt, Artificial Sequence
  Synthetic
cacuauucagagcaaauucc

SEQ ID NO: 21955 - RNA, 19 nt, Artificial Sequence
  Synthetic
agauccaccuccugcuucc

SEQ ID NO: 21956 - RNA, 20 nt, Artificial Sequence
  Synthetic
cagauccaccuccugcuucc

SEQ ID NO: 21957 - RNA, 19 nt, Artificial Sequence
  Synthetic
aggacucuuggacuuucgc

SEQ ID NO: 21958 - RNA, 18 nt, Artificial Sequence
  Synthetic
acauacuuuguggaaggc

SEQ ID NO: 21959 - RNA, 19 nt, Artificial Sequence
  Synthetic
uacauacuuuguggaaggc

SEQ ID NO: 21960 - RNA, 20 nt, Artificial Sequence
  Synthetic
uuacauacuuuguggaaggc

SEQ ID NO: 21961 - RNA, 21 nt, Artificial Sequence
  Synthetic
uuuacauacuuuguggaaggc

SEQ ID NO: 21962 - RNA, 22 nt, Artificial Sequence
  Synthetic
auuuacauacuuuguggaaggc

SEQ ID NO: 21963 - RNA, 23 nt, Artificial Sequence
  Synthetic
uauuuacauacuuuguggaaggc

SEQ ID NO: 21964 - RNA, 24 nt, Artificial Sequence
  Synthetic
  misc_feature (1)..(1): n is a, c, g, or u
nuauuuacauacuuuguggaaggc

SEQ ID NO: 21965 - RNA, 18 nt, Artificial Sequence
  Synthetic
aagguaggagugggaggc

SEQ ID NO: 21966 - RNA, 19 nt, Artificial Sequence
  Synthetic
caagguaggagugggaggc

SEQ ID NO: 21967 - RNA, 20 nt, Artificial Sequence
  Synthetic
acaagguaggagugggaggc

SEQ ID NO: 21968 - RNA, 18 nt, Artificial Sequence
  Synthetic
uauuaggaggcuguaggc

SEQ ID NO: 21969 - RNA, 20 nt, Artificial Sequence
  Synthetic
uguauuaggaggcuguaggc

SEQ ID NO: 21970 - RNA, 18 nt, Artificial Sequence
  Synthetic
uuggcuuccugggugggc

SEQ ID NO: 21971 - RNA, 19 nt, Artificial Sequence
  Synthetic
  misc_feature (1)..(1): n is a, c, g, or u
nuuggcuuccugggugggc

SEQ ID NO: 21972 - RNA, 20 nt, Artificial Sequence
  Synthetic
  misc_feature (2)..(2): n is a, c, g, or u
cnuuggcuuccugggugggc

SEQ ID NO: 21973 - RNA, 21 nt, Artificial Sequence
  Synthetic
  misc_feature (3)..(3): n is a, c, g, or u
acnuuggcuuccugggugggc

SEQ ID NO: 21974 - RNA, 23 nt, Artificial Sequence
  Synthetic
  misc_feature (5)..(5): n is a, c, g, or u
ugacnuuggcuuccugggugggc

SEQ ID NO: 21975 - RNA, 24 nt, Artificial Sequence
  Synthetic
  misc_feature (6)..(6): n is a, c, g, or u
augacnuuggcuuccugggugggc

SEQ ID NO: 21976 - RNA, 18 nt, Artificial Sequence
  Synthetic
ccacccggguguccuggc

SEQ ID NO: 21977 - RNA, 19 nt, Artificial Sequence
  Synthetic
accacccggguguccuggc

SEQ ID NO: 21978 - RNA, 20 nt, Artificial Sequence
  Synthetic
uaccacccggguguccuggc

SEQ ID NO: 21979 - RNA, 18 nt, Artificial Sequence
  Synthetic
uauuuuccugcugguggc

SEQ ID NO: 21980 - RNA, 20 nt, Artificial Sequence
  Synthetic
uguauuuuccugcugguggc

SEQ ID NO: 21981 - RNA, 21 nt, Artificial Sequence
  Synthetic
cuguauuuuccugcugguggc

SEQ ID NO: 21982 - RNA, 22 nt, Artificial Sequence
  Synthetic
  misc_feature (1)..(1): n is a, c, g, or u
ncuguauuuuccugcugguggc

SEQ ID NO: 21983 - RNA, 18 nt, Artificial Sequence
  Synthetic
aggcaagcuauuuugugc

SEQ ID NO: 21984 - RNA, 19 nt, Artificial Sequence
  Synthetic
caggcaagcuauuuugugc

SEQ ID NO: 21985 - RNA, 20 nt, Artificial Sequence
  Synthetic
ucaggcaagcuauuuugugc

SEQ ID NO: 21986 - RNA, 21 nt, Artificial Sequence
  Synthetic
cucaggcaagcuauuuugugc

SEQ ID NO: 21987 - RNA, 22 nt, Artificial Sequence
  Synthetic
ucucaggcaagcuauuuugugc

SEQ ID NO: 21988 - RNA, 23 nt, Artificial Sequence
  Synthetic
cucucaggcaagcuauuuugugc

SEQ ID NO: 21989 - RNA, 18 nt, Artificial Sequence
  Synthetic
  misc_feature (17)..(17): n is a, c, g, or u
uuggaagagaaacugunc

SEQ ID NO: 21990 - RNA, 19 nt, Artificial Sequence
  Synthetic
  misc_feature (18)..(18): n is a, c, g, or u
uuuggaagagaaacugunc

SEQ ID NO: 21991 - RNA, 20 nt, Artificial Sequence
  Synthetic
  misc_feature (19)..(19): n is a, c, g, or u
auuuggaagagaaacugunc

SEQ ID NO: 21992 - RNA, 21 nt, Artificial Sequence
  Synthetic
  misc_feature (20)..(20): n is a, c, g, or u
cauuuggaagagaaacugunc

SEQ ID NO: 21993 - RNA, 22 nt, Artificial Sequence
  Synthetic
  misc_feature (21)..(21): n is a, c, g, or u
acauuuggaagagaaacugunc

SEQ ID NO: 21994 - RNA, 23 nt, Artificial Sequence
  Synthetic
  misc_feature (22)..(22): n is a, c, g, or u
uacauuuggaagagaaacugunc

SEQ ID NO: 21995 - RNA, 24 nt, Artificial Sequence
  Synthetic
  misc_feature (23)..(23): n is a, c, g, or u
uuacauuuggaagagaaacugunc

SEQ ID NO: 21996 - RNA, 18 nt, Artificial Sequence
  Synthetic
cauauugugcauaaaauc

SEQ ID NO: 21997 - RNA, 19 nt, Artificial Sequence
  Synthetic
acauauugugcauaaaauc

SEQ ID NO: 21998 - RNA, 20 nt, Artificial Sequence
  Synthetic
aacauauugugcauaaaauc

SEQ ID NO: 21999 - RNA, 18 nt, Artificial Sequence
  Synthetic
cuccugcuuccaccaauc

SEQ ID NO: 22000 - RNA, 19 nt, Artificial Sequence
  Synthetic
ccuccugcuuccaccaauc

SEQ ID NO: 22001 - RNA, 20 nt, Artificial Sequence
  Synthetic
accuccugcuuccaccaauc

SEQ ID NO: 22002 - RNA, 18 nt, Artificial Sequence
  Synthetic
uauugccucucucacauc

SEQ ID NO: 22003 - RNA, 19 nt, Artificial Sequence
  Synthetic
cuauugccucucucacauc

SEQ ID NO: 22004 - RNA, 20 nt, Artificial Sequence
  Synthetic
acuauugccucucucacauc

SEQ ID NO: 22005 - RNA, 22 nt, Artificial Sequence
  Synthetic
cgacuauugccucucucacauc

SEQ ID NO: 22006 - RNA, 23 nt, Artificial Sequence
  Synthetic
ccgacuauugccucucucacauc

SEQ ID NO: 22007 - RNA, 24 nt, Artificial Sequence
  Synthetic
uccgacuauugccucucucacauc

SEQ ID NO: 22008 - RNA, 18 nt, Artificial Sequence
  Synthetic
ccaaaucugugcagcauc

SEQ ID NO: 22009 - RNA, 18 nt, Artificial Sequence
  Synthetic
uuucugugcccaauccuc

SEQ ID NO: 22010 - RNA, 19 nt, Artificial Sequence
  Synthetic
cuuucugugcccaauccuc

SEQ ID NO: 22011 - RNA, 20 nt, Artificial Sequence
  Synthetic
  misc_feature (1)..(1): n is a, c, g, or u
ncuuucugugcccaauccuc

SEQ ID NO: 22012 - RNA, 21 nt, Artificial Sequence
  Synthetic
  misc_feature (2)..(2): n is a, c, g, or u
ancuuucugugcccaauccuc

SEQ ID NO: 22013 - RNA, 22 nt, Artificial Sequence
  Synthetic
  misc_feature (3)..(3): n is a, c, g, or u
aancuuucugugcccaauccuc

SEQ ID NO: 22014 - RNA, 24 nt, Artificial Sequence
  Synthetic
  misc_feature (5)..(5): n is a, c, g, or u
agaancuuucugugcccaauccuc

SEQ ID NO: 22015 - RNA, 18 nt, Artificial Sequence
  Synthetic
  misc_feature (5)..(5): n is a, c, g, or u
acucnguuguccuuucuc

SEQ ID NO: 22016 - RNA, 19 nt, Artificial Sequence
  Synthetic
  misc_feature (6)..(6): n is a, c, g, or u
aacucnguuguccuuucuc

SEQ ID NO: 22017 - RNA, 20 nt, Artificial Sequence
  Synthetic
  misc_feature (7)..(7): n is a, c, g, or u
caacucnguuguccuuucuc

SEQ ID NO: 22018 - RNA, 21 nt, Artificial Sequence
  Synthetic
  misc_feature (8)..(8): n is a, c, g, or u
acaacucnguuguccuuucuc

SEQ ID NO: 22019 - RNA, 23 nt, Artificial Sequence
  Synthetic
  misc_feature (10)..(10): n is a, c, g, or u
ugacaacucnguuguccuuucuc

SEQ ID NO: 22020 - RNA, 24 nt, Artificial Sequence
  Synthetic
  misc_feature (11)..(11): n is a, c, g, or u
cugacaacucnguuguccuuucuc

SEQ ID NO: 22021 - RNA, 18 nt, Artificial Sequence
  Synthetic
uggccaaaauucgcaguc

SEQ ID NO: 22022 - RNA, 19 nt, Artificial Sequence
  Synthetic
cuggccaaaauucgcaguc

SEQ ID NO: 22023 - RNA, 20 nt, Artificial Sequence
  Synthetic
ccuggccaaaauucgcaguc

SEQ ID NO: 22024 - RNA, 20 nt, Artificial Sequence
  Synthetic
aggagugggaggcuucgguc

SEQ ID NO: 22025 - RNA, 21 nt, Artificial Sequence
  Synthetic
uaggagugggaggcuucgguc

SEQ ID NO: 22026 - RNA, 24 nt, Artificial Sequence
  Synthetic
agguaggagugggaggcuucgguc

SEQ ID NO: 22027 - RNA, 18 nt, Artificial Sequence
  Synthetic
ccguguguccucuacuuc

SEQ ID NO: 22028 - RNA, 19 nt, Artificial Sequence
  Synthetic
cccguguguccucuacuuc

SEQ ID NO: 22029 - RNA, 18 nt, Artificial Sequence
  Synthetic
ccccacacgguggccuuc

SEQ ID NO: 22030 - RNA, 19 nt, Artificial Sequence
  Synthetic
cccccacacgguggccuuc

SEQ ID NO: 22031 - RNA, 20 nt, Artificial Sequence
  Synthetic
acccccacacgguggccuuc

SEQ ID NO: 22032 - RNA, 19 nt, Artificial Sequence
  Synthetic
  misc_feature (11)..(11): n is a, c, g, or u
aguugaugacnuuggcuuc

SEQ ID NO: 22033 - RNA, 21 nt, Artificial Sequence
  Synthetic
  misc_feature (13)..(13): n is a, c, g, or u
ugaguugaugacnuuggcuuc

SEQ ID NO: 22034 - RNA, 18 nt, Artificial Sequence
  Synthetic
uacuagugcaauuuguuc

SEQ ID NO: 22035 - RNA, 19 nt, Artificial Sequence
  Synthetic
uuacuagugcaauuuguuc

SEQ ID NO: 22036 - RNA, 20 nt, Artificial Sequence
  Synthetic
uuuacuagugcaauuuguuc

SEQ ID NO: 22037 - RNA, 18 nt, Artificial Sequence
  Synthetic
uucuuuccagaccaccag

SEQ ID NO: 22038 - RNA, 19 nt, Artificial Sequence
  Synthetic
auucuuuccagaccaccag

SEQ ID NO: 22039 - RNA, 23 nt, Artificial Sequence
  Synthetic
ugggauucuuuccagaccaccag

SEQ ID NO: 22040 - RNA, 24 nt, Artificial Sequence
  Synthetic
cugggauucuuuccagaccaccag

SEQ ID NO: 22041 - RNA, 18 nt, Artificial Sequence
  Synthetic
  misc_feature (6)..(6): n is a, c, g, or u
ugaaanuaauuaugccag

SEQ ID NO: 22042 - RNA, 19 nt, Artificial Sequence
  Synthetic
  misc_feature (7)..(7): n is a, c, g, or u
uugaaanuaauuaugccag

SEQ ID NO: 22043 - RNA, 20 nt, Artificial Sequence
  Synthetic
  misc_feature (8)..(8): n is a, c, g, or u
auugaaanuaauuaugccag

SEQ ID NO: 22044 - RNA, 18 nt, Artificial Sequence
  Synthetic
cuuggcucaguuuacuag

SEQ ID NO: 22045 - RNA, 19 nt, Artificial Sequence
  Synthetic
ucuuggcucaguuuacuag

SEQ ID NO: 22046 - RNA, 20 nt, Artificial Sequence
  Synthetic
cucuuggcucaguuuacuag

SEQ ID NO: 22047 - RNA, 21 nt, Artificial Sequence
  Synthetic
ucucuuggcucaguuuacuag

SEQ ID NO: 22048 - RNA, 22 nt, Artificial Sequence
  Synthetic
uucucuuggcucaguuuacuag

SEQ ID NO: 22049 - RNA, 23 nt, Artificial Sequence
  Synthetic
uuucucuuggcucaguuuacuag

SEQ ID NO: 22050 - RNA, 18 nt, Artificial Sequence
  Synthetic
  misc_feature (3)..(4): n is a, c, g, or u
cunncguuccggccgacg

SEQ ID NO: 22051 - RNA, 19 nt, Artificial Sequence
  Synthetic
  misc_feature (4)..(5): n is a, c, g, or u
ccunncguuccggccgacg

SEQ ID NO: 22052 - RNA, 21 nt, Artificial Sequence
  Synthetic
uccaacuuguccuggcuaucg

SEQ ID NO: 22053 - RNA, 22 nt, Artificial Sequence
  Synthetic
cuccaacuuguccuggcuaucg

SEQ ID NO: 22054 - RNA, 23 nt, Artificial Sequence
  Synthetic
ccuccaacuuguccuggcuaucg

SEQ ID NO: 22055 - RNA, 24 nt, Artificial Sequence
  Synthetic
uccuccaacuuguccuggcuaucg

SEQ ID NO: 22056 - RNA, 18 nt, Artificial Sequence
  Synthetic
acugggaggagucggggg

SEQ ID NO: 22057 - RNA, 21 nt, Artificial Sequence
  Synthetic
aggacugggaggagucggggg

SEQ ID NO: 22058 - RNA, 22 nt, Artificial Sequence
  Synthetic
aaggacugggaggagucggggg

SEQ ID NO: 22059 - RNA, 23 nt, Artificial Sequence
  Synthetic
uaaggacugggaggagucggggg

SEQ ID NO: 22060 - RNA, 24 nt, Artificial Sequence
  Synthetic
uuaaggacugggaggagucggggg

SEQ ID NO: 22061 - RNA, 18 nt, Artificial Sequence
  Synthetic
  misc_feature (6)..(6): n is a, c, g, or u
augaunugguauuggggg

SEQ ID NO: 22062 - RNA, 21 nt, Artificial Sequence
  Synthetic
  misc_feature (9)..(9): n is a, c, g, or u
uggaugaunugguauuggggg

SEQ ID NO: 22063 - RNA, 22 nt, Artificial Sequence
  Synthetic
  misc_feature (10)..(10): n is a, c, g, or u
auggaugaunugguauuggggg

SEQ ID NO: 22064 - RNA, 23 nt, Artificial Sequence
  Synthetic
  misc_feature (11)..(11): n is a, c, g, or u
uauggaugaunugguauuggggg

SEQ ID NO: 22065 - RNA, 24 nt, Artificial Sequence
  Synthetic
  misc_feature (12)..(12): n is a, c, g, or u
auauggaugaunugguauuggggg

SEQ ID NO: 22066 - RNA, 19 nt, Artificial Sequence
  Synthetic
uguguauuuaaggacuggg

SEQ ID NO: 22067 - RNA, 20 nt, Artificial Sequence
  Synthetic
cuguguauuuaaggacuggg

SEQ ID NO: 22068 - RNA, 21 nt, Artificial Sequence
  Synthetic
acuguguauuuaaggacuggg

SEQ ID NO: 22069 - RNA, 23 nt, Artificial Sequence
  Synthetic
agacuguguauuuaaggacuggg

SEQ ID NO: 22070 - RNA, 24 nt, Artificial Sequence
  Synthetic
aagacuguguauuuaaggacuggg

SEQ ID NO: 22071 - RNA, 18 nt, Artificial Sequence
  Synthetic
aagcuauuuugugcuggg

SEQ ID NO: 22072 - RNA, 19 nt, Artificial Sequence
  Synthetic
caagcuauuuugugcuggg

SEQ ID NO: 22073 - RNA, 22 nt, Artificial Sequence
  Synthetic
aggcaagcuauuuugugcuggg

SEQ ID NO: 22074 - RNA, 23 nt, Artificial Sequence
  Synthetic
caggcaagcuauuuugugcuggg

SEQ ID NO: 22075 - RNA, 24 nt, Artificial Sequence
  Synthetic
ucaggcaagcuauuuugugcuggg

SEQ ID NO: 22076 - RNA, 18 nt, Artificial Sequence
  Synthetic
acagcuaaaacaaaaugg

SEQ ID NO: 22077 - RNA, 19 nt, Artificial Sequence
  Synthetic
cacagcuaaaacaaaaugg

SEQ ID NO: 22078 - RNA, 20 nt, Artificial Sequence
  Synthetic
acacagcuaaaacaaaaugg

SEQ ID NO: 22079 - RNA, 21 nt, Artificial Sequence
  Synthetic
aacacagcuaaaacaaaaugg

SEQ ID NO: 22080 - RNA, 23 nt, Artificial Sequence
  Synthetic
ugaacacagcuaaaacaaaaugg

SEQ ID NO: 22081 - RNA, 24 nt, Artificial Sequence
  Synthetic
uugaacacagcuaaaacaaaaugg

SEQ ID NO: 22082 - RNA, 18 nt, Artificial Sequence
  Synthetic
ucagcccguuucucuugg

SEQ ID NO: 22083 - RNA, 19 nt, Artificial Sequence
  Synthetic
cucagcccguuucucuugg

SEQ ID NO: 22084 - RNA, 20 nt, Artificial Sequence
  Synthetic
ccucagcccguuucucuugg

SEQ ID NO: 22085 - RNA, 24 nt, Artificial Sequence
  Synthetic
ugggccucagcccguuucucuugg

SEQ ID NO: 22086 - RNA, 18 nt, Artificial Sequence
  Synthetic
cuggcuuuuaguuauaug

SEQ ID NO: 22087 - RNA, 19 nt, Artificial Sequence
  Synthetic
ucuggcuuuuaguuauaug

SEQ ID NO: 22088 - RNA, 21 nt, Artificial Sequence
  Synthetic
ugucuggcuuuuaguuauaug

SEQ ID NO: 22089 - RNA, 22 nt, Artificial Sequence
  Synthetic
cugucuggcuuuuaguuauaug

SEQ ID NO: 22090 - RNA, 23 nt, Artificial Sequence
  Synthetic
acugucuggcuuuuaguuauaug

SEQ ID NO: 22091 - RNA, 24 nt, Artificial Sequence
  Synthetic
cacugucuggcuuuuaguuauaug

SEQ ID NO: 22092 - RNA, 18 nt, Artificial Sequence
  Synthetic
caguuccaccaagcacug

SEQ ID NO: 22093 - RNA, 19 nt, Artificial Sequence
  Synthetic
acaguuccaccaagcacug

SEQ ID NO: 22094 - RNA, 20 nt, Artificial Sequence
  Synthetic
cacaguuccaccaagcacug

SEQ ID NO: 22095 - RNA, 18 nt, Artificial Sequence
  Synthetic
uaccuguuuucaauccug

SEQ ID NO: 22096 - RNA, 19 nt, Artificial Sequence
  Synthetic
  misc_feature (1)..(1): n is a, c, g, or u
nuaccuguuuucaauccug

SEQ ID NO: 22097 - RNA, 20 nt, Artificial Sequence
  Synthetic
  misc_feature (2)..(2): n is a, c, g, or u
unuaccuguuuucaauccug

SEQ ID NO: 22098 - RNA, 21 nt, Artificial Sequence
  Synthetic
  misc_feature (3)..(3): n is a, c, g, or u
cunuaccuguuuucaauccug

SEQ ID NO: 22099 - RNA, 22 nt, Artificial Sequence
  Synthetic
  misc_feature (4)..(4): n is a, c, g, or u
acunuaccuguuuucaauccug

SEQ ID NO: 22100 - RNA, 23 nt, Artificial Sequence
  Synthetic
  misc_feature (5)..(5): n is a, c, g, or u
uacunuaccuguuuucaauccug

SEQ ID NO: 22101 - RNA, 24 nt, Artificial Sequence
  Synthetic
  misc_feature (6)..(6): n is a, c, g, or u
cuacunuaccuguuuucaauccug

SEQ ID NO: 22102 - RNA, 19 nt, Artificial Sequence
  Synthetic
ugcaacuuuuucaccucug

SEQ ID NO: 22103 - RNA, 20 nt, Artificial Sequence
  Synthetic
augcaacuuuuucaccucug

SEQ ID NO: 22104 - RNA, 18 nt, Artificial Sequence
  Synthetic
aagaauuuggagcuucug

SEQ ID NO: 22105 - RNA, 19 nt, Artificial Sequence
  Synthetic
aaagaauuuggagcuucug

SEQ ID NO: 22106 - RNA, 20 nt, Artificial Sequence
  Synthetic
uaaagaauuuggagcuucug

SEQ ID NO: 22107 - RNA, 21 nt, Artificial Sequence
  Synthetic
auaaagaauuuggagcuucug

SEQ ID NO: 22108 - RNA, 22 nt, Artificial Sequence
  Synthetic
uauaaagaauuuggagcuucug

SEQ ID NO: 22109 - RNA, 23 nt, Artificial Sequence
  Synthetic
uuauaaagaauuuggagcuucug

SEQ ID NO: 22110 - RNA, 24 nt, Artificial Sequence
  Synthetic
cuuauaaagaauuuggagcuucug

SEQ ID NO: 22111 - RNA, 18 nt, Artificial Sequence
  Synthetic
  misc_feature (3)..(3): n is a, c, g, or u
acnuuggcuuccugggug

SEQ ID NO: 22112 - RNA, 20 nt, Artificial Sequence
  Synthetic
  misc_feature (5)..(5): n is a, c, g, or u
ugacnuuggcuuccugggug

SEQ ID NO: 22113 - RNA, 21 nt, Artificial Sequence
  Synthetic
  misc_feature (6)..(6): n is a, c, g, or u
augacnuuggcuuccugggug

SEQ ID NO: 22114 - RNA, 23 nt, Artificial Sequence
  Synthetic
  misc_feature (8)..(8): n is a, c, g, or u
ugaugacnuuggcuuccugggug

SEQ ID NO: 22115 - RNA, 24 nt, Artificial Sequence
  Synthetic
  misc_feature (9)..(9): n is a, c, g, or u
uugaugacnuuggcuuccugggug

SEQ ID NO: 22116 - RNA, 18 nt, Artificial Sequence
  Synthetic
  misc_feature (3)..(3): n is a, c, g, or u
aunugauacaaaaaugug

SEQ ID NO: 22117 - RNA, 20 nt, Artificial Sequence
  Synthetic
  misc_feature (5)..(5): n is a, c, g, or u
agaunugauacaaaaaugug

SEQ ID NO: 22118 - RNA, 21 nt, Artificial Sequence
  Synthetic
  misc_feature (6)..(6): n is a, c, g, or u
aagaunugauacaaaaaugug

SEQ ID NO: 22119 - RNA, 22 nt, Artificial Sequence
  Synthetic
  misc_feature (7)..(7): n is a, c, g, or u
caagaunugauacaaaaaugug

SEQ ID NO: 22120 - RNA, 23 nt, Artificial Sequence
  Synthetic
  misc_feature (8)..(8): n is a, c, g, or u
ucaagaunugauacaaaaaugug

SEQ ID NO: 22121 - RNA, 24 nt, Artificial Sequence
  Synthetic
  misc_feature (9)..(9): n is a, c, g, or u
aucaagaunugauacaaaaaugug

SEQ ID NO: 22122 - RNA, 18 nt, Artificial Sequence
  Synthetic
uacuauccagagaaugug

SEQ ID NO: 22123 - RNA, 19 nt, Artificial Sequence
  Synthetic
uuacuauccagagaaugug

SEQ ID NO: 22124 - RNA, 20 nt, Artificial Sequence
  Synthetic
cuuacuauccagagaaugug

SEQ ID NO: 22125 - RNA, 21 nt, Artificial Sequence
  Synthetic
ccuuacuauccagagaaugug

SEQ ID NO: 22126 - RNA, 22 nt, Artificial Sequence
  Synthetic
  misc_feature (1)..(1): n is a, c, g, or u
nccuuacuauccagagaaugug

SEQ ID NO: 22127 - RNA, 23 nt, Artificial Sequence
  Synthetic
  misc_feature (2)..(2): n is a, c, g, or u
anccuuacuauccagagaaugug

SEQ ID NO: 22128 - RNA, 24 nt, Artificial Sequence
  Synthetic
  misc_feature (3)..(3): n is a, c, g, or u
aanccuuacuauccagagaaugug

SEQ ID NO: 22129 - RNA, 20 nt, Artificial Sequence
  Synthetic
  misc_feature (11)..(11): n is a, c, g, or u
ugggacagaancuuucugug

SEQ ID NO: 22130 - RNA, 21 nt, Artificial Sequence
  Synthetic
  misc_feature (12)..(12): n is a, c, g, or u
augggacagaancuuucugug

SEQ ID NO: 22131 - RNA, 22 nt, Artificial Sequence
  Synthetic
  misc_feature (13)..(13): n is a, c, g, or u
caugggacagaancuuucugug

SEQ ID NO: 22132 - RNA, 18 nt, Artificial Sequence
  Synthetic
cacaaacaaggacaauug

SEQ ID NO: 22133 - RNA, 19 nt, Artificial Sequence
  Synthetic
acacaaacaaggacaauug

SEQ ID NO: 22134 - RNA, 20 nt, Artificial Sequence
  Synthetic
aacacaaacaaggacaauug

SEQ ID NO: 22135 - RNA, 19 nt, Artificial Sequence
  Synthetic
ugaauagacccauugauug

SEQ ID NO: 22136 - RNA, 19 nt, Artificial Sequence
  Synthetic
aguuuacuagugcaauuug

SEQ ID NO: 22137 - RNA, 20 nt, Artificial Sequence
  Synthetic
caguuuacuagugcaauuug

SEQ ID NO: 22138 - RNA, 18 nt, Artificial Sequence
  Synthetic
  misc_feature (18)..(18): n is a, c, g, or u
uuagaggauccugcagcn

SEQ ID NO: 22139 - RNA, 19 nt, Artificial Sequence
  Synthetic
  misc_feature (19)..(19): n is a, c, g, or u
uuuagaggauccugcagcn

SEQ ID NO: 22140 - RNA, 20 nt, Artificial Sequence
  Synthetic
  misc_feature (20)..(20): n is a, c, g, or u
auuuagaggauccugcagcn

SEQ ID NO: 22141 - RNA, 21 nt, Artificial Sequence
  Synthetic
  misc_feature (21)..(21): n is a, c, g, or u
aauuuagaggauccugcagcn

SEQ ID NO: 22142 - RNA, 22 nt, Artificial Sequence
  Synthetic
  misc_feature (22)..(22): n is a, c, g, or u
uaauuuagaggauccugcagcn

SEQ ID NO: 22143 - RNA, 23 nt, Artificial Sequence
  Synthetic
  misc_feature (23)..(23): n is a, c, g, or u
auaauuuagaggauccugcagcn

SEQ ID NO: 22144 - RNA, 24 nt, Artificial Sequence
  Synthetic
  misc_feature (24)..(24): n is a, c, g, or u
aauaauuuagaggauccugcagcn

SEQ ID NO: 22145 - RNA, 18 nt, Artificial Sequence
  Synthetic
aaucuccagcuucccaau

SEQ ID NO: 22146 - RNA, 19 nt, Artificial Sequence
  Synthetic
caaucuccagcuucccaau

SEQ ID NO: 22147 - RNA, 20 nt, Artificial Sequence
  Synthetic
ucaaucuccagcuucccaau

SEQ ID NO: 22148 - RNA, 18 nt, Artificial Sequence
  Synthetic
ccugacauucacuugcau

SEQ ID NO: 22149 - RNA, 19 nt, Artificial Sequence
  Synthetic
uccugacauucacuugcau

SEQ ID NO: 22150 - RNA, 20 nt, Artificial Sequence
  Synthetic
uuccugacauucacuugcau

SEQ ID NO: 22151 - RNA, 21 nt, Artificial Sequence
  Synthetic
uuuccugacauucacuugcau

SEQ ID NO: 22152 - RNA, 22 nt, Artificial Sequence
  Synthetic
uuuuccugacauucacuugcau

SEQ ID NO: 22153 - RNA, 23 nt, Artificial Sequence
  Synthetic
cuuuuccugacauucacuugcau

SEQ ID NO: 22154 - RNA, 24 nt, Artificial Sequence
  Synthetic
ucuuuuccugacauucacuugcau

SEQ ID NO: 22155 - RNA, 18 nt, Artificial Sequence
  Synthetic
aaauacuucccuuuggau

SEQ ID NO: 22156 - RNA, 19 nt, Artificial Sequence
  Synthetic
uaaauacuucccuuuggau

SEQ ID NO: 22157 - RNA, 20 nt, Artificial Sequence
  Synthetic
cuaaauacuucccuuuggau

SEQ ID NO: 22158 - RNA, 18 nt, Artificial Sequence
  Synthetic
uugguucuucuggacuau

SEQ ID NO: 22159 - RNA, 20 nt, Artificial Sequence
  Synthetic
uguugguucuucuggacuau

SEQ ID NO: 22160 - RNA, 21 nt, Artificial Sequence
  Synthetic
uuguugguucuucuggacuau

SEQ ID NO: 22161 - RNA, 22 nt, Artificial Sequence
  Synthetic
cuuguugguucuucuggacuau

SEQ ID NO: 22162 - RNA, 23 nt, Artificial Sequence
  Synthetic
ucuuguugguucuucuggacuau

SEQ ID NO: 22163 - RNA, 24 nt, Artificial Sequence
  Synthetic
uucuuguugguucuucuggacuau

SEQ ID NO: 22164 - RNA, 18 nt, Artificial Sequence
  Synthetic
cuuucggaaaauaccuau

SEQ ID NO: 22165 - RNA, 18 nt, Artificial Sequence
  Synthetic
uaaaaauuagacaauuau

SEQ ID NO: 22166 - RNA, 19 nt, Artificial Sequence
  Synthetic
cuaaaaauuagacaauuau

SEQ ID NO: 22167 - RNA, 20 nt, Artificial Sequence
  Synthetic
  misc_feature (1)..(1): n is a, c, g, or u
ncuaaaaauuagacaauuau

SEQ ID NO: 22168 - RNA, 24 nt, Artificial Sequence
  Synthetic
  misc_feature (5)..(5): n is a, c, g, or u
ugggncuaaaaauuagacaauuau

SEQ ID NO: 22169 - RNA, 19 nt, Artificial Sequence
  Synthetic
agaucuaguaguuaauuau

SEQ ID NO: 22170 - RNA, 21 nt, Artificial Sequence
  Synthetic
agagaucuaguaguuaauuau

SEQ ID NO: 22171 - RNA, 22 nt, Artificial Sequence
  Synthetic
  misc_feature (1)..(1): n is a, c, g, or u
nagagaucuaguaguuaauuau

SEQ ID NO: 22172 - RNA, 23 nt, Artificial Sequence
  Synthetic
  misc_feature (2)..(2): n is a, c, g, or u
cnagagaucuaguaguuaauuau

SEQ ID NO: 22173 - RNA, 18 nt, Artificial Sequence
  Synthetic
ugucuggcuuuuaguuau

SEQ ID NO: 22174 - RNA, 19 nt, Artificial Sequence
  Synthetic
cugucuggcuuuuaguuau

SEQ ID NO: 22175 - RNA, 20 nt, Artificial Sequence
  Synthetic
acugucuggcuuuuaguuau

SEQ ID NO: 22176 - RNA, 21 nt, Artificial Sequence
  Synthetic
cacugucuggcuuuuaguuau

SEQ ID NO: 22177 - RNA, 22 nt, Artificial Sequence
  Synthetic
ccacugucuggcuuuuaguuau

SEQ ID NO: 22178 - RNA, 23 nt, Artificial Sequence
  Synthetic
cccacugucuggcuuuuaguuau

SEQ ID NO: 22179 - RNA, 24 nt, Artificial Sequence
  Synthetic
ccccacugucuggcuuuuaguuau

SEQ ID NO: 22180 - RNA, 18 nt, Artificial Sequence
  Synthetic
  misc_feature (6)..(6): n is a, c, g, or u
uuugunggcccacucacu

SEQ ID NO: 22181 - RNA, 19 nt, Artificial Sequence
  Synthetic
  misc_feature (7)..(7): n is a, c, g, or u
auuugunggcccacucacu

SEQ ID NO: 22182 - RNA, 20 nt, Artificial Sequence
  Synthetic
  misc_feature (8)..(8): n is a, c, g, or u
aauuugunggcccacucacu

SEQ ID NO: 22183 - RNA, 21 nt, Artificial Sequence
  Synthetic
  misc_feature (9)..(9): n is a, c, g, or u
caauuugunggcccacucacu

SEQ ID NO: 22184 - RNA, 22 nt, Artificial Sequence
  Synthetic
  misc_feature (10)..(10): n is a, c, g, or u
acaauuugunggcccacucacu

SEQ ID NO: 22185 - RNA, 23 nt, Artificial Sequence
  Synthetic
  misc_feature (11)..(11): n is a, c, g, or u
aacaauuugunggcccacucacu

SEQ ID NO: 22186 - RNA, 18 nt, Artificial Sequence
  Synthetic
  misc_feature (6)..(6): n is a, c, g, or u
uaccanagagucuagacu

SEQ ID NO: 22187 - RNA, 19 nt, Artificial Sequence
  Synthetic
  misc_feature (7)..(7): n is a, c, g, or u
auaccanagagucuagacu

SEQ ID NO: 22188 - RNA, 20 nt, Artificial Sequence
  Synthetic
  misc_feature (8)..(8): n is a, c, g, or u
aauaccanagagucuagacu

SEQ ID NO: 22189 - RNA, 21 nt, Artificial Sequence
  Synthetic
  misc_feature (9)..(9): n is a, c, g, or u
caauaccanagagucuagacu

SEQ ID NO: 22190 - RNA, 22 nt, Artificial Sequence
  Synthetic
  misc_feature (10)..(10): n is a, c, g, or u
acaauaccanagagucuagacu

SEQ ID NO: 22191 - RNA, 23 nt, Artificial Sequence
  Synthetic
  misc_feature (11)..(11): n is a, c, g, or u
cacaauaccanagagucuagacu

SEQ ID NO: 22192 - RNA, 24 nt, Artificial Sequence
  Synthetic
  misc_feature (12)..(12): n is a, c, g, or u
ucacaauaccanagagucuagacu

SEQ ID NO: 22193 - RNA, 19 nt, Artificial Sequence
  Synthetic
aguuacuaaauacuucccu

SEQ ID NO: 22194 - RNA, 20 nt, Artificial Sequence
  Synthetic
aaguuacuaaauacuucccu

SEQ ID NO: 22195 - RNA, 18 nt, Artificial Sequence
  Synthetic
cccucuaccgagaugccu

SEQ ID NO: 22196 - RNA, 20 nt, Artificial Sequence
  Synthetic
agcccucuaccgagaugccu

SEQ ID NO: 22197 - RNA, 18 nt, Artificial Sequence
  Synthetic
cuuguugacaaaaauccu

SEQ ID NO: 22198 - RNA, 19 nt, Artificial Sequence
  Synthetic
ucuuguugacaaaaauccu

SEQ ID NO: 22199 - RNA, 20 nt, Artificial Sequence
  Synthetic
uucuuguugacaaaaauccu

SEQ ID NO: 22200 - RNA, 18 nt, Artificial Sequence
  Synthetic
  misc_feature (6)..(6): n is a, c, g, or u
aggggncuguauuuuccu

SEQ ID NO: 22201 - RNA, 19 nt, Artificial Sequence
  Synthetic
  misc_feature (7)..(7): n is a, c, g, or u
aaggggncuguauuuuccu

SEQ ID NO: 22202 - RNA, 20 nt, Artificial Sequence
  Synthetic
  misc_feature (8)..(8): n is a, c, g, or u
uaaggggncuguauuuuccu

SEQ ID NO: 22203 - RNA, 22 nt, Artificial Sequence
  Synthetic
  misc_feature (10)..(10): n is a, c, g, or u
aguaaggggncuguauuuuccu

SEQ ID NO: 22204 - RNA, 24 nt, Artificial Sequence
  Synthetic
  misc_feature (12)..(12): n is a, c, g, or u
agaguaaggggncuguauuuuccu

SEQ ID NO: 22205 - RNA, 18 nt, Artificial Sequence
  Synthetic
uucccccacugucuggcu

SEQ ID NO: 22206 - RNA, 19 nt, Artificial Sequence
  Synthetic
uuucccccacugucuggcu

SEQ ID NO: 22207 - RNA, 20 nt, Artificial Sequence
  Synthetic
cuuucccccacugucuggcu

SEQ ID NO: 22208 - RNA, 18 nt, Artificial Sequence
  Synthetic
  misc_feature (10)..(10): n is a, c, g, or u
  misc_feature (16)..(16): n is a, c, g, or u
caauacuaanaugggncu

SEQ ID NO: 22209 - RNA, 19 nt, Artificial Sequence
  Synthetic
  misc_feature (11)..(11): n is a, c, g, or u
  misc_feature (17)..(17): n is a, c, g, or u
ucaauacuaanaugggncu

SEQ ID NO: 22210 - RNA, 21 nt, Artificial Sequence
  Synthetic
  misc_feature (13)..(13): n is a, c, g, or u
  misc_feature (19)..(19): n is a, c, g, or u
ugucaauacuaanaugggncu

SEQ ID NO: 22211 - RNA, 22 nt, Artificial Sequence
  Synthetic
  misc_feature (14)..(14): n is a, c, g, or u
  misc_feature (20)..(20): n is a, c, g, or u
augucaauacuaanaugggncu

SEQ ID NO: 22212 - RNA, 23 nt, Artificial Sequence
  Synthetic
  misc_feature (15)..(15): n is a, c, g, or u
  misc_feature (21)..(21): n is a, c, g, or u
uaugucaauacuaanaugggncu

SEQ ID NO: 22213 - RNA, 24 nt, Artificial Sequence
  Synthetic
  misc_feature (16)..(16): n is a, c, g, or u
  misc_feature (22)..(22): n is a, c, g, or u
uuaugucaauacuaanaugggncu

SEQ ID NO: 22214 - RNA, 18 nt, Artificial Sequence
  Synthetic
  misc_feature (10)..(10): n is a, c, g, or u
uccugcagcnagagaucu

SEQ ID NO: 22215 - RNA, 19 nt, Artificial Sequence
  Synthetic
  misc_feature (11)..(11): n is a, c, g, or u
auccugcagcnagagaucu

SEQ ID NO: 22216 - RNA, 22 nt, Artificial Sequence
  Synthetic
  misc_feature (14)..(14): n is a, c, g, or u
aggauccugcagcnagagaucu

SEQ ID NO: 22217 - RNA, 24 nt, Artificial Sequence
  Synthetic
  misc_feature (16)..(16): n is a, c, g, or u
agaggauccugcagcnagagaucu

SEQ ID NO: 22218 - RNA, 18 nt, Artificial Sequence
  Synthetic
aaccuuuguggcuccucu

SEQ ID NO: 22219 - RNA, 20 nt, Artificial Sequence
  Synthetic
uggacuucucucaauuuucu

SEQ ID NO: 22220 - RNA, 18 nt, Artificial Sequence
  Synthetic
agagcaaauuccagcagu

SEQ ID NO: 22221 - RNA, 19 nt, Artificial Sequence
  Synthetic
cagagcaaauuccagcagu

SEQ ID NO: 22222 - RNA, 20 nt, Artificial Sequence
  Synthetic
ucagagcaaauuccagcagu

SEQ ID NO: 22223 - RNA, 18 nt, Artificial Sequence
  Synthetic
aggagucgggggaggagu

SEQ ID NO: 22224 - RNA, 22 nt, Artificial Sequence
  Synthetic
ugggaggagucgggggaggagu

SEQ ID NO: 22225 - RNA, 23 nt, Artificial Sequence
  Synthetic
cugggaggagucgggggaggagu

SEQ ID NO: 22226 - RNA, 24 nt, Artificial Sequence
  Synthetic
acugggaggagucgggggaggagu

SEQ ID NO: 22227 - RNA, 18 nt, Artificial Sequence
  Synthetic
uuuggugucuuuuggagu

SEQ ID NO: 22228 - RNA, 19 nt, Artificial Sequence
  Synthetic
auuuggugucuuuuggagu

SEQ ID NO: 22229 - RNA, 20 nt, Artificial Sequence
  Synthetic
uauuuggugucuuuuggagu

SEQ ID NO: 22230 - RNA, 22 nt, Artificial Sequence
  Synthetic
aguauuuggugucuuuuggagu

SEQ ID NO: 22231 - RNA, 24 nt, Artificial Sequence
  Synthetic
ugaguauuuggugucuuuuggagu

SEQ ID NO: 22232 - RNA, 20 nt, Artificial Sequence
  Synthetic
uggccaauggcaaacaaggu

SEQ ID NO: 22233 - RNA, 21 nt, Artificial Sequence
  Synthetic
uuggccaauggcaaacaaggu

SEQ ID NO: 22234 - RNA, 22 nt, Artificial Sequence
  Synthetic
auuggccaauggcaaacaaggu

SEQ ID NO: 22235 - RNA, 23 nt, Artificial Sequence
  Synthetic
aauuggccaauggcaaacaaggu

SEQ ID NO: 22236 - RNA, 24 nt, Artificial Sequence
  Synthetic
caauuggccaauggcaaacaaggu

SEQ ID NO: 22237 - RNA, 21 nt, Artificial Sequence
  Synthetic
ccggguguccuggccaaaauu

SEQ ID NO: 22238 - RNA, 22 nt, Artificial Sequence
  Synthetic
cccggguguccuggccaaaauu

SEQ ID NO: 22239 - RNA, 23 nt, Artificial Sequence
  Synthetic
acccggguguccuggccaaaauu

SEQ ID NO: 22240 - RNA, 24 nt, Artificial Sequence
  Synthetic
cacccggguguccuggccaaaauu

SEQ ID NO: 22241 - RNA, 18 nt, Artificial Sequence
  Synthetic
  misc_feature (15)..(15): n is a, c, g, or u
aagguuugucaacgnauu

SEQ ID NO: 22242 - RNA, 21 nt, Artificial Sequence
  Synthetic
  misc_feature (18)..(18): n is a, c, g, or u
uggaagguuugucaacgnauu

SEQ ID NO: 22243 - RNA, 22 nt, Artificial Sequence
  Synthetic
  misc_feature (19)..(19): n is a, c, g, or u
uuggaagguuugucaacgnauu

SEQ ID NO: 22244 - RNA, 23 nt, Artificial Sequence
  Synthetic
  misc_feature (20)..(20): n is a, c, g, or u
auuggaagguuugucaacgnauu

SEQ ID NO: 22245 - RNA, 18 nt, Artificial Sequence
  Synthetic
  misc_feature (15)..(15): n is a, c, g, or u
uuuauggguuauaunauu

SEQ ID NO: 22246 - RNA, 19 nt, Artificial Sequence
  Synthetic
  misc_feature (16)..(16): n is a, c, g, or u
cuuuauggguuauaunauu

SEQ ID NO: 22247 - RNA, 20 nt, Artificial Sequence
  Synthetic
  misc_feature (17)..(17): n is a, c, g, or u
acuuuauggguuauaunauu

SEQ ID NO: 22248 - RNA, 21 nt, Artificial Sequence
  Synthetic
  misc_feature (18)..(18): n is a, c, g, or u
cacuuuauggguuauaunauu

SEQ ID NO: 22249 - RNA, 22 nt, Artificial Sequence
  Synthetic
  misc_feature (1)..(1): n is a, c, g, or u
  misc_feature (19)..(19): n is a, c, g, or u
ncacuuuauggguuauaunauu

SEQ ID NO: 22250 - RNA, 23 nt, Artificial Sequence
  Synthetic
  misc_feature (2)..(2): n is a, c, g, or u
  misc_feature (20)..(20): n is a, c, g, or u
uncacuuuauggguuauaunauu

SEQ ID NO: 22251 - RNA, 24 nt, Artificial Sequence
  Synthetic
  misc_feature (1)..(1): n is a, c, g, or u
  misc_feature (3)..(3): n is a, c, g, or u
  misc_feature (21)..(21): n is a, c, g, or u
nuncacuuuauggguuauaunauu

SEQ ID NO: 22252 - RNA, 19 nt, Artificial Sequence
  Synthetic
agaucucaaucuccagcuu

SEQ ID NO: 22253 - RNA, 20 nt, Artificial Sequence
  Synthetic
aagaucucaaucuccagcuu

SEQ ID NO: 22254 - RNA, 18 nt, Artificial Sequence
  Synthetic
ccccacuggcuggggcuu

SEQ ID NO: 22255 - RNA, 19 nt, Artificial Sequence
  Synthetic
cccccacuggcuggggcuu

SEQ ID NO: 22256 - RNA, 20 nt, Artificial Sequence
  Synthetic
acccccacuggcuggggcuu

SEQ ID NO: 22257 - RNA, 19 nt, Artificial Sequence
  Synthetic
ugcuaugccucaucuucuu

SEQ ID NO: 22258 - RNA, 20 nt, Artificial Sequence
  Synthetic
cugcuaugccucaucuucuu

SEQ ID NO: 22259 - RNA, 19 nt, Artificial Sequence
  Synthetic
cgggggaggaguugagguu

SEQ ID NO: 22260 - RNA, 20 nt, Artificial Sequence
  Synthetic
ucgggggaggaguugagguu

SEQ ID NO: 22261 - RNA, 22 nt, Artificial Sequence
  Synthetic
agucgggggaggaguugagguu

SEQ ID NO: 22262 - RNA, 18 nt, Artificial Sequence
  Synthetic
  misc_feature (10)..(10): n is a, c, g, or u
uccucuacunuaccuguu

SEQ ID NO: 22263 - RNA, 19 nt, Artificial Sequence
  Synthetic
  misc_feature (11)..(11): n is a, c, g, or u
cuccucuacunuaccuguu

SEQ ID NO: 22264 - RNA, 20 nt, Artificial Sequence
  Synthetic
  misc_feature (12)..(12): n is a, c, g, or u
acuccucuacunuaccuguu

SEQ ID NO: 22265 - RNA, 21 nt, Artificial Sequence
  Synthetic
  misc_feature (13)..(13): n is a, c, g, or u
uacuccucuacunuaccuguu

SEQ ID NO: 22266 - RNA, 22 nt, Artificial Sequence
  Synthetic
  misc_feature (14)..(14): n is a, c, g, or u
uuacuccucuacunuaccuguu

SEQ ID NO: 22267 - RNA, 23 nt, Artificial Sequence
  Synthetic
  misc_feature (15)..(15): n is a, c, g, or u
uuuacuccucuacunuaccuguu

SEQ ID NO: 22268 - RNA, 24 nt, Artificial Sequence
  Synthetic
  misc_feature (16)..(16): n is a, c, g, or u
cuuuacuccucuacunuaccuguu

SEQ ID NO: 22269 - RNA, 18 nt, Artificial Sequence
  Synthetic
ucccuuuauaccgcuguu

SEQ ID NO: 22270 - RNA, 20 nt, Artificial Sequence
  Synthetic
agucccuuuauaccgcuguu

SEQ ID NO: 22271 - RNA, 22 nt, Artificial Sequence
  Synthetic
ugagucccuuuauaccgcuguu

SEQ ID NO: 22272 - RNA, 23 nt, Artificial Sequence
  Synthetic
uugagucccuuuauaccgcuguu

SEQ ID NO: 22273 - RNA, 24 nt, Artificial Sequence
  Synthetic
cuugagucccuuuauaccgcuguu

SEQ ID NO: 22274 - RNA, 18 nt, Artificial Sequence
  Synthetic
cauaaggugggaaacuuu

SEQ ID NO: 22275 - RNA, 19 nt, Artificial Sequence
  Synthetic
ucauaaggugggaaacuuu

SEQ ID NO: 22276 - RNA, 20 nt, Artificial Sequence
  Synthetic
cucauaaggugggaaacuuu

SEQ ID NO: 22277 - RNA, 21 nt, Artificial Sequence
  Synthetic
  misc_feature (13)..(13): n is a, c, g, or u
  misc_feature (15)..(15): n is a, c, g, or u
ugggguuauuccnuncacuuu

SEQ ID NO: 22278 - RNA, 24 nt, Artificial Sequence
  Synthetic
  misc_feature (16)..(16): n is a, c, g, or u
  misc_feature (18)..(18): n is a, c, g, or u
uggugggguuauuccnuncacuuu

SEQ ID NO: 22279 - RNA, 18 nt, Artificial Sequence
  Synthetic
ugaguauuuggugucuuu

SEQ ID NO: 22280 - RNA, 19 nt, Artificial Sequence
  Synthetic
uugaguauuuggugucuuu

SEQ ID NO: 22281 - RNA, 20 nt, Artificial Sequence
  Synthetic
cuugaguauuuggugucuuu

SEQ ID NO: 22282 - RNA, 21 nt, Artificial Sequence
  Synthetic
  misc_feature (1)..(1): n is a, c, g, or u
ncuugaguauuuggugucuuu

SEQ ID NO: 22283 - RNA, 22 nt, Artificial Sequence
  Synthetic
  misc_feature (2)..(2): n is a, c, g, or u
uncuugaguauuuggugucuuu

SEQ ID NO: 22284 - RNA, 24 nt, Artificial Sequence
  Synthetic
  misc_feature (4)..(4): n is a, c, g, or u
uguncuugaguauuuggugucuuu

SEQ ID NO: 22285 - RNA, 18 nt, Artificial Sequence
  Synthetic
uuucucuuggcucaguuu

SEQ ID NO: 22286 - RNA, 20 nt, Artificial Sequence
  Synthetic
cguuucucuuggcucaguuu

SEQ ID NO: 22287 - RNA, 18 nt, Artificial Sequence
  Synthetic
cacauagcgccucauuuu

SEQ ID NO: 22288 - RNA, 19 nt, Artificial Sequence
  Synthetic
acacauagcgccucauuuu

SEQ ID NO: 22289 - RNA, 20 nt, Artificial Sequence
  Synthetic
cacacauagcgccucauuuu

SEQ ID NO: 22290 - RNA, 18 nt, Artificial Sequence
  Synthetic
gaagucagaaggcaaaaa

SEQ ID NO: 22291 - RNA, 19 nt, Artificial Sequence
  Synthetic
agaagucagaaggcaaaaa

SEQ ID NO: 22292 - RNA, 20 nt, Artificial Sequence
  Synthetic
aagaagucagaaggcaaaaa

SEQ ID NO: 22293 - RNA, 21 nt, Artificial Sequence
  Synthetic
gaagaagucagaaggcaaaaa

SEQ ID NO: 22294 - RNA, 22 nt, Artificial Sequence
  Synthetic
ggaagaagucagaaggcaaaaa

SEQ ID NO: 22295 - RNA, 23 nt, Artificial Sequence
  Synthetic
gggaagaagucagaaggcaaaaa

SEQ ID NO: 22296 - RNA, 24 nt, Artificial Sequence
  Synthetic
cgggaagaagucagaaggcaaaaa

SEQ ID NO: 22297 - RNA, 18 nt, Artificial Sequence
  Synthetic
auauggugacccacaaaa

SEQ ID NO: 22298 - RNA, 19 nt, Artificial Sequence
  Synthetic
aauauggugacccacaaaa

SEQ ID NO: 22299 - RNA, 20 nt, Artificial Sequence
  Synthetic
gaauauggugacccacaaaa

SEQ ID NO: 22300 - RNA, 21 nt, Artificial Sequence
  Synthetic
ggaauauggugacccacaaaa

SEQ ID NO: 22301 - RNA, 22 nt, Artificial Sequence
  Synthetic
aggaauauggugacccacaaaa

SEQ ID NO: 22302 - RNA, 23 nt, Artificial Sequence
  Synthetic
caggaauauggugacccacaaaa

SEQ ID NO: 22303 - RNA, 24 nt, Artificial Sequence
  Synthetic
ccaggaauauggugacccacaaaa

SEQ ID NO: 22304 - RNA, 18 nt, Artificial Sequence
  Synthetic
agaagucagaaggcaaaa

SEQ ID NO: 22305 - RNA, 19 nt, Artificial Sequence
  Synthetic
aagaagucagaaggcaaaa

SEQ ID NO: 22306 - RNA, 20 nt, Artificial Sequence
  Synthetic
gaagaagucagaaggcaaaa

SEQ ID NO: 22307 - RNA, 21 nt, Artificial Sequence
  Synthetic
ggaagaagucagaaggcaaaa

SEQ ID NO: 22308 - RNA, 22 nt, Artificial Sequence
  Synthetic
gggaagaagucagaaggcaaaa

SEQ ID NO: 22309 - RNA, 23 nt, Artificial Sequence
  Synthetic
cgggaagaagucagaaggcaaaa

SEQ ID NO: 22310 - RNA, 24 nt, Artificial Sequence
  Synthetic
acgggaagaagucagaaggcaaaa

SEQ ID NO: 22311 - RNA, 18 nt, Artificial Sequence
  Synthetic
uguaaguuggcgagaaaa

SEQ ID NO: 22312 - RNA, 19 nt, Artificial Sequence
  Synthetic
uuguaaguuggcgagaaaa

SEQ ID NO: 22313 - RNA, 20 nt, Artificial Sequence
  Synthetic
cuuguaaguuggcgagaaaa

SEQ ID NO: 22314 - RNA, 21 nt, Artificial Sequence
  Synthetic
ccuuguaaguuggcgagaaaa

SEQ ID NO: 22315 - RNA, 22 nt, Artificial Sequence
  Synthetic
gccuuguaaguuggcgagaaaa

SEQ ID NO: 22316 - RNA, 23 nt, Artificial Sequence
  Synthetic
ggccuuguaaguuggcgagaaaa

SEQ ID NO: 22317 - RNA, 24 nt, Artificial Sequence
  Synthetic
aggccuuguaaguuggcgagaaaa

SEQ ID NO: 22318 - RNA, 18 nt, Artificial Sequence
  Synthetic
ggugguaccccuagaaaa

SEQ ID NO: 22319 - RNA, 19 nt, Artificial Sequence
  Synthetic
gggugguaccccuagaaaa

SEQ ID NO: 22320 - RNA, 20 nt, Artificial Sequence
  Synthetic
cgggugguaccccuagaaaa

SEQ ID NO: 22321 - RNA, 18 nt, Artificial Sequence
  Synthetic
gagccaccagcaggaaaa

SEQ ID NO: 22322 - RNA, 19 nt, Artificial Sequence
  Synthetic
ggagccaccagcaggaaaa

SEQ ID NO: 22323 - RNA, 20 nt, Artificial Sequence
  Synthetic
uggagccaccagcaggaaaa

SEQ ID NO: 22324 - RNA, 21 nt, Artificial Sequence
  Synthetic
cuggagccaccagcaggaaaa

SEQ ID NO: 22325 - RNA, 22 nt, Artificial Sequence
  Synthetic
acuggagccaccagcaggaaaa

SEQ ID NO: 22326 - RNA, 23 nt, Artificial Sequence
  Synthetic
aacuggagccaccagcaggaaaa

SEQ ID NO: 22327 - RNA, 24 nt, Artificial Sequence
  Synthetic
gaacuggagccaccagcaggaaaa

SEQ ID NO: 22328 - RNA, 18 nt, Artificial Sequence
  Synthetic
aagugaaugucaggaaaa

SEQ ID NO: 22329 - RNA, 19 nt, Artificial Sequence
  Synthetic
caagugaaugucaggaaaa

SEQ ID NO: 22330 - RNA, 20 nt, Artificial Sequence
  Synthetic
gcaagugaaugucaggaaaa

SEQ ID NO: 22331 - RNA, 21 nt, Artificial Sequence
  Synthetic
ugcaagugaaugucaggaaaa

SEQ ID NO: 22332 - RNA, 22 nt, Artificial Sequence
  Synthetic
augcaagugaaugucaggaaaa

SEQ ID NO: 22333 - RNA, 23 nt, Artificial Sequence
  Synthetic
gaugcaagugaaugucaggaaaa

SEQ ID NO: 22334 - RNA, 24 nt, Artificial Sequence
  Synthetic
ugaugcaagugaaugucaggaaaa

SEQ ID NO: 22335 - RNA, 18 nt, Artificial Sequence
  Synthetic
aguaacuuugggauaaaa

SEQ ID NO: 22336 - RNA, 19 nt, Artificial Sequence
  Synthetic
uaguaacuuugggauaaaa

SEQ ID NO: 22337 - RNA, 20 nt, Artificial Sequence
  Synthetic
uuaguaacuuugggauaaaa

SEQ ID NO: 22338 - RNA, 21 nt, Artificial Sequence
  Synthetic
uuuaguaacuuugggauaaaa

SEQ ID NO: 22339 - RNA, 22 nt, Artificial Sequence
  Synthetic
auuuaguaacuuugggauaaaa

SEQ ID NO: 22340 - RNA, 23 nt, Artificial Sequence
  Synthetic
uauuuaguaacuuugggauaaaa

SEQ ID NO: 22341 - RNA, 24 nt, Artificial Sequence
  Synthetic
guauuuaguaacuuugggauaaaa

SEQ ID NO: 22342 - RNA, 18 nt, Artificial Sequence
  Synthetic
ucauccauauaacuaaaa

SEQ ID NO: 22343 - RNA, 19 nt, Artificial Sequence
  Synthetic
aucauccauauaacuaaaa

SEQ ID NO: 22344 - RNA, 20 nt, Artificial Sequence
  Synthetic
  misc_feature (1)..(1): n is a, c, g, or u
naucauccauauaacuaaaa

SEQ ID NO: 22345 - RNA, 21 nt, Artificial Sequence
  Synthetic
  misc_feature (2)..(2): n is a, c, g, or u
anaucauccauauaacuaaaa

SEQ ID NO: 22346 - RNA, 22 nt, Artificial Sequence
  Synthetic
  misc_feature (3)..(3): n is a, c, g, or u
canaucauccauauaacuaaaa

SEQ ID NO: 22347 - RNA, 23 nt, Artificial Sequence
  Synthetic
  misc_feature (4)..(4): n is a, c, g, or u
ccanaucauccauauaacuaaaa

SEQ ID NO: 22348 - RNA, 24 nt, Artificial Sequence
  Synthetic
  misc_feature (5)..(5): n is a, c, g, or u
accanaucauccauauaacuaaaa

SEQ ID NO: 22349 - RNA, 18 nt, Artificial Sequence
  Synthetic
aauauggugacccacaaa

SEQ ID NO: 22350 - RNA, 19 nt, Artificial Sequence
  Synthetic
gaauauggugacccacaaa

SEQ ID NO: 22351 - RNA, 20 nt, Artificial Sequence
  Synthetic
ggaauauggugacccacaaa

SEQ ID NO: 22352 - RNA, 21 nt, Artificial Sequence
  Synthetic
aggaauauggugacccacaaa

SEQ ID NO: 22353 - RNA, 22 nt, Artificial Sequence
  Synthetic
caggaauauggugacccacaaa

SEQ ID NO: 22354 - RNA, 23 nt, Artificial Sequence
  Synthetic
ccaggaauauggugacccacaaa

SEQ ID NO: 22355 - RNA, 24 nt, Artificial Sequence
  Synthetic
cccaggaauauggugacccacaaa

SEQ ID NO: 22356 - RNA, 18 nt, Artificial Sequence
  Synthetic
uuaauaccuuuauccaaa

SEQ ID NO: 22357 - RNA, 19 nt, Artificial Sequence
  Synthetic
  misc_feature (1)..(1): n is a, c, g, or u
nuuaauaccuuuauccaaa

SEQ ID NO: 22358 - RNA, 20 nt, Artificial Sequence
  Synthetic
  misc_feature (2)..(2): n is a, c, g, or u
gnuuaauaccuuuauccaaa

SEQ ID NO: 22359 - RNA, 21 nt, Artificial Sequence
  Synthetic
  misc_feature (3)..(3): n is a, c, g, or u
ggnuuaauaccuuuauccaaa

SEQ ID NO: 22360 - RNA, 22 nt, Artificial Sequence
  Synthetic
  misc_feature (4)..(4): n is a, c, g, or u
aggnuuaauaccuuuauccaaa

SEQ ID NO: 22361 - RNA, 23 nt, Artificial Sequence
  Synthetic
  misc_feature (5)..(5): n is a, c, g, or u
aaggnuuaauaccuuuauccaaa

SEQ ID NO: 22362 - RNA, 24 nt, Artificial Sequence
  Synthetic
  misc_feature (6)..(6): n is a, c, g, or u
uaaggnuuaauaccuuuauccaaa

SEQ ID NO: 22363 - RNA, 18 nt, Artificial Sequence
  Synthetic
  misc_feature (1)..(1): n is a, c, g, or u
nacaguuucucuuccaaa

SEQ ID NO: 22364 - RNA, 19 nt, Artificial Sequence
  Synthetic
  misc_feature (2)..(2): n is a, c, g, or u
gnacaguuucucuuccaaa

SEQ ID NO: 22365 - RNA, 20 nt, Artificial Sequence
  Synthetic
  misc_feature (3)..(3): n is a, c, g, or u
agnacaguuucucuuccaaa

SEQ ID NO: 22366 - RNA, 21 nt, Artificial Sequence
  Synthetic
  misc_feature (4)..(4): n is a, c, g, or u
aagnacaguuucucuuccaaa

SEQ ID NO: 22367 - RNA, 22 nt, Artificial Sequence
  Synthetic
  misc_feature (5)..(5): n is a, c, g, or u
caagnacaguuucucuuccaaa

SEQ ID NO: 22368 - RNA, 23 nt, Artificial Sequence
  Synthetic
  misc_feature (6)..(6): n is a, c, g, or u
ucaagnacaguuucucuuccaaa

SEQ ID NO: 22369 - RNA, 24 nt, Artificial Sequence
  Synthetic
  misc_feature (7)..(7): n is a, c, g, or u
cucaagnacaguuucucuuccaaa

SEQ ID NO: 22370 - RNA, 18 nt, Artificial Sequence
  Synthetic
aagaagucagaaggcaaa

SEQ ID NO: 22371 - RNA, 19 nt, Artificial Sequence
  Synthetic
gaagaagucagaaggcaaa

SEQ ID NO: 22372 - RNA, 20 nt, Artificial Sequence
  Synthetic
ggaagaagucagaaggcaaa

SEQ ID NO: 22373 - RNA, 21 nt, Artificial Sequence
  Synthetic
gggaagaagucagaaggcaaa

SEQ ID NO: 22374 - RNA, 22 nt, Artificial Sequence
  Synthetic
cgggaagaagucagaaggcaaa

SEQ ID NO: 22375 - RNA, 23 nt, Artificial Sequence
  Synthetic
acgggaagaagucagaaggcaaa

SEQ ID NO: 22376 - RNA, 24 nt, Artificial Sequence
  Synthetic
gacgggaagaagucagaaggcaaa

SEQ ID NO: 22377 - RNA, 18 nt, Artificial Sequence
  Synthetic
uuguaaguuggcgagaaa

SEQ ID NO: 22378 - RNA, 19 nt, Artificial Sequence
  Synthetic
cuuguaaguuggcgagaaa

SEQ ID NO: 22379 - RNA, 20 nt, Artificial Sequence
  Synthetic
ccuuguaaguuggcgagaaa

SEQ ID NO: 22380 - RNA, 21 nt, Artificial Sequence
  Synthetic
gccuuguaaguuggcgagaaa

SEQ ID NO: 22381 - RNA, 22 nt, Artificial Sequence
  Synthetic
ggccuuguaaguuggcgagaaa

SEQ ID NO: 22382 - RNA, 23 nt, Artificial Sequence
  Synthetic
aggccuuguaaguuggcgagaaa

SEQ ID NO: 22383 - RNA, 24 nt, Artificial Sequence
  Synthetic
aaggccuuguaaguuggcgagaaa

SEQ ID NO: 22384 - RNA, 18 nt, Artificial Sequence
  Synthetic
gggugguaccccuagaaa

SEQ ID NO: 22385 - RNA, 19 nt, Artificial Sequence
  Synthetic
cgggugguaccccuagaaa

SEQ ID NO: 22386 - RNA, 20 nt, Artificial Sequence
  Synthetic
ccgggugguaccccuagaaa

SEQ ID NO: 22387 - RNA, 18 nt, Artificial Sequence
  Synthetic
caagugaaugucaggaaa

SEQ ID NO: 22388 - RNA, 19 nt, Artificial Sequence
  Synthetic
gcaagugaaugucaggaaa

SEQ ID NO: 22389 - RNA, 20 nt, Artificial Sequence
  Synthetic
ugcaagugaaugucaggaaa

SEQ ID NO: 22390 - RNA, 21 nt, Artificial Sequence
  Synthetic
augcaagugaaugucaggaaa

SEQ ID NO: 22391 - RNA, 22 nt, Artificial Sequence
  Synthetic
gaugcaagugaaugucaggaaa

SEQ ID NO: 22392 - RNA, 23 nt, Artificial Sequence
  Synthetic
ugaugcaagugaaugucaggaaa

SEQ ID NO: 22393 - RNA, 24 nt, Artificial Sequence
  Synthetic
uugaugcaagugaaugucaggaaa

SEQ ID NO: 22394 - RNA, 18 nt, Artificial Sequence
  Synthetic
acagcagcaggagggaaa

SEQ ID NO: 22395 - RNA, 19 nt, Artificial Sequence
  Synthetic
uacagcagcaggagggaaa

SEQ ID NO: 22396 - RNA, 20 nt, Artificial Sequence
  Synthetic
guacagcagcaggagggaaa

SEQ ID NO: 22397 - RNA, 21 nt, Artificial Sequence
  Synthetic
gguacagcagcaggagggaaa

SEQ ID NO: 22398 - RNA, 22 nt, Artificial Sequence
  Synthetic
ugguacagcagcaggagggaaa

SEQ ID NO: 22399 - RNA, 23 nt, Artificial Sequence
  Synthetic
uugguacagcagcaggagggaaa

SEQ ID NO: 22400 - RNA, 24 nt, Artificial Sequence
  Synthetic
uuugguacagcagcaggagggaaa

SEQ ID NO: 22401 - RNA, 18 nt, Artificial Sequence
  Synthetic
  misc_feature (14)..(14): n is a, c, g, or u
caaauguaaggcangaaa

SEQ ID NO: 22402 - RNA, 19 nt, Artificial Sequence
  Synthetic
  misc_feature (15)..(15): n is a, c, g, or u
ccaaauguaaggcangaaa

SEQ ID NO: 22403 - RNA, 20 nt, Artificial Sequence
  Synthetic
  misc_feature (16)..(16): n is a, c, g, or u
uccaaauguaaggcangaaa

SEQ ID NO: 22404 - RNA, 21 nt, Artificial Sequence
  Synthetic
  misc_feature (17)..(17): n is a, c, g, or u
uuccaaauguaaggcangaaa

SEQ ID NO: 22405 - RNA, 22 nt, Artificial Sequence
  Synthetic
  misc_feature (18)..(18): n is a, c, g, or u
cuuccaaauguaaggcangaaa

SEQ ID NO: 22406 - RNA, 23 nt, Artificial Sequence
  Synthetic
  misc_feature (19)..(19): n is a, c, g, or u
ucuuccaaauguaaggcangaaa

SEQ ID NO: 22407 - RNA, 24 nt, Artificial Sequence
  Synthetic
  misc_feature (20)..(20): n is a, c, g, or u
cucuuccaaauguaaggcangaaa

SEQ ID NO: 22408 - RNA, 18 nt, Artificial Sequence
  Synthetic
auaaccacauugaguaaa

SEQ ID NO: 22409 - RNA, 19 nt, Artificial Sequence
  Synthetic
gauaaccacauugaguaaa

SEQ ID NO: 22410 - RNA, 20 nt, Artificial Sequence
  Synthetic
ggauaaccacauugaguaaa

SEQ ID NO: 22411 - RNA, 21 nt, Artificial Sequence
  Synthetic
aggauaaccacauugaguaaa

SEQ ID NO: 22412 - RNA, 22 nt, Artificial Sequence
  Synthetic
caggauaaccacauugaguaaa

SEQ ID NO: 22413 - RNA, 23 nt, Artificial Sequence
  Synthetic
gcaggauaaccacauugaguaaa

SEQ ID NO: 22414 - RNA, 24 nt, Artificial Sequence
  Synthetic
agcaggauaaccacauugaguaaa

SEQ ID NO: 22415 - RNA, 18 nt, Artificial Sequence
  Synthetic
acaaauugcacuaguaaa

SEQ ID NO: 22416 - RNA, 19 nt, Artificial Sequence
  Synthetic
aacaaauugcacuaguaaa

SEQ ID NO: 22417 - RNA, 20 nt, Artificial Sequence
  Synthetic
gaacaaauugcacuaguaaa

SEQ ID NO: 22418 - RNA, 21 nt, Artificial Sequence
  Synthetic
ugaacaaauugcacuaguaaa

SEQ ID NO: 22419 - RNA, 22 nt, Artificial Sequence
  Synthetic
cugaacaaauugcacuaguaaa

SEQ ID NO: 22420 - RNA, 23 nt, Artificial Sequence
  Synthetic
acugaacaaauugcacuaguaaa

SEQ ID NO: 22421 - RNA, 24 nt, Artificial Sequence
  Synthetic
cacugaacaaauugcacuaguaaa

SEQ ID NO: 22422 - RNA, 18 nt, Artificial Sequence
  Synthetic
gcggggaguccgcguaaa

SEQ ID NO: 22423 - RNA, 19 nt, Artificial Sequence
  Synthetic
ggcggggaguccgcguaaa

SEQ ID NO: 22424 - RNA, 20 nt, Artificial Sequence
  Synthetic
aggcggggaguccgcguaaa

SEQ ID NO: 22425 - RNA, 21 nt, Artificial Sequence
  Synthetic
caggcggggaguccgcguaaa

SEQ ID NO: 22426 - RNA, 22 nt, Artificial Sequence
  Synthetic
acaggcggggaguccgcguaaa

SEQ ID NO: 22427 - RNA, 23 nt, Artificial Sequence
  Synthetic
cacaggcggggaguccgcguaaa

SEQ ID NO: 22428 - RNA, 24 nt, Artificial Sequence
  Synthetic
gcacaggcggggaguccgcguaaa

SEQ ID NO: 22429 - RNA, 18 nt, Artificial Sequence
  Synthetic
gaauauggugacccacaa

SEQ ID NO: 22430 - RNA, 19 nt, Artificial Sequence
  Synthetic
ggaauauggugacccacaa

SEQ ID NO: 22431 - RNA, 20 nt, Artificial Sequence
  Synthetic
aggaauauggugacccacaa

SEQ ID NO: 22432 - RNA, 21 nt, Artificial Sequence
  Synthetic
caggaauauggugacccacaa

SEQ ID NO: 22433 - RNA, 22 nt, Artificial Sequence
  Synthetic
ccaggaauauggugacccacaa

SEQ ID NO: 22434 - RNA, 23 nt, Artificial Sequence
  Synthetic
cccaggaauauggugacccacaa

SEQ ID NO: 22435 - RNA, 24 nt, Artificial Sequence
  Synthetic
ucccaggaauauggugacccacaa

SEQ ID NO: 22436 - RNA, 18 nt, Artificial Sequence
  Synthetic
caacucaccccagcacaa

SEQ ID NO: 22437 - RNA, 19 nt, Artificial Sequence
  Synthetic
ucaacucaccccagcacaa

SEQ ID NO: 22438 - RNA, 20 nt, Artificial Sequence
  Synthetic
aucaacucaccccagcacaa

SEQ ID NO: 22439 - RNA, 21 nt, Artificial Sequence
  Synthetic
caucaacucaccccagcacaa

SEQ ID NO: 22440 - RNA, 22 nt, Artificial Sequence
  Synthetic
ucaucaacucaccccagcacaa

SEQ ID NO: 22441 - RNA, 23 nt, Artificial Sequence
  Synthetic
gucaucaacucaccccagcacaa

SEQ ID NO: 22442 - RNA, 24 nt, Artificial Sequence
  Synthetic
  misc_feature (1)..(1): n is a, c, g, or u
ngucaucaacucaccccagcacaa

SEQ ID NO: 22443 - RNA, 18 nt, Artificial Sequence
  Synthetic
caacgauagccaggacaa

SEQ ID NO: 22444 - RNA, 19 nt, Artificial Sequence
  Synthetic
ccaacgauagccaggacaa

SEQ ID NO: 22445 - RNA, 20 nt, Artificial Sequence
  Synthetic
uccaacgauagccaggacaa

SEQ ID NO: 22446 - RNA, 21 nt, Artificial Sequence
  Synthetic
auccaacgauagccaggacaa

SEQ ID NO: 22447 - RNA, 22 nt, Artificial Sequence
  Synthetic
cauccaacgauagccaggacaa

SEQ ID NO: 22448 - RNA, 23 nt, Artificial Sequence
  Synthetic
acauccaacgauagccaggacaa

SEQ ID NO: 22449 - RNA, 24 nt, Artificial Sequence
  Synthetic
cacauccaacgauagccaggacaa

SEQ ID NO: 22450 - RNA, 18 nt, Artificial Sequence
  Synthetic
auaguccagaagaaccaa

SEQ ID NO: 22451 - RNA, 19 nt, Artificial Sequence
  Synthetic
gauaguccagaagaaccaa

SEQ ID NO: 22452 - RNA, 20 nt, Artificial Sequence
  Synthetic
ugauaguccagaagaaccaa

SEQ ID NO: 22453 - RNA, 21 nt, Artificial Sequence
  Synthetic
uugauaguccagaagaaccaa

SEQ ID NO: 22454 - RNA, 22 nt, Artificial Sequence
  Synthetic
cuugauaguccagaagaaccaa

SEQ ID NO: 22455 - RNA, 23 nt, Artificial Sequence
  Synthetic
ccuugauaguccagaagaaccaa

SEQ ID NO: 22456 - RNA, 24 nt, Artificial Sequence
  Synthetic
accuugauaguccagaagaaccaa

SEQ ID NO: 22457 - RNA, 18 nt, Artificial Sequence
  Synthetic
uuuguguugaagucccaa

SEQ ID NO: 22458 - RNA, 19 nt, Artificial Sequence
  Synthetic
guuuguguugaagucccaa

SEQ ID NO: 22459 - RNA, 20 nt, Artificial Sequence
  Synthetic
uguuuguguugaagucccaa

SEQ ID NO: 22460 - RNA, 21 nt, Artificial Sequence
  Synthetic
uuguuuguguugaagucccaa

SEQ ID NO: 22461 - RNA, 22 nt, Artificial Sequence
  Synthetic
cuuguuuguguugaagucccaa

SEQ ID NO: 22462 - RNA, 23 nt, Artificial Sequence
  Synthetic
ccuuguuuguguugaagucccaa

SEQ ID NO: 22463 - RNA, 24 nt, Artificial Sequence
  Synthetic
uccuuguuuguguugaagucccaa

SEQ ID NO: 22464 - RNA, 18 nt, Artificial Sequence
  Synthetic
acuaguaaacugagccaa

SEQ ID NO: 22465 - RNA, 19 nt, Artificial Sequence
  Synthetic
cacuaguaaacugagccaa

SEQ ID NO: 22466 - RNA, 20 nt, Artificial Sequence
  Synthetic
gcacuaguaaacugagccaa

SEQ ID NO: 22467 - RNA, 21 nt, Artificial Sequence
  Synthetic
ugcacuaguaaacugagccaa

SEQ ID NO: 22468 - RNA, 22 nt, Artificial Sequence
  Synthetic
uugcacuaguaaacugagccaa

SEQ ID NO: 22469 - RNA, 23 nt, Artificial Sequence
  Synthetic
auugcacuaguaaacugagccaa

SEQ ID NO: 22470 - RNA, 24 nt, Artificial Sequence
  Synthetic
aauugcacuaguaaacugagccaa

SEQ ID NO: 22471 - RNA, 18 nt, Artificial Sequence
  Synthetic
  misc_feature (1)..(1): n is a, c, g, or u
nuuaauaccuuuauccaa

SEQ ID NO: 22472 - RNA, 19 nt, Artificial Sequence
  Synthetic
  misc_feature (2)..(2): n is a, c, g, or u
gnuuaauaccuuuauccaa

SEQ ID NO: 22473 - RNA, 20 nt, Artificial Sequence
  Synthetic
  misc_feature (3)..(3): n is a, c, g, or u
ggnuuaauaccuuuauccaa

SEQ ID NO: 22474 - RNA, 21 nt, Artificial Sequence
  Synthetic
  misc_feature (4)..(4): n is a, c, g, or u
aggnuuaauaccuuuauccaa

SEQ ID NO: 22475 - RNA, 22 nt, Artificial Sequence
  Synthetic
  misc_feature (5)..(5): n is a, c, g, or u
aaggnuuaauaccuuuauccaa

SEQ ID NO: 22476 - RNA, 23 nt, Artificial Sequence
  Synthetic
  misc_feature (6)..(6): n is a, c, g, or u
uaaggnuuaauaccuuuauccaa

SEQ ID NO: 22477 - RNA, 24 nt, Artificial Sequence
  Synthetic
  misc_feature (7)..(7): n is a, c, g, or u
guaaggnuuaauaccuuuauccaa

SEQ ID NO: 22478 - RNA, 18 nt, Artificial Sequence
  Synthetic
cuuugauguauuccucaa

SEQ ID NO: 22479 - RNA, 19 nt, Artificial Sequence
  Synthetic
ucuuugauguauuccucaa

SEQ ID NO: 22480 - RNA, 20 nt, Artificial Sequence
  Synthetic
gucuuugauguauuccucaa

SEQ ID NO: 22481 - RNA, 21 nt, Artificial Sequence
  Synthetic
agucuuugauguauuccucaa

SEQ ID NO: 22482 - RNA, 22 nt, Artificial Sequence
  Synthetic
cagucuuugauguauuccucaa

SEQ ID NO: 22483 - RNA, 23 nt, Artificial Sequence
  Synthetic
acagucuuugauguauuccucaa

SEQ ID NO: 22484 - RNA, 24 nt, Artificial Sequence
  Synthetic
cacagucuuugauguauuccucaa

SEQ ID NO: 22485 - RNA, 18 nt, Artificial Sequence
  Synthetic
ugugaggauuuuugucaa

SEQ ID NO: 22486 - RNA, 19 nt, Artificial Sequence
  Synthetic
uugugaggauuuuugucaa

SEQ ID NO: 22487 - RNA, 20 nt, Artificial Sequence
  Synthetic
auugugaggauuuuugucaa

SEQ ID NO: 22488 - RNA, 21 nt, Artificial Sequence
  Synthetic
uauugugaggauuuuugucaa

SEQ ID NO: 22489 - RNA, 22 nt, Artificial Sequence
  Synthetic
guauugugaggauuuuugucaa

SEQ ID NO: 22490 - RNA, 23 nt, Artificial Sequence
  Synthetic
gguauugugaggauuuuugucaa

SEQ ID NO: 22491 - RNA, 24 nt, Artificial Sequence
  Synthetic
ugguauugugaggauuuuugucaa

SEQ ID NO: 22492 - RNA, 18 nt, Artificial Sequence
  Synthetic
cagaagaaccaacaagaa

SEQ ID NO: 22493 - RNA, 19 nt, Artificial Sequence
  Synthetic
ccagaagaaccaacaagaa

SEQ ID NO: 22494 - RNA, 20 nt, Artificial Sequence
  Synthetic
uccagaagaaccaacaagaa

SEQ ID NO: 22495 - RNA, 21 nt, Artificial Sequence
  Synthetic
guccagaagaaccaacaagaa

SEQ ID NO: 22496 - RNA, 22 nt, Artificial Sequence
  Synthetic
aguccagaagaaccaacaagaa

SEQ ID NO: 22497 - RNA, 23 nt, Artificial Sequence
  Synthetic
uaguccagaagaaccaacaagaa

SEQ ID NO: 22498 - RNA, 24 nt, Artificial Sequence
  Synthetic
auaguccagaagaaccaacaagaa

SEQ ID NO: 22499 - RNA, 18 nt, Artificial Sequence
  Synthetic
ccggacagacgggaagaa

SEQ ID NO: 22500 - RNA, 19 nt, Artificial Sequence
  Synthetic
cccggacagacgggaagaa

SEQ ID NO: 22501 - RNA, 20 nt, Artificial Sequence
  Synthetic
ucccggacagacgggaagaa

SEQ ID NO: 22502 - RNA, 21 nt, Artificial Sequence
  Synthetic
gucccggacagacgggaagaa

SEQ ID NO: 22503 - RNA, 22 nt, Artificial Sequence
  Synthetic
ggucccggacagacgggaagaa

SEQ ID NO: 22504 - RNA, 23 nt, Artificial Sequence
  Synthetic
aggucccggacagacgggaagaa

SEQ ID NO: 22505 - RNA, 24 nt, Artificial Sequence
  Synthetic
uaggucccggacagacgggaagaa

SEQ ID NO: 22506 - RNA, 18 nt, Artificial Sequence
  Synthetic
gacgggaagaagucagaa

SEQ ID NO: 22507 - RNA, 19 nt, Artificial Sequence
  Synthetic
agacgggaagaagucagaa

SEQ ID NO: 22508 - RNA, 20 nt, Artificial Sequence
  Synthetic
cagacgggaagaagucagaa

SEQ ID NO: 22509 - RNA, 21 nt, Artificial Sequence
  Synthetic
acagacgggaagaagucagaa

SEQ ID NO: 22510 - RNA, 22 nt, Artificial Sequence
  Synthetic
gacagacgggaagaagucagaa

SEQ ID NO: 22511 - RNA, 23 nt, Artificial Sequence
  Synthetic
ggacagacgggaagaagucagaa

SEQ ID NO: 22512 - RNA, 24 nt, Artificial Sequence
  Synthetic
cggacagacgggaagaagucagaa

SEQ ID NO: 22513 - RNA, 18 nt, Artificial Sequence
  Synthetic
uaaacugagccaagagaa

SEQ ID NO: 22514 - RNA, 19 nt, Artificial Sequence
  Synthetic
guaaacugagccaagagaa

SEQ ID NO: 22515 - RNA, 20 nt, Artificial Sequence
  Synthetic
aguaaacugagccaagagaa

SEQ ID NO: 22516 - RNA, 21 nt, Artificial Sequence
  Synthetic
uaguaaacugagccaagagaa

SEQ ID NO: 22517 - RNA, 22 nt, Artificial Sequence
  Synthetic
cuaguaaacugagccaagagaa

SEQ ID NO: 22518 - RNA, 23 nt, Artificial Sequence
  Synthetic
acuaguaaacugagccaagagaa

SEQ ID NO: 22519 - RNA, 24 nt, Artificial Sequence
  Synthetic
cacuaguaaacugagccaagagaa

SEQ ID NO: 22520 - RNA, 18 nt, Artificial Sequence
  Synthetic
cuuguaaguuggcgagaa

SEQ ID NO: 22521 - RNA, 19 nt, Artificial Sequence
  Synthetic
ccuuguaaguuggcgagaa

SEQ ID NO: 22522 - RNA, 20 nt, Artificial Sequence
  Synthetic
gccuuguaaguuggcgagaa

SEQ ID NO: 22523 - RNA, 21 nt, Artificial Sequence
  Synthetic
ggccuuguaaguuggcgagaa

SEQ ID NO: 22524 - RNA, 22 nt, Artificial Sequence
  Synthetic
aggccuuguaaguuggcgagaa

SEQ ID NO: 22525 - RNA, 23 nt, Artificial Sequence
  Synthetic
aaggccuuguaaguuggcgagaa

SEQ ID NO: 22526 - RNA, 24 nt, Artificial Sequence
  Synthetic
aaaggccuuguaaguuggcgagaa

SEQ ID NO: 22527 - RNA, 18 nt, Artificial Sequence
  Synthetic
  misc_feature (7)..(8): n is a, c, g, or u
ggaacgnnaggcggagaa

SEQ ID NO: 22528 - RNA, 19 nt, Artificial Sequence
  Synthetic
  misc_feature (8)..(9): n is a, c, g, or u
cggaacgnnaggcggagaa

SEQ ID NO: 22529 - RNA, 20 nt, Artificial Sequence
  Synthetic
  misc_feature (9)..(10): n is a, c, g, or u
ccggaacgnnaggcggagaa

SEQ ID NO: 22530 - RNA, 21 nt, Artificial Sequence
  Synthetic
  misc_feature (10)..(11): n is a, c, g, or u
gccggaacgnnaggcggagaa

SEQ ID NO: 22531 - RNA, 22 nt, Artificial Sequence
  Synthetic
  misc_feature (11)..(12): n is a, c, g, or u
ggccggaacgnnaggcggagaa

SEQ ID NO: 22532 - RNA, 23 nt, Artificial Sequence
  Synthetic
  misc_feature (12)..(13): n is a, c, g, or u
cggccggaacgnnaggcggagaa

SEQ ID NO: 22533 - RNA, 24 nt, Artificial Sequence
  Synthetic
  misc_feature (13)..(14): n is a, c, g, or u
ucggccggaacgnnaggcggagaa

SEQ ID NO: 22534 - RNA, 18 nt, Artificial Sequence
  Synthetic
  misc_feature (6)..(6): n is a, c, g, or u
agaccngcugcgagcgaa

SEQ ID NO: 22535 - RNA, 19 nt, Artificial Sequence
  Synthetic
  misc_feature (7)..(7): n is a, c, g, or u
cagaccngcugcgagcgaa

SEQ ID NO: 22536 - RNA, 20 nt, Artificial Sequence
  Synthetic
  misc_feature (8)..(8): n is a, c, g, or u
ccagaccngcugcgagcgaa

SEQ ID NO: 22537 - RNA, 21 nt, Artificial Sequence
  Synthetic
  misc_feature (9)..(9): n is a, c, g, or u
uccagaccngcugcgagcgaa

SEQ ID NO: 22538 - RNA, 22 nt, Artificial Sequence
  Synthetic
  misc_feature (10)..(10): n is a, c, g, or u
cuccagaccngcugcgagcgaa

SEQ ID NO: 22539 - RNA, 23 nt, Artificial Sequence
  Synthetic
  misc_feature (11)..(11): n is a, c, g, or u
gcuccagaccngcugcgagcgaa

SEQ ID NO: 22540 - RNA, 24 nt, Artificial Sequence
  Synthetic
  misc_feature (12)..(12): n is a, c, g, or u
cgcuccagaccngcugcgagcgaa

SEQ ID NO: 22541 - RNA, 18 nt, Artificial Sequence
  Synthetic
uuauugcccacccaggaa

SEQ ID NO: 22542 - RNA, 19 nt, Artificial Sequence
  Synthetic
auuauugcccacccaggaa

SEQ ID NO: 22543 - RNA, 20 nt, Artificial Sequence
  Synthetic
aauuauugcccacccaggaa

SEQ ID NO: 22544 - RNA, 21 nt, Artificial Sequence
  Synthetic
aaauuauugcccacccaggaa

SEQ ID NO: 22545 - RNA, 22 nt, Artificial Sequence
  Synthetic
uaaauuauugcccacccaggaa

SEQ ID NO: 22546 - RNA, 23 nt, Artificial Sequence
  Synthetic
cuaaauuauugcccacccaggaa

SEQ ID NO: 22547 - RNA, 24 nt, Artificial Sequence
  Synthetic
ucuaaauuauugcccacccaggaa

SEQ ID NO: 22548 - RNA, 18 nt, Artificial Sequence
  Synthetic
gcaagugaaugucaggaa

SEQ ID NO: 22549 - RNA, 19 nt, Artificial Sequence
  Synthetic
ugcaagugaaugucaggaa

SEQ ID NO: 22550 - RNA, 20 nt, Artificial Sequence
  Synthetic
augcaagugaaugucaggaa

SEQ ID NO: 22551 - RNA, 21 nt, Artificial Sequence
  Synthetic
gaugcaagugaaugucaggaa

SEQ ID NO: 22552 - RNA, 22 nt, Artificial Sequence
  Synthetic
ugaugcaagugaaugucaggaa

SEQ ID NO: 22553 - RNA, 23 nt, Artificial Sequence
  Synthetic
uugaugcaagugaaugucaggaa

SEQ ID NO: 22554 - RNA, 24 nt, Artificial Sequence
  Synthetic
cuugaugcaagugaaugucaggaa

SEQ ID NO: 22555 - RNA, 18 nt, Artificial Sequence
  Synthetic
aagaugaugggaugggaa

SEQ ID NO: 22556 - RNA, 19 nt, Artificial Sequence
  Synthetic
caagaugaugggaugggaa

SEQ ID NO: 22557 - RNA, 20 nt, Artificial Sequence
  Synthetic
ccaagaugaugggaugggaa

SEQ ID NO: 22558 - RNA, 21 nt, Artificial Sequence
  Synthetic
cccaagaugaugggaugggaa

SEQ ID NO: 22559 - RNA, 22 nt, Artificial Sequence
  Synthetic
gcccaagaugaugggaugggaa

SEQ ID NO: 22560 - RNA, 23 nt, Artificial Sequence
  Synthetic
agcccaagaugaugggaugggaa

SEQ ID NO: 22561 - RNA, 24 nt, Artificial Sequence
  Synthetic
aagcccaagaugaugggaugggaa

SEQ ID NO: 22562 - RNA, 18 nt, Artificial Sequence
  Synthetic
gaauacuaacauugggaa

SEQ ID NO: 22563 - RNA, 19 nt, Artificial Sequence
  Synthetic
ggaauacuaacauugggaa

SEQ ID NO: 22564 - RNA, 20 nt, Artificial Sequence
  Synthetic
aggaauacuaacauugggaa

SEQ ID NO: 22565 - RNA, 21 nt, Artificial Sequence
  Synthetic
aaggaauacuaacauugggaa

SEQ ID NO: 22566 - RNA, 22 nt, Artificial Sequence
  Synthetic
caaggaauacuaacauugggaa

SEQ ID NO: 22567 - RNA, 23 nt, Artificial Sequence
  Synthetic
ccaaggaauacuaacauugggaa

SEQ ID NO: 22568 - RNA, 24 nt, Artificial Sequence
  Synthetic
uccaaggaauacuaacauugggaa

SEQ ID NO: 22569 - RNA, 18 nt, Artificial Sequence
  Synthetic
ugguuguagauccuggaa

SEQ ID NO: 22570 - RNA, 19 nt, Artificial Sequence
  Synthetic
gugguuguagauccuggaa

SEQ ID NO: 22571 - RNA, 20 nt, Artificial Sequence
  Synthetic
ggugguuguagauccuggaa

SEQ ID NO: 22572 - RNA, 21 nt, Artificial Sequence
  Synthetic
uggugguuguagauccuggaa

SEQ ID NO: 22573 - RNA, 22 nt, Artificial Sequence
  Synthetic
cuggugguuguagauccuggaa

SEQ ID NO: 22574 - RNA, 23 nt, Artificial Sequence
  Synthetic
gcuggugguuguagauccuggaa

SEQ ID NO: 22575 - RNA, 24 nt, Artificial Sequence
  Synthetic
ugcuggugguuguagauccuggaa

SEQ ID NO: 22576 - RNA, 18 nt, Artificial Sequence
  Synthetic
gaccuccgauugguggaa

SEQ ID NO: 22577 - RNA, 19 nt, Artificial Sequence
  Synthetic
ugaccuccgauugguggaa

SEQ ID NO: 22578 - RNA, 20 nt, Artificial Sequence
  Synthetic
cugaccuccgauugguggaa

SEQ ID NO: 22579 - RNA, 21 nt, Artificial Sequence
  Synthetic
ccugaccuccgauugguggaa

SEQ ID NO: 22580 - RNA, 22 nt, Artificial Sequence
  Synthetic
uccugaccuccgauugguggaa

SEQ ID NO: 22581 - RNA, 23 nt, Artificial Sequence
  Synthetic
uuccugaccuccgauugguggaa

SEQ ID NO: 22582 - RNA, 24 nt, Artificial Sequence
  Synthetic
cuuccugaccuccgauugguggaa

SEQ ID NO: 22583 - RNA, 18 nt, Artificial Sequence
  Synthetic
ugaacagugggacaugaa

SEQ ID NO: 22584 - RNA, 19 nt, Artificial Sequence
  Synthetic
uugaacagugggacaugaa

SEQ ID NO: 22585 - RNA, 20 nt, Artificial Sequence
  Synthetic
cuugaacagugggacaugaa

SEQ ID NO: 22586 - RNA, 21 nt, Artificial Sequence
  Synthetic
gcuugaacagugggacaugaa

SEQ ID NO: 22587 - RNA, 22 nt, Artificial Sequence
  Synthetic
ggcuugaacagugggacaugaa

SEQ ID NO: 22588 - RNA, 23 nt, Artificial Sequence
  Synthetic
aggcuugaacagugggacaugaa

SEQ ID NO: 22589 - RNA, 24 nt, Artificial Sequence
  Synthetic
gaggcuugaacagugggacaugaa

SEQ ID NO: 22590 - RNA, 18 nt, Artificial Sequence
  Synthetic
gcauagcagcaggaugaa

SEQ ID NO: 22591 - RNA, 19 nt, Artificial Sequence
  Synthetic
ggcauagcagcaggaugaa

SEQ ID NO: 22592 - RNA, 20 nt, Artificial Sequence
  Synthetic
aggcauagcagcaggaugaa

SEQ ID NO: 22593 - RNA, 21 nt, Artificial Sequence
  Synthetic
gaggcauagcagcaggaugaa

SEQ ID NO: 22594 - RNA, 22 nt, Artificial Sequence
  Synthetic
ugaggcauagcagcaggaugaa

SEQ ID NO: 22595 - RNA, 23 nt, Artificial Sequence
  Synthetic
augaggcauagcagcaggaugaa

SEQ ID NO: 22596 - RNA, 24 nt, Artificial Sequence
  Synthetic
gaugaggcauagcagcaggaugaa

SEQ ID NO: 22597 - RNA, 18 nt, Artificial Sequence
  Synthetic
ggguucuguguuucugaa

SEQ ID NO: 22598 - RNA, 19 nt, Artificial Sequence
  Synthetic
aggguucuguguuucugaa

SEQ ID NO: 22599 - RNA, 20 nt, Artificial Sequence
  Synthetic
caggguucuguguuucugaa

SEQ ID NO: 22600 - RNA, 21 nt, Artificial Sequence
  Synthetic
gcaggguucuguguuucugaa

SEQ ID NO: 22601 - RNA, 22 nt, Artificial Sequence
  Synthetic
agcaggguucuguguuucugaa

SEQ ID NO: 22602 - RNA, 23 nt, Artificial Sequence
  Synthetic
gagcaggguucuguguuucugaa

SEQ ID NO: 22603 - RNA, 24 nt, Artificial Sequence
  Synthetic
ggagcaggguucuguguuucugaa

SEQ ID NO: 22604 - RNA, 18 nt, Artificial Sequence
  Synthetic
gcgacgugcagaggugaa

SEQ ID NO: 22605 - RNA, 19 nt, Artificial Sequence
  Synthetic
ugcgacgugcagaggugaa

SEQ ID NO: 22606 - RNA, 20 nt, Artificial Sequence
  Synthetic
augcgacgugcagaggugaa

SEQ ID NO: 22607 - RNA, 21 nt, Artificial Sequence
  Synthetic
caugcgacgugcagaggugaa

SEQ ID NO: 22608 - RNA, 22 nt, Artificial Sequence
  Synthetic
ccaugcgacgugcagaggugaa

SEQ ID NO: 22609 - RNA, 23 nt, Artificial Sequence
  Synthetic
uccaugcgacgugcagaggugaa

SEQ ID NO: 22610 - RNA, 24 nt, Artificial Sequence
  Synthetic
cuccaugcgacgugcagaggugaa

SEQ ID NO: 22611 - RNA, 18 nt, Artificial Sequence
  Synthetic
uaaccagucaggauugaa

SEQ ID NO: 22612 - RNA, 19 nt, Artificial Sequence
  Synthetic
uuaaccagucaggauugaa

SEQ ID NO: 22613 - RNA, 20 nt, Artificial Sequence
  Synthetic
guuaaccagucaggauugaa

SEQ ID NO: 22614 - RNA, 21 nt, Artificial Sequence
  Synthetic
aguuaaccagucaggauugaa

SEQ ID NO: 22615 - RNA, 22 nt, Artificial Sequence
  Synthetic
gaguuaaccagucaggauugaa

SEQ ID NO: 22616 - RNA, 23 nt, Artificial Sequence
  Synthetic
ggaguuaaccagucaggauugaa

SEQ ID NO: 22617 - RNA, 24 nt, Artificial Sequence
  Synthetic
aggaguuaaccagucaggauugaa

SEQ ID NO: 22618 - RNA, 18 nt, Artificial Sequence
  Synthetic
auggaugcccacagauaa

SEQ ID NO: 22619 - RNA, 19 nt, Artificial Sequence
  Synthetic
aauggaugcccacagauaa

SEQ ID NO: 22620 - RNA, 20 nt, Artificial Sequence
  Synthetic
aaauggaugcccacagauaa

SEQ ID NO: 22621 - RNA, 21 nt, Artificial Sequence
  Synthetic
caaauggaugcccacagauaa

SEQ ID NO: 22622 - RNA, 22 nt, Artificial Sequence
  Synthetic
ucaaauggaugcccacagauaa

SEQ ID NO: 22623 - RNA, 23 nt, Artificial Sequence
  Synthetic
uucaaauggaugcccacagauaa

SEQ ID NO: 22624 - RNA, 24 nt, Artificial Sequence
  Synthetic
guucaaauggaugcccacagauaa

SEQ ID NO: 22625 - RNA, 18 nt, Artificial Sequence
  Synthetic
  misc_feature (5)..(5): n is a, c, g, or u
accanaucauccauauaa

SEQ ID NO: 22626 - RNA, 19 nt, Artificial Sequence
  Synthetic
  misc_feature (6)..(6): n is a, c, g, or u
uaccanaucauccauauaa

SEQ ID NO: 22627 - RNA, 20 nt, Artificial Sequence
  Synthetic
  misc_feature (7)..(7): n is a, c, g, or u
auaccanaucauccauauaa

SEQ ID NO: 22628 - RNA, 21 nt, Artificial Sequence
  Synthetic
  misc_feature (8)..(8): n is a, c, g, or u
aauaccanaucauccauauaa

SEQ ID NO: 22629 - RNA, 22 nt, Artificial Sequence
  Synthetic
  misc_feature (9)..(9): n is a, c, g, or u
caauaccanaucauccauauaa

SEQ ID NO: 22630 - RNA, 23 nt, Artificial Sequence
  Synthetic
  misc_feature (10)..(10): n is a, c, g, or u
ccaauaccanaucauccauauaa

SEQ ID NO: 22631 - RNA, 24 nt, Artificial Sequence
  Synthetic
  misc_feature (11)..(11): n is a, c, g, or u
cccaauaccanaucauccauauaa

SEQ ID NO: 22632 - RNA, 18 nt, Artificial Sequence
  Synthetic
uugguaacagcgguauaa

SEQ ID NO: 22633 - RNA, 19 nt, Artificial Sequence
  Synthetic
auugguaacagcgguauaa

SEQ ID NO: 22634 - RNA, 20 nt, Artificial Sequence
  Synthetic
aauugguaacagcgguauaa

SEQ ID NO: 22635 - RNA, 21 nt, Artificial Sequence
  Synthetic
aaauugguaacagcgguauaa

SEQ ID NO: 22636 - RNA, 22 nt, Artificial Sequence
  Synthetic
aaaauugguaacagcgguauaa

SEQ ID NO: 22637 - RNA, 23 nt, Artificial Sequence
  Synthetic
aaaaauugguaacagcgguauaa

SEQ ID NO: 22638 - RNA, 24 nt, Artificial Sequence
  Synthetic
aaaaaauugguaacagcgguauaa

SEQ ID NO: 22639 - RNA, 18 nt, Artificial Sequence
  Synthetic
augccuacagccuccuaa

SEQ ID NO: 22640 - RNA, 19 nt, Artificial Sequence
  Synthetic
uaugccuacagccuccuaa

SEQ ID NO: 22641 - RNA, 20 nt, Artificial Sequence
  Synthetic
uuaugccuacagccuccuaa

SEQ ID NO: 22642 - RNA, 21 nt, Artificial Sequence
  Synthetic
uuuaugccuacagccuccuaa

SEQ ID NO: 22643 - RNA, 22 nt, Artificial Sequence
  Synthetic
auuuaugccuacagccuccuaa

SEQ ID NO: 22644 - RNA, 23 nt, Artificial Sequence
  Synthetic
aauuuaugccuacagccuccuaa

SEQ ID NO: 22645 - RNA, 24 nt, Artificial Sequence
  Synthetic
caauuuaugccuacagccuccuaa

SEQ ID NO: 22646 - RNA, 18 nt, Artificial Sequence
  Synthetic
gauaaccacauugaguaa

SEQ ID NO: 22647 - RNA, 19 nt, Artificial Sequence
  Synthetic
ggauaaccacauugaguaa

SEQ ID NO: 22648 - RNA, 20 nt, Artificial Sequence
  Synthetic
aggauaaccacauugaguaa

SEQ ID NO: 22649 - RNA, 21 nt, Artificial Sequence
  Synthetic
caggauaaccacauugaguaa

SEQ ID NO: 22650 - RNA, 22 nt, Artificial Sequence
  Synthetic
gcaggauaaccacauugaguaa

SEQ ID NO: 22651 - RNA, 23 nt, Artificial Sequence
  Synthetic
agcaggauaaccacauugaguaa

SEQ ID NO: 22652 - RNA, 24 nt, Artificial Sequence
  Synthetic
gagcaggauaaccacauugaguaa

SEQ ID NO: 22653 - RNA, 18 nt, Artificial Sequence
  Synthetic
aacaaauugcacuaguaa

SEQ ID NO: 22654 - RNA, 19 nt, Artificial Sequence
  Synthetic
gaacaaauugcacuaguaa

SEQ ID NO: 22655 - RNA, 20 nt, Artificial Sequence
  Synthetic
ugaacaaauugcacuaguaa

SEQ ID NO: 22656 - RNA, 21 nt, Artificial Sequence
  Synthetic
cugaacaaauugcacuaguaa

SEQ ID NO: 22657 - RNA, 22 nt, Artificial Sequence
  Synthetic
acugaacaaauugcacuaguaa

SEQ ID NO: 22658 - RNA, 23 nt, Artificial Sequence
  Synthetic
cacugaacaaauugcacuaguaa

SEQ ID NO: 22659 - RNA, 24 nt, Artificial Sequence
  Synthetic
ccacugaacaaauugcacuaguaa

SEQ ID NO: 22660 - RNA, 18 nt, Artificial Sequence
  Synthetic
ggcggggaguccgcguaa

SEQ ID NO: 22661 - RNA, 19 nt, Artificial Sequence
  Synthetic
aggcggggaguccgcguaa

SEQ ID NO: 22662 - RNA, 20 nt, Artificial Sequence
  Synthetic
caggcggggaguccgcguaa

SEQ ID NO: 22663 - RNA, 21 nt, Artificial Sequence
  Synthetic
acaggcggggaguccgcguaa

SEQ ID NO: 22664 - RNA, 22 nt, Artificial Sequence
  Synthetic
cacaggcggggaguccgcguaa

SEQ ID NO: 22665 - RNA, 23 nt, Artificial Sequence
  Synthetic
gcacaggcggggaguccgcguaa

SEQ ID NO: 22666 - RNA, 24 nt, Artificial Sequence
  Synthetic
ggcacaggcggggaguccgcguaa

SEQ ID NO: 22667 - RNA, 18 nt, Artificial Sequence
  Synthetic
aagccugcuuagcgguaa

SEQ ID NO: 22668 - RNA, 19 nt, Artificial Sequence
  Synthetic
aaagccugcuuagcgguaa

SEQ ID NO: 22669 - RNA, 20 nt, Artificial Sequence
  Synthetic
aaaagccugcuuagcgguaa

SEQ ID NO: 22670 - RNA, 21 nt, Artificial Sequence
  Synthetic
caaaagccugcuuagcgguaa

SEQ ID NO: 22671 - RNA, 22 nt, Artificial Sequence
  Synthetic
acaaaagccugcuuagcgguaa

SEQ ID NO: 22672 - RNA, 23 nt, Artificial Sequence
  Synthetic
aacaaaagccugcuuagcgguaa

SEQ ID NO: 22673 - RNA, 24 nt, Artificial Sequence
  Synthetic
aaacaaaagccugcuuagcgguaa

SEQ ID NO: 22674 - RNA, 18 nt, Artificial Sequence
  Synthetic
gaaacacaccgccuguaa

SEQ ID NO: 22675 - RNA, 19 nt, Artificial Sequence
  Synthetic
agaaacacaccgccuguaa

SEQ ID NO: 22676 - RNA, 20 nt, Artificial Sequence
  Synthetic
aagaaacacaccgccuguaa

SEQ ID NO: 22677 - RNA, 21 nt, Artificial Sequence
  Synthetic
caagaaacacaccgccuguaa

SEQ ID NO: 22678 - RNA, 22 nt, Artificial Sequence
  Synthetic
acaagaaacacaccgccuguaa

SEQ ID NO: 22679 - RNA, 23 nt, Artificial Sequence
  Synthetic
aacaagaaacacaccgccuguaa

SEQ ID NO: 22680 - RNA, 24 nt, Artificial Sequence
  Synthetic
caacaagaaacacaccgccuguaa

SEQ ID NO: 22681 - RNA, 18 nt, Artificial Sequence
  Synthetic
cagagaaaggccuuguaa

SEQ ID NO: 22682 - RNA, 19 nt, Artificial Sequence
  Synthetic
acagagaaaggccuuguaa

SEQ ID NO: 22683 - RNA, 20 nt, Artificial Sequence
  Synthetic
uacagagaaaggccuuguaa

SEQ ID NO: 22684 - RNA, 21 nt, Artificial Sequence
  Synthetic
uuacagagaaaggccuuguaa

SEQ ID NO: 22685 - RNA, 22 nt, Artificial Sequence
  Synthetic
uuuacagagaaaggccuuguaa

SEQ ID NO: 22686 - RNA, 23 nt, Artificial Sequence
  Synthetic
guuuacagagaaaggccuuguaa

SEQ ID NO: 22687 - RNA, 24 nt, Artificial Sequence
  Synthetic
uguuuacagagaaaggccuuguaa

SEQ ID NO: 22688 - RNA, 18 nt, Artificial Sequence
  Synthetic
ggguugcgucagcaaaca

SEQ ID NO: 22689 - RNA, 19 nt, Artificial Sequence
  Synthetic
gggguugcgucagcaaaca

SEQ ID NO: 22690 - RNA, 20 nt, Artificial Sequence
  Synthetic
ggggguugcgucagcaaaca

SEQ ID NO: 22691 - RNA, 21 nt, Artificial Sequence
  Synthetic
uggggguugcgucagcaaaca

SEQ ID NO: 22692 - RNA, 22 nt, Artificial Sequence
  Synthetic
guggggguugcgucagcaaaca

SEQ ID NO: 22693 - RNA, 23 nt, Artificial Sequence
  Synthetic
aguggggguugcgucagcaaaca

SEQ ID NO: 22694 - RNA, 24 nt, Artificial Sequence
  Synthetic
caguggggguugcgucagcaaaca

SEQ ID NO: 22695 - RNA, 18 nt, Artificial Sequence
  Synthetic
agcagcaggagggaaaca

SEQ ID NO: 22696 - RNA, 19 nt, Artificial Sequence
  Synthetic
cagcagcaggagggaaaca

SEQ ID NO: 22697 - RNA, 20 nt, Artificial Sequence
  Synthetic
acagcagcaggagggaaaca

SEQ ID NO: 22698 - RNA, 21 nt, Artificial Sequence
  Synthetic
uacagcagcaggagggaaaca

SEQ ID NO: 22699 - RNA, 22 nt, Artificial Sequence
  Synthetic
guacagcagcaggagggaaaca

SEQ ID NO: 22700 - RNA, 23 nt, Artificial Sequence
  Synthetic
gguacagcagcaggagggaaaca

SEQ ID NO: 22701 - RNA, 24 nt, Artificial Sequence
  Synthetic
ugguacagcagcaggagggaaaca

SEQ ID NO: 22702 - RNA, 18 nt, Artificial Sequence
  Synthetic
aguccagaagaaccaaca

SEQ ID NO: 22703 - RNA, 19 nt, Artificial Sequence
  Synthetic
uaguccagaagaaccaaca

SEQ ID NO: 22704 - RNA, 20 nt, Artificial Sequence
  Synthetic
auaguccagaagaaccaaca

SEQ ID NO: 22705 - RNA, 21 nt, Artificial Sequence
  Synthetic
gauaguccagaagaaccaaca

SEQ ID NO: 22706 - RNA, 22 nt, Artificial Sequence
  Synthetic
ugauaguccagaagaaccaaca

SEQ ID NO: 22707 - RNA, 23 nt, Artificial Sequence
  Synthetic
uugauaguccagaagaaccaaca

SEQ ID NO: 22708 - RNA, 24 nt, Artificial Sequence
  Synthetic
cuugauaguccagaagaaccaaca

SEQ ID NO: 22709 - RNA, 18 nt, Artificial Sequence
  Synthetic
ugaggauuuuugucaaca

SEQ ID NO: 22710 - RNA, 19 nt, Artificial Sequence
  Synthetic
gugaggauuuuugucaaca

SEQ ID NO: 22711 - RNA, 20 nt, Artificial Sequence
  Synthetic
ugugaggauuuuugucaaca

SEQ ID NO: 22712 - RNA, 21 nt, Artificial Sequence
  Synthetic
uugugaggauuuuugucaaca

SEQ ID NO: 22713 - RNA, 22 nt, Artificial Sequence
  Synthetic
auugugaggauuuuugucaaca

SEQ ID NO: 22714 - RNA, 23 nt, Artificial Sequence
  Synthetic
uauugugaggauuuuugucaaca

SEQ ID NO: 22715 - RNA, 24 nt, Artificial Sequence
  Synthetic
guauugugaggauuuuugucaaca

SEQ ID NO: 22716 - RNA, 18 nt, Artificial Sequence
  Synthetic
agcuuggaggcuugaaca

SEQ ID NO: 22717 - RNA, 19 nt, Artificial Sequence
  Synthetic
cagcuuggaggcuugaaca

SEQ ID NO: 22718 - RNA, 20 nt, Artificial Sequence
  Synthetic
acagcuuggaggcuugaaca

SEQ ID NO: 22719 - RNA, 21 nt, Artificial Sequence
  Synthetic
cacagcuuggaggcuugaaca

SEQ ID NO: 22720 - RNA, 22 nt, Artificial Sequence
  Synthetic
gcacagcuuggaggcuugaaca

SEQ ID NO: 22721 - RNA, 23 nt, Artificial Sequence
  Synthetic
ggcacagcuuggaggcuugaaca

SEQ ID NO: 22722 - RNA, 24 nt, Artificial Sequence
  Synthetic
aggcacagcuuggaggcuugaaca

SEQ ID NO: 22723 - RNA, 18 nt, Artificial Sequence
  Synthetic
guccaaggaauacuaaca

SEQ ID NO: 22724 - RNA, 19 nt, Artificial Sequence
  Synthetic
aguccaaggaauacuaaca

SEQ ID NO: 22725 - RNA, 20 nt, Artificial Sequence
  Synthetic
gaguccaaggaauacuaaca

SEQ ID NO: 22726 - RNA, 21 nt, Artificial Sequence
  Synthetic
ugaguccaaggaauacuaaca

SEQ ID NO: 22727 - RNA, 22 nt, Artificial Sequence
  Synthetic
augaguccaaggaauacuaaca

SEQ ID NO: 22728 - RNA, 23 nt, Artificial Sequence
  Synthetic
uaugaguccaaggaauacuaaca

SEQ ID NO: 22729 - RNA, 24 nt, Artificial Sequence
  Synthetic
uuaugaguccaaggaauacuaaca

SEQ ID NO: 22730 - RNA, 18 nt, Artificial Sequence
  Synthetic
aacacaccgccuguaaca

SEQ ID NO: 22731 - RNA, 19 nt, Artificial Sequence
  Synthetic
aaacacaccgccuguaaca

SEQ ID NO: 22732 - RNA, 20 nt, Artificial Sequence
  Synthetic
gaaacacaccgccuguaaca

SEQ ID NO: 22733 - RNA, 21 nt, Artificial Sequence
  Synthetic
agaaacacaccgccuguaaca

SEQ ID NO: 22734 - RNA, 22 nt, Artificial Sequence
  Synthetic
aagaaacacaccgccuguaaca

SEQ ID NO: 22735 - RNA, 23 nt, Artificial Sequence
  Synthetic
caagaaacacaccgccuguaaca

SEQ ID NO: 22736 - RNA, 24 nt, Artificial Sequence
  Synthetic
acaagaaacacaccgccuguaaca

SEQ ID NO: 22737 - RNA, 18 nt, Artificial Sequence
  Synthetic
uaaaacgccgcagacaca

SEQ ID NO: 22738 - RNA, 19 nt, Artificial Sequence
  Synthetic
auaaaacgccgcagacaca

SEQ ID NO: 22739 - RNA, 20 nt, Artificial Sequence
  Synthetic
gauaaaacgccgcagacaca

SEQ ID NO: 22740 - RNA, 21 nt, Artificial Sequence
  Synthetic
ugauaaaacgccgcagacaca

SEQ ID NO: 22741 - RNA, 22 nt, Artificial Sequence
  Synthetic
augauaaaacgccgcagacaca

SEQ ID NO: 22742 - RNA, 23 nt, Artificial Sequence
  Synthetic
gaugauaaaacgccgcagacaca

SEQ ID NO: 22743 - RNA, 24 nt, Artificial Sequence
  Synthetic
agaugauaaaacgccgcagacaca

SEQ ID NO: 22744 - RNA, 18 nt, Artificial Sequence
  Synthetic
uucaaauggaugcccaca

SEQ ID NO: 22745 - RNA, 19 nt, Artificial Sequence
  Synthetic
guucaaauggaugcccaca

SEQ ID NO: 22746 - RNA, 20 nt, Artificial Sequence
  Synthetic
uguucaaauggaugcccaca

SEQ ID NO: 22747 - RNA, 21 nt, Artificial Sequence
  Synthetic
guguucaaauggaugcccaca

SEQ ID NO: 22748 - RNA, 22 nt, Artificial Sequence
  Synthetic
uguguucaaauggaugcccaca

SEQ ID NO: 22749 - RNA, 23 nt, Artificial Sequence
  Synthetic
cuguguucaaauggaugcccaca

SEQ ID NO: 22750 - RNA, 24 nt, Artificial Sequence
  Synthetic
gcuguguucaaauggaugcccaca

SEQ ID NO: 22751 - RNA, 18 nt, Artificial Sequence
  Synthetic
ggcagaugagaaggcaca

SEQ ID NO: 22752 - RNA, 19 nt, Artificial Sequence
  Synthetic
cggcagaugagaaggcaca

SEQ ID NO: 22753 - RNA, 20 nt, Artificial Sequence
  Synthetic
ccggcagaugagaaggcaca

SEQ ID NO: 22754 - RNA, 21 nt, Artificial Sequence
  Synthetic
gccggcagaugagaaggcaca

SEQ ID NO: 22755 - RNA, 22 nt, Artificial Sequence
  Synthetic
ggccggcagaugagaaggcaca

SEQ ID NO: 22756 - RNA, 23 nt, Artificial Sequence
  Synthetic
gggccggcagaugagaaggcaca

SEQ ID NO: 22757 - RNA, 24 nt, Artificial Sequence
  Synthetic
cgggccggcagaugagaaggcaca

SEQ ID NO: 22758 - RNA, 18 nt, Artificial Sequence
  Synthetic
cccagaggauugggcaca

SEQ ID NO: 22759 - RNA, 19 nt, Artificial Sequence
  Synthetic
ucccagaggauugggcaca

SEQ ID NO: 22760 - RNA, 20 nt, Artificial Sequence
  Synthetic
aucccagaggauugggcaca

SEQ ID NO: 22761 - RNA, 21 nt, Artificial Sequence
  Synthetic
aaucccagaggauugggcaca

SEQ ID NO: 22762 - RNA, 22 nt, Artificial Sequence
  Synthetic
gaaucccagaggauugggcaca

SEQ ID NO: 22763 - RNA, 23 nt, Artificial Sequence
  Synthetic
agaaucccagaggauugggcaca

SEQ ID NO: 22764 - RNA, 24 nt, Artificial Sequence
  Synthetic
aagaaucccagaggauugggcaca

SEQ ID NO: 22765 - RNA, 18 nt, Artificial Sequence
  Synthetic
auaacuaaaagccagaca

SEQ ID NO: 22766 - RNA, 19 nt, Artificial Sequence
  Synthetic
uauaacuaaaagccagaca

SEQ ID NO: 22767 - RNA, 20 nt, Artificial Sequence
  Synthetic
auauaacuaaaagccagaca

SEQ ID NO: 22768 - RNA, 21 nt, Artificial Sequence
  Synthetic
cauauaacuaaaagccagaca

SEQ ID NO: 22769 - RNA, 22 nt, Artificial Sequence
  Synthetic
ccauauaacuaaaagccagaca

SEQ ID NO: 22770 - RNA, 23 nt, Artificial Sequence
  Synthetic
uccauauaacuaaaagccagaca

SEQ ID NO: 22771 - RNA, 24 nt, Artificial Sequence
  Synthetic
auccauauaacuaaaagccagaca

SEQ ID NO: 22772 - RNA, 18 nt, Artificial Sequence
  Synthetic
gccgacgggacguagaca

SEQ ID NO: 22773 - RNA, 19 nt, Artificial Sequence
  Synthetic
cgccgacgggacguagaca

SEQ ID NO: 22774 - RNA, 20 nt, Artificial Sequence
  Synthetic
gcgccgacgggacguagaca

SEQ ID NO: 22775 - RNA, 18 nt, Artificial Sequence
  Synthetic
uacuuccgagaaaggaca

SEQ ID NO: 22776 - RNA, 19 nt, Artificial Sequence
  Synthetic
guacuuccgagaaaggaca

SEQ ID NO: 22777 - RNA, 20 nt, Artificial Sequence
  Synthetic
uguacuuccgagaaaggaca

SEQ ID NO: 22778 - RNA, 21 nt, Artificial Sequence
  Synthetic
guguacuuccgagaaaggaca

SEQ ID NO: 22779 - RNA, 22 nt, Artificial Sequence
  Synthetic
gguguacuuccgagaaaggaca

SEQ ID NO: 22780 - RNA, 23 nt, Artificial Sequence
  Synthetic
agguguacuuccgagaaaggaca

SEQ ID NO: 22781 - RNA, 24 nt, Artificial Sequence
  Synthetic
gagguguacuuccgagaaaggaca

SEQ ID NO: 22782 - RNA, 18 nt, Artificial Sequence
  Synthetic
cgaauuuuggccaggaca

SEQ ID NO: 22783 - RNA, 19 nt, Artificial Sequence
  Synthetic
gcgaauuuuggccaggaca

SEQ ID NO: 22784 - RNA, 20 nt, Artificial Sequence
  Synthetic
ugcgaauuuuggccaggaca

SEQ ID NO: 22785 - RNA, 21 nt, Artificial Sequence
  Synthetic
cugcgaauuuuggccaggaca

SEQ ID NO: 22786 - RNA, 22 nt, Artificial Sequence
  Synthetic
acugcgaauuuuggccaggaca

SEQ ID NO: 22787 - RNA, 23 nt, Artificial Sequence
  Synthetic
gacugcgaauuuuggccaggaca

SEQ ID NO: 22788 - RNA, 24 nt, Artificial Sequence
  Synthetic
ggacugcgaauuuuggccaggaca

SEQ ID NO: 22789 - RNA, 18 nt, Artificial Sequence
  Synthetic
uccuggaaguagaggaca

SEQ ID NO: 22790 - RNA, 19 nt, Artificial Sequence
  Synthetic
auccuggaaguagaggaca

SEQ ID NO: 22791 - RNA, 20 nt, Artificial Sequence
  Synthetic
gauccuggaaguagaggaca

SEQ ID NO: 22792 - RNA, 21 nt, Artificial Sequence
  Synthetic
agauccuggaaguagaggaca

SEQ ID NO: 22793 - RNA, 22 nt, Artificial Sequence
  Synthetic
uagauccuggaaguagaggaca

SEQ ID NO: 22794 - RNA, 23 nt, Artificial Sequence
  Synthetic
guagauccuggaaguagaggaca

SEQ ID NO: 22795 - RNA, 24 nt, Artificial Sequence
  Synthetic
uguagauccuggaaguagaggaca

SEQ ID NO: 22796 - RNA, 18 nt, Artificial Sequence
  Synthetic
ucgaguaggucccggaca

SEQ ID NO: 22797 - RNA, 19 nt, Artificial Sequence
  Synthetic
gucgaguaggucccggaca

SEQ ID NO: 22798 - RNA, 20 nt, Artificial Sequence
  Synthetic
ugucgaguaggucccggaca

SEQ ID NO: 22799 - RNA, 21 nt, Artificial Sequence
  Synthetic
gugucgaguaggucccggaca

SEQ ID NO: 22800 - RNA, 22 nt, Artificial Sequence
  Synthetic
ggugucgaguaggucccggaca

SEQ ID NO: 22801 - RNA, 23 nt, Artificial Sequence
  Synthetic
cggugucgaguaggucccggaca

SEQ ID NO: 22802 - RNA, 24 nt, Artificial Sequence
  Synthetic
gcggugucgaguaggucccggaca

SEQ ID NO: 22803 - RNA, 18 nt, Artificial Sequence
  Synthetic
  misc_feature (6)..(6): n is a, c, g, or u
guucanguauuguuuaca

SEQ ID NO: 22804 - RNA, 19 nt, Artificial Sequence
  Synthetic
  misc_feature (7)..(7): n is a, c, g, or u
gguucanguauuguuuaca

SEQ ID NO: 22805 - RNA, 20 nt, Artificial Sequence
  Synthetic
  misc_feature (8)..(8): n is a, c, g, or u
agguucanguauuguuuaca

SEQ ID NO: 22806 - RNA, 21 nt, Artificial Sequence
  Synthetic
  misc_feature (9)..(9): n is a, c, g, or u
aagguucanguauuguuuaca

SEQ ID NO: 22807 - RNA, 22 nt, Artificial Sequence
  Synthetic
  misc_feature (10)..(10): n is a, c, g, or u
aaagguucanguauuguuuaca

SEQ ID NO: 22808 - RNA, 23 nt, Artificial Sequence
  Synthetic
  misc_feature (11)..(11): n is a, c, g, or u
uaaagguucanguauuguuuaca

SEQ ID NO: 22809 - RNA, 24 nt, Artificial Sequence
  Synthetic
  misc_feature (12)..(12): n is a, c, g, or u
guaaagguucanguauuguuuaca

SEQ ID NO: 22810 - RNA, 18 nt, Artificial Sequence
  Synthetic
gauaguccagaagaacca

SEQ ID NO: 22811 - RNA, 19 nt, Artificial Sequence
  Synthetic
ugauaguccagaagaacca

SEQ ID NO: 22812 - RNA, 20 nt, Artificial Sequence
  Synthetic
uugauaguccagaagaacca

SEQ ID NO: 22813 - RNA, 21 nt, Artificial Sequence
  Synthetic
cuugauaguccagaagaacca

SEQ ID NO: 22814 - RNA, 22 nt, Artificial Sequence
  Synthetic
ccuugauaguccagaagaacca

SEQ ID NO: 22815 - RNA, 23 nt, Artificial Sequence
  Synthetic
accuugauaguccagaagaacca

SEQ ID NO: 22816 - RNA, 24 nt, Artificial Sequence
  Synthetic
uaccuugauaguccagaagaacca

SEQ ID NO: 22817 - RNA, 18 nt, Artificial Sequence
  Synthetic
aaaagaaggaguuaacca

SEQ ID NO: 22818 - RNA, 19 nt, Artificial Sequence
  Synthetic
gaaaagaaggaguuaacca

SEQ ID NO: 22819 - RNA, 20 nt, Artificial Sequence
  Synthetic
ggaaaagaaggaguuaacca

SEQ ID NO: 22820 - RNA, 21 nt, Artificial Sequence
  Synthetic
aggaaaagaaggaguuaacca

SEQ ID NO: 22821 - RNA, 22 nt, Artificial Sequence
  Synthetic
caggaaaagaaggaguuaacca

SEQ ID NO: 22822 - RNA, 23 nt, Artificial Sequence
  Synthetic
ucaggaaaagaaggaguuaacca

SEQ ID NO: 22823 - RNA, 24 nt, Artificial Sequence
  Synthetic
gucaggaaaagaaggaguuaacca

SEQ ID NO: 22824 - RNA, 18 nt, Artificial Sequence
  Synthetic
ucugaacuggagccacca

SEQ ID NO: 22825 - RNA, 19 nt, Artificial Sequence
  Synthetic
uucugaacuggagccacca

SEQ ID NO: 22826 - RNA, 20 nt, Artificial Sequence
  Synthetic
uuucugaacuggagccacca

SEQ ID NO: 22827 - RNA, 21 nt, Artificial Sequence
  Synthetic
guuucugaacuggagccacca

SEQ ID NO: 22828 - RNA, 22 nt, Artificial Sequence
  Synthetic
uguuucugaacuggagccacca

SEQ ID NO: 22829 - RNA, 23 nt, Artificial Sequence
  Synthetic
guguuucugaacuggagccacca

SEQ ID NO: 22830 - RNA, 24 nt, Artificial Sequence
  Synthetic
uguguuucugaacuggagccacca

SEQ ID NO: 22831 - RNA, 18 nt, Artificial Sequence
  Synthetic
ggaaagcccuacgcacca

SEQ ID NO: 22832 - RNA, 19 nt, Artificial Sequence
  Synthetic
gggaaagcccuacgcacca

SEQ ID NO: 22833 - RNA, 20 nt, Artificial Sequence
  Synthetic
ggggaaagcccuacgcacca

SEQ ID NO: 22834 - RNA, 21 nt, Artificial Sequence
  Synthetic
gggggaaagcccuacgcacca

SEQ ID NO: 22835 - RNA, 22 nt, Artificial Sequence
  Synthetic
ugggggaaagcccuacgcacca

SEQ ID NO: 22836 - RNA, 23 nt, Artificial Sequence
  Synthetic
gugggggaaagcccuacgcacca

SEQ ID NO: 22837 - RNA, 24 nt, Artificial Sequence
  Synthetic
agugggggaaagcccuacgcacca

SEQ ID NO: 22838 - RNA, 18 nt, Artificial Sequence
  Synthetic
cagagccccaagcgacca

SEQ ID NO: 22839 - RNA, 19 nt, Artificial Sequence
  Synthetic
gcagagccccaagcgacca

SEQ ID NO: 22840 - RNA, 20 nt, Artificial Sequence
  Synthetic
ggcagagccccaagcgacca

SEQ ID NO: 22841 - RNA, 21 nt, Artificial Sequence
  Synthetic
cggcagagccccaagcgacca

SEQ ID NO: 22842 - RNA, 22 nt, Artificial Sequence
  Synthetic
gcggcagagccccaagcgacca

SEQ ID NO: 22843 - RNA, 23 nt, Artificial Sequence
  Synthetic
ggcggcagagccccaagcgacca

SEQ ID NO: 22844 - RNA, 24 nt, Artificial Sequence
  Synthetic
gggcggcagagccccaagcgacca

SEQ ID NO: 22845 - RNA, 18 nt, Artificial Sequence
  Synthetic
uaaauuauugcccaccca

SEQ ID NO: 22846 - RNA, 19 nt, Artificial Sequence
  Synthetic
cuaaauuauugcccaccca

SEQ ID NO: 22847 - RNA, 20 nt, Artificial Sequence
  Synthetic
ucuaaauuauugcccaccca

SEQ ID NO: 22848 - RNA, 21 nt, Artificial Sequence
  Synthetic
cucuaaauuauugcccaccca

SEQ ID NO: 22849 - RNA, 22 nt, Artificial Sequence
  Synthetic
ccucuaaauuauugcccaccca

SEQ ID NO: 22850 - RNA, 23 nt, Artificial Sequence
  Synthetic
uccucuaaauuauugcccaccca

SEQ ID NO: 22851 - RNA, 24 nt, Artificial Sequence
  Synthetic
auccucuaaauuauugcccaccca

SEQ ID NO: 22852 - RNA, 18 nt, Artificial Sequence
  Synthetic
ccugagggcuccacccca

SEQ ID NO: 22853 - RNA, 19 nt, Artificial Sequence
  Synthetic
gccugagggcuccacccca

SEQ ID NO: 22854 - RNA, 20 nt, Artificial Sequence
  Synthetic
ugccugagggcuccacccca

SEQ ID NO: 22855 - RNA, 21 nt, Artificial Sequence
  Synthetic
gugccugagggcuccacccca

SEQ ID NO: 22856 - RNA, 22 nt, Artificial Sequence
  Synthetic
ugugccugagggcuccacccca

SEQ ID NO: 22857 - RNA, 23 nt, Artificial Sequence
  Synthetic
cugugccugagggcuccacccca

SEQ ID NO: 22858 - RNA, 24 nt, Artificial Sequence
  Synthetic
ccugugccugagggcuccacccca

SEQ ID NO: 22859 - RNA, 18 nt, Artificial Sequence
  Synthetic
  misc_feature (2)..(2): n is a, c, g, or u
gngggcggcagagcccca

SEQ ID NO: 22860 - RNA, 19 nt, Artificial Sequence
  Synthetic
  misc_feature (3)..(3): n is a, c, g, or u
agngggcggcagagcccca

SEQ ID NO: 22861 - RNA, 20 nt, Artificial Sequence
  Synthetic
  misc_feature (4)..(4): n is a, c, g, or u
aagngggcggcagagcccca

SEQ ID NO: 22862 - RNA, 21 nt, Artificial Sequence
  Synthetic
  misc_feature (5)..(5): n is a, c, g, or u
gaagngggcggcagagcccca

SEQ ID NO: 22863 - RNA, 22 nt, Artificial Sequence
  Synthetic
  misc_feature (6)..(6): n is a, c, g, or u
agaagngggcggcagagcccca

SEQ ID NO: 22864 - RNA, 23 nt, Artificial Sequence
  Synthetic
  misc_feature (7)..(7): n is a, c, g, or u
gagaagngggcggcagagcccca

SEQ ID NO: 22865 - RNA, 24 nt, Artificial Sequence
  Synthetic
  misc_feature (8)..(8): n is a, c, g, or u
ggagaagngggcggcagagcccca

SEQ ID NO: 22866 - RNA, 18 nt, Artificial Sequence
  Synthetic
aaggggcugcaaagccca

SEQ ID NO: 22867 - RNA, 19 nt, Artificial Sequence
  Synthetic
aaaggggcugcaaagccca

SEQ ID NO: 22868 - RNA, 20 nt, Artificial Sequence
  Synthetic
aaaaggggcugcaaagccca

SEQ ID NO: 22869 - RNA, 21 nt, Artificial Sequence
  Synthetic
uaaaaggggcugcaaagccca

SEQ ID NO: 22870 - RNA, 22 nt, Artificial Sequence
  Synthetic
guaaaaggggcugcaaagccca

SEQ ID NO: 22871 - RNA, 23 nt, Artificial Sequence
  Synthetic
aguaaaaggggcugcaaagccca

SEQ ID NO: 22872 - RNA, 24 nt, Artificial Sequence
  Synthetic
gaguaaaaggggcugcaaagccca

SEQ ID NO: 22873 - RNA, 18 nt, Artificial Sequence
  Synthetic
ccucuaaauuauugccca

SEQ ID NO: 22874 - RNA, 19 nt, Artificial Sequence
  Synthetic
uccucuaaauuauugccca

SEQ ID NO: 22875 - RNA, 20 nt, Artificial Sequence
  Synthetic
auccucuaaauuauugccca

SEQ ID NO: 22876 - RNA, 21 nt, Artificial Sequence
  Synthetic
gauccucuaaauuauugccca

SEQ ID NO: 22877 - RNA, 22 nt, Artificial Sequence
  Synthetic
ggauccucuaaauuauugccca

SEQ ID NO: 22878 - RNA, 23 nt, Artificial Sequence
  Synthetic
aggauccucuaaauuauugccca

SEQ ID NO: 22879 - RNA, 24 nt, Artificial Sequence
  Synthetic
caggauccucuaaauuauugccca

SEQ ID NO: 22880 - RNA, 18 nt, Artificial Sequence
  Synthetic
guuuguguugaaguccca

SEQ ID NO: 22881 - RNA, 19 nt, Artificial Sequence
  Synthetic
uguuuguguugaaguccca

SEQ ID NO: 22882 - RNA, 20 nt, Artificial Sequence
  Synthetic
uuguuuguguugaaguccca

SEQ ID NO: 22883 - RNA, 21 nt, Artificial Sequence
  Synthetic
cuuguuuguguugaaguccca

SEQ ID NO: 22884 - RNA, 22 nt, Artificial Sequence
  Synthetic
ccuuguuuguguugaaguccca

SEQ ID NO: 22885 - RNA, 23 nt, Artificial Sequence
  Synthetic
uccuuguuuguguugaaguccca

SEQ ID NO: 22886 - RNA, 24 nt, Artificial Sequence
  Synthetic
guccuuguuuguguugaaguccca

SEQ ID NO: 22887 - RNA, 18 nt, Artificial Sequence
  Synthetic
guccaugccccaaagcca

SEQ ID NO: 22888 - RNA, 19 nt, Artificial Sequence
  Synthetic
uguccaugccccaaagcca

SEQ ID NO: 22889 - RNA, 20 nt, Artificial Sequence
  Synthetic
auguccaugccccaaagcca

SEQ ID NO: 22890 - RNA, 21 nt, Artificial Sequence
  Synthetic
aauguccaugccccaaagcca

SEQ ID NO: 22891 - RNA, 22 nt, Artificial Sequence
  Synthetic
caauguccaugccccaaagcca

SEQ ID NO: 22892 - RNA, 23 nt, Artificial Sequence
  Synthetic
ucaauguccaugccccaaagcca

SEQ ID NO: 22893 - RNA, 24 nt, Artificial Sequence
  Synthetic
gucaauguccaugccccaaagcca

SEQ ID NO: 22894 - RNA, 18 nt, Artificial Sequence
  Synthetic
aucgccaagccccagcca

SEQ ID NO: 22895 - RNA, 19 nt, Artificial Sequence
  Synthetic
aaucgccaagccccagcca

SEQ ID NO: 22896 - RNA, 20 nt, Artificial Sequence
  Synthetic
caaucgccaagccccagcca

SEQ ID NO: 22897 - RNA, 21 nt, Artificial Sequence
  Synthetic
ccaaucgccaagccccagcca

SEQ ID NO: 22898 - RNA, 22 nt, Artificial Sequence
  Synthetic
gccaaucgccaagccccagcca

SEQ ID NO: 22899 - RNA, 23 nt, Artificial Sequence
  Synthetic
ggccaaucgccaagccccagcca

SEQ ID NO: 22900 - RNA, 24 nt, Artificial Sequence
  Synthetic
uggccaaucgccaagccccagcca

SEQ ID NO: 22901 - RNA, 18 nt, Artificial Sequence
  Synthetic
  misc_feature (7)..(7): n is a, c, g, or u
agcacanccuagcagcca

SEQ ID NO: 22902 - RNA, 19 nt, Artificial Sequence
  Synthetic
  misc_feature (8)..(8): n is a, c, g, or u
cagcacanccuagcagcca

SEQ ID NO: 22903 - RNA, 20 nt, Artificial Sequence
  Synthetic
  misc_feature (9)..(9): n is a, c, g, or u
gcagcacanccuagcagcca

SEQ ID NO: 22904 - RNA, 21 nt, Artificial Sequence
  Synthetic
  misc_feature (10)..(10): n is a, c, g, or u
ggcagcacanccuagcagcca

SEQ ID NO: 22905 - RNA, 22 nt, Artificial Sequence
  Synthetic
  misc_feature (11)..(11): n is a, c, g, or u
uggcagcacanccuagcagcca

SEQ ID NO: 22906 - RNA, 23 nt, Artificial Sequence
  Synthetic
  misc_feature (12)..(12): n is a, c, g, or u
uuggcagcacanccuagcagcca

SEQ ID NO: 22907 - RNA, 24 nt, Artificial Sequence
  Synthetic
  misc_feature (13)..(13): n is a, c, g, or u
guuggcagcacanccuagcagcca

SEQ ID NO: 22908 - RNA, 18 nt, Artificial Sequence
  Synthetic
ggaucggcagaggagcca

SEQ ID NO: 22909 - RNA, 19 nt, Artificial Sequence
  Synthetic
uggaucggcagaggagcca

SEQ ID NO: 22910 - RNA, 20 nt, Artificial Sequence
  Synthetic
auggaucggcagaggagcca

SEQ ID NO: 22911 - RNA, 21 nt, Artificial Sequence
  Synthetic
uauggaucggcagaggagcca

SEQ ID NO: 22912 - RNA, 22 nt, Artificial Sequence
  Synthetic
guauggaucggcagaggagcca

SEQ ID NO: 22913 - RNA, 23 nt, Artificial Sequence
  Synthetic
aguauggaucggcagaggagcca

SEQ ID NO: 22914 - RNA, 24 nt, Artificial Sequence
  Synthetic
caguauggaucggcagaggagcca

SEQ ID NO: 22915 - RNA, 18 nt, Artificial Sequence
  Synthetic
cacuaguaaacugagcca

SEQ ID NO: 22916 - RNA, 19 nt, Artificial Sequence
  Synthetic
gcacuaguaaacugagcca

SEQ ID NO: 22917 - RNA, 20 nt, Artificial Sequence
  Synthetic
ugcacuaguaaacugagcca

SEQ ID NO: 22918 - RNA, 21 nt, Artificial Sequence
  Synthetic
uugcacuaguaaacugagcca

SEQ ID NO: 22919 - RNA, 22 nt, Artificial Sequence
  Synthetic
auugcacuaguaaacugagcca

SEQ ID NO: 22920 - RNA, 23 nt, Artificial Sequence
  Synthetic
aauugcacuaguaaacugagcca

SEQ ID NO: 22921 - RNA, 24 nt, Artificial Sequence
  Synthetic
aaauugcacuaguaaacugagcca

SEQ ID NO: 22922 - RNA, 18 nt, Artificial Sequence
  Synthetic
  misc_feature (10)..(10): n is a, c, g, or u
ccaauaccanaucaucca

SEQ ID NO: 22923 - RNA, 19 nt, Artificial Sequence
  Synthetic
  misc_feature (11)..(11): n is a, c, g, or u
cccaauaccanaucaucca

SEQ ID NO: 22924 - RNA, 20 nt, Artificial Sequence
  Synthetic
  misc_feature (12)..(12): n is a, c, g, or u
ccccaauaccanaucaucca

SEQ ID NO: 22925 - RNA, 21 nt, Artificial Sequence
  Synthetic
  misc_feature (13)..(13): n is a, c, g, or u
cccccaauaccanaucaucca

SEQ ID NO: 22926 - RNA, 22 nt, Artificial Sequence
  Synthetic
  misc_feature (14)..(14): n is a, c, g, or u
gcccccaauaccanaucaucca

SEQ ID NO: 22927 - RNA, 23 nt, Artificial Sequence
  Synthetic
  misc_feature (15)..(15): n is a, c, g, or u
ggcccccaauaccanaucaucca

SEQ ID NO: 22928 - RNA, 24 nt, Artificial Sequence
  Synthetic
  misc_feature (16)..(16): n is a, c, g, or u
uggcccccaauaccanaucaucca

SEQ ID NO: 22929 - RNA, 18 nt, Artificial Sequence
  Synthetic
cgucccgcgcaggaucca

SEQ ID NO: 22930 - RNA, 19 nt, Artificial Sequence
  Synthetic
acgucccgcgcaggaucca

SEQ ID NO: 22931 - RNA, 20 nt, Artificial Sequence
  Synthetic
gacgucccgcgcaggaucca

SEQ ID NO: 22932 - RNA, 18 nt, Artificial Sequence
  Synthetic
  misc_feature (2)..(2): n is a, c, g, or u
gnuuaauaccuuuaucca

SEQ ID NO: 22933 - RNA, 19 nt, Artificial Sequence
  Synthetic
  misc_feature (3)..(3): n is a, c, g, or u
ggnuuaauaccuuuaucca

SEQ ID NO: 22934 - RNA, 20 nt, Artificial Sequence
  Synthetic
  misc_feature (4)..(4): n is a, c, g, or u
aggnuuaauaccuuuaucca

SEQ ID NO: 22935 - RNA, 21 nt, Artificial Sequence
  Synthetic
  misc_feature (5)..(5): n is a, c, g, or u
aaggnuuaauaccuuuaucca

SEQ ID NO: 22936 - RNA, 22 nt, Artificial Sequence
  Synthetic
  misc_feature (6)..(6): n is a, c, g, or u
uaaggnuuaauaccuuuaucca

SEQ ID NO: 22937 - RNA, 23 nt, Artificial Sequence
  Synthetic
  misc_feature (7)..(7): n is a, c, g, or u
guaaggnuuaauaccuuuaucca

SEQ ID NO: 22938 - RNA, 24 nt, Artificial Sequence
  Synthetic
  misc_feature (8)..(8): n is a, c, g, or u
aguaaggnuuaauaccuuuaucca

SEQ ID NO: 22939 - RNA, 18 nt, Artificial Sequence
  Synthetic
aaaaugagaguaacucca

SEQ ID NO: 22940 - RNA, 19 nt, Artificial Sequence
  Synthetic
aaaaaugagaguaacucca

SEQ ID NO: 22941 - RNA, 20 nt, Artificial Sequence
  Synthetic
caaaaaugagaguaacucca

SEQ ID NO: 22942 - RNA, 21 nt, Artificial Sequence
  Synthetic
gcaaaaaugagaguaacucca

SEQ ID NO: 22943 - RNA, 22 nt, Artificial Sequence
  Synthetic
ggcaaaaaugagaguaacucca

SEQ ID NO: 22944 - RNA, 23 nt, Artificial Sequence
  Synthetic
aggcaaaaaugagaguaacucca

SEQ ID NO: 22945 - RNA, 24 nt, Artificial Sequence
  Synthetic
aaggcaaaaaugagaguaacucca

SEQ ID NO: 22946 - RNA, 18 nt, Artificial Sequence
  Synthetic
  misc_feature (6)..(6): n is a, c, g, or u
gugcgnauccacacucca

SEQ ID NO: 22947 - RNA, 19 nt, Artificial Sequence
  Synthetic
  misc_feature (7)..(7): n is a, c, g, or u
agugcgnauccacacucca

SEQ ID NO: 22948 - RNA, 20 nt, Artificial Sequence
  Synthetic
  misc_feature (8)..(8): n is a, c, g, or u
gagugcgnauccacacucca

SEQ ID NO: 22949 - RNA, 21 nt, Artificial Sequence
  Synthetic
  misc_feature (9)..(9): n is a, c, g, or u
ggagugcgnauccacacucca

SEQ ID NO: 22950 - RNA, 22 nt, Artificial Sequence
  Synthetic
  misc_feature (10)..(10): n is a, c, g, or u
uggagugcgnauccacacucca

SEQ ID NO: 22951 - RNA, 23 nt, Artificial Sequence
  Synthetic
  misc_feature (11)..(11): n is a, c, g, or u
guggagugcgnauccacacucca

SEQ ID NO: 22952 - RNA, 24 nt, Artificial Sequence
  Synthetic
  misc_feature (12)..(12): n is a, c, g, or u
gguggagugcgnauccacacucca

SEQ ID NO: 22953 - RNA, 18 nt, Artificial Sequence
  Synthetic
cguucacgguggucucca

SEQ ID NO: 22954 - RNA, 19 nt, Artificial Sequence
  Synthetic
gcguucacgguggucucca

SEQ ID NO: 22955 - RNA, 20 nt, Artificial Sequence
  Synthetic
ggcguucacgguggucucca

SEQ ID NO: 22956 - RNA, 21 nt, Artificial Sequence
  Synthetic
gggcguucacgguggucucca

SEQ ID NO: 22957 - RNA, 22 nt, Artificial Sequence
  Synthetic
ggggcguucacgguggucucca

SEQ ID NO: 22958 - RNA, 23 nt, Artificial Sequence
  Synthetic
aggggcguucacgguggucucca

SEQ ID NO: 22959 - RNA, 24 nt, Artificial Sequence
  Synthetic
  misc_feature (1)..(1): n is a, c, g, or u
naggggcguucacgguggucucca

SEQ ID NO: 22960 - RNA, 18 nt, Artificial Sequence
  Synthetic
acauaccuugauagucca

SEQ ID NO: 22961 - RNA, 19 nt, Artificial Sequence
  Synthetic
aacauaccuugauagucca

SEQ ID NO: 22962 - RNA, 20 nt, Artificial Sequence
  Synthetic
caacauaccuugauagucca

SEQ ID NO: 22963 - RNA, 21 nt, Artificial Sequence
  Synthetic
gcaacauaccuugauagucca

SEQ ID NO: 22964 - RNA, 22 nt, Artificial Sequence
  Synthetic
ggcaacauaccuugauagucca

SEQ ID NO: 22965 - RNA, 23 nt, Artificial Sequence
  Synthetic
gggcaacauaccuugauagucca

SEQ ID NO: 22966 - RNA, 24 nt, Artificial Sequence
  Synthetic
cgggcaacauaccuugauagucca

SEQ ID NO: 22967 - RNA, 18 nt, Artificial Sequence
  Synthetic
  misc_feature (12)..(12): n is a, c, g, or u
uuugguggucunuaagca

SEQ ID NO: 22968 - RNA, 19 nt, Artificial Sequence
  Synthetic
  misc_feature (13)..(13): n is a, c, g, or u
auuugguggucunuaagca

SEQ ID NO: 22969 - RNA, 20 nt, Artificial Sequence
  Synthetic
  misc_feature (14)..(14): n is a, c, g, or u
cauuugguggucunuaagca

SEQ ID NO: 22970 - RNA, 21 nt, Artificial Sequence
  Synthetic
  misc_feature (15)..(15): n is a, c, g, or u
gcauuugguggucunuaagca

SEQ ID NO: 22971 - RNA, 22 nt, Artificial Sequence
  Synthetic
  misc_feature (16)..(16): n is a, c, g, or u
ggcauuugguggucunuaagca

SEQ ID NO: 22972 - RNA, 23 nt, Artificial Sequence
  Synthetic
  misc_feature (17)..(17): n is a, c, g, or u
gggcauuugguggucunuaagca

SEQ ID NO: 22973 - RNA, 24 nt, Artificial Sequence
  Synthetic
  misc_feature (18)..(18): n is a, c, g, or u
ggggcauuugguggucunuaagca

SEQ ID NO: 22974 - RNA, 18 nt, Artificial Sequence
  Synthetic
cgaagguuugguacagca

SEQ ID NO: 22975 - RNA, 19 nt, Artificial Sequence
  Synthetic
ccgaagguuugguacagca

SEQ ID NO: 22976 - RNA, 20 nt, Artificial Sequence
  Synthetic
uccgaagguuugguacagca

SEQ ID NO: 22977 - RNA, 21 nt, Artificial Sequence
  Synthetic
guccgaagguuugguacagca

SEQ ID NO: 22978 - RNA, 22 nt, Artificial Sequence
  Synthetic
cguccgaagguuugguacagca

SEQ ID NO: 22979 - RNA, 23 nt, Artificial Sequence
  Synthetic
ccguccgaagguuugguacagca

SEQ ID NO: 22980 - RNA, 24 nt, Artificial Sequence
  Synthetic
uccguccgaagguuugguacagca

SEQ ID NO: 22981 - RNA, 18 nt, Artificial Sequence
  Synthetic
gaacuggagccaccagca

SEQ ID NO: 22982 - RNA, 19 nt, Artificial Sequence
  Synthetic
ugaacuggagccaccagca

SEQ ID NO: 22983 - RNA, 20 nt, Artificial Sequence
  Synthetic
cugaacuggagccaccagca

SEQ ID NO: 22984 - RNA, 21 nt, Artificial Sequence
  Synthetic
ucugaacuggagccaccagca

SEQ ID NO: 22985 - RNA, 22 nt, Artificial Sequence
  Synthetic
uucugaacuggagccaccagca

SEQ ID NO: 22986 - RNA, 23 nt, Artificial Sequence
  Synthetic
uuucugaacuggagccaccagca

SEQ ID NO: 22987 - RNA, 24 nt, Artificial Sequence
  Synthetic
guuucugaacuggagccaccagca

SEQ ID NO: 22988 - RNA, 18 nt, Artificial Sequence
  Synthetic
agguuugguacagcagca

SEQ ID NO: 22989 - RNA, 19 nt, Artificial Sequence
  Synthetic
aagguuugguacagcagca

SEQ ID NO: 22990 - RNA, 20 nt, Artificial Sequence
  Synthetic
gaagguuugguacagcagca

SEQ ID NO: 22991 - RNA, 18 nt, Artificial Sequence
  Synthetic
ccuggccguugccgagca

SEQ ID NO: 22992 - RNA, 19 nt, Artificial Sequence
  Synthetic
gccuggccguugccgagca

SEQ ID NO: 22993 - RNA, 20 nt, Artificial Sequence
  Synthetic
ggccuggccguugccgagca

SEQ ID NO: 22994 - RNA, 21 nt, Artificial Sequence
  Synthetic
aggccuggccguugccgagca

SEQ ID NO: 22995 - RNA, 22 nt, Artificial Sequence
  Synthetic
aaggccuggccguugccgagca

SEQ ID NO: 22996 - RNA, 23 nt, Artificial Sequence
  Synthetic
aaaggccuggccguugccgagca

SEQ ID NO: 22997 - RNA, 24 nt, Artificial Sequence
  Synthetic
caaaggccuggccguugccgagca

SEQ ID NO: 22998 - RNA, 18 nt, Artificial Sequence
  Synthetic
agaagaugaggcauagca

SEQ ID NO: 22999 - RNA, 19 nt, Artificial Sequence
  Synthetic
aagaagaugaggcauagca

SEQ ID NO: 23000 - RNA, 20 nt, Artificial Sequence
  Synthetic
caagaagaugaggcauagca

SEQ ID NO: 23001 - RNA, 21 nt, Artificial Sequence
  Synthetic
acaagaagaugaggcauagca

SEQ ID NO: 23002 - RNA, 22 nt, Artificial Sequence
  Synthetic
aacaagaagaugaggcauagca

SEQ ID NO: 23003 - RNA, 23 nt, Artificial Sequence
  Synthetic
caacaagaagaugaggcauagca

SEQ ID NO: 23004 - RNA, 24 nt, Artificial Sequence
  Synthetic
ccaacaagaagaugaggcauagca

SEQ ID NO: 23005 - RNA, 18 nt, Artificial Sequence
  Synthetic
uuagcgguaauacaggca

SEQ ID NO: 23006 - RNA, 19 nt, Artificial Sequence
  Synthetic
cuuagcgguaauacaggca

SEQ ID NO: 23007 - RNA, 20 nt, Artificial Sequence
  Synthetic
gcuuagcgguaauacaggca

SEQ ID NO: 23008 - RNA, 21 nt, Artificial Sequence
  Synthetic
ugcuuagcgguaauacaggca

SEQ ID NO: 23009 - RNA, 22 nt, Artificial Sequence
  Synthetic
cugcuuagcgguaauacaggca

SEQ ID NO: 23010 - RNA, 23 nt, Artificial Sequence
  Synthetic
ccugcuuagcgguaauacaggca

SEQ ID NO: 23011 - RNA, 24 nt, Artificial Sequence
  Synthetic
gccugcuuagcgguaauacaggca

SEQ ID NO: 23012 - RNA, 18 nt, Artificial Sequence
  Synthetic
agugcacacgggccggca

SEQ ID NO: 23013 - RNA, 19 nt, Artificial Sequence
  Synthetic
aagugcacacgggccggca

SEQ ID NO: 23014 - RNA, 20 nt, Artificial Sequence
  Synthetic
gaagugcacacgggccggca

SEQ ID NO: 23015 - RNA, 21 nt, Artificial Sequence
  Synthetic
cgaagugcacacgggccggca

SEQ ID NO: 23016 - RNA, 22 nt, Artificial Sequence
  Synthetic
gcgaagugcacacgggccggca

SEQ ID NO: 23017 - RNA, 23 nt, Artificial Sequence
  Synthetic
agcgaagugcacacgggccggca

SEQ ID NO: 23018 - RNA, 24 nt, Artificial Sequence
  Synthetic
aagcgaagugcacacgggccggca

SEQ ID NO: 23019 - RNA, 18 nt, Artificial Sequence
  Synthetic
ccgcaguauggaucggca

SEQ ID NO: 23020 - RNA, 19 nt, Artificial Sequence
  Synthetic
uccgcaguauggaucggca

SEQ ID NO: 23021 - RNA, 20 nt, Artificial Sequence
  Synthetic
uuccgcaguauggaucggca

SEQ ID NO: 23022 - RNA, 21 nt, Artificial Sequence
  Synthetic
guuccgcaguauggaucggca

SEQ ID NO: 23023 - RNA, 22 nt, Artificial Sequence
  Synthetic
aguuccgcaguauggaucggca

SEQ ID NO: 23024 - RNA, 23 nt, Artificial Sequence
  Synthetic
gaguuccgcaguauggaucggca

SEQ ID NO: 23025 - RNA, 24 nt, Artificial Sequence
  Synthetic
ggaguuccgcaguauggaucggca

SEQ ID NO: 23026 - RNA, 18 nt, Artificial Sequence
  Synthetic
uacaggcauacaagggca

SEQ ID NO: 23027 - RNA, 19 nt, Artificial Sequence
  Synthetic
auacaggcauacaagggca

SEQ ID NO: 23028 - RNA, 20 nt, Artificial Sequence
  Synthetic
aauacaggcauacaagggca

SEQ ID NO: 23029 - RNA, 21 nt, Artificial Sequence
  Synthetic
uaauacaggcauacaagggca

SEQ ID NO: 23030 - RNA, 22 nt, Artificial Sequence
  Synthetic
guaauacaggcauacaagggca

SEQ ID NO: 23031 - RNA, 23 nt, Artificial Sequence
  Synthetic
gguaauacaggcauacaagggca

SEQ ID NO: 23032 - RNA, 24 nt, Artificial Sequence
  Synthetic
cgguaauacaggcauacaagggca

SEQ ID NO: 23033 - RNA, 18 nt, Artificial Sequence
  Synthetic
aucccagaggauugggca

SEQ ID NO: 23034 - RNA, 19 nt, Artificial Sequence
  Synthetic
aaucccagaggauugggca

SEQ ID NO: 23035 - RNA, 20 nt, Artificial Sequence
  Synthetic
gaaucccagaggauugggca

SEQ ID NO: 23036 - RNA, 21 nt, Artificial Sequence
  Synthetic
agaaucccagaggauugggca

SEQ ID NO: 23037 - RNA, 22 nt, Artificial Sequence
  Synthetic
aagaaucccagaggauugggca

SEQ ID NO: 23038 - RNA, 23 nt, Artificial Sequence
  Synthetic
aaagaaucccagaggauugggca

SEQ ID NO: 23039 - RNA, 24 nt, Artificial Sequence
  Synthetic
gaaagaaucccagaggauugggca

SEQ ID NO: 23040 - RNA, 18 nt, Artificial Sequence
  Synthetic
  misc_feature (7)..(7): n is a, c, g, or u
guaucanaucuugaugca

SEQ ID NO: 23041 - RNA, 19 nt, Artificial Sequence
  Synthetic
  misc_feature (8)..(8): n is a, c, g, or u
uguaucanaucuugaugca

SEQ ID NO: 23042 - RNA, 20 nt, Artificial Sequence
  Synthetic
  misc_feature (9)..(9): n is a, c, g, or u
uuguaucanaucuugaugca

SEQ ID NO: 23043 - RNA, 21 nt, Artificial Sequence
  Synthetic
  misc_feature (10)..(10): n is a, c, g, or u
uuuguaucanaucuugaugca

SEQ ID NO: 23044 - RNA, 22 nt, Artificial Sequence
  Synthetic
  misc_feature (11)..(11): n is a, c, g, or u
uuuuguaucanaucuugaugca

SEQ ID NO: 23045 - RNA, 23 nt, Artificial Sequence
  Synthetic
  misc_feature (12)..(12): n is a, c, g, or u
uuuuuguaucanaucuugaugca

SEQ ID NO: 23046 - RNA, 24 nt, Artificial Sequence
  Synthetic
  misc_feature (13)..(13): n is a, c, g, or u
auuuuuguaucanaucuugaugca

SEQ ID NO: 23047 - RNA, 18 nt, Artificial Sequence
  Synthetic
gaggugaagcgaagugca

SEQ ID NO: 23048 - RNA, 19 nt, Artificial Sequence
  Synthetic
agaggugaagcgaagugca

SEQ ID NO: 23049 - RNA, 20 nt, Artificial Sequence
  Synthetic
cagaggugaagcgaagugca

SEQ ID NO: 23050 - RNA, 21 nt, Artificial Sequence
  Synthetic
gcagaggugaagcgaagugca

SEQ ID NO: 23051 - RNA, 22 nt, Artificial Sequence
  Synthetic
ugcagaggugaagcgaagugca

SEQ ID NO: 23052 - RNA, 23 nt, Artificial Sequence
  Synthetic
gugcagaggugaagcgaagugca

SEQ ID NO: 23053 - RNA, 24 nt, Artificial Sequence
  Synthetic
cgugcagaggugaagcgaagugca

SEQ ID NO: 23054 - RNA, 18 nt, Artificial Sequence
  Synthetic
acagacgggaagaaguca

SEQ ID NO: 23055 - RNA, 19 nt, Artificial Sequence
  Synthetic
gacagacgggaagaaguca

SEQ ID NO: 23056 - RNA, 20 nt, Artificial Sequence
  Synthetic
ggacagacgggaagaaguca

SEQ ID NO: 23057 - RNA, 21 nt, Artificial Sequence
  Synthetic
cggacagacgggaagaaguca

SEQ ID NO: 23058 - RNA, 22 nt, Artificial Sequence
  Synthetic
ccggacagacgggaagaaguca

SEQ ID NO: 23059 - RNA, 23 nt, Artificial Sequence
  Synthetic
cccggacagacgggaagaaguca

SEQ ID NO: 23060 - RNA, 24 nt, Artificial Sequence
  Synthetic
ucccggacagacgggaagaaguca

SEQ ID NO: 23061 - RNA, 18 nt, Artificial Sequence
  Synthetic
ccaguggggguugcguca

SEQ ID NO: 23062 - RNA, 19 nt, Artificial Sequence
  Synthetic
gccaguggggguugcguca

SEQ ID NO: 23063 - RNA, 20 nt, Artificial Sequence
  Synthetic
agccaguggggguugcguca

SEQ ID NO: 23064 - RNA, 21 nt, Artificial Sequence
  Synthetic
cagccaguggggguugcguca

SEQ ID NO: 23065 - RNA, 22 nt, Artificial Sequence
  Synthetic
ccagccaguggggguugcguca

SEQ ID NO: 23066 - RNA, 23 nt, Artificial Sequence
  Synthetic
cccagccaguggggguugcguca

SEQ ID NO: 23067 - RNA, 24 nt, Artificial Sequence
  Synthetic
ccccagccaguggggguugcguca

SEQ ID NO: 23068 - RNA, 18 nt, Artificial Sequence
  Synthetic
ugaugcaagugaauguca

SEQ ID NO: 23069 - RNA, 19 nt, Artificial Sequence
  Synthetic
uugaugcaagugaauguca

SEQ ID NO: 23070 - RNA, 20 nt, Artificial Sequence
  Synthetic
cuugaugcaagugaauguca

SEQ ID NO: 23071 - RNA, 21 nt, Artificial Sequence
  Synthetic
ucuugaugcaagugaauguca

SEQ ID NO: 23072 - RNA, 22 nt, Artificial Sequence
  Synthetic
aucuugaugcaagugaauguca

SEQ ID NO: 23073 - RNA, 23 nt, Artificial Sequence
  Synthetic
  misc_feature (1)..(1): n is a, c, g, or u
naucuugaugcaagugaauguca

SEQ ID NO: 23074 - RNA, 24 nt, Artificial Sequence
  Synthetic
  misc_feature (2)..(2): n is a, c, g, or u
anaucuugaugcaagugaauguca

SEQ ID NO: 23075 - RNA, 18 nt, Artificial Sequence
  Synthetic
uugugaggauuuuuguca

SEQ ID NO: 23076 - RNA, 19 nt, Artificial Sequence
  Synthetic
auugugaggauuuuuguca

SEQ ID NO: 23077 - RNA, 20 nt, Artificial Sequence
  Synthetic
uauugugaggauuuuuguca

SEQ ID NO: 23078 - RNA, 21 nt, Artificial Sequence
  Synthetic
guauugugaggauuuuuguca

SEQ ID NO: 23079 - RNA, 22 nt, Artificial Sequence
  Synthetic
gguauugugaggauuuuuguca

SEQ ID NO: 23080 - RNA, 23 nt, Artificial Sequence
  Synthetic
ugguauugugaggauuuuuguca

SEQ ID NO: 23081 - RNA, 24 nt, Artificial Sequence
  Synthetic
  misc_feature (1)..(1): n is a, c, g, or u
nugguauugugaggauuuuuguca

SEQ ID NO: 23082 - RNA, 18 nt, Artificial Sequence
  Synthetic
aaucaaugggucuauuca

SEQ ID NO: 23083 - RNA, 19 nt, Artificial Sequence
  Synthetic
caaucaaugggucuauuca

SEQ ID NO: 23084 - RNA, 20 nt, Artificial Sequence
  Synthetic
ccaaucaaugggucuauuca

SEQ ID NO: 23085 - RNA, 21 nt, Artificial Sequence
  Synthetic
uccaaucaaugggucuauuca

SEQ ID NO: 23086 - RNA, 22 nt, Artificial Sequence
  Synthetic
uuccaaucaaugggucuauuca

SEQ ID NO: 23087 - RNA, 23 nt, Artificial Sequence
  Synthetic
cuuccaaucaaugggucuauuca

SEQ ID NO: 23088 - RNA, 24 nt, Artificial Sequence
  Synthetic
ccuuccaaucaaugggucuauuca

SEQ ID NO: 23089 - RNA, 18 nt, Artificial Sequence
  Synthetic
uuguuuuagcuguguuca

SEQ ID NO: 23090 - RNA, 19 nt, Artificial Sequence
  Synthetic
uuuguuuuagcuguguuca

SEQ ID NO: 23091 - RNA, 20 nt, Artificial Sequence
  Synthetic
uuuuguuuuagcuguguuca

SEQ ID NO: 23092 - RNA, 21 nt, Artificial Sequence
  Synthetic
auuuuguuuuagcuguguuca

SEQ ID NO: 23093 - RNA, 22 nt, Artificial Sequence
  Synthetic
cauuuuguuuuagcuguguuca

SEQ ID NO: 23094 - RNA, 23 nt, Artificial Sequence
  Synthetic
ccauuuuguuuuagcuguguuca

SEQ ID NO: 23095 - RNA, 24 nt, Artificial Sequence
  Synthetic
accauuuuguuuuagcuguguuca

SEQ ID NO: 23096 - RNA, 18 nt, Artificial Sequence
  Synthetic
gaagaaccaacaagaaga

SEQ ID NO: 23097 - RNA, 19 nt, Artificial Sequence
  Synthetic
agaagaaccaacaagaaga

SEQ ID NO: 23098 - RNA, 20 nt, Artificial Sequence
  Synthetic
cagaagaaccaacaagaaga

SEQ ID NO: 23099 - RNA, 21 nt, Artificial Sequence
  Synthetic
ccagaagaaccaacaagaaga

SEQ ID NO: 23100 - RNA, 22 nt, Artificial Sequence
  Synthetic
uccagaagaaccaacaagaaga

SEQ ID NO: 23101 - RNA, 23 nt, Artificial Sequence
  Synthetic
guccagaagaaccaacaagaaga

SEQ ID NO: 23102 - RNA, 24 nt, Artificial Sequence
  Synthetic
aguccagaagaaccaacaagaaga

SEQ ID NO: 23103 - RNA, 18 nt, Artificial Sequence
  Synthetic
ccuugauaguccagaaga

SEQ ID NO: 23104 - RNA, 19 nt, Artificial Sequence
  Synthetic
accuugauaguccagaaga

SEQ ID NO: 23105 - RNA, 20 nt, Artificial Sequence
  Synthetic
uaccuugauaguccagaaga

SEQ ID NO: 23106 - RNA, 21 nt, Artificial Sequence
  Synthetic
auaccuugauaguccagaaga

SEQ ID NO: 23107 - RNA, 22 nt, Artificial Sequence
  Synthetic
cauaccuugauaguccagaaga

SEQ ID NO: 23108 - RNA, 23 nt, Artificial Sequence
  Synthetic
acauaccuugauaguccagaaga

SEQ ID NO: 23109 - RNA, 24 nt, Artificial Sequence
  Synthetic
aacauaccuugauaguccagaaga

SEQ ID NO: 23110 - RNA, 18 nt, Artificial Sequence
  Synthetic
auagcagcaggaugaaga

SEQ ID NO: 23111 - RNA, 19 nt, Artificial Sequence
  Synthetic
cauagcagcaggaugaaga

SEQ ID NO: 23112 - RNA, 20 nt, Artificial Sequence
  Synthetic
gcauagcagcaggaugaaga

SEQ ID NO: 23113 - RNA, 21 nt, Artificial Sequence
  Synthetic
ggcauagcagcaggaugaaga

SEQ ID NO: 23114 - RNA, 22 nt, Artificial Sequence
  Synthetic
aggcauagcagcaggaugaaga

SEQ ID NO: 23115 - RNA, 23 nt, Artificial Sequence
  Synthetic
gaggcauagcagcaggaugaaga

SEQ ID NO: 23116 - RNA, 24 nt, Artificial Sequence
  Synthetic
ugaggcauagcagcaggaugaaga

SEQ ID NO: 23117 - RNA, 18 nt, Artificial Sequence
  Synthetic
cucaagaugcugcacaga

SEQ ID NO: 23118 - RNA, 19 nt, Artificial Sequence
  Synthetic
acucaagaugcugcacaga

SEQ ID NO: 23119 - RNA, 20 nt, Artificial Sequence
  Synthetic
gacucaagaugcugcacaga

SEQ ID NO: 23120 - RNA, 21 nt, Artificial Sequence
  Synthetic
ggacucaagaugcugcacaga

SEQ ID NO: 23121 - RNA, 22 nt, Artificial Sequence
  Synthetic
gggacucaagaugcugcacaga

SEQ ID NO: 23122 - RNA, 23 nt, Artificial Sequence
  Synthetic
agggacucaagaugcugcacaga

SEQ ID NO: 23123 - RNA, 24 nt, Artificial Sequence
  Synthetic
aagggacucaagaugcugcacaga

SEQ ID NO: 23124 - RNA, 18 nt, Artificial Sequence
  Synthetic
gaguaggucccggacaga

SEQ ID NO: 23125 - RNA, 19 nt, Artificial Sequence
  Synthetic
cgaguaggucccggacaga

SEQ ID NO: 23126 - RNA, 20 nt, Artificial Sequence
  Synthetic
ucgaguaggucccggacaga

SEQ ID NO: 23127 - RNA, 18 nt, Artificial Sequence
  Synthetic
  misc_feature (4)..(4): n is a, c, g, or u
ucanguauuguuuacaga

SEQ ID NO: 23128 - RNA, 19 nt, Artificial Sequence
  Synthetic
  misc_feature (5)..(5): n is a, c, g, or u
uucanguauuguuuacaga

SEQ ID NO: 23129 - RNA, 20 nt, Artificial Sequence
  Synthetic
  misc_feature (6)..(6): n is a, c, g, or u
guucanguauuguuuacaga

SEQ ID NO: 23130 - RNA, 21 nt, Artificial Sequence
  Synthetic
  misc_feature (7)..(7): n is a, c, g, or u
gguucanguauuguuuacaga

SEQ ID NO: 23131 - RNA, 22 nt, Artificial Sequence
  Synthetic
  misc_feature (8)..(8): n is a, c, g, or u
agguucanguauuguuuacaga

SEQ ID NO: 23132 - RNA, 23 nt, Artificial Sequence
  Synthetic
  misc_feature (9)..(9): n is a, c, g, or u
aagguucanguauuguuuacaga

SEQ ID NO: 23133 - RNA, 24 nt, Artificial Sequence
  Synthetic
  misc_feature (10)..(10): n is a, c, g, or u
aaagguucanguauuguuuacaga

SEQ ID NO: 23134 - RNA, 18 nt, Artificial Sequence
  Synthetic
aaaagaugauuaggcaga

SEQ ID NO: 23135 - RNA, 19 nt, Artificial Sequence
  Synthetic
caaaagaugauuaggcaga

SEQ ID NO: 23136 - RNA, 20 nt, Artificial Sequence
  Synthetic
acaaaagaugauuaggcaga

SEQ ID NO: 23137 - RNA, 21 nt, Artificial Sequence
  Synthetic
aacaaaagaugauuaggcaga

SEQ ID NO: 23138 - RNA, 22 nt, Artificial Sequence
  Synthetic
gaacaaaagaugauuaggcaga

SEQ ID NO: 23139 - RNA, 23 nt, Artificial Sequence
  Synthetic
ugaacaaaagaugauuaggcaga

SEQ ID NO: 23140 - RNA, 24 nt, Artificial Sequence
  Synthetic
augaacaaaagaugauuaggcaga

SEQ ID NO: 23141 - RNA, 18 nt, Artificial Sequence
  Synthetic
ugcacacgggccggcaga

SEQ ID NO: 23142 - RNA, 19 nt, Artificial Sequence
  Synthetic
gugcacacgggccggcaga

SEQ ID NO: 23143 - RNA, 20 nt, Artificial Sequence
  Synthetic
agugcacacgggccggcaga

SEQ ID NO: 23144 - RNA, 21 nt, Artificial Sequence
  Synthetic
aagugcacacgggccggcaga

SEQ ID NO: 23145 - RNA, 22 nt, Artificial Sequence
  Synthetic
gaagugcacacgggccggcaga

SEQ ID NO: 23146 - RNA, 23 nt, Artificial Sequence
  Synthetic
cgaagugcacacgggccggcaga

SEQ ID NO: 23147 - RNA, 24 nt, Artificial Sequence
  Synthetic
gcgaagugcacacgggccggcaga

SEQ ID NO: 23148 - RNA, 18 nt, Artificial Sequence
  Synthetic
cuccaugcgacgugcaga

SEQ ID NO: 23149 - RNA, 19 nt, Artificial Sequence
  Synthetic
ucuccaugcgacgugcaga

SEQ ID NO: 23150 - RNA, 20 nt, Artificial Sequence
  Synthetic
gucuccaugcgacgugcaga

SEQ ID NO: 23151 - RNA, 21 nt, Artificial Sequence
  Synthetic
ggucuccaugcgacgugcaga

SEQ ID NO: 23152 - RNA, 22 nt, Artificial Sequence
  Synthetic
uggucuccaugcgacgugcaga

SEQ ID NO: 23153 - RNA, 23 nt, Artificial Sequence
  Synthetic
guggucuccaugcgacgugcaga

SEQ ID NO: 23154 - RNA, 24 nt, Artificial Sequence
  Synthetic
gguggucuccaugcgacgugcaga

SEQ ID NO: 23155 - RNA, 18 nt, Artificial Sequence
  Synthetic
guaaacugagccaagaga

SEQ ID NO: 23156 - RNA, 19 nt, Artificial Sequence
  Synthetic
aguaaacugagccaagaga

SEQ ID NO: 23157 - RNA, 20 nt, Artificial Sequence
  Synthetic
uaguaaacugagccaagaga

SEQ ID NO: 23158 - RNA, 21 nt, Artificial Sequence
  Synthetic
cuaguaaacugagccaagaga

SEQ ID NO: 23159 - RNA, 22 nt, Artificial Sequence
  Synthetic
acuaguaaacugagccaagaga

SEQ ID NO: 23160 - RNA, 23 nt, Artificial Sequence
  Synthetic
cacuaguaaacugagccaagaga

SEQ ID NO: 23161 - RNA, 24 nt, Artificial Sequence
  Synthetic
gcacuaguaaacugagccaagaga

SEQ ID NO: 23162 - RNA, 18 nt, Artificial Sequence
  Synthetic
cccuuagagguggagaga

SEQ ID NO: 23163 - RNA, 19 nt, Artificial Sequence
  Synthetic
ucccuuagagguggagaga

SEQ ID NO: 23164 - RNA, 20 nt, Artificial Sequence
  Synthetic
gucccuuagagguggagaga

SEQ ID NO: 23165 - RNA, 21 nt, Artificial Sequence
  Synthetic
ugucccuuagagguggagaga

SEQ ID NO: 23166 - RNA, 22 nt, Artificial Sequence
  Synthetic
gugucccuuagagguggagaga

SEQ ID NO: 23167 - RNA, 23 nt, Artificial Sequence
  Synthetic
ugugucccuuagagguggagaga

SEQ ID NO: 23168 - RNA, 24 nt, Artificial Sequence
  Synthetic
gugugucccuuagagguggagaga

SEQ ID NO: 23169 - RNA, 18 nt, Artificial Sequence
  Synthetic
ggagguguacuuccgaga

SEQ ID NO: 23170 - RNA, 19 nt, Artificial Sequence
  Synthetic
aggagguguacuuccgaga

SEQ ID NO: 23171 - RNA, 20 nt, Artificial Sequence
  Synthetic
aaggagguguacuuccgaga

SEQ ID NO: 23172 - RNA, 21 nt, Artificial Sequence
  Synthetic
gaaggagguguacuuccgaga

SEQ ID NO: 23173 - RNA, 22 nt, Artificial Sequence
  Synthetic
ggaaggagguguacuuccgaga

SEQ ID NO: 23174 - RNA, 23 nt, Artificial Sequence
  Synthetic
gggaaggagguguacuuccgaga

SEQ ID NO: 23175 - RNA, 24 nt, Artificial Sequence
  Synthetic
ugggaaggagguguacuuccgaga

SEQ ID NO: 23176 - RNA, 18 nt, Artificial Sequence
  Synthetic
  misc_feature (8)..(9): n is a, c, g, or u
cggaacgnnaggcggaga

SEQ ID NO: 23177 - RNA, 19 nt, Artificial Sequence
  Synthetic
  misc_feature (9)..(10): n is a, c, g, or u
ccggaacgnnaggcggaga

SEQ ID NO: 23178 - RNA, 20 nt, Artificial Sequence
  Synthetic
  misc_feature (10)..(11): n is a, c, g, or u
gccggaacgnnaggcggaga

SEQ ID NO: 23179 - RNA, 21 nt, Artificial Sequence
  Synthetic
  misc_feature (11)..(12): n is a, c, g, or u
ggccggaacgnnaggcggaga

SEQ ID NO: 23180 - RNA, 22 nt, Artificial Sequence
  Synthetic
  misc_feature (12)..(13): n is a, c, g, or u
cggccggaacgnnaggcggaga

SEQ ID NO: 23181 - RNA, 23 nt, Artificial Sequence
  Synthetic
  misc_feature (13)..(14): n is a, c, g, or u
ucggccggaacgnnaggcggaga

SEQ ID NO: 23182 - RNA, 24 nt, Artificial Sequence
  Synthetic
  misc_feature (14)..(15): n is a, c, g, or u
gucggccggaacgnnaggcggaga

SEQ ID NO: 23183 - RNA, 18 nt, Artificial Sequence
  Synthetic
acauugggaagcuggaga

SEQ ID NO: 23184 - RNA, 19 nt, Artificial Sequence
  Synthetic
aacauugggaagcuggaga

SEQ ID NO: 23185 - RNA, 20 nt, Artificial Sequence
  Synthetic
uaacauugggaagcuggaga

SEQ ID NO: 23186 - RNA, 21 nt, Artificial Sequence
  Synthetic
cuaacauugggaagcuggaga

SEQ ID NO: 23187 - RNA, 22 nt, Artificial Sequence
  Synthetic
acuaacauugggaagcuggaga

SEQ ID NO: 23188 - RNA, 23 nt, Artificial Sequence
  Synthetic
uacuaacauugggaagcuggaga

SEQ ID NO: 23189 - RNA, 24 nt, Artificial Sequence
  Synthetic
auacuaacauugggaagcuggaga

SEQ ID NO: 23190 - RNA, 18 nt, Artificial Sequence
  Synthetic
uugguaagugauuggaga

SEQ ID NO: 23191 - RNA, 19 nt, Artificial Sequence
  Synthetic
guugguaagugauuggaga

SEQ ID NO: 23192 - RNA, 20 nt, Artificial Sequence
  Synthetic
gguugguaagugauuggaga

SEQ ID NO: 23193 - RNA, 21 nt, Artificial Sequence
  Synthetic
agguugguaagugauuggaga

SEQ ID NO: 23194 - RNA, 22 nt, Artificial Sequence
  Synthetic
gagguugguaagugauuggaga

SEQ ID NO: 23195 - RNA, 23 nt, Artificial Sequence
  Synthetic
ggagguugguaagugauuggaga

SEQ ID NO: 23196 - RNA, 24 nt, Artificial Sequence
  Synthetic
aggagguugguaagugauuggaga

SEQ ID NO: 23197 - RNA, 18 nt, Artificial Sequence
  Synthetic
gcauacaagggcaugaga

SEQ ID NO: 23198 - RNA, 19 nt, Artificial Sequence
  Synthetic
ggcauacaagggcaugaga

SEQ ID NO: 23199 - RNA, 20 nt, Artificial Sequence
  Synthetic
aggcauacaagggcaugaga

SEQ ID NO: 23200 - RNA, 21 nt, Artificial Sequence
  Synthetic
caggcauacaagggcaugaga

SEQ ID NO: 23201 - RNA, 22 nt, Artificial Sequence
  Synthetic
acaggcauacaagggcaugaga

SEQ ID NO: 23202 - RNA, 23 nt, Artificial Sequence
  Synthetic
uacaggcauacaagggcaugaga

SEQ ID NO: 23203 - RNA, 24 nt, Artificial Sequence
  Synthetic
auacaggcauacaagggcaugaga

SEQ ID NO: 23204 - RNA, 18 nt, Artificial Sequence
  Synthetic
gcgccgacgggacguaga

SEQ ID NO: 23205 - RNA, 19 nt, Artificial Sequence
  Synthetic
agcgccgacgggacguaga

SEQ ID NO: 23206 - RNA, 20 nt, Artificial Sequence
  Synthetic
cagcgccgacgggacguaga

SEQ ID NO: 23207 - RNA, 18 nt, Artificial Sequence
  Synthetic
ggaugugugucccuuaga

SEQ ID NO: 23208 - RNA, 19 nt, Artificial Sequence
  Synthetic
uggaugugugucccuuaga

SEQ ID NO: 23209 - RNA, 20 nt, Artificial Sequence
  Synthetic
guggaugugugucccuuaga

SEQ ID NO: 23210 - RNA, 21 nt, Artificial Sequence
  Synthetic
uguggaugugugucccuuaga

SEQ ID NO: 23211 - RNA, 22 nt, Artificial Sequence
  Synthetic
cuguggaugugugucccuuaga

SEQ ID NO: 23212 - RNA, 23 nt, Artificial Sequence
  Synthetic
ccuguggaugugugucccuuaga

SEQ ID NO: 23213 - RNA, 24 nt, Artificial Sequence
  Synthetic
gccuguggaugugugucccuuaga

SEQ ID NO: 23214 - RNA, 18 nt, Artificial Sequence
  Synthetic
acaccgccuguaacacga

SEQ ID NO: 23215 - RNA, 19 nt, Artificial Sequence
  Synthetic
cacaccgccuguaacacga

SEQ ID NO: 23216 - RNA, 20 nt, Artificial Sequence
  Synthetic
acacaccgccuguaacacga

SEQ ID NO: 23217 - RNA, 21 nt, Artificial Sequence
  Synthetic
aacacaccgccuguaacacga

SEQ ID NO: 23218 - RNA, 22 nt, Artificial Sequence
  Synthetic
aaacacaccgccuguaacacga

SEQ ID NO: 23219 - RNA, 23 nt, Artificial Sequence
  Synthetic
gaaacacaccgccuguaacacga

SEQ ID NO: 23220 - RNA, 24 nt, Artificial Sequence
  Synthetic
agaaacacaccgccuguaacacga

SEQ ID NO: 23221 - RNA, 18 nt, Artificial Sequence
  Synthetic
agccccaagcgaccacga

SEQ ID NO: 23222 - RNA, 19 nt, Artificial Sequence
  Synthetic
gagccccaagcgaccacga

SEQ ID NO: 23223 - RNA, 20 nt, Artificial Sequence
  Synthetic
agagccccaagcgaccacga

SEQ ID NO: 23224 - RNA, 21 nt, Artificial Sequence
  Synthetic
cagagccccaagcgaccacga

SEQ ID NO: 23225 - RNA, 22 nt, Artificial Sequence
  Synthetic
gcagagccccaagcgaccacga

SEQ ID NO: 23226 - RNA, 23 nt, Artificial Sequence
  Synthetic
ggcagagccccaagcgaccacga

SEQ ID NO: 23227 - RNA, 24 nt, Artificial Sequence
  Synthetic
cggcagagccccaagcgaccacga

SEQ ID NO: 23228 - RNA, 18 nt, Artificial Sequence
  Synthetic
cgcaggauucagcgccga

SEQ ID NO: 23229 - RNA, 19 nt, Artificial Sequence
  Synthetic
ccgcaggauucagcgccga

SEQ ID NO: 23230 - RNA, 20 nt, Artificial Sequence
  Synthetic
uccgcaggauucagcgccga

SEQ ID NO: 23231 - RNA, 18 nt, Artificial Sequence
  Synthetic
aaggagguguacuuccga

SEQ ID NO: 23232 - RNA, 19 nt, Artificial Sequence
  Synthetic
gaaggagguguacuuccga

SEQ ID NO: 23233 - RNA, 20 nt, Artificial Sequence
  Synthetic
ggaaggagguguacuuccga

SEQ ID NO: 23234 - RNA, 21 nt, Artificial Sequence
  Synthetic
gggaaggagguguacuuccga

SEQ ID NO: 23235 - RNA, 22 nt, Artificial Sequence
  Synthetic
ugggaaggagguguacuuccga

SEQ ID NO: 23236 - RNA, 23 nt, Artificial Sequence
  Synthetic
augggaaggagguguacuuccga

SEQ ID NO: 23237 - RNA, 24 nt, Artificial Sequence
  Synthetic
caugggaaggagguguacuuccga

SEQ ID NO: 23238 - RNA, 18 nt, Artificial Sequence
  Synthetic
  misc_feature (7)..(7): n is a, c, g, or u
cagaccngcugcgagcga

SEQ ID NO: 23239 - RNA, 19 nt, Artificial Sequence
  Synthetic
  misc_feature (8)..(8): n is a, c, g, or u
ccagaccngcugcgagcga

SEQ ID NO: 23240 - RNA, 20 nt, Artificial Sequence
  Synthetic
  misc_feature (9)..(9): n is a, c, g, or u
uccagaccngcugcgagcga

SEQ ID NO: 23241 - RNA, 21 nt, Artificial Sequence
  Synthetic
  misc_feature (10)..(10): n is a, c, g, or u
cuccagaccngcugcgagcga

SEQ ID NO: 23242 - RNA, 22 nt, Artificial Sequence
  Synthetic
  misc_feature (11)..(11): n is a, c, g, or u
gcuccagaccngcugcgagcga

SEQ ID NO: 23243 - RNA, 23 nt, Artificial Sequence
  Synthetic
  misc_feature (12)..(12): n is a, c, g, or u
cgcuccagaccngcugcgagcga

SEQ ID NO: 23244 - RNA, 24 nt, Artificial Sequence
  Synthetic
  misc_feature (13)..(13): n is a, c, g, or u
ccgcuccagaccngcugcgagcga

SEQ ID NO: 23245 - RNA, 18 nt, Artificial Sequence
  Synthetic
ggccuuguaaguuggcga

SEQ ID NO: 23246 - RNA, 19 nt, Artificial Sequence
  Synthetic
aggccuuguaaguuggcga

SEQ ID NO: 23247 - RNA, 20 nt, Artificial Sequence
  Synthetic
aaggccuuguaaguuggcga

SEQ ID NO: 23248 - RNA, 21 nt, Artificial Sequence
  Synthetic
aaaggccuuguaaguuggcga

SEQ ID NO: 23249 - RNA, 22 nt, Artificial Sequence
  Synthetic
gaaaggccuuguaaguuggcga

SEQ ID NO: 23250 - RNA, 23 nt, Artificial Sequence
  Synthetic
agaaaggccuuguaaguuggcga

SEQ ID NO: 23251 - RNA, 24 nt, Artificial Sequence
  Synthetic
gagaaaggccuuguaaguuggcga

SEQ ID NO: 23252 - RNA, 18 nt, Artificial Sequence
  Synthetic
  misc_feature (11)..(11): n is a, c, g, or u
gcuccagaccngcugcga

SEQ ID NO: 23253 - RNA, 19 nt, Artificial Sequence
  Synthetic
  misc_feature (12)..(12): n is a, c, g, or u
cgcuccagaccngcugcga

SEQ ID NO: 23254 - RNA, 20 nt, Artificial Sequence
  Synthetic
  misc_feature (13)..(13): n is a, c, g, or u
ccgcuccagaccngcugcga

SEQ ID NO: 23255 - RNA, 21 nt, Artificial Sequence
  Synthetic
  misc_feature (14)..(14): n is a, c, g, or u
uccgcuccagaccngcugcga

SEQ ID NO: 23256 - RNA, 22 nt, Artificial Sequence
  Synthetic
  misc_feature (15)..(15): n is a, c, g, or u
guccgcuccagaccngcugcga

SEQ ID NO: 23257 - RNA, 23 nt, Artificial Sequence
  Synthetic
  misc_feature (1)..(1): n is a, c, g, or u
  misc_feature (16)..(16): n is a, c, g, or u
nguccgcuccagaccngcugcga

SEQ ID NO: 23258 - RNA, 24 nt, Artificial Sequence
  Synthetic
  misc_feature (2)..(2): n is a, c, g, or u
  misc_feature (17)..(17): n is a, c, g, or u
anguccgcuccagaccngcugcga

SEQ ID NO: 23259 - RNA, 18 nt, Artificial Sequence
  Synthetic
ugagaucuucgucugcga

SEQ ID NO: 23260 - RNA, 19 nt, Artificial Sequence
  Synthetic
uugagaucuucgucugcga

SEQ ID NO: 23261 - RNA, 20 nt, Artificial Sequence
  Synthetic
auugagaucuucgucugcga

SEQ ID NO: 23262 - RNA, 21 nt, Artificial Sequence
  Synthetic
gauugagaucuucgucugcga

SEQ ID NO: 23263 - RNA, 22 nt, Artificial Sequence
  Synthetic
  misc_feature (1)..(1): n is a, c, g, or u
ngauugagaucuucgucugcga

SEQ ID NO: 23264 - RNA, 23 nt, Artificial Sequence
  Synthetic
  misc_feature (2)..(2): n is a, c, g, or u
gngauugagaucuucgucugcga

SEQ ID NO: 23265 - RNA, 24 nt, Artificial Sequence
  Synthetic
  misc_feature (3)..(3): n is a, c, g, or u
ggngauugagaucuucgucugcga

SEQ ID NO: 23266 - RNA, 18 nt, Artificial Sequence
  Synthetic
gauugagaucuucugcga

SEQ ID NO: 23267 - RNA, 19 nt, Artificial Sequence
  Synthetic
agauugagaucuucugcga

SEQ ID NO: 23268 - RNA, 20 nt, Artificial Sequence
  Synthetic
gagauugagaucuucugcga

SEQ ID NO: 23269 - RNA, 21 nt, Artificial Sequence
  Synthetic
ggagauugagaucuucugcga

SEQ ID NO: 23270 - RNA, 22 nt, Artificial Sequence
  Synthetic
uggagauugagaucuucugcga

SEQ ID NO: 23271 - RNA, 23 nt, Artificial Sequence
  Synthetic
cuggagauugagaucuucugcga

SEQ ID NO: 23272 - RNA, 24 nt, Artificial Sequence
  Synthetic
gcuggagauugagaucuucugcga

SEQ ID NO: 23273 - RNA, 18 nt, Artificial Sequence
  Synthetic
augucaggaaaagaagga

SEQ ID NO: 23274 - RNA, 19 nt, Artificial Sequence
  Synthetic
aaugucaggaaaagaagga

SEQ ID NO: 23275 - RNA, 20 nt, Artificial Sequence
  Synthetic
gaaugucaggaaaagaagga

SEQ ID NO: 23276 - RNA, 21 nt, Artificial Sequence
  Synthetic
ugaaugucaggaaaagaagga

SEQ ID NO: 23277 - RNA, 22 nt, Artificial Sequence
  Synthetic
gugaaugucaggaaaagaagga

SEQ ID NO: 23278 - RNA, 23 nt, Artificial Sequence
  Synthetic
agugaaugucaggaaaagaagga

SEQ ID NO: 23279 - RNA, 24 nt, Artificial Sequence
  Synthetic
aagugaaugucaggaaaagaagga

SEQ ID NO: 23280 - RNA, 18 nt, Artificial Sequence
  Synthetic
cgauugguggaagcagga

SEQ ID NO: 23281 - RNA, 19 nt, Artificial Sequence
  Synthetic
ccgauugguggaagcagga

SEQ ID NO: 23282 - RNA, 20 nt, Artificial Sequence
  Synthetic
uccgauugguggaagcagga

SEQ ID NO: 23283 - RNA, 21 nt, Artificial Sequence
  Synthetic
cuccgauugguggaagcagga

SEQ ID NO: 23284 - RNA, 22 nt, Artificial Sequence
  Synthetic
ccuccgauugguggaagcagga

SEQ ID NO: 23285 - RNA, 23 nt, Artificial Sequence
  Synthetic
accuccgauugguggaagcagga

SEQ ID NO: 23286 - RNA, 24 nt, Artificial Sequence
  Synthetic
gaccuccgauugguggaagcagga

SEQ ID NO: 23287 - RNA, 18 nt, Artificial Sequence
  Synthetic
uuugguacagcagcagga

SEQ ID NO: 23288 - RNA, 19 nt, Artificial Sequence
  Synthetic
guuugguacagcagcagga

SEQ ID NO: 23289 - RNA, 20 nt, Artificial Sequence
  Synthetic
gguuugguacagcagcagga

SEQ ID NO: 23290 - RNA, 21 nt, Artificial Sequence
  Synthetic
agguuugguacagcagcagga

SEQ ID NO: 23291 - RNA, 22 nt, Artificial Sequence
  Synthetic
aagguuugguacagcagcagga

SEQ ID NO: 23292 - RNA, 23 nt, Artificial Sequence
  Synthetic
gaagguuugguacagcagcagga

SEQ ID NO: 23293 - RNA, 24 nt, Artificial Sequence
  Synthetic
cgaagguuugguacagcagcagga

SEQ ID NO: 23294 - RNA, 18 nt, Artificial Sequence
  Synthetic
ugaggcauagcagcagga

SEQ ID NO: 23295 - RNA, 19 nt, Artificial Sequence
  Synthetic
augaggcauagcagcagga

SEQ ID NO: 23296 - RNA, 20 nt, Artificial Sequence
  Synthetic
gaugaggcauagcagcagga

SEQ ID NO: 23297 - RNA, 21 nt, Artificial Sequence
  Synthetic
agaugaggcauagcagcagga

SEQ ID NO: 23298 - RNA, 22 nt, Artificial Sequence
  Synthetic
aagaugaggcauagcagcagga

SEQ ID NO: 23299 - RNA, 23 nt, Artificial Sequence
  Synthetic
gaagaugaggcauagcagcagga

SEQ ID NO: 23300 - RNA, 24 nt, Artificial Sequence
  Synthetic
agaagaugaggcauagcagcagga

SEQ ID NO: 23301 - RNA, 18 nt, Artificial Sequence
  Synthetic
gaggggucguccgcagga

SEQ ID NO: 23302 - RNA, 19 nt, Artificial Sequence
  Synthetic
agaggggucguccgcagga

SEQ ID NO: 23303 - RNA, 20 nt, Artificial Sequence
  Synthetic
gagaggggucguccgcagga

SEQ ID NO: 23304 - RNA, 21 nt, Artificial Sequence
  Synthetic
cgagaggggucguccgcagga

SEQ ID NO: 23305 - RNA, 22 nt, Artificial Sequence
  Synthetic
acgagaggggucguccgcagga

SEQ ID NO: 23306 - RNA, 23 nt, Artificial Sequence
  Synthetic
cacgagaggggucguccgcagga

SEQ ID NO: 23307 - RNA, 24 nt, Artificial Sequence
  Synthetic
ccacgagaggggucguccgcagga

SEQ ID NO: 23308 - RNA, 18 nt, Artificial Sequence
  Synthetic
ggaguuaaccagucagga

SEQ ID NO: 23309 - RNA, 19 nt, Artificial Sequence
  Synthetic
aggaguuaaccagucagga

SEQ ID NO: 23310 - RNA, 20 nt, Artificial Sequence
  Synthetic
aaggaguuaaccagucagga

SEQ ID NO: 23311 - RNA, 21 nt, Artificial Sequence
  Synthetic
gaaggaguuaaccagucagga

SEQ ID NO: 23312 - RNA, 22 nt, Artificial Sequence
  Synthetic
agaaggaguuaaccagucagga

SEQ ID NO: 23313 - RNA, 23 nt, Artificial Sequence
  Synthetic
aagaaggaguuaaccagucagga

SEQ ID NO: 23314 - RNA, 24 nt, Artificial Sequence
  Synthetic
aaagaaggaguuaaccagucagga

SEQ ID NO: 23315 - RNA, 18 nt, Artificial Sequence
  Synthetic
ugcaagugaaugucagga

SEQ ID NO: 23316 - RNA, 19 nt, Artificial Sequence
  Synthetic
augcaagugaaugucagga

SEQ ID NO: 23317 - RNA, 20 nt, Artificial Sequence
  Synthetic
gaugcaagugaaugucagga

SEQ ID NO: 23318 - RNA, 21 nt, Artificial Sequence
  Synthetic
ugaugcaagugaaugucagga

SEQ ID NO: 23319 - RNA, 22 nt, Artificial Sequence
  Synthetic
uugaugcaagugaaugucagga

SEQ ID NO: 23320 - RNA, 23 nt, Artificial Sequence
  Synthetic
cuugaugcaagugaaugucagga

SEQ ID NO: 23321 - RNA, 24 nt, Artificial Sequence
  Synthetic
ucuugaugcaagugaaugucagga

SEQ ID NO: 23322 - RNA, 18 nt, Artificial Sequence
  Synthetic
ggaaagaaucccagagga

SEQ ID NO: 23323 - RNA, 19 nt, Artificial Sequence
  Synthetic
uggaaagaaucccagagga

SEQ ID NO: 23324 - RNA, 20 nt, Artificial Sequence
  Synthetic
cuggaaagaaucccagagga

SEQ ID NO: 23325 - RNA, 21 nt, Artificial Sequence
  Synthetic
ucuggaaagaaucccagagga

SEQ ID NO: 23326 - RNA, 22 nt, Artificial Sequence
  Synthetic
gucuggaaagaaucccagagga

SEQ ID NO: 23327 - RNA, 23 nt, Artificial Sequence
  Synthetic
ggucuggaaagaaucccagagga

SEQ ID NO: 23328 - RNA, 24 nt, Artificial Sequence
  Synthetic
uggucuggaaagaaucccagagga

SEQ ID NO: 23329 - RNA, 18 nt, Artificial Sequence
  Synthetic
  misc_feature (9)..(9): n is a, c, g, or u
aacagguanaguagagga

SEQ ID NO: 23330 - RNA, 19 nt, Artificial Sequence
  Synthetic
  misc_feature (10)..(10): n is a, c, g, or u
aaacagguanaguagagga

SEQ ID NO: 23331 - RNA, 20 nt, Artificial Sequence
  Synthetic
  misc_feature (11)..(11): n is a, c, g, or u
aaaacagguanaguagagga

SEQ ID NO: 23332 - RNA, 21 nt, Artificial Sequence
  Synthetic
  misc_feature (12)..(12): n is a, c, g, or u
gaaaacagguanaguagagga

SEQ ID NO: 23333 - RNA, 22 nt, Artificial Sequence
  Synthetic
  misc_feature (13)..(13): n is a, c, g, or u
ugaaaacagguanaguagagga

SEQ ID NO: 23334 - RNA, 23 nt, Artificial Sequence
  Synthetic
  misc_feature (14)..(14): n is a, c, g, or u
uugaaaacagguanaguagagga

SEQ ID NO: 23335 - RNA, 24 nt, Artificial Sequence
  Synthetic
  misc_feature (15)..(15): n is a, c, g, or u
auugaaaacagguanaguagagga

SEQ ID NO: 23336 - RNA, 18 nt, Artificial Sequence
  Synthetic
ccaggacaaguuggagga

SEQ ID NO: 23337 - RNA, 19 nt, Artificial Sequence
  Synthetic
gccaggacaaguuggagga

SEQ ID NO: 23338 - RNA, 20 nt, Artificial Sequence
  Synthetic
agccaggacaaguuggagga

SEQ ID NO: 23339 - RNA, 21 nt, Artificial Sequence
  Synthetic
uagccaggacaaguuggagga

SEQ ID NO: 23340 - RNA, 22 nt, Artificial Sequence
  Synthetic
auagccaggacaaguuggagga

SEQ ID NO: 23341 - RNA, 23 nt, Artificial Sequence
  Synthetic
gauagccaggacaaguuggagga

SEQ ID NO: 23342 - RNA, 24 nt, Artificial Sequence
  Synthetic
cgauagccaggacaaguuggagga

SEQ ID NO: 23343 - RNA, 18 nt, Artificial Sequence
  Synthetic
ccggaaguguugauagga

SEQ ID NO: 23344 - RNA, 19 nt, Artificial Sequence
  Synthetic
uccggaaguguugauagga

SEQ ID NO: 23345 - RNA, 20 nt, Artificial Sequence
  Synthetic
cuccggaaguguugauagga

SEQ ID NO: 23346 - RNA, 21 nt, Artificial Sequence
  Synthetic
ucuccggaaguguugauagga

SEQ ID NO: 23347 - RNA, 22 nt, Artificial Sequence
  Synthetic
gucuccggaaguguugauagga

SEQ ID NO: 23348 - RNA, 23 nt, Artificial Sequence
  Synthetic
agucuccggaaguguugauagga

SEQ ID NO: 23349 - RNA, 24 nt, Artificial Sequence
  Synthetic
uagucuccggaaguguugauagga

SEQ ID NO: 23350 - RNA, 18 nt, Artificial Sequence
  Synthetic
  misc_feature (3)..(3): n is a, c, g, or u
agnccccuuacucucgga

SEQ ID NO: 23351 - RNA, 19 nt, Artificial Sequence
  Synthetic
  misc_feature (4)..(4): n is a, c, g, or u
cagnccccuuacucucgga

SEQ ID NO: 23352 - RNA, 20 nt, Artificial Sequence
  Synthetic
  misc_feature (5)..(5): n is a, c, g, or u
acagnccccuuacucucgga

SEQ ID NO: 23353 - RNA, 21 nt, Artificial Sequence
  Synthetic
  misc_feature (6)..(6): n is a, c, g, or u
uacagnccccuuacucucgga

SEQ ID NO: 23354 - RNA, 22 nt, Artificial Sequence
  Synthetic
  misc_feature (7)..(7): n is a, c, g, or u
auacagnccccuuacucucgga

SEQ ID NO: 23355 - RNA, 23 nt, Artificial Sequence
  Synthetic
  misc_feature (8)..(8): n is a, c, g, or u
aauacagnccccuuacucucgga

SEQ ID NO: 23356 - RNA, 24 nt, Artificial Sequence
  Synthetic
  misc_feature (9)..(9): n is a, c, g, or u
aaauacagnccccuuacucucgga

SEQ ID NO: 23357 - RNA, 18 nt, Artificial Sequence
  Synthetic
agagaggcaauagucgga

SEQ ID NO: 23358 - RNA, 19 nt, Artificial Sequence
  Synthetic
gagagaggcaauagucgga

SEQ ID NO: 23359 - RNA, 20 nt, Artificial Sequence
  Synthetic
ugagagaggcaauagucgga

SEQ ID NO: 23360 - RNA, 21 nt, Artificial Sequence
  Synthetic
gugagagaggcaauagucgga

SEQ ID NO: 23361 - RNA, 22 nt, Artificial Sequence
  Synthetic
ugugagagaggcaauagucgga

SEQ ID NO: 23362 - RNA, 23 nt, Artificial Sequence
  Synthetic
augugagagaggcaauagucgga

SEQ ID NO: 23363 - RNA, 24 nt, Artificial Sequence
  Synthetic
gaugugagagaggcaauagucgga

SEQ ID NO: 23364 - RNA, 18 nt, Artificial Sequence
  Synthetic
aacagcgguauaaaggga

SEQ ID NO: 23365 - RNA, 19 nt, Artificial Sequence
  Synthetic
uaacagcgguauaaaggga

SEQ ID NO: 23366 - RNA, 20 nt, Artificial Sequence
  Synthetic
guaacagcgguauaaaggga

SEQ ID NO: 23367 - RNA, 21 nt, Artificial Sequence
  Synthetic
gguaacagcgguauaaaggga

SEQ ID NO: 23368 - RNA, 22 nt, Artificial Sequence
  Synthetic
ugguaacagcgguauaaaggga

SEQ ID NO: 23369 - RNA, 23 nt, Artificial Sequence
  Synthetic
uugguaacagcgguauaaaggga

SEQ ID NO: 23370 - RNA, 24 nt, Artificial Sequence
  Synthetic
auugguaacagcgguauaaaggga

SEQ ID NO: 23371 - RNA, 18 nt, Artificial Sequence
  Synthetic
gauucagcgccgacggga

SEQ ID NO: 23372 - RNA, 19 nt, Artificial Sequence
  Synthetic
ggauucagcgccgacggga

SEQ ID NO: 23373 - RNA, 20 nt, Artificial Sequence
  Synthetic
aggauucagcgccgacggga

SEQ ID NO: 23374 - RNA, 18 nt, Artificial Sequence
  Synthetic
  misc_feature (2)..(2): n is a, c, g, or u
anccuagcagccauggga

SEQ ID NO: 23375 - RNA, 19 nt, Artificial Sequence
  Synthetic
  misc_feature (3)..(3): n is a, c, g, or u
canccuagcagccauggga

SEQ ID NO: 23376 - RNA, 20 nt, Artificial Sequence
  Synthetic
  misc_feature (4)..(4): n is a, c, g, or u
acanccuagcagccauggga

SEQ ID NO: 23377 - RNA, 21 nt, Artificial Sequence
  Synthetic
  misc_feature (5)..(5): n is a, c, g, or u
cacanccuagcagccauggga

SEQ ID NO: 23378 - RNA, 22 nt, Artificial Sequence
  Synthetic
  misc_feature (6)..(6): n is a, c, g, or u
gcacanccuagcagccauggga

SEQ ID NO: 23379 - RNA, 23 nt, Artificial Sequence
  Synthetic
  misc_feature (7)..(7): n is a, c, g, or u
agcacanccuagcagccauggga

SEQ ID NO: 23380 - RNA, 24 nt, Artificial Sequence
  Synthetic
  misc_feature (8)..(8): n is a, c, g, or u
cagcacanccuagcagccauggga

SEQ ID NO: 23381 - RNA, 18 nt, Artificial Sequence
  Synthetic
aagcccaagaugauggga

SEQ ID NO: 23382 - RNA, 19 nt, Artificial Sequence
  Synthetic
aaagcccaagaugauggga

SEQ ID NO: 23383 - RNA, 20 nt, Artificial Sequence
  Synthetic
gaaagcccaagaugauggga

SEQ ID NO: 23384 - RNA, 21 nt, Artificial Sequence
  Synthetic
cgaaagcccaagaugauggga

SEQ ID NO: 23385 - RNA, 22 nt, Artificial Sequence
  Synthetic
ccgaaagcccaagaugauggga

SEQ ID NO: 23386 - RNA, 23 nt, Artificial Sequence
  Synthetic
uccgaaagcccaagaugauggga

SEQ ID NO: 23387 - RNA, 24 nt, Artificial Sequence
  Synthetic
uuccgaaagcccaagaugauggga

SEQ ID NO: 23388 - RNA, 18 nt, Artificial Sequence
  Synthetic
gaggcuugaacaguggga

SEQ ID NO: 23389 - RNA, 19 nt, Artificial Sequence
  Synthetic
ggaggcuugaacaguggga

SEQ ID NO: 23390 - RNA, 20 nt, Artificial Sequence
  Synthetic
uggaggcuugaacaguggga

SEQ ID NO: 23391 - RNA, 21 nt, Artificial Sequence
  Synthetic
uuggaggcuugaacaguggga

SEQ ID NO: 23392 - RNA, 22 nt, Artificial Sequence
  Synthetic
cuuggaggcuugaacaguggga

SEQ ID NO: 23393 - RNA, 23 nt, Artificial Sequence
  Synthetic
gcuuggaggcuugaacaguggga

SEQ ID NO: 23394 - RNA, 24 nt, Artificial Sequence
  Synthetic
agcuuggaggcuugaacaguggga

SEQ ID NO: 23395 - RNA, 18 nt, Artificial Sequence
  Synthetic
uauuuaguaacuuuggga

SEQ ID NO: 23396 - RNA, 19 nt, Artificial Sequence
  Synthetic
guauuuaguaacuuuggga

SEQ ID NO: 23397 - RNA, 20 nt, Artificial Sequence
  Synthetic
aguauuuaguaacuuuggga

SEQ ID NO: 23398 - RNA, 21 nt, Artificial Sequence
  Synthetic
aaguauuuaguaacuuuggga

SEQ ID NO: 23399 - RNA, 22 nt, Artificial Sequence
  Synthetic
gaaguauuuaguaacuuuggga

SEQ ID NO: 23400 - RNA, 23 nt, Artificial Sequence
  Synthetic
ggaaguauuuaguaacuuuggga

SEQ ID NO: 23401 - RNA, 24 nt, Artificial Sequence
  Synthetic
gggaaguauuuaguaacuuuggga

SEQ ID NO: 23402 - RNA, 18 nt, Artificial Sequence
  Synthetic
gggggugugaacccugga

SEQ ID NO: 23403 - RNA, 19 nt, Artificial Sequence
  Synthetic
ugggggugugaacccugga

SEQ ID NO: 23404 - RNA, 20 nt, Artificial Sequence
  Synthetic
gugggggugugaacccugga

SEQ ID NO: 23405 - RNA, 21 nt, Artificial Sequence
  Synthetic
ugugggggugugaacccugga

SEQ ID NO: 23406 - RNA, 22 nt, Artificial Sequence
  Synthetic
gugugggggugugaacccugga

SEQ ID NO: 23407 - RNA, 23 nt, Artificial Sequence
  Synthetic
cgugugggggugugaacccugga

SEQ ID NO: 23408 - RNA, 24 nt, Artificial Sequence
  Synthetic
ccgugugggggugugaacccugga

SEQ ID NO: 23409 - RNA, 18 nt, Artificial Sequence
  Synthetic
gugguuguagauccugga

SEQ ID NO: 23410 - RNA, 19 nt, Artificial Sequence
  Synthetic
ggugguuguagauccugga

SEQ ID NO: 23411 - RNA, 20 nt, Artificial Sequence
  Synthetic
uggugguuguagauccugga

SEQ ID NO: 23412 - RNA, 21 nt, Artificial Sequence
  Synthetic
cuggugguuguagauccugga

SEQ ID NO: 23413 - RNA, 22 nt, Artificial Sequence
  Synthetic
gcuggugguuguagauccugga

SEQ ID NO: 23414 - RNA, 23 nt, Artificial Sequence
  Synthetic
ugcuggugguuguagauccugga

SEQ ID NO: 23415 - RNA, 24 nt, Artificial Sequence
  Synthetic
gugcuggugguuguagauccugga

SEQ ID NO: 23416 - RNA, 18 nt, Artificial Sequence
  Synthetic
uuugcucugaauagugga

SEQ ID NO: 23417 - RNA, 19 nt, Artificial Sequence
  Synthetic
auuugcucugaauagugga

SEQ ID NO: 23418 - RNA, 20 nt, Artificial Sequence
  Synthetic
aauuugcucugaauagugga

SEQ ID NO: 23419 - RNA, 21 nt, Artificial Sequence
  Synthetic
gaauuugcucugaauagugga

SEQ ID NO: 23420 - RNA, 22 nt, Artificial Sequence
  Synthetic
ggaauuugcucugaauagugga

SEQ ID NO: 23421 - RNA, 23 nt, Artificial Sequence
  Synthetic
uggaauuugcucugaauagugga

SEQ ID NO: 23422 - RNA, 24 nt, Artificial Sequence
  Synthetic
cuggaauuugcucugaauagugga

SEQ ID NO: 23423 - RNA, 18 nt, Artificial Sequence
  Synthetic
ugaccuccgauuggugga

SEQ ID NO: 23424 - RNA, 19 nt, Artificial Sequence
  Synthetic
cugaccuccgauuggugga

SEQ ID NO: 23425 - RNA, 20 nt, Artificial Sequence
  Synthetic
ccugaccuccgauuggugga

SEQ ID NO: 23426 - RNA, 21 nt, Artificial Sequence
  Synthetic
uccugaccuccgauuggugga

SEQ ID NO: 23427 - RNA, 22 nt, Artificial Sequence
  Synthetic
uuccugaccuccgauuggugga

SEQ ID NO: 23428 - RNA, 23 nt, Artificial Sequence
  Synthetic
cuuccugaccuccgauuggugga

SEQ ID NO: 23429 - RNA, 24 nt, Artificial Sequence
  Synthetic
ucuuccugaccuccgauuggugga

SEQ ID NO: 23430 - RNA, 18 nt, Artificial Sequence
  Synthetic
  misc_feature (16)..(16): n is a, c, g, or u
ucuucugcgacgcggnga

SEQ ID NO: 23431 - RNA, 19 nt, Artificial Sequence
  Synthetic
  misc_feature (17)..(17): n is a, c, g, or u
aucuucugcgacgcggnga

SEQ ID NO: 23432 - RNA, 20 nt, Artificial Sequence
  Synthetic
  misc_feature (18)..(18): n is a, c, g, or u
gaucuucugcgacgcggnga

SEQ ID NO: 23433 - RNA, 21 nt, Artificial Sequence
  Synthetic
  misc_feature (19)..(19): n is a, c, g, or u
agaucuucugcgacgcggnga

SEQ ID NO: 23434 - RNA, 22 nt, Artificial Sequence
  Synthetic
  misc_feature (20)..(20): n is a, c, g, or u
gagaucuucugcgacgcggnga

SEQ ID NO: 23435 - RNA, 23 nt, Artificial Sequence
  Synthetic
  misc_feature (21)..(21): n is a, c, g, or u
ugagaucuucugcgacgcggnga

SEQ ID NO: 23436 - RNA, 24 nt, Artificial Sequence
  Synthetic
  misc_feature (22)..(22): n is a, c, g, or u
uugagaucuucugcgacgcggnga

SEQ ID NO: 23437 - RNA, 18 nt, Artificial Sequence
  Synthetic
uugaacagugggacauga

SEQ ID NO: 23438 - RNA, 19 nt, Artificial Sequence
  Synthetic
cuugaacagugggacauga

SEQ ID NO: 23439 - RNA, 20 nt, Artificial Sequence
  Synthetic
gcuugaacagugggacauga

SEQ ID NO: 23440 - RNA, 21 nt, Artificial Sequence
  Synthetic
ggcuugaacagugggacauga

SEQ ID NO: 23441 - RNA, 22 nt, Artificial Sequence
  Synthetic
aggcuugaacagugggacauga

SEQ ID NO: 23442 - RNA, 23 nt, Artificial Sequence
  Synthetic
gaggcuugaacagugggacauga

SEQ ID NO: 23443 - RNA, 24 nt, Artificial Sequence
  Synthetic
ggaggcuugaacagugggacauga

SEQ ID NO: 23444 - RNA, 18 nt, Artificial Sequence
  Synthetic
gacaugaacaaaagauga

SEQ ID NO: 23445 - RNA, 19 nt, Artificial Sequence
  Synthetic
ggacaugaacaaaagauga

SEQ ID NO: 23446 - RNA, 20 nt, Artificial Sequence
  Synthetic
gggacaugaacaaaagauga

SEQ ID NO: 23447 - RNA, 21 nt, Artificial Sequence
  Synthetic
ugggacaugaacaaaagauga

SEQ ID NO: 23448 - RNA, 22 nt, Artificial Sequence
  Synthetic
gugggacaugaacaaaagauga

SEQ ID NO: 23449 - RNA, 23 nt, Artificial Sequence
  Synthetic
agugggacaugaacaaaagauga

SEQ ID NO: 23450 - RNA, 24 nt, Artificial Sequence
  Synthetic
cagugggacaugaacaaaagauga

SEQ ID NO: 23451 - RNA, 18 nt, Artificial Sequence
  Synthetic
ggaugaagaggaagauga

SEQ ID NO: 23452 - RNA, 19 nt, Artificial Sequence
  Synthetic
aggaugaagaggaagauga

SEQ ID NO: 23453 - RNA, 20 nt, Artificial Sequence
  Synthetic
caggaugaagaggaagauga

SEQ ID NO: 23454 - RNA, 21 nt, Artificial Sequence
  Synthetic
gcaggaugaagaggaagauga

SEQ ID NO: 23455 - RNA, 22 nt, Artificial Sequence
  Synthetic
agcaggaugaagaggaagauga

SEQ ID NO: 23456 - RNA, 23 nt, Artificial Sequence
  Synthetic
cagcaggaugaagaggaagauga

SEQ ID NO: 23457 - RNA, 24 nt, Artificial Sequence
  Synthetic
gcagcaggaugaagaggaagauga

SEQ ID NO: 23458 - RNA, 18 nt, Artificial Sequence
  Synthetic
acacgggccggcagauga

SEQ ID NO: 23459 - RNA, 19 nt, Artificial Sequence
  Synthetic
cacacgggccggcagauga

SEQ ID NO: 23460 - RNA, 20 nt, Artificial Sequence
  Synthetic
gcacacgggccggcagauga

SEQ ID NO: 23461 - RNA, 18 nt, Artificial Sequence
  Synthetic
ggcauagcagcaggauga

SEQ ID NO: 23462 - RNA, 19 nt, Artificial Sequence
  Synthetic
aggcauagcagcaggauga

SEQ ID NO: 23463 - RNA, 20 nt, Artificial Sequence
  Synthetic
gaggcauagcagcaggauga

SEQ ID NO: 23464 - RNA, 21 nt, Artificial Sequence
  Synthetic
ugaggcauagcagcaggauga

SEQ ID NO: 23465 - RNA, 22 nt, Artificial Sequence
  Synthetic
augaggcauagcagcaggauga

SEQ ID NO: 23466 - RNA, 23 nt, Artificial Sequence
  Synthetic
gaugaggcauagcagcaggauga

SEQ ID NO: 23467 - RNA, 24 nt, Artificial Sequence
  Synthetic
agaugaggcauagcagcaggauga

SEQ ID NO: 23468 - RNA, 18 nt, Artificial Sequence
  Synthetic
cuucgagaagauugauga

SEQ ID NO: 23469 - RNA, 19 nt, Artificial Sequence
  Synthetic
ucuucgagaagauugauga

SEQ ID NO: 23470 - RNA, 20 nt, Artificial Sequence
  Synthetic
gucuucgagaagauugauga

SEQ ID NO: 23471 - RNA, 21 nt, Artificial Sequence
  Synthetic
agucuucgagaagauugauga

SEQ ID NO: 23472 - RNA, 22 nt, Artificial Sequence
  Synthetic
cagucuucgagaagauugauga

SEQ ID NO: 23473 - RNA, 23 nt, Artificial Sequence
  Synthetic
ccagucuucgagaagauugauga

SEQ ID NO: 23474 - RNA, 24 nt, Artificial Sequence
  Synthetic
cccagucuucgagaagauugauga

SEQ ID NO: 23475 - RNA, 18 nt, Artificial Sequence
  Synthetic
auugcacuaguaaacuga

SEQ ID NO: 23476 - RNA, 19 nt, Artificial Sequence
  Synthetic
aauugcacuaguaaacuga

SEQ ID NO: 23477 - RNA, 20 nt, Artificial Sequence
  Synthetic
aaauugcacuaguaaacuga

SEQ ID NO: 23478 - RNA, 21 nt, Artificial Sequence
  Synthetic
caaauugcacuaguaaacuga

SEQ ID NO: 23479 - RNA, 22 nt, Artificial Sequence
  Synthetic
acaaauugcacuaguaaacuga

SEQ ID NO: 23480 - RNA, 23 nt, Artificial Sequence
  Synthetic
aacaaauugcacuaguaaacuga

SEQ ID NO: 23481 - RNA, 24 nt, Artificial Sequence
  Synthetic
gaacaaauugcacuaguaaacuga

SEQ ID NO: 23482 - RNA, 18 nt, Artificial Sequence
  Synthetic
ugcacaauauguuccuga

SEQ ID NO: 23483 - RNA, 19 nt, Artificial Sequence
  Synthetic
augcacaauauguuccuga

SEQ ID NO: 23484 - RNA, 20 nt, Artificial Sequence
  Synthetic
uaugcacaauauguuccuga

SEQ ID NO: 23485 - RNA, 21 nt, Artificial Sequence
  Synthetic
uuaugcacaauauguuccuga

SEQ ID NO: 23486 - RNA, 22 nt, Artificial Sequence
  Synthetic
uuuaugcacaauauguuccuga

SEQ ID NO: 23487 - RNA, 23 nt, Artificial Sequence
  Synthetic
uuuuaugcacaauauguuccuga

SEQ ID NO: 23488 - RNA, 24 nt, Artificial Sequence
  Synthetic
auuuuaugcacaauauguuccuga

SEQ ID NO: 23489 - RNA, 18 nt, Artificial Sequence
  Synthetic
aggguucuguguuucuga

SEQ ID NO: 23490 - RNA, 19 nt, Artificial Sequence
  Synthetic
caggguucuguguuucuga

SEQ ID NO: 23491 - RNA, 20 nt, Artificial Sequence
  Synthetic
gcaggguucuguguuucuga

SEQ ID NO: 23492 - RNA, 21 nt, Artificial Sequence
  Synthetic
agcaggguucuguguuucuga

SEQ ID NO: 23493 - RNA, 22 nt, Artificial Sequence
  Synthetic
gagcaggguucuguguuucuga

SEQ ID NO: 23494 - RNA, 23 nt, Artificial Sequence
  Synthetic
ggagcaggguucuguguuucuga

SEQ ID NO: 23495 - RNA, 24 nt, Artificial Sequence
  Synthetic
cggagcaggguucuguguuucuga

SEQ ID NO: 23496 - RNA, 18 nt, Artificial Sequence
  Synthetic
caggagguugguaaguga

SEQ ID NO: 23497 - RNA, 19 nt, Artificial Sequence
  Synthetic
acaggagguugguaaguga

SEQ ID NO: 23498 - RNA, 20 nt, Artificial Sequence
  Synthetic
gacaggagguugguaaguga

SEQ ID NO: 23499 - RNA, 21 nt, Artificial Sequence
  Synthetic
ggacaggagguugguaaguga

SEQ ID NO: 23500 - RNA, 22 nt, Artificial Sequence
  Synthetic
aggacaggagguugguaaguga

SEQ ID NO: 23501 - RNA, 23 nt, Artificial Sequence
  Synthetic
gaggacaggagguugguaaguga

SEQ ID NO: 23502 - RNA, 24 nt, Artificial Sequence
  Synthetic
ggaggacaggagguugguaaguga

SEQ ID NO: 23503 - RNA, 18 nt, Artificial Sequence
  Synthetic
  misc_feature (12)..(12): n is a, c, g, or u
uccuuucauuunuaguga

SEQ ID NO: 23504 - RNA, 19 nt, Artificial Sequence
  Synthetic
  misc_feature (13)..(13): n is a, c, g, or u
cuccuuucauuunuaguga

SEQ ID NO: 23505 - RNA, 20 nt, Artificial Sequence
  Synthetic
  misc_feature (14)..(14): n is a, c, g, or u
ucuccuuucauuunuaguga

SEQ ID NO: 23506 - RNA, 21 nt, Artificial Sequence
  Synthetic
  misc_feature (15)..(15): n is a, c, g, or u
gucuccuuucauuunuaguga

SEQ ID NO: 23507 - RNA, 22 nt, Artificial Sequence
  Synthetic
  misc_feature (16)..(16): n is a, c, g, or u
cgucuccuuucauuunuaguga

SEQ ID NO: 23508 - RNA, 23 nt, Artificial Sequence
  Synthetic
  misc_feature (17)..(17): n is a, c, g, or u
ucgucuccuuucauuunuaguga

SEQ ID NO: 23509 - RNA, 24 nt, Artificial Sequence
  Synthetic
  misc_feature (18)..(18): n is a, c, g, or u
aucgucuccuuucauuunuaguga

SEQ ID NO: 23510 - RNA, 18 nt, Artificial Sequence
  Synthetic
ugcgacgugcagagguga

SEQ ID NO: 23511 - RNA, 19 nt, Artificial Sequence
  Synthetic
augcgacgugcagagguga

SEQ ID NO: 23512 - RNA, 20 nt, Artificial Sequence
  Synthetic
caugcgacgugcagagguga

SEQ ID NO: 23513 - RNA, 21 nt, Artificial Sequence
  Synthetic
ccaugcgacgugcagagguga

SEQ ID NO: 23514 - RNA, 22 nt, Artificial Sequence
  Synthetic
uccaugcgacgugcagagguga

SEQ ID NO: 23515 - RNA, 23 nt, Artificial Sequence
  Synthetic
cuccaugcgacgugcagagguga

SEQ ID NO: 23516 - RNA, 24 nt, Artificial Sequence
  Synthetic
ucuccaugcgacgugcagagguga

SEQ ID NO: 23517 - RNA, 18 nt, Artificial Sequence
  Synthetic
guugcauggugcugguga

SEQ ID NO: 23518 - RNA, 19 nt, Artificial Sequence
  Synthetic
aguugcauggugcugguga

SEQ ID NO: 23519 - RNA, 20 nt, Artificial Sequence
  Synthetic
aaguugcauggugcugguga

SEQ ID NO: 23520 - RNA, 21 nt, Artificial Sequence
  Synthetic
aaaguugcauggugcugguga

SEQ ID NO: 23521 - RNA, 22 nt, Artificial Sequence
  Synthetic
aaaaguugcauggugcugguga

SEQ ID NO: 23522 - RNA, 23 nt, Artificial Sequence
  Synthetic
aaaaaguugcauggugcugguga

SEQ ID NO: 23523 - RNA, 24 nt, Artificial Sequence
  Synthetic
gaaaaaguugcauggugcugguga

SEQ ID NO: 23524 - RNA, 18 nt, Artificial Sequence
  Synthetic
agaagauugaugauguga

SEQ ID NO: 23525 - RNA, 19 nt, Artificial Sequence
  Synthetic
gagaagauugaugauguga

SEQ ID NO: 23526 - RNA, 20 nt, Artificial Sequence
  Synthetic
cgagaagauugaugauguga

SEQ ID NO: 23527 - RNA, 21 nt, Artificial Sequence
  Synthetic
ucgagaagauugaugauguga

SEQ ID NO: 23528 - RNA, 22 nt, Artificial Sequence
  Synthetic
uucgagaagauugaugauguga

SEQ ID NO: 23529 - RNA, 23 nt, Artificial Sequence
  Synthetic
cuucgagaagauugaugauguga

SEQ ID NO: 23530 - RNA, 24 nt, Artificial Sequence
  Synthetic
ucuucgagaagauugaugauguga

SEQ ID NO: 23531 - RNA, 18 nt, Artificial Sequence
  Synthetic
guaccccuagaaaauuga

SEQ ID NO: 23532 - RNA, 19 nt, Artificial Sequence
  Synthetic
gguaccccuagaaaauuga

SEQ ID NO: 23533 - RNA, 20 nt, Artificial Sequence
  Synthetic
ugguaccccuagaaaauuga

SEQ ID NO: 23534 - RNA, 18 nt, Artificial Sequence
  Synthetic
gcaggauaaccacauuga

SEQ ID NO: 23535 - RNA, 19 nt, Artificial Sequence
  Synthetic
agcaggauaaccacauuga

SEQ ID NO: 23536 - RNA, 20 nt, Artificial Sequence
  Synthetic
gagcaggauaaccacauuga

SEQ ID NO: 23537 - RNA, 21 nt, Artificial Sequence
  Synthetic
agagcaggauaaccacauuga

SEQ ID NO: 23538 - RNA, 22 nt, Artificial Sequence
  Synthetic
gagagcaggauaaccacauuga

SEQ ID NO: 23539 - RNA, 23 nt, Artificial Sequence
  Synthetic
ugagagcaggauaaccacauuga

SEQ ID NO: 23540 - RNA, 24 nt, Artificial Sequence
  Synthetic
augagagcaggauaaccacauuga

SEQ ID NO: 23541 - RNA, 18 nt, Artificial Sequence
  Synthetic
aacauagagguuccuuga

SEQ ID NO: 23542 - RNA, 19 nt, Artificial Sequence
  Synthetic
aaacauagagguuccuuga

SEQ ID NO: 23543 - RNA, 20 nt, Artificial Sequence
  Synthetic
gaaacauagagguuccuuga

SEQ ID NO: 23544 - RNA, 21 nt, Artificial Sequence
  Synthetic
ggaaacauagagguuccuuga

SEQ ID NO: 23545 - RNA, 22 nt, Artificial Sequence
  Synthetic
gggaaacauagagguuccuuga

SEQ ID NO: 23546 - RNA, 23 nt, Artificial Sequence
  Synthetic
agggaaacauagagguuccuuga

SEQ ID NO: 23547 - RNA, 24 nt, Artificial Sequence
  Synthetic
gagggaaacauagagguuccuuga

SEQ ID NO: 23548 - RNA, 18 nt, Artificial Sequence
  Synthetic
  misc_feature (11)..(11): n is a, c, g, or u
uuuuguaucanaucuuga

SEQ ID NO: 23549 - RNA, 19 nt, Artificial Sequence
  Synthetic
  misc_feature (12)..(12): n is a, c, g, or u
uuuuuguaucanaucuuga

SEQ ID NO: 23550 - RNA, 20 nt, Artificial Sequence
  Synthetic
  misc_feature (13)..(13): n is a, c, g, or u
auuuuuguaucanaucuuga

SEQ ID NO: 23551 - RNA, 21 nt, Artificial Sequence
  Synthetic
  misc_feature (14)..(14): n is a, c, g, or u
cauuuuuguaucanaucuuga

SEQ ID NO: 23552 - RNA, 22 nt, Artificial Sequence
  Synthetic
  misc_feature (15)..(15): n is a, c, g, or u
acauuuuuguaucanaucuuga

SEQ ID NO: 23553 - RNA, 23 nt, Artificial Sequence
  Synthetic
  misc_feature (16)..(16): n is a, c, g, or u
cacauuuuuguaucanaucuuga

SEQ ID NO: 23554 - RNA, 24 nt, Artificial Sequence
  Synthetic
  misc_feature (17)..(17): n is a, c, g, or u
ucacauuuuuguaucanaucuuga

SEQ ID NO: 23555 - RNA, 18 nt, Artificial Sequence
  Synthetic
gccccuucucgccguuga

SEQ ID NO: 23556 - RNA, 19 nt, Artificial Sequence
  Synthetic
ugccccuucucgccguuga

SEQ ID NO: 23557 - RNA, 20 nt, Artificial Sequence
  Synthetic
augccccuucucgccguuga

SEQ ID NO: 23558 - RNA, 21 nt, Artificial Sequence
  Synthetic
caugccccuucucgccguuga

SEQ ID NO: 23559 - RNA, 22 nt, Artificial Sequence
  Synthetic
ccaugccccuucucgccguuga

SEQ ID NO: 23560 - RNA, 23 nt, Artificial Sequence
  Synthetic
cccaugccccuucucgccguuga

SEQ ID NO: 23561 - RNA, 24 nt, Artificial Sequence
  Synthetic
ucccaugccccuucucgccguuga

SEQ ID NO: 23562 - RNA, 18 nt, Artificial Sequence
  Synthetic
cucaauccaggucguuga

SEQ ID NO: 23563 - RNA, 19 nt, Artificial Sequence
  Synthetic
ccucaauccaggucguuga

SEQ ID NO: 23564 - RNA, 20 nt, Artificial Sequence
  Synthetic
uccucaauccaggucguuga

SEQ ID NO: 23565 - RNA, 21 nt, Artificial Sequence
  Synthetic
uuccucaauccaggucguuga

SEQ ID NO: 23566 - RNA, 22 nt, Artificial Sequence
  Synthetic
auuccucaauccaggucguuga

SEQ ID NO: 23567 - RNA, 23 nt, Artificial Sequence
  Synthetic
uauuccucaauccaggucguuga

SEQ ID NO: 23568 - RNA, 24 nt, Artificial Sequence
  Synthetic
guauuccucaauccaggucguuga

SEQ ID NO: 23569 - RNA, 18 nt, Artificial Sequence
  Synthetic
  misc_feature (17)..(17): n is a, c, g, or u
ggauugaaaacagguana

SEQ ID NO: 23570 - RNA, 19 nt, Artificial Sequence
  Synthetic
  misc_feature (18)..(18): n is a, c, g, or u
aggauugaaaacagguana

SEQ ID NO: 23571 - RNA, 20 nt, Artificial Sequence
  Synthetic
  misc_feature (19)..(19): n is a, c, g, or u
caggauugaaaacagguana

SEQ ID NO: 23572 - RNA, 21 nt, Artificial Sequence
  Synthetic
  misc_feature (20)..(20): n is a, c, g, or u
ucaggauugaaaacagguana

SEQ ID NO: 23573 - RNA, 22 nt, Artificial Sequence
  Synthetic
  misc_feature (21)..(21): n is a, c, g, or u
gucaggauugaaaacagguana

SEQ ID NO: 23574 - RNA, 23 nt, Artificial Sequence
  Synthetic
  misc_feature (22)..(22): n is a, c, g, or u
agucaggauugaaaacagguana

SEQ ID NO: 23575 - RNA, 24 nt, Artificial Sequence
  Synthetic
  misc_feature (23)..(23): n is a, c, g, or u
cagucaggauugaaaacagguana

SEQ ID NO: 23576 - RNA, 18 nt, Artificial Sequence
  Synthetic
  misc_feature (16)..(17): n is a, c, g, or u
ucgucggccggaacgnna

SEQ ID NO: 23577 - RNA, 19 nt, Artificial Sequence
  Synthetic
  misc_feature (17)..(18): n is a, c, g, or u
gucgucggccggaacgnna

SEQ ID NO: 23578 - RNA, 20 nt, Artificial Sequence
  Synthetic
  misc_feature (18)..(19): n is a, c, g, or u
cgucgucggccggaacgnna

SEQ ID NO: 23579 - RNA, 21 nt, Artificial Sequence
  Synthetic
  misc_feature (19)..(20): n is a, c, g, or u
ccgucgucggccggaacgnna

SEQ ID NO: 23580 - RNA, 22 nt, Artificial Sequence
  Synthetic
  misc_feature (20)..(21): n is a, c, g, or u
cccgucgucggccggaacgnna

SEQ ID NO: 23581 - RNA, 23 nt, Artificial Sequence
  Synthetic
  misc_feature (21)..(22): n is a, c, g, or u
acccgucgucggccggaacgnna

SEQ ID NO: 23582 - RNA, 24 nt, Artificial Sequence
  Synthetic
  misc_feature (22)..(23): n is a, c, g, or u
gacccgucgucggccggaacgnna

SEQ ID NO: 23583 - RNA, 18 nt, Artificial Sequence
  Synthetic
  misc_feature (17)..(17): n is a, c, g, or u
ucccccaacucccaauna

SEQ ID NO: 23584 - RNA, 19 nt, Artificial Sequence
  Synthetic
  misc_feature (18)..(18): n is a, c, g, or u
gucccccaacucccaauna

SEQ ID NO: 23585 - RNA, 20 nt, Artificial Sequence
  Synthetic
  misc_feature (1)..(1): n is a, c, g, or u
  misc_feature (19)..(19): n is a, c, g, or u
ngucccccaacucccaauna

SEQ ID NO: 23586 - RNA, 21 nt, Artificial Sequence
  Synthetic
  misc_feature (2)..(2): n is a, c, g, or u
  misc_feature (20)..(20): n is a, c, g, or u
angucccccaacucccaauna

SEQ ID NO: 23587 - RNA, 22 nt, Artificial Sequence
  Synthetic
  misc_feature (3)..(3): n is a, c, g, or u
  misc_feature (21)..(21): n is a, c, g, or u
aangucccccaacucccaauna

SEQ ID NO: 23588 - RNA, 23 nt, Artificial Sequence
  Synthetic
  misc_feature (4)..(4): n is a, c, g, or u
  misc_feature (22)..(22): n is a, c, g, or u
caangucccccaacucccaauna

SEQ ID NO: 23589 - RNA, 24 nt, Artificial Sequence
  Synthetic
  misc_feature (5)..(5): n is a, c, g, or u
  misc_feature (23)..(23): n is a, c, g, or u
gcaangucccccaacucccaauna

SEQ ID NO: 23590 - RNA, 18 nt, Artificial Sequence
  Synthetic
uccaaaagacaccaaaua

SEQ ID NO: 23591 - RNA, 19 nt, Artificial Sequence
  Synthetic
cuccaaaagacaccaaaua

SEQ ID NO: 23592 - RNA, 20 nt, Artificial Sequence
  Synthetic
acuccaaaagacaccaaaua

SEQ ID NO: 23593 - RNA, 21 nt, Artificial Sequence
  Synthetic
cacuccaaaagacaccaaaua

SEQ ID NO: 23594 - RNA, 22 nt, Artificial Sequence
  Synthetic
acacuccaaaagacaccaaaua

SEQ ID NO: 23595 - RNA, 23 nt, Artificial Sequence
  Synthetic
cacacuccaaaagacaccaaaua

SEQ ID NO: 23596 - RNA, 24 nt, Artificial Sequence
  Synthetic
ccacacuccaaaagacaccaaaua

SEQ ID NO: 23597 - RNA, 18 nt, Artificial Sequence
  Synthetic
gaugugagagaggcaaua

SEQ ID NO: 23598 - RNA, 19 nt, Artificial Sequence
  Synthetic
ugaugugagagaggcaaua

SEQ ID NO: 23599 - RNA, 20 nt, Artificial Sequence
  Synthetic
augaugugagagaggcaaua

SEQ ID NO: 23600 - RNA, 21 nt, Artificial Sequence
  Synthetic
gaugaugugagagaggcaaua

SEQ ID NO: 23601 - RNA, 22 nt, Artificial Sequence
  Synthetic
ugaugaugugagagaggcaaua

SEQ ID NO: 23602 - RNA, 23 nt, Artificial Sequence
  Synthetic
uugaugaugugagagaggcaaua

SEQ ID NO: 23603 - RNA, 24 nt, Artificial Sequence
  Synthetic
auugaugaugugagagaggcaaua

SEQ ID NO: 23604 - RNA, 18 nt, Artificial Sequence
  Synthetic
gccuacagccuccuaaua

SEQ ID NO: 23605 - RNA, 19 nt, Artificial Sequence
  Synthetic
ugccuacagccuccuaaua

SEQ ID NO: 23606 - RNA, 20 nt, Artificial Sequence
  Synthetic
augccuacagccuccuaaua

SEQ ID NO: 23607 - RNA, 21 nt, Artificial Sequence
  Synthetic
uaugccuacagccuccuaaua

SEQ ID NO: 23608 - RNA, 22 nt, Artificial Sequence
  Synthetic
uuaugccuacagccuccuaaua

SEQ ID NO: 23609 - RNA, 23 nt, Artificial Sequence
  Synthetic
uuuaugccuacagccuccuaaua

SEQ ID NO: 23610 - RNA, 24 nt, Artificial Sequence
  Synthetic
auuuaugccuacagccuccuaaua

SEQ ID NO: 23611 - RNA, 18 nt, Artificial Sequence
  Synthetic
  misc_feature (4)..(4): n is a, c, g, or u
caunuuaguauugacaua

SEQ ID NO: 23612 - RNA, 19 nt, Artificial Sequence
  Synthetic
  misc_feature (5)..(5): n is a, c, g, or u
ccaunuuaguauugacaua

SEQ ID NO: 23613 - RNA, 20 nt, Artificial Sequence
  Synthetic
  misc_feature (6)..(6): n is a, c, g, or u
cccaunuuaguauugacaua

SEQ ID NO: 23614 - RNA, 21 nt, Artificial Sequence
  Synthetic
  misc_feature (1)..(1): n is a, c, g, or u
  misc_feature (7)..(7): n is a, c, g, or u
ncccaunuuaguauugacaua

SEQ ID NO: 23615 - RNA, 22 nt, Artificial Sequence
  Synthetic
  misc_feature (2)..(2): n is a, c, g, or u
  misc_feature (8)..(8): n is a, c, g, or u
gncccaunuuaguauugacaua

SEQ ID NO: 23616 - RNA, 23 nt, Artificial Sequence
  Synthetic
  misc_feature (3)..(3): n is a, c, g, or u
  misc_feature (9)..(9): n is a, c, g, or u
agncccaunuuaguauugacaua

SEQ ID NO: 23617 - RNA, 24 nt, Artificial Sequence
  Synthetic
  misc_feature (4)..(4): n is a, c, g, or u
  misc_feature (10)..(10): n is a, c, g, or u
uagncccaunuuaguauugacaua

SEQ ID NO: 23618 - RNA, 18 nt, Artificial Sequence
  Synthetic
agcgguaauacaggcaua

SEQ ID NO: 23619 - RNA, 19 nt, Artificial Sequence
  Synthetic
uagcgguaauacaggcaua

SEQ ID NO: 23620 - RNA, 20 nt, Artificial Sequence
  Synthetic
uuagcgguaauacaggcaua

SEQ ID NO: 23621 - RNA, 21 nt, Artificial Sequence
  Synthetic
cuuagcgguaauacaggcaua

SEQ ID NO: 23622 - RNA, 22 nt, Artificial Sequence
  Synthetic
gcuuagcgguaauacaggcaua

SEQ ID NO: 23623 - RNA, 23 nt, Artificial Sequence
  Synthetic
ugcuuagcgguaauacaggcaua

SEQ ID NO: 23624 - RNA, 24 nt, Artificial Sequence
  Synthetic
cugcuuagcgguaauacaggcaua

SEQ ID NO: 23625 - RNA, 18 nt, Artificial Sequence
  Synthetic
auguucuccauguucaua

SEQ ID NO: 23626 - RNA, 19 nt, Artificial Sequence
  Synthetic
gauguucuccauguucaua

SEQ ID NO: 23627 - RNA, 20 nt, Artificial Sequence
  Synthetic
ugauguucuccauguucaua

SEQ ID NO: 23628 - RNA, 21 nt, Artificial Sequence
  Synthetic
gugauguucuccauguucaua

SEQ ID NO: 23629 - RNA, 22 nt, Artificial Sequence
  Synthetic
ugugauguucuccauguucaua

SEQ ID NO: 23630 - RNA, 23 nt, Artificial Sequence
  Synthetic
augugauguucuccauguucaua

SEQ ID NO: 23631 - RNA, 24 nt, Artificial Sequence
  Synthetic
gaugugauguucuccauguucaua

SEQ ID NO: 23632 - RNA, 18 nt, Artificial Sequence
  Synthetic
aauggaugcccacagaua

SEQ ID NO: 23633 - RNA, 19 nt, Artificial Sequence
  Synthetic
aaauggaugcccacagaua

SEQ ID NO: 23634 - RNA, 20 nt, Artificial Sequence
  Synthetic
caaauggaugcccacagaua

SEQ ID NO: 23635 - RNA, 21 nt, Artificial Sequence
  Synthetic
ucaaauggaugcccacagaua

SEQ ID NO: 23636 - RNA, 22 nt, Artificial Sequence
  Synthetic
uucaaauggaugcccacagaua

SEQ ID NO: 23637 - RNA, 23 nt, Artificial Sequence
  Synthetic
guucaaauggaugcccacagaua

SEQ ID NO: 23638 - RNA, 24 nt, Artificial Sequence
  Synthetic
uguucaaauggaugcccacagaua

SEQ ID NO: 23639 - RNA, 18 nt, Artificial Sequence
  Synthetic
cagacacauccaacgaua

SEQ ID NO: 23640 - RNA, 19 nt, Artificial Sequence
  Synthetic
gcagacacauccaacgaua

SEQ ID NO: 23641 - RNA, 20 nt, Artificial Sequence
  Synthetic
cgcagacacauccaacgaua

SEQ ID NO: 23642 - RNA, 18 nt, Artificial Sequence
  Synthetic
aaccacauucucuggaua

SEQ ID NO: 23643 - RNA, 19 nt, Artificial Sequence
  Synthetic
uaaccacauucucuggaua

SEQ ID NO: 23644 - RNA, 20 nt, Artificial Sequence
  Synthetic
uuaaccacauucucuggaua

SEQ ID NO: 23645 - RNA, 21 nt, Artificial Sequence
  Synthetic
auuaaccacauucucuggaua

SEQ ID NO: 23646 - RNA, 22 nt, Artificial Sequence
  Synthetic
gauuaaccacauucucuggaua

SEQ ID NO: 23647 - RNA, 23 nt, Artificial Sequence
  Synthetic
ugauuaaccacauucucuggaua

SEQ ID NO: 23648 - RNA, 24 nt, Artificial Sequence
  Synthetic
augauuaaccacauucucuggaua

SEQ ID NO: 23649 - RNA, 18 nt, Artificial Sequence
  Synthetic
  misc_feature (6)..(6): n is a, c, g, or u
uaccanaucauccauaua

SEQ ID NO: 23650 - RNA, 19 nt, Artificial Sequence
  Synthetic
  misc_feature (7)..(7): n is a, c, g, or u
auaccanaucauccauaua

SEQ ID NO: 23651 - RNA, 20 nt, Artificial Sequence
  Synthetic
  misc_feature (8)..(8): n is a, c, g, or u
aauaccanaucauccauaua

SEQ ID NO: 23652 - RNA, 21 nt, Artificial Sequence
  Synthetic
  misc_feature (9)..(9): n is a, c, g, or u
caauaccanaucauccauaua

SEQ ID NO: 23653 - RNA, 22 nt, Artificial Sequence
  Synthetic
  misc_feature (10)..(10): n is a, c, g, or u
ccaauaccanaucauccauaua

SEQ ID NO: 23654 - RNA, 23 nt, Artificial Sequence
  Synthetic
  misc_feature (11)..(11): n is a, c, g, or u
cccaauaccanaucauccauaua

SEQ ID NO: 23655 - RNA, 24 nt, Artificial Sequence
  Synthetic
  misc_feature (12)..(12): n is a, c, g, or u
ccccaauaccanaucauccauaua

SEQ ID NO: 23656 - RNA, 18 nt, Artificial Sequence
  Synthetic
auugguaacagcgguaua

SEQ ID NO: 23657 - RNA, 19 nt, Artificial Sequence
  Synthetic
aauugguaacagcgguaua

SEQ ID NO: 23658 - RNA, 20 nt, Artificial Sequence
  Synthetic
aaauugguaacagcgguaua

SEQ ID NO: 23659 - RNA, 21 nt, Artificial Sequence
  Synthetic
aaaauugguaacagcgguaua

SEQ ID NO: 23660 - RNA, 22 nt, Artificial Sequence
  Synthetic
aaaaauugguaacagcgguaua

SEQ ID NO: 23661 - RNA, 23 nt, Artificial Sequence
  Synthetic
aaaaaauugguaacagcgguaua

SEQ ID NO: 23662 - RNA, 24 nt, Artificial Sequence
  Synthetic
caaaaaauugguaacagcgguaua

SEQ ID NO: 23663 - RNA, 18 nt, Artificial Sequence
  Synthetic
acugaacaaauugcacua

SEQ ID NO: 23664 - RNA, 19 nt, Artificial Sequence
  Synthetic
cacugaacaaauugcacua

SEQ ID NO: 23665 - RNA, 20 nt, Artificial Sequence
  Synthetic
ccacugaacaaauugcacua

SEQ ID NO: 23666 - RNA, 21 nt, Artificial Sequence
  Synthetic
accacugaacaaauugcacua

SEQ ID NO: 23667 - RNA, 22 nt, Artificial Sequence
  Synthetic
caccacugaacaaauugcacua

SEQ ID NO: 23668 - RNA, 23 nt, Artificial Sequence
  Synthetic
gcaccacugaacaaauugcacua

SEQ ID NO: 23669 - RNA, 24 nt, Artificial Sequence
  Synthetic
cgcaccacugaacaaauugcacua

SEQ ID NO: 23670 - RNA, 18 nt, Artificial Sequence
  Synthetic
acuuugggauaaaaccua

SEQ ID NO: 23671 - RNA, 19 nt, Artificial Sequence
  Synthetic
aacuuugggauaaaaccua

SEQ ID NO: 23672 - RNA, 20 nt, Artificial Sequence
  Synthetic
uaacuuugggauaaaaccua

SEQ ID NO: 23673 - RNA, 21 nt, Artificial Sequence
  Synthetic
guaacuuugggauaaaaccua

SEQ ID NO: 23674 - RNA, 22 nt, Artificial Sequence
  Synthetic
aguaacuuugggauaaaaccua

SEQ ID NO: 23675 - RNA, 23 nt, Artificial Sequence
  Synthetic
uaguaacuuugggauaaaaccua

SEQ ID NO: 23676 - RNA, 24 nt, Artificial Sequence
  Synthetic
uuaguaacuuugggauaaaaccua

SEQ ID NO: 23677 - RNA, 18 nt, Artificial Sequence
  Synthetic
ccugccuuccacaaagua

SEQ ID NO: 23678 - RNA, 19 nt, Artificial Sequence
  Synthetic
uccugccuuccacaaagua

SEQ ID NO: 23679 - RNA, 20 nt, Artificial Sequence
  Synthetic
uuccugccuuccacaaagua

SEQ ID NO: 23680 - RNA, 21 nt, Artificial Sequence
  Synthetic
auuccugccuuccacaaagua

SEQ ID NO: 23681 - RNA, 22 nt, Artificial Sequence
  Synthetic
aauuccugccuuccacaaagua

SEQ ID NO: 23682 - RNA, 23 nt, Artificial Sequence
  Synthetic
gaauuccugccuuccacaaagua

SEQ ID NO: 23683 - RNA, 24 nt, Artificial Sequence
  Synthetic
agaauuccugccuuccacaaagua

SEQ ID NO: 23684 - RNA, 18 nt, Artificial Sequence
  Synthetic
uuguagauccuggaagua

SEQ ID NO: 23685 - RNA, 19 nt, Artificial Sequence
  Synthetic
guuguagauccuggaagua

SEQ ID NO: 23686 - RNA, 20 nt, Artificial Sequence
  Synthetic
gguuguagauccuggaagua

SEQ ID NO: 23687 - RNA, 21 nt, Artificial Sequence
  Synthetic
ugguuguagauccuggaagua

SEQ ID NO: 23688 - RNA, 22 nt, Artificial Sequence
  Synthetic
gugguuguagauccuggaagua

SEQ ID NO: 23689 - RNA, 23 nt, Artificial Sequence
  Synthetic
ggugguuguagauccuggaagua

SEQ ID NO: 23690 - RNA, 24 nt, Artificial Sequence
  Synthetic
uggugguuguagauccuggaagua

SEQ ID NO: 23691 - RNA, 18 nt, Artificial Sequence
  Synthetic
ggauaaccacauugagua

SEQ ID NO: 23692 - RNA, 19 nt, Artificial Sequence
  Synthetic
aggauaaccacauugagua

SEQ ID NO: 23693 - RNA, 20 nt, Artificial Sequence
  Synthetic
caggauaaccacauugagua

SEQ ID NO: 23694 - RNA, 21 nt, Artificial Sequence
  Synthetic
gcaggauaaccacauugagua

SEQ ID NO: 23695 - RNA, 22 nt, Artificial Sequence
  Synthetic
agcaggauaaccacauugagua

SEQ ID NO: 23696 - RNA, 23 nt, Artificial Sequence
  Synthetic
gagcaggauaaccacauugagua

SEQ ID NO: 23697 - RNA, 24 nt, Artificial Sequence
  Synthetic
agagcaggauaaccacauugagua

SEQ ID NO: 23698 - RNA, 18 nt, Artificial Sequence
  Synthetic
  misc_feature (14)..(14): n is a, c, g, or u
uugaaaacagguanagua

SEQ ID NO: 23699 - RNA, 19 nt, Artificial Sequence
  Synthetic
  misc_feature (15)..(15): n is a, c, g, or u
auugaaaacagguanagua

SEQ ID NO: 23700 - RNA, 20 nt, Artificial Sequence
  Synthetic
  misc_feature (16)..(16): n is a, c, g, or u
gauugaaaacagguanagua

SEQ ID NO: 23701 - RNA, 21 nt, Artificial Sequence
  Synthetic
  misc_feature (17)..(17): n is a, c, g, or u
ggauugaaaacagguanagua

SEQ ID NO: 23702 - RNA, 22 nt, Artificial Sequence
  Synthetic
  misc_feature (18)..(18): n is a, c, g, or u
aggauugaaaacagguanagua

SEQ ID NO: 23703 - RNA, 23 nt, Artificial Sequence
  Synthetic
  misc_feature (19)..(19): n is a, c, g, or u
caggauugaaaacagguanagua

SEQ ID NO: 23704 - RNA, 24 nt, Artificial Sequence
  Synthetic
  misc_feature (20)..(20): n is a, c, g, or u
ucaggauugaaaacagguanagua

SEQ ID NO: 23705 - RNA, 18 nt, Artificial Sequence
  Synthetic
cagcgccgacgggacgua

SEQ ID NO: 23706 - RNA, 19 nt, Artificial Sequence
  Synthetic
ucagcgccgacgggacgua

SEQ ID NO: 23707 - RNA, 20 nt, Artificial Sequence
  Synthetic
uucagcgccgacgggacgua

SEQ ID NO: 23708 - RNA, 21 nt, Artificial Sequence
  Synthetic
auucagcgccgacgggacgua

SEQ ID NO: 23709 - RNA, 22 nt, Artificial Sequence
  Synthetic
gauucagcgccgacgggacgua

SEQ ID NO: 23710 - RNA, 23 nt, Artificial Sequence
  Synthetic
ggauucagcgccgacgggacgua

SEQ ID NO: 23711 - RNA, 24 nt, Artificial Sequence
  Synthetic
aggauucagcgccgacgggacgua

SEQ ID NO: 23712 - RNA, 18 nt, Artificial Sequence
  Synthetic
aggcggggaguccgcgua

SEQ ID NO: 23713 - RNA, 19 nt, Artificial Sequence
  Synthetic
caggcggggaguccgcgua

SEQ ID NO: 23714 - RNA, 20 nt, Artificial Sequence
  Synthetic
acaggcggggaguccgcgua

SEQ ID NO: 23715 - RNA, 21 nt, Artificial Sequence
  Synthetic
cacaggcggggaguccgcgua

SEQ ID NO: 23716 - RNA, 22 nt, Artificial Sequence
  Synthetic
gcacaggcggggaguccgcgua

SEQ ID NO: 23717 - RNA, 23 nt, Artificial Sequence
  Synthetic
ggcacaggcggggaguccgcgua

SEQ ID NO: 23718 - RNA, 24 nt, Artificial Sequence
  Synthetic
aggcacaggcggggaguccgcgua

SEQ ID NO: 23719 - RNA, 18 nt, Artificial Sequence
  Synthetic
aaauugguaacagcggua

SEQ ID NO: 23720 - RNA, 19 nt, Artificial Sequence
  Synthetic
aaaauugguaacagcggua

SEQ ID NO: 23721 - RNA, 20 nt, Artificial Sequence
  Synthetic
aaaaauugguaacagcggua

SEQ ID NO: 23722 - RNA, 21 nt, Artificial Sequence
  Synthetic
aaaaaauugguaacagcggua

SEQ ID NO: 23723 - RNA, 22 nt, Artificial Sequence
  Synthetic
caaaaaauugguaacagcggua

SEQ ID NO: 23724 - RNA, 23 nt, Artificial Sequence
  Synthetic
acaaaaaauugguaacagcggua

SEQ ID NO: 23725 - RNA, 24 nt, Artificial Sequence
  Synthetic
aacaaaaaauugguaacagcggua

SEQ ID NO: 23726 - RNA, 18 nt, Artificial Sequence
  Synthetic
uucuaaggcaucucggua

SEQ ID NO: 23727 - RNA, 19 nt, Artificial Sequence
  Synthetic
auucuaaggcaucucggua

SEQ ID NO: 23728 - RNA, 20 nt, Artificial Sequence
  Synthetic
gauucuaaggcaucucggua

SEQ ID NO: 23729 - RNA, 21 nt, Artificial Sequence
  Synthetic
ugauucuaaggcaucucggua

SEQ ID NO: 23730 - RNA, 22 nt, Artificial Sequence
  Synthetic
gugauucuaaggcaucucggua

SEQ ID NO: 23731 - RNA, 23 nt, Artificial Sequence
  Synthetic
ggugauucuaaggcaucucggua

SEQ ID NO: 23732 - RNA, 24 nt, Artificial Sequence
  Synthetic
  misc_feature (1)..(1): n is a, c, g, or u
nggugauucuaaggcaucucggua

SEQ ID NO: 23733 - RNA, 18 nt, Artificial Sequence
  Synthetic
  misc_feature (16)..(16): n is a, c, g, or u
ggcauuugguggucunua

SEQ ID NO: 23734 - RNA, 19 nt, Artificial Sequence
  Synthetic
  misc_feature (17)..(17): n is a, c, g, or u
gggcauuugguggucunua

SEQ ID NO: 23735 - RNA, 20 nt, Artificial Sequence
  Synthetic
  misc_feature (18)..(18): n is a, c, g, or u
ggggcauuugguggucunua

SEQ ID NO: 23736 - RNA, 21 nt, Artificial Sequence
  Synthetic
  misc_feature (19)..(19): n is a, c, g, or u
aggggcauuugguggucunua

SEQ ID NO: 23737 - RNA, 22 nt, Artificial Sequence
  Synthetic
  misc_feature (20)..(20): n is a, c, g, or u
uaggggcauuugguggucunua

SEQ ID NO: 23738 - RNA, 23 nt, Artificial Sequence
  Synthetic
  misc_feature (21)..(21): n is a, c, g, or u
auaggggcauuugguggucunua

SEQ ID NO: 23739 - RNA, 24 nt, Artificial Sequence
  Synthetic
  misc_feature (22)..(22): n is a, c, g, or u
gauaggggcauuugguggucunua

SEQ ID NO: 23740 - RNA, 18 nt, Artificial Sequence
  Synthetic
augaacaaaagaugauua

SEQ ID NO: 23741 - RNA, 19 nt, Artificial Sequence
  Synthetic
caugaacaaaagaugauua

SEQ ID NO: 23742 - RNA, 20 nt, Artificial Sequence
  Synthetic
acaugaacaaaagaugauua

SEQ ID NO: 23743 - RNA, 21 nt, Artificial Sequence
  Synthetic
gacaugaacaaaagaugauua

SEQ ID NO: 23744 - RNA, 22 nt, Artificial Sequence
  Synthetic
ggacaugaacaaaagaugauua

SEQ ID NO: 23745 - RNA, 23 nt, Artificial Sequence
  Synthetic
gggacaugaacaaaagaugauua

SEQ ID NO: 23746 - RNA, 24 nt, Artificial Sequence
  Synthetic
ugggacaugaacaaaagaugauua

SEQ ID NO: 23747 - RNA, 18 nt, Artificial Sequence
  Synthetic
aguccaagaguccucuua

SEQ ID NO: 23748 - RNA, 19 nt, Artificial Sequence
  Synthetic
aaguccaagaguccucuua

SEQ ID NO: 23749 - RNA, 20 nt, Artificial Sequence
  Synthetic
aaaguccaagaguccucuua

SEQ ID NO: 23750 - RNA, 21 nt, Artificial Sequence
  Synthetic
gaaaguccaagaguccucuua

SEQ ID NO: 23751 - RNA, 22 nt, Artificial Sequence
  Synthetic
cgaaaguccaagaguccucuua

SEQ ID NO: 23752 - RNA, 23 nt, Artificial Sequence
  Synthetic
gcgaaaguccaagaguccucuua

SEQ ID NO: 23753 - RNA, 24 nt, Artificial Sequence
  Synthetic
ggcgaaaguccaagaguccucuua

SEQ ID NO: 23754 - RNA, 18 nt, Artificial Sequence
  Synthetic
uguguggauucucucuua

SEQ ID NO: 23755 - RNA, 19 nt, Artificial Sequence
  Synthetic
auguguggauucucucuua

SEQ ID NO: 23756 - RNA, 20 nt, Artificial Sequence
  Synthetic
uauguguggauucucucuua

SEQ ID NO: 23757 - RNA, 21 nt, Artificial Sequence
  Synthetic
cuauguguggauucucucuua

SEQ ID NO: 23758 - RNA, 22 nt, Artificial Sequence
  Synthetic
gcuauguguggauucucucuua

SEQ ID NO: 23759 - RNA, 23 nt, Artificial Sequence
  Synthetic
cgcuauguguggauucucucuua

SEQ ID NO: 23760 - RNA, 24 nt, Artificial Sequence
  Synthetic
gcgcuauguguggauucucucuua

SEQ ID NO: 23761 - RNA, 18 nt, Artificial Sequence
  Synthetic
  misc_feature (6)..(6): n is a, c, g, or u
uaaggnuuaauaccuuua

SEQ ID NO: 23762 - RNA, 19 nt, Artificial Sequence
  Synthetic
  misc_feature (7)..(7): n is a, c, g, or u
guaaggnuuaauaccuuua

SEQ ID NO: 23763 - RNA, 20 nt, Artificial Sequence
  Synthetic
  misc_feature (8)..(8): n is a, c, g, or u
aguaaggnuuaauaccuuua

SEQ ID NO: 23764 - RNA, 21 nt, Artificial Sequence
  Synthetic
  misc_feature (9)..(9): n is a, c, g, or u
uaguaaggnuuaauaccuuua

SEQ ID NO: 23765 - RNA, 22 nt, Artificial Sequence
  Synthetic
  misc_feature (10)..(10): n is a, c, g, or u
auaguaaggnuuaauaccuuua

SEQ ID NO: 23766 - RNA, 23 nt, Artificial Sequence
  Synthetic
  misc_feature (11)..(11): n is a, c, g, or u
gauaguaaggnuuaauaccuuua

SEQ ID NO: 23767 - RNA, 24 nt, Artificial Sequence
  Synthetic
  misc_feature (12)..(12): n is a, c, g, or u
ggauaguaaggnuuaauaccuuua

SEQ ID NO: 23768 - RNA, 18 nt, Artificial Sequence
  Synthetic
gaagcuccaaauucuuua

SEQ ID NO: 23769 - RNA, 19 nt, Artificial Sequence
  Synthetic
agaagcuccaaauucuuua

SEQ ID NO: 23770 - RNA, 20 nt, Artificial Sequence
  Synthetic
cagaagcuccaaauucuuua

SEQ ID NO: 23771 - RNA, 21 nt, Artificial Sequence
  Synthetic
acagaagcuccaaauucuuua

SEQ ID NO: 23772 - RNA, 22 nt, Artificial Sequence
  Synthetic
cacagaagcuccaaauucuuua

SEQ ID NO: 23773 - RNA, 23 nt, Artificial Sequence
  Synthetic
ccacagaagcuccaaauucuuua

SEQ ID NO: 23774 - RNA, 24 nt, Artificial Sequence
  Synthetic
uccacagaagcuccaaauucuuua

SEQ ID NO: 23775 - RNA, 18 nt, Artificial Sequence
  Synthetic
  misc_feature (8)..(8): n is a, c, g, or u
agguucanguauuguuua

SEQ ID NO: 23776 - RNA, 19 nt, Artificial Sequence
  Synthetic
  misc_feature (9)..(9): n is a, c, g, or u
aagguucanguauuguuua

SEQ ID NO: 23777 - RNA, 20 nt, Artificial Sequence
  Synthetic
  misc_feature (10)..(10): n is a, c, g, or u
aaagguucanguauuguuua

SEQ ID NO: 23778 - RNA, 21 nt, Artificial Sequence
  Synthetic
  misc_feature (11)..(11): n is a, c, g, or u
uaaagguucanguauuguuua

SEQ ID NO: 23779 - RNA, 22 nt, Artificial Sequence
  Synthetic
  misc_feature (12)..(12): n is a, c, g, or u
guaaagguucanguauuguuua

SEQ ID NO: 23780 - RNA, 23 nt, Artificial Sequence
  Synthetic
  misc_feature (13)..(13): n is a, c, g, or u
gguaaagguucanguauuguuua

SEQ ID NO: 23781 - RNA, 24 nt, Artificial Sequence
  Synthetic
  misc_feature (14)..(14): n is a, c, g, or u
ggguaaagguucanguauuguuua

SEQ ID NO: 23782 - RNA, 18 nt, Artificial Sequence
  Synthetic
guaaguuggcgagaaaac

SEQ ID NO: 23783 - RNA, 19 nt, Artificial Sequence
  Synthetic
uguaaguuggcgagaaaac

SEQ ID NO: 23784 - RNA, 20 nt, Artificial Sequence
  Synthetic
uuguaaguuggcgagaaaac

SEQ ID NO: 23785 - RNA, 21 nt, Artificial Sequence
  Synthetic
cuuguaaguuggcgagaaaac

SEQ ID NO: 23786 - RNA, 22 nt, Artificial Sequence
  Synthetic
ccuuguaaguuggcgagaaaac

SEQ ID NO: 23787 - RNA, 23 nt, Artificial Sequence
  Synthetic
gccuuguaaguuggcgagaaaac

SEQ ID NO: 23788 - RNA, 24 nt, Artificial Sequence
  Synthetic
ggccuuguaaguuggcgagaaaac

SEQ ID NO: 23789 - RNA, 18 nt, Artificial Sequence
  Synthetic
cagcagcaggagggaaac

SEQ ID NO: 23790 - RNA, 19 nt, Artificial Sequence
  Synthetic
acagcagcaggagggaaac

SEQ ID NO: 23791 - RNA, 20 nt, Artificial Sequence
  Synthetic
uacagcagcaggagggaaac

SEQ ID NO: 23792 - RNA, 21 nt, Artificial Sequence
  Synthetic
guacagcagcaggagggaaac

SEQ ID NO: 23793 - RNA, 22 nt, Artificial Sequence
  Synthetic
gguacagcagcaggagggaaac

SEQ ID NO: 23794 - RNA, 23 nt, Artificial Sequence
  Synthetic
ugguacagcagcaggagggaaac

SEQ ID NO: 23795 - RNA, 24 nt, Artificial Sequence
  Synthetic
uugguacagcagcaggagggaaac

SEQ ID NO: 23796 - RNA, 18 nt, Artificial Sequence
  Synthetic
uaguccagaagaaccaac

SEQ ID NO: 23797 - RNA, 19 nt, Artificial Sequence
  Synthetic
auaguccagaagaaccaac

SEQ ID NO: 23798 - RNA, 20 nt, Artificial Sequence
  Synthetic
gauaguccagaagaaccaac

SEQ ID NO: 23799 - RNA, 21 nt, Artificial Sequence
  Synthetic
ugauaguccagaagaaccaac

SEQ ID NO: 23800 - RNA, 22 nt, Artificial Sequence
  Synthetic
uugauaguccagaagaaccaac

SEQ ID NO: 23801 - RNA, 23 nt, Artificial Sequence
  Synthetic
cuugauaguccagaagaaccaac

SEQ ID NO: 23802 - RNA, 24 nt, Artificial Sequence
  Synthetic
ccuugauaguccagaagaaccaac

SEQ ID NO: 23803 - RNA, 18 nt, Artificial Sequence
  Synthetic
gccgcagacacauccaac

SEQ ID NO: 23804 - RNA, 19 nt, Artificial Sequence
  Synthetic
cgccgcagacacauccaac

SEQ ID NO: 23805 - RNA, 20 nt, Artificial Sequence
  Synthetic
acgccgcagacacauccaac

SEQ ID NO: 23806 - RNA, 21 nt, Artificial Sequence
  Synthetic
aacgccgcagacacauccaac

SEQ ID NO: 23807 - RNA, 22 nt, Artificial Sequence
  Synthetic
aaacgccgcagacacauccaac

SEQ ID NO: 23808 - RNA, 23 nt, Artificial Sequence
  Synthetic
aaaacgccgcagacacauccaac

SEQ ID NO: 23809 - RNA, 24 nt, Artificial Sequence
  Synthetic
uaaaacgccgcagacacauccaac

SEQ ID NO: 23810 - RNA, 18 nt, Artificial Sequence
  Synthetic
gugaggauuuuugucaac

SEQ ID NO: 23811 - RNA, 19 nt, Artificial Sequence
  Synthetic
ugugaggauuuuugucaac

SEQ ID NO: 23812 - RNA, 20 nt, Artificial Sequence
  Synthetic
uugugaggauuuuugucaac

SEQ ID NO: 23813 - RNA, 21 nt, Artificial Sequence
  Synthetic
auugugaggauuuuugucaac

SEQ ID NO: 23814 - RNA, 22 nt, Artificial Sequence
  Synthetic
uauugugaggauuuuugucaac

SEQ ID NO: 23815 - RNA, 23 nt, Artificial Sequence
  Synthetic
guauugugaggauuuuugucaac

SEQ ID NO: 23816 - RNA, 24 nt, Artificial Sequence
  Synthetic
gguauugugaggauuuuugucaac

SEQ ID NO: 23817 - RNA, 18 nt, Artificial Sequence
  Synthetic
cccgucgucggccggaac

SEQ ID NO: 23818 - RNA, 19 nt, Artificial Sequence
  Synthetic
acccgucgucggccggaac

SEQ ID NO: 23819 - RNA, 20 nt, Artificial Sequence
  Synthetic
gacccgucgucggccggaac

SEQ ID NO: 23820 - RNA, 18 nt, Artificial Sequence
  Synthetic
gaacagugggacaugaac

SEQ ID NO: 23821 - RNA, 19 nt, Artificial Sequence
  Synthetic
ugaacagugggacaugaac

SEQ ID NO: 23822 - RNA, 20 nt, Artificial Sequence
  Synthetic
uugaacagugggacaugaac

SEQ ID NO: 23823 - RNA, 21 nt, Artificial Sequence
  Synthetic
cuugaacagugggacaugaac

SEQ ID NO: 23824 - RNA, 22 nt, Artificial Sequence
  Synthetic
gcuugaacagugggacaugaac

SEQ ID NO: 23825 - RNA, 23 nt, Artificial Sequence
  Synthetic
ggcuugaacagugggacaugaac

SEQ ID NO: 23826 - RNA, 24 nt, Artificial Sequence
  Synthetic
aggcuugaacagugggacaugaac

SEQ ID NO: 23827 - RNA, 18 nt, Artificial Sequence
  Synthetic
gguucuguguuucugaac

SEQ ID NO: 23828 - RNA, 19 nt, Artificial Sequence
  Synthetic
ggguucuguguuucugaac

SEQ ID NO: 23829 - RNA, 20 nt, Artificial Sequence
  Synthetic
aggguucuguguuucugaac

SEQ ID NO: 23830 - RNA, 21 nt, Artificial Sequence
  Synthetic
caggguucuguguuucugaac

SEQ ID NO: 23831 - RNA, 22 nt, Artificial Sequence
  Synthetic
gcaggguucuguguuucugaac

SEQ ID NO: 23832 - RNA, 23 nt, Artificial Sequence
  Synthetic
agcaggguucuguguuucugaac

SEQ ID NO: 23833 - RNA, 24 nt, Artificial Sequence
  Synthetic
gagcaggguucuguguuucugaac

SEQ ID NO: 23834 - RNA, 18 nt, Artificial Sequence
  Synthetic
ccgugugggggugugaac

SEQ ID NO: 23835 - RNA, 19 nt, Artificial Sequence
  Synthetic
accgugugggggugugaac

SEQ ID NO: 23836 - RNA, 20 nt, Artificial Sequence
  Synthetic
caccgugugggggugugaac

SEQ ID NO: 23837 - RNA, 21 nt, Artificial Sequence
  Synthetic
ccaccgugugggggugugaac

SEQ ID NO: 23838 - RNA, 22 nt, Artificial Sequence
  Synthetic
gccaccgugugggggugugaac

SEQ ID NO: 23839 - RNA, 23 nt, Artificial Sequence
  Synthetic
ggccaccgugugggggugugaac

SEQ ID NO: 23840 - RNA, 24 nt, Artificial Sequence
  Synthetic
aggccaccgugugggggugugaac

SEQ ID NO: 23841 - RNA, 18 nt, Artificial Sequence
  Synthetic
cagcuuggaggcuugaac

SEQ ID NO: 23842 - RNA, 19 nt, Artificial Sequence
  Synthetic
acagcuuggaggcuugaac

SEQ ID NO: 23843 - RNA, 20 nt, Artificial Sequence
  Synthetic
cacagcuuggaggcuugaac

SEQ ID NO: 23844 - RNA, 21 nt, Artificial Sequence
  Synthetic
gcacagcuuggaggcuugaac

SEQ ID NO: 23845 - RNA, 22 nt, Artificial Sequence
  Synthetic
ggcacagcuuggaggcuugaac

SEQ ID NO: 23846 - RNA, 23 nt, Artificial Sequence
  Synthetic
aggcacagcuuggaggcuugaac

SEQ ID NO: 23847 - RNA, 24 nt, Artificial Sequence
  Synthetic
aaggcacagcuuggaggcuugaac

SEQ ID NO: 23848 - RNA, 18 nt, Artificial Sequence
  Synthetic
uggaugcccacagauaac

SEQ ID NO: 23849 - RNA, 19 nt, Artificial Sequence
  Synthetic
auggaugcccacagauaac

SEQ ID NO: 23850 - RNA, 20 nt, Artificial Sequence
  Synthetic
aauggaugcccacagauaac

SEQ ID NO: 23851 - RNA, 21 nt, Artificial Sequence
  Synthetic
aaauggaugcccacagauaac

SEQ ID NO: 23852 - RNA, 22 nt, Artificial Sequence
  Synthetic
caaauggaugcccacagauaac

SEQ ID NO: 23853 - RNA, 23 nt, Artificial Sequence
  Synthetic
ucaaauggaugcccacagauaac

SEQ ID NO: 23854 - RNA, 24 nt, Artificial Sequence
  Synthetic
uucaaauggaugcccacagauaac

SEQ ID NO: 23855 - RNA, 18 nt, Artificial Sequence
  Synthetic
  misc_feature (4)..(4): n is a, c, g, or u
ccanaucauccauauaac

SEQ ID NO: 23856 - RNA, 19 nt, Artificial Sequence
  Synthetic
  misc_feature (5)..(5): n is a, c, g, or u
accanaucauccauauaac

SEQ ID NO: 23857 - RNA, 20 nt, Artificial Sequence
  Synthetic
  misc_feature (6)..(6): n is a, c, g, or u
uaccanaucauccauauaac

SEQ ID NO: 23858 - RNA, 21 nt, Artificial Sequence
  Synthetic
  misc_feature (7)..(7): n is a, c, g, or u
auaccanaucauccauauaac

SEQ ID NO: 23859 - RNA, 22 nt, Artificial Sequence
  Synthetic
  misc_feature (8)..(8): n is a, c, g, or u
aauaccanaucauccauauaac

SEQ ID NO: 23860 - RNA, 23 nt, Artificial Sequence
  Synthetic
  misc_feature (9)..(9): n is a, c, g, or u
caauaccanaucauccauauaac

SEQ ID NO: 23861 - RNA, 24 nt, Artificial Sequence
  Synthetic
  misc_feature (10)..(10): n is a, c, g, or u
ccaauaccanaucauccauauaac

SEQ ID NO: 23862 - RNA, 18 nt, Artificial Sequence
  Synthetic
aguccaaggaauacuaac

SEQ ID NO: 23863 - RNA, 19 nt, Artificial Sequence
  Synthetic
gaguccaaggaauacuaac

SEQ ID NO: 23864 - RNA, 20 nt, Artificial Sequence
  Synthetic
ugaguccaaggaauacuaac

SEQ ID NO: 23865 - RNA, 21 nt, Artificial Sequence
  Synthetic
augaguccaaggaauacuaac

SEQ ID NO: 23866 - RNA, 22 nt, Artificial Sequence
  Synthetic
uaugaguccaaggaauacuaac

SEQ ID NO: 23867 - RNA, 23 nt, Artificial Sequence
  Synthetic
uuaugaguccaaggaauacuaac

SEQ ID NO: 23868 - RNA, 24 nt, Artificial Sequence
  Synthetic
cuuaugaguccaaggaauacuaac

SEQ ID NO: 23869 - RNA, 18 nt, Artificial Sequence
  Synthetic
agggaaguauuuaguaac

SEQ ID NO: 23870 - RNA, 19 nt, Artificial Sequence
  Synthetic
aagggaaguauuuaguaac

SEQ ID NO: 23871 - RNA, 20 nt, Artificial Sequence
  Synthetic
aaagggaaguauuuaguaac

SEQ ID NO: 23872 - RNA, 21 nt, Artificial Sequence
  Synthetic
caaagggaaguauuuaguaac

SEQ ID NO: 23873 - RNA, 22 nt, Artificial Sequence
  Synthetic
ccaaagggaaguauuuaguaac

SEQ ID NO: 23874 - RNA, 23 nt, Artificial Sequence
  Synthetic
uccaaagggaaguauuuaguaac

SEQ ID NO: 23875 - RNA, 24 nt, Artificial Sequence
  Synthetic
auccaaagggaaguauuuaguaac

SEQ ID NO: 23876 - RNA, 18 nt, Artificial Sequence
  Synthetic
aaacacaccgccuguaac

SEQ ID NO: 23877 - RNA, 19 nt, Artificial Sequence
  Synthetic
gaaacacaccgccuguaac

SEQ ID NO: 23878 - RNA, 20 nt, Artificial Sequence
  Synthetic
agaaacacaccgccuguaac

SEQ ID NO: 23879 - RNA, 21 nt, Artificial Sequence
  Synthetic
aagaaacacaccgccuguaac

SEQ ID NO: 23880 - RNA, 22 nt, Artificial Sequence
  Synthetic
caagaaacacaccgccuguaac

SEQ ID NO: 23881 - RNA, 23 nt, Artificial Sequence
  Synthetic
acaagaaacacaccgccuguaac

SEQ ID NO: 23882 - RNA, 24 nt, Artificial Sequence
  Synthetic
aacaagaaacacaccgccuguaac

SEQ ID NO: 23883 - RNA, 18 nt, Artificial Sequence
  Synthetic
aauacaaagaccuuuaac

SEQ ID NO: 23884 - RNA, 19 nt, Artificial Sequence
  Synthetic
uaauacaaagaccuuuaac

SEQ ID NO: 23885 - RNA, 20 nt, Artificial Sequence
  Synthetic
cuaauacaaagaccuuuaac

SEQ ID NO: 23886 - RNA, 21 nt, Artificial Sequence
  Synthetic
ccuaauacaaagaccuuuaac

SEQ ID NO: 23887 - RNA, 22 nt, Artificial Sequence
  Synthetic
uccuaauacaaagaccuuuaac

SEQ ID NO: 23888 - RNA, 23 nt, Artificial Sequence
  Synthetic
cuccuaauacaaagaccuuuaac

SEQ ID NO: 23889 - RNA, 24 nt, Artificial Sequence
  Synthetic
ccuccuaauacaaagaccuuuaac

SEQ ID NO: 23890 - RNA, 18 nt, Artificial Sequence
  Synthetic
acacaccgccuguaacac

SEQ ID NO: 23891 - RNA, 19 nt, Artificial Sequence
  Synthetic
aacacaccgccuguaacac

SEQ ID NO: 23892 - RNA, 20 nt, Artificial Sequence
  Synthetic
aaacacaccgccuguaacac

SEQ ID NO: 23893 - RNA, 21 nt, Artificial Sequence
  Synthetic
gaaacacaccgccuguaacac

SEQ ID NO: 23894 - RNA, 22 nt, Artificial Sequence
  Synthetic
agaaacacaccgccuguaacac

SEQ ID NO: 23895 - RNA, 23 nt, Artificial Sequence
  Synthetic
aagaaacacaccgccuguaacac

SEQ ID NO: 23896 - RNA, 24 nt, Artificial Sequence
  Synthetic
caagaaacacaccgccuguaacac

SEQ ID NO: 23897 - RNA, 18 nt, Artificial Sequence
  Synthetic
  misc_feature (10)..(10): n is a, c, g, or u
uggagugcgnauccacac

SEQ ID NO: 23898 - RNA, 19 nt, Artificial Sequence
  Synthetic
  misc_feature (11)..(11): n is a, c, g, or u
guggagugcgnauccacac

SEQ ID NO: 23899 - RNA, 20 nt, Artificial Sequence
  Synthetic
  misc_feature (12)..(12): n is a, c, g, or u
gguggagugcgnauccacac

SEQ ID NO: 23900 - RNA, 21 nt, Artificial Sequence
  Synthetic
  misc_feature (13)..(13): n is a, c, g, or u
agguggagugcgnauccacac

SEQ ID NO: 23901 - RNA, 22 nt, Artificial Sequence
  Synthetic
  misc_feature (14)..(14): n is a, c, g, or u
cagguggagugcgnauccacac

SEQ ID NO: 23902 - RNA, 23 nt, Artificial Sequence
  Synthetic
  misc_feature (15)..(15): n is a, c, g, or u
gcagguggagugcgnauccacac

SEQ ID NO: 23903 - RNA, 24 nt, Artificial Sequence
  Synthetic
  misc_feature (16)..(16): n is a, c, g, or u
agcagguggagugcgnauccacac

SEQ ID NO: 23904 - RNA, 18 nt, Artificial Sequence
  Synthetic
ccuggaaguagaggacac

SEQ ID NO: 23905 - RNA, 19 nt, Artificial Sequence
  Synthetic
uccuggaaguagaggacac

SEQ ID NO: 23906 - RNA, 20 nt, Artificial Sequence
  Synthetic
auccuggaaguagaggacac

SEQ ID NO: 23907 - RNA, 21 nt, Artificial Sequence
  Synthetic
gauccuggaaguagaggacac

SEQ ID NO: 23908 - RNA, 22 nt, Artificial Sequence
  Synthetic
agauccuggaaguagaggacac

SEQ ID NO: 23909 - RNA, 23 nt, Artificial Sequence
  Synthetic
uagauccuggaaguagaggacac

SEQ ID NO: 23910 - RNA, 24 nt, Artificial Sequence
  Synthetic
guagauccuggaaguagaggacac

SEQ ID NO: 23911 - RNA, 18 nt, Artificial Sequence
  Synthetic
ugagagcaggauaaccac

SEQ ID NO: 23912 - RNA, 19 nt, Artificial Sequence
  Synthetic
augagagcaggauaaccac

SEQ ID NO: 23913 - RNA, 20 nt, Artificial Sequence
  Synthetic
caugagagcaggauaaccac

SEQ ID NO: 23914 - RNA, 21 nt, Artificial Sequence
  Synthetic
gcaugagagcaggauaaccac

SEQ ID NO: 23915 - RNA, 22 nt, Artificial Sequence
  Synthetic
ggcaugagagcaggauaaccac

SEQ ID NO: 23916 - RNA, 23 nt, Artificial Sequence
  Synthetic
gggcaugagagcaggauaaccac

SEQ ID NO: 23917 - RNA, 24 nt, Artificial Sequence
  Synthetic
agggcaugagagcaggauaaccac

SEQ ID NO: 23918 - RNA, 18 nt, Artificial Sequence
  Synthetic
agagccccaagcgaccac

SEQ ID NO: 23919 - RNA, 19 nt, Artificial Sequence
  Synthetic
cagagccccaagcgaccac

SEQ ID NO: 23920 - RNA, 20 nt, Artificial Sequence
  Synthetic
gcagagccccaagcgaccac

SEQ ID NO: 23921 - RNA, 21 nt, Artificial Sequence
  Synthetic
ggcagagccccaagcgaccac

SEQ ID NO: 23922 - RNA, 22 nt, Artificial Sequence
  Synthetic
cggcagagccccaagcgaccac

SEQ ID NO: 23923 - RNA, 23 nt, Artificial Sequence
  Synthetic
gcggcagagccccaagcgaccac

SEQ ID NO: 23924 - RNA, 24 nt, Artificial Sequence
  Synthetic
ggcggcagagccccaagcgaccac

SEQ ID NO: 23925 - RNA, 18 nt, Artificial Sequence
  Synthetic
cucuaaauuauugcccac

SEQ ID NO: 23926 - RNA, 19 nt, Artificial Sequence
  Synthetic
ccucuaaauuauugcccac

SEQ ID NO: 23927 - RNA, 20 nt, Artificial Sequence
  Synthetic
uccucuaaauuauugcccac

SEQ ID NO: 23928 - RNA, 21 nt, Artificial Sequence
  Synthetic
auccucuaaauuauugcccac

SEQ ID NO: 23929 - RNA, 22 nt, Artificial Sequence
  Synthetic
gauccucuaaauuauugcccac

SEQ ID NO: 23930 - RNA, 23 nt, Artificial Sequence
  Synthetic
ggauccucuaaauuauugcccac

SEQ ID NO: 23931 - RNA, 24 nt, Artificial Sequence
  Synthetic
aggauccucuaaauuauugcccac

SEQ ID NO: 23932 - RNA, 18 nt, Artificial Sequence
  Synthetic
uccaugccccaaagccac

SEQ ID NO: 23933 - RNA, 19 nt, Artificial Sequence
  Synthetic
guccaugccccaaagccac

SEQ ID NO: 23934 - RNA, 20 nt, Artificial Sequence
  Synthetic
uguccaugccccaaagccac

SEQ ID NO: 23935 - RNA, 21 nt, Artificial Sequence
  Synthetic
auguccaugccccaaagccac

SEQ ID NO: 23936 - RNA, 22 nt, Artificial Sequence
  Synthetic
aauguccaugccccaaagccac

SEQ ID NO: 23937 - RNA, 23 nt, Artificial Sequence
  Synthetic
caauguccaugccccaaagccac

SEQ ID NO: 23938 - RNA, 24 nt, Artificial Sequence
  Synthetic
ucaauguccaugccccaaagccac

SEQ ID NO: 23939 - RNA, 18 nt, Artificial Sequence
  Synthetic
aaaugagaguaacuccac

SEQ ID NO: 23940 - RNA, 19 nt, Artificial Sequence
  Synthetic
aaaaugagaguaacuccac

SEQ ID NO: 23941 - RNA, 20 nt, Artificial Sequence
  Synthetic
aaaaaugagaguaacuccac

SEQ ID NO: 23942 - RNA, 21 nt, Artificial Sequence
  Synthetic
caaaaaugagaguaacuccac

SEQ ID NO: 23943 - RNA, 22 nt, Artificial Sequence
  Synthetic
gcaaaaaugagaguaacuccac

SEQ ID NO: 23944 - RNA, 23 nt, Artificial Sequence
  Synthetic
ggcaaaaaugagaguaacuccac

SEQ ID NO: 23945 - RNA, 24 nt, Artificial Sequence
  Synthetic
aggcaaaaaugagaguaacuccac

SEQ ID NO: 23946 - RNA, 18 nt, Artificial Sequence
  Synthetic
ugugccugagggcuccac

SEQ ID NO: 23947 - RNA, 19 nt, Artificial Sequence
  Synthetic
cugugccugagggcuccac

SEQ ID NO: 23948 - RNA, 20 nt, Artificial Sequence
  Synthetic
ccugugccugagggcuccac

SEQ ID NO: 23949 - RNA, 21 nt, Artificial Sequence
  Synthetic
cccugugccugagggcuccac

SEQ ID NO: 23950 - RNA, 22 nt, Artificial Sequence
  Synthetic
gcccugugccugagggcuccac

SEQ ID NO: 23951 - RNA, 23 nt, Artificial Sequence
  Synthetic
ugcccugugccugagggcuccac

SEQ ID NO: 23952 - RNA, 24 nt, Artificial Sequence
  Synthetic
augcccugugccugagggcuccac

SEQ ID NO: 23953 - RNA, 18 nt, Artificial Sequence
  Synthetic
aaauugagagaaguccac

SEQ ID NO: 23954 - RNA, 19 nt, Artificial Sequence
  Synthetic
aaaauugagagaaguccac

SEQ ID NO: 23955 - RNA, 20 nt, Artificial Sequence
  Synthetic
gaaaauugagagaaguccac

SEQ ID NO: 23956 - RNA, 21 nt, Artificial Sequence
  Synthetic
agaaaauugagagaaguccac

SEQ ID NO: 23957 - RNA, 22 nt, Artificial Sequence
  Synthetic
uagaaaauugagagaaguccac

SEQ ID NO: 23958 - RNA, 23 nt, Artificial Sequence
  Synthetic
cuagaaaauugagagaaguccac

SEQ ID NO: 23959 - RNA, 24 nt, Artificial Sequence
  Synthetic
ccuagaaaauugagagaaguccac

SEQ ID NO: 23960 - RNA, 18 nt, Artificial Sequence
  Synthetic
ucccagaggauugggcac

SEQ ID NO: 23961 - RNA, 19 nt, Artificial Sequence
  Synthetic
aucccagaggauugggcac

SEQ ID NO: 23962 - RNA, 20 nt, Artificial Sequence
  Synthetic
aaucccagaggauugggcac

SEQ ID NO: 23963 - RNA, 21 nt, Artificial Sequence
  Synthetic
gaaucccagaggauugggcac

SEQ ID NO: 23964 - RNA, 22 nt, Artificial Sequence
  Synthetic
agaaucccagaggauugggcac

SEQ ID NO: 23965 - RNA, 23 nt, Artificial Sequence
  Synthetic
aagaaucccagaggauugggcac

SEQ ID NO: 23966 - RNA, 24 nt, Artificial Sequence
  Synthetic
aaagaaucccagaggauugggcac

SEQ ID NO: 23967 - RNA, 18 nt, Artificial Sequence
  Synthetic
aggugaagcgaagugcac

SEQ ID NO: 23968 - RNA, 19 nt, Artificial Sequence
  Synthetic
gaggugaagcgaagugcac

SEQ ID NO: 23969 - RNA, 20 nt, Artificial Sequence
  Synthetic
agaggugaagcgaagugcac

SEQ ID NO: 23970 - RNA, 21 nt, Artificial Sequence
  Synthetic
cagaggugaagcgaagugcac

SEQ ID NO: 23971 - RNA, 22 nt, Artificial Sequence
  Synthetic
gcagaggugaagcgaagugcac

SEQ ID NO: 23972 - RNA, 23 nt, Artificial Sequence
  Synthetic
ugcagaggugaagcgaagugcac

SEQ ID NO: 23973 - RNA, 24 nt, Artificial Sequence
  Synthetic
gugcagaggugaagcgaagugcac

SEQ ID NO: 23974 - RNA, 18 nt, Artificial Sequence
  Synthetic
  misc_feature (5)..(5): n is a, c, g, or u
ccaangucaucaacucac

SEQ ID NO: 23975 - RNA, 19 nt, Artificial Sequence
  Synthetic
  misc_feature (6)..(6): n is a, c, g, or u
gccaangucaucaacucac

SEQ ID NO: 23976 - RNA, 20 nt, Artificial Sequence
  Synthetic
  misc_feature (7)..(7): n is a, c, g, or u
agccaangucaucaacucac

SEQ ID NO: 23977 - RNA, 21 nt, Artificial Sequence
  Synthetic
  misc_feature (8)..(8): n is a, c, g, or u
aagccaangucaucaacucac

SEQ ID NO: 23978 - RNA, 22 nt, Artificial Sequence
  Synthetic
  misc_feature (9)..(9): n is a, c, g, or u
gaagccaangucaucaacucac

SEQ ID NO: 23979 - RNA, 23 nt, Artificial Sequence
  Synthetic
  misc_feature (10)..(10): n is a, c, g, or u
ggaagccaangucaucaacucac

SEQ ID NO: 23980 - RNA, 24 nt, Artificial Sequence
  Synthetic
  misc_feature (11)..(11): n is a, c, g, or u
aggaagccaangucaucaacucac

SEQ ID NO: 23981 - RNA, 18 nt, Artificial Sequence
  Synthetic
aucaaugggucuauucac

SEQ ID NO: 23982 - RNA, 19 nt, Artificial Sequence
  Synthetic
aaucaaugggucuauucac

SEQ ID NO: 23983 - RNA, 20 nt, Artificial Sequence
  Synthetic
caaucaaugggucuauucac

SEQ ID NO: 23984 - RNA, 21 nt, Artificial Sequence
  Synthetic
ccaaucaaugggucuauucac

SEQ ID NO: 23985 - RNA, 22 nt, Artificial Sequence
  Synthetic
uccaaucaaugggucuauucac

SEQ ID NO: 23986 - RNA, 23 nt, Artificial Sequence
  Synthetic
uuccaaucaaugggucuauucac

SEQ ID NO: 23987 - RNA, 24 nt, Artificial Sequence
  Synthetic
cuuccaaucaaugggucuauucac

SEQ ID NO: 23988 - RNA, 18 nt, Artificial Sequence
  Synthetic
auccacacuccaaaagac

SEQ ID NO: 23989 - RNA, 19 nt, Artificial Sequence
  Synthetic
  misc_feature (1)..(1): n is a, c, g, or u
nauccacacuccaaaagac

SEQ ID NO: 23990 - RNA, 20 nt, Artificial Sequence
  Synthetic
  misc_feature (2)..(2): n is a, c, g, or u
gnauccacacuccaaaagac

SEQ ID NO: 23991 - RNA, 21 nt, Artificial Sequence
  Synthetic
  misc_feature (3)..(3): n is a, c, g, or u
cgnauccacacuccaaaagac

SEQ ID NO: 23992 - RNA, 22 nt, Artificial Sequence
  Synthetic
  misc_feature (4)..(4): n is a, c, g, or u
gcgnauccacacuccaaaagac

SEQ ID NO: 23993 - RNA, 23 nt, Artificial Sequence
  Synthetic
  misc_feature (5)..(5): n is a, c, g, or u
ugcgnauccacacuccaaaagac

SEQ ID NO: 23994 - RNA, 24 nt, Artificial Sequence
  Synthetic
  misc_feature (6)..(6): n is a, c, g, or u
gugcgnauccacacuccaaaagac

SEQ ID NO: 23995 - RNA, 18 nt, Artificial Sequence
  Synthetic
aguaggucccggacagac

SEQ ID NO: 23996 - RNA, 19 nt, Artificial Sequence
  Synthetic
gaguaggucccggacagac

SEQ ID NO: 23997 - RNA, 20 nt, Artificial Sequence
  Synthetic
cgaguaggucccggacagac

SEQ ID NO: 23998 - RNA, 21 nt, Artificial Sequence
  Synthetic
ucgaguaggucccggacagac

SEQ ID NO: 23999 - RNA, 22 nt, Artificial Sequence
  Synthetic
gucgaguaggucccggacagac

SEQ ID NO: 24000 - RNA, 23 nt, Artificial Sequence
  Synthetic
ugucgaguaggucccggacagac

SEQ ID NO: 24001 - RNA, 24 nt, Artificial Sequence
  Synthetic
gugucgaguaggucccggacagac

SEQ ID NO: 24002 - RNA, 18 nt, Artificial Sequence
  Synthetic
uauaacuaaaagccagac

SEQ ID NO: 24003 - RNA, 19 nt, Artificial Sequence
  Synthetic
auauaacuaaaagccagac

SEQ ID NO: 24004 - RNA, 20 nt, Artificial Sequence
  Synthetic
cauauaacuaaaagccagac

SEQ ID NO: 24005 - RNA, 21 nt, Artificial Sequence
  Synthetic
ccauauaacuaaaagccagac

SEQ ID NO: 24006 - RNA, 22 nt, Artificial Sequence
  Synthetic
uccauauaacuaaaagccagac

SEQ ID NO: 24007 - RNA, 23 nt, Artificial Sequence
  Synthetic
auccauauaacuaaaagccagac

SEQ ID NO: 24008 - RNA, 24 nt, Artificial Sequence
  Synthetic
cauccauauaacuaaaagccagac

SEQ ID NO: 24009 - RNA, 18 nt, Artificial Sequence
  Synthetic
cgccgacgggacguagac

SEQ ID NO: 24010 - RNA, 19 nt, Artificial Sequence
  Synthetic
gcgccgacgggacguagac

SEQ ID NO: 24011 - RNA, 20 nt, Artificial Sequence
  Synthetic
agcgccgacgggacguagac

SEQ ID NO: 24012 - RNA, 18 nt, Artificial Sequence
  Synthetic
ggcagagccccaagcgac

SEQ ID NO: 24013 - RNA, 19 nt, Artificial Sequence
  Synthetic
cggcagagccccaagcgac

SEQ ID NO: 24014 - RNA, 20 nt, Artificial Sequence
  Synthetic
gcggcagagccccaagcgac

SEQ ID NO: 24015 - RNA, 21 nt, Artificial Sequence
  Synthetic
ggcggcagagccccaagcgac

SEQ ID NO: 24016 - RNA, 22 nt, Artificial Sequence
  Synthetic
gggcggcagagccccaagcgac

SEQ ID NO: 24017 - RNA, 23 nt, Artificial Sequence
  Synthetic
  misc_feature (1)..(1): n is a, c, g, or u
ngggcggcagagccccaagcgac

SEQ ID NO: 24018 - RNA, 24 nt, Artificial Sequence
  Synthetic
  misc_feature (2)..(2): n is a, c, g, or u
gngggcggcagagccccaagcgac

SEQ ID NO: 24019 - RNA, 18 nt, Artificial Sequence
  Synthetic
caggacaaguuggaggac

SEQ ID NO: 24020 - RNA, 19 nt, Artificial Sequence
  Synthetic
ccaggacaaguuggaggac

SEQ ID NO: 24021 - RNA, 20 nt, Artificial Sequence
  Synthetic
gccaggacaaguuggaggac

SEQ ID NO: 24022 - RNA, 21 nt, Artificial Sequence
  Synthetic
agccaggacaaguuggaggac

SEQ ID NO: 24023 - RNA, 22 nt, Artificial Sequence
  Synthetic
uagccaggacaaguuggaggac

SEQ ID NO: 24024 - RNA, 23 nt, Artificial Sequence
  Synthetic
auagccaggacaaguuggaggac

SEQ ID NO: 24025 - RNA, 24 nt, Artificial Sequence
  Synthetic
gauagccaggacaaguuggaggac

SEQ ID NO: 24026 - RNA, 18 nt, Artificial Sequence
  Synthetic
acagcgguauaaagggac

SEQ ID NO: 24027 - RNA, 19 nt, Artificial Sequence
  Synthetic
aacagcgguauaaagggac

SEQ ID NO: 24028 - RNA, 20 nt, Artificial Sequence
  Synthetic
uaacagcgguauaaagggac

SEQ ID NO: 24029 - RNA, 21 nt, Artificial Sequence
  Synthetic
guaacagcgguauaaagggac

SEQ ID NO: 24030 - RNA, 22 nt, Artificial Sequence
  Synthetic
gguaacagcgguauaaagggac

SEQ ID NO: 24031 - RNA, 23 nt, Artificial Sequence
  Synthetic
ugguaacagcgguauaaagggac

SEQ ID NO: 24032 - RNA, 24 nt, Artificial Sequence
  Synthetic
uugguaacagcgguauaaagggac

SEQ ID NO: 24033 - RNA, 18 nt, Artificial Sequence
  Synthetic
auucagcgccgacgggac

SEQ ID NO: 24034 - RNA, 19 nt, Artificial Sequence
  Synthetic
gauucagcgccgacgggac

SEQ ID NO: 24035 - RNA, 20 nt, Artificial Sequence
  Synthetic
ggauucagcgccgacgggac

SEQ ID NO: 24036 - RNA, 21 nt, Artificial Sequence
  Synthetic
aggauucagcgccgacgggac

SEQ ID NO: 24037 - RNA, 22 nt, Artificial Sequence
  Synthetic
caggauucagcgccgacgggac

SEQ ID NO: 24038 - RNA, 23 nt, Artificial Sequence
  Synthetic
gcaggauucagcgccgacgggac

SEQ ID NO: 24039 - RNA, 24 nt, Artificial Sequence
  Synthetic
cgcaggauucagcgccgacgggac

SEQ ID NO: 24040 - RNA, 18 nt, Artificial Sequence
  Synthetic
ugauuggagauuggggac

SEQ ID NO: 24041 - RNA, 19 nt, Artificial Sequence
  Synthetic
gugauuggagauuggggac

SEQ ID NO: 24042 - RNA, 20 nt, Artificial Sequence
  Synthetic
agugauuggagauuggggac

SEQ ID NO: 24043 - RNA, 21 nt, Artificial Sequence
  Synthetic
aagugauuggagauuggggac

SEQ ID NO: 24044 - RNA, 22 nt, Artificial Sequence
  Synthetic
uaagugauuggagauuggggac

SEQ ID NO: 24045 - RNA, 23 nt, Artificial Sequence
  Synthetic
guaagugauuggagauuggggac

SEQ ID NO: 24046 - RNA, 24 nt, Artificial Sequence
  Synthetic
gguaagugauuggagauuggggac

SEQ ID NO: 24047 - RNA, 18 nt, Artificial Sequence
  Synthetic
aggcuugaacagugggac

SEQ ID NO: 24048 - RNA, 19 nt, Artificial Sequence
  Synthetic
gaggcuugaacagugggac

SEQ ID NO: 24049 - RNA, 20 nt, Artificial Sequence
  Synthetic
ggaggcuugaacagugggac

SEQ ID NO: 24050 - RNA, 21 nt, Artificial Sequence
  Synthetic
uggaggcuugaacagugggac

SEQ ID NO: 24051 - RNA, 22 nt, Artificial Sequence
  Synthetic
uuggaggcuugaacagugggac

SEQ ID NO: 24052 - RNA, 23 nt, Artificial Sequence
  Synthetic
cuuggaggcuugaacagugggac

SEQ ID NO: 24053 - RNA, 24 nt, Artificial Sequence
  Synthetic
gcuuggaggcuugaacagugggac

SEQ ID NO: 24054 - RNA, 18 nt, Artificial Sequence
  Synthetic
ggggugugaacccuggac

SEQ ID NO: 24055 - RNA, 19 nt, Artificial Sequence
  Synthetic
gggggugugaacccuggac

SEQ ID NO: 24056 - RNA, 20 nt, Artificial Sequence
  Synthetic
ugggggugugaacccuggac

SEQ ID NO: 24057 - RNA, 21 nt, Artificial Sequence
  Synthetic
gugggggugugaacccuggac

SEQ ID NO: 24058 - RNA, 22 nt, Artificial Sequence
  Synthetic
ugugggggugugaacccuggac

SEQ ID NO: 24059 - RNA, 23 nt, Artificial Sequence
  Synthetic
gugugggggugugaacccuggac

SEQ ID NO: 24060 - RNA, 24 nt, Artificial Sequence
  Synthetic
cgugugggggugugaacccuggac

SEQ ID NO: 24061 - RNA, 18 nt, Artificial Sequence
  Synthetic
ucaauccaggucguugac

SEQ ID NO: 24062 - RNA, 19 nt, Artificial Sequence
  Synthetic
cucaauccaggucguugac

SEQ ID NO: 24063 - RNA, 20 nt, Artificial Sequence
  Synthetic
ccucaauccaggucguugac

SEQ ID NO: 24064 - RNA, 21 nt, Artificial Sequence
  Synthetic
uccucaauccaggucguugac

SEQ ID NO: 24065 - RNA, 22 nt, Artificial Sequence
  Synthetic
uuccucaauccaggucguugac

SEQ ID NO: 24066 - RNA, 23 nt, Artificial Sequence
  Synthetic
auuccucaauccaggucguugac

SEQ ID NO: 24067 - RNA, 24 nt, Artificial Sequence
  Synthetic
uauuccucaauccaggucguugac

SEQ ID NO: 24068 - RNA, 18 nt, Artificial Sequence
  Synthetic
ccaaaagacaccaaauac

SEQ ID NO: 24069 - RNA, 19 nt, Artificial Sequence
  Synthetic
uccaaaagacaccaaauac

SEQ ID NO: 24070 - RNA, 20 nt, Artificial Sequence
  Synthetic
cuccaaaagacaccaaauac

SEQ ID NO: 24071 - RNA, 21 nt, Artificial Sequence
  Synthetic
acuccaaaagacaccaaauac

SEQ ID NO: 24072 - RNA, 22 nt, Artificial Sequence
  Synthetic
cacuccaaaagacaccaaauac

SEQ ID NO: 24073 - RNA, 23 nt, Artificial Sequence
  Synthetic
acacuccaaaagacaccaaauac

SEQ ID NO: 24074 - RNA, 24 nt, Artificial Sequence
  Synthetic
cacacuccaaaagacaccaaauac

SEQ ID NO: 24075 - RNA, 18 nt, Artificial Sequence
  Synthetic
ccuacagccuccuaauac

SEQ ID NO: 24076 - RNA, 19 nt, Artificial Sequence
  Synthetic
gccuacagccuccuaauac

SEQ ID NO: 24077 - RNA, 20 nt, Artificial Sequence
  Synthetic
ugccuacagccuccuaauac

SEQ ID NO: 24078 - RNA, 21 nt, Artificial Sequence
  Synthetic
augccuacagccuccuaauac

SEQ ID NO: 24079 - RNA, 22 nt, Artificial Sequence
  Synthetic
uaugccuacagccuccuaauac

SEQ ID NO: 24080 - RNA, 23 nt, Artificial Sequence
  Synthetic
uuaugccuacagccuccuaauac

SEQ ID NO: 24081 - RNA, 24 nt, Artificial Sequence
  Synthetic
uuuaugccuacagccuccuaauac

SEQ ID NO: 24082 - RNA, 18 nt, Artificial Sequence
  Synthetic
gcgguaauacaggcauac

SEQ ID NO: 24083 - RNA, 19 nt, Artificial Sequence
  Synthetic
agcgguaauacaggcauac

SEQ ID NO: 24084 - RNA, 20 nt, Artificial Sequence
  Synthetic
uagcgguaauacaggcauac

SEQ ID NO: 24085 - RNA, 21 nt, Artificial Sequence
  Synthetic
uuagcgguaauacaggcauac

SEQ ID NO: 24086 - RNA, 22 nt, Artificial Sequence
  Synthetic
cuuagcgguaauacaggcauac

SEQ ID NO: 24087 - RNA, 23 nt, Artificial Sequence
  Synthetic
gcuuagcgguaauacaggcauac

SEQ ID NO: 24088 - RNA, 24 nt, Artificial Sequence
  Synthetic
ugcuuagcgguaauacaggcauac

SEQ ID NO: 24089 - RNA, 18 nt, Artificial Sequence
  Synthetic
cguccgaagguuugguac

SEQ ID NO: 24090 - RNA, 19 nt, Artificial Sequence
  Synthetic
ccguccgaagguuugguac

SEQ ID NO: 24091 - RNA, 20 nt, Artificial Sequence
  Synthetic
uccguccgaagguuugguac

SEQ ID NO: 24092 - RNA, 18 nt, Artificial Sequence
  Synthetic
  misc_feature (7)..(7): n is a, c, g, or u
gguucanguauuguuuac

SEQ ID NO: 24093 - RNA, 19 nt, Artificial Sequence
  Synthetic
  misc_feature (8)..(8): n is a, c, g, or u
agguucanguauuguuuac

SEQ ID NO: 24094 - RNA, 20 nt, Artificial Sequence
  Synthetic
  misc_feature (9)..(9): n is a, c, g, or u
aagguucanguauuguuuac

SEQ ID NO: 24095 - RNA, 21 nt, Artificial Sequence
  Synthetic
  misc_feature (10)..(10): n is a, c, g, or u
aaagguucanguauuguuuac

SEQ ID NO: 24096 - RNA, 22 nt, Artificial Sequence
  Synthetic
  misc_feature (11)..(11): n is a, c, g, or u
uaaagguucanguauuguuuac

SEQ ID NO: 24097 - RNA, 23 nt, Artificial Sequence
  Synthetic
  misc_feature (12)..(12): n is a, c, g, or u
guaaagguucanguauuguuuac

SEQ ID NO: 24098 - RNA, 24 nt, Artificial Sequence
  Synthetic
  misc_feature (13)..(13): n is a, c, g, or u
gguaaagguucanguauuguuuac

SEQ ID NO: 24099 - RNA, 18 nt, Artificial Sequence
  Synthetic
ugauaguccagaagaacc

SEQ ID NO: 24100 - RNA, 19 nt, Artificial Sequence
  Synthetic
uugauaguccagaagaacc

SEQ ID NO: 24101 - RNA, 20 nt, Artificial Sequence
  Synthetic
cuugauaguccagaagaacc

SEQ ID NO: 24102 - RNA, 21 nt, Artificial Sequence
  Synthetic
ccuugauaguccagaagaacc

SEQ ID NO: 24103 - RNA, 22 nt, Artificial Sequence
  Synthetic
accuugauaguccagaagaacc

SEQ ID NO: 24104 - RNA, 23 nt, Artificial Sequence
  Synthetic
uaccuugauaguccagaagaacc

SEQ ID NO: 24105 - RNA, 24 nt, Artificial Sequence
  Synthetic
auaccuugauaguccagaagaacc

SEQ ID NO: 24106 - RNA, 18 nt, Artificial Sequence
  Synthetic
cgugugggggugugaacc

SEQ ID NO: 24107 - RNA, 19 nt, Artificial Sequence
  Synthetic
ccgugugggggugugaacc

SEQ ID NO: 24108 - RNA, 20 nt, Artificial Sequence
  Synthetic
accgugugggggugugaacc

SEQ ID NO: 24109 - RNA, 21 nt, Artificial Sequence
  Synthetic
caccgugugggggugugaacc

SEQ ID NO: 24110 - RNA, 22 nt, Artificial Sequence
  Synthetic
ccaccgugugggggugugaacc

SEQ ID NO: 24111 - RNA, 23 nt, Artificial Sequence
  Synthetic
gccaccgugugggggugugaacc

SEQ ID NO: 24112 - RNA, 24 nt, Artificial Sequence
  Synthetic
ggccaccgugugggggugugaacc

SEQ ID NO: 24113 - RNA, 18 nt, Artificial Sequence
  Synthetic
  misc_feature (10)..(10): n is a, c, g, or u
acucccaaunauauaacc

SEQ ID NO: 24114 - RNA, 19 nt, Artificial Sequence
  Synthetic
  misc_feature (11)..(11): n is a, c, g, or u
aacucccaaunauauaacc

SEQ ID NO: 24115 - RNA, 20 nt, Artificial Sequence
  Synthetic
  misc_feature (12)..(12): n is a, c, g, or u
caacucccaaunauauaacc

SEQ ID NO: 24116 - RNA, 21 nt, Artificial Sequence
  Synthetic
  misc_feature (13)..(13): n is a, c, g, or u
ccaacucccaaunauauaacc

SEQ ID NO: 24117 - RNA, 22 nt, Artificial Sequence
  Synthetic
  misc_feature (14)..(14): n is a, c, g, or u
cccaacucccaaunauauaacc

SEQ ID NO: 24118 - RNA, 23 nt, Artificial Sequence
  Synthetic
  misc_feature (15)..(15): n is a, c, g, or u
ccccaacucccaaunauauaacc

SEQ ID NO: 24119 - RNA, 24 nt, Artificial Sequence
  Synthetic
  misc_feature (16)..(16): n is a, c, g, or u
cccccaacucccaaunauauaacc

SEQ ID NO: 24120 - RNA, 18 nt, Artificial Sequence
  Synthetic
ucuaaauuauugcccacc

SEQ ID NO: 24121 - RNA, 19 nt, Artificial Sequence
  Synthetic
cucuaaauuauugcccacc

SEQ ID NO: 24122 - RNA, 20 nt, Artificial Sequence
  Synthetic
ccucuaaauuauugcccacc

SEQ ID NO: 24123 - RNA, 21 nt, Artificial Sequence
  Synthetic
uccucuaaauuauugcccacc

SEQ ID NO: 24124 - RNA, 22 nt, Artificial Sequence
  Synthetic
auccucuaaauuauugcccacc

SEQ ID NO: 24125 - RNA, 23 nt, Artificial Sequence
  Synthetic
gauccucuaaauuauugcccacc

SEQ ID NO: 24126 - RNA, 24 nt, Artificial Sequence
  Synthetic
ggauccucuaaauuauugcccacc

SEQ ID NO: 24127 - RNA, 18 nt, Artificial Sequence
  Synthetic
ccaugccccaaagccacc

SEQ ID NO: 24128 - RNA, 19 nt, Artificial Sequence
  Synthetic
uccaugccccaaagccacc

SEQ ID NO: 24129 - RNA, 20 nt, Artificial Sequence
  Synthetic
guccaugccccaaagccacc

SEQ ID NO: 24130 - RNA, 21 nt, Artificial Sequence
  Synthetic
uguccaugccccaaagccacc

SEQ ID NO: 24131 - RNA, 22 nt, Artificial Sequence
  Synthetic
auguccaugccccaaagccacc

SEQ ID NO: 24132 - RNA, 23 nt, Artificial Sequence
  Synthetic
aauguccaugccccaaagccacc

SEQ ID NO: 24133 - RNA, 24 nt, Artificial Sequence
  Synthetic
caauguccaugccccaaagccacc

SEQ ID NO: 24134 - RNA, 18 nt, Artificial Sequence
  Synthetic
uucugaacuggagccacc

SEQ ID NO: 24135 - RNA, 19 nt, Artificial Sequence
  Synthetic
uuucugaacuggagccacc

SEQ ID NO: 24136 - RNA, 20 nt, Artificial Sequence
  Synthetic
guuucugaacuggagccacc

SEQ ID NO: 24137 - RNA, 21 nt, Artificial Sequence
  Synthetic
uguuucugaacuggagccacc

SEQ ID NO: 24138 - RNA, 22 nt, Artificial Sequence
  Synthetic
guguuucugaacuggagccacc

SEQ ID NO: 24139 - RNA, 23 nt, Artificial Sequence
  Synthetic
uguguuucugaacuggagccacc

SEQ ID NO: 24140 - RNA, 24 nt, Artificial Sequence
  Synthetic
cuguguuucugaacuggagccacc

SEQ ID NO: 24141 - RNA, 18 nt, Artificial Sequence
  Synthetic
gugccugagggcuccacc

SEQ ID NO: 24142 - RNA, 19 nt, Artificial Sequence
  Synthetic
ugugccugagggcuccacc

SEQ ID NO: 24143 - RNA, 20 nt, Artificial Sequence
  Synthetic
cugugccugagggcuccacc

SEQ ID NO: 24144 - RNA, 21 nt, Artificial Sequence
  Synthetic
ccugugccugagggcuccacc

SEQ ID NO: 24145 - RNA, 22 nt, Artificial Sequence
  Synthetic
cccugugccugagggcuccacc

SEQ ID NO: 24146 - RNA, 23 nt, Artificial Sequence
  Synthetic
gcccugugccugagggcuccacc

SEQ ID NO: 24147 - RNA, 24 nt, Artificial Sequence
  Synthetic
ugcccugugccugagggcuccacc

SEQ ID NO: 24148 - RNA, 18 nt, Artificial Sequence
  Synthetic
gggaaagcccuacgcacc

SEQ ID NO: 24149 - RNA, 19 nt, Artificial Sequence
  Synthetic
ggggaaagcccuacgcacc

SEQ ID NO: 24150 - RNA, 20 nt, Artificial Sequence
  Synthetic
gggggaaagcccuacgcacc

SEQ ID NO: 24151 - RNA, 21 nt, Artificial Sequence
  Synthetic
ugggggaaagcccuacgcacc

SEQ ID NO: 24152 - RNA, 22 nt, Artificial Sequence
  Synthetic
gugggggaaagcccuacgcacc

SEQ ID NO: 24153 - RNA, 23 nt, Artificial Sequence
  Synthetic
agugggggaaagcccuacgcacc

SEQ ID NO: 24154 - RNA, 24 nt, Artificial Sequence
  Synthetic
cagugggggaaagcccuacgcacc

SEQ ID NO: 24155 - RNA, 18 nt, Artificial Sequence
  Synthetic
ccuccuaauacaaagacc

SEQ ID NO: 24156 - RNA, 19 nt, Artificial Sequence
  Synthetic
gccuccuaauacaaagacc

SEQ ID NO: 24157 - RNA, 20 nt, Artificial Sequence
  Synthetic
agccuccuaauacaaagacc

SEQ ID NO: 24158 - RNA, 21 nt, Artificial Sequence
  Synthetic
cagccuccuaauacaaagacc

SEQ ID NO: 24159 - RNA, 22 nt, Artificial Sequence
  Synthetic
acagccuccuaauacaaagacc

SEQ ID NO: 24160 - RNA, 23 nt, Artificial Sequence
  Synthetic
uacagccuccuaauacaaagacc

SEQ ID NO: 24161 - RNA, 24 nt, Artificial Sequence
  Synthetic
cuacagccuccuaauacaaagacc

SEQ ID NO: 24162 - RNA, 18 nt, Artificial Sequence
  Synthetic
aguagaggaguaaagacc

SEQ ID NO: 24163 - RNA, 19 nt, Artificial Sequence
  Synthetic
  misc_feature (1)..(1): n is a, c, g, or u
naguagaggaguaaagacc

SEQ ID NO: 24164 - RNA, 20 nt, Artificial Sequence
  Synthetic
  misc_feature (2)..(2): n is a, c, g, or u
anaguagaggaguaaagacc

SEQ ID NO: 24165 - RNA, 21 nt, Artificial Sequence
  Synthetic
  misc_feature (3)..(3): n is a, c, g, or u
uanaguagaggaguaaagacc

SEQ ID NO: 24166 - RNA, 22 nt, Artificial Sequence
  Synthetic
  misc_feature (4)..(4): n is a, c, g, or u
guanaguagaggaguaaagacc

SEQ ID NO: 24167 - RNA, 23 nt, Artificial Sequence
  Synthetic
  misc_feature (5)..(5): n is a, c, g, or u
gguanaguagaggaguaaagacc

SEQ ID NO: 24168 - RNA, 24 nt, Artificial Sequence
  Synthetic
  misc_feature (6)..(6): n is a, c, g, or u
agguanaguagaggaguaaagacc

SEQ ID NO: 24169 - RNA, 18 nt, Artificial Sequence
  Synthetic
gcagagccccaagcgacc

SEQ ID NO: 24170 - RNA, 19 nt, Artificial Sequence
  Synthetic
ggcagagccccaagcgacc

SEQ ID NO: 24171 - RNA, 20 nt, Artificial Sequence
  Synthetic
cggcagagccccaagcgacc

SEQ ID NO: 24172 - RNA, 21 nt, Artificial Sequence
  Synthetic
gcggcagagccccaagcgacc

SEQ ID NO: 24173 - RNA, 22 nt, Artificial Sequence
  Synthetic
ggcggcagagccccaagcgacc

SEQ ID NO: 24174 - RNA, 23 nt, Artificial Sequence
  Synthetic
gggcggcagagccccaagcgacc

SEQ ID NO: 24175 - RNA, 24 nt, Artificial Sequence
  Synthetic
  misc_feature (1)..(1): n is a, c, g, or u
ngggcggcagagccccaagcgacc

SEQ ID NO: 24176 - RNA, 18 nt, Artificial Sequence
  Synthetic
cccaggaauauggugacc

SEQ ID NO: 24177 - RNA, 19 nt, Artificial Sequence
  Synthetic
ucccaggaauauggugacc

SEQ ID NO: 24178 - RNA, 20 nt, Artificial Sequence
  Synthetic
uucccaggaauauggugacc

SEQ ID NO: 24179 - RNA, 21 nt, Artificial Sequence
  Synthetic
guucccaggaauauggugacc

SEQ ID NO: 24180 - RNA, 22 nt, Artificial Sequence
  Synthetic
uguucccaggaauauggugacc

SEQ ID NO: 24181 - RNA, 23 nt, Artificial Sequence
  Synthetic
uuguucccaggaauauggugacc

SEQ ID NO: 24182 - RNA, 24 nt, Artificial Sequence
  Synthetic
cuuguucccaggaauauggugacc

SEQ ID NO: 24183 - RNA, 18 nt, Artificial Sequence
  Synthetic
ggacacccgggugguacc

SEQ ID NO: 24184 - RNA, 19 nt, Artificial Sequence
  Synthetic
aggacacccgggugguacc

SEQ ID NO: 24185 - RNA, 20 nt, Artificial Sequence
  Synthetic
caggacacccgggugguacc

SEQ ID NO: 24186 - RNA, 21 nt, Artificial Sequence
  Synthetic
ccaggacacccgggugguacc

SEQ ID NO: 24187 - RNA, 22 nt, Artificial Sequence
  Synthetic
gccaggacacccgggugguacc

SEQ ID NO: 24188 - RNA, 23 nt, Artificial Sequence
  Synthetic
ggccaggacacccgggugguacc

SEQ ID NO: 24189 - RNA, 24 nt, Artificial Sequence
  Synthetic
uggccaggacacccgggugguacc

SEQ ID NO: 24190 - RNA, 18 nt, Artificial Sequence
  Synthetic
  misc_feature (9)..(9): n is a, c, g, or u
cucccaaunauauaaccc

SEQ ID NO: 24191 - RNA, 19 nt, Artificial Sequence
  Synthetic
  misc_feature (10)..(10): n is a, c, g, or u
acucccaaunauauaaccc

SEQ ID NO: 24192 - RNA, 20 nt, Artificial Sequence
  Synthetic
  misc_feature (11)..(11): n is a, c, g, or u
aacucccaaunauauaaccc

SEQ ID NO: 24193 - RNA, 21 nt, Artificial Sequence
  Synthetic
  misc_feature (12)..(12): n is a, c, g, or u
caacucccaaunauauaaccc

SEQ ID NO: 24194 - RNA, 22 nt, Artificial Sequence
  Synthetic
  misc_feature (13)..(13): n is a, c, g, or u
ccaacucccaaunauauaaccc

SEQ ID NO: 24195 - RNA, 23 nt, Artificial Sequence
  Synthetic
  misc_feature (14)..(14): n is a, c, g, or u
cccaacucccaaunauauaaccc

SEQ ID NO: 24196 - RNA, 24 nt, Artificial Sequence
  Synthetic
  misc_feature (15)..(15): n is a, c, g, or u
ccccaacucccaaunauauaaccc

SEQ ID NO: 24197 - RNA, 18 nt, Artificial Sequence
  Synthetic
cuaaauuauugcccaccc

SEQ ID NO: 24198 - RNA, 19 nt, Artificial Sequence
  Synthetic
ucuaaauuauugcccaccc

SEQ ID NO: 24199 - RNA, 20 nt, Artificial Sequence
  Synthetic
cucuaaauuauugcccaccc

SEQ ID NO: 24200 - RNA, 21 nt, Artificial Sequence
  Synthetic
ccucuaaauuauugcccaccc

SEQ ID NO: 24201 - RNA, 22 nt, Artificial Sequence
  Synthetic
uccucuaaauuauugcccaccc

SEQ ID NO: 24202 - RNA, 23 nt, Artificial Sequence
  Synthetic
auccucuaaauuauugcccaccc

SEQ ID NO: 24203 - RNA, 24 nt, Artificial Sequence
  Synthetic
gauccucuaaauuauugcccaccc

SEQ ID NO: 24204 - RNA, 18 nt, Artificial Sequence
  Synthetic
ugccugagggcuccaccc

SEQ ID NO: 24205 - RNA, 19 nt, Artificial Sequence
  Synthetic
gugccugagggcuccaccc

SEQ ID NO: 24206 - RNA, 20 nt, Artificial Sequence
  Synthetic
ugugccugagggcuccaccc

SEQ ID NO: 24207 - RNA, 21 nt, Artificial Sequence
  Synthetic
cugugccugagggcuccaccc

SEQ ID NO: 24208 - RNA, 22 nt, Artificial Sequence
  Synthetic
ccugugccugagggcuccaccc

SEQ ID NO: 24209 - RNA, 23 nt, Artificial Sequence
  Synthetic
cccugugccugagggcuccaccc

SEQ ID NO: 24210 - RNA, 24 nt, Artificial Sequence
  Synthetic
gcccugugccugagggcuccaccc

SEQ ID NO: 24211 - RNA, 18 nt, Artificial Sequence
  Synthetic
ccaggaauauggugaccc

SEQ ID NO: 24212 - RNA, 19 nt, Artificial Sequence
  Synthetic
cccaggaauauggugaccc

SEQ ID NO: 24213 - RNA, 20 nt, Artificial Sequence
  Synthetic
ucccaggaauauggugaccc

SEQ ID NO: 24214 - RNA, 21 nt, Artificial Sequence
  Synthetic
uucccaggaauauggugaccc

SEQ ID NO: 24215 - RNA, 22 nt, Artificial Sequence
  Synthetic
guucccaggaauauggugaccc

SEQ ID NO: 24216 - RNA, 23 nt, Artificial Sequence
  Synthetic
uguucccaggaauauggugaccc

SEQ ID NO: 24217 - RNA, 24 nt, Artificial Sequence
  Synthetic
uuguucccaggaauauggugaccc

SEQ ID NO: 24218 - RNA, 18 nt, Artificial Sequence
  Synthetic
gacacccgggugguaccc

SEQ ID NO: 24219 - RNA, 19 nt, Artificial Sequence
  Synthetic
ggacacccgggugguaccc

SEQ ID NO: 24220 - RNA, 20 nt, Artificial Sequence
  Synthetic
aggacacccgggugguaccc

SEQ ID NO: 24221 - RNA, 21 nt, Artificial Sequence
  Synthetic
caggacacccgggugguaccc

SEQ ID NO: 24222 - RNA, 22 nt, Artificial Sequence
  Synthetic
ccaggacacccgggugguaccc

SEQ ID NO: 24223 - RNA, 23 nt, Artificial Sequence
  Synthetic
gccaggacacccgggugguaccc

SEQ ID NO: 24224 - RNA, 24 nt, Artificial Sequence
  Synthetic
ggccaggacacccgggugguaccc

SEQ ID NO: 24225 - RNA, 18 nt, Artificial Sequence
  Synthetic
gccugagggcuccacccc

SEQ ID NO: 24226 - RNA, 19 nt, Artificial Sequence
  Synthetic
ugccugagggcuccacccc

SEQ ID NO: 24227 - RNA, 20 nt, Artificial Sequence
  Synthetic
gugccugagggcuccacccc

SEQ ID NO: 24228 - RNA, 21 nt, Artificial Sequence
  Synthetic
ugugccugagggcuccacccc

SEQ ID NO: 24229 - RNA, 22 nt, Artificial Sequence
  Synthetic
cugugccugagggcuccacccc

SEQ ID NO: 24230 - RNA, 23 nt, Artificial Sequence
  Synthetic
ccugugccugagggcuccacccc

SEQ ID NO: 24231 - RNA, 24 nt, Artificial Sequence
  Synthetic
cccugugccugagggcuccacccc

SEQ ID NO: 24232 - RNA, 18 nt, Artificial Sequence
  Synthetic
acacccgggugguacccc

SEQ ID NO: 24233 - RNA, 19 nt, Artificial Sequence
  Synthetic
gacacccgggugguacccc

SEQ ID NO: 24234 - RNA, 20 nt, Artificial Sequence
  Synthetic
ggacacccgggugguacccc

SEQ ID NO: 24235 - RNA, 21 nt, Artificial Sequence
  Synthetic
aggacacccgggugguacccc

SEQ ID NO: 24236 - RNA, 22 nt, Artificial Sequence
  Synthetic
caggacacccgggugguacccc

SEQ ID NO: 24237 - RNA, 23 nt, Artificial Sequence
  Synthetic
ccaggacacccgggugguacccc

SEQ ID NO: 24238 - RNA, 24 nt, Artificial Sequence
  Synthetic
gccaggacacccgggugguacccc

SEQ ID NO: 24239 - RNA, 18 nt, Artificial Sequence
  Synthetic
aaaggggcugcaaagccc

SEQ ID NO: 24240 - RNA, 19 nt, Artificial Sequence
  Synthetic
aaaaggggcugcaaagccc

SEQ ID NO: 24241 - RNA, 20 nt, Artificial Sequence
  Synthetic
uaaaaggggcugcaaagccc

SEQ ID NO: 24242 - RNA, 21 nt, Artificial Sequence
  Synthetic
guaaaaggggcugcaaagccc

SEQ ID NO: 24243 - RNA, 22 nt, Artificial Sequence
  Synthetic
aguaaaaggggcugcaaagccc

SEQ ID NO: 24244 - RNA, 23 nt, Artificial Sequence
  Synthetic
gaguaaaaggggcugcaaagccc

SEQ ID NO: 24245 - RNA, 24 nt, Artificial Sequence
  Synthetic
ugaguaaaaggggcugcaaagccc

SEQ ID NO: 24246 - RNA, 18 nt, Artificial Sequence
  Synthetic
gggucaauguccaugccc

SEQ ID NO: 24247 - RNA, 19 nt, Artificial Sequence
  Synthetic
agggucaauguccaugccc

SEQ ID NO: 24248 - RNA, 20 nt, Artificial Sequence
  Synthetic
aagggucaauguccaugccc

SEQ ID NO: 24249 - RNA, 21 nt, Artificial Sequence
  Synthetic
uaagggucaauguccaugccc

SEQ ID NO: 24250 - RNA, 22 nt, Artificial Sequence
  Synthetic
auaagggucaauguccaugccc

SEQ ID NO: 24251 - RNA, 23 nt, Artificial Sequence
  Synthetic
uauaagggucaauguccaugccc

SEQ ID NO: 24252 - RNA, 24 nt, Artificial Sequence
  Synthetic
uuauaagggucaauguccaugccc

SEQ ID NO: 24253 - RNA, 18 nt, Artificial Sequence
  Synthetic
uggucuggaaagaauccc

SEQ ID NO: 24254 - RNA, 19 nt, Artificial Sequence
  Synthetic
guggucuggaaagaauccc

SEQ ID NO: 24255 - RNA, 20 nt, Artificial Sequence
  Synthetic
gguggucuggaaagaauccc

SEQ ID NO: 24256 - RNA, 21 nt, Artificial Sequence
  Synthetic
ugguggucuggaaagaauccc

SEQ ID NO: 24257 - RNA, 22 nt, Artificial Sequence
  Synthetic
cugguggucuggaaagaauccc

SEQ ID NO: 24258 - RNA, 23 nt, Artificial Sequence
  Synthetic
acugguggucuggaaagaauccc

SEQ ID NO: 24259 - RNA, 24 nt, Artificial Sequence
  Synthetic
aacugguggucuggaaagaauccc

SEQ ID NO: 24260 - RNA, 18 nt, Artificial Sequence
  Synthetic
ccuguggauguguguccc

SEQ ID NO: 24261 - RNA, 19 nt, Artificial Sequence
  Synthetic
gccuguggauguguguccc

SEQ ID NO: 24262 - RNA, 20 nt, Artificial Sequence
  Synthetic
ggccuguggauguguguccc

SEQ ID NO: 24263 - RNA, 21 nt, Artificial Sequence
  Synthetic
uggccuguggauguguguccc

SEQ ID NO: 24264 - RNA, 22 nt, Artificial Sequence
  Synthetic
auggccuguggauguguguccc

SEQ ID NO: 24265 - RNA, 23 nt, Artificial Sequence
  Synthetic
cauggccuguggauguguguccc

SEQ ID NO: 24266 - RNA, 24 nt, Artificial Sequence
  Synthetic
gcauggccuguggauguguguccc

SEQ ID NO: 24267 - RNA, 18 nt, Artificial Sequence
  Synthetic
aaaaggggcugcaaagcc

SEQ ID NO: 24268 - RNA, 19 nt, Artificial Sequence
  Synthetic
uaaaaggggcugcaaagcc

SEQ ID NO: 24269 - RNA, 20 nt, Artificial Sequence
  Synthetic
guaaaaggggcugcaaagcc

SEQ ID NO: 24270 - RNA, 21 nt, Artificial Sequence
  Synthetic
aguaaaaggggcugcaaagcc

SEQ ID NO: 24271 - RNA, 22 nt, Artificial Sequence
  Synthetic
gaguaaaaggggcugcaaagcc

SEQ ID NO: 24272 - RNA, 23 nt, Artificial Sequence
  Synthetic
ugaguaaaaggggcugcaaagcc

SEQ ID NO: 24273 - RNA, 24 nt, Artificial Sequence
  Synthetic
uugaguaaaaggggcugcaaagcc

SEQ ID NO: 24274 - RNA, 18 nt, Artificial Sequence
  Synthetic
aaucgccaagccccagcc

SEQ ID NO: 24275 - RNA, 19 nt, Artificial Sequence
  Synthetic
caaucgccaagccccagcc

SEQ ID NO: 24276 - RNA, 20 nt, Artificial Sequence
  Synthetic
ccaaucgccaagccccagcc

SEQ ID NO: 24277 - RNA, 21 nt, Artificial Sequence
  Synthetic
gccaaucgccaagccccagcc

SEQ ID NO: 24278 - RNA, 22 nt, Artificial Sequence
  Synthetic
ggccaaucgccaagccccagcc

SEQ ID NO: 24279 - RNA, 23 nt, Artificial Sequence
  Synthetic
uggccaaucgccaagccccagcc

SEQ ID NO: 24280 - RNA, 24 nt, Artificial Sequence
  Synthetic
auggccaaucgccaagccccagcc

SEQ ID NO: 24281 - RNA, 18 nt, Artificial Sequence
  Synthetic
  misc_feature (8)..(8): n is a, c, g, or u
cagcacanccuagcagcc

SEQ ID NO: 24282 - RNA, 19 nt, Artificial Sequence
  Synthetic
  misc_feature (9)..(9): n is a, c, g, or u
gcagcacanccuagcagcc

SEQ ID NO: 24283 - RNA, 20 nt, Artificial Sequence
  Synthetic
  misc_feature (10)..(10): n is a, c, g, or u
ggcagcacanccuagcagcc

SEQ ID NO: 24284 - RNA, 21 nt, Artificial Sequence
  Synthetic
  misc_feature (11)..(11): n is a, c, g, or u
uggcagcacanccuagcagcc

SEQ ID NO: 24285 - RNA, 22 nt, Artificial Sequence
  Synthetic
  misc_feature (12)..(12): n is a, c, g, or u
uuggcagcacanccuagcagcc

SEQ ID NO: 24286 - RNA, 23 nt, Artificial Sequence
  Synthetic
  misc_feature (13)..(13): n is a, c, g, or u
guuggcagcacanccuagcagcc

SEQ ID NO: 24287 - RNA, 24 nt, Artificial Sequence
  Synthetic
  misc_feature (14)..(14): n is a, c, g, or u
aguuggcagcacanccuagcagcc

SEQ ID NO: 24288 - RNA, 18 nt, Artificial Sequence
  Synthetic
  misc_feature (5)..(5): n is a, c, g, or u
gaagngggcggcagagcc

SEQ ID NO: 24289 - RNA, 19 nt, Artificial Sequence
  Synthetic
  misc_feature (6)..(6): n is a, c, g, or u
agaagngggcggcagagcc

SEQ ID NO: 24290 - RNA, 20 nt, Artificial Sequence
  Synthetic
  misc_feature (7)..(7): n is a, c, g, or u
gagaagngggcggcagagcc

SEQ ID NO: 24291 - RNA, 21 nt, Artificial Sequence
  Synthetic
  misc_feature (8)..(8): n is a, c, g, or u
ggagaagngggcggcagagcc

SEQ ID NO: 24292 - RNA, 22 nt, Artificial Sequence
  Synthetic
  misc_feature (9)..(9): n is a, c, g, or u
cggagaagngggcggcagagcc

SEQ ID NO: 24293 - RNA, 23 nt, Artificial Sequence
  Synthetic
  misc_feature (10)..(10): n is a, c, g, or u
gcggagaagngggcggcagagcc

SEQ ID NO: 24294 - RNA, 24 nt, Artificial Sequence
  Synthetic
  misc_feature (11)..(11): n is a, c, g, or u
ggcggagaagngggcggcagagcc

SEQ ID NO: 24295 - RNA, 18 nt, Artificial Sequence
  Synthetic
uggaucggcagaggagcc

SEQ ID NO: 24296 - RNA, 19 nt, Artificial Sequence
  Synthetic
auggaucggcagaggagcc

SEQ ID NO: 24297 - RNA, 20 nt, Artificial Sequence
  Synthetic
uauggaucggcagaggagcc

SEQ ID NO: 24298 - RNA, 21 nt, Artificial Sequence
  Synthetic
guauggaucggcagaggagcc

SEQ ID NO: 24299 - RNA, 22 nt, Artificial Sequence
  Synthetic
aguauggaucggcagaggagcc

SEQ ID NO: 24300 - RNA, 23 nt, Artificial Sequence
  Synthetic
caguauggaucggcagaggagcc

SEQ ID NO: 24301 - RNA, 24 nt, Artificial Sequence
  Synthetic
gcaguauggaucggcagaggagcc

SEQ ID NO: 24302 - RNA, 18 nt, Artificial Sequence
  Synthetic
uguuucugaacuggagcc

SEQ ID NO: 24303 - RNA, 19 nt, Artificial Sequence
  Synthetic
guguuucugaacuggagcc

SEQ ID NO: 24304 - RNA, 20 nt, Artificial Sequence
  Synthetic
uguguuucugaacuggagcc

SEQ ID NO: 24305 - RNA, 21 nt, Artificial Sequence
  Synthetic
cuguguuucugaacuggagcc

SEQ ID NO: 24306 - RNA, 22 nt, Artificial Sequence
  Synthetic
ucuguguuucugaacuggagcc

SEQ ID NO: 24307 - RNA, 23 nt, Artificial Sequence
  Synthetic
uucuguguuucugaacuggagcc

SEQ ID NO: 24308 - RNA, 24 nt, Artificial Sequence
  Synthetic
guucuguguuucugaacuggagcc

SEQ ID NO: 24309 - RNA, 18 nt, Artificial Sequence
  Synthetic
gcacuaguaaacugagcc

SEQ ID NO: 24310 - RNA, 19 nt, Artificial Sequence
  Synthetic
ugcacuaguaaacugagcc

SEQ ID NO: 24311 - RNA, 20 nt, Artificial Sequence
  Synthetic
uugcacuaguaaacugagcc

SEQ ID NO: 24312 - RNA, 21 nt, Artificial Sequence
  Synthetic
auugcacuaguaaacugagcc

SEQ ID NO: 24313 - RNA, 22 nt, Artificial Sequence
  Synthetic
aauugcacuaguaaacugagcc

SEQ ID NO: 24314 - RNA, 23 nt, Artificial Sequence
  Synthetic
aaauugcacuaguaaacugagcc

SEQ ID NO: 24315 - RNA, 24 nt, Artificial Sequence
  Synthetic
caaauugcacuaguaaacugagcc

SEQ ID NO: 24316 - RNA, 18 nt, Artificial Sequence
  Synthetic
ggaagaugauaaaacgcc

SEQ ID NO: 24317 - RNA, 19 nt, Artificial Sequence
  Synthetic
aggaagaugauaaaacgcc

SEQ ID NO: 24318 - RNA, 20 nt, Artificial Sequence
  Synthetic
gaggaagaugauaaaacgcc

SEQ ID NO: 24319 - RNA, 21 nt, Artificial Sequence
  Synthetic
agaggaagaugauaaaacgcc

SEQ ID NO: 24320 - RNA, 22 nt, Artificial Sequence
  Synthetic
aagaggaagaugauaaaacgcc

SEQ ID NO: 24321 - RNA, 23 nt, Artificial Sequence
  Synthetic
gaagaggaagaugauaaaacgcc

SEQ ID NO: 24322 - RNA, 24 nt, Artificial Sequence
  Synthetic
ugaagaggaagaugauaaaacgcc

SEQ ID NO: 24323 - RNA, 18 nt, Artificial Sequence
  Synthetic
aacaagaaacacaccgcc

SEQ ID NO: 24324 - RNA, 19 nt, Artificial Sequence
  Synthetic
caacaagaaacacaccgcc

SEQ ID NO: 24325 - RNA, 20 nt, Artificial Sequence
  Synthetic
ucaacaagaaacacaccgcc

SEQ ID NO: 24326 - RNA, 21 nt, Artificial Sequence
  Synthetic
gucaacaagaaacacaccgcc

SEQ ID NO: 24327 - RNA, 22 nt, Artificial Sequence
  Synthetic
ugucaacaagaaacacaccgcc

SEQ ID NO: 24328 - RNA, 23 nt, Artificial Sequence
  Synthetic
uugucaacaagaaacacaccgcc

SEQ ID NO: 24329 - RNA, 24 nt, Artificial Sequence
  Synthetic
uuugucaacaagaaacacaccgcc

SEQ ID NO: 24330 - RNA, 18 nt, Artificial Sequence
  Synthetic
uccgcaggauucagcgcc

SEQ ID NO: 24331 - RNA, 19 nt, Artificial Sequence
  Synthetic
guccgcaggauucagcgcc

SEQ ID NO: 24332 - RNA, 20 nt, Artificial Sequence
  Synthetic
cguccgcaggauucagcgcc

SEQ ID NO: 24333 - RNA, 21 nt, Artificial Sequence
  Synthetic
ucguccgcaggauucagcgcc

SEQ ID NO: 24334 - RNA, 22 nt, Artificial Sequence
  Synthetic
gucguccgcaggauucagcgcc

SEQ ID NO: 24335 - RNA, 23 nt, Artificial Sequence
  Synthetic
ggucguccgcaggauucagcgcc

SEQ ID NO: 24336 - RNA, 24 nt, Artificial Sequence
  Synthetic
gggucguccgcaggauucagcgcc

SEQ ID NO: 24337 - RNA, 18 nt, Artificial Sequence
  Synthetic
cccaugccccuucucgcc

SEQ ID NO: 24338 - RNA, 19 nt, Artificial Sequence
  Synthetic
ucccaugccccuucucgcc

SEQ ID NO: 24339 - RNA, 20 nt, Artificial Sequence
  Synthetic
gucccaugccccuucucgcc

SEQ ID NO: 24340 - RNA, 21 nt, Artificial Sequence
  Synthetic
ugucccaugccccuucucgcc

SEQ ID NO: 24341 - RNA, 22 nt, Artificial Sequence
  Synthetic
cugucccaugccccuucucgcc

SEQ ID NO: 24342 - RNA, 23 nt, Artificial Sequence
  Synthetic
ucugucccaugccccuucucgcc

SEQ ID NO: 24343 - RNA, 24 nt, Artificial Sequence
  Synthetic
uucugucccaugccccuucucgcc

SEQ ID NO: 24344 - RNA, 18 nt, Artificial Sequence
  Synthetic
gcgaagugcacacgggcc

SEQ ID NO: 24345 - RNA, 19 nt, Artificial Sequence
  Synthetic
agcgaagugcacacgggcc

SEQ ID NO: 24346 - RNA, 20 nt, Artificial Sequence
  Synthetic
aagcgaagugcacacgggcc

SEQ ID NO: 24347 - RNA, 21 nt, Artificial Sequence
  Synthetic
gaagcgaagugcacacgggcc

SEQ ID NO: 24348 - RNA, 22 nt, Artificial Sequence
  Synthetic
ugaagcgaagugcacacgggcc

SEQ ID NO: 24349 - RNA, 23 nt, Artificial Sequence
  Synthetic
gugaagcgaagugcacacgggcc

SEQ ID NO: 24350 - RNA, 24 nt, Artificial Sequence
  Synthetic
ggugaagcgaagugcacacgggcc

SEQ ID NO: 24351 - RNA, 18 nt, Artificial Sequence
  Synthetic
  misc_feature (5)..(5): n is a, c, g, or u
auuunuagugagugggcc

SEQ ID NO: 24352 - RNA, 19 nt, Artificial Sequence
  Synthetic
  misc_feature (6)..(6): n is a, c, g, or u
cauuunuagugagugggcc

SEQ ID NO: 24353 - RNA, 20 nt, Artificial Sequence
  Synthetic
  misc_feature (7)..(7): n is a, c, g, or u
ucauuunuagugagugggcc

SEQ ID NO: 24354 - RNA, 21 nt, Artificial Sequence
  Synthetic
  misc_feature (8)..(8): n is a, c, g, or u
uucauuunuagugagugggcc

SEQ ID NO: 24355 - RNA, 22 nt, Artificial Sequence
  Synthetic
  misc_feature (9)..(9): n is a, c, g, or u
uuucauuunuagugagugggcc

SEQ ID NO: 24356 - RNA, 23 nt, Artificial Sequence
  Synthetic
  misc_feature (10)..(10): n is a, c, g, or u
cuuucauuunuagugagugggcc

SEQ ID NO: 24357 - RNA, 24 nt, Artificial Sequence
  Synthetic
  misc_feature (11)..(11): n is a, c, g, or u
ccuuucauuunuagugagugggcc

SEQ ID NO: 24358 - RNA, 18 nt, Artificial Sequence
  Synthetic
agggucaauguccaugcc

SEQ ID NO: 24359 - RNA, 19 nt, Artificial Sequence
  Synthetic
aagggucaauguccaugcc

SEQ ID NO: 24360 - RNA, 20 nt, Artificial Sequence
  Synthetic
uaagggucaauguccaugcc

SEQ ID NO: 24361 - RNA, 21 nt, Artificial Sequence
  Synthetic
auaagggucaauguccaugcc

SEQ ID NO: 24362 - RNA, 22 nt, Artificial Sequence
  Synthetic
uauaagggucaauguccaugcc

SEQ ID NO: 24363 - RNA, 23 nt, Artificial Sequence
  Synthetic
uuauaagggucaauguccaugcc

SEQ ID NO: 24364 - RNA, 24 nt, Artificial Sequence
  Synthetic
uuuauaagggucaauguccaugcc

SEQ ID NO: 24365 - RNA, 18 nt, Artificial Sequence
  Synthetic
uguguucaaauggaugcc

SEQ ID NO: 24366 - RNA, 19 nt, Artificial Sequence
  Synthetic
cuguguucaaauggaugcc

SEQ ID NO: 24367 - RNA, 20 nt, Artificial Sequence
  Synthetic
gcuguguucaaauggaugcc

SEQ ID NO: 24368 - RNA, 21 nt, Artificial Sequence
  Synthetic
agcuguguucaaauggaugcc

SEQ ID NO: 24369 - RNA, 22 nt, Artificial Sequence
  Synthetic
uagcuguguucaaauggaugcc

SEQ ID NO: 24370 - RNA, 23 nt, Artificial Sequence
  Synthetic
uuagcuguguucaaauggaugcc

SEQ ID NO: 24371 - RNA, 24 nt, Artificial Sequence
  Synthetic
uuuagcuguguucaaauggaugcc

SEQ ID NO: 24372 - RNA, 18 nt, Artificial Sequence
  Synthetic
aacagaccaauuuaugcc

SEQ ID NO: 24373 - RNA, 19 nt, Artificial Sequence
  Synthetic
gaacagaccaauuuaugcc

SEQ ID NO: 24374 - RNA, 20 nt, Artificial Sequence
  Synthetic
ugaacagaccaauuuaugcc

SEQ ID NO: 24375 - RNA, 21 nt, Artificial Sequence
  Synthetic
gugaacagaccaauuuaugcc

SEQ ID NO: 24376 - RNA, 22 nt, Artificial Sequence
  Synthetic
ggugaacagaccaauuuaugcc

SEQ ID NO: 24377 - RNA, 23 nt, Artificial Sequence
  Synthetic
uggugaacagaccaauuuaugcc

SEQ ID NO: 24378 - RNA, 24 nt, Artificial Sequence
  Synthetic
cuggugaacagaccaauuuaugcc

SEQ ID NO: 24379 - RNA, 18 nt, Artificial Sequence
  Synthetic
  misc_feature (4)..(4): n is a, c, g, or u
aacngaguugucagugcc

SEQ ID NO: 24380 - RNA, 19 nt, Artificial Sequence
  Synthetic
  misc_feature (5)..(5): n is a, c, g, or u
caacngaguugucagugcc

SEQ ID NO: 24381 - RNA, 20 nt, Artificial Sequence
  Synthetic
  misc_feature (6)..(6): n is a, c, g, or u
acaacngaguugucagugcc

SEQ ID NO: 24382 - RNA, 21 nt, Artificial Sequence
  Synthetic
  misc_feature (7)..(7): n is a, c, g, or u
gacaacngaguugucagugcc

SEQ ID NO: 24383 - RNA, 22 nt, Artificial Sequence
  Synthetic
  misc_feature (8)..(8): n is a, c, g, or u
ggacaacngaguugucagugcc

SEQ ID NO: 24384 - RNA, 23 nt, Artificial Sequence
  Synthetic
  misc_feature (9)..(9): n is a, c, g, or u
aggacaacngaguugucagugcc

SEQ ID NO: 24385 - RNA, 24 nt, Artificial Sequence
  Synthetic
  misc_feature (10)..(10): n is a, c, g, or u
aaggacaacngaguugucagugcc

SEQ ID NO: 24386 - RNA, 18 nt, Artificial Sequence
  Synthetic
  misc_feature (3)..(3): n is a, c, g, or u
gunagaaugcccugugcc

SEQ ID NO: 24387 - RNA, 19 nt, Artificial Sequence
  Synthetic
  misc_feature (4)..(4): n is a, c, g, or u
ugunagaaugcccugugcc

SEQ ID NO: 24388 - RNA, 20 nt, Artificial Sequence
  Synthetic
  misc_feature (5)..(5): n is a, c, g, or u
uugunagaaugcccugugcc

SEQ ID NO: 24389 - RNA, 21 nt, Artificial Sequence
  Synthetic
  misc_feature (6)..(6): n is a, c, g, or u
guugunagaaugcccugugcc

SEQ ID NO: 24390 - RNA, 22 nt, Artificial Sequence
  Synthetic
  misc_feature (7)..(7): n is a, c, g, or u
gguugunagaaugcccugugcc

SEQ ID NO: 24391 - RNA, 23 nt, Artificial Sequence
  Synthetic
  misc_feature (8)..(8): n is a, c, g, or u
agguugunagaaugcccugugcc

SEQ ID NO: 24392 - RNA, 24 nt, Artificial Sequence
  Synthetic
  misc_feature (9)..(9): n is a, c, g, or u
gagguugunagaaugcccugugcc

SEQ ID NO: 24393 - RNA, 18 nt, Artificial Sequence
  Synthetic
agcacaaaauagcuugcc

SEQ ID NO: 24394 - RNA, 19 nt, Artificial Sequence
  Synthetic
cagcacaaaauagcuugcc

SEQ ID NO: 24395 - RNA, 20 nt, Artificial Sequence
  Synthetic
ccagcacaaaauagcuugcc

SEQ ID NO: 24396 - RNA, 21 nt, Artificial Sequence
  Synthetic
cccagcacaaaauagcuugcc

SEQ ID NO: 24397 - RNA, 22 nt, Artificial Sequence
  Synthetic
ccccagcacaaaauagcuugcc

SEQ ID NO: 24398 - RNA, 23 nt, Artificial Sequence
  Synthetic
accccagcacaaaauagcuugcc

SEQ ID NO: 24399 - RNA, 24 nt, Artificial Sequence
  Synthetic
caccccagcacaaaauagcuugcc

SEQ ID NO: 24400 - RNA, 18 nt, Artificial Sequence
  Synthetic
acuccuaccuuguuugcc

SEQ ID NO: 24401 - RNA, 19 nt, Artificial Sequence
  Synthetic
cacuccuaccuuguuugcc

SEQ ID NO: 24402 - RNA, 20 nt, Artificial Sequence
  Synthetic
ccacuccuaccuuguuugcc

SEQ ID NO: 24403 - RNA, 21 nt, Artificial Sequence
  Synthetic
cccacuccuaccuuguuugcc

SEQ ID NO: 24404 - RNA, 22 nt, Artificial Sequence
  Synthetic
ucccacuccuaccuuguuugcc

SEQ ID NO: 24405 - RNA, 23 nt, Artificial Sequence
  Synthetic
cucccacuccuaccuuguuugcc

SEQ ID NO: 24406 - RNA, 24 nt, Artificial Sequence
  Synthetic
ccucccacuccuaccuuguuugcc

SEQ ID NO: 24407 - RNA, 18 nt, Artificial Sequence
  Synthetic
guggucuggaaagaaucc

SEQ ID NO: 24408 - RNA, 19 nt, Artificial Sequence
  Synthetic
gguggucuggaaagaaucc

SEQ ID NO: 24409 - RNA, 20 nt, Artificial Sequence
  Synthetic
ugguggucuggaaagaaucc

SEQ ID NO: 24410 - RNA, 21 nt, Artificial Sequence
  Synthetic
cugguggucuggaaagaaucc

SEQ ID NO: 24411 - RNA, 22 nt, Artificial Sequence
  Synthetic
acugguggucuggaaagaaucc

SEQ ID NO: 24412 - RNA, 23 nt, Artificial Sequence
  Synthetic
aacugguggucuggaaagaaucc

SEQ ID NO: 24413 - RNA, 24 nt, Artificial Sequence
  Synthetic
caacugguggucuggaaagaaucc

SEQ ID NO: 24414 - RNA, 18 nt, Artificial Sequence
  Synthetic
gcuggugguuguagaucc

SEQ ID NO: 24415 - RNA, 19 nt, Artificial Sequence
  Synthetic
ugcuggugguuguagaucc

SEQ ID NO: 24416 - RNA, 20 nt, Artificial Sequence
  Synthetic
gugcuggugguuguagaucc

SEQ ID NO: 24417 - RNA, 21 nt, Artificial Sequence
  Synthetic
cgugcuggugguuguagaucc

SEQ ID NO: 24418 - RNA, 22 nt, Artificial Sequence
  Synthetic
ccgugcuggugguuguagaucc

SEQ ID NO: 24419 - RNA, 23 nt, Artificial Sequence
  Synthetic
cccgugcuggugguuguagaucc

SEQ ID NO: 24420 - RNA, 24 nt, Artificial Sequence
  Synthetic
ucccgugcuggugguuguagaucc

SEQ ID NO: 24421 - RNA, 18 nt, Artificial Sequence
  Synthetic
  misc_feature (6)..(6): n is a, c, g, or u
ucucungcugcaggaucc

SEQ ID NO: 24422 - RNA, 19 nt, Artificial Sequence
  Synthetic
  misc_feature (7)..(7): n is a, c, g, or u
aucucungcugcaggaucc

SEQ ID NO: 24423 - RNA, 20 nt, Artificial Sequence
  Synthetic
  misc_feature (8)..(8): n is a, c, g, or u
gaucucungcugcaggaucc

SEQ ID NO: 24424 - RNA, 21 nt, Artificial Sequence
  Synthetic
  misc_feature (9)..(9): n is a, c, g, or u
agaucucungcugcaggaucc

SEQ ID NO: 24425 - RNA, 22 nt, Artificial Sequence
  Synthetic
  misc_feature (10)..(10): n is a, c, g, or u
uagaucucungcugcaggaucc

SEQ ID NO: 24426 - RNA, 23 nt, Artificial Sequence
  Synthetic
  misc_feature (11)..(11): n is a, c, g, or u
cuagaucucungcugcaggaucc

SEQ ID NO: 24427 - RNA, 24 nt, Artificial Sequence
  Synthetic
  misc_feature (12)..(12): n is a, c, g, or u
acuagaucucungcugcaggaucc

SEQ ID NO: 24428 - RNA, 18 nt, Artificial Sequence
  Synthetic
  misc_feature (3)..(3): n is a, c, g, or u
ggnuuaauaccuuuaucc

SEQ ID NO: 24429 - RNA, 19 nt, Artificial Sequence
  Synthetic
  misc_feature (4)..(4): n is a, c, g, or u
aggnuuaauaccuuuaucc

SEQ ID NO: 24430 - RNA, 20 nt, Artificial Sequence
  Synthetic
  misc_feature (5)..(5): n is a, c, g, or u
aaggnuuaauaccuuuaucc

SEQ ID NO: 24431 - RNA, 21 nt, Artificial Sequence
  Synthetic
  misc_feature (6)..(6): n is a, c, g, or u
uaaggnuuaauaccuuuaucc

SEQ ID NO: 24432 - RNA, 22 nt, Artificial Sequence
  Synthetic
  misc_feature (7)..(7): n is a, c, g, or u
guaaggnuuaauaccuuuaucc

SEQ ID NO: 24433 - RNA, 23 nt, Artificial Sequence
  Synthetic
  misc_feature (8)..(8): n is a, c, g, or u
aguaaggnuuaauaccuuuaucc

SEQ ID NO: 24434 - RNA, 24 nt, Artificial Sequence
  Synthetic
  misc_feature (9)..(9): n is a, c, g, or u
uaguaaggnuuaauaccuuuaucc

SEQ ID NO: 24435 - RNA, 18 nt, Artificial Sequence
  Synthetic
aaaaaugagaguaacucc

SEQ ID NO: 24436 - RNA, 19 nt, Artificial Sequence
  Synthetic
caaaaaugagaguaacucc

SEQ ID NO: 24437 - RNA, 20 nt, Artificial Sequence
  Synthetic
gcaaaaaugagaguaacucc

SEQ ID NO: 24438 - RNA, 21 nt, Artificial Sequence
  Synthetic
ggcaaaaaugagaguaacucc

SEQ ID NO: 24439 - RNA, 22 nt, Artificial Sequence
  Synthetic
aggcaaaaaugagaguaacucc

SEQ ID NO: 24440 - RNA, 23 nt, Artificial Sequence
  Synthetic
aaggcaaaaaugagaguaacucc

SEQ ID NO: 24441 - RNA, 24 nt, Artificial Sequence
  Synthetic
gaaggcaaaaaugagaguaacucc

SEQ ID NO: 24442 - RNA, 18 nt, Artificial Sequence
  Synthetic
  misc_feature (7)..(7): n is a, c, g, or u
agugcgnauccacacucc

SEQ ID NO: 24443 - RNA, 19 nt, Artificial Sequence
  Synthetic
  misc_feature (8)..(8): n is a, c, g, or u
gagugcgnauccacacucc

SEQ ID NO: 24444 - RNA, 20 nt, Artificial Sequence
  Synthetic
  misc_feature (9)..(9): n is a, c, g, or u
ggagugcgnauccacacucc

SEQ ID NO: 24445 - RNA, 21 nt, Artificial Sequence
  Synthetic
  misc_feature (10)..(10): n is a, c, g, or u
uggagugcgnauccacacucc

SEQ ID NO: 24446 - RNA, 22 nt, Artificial Sequence
  Synthetic
  misc_feature (11)..(11): n is a, c, g, or u
guggagugcgnauccacacucc

SEQ ID NO: 24447 - RNA, 23 nt, Artificial Sequence
  Synthetic
  misc_feature (12)..(12): n is a, c, g, or u
gguggagugcgnauccacacucc

SEQ ID NO: 24448 - RNA, 24 nt, Artificial Sequence
  Synthetic
  misc_feature (13)..(13): n is a, c, g, or u
agguggagugcgnauccacacucc

SEQ ID NO: 24449 - RNA, 18 nt, Artificial Sequence
  Synthetic
cgggcugaggcccacucc

SEQ ID NO: 24450 - RNA, 19 nt, Artificial Sequence
  Synthetic
acgggcugaggcccacucc

SEQ ID NO: 24451 - RNA, 20 nt, Artificial Sequence
  Synthetic
aacgggcugaggcccacucc

SEQ ID NO: 24452 - RNA, 21 nt, Artificial Sequence
  Synthetic
aaacgggcugaggcccacucc

SEQ ID NO: 24453 - RNA, 22 nt, Artificial Sequence
  Synthetic
gaaacgggcugaggcccacucc

SEQ ID NO: 24454 - RNA, 23 nt, Artificial Sequence
  Synthetic
agaaacgggcugaggcccacucc

SEQ ID NO: 24455 - RNA, 24 nt, Artificial Sequence
  Synthetic
gagaaacgggcugaggcccacucc

SEQ ID NO: 24456 - RNA, 18 nt, Artificial Sequence
  Synthetic
uuuaaccucaacuccucc

SEQ ID NO: 24457 - RNA, 19 nt, Artificial Sequence
  Synthetic
cuuuaaccucaacuccucc

SEQ ID NO: 24458 - RNA, 20 nt, Artificial Sequence
  Synthetic
ccuuuaaccucaacuccucc

SEQ ID NO: 24459 - RNA, 21 nt, Artificial Sequence
  Synthetic
accuuuaaccucaacuccucc

SEQ ID NO: 24460 - RNA, 22 nt, Artificial Sequence
  Synthetic
gaccuuuaaccucaacuccucc

SEQ ID NO: 24461 - RNA, 23 nt, Artificial Sequence
  Synthetic
agaccuuuaaccucaacuccucc

SEQ ID NO: 24462 - RNA, 24 nt, Artificial Sequence
  Synthetic
aagaccuuuaaccucaacuccucc

SEQ ID NO: 24463 - RNA, 18 nt, Artificial Sequence
  Synthetic
uucccaccuuaugagucc

SEQ ID NO: 24464 - RNA, 19 nt, Artificial Sequence
  Synthetic
uuucccaccuuaugagucc

SEQ ID NO: 24465 - RNA, 20 nt, Artificial Sequence
  Synthetic
guuucccaccuuaugagucc

SEQ ID NO: 24466 - RNA, 21 nt, Artificial Sequence
  Synthetic
aguuucccaccuuaugagucc

SEQ ID NO: 24467 - RNA, 22 nt, Artificial Sequence
  Synthetic
aaguuucccaccuuaugagucc

SEQ ID NO: 24468 - RNA, 23 nt, Artificial Sequence
  Synthetic
aaaguuucccaccuuaugagucc

SEQ ID NO: 24469 - RNA, 24 nt, Artificial Sequence
  Synthetic
uaaaguuucccaccuuaugagucc

SEQ ID NO: 24470 - RNA, 18 nt, Artificial Sequence
  Synthetic
aacauaccuugauagucc

SEQ ID NO: 24471 - RNA, 19 nt, Artificial Sequence
  Synthetic
caacauaccuugauagucc

SEQ ID NO: 24472 - RNA, 20 nt, Artificial Sequence
  Synthetic
gcaacauaccuugauagucc

SEQ ID NO: 24473 - RNA, 18 nt, Artificial Sequence
  Synthetic
ccacgagaggggucgucc

SEQ ID NO: 24474 - RNA, 19 nt, Artificial Sequence
  Synthetic
accacgagaggggucgucc

SEQ ID NO: 24475 - RNA, 20 nt, Artificial Sequence
  Synthetic
gaccacgagaggggucgucc

SEQ ID NO: 24476 - RNA, 18 nt, Artificial Sequence
  Synthetic
uaacacgagaaggggucc

SEQ ID NO: 24477 - RNA, 19 nt, Artificial Sequence
  Synthetic
guaacacgagaaggggucc

SEQ ID NO: 24478 - RNA, 20 nt, Artificial Sequence
  Synthetic
uguaacacgagaaggggucc

SEQ ID NO: 24479 - RNA, 18 nt, Artificial Sequence
  Synthetic
  misc_feature (14)..(14): n is a, c, g, or u
guuccugaggcaangucc

SEQ ID NO: 24480 - RNA, 19 nt, Artificial Sequence
  Synthetic
  misc_feature (15)..(15): n is a, c, g, or u
uguuccugaggcaangucc

SEQ ID NO: 24481 - RNA, 20 nt, Artificial Sequence
  Synthetic
  misc_feature (16)..(16): n is a, c, g, or u
auguuccugaggcaangucc

SEQ ID NO: 24482 - RNA, 21 nt, Artificial Sequence
  Synthetic
  misc_feature (17)..(17): n is a, c, g, or u
uauguuccugaggcaangucc

SEQ ID NO: 24483 - RNA, 22 nt, Artificial Sequence
  Synthetic
  misc_feature (18)..(18): n is a, c, g, or u
auauguuccugaggcaangucc

SEQ ID NO: 24484 - RNA, 23 nt, Artificial Sequence
  Synthetic
  misc_feature (19)..(19): n is a, c, g, or u
aauauguuccugaggcaangucc

SEQ ID NO: 24485 - RNA, 24 nt, Artificial Sequence
  Synthetic
  misc_feature (20)..(20): n is a, c, g, or u
caauauguuccugaggcaangucc

SEQ ID NO: 24486 - RNA, 18 nt, Artificial Sequence
  Synthetic
gccuguggaugugugucc

SEQ ID NO: 24487 - RNA, 19 nt, Artificial Sequence
  Synthetic
ggccuguggaugugugucc

SEQ ID NO: 24488 - RNA, 20 nt, Artificial Sequence
  Synthetic
uggccuguggaugugugucc

SEQ ID NO: 24489 - RNA, 21 nt, Artificial Sequence
  Synthetic
auggccuguggaugugugucc

SEQ ID NO: 24490 - RNA, 22 nt, Artificial Sequence
  Synthetic
cauggccuguggaugugugucc

SEQ ID NO: 24491 - RNA, 23 nt, Artificial Sequence
  Synthetic
gcauggccuguggaugugugucc

SEQ ID NO: 24492 - RNA, 24 nt, Artificial Sequence
  Synthetic
ugcauggccuguggaugugugucc

SEQ ID NO: 24493 - RNA, 18 nt, Artificial Sequence
  Synthetic
  misc_feature (15)..(15): n is a, c, g, or u
agguuguuggcaagnucc

SEQ ID NO: 24494 - RNA, 19 nt, Artificial Sequence
  Synthetic
  misc_feature (16)..(16): n is a, c, g, or u
aagguuguuggcaagnucc

SEQ ID NO: 24495 - RNA, 20 nt, Artificial Sequence
  Synthetic
  misc_feature (17)..(17): n is a, c, g, or u
uaagguuguuggcaagnucc

SEQ ID NO: 24496 - RNA, 21 nt, Artificial Sequence
  Synthetic
  misc_feature (18)..(18): n is a, c, g, or u
guaagguuguuggcaagnucc

SEQ ID NO: 24497 - RNA, 22 nt, Artificial Sequence
  Synthetic
  misc_feature (19)..(19): n is a, c, g, or u
uguaagguuguuggcaagnucc

SEQ ID NO: 24498 - RNA, 23 nt, Artificial Sequence
  Synthetic
  misc_feature (20)..(20): n is a, c, g, or u
auguaagguuguuggcaagnucc

SEQ ID NO: 24499 - RNA, 24 nt, Artificial Sequence
  Synthetic
  misc_feature (21)..(21): n is a, c, g, or u
uauguaagguuguuggcaagnucc

SEQ ID NO: 24500 - RNA, 18 nt, Artificial Sequence
  Synthetic
ggaaggagguguacuucc

SEQ ID NO: 24501 - RNA, 19 nt, Artificial Sequence
  Synthetic
gggaaggagguguacuucc

SEQ ID NO: 24502 - RNA, 20 nt, Artificial Sequence
  Synthetic
ugggaaggagguguacuucc

SEQ ID NO: 24503 - RNA, 21 nt, Artificial Sequence
  Synthetic
augggaaggagguguacuucc

SEQ ID NO: 24504 - RNA, 22 nt, Artificial Sequence
  Synthetic
caugggaaggagguguacuucc

SEQ ID NO: 24505 - RNA, 23 nt, Artificial Sequence
  Synthetic
ccaugggaaggagguguacuucc

SEQ ID NO: 24506 - RNA, 24 nt, Artificial Sequence
  Synthetic
gccaugggaaggagguguacuucc

SEQ ID NO: 24507 - RNA, 18 nt, Artificial Sequence
  Synthetic
auagaauuccugccuucc

SEQ ID NO: 24508 - RNA, 19 nt, Artificial Sequence
  Synthetic
uauagaauuccugccuucc

SEQ ID NO: 24509 - RNA, 20 nt, Artificial Sequence
  Synthetic
auauagaauuccugccuucc

SEQ ID NO: 24510 - RNA, 21 nt, Artificial Sequence
  Synthetic
uauauagaauuccugccuucc

SEQ ID NO: 24511 - RNA, 22 nt, Artificial Sequence
  Synthetic
uuauauagaauuccugccuucc

SEQ ID NO: 24512 - RNA, 23 nt, Artificial Sequence
  Synthetic
cuuauauagaauuccugccuucc

SEQ ID NO: 24513 - RNA, 24 nt, Artificial Sequence
  Synthetic
ucuuauauagaauuccugccuucc

SEQ ID NO: 24514 - RNA, 18 nt, Artificial Sequence
  Synthetic
gggaaacauagagguucc

SEQ ID NO: 24515 - RNA, 19 nt, Artificial Sequence
  Synthetic
agggaaacauagagguucc

SEQ ID NO: 24516 - RNA, 20 nt, Artificial Sequence
  Synthetic
gagggaaacauagagguucc

SEQ ID NO: 24517 - RNA, 21 nt, Artificial Sequence
  Synthetic
ggagggaaacauagagguucc

SEQ ID NO: 24518 - RNA, 22 nt, Artificial Sequence
  Synthetic
aggagggaaacauagagguucc

SEQ ID NO: 24519 - RNA, 23 nt, Artificial Sequence
  Synthetic
caggagggaaacauagagguucc

SEQ ID NO: 24520 - RNA, 24 nt, Artificial Sequence
  Synthetic
gcaggagggaaacauagagguucc

SEQ ID NO: 24521 - RNA, 18 nt, Artificial Sequence
  Synthetic
uuaugcacaauauguucc

SEQ ID NO: 24522 - RNA, 19 nt, Artificial Sequence
  Synthetic
uuuaugcacaauauguucc

SEQ ID NO: 24523 - RNA, 20 nt, Artificial Sequence
  Synthetic
uuuuaugcacaauauguucc

SEQ ID NO: 24524 - RNA, 21 nt, Artificial Sequence
  Synthetic
auuuuaugcacaauauguucc

SEQ ID NO: 24525 - RNA, 22 nt, Artificial Sequence
  Synthetic
gauuuuaugcacaauauguucc

SEQ ID NO: 24526 - RNA, 23 nt, Artificial Sequence
  Synthetic
ugauuuuaugcacaauauguucc

SEQ ID NO: 24527 - RNA, 24 nt, Artificial Sequence
  Synthetic
uugauuuuaugcacaauauguucc

SEQ ID NO: 24528 - RNA, 18 nt, Artificial Sequence
  Synthetic
ugcuguagcucuuguucc

SEQ ID NO: 24529 - RNA, 19 nt, Artificial Sequence
  Synthetic
augcuguagcucuuguucc

SEQ ID NO: 24530 - RNA, 20 nt, Artificial Sequence
  Synthetic
caugcuguagcucuuguucc

SEQ ID NO: 24531 - RNA, 21 nt, Artificial Sequence
  Synthetic
ccaugcuguagcucuuguucc

SEQ ID NO: 24532 - RNA, 22 nt, Artificial Sequence
  Synthetic
cccaugcuguagcucuuguucc

SEQ ID NO: 24533 - RNA, 23 nt, Artificial Sequence
  Synthetic
ucccaugcuguagcucuuguucc

SEQ ID NO: 24534 - RNA, 24 nt, Artificial Sequence
  Synthetic
cucccaugcuguagcucuuguucc

SEQ ID NO: 24535 - RNA, 18 nt, Artificial Sequence
  Synthetic
cucccauagguauuuucc

SEQ ID NO: 24536 - RNA, 19 nt, Artificial Sequence
  Synthetic
acucccauagguauuuucc

SEQ ID NO: 24537 - RNA, 20 nt, Artificial Sequence
  Synthetic
cacucccauagguauuuucc

SEQ ID NO: 24538 - RNA, 21 nt, Artificial Sequence
  Synthetic
ccacucccauagguauuuucc

SEQ ID NO: 24539 - RNA, 22 nt, Artificial Sequence
  Synthetic
cccacucccauagguauuuucc

SEQ ID NO: 24540 - RNA, 23 nt, Artificial Sequence
  Synthetic
gcccacucccauagguauuuucc

SEQ ID NO: 24541 - RNA, 24 nt, Artificial Sequence
  Synthetic
ggcccacucccauagguauuuucc

SEQ ID NO: 24542 - RNA, 18 nt, Artificial Sequence
  Synthetic
uaaaaggggcugcaaagc

SEQ ID NO: 24543 - RNA, 19 nt, Artificial Sequence
  Synthetic
guaaaaggggcugcaaagc

SEQ ID NO: 24544 - RNA, 20 nt, Artificial Sequence
  Synthetic
aguaaaaggggcugcaaagc

SEQ ID NO: 24545 - RNA, 21 nt, Artificial Sequence
  Synthetic
gaguaaaaggggcugcaaagc

SEQ ID NO: 24546 - RNA, 22 nt, Artificial Sequence
  Synthetic
ugaguaaaaggggcugcaaagc

SEQ ID NO: 24547 - RNA, 23 nt, Artificial Sequence
  Synthetic
uugaguaaaaggggcugcaaagc

SEQ ID NO: 24548 - RNA, 24 nt, Artificial Sequence
  Synthetic
auugaguaaaaggggcugcaaagc

SEQ ID NO: 24549 - RNA, 18 nt, Artificial Sequence
  Synthetic
uagguauuuuccgaaagc

SEQ ID NO: 24550 - RNA, 19 nt, Artificial Sequence
  Synthetic
auagguauuuuccgaaagc

SEQ ID NO: 24551 - RNA, 20 nt, Artificial Sequence
  Synthetic
cauagguauuuuccgaaagc

SEQ ID NO: 24552 - RNA, 21 nt, Artificial Sequence
  Synthetic
ccauagguauuuuccgaaagc

SEQ ID NO: 24553 - RNA, 22 nt, Artificial Sequence
  Synthetic
cccauagguauuuuccgaaagc

SEQ ID NO: 24554 - RNA, 23 nt, Artificial Sequence
  Synthetic
ucccauagguauuuuccgaaagc

SEQ ID NO: 24555 - RNA, 24 nt, Artificial Sequence
  Synthetic
cucccauagguauuuuccgaaagc

SEQ ID NO: 24556 - RNA, 18 nt, Artificial Sequence
  Synthetic
gauggccaaucgccaagc

SEQ ID NO: 24557 - RNA, 19 nt, Artificial Sequence
  Synthetic
ugauggccaaucgccaagc

SEQ ID NO: 24558 - RNA, 20 nt, Artificial Sequence
  Synthetic
cugauggccaaucgccaagc

SEQ ID NO: 24559 - RNA, 21 nt, Artificial Sequence
  Synthetic
gcugauggccaaucgccaagc

SEQ ID NO: 24560 - RNA, 22 nt, Artificial Sequence
  Synthetic
cgcugauggccaaucgccaagc

SEQ ID NO: 24561 - RNA, 23 nt, Artificial Sequence
  Synthetic
gcgcugauggccaaucgccaagc

SEQ ID NO: 24562 - RNA, 24 nt, Artificial Sequence
  Synthetic
ugcgcugauggccaaucgccaagc

SEQ ID NO: 24563 - RNA, 18 nt, Artificial Sequence
  Synthetic
gaguaacuccacagaagc

SEQ ID NO: 24564 - RNA, 19 nt, Artificial Sequence
  Synthetic
agaguaacuccacagaagc

SEQ ID NO: 24565 - RNA, 20 nt, Artificial Sequence
  Synthetic
gagaguaacuccacagaagc

SEQ ID NO: 24566 - RNA, 21 nt, Artificial Sequence
  Synthetic
ugagaguaacuccacagaagc

SEQ ID NO: 24567 - RNA, 22 nt, Artificial Sequence
  Synthetic
augagaguaacuccacagaagc

SEQ ID NO: 24568 - RNA, 23 nt, Artificial Sequence
  Synthetic
aaugagaguaacuccacagaagc

SEQ ID NO: 24569 - RNA, 24 nt, Artificial Sequence
  Synthetic
aaaugagaguaacuccacagaagc

SEQ ID NO: 24570 - RNA, 18 nt, Artificial Sequence
  Synthetic
auacuaacauugggaagc

SEQ ID NO: 24571 - RNA, 19 nt, Artificial Sequence
  Synthetic
aauacuaacauugggaagc

SEQ ID NO: 24572 - RNA, 20 nt, Artificial Sequence
  Synthetic
gaauacuaacauugggaagc

SEQ ID NO: 24573 - RNA, 21 nt, Artificial Sequence
  Synthetic
ggaauacuaacauugggaagc

SEQ ID NO: 24574 - RNA, 22 nt, Artificial Sequence
  Synthetic
aggaauacuaacauugggaagc

SEQ ID NO: 24575 - RNA, 23 nt, Artificial Sequence
  Synthetic
aaggaauacuaacauugggaagc

SEQ ID NO: 24576 - RNA, 24 nt, Artificial Sequence
  Synthetic
caaggaauacuaacauugggaagc

SEQ ID NO: 24577 - RNA, 18 nt, Artificial Sequence
  Synthetic
ccuccgauugguggaagc

SEQ ID NO: 24578 - RNA, 19 nt, Artificial Sequence
  Synthetic
accuccgauugguggaagc

SEQ ID NO: 24579 - RNA, 20 nt, Artificial Sequence
  Synthetic
gaccuccgauugguggaagc

SEQ ID NO: 24580 - RNA, 21 nt, Artificial Sequence
  Synthetic
ugaccuccgauugguggaagc

SEQ ID NO: 24581 - RNA, 22 nt, Artificial Sequence
  Synthetic
cugaccuccgauugguggaagc

SEQ ID NO: 24582 - RNA, 23 nt, Artificial Sequence
  Synthetic
ccugaccuccgauugguggaagc

SEQ ID NO: 24583 - RNA, 24 nt, Artificial Sequence
  Synthetic
uccugaccuccgauugguggaagc

SEQ ID NO: 24584 - RNA, 18 nt, Artificial Sequence
  Synthetic
agccacccaaggcacagc

SEQ ID NO: 24585 - RNA, 19 nt, Artificial Sequence
  Synthetic
aagccacccaaggcacagc

SEQ ID NO: 24586 - RNA, 20 nt, Artificial Sequence
  Synthetic
aaagccacccaaggcacagc

SEQ ID NO: 24587 - RNA, 21 nt, Artificial Sequence
  Synthetic
caaagccacccaaggcacagc

SEQ ID NO: 24588 - RNA, 22 nt, Artificial Sequence
  Synthetic
ccaaagccacccaaggcacagc

SEQ ID NO: 24589 - RNA, 23 nt, Artificial Sequence
  Synthetic
cccaaagccacccaaggcacagc

SEQ ID NO: 24590 - RNA, 24 nt, Artificial Sequence
  Synthetic
ccccaaagccacccaaggcacagc

SEQ ID NO: 24591 - RNA, 18 nt, Artificial Sequence
  Synthetic
ccgaagguuugguacagc

SEQ ID NO: 24592 - RNA, 19 nt, Artificial Sequence
  Synthetic
uccgaagguuugguacagc

SEQ ID NO: 24593 - RNA, 20 nt, Artificial Sequence
  Synthetic
guccgaagguuugguacagc

SEQ ID NO: 24594 - RNA, 21 nt, Artificial Sequence
  Synthetic
cguccgaagguuugguacagc

SEQ ID NO: 24595 - RNA, 22 nt, Artificial Sequence
  Synthetic
ccguccgaagguuugguacagc

SEQ ID NO: 24596 - RNA, 23 nt, Artificial Sequence
  Synthetic
uccguccgaagguuugguacagc

SEQ ID NO: 24597 - RNA, 24 nt, Artificial Sequence
  Synthetic
uuccguccgaagguuugguacagc

SEQ ID NO: 24598 - RNA, 18 nt, Artificial Sequence
  Synthetic
ugaacuggagccaccagc

SEQ ID NO: 24599 - RNA, 19 nt, Artificial Sequence
  Synthetic
cugaacuggagccaccagc

SEQ ID NO: 24600 - RNA, 20 nt, Artificial Sequence
  Synthetic
ucugaacuggagccaccagc

SEQ ID NO: 24601 - RNA, 21 nt, Artificial Sequence
  Synthetic
uucugaacuggagccaccagc

SEQ ID NO: 24602 - RNA, 22 nt, Artificial Sequence
  Synthetic
uuucugaacuggagccaccagc

SEQ ID NO: 24603 - RNA, 23 nt, Artificial Sequence
  Synthetic
guuucugaacuggagccaccagc

SEQ ID NO: 24604 - RNA, 24 nt, Artificial Sequence
  Synthetic
uguuucugaacuggagccaccagc

SEQ ID NO: 24605 - RNA, 18 nt, Artificial Sequence
  Synthetic
ucaucaacucaccccagc

SEQ ID NO: 24606 - RNA, 19 nt, Artificial Sequence
  Synthetic
gucaucaacucaccccagc

SEQ ID NO: 24607 - RNA, 20 nt, Artificial Sequence
  Synthetic
  misc_feature (1)..(1): n is a, c, g, or u
ngucaucaacucaccccagc

SEQ ID NO: 24608 - RNA, 21 nt, Artificial Sequence
  Synthetic
  misc_feature (2)..(2): n is a, c, g, or u
angucaucaacucaccccagc

SEQ ID NO: 24609 - RNA, 22 nt, Artificial Sequence
  Synthetic
  misc_feature (3)..(3): n is a, c, g, or u
aangucaucaacucaccccagc

SEQ ID NO: 24610 - RNA, 23 nt, Artificial Sequence
  Synthetic
  misc_feature (4)..(4): n is a, c, g, or u
caangucaucaacucaccccagc

SEQ ID NO: 24611 - RNA, 24 nt, Artificial Sequence
  Synthetic
  misc_feature (5)..(5): n is a, c, g, or u
ccaangucaucaacucaccccagc

SEQ ID NO: 24612 - RNA, 18 nt, Artificial Sequence
  Synthetic
aagguuugguacagcagc

SEQ ID NO: 24613 - RNA, 19 nt, Artificial Sequence
  Synthetic
gaagguuugguacagcagc

SEQ ID NO: 24614 - RNA, 20 nt, Artificial Sequence
  Synthetic
cgaagguuugguacagcagc

SEQ ID NO: 24615 - RNA, 18 nt, Artificial Sequence
  Synthetic
  misc_feature (9)..(9): n is a, c, g, or u
gcagcacanccuagcagc

SEQ ID NO: 24616 - RNA, 19 nt, Artificial Sequence
  Synthetic
  misc_feature (10)..(10): n is a, c, g, or u
ggcagcacanccuagcagc

SEQ ID NO: 24617 - RNA, 20 nt, Artificial Sequence
  Synthetic
  misc_feature (11)..(11): n is a, c, g, or u
uggcagcacanccuagcagc

SEQ ID NO: 24618 - RNA, 21 nt, Artificial Sequence
  Synthetic
  misc_feature (12)..(12): n is a, c, g, or u
uuggcagcacanccuagcagc

SEQ ID NO: 24619 - RNA, 22 nt, Artificial Sequence
  Synthetic
  misc_feature (13)..(13): n is a, c, g, or u
guuggcagcacanccuagcagc

SEQ ID NO: 24620 - RNA, 23 nt, Artificial Sequence
  Synthetic
  misc_feature (14)..(14): n is a, c, g, or u
aguuggcagcacanccuagcagc

SEQ ID NO: 24621 - RNA, 24 nt, Artificial Sequence
  Synthetic
  misc_feature (15)..(15): n is a, c, g, or u
caguuggcagcacanccuagcagc

SEQ ID NO: 24622 - RNA, 18 nt, Artificial Sequence
  Synthetic
ucguccgcaggauucagc

SEQ ID NO: 24623 - RNA, 19 nt, Artificial Sequence
  Synthetic
gucguccgcaggauucagc

SEQ ID NO: 24624 - RNA, 20 nt, Artificial Sequence
  Synthetic
ggucguccgcaggauucagc

SEQ ID NO: 24625 - RNA, 18 nt, Artificial Sequence
  Synthetic
  misc_feature (6)..(6): n is a, c, g, or u
agaagngggcggcagagc

SEQ ID NO: 24626 - RNA, 19 nt, Artificial Sequence
  Synthetic
  misc_feature (7)..(7): n is a, c, g, or u
gagaagngggcggcagagc

SEQ ID NO: 24627 - RNA, 20 nt, Artificial Sequence
  Synthetic
  misc_feature (8)..(8): n is a, c, g, or u
ggagaagngggcggcagagc

SEQ ID NO: 24628 - RNA, 21 nt, Artificial Sequence
  Synthetic
  misc_feature (9)..(9): n is a, c, g, or u
cggagaagngggcggcagagc

SEQ ID NO: 24629 - RNA, 22 nt, Artificial Sequence
  Synthetic
  misc_feature (10)..(10): n is a, c, g, or u
gcggagaagngggcggcagagc

SEQ ID NO: 24630 - RNA, 23 nt, Artificial Sequence
  Synthetic
  misc_feature (11)..(11): n is a, c, g, or u
ggcggagaagngggcggcagagc

SEQ ID NO: 24631 - RNA, 24 nt, Artificial Sequence
  Synthetic
  misc_feature (12)..(12): n is a, c, g, or u
aggcggagaagngggcggcagagc

SEQ ID NO: 24632 - RNA, 18 nt, Artificial Sequence
  Synthetic
gccuggccguugccgagc

SEQ ID NO: 24633 - RNA, 19 nt, Artificial Sequence
  Synthetic
ggccuggccguugccgagc

SEQ ID NO: 24634 - RNA, 20 nt, Artificial Sequence
  Synthetic
aggccuggccguugccgagc

SEQ ID NO: 24635 - RNA, 21 nt, Artificial Sequence
  Synthetic
aaggccuggccguugccgagc

SEQ ID NO: 24636 - RNA, 22 nt, Artificial Sequence
  Synthetic
aaaggccuggccguugccgagc

SEQ ID NO: 24637 - RNA, 23 nt, Artificial Sequence
  Synthetic
caaaggccuggccguugccgagc

SEQ ID NO: 24638 - RNA, 24 nt, Artificial Sequence
  Synthetic
gcaaaggccuggccguugccgagc

SEQ ID NO: 24639 - RNA, 18 nt, Artificial Sequence
  Synthetic
auggaucggcagaggagc

SEQ ID NO: 24640 - RNA, 19 nt, Artificial Sequence
  Synthetic
uauggaucggcagaggagc

SEQ ID NO: 24641 - RNA, 20 nt, Artificial Sequence
  Synthetic
guauggaucggcagaggagc

SEQ ID NO: 24642 - RNA, 21 nt, Artificial Sequence
  Synthetic
aguauggaucggcagaggagc

SEQ ID NO: 24643 - RNA, 22 nt, Artificial Sequence
  Synthetic
caguauggaucggcagaggagc

SEQ ID NO: 24644 - RNA, 23 nt, Artificial Sequence
  Synthetic
gcaguauggaucggcagaggagc

SEQ ID NO: 24645 - RNA, 24 nt, Artificial Sequence
  Synthetic
cgcaguauggaucggcagaggagc

SEQ ID NO: 24646 - RNA, 18 nt, Artificial Sequence
  Synthetic
ugcacuaguaaacugagc

SEQ ID NO: 24647 - RNA, 19 nt, Artificial Sequence
  Synthetic
uugcacuaguaaacugagc

SEQ ID NO: 24648 - RNA, 20 nt, Artificial Sequence
  Synthetic
auugcacuaguaaacugagc

SEQ ID NO: 24649 - RNA, 21 nt, Artificial Sequence
  Synthetic
aauugcacuaguaaacugagc

SEQ ID NO: 24650 - RNA, 22 nt, Artificial Sequence
  Synthetic
aaauugcacuaguaaacugagc

SEQ ID NO: 24651 - RNA, 23 nt, Artificial Sequence
  Synthetic
caaauugcacuaguaaacugagc

SEQ ID NO: 24652 - RNA, 24 nt, Artificial Sequence
  Synthetic
acaaauugcacuaguaaacugagc

SEQ ID NO: 24653 - RNA, 18 nt, Artificial Sequence
  Synthetic
aagaagaugaggcauagc

SEQ ID NO: 24654 - RNA, 19 nt, Artificial Sequence
  Synthetic
caagaagaugaggcauagc

SEQ ID NO: 24655 - RNA, 20 nt, Artificial Sequence
  Synthetic
acaagaagaugaggcauagc

SEQ ID NO: 24656 - RNA, 21 nt, Artificial Sequence
  Synthetic
aacaagaagaugaggcauagc

SEQ ID NO: 24657 - RNA, 22 nt, Artificial Sequence
  Synthetic
caacaagaagaugaggcauagc

SEQ ID NO: 24658 - RNA, 23 nt, Artificial Sequence
  Synthetic
ccaacaagaagaugaggcauagc

SEQ ID NO: 24659 - RNA, 24 nt, Artificial Sequence
  Synthetic
accaacaagaagaugaggcauagc

SEQ ID NO: 24660 - RNA, 18 nt, Artificial Sequence
  Synthetic
gacacauccaacgauagc

SEQ ID NO: 24661 - RNA, 19 nt, Artificial Sequence
  Synthetic
agacacauccaacgauagc

SEQ ID NO: 24662 - RNA, 20 nt, Artificial Sequence
  Synthetic
cagacacauccaacgauagc

SEQ ID NO: 24663 - RNA, 18 nt, Artificial Sequence
  Synthetic
aggaagaugauaaaacgc

SEQ ID NO: 24664 - RNA, 19 nt, Artificial Sequence
  Synthetic
gaggaagaugauaaaacgc

SEQ ID NO: 24665 - RNA, 20 nt, Artificial Sequence
  Synthetic
agaggaagaugauaaaacgc

SEQ ID NO: 24666 - RNA, 21 nt, Artificial Sequence
  Synthetic
aagaggaagaugauaaaacgc

SEQ ID NO: 24667 - RNA, 22 nt, Artificial Sequence
  Synthetic
gaagaggaagaugauaaaacgc

SEQ ID NO: 24668 - RNA, 23 nt, Artificial Sequence
  Synthetic
ugaagaggaagaugauaaaacgc

SEQ ID NO: 24669 - RNA, 24 nt, Artificial Sequence
  Synthetic
augaagaggaagaugauaaaacgc

SEQ ID NO: 24670 - RNA, 18 nt, Artificial Sequence
  Synthetic
agacaaaggacgucccgc

SEQ ID NO: 24671 - RNA, 19 nt, Artificial Sequence
  Synthetic
uagacaaaggacgucccgc

SEQ ID NO: 24672 - RNA, 20 nt, Artificial Sequence
  Synthetic
guagacaaaggacgucccgc

SEQ ID NO: 24673 - RNA, 18 nt, Artificial Sequence
  Synthetic
cacaggcggggaguccgc

SEQ ID NO: 24674 - RNA, 19 nt, Artificial Sequence
  Synthetic
gcacaggcggggaguccgc

SEQ ID NO: 24675 - RNA, 20 nt, Artificial Sequence
  Synthetic
ggcacaggcggggaguccgc

SEQ ID NO: 24676 - RNA, 21 nt, Artificial Sequence
  Synthetic
aggcacaggcggggaguccgc

SEQ ID NO: 24677 - RNA, 22 nt, Artificial Sequence
  Synthetic
aaggcacaggcggggaguccgc

SEQ ID NO: 24678 - RNA, 23 nt, Artificial Sequence
  Synthetic
gaaggcacaggcggggaguccgc

SEQ ID NO: 24679 - RNA, 24 nt, Artificial Sequence
  Synthetic
agaaggcacaggcggggaguccgc

SEQ ID NO: 24680 - RNA, 18 nt, Artificial Sequence
  Synthetic
  misc_feature (12)..(12): n is a, c, g, or u
agugccgauaanguccgc

SEQ ID NO: 24681 - RNA, 19 nt, Artificial Sequence
  Synthetic
  misc_feature (13)..(13): n is a, c, g, or u
cagugccgauaanguccgc

SEQ ID NO: 24682 - RNA, 20 nt, Artificial Sequence
  Synthetic
  misc_feature (14)..(14): n is a, c, g, or u
ucagugccgauaanguccgc

SEQ ID NO: 24683 - RNA, 21 nt, Artificial Sequence
  Synthetic
  misc_feature (15)..(15): n is a, c, g, or u
gucagugccgauaanguccgc

SEQ ID NO: 24684 - RNA, 22 nt, Artificial Sequence
  Synthetic
  misc_feature (16)..(16): n is a, c, g, or u
ugucagugccgauaanguccgc

SEQ ID NO: 24685 - RNA, 23 nt, Artificial Sequence
  Synthetic
  misc_feature (17)..(17): n is a, c, g, or u
uugucagugccgauaanguccgc

SEQ ID NO: 24686 - RNA, 24 nt, Artificial Sequence
  Synthetic
  misc_feature (18)..(18): n is a, c, g, or u
guugucagugccgauaanguccgc

SEQ ID NO: 24687 - RNA, 18 nt, Artificial Sequence
  Synthetic
gccggcagaugagaaggc

SEQ ID NO: 24688 - RNA, 19 nt, Artificial Sequence
  Synthetic
ggccggcagaugagaaggc

SEQ ID NO: 24689 - RNA, 20 nt, Artificial Sequence
  Synthetic
gggccggcagaugagaaggc

SEQ ID NO: 24690 - RNA, 21 nt, Artificial Sequence
  Synthetic
cgggccggcagaugagaaggc

SEQ ID NO: 24691 - RNA, 22 nt, Artificial Sequence
  Synthetic
acgggccggcagaugagaaggc

SEQ ID NO: 24692 - RNA, 23 nt, Artificial Sequence
  Synthetic
cacgggccggcagaugagaaggc

SEQ ID NO: 24693 - RNA, 24 nt, Artificial Sequence
  Synthetic
acacgggccggcagaugagaaggc

SEQ ID NO: 24694 - RNA, 18 nt, Artificial Sequence
  Synthetic
cucuuccaaauguaaggc

SEQ ID NO: 24695 - RNA, 19 nt, Artificial Sequence
  Synthetic
ucucuuccaaauguaaggc

SEQ ID NO: 24696 - RNA, 20 nt, Artificial Sequence
  Synthetic
uucucuuccaaauguaaggc

SEQ ID NO: 24697 - RNA, 21 nt, Artificial Sequence
  Synthetic
uuucucuuccaaauguaaggc

SEQ ID NO: 24698 - RNA, 22 nt, Artificial Sequence
  Synthetic
guuucucuuccaaauguaaggc

SEQ ID NO: 24699 - RNA, 23 nt, Artificial Sequence
  Synthetic
aguuucucuuccaaauguaaggc

SEQ ID NO: 24700 - RNA, 24 nt, Artificial Sequence
  Synthetic
caguuucucuuccaaauguaaggc

SEQ ID NO: 24701 - RNA, 18 nt, Artificial Sequence
  Synthetic
agaugagaaggcacaggc

SEQ ID NO: 24702 - RNA, 19 nt, Artificial Sequence
  Synthetic
cagaugagaaggcacaggc

SEQ ID NO: 24703 - RNA, 20 nt, Artificial Sequence
  Synthetic
gcagaugagaaggcacaggc

SEQ ID NO: 24704 - RNA, 21 nt, Artificial Sequence
  Synthetic
ggcagaugagaaggcacaggc

SEQ ID NO: 24705 - RNA, 22 nt, Artificial Sequence
  Synthetic
cggcagaugagaaggcacaggc

SEQ ID NO: 24706 - RNA, 23 nt, Artificial Sequence
  Synthetic
ccggcagaugagaaggcacaggc

SEQ ID NO: 24707 - RNA, 24 nt, Artificial Sequence
  Synthetic
gccggcagaugagaaggcacaggc

SEQ ID NO: 24708 - RNA, 18 nt, Artificial Sequence
  Synthetic
gaucuucgucugcgaggc

SEQ ID NO: 24709 - RNA, 19 nt, Artificial Sequence
  Synthetic
agaucuucgucugcgaggc

SEQ ID NO: 24710 - RNA, 20 nt, Artificial Sequence
  Synthetic
gagaucuucgucugcgaggc

SEQ ID NO: 24711 - RNA, 18 nt, Artificial Sequence
  Synthetic
aaggcacagcuuggaggc

SEQ ID NO: 24712 - RNA, 19 nt, Artificial Sequence
  Synthetic
caaggcacagcuuggaggc

SEQ ID NO: 24713 - RNA, 20 nt, Artificial Sequence
  Synthetic
ccaaggcacagcuuggaggc

SEQ ID NO: 24714 - RNA, 21 nt, Artificial Sequence
  Synthetic
cccaaggcacagcuuggaggc

SEQ ID NO: 24715 - RNA, 22 nt, Artificial Sequence
  Synthetic
acccaaggcacagcuuggaggc

SEQ ID NO: 24716 - RNA, 23 nt, Artificial Sequence
  Synthetic
cacccaaggcacagcuuggaggc

SEQ ID NO: 24717 - RNA, 24 nt, Artificial Sequence
  Synthetic
ccacccaaggcacagcuuggaggc

SEQ ID NO: 24718 - RNA, 18 nt, Artificial Sequence
  Synthetic
  misc_feature (13)..(14): n is a, c, g, or u
ucggccggaacgnnaggc

SEQ ID NO: 24719 - RNA, 19 nt, Artificial Sequence
  Synthetic
  misc_feature (14)..(15): n is a, c, g, or u
gucggccggaacgnnaggc

SEQ ID NO: 24720 - RNA, 20 nt, Artificial Sequence
  Synthetic
  misc_feature (15)..(16): n is a, c, g, or u
cgucggccggaacgnnaggc

SEQ ID NO: 24721 - RNA, 21 nt, Artificial Sequence
  Synthetic
  misc_feature (16)..(17): n is a, c, g, or u
ucgucggccggaacgnnaggc

SEQ ID NO: 24722 - RNA, 22 nt, Artificial Sequence
  Synthetic
  misc_feature (17)..(18): n is a, c, g, or u
gucgucggccggaacgnnaggc

SEQ ID NO: 24723 - RNA, 23 nt, Artificial Sequence
  Synthetic
  misc_feature (18)..(19): n is a, c, g, or u
cgucgucggccggaacgnnaggc

SEQ ID NO: 24724 - RNA, 24 nt, Artificial Sequence
  Synthetic
  misc_feature (19)..(20): n is a, c, g, or u
ccgucgucggccggaacgnnaggc

SEQ ID NO: 24725 - RNA, 18 nt, Artificial Sequence
  Synthetic
uccgcaguauggaucggc

SEQ ID NO: 24726 - RNA, 19 nt, Artificial Sequence
  Synthetic
uuccgcaguauggaucggc

SEQ ID NO: 24727 - RNA, 20 nt, Artificial Sequence
  Synthetic
guuccgcaguauggaucggc

SEQ ID NO: 24728 - RNA, 21 nt, Artificial Sequence
  Synthetic
aguuccgcaguauggaucggc

SEQ ID NO: 24729 - RNA, 22 nt, Artificial Sequence
  Synthetic
gaguuccgcaguauggaucggc

SEQ ID NO: 24730 - RNA, 23 nt, Artificial Sequence
  Synthetic
ggaguuccgcaguauggaucggc

SEQ ID NO: 24731 - RNA, 24 nt, Artificial Sequence
  Synthetic
aggaguuccgcaguauggaucggc

SEQ ID NO: 24732 - RNA, 18 nt, Artificial Sequence
  Synthetic
gugcgacccgucgucggc

SEQ ID NO: 24733 - RNA, 19 nt, Artificial Sequence
  Synthetic
ggugcgacccgucgucggc

SEQ ID NO: 24734 - RNA, 20 nt, Artificial Sequence
  Synthetic
aggugcgacccgucgucggc

SEQ ID NO: 24735 - RNA, 21 nt, Artificial Sequence
  Synthetic
gaggugcgacccgucgucggc

SEQ ID NO: 24736 - RNA, 22 nt, Artificial Sequence
  Synthetic
agaggugcgacccgucgucggc

SEQ ID NO: 24737 - RNA, 23 nt, Artificial Sequence
  Synthetic
gagaggugcgacccgucgucggc

SEQ ID NO: 24738 - RNA, 24 nt, Artificial Sequence
  Synthetic
agagaggugcgacccgucgucggc

SEQ ID NO: 24739 - RNA, 18 nt, Artificial Sequence
  Synthetic
auacaggcauacaagggc

SEQ ID NO: 24740 - RNA, 19 nt, Artificial Sequence
  Synthetic
aauacaggcauacaagggc

SEQ ID NO: 24741 - RNA, 20 nt, Artificial Sequence
  Synthetic
uaauacaggcauacaagggc

SEQ ID NO: 24742 - RNA, 21 nt, Artificial Sequence
  Synthetic
guaauacaggcauacaagggc

SEQ ID NO: 24743 - RNA, 22 nt, Artificial Sequence
  Synthetic
gguaauacaggcauacaagggc

SEQ ID NO: 24744 - RNA, 23 nt, Artificial Sequence
  Synthetic
cgguaauacaggcauacaagggc

SEQ ID NO: 24745 - RNA, 24 nt, Artificial Sequence
  Synthetic
gcgguaauacaggcauacaagggc

SEQ ID NO: 24746 - RNA, 18 nt, Artificial Sequence
  Synthetic
ggcaucucgguagagggc

SEQ ID NO: 24747 - RNA, 19 nt, Artificial Sequence
  Synthetic
aggcaucucgguagagggc

SEQ ID NO: 24748 - RNA, 20 nt, Artificial Sequence
  Synthetic
aaggcaucucgguagagggc

SEQ ID NO: 24749 - RNA, 21 nt, Artificial Sequence
  Synthetic
uaaggcaucucgguagagggc

SEQ ID NO: 24750 - RNA, 22 nt, Artificial Sequence
  Synthetic
cuaaggcaucucgguagagggc

SEQ ID NO: 24751 - RNA, 23 nt, Artificial Sequence
  Synthetic
ucuaaggcaucucgguagagggc

SEQ ID NO: 24752 - RNA, 24 nt, Artificial Sequence
  Synthetic
uucuaaggcaucucgguagagggc

SEQ ID NO: 24753 - RNA, 18 nt, Artificial Sequence
  Synthetic
gagccaagagaaacgggc

SEQ ID NO: 24754 - RNA, 19 nt, Artificial Sequence
  Synthetic
ugagccaagagaaacgggc

SEQ ID NO: 24755 - RNA, 20 nt, Artificial Sequence
  Synthetic
cugagccaagagaaacgggc

SEQ ID NO: 24756 - RNA, 21 nt, Artificial Sequence
  Synthetic
acugagccaagagaaacgggc

SEQ ID NO: 24757 - RNA, 22 nt, Artificial Sequence
  Synthetic
aacugagccaagagaaacgggc

SEQ ID NO: 24758 - RNA, 23 nt, Artificial Sequence
  Synthetic
aaacugagccaagagaaacgggc

SEQ ID NO: 24759 - RNA, 24 nt, Artificial Sequence
  Synthetic
uaaacugagccaagagaaacgggc

SEQ ID NO: 24760 - RNA, 18 nt, Artificial Sequence
  Synthetic
acauugaguaaaaggggc

SEQ ID NO: 24761 - RNA, 19 nt, Artificial Sequence
  Synthetic
cacauugaguaaaaggggc

SEQ ID NO: 24762 - RNA, 20 nt, Artificial Sequence
  Synthetic
ccacauugaguaaaaggggc

SEQ ID NO: 24763 - RNA, 21 nt, Artificial Sequence
  Synthetic
accacauugaguaaaaggggc

SEQ ID NO: 24764 - RNA, 22 nt, Artificial Sequence
  Synthetic
aaccacauugaguaaaaggggc

SEQ ID NO: 24765 - RNA, 23 nt, Artificial Sequence
  Synthetic
uaaccacauugaguaaaaggggc

SEQ ID NO: 24766 - RNA, 24 nt, Artificial Sequence
  Synthetic
auaaccacauugaguaaaaggggc

SEQ ID NO: 24767 - RNA, 18 nt, Artificial Sequence
  Synthetic
  misc_feature (1)..(2): n is a, c, g, or u
  misc_feature (14)..(14): n is a, c, g, or u
nnaggcggagaagngggc

SEQ ID NO: 24768 - RNA, 19 nt, Artificial Sequence
  Synthetic
  misc_feature (2)..(3): n is a, c, g, or u
  misc_feature (15)..(15): n is a, c, g, or u
gnnaggcggagaagngggc

SEQ ID NO: 24769 - RNA, 20 nt, Artificial Sequence
  Synthetic
  misc_feature (3)..(4): n is a, c, g, or u
  misc_feature (16)..(16): n is a, c, g, or u
cgnnaggcggagaagngggc

SEQ ID NO: 24770 - RNA, 21 nt, Artificial Sequence
  Synthetic
  misc_feature (4)..(5): n is a, c, g, or u
  misc_feature (17)..(17): n is a, c, g, or u
acgnnaggcggagaagngggc

SEQ ID NO: 24771 - RNA, 22 nt, Artificial Sequence
  Synthetic
  misc_feature (5)..(6): n is a, c, g, or u
  misc_feature (18)..(18): n is a, c, g, or u
aacgnnaggcggagaagngggc

SEQ ID NO: 24772 - RNA, 23 nt, Artificial Sequence
  Synthetic
  misc_feature (6)..(7): n is a, c, g, or u
  misc_feature (19)..(19): n is a, c, g, or u
gaacgnnaggcggagaagngggc

SEQ ID NO: 24773 - RNA, 24 nt, Artificial Sequence
  Synthetic
  misc_feature (7)..(8): n is a, c, g, or u
  misc_feature (20)..(20): n is a, c, g, or u
ggaacgnnaggcggagaagngggc

SEQ ID NO: 24774 - RNA, 18 nt, Artificial Sequence
  Synthetic
aaucccagaggauugggc

SEQ ID NO: 24775 - RNA, 19 nt, Artificial Sequence
  Synthetic
gaaucccagaggauugggc

SEQ ID NO: 24776 - RNA, 20 nt, Artificial Sequence
  Synthetic
agaaucccagaggauugggc

SEQ ID NO: 24777 - RNA, 21 nt, Artificial Sequence
  Synthetic
aagaaucccagaggauugggc

SEQ ID NO: 24778 - RNA, 22 nt, Artificial Sequence
  Synthetic
aaagaaucccagaggauugggc

SEQ ID NO: 24779 - RNA, 23 nt, Artificial Sequence
  Synthetic
gaaagaaucccagaggauugggc

SEQ ID NO: 24780 - RNA, 24 nt, Artificial Sequence
  Synthetic
ggaaagaaucccagaggauugggc

SEQ ID NO: 24781 - RNA, 18 nt, Artificial Sequence
  Synthetic
cgucagcaaacacuuggc

SEQ ID NO: 24782 - RNA, 19 nt, Artificial Sequence
  Synthetic
gcgucagcaaacacuuggc

SEQ ID NO: 24783 - RNA, 20 nt, Artificial Sequence
  Synthetic
ugcgucagcaaacacuuggc

SEQ ID NO: 24784 - RNA, 21 nt, Artificial Sequence
  Synthetic
uugcgucagcaaacacuuggc

SEQ ID NO: 24785 - RNA, 22 nt, Artificial Sequence
  Synthetic
guugcgucagcaaacacuuggc

SEQ ID NO: 24786 - RNA, 23 nt, Artificial Sequence
  Synthetic
gguugcgucagcaaacacuuggc

SEQ ID NO: 24787 - RNA, 24 nt, Artificial Sequence
  Synthetic
ggguugcgucagcaaacacuuggc

SEQ ID NO: 24788 - RNA, 18 nt, Artificial Sequence
  Synthetic
aaggccuuguaaguuggc

SEQ ID NO: 24789 - RNA, 19 nt, Artificial Sequence
  Synthetic
aaaggccuuguaaguuggc

SEQ ID NO: 24790 - RNA, 20 nt, Artificial Sequence
  Synthetic
gaaaggccuuguaaguuggc

SEQ ID NO: 24791 - RNA, 21 nt, Artificial Sequence
  Synthetic
agaaaggccuuguaaguuggc

SEQ ID NO: 24792 - RNA, 22 nt, Artificial Sequence
  Synthetic
gagaaaggccuuguaaguuggc

SEQ ID NO: 24793 - RNA, 23 nt, Artificial Sequence
  Synthetic
agagaaaggccuuguaaguuggc

SEQ ID NO: 24794 - RNA, 24 nt, Artificial Sequence
  Synthetic
cagagaaaggccuuguaaguuggc

SEQ ID NO: 24795 - RNA, 18 nt, Artificial Sequence
  Synthetic
gggacugcgaauuuuggc

SEQ ID NO: 24796 - RNA, 19 nt, Artificial Sequence
  Synthetic
ggggacugcgaauuuuggc

SEQ ID NO: 24797 - RNA, 20 nt, Artificial Sequence
  Synthetic
uggggacugcgaauuuuggc

SEQ ID NO: 24798 - RNA, 21 nt, Artificial Sequence
  Synthetic
uuggggacugcgaauuuuggc

SEQ ID NO: 24799 - RNA, 22 nt, Artificial Sequence
  Synthetic
auuggggacugcgaauuuuggc

SEQ ID NO: 24800 - RNA, 23 nt, Artificial Sequence
  Synthetic
gauuggggacugcgaauuuuggc

SEQ ID NO: 24801 - RNA, 24 nt, Artificial Sequence
  Synthetic
agauuggggacugcgaauuuuggc

SEQ ID NO: 24802 - RNA, 18 nt, Artificial Sequence
  Synthetic
  misc_feature (1)..(1): n is a, c, g, or u
  misc_feature (16)..(16): n is a, c, g, or u
nguccgcuccagaccngc

SEQ ID NO: 24803 - RNA, 19 nt, Artificial Sequence
  Synthetic
  misc_feature (2)..(2): n is a, c, g, or u
  misc_feature (17)..(17): n is a, c, g, or u
anguccgcuccagaccngc

SEQ ID NO: 24804 - RNA, 20 nt, Artificial Sequence
  Synthetic
  misc_feature (3)..(3): n is a, c, g, or u
  misc_feature (18)..(18): n is a, c, g, or u
aanguccgcuccagaccngc

SEQ ID NO: 24805 - RNA, 21 nt, Artificial Sequence
  Synthetic
  misc_feature (4)..(4): n is a, c, g, or u
  misc_feature (19)..(19): n is a, c, g, or u
uaanguccgcuccagaccngc

SEQ ID NO: 24806 - RNA, 22 nt, Artificial Sequence
  Synthetic
  misc_feature (5)..(5): n is a, c, g, or u
  misc_feature (20)..(20): n is a, c, g, or u
auaanguccgcuccagaccngc

SEQ ID NO: 24807 - RNA, 23 nt, Artificial Sequence
  Synthetic
  misc_feature (6)..(6): n is a, c, g, or u
  misc_feature (21)..(21): n is a, c, g, or u
gauaanguccgcuccagaccngc

SEQ ID NO: 24808 - RNA, 24 nt, Artificial Sequence
  Synthetic
  misc_feature (7)..(7): n is a, c, g, or u
  misc_feature (22)..(22): n is a, c, g, or u
cgauaanguccgcuccagaccngc

SEQ ID NO: 24809 - RNA, 18 nt, Artificial Sequence
  Synthetic
  misc_feature (16)..(16): n is a, c, g, or u
gcgagcgaaacaagcngc

SEQ ID NO: 24810 - RNA, 19 nt, Artificial Sequence
  Synthetic
  misc_feature (17)..(17): n is a, c, g, or u
ugcgagcgaaacaagcngc

SEQ ID NO: 24811 - RNA, 20 nt, Artificial Sequence
  Synthetic
  misc_feature (18)..(18): n is a, c, g, or u
cugcgagcgaaacaagcngc

SEQ ID NO: 24812 - RNA, 21 nt, Artificial Sequence
  Synthetic
  misc_feature (19)..(19): n is a, c, g, or u
gcugcgagcgaaacaagcngc

SEQ ID NO: 24813 - RNA, 22 nt, Artificial Sequence
  Synthetic
  misc_feature (1)..(1): n is a, c, g, or u
  misc_feature (20)..(20): n is a, c, g, or u
ngcugcgagcgaaacaagcngc

SEQ ID NO: 24814 - RNA, 23 nt, Artificial Sequence
  Synthetic
  misc_feature (2)..(2): n is a, c, g, or u
  misc_feature (21)..(21): n is a, c, g, or u
cngcugcgagcgaaacaagcngc

SEQ ID NO: 24815 - RNA, 24 nt, Artificial Sequence
  Synthetic
  misc_feature (3)..(3): n is a, c, g, or u
  misc_feature (22)..(22): n is a, c, g, or u
ccngcugcgagcgaaacaagcngc

SEQ ID NO: 24816 - RNA, 18 nt, Artificial Sequence
  Synthetic
  misc_feature (16)..(16): n is a, c, g, or u
aacuacuagaucucungc

SEQ ID NO: 24817 - RNA, 19 nt, Artificial Sequence
  Synthetic
  misc_feature (17)..(17): n is a, c, g, or u
uaacuacuagaucucungc

SEQ ID NO: 24818 - RNA, 20 nt, Artificial Sequence
  Synthetic
  misc_feature (18)..(18): n is a, c, g, or u
uuaacuacuagaucucungc

SEQ ID NO: 24819 - RNA, 21 nt, Artificial Sequence
  Synthetic
  misc_feature (19)..(19): n is a, c, g, or u
auuaacuacuagaucucungc

SEQ ID NO: 24820 - RNA, 22 nt, Artificial Sequence
  Synthetic
  misc_feature (20)..(20): n is a, c, g, or u
aauuaacuacuagaucucungc

SEQ ID NO: 24821 - RNA, 23 nt, Artificial Sequence
  Synthetic
  misc_feature (21)..(21): n is a, c, g, or u
uaauuaacuacuagaucucungc

SEQ ID NO: 24822 - RNA, 24 nt, Artificial Sequence
  Synthetic
  misc_feature (22)..(22): n is a, c, g, or u
auaauuaacuacuagaucucungc

SEQ ID NO: 24823 - RNA, 18 nt, Artificial Sequence
  Synthetic
agagaggugcucccaugc

SEQ ID NO: 24824 - RNA, 19 nt, Artificial Sequence
  Synthetic
gagagaggugcucccaugc

SEQ ID NO: 24825 - RNA, 20 nt, Artificial Sequence
  Synthetic
ugagagaggugcucccaugc

SEQ ID NO: 24826 - RNA, 21 nt, Artificial Sequence
  Synthetic
uugagagaggugcucccaugc

SEQ ID NO: 24827 - RNA, 22 nt, Artificial Sequence
  Synthetic
guugagagaggugcucccaugc

SEQ ID NO: 24828 - RNA, 23 nt, Artificial Sequence
  Synthetic
cguugagagaggugcucccaugc

SEQ ID NO: 24829 - RNA, 24 nt, Artificial Sequence
  Synthetic
ccguugagagaggugcucccaugc

SEQ ID NO: 24830 - RNA, 18 nt, Artificial Sequence
  Synthetic
aagggucaauguccaugc

SEQ ID NO: 24831 - RNA, 19 nt, Artificial Sequence
  Synthetic
uaagggucaauguccaugc

SEQ ID NO: 24832 - RNA, 20 nt, Artificial Sequence
  Synthetic
auaagggucaauguccaugc

SEQ ID NO: 24833 - RNA, 21 nt, Artificial Sequence
  Synthetic
uauaagggucaauguccaugc

SEQ ID NO: 24834 - RNA, 22 nt, Artificial Sequence
  Synthetic
uuauaagggucaauguccaugc

SEQ ID NO: 24835 - RNA, 23 nt, Artificial Sequence
  Synthetic
uuuauaagggucaauguccaugc

SEQ ID NO: 24836 - RNA, 24 nt, Artificial Sequence
  Synthetic
cuuuauaagggucaauguccaugc

SEQ ID NO: 24837 - RNA, 18 nt, Artificial Sequence
  Synthetic
  misc_feature (4)..(4): n is a, c, g, or u
ugunagaaugcccugugc

SEQ ID NO: 24838 - RNA, 19 nt, Artificial Sequence
  Synthetic
  misc_feature (5)..(5): n is a, c, g, or u
uugunagaaugcccugugc

SEQ ID NO: 24839 - RNA, 20 nt, Artificial Sequence
  Synthetic
  misc_feature (6)..(6): n is a, c, g, or u
guugunagaaugcccugugc

SEQ ID NO: 24840 - RNA, 21 nt, Artificial Sequence
  Synthetic
  misc_feature (7)..(7): n is a, c, g, or u
gguugunagaaugcccugugc

SEQ ID NO: 24841 - RNA, 22 nt, Artificial Sequence
  Synthetic
  misc_feature (8)..(8): n is a, c, g, or u
agguugunagaaugcccugugc

SEQ ID NO: 24842 - RNA, 23 nt, Artificial Sequence
  Synthetic
  misc_feature (9)..(9): n is a, c, g, or u
gagguugunagaaugcccugugc

SEQ ID NO: 24843 - RNA, 24 nt, Artificial Sequence
  Synthetic
  misc_feature (10)..(10): n is a, c, g, or u
cgagguugunagaaugcccugugc

SEQ ID NO: 24844 - RNA, 18 nt, Artificial Sequence
  Synthetic
cagcacaaaauagcuugc

SEQ ID NO: 24845 - RNA, 19 nt, Artificial Sequence
  Synthetic
ccagcacaaaauagcuugc

SEQ ID NO: 24846 - RNA, 20 nt, Artificial Sequence
  Synthetic
cccagcacaaaauagcuugc

SEQ ID NO: 24847 - RNA, 21 nt, Artificial Sequence
  Synthetic
ccccagcacaaaauagcuugc

SEQ ID NO: 24848 - RNA, 22 nt, Artificial Sequence
  Synthetic
accccagcacaaaauagcuugc

SEQ ID NO: 24849 - RNA, 23 nt, Artificial Sequence
  Synthetic
caccccagcacaaaauagcuugc

SEQ ID NO: 24850 - RNA, 24 nt, Artificial Sequence
  Synthetic
ucaccccagcacaaaauagcuugc

SEQ ID NO: 24851 - RNA, 18 nt, Artificial Sequence
  Synthetic
ccagccaguggggguugc

SEQ ID NO: 24852 - RNA, 19 nt, Artificial Sequence
  Synthetic
cccagccaguggggguugc

SEQ ID NO: 24853 - RNA, 20 nt, Artificial Sequence
  Synthetic
ccccagccaguggggguugc

SEQ ID NO: 24854 - RNA, 21 nt, Artificial Sequence
  Synthetic
gccccagccaguggggguugc

SEQ ID NO: 24855 - RNA, 22 nt, Artificial Sequence
  Synthetic
agccccagccaguggggguugc

SEQ ID NO: 24856 - RNA, 23 nt, Artificial Sequence
  Synthetic
aagccccagccaguggggguugc

SEQ ID NO: 24857 - RNA, 24 nt, Artificial Sequence
  Synthetic
caagccccagccaguggggguugc

SEQ ID NO: 24858 - RNA, 18 nt, Artificial Sequence
  Synthetic
gggacugcuggaauuugc

SEQ ID NO: 24859 - RNA, 19 nt, Artificial Sequence
  Synthetic
cgggacugcuggaauuugc

SEQ ID NO: 24860 - RNA, 20 nt, Artificial Sequence
  Synthetic
ucgggacugcuggaauuugc

SEQ ID NO: 24861 - RNA, 21 nt, Artificial Sequence
  Synthetic
aucgggacugcuggaauuugc

SEQ ID NO: 24862 - RNA, 22 nt, Artificial Sequence
  Synthetic
aaucgggacugcuggaauuugc

SEQ ID NO: 24863 - RNA, 23 nt, Artificial Sequence
  Synthetic
caaucgggacugcuggaauuugc

SEQ ID NO: 24864 - RNA, 24 nt, Artificial Sequence
  Synthetic
ccaaucgggacugcuggaauuugc

SEQ ID NO: 24865 - RNA, 18 nt, Artificial Sequence
  Synthetic
uauucacgggaaguuugc

SEQ ID NO: 24866 - RNA, 19 nt, Artificial Sequence
  Synthetic
cuauucacgggaaguuugc

SEQ ID NO: 24867 - RNA, 20 nt, Artificial Sequence
  Synthetic
ucuauucacgggaaguuugc

SEQ ID NO: 24868 - RNA, 21 nt, Artificial Sequence
  Synthetic
gucuauucacgggaaguuugc

SEQ ID NO: 24869 - RNA, 22 nt, Artificial Sequence
  Synthetic
ggucuauucacgggaaguuugc

SEQ ID NO: 24870 - RNA, 23 nt, Artificial Sequence
  Synthetic
gggucuauucacgggaaguuugc

SEQ ID NO: 24871 - RNA, 24 nt, Artificial Sequence
  Synthetic
ugggucuauucacgggaaguuugc

SEQ ID NO: 24872 - RNA, 18 nt, Artificial Sequence
  Synthetic
  misc_feature (17)..(17): n is a, c, g, or u
ccaaaagacccacaaunc

SEQ ID NO: 24873 - RNA, 19 nt, Artificial Sequence
  Synthetic
  misc_feature (18)..(18): n is a, c, g, or u
cccaaaagacccacaaunc

SEQ ID NO: 24874 - RNA, 20 nt, Artificial Sequence
  Synthetic
  misc_feature (19)..(19): n is a, c, g, or u
gcccaaaagacccacaaunc

SEQ ID NO: 24875 - RNA, 21 nt, Artificial Sequence
  Synthetic
  misc_feature (20)..(20): n is a, c, g, or u
agcccaaaagacccacaaunc

SEQ ID NO: 24876 - RNA, 22 nt, Artificial Sequence
  Synthetic
  misc_feature (21)..(21): n is a, c, g, or u
aagcccaaaagacccacaaunc

SEQ ID NO: 24877 - RNA, 23 nt, Artificial Sequence
  Synthetic
  misc_feature (22)..(22): n is a, c, g, or u
aaagcccaaaagacccacaaunc

SEQ ID NO: 24878 - RNA, 24 nt, Artificial Sequence
  Synthetic
  misc_feature (23)..(23): n is a, c, g, or u
caaagcccaaaagacccacaaunc

SEQ ID NO: 24879 - RNA, 18 nt, Artificial Sequence
  Synthetic
augcgcugauggccaauc

SEQ ID NO: 24880 - RNA, 19 nt, Artificial Sequence
  Synthetic
caugcgcugauggccaauc

SEQ ID NO: 24881 - RNA, 20 nt, Artificial Sequence
  Synthetic
gcaugcgcugauggccaauc

SEQ ID NO: 24882 - RNA, 18 nt, Artificial Sequence
  Synthetic
uugacaaaccuuccaauc

SEQ ID NO: 24883 - RNA, 19 nt, Artificial Sequence
  Synthetic
guugacaaaccuuccaauc

SEQ ID NO: 24884 - RNA, 20 nt, Artificial Sequence
  Synthetic
cguugacaaaccuuccaauc

SEQ ID NO: 24885 - RNA, 21 nt, Artificial Sequence
  Synthetic
  misc_feature (1)..(1): n is a, c, g, or u
ncguugacaaaccuuccaauc

SEQ ID NO: 24886 - RNA, 22 nt, Artificial Sequence
  Synthetic
  misc_feature (2)..(2): n is a, c, g, or u
uncguugacaaaccuuccaauc

SEQ ID NO: 24887 - RNA, 23 nt, Artificial Sequence
  Synthetic
  misc_feature (3)..(3): n is a, c, g, or u
auncguugacaaaccuuccaauc

SEQ ID NO: 24888 - RNA, 24 nt, Artificial Sequence
  Synthetic
  misc_feature (4)..(4): n is a, c, g, or u
aauncguugacaaaccuuccaauc

SEQ ID NO: 24889 - RNA, 18 nt, Artificial Sequence
  Synthetic
gguggucuggaaagaauc

SEQ ID NO: 24890 - RNA, 19 nt, Artificial Sequence
  Synthetic
ugguggucuggaaagaauc

SEQ ID NO: 24891 - RNA, 20 nt, Artificial Sequence
  Synthetic
cugguggucuggaaagaauc

SEQ ID NO: 24892 - RNA, 21 nt, Artificial Sequence
  Synthetic
acugguggucuggaaagaauc

SEQ ID NO: 24893 - RNA, 22 nt, Artificial Sequence
  Synthetic
aacugguggucuggaaagaauc

SEQ ID NO: 24894 - RNA, 23 nt, Artificial Sequence
  Synthetic
caacugguggucuggaaagaauc

SEQ ID NO: 24895 - RNA, 24 nt, Artificial Sequence
  Synthetic
ccaacugguggucuggaaagaauc

SEQ ID NO: 24896 - RNA, 18 nt, Artificial Sequence
  Synthetic
ugcuggugguuguagauc

SEQ ID NO: 24897 - RNA, 19 nt, Artificial Sequence
  Synthetic
gugcuggugguuguagauc

SEQ ID NO: 24898 - RNA, 20 nt, Artificial Sequence
  Synthetic
cgugcuggugguuguagauc

SEQ ID NO: 24899 - RNA, 21 nt, Artificial Sequence
  Synthetic
ccgugcuggugguuguagauc

SEQ ID NO: 24900 - RNA, 22 nt, Artificial Sequence
  Synthetic
cccgugcuggugguuguagauc

SEQ ID NO: 24901 - RNA, 23 nt, Artificial Sequence
  Synthetic
ucccgugcuggugguuguagauc

SEQ ID NO: 24902 - RNA, 24 nt, Artificial Sequence
  Synthetic
gucccgugcuggugguuguagauc

SEQ ID NO: 24903 - RNA, 18 nt, Artificial Sequence
  Synthetic
aguuccgcaguauggauc

SEQ ID NO: 24904 - RNA, 19 nt, Artificial Sequence
  Synthetic
gaguuccgcaguauggauc

SEQ ID NO: 24905 - RNA, 20 nt, Artificial Sequence
  Synthetic
ggaguuccgcaguauggauc

SEQ ID NO: 24906 - RNA, 21 nt, Artificial Sequence
  Synthetic
aggaguuccgcaguauggauc

SEQ ID NO: 24907 - RNA, 22 nt, Artificial Sequence
  Synthetic
uaggaguuccgcaguauggauc

SEQ ID NO: 24908 - RNA, 23 nt, Artificial Sequence
  Synthetic
cuaggaguuccgcaguauggauc

SEQ ID NO: 24909 - RNA, 24 nt, Artificial Sequence
  Synthetic
gcuaggaguuccgcaguauggauc

SEQ ID NO: 24910 - RNA, 18 nt, Artificial Sequence
  Synthetic
  misc_feature (4)..(4): n is a, c, g, or u
aggnuuaauaccuuuauc

SEQ ID NO: 24911 - RNA, 19 nt, Artificial Sequence
  Synthetic
  misc_feature (5)..(5): n is a, c, g, or u
aaggnuuaauaccuuuauc

SEQ ID NO: 24912 - RNA, 20 nt, Artificial Sequence
  Synthetic
  misc_feature (6)..(6): n is a, c, g, or u
uaaggnuuaauaccuuuauc

SEQ ID NO: 24913 - RNA, 21 nt, Artificial Sequence
  Synthetic
  misc_feature (7)..(7): n is a, c, g, or u
guaaggnuuaauaccuuuauc

SEQ ID NO: 24914 - RNA, 22 nt, Artificial Sequence
  Synthetic
  misc_feature (8)..(8): n is a, c, g, or u
aguaaggnuuaauaccuuuauc

SEQ ID NO: 24915 - RNA, 23 nt, Artificial Sequence
  Synthetic
  misc_feature (9)..(9): n is a, c, g, or u
uaguaaggnuuaauaccuuuauc

SEQ ID NO: 24916 - RNA, 24 nt, Artificial Sequence
  Synthetic
  misc_feature (10)..(10): n is a, c, g, or u
auaguaaggnuuaauaccuuuauc

SEQ ID NO: 24917 - RNA, 18 nt, Artificial Sequence
  Synthetic
caaaaaugagaguaacuc

SEQ ID NO: 24918 - RNA, 19 nt, Artificial Sequence
  Synthetic
gcaaaaaugagaguaacuc

SEQ ID NO: 24919 - RNA, 20 nt, Artificial Sequence
  Synthetic
ggcaaaaaugagaguaacuc

SEQ ID NO: 24920 - RNA, 21 nt, Artificial Sequence
  Synthetic
aggcaaaaaugagaguaacuc

SEQ ID NO: 24921 - RNA, 22 nt, Artificial Sequence
  Synthetic
aaggcaaaaaugagaguaacuc

SEQ ID NO: 24922 - RNA, 23 nt, Artificial Sequence
  Synthetic
gaaggcaaaaaugagaguaacuc

SEQ ID NO: 24923 - RNA, 24 nt, Artificial Sequence
  Synthetic
agaaggcaaaaaugagaguaacuc

SEQ ID NO: 24924 - RNA, 18 nt, Artificial Sequence
  Synthetic
  misc_feature (8)..(8): n is a, c, g, or u
gagugcgnauccacacuc

SEQ ID NO: 24925 - RNA, 19 nt, Artificial Sequence
  Synthetic
  misc_feature (9)..(9): n is a, c, g, or u
ggagugcgnauccacacuc

SEQ ID NO: 24926 - RNA, 20 nt, Artificial Sequence
  Synthetic
  misc_feature (10)..(10): n is a, c, g, or u
uggagugcgnauccacacuc

SEQ ID NO: 24927 - RNA, 21 nt, Artificial Sequence
  Synthetic
  misc_feature (11)..(11): n is a, c, g, or u
guggagugcgnauccacacuc

SEQ ID NO: 24928 - RNA, 22 nt, Artificial Sequence
  Synthetic
  misc_feature (12)..(12): n is a, c, g, or u
gguggagugcgnauccacacuc

SEQ ID NO: 24929 - RNA, 23 nt, Artificial Sequence
  Synthetic
  misc_feature (13)..(13): n is a, c, g, or u
agguggagugcgnauccacacuc

SEQ ID NO: 24930 - RNA, 24 nt, Artificial Sequence
  Synthetic
  misc_feature (14)..(14): n is a, c, g, or u
cagguggagugcgnauccacacuc

SEQ ID NO: 24931 - RNA, 18 nt, Artificial Sequence
  Synthetic
gugauucuaaggcaucuc

SEQ ID NO: 24932 - RNA, 19 nt, Artificial Sequence
  Synthetic
ggugauucuaaggcaucuc

SEQ ID NO: 24933 - RNA, 20 nt, Artificial Sequence
  Synthetic
  misc_feature (1)..(1): n is a, c, g, or u
nggugauucuaaggcaucuc

SEQ ID NO: 24934 - RNA, 21 nt, Artificial Sequence
  Synthetic
  misc_feature (2)..(2): n is a, c, g, or u
cnggugauucuaaggcaucuc

SEQ ID NO: 24935 - RNA, 22 nt, Artificial Sequence
  Synthetic
  misc_feature (3)..(3): n is a, c, g, or u
ucnggugauucuaaggcaucuc

SEQ ID NO: 24936 - RNA, 23 nt, Artificial Sequence
  Synthetic
  misc_feature (4)..(4): n is a, c, g, or u
uucnggugauucuaaggcaucuc

SEQ ID NO: 24937 - RNA, 24 nt, Artificial Sequence
  Synthetic
  misc_feature (5)..(5): n is a, c, g, or u
guucnggugauucuaaggcaucuc

SEQ ID NO: 24938 - RNA, 18 nt, Artificial Sequence
  Synthetic
ucuaacaacaguagucuc

SEQ ID NO: 24939 - RNA, 19 nt, Artificial Sequence
  Synthetic
gucuaacaacaguagucuc

SEQ ID NO: 24940 - RNA, 20 nt, Artificial Sequence
  Synthetic
ugucuaacaacaguagucuc

SEQ ID NO: 24941 - RNA, 21 nt, Artificial Sequence
  Synthetic
uugucuaacaacaguagucuc

SEQ ID NO: 24942 - RNA, 22 nt, Artificial Sequence
  Synthetic
guugucuaacaacaguagucuc

SEQ ID NO: 24943 - RNA, 23 nt, Artificial Sequence
  Synthetic
cguugucuaacaacaguagucuc

SEQ ID NO: 24944 - RNA, 24 nt, Artificial Sequence
  Synthetic
ucguugucuaacaacaguagucuc

SEQ ID NO: 24945 - RNA, 18 nt, Artificial Sequence
  Synthetic
uugaccggggcgaaaguc

SEQ ID NO: 24946 - RNA, 19 nt, Artificial Sequence
  Synthetic
guugaccggggcgaaaguc

SEQ ID NO: 24947 - RNA, 20 nt, Artificial Sequence
  Synthetic
cguugaccggggcgaaaguc

SEQ ID NO: 24948 - RNA, 21 nt, Artificial Sequence
  Synthetic
ucguugaccggggcgaaaguc

SEQ ID NO: 24949 - RNA, 22 nt, Artificial Sequence
  Synthetic
gucguugaccggggcgaaaguc

SEQ ID NO: 24950 - RNA, 23 nt, Artificial Sequence
  Synthetic
ggucguugaccggggcgaaaguc

SEQ ID NO: 24951 - RNA, 24 nt, Artificial Sequence
  Synthetic
aggucguugaccggggcgaaaguc

SEQ ID NO: 24952 - RNA, 18 nt, Artificial Sequence
  Synthetic
gacagacgggaagaaguc

SEQ ID NO: 24953 - RNA, 19 nt, Artificial Sequence
  Synthetic
ggacagacgggaagaaguc

SEQ ID NO: 24954 - RNA, 20 nt, Artificial Sequence
  Synthetic
cggacagacgggaagaaguc

SEQ ID NO: 24955 - RNA, 21 nt, Artificial Sequence
  Synthetic
ccggacagacgggaagaaguc

SEQ ID NO: 24956 - RNA, 22 nt, Artificial Sequence
  Synthetic
cccggacagacgggaagaaguc

SEQ ID NO: 24957 - RNA, 23 nt, Artificial Sequence
  Synthetic
ucccggacagacgggaagaaguc

SEQ ID NO: 24958 - RNA, 24 nt, Artificial Sequence
  Synthetic
gucccggacagacgggaagaaguc

SEQ ID NO: 24959 - RNA, 18 nt, Artificial Sequence
  Synthetic
  misc_feature (4)..(4): n is a, c, g, or u
auancaggguccccaguc

SEQ ID NO: 24960 - RNA, 19 nt, Artificial Sequence
  Synthetic
  misc_feature (5)..(5): n is a, c, g, or u
cauancaggguccccaguc

SEQ ID NO: 24961 - RNA, 20 nt, Artificial Sequence
  Synthetic
  misc_feature (6)..(6): n is a, c, g, or u
ucauancaggguccccaguc

SEQ ID NO: 24962 - RNA, 21 nt, Artificial Sequence
  Synthetic
  misc_feature (7)..(7): n is a, c, g, or u
uucauancaggguccccaguc

SEQ ID NO: 24963 - RNA, 22 nt, Artificial Sequence
  Synthetic
  misc_feature (8)..(8): n is a, c, g, or u
guucauancaggguccccaguc

SEQ ID NO: 24964 - RNA, 23 nt, Artificial Sequence
  Synthetic
  misc_feature (9)..(9): n is a, c, g, or u
uguucauancaggguccccaguc

SEQ ID NO: 24965 - RNA, 24 nt, Artificial Sequence
  Synthetic
  misc_feature (10)..(10): n is a, c, g, or u
auguucauancaggguccccaguc

SEQ ID NO: 24966 - RNA, 18 nt, Artificial Sequence
  Synthetic
ccccgacuccucccaguc

SEQ ID NO: 24967 - RNA, 19 nt, Artificial Sequence
  Synthetic
cccccgacuccucccaguc

SEQ ID NO: 24968 - RNA, 20 nt, Artificial Sequence
  Synthetic
ucccccgacuccucccaguc

SEQ ID NO: 24969 - RNA, 21 nt, Artificial Sequence
  Synthetic
cucccccgacuccucccaguc

SEQ ID NO: 24970 - RNA, 22 nt, Artificial Sequence
  Synthetic
ccucccccgacuccucccaguc

SEQ ID NO: 24971 - RNA, 23 nt, Artificial Sequence
  Synthetic
uccucccccgacuccucccaguc

SEQ ID NO: 24972 - RNA, 24 nt, Artificial Sequence
  Synthetic
cuccucccccgacuccucccaguc

SEQ ID NO: 24973 - RNA, 18 nt, Artificial Sequence
  Synthetic
uuucccaccuuaugaguc

SEQ ID NO: 24974 - RNA, 19 nt, Artificial Sequence
  Synthetic
guuucccaccuuaugaguc

SEQ ID NO: 24975 - RNA, 20 nt, Artificial Sequence
  Synthetic
aguuucccaccuuaugaguc

SEQ ID NO: 24976 - RNA, 21 nt, Artificial Sequence
  Synthetic
aaguuucccaccuuaugaguc

SEQ ID NO: 24977 - RNA, 22 nt, Artificial Sequence
  Synthetic
aaaguuucccaccuuaugaguc

SEQ ID NO: 24978 - RNA, 23 nt, Artificial Sequence
  Synthetic
uaaaguuucccaccuuaugaguc

SEQ ID NO: 24979 - RNA, 24 nt, Artificial Sequence
  Synthetic
guaaaguuucccaccuuaugaguc

SEQ ID NO: 24980 - RNA, 18 nt, Artificial Sequence
  Synthetic
caacauaccuugauaguc

SEQ ID NO: 24981 - RNA, 19 nt, Artificial Sequence
  Synthetic
gcaacauaccuugauaguc

SEQ ID NO: 24982 - RNA, 20 nt, Artificial Sequence
  Synthetic
ggcaacauaccuugauaguc

SEQ ID NO: 24983 - RNA, 21 nt, Artificial Sequence
  Synthetic
gggcaacauaccuugauaguc

SEQ ID NO: 24984 - RNA, 22 nt, Artificial Sequence
  Synthetic
cgggcaacauaccuugauaguc

SEQ ID NO: 24985 - RNA, 23 nt, Artificial Sequence
  Synthetic
acgggcaacauaccuugauaguc

SEQ ID NO: 24986 - RNA, 24 nt, Artificial Sequence
  Synthetic
cacgggcaacauaccuugauaguc

SEQ ID NO: 24987 - RNA, 18 nt, Artificial Sequence
  Synthetic
ugucuaacaacaguaguc

SEQ ID NO: 24988 - RNA, 19 nt, Artificial Sequence
  Synthetic
uugucuaacaacaguaguc

SEQ ID NO: 24989 - RNA, 20 nt, Artificial Sequence
  Synthetic
guugucuaacaacaguaguc

SEQ ID NO: 24990 - RNA, 21 nt, Artificial Sequence
  Synthetic
cguugucuaacaacaguaguc

SEQ ID NO: 24991 - RNA, 22 nt, Artificial Sequence
  Synthetic
ucguugucuaacaacaguaguc

SEQ ID NO: 24992 - RNA, 23 nt, Artificial Sequence
  Synthetic
cucguugucuaacaacaguaguc

SEQ ID NO: 24993 - RNA, 24 nt, Artificial Sequence
  Synthetic
ccucguugucuaacaacaguaguc

SEQ ID NO: 24994 - RNA, 18 nt, Artificial Sequence
  Synthetic
agagaggugcgacccguc

SEQ ID NO: 24995 - RNA, 19 nt, Artificial Sequence
  Synthetic
aagagaggugcgacccguc

SEQ ID NO: 24996 - RNA, 20 nt, Artificial Sequence
  Synthetic
aaagagaggugcgacccguc

SEQ ID NO: 24997 - RNA, 18 nt, Artificial Sequence
  Synthetic
acaggugcaauuuccguc

SEQ ID NO: 24998 - RNA, 19 nt, Artificial Sequence
  Synthetic
uacaggugcaauuuccguc

SEQ ID NO: 24999 - RNA, 20 nt, Artificial Sequence
  Synthetic
auacaggugcaauuuccguc

SEQ ID NO: 25000 - RNA, 21 nt, Artificial Sequence
  Synthetic
aauacaggugcaauuuccguc

SEQ ID NO: 25001 - RNA, 22 nt, Artificial Sequence
  Synthetic
gaauacaggugcaauuuccguc

SEQ ID NO: 25002 - RNA, 23 nt, Artificial Sequence
  Synthetic
ggaauacaggugcaauuuccguc

SEQ ID NO: 25003 - RNA, 24 nt, Artificial Sequence
  Synthetic
gggaauacaggugcaauuuccguc

SEQ ID NO: 25004 - RNA, 18 nt, Artificial Sequence
  Synthetic
gccaguggggguugcguc

SEQ ID NO: 25005 - RNA, 19 nt, Artificial Sequence
  Synthetic
agccaguggggguugcguc

SEQ ID NO: 25006 - RNA, 20 nt, Artificial Sequence
  Synthetic
cagccaguggggguugcguc

SEQ ID NO: 25007 - RNA, 21 nt, Artificial Sequence
  Synthetic
ccagccaguggggguugcguc

SEQ ID NO: 25008 - RNA, 22 nt, Artificial Sequence
  Synthetic
cccagccaguggggguugcguc

SEQ ID NO: 25009 - RNA, 23 nt, Artificial Sequence
  Synthetic
ccccagccaguggggguugcguc

SEQ ID NO: 25010 - RNA, 24 nt, Artificial Sequence
  Synthetic
gccccagccaguggggguugcguc

SEQ ID NO: 25011 - RNA, 18 nt, Artificial Sequence
  Synthetic
accacgagaggggucguc

SEQ ID NO: 25012 - RNA, 19 nt, Artificial Sequence
  Synthetic
gaccacgagaggggucguc

SEQ ID NO: 25013 - RNA, 20 nt, Artificial Sequence
  Synthetic
cgaccacgagaggggucguc

SEQ ID NO: 25014 - RNA, 21 nt, Artificial Sequence
  Synthetic
gcgaccacgagaggggucguc

SEQ ID NO: 25015 - RNA, 22 nt, Artificial Sequence
  Synthetic
agcgaccacgagaggggucguc

SEQ ID NO: 25016 - RNA, 23 nt, Artificial Sequence
  Synthetic
aagcgaccacgagaggggucguc

SEQ ID NO: 25017 - RNA, 24 nt, Artificial Sequence
  Synthetic
caagcgaccacgagaggggucguc

SEQ ID NO: 25018 - RNA, 18 nt, Artificial Sequence
  Synthetic
  misc_feature (2)..(2): n is a, c, g, or u
gngauugagaucuucguc

SEQ ID NO: 25019 - RNA, 19 nt, Artificial Sequence
  Synthetic
  misc_feature (3)..(3): n is a, c, g, or u
ggngauugagaucuucguc

SEQ ID NO: 25020 - RNA, 20 nt, Artificial Sequence
  Synthetic
  misc_feature (4)..(4): n is a, c, g, or u
cggngauugagaucuucguc

SEQ ID NO: 25021 - RNA, 21 nt, Artificial Sequence
  Synthetic
  misc_feature (5)..(5): n is a, c, g, or u
gcggngauugagaucuucguc

SEQ ID NO: 25022 - RNA, 22 nt, Artificial Sequence
  Synthetic
  misc_feature (6)..(6): n is a, c, g, or u
cgcggngauugagaucuucguc

SEQ ID NO: 25023 - RNA, 23 nt, Artificial Sequence
  Synthetic
  misc_feature (7)..(7): n is a, c, g, or u
acgcggngauugagaucuucguc

SEQ ID NO: 25024 - RNA, 24 nt, Artificial Sequence
  Synthetic
  misc_feature (8)..(8): n is a, c, g, or u
gacgcggngauugagaucuucguc

SEQ ID NO: 25025 - RNA, 18 nt, Artificial Sequence
  Synthetic
uauuccucaauccagguc

SEQ ID NO: 25026 - RNA, 19 nt, Artificial Sequence
  Synthetic
guauuccucaauccagguc

SEQ ID NO: 25027 - RNA, 20 nt, Artificial Sequence
  Synthetic
uguauuccucaauccagguc

SEQ ID NO: 25028 - RNA, 21 nt, Artificial Sequence
  Synthetic
auguauuccucaauccagguc

SEQ ID NO: 25029 - RNA, 22 nt, Artificial Sequence
  Synthetic
gauguauuccucaauccagguc

SEQ ID NO: 25030 - RNA, 23 nt, Artificial Sequence
  Synthetic
ugauguauuccucaauccagguc

SEQ ID NO: 25031 - RNA, 24 nt, Artificial Sequence
  Synthetic
uugauguauuccucaauccagguc

SEQ ID NO: 25032 - RNA, 18 nt, Artificial Sequence
  Synthetic
agcggugucgaguagguc

SEQ ID NO: 25033 - RNA, 19 nt, Artificial Sequence
  Synthetic
aagcggugucgaguagguc

SEQ ID NO: 25034 - RNA, 20 nt, Artificial Sequence
  Synthetic
gaagcggugucgaguagguc

SEQ ID NO: 25035 - RNA, 18 nt, Artificial Sequence
  Synthetic
guaacacgagaagggguc

SEQ ID NO: 25036 - RNA, 19 nt, Artificial Sequence
  Synthetic
uguaacacgagaagggguc

SEQ ID NO: 25037 - RNA, 20 nt, Artificial Sequence
  Synthetic
cuguaacacgagaagggguc

SEQ ID NO: 25038 - RNA, 21 nt, Artificial Sequence
  Synthetic
ccuguaacacgagaagggguc

SEQ ID NO: 25039 - RNA, 22 nt, Artificial Sequence
  Synthetic
gccuguaacacgagaagggguc

SEQ ID NO: 25040 - RNA, 23 nt, Artificial Sequence
  Synthetic
cgccuguaacacgagaagggguc

SEQ ID NO: 25041 - RNA, 24 nt, Artificial Sequence
  Synthetic
ccgccuguaacacgagaagggguc

SEQ ID NO: 25042 - RNA, 18 nt, Artificial Sequence
  Synthetic
uggauccaacuggugguc

SEQ ID NO: 25043 - RNA, 19 nt, Artificial Sequence
  Synthetic
guggauccaacuggugguc

SEQ ID NO: 25044 - RNA, 20 nt, Artificial Sequence
  Synthetic
aguggauccaacuggugguc

SEQ ID NO: 25045 - RNA, 21 nt, Artificial Sequence
  Synthetic
uaguggauccaacuggugguc

SEQ ID NO: 25046 - RNA, 22 nt, Artificial Sequence
  Synthetic
auaguggauccaacuggugguc

SEQ ID NO: 25047 - RNA, 23 nt, Artificial Sequence
  Synthetic
aauaguggauccaacuggugguc

SEQ ID NO: 25048 - RNA, 24 nt, Artificial Sequence
  Synthetic
gaauaguggauccaacuggugguc

SEQ ID NO: 25049 - RNA, 18 nt, Artificial Sequence
  Synthetic
uaggggcauuuggugguc

SEQ ID NO: 25050 - RNA, 19 nt, Artificial Sequence
  Synthetic
auaggggcauuuggugguc

SEQ ID NO: 25051 - RNA, 20 nt, Artificial Sequence
  Synthetic
gauaggggcauuuggugguc

SEQ ID NO: 25052 - RNA, 21 nt, Artificial Sequence
  Synthetic
ggauaggggcauuuggugguc

SEQ ID NO: 25053 - RNA, 22 nt, Artificial Sequence
  Synthetic
aggauaggggcauuuggugguc

SEQ ID NO: 25054 - RNA, 23 nt, Artificial Sequence
  Synthetic
uaggauaggggcauuuggugguc

SEQ ID NO: 25055 - RNA, 24 nt, Artificial Sequence
  Synthetic
auaggauaggggcauuuggugguc

SEQ ID NO: 25056 - RNA, 18 nt, Artificial Sequence
  Synthetic
  misc_feature (15)..(15): n is a, c, g, or u
acccaggaagccaanguc

SEQ ID NO: 25057 - RNA, 19 nt, Artificial Sequence
  Synthetic
  misc_feature (16)..(16): n is a, c, g, or u
cacccaggaagccaanguc

SEQ ID NO: 25058 - RNA, 20 nt, Artificial Sequence
  Synthetic
  misc_feature (17)..(17): n is a, c, g, or u
ccacccaggaagccaanguc

SEQ ID NO: 25059 - RNA, 21 nt, Artificial Sequence
  Synthetic
  misc_feature (18)..(18): n is a, c, g, or u
cccacccaggaagccaanguc

SEQ ID NO: 25060 - RNA, 22 nt, Artificial Sequence
  Synthetic
  misc_feature (19)..(19): n is a, c, g, or u
gcccacccaggaagccaanguc

SEQ ID NO: 25061 - RNA, 23 nt, Artificial Sequence
  Synthetic
  misc_feature (20)..(20): n is a, c, g, or u
ugcccacccaggaagccaanguc

SEQ ID NO: 25062 - RNA, 24 nt, Artificial Sequence
  Synthetic
  misc_feature (21)..(21): n is a, c, g, or u
uugcccacccaggaagccaanguc

SEQ ID NO: 25063 - RNA, 18 nt, Artificial Sequence
  Synthetic
uugaugcaagugaauguc

SEQ ID NO: 25064 - RNA, 19 nt, Artificial Sequence
  Synthetic
cuugaugcaagugaauguc

SEQ ID NO: 25065 - RNA, 20 nt, Artificial Sequence
  Synthetic
ucuugaugcaagugaauguc

SEQ ID NO: 25066 - RNA, 21 nt, Artificial Sequence
  Synthetic
aucuugaugcaagugaauguc

SEQ ID NO: 25067 - RNA, 22 nt, Artificial Sequence
  Synthetic
  misc_feature (1)..(1): n is a, c, g, or u
naucuugaugcaagugaauguc

SEQ ID NO: 25068 - RNA, 23 nt, Artificial Sequence
  Synthetic
  misc_feature (2)..(2): n is a, c, g, or u
anaucuugaugcaagugaauguc

SEQ ID NO: 25069 - RNA, 24 nt, Artificial Sequence
  Synthetic
  misc_feature (3)..(3): n is a, c, g, or u
canaucuugaugcaagugaauguc

SEQ ID NO: 25070 - RNA, 18 nt, Artificial Sequence
  Synthetic
auugugaggauuuuuguc

SEQ ID NO: 25071 - RNA, 19 nt, Artificial Sequence
  Synthetic
uauugugaggauuuuuguc

SEQ ID NO: 25072 - RNA, 20 nt, Artificial Sequence
  Synthetic
guauugugaggauuuuuguc

SEQ ID NO: 25073 - RNA, 21 nt, Artificial Sequence
  Synthetic
gguauugugaggauuuuuguc

SEQ ID NO: 25074 - RNA, 22 nt, Artificial Sequence
  Synthetic
ugguauugugaggauuuuuguc

SEQ ID NO: 25075 - RNA, 23 nt, Artificial Sequence
  Synthetic
  misc_feature (1)..(1): n is a, c, g, or u
nugguauugugaggauuuuuguc

SEQ ID NO: 25076 - RNA, 24 nt, Artificial Sequence
  Synthetic
  misc_feature (2)..(2): n is a, c, g, or u
unugguauugugaggauuuuuguc

SEQ ID NO: 25077 - RNA, 18 nt, Artificial Sequence
  Synthetic
  misc_feature (16)..(16): n is a, c, g, or u
aagguuguuggcaagnuc

SEQ ID NO: 25078 - RNA, 19 nt, Artificial Sequence
  Synthetic
  misc_feature (17)..(17): n is a, c, g, or u
uaagguuguuggcaagnuc

SEQ ID NO: 25079 - RNA, 20 nt, Artificial Sequence
  Synthetic
  misc_feature (18)..(18): n is a, c, g, or u
guaagguuguuggcaagnuc

SEQ ID NO: 25080 - RNA, 21 nt, Artificial Sequence
  Synthetic
  misc_feature (19)..(19): n is a, c, g, or u
uguaagguuguuggcaagnuc

SEQ ID NO: 25081 - RNA, 22 nt, Artificial Sequence
  Synthetic
  misc_feature (20)..(20): n is a, c, g, or u
auguaagguuguuggcaagnuc

SEQ ID NO: 25082 - RNA, 23 nt, Artificial Sequence
  Synthetic
  misc_feature (21)..(21): n is a, c, g, or u
uauguaagguuguuggcaagnuc

SEQ ID NO: 25083 - RNA, 24 nt, Artificial Sequence
  Synthetic
  misc_feature (22)..(22): n is a, c, g, or u
uuauguaagguuguuggcaagnuc

SEQ ID NO: 25084 - RNA, 18 nt, Artificial Sequence
  Synthetic
uaaugauuaaccacauuc

SEQ ID NO: 25085 - RNA, 19 nt, Artificial Sequence
  Synthetic
guaaugauuaaccacauuc

SEQ ID NO: 25086 - RNA, 20 nt, Artificial Sequence
  Synthetic
aguaaugauuaaccacauuc

SEQ ID NO: 25087 - RNA, 21 nt, Artificial Sequence
  Synthetic
aaguaaugauuaaccacauuc

SEQ ID NO: 25088 - RNA, 22 nt, Artificial Sequence
  Synthetic
  misc_feature (1)..(1): n is a, c, g, or u
naaguaaugauuaaccacauuc

SEQ ID NO: 25089 - RNA, 23 nt, Artificial Sequence
  Synthetic
  misc_feature (2)..(2): n is a, c, g, or u
unaaguaaugauuaaccacauuc

SEQ ID NO: 25090 - RNA, 24 nt, Artificial Sequence
  Synthetic
  misc_feature (3)..(3): n is a, c, g, or u
uunaaguaaugauuaaccacauuc

SEQ ID NO: 25091 - RNA, 18 nt, Artificial Sequence
  Synthetic
  misc_feature (10)..(10): n is a, c, g, or u
gcaauguucnggugauuc

SEQ ID NO: 25092 - RNA, 19 nt, Artificial Sequence
  Synthetic
  misc_feature (11)..(11): n is a, c, g, or u
ugcaauguucnggugauuc

SEQ ID NO: 25093 - RNA, 20 nt, Artificial Sequence
  Synthetic
  misc_feature (12)..(12): n is a, c, g, or u
gugcaauguucnggugauuc

SEQ ID NO: 25094 - RNA, 21 nt, Artificial Sequence
  Synthetic
  misc_feature (13)..(13): n is a, c, g, or u
ggugcaauguucnggugauuc

SEQ ID NO: 25095 - RNA, 22 nt, Artificial Sequence
  Synthetic
  misc_feature (14)..(14): n is a, c, g, or u
gggugcaauguucnggugauuc

SEQ ID NO: 25096 - RNA, 23 nt, Artificial Sequence
  Synthetic
  misc_feature (15)..(15): n is a, c, g, or u
ggggugcaauguucnggugauuc

SEQ ID NO: 25097 - RNA, 24 nt, Artificial Sequence
  Synthetic
  misc_feature (16)..(16): n is a, c, g, or u
gggggugcaauguucnggugauuc

SEQ ID NO: 25098 - RNA, 18 nt, Artificial Sequence
  Synthetic
caaucaaugggucuauuc

SEQ ID NO: 25099 - RNA, 19 nt, Artificial Sequence
  Synthetic
ccaaucaaugggucuauuc

SEQ ID NO: 25100 - RNA, 20 nt, Artificial Sequence
  Synthetic
uccaaucaaugggucuauuc

SEQ ID NO: 25101 - RNA, 21 nt, Artificial Sequence
  Synthetic
uuccaaucaaugggucuauuc

SEQ ID NO: 25102 - RNA, 22 nt, Artificial Sequence
  Synthetic
cuuccaaucaaugggucuauuc

SEQ ID NO: 25103 - RNA, 23 nt, Artificial Sequence
  Synthetic
ccuuccaaucaaugggucuauuc

SEQ ID NO: 25104 - RNA, 24 nt, Artificial Sequence
  Synthetic
accuuccaaucaaugggucuauuc

SEQ ID NO: 25105 - RNA, 18 nt, Artificial Sequence
  Synthetic
gggaaggagguguacuuc

SEQ ID NO: 25106 - RNA, 19 nt, Artificial Sequence
  Synthetic
ugggaaggagguguacuuc

SEQ ID NO: 25107 - RNA, 20 nt, Artificial Sequence
  Synthetic
augggaaggagguguacuuc

SEQ ID NO: 25108 - RNA, 21 nt, Artificial Sequence
  Synthetic
caugggaaggagguguacuuc

SEQ ID NO: 25109 - RNA, 22 nt, Artificial Sequence
  Synthetic
ccaugggaaggagguguacuuc

SEQ ID NO: 25110 - RNA, 23 nt, Artificial Sequence
  Synthetic
gccaugggaaggagguguacuuc

SEQ ID NO: 25111 - RNA, 24 nt, Artificial Sequence
  Synthetic
agccaugggaaggagguguacuuc

SEQ ID NO: 25112 - RNA, 18 nt, Artificial Sequence
  Synthetic
uauagaauuccugccuuc

SEQ ID NO: 25113 - RNA, 19 nt, Artificial Sequence
  Synthetic
auauagaauuccugccuuc

SEQ ID NO: 25114 - RNA, 20 nt, Artificial Sequence
  Synthetic
uauauagaauuccugccuuc

SEQ ID NO: 25115 - RNA, 21 nt, Artificial Sequence
  Synthetic
uuauauagaauuccugccuuc

SEQ ID NO: 25116 - RNA, 22 nt, Artificial Sequence
  Synthetic
cuuauauagaauuccugccuuc

SEQ ID NO: 25117 - RNA, 23 nt, Artificial Sequence
  Synthetic
ucuuauauagaauuccugccuuc

SEQ ID NO: 25118 - RNA, 24 nt, Artificial Sequence
  Synthetic
cucuuauauagaauuccugccuuc

SEQ ID NO: 25119 - RNA, 18 nt, Artificial Sequence
  Synthetic
cuggagauugagaucuuc

SEQ ID NO: 25120 - RNA, 19 nt, Artificial Sequence
  Synthetic
gcuggagauugagaucuuc

SEQ ID NO: 25121 - RNA, 20 nt, Artificial Sequence
  Synthetic
agcuggagauugagaucuuc

SEQ ID NO: 25122 - RNA, 21 nt, Artificial Sequence
  Synthetic
aagcuggagauugagaucuuc

SEQ ID NO: 25123 - RNA, 22 nt, Artificial Sequence
  Synthetic
gaagcuggagauugagaucuuc

SEQ ID NO: 25124 - RNA, 23 nt, Artificial Sequence
  Synthetic
ggaagcuggagauugagaucuuc

SEQ ID NO: 25125 - RNA, 24 nt, Artificial Sequence
  Synthetic
gggaagcuggagauugagaucuuc

SEQ ID NO: 25126 - RNA, 18 nt, Artificial Sequence
  Synthetic
  misc_feature (1)..(1): n is a, c, g, or u
ncaggguccccagucuuc

SEQ ID NO: 25127 - RNA, 19 nt, Artificial Sequence
  Synthetic
  misc_feature (2)..(2): n is a, c, g, or u
ancaggguccccagucuuc

SEQ ID NO: 25128 - RNA, 20 nt, Artificial Sequence
  Synthetic
  misc_feature (3)..(3): n is a, c, g, or u
uancaggguccccagucuuc

SEQ ID NO: 25129 - RNA, 21 nt, Artificial Sequence
  Synthetic
  misc_feature (4)..(4): n is a, c, g, or u
auancaggguccccagucuuc

SEQ ID NO: 25130 - RNA, 22 nt, Artificial Sequence
  Synthetic
  misc_feature (5)..(5): n is a, c, g, or u
cauancaggguccccagucuuc

SEQ ID NO: 25131 - RNA, 23 nt, Artificial Sequence
  Synthetic
  misc_feature (6)..(6): n is a, c, g, or u
ucauancaggguccccagucuuc

SEQ ID NO: 25132 - RNA, 24 nt, Artificial Sequence
  Synthetic
  misc_feature (7)..(7): n is a, c, g, or u
uucauancaggguccccagucuuc

SEQ ID NO: 25133 - RNA, 18 nt, Artificial Sequence
  Synthetic
gcgagggaguucuucuuc

SEQ ID NO: 25134 - RNA, 19 nt, Artificial Sequence
  Synthetic
ggcgagggaguucuucuuc

SEQ ID NO: 25135 - RNA, 20 nt, Artificial Sequence
  Synthetic
aggcgagggaguucuucuuc

SEQ ID NO: 25136 - RNA, 21 nt, Artificial Sequence
  Synthetic
gaggcgagggaguucuucuuc

SEQ ID NO: 25137 - RNA, 22 nt, Artificial Sequence
  Synthetic
cgaggcgagggaguucuucuuc

SEQ ID NO: 25138 - RNA, 23 nt, Artificial Sequence
  Synthetic
gcgaggcgagggaguucuucuuc

SEQ ID NO: 25139 - RNA, 24 nt, Artificial Sequence
  Synthetic
ugcgaggcgagggaguucuucuuc

SEQ ID NO: 25140 - RNA, 18 nt, Artificial Sequence
  Synthetic
agggaaacauagagguuc

SEQ ID NO: 25141 - RNA, 19 nt, Artificial Sequence
  Synthetic
gagggaaacauagagguuc

SEQ ID NO: 25142 - RNA, 20 nt, Artificial Sequence
  Synthetic
ggagggaaacauagagguuc

SEQ ID NO: 25143 - RNA, 21 nt, Artificial Sequence
  Synthetic
aggagggaaacauagagguuc

SEQ ID NO: 25144 - RNA, 22 nt, Artificial Sequence
  Synthetic
caggagggaaacauagagguuc

SEQ ID NO: 25145 - RNA, 23 nt, Artificial Sequence
  Synthetic
gcaggagggaaacauagagguuc

SEQ ID NO: 25146 - RNA, 24 nt, Artificial Sequence
  Synthetic
agcaggagggaaacauagagguuc

SEQ ID NO: 25147 - RNA, 18 nt, Artificial Sequence
  Synthetic
uuuaugcacaauauguuc

SEQ ID NO: 25148 - RNA, 19 nt, Artificial Sequence
  Synthetic
uuuuaugcacaauauguuc

SEQ ID NO: 25149 - RNA, 20 nt, Artificial Sequence
  Synthetic
auuuuaugcacaauauguuc

SEQ ID NO: 25150 - RNA, 21 nt, Artificial Sequence
  Synthetic
gauuuuaugcacaauauguuc

SEQ ID NO: 25151 - RNA, 22 nt, Artificial Sequence
  Synthetic
ugauuuuaugcacaauauguuc

SEQ ID NO: 25152 - RNA, 23 nt, Artificial Sequence
  Synthetic
uugauuuuaugcacaauauguuc

SEQ ID NO: 25153 - RNA, 24 nt, Artificial Sequence
  Synthetic
uuugauuuuaugcacaauauguuc

SEQ ID NO: 25154 - RNA, 18 nt, Artificial Sequence
  Synthetic
augcuguagcucuuguuc

SEQ ID NO: 25155 - RNA, 19 nt, Artificial Sequence
  Synthetic
caugcuguagcucuuguuc

SEQ ID NO: 25156 - RNA, 20 nt, Artificial Sequence
  Synthetic
ccaugcuguagcucuuguuc

SEQ ID NO: 25157 - RNA, 21 nt, Artificial Sequence
  Synthetic
cccaugcuguagcucuuguuc

SEQ ID NO: 25158 - RNA, 22 nt, Artificial Sequence
  Synthetic
ucccaugcuguagcucuuguuc

SEQ ID NO: 25159 - RNA, 23 nt, Artificial Sequence
  Synthetic
cucccaugcuguagcucuuguuc

SEQ ID NO: 25160 - RNA, 24 nt, Artificial Sequence
  Synthetic
gcucccaugcuguagcucuuguuc

SEQ ID NO: 25161 - RNA, 18 nt, Artificial Sequence
  Synthetic
acucccauagguauuuuc

SEQ ID NO: 25162 - RNA, 19 nt, Artificial Sequence
  Synthetic
cacucccauagguauuuuc

SEQ ID NO: 25163 - RNA, 20 nt, Artificial Sequence
  Synthetic
ccacucccauagguauuuuc

SEQ ID NO: 25164 - RNA, 21 nt, Artificial Sequence
  Synthetic
cccacucccauagguauuuuc

SEQ ID NO: 25165 - RNA, 22 nt, Artificial Sequence
  Synthetic
gcccacucccauagguauuuuc

SEQ ID NO: 25166 - RNA, 23 nt, Artificial Sequence
  Synthetic
ggcccacucccauagguauuuuc

SEQ ID NO: 25167 - RNA, 24 nt, Artificial Sequence
  Synthetic
aggcccacucccauagguauuuuc

SEQ ID NO: 25168 - RNA, 18 nt, Artificial Sequence
  Synthetic
agugaaugucaggaaaag

SEQ ID NO: 25169 - RNA, 19 nt, Artificial Sequence
  Synthetic
aagugaaugucaggaaaag

SEQ ID NO: 25170 - RNA, 20 nt, Artificial Sequence
  Synthetic
caagugaaugucaggaaaag

SEQ ID NO: 25171 - RNA, 21 nt, Artificial Sequence
  Synthetic
gcaagugaaugucaggaaaag

SEQ ID NO: 25172 - RNA, 22 nt, Artificial Sequence
  Synthetic
ugcaagugaaugucaggaaaag

SEQ ID NO: 25173 - RNA, 23 nt, Artificial Sequence
  Synthetic
augcaagugaaugucaggaaaag

SEQ ID NO: 25174 - RNA, 24 nt, Artificial Sequence
  Synthetic
gaugcaagugaaugucaggaaaag

SEQ ID NO: 25175 - RNA, 18 nt, Artificial Sequence
  Synthetic
cauccauauaacuaaaag

SEQ ID NO: 25176 - RNA, 19 nt, Artificial Sequence
  Synthetic
ucauccauauaacuaaaag

SEQ ID NO: 25177 - RNA, 20 nt, Artificial Sequence
  Synthetic
aucauccauauaacuaaaag

SEQ ID NO: 25178 - RNA, 21 nt, Artificial Sequence
  Synthetic
  misc_feature (1)..(1): n is a, c, g, or u
naucauccauauaacuaaaag

SEQ ID NO: 25179 - RNA, 22 nt, Artificial Sequence
  Synthetic
  misc_feature (2)..(2): n is a, c, g, or u
anaucauccauauaacuaaaag

SEQ ID NO: 25180 - RNA, 23 nt, Artificial Sequence
  Synthetic
  misc_feature (3)..(3): n is a, c, g, or u
canaucauccauauaacuaaaag

SEQ ID NO: 25181 - RNA, 24 nt, Artificial Sequence
  Synthetic
  misc_feature (4)..(4): n is a, c, g, or u
ccanaucauccauauaacuaaaag

SEQ ID NO: 25182 - RNA, 18 nt, Artificial Sequence
  Synthetic
guaaaaggggcugcaaag

SEQ ID NO: 25183 - RNA, 19 nt, Artificial Sequence
  Synthetic
aguaaaaggggcugcaaag

SEQ ID NO: 25184 - RNA, 20 nt, Artificial Sequence
  Synthetic
gaguaaaaggggcugcaaag

SEQ ID NO: 25185 - RNA, 21 nt, Artificial Sequence
  Synthetic
ugaguaaaaggggcugcaaag

SEQ ID NO: 25186 - RNA, 22 nt, Artificial Sequence
  Synthetic
uugaguaaaaggggcugcaaag

SEQ ID NO: 25187 - RNA, 23 nt, Artificial Sequence
  Synthetic
auugaguaaaaggggcugcaaag

SEQ ID NO: 25188 - RNA, 24 nt, Artificial Sequence
  Synthetic
cauugaguaaaaggggcugcaaag

SEQ ID NO: 25189 - RNA, 18 nt, Artificial Sequence
  Synthetic
gguguacuuccgagaaag

SEQ ID NO: 25190 - RNA, 19 nt, Artificial Sequence
  Synthetic
agguguacuuccgagaaag

SEQ ID NO: 25191 - RNA, 20 nt, Artificial Sequence
  Synthetic
gagguguacuuccgagaaag

SEQ ID NO: 25192 - RNA, 21 nt, Artificial Sequence
  Synthetic
ggagguguacuuccgagaaag

SEQ ID NO: 25193 - RNA, 22 nt, Artificial Sequence
  Synthetic
aggagguguacuuccgagaaag

SEQ ID NO: 25194 - RNA, 23 nt, Artificial Sequence
  Synthetic
aaggagguguacuuccgagaaag

SEQ ID NO: 25195 - RNA, 24 nt, Artificial Sequence
  Synthetic
gaaggagguguacuuccgagaaag

SEQ ID NO: 25196 - RNA, 18 nt, Artificial Sequence
  Synthetic
auagguauuuuccgaaag

SEQ ID NO: 25197 - RNA, 19 nt, Artificial Sequence
  Synthetic
cauagguauuuuccgaaag

SEQ ID NO: 25198 - RNA, 20 nt, Artificial Sequence
  Synthetic
ccauagguauuuuccgaaag

SEQ ID NO: 25199 - RNA, 21 nt, Artificial Sequence
  Synthetic
cccauagguauuuuccgaaag

SEQ ID NO: 25200 - RNA, 22 nt, Artificial Sequence
  Synthetic
ucccauagguauuuuccgaaag

SEQ ID NO: 25201 - RNA, 23 nt, Artificial Sequence
  Synthetic
cucccauagguauuuuccgaaag

SEQ ID NO: 25202 - RNA, 24 nt, Artificial Sequence
  Synthetic
acucccauagguauuuuccgaaag

SEQ ID NO: 25203 - RNA, 18 nt, Artificial Sequence
  Synthetic
cguugaccggggcgaaag

SEQ ID NO: 25204 - RNA, 19 nt, Artificial Sequence
  Synthetic
ucguugaccggggcgaaag

SEQ ID NO: 25205 - RNA, 20 nt, Artificial Sequence
  Synthetic
gucguugaccggggcgaaag

SEQ ID NO: 25206 - RNA, 18 nt, Artificial Sequence
  Synthetic
aacgauagccaggacaag

SEQ ID NO: 25207 - RNA, 19 nt, Artificial Sequence
  Synthetic
caacgauagccaggacaag

SEQ ID NO: 25208 - RNA, 20 nt, Artificial Sequence
  Synthetic
ccaacgauagccaggacaag

SEQ ID NO: 25209 - RNA, 21 nt, Artificial Sequence
  Synthetic
uccaacgauagccaggacaag

SEQ ID NO: 25210 - RNA, 22 nt, Artificial Sequence
  Synthetic
auccaacgauagccaggacaag

SEQ ID NO: 25211 - RNA, 23 nt, Artificial Sequence
  Synthetic
cauccaacgauagccaggacaag

SEQ ID NO: 25212 - RNA, 24 nt, Artificial Sequence
  Synthetic
acauccaacgauagccaggacaag

SEQ ID NO: 25213 - RNA, 18 nt, Artificial Sequence
  Synthetic
cuaguaaacugagccaag

SEQ ID NO: 25214 - RNA, 19 nt, Artificial Sequence
  Synthetic
acuaguaaacugagccaag

SEQ ID NO: 25215 - RNA, 20 nt, Artificial Sequence
  Synthetic
cacuaguaaacugagccaag

SEQ ID NO: 25216 - RNA, 21 nt, Artificial Sequence
  Synthetic
gcacuaguaaacugagccaag

SEQ ID NO: 25217 - RNA, 22 nt, Artificial Sequence
  Synthetic
ugcacuaguaaacugagccaag

SEQ ID NO: 25218 - RNA, 23 nt, Artificial Sequence
  Synthetic
uugcacuaguaaacugagccaag

SEQ ID NO: 25219 - RNA, 24 nt, Artificial Sequence
  Synthetic
auugcacuaguaaacugagccaag

SEQ ID NO: 25220 - RNA, 18 nt, Artificial Sequence
  Synthetic
agaagaaccaacaagaag

SEQ ID NO: 25221 - RNA, 19 nt, Artificial Sequence
  Synthetic
cagaagaaccaacaagaag

SEQ ID NO: 25222 - RNA, 20 nt, Artificial Sequence
  Synthetic
ccagaagaaccaacaagaag

SEQ ID NO: 25223 - RNA, 21 nt, Artificial Sequence
  Synthetic
uccagaagaaccaacaagaag

SEQ ID NO: 25224 - RNA, 22 nt, Artificial Sequence
  Synthetic
guccagaagaaccaacaagaag

SEQ ID NO: 25225 - RNA, 23 nt, Artificial Sequence
  Synthetic
aguccagaagaaccaacaagaag

SEQ ID NO: 25226 - RNA, 24 nt, Artificial Sequence
  Synthetic
uaguccagaagaaccaacaagaag

SEQ ID NO: 25227 - RNA, 18 nt, Artificial Sequence
  Synthetic
cggacagacgggaagaag

SEQ ID NO: 25228 - RNA, 19 nt, Artificial Sequence
  Synthetic
ccggacagacgggaagaag

SEQ ID NO: 25229 - RNA, 20 nt, Artificial Sequence
  Synthetic
cccggacagacgggaagaag

SEQ ID NO: 25230 - RNA, 21 nt, Artificial Sequence
  Synthetic
ucccggacagacgggaagaag

SEQ ID NO: 25231 - RNA, 22 nt, Artificial Sequence
  Synthetic
gucccggacagacgggaagaag

SEQ ID NO: 25232 - RNA, 23 nt, Artificial Sequence
  Synthetic
ggucccggacagacgggaagaag

SEQ ID NO: 25233 - RNA, 24 nt, Artificial Sequence
  Synthetic
aggucccggacagacgggaagaag

SEQ ID NO: 25234 - RNA, 18 nt, Artificial Sequence
  Synthetic
acgggaagaagucagaag

SEQ ID NO: 25235 - RNA, 19 nt, Artificial Sequence
  Synthetic
gacgggaagaagucagaag

SEQ ID NO: 25236 - RNA, 20 nt, Artificial Sequence
  Synthetic
agacgggaagaagucagaag

SEQ ID NO: 25237 - RNA, 21 nt, Artificial Sequence
  Synthetic
cagacgggaagaagucagaag

SEQ ID NO: 25238 - RNA, 22 nt, Artificial Sequence
  Synthetic
acagacgggaagaagucagaag

SEQ ID NO: 25239 - RNA, 23 nt, Artificial Sequence
  Synthetic
gacagacgggaagaagucagaag

SEQ ID NO: 25240 - RNA, 24 nt, Artificial Sequence
  Synthetic
ggacagacgggaagaagucagaag

SEQ ID NO: 25241 - RNA, 18 nt, Artificial Sequence
  Synthetic
aauacuaacauugggaag

SEQ ID NO: 25242 - RNA, 19 nt, Artificial Sequence
  Synthetic
gaauacuaacauugggaag

SEQ ID NO: 25243 - RNA, 20 nt, Artificial Sequence
  Synthetic
ggaauacuaacauugggaag

SEQ ID NO: 25244 - RNA, 21 nt, Artificial Sequence
  Synthetic
aggaauacuaacauugggaag

SEQ ID NO: 25245 - RNA, 22 nt, Artificial Sequence
  Synthetic
aaggaauacuaacauugggaag

SEQ ID NO: 25246 - RNA, 23 nt, Artificial Sequence
  Synthetic
caaggaauacuaacauugggaag

SEQ ID NO: 25247 - RNA, 24 nt, Artificial Sequence
  Synthetic
ccaaggaauacuaacauugggaag

SEQ ID NO: 25248 - RNA, 18 nt, Artificial Sequence
  Synthetic
gguuguagauccuggaag

SEQ ID NO: 25249 - RNA, 19 nt, Artificial Sequence
  Synthetic
ugguuguagauccuggaag

SEQ ID NO: 25250 - RNA, 20 nt, Artificial Sequence
  Synthetic
gugguuguagauccuggaag

SEQ ID NO: 25251 - RNA, 21 nt, Artificial Sequence
  Synthetic
ggugguuguagauccuggaag

SEQ ID NO: 25252 - RNA, 22 nt, Artificial Sequence
  Synthetic
uggugguuguagauccuggaag

SEQ ID NO: 25253 - RNA, 23 nt, Artificial Sequence
  Synthetic
cuggugguuguagauccuggaag

SEQ ID NO: 25254 - RNA, 24 nt, Artificial Sequence
  Synthetic
gcuggugguuguagauccuggaag

SEQ ID NO: 25255 - RNA, 18 nt, Artificial Sequence
  Synthetic
accuccgauugguggaag

SEQ ID NO: 25256 - RNA, 19 nt, Artificial Sequence
  Synthetic
gaccuccgauugguggaag

SEQ ID NO: 25257 - RNA, 20 nt, Artificial Sequence
  Synthetic
ugaccuccgauugguggaag

SEQ ID NO: 25258 - RNA, 21 nt, Artificial Sequence
  Synthetic
cugaccuccgauugguggaag

SEQ ID NO: 25259 - RNA, 22 nt, Artificial Sequence
  Synthetic
ccugaccuccgauugguggaag

SEQ ID NO: 25260 - RNA, 23 nt, Artificial Sequence
  Synthetic
uccugaccuccgauugguggaag

SEQ ID NO: 25261 - RNA, 24 nt, Artificial Sequence
  Synthetic
uuccugaccuccgauugguggaag

SEQ ID NO: 25262 - RNA, 18 nt, Artificial Sequence
  Synthetic
cauagcagcaggaugaag

SEQ ID NO: 25263 - RNA, 19 nt, Artificial Sequence
  Synthetic
gcauagcagcaggaugaag

SEQ ID NO: 25264 - RNA, 20 nt, Artificial Sequence
  Synthetic
ggcauagcagcaggaugaag

SEQ ID NO: 25265 - RNA, 21 nt, Artificial Sequence
  Synthetic
aggcauagcagcaggaugaag

SEQ ID NO: 25266 - RNA, 22 nt, Artificial Sequence
  Synthetic
gaggcauagcagcaggaugaag

SEQ ID NO: 25267 - RNA, 23 nt, Artificial Sequence
  Synthetic
ugaggcauagcagcaggaugaag

SEQ ID NO: 25268 - RNA, 24 nt, Artificial Sequence
  Synthetic
augaggcauagcagcaggaugaag

SEQ ID NO: 25269 - RNA, 18 nt, Artificial Sequence
  Synthetic
gcuuggaggcuugaacag

SEQ ID NO: 25270 - RNA, 19 nt, Artificial Sequence
  Synthetic
agcuuggaggcuugaacag

SEQ ID NO: 25271 - RNA, 20 nt, Artificial Sequence
  Synthetic
cagcuuggaggcuugaacag

SEQ ID NO: 25272 - RNA, 21 nt, Artificial Sequence
  Synthetic
acagcuuggaggcuugaacag

SEQ ID NO: 25273 - RNA, 22 nt, Artificial Sequence
  Synthetic
cacagcuuggaggcuugaacag

SEQ ID NO: 25274 - RNA, 23 nt, Artificial Sequence
  Synthetic
gcacagcuuggaggcuugaacag

SEQ ID NO: 25275 - RNA, 24 nt, Artificial Sequence
  Synthetic
ggcacagcuuggaggcuugaacag

SEQ ID NO: 25276 - RNA, 18 nt, Artificial Sequence
  Synthetic
aagccacccaaggcacag

SEQ ID NO: 25277 - RNA, 19 nt, Artificial Sequence
  Synthetic
aaagccacccaaggcacag

SEQ ID NO: 25278 - RNA, 20 nt, Artificial Sequence
  Synthetic
caaagccacccaaggcacag

SEQ ID NO: 25279 - RNA, 21 nt, Artificial Sequence
  Synthetic
ccaaagccacccaaggcacag

SEQ ID NO: 25280 - RNA, 22 nt, Artificial Sequence
  Synthetic
cccaaagccacccaaggcacag

SEQ ID NO: 25281 - RNA, 23 nt, Artificial Sequence
  Synthetic
ccccaaagccacccaaggcacag

SEQ ID NO: 25282 - RNA, 24 nt, Artificial Sequence
  Synthetic
gccccaaagccacccaaggcacag

SEQ ID NO: 25283 - RNA, 18 nt, Artificial Sequence
  Synthetic
gcagaugagaaggcacag

SEQ ID NO: 25284 - RNA, 19 nt, Artificial Sequence
  Synthetic
ggcagaugagaaggcacag

SEQ ID NO: 25285 - RNA, 20 nt, Artificial Sequence
  Synthetic
cggcagaugagaaggcacag

SEQ ID NO: 25286 - RNA, 21 nt, Artificial Sequence
  Synthetic
ccggcagaugagaaggcacag

SEQ ID NO: 25287 - RNA, 22 nt, Artificial Sequence
  Synthetic
gccggcagaugagaaggcacag

SEQ ID NO: 25288 - RNA, 23 nt, Artificial Sequence
  Synthetic
ggccggcagaugagaaggcacag

SEQ ID NO: 25289 - RNA, 24 nt, Artificial Sequence
  Synthetic
gggccggcagaugagaaggcacag

SEQ ID NO: 25290 - RNA, 18 nt, Artificial Sequence
  Synthetic
uaacuaaaagccagacag

SEQ ID NO: 25291 - RNA, 19 nt, Artificial Sequence
  Synthetic
auaacuaaaagccagacag

SEQ ID NO: 25292 - RNA, 20 nt, Artificial Sequence
  Synthetic
uauaacuaaaagccagacag

SEQ ID NO: 25293 - RNA, 21 nt, Artificial Sequence
  Synthetic
auauaacuaaaagccagacag

SEQ ID NO: 25294 - RNA, 22 nt, Artificial Sequence
  Synthetic
cauauaacuaaaagccagacag

SEQ ID NO: 25295 - RNA, 23 nt, Artificial Sequence
  Synthetic
ccauauaacuaaaagccagacag

SEQ ID NO: 25296 - RNA, 24 nt, Artificial Sequence
  Synthetic
uccauauaacuaaaagccagacag

SEQ ID NO: 25297 - RNA, 18 nt, Artificial Sequence
  Synthetic
cgaguaggucccggacag

SEQ ID NO: 25298 - RNA, 19 nt, Artificial Sequence
  Synthetic
ucgaguaggucccggacag

SEQ ID NO: 25299 - RNA, 20 nt, Artificial Sequence
  Synthetic
gucgaguaggucccggacag

SEQ ID NO: 25300 - RNA, 21 nt, Artificial Sequence
  Synthetic
ugucgaguaggucccggacag

SEQ ID NO: 25301 - RNA, 22 nt, Artificial Sequence
  Synthetic
gugucgaguaggucccggacag

SEQ ID NO: 25302 - RNA, 23 nt, Artificial Sequence
  Synthetic
ggugucgaguaggucccggacag

SEQ ID NO: 25303 - RNA, 24 nt, Artificial Sequence
  Synthetic
cggugucgaguaggucccggacag

SEQ ID NO: 25304 - RNA, 18 nt, Artificial Sequence
  Synthetic
  misc_feature (5)..(5): n is a, c, g, or u
uucanguauuguuuacag

SEQ ID NO: 25305 - RNA, 19 nt, Artificial Sequence
  Synthetic
  misc_feature (6)..(6): n is a, c, g, or u
guucanguauuguuuacag

SEQ ID NO: 25306 - RNA, 20 nt, Artificial Sequence
  Synthetic
  misc_feature (7)..(7): n is a, c, g, or u
gguucanguauuguuuacag

SEQ ID NO: 25307 - RNA, 21 nt, Artificial Sequence
  Synthetic
  misc_feature (8)..(8): n is a, c, g, or u
agguucanguauuguuuacag

SEQ ID NO: 25308 - RNA, 22 nt, Artificial Sequence
  Synthetic
  misc_feature (9)..(9): n is a, c, g, or u
aagguucanguauuguuuacag

SEQ ID NO: 25309 - RNA, 23 nt, Artificial Sequence
  Synthetic
  misc_feature (10)..(10): n is a, c, g, or u
aaagguucanguauuguuuacag

SEQ ID NO: 25310 - RNA, 24 nt, Artificial Sequence
  Synthetic
  misc_feature (11)..(11): n is a, c, g, or u
uaaagguucanguauuguuuacag

SEQ ID NO: 25311 - RNA, 18 nt, Artificial Sequence
  Synthetic
aaagaaggaguuaaccag

SEQ ID NO: 25312 - RNA, 19 nt, Artificial Sequence
  Synthetic
aaaagaaggaguuaaccag

SEQ ID NO: 25313 - RNA, 20 nt, Artificial Sequence
  Synthetic
gaaaagaaggaguuaaccag

SEQ ID NO: 25314 - RNA, 21 nt, Artificial Sequence
  Synthetic
ggaaaagaaggaguuaaccag

SEQ ID NO: 25315 - RNA, 22 nt, Artificial Sequence
  Synthetic
aggaaaagaaggaguuaaccag

SEQ ID NO: 25316 - RNA, 23 nt, Artificial Sequence
  Synthetic
caggaaaagaaggaguuaaccag

SEQ ID NO: 25317 - RNA, 24 nt, Artificial Sequence
  Synthetic
ucaggaaaagaaggaguuaaccag

SEQ ID NO: 25318 - RNA, 18 nt, Artificial Sequence
  Synthetic
cugaacuggagccaccag

SEQ ID NO: 25319 - RNA, 19 nt, Artificial Sequence
  Synthetic
ucugaacuggagccaccag

SEQ ID NO: 25320 - RNA, 20 nt, Artificial Sequence
  Synthetic
uucugaacuggagccaccag

SEQ ID NO: 25321 - RNA, 21 nt, Artificial Sequence
  Synthetic
uuucugaacuggagccaccag

SEQ ID NO: 25322 - RNA, 22 nt, Artificial Sequence
  Synthetic
guuucugaacuggagccaccag

SEQ ID NO: 25323 - RNA, 23 nt, Artificial Sequence
  Synthetic
uguuucugaacuggagccaccag

SEQ ID NO: 25324 - RNA, 24 nt, Artificial Sequence
  Synthetic
guguuucugaacuggagccaccag

SEQ ID NO: 25325 - RNA, 18 nt, Artificial Sequence
  Synthetic
gucaucaacucaccccag

SEQ ID NO: 25326 - RNA, 19 nt, Artificial Sequence
  Synthetic
  misc_feature (1)..(1): n is a, c, g, or u
ngucaucaacucaccccag

SEQ ID NO: 25327 - RNA, 20 nt, Artificial Sequence
  Synthetic
  misc_feature (2)..(2): n is a, c, g, or u
angucaucaacucaccccag

SEQ ID NO: 25328 - RNA, 21 nt, Artificial Sequence
  Synthetic
  misc_feature (3)..(3): n is a, c, g, or u
aangucaucaacucaccccag

SEQ ID NO: 25329 - RNA, 22 nt, Artificial Sequence
  Synthetic
  misc_feature (4)..(4): n is a, c, g, or u
caangucaucaacucaccccag

SEQ ID NO: 25330 - RNA, 23 nt, Artificial Sequence
  Synthetic
  misc_feature (5)..(5): n is a, c, g, or u
ccaangucaucaacucaccccag

SEQ ID NO: 25331 - RNA, 24 nt, Artificial Sequence
  Synthetic
  misc_feature (6)..(6): n is a, c, g, or u
gccaangucaucaacucaccccag

SEQ ID NO: 25332 - RNA, 18 nt, Artificial Sequence
  Synthetic
ucgccaagccccagccag

SEQ ID NO: 25333 - RNA, 19 nt, Artificial Sequence
  Synthetic
aucgccaagccccagccag

SEQ ID NO: 25334 - RNA, 20 nt, Artificial Sequence
  Synthetic
aaucgccaagccccagccag

SEQ ID NO: 25335 - RNA, 21 nt, Artificial Sequence
  Synthetic
caaucgccaagccccagccag

SEQ ID NO: 25336 - RNA, 22 nt, Artificial Sequence
  Synthetic
ccaaucgccaagccccagccag

SEQ ID NO: 25337 - RNA, 23 nt, Artificial Sequence
  Synthetic
gccaaucgccaagccccagccag

SEQ ID NO: 25338 - RNA, 24 nt, Artificial Sequence
  Synthetic
ggccaaucgccaagccccagccag

SEQ ID NO: 25339 - RNA, 18 nt, Artificial Sequence
  Synthetic
acauccaacgauagccag

SEQ ID NO: 25340 - RNA, 19 nt, Artificial Sequence
  Synthetic
cacauccaacgauagccag

SEQ ID NO: 25341 - RNA, 20 nt, Artificial Sequence
  Synthetic
acacauccaacgauagccag

SEQ ID NO: 25342 - RNA, 21 nt, Artificial Sequence
  Synthetic
gacacauccaacgauagccag

SEQ ID NO: 25343 - RNA, 22 nt, Artificial Sequence
  Synthetic
agacacauccaacgauagccag

SEQ ID NO: 25344 - RNA, 23 nt, Artificial Sequence
  Synthetic
cagacacauccaacgauagccag

SEQ ID NO: 25345 - RNA, 24 nt, Artificial Sequence
  Synthetic
gcagacacauccaacgauagccag

SEQ ID NO: 25346 - RNA, 18 nt, Artificial Sequence
  Synthetic
cauaccuugauaguccag

SEQ ID NO: 25347 - RNA, 19 nt, Artificial Sequence
  Synthetic
acauaccuugauaguccag

SEQ ID NO: 25348 - RNA, 20 nt, Artificial Sequence
  Synthetic
aacauaccuugauaguccag

SEQ ID NO: 25349 - RNA, 21 nt, Artificial Sequence
  Synthetic
caacauaccuugauaguccag

SEQ ID NO: 25350 - RNA, 22 nt, Artificial Sequence
  Synthetic
gcaacauaccuugauaguccag

SEQ ID NO: 25351 - RNA, 23 nt, Artificial Sequence
  Synthetic
ggcaacauaccuugauaguccag

SEQ ID NO: 25352 - RNA, 24 nt, Artificial Sequence
  Synthetic
gggcaacauaccuugauaguccag

SEQ ID NO: 25353 - RNA, 18 nt, Artificial Sequence
  Synthetic
  misc_feature (11)..(11): n is a, c, g, or u
uugguggucunuaagcag

SEQ ID NO: 25354 - RNA, 19 nt, Artificial Sequence
  Synthetic
  misc_feature (12)..(12): n is a, c, g, or u
uuugguggucunuaagcag

SEQ ID NO: 25355 - RNA, 20 nt, Artificial Sequence
  Synthetic
  misc_feature (13)..(13): n is a, c, g, or u
auuugguggucunuaagcag

SEQ ID NO: 25356 - RNA, 21 nt, Artificial Sequence
  Synthetic
  misc_feature (14)..(14): n is a, c, g, or u
cauuugguggucunuaagcag

SEQ ID NO: 25357 - RNA, 22 nt, Artificial Sequence
  Synthetic
  misc_feature (15)..(15): n is a, c, g, or u
gcauuugguggucunuaagcag

SEQ ID NO: 25358 - RNA, 23 nt, Artificial Sequence
  Synthetic
  misc_feature (16)..(16): n is a, c, g, or u
ggcauuugguggucunuaagcag

SEQ ID NO: 25359 - RNA, 24 nt, Artificial Sequence
  Synthetic
  misc_feature (17)..(17): n is a, c, g, or u
gggcauuugguggucunuaagcag

SEQ ID NO: 25360 - RNA, 18 nt, Artificial Sequence
  Synthetic
gaagguuugguacagcag

SEQ ID NO: 25361 - RNA, 19 nt, Artificial Sequence
  Synthetic
cgaagguuugguacagcag

SEQ ID NO: 25362 - RNA, 20 nt, Artificial Sequence
  Synthetic
ccgaagguuugguacagcag

SEQ ID NO: 25363 - RNA, 21 nt, Artificial Sequence
  Synthetic
uccgaagguuugguacagcag

SEQ ID NO: 25364 - RNA, 22 nt, Artificial Sequence
  Synthetic
guccgaagguuugguacagcag

SEQ ID NO: 25365 - RNA, 23 nt, Artificial Sequence
  Synthetic
cguccgaagguuugguacagcag

SEQ ID NO: 25366 - RNA, 24 nt, Artificial Sequence
  Synthetic
ccguccgaagguuugguacagcag

SEQ ID NO: 25367 - RNA, 18 nt, Artificial Sequence
  Synthetic
gguuugguacagcagcag

SEQ ID NO: 25368 - RNA, 19 nt, Artificial Sequence
  Synthetic
agguuugguacagcagcag

SEQ ID NO: 25369 - RNA, 20 nt, Artificial Sequence
  Synthetic
aagguuugguacagcagcag

SEQ ID NO: 25370 - RNA, 18 nt, Artificial Sequence
  Synthetic
gaugaggcauagcagcag

SEQ ID NO: 25371 - RNA, 19 nt, Artificial Sequence
  Synthetic
agaugaggcauagcagcag

SEQ ID NO: 25372 - RNA, 20 nt, Artificial Sequence
  Synthetic
aagaugaggcauagcagcag

SEQ ID NO: 25373 - RNA, 21 nt, Artificial Sequence
  Synthetic
gaagaugaggcauagcagcag

SEQ ID NO: 25374 - RNA, 22 nt, Artificial Sequence
  Synthetic
agaagaugaggcauagcagcag

SEQ ID NO: 25375 - RNA, 23 nt, Artificial Sequence
  Synthetic
aagaagaugaggcauagcagcag

SEQ ID NO: 25376 - RNA, 24 nt, Artificial Sequence
  Synthetic
caagaagaugaggcauagcagcag

SEQ ID NO: 25377 - RNA, 18 nt, Artificial Sequence
  Synthetic
acaagggcaugagagcag

SEQ ID NO: 25378 - RNA, 19 nt, Artificial Sequence
  Synthetic
uacaagggcaugagagcag

SEQ ID NO: 25379 - RNA, 20 nt, Artificial Sequence
  Synthetic
auacaagggcaugagagcag

SEQ ID NO: 25380 - RNA, 21 nt, Artificial Sequence
  Synthetic
cauacaagggcaugagagcag

SEQ ID NO: 25381 - RNA, 22 nt, Artificial Sequence
  Synthetic
gcauacaagggcaugagagcag

SEQ ID NO: 25382 - RNA, 23 nt, Artificial Sequence
  Synthetic
ggcauacaagggcaugagagcag

SEQ ID NO: 25383 - RNA, 24 nt, Artificial Sequence
  Synthetic
aggcauacaagggcaugagagcag

SEQ ID NO: 25384 - RNA, 18 nt, Artificial Sequence
  Synthetic
  misc_feature (2)..(2): n is a, c, g, or u
cngcuaggaguuccgcag

SEQ ID NO: 25385 - RNA, 19 nt, Artificial Sequence
  Synthetic
  misc_feature (3)..(3): n is a, c, g, or u
gcngcuaggaguuccgcag

SEQ ID NO: 25386 - RNA, 20 nt, Artificial Sequence
  Synthetic
  misc_feature (4)..(4): n is a, c, g, or u
agcngcuaggaguuccgcag

SEQ ID NO: 25387 - RNA, 21 nt, Artificial Sequence
  Synthetic
  misc_feature (5)..(5): n is a, c, g, or u
aagcngcuaggaguuccgcag

SEQ ID NO: 25388 - RNA, 22 nt, Artificial Sequence
  Synthetic
  misc_feature (6)..(6): n is a, c, g, or u
caagcngcuaggaguuccgcag

SEQ ID NO: 25389 - RNA, 23 nt, Artificial Sequence
  Synthetic
  misc_feature (7)..(7): n is a, c, g, or u
acaagcngcuaggaguuccgcag

SEQ ID NO: 25390 - RNA, 24 nt, Artificial Sequence
  Synthetic
  misc_feature (8)..(8): n is a, c, g, or u
aacaagcngcuaggaguuccgcag

SEQ ID NO: 25391 - RNA, 18 nt, Artificial Sequence
  Synthetic
gugcacacgggccggcag

SEQ ID NO: 25392 - RNA, 19 nt, Artificial Sequence
  Synthetic
agugcacacgggccggcag

SEQ ID NO: 25393 - RNA, 20 nt, Artificial Sequence
  Synthetic
aagugcacacgggccggcag

SEQ ID NO: 25394 - RNA, 21 nt, Artificial Sequence
  Synthetic
gaagugcacacgggccggcag

SEQ ID NO: 25395 - RNA, 22 nt, Artificial Sequence
  Synthetic
cgaagugcacacgggccggcag

SEQ ID NO: 25396 - RNA, 23 nt, Artificial Sequence
  Synthetic
gcgaagugcacacgggccggcag

SEQ ID NO: 25397 - RNA, 24 nt, Artificial Sequence
  Synthetic
agcgaagugcacacgggccggcag

SEQ ID NO: 25398 - RNA, 18 nt, Artificial Sequence
  Synthetic
cgcaguauggaucggcag

SEQ ID NO: 25399 - RNA, 19 nt, Artificial Sequence
  Synthetic
ccgcaguauggaucggcag

SEQ ID NO: 25400 - RNA, 20 nt, Artificial Sequence
  Synthetic
uccgcaguauggaucggcag

SEQ ID NO: 25401 - RNA, 21 nt, Artificial Sequence
  Synthetic
uuccgcaguauggaucggcag

SEQ ID NO: 25402 - RNA, 22 nt, Artificial Sequence
  Synthetic
guuccgcaguauggaucggcag

SEQ ID NO: 25403 - RNA, 23 nt, Artificial Sequence
  Synthetic
aguuccgcaguauggaucggcag

SEQ ID NO: 25404 - RNA, 24 nt, Artificial Sequence
  Synthetic
gaguuccgcaguauggaucggcag

SEQ ID NO: 25405 - RNA, 18 nt, Artificial Sequence
  Synthetic
gaugcaagugaaugucag

SEQ ID NO: 25406 - RNA, 19 nt, Artificial Sequence
  Synthetic
ugaugcaagugaaugucag

SEQ ID NO: 25407 - RNA, 20 nt, Artificial Sequence
  Synthetic
uugaugcaagugaaugucag

SEQ ID NO: 25408 - RNA, 21 nt, Artificial Sequence
  Synthetic
cuugaugcaagugaaugucag

SEQ ID NO: 25409 - RNA, 22 nt, Artificial Sequence
  Synthetic
ucuugaugcaagugaaugucag

SEQ ID NO: 25410 - RNA, 23 nt, Artificial Sequence
  Synthetic
aucuugaugcaagugaaugucag

SEQ ID NO: 25411 - RNA, 24 nt, Artificial Sequence
  Synthetic
  misc_feature (1)..(1): n is a, c, g, or u
naucuugaugcaagugaaugucag

SEQ ID NO: 25412 - RNA, 18 nt, Artificial Sequence
  Synthetic
  misc_feature (3)..(3): n is a, c, g, or u
canguauuguuuacagag

SEQ ID NO: 25413 - RNA, 19 nt, Artificial Sequence
  Synthetic
  misc_feature (4)..(4): n is a, c, g, or u
ucanguauuguuuacagag

SEQ ID NO: 25414 - RNA, 20 nt, Artificial Sequence
  Synthetic
  misc_feature (5)..(5): n is a, c, g, or u
uucanguauuguuuacagag

SEQ ID NO: 25415 - RNA, 21 nt, Artificial Sequence
  Synthetic
  misc_feature (6)..(6): n is a, c, g, or u
guucanguauuguuuacagag

SEQ ID NO: 25416 - RNA, 22 nt, Artificial Sequence
  Synthetic
  misc_feature (7)..(7): n is a, c, g, or u
gguucanguauuguuuacagag

SEQ ID NO: 25417 - RNA, 23 nt, Artificial Sequence
  Synthetic
  misc_feature (8)..(8): n is a, c, g, or u
agguucanguauuguuuacagag

SEQ ID NO: 25418 - RNA, 24 nt, Artificial Sequence
  Synthetic
  misc_feature (9)..(9): n is a, c, g, or u
aagguucanguauuguuuacagag

SEQ ID NO: 25419 - RNA, 18 nt, Artificial Sequence
  Synthetic
aaagaugauuaggcagag

SEQ ID NO: 25420 - RNA, 19 nt, Artificial Sequence
  Synthetic
aaaagaugauuaggcagag

SEQ ID NO: 25421 - RNA, 20 nt, Artificial Sequence
  Synthetic
caaaagaugauuaggcagag

SEQ ID NO: 25422 - RNA, 21 nt, Artificial Sequence
  Synthetic
acaaaagaugauuaggcagag

SEQ ID NO: 25423 - RNA, 22 nt, Artificial Sequence
  Synthetic
aacaaaagaugauuaggcagag

SEQ ID NO: 25424 - RNA, 23 nt, Artificial Sequence
  Synthetic
gaacaaaagaugauuaggcagag

SEQ ID NO: 25425 - RNA, 24 nt, Artificial Sequence
  Synthetic
ugaacaaaagaugauuaggcagag

SEQ ID NO: 25426 - RNA, 18 nt, Artificial Sequence
  Synthetic
uccaugcgacgugcagag

SEQ ID NO: 25427 - RNA, 19 nt, Artificial Sequence
  Synthetic
cuccaugcgacgugcagag

SEQ ID NO: 25428 - RNA, 20 nt, Artificial Sequence
  Synthetic
ucuccaugcgacgugcagag

SEQ ID NO: 25429 - RNA, 21 nt, Artificial Sequence
  Synthetic
gucuccaugcgacgugcagag

SEQ ID NO: 25430 - RNA, 22 nt, Artificial Sequence
  Synthetic
ggucuccaugcgacgugcagag

SEQ ID NO: 25431 - RNA, 23 nt, Artificial Sequence
  Synthetic
uggucuccaugcgacgugcagag

SEQ ID NO: 25432 - RNA, 24 nt, Artificial Sequence
  Synthetic
guggucuccaugcgacgugcagag

SEQ ID NO: 25433 - RNA, 18 nt, Artificial Sequence
  Synthetic
ucccuuagagguggagag

SEQ ID NO: 25434 - RNA, 19 nt, Artificial Sequence
  Synthetic
gucccuuagagguggagag

SEQ ID NO: 25435 - RNA, 20 nt, Artificial Sequence
  Synthetic
ugucccuuagagguggagag

SEQ ID NO: 25436 - RNA, 21 nt, Artificial Sequence
  Synthetic
gugucccuuagagguggagag

SEQ ID NO: 25437 - RNA, 22 nt, Artificial Sequence
  Synthetic
ugugucccuuagagguggagag

SEQ ID NO: 25438 - RNA, 23 nt, Artificial Sequence
  Synthetic
gugugucccuuagagguggagag

SEQ ID NO: 25439 - RNA, 24 nt, Artificial Sequence
  Synthetic
ugugugucccuuagagguggagag

SEQ ID NO: 25440 - RNA, 18 nt, Artificial Sequence
  Synthetic
gaugugugucccuuagag

SEQ ID NO: 25441 - RNA, 19 nt, Artificial Sequence
  Synthetic
ggaugugugucccuuagag

SEQ ID NO: 25442 - RNA, 20 nt, Artificial Sequence
  Synthetic
uggaugugugucccuuagag

SEQ ID NO: 25443 - RNA, 21 nt, Artificial Sequence
  Synthetic
guggaugugugucccuuagag

SEQ ID NO: 25444 - RNA, 22 nt, Artificial Sequence
  Synthetic
uguggaugugugucccuuagag

SEQ ID NO: 25445 - RNA, 23 nt, Artificial Sequence
  Synthetic
cuguggaugugugucccuuagag

SEQ ID NO: 25446 - RNA, 24 nt, Artificial Sequence
  Synthetic
ccuguggaugugugucccuuagag

SEQ ID NO: 25447 - RNA, 18 nt, Artificial Sequence
  Synthetic
caccgccuguaacacgag

SEQ ID NO: 25448 - RNA, 19 nt, Artificial Sequence
  Synthetic
acaccgccuguaacacgag

SEQ ID NO: 25449 - RNA, 20 nt, Artificial Sequence
  Synthetic
cacaccgccuguaacacgag

SEQ ID NO: 25450 - RNA, 21 nt, Artificial Sequence
  Synthetic
acacaccgccuguaacacgag

SEQ ID NO: 25451 - RNA, 22 nt, Artificial Sequence
  Synthetic
aacacaccgccuguaacacgag

SEQ ID NO: 25452 - RNA, 23 nt, Artificial Sequence
  Synthetic
aaacacaccgccuguaacacgag

SEQ ID NO: 25453 - RNA, 24 nt, Artificial Sequence
  Synthetic
gaaacacaccgccuguaacacgag

SEQ ID NO: 25454 - RNA, 18 nt, Artificial Sequence
  Synthetic
agagaaguccaccacgag

SEQ ID NO: 25455 - RNA, 19 nt, Artificial Sequence
  Synthetic
gagagaaguccaccacgag

SEQ ID NO: 25456 - RNA, 20 nt, Artificial Sequence
  Synthetic
ugagagaaguccaccacgag

SEQ ID NO: 25457 - RNA, 21 nt, Artificial Sequence
  Synthetic
uugagagaaguccaccacgag

SEQ ID NO: 25458 - RNA, 22 nt, Artificial Sequence
  Synthetic
auugagagaaguccaccacgag

SEQ ID NO: 25459 - RNA, 23 nt, Artificial Sequence
  Synthetic
aauugagagaaguccaccacgag

SEQ ID NO: 25460 - RNA, 24 nt, Artificial Sequence
  Synthetic
aaauugagagaaguccaccacgag

SEQ ID NO: 25461 - RNA, 18 nt, Artificial Sequence
  Synthetic
aggagguguacuuccgag

SEQ ID NO: 25462 - RNA, 19 nt, Artificial Sequence
  Synthetic
aaggagguguacuuccgag

SEQ ID NO: 25463 - RNA, 20 nt, Artificial Sequence
  Synthetic
gaaggagguguacuuccgag

SEQ ID NO: 25464 - RNA, 21 nt, Artificial Sequence
  Synthetic
ggaaggagguguacuuccgag

SEQ ID NO: 25465 - RNA, 22 nt, Artificial Sequence
  Synthetic
gggaaggagguguacuuccgag

SEQ ID NO: 25466 - RNA, 23 nt, Artificial Sequence
  Synthetic
ugggaaggagguguacuuccgag

SEQ ID NO: 25467 - RNA, 24 nt, Artificial Sequence
  Synthetic
augggaaggagguguacuuccgag

SEQ ID NO: 25468 - RNA, 18 nt, Artificial Sequence
  Synthetic
  misc_feature (10)..(10): n is a, c, g, or u
cuccagaccngcugcgag

SEQ ID NO: 25469 - RNA, 19 nt, Artificial Sequence
  Synthetic
  misc_feature (11)..(11): n is a, c, g, or u
gcuccagaccngcugcgag

SEQ ID NO: 25470 - RNA, 20 nt, Artificial Sequence
  Synthetic
  misc_feature (12)..(12): n is a, c, g, or u
cgcuccagaccngcugcgag

SEQ ID NO: 25471 - RNA, 21 nt, Artificial Sequence
  Synthetic
  misc_feature (13)..(13): n is a, c, g, or u
ccgcuccagaccngcugcgag

SEQ ID NO: 25472 - RNA, 22 nt, Artificial Sequence
  Synthetic
  misc_feature (14)..(14): n is a, c, g, or u
uccgcuccagaccngcugcgag

SEQ ID NO: 25473 - RNA, 23 nt, Artificial Sequence
  Synthetic
  misc_feature (15)..(15): n is a, c, g, or u
guccgcuccagaccngcugcgag

SEQ ID NO: 25474 - RNA, 24 nt, Artificial Sequence
  Synthetic
  misc_feature (1)..(1): n is a, c, g, or u
  misc_feature (16)..(16): n is a, c, g, or u
nguccgcuccagaccngcugcgag

SEQ ID NO: 25475 - RNA, 18 nt, Artificial Sequence
  Synthetic
gagaucuucgucugcgag

SEQ ID NO: 25476 - RNA, 19 nt, Artificial Sequence
  Synthetic
ugagaucuucgucugcgag

SEQ ID NO: 25477 - RNA, 20 nt, Artificial Sequence
  Synthetic
uugagaucuucgucugcgag

SEQ ID NO: 25478 - RNA, 18 nt, Artificial Sequence
  Synthetic
uugguacagcagcaggag

SEQ ID NO: 25479 - RNA, 19 nt, Artificial Sequence
  Synthetic
uuugguacagcagcaggag

SEQ ID NO: 25480 - RNA, 20 nt, Artificial Sequence
  Synthetic
guuugguacagcagcaggag

SEQ ID NO: 25481 - RNA, 21 nt, Artificial Sequence
  Synthetic
gguuugguacagcagcaggag

SEQ ID NO: 25482 - RNA, 22 nt, Artificial Sequence
  Synthetic
agguuugguacagcagcaggag

SEQ ID NO: 25483 - RNA, 23 nt, Artificial Sequence
  Synthetic
aagguuugguacagcagcaggag

SEQ ID NO: 25484 - RNA, 24 nt, Artificial Sequence
  Synthetic
gaagguuugguacagcagcaggag

SEQ ID NO: 25485 - RNA, 18 nt, Artificial Sequence
  Synthetic
  misc_feature (8)..(8): n is a, c, g, or u
acagguanaguagaggag

SEQ ID NO: 25486 - RNA, 19 nt, Artificial Sequence
  Synthetic
  misc_feature (9)..(9): n is a, c, g, or u
aacagguanaguagaggag

SEQ ID NO: 25487 - RNA, 20 nt, Artificial Sequence
  Synthetic
  misc_feature (10)..(10): n is a, c, g, or u
aaacagguanaguagaggag

SEQ ID NO: 25488 - RNA, 21 nt, Artificial Sequence
  Synthetic
  misc_feature (11)..(11): n is a, c, g, or u
aaaacagguanaguagaggag

SEQ ID NO: 25489 - RNA, 22 nt, Artificial Sequence
  Synthetic
  misc_feature (12)..(12): n is a, c, g, or u
gaaaacagguanaguagaggag

SEQ ID NO: 25490 - RNA, 23 nt, Artificial Sequence
  Synthetic
  misc_feature (13)..(13): n is a, c, g, or u
ugaaaacagguanaguagaggag

SEQ ID NO: 25491 - RNA, 24 nt, Artificial Sequence
  Synthetic
  misc_feature (14)..(14): n is a, c, g, or u
uugaaaacagguanaguagaggag

SEQ ID NO: 25492 - RNA, 18 nt, Artificial Sequence
  Synthetic
aacauugggaagcuggag

SEQ ID NO: 25493 - RNA, 19 nt, Artificial Sequence
  Synthetic
uaacauugggaagcuggag

SEQ ID NO: 25494 - RNA, 20 nt, Artificial Sequence
  Synthetic
cuaacauugggaagcuggag

SEQ ID NO: 25495 - RNA, 21 nt, Artificial Sequence
  Synthetic
acuaacauugggaagcuggag

SEQ ID NO: 25496 - RNA, 22 nt, Artificial Sequence
  Synthetic
uacuaacauugggaagcuggag

SEQ ID NO: 25497 - RNA, 23 nt, Artificial Sequence
  Synthetic
auacuaacauugggaagcuggag

SEQ ID NO: 25498 - RNA, 24 nt, Artificial Sequence
  Synthetic
aauacuaacauugggaagcuggag

SEQ ID NO: 25499 - RNA, 18 nt, Artificial Sequence
  Synthetic
guugguaagugauuggag

SEQ ID NO: 25500 - RNA, 19 nt, Artificial Sequence
  Synthetic
gguugguaagugauuggag

SEQ ID NO: 25501 - RNA, 20 nt, Artificial Sequence
  Synthetic
agguugguaagugauuggag

SEQ ID NO: 25502 - RNA, 21 nt, Artificial Sequence
  Synthetic
gagguugguaagugauuggag

SEQ ID NO: 25503 - RNA, 22 nt, Artificial Sequence
  Synthetic
ggagguugguaagugauuggag

SEQ ID NO: 25504 - RNA, 23 nt, Artificial Sequence
  Synthetic
aggagguugguaagugauuggag

SEQ ID NO: 25505 - RNA, 24 nt, Artificial Sequence
  Synthetic
caggagguugguaagugauuggag

SEQ ID NO: 25506 - RNA, 18 nt, Artificial Sequence
  Synthetic
agccaggacaaguuggag

SEQ ID NO: 25507 - RNA, 19 nt, Artificial Sequence
  Synthetic
uagccaggacaaguuggag

SEQ ID NO: 25508 - RNA, 20 nt, Artificial Sequence
  Synthetic
auagccaggacaaguuggag

SEQ ID NO: 25509 - RNA, 21 nt, Artificial Sequence
  Synthetic
gauagccaggacaaguuggag

SEQ ID NO: 25510 - RNA, 22 nt, Artificial Sequence
  Synthetic
cgauagccaggacaaguuggag

SEQ ID NO: 25511 - RNA, 23 nt, Artificial Sequence
  Synthetic
acgauagccaggacaaguuggag

SEQ ID NO: 25512 - RNA, 24 nt, Artificial Sequence
  Synthetic
aacgauagccaggacaaguuggag

SEQ ID NO: 25513 - RNA, 18 nt, Artificial Sequence
  Synthetic
ucagaaggcaaaaaugag

SEQ ID NO: 25514 - RNA, 19 nt, Artificial Sequence
  Synthetic
gucagaaggcaaaaaugag

SEQ ID NO: 25515 - RNA, 20 nt, Artificial Sequence
  Synthetic
agucagaaggcaaaaaugag

SEQ ID NO: 25516 - RNA, 21 nt, Artificial Sequence
  Synthetic
aagucagaaggcaaaaaugag

SEQ ID NO: 25517 - RNA, 22 nt, Artificial Sequence
  Synthetic
gaagucagaaggcaaaaaugag

SEQ ID NO: 25518 - RNA, 23 nt, Artificial Sequence
  Synthetic
agaagucagaaggcaaaaaugag

SEQ ID NO: 25519 - RNA, 24 nt, Artificial Sequence
  Synthetic
aagaagucagaaggcaaaaaugag

SEQ ID NO: 25520 - RNA, 18 nt, Artificial Sequence
  Synthetic
ggcauacaagggcaugag

SEQ ID NO: 25521 - RNA, 19 nt, Artificial Sequence
  Synthetic
aggcauacaagggcaugag

SEQ ID NO: 25522 - RNA, 20 nt, Artificial Sequence
  Synthetic
caggcauacaagggcaugag

SEQ ID NO: 25523 - RNA, 21 nt, Artificial Sequence
  Synthetic
acaggcauacaagggcaugag

SEQ ID NO: 25524 - RNA, 22 nt, Artificial Sequence
  Synthetic
uacaggcauacaagggcaugag

SEQ ID NO: 25525 - RNA, 23 nt, Artificial Sequence
  Synthetic
auacaggcauacaagggcaugag

SEQ ID NO: 25526 - RNA, 24 nt, Artificial Sequence
  Synthetic
aauacaggcauacaagggcaugag

SEQ ID NO: 25527 - RNA, 18 nt, Artificial Sequence
  Synthetic
aguuucccaccuuaugag

SEQ ID NO: 25528 - RNA, 19 nt, Artificial Sequence
  Synthetic
aaguuucccaccuuaugag

SEQ ID NO: 25529 - RNA, 20 nt, Artificial Sequence
  Synthetic
aaaguuucccaccuuaugag

SEQ ID NO: 25530 - RNA, 18 nt, Artificial Sequence
  Synthetic
uugcacuaguaaacugag

SEQ ID NO: 25531 - RNA, 19 nt, Artificial Sequence
  Synthetic
auugcacuaguaaacugag

SEQ ID NO: 25532 - RNA, 20 nt, Artificial Sequence
  Synthetic
aauugcacuaguaaacugag

SEQ ID NO: 25533 - RNA, 21 nt, Artificial Sequence
  Synthetic
aaauugcacuaguaaacugag

SEQ ID NO: 25534 - RNA, 22 nt, Artificial Sequence
  Synthetic
caaauugcacuaguaaacugag

SEQ ID NO: 25535 - RNA, 23 nt, Artificial Sequence
  Synthetic
acaaauugcacuaguaaacugag

SEQ ID NO: 25536 - RNA, 24 nt, Artificial Sequence
  Synthetic
aacaaauugcacuaguaaacugag

SEQ ID NO: 25537 - RNA, 18 nt, Artificial Sequence
  Synthetic
gaagauugaugaugugag

SEQ ID NO: 25538 - RNA, 19 nt, Artificial Sequence
  Synthetic
agaagauugaugaugugag

SEQ ID NO: 25539 - RNA, 20 nt, Artificial Sequence
  Synthetic
gagaagauugaugaugugag

SEQ ID NO: 25540 - RNA, 21 nt, Artificial Sequence
  Synthetic
cgagaagauugaugaugugag

SEQ ID NO: 25541 - RNA, 22 nt, Artificial Sequence
  Synthetic
ucgagaagauugaugaugugag

SEQ ID NO: 25542 - RNA, 23 nt, Artificial Sequence
  Synthetic
uucgagaagauugaugaugugag

SEQ ID NO: 25543 - RNA, 24 nt, Artificial Sequence
  Synthetic
cuucgagaagauugaugaugugag

SEQ ID NO: 25544 - RNA, 18 nt, Artificial Sequence
  Synthetic
caggauaaccacauugag

SEQ ID NO: 25545 - RNA, 19 nt, Artificial Sequence
  Synthetic
gcaggauaaccacauugag

SEQ ID NO: 25546 - RNA, 20 nt, Artificial Sequence
  Synthetic
agcaggauaaccacauugag

SEQ ID NO: 25547 - RNA, 21 nt, Artificial Sequence
  Synthetic
gagcaggauaaccacauugag

SEQ ID NO: 25548 - RNA, 22 nt, Artificial Sequence
  Synthetic
agagcaggauaaccacauugag

SEQ ID NO: 25549 - RNA, 23 nt, Artificial Sequence
  Synthetic
gagagcaggauaaccacauugag

SEQ ID NO: 25550 - RNA, 24 nt, Artificial Sequence
  Synthetic
ugagagcaggauaaccacauugag

SEQ ID NO: 25551 - RNA, 18 nt, Artificial Sequence
  Synthetic
acauagagguuccuugag

SEQ ID NO: 25552 - RNA, 19 nt, Artificial Sequence
  Synthetic
aacauagagguuccuugag

SEQ ID NO: 25553 - RNA, 20 nt, Artificial Sequence
  Synthetic
aaacauagagguuccuugag

SEQ ID NO: 25554 - RNA, 21 nt, Artificial Sequence
  Synthetic
gaaacauagagguuccuugag

SEQ ID NO: 25555 - RNA, 22 nt, Artificial Sequence
  Synthetic
ggaaacauagagguuccuugag

SEQ ID NO: 25556 - RNA, 23 nt, Artificial Sequence
  Synthetic
gggaaacauagagguuccuugag

SEQ ID NO: 25557 - RNA, 24 nt, Artificial Sequence
  Synthetic
agggaaacauagagguuccuugag

SEQ ID NO: 25558 - RNA, 18 nt, Artificial Sequence
  Synthetic
  misc_feature (16)..(16): n is a, c, g, or u
gauugaaaacagguanag

SEQ ID NO: 25559 - RNA, 19 nt, Artificial Sequence
  Synthetic
  misc_feature (17)..(17): n is a, c, g, or u
ggauugaaaacagguanag

SEQ ID NO: 25560 - RNA, 20 nt, Artificial Sequence
  Synthetic
  misc_feature (18)..(18): n is a, c, g, or u
aggauugaaaacagguanag

SEQ ID NO: 25561 - RNA, 21 nt, Artificial Sequence
  Synthetic
  misc_feature (19)..(19): n is a, c, g, or u
caggauugaaaacagguanag

SEQ ID NO: 25562 - RNA, 22 nt, Artificial Sequence
  Synthetic
  misc_feature (20)..(20): n is a, c, g, or u
ucaggauugaaaacagguanag

SEQ ID NO: 25563 - RNA, 23 nt, Artificial Sequence
  Synthetic
  misc_feature (21)..(21): n is a, c, g, or u
gucaggauugaaaacagguanag

SEQ ID NO: 25564 - RNA, 24 nt, Artificial Sequence
  Synthetic
  misc_feature (22)..(22): n is a, c, g, or u
agucaggauugaaaacagguanag

SEQ ID NO: 25565 - RNA, 18 nt, Artificial Sequence
  Synthetic
  misc_feature (15)..(16): n is a, c, g, or u
cgucggccggaacgnnag

SEQ ID NO: 25566 - RNA, 19 nt, Artificial Sequence
  Synthetic
  misc_feature (16)..(17): n is a, c, g, or u
ucgucggccggaacgnnag

SEQ ID NO: 25567 - RNA, 20 nt, Artificial Sequence
  Synthetic
  misc_feature (17)..(18): n is a, c, g, or u
gucgucggccggaacgnnag

SEQ ID NO: 25568 - RNA, 21 nt, Artificial Sequence
  Synthetic
  misc_feature (18)..(19): n is a, c, g, or u
cgucgucggccggaacgnnag

SEQ ID NO: 25569 - RNA, 22 nt, Artificial Sequence
  Synthetic
  misc_feature (19)..(20): n is a, c, g, or u
ccgucgucggccggaacgnnag

SEQ ID NO: 25570 - RNA, 23 nt, Artificial Sequence
  Synthetic
  misc_feature (20)..(21): n is a, c, g, or u
cccgucgucggccggaacgnnag

SEQ ID NO: 25571 - RNA, 24 nt, Artificial Sequence
  Synthetic
  misc_feature (21)..(22): n is a, c, g, or u
acccgucgucggccggaacgnnag

SEQ ID NO: 25572 - RNA, 18 nt, Artificial Sequence
  Synthetic
augugagagaggcaauag

SEQ ID NO: 25573 - RNA, 19 nt, Artificial Sequence
  Synthetic
gaugugagagaggcaauag

SEQ ID NO: 25574 - RNA, 20 nt, Artificial Sequence
  Synthetic
ugaugugagagaggcaauag

SEQ ID NO: 25575 - RNA, 21 nt, Artificial Sequence
  Synthetic
augaugugagagaggcaauag

SEQ ID NO: 25576 - RNA, 22 nt, Artificial Sequence
  Synthetic
gaugaugugagagaggcaauag

SEQ ID NO: 25577 - RNA, 23 nt, Artificial Sequence
  Synthetic
ugaugaugugagagaggcaauag

SEQ ID NO: 25578 - RNA, 24 nt, Artificial Sequence
  Synthetic
uugaugaugugagagaggcaauag

SEQ ID NO: 25579 - RNA, 18 nt, Artificial Sequence
  Synthetic
agacacauccaacgauag

SEQ ID NO: 25580 - RNA, 19 nt, Artificial Sequence
  Synthetic
cagacacauccaacgauag

SEQ ID NO: 25581 - RNA, 20 nt, Artificial Sequence
  Synthetic
gcagacacauccaacgauag

SEQ ID NO: 25582 - RNA, 21 nt, Artificial Sequence
  Synthetic
cgcagacacauccaacgauag

SEQ ID NO: 25583 - RNA, 22 nt, Artificial Sequence
  Synthetic
ccgcagacacauccaacgauag

SEQ ID NO: 25584 - RNA, 23 nt, Artificial Sequence
  Synthetic
gccgcagacacauccaacgauag

SEQ ID NO: 25585 - RNA, 24 nt, Artificial Sequence
  Synthetic
cgccgcagacacauccaacgauag

SEQ ID NO: 25586 - RNA, 18 nt, Artificial Sequence
  Synthetic
accacauucucuggauag

SEQ ID NO: 25587 - RNA, 19 nt, Artificial Sequence
  Synthetic
aaccacauucucuggauag

SEQ ID NO: 25588 - RNA, 20 nt, Artificial Sequence
  Synthetic
uaaccacauucucuggauag

SEQ ID NO: 25589 - RNA, 21 nt, Artificial Sequence
  Synthetic
uuaaccacauucucuggauag

SEQ ID NO: 25590 - RNA, 22 nt, Artificial Sequence
  Synthetic
auuaaccacauucucuggauag

SEQ ID NO: 25591 - RNA, 23 nt, Artificial Sequence
  Synthetic
gauuaaccacauucucuggauag

SEQ ID NO: 25592 - RNA, 24 nt, Artificial Sequence
  Synthetic
ugauuaaccacauucucuggauag

SEQ ID NO: 25593 - RNA, 18 nt, Artificial Sequence
  Synthetic
ggcaacauaccuugauag

SEQ ID NO: 25594 - RNA, 19 nt, Artificial Sequence
  Synthetic
gggcaacauaccuugauag

SEQ ID NO: 25595 - RNA, 20 nt, Artificial Sequence
  Synthetic
cgggcaacauaccuugauag

SEQ ID NO: 25596 - RNA, 21 nt, Artificial Sequence
  Synthetic
acgggcaacauaccuugauag

SEQ ID NO: 25597 - RNA, 22 nt, Artificial Sequence
  Synthetic
cacgggcaacauaccuugauag

SEQ ID NO: 25598 - RNA, 23 nt, Artificial Sequence
  Synthetic
acacgggcaacauaccuugauag

SEQ ID NO: 25599 - RNA, 24 nt, Artificial Sequence
  Synthetic
cacacgggcaacauaccuugauag

SEQ ID NO: 25600 - RNA, 18 nt, Artificial Sequence
  Synthetic
cuccggaaguguugauag

SEQ ID NO: 25601 - RNA, 19 nt, Artificial Sequence
  Synthetic
ucuccggaaguguugauag

SEQ ID NO: 25602 - RNA, 20 nt, Artificial Sequence
  Synthetic
gucuccggaaguguugauag

SEQ ID NO: 25603 - RNA, 21 nt, Artificial Sequence
  Synthetic
agucuccggaaguguugauag

SEQ ID NO: 25604 - RNA, 22 nt, Artificial Sequence
  Synthetic
uagucuccggaaguguugauag

SEQ ID NO: 25605 - RNA, 23 nt, Artificial Sequence
  Synthetic
guagucuccggaaguguugauag

SEQ ID NO: 25606 - RNA, 24 nt, Artificial Sequence
  Synthetic
aguagucuccggaaguguugauag

SEQ ID NO: 25607 - RNA, 18 nt, Artificial Sequence
  Synthetic
agcgccgacgggacguag

SEQ ID NO: 25608 - RNA, 19 nt, Artificial Sequence
  Synthetic
cagcgccgacgggacguag

SEQ ID NO: 25609 - RNA, 20 nt, Artificial Sequence
  Synthetic
ucagcgccgacgggacguag

SEQ ID NO: 25610 - RNA, 18 nt, Artificial Sequence
  Synthetic
ugaacaaaagaugauuag

SEQ ID NO: 25611 - RNA, 19 nt, Artificial Sequence
  Synthetic
augaacaaaagaugauuag

SEQ ID NO: 25612 - RNA, 20 nt, Artificial Sequence
  Synthetic
caugaacaaaagaugauuag

SEQ ID NO: 25613 - RNA, 21 nt, Artificial Sequence
  Synthetic
acaugaacaaaagaugauuag

SEQ ID NO: 25614 - RNA, 22 nt, Artificial Sequence
  Synthetic
gacaugaacaaaagaugauuag

SEQ ID NO: 25615 - RNA, 23 nt, Artificial Sequence
  Synthetic
ggacaugaacaaaagaugauuag

SEQ ID NO: 25616 - RNA, 24 nt, Artificial Sequence
  Synthetic
gggacaugaacaaaagaugauuag

SEQ ID NO: 25617 - RNA, 18 nt, Artificial Sequence
  Synthetic
ccgucgucggccggaacg

SEQ ID NO: 25618 - RNA, 19 nt, Artificial Sequence
  Synthetic
cccgucgucggccggaacg

SEQ ID NO: 25619 - RNA, 20 nt, Artificial Sequence
  Synthetic
acccgucgucggccggaacg

SEQ ID NO: 25620 - RNA, 18 nt, Artificial Sequence
  Synthetic
cacaccgccuguaacacg

SEQ ID NO: 25621 - RNA, 19 nt, Artificial Sequence
  Synthetic
acacaccgccuguaacacg

SEQ ID NO: 25622 - RNA, 20 nt, Artificial Sequence
  Synthetic
aacacaccgccuguaacacg

SEQ ID NO: 25623 - RNA, 21 nt, Artificial Sequence
  Synthetic
aaacacaccgccuguaacacg

SEQ ID NO: 25624 - RNA, 22 nt, Artificial Sequence
  Synthetic
gaaacacaccgccuguaacacg

SEQ ID NO: 25625 - RNA, 23 nt, Artificial Sequence
  Synthetic
agaaacacaccgccuguaacacg

SEQ ID NO: 25626 - RNA, 24 nt, Artificial Sequence
  Synthetic
aagaaacacaccgccuguaacacg

SEQ ID NO: 25627 - RNA, 18 nt, Artificial Sequence
  Synthetic
ggaaguagaggacacacg

SEQ ID NO: 25628 - RNA, 19 nt, Artificial Sequence
  Synthetic
uggaaguagaggacacacg

SEQ ID NO: 25629 - RNA, 20 nt, Artificial Sequence
  Synthetic
cuggaaguagaggacacacg

SEQ ID NO: 25630 - RNA, 21 nt, Artificial Sequence
  Synthetic
ccuggaaguagaggacacacg

SEQ ID NO: 25631 - RNA, 22 nt, Artificial Sequence
  Synthetic
uccuggaaguagaggacacacg

SEQ ID NO: 25632 - RNA, 23 nt, Artificial Sequence
  Synthetic
auccuggaaguagaggacacacg

SEQ ID NO: 25633 - RNA, 24 nt, Artificial Sequence
  Synthetic
gauccuggaaguagaggacacacg

SEQ ID NO: 25634 - RNA, 18 nt, Artificial Sequence
  Synthetic
gagccccaagcgaccacg

SEQ ID NO: 25635 - RNA, 19 nt, Artificial Sequence
  Synthetic
agagccccaagcgaccacg

SEQ ID NO: 25636 - RNA, 20 nt, Artificial Sequence
  Synthetic
cagagccccaagcgaccacg

SEQ ID NO: 25637 - RNA, 21 nt, Artificial Sequence
  Synthetic
gcagagccccaagcgaccacg

SEQ ID NO: 25638 - RNA, 22 nt, Artificial Sequence
  Synthetic
ggcagagccccaagcgaccacg

SEQ ID NO: 25639 - RNA, 23 nt, Artificial Sequence
  Synthetic
cggcagagccccaagcgaccacg

SEQ ID NO: 25640 - RNA, 24 nt, Artificial Sequence
  Synthetic
gcggcagagccccaagcgaccacg

SEQ ID NO: 25641 - RNA, 18 nt, Artificial Sequence
  Synthetic
guaggucccggacagacg

SEQ ID NO: 25642 - RNA, 19 nt, Artificial Sequence
  Synthetic
aguaggucccggacagacg

SEQ ID NO: 25643 - RNA, 20 nt, Artificial Sequence
  Synthetic
gaguaggucccggacagacg

SEQ ID NO: 25644 - RNA, 18 nt, Artificial Sequence
  Synthetic
gguggucuccaugcgacg

SEQ ID NO: 25645 - RNA, 19 nt, Artificial Sequence
  Synthetic
cgguggucuccaugcgacg

SEQ ID NO: 25646 - RNA, 20 nt, Artificial Sequence
  Synthetic
acgguggucuccaugcgacg

SEQ ID NO: 25647 - RNA, 18 nt, Artificial Sequence
  Synthetic
caccccagaaggccaccg

SEQ ID NO: 25648 - RNA, 19 nt, Artificial Sequence
  Synthetic
ccaccccagaaggccaccg

SEQ ID NO: 25649 - RNA, 20 nt, Artificial Sequence
  Synthetic
uccaccccagaaggccaccg

SEQ ID NO: 25650 - RNA, 21 nt, Artificial Sequence
  Synthetic
cuccaccccagaaggccaccg

SEQ ID NO: 25651 - RNA, 22 nt, Artificial Sequence
  Synthetic
gcuccaccccagaaggccaccg

SEQ ID NO: 25652 - RNA, 23 nt, Artificial Sequence
  Synthetic
ggcuccaccccagaaggccaccg

SEQ ID NO: 25653 - RNA, 24 nt, Artificial Sequence
  Synthetic
gggcuccaccccagaaggccaccg

SEQ ID NO: 25654 - RNA, 18 nt, Artificial Sequence
  Synthetic
guagaggaguaaagaccg

SEQ ID NO: 25655 - RNA, 19 nt, Artificial Sequence
  Synthetic
aguagaggaguaaagaccg

SEQ ID NO: 25656 - RNA, 20 nt, Artificial Sequence
  Synthetic
  misc_feature (1)..(1): n is a, c, g, or u
naguagaggaguaaagaccg

SEQ ID NO: 25657 - RNA, 21 nt, Artificial Sequence
  Synthetic
  misc_feature (2)..(2): n is a, c, g, or u
anaguagaggaguaaagaccg

SEQ ID NO: 25658 - RNA, 22 nt, Artificial Sequence
  Synthetic
  misc_feature (3)..(3): n is a, c, g, or u
uanaguagaggaguaaagaccg

SEQ ID NO: 25659 - RNA, 23 nt, Artificial Sequence
  Synthetic
  misc_feature (4)..(4): n is a, c, g, or u
guanaguagaggaguaaagaccg

SEQ ID NO: 25660 - RNA, 24 nt, Artificial Sequence
  Synthetic
  misc_feature (5)..(5): n is a, c, g, or u
gguanaguagaggaguaaagaccg

SEQ ID NO: 25661 - RNA, 18 nt, Artificial Sequence
  Synthetic
uagacaaaggacgucccg

SEQ ID NO: 25662 - RNA, 19 nt, Artificial Sequence
  Synthetic
guagacaaaggacgucccg

SEQ ID NO: 25663 - RNA, 20 nt, Artificial Sequence
  Synthetic
cguagacaaaggacgucccg

SEQ ID NO: 25664 - RNA, 21 nt, Artificial Sequence
  Synthetic
acguagacaaaggacgucccg

SEQ ID NO: 25665 - RNA, 22 nt, Artificial Sequence
  Synthetic
gacguagacaaaggacgucccg

SEQ ID NO: 25666 - RNA, 23 nt, Artificial Sequence
  Synthetic
ggacguagacaaaggacgucccg

SEQ ID NO: 25667 - RNA, 24 nt, Artificial Sequence
  Synthetic
gggacguagacaaaggacgucccg

SEQ ID NO: 25668 - RNA, 18 nt, Artificial Sequence
  Synthetic
ggugucgaguaggucccg

SEQ ID NO: 25669 - RNA, 19 nt, Artificial Sequence
  Synthetic
cggugucgaguaggucccg

SEQ ID NO: 25670 - RNA, 20 nt, Artificial Sequence
  Synthetic
gcggugucgaguaggucccg

SEQ ID NO: 25671 - RNA, 18 nt, Artificial Sequence
  Synthetic
ccgcaggauucagcgccg

SEQ ID NO: 25672 - RNA, 19 nt, Artificial Sequence
  Synthetic
uccgcaggauucagcgccg

SEQ ID NO: 25673 - RNA, 20 nt, Artificial Sequence
  Synthetic
guccgcaggauucagcgccg

SEQ ID NO: 25674 - RNA, 21 nt, Artificial Sequence
  Synthetic
cguccgcaggauucagcgccg

SEQ ID NO: 25675 - RNA, 22 nt, Artificial Sequence
  Synthetic
ucguccgcaggauucagcgccg

SEQ ID NO: 25676 - RNA, 23 nt, Artificial Sequence
  Synthetic
gucguccgcaggauucagcgccg

SEQ ID NO: 25677 - RNA, 24 nt, Artificial Sequence
  Synthetic
ggucguccgcaggauucagcgccg

SEQ ID NO: 25678 - RNA, 18 nt, Artificial Sequence
  Synthetic
ccaugccccuucucgccg

SEQ ID NO: 25679 - RNA, 19 nt, Artificial Sequence
  Synthetic
cccaugccccuucucgccg

SEQ ID NO: 25680 - RNA, 20 nt, Artificial Sequence
  Synthetic
ucccaugccccuucucgccg

SEQ ID NO: 25681 - RNA, 21 nt, Artificial Sequence
  Synthetic
gucccaugccccuucucgccg

SEQ ID NO: 25682 - RNA, 22 nt, Artificial Sequence
  Synthetic
ugucccaugccccuucucgccg

SEQ ID NO: 25683 - RNA, 23 nt, Artificial Sequence
  Synthetic
cugucccaugccccuucucgccg

SEQ ID NO: 25684 - RNA, 24 nt, Artificial Sequence
  Synthetic
ucugucccaugccccuucucgccg

SEQ ID NO: 25685 - RNA, 18 nt, Artificial Sequence
  Synthetic
aaggccuggccguugccg

SEQ ID NO: 25686 - RNA, 19 nt, Artificial Sequence
  Synthetic
aaaggccuggccguugccg

SEQ ID NO: 25687 - RNA, 20 nt, Artificial Sequence
  Synthetic
caaaggccuggccguugccg

SEQ ID NO: 25688 - RNA, 21 nt, Artificial Sequence
  Synthetic
gcaaaggccuggccguugccg

SEQ ID NO: 25689 - RNA, 22 nt, Artificial Sequence
  Synthetic
ggcaaaggccuggccguugccg

SEQ ID NO: 25690 - RNA, 23 nt, Artificial Sequence
  Synthetic
uggcaaaggccuggccguugccg

SEQ ID NO: 25691 - RNA, 24 nt, Artificial Sequence
  Synthetic
uuggcaaaggccuggccguugccg

SEQ ID NO: 25692 - RNA, 18 nt, Artificial Sequence
  Synthetic
gcacaggcggggaguccg

SEQ ID NO: 25693 - RNA, 19 nt, Artificial Sequence
  Synthetic
ggcacaggcggggaguccg

SEQ ID NO: 25694 - RNA, 20 nt, Artificial Sequence
  Synthetic
aggcacaggcggggaguccg

SEQ ID NO: 25695 - RNA, 21 nt, Artificial Sequence
  Synthetic
aaggcacaggcggggaguccg

SEQ ID NO: 25696 - RNA, 22 nt, Artificial Sequence
  Synthetic
gaaggcacaggcggggaguccg

SEQ ID NO: 25697 - RNA, 23 nt, Artificial Sequence
  Synthetic
agaaggcacaggcggggaguccg

SEQ ID NO: 25698 - RNA, 24 nt, Artificial Sequence
  Synthetic
gagaaggcacaggcggggaguccg

SEQ ID NO: 25699 - RNA, 18 nt, Artificial Sequence
  Synthetic
gaaggagguguacuuccg

SEQ ID NO: 25700 - RNA, 19 nt, Artificial Sequence
  Synthetic
ggaaggagguguacuuccg

SEQ ID NO: 25701 - RNA, 20 nt, Artificial Sequence
  Synthetic
gggaaggagguguacuuccg

SEQ ID NO: 25702 - RNA, 21 nt, Artificial Sequence
  Synthetic
ugggaaggagguguacuuccg

SEQ ID NO: 25703 - RNA, 22 nt, Artificial Sequence
  Synthetic
augggaaggagguguacuuccg

SEQ ID NO: 25704 - RNA, 23 nt, Artificial Sequence
  Synthetic
caugggaaggagguguacuuccg

SEQ ID NO: 25705 - RNA, 24 nt, Artificial Sequence
  Synthetic
ccaugggaaggagguguacuuccg

SEQ ID NO: 25706 - RNA, 18 nt, Artificial Sequence
  Synthetic
auacaggugcaauuuccg

SEQ ID NO: 25707 - RNA, 19 nt, Artificial Sequence
  Synthetic
aauacaggugcaauuuccg

SEQ ID NO: 25708 - RNA, 20 nt, Artificial Sequence
  Synthetic
gaauacaggugcaauuuccg

SEQ ID NO: 25709 - RNA, 21 nt, Artificial Sequence
  Synthetic
ggaauacaggugcaauuuccg

SEQ ID NO: 25710 - RNA, 22 nt, Artificial Sequence
  Synthetic
gggaauacaggugcaauuuccg

SEQ ID NO: 25711 - RNA, 23 nt, Artificial Sequence
  Synthetic
ugggaauacaggugcaauuuccg

SEQ ID NO: 25712 - RNA, 24 nt, Artificial Sequence
  Synthetic
augggaauacaggugcaauuuccg

SEQ ID NO: 25713 - RNA, 18 nt, Artificial Sequence
  Synthetic
acaggcggggaguccgcg

SEQ ID NO: 25714 - RNA, 19 nt, Artificial Sequence
  Synthetic
cacaggcggggaguccgcg

SEQ ID NO: 25715 - RNA, 20 nt, Artificial Sequence
  Synthetic
gcacaggcggggaguccgcg

SEQ ID NO: 25716 - RNA, 21 nt, Artificial Sequence
  Synthetic
ggcacaggcggggaguccgcg

SEQ ID NO: 25717 - RNA, 22 nt, Artificial Sequence
  Synthetic
aggcacaggcggggaguccgcg

SEQ ID NO: 25718 - RNA, 23 nt, Artificial Sequence
  Synthetic
aaggcacaggcggggaguccgcg

SEQ ID NO: 25719 - RNA, 24 nt, Artificial Sequence
  Synthetic
gaaggcacaggcggggaguccgcg

SEQ ID NO: 25720 - RNA, 18 nt, Artificial Sequence
  Synthetic
aucuucgucugcgaggcg

SEQ ID NO: 25721 - RNA, 19 nt, Artificial Sequence
  Synthetic
gaucuucgucugcgaggcg

SEQ ID NO: 25722 - RNA, 20 nt, Artificial Sequence
  Synthetic
agaucuucgucugcgaggcg

SEQ ID NO: 25723 - RNA, 18 nt, Artificial Sequence
  Synthetic
  misc_feature (12)..(13): n is a, c, g, or u
cggccggaacgnnaggcg

SEQ ID NO: 25724 - RNA, 19 nt, Artificial Sequence
  Synthetic
  misc_feature (13)..(14): n is a, c, g, or u
ucggccggaacgnnaggcg

SEQ ID NO: 25725 - RNA, 20 nt, Artificial Sequence
  Synthetic
  misc_feature (14)..(15): n is a, c, g, or u
gucggccggaacgnnaggcg

SEQ ID NO: 25726 - RNA, 21 nt, Artificial Sequence
  Synthetic
  misc_feature (15)..(16): n is a, c, g, or u
cgucggccggaacgnnaggcg

SEQ ID NO: 25727 - RNA, 22 nt, Artificial Sequence
  Synthetic
  misc_feature (16)..(17): n is a, c, g, or u
ucgucggccggaacgnnaggcg

SEQ ID NO: 25728 - RNA, 23 nt, Artificial Sequence
  Synthetic
  misc_feature (17)..(18): n is a, c, g, or u
gucgucggccggaacgnnaggcg

SEQ ID NO: 25729 - RNA, 24 nt, Artificial Sequence
  Synthetic
  misc_feature (18)..(19): n is a, c, g, or u
cgucgucggccggaacgnnaggcg

SEQ ID NO: 25730 - RNA, 18 nt, Artificial Sequence
  Synthetic
  misc_feature (1)..(1): n is a, c, g, or u
  misc_feature (13)..(13): n is a, c, g, or u
naggcggagaagngggcg

SEQ ID NO: 25731 - RNA, 19 nt, Artificial Sequence
  Synthetic
  misc_feature (1)..(2): n is a, c, g, or u
  misc_feature (14)..(14): n is a, c, g, or u
nnaggcggagaagngggcg

SEQ ID NO: 25732 - RNA, 20 nt, Artificial Sequence
  Synthetic
  misc_feature (2)..(3): n is a, c, g, or u
  misc_feature (15)..(15): n is a, c, g, or u
gnnaggcggagaagngggcg

SEQ ID NO: 25733 - RNA, 21 nt, Artificial Sequence
  Synthetic
  misc_feature (3)..(4): n is a, c, g, or u
  misc_feature (16)..(16): n is a, c, g, or u
cgnnaggcggagaagngggcg

SEQ ID NO: 25734 - RNA, 22 nt, Artificial Sequence
  Synthetic
  misc_feature (4)..(5): n is a, c, g, or u
  misc_feature (17)..(17): n is a, c, g, or u
acgnnaggcggagaagngggcg

SEQ ID NO: 25735 - RNA, 23 nt, Artificial Sequence
  Synthetic
  misc_feature (5)..(6): n is a, c, g, or u
  misc_feature (18)..(18): n is a, c, g, or u
aacgnnaggcggagaagngggcg

SEQ ID NO: 25736 - RNA, 24 nt, Artificial Sequence
  Synthetic
  misc_feature (6)..(7): n is a, c, g, or u
  misc_feature (19)..(19): n is a, c, g, or u
gaacgnnaggcggagaagngggcg

SEQ ID NO: 25737 - RNA, 18 nt, Artificial Sequence
  Synthetic
aggccuuguaaguuggcg

SEQ ID NO: 25738 - RNA, 19 nt, Artificial Sequence
  Synthetic
aaggccuuguaaguuggcg

SEQ ID NO: 25739 - RNA, 20 nt, Artificial Sequence
  Synthetic
aaaggccuuguaaguuggcg

SEQ ID NO: 25740 - RNA, 21 nt, Artificial Sequence
  Synthetic
gaaaggccuuguaaguuggcg

SEQ ID NO: 25741 - RNA, 22 nt, Artificial Sequence
  Synthetic
agaaaggccuuguaaguuggcg

SEQ ID NO: 25742 - RNA, 23 nt, Artificial Sequence
  Synthetic
gagaaaggccuuguaaguuggcg

SEQ ID NO: 25743 - RNA, 24 nt, Artificial Sequence
  Synthetic
agagaaaggccuuguaaguuggcg

SEQ ID NO: 25744 - RNA, 18 nt, Artificial Sequence
  Synthetic
  misc_feature (12)..(12): n is a, c, g, or u
cgcuccagaccngcugcg

SEQ ID NO: 25745 - RNA, 19 nt, Artificial Sequence
  Synthetic
  misc_feature (13)..(13): n is a, c, g, or u
ccgcuccagaccngcugcg

SEQ ID NO: 25746 - RNA, 20 nt, Artificial Sequence
  Synthetic
  misc_feature (14)..(14): n is a, c, g, or u
uccgcuccagaccngcugcg

SEQ ID NO: 25747 - RNA, 21 nt, Artificial Sequence
  Synthetic
  misc_feature (15)..(15): n is a, c, g, or u
guccgcuccagaccngcugcg

SEQ ID NO: 25748 - RNA, 22 nt, Artificial Sequence
  Synthetic
  misc_feature (1)..(1): n is a, c, g, or u
  misc_feature (16)..(16): n is a, c, g, or u
nguccgcuccagaccngcugcg

SEQ ID NO: 25749 - RNA, 23 nt, Artificial Sequence
  Synthetic
  misc_feature (2)..(2): n is a, c, g, or u
  misc_feature (17)..(17): n is a, c, g, or u
anguccgcuccagaccngcugcg

SEQ ID NO: 25750 - RNA, 24 nt, Artificial Sequence
  Synthetic
  misc_feature (3)..(3): n is a, c, g, or u
  misc_feature (18)..(18): n is a, c, g, or u
aanguccgcuccagaccngcugcg

SEQ ID NO: 25751 - RNA, 18 nt, Artificial Sequence
  Synthetic
ugcgcugauggccaaucg

SEQ ID NO: 25752 - RNA, 19 nt, Artificial Sequence
  Synthetic
augcgcugauggccaaucg

SEQ ID NO: 25753 - RNA, 20 nt, Artificial Sequence
  Synthetic
caugcgcugauggccaaucg

SEQ ID NO: 25754 - RNA, 18 nt, Artificial Sequence
  Synthetic
guuccgcaguauggaucg

SEQ ID NO: 25755 - RNA, 19 nt, Artificial Sequence
  Synthetic
aguuccgcaguauggaucg

SEQ ID NO: 25756 - RNA, 20 nt, Artificial Sequence
  Synthetic
gaguuccgcaguauggaucg

SEQ ID NO: 25757 - RNA, 21 nt, Artificial Sequence
  Synthetic
ggaguuccgcaguauggaucg

SEQ ID NO: 25758 - RNA, 22 nt, Artificial Sequence
  Synthetic
aggaguuccgcaguauggaucg

SEQ ID NO: 25759 - RNA, 23 nt, Artificial Sequence
  Synthetic
uaggaguuccgcaguauggaucg

SEQ ID NO: 25760 - RNA, 24 nt, Artificial Sequence
  Synthetic
cuaggaguuccgcaguauggaucg

SEQ ID NO: 25761 - RNA, 18 nt, Artificial Sequence
  Synthetic
ugauucuaaggcaucucg

SEQ ID NO: 25762 - RNA, 19 nt, Artificial Sequence
  Synthetic
gugauucuaaggcaucucg

SEQ ID NO: 25763 - RNA, 20 nt, Artificial Sequence
  Synthetic
ggugauucuaaggcaucucg

SEQ ID NO: 25764 - RNA, 21 nt, Artificial Sequence
  Synthetic
  misc_feature (1)..(1): n is a, c, g, or u
nggugauucuaaggcaucucg

SEQ ID NO: 25765 - RNA, 22 nt, Artificial Sequence
  Synthetic
  misc_feature (2)..(2): n is a, c, g, or u
cnggugauucuaaggcaucucg

SEQ ID NO: 25766 - RNA, 23 nt, Artificial Sequence
  Synthetic
  misc_feature (3)..(3): n is a, c, g, or u
ucnggugauucuaaggcaucucg

SEQ ID NO: 25767 - RNA, 24 nt, Artificial Sequence
  Synthetic
  misc_feature (4)..(4): n is a, c, g, or u
uucnggugauucuaaggcaucucg

SEQ ID NO: 25768 - RNA, 18 nt, Artificial Sequence
  Synthetic
aggugcgacccgucgucg

SEQ ID NO: 25769 - RNA, 19 nt, Artificial Sequence
  Synthetic
gaggugcgacccgucgucg

SEQ ID NO: 25770 - RNA, 20 nt, Artificial Sequence
  Synthetic
agaggugcgacccgucgucg

SEQ ID NO: 25771 - RNA, 18 nt, Artificial Sequence
  Synthetic
agggcugaagcggugucg

SEQ ID NO: 25772 - RNA, 19 nt, Artificial Sequence
  Synthetic
gagggcugaagcggugucg

SEQ ID NO: 25773 - RNA, 20 nt, Artificial Sequence
  Synthetic
agagggcugaagcggugucg

SEQ ID NO: 25774 - RNA, 21 nt, Artificial Sequence
  Synthetic
uagagggcugaagcggugucg

SEQ ID NO: 25775 - RNA, 22 nt, Artificial Sequence
  Synthetic
guagagggcugaagcggugucg

SEQ ID NO: 25776 - RNA, 23 nt, Artificial Sequence
  Synthetic
gguagagggcugaagcggugucg

SEQ ID NO: 25777 - RNA, 24 nt, Artificial Sequence
  Synthetic
cgguagagggcugaagcggugucg

SEQ ID NO: 25778 - RNA, 18 nt, Artificial Sequence
  Synthetic
caggguccccagucuucg

SEQ ID NO: 25779 - RNA, 19 nt, Artificial Sequence
  Synthetic
  misc_feature (1)..(1): n is a, c, g, or u
ncaggguccccagucuucg

SEQ ID NO: 25780 - RNA, 20 nt, Artificial Sequence
  Synthetic
  misc_feature (2)..(2): n is a, c, g, or u
ancaggguccccagucuucg

SEQ ID NO: 25781 - RNA, 21 nt, Artificial Sequence
  Synthetic
  misc_feature (3)..(3): n is a, c, g, or u
uancaggguccccagucuucg

SEQ ID NO: 25782 - RNA, 22 nt, Artificial Sequence
  Synthetic
  misc_feature (4)..(4): n is a, c, g, or u
auancaggguccccagucuucg

SEQ ID NO: 25783 - RNA, 23 nt, Artificial Sequence
  Synthetic
  misc_feature (5)..(5): n is a, c, g, or u
cauancaggguccccagucuucg

SEQ ID NO: 25784 - RNA, 24 nt, Artificial Sequence
  Synthetic
  misc_feature (6)..(6): n is a, c, g, or u
ucauancaggguccccagucuucg

SEQ ID NO: 25785 - RNA, 18 nt, Artificial Sequence
  Synthetic
gcaaacacuuggcaaagg

SEQ ID NO: 25786 - RNA, 19 nt, Artificial Sequence
  Synthetic
agcaaacacuuggcaaagg

SEQ ID NO: 25787 - RNA, 20 nt, Artificial Sequence
  Synthetic
cagcaaacacuuggcaaagg

SEQ ID NO: 25788 - RNA, 21 nt, Artificial Sequence
  Synthetic
ucagcaaacacuuggcaaagg

SEQ ID NO: 25789 - RNA, 22 nt, Artificial Sequence
  Synthetic
gucagcaaacacuuggcaaagg

SEQ ID NO: 25790 - RNA, 23 nt, Artificial Sequence
  Synthetic
cgucagcaaacacuuggcaaagg

SEQ ID NO: 25791 - RNA, 24 nt, Artificial Sequence
  Synthetic
gcgucagcaaacacuuggcaaagg

SEQ ID NO: 25792 - RNA, 18 nt, Artificial Sequence
  Synthetic
ccccaaagccacccaagg

SEQ ID NO: 25793 - RNA, 19 nt, Artificial Sequence
  Synthetic
gccccaaagccacccaagg

SEQ ID NO: 25794 - RNA, 20 nt, Artificial Sequence
  Synthetic
ugccccaaagccacccaagg

SEQ ID NO: 25795 - RNA, 21 nt, Artificial Sequence
  Synthetic
augccccaaagccacccaagg

SEQ ID NO: 25796 - RNA, 22 nt, Artificial Sequence
  Synthetic
caugccccaaagccacccaagg

SEQ ID NO: 25797 - RNA, 23 nt, Artificial Sequence
  Synthetic
ccaugccccaaagccacccaagg

SEQ ID NO: 25798 - RNA, 24 nt, Artificial Sequence
  Synthetic
uccaugccccaaagccacccaagg

SEQ ID NO: 25799 - RNA, 18 nt, Artificial Sequence
  Synthetic
cgggaagaagucagaagg

SEQ ID NO: 25800 - RNA, 19 nt, Artificial Sequence
  Synthetic
acgggaagaagucagaagg

SEQ ID NO: 25801 - RNA, 20 nt, Artificial Sequence
  Synthetic
gacgggaagaagucagaagg

SEQ ID NO: 25802 - RNA, 21 nt, Artificial Sequence
  Synthetic
agacgggaagaagucagaagg

SEQ ID NO: 25803 - RNA, 22 nt, Artificial Sequence
  Synthetic
cagacgggaagaagucagaagg

SEQ ID NO: 25804 - RNA, 23 nt, Artificial Sequence
  Synthetic
acagacgggaagaagucagaagg

SEQ ID NO: 25805 - RNA, 24 nt, Artificial Sequence
  Synthetic
gacagacgggaagaagucagaagg

SEQ ID NO: 25806 - RNA, 18 nt, Artificial Sequence
  Synthetic
ggccggcagaugagaagg

SEQ ID NO: 25807 - RNA, 19 nt, Artificial Sequence
  Synthetic
gggccggcagaugagaagg

SEQ ID NO: 25808 - RNA, 20 nt, Artificial Sequence
  Synthetic
cgggccggcagaugagaagg

SEQ ID NO: 25809 - RNA, 21 nt, Artificial Sequence
  Synthetic
acgggccggcagaugagaagg

SEQ ID NO: 25810 - RNA, 22 nt, Artificial Sequence
  Synthetic
cacgggccggcagaugagaagg

SEQ ID NO: 25811 - RNA, 23 nt, Artificial Sequence
  Synthetic
acacgggccggcagaugagaagg

SEQ ID NO: 25812 - RNA, 24 nt, Artificial Sequence
  Synthetic
cacacgggccggcagaugagaagg

SEQ ID NO: 25813 - RNA, 18 nt, Artificial Sequence
  Synthetic
ucucuuccaaauguaagg

SEQ ID NO: 25814 - RNA, 19 nt, Artificial Sequence
  Synthetic
uucucuuccaaauguaagg

SEQ ID NO: 25815 - RNA, 20 nt, Artificial Sequence
  Synthetic
uuucucuuccaaauguaagg

SEQ ID NO: 25816 - RNA, 21 nt, Artificial Sequence
  Synthetic
guuucucuuccaaauguaagg

SEQ ID NO: 25817 - RNA, 22 nt, Artificial Sequence
  Synthetic
aguuucucuuccaaauguaagg

SEQ ID NO: 25818 - RNA, 23 nt, Artificial Sequence
  Synthetic
caguuucucuuccaaauguaagg

SEQ ID NO: 25819 - RNA, 24 nt, Artificial Sequence
  Synthetic
acaguuucucuuccaaauguaagg

SEQ ID NO: 25820 - RNA, 18 nt, Artificial Sequence
  Synthetic
cagaugagaaggcacagg

SEQ ID NO: 25821 - RNA, 19 nt, Artificial Sequence
  Synthetic
gcagaugagaaggcacagg

SEQ ID NO: 25822 - RNA, 20 nt, Artificial Sequence
  Synthetic
ggcagaugagaaggcacagg

SEQ ID NO: 25823 - RNA, 21 nt, Artificial Sequence
  Synthetic
cggcagaugagaaggcacagg

SEQ ID NO: 25824 - RNA, 22 nt, Artificial Sequence
  Synthetic
ccggcagaugagaaggcacagg

SEQ ID NO: 25825 - RNA, 23 nt, Artificial Sequence
  Synthetic
gccggcagaugagaaggcacagg

SEQ ID NO: 25826 - RNA, 24 nt, Artificial Sequence
  Synthetic
ggccggcagaugagaaggcacagg

SEQ ID NO: 25827 - RNA, 18 nt, Artificial Sequence
  Synthetic
guuugguacagcagcagg

SEQ ID NO: 25828 - RNA, 19 nt, Artificial Sequence
  Synthetic
gguuugguacagcagcagg

SEQ ID NO: 25829 - RNA, 20 nt, Artificial Sequence
  Synthetic
agguuugguacagcagcagg

SEQ ID NO: 25830 - RNA, 21 nt, Artificial Sequence
  Synthetic
aagguuugguacagcagcagg

SEQ ID NO: 25831 - RNA, 22 nt, Artificial Sequence
  Synthetic
gaagguuugguacagcagcagg

SEQ ID NO: 25832 - RNA, 23 nt, Artificial Sequence
  Synthetic
cgaagguuugguacagcagcagg

SEQ ID NO: 25833 - RNA, 24 nt, Artificial Sequence
  Synthetic
ccgaagguuugguacagcagcagg

SEQ ID NO: 25834 - RNA, 18 nt, Artificial Sequence
  Synthetic
augaggcauagcagcagg

SEQ ID NO: 25835 - RNA, 19 nt, Artificial Sequence
  Synthetic
gaugaggcauagcagcagg

SEQ ID NO: 25836 - RNA, 20 nt, Artificial Sequence
  Synthetic
agaugaggcauagcagcagg

SEQ ID NO: 25837 - RNA, 21 nt, Artificial Sequence
  Synthetic
aagaugaggcauagcagcagg

SEQ ID NO: 25838 - RNA, 22 nt, Artificial Sequence
  Synthetic
gaagaugaggcauagcagcagg

SEQ ID NO: 25839 - RNA, 23 nt, Artificial Sequence
  Synthetic
agaagaugaggcauagcagcagg

SEQ ID NO: 25840 - RNA, 24 nt, Artificial Sequence
  Synthetic
aagaagaugaggcauagcagcagg

SEQ ID NO: 25841 - RNA, 18 nt, Artificial Sequence
  Synthetic
aggaguuaaccagucagg

SEQ ID NO: 25842 - RNA, 19 nt, Artificial Sequence
  Synthetic
aaggaguuaaccagucagg

SEQ ID NO: 25843 - RNA, 20 nt, Artificial Sequence
  Synthetic
gaaggaguuaaccagucagg

SEQ ID NO: 25844 - RNA, 21 nt, Artificial Sequence
  Synthetic
agaaggaguuaaccagucagg

SEQ ID NO: 25845 - RNA, 22 nt, Artificial Sequence
  Synthetic
aagaaggaguuaaccagucagg

SEQ ID NO: 25846 - RNA, 23 nt, Artificial Sequence
  Synthetic
aaagaaggaguuaaccagucagg

SEQ ID NO: 25847 - RNA, 24 nt, Artificial Sequence
  Synthetic
aaaagaaggaguuaaccagucagg

SEQ ID NO: 25848 - RNA, 18 nt, Artificial Sequence
  Synthetic
augcaagugaaugucagg

SEQ ID NO: 25849 - RNA, 19 nt, Artificial Sequence
  Synthetic
gaugcaagugaaugucagg

SEQ ID NO: 25850 - RNA, 20 nt, Artificial Sequence
  Synthetic
ugaugcaagugaaugucagg

SEQ ID NO: 25851 - RNA, 21 nt, Artificial Sequence
  Synthetic
uugaugcaagugaaugucagg

SEQ ID NO: 25852 - RNA, 22 nt, Artificial Sequence
  Synthetic
cuugaugcaagugaaugucagg

SEQ ID NO: 25853 - RNA, 23 nt, Artificial Sequence
  Synthetic
ucuugaugcaagugaaugucagg

SEQ ID NO: 25854 - RNA, 24 nt, Artificial Sequence
  Synthetic
aucuugaugcaagugaaugucagg

SEQ ID NO: 25855 - RNA, 18 nt, Artificial Sequence
  Synthetic
uggaaagaaucccagagg

SEQ ID NO: 25856 - RNA, 19 nt, Artificial Sequence
  Synthetic
cuggaaagaaucccagagg

SEQ ID NO: 25857 - RNA, 20 nt, Artificial Sequence
  Synthetic
ucuggaaagaaucccagagg

SEQ ID NO: 25858 - RNA, 21 nt, Artificial Sequence
  Synthetic
gucuggaaagaaucccagagg

SEQ ID NO: 25859 - RNA, 22 nt, Artificial Sequence
  Synthetic
ggucuggaaagaaucccagagg

SEQ ID NO: 25860 - RNA, 23 nt, Artificial Sequence
  Synthetic
uggucuggaaagaaucccagagg

SEQ ID NO: 25861 - RNA, 24 nt, Artificial Sequence
  Synthetic
guggucuggaaagaaucccagagg

SEQ ID NO: 25862 - RNA, 18 nt, Artificial Sequence
  Synthetic
aagaugauuaggcagagg

SEQ ID NO: 25863 - RNA, 19 nt, Artificial Sequence
  Synthetic
aaagaugauuaggcagagg

SEQ ID NO: 25864 - RNA, 20 nt, Artificial Sequence
  Synthetic
aaaagaugauuaggcagagg

SEQ ID NO: 25865 - RNA, 21 nt, Artificial Sequence
  Synthetic
caaaagaugauuaggcagagg

SEQ ID NO: 25866 - RNA, 22 nt, Artificial Sequence
  Synthetic
acaaaagaugauuaggcagagg

SEQ ID NO: 25867 - RNA, 23 nt, Artificial Sequence
  Synthetic
aacaaaagaugauuaggcagagg

SEQ ID NO: 25868 - RNA, 24 nt, Artificial Sequence
  Synthetic
gaacaaaagaugauuaggcagagg

SEQ ID NO: 25869 - RNA, 18 nt, Artificial Sequence
  Synthetic
ccaugcgacgugcagagg

SEQ ID NO: 25870 - RNA, 19 nt, Artificial Sequence
  Synthetic
uccaugcgacgugcagagg

SEQ ID NO: 25871 - RNA, 20 nt, Artificial Sequence
  Synthetic
cuccaugcgacgugcagagg

SEQ ID NO: 25872 - RNA, 21 nt, Artificial Sequence
  Synthetic
ucuccaugcgacgugcagagg

SEQ ID NO: 25873 - RNA, 22 nt, Artificial Sequence
  Synthetic
gucuccaugcgacgugcagagg

SEQ ID NO: 25874 - RNA, 23 nt, Artificial Sequence
  Synthetic
ggucuccaugcgacgugcagagg

SEQ ID NO: 25875 - RNA, 24 nt, Artificial Sequence
  Synthetic
uggucuccaugcgacgugcagagg

SEQ ID NO: 25876 - RNA, 18 nt, Artificial Sequence
  Synthetic
aguccgcguaaagagagg

SEQ ID NO: 25877 - RNA, 19 nt, Artificial Sequence
  Synthetic
gaguccgcguaaagagagg

SEQ ID NO: 25878 - RNA, 20 nt, Artificial Sequence
  Synthetic
ggaguccgcguaaagagagg

SEQ ID NO: 25879 - RNA, 21 nt, Artificial Sequence
  Synthetic
gggaguccgcguaaagagagg

SEQ ID NO: 25880 - RNA, 22 nt, Artificial Sequence
  Synthetic
ggggaguccgcguaaagagagg

SEQ ID NO: 25881 - RNA, 23 nt, Artificial Sequence
  Synthetic
cggggaguccgcguaaagagagg

SEQ ID NO: 25882 - RNA, 24 nt, Artificial Sequence
  Synthetic
gcggggaguccgcguaaagagagg

SEQ ID NO: 25883 - RNA, 18 nt, Artificial Sequence
  Synthetic
  misc_feature (10)..(10): n is a, c, g, or u
aaacagguanaguagagg

SEQ ID NO: 25884 - RNA, 19 nt, Artificial Sequence
  Synthetic
  misc_feature (11)..(11): n is a, c, g, or u
aaaacagguanaguagagg

SEQ ID NO: 25885 - RNA, 20 nt, Artificial Sequence
  Synthetic
  misc_feature (12)..(12): n is a, c, g, or u
gaaaacagguanaguagagg

SEQ ID NO: 25886 - RNA, 21 nt, Artificial Sequence
  Synthetic
  misc_feature (13)..(13): n is a, c, g, or u
ugaaaacagguanaguagagg

SEQ ID NO: 25887 - RNA, 22 nt, Artificial Sequence
  Synthetic
  misc_feature (14)..(14): n is a, c, g, or u
uugaaaacagguanaguagagg

SEQ ID NO: 25888 - RNA, 23 nt, Artificial Sequence
  Synthetic
  misc_feature (15)..(15): n is a, c, g, or u
auugaaaacagguanaguagagg

SEQ ID NO: 25889 - RNA, 24 nt, Artificial Sequence
  Synthetic
  misc_feature (16)..(16): n is a, c, g, or u
gauugaaaacagguanaguagagg

SEQ ID NO: 25890 - RNA, 18 nt, Artificial Sequence
  Synthetic
aaggcaucucgguagagg

SEQ ID NO: 25891 - RNA, 19 nt, Artificial Sequence
  Synthetic
uaaggcaucucgguagagg

SEQ ID NO: 25892 - RNA, 20 nt, Artificial Sequence
  Synthetic
cuaaggcaucucgguagagg

SEQ ID NO: 25893 - RNA, 21 nt, Artificial Sequence
  Synthetic
ucuaaggcaucucgguagagg

SEQ ID NO: 25894 - RNA, 22 nt, Artificial Sequence
  Synthetic
uucuaaggcaucucgguagagg

SEQ ID NO: 25895 - RNA, 23 nt, Artificial Sequence
  Synthetic
auucuaaggcaucucgguagagg

SEQ ID NO: 25896 - RNA, 24 nt, Artificial Sequence
  Synthetic
gauucuaaggcaucucgguagagg

SEQ ID NO: 25897 - RNA, 18 nt, Artificial Sequence
  Synthetic
augugugucccuuagagg

SEQ ID NO: 25898 - RNA, 19 nt, Artificial Sequence
  Synthetic
gaugugugucccuuagagg

SEQ ID NO: 25899 - RNA, 20 nt, Artificial Sequence
  Synthetic
ggaugugugucccuuagagg

SEQ ID NO: 25900 - RNA, 21 nt, Artificial Sequence
  Synthetic
uggaugugugucccuuagagg

SEQ ID NO: 25901 - RNA, 22 nt, Artificial Sequence
  Synthetic
guggaugugugucccuuagagg

SEQ ID NO: 25902 - RNA, 23 nt, Artificial Sequence
  Synthetic
uguggaugugugucccuuagagg

SEQ ID NO: 25903 - RNA, 24 nt, Artificial Sequence
  Synthetic
cuguggaugugugucccuuagagg

SEQ ID NO: 25904 - RNA, 18 nt, Artificial Sequence
  Synthetic
agaucuucgucugcgagg

SEQ ID NO: 25905 - RNA, 19 nt, Artificial Sequence
  Synthetic
gagaucuucgucugcgagg

SEQ ID NO: 25906 - RNA, 20 nt, Artificial Sequence
  Synthetic
ugagaucuucgucugcgagg

SEQ ID NO: 25907 - RNA, 21 nt, Artificial Sequence
  Synthetic
uugagaucuucgucugcgagg

SEQ ID NO: 25908 - RNA, 22 nt, Artificial Sequence
  Synthetic
auugagaucuucgucugcgagg

SEQ ID NO: 25909 - RNA, 23 nt, Artificial Sequence
  Synthetic
gauugagaucuucgucugcgagg

SEQ ID NO: 25910 - RNA, 24 nt, Artificial Sequence
  Synthetic
  misc_feature (1)..(1): n is a, c, g, or u
ngauugagaucuucgucugcgagg

SEQ ID NO: 25911 - RNA, 18 nt, Artificial Sequence
  Synthetic
caaggcacagcuuggagg

SEQ ID NO: 25912 - RNA, 19 nt, Artificial Sequence
  Synthetic
ccaaggcacagcuuggagg

SEQ ID NO: 25913 - RNA, 20 nt, Artificial Sequence
  Synthetic
cccaaggcacagcuuggagg

SEQ ID NO: 25914 - RNA, 21 nt, Artificial Sequence
  Synthetic
acccaaggcacagcuuggagg

SEQ ID NO: 25915 - RNA, 22 nt, Artificial Sequence
  Synthetic
cacccaaggcacagcuuggagg

SEQ ID NO: 25916 - RNA, 23 nt, Artificial Sequence
  Synthetic
ccacccaaggcacagcuuggagg

SEQ ID NO: 25917 - RNA, 24 nt, Artificial Sequence
  Synthetic
gccacccaaggcacagcuuggagg

SEQ ID NO: 25918 - RNA, 18 nt, Artificial Sequence
  Synthetic
gccaggacaaguuggagg

SEQ ID NO: 25919 - RNA, 19 nt, Artificial Sequence
  Synthetic
agccaggacaaguuggagg

SEQ ID NO: 25920 - RNA, 20 nt, Artificial Sequence
  Synthetic
uagccaggacaaguuggagg

SEQ ID NO: 25921 - RNA, 21 nt, Artificial Sequence
  Synthetic
auagccaggacaaguuggagg

SEQ ID NO: 25922 - RNA, 22 nt, Artificial Sequence
  Synthetic
gauagccaggacaaguuggagg

SEQ ID NO: 25923 - RNA, 23 nt, Artificial Sequence
  Synthetic
cgauagccaggacaaguuggagg

SEQ ID NO: 25924 - RNA, 24 nt, Artificial Sequence
  Synthetic
acgauagccaggacaaguuggagg

SEQ ID NO: 25925 - RNA, 18 nt, Artificial Sequence
  Synthetic
accaacaagaagaugagg

SEQ ID NO: 25926 - RNA, 19 nt, Artificial Sequence
  Synthetic
aaccaacaagaagaugagg

SEQ ID NO: 25927 - RNA, 20 nt, Artificial Sequence
  Synthetic
gaaccaacaagaagaugagg

SEQ ID NO: 25928 - RNA, 21 nt, Artificial Sequence
  Synthetic
agaaccaacaagaagaugagg

SEQ ID NO: 25929 - RNA, 22 nt, Artificial Sequence
  Synthetic
aagaaccaacaagaagaugagg

SEQ ID NO: 25930 - RNA, 23 nt, Artificial Sequence
  Synthetic
gaagaaccaacaagaagaugagg

SEQ ID NO: 25931 - RNA, 24 nt, Artificial Sequence
  Synthetic
agaagaaccaacaagaagaugagg

SEQ ID NO: 25932 - RNA, 18 nt, Artificial Sequence
  Synthetic
  misc_feature (14)..(15): n is a, c, g, or u
gucggccggaacgnnagg

SEQ ID NO: 25933 - RNA, 19 nt, Artificial Sequence
  Synthetic
  misc_feature (15)..(16): n is a, c, g, or u
cgucggccggaacgnnagg

SEQ ID NO: 25934 - RNA, 20 nt, Artificial Sequence
  Synthetic
  misc_feature (16)..(17): n is a, c, g, or u
ucgucggccggaacgnnagg

SEQ ID NO: 25935 - RNA, 21 nt, Artificial Sequence
  Synthetic
  misc_feature (17)..(18): n is a, c, g, or u
gucgucggccggaacgnnagg

SEQ ID NO: 25936 - RNA, 22 nt, Artificial Sequence
  Synthetic
  misc_feature (18)..(19): n is a, c, g, or u
cgucgucggccggaacgnnagg

SEQ ID NO: 25937 - RNA, 23 nt, Artificial Sequence
  Synthetic
  misc_feature (19)..(20): n is a, c, g, or u
ccgucgucggccggaacgnnagg

SEQ ID NO: 25938 - RNA, 24 nt, Artificial Sequence
  Synthetic
  misc_feature (20)..(21): n is a, c, g, or u
cccgucgucggccggaacgnnagg

SEQ ID NO: 25939 - RNA, 18 nt, Artificial Sequence
  Synthetic
uccggaaguguugauagg

SEQ ID NO: 25940 - RNA, 19 nt, Artificial Sequence
  Synthetic
cuccggaaguguugauagg

SEQ ID NO: 25941 - RNA, 20 nt, Artificial Sequence
  Synthetic
ucuccggaaguguugauagg

SEQ ID NO: 25942 - RNA, 21 nt, Artificial Sequence
  Synthetic
gucuccggaaguguugauagg

SEQ ID NO: 25943 - RNA, 22 nt, Artificial Sequence
  Synthetic
agucuccggaaguguugauagg

SEQ ID NO: 25944 - RNA, 23 nt, Artificial Sequence
  Synthetic
uagucuccggaaguguugauagg

SEQ ID NO: 25945 - RNA, 24 nt, Artificial Sequence
  Synthetic
guagucuccggaaguguugauagg

SEQ ID NO: 25946 - RNA, 18 nt, Artificial Sequence
  Synthetic
gaacaaaagaugauuagg

SEQ ID NO: 25947 - RNA, 19 nt, Artificial Sequence
  Synthetic
ugaacaaaagaugauuagg

SEQ ID NO: 25948 - RNA, 20 nt, Artificial Sequence
  Synthetic
augaacaaaagaugauuagg

SEQ ID NO: 25949 - RNA, 21 nt, Artificial Sequence
  Synthetic
caugaacaaaagaugauuagg

SEQ ID NO: 25950 - RNA, 22 nt, Artificial Sequence
  Synthetic
acaugaacaaaagaugauuagg

SEQ ID NO: 25951 - RNA, 23 nt, Artificial Sequence
  Synthetic
gacaugaacaaaagaugauuagg

SEQ ID NO: 25952 - RNA, 24 nt, Artificial Sequence
  Synthetic
ggacaugaacaaaagaugauuagg

SEQ ID NO: 25953 - RNA, 18 nt, Artificial Sequence
  Synthetic
cugagccaagagaaacgg

SEQ ID NO: 25954 - RNA, 19 nt, Artificial Sequence
  Synthetic
acugagccaagagaaacgg

SEQ ID NO: 25955 - RNA, 20 nt, Artificial Sequence
  Synthetic
aacugagccaagagaaacgg

SEQ ID NO: 25956 - RNA, 21 nt, Artificial Sequence
  Synthetic
aaacugagccaagagaaacgg

SEQ ID NO: 25957 - RNA, 22 nt, Artificial Sequence
  Synthetic
uaaacugagccaagagaaacgg

SEQ ID NO: 25958 - RNA, 23 nt, Artificial Sequence
  Synthetic
guaaacugagccaagagaaacgg

SEQ ID NO: 25959 - RNA, 24 nt, Artificial Sequence
  Synthetic
aguaaacugagccaagagaaacgg

SEQ ID NO: 25960 - RNA, 18 nt, Artificial Sequence
  Synthetic
gccguugccgagcaacgg

SEQ ID NO: 25961 - RNA, 19 nt, Artificial Sequence
  Synthetic
ggccguugccgagcaacgg

SEQ ID NO: 25962 - RNA, 20 nt, Artificial Sequence
  Synthetic
uggccguugccgagcaacgg

SEQ ID NO: 25963 - RNA, 21 nt, Artificial Sequence
  Synthetic
cuggccguugccgagcaacgg

SEQ ID NO: 25964 - RNA, 22 nt, Artificial Sequence
  Synthetic
ccuggccguugccgagcaacgg

SEQ ID NO: 25965 - RNA, 23 nt, Artificial Sequence
  Synthetic
gccuggccguugccgagcaacgg

SEQ ID NO: 25966 - RNA, 24 nt, Artificial Sequence
  Synthetic
ggccuggccguugccgagcaacgg

SEQ ID NO: 25967 - RNA, 18 nt, Artificial Sequence
  Synthetic
gaagcgaagugcacacgg

SEQ ID NO: 25968 - RNA, 19 nt, Artificial Sequence
  Synthetic
ugaagcgaagugcacacgg

SEQ ID NO: 25969 - RNA, 20 nt, Artificial Sequence
  Synthetic
gugaagcgaagugcacacgg

SEQ ID NO: 25970 - RNA, 21 nt, Artificial Sequence
  Synthetic
ggugaagcgaagugcacacgg

SEQ ID NO: 25971 - RNA, 22 nt, Artificial Sequence
  Synthetic
aggugaagcgaagugcacacgg

SEQ ID NO: 25972 - RNA, 23 nt, Artificial Sequence
  Synthetic
gaggugaagcgaagugcacacgg

SEQ ID NO: 25973 - RNA, 24 nt, Artificial Sequence
  Synthetic
agaggugaagcgaagugcacacgg

SEQ ID NO: 25974 - RNA, 18 nt, Artificial Sequence
  Synthetic
uaggucccggacagacgg

SEQ ID NO: 25975 - RNA, 19 nt, Artificial Sequence
  Synthetic
guaggucccggacagacgg

SEQ ID NO: 25976 - RNA, 20 nt, Artificial Sequence
  Synthetic
aguaggucccggacagacgg

SEQ ID NO: 25977 - RNA, 18 nt, Artificial Sequence
  Synthetic
auccaggucguugaccgg

SEQ ID NO: 25978 - RNA, 19 nt, Artificial Sequence
  Synthetic
aauccaggucguugaccgg

SEQ ID NO: 25979 - RNA, 20 nt, Artificial Sequence
  Synthetic
caauccaggucguugaccgg

SEQ ID NO: 25980 - RNA, 21 nt, Artificial Sequence
  Synthetic
ucaauccaggucguugaccgg

SEQ ID NO: 25981 - RNA, 22 nt, Artificial Sequence
  Synthetic
cucaauccaggucguugaccgg

SEQ ID NO: 25982 - RNA, 23 nt, Artificial Sequence
  Synthetic
ccucaauccaggucguugaccgg

SEQ ID NO: 25983 - RNA, 24 nt, Artificial Sequence
  Synthetic
uccucaauccaggucguugaccgg

SEQ ID NO: 25984 - RNA, 18 nt, Artificial Sequence
  Synthetic
gugucgaguaggucccgg

SEQ ID NO: 25985 - RNA, 19 nt, Artificial Sequence
  Synthetic
ggugucgaguaggucccgg

SEQ ID NO: 25986 - RNA, 20 nt, Artificial Sequence
  Synthetic
cggugucgaguaggucccgg

SEQ ID NO: 25987 - RNA, 18 nt, Artificial Sequence
  Synthetic
aaaaauugguaacagcgg

SEQ ID NO: 25988 - RNA, 19 nt, Artificial Sequence
  Synthetic
aaaaaauugguaacagcgg

SEQ ID NO: 25989 - RNA, 20 nt, Artificial Sequence
  Synthetic
caaaaaauugguaacagcgg

SEQ ID NO: 25990 - RNA, 21 nt, Artificial Sequence
  Synthetic
acaaaaaauugguaacagcgg

SEQ ID NO: 25991 - RNA, 22 nt, Artificial Sequence
  Synthetic
aacaaaaaauugguaacagcgg

SEQ ID NO: 25992 - RNA, 23 nt, Artificial Sequence
  Synthetic
uaacaaaaaauugguaacagcgg

SEQ ID NO: 25993 - RNA, 24 nt, Artificial Sequence
  Synthetic
auaacaaaaaauugguaacagcgg

SEQ ID NO: 25994 - RNA, 18 nt, Artificial Sequence
  Synthetic
  misc_feature (11)..(12): n is a, c, g, or u
ggccggaacgnnaggcgg

SEQ ID NO: 25995 - RNA, 19 nt, Artificial Sequence
  Synthetic
  misc_feature (12)..(13): n is a, c, g, or u
cggccggaacgnnaggcgg

SEQ ID NO: 25996 - RNA, 20 nt, Artificial Sequence
  Synthetic
  misc_feature (13)..(14): n is a, c, g, or u
ucggccggaacgnnaggcgg

SEQ ID NO: 25997 - RNA, 21 nt, Artificial Sequence
  Synthetic
  misc_feature (14)..(15): n is a, c, g, or u
gucggccggaacgnnaggcgg

SEQ ID NO: 25998 - RNA, 22 nt, Artificial Sequence
  Synthetic
  misc_feature (15)..(16): n is a, c, g, or u
cgucggccggaacgnnaggcgg

SEQ ID NO: 25999 - RNA, 23 nt, Artificial Sequence
  Synthetic
  misc_feature (16)..(17): n is a, c, g, or u
ucgucggccggaacgnnaggcgg

SEQ ID NO: 26000 - RNA, 24 nt, Artificial Sequence
  Synthetic
  misc_feature (17)..(18): n is a, c, g, or u
gucgucggccggaacgnnaggcgg

SEQ ID NO: 26001 - RNA, 18 nt, Artificial Sequence
  Synthetic
  misc_feature (12)..(12): n is a, c, g, or u
aggcggagaagngggcgg

SEQ ID NO: 26002 - RNA, 19 nt, Artificial Sequence
  Synthetic
  misc_feature (1)..(1): n is a, c, g, or u
  misc_feature (13)..(13): n is a, c, g, or u
naggcggagaagngggcgg

SEQ ID NO: 26003 - RNA, 20 nt, Artificial Sequence
  Synthetic
  misc_feature (1)..(2): n is a, c, g, or u
  misc_feature (14)..(14): n is a, c, g, or u
nnaggcggagaagngggcgg

SEQ ID NO: 26004 - RNA, 21 nt, Artificial Sequence
  Synthetic
  misc_feature (2)..(3): n is a, c, g, or u
  misc_feature (15)..(15): n is a, c, g, or u
gnnaggcggagaagngggcgg

SEQ ID NO: 26005 - RNA, 22 nt, Artificial Sequence
  Synthetic
  misc_feature (3)..(4): n is a, c, g, or u
  misc_feature (16)..(16): n is a, c, g, or u
cgnnaggcggagaagngggcgg

SEQ ID NO: 26006 - RNA, 23 nt, Artificial Sequence
  Synthetic
  misc_feature (4)..(5): n is a, c, g, or u
  misc_feature (17)..(17): n is a, c, g, or u
acgnnaggcggagaagngggcgg

SEQ ID NO: 26007 - RNA, 24 nt, Artificial Sequence
  Synthetic
  misc_feature (5)..(6): n is a, c, g, or u
  misc_feature (18)..(18): n is a, c, g, or u
aacgnnaggcggagaagngggcgg

SEQ ID NO: 26008 - RNA, 18 nt, Artificial Sequence
  Synthetic
uuccgcaguauggaucgg

SEQ ID NO: 26009 - RNA, 19 nt, Artificial Sequence
  Synthetic
guuccgcaguauggaucgg

SEQ ID NO: 26010 - RNA, 20 nt, Artificial Sequence
  Synthetic
aguuccgcaguauggaucgg

SEQ ID NO: 26011 - RNA, 18 nt, Artificial Sequence
  Synthetic
gauucuaaggcaucucgg

SEQ ID NO: 26012 - RNA, 19 nt, Artificial Sequence
  Synthetic
ugauucuaaggcaucucgg

SEQ ID NO: 26013 - RNA, 20 nt, Artificial Sequence
  Synthetic
gugauucuaaggcaucucgg

SEQ ID NO: 26014 - RNA, 21 nt, Artificial Sequence
  Synthetic
ggugauucuaaggcaucucgg

SEQ ID NO: 26015 - RNA, 22 nt, Artificial Sequence
  Synthetic
  misc_feature (1)..(1): n is a, c, g, or u
nggugauucuaaggcaucucgg

SEQ ID NO: 26016 - RNA, 23 nt, Artificial Sequence
  Synthetic
  misc_feature (2)..(2): n is a, c, g, or u
cnggugauucuaaggcaucucgg

SEQ ID NO: 26017 - RNA, 24 nt, Artificial Sequence
  Synthetic
  misc_feature (3)..(3): n is a, c, g, or u
ucnggugauucuaaggcaucucgg

SEQ ID NO: 26018 - RNA, 18 nt, Artificial Sequence
  Synthetic
gagagaggcaauagucgg

SEQ ID NO: 26019 - RNA, 19 nt, Artificial Sequence
  Synthetic
ugagagaggcaauagucgg

SEQ ID NO: 26020 - RNA, 20 nt, Artificial Sequence
  Synthetic
gugagagaggcaauagucgg

SEQ ID NO: 26021 - RNA, 21 nt, Artificial Sequence
  Synthetic
ugugagagaggcaauagucgg

SEQ ID NO: 26022 - RNA, 22 nt, Artificial Sequence
  Synthetic
augugagagaggcaauagucgg

SEQ ID NO: 26023 - RNA, 23 nt, Artificial Sequence
  Synthetic
gaugugagagaggcaauagucgg

SEQ ID NO: 26024 - RNA, 24 nt, Artificial Sequence
  Synthetic
ugaugugagagaggcaauagucgg

SEQ ID NO: 26025 - RNA, 18 nt, Artificial Sequence
  Synthetic
ggugcgacccgucgucgg

SEQ ID NO: 26026 - RNA, 19 nt, Artificial Sequence
  Synthetic
aggugcgacccgucgucgg

SEQ ID NO: 26027 - RNA, 20 nt, Artificial Sequence
  Synthetic
gaggugcgacccgucgucgg

SEQ ID NO: 26028 - RNA, 18 nt, Artificial Sequence
  Synthetic
aauacaggcauacaaggg

SEQ ID NO: 26029 - RNA, 19 nt, Artificial Sequence
  Synthetic
uaauacaggcauacaaggg

SEQ ID NO: 26030 - RNA, 20 nt, Artificial Sequence
  Synthetic
guaauacaggcauacaaggg

SEQ ID NO: 26031 - RNA, 21 nt, Artificial Sequence
  Synthetic
gguaauacaggcauacaaggg

SEQ ID NO: 26032 - RNA, 22 nt, Artificial Sequence
  Synthetic
cgguaauacaggcauacaaggg

SEQ ID NO: 26033 - RNA, 23 nt, Artificial Sequence
  Synthetic
gcgguaauacaggcauacaaggg

SEQ ID NO: 26034 - RNA, 24 nt, Artificial Sequence
  Synthetic
agcgguaauacaggcauacaaggg

SEQ ID NO: 26035 - RNA, 18 nt, Artificial Sequence
  Synthetic
aggcaucucgguagaggg

SEQ ID NO: 26036 - RNA, 19 nt, Artificial Sequence
  Synthetic
aaggcaucucgguagaggg

SEQ ID NO: 26037 - RNA, 20 nt, Artificial Sequence
  Synthetic
uaaggcaucucgguagaggg

SEQ ID NO: 26038 - RNA, 21 nt, Artificial Sequence
  Synthetic
cuaaggcaucucgguagaggg

SEQ ID NO: 26039 - RNA, 22 nt, Artificial Sequence
  Synthetic
ucuaaggcaucucgguagaggg

SEQ ID NO: 26040 - RNA, 23 nt, Artificial Sequence
  Synthetic
uucuaaggcaucucgguagaggg

SEQ ID NO: 26041 - RNA, 24 nt, Artificial Sequence
  Synthetic
auucuaaggcaucucgguagaggg

SEQ ID NO: 26042 - RNA, 18 nt, Artificial Sequence
  Synthetic
ugagccaagagaaacggg

SEQ ID NO: 26043 - RNA, 19 nt, Artificial Sequence
  Synthetic
cugagccaagagaaacggg

SEQ ID NO: 26044 - RNA, 20 nt, Artificial Sequence
  Synthetic
acugagccaagagaaacggg

SEQ ID NO: 26045 - RNA, 21 nt, Artificial Sequence
  Synthetic
aacugagccaagagaaacggg

SEQ ID NO: 26046 - RNA, 22 nt, Artificial Sequence
  Synthetic
aaacugagccaagagaaacggg

SEQ ID NO: 26047 - RNA, 23 nt, Artificial Sequence
  Synthetic
uaaacugagccaagagaaacggg

SEQ ID NO: 26048 - RNA, 24 nt, Artificial Sequence
  Synthetic
guaaacugagccaagagaaacggg

SEQ ID NO: 26049 - RNA, 18 nt, Artificial Sequence
  Synthetic
ccguugccgagcaacggg

SEQ ID NO: 26050 - RNA, 19 nt, Artificial Sequence
  Synthetic
gccguugccgagcaacggg

SEQ ID NO: 26051 - RNA, 20 nt, Artificial Sequence
  Synthetic
ggccguugccgagcaacggg

SEQ ID NO: 26052 - RNA, 21 nt, Artificial Sequence
  Synthetic
uggccguugccgagcaacggg

SEQ ID NO: 26053 - RNA, 22 nt, Artificial Sequence
  Synthetic
cuggccguugccgagcaacggg

SEQ ID NO: 26054 - RNA, 23 nt, Artificial Sequence
  Synthetic
ccuggccguugccgagcaacggg

SEQ ID NO: 26055 - RNA, 24 nt, Artificial Sequence
  Synthetic
gccuggccguugccgagcaacggg

SEQ ID NO: 26056 - RNA, 18 nt, Artificial Sequence
  Synthetic
aggucccggacagacggg

SEQ ID NO: 26057 - RNA, 19 nt, Artificial Sequence
  Synthetic
uaggucccggacagacggg

SEQ ID NO: 26058 - RNA, 20 nt, Artificial Sequence
  Synthetic
guaggucccggacagacggg

SEQ ID NO: 26059 - RNA, 18 nt, Artificial Sequence
  Synthetic
uccaggucguugaccggg

SEQ ID NO: 26060 - RNA, 19 nt, Artificial Sequence
  Synthetic
auccaggucguugaccggg

SEQ ID NO: 26061 - RNA, 20 nt, Artificial Sequence
  Synthetic
aauccaggucguugaccggg

SEQ ID NO: 26062 - RNA, 18 nt, Artificial Sequence
  Synthetic
cguugccgagcaacgggg

SEQ ID NO: 26063 - RNA, 19 nt, Artificial Sequence
  Synthetic
ccguugccgagcaacgggg

SEQ ID NO: 26064 - RNA, 20 nt, Artificial Sequence
  Synthetic
gccguugccgagcaacgggg

SEQ ID NO: 26065 - RNA, 21 nt, Artificial Sequence
  Synthetic
ggccguugccgagcaacgggg

SEQ ID NO: 26066 - RNA, 22 nt, Artificial Sequence
  Synthetic
uggccguugccgagcaacgggg

SEQ ID NO: 26067 - RNA, 23 nt, Artificial Sequence
  Synthetic
cuggccguugccgagcaacgggg

SEQ ID NO: 26068 - RNA, 24 nt, Artificial Sequence
  Synthetic
ccuggccguugccgagcaacgggg

SEQ ID NO: 26069 - RNA, 18 nt, Artificial Sequence
  Synthetic
ccaggucguugaccgggg

SEQ ID NO: 26070 - RNA, 19 nt, Artificial Sequence
  Synthetic
uccaggucguugaccgggg

SEQ ID NO: 26071 - RNA, 20 nt, Artificial Sequence
  Synthetic
auccaggucguugaccgggg

SEQ ID NO: 26072 - RNA, 21 nt, Artificial Sequence
  Synthetic
aauccaggucguugaccgggg

SEQ ID NO: 26073 - RNA, 22 nt, Artificial Sequence
  Synthetic
caauccaggucguugaccgggg

SEQ ID NO: 26074 - RNA, 23 nt, Artificial Sequence
  Synthetic
ucaauccaggucguugaccgggg

SEQ ID NO: 26075 - RNA, 24 nt, Artificial Sequence
  Synthetic
cucaauccaggucguugaccgggg

SEQ ID NO: 26076 - RNA, 18 nt, Artificial Sequence
  Synthetic
aaggccaccguguggggg

SEQ ID NO: 26077 - RNA, 19 nt, Artificial Sequence
  Synthetic
gaaggccaccguguggggg

SEQ ID NO: 26078 - RNA, 20 nt, Artificial Sequence
  Synthetic
agaaggccaccguguggggg

SEQ ID NO: 26079 - RNA, 21 nt, Artificial Sequence
  Synthetic
cagaaggccaccguguggggg

SEQ ID NO: 26080 - RNA, 22 nt, Artificial Sequence
  Synthetic
ccagaaggccaccguguggggg

SEQ ID NO: 26081 - RNA, 23 nt, Artificial Sequence
  Synthetic
cccagaaggccaccguguggggg

SEQ ID NO: 26082 - RNA, 24 nt, Artificial Sequence
  Synthetic
ccccagaaggccaccguguggggg

SEQ ID NO: 26083 - RNA, 18 nt, Artificial Sequence
  Synthetic
aaaagccagacagugggg

SEQ ID NO: 26084 - RNA, 19 nt, Artificial Sequence
  Synthetic
uaaaagccagacagugggg

SEQ ID NO: 26085 - RNA, 20 nt, Artificial Sequence
  Synthetic
cuaaaagccagacagugggg

SEQ ID NO: 26086 - RNA, 21 nt, Artificial Sequence
  Synthetic
acuaaaagccagacagugggg

SEQ ID NO: 26087 - RNA, 22 nt, Artificial Sequence
  Synthetic
aacuaaaagccagacagugggg

SEQ ID NO: 26088 - RNA, 23 nt, Artificial Sequence
  Synthetic
uaacuaaaagccagacagugggg

SEQ ID NO: 26089 - RNA, 24 nt, Artificial Sequence
  Synthetic
auaacuaaaagccagacagugggg

SEQ ID NO: 26090 - RNA, 18 nt, Artificial Sequence
  Synthetic
  misc_feature (3)..(3): n is a, c, g, or u
canccuagcagccauggg

SEQ ID NO: 26091 - RNA, 19 nt, Artificial Sequence
  Synthetic
  misc_feature (4)..(4): n is a, c, g, or u
acanccuagcagccauggg

SEQ ID NO: 26092 - RNA, 20 nt, Artificial Sequence
  Synthetic
  misc_feature (5)..(5): n is a, c, g, or u
cacanccuagcagccauggg

SEQ ID NO: 26093 - RNA, 21 nt, Artificial Sequence
  Synthetic
  misc_feature (6)..(6): n is a, c, g, or u
gcacanccuagcagccauggg

SEQ ID NO: 26094 - RNA, 22 nt, Artificial Sequence
  Synthetic
  misc_feature (7)..(7): n is a, c, g, or u
agcacanccuagcagccauggg

SEQ ID NO: 26095 - RNA, 23 nt, Artificial Sequence
  Synthetic
  misc_feature (8)..(8): n is a, c, g, or u
cagcacanccuagcagccauggg

SEQ ID NO: 26096 - RNA, 24 nt, Artificial Sequence
  Synthetic
  misc_feature (9)..(9): n is a, c, g, or u
gcagcacanccuagcagccauggg

SEQ ID NO: 26097 - RNA, 18 nt, Artificial Sequence
  Synthetic
aaagcccaagaugauggg

SEQ ID NO: 26098 - RNA, 19 nt, Artificial Sequence
  Synthetic
gaaagcccaagaugauggg

SEQ ID NO: 26099 - RNA, 20 nt, Artificial Sequence
  Synthetic
cgaaagcccaagaugauggg

SEQ ID NO: 26100 - RNA, 21 nt, Artificial Sequence
  Synthetic
ccgaaagcccaagaugauggg

SEQ ID NO: 26101 - RNA, 22 nt, Artificial Sequence
  Synthetic
uccgaaagcccaagaugauggg

SEQ ID NO: 26102 - RNA, 23 nt, Artificial Sequence
  Synthetic
uuccgaaagcccaagaugauggg

SEQ ID NO: 26103 - RNA, 24 nt, Artificial Sequence
  Synthetic
uuuccgaaagcccaagaugauggg

SEQ ID NO: 26104 - RNA, 18 nt, Artificial Sequence
  Synthetic
agagguggagagacuggg

SEQ ID NO: 26105 - RNA, 19 nt, Artificial Sequence
  Synthetic
uagagguggagagacuggg

SEQ ID NO: 26106 - RNA, 20 nt, Artificial Sequence
  Synthetic
uuagagguggagagacuggg

SEQ ID NO: 26107 - RNA, 21 nt, Artificial Sequence
  Synthetic
cuuagagguggagagacuggg

SEQ ID NO: 26108 - RNA, 22 nt, Artificial Sequence
  Synthetic
ccuuagagguggagagacuggg

SEQ ID NO: 26109 - RNA, 23 nt, Artificial Sequence
  Synthetic
cccuuagagguggagagacuggg

SEQ ID NO: 26110 - RNA, 24 nt, Artificial Sequence
  Synthetic
ucccuuagagguggagagacuggg

SEQ ID NO: 26111 - RNA, 18 nt, Artificial Sequence
  Synthetic
uaaaagccagacaguggg

SEQ ID NO: 26112 - RNA, 19 nt, Artificial Sequence
  Synthetic
cuaaaagccagacaguggg

SEQ ID NO: 26113 - RNA, 20 nt, Artificial Sequence
  Synthetic
acuaaaagccagacaguggg

SEQ ID NO: 26114 - RNA, 21 nt, Artificial Sequence
  Synthetic
aacuaaaagccagacaguggg

SEQ ID NO: 26115 - RNA, 22 nt, Artificial Sequence
  Synthetic
uaacuaaaagccagacaguggg

SEQ ID NO: 26116 - RNA, 23 nt, Artificial Sequence
  Synthetic
auaacuaaaagccagacaguggg

SEQ ID NO: 26117 - RNA, 24 nt, Artificial Sequence
  Synthetic
uauaacuaaaagccagacaguggg

SEQ ID NO: 26118 - RNA, 18 nt, Artificial Sequence
  Synthetic
gaaucccagaggauuggg

SEQ ID NO: 26119 - RNA, 19 nt, Artificial Sequence
  Synthetic
agaaucccagaggauuggg

SEQ ID NO: 26120 - RNA, 20 nt, Artificial Sequence
  Synthetic
aagaaucccagaggauuggg

SEQ ID NO: 26121 - RNA, 21 nt, Artificial Sequence
  Synthetic
aaagaaucccagaggauuggg

SEQ ID NO: 26122 - RNA, 22 nt, Artificial Sequence
  Synthetic
gaaagaaucccagaggauuggg

SEQ ID NO: 26123 - RNA, 23 nt, Artificial Sequence
  Synthetic
ggaaagaaucccagaggauuggg

SEQ ID NO: 26124 - RNA, 24 nt, Artificial Sequence
  Synthetic
uggaaagaaucccagaggauuggg

SEQ ID NO: 26125 - RNA, 18 nt, Artificial Sequence
  Synthetic
guauuuaguaacuuuggg

SEQ ID NO: 26126 - RNA, 19 nt, Artificial Sequence
  Synthetic
aguauuuaguaacuuuggg

SEQ ID NO: 26127 - RNA, 20 nt, Artificial Sequence
  Synthetic
aaguauuuaguaacuuuggg

SEQ ID NO: 26128 - RNA, 21 nt, Artificial Sequence
  Synthetic
gaaguauuuaguaacuuuggg

SEQ ID NO: 26129 - RNA, 22 nt, Artificial Sequence
  Synthetic
ggaaguauuuaguaacuuuggg

SEQ ID NO: 26130 - RNA, 23 nt, Artificial Sequence
  Synthetic
gggaaguauuuaguaacuuuggg

SEQ ID NO: 26131 - RNA, 24 nt, Artificial Sequence
  Synthetic
agggaaguauuuaguaacuuuggg

SEQ ID NO: 26132 - RNA, 18 nt, Artificial Sequence
  Synthetic
  misc_feature (14)..(14): n is a, c, g, or u
  misc_feature (16)..(16): n is a, c, g, or u
aacccauaaagugnangg

SEQ ID NO: 26133 - RNA, 19 nt, Artificial Sequence
  Synthetic
  misc_feature (15)..(15): n is a, c, g, or u
  misc_feature (17)..(17): n is a, c, g, or u
uaacccauaaagugnangg

SEQ ID NO: 26134 - RNA, 20 nt, Artificial Sequence
  Synthetic
  misc_feature (16)..(16): n is a, c, g, or u
  misc_feature (18)..(18): n is a, c, g, or u
auaacccauaaagugnangg

SEQ ID NO: 26135 - RNA, 21 nt, Artificial Sequence
  Synthetic
  misc_feature (17)..(17): n is a, c, g, or u
  misc_feature (19)..(19): n is a, c, g, or u
uauaacccauaaagugnangg

SEQ ID NO: 26136 - RNA, 22 nt, Artificial Sequence
  Synthetic
  misc_feature (18)..(18): n is a, c, g, or u
  misc_feature (20)..(20): n is a, c, g, or u
auauaacccauaaagugnangg

SEQ ID NO: 26137 - RNA, 23 nt, Artificial Sequence
  Synthetic
  misc_feature (1)..(1): n is a, c, g, or u
  misc_feature (19)..(19): n is a, c, g, or u
  misc_feature (21)..(21): n is a, c, g, or u
nauauaacccauaaagugnangg

SEQ ID NO: 26138 - RNA, 24 nt, Artificial Sequence
  Synthetic
  misc_feature (2)..(2): n is a, c, g, or u
  misc_feature (20)..(20): n is a, c, g, or u
  misc_feature (22)..(22): n is a, c, g, or u
unauauaacccauaaagugnangg

SEQ ID NO: 26139 - RNA, 18 nt, Artificial Sequence
  Synthetic
  misc_feature (4)..(4): n is a, c, g, or u
acanccuagcagccaugg

SEQ ID NO: 26140 - RNA, 19 nt, Artificial Sequence
  Synthetic
  misc_feature (5)..(5): n is a, c, g, or u
cacanccuagcagccaugg

SEQ ID NO: 26141 - RNA, 20 nt, Artificial Sequence
  Synthetic
  misc_feature (6)..(6): n is a, c, g, or u
gcacanccuagcagccaugg

SEQ ID NO: 26142 - RNA, 21 nt, Artificial Sequence
  Synthetic
  misc_feature (7)..(7): n is a, c, g, or u
agcacanccuagcagccaugg

SEQ ID NO: 26143 - RNA, 22 nt, Artificial Sequence
  Synthetic
  misc_feature (8)..(8): n is a, c, g, or u
cagcacanccuagcagccaugg

SEQ ID NO: 26144 - RNA, 23 nt, Artificial Sequence
  Synthetic
  misc_feature (9)..(9): n is a, c, g, or u
gcagcacanccuagcagccaugg

SEQ ID NO: 26145 - RNA, 24 nt, Artificial Sequence
  Synthetic
  misc_feature (10)..(10): n is a, c, g, or u
ggcagcacanccuagcagccaugg

SEQ ID NO: 26146 - RNA, 18 nt, Artificial Sequence
  Synthetic
gaaagcccaagaugaugg

SEQ ID NO: 26147 - RNA, 19 nt, Artificial Sequence
  Synthetic
cgaaagcccaagaugaugg

SEQ ID NO: 26148 - RNA, 20 nt, Artificial Sequence
  Synthetic
ccgaaagcccaagaugaugg

SEQ ID NO: 26149 - RNA, 21 nt, Artificial Sequence
  Synthetic
uccgaaagcccaagaugaugg

SEQ ID NO: 26150 - RNA, 22 nt, Artificial Sequence
  Synthetic
uuccgaaagcccaagaugaugg

SEQ ID NO: 26151 - RNA, 23 nt, Artificial Sequence
  Synthetic
uuuccgaaagcccaagaugaugg

SEQ ID NO: 26152 - RNA, 24 nt, Artificial Sequence
  Synthetic
uuuuccgaaagcccaagaugaugg

SEQ ID NO: 26153 - RNA, 18 nt, Artificial Sequence
  Synthetic
aggaguuccgcaguaugg

SEQ ID NO: 26154 - RNA, 19 nt, Artificial Sequence
  Synthetic
uaggaguuccgcaguaugg

SEQ ID NO: 26155 - RNA, 20 nt, Artificial Sequence
  Synthetic
cuaggaguuccgcaguaugg

SEQ ID NO: 26156 - RNA, 21 nt, Artificial Sequence
  Synthetic
gcuaggaguuccgcaguaugg

SEQ ID NO: 26157 - RNA, 22 nt, Artificial Sequence
  Synthetic
  misc_feature (1)..(1): n is a, c, g, or u
ngcuaggaguuccgcaguaugg

SEQ ID NO: 26158 - RNA, 23 nt, Artificial Sequence
  Synthetic
  misc_feature (2)..(2): n is a, c, g, or u
cngcuaggaguuccgcaguaugg

SEQ ID NO: 26159 - RNA, 24 nt, Artificial Sequence
  Synthetic
  misc_feature (3)..(3): n is a, c, g, or u
gcngcuaggaguuccgcaguaugg

SEQ ID NO: 26160 - RNA, 18 nt, Artificial Sequence
  Synthetic
ugggggugugaacccugg

SEQ ID NO: 26161 - RNA, 19 nt, Artificial Sequence
  Synthetic
gugggggugugaacccugg

SEQ ID NO: 26162 - RNA, 20 nt, Artificial Sequence
  Synthetic
ugugggggugugaacccugg

SEQ ID NO: 26163 - RNA, 21 nt, Artificial Sequence
  Synthetic
gugugggggugugaacccugg

SEQ ID NO: 26164 - RNA, 22 nt, Artificial Sequence
  Synthetic
cgugugggggugugaacccugg

SEQ ID NO: 26165 - RNA, 23 nt, Artificial Sequence
  Synthetic
ccgugugggggugugaacccugg

SEQ ID NO: 26166 - RNA, 24 nt, Artificial Sequence
  Synthetic
accgugugggggugugaacccugg

SEQ ID NO: 26167 - RNA, 18 nt, Artificial Sequence
  Synthetic
auccaacugguggucugg

SEQ ID NO: 26168 - RNA, 19 nt, Artificial Sequence
  Synthetic
gauccaacugguggucugg

SEQ ID NO: 26169 - RNA, 20 nt, Artificial Sequence
  Synthetic
ggauccaacugguggucugg

SEQ ID NO: 26170 - RNA, 21 nt, Artificial Sequence
  Synthetic
uggauccaacugguggucugg

SEQ ID NO: 26171 - RNA, 22 nt, Artificial Sequence
  Synthetic
guggauccaacugguggucugg

SEQ ID NO: 26172 - RNA, 23 nt, Artificial Sequence
  Synthetic
aguggauccaacugguggucugg

SEQ ID NO: 26173 - RNA, 24 nt, Artificial Sequence
  Synthetic
uaguggauccaacugguggucugg

SEQ ID NO: 26174 - RNA, 18 nt, Artificial Sequence
  Synthetic
cuaaaagccagacagugg

SEQ ID NO: 26175 - RNA, 19 nt, Artificial Sequence
  Synthetic
acuaaaagccagacagugg

SEQ ID NO: 26176 - RNA, 20 nt, Artificial Sequence
  Synthetic
aacuaaaagccagacagugg

SEQ ID NO: 26177 - RNA, 21 nt, Artificial Sequence
  Synthetic
uaacuaaaagccagacagugg

SEQ ID NO: 26178 - RNA, 22 nt, Artificial Sequence
  Synthetic
auaacuaaaagccagacagugg

SEQ ID NO: 26179 - RNA, 23 nt, Artificial Sequence
  Synthetic
uauaacuaaaagccagacagugg

SEQ ID NO: 26180 - RNA, 24 nt, Artificial Sequence
  Synthetic
auauaacuaaaagccagacagugg

SEQ ID NO: 26181 - RNA, 18 nt, Artificial Sequence
  Synthetic
uuccuugagcaagagugg

SEQ ID NO: 26182 - RNA, 19 nt, Artificial Sequence
  Synthetic
guuccuugagcaagagugg

SEQ ID NO: 26183 - RNA, 20 nt, Artificial Sequence
  Synthetic
gguuccuugagcaagagugg

SEQ ID NO: 26184 - RNA, 21 nt, Artificial Sequence
  Synthetic
agguuccuugagcaagagugg

SEQ ID NO: 26185 - RNA, 22 nt, Artificial Sequence
  Synthetic
gagguuccuugagcaagagugg

SEQ ID NO: 26186 - RNA, 23 nt, Artificial Sequence
  Synthetic
agagguuccuugagcaagagugg

SEQ ID NO: 26187 - RNA, 24 nt, Artificial Sequence
  Synthetic
uagagguuccuugagcaagagugg

SEQ ID NO: 26188 - RNA, 18 nt, Artificial Sequence
  Synthetic
ugugucccuuagaggugg

SEQ ID NO: 26189 - RNA, 19 nt, Artificial Sequence
  Synthetic
gugugucccuuagaggugg

SEQ ID NO: 26190 - RNA, 20 nt, Artificial Sequence
  Synthetic
ugugugucccuuagaggugg

SEQ ID NO: 26191 - RNA, 21 nt, Artificial Sequence
  Synthetic
augugugucccuuagaggugg

SEQ ID NO: 26192 - RNA, 22 nt, Artificial Sequence
  Synthetic
gaugugugucccuuagaggugg

SEQ ID NO: 26193 - RNA, 23 nt, Artificial Sequence
  Synthetic
ggaugugugucccuuagaggugg

SEQ ID NO: 26194 - RNA, 24 nt, Artificial Sequence
  Synthetic
uggaugugugucccuuagaggugg

SEQ ID NO: 26195 - RNA, 18 nt, Artificial Sequence
  Synthetic
aguggauccaacuggugg

SEQ ID NO: 26196 - RNA, 19 nt, Artificial Sequence
  Synthetic
uaguggauccaacuggugg

SEQ ID NO: 26197 - RNA, 20 nt, Artificial Sequence
  Synthetic
auaguggauccaacuggugg

SEQ ID NO: 26198 - RNA, 21 nt, Artificial Sequence
  Synthetic
aauaguggauccaacuggugg

SEQ ID NO: 26199 - RNA, 22 nt, Artificial Sequence
  Synthetic
gaauaguggauccaacuggugg

SEQ ID NO: 26200 - RNA, 23 nt, Artificial Sequence
  Synthetic
ugaauaguggauccaacuggugg

SEQ ID NO: 26201 - RNA, 24 nt, Artificial Sequence
  Synthetic
cugaauaguggauccaacuggugg

SEQ ID NO: 26202 - RNA, 18 nt, Artificial Sequence
  Synthetic
  misc_feature (15)..(15): n is a, c, g, or u
ugccugagagcagunugg

SEQ ID NO: 26203 - RNA, 19 nt, Artificial Sequence
  Synthetic
  misc_feature (16)..(16): n is a, c, g, or u
uugccugagagcagunugg

SEQ ID NO: 26204 - RNA, 20 nt, Artificial Sequence
  Synthetic
  misc_feature (17)..(17): n is a, c, g, or u
cuugccugagagcagunugg

SEQ ID NO: 26205 - RNA, 21 nt, Artificial Sequence
  Synthetic
  misc_feature (18)..(18): n is a, c, g, or u
gcuugccugagagcagunugg

SEQ ID NO: 26206 - RNA, 22 nt, Artificial Sequence
  Synthetic
  misc_feature (19)..(19): n is a, c, g, or u
agcuugccugagagcagunugg

SEQ ID NO: 26207 - RNA, 23 nt, Artificial Sequence
  Synthetic
  misc_feature (20)..(20): n is a, c, g, or u
uagcuugccugagagcagunugg

SEQ ID NO: 26208 - RNA, 24 nt, Artificial Sequence
  Synthetic
  misc_feature (21)..(21): n is a, c, g, or u
auagcuugccugagagcagunugg

SEQ ID NO: 26209 - RNA, 18 nt, Artificial Sequence
  Synthetic
uuccugaccuccgauugg

SEQ ID NO: 26210 - RNA, 19 nt, Artificial Sequence
  Synthetic
cuuccugaccuccgauugg

SEQ ID NO: 26211 - RNA, 20 nt, Artificial Sequence
  Synthetic
ucuuccugaccuccgauugg

SEQ ID NO: 26212 - RNA, 21 nt, Artificial Sequence
  Synthetic
uucuuccugaccuccgauugg

SEQ ID NO: 26213 - RNA, 22 nt, Artificial Sequence
  Synthetic
uuucuuccugaccuccgauugg

SEQ ID NO: 26214 - RNA, 23 nt, Artificial Sequence
  Synthetic
cuuucuuccugaccuccgauugg

SEQ ID NO: 26215 - RNA, 24 nt, Artificial Sequence
  Synthetic
gcuuucuuccugaccuccgauugg

SEQ ID NO: 26216 - RNA, 18 nt, Artificial Sequence
  Synthetic
gcgucagcaaacacuugg

SEQ ID NO: 26217 - RNA, 19 nt, Artificial Sequence
  Synthetic
ugcgucagcaaacacuugg

SEQ ID NO: 26218 - RNA, 20 nt, Artificial Sequence
  Synthetic
uugcgucagcaaacacuugg

SEQ ID NO: 26219 - RNA, 21 nt, Artificial Sequence
  Synthetic
guugcgucagcaaacacuugg

SEQ ID NO: 26220 - RNA, 22 nt, Artificial Sequence
  Synthetic
gguugcgucagcaaacacuugg

SEQ ID NO: 26221 - RNA, 23 nt, Artificial Sequence
  Synthetic
ggguugcgucagcaaacacuugg

SEQ ID NO: 26222 - RNA, 24 nt, Artificial Sequence
  Synthetic
gggguugcgucagcaaacacuugg

SEQ ID NO: 26223 - RNA, 18 nt, Artificial Sequence
  Synthetic
ggauccaacagugcuugg

SEQ ID NO: 26224 - RNA, 19 nt, Artificial Sequence
  Synthetic
cggauccaacagugcuugg

SEQ ID NO: 26225 - RNA, 20 nt, Artificial Sequence
  Synthetic
ucggauccaacagugcuugg

SEQ ID NO: 26226 - RNA, 21 nt, Artificial Sequence
  Synthetic
cucggauccaacagugcuugg

SEQ ID NO: 26227 - RNA, 22 nt, Artificial Sequence
  Synthetic
ucucggauccaacagugcuugg

SEQ ID NO: 26228 - RNA, 23 nt, Artificial Sequence
  Synthetic
cucucggauccaacagugcuugg

SEQ ID NO: 26229 - RNA, 24 nt, Artificial Sequence
  Synthetic
acucucggauccaacagugcuugg

SEQ ID NO: 26230 - RNA, 18 nt, Artificial Sequence
  Synthetic
aaaggccuuguaaguugg

SEQ ID NO: 26231 - RNA, 19 nt, Artificial Sequence
  Synthetic
gaaaggccuuguaaguugg

SEQ ID NO: 26232 - RNA, 20 nt, Artificial Sequence
  Synthetic
agaaaggccuuguaaguugg

SEQ ID NO: 26233 - RNA, 21 nt, Artificial Sequence
  Synthetic
gagaaaggccuuguaaguugg

SEQ ID NO: 26234 - RNA, 22 nt, Artificial Sequence
  Synthetic
agagaaaggccuuguaaguugg

SEQ ID NO: 26235 - RNA, 23 nt, Artificial Sequence
  Synthetic
cagagaaaggccuuguaaguugg

SEQ ID NO: 26236 - RNA, 24 nt, Artificial Sequence
  Synthetic
acagagaaaggccuuguaaguugg

SEQ ID NO: 26237 - RNA, 18 nt, Artificial Sequence
  Synthetic
aguauuuaguaacuuugg

SEQ ID NO: 26238 - RNA, 19 nt, Artificial Sequence
  Synthetic
aaguauuuaguaacuuugg

SEQ ID NO: 26239 - RNA, 20 nt, Artificial Sequence
  Synthetic
gaaguauuuaguaacuuugg

SEQ ID NO: 26240 - RNA, 21 nt, Artificial Sequence
  Synthetic
ggaaguauuuaguaacuuugg

SEQ ID NO: 26241 - RNA, 22 nt, Artificial Sequence
  Synthetic
gggaaguauuuaguaacuuugg

SEQ ID NO: 26242 - RNA, 23 nt, Artificial Sequence
  Synthetic
agggaaguauuuaguaacuuugg

SEQ ID NO: 26243 - RNA, 24 nt, Artificial Sequence
  Synthetic
aagggaaguauuuaguaacuuugg

SEQ ID NO: 26244 - RNA, 18 nt, Artificial Sequence
  Synthetic
uuccguccgaagguuugg

SEQ ID NO: 26245 - RNA, 19 nt, Artificial Sequence
  Synthetic
uuuccguccgaagguuugg

SEQ ID NO: 26246 - RNA, 20 nt, Artificial Sequence
  Synthetic
auuuccguccgaagguuugg

SEQ ID NO: 26247 - RNA, 18 nt, Artificial Sequence
  Synthetic
ggggacugcgaauuuugg

SEQ ID NO: 26248 - RNA, 19 nt, Artificial Sequence
  Synthetic
uggggacugcgaauuuugg

SEQ ID NO: 26249 - RNA, 20 nt, Artificial Sequence
  Synthetic
uuggggacugcgaauuuugg

SEQ ID NO: 26250 - RNA, 21 nt, Artificial Sequence
  Synthetic
auuggggacugcgaauuuugg

SEQ ID NO: 26251 - RNA, 22 nt, Artificial Sequence
  Synthetic
gauuggggacugcgaauuuugg

SEQ ID NO: 26252 - RNA, 23 nt, Artificial Sequence
  Synthetic
agauuggggacugcgaauuuugg

SEQ ID NO: 26253 - RNA, 24 nt, Artificial Sequence
  Synthetic
gagauuggggacugcgaauuuugg

SEQ ID NO: 26254 - RNA, 18 nt, Artificial Sequence
  Synthetic
  misc_feature (17)..(17): n is a, c, g, or u
ugcgagcgaaacaagcng

SEQ ID NO: 26255 - RNA, 19 nt, Artificial Sequence
  Synthetic
  misc_feature (18)..(18): n is a, c, g, or u
cugcgagcgaaacaagcng

SEQ ID NO: 26256 - RNA, 20 nt, Artificial Sequence
  Synthetic
  misc_feature (19)..(19): n is a, c, g, or u
gcugcgagcgaaacaagcng

SEQ ID NO: 26257 - RNA, 21 nt, Artificial Sequence
  Synthetic
  misc_feature (1)..(1): n is a, c, g, or u
  misc_feature (20)..(20): n is a, c, g, or u
ngcugcgagcgaaacaagcng

SEQ ID NO: 26258 - RNA, 22 nt, Artificial Sequence
  Synthetic
  misc_feature (2)..(2): n is a, c, g, or u
  misc_feature (21)..(21): n is a, c, g, or u
cngcugcgagcgaaacaagcng

SEQ ID NO: 26259 - RNA, 23 nt, Artificial Sequence
  Synthetic
  misc_feature (3)..(3): n is a, c, g, or u
  misc_feature (22)..(22): n is a, c, g, or u
ccngcugcgagcgaaacaagcng

SEQ ID NO: 26260 - RNA, 24 nt, Artificial Sequence
  Synthetic
  misc_feature (4)..(4): n is a, c, g, or u
  misc_feature (23)..(23): n is a, c, g, or u
accngcugcgagcgaaacaagcng

SEQ ID NO: 26261 - RNA, 18 nt, Artificial Sequence
  Synthetic
  misc_feature (4)..(5): n is a, c, g, or u
  misc_feature (17)..(17): n is a, c, g, or u
acgnnaggcggagaagng

SEQ ID NO: 26262 - RNA, 19 nt, Artificial Sequence
  Synthetic
  misc_feature (5)..(6): n is a, c, g, or u
  misc_feature (18)..(18): n is a, c, g, or u
aacgnnaggcggagaagng

SEQ ID NO: 26263 - RNA, 20 nt, Artificial Sequence
  Synthetic
  misc_feature (6)..(7): n is a, c, g, or u
  misc_feature (19)..(19): n is a, c, g, or u
gaacgnnaggcggagaagng

SEQ ID NO: 26264 - RNA, 21 nt, Artificial Sequence
  Synthetic
  misc_feature (7)..(8): n is a, c, g, or u
  misc_feature (20)..(20): n is a, c, g, or u
ggaacgnnaggcggagaagng

SEQ ID NO: 26265 - RNA, 22 nt, Artificial Sequence
  Synthetic
  misc_feature (8)..(9): n is a, c, g, or u
  misc_feature (21)..(21): n is a, c, g, or u
cggaacgnnaggcggagaagng

SEQ ID NO: 26266 - RNA, 23 nt, Artificial Sequence
  Synthetic
  misc_feature (9)..(10): n is a, c, g, or u
  misc_feature (22)..(22): n is a, c, g, or u
ccggaacgnnaggcggagaagng

SEQ ID NO: 26267 - RNA, 24 nt, Artificial Sequence
  Synthetic
  misc_feature (10)..(11): n is a, c, g, or u
  misc_feature (23)..(23): n is a, c, g, or u
gccggaacgnnaggcggagaagng

SEQ ID NO: 26268 - RNA, 18 nt, Artificial Sequence
  Synthetic
  misc_feature (17)..(17): n is a, c, g, or u
aucuucugcgacgcggng

SEQ ID NO: 26269 - RNA, 19 nt, Artificial Sequence
  Synthetic
  misc_feature (18)..(18): n is a, c, g, or u
gaucuucugcgacgcggng

SEQ ID NO: 26270 - RNA, 20 nt, Artificial Sequence
  Synthetic
  misc_feature (19)..(19): n is a, c, g, or u
agaucuucugcgacgcggng

SEQ ID NO: 26271 - RNA, 21 nt, Artificial Sequence
  Synthetic
  misc_feature (20)..(20): n is a, c, g, or u
gagaucuucugcgacgcggng

SEQ ID NO: 26272 - RNA, 22 nt, Artificial Sequence
  Synthetic
  misc_feature (21)..(21): n is a, c, g, or u
ugagaucuucugcgacgcggng

SEQ ID NO: 26273 - RNA, 23 nt, Artificial Sequence
  Synthetic
  misc_feature (22)..(22): n is a, c, g, or u
uugagaucuucugcgacgcggng

SEQ ID NO: 26274 - RNA, 24 nt, Artificial Sequence
  Synthetic
  misc_feature (23)..(23): n is a, c, g, or u
auugagaucuucugcgacgcggng

SEQ ID NO: 26275 - RNA, 18 nt, Artificial Sequence
  Synthetic
caguuucucuuccaaaug

SEQ ID NO: 26276 - RNA, 19 nt, Artificial Sequence
  Synthetic
acaguuucucuuccaaaug

SEQ ID NO: 26277 - RNA, 20 nt, Artificial Sequence
  Synthetic
  misc_feature (1)..(1): n is a, c, g, or u
nacaguuucucuuccaaaug

SEQ ID NO: 26278 - RNA, 21 nt, Artificial Sequence
  Synthetic
  misc_feature (2)..(2): n is a, c, g, or u
gnacaguuucucuuccaaaug

SEQ ID NO: 26279 - RNA, 22 nt, Artificial Sequence
  Synthetic
  misc_feature (3)..(3): n is a, c, g, or u
agnacaguuucucuuccaaaug

SEQ ID NO: 26280 - RNA, 23 nt, Artificial Sequence
  Synthetic
  misc_feature (4)..(4): n is a, c, g, or u
aagnacaguuucucuuccaaaug

SEQ ID NO: 26281 - RNA, 24 nt, Artificial Sequence
  Synthetic
  misc_feature (5)..(5): n is a, c, g, or u
caagnacaguuucucuuccaaaug

SEQ ID NO: 26282 - RNA, 18 nt, Artificial Sequence
  Synthetic
ucuugaugcaagugaaug

SEQ ID NO: 26283 - RNA, 19 nt, Artificial Sequence
  Synthetic
aucuugaugcaagugaaug

SEQ ID NO: 26284 - RNA, 20 nt, Artificial Sequence
  Synthetic
  misc_feature (1)..(1): n is a, c, g, or u
naucuugaugcaagugaaug

SEQ ID NO: 26285 - RNA, 21 nt, Artificial Sequence
  Synthetic
  misc_feature (2)..(2): n is a, c, g, or u
anaucuugaugcaagugaaug

SEQ ID NO: 26286 - RNA, 22 nt, Artificial Sequence
  Synthetic
  misc_feature (3)..(3): n is a, c, g, or u
canaucuugaugcaagugaaug

SEQ ID NO: 26287 - RNA, 23 nt, Artificial Sequence
  Synthetic
  misc_feature (4)..(4): n is a, c, g, or u
ucanaucuugaugcaagugaaug

SEQ ID NO: 26288 - RNA, 24 nt, Artificial Sequence
  Synthetic
  misc_feature (5)..(5): n is a, c, g, or u
aucanaucuugaugcaagugaaug

SEQ ID NO: 26289 - RNA, 18 nt, Artificial Sequence
  Synthetic
  misc_feature (10)..(10): n is a, c, g, or u
ucuaguuuunaaguaaug

SEQ ID NO: 26290 - RNA, 19 nt, Artificial Sequence
  Synthetic
  misc_feature (11)..(11): n is a, c, g, or u
gucuaguuuunaaguaaug

SEQ ID NO: 26291 - RNA, 20 nt, Artificial Sequence
  Synthetic
  misc_feature (12)..(12): n is a, c, g, or u
ugucuaguuuunaaguaaug

SEQ ID NO: 26292 - RNA, 21 nt, Artificial Sequence
  Synthetic
  misc_feature (1)..(1): n is a, c, g, or u
  misc_feature (13)..(13): n is a, c, g, or u
nugucuaguuuunaaguaaug

SEQ ID NO: 26293 - RNA, 22 nt, Artificial Sequence
  Synthetic
  misc_feature (2)..(2): n is a, c, g, or u
  misc_feature (14)..(14): n is a, c, g, or u
anugucuaguuuunaaguaaug

SEQ ID NO: 26294 - RNA, 23 nt, Artificial Sequence
  Synthetic
  misc_feature (3)..(3): n is a, c, g, or u
  misc_feature (15)..(15): n is a, c, g, or u
uanugucuaguuuunaaguaaug

SEQ ID NO: 26295 - RNA, 24 nt, Artificial Sequence
  Synthetic
  misc_feature (4)..(4): n is a, c, g, or u
  misc_feature (16)..(16): n is a, c, g, or u
auanugucuaguuuunaaguaaug

SEQ ID NO: 26296 - RNA, 18 nt, Artificial Sequence
  Synthetic
cuugaacagugggacaug

SEQ ID NO: 26297 - RNA, 19 nt, Artificial Sequence
  Synthetic
gcuugaacagugggacaug

SEQ ID NO: 26298 - RNA, 20 nt, Artificial Sequence
  Synthetic
ggcuugaacagugggacaug

SEQ ID NO: 26299 - RNA, 21 nt, Artificial Sequence
  Synthetic
aggcuugaacagugggacaug

SEQ ID NO: 26300 - RNA, 22 nt, Artificial Sequence
  Synthetic
gaggcuugaacagugggacaug

SEQ ID NO: 26301 - RNA, 23 nt, Artificial Sequence
  Synthetic
ggaggcuugaacagugggacaug

SEQ ID NO: 26302 - RNA, 24 nt, Artificial Sequence
  Synthetic
uggaggcuugaacagugggacaug

SEQ ID NO: 26303 - RNA, 18 nt, Artificial Sequence
  Synthetic
  misc_feature (5)..(5): n is a, c, g, or u
cacanccuagcagccaug

SEQ ID NO: 26304 - RNA, 19 nt, Artificial Sequence
  Synthetic
  misc_feature (6)..(6): n is a, c, g, or u
gcacanccuagcagccaug

SEQ ID NO: 26305 - RNA, 20 nt, Artificial Sequence
  Synthetic
  misc_feature (7)..(7): n is a, c, g, or u
agcacanccuagcagccaug

SEQ ID NO: 26306 - RNA, 21 nt, Artificial Sequence
  Synthetic
  misc_feature (8)..(8): n is a, c, g, or u
cagcacanccuagcagccaug

SEQ ID NO: 26307 - RNA, 22 nt, Artificial Sequence
  Synthetic
  misc_feature (9)..(9): n is a, c, g, or u
gcagcacanccuagcagccaug

SEQ ID NO: 26308 - RNA, 23 nt, Artificial Sequence
  Synthetic
  misc_feature (10)..(10): n is a, c, g, or u
ggcagcacanccuagcagccaug

SEQ ID NO: 26309 - RNA, 24 nt, Artificial Sequence
  Synthetic
  misc_feature (11)..(11): n is a, c, g, or u
uggcagcacanccuagcagccaug

SEQ ID NO: 26310 - RNA, 18 nt, Artificial Sequence
  Synthetic
ggacaugaacaaaagaug

SEQ ID NO: 26311 - RNA, 19 nt, Artificial Sequence
  Synthetic
gggacaugaacaaaagaug

SEQ ID NO: 26312 - RNA, 20 nt, Artificial Sequence
  Synthetic
ugggacaugaacaaaagaug

SEQ ID NO: 26313 - RNA, 21 nt, Artificial Sequence
  Synthetic
gugggacaugaacaaaagaug

SEQ ID NO: 26314 - RNA, 22 nt, Artificial Sequence
  Synthetic
agugggacaugaacaaaagaug

SEQ ID NO: 26315 - RNA, 23 nt, Artificial Sequence
  Synthetic
cagugggacaugaacaaaagaug

SEQ ID NO: 26316 - RNA, 24 nt, Artificial Sequence
  Synthetic
acagugggacaugaacaaaagaug

SEQ ID NO: 26317 - RNA, 18 nt, Artificial Sequence
  Synthetic
uuccgaaagcccaagaug

SEQ ID NO: 26318 - RNA, 19 nt, Artificial Sequence
  Synthetic
uuuccgaaagcccaagaug

SEQ ID NO: 26319 - RNA, 20 nt, Artificial Sequence
  Synthetic
uuuuccgaaagcccaagaug

SEQ ID NO: 26320 - RNA, 21 nt, Artificial Sequence
  Synthetic
auuuuccgaaagcccaagaug

SEQ ID NO: 26321 - RNA, 22 nt, Artificial Sequence
  Synthetic
uauuuuccgaaagcccaagaug

SEQ ID NO: 26322 - RNA, 23 nt, Artificial Sequence
  Synthetic
guauuuuccgaaagcccaagaug

SEQ ID NO: 26323 - RNA, 24 nt, Artificial Sequence
  Synthetic
gguauuuuccgaaagcccaagaug

SEQ ID NO: 26324 - RNA, 18 nt, Artificial Sequence
  Synthetic
aggaugaagaggaagaug

SEQ ID NO: 26325 - RNA, 19 nt, Artificial Sequence
  Synthetic
caggaugaagaggaagaug

SEQ ID NO: 26326 - RNA, 20 nt, Artificial Sequence
  Synthetic
gcaggaugaagaggaagaug

SEQ ID NO: 26327 - RNA, 21 nt, Artificial Sequence
  Synthetic
agcaggaugaagaggaagaug

SEQ ID NO: 26328 - RNA, 22 nt, Artificial Sequence
  Synthetic
cagcaggaugaagaggaagaug

SEQ ID NO: 26329 - RNA, 23 nt, Artificial Sequence
  Synthetic
gcagcaggaugaagaggaagaug

SEQ ID NO: 26330 - RNA, 24 nt, Artificial Sequence
  Synthetic
agcagcaggaugaagaggaagaug

SEQ ID NO: 26331 - RNA, 18 nt, Artificial Sequence
  Synthetic
cacacgggccggcagaug

SEQ ID NO: 26332 - RNA, 19 nt, Artificial Sequence
  Synthetic
gcacacgggccggcagaug

SEQ ID NO: 26333 - RNA, 20 nt, Artificial Sequence
  Synthetic
ugcacacgggccggcagaug

SEQ ID NO: 26334 - RNA, 21 nt, Artificial Sequence
  Synthetic
gugcacacgggccggcagaug

SEQ ID NO: 26335 - RNA, 22 nt, Artificial Sequence
  Synthetic
agugcacacgggccggcagaug

SEQ ID NO: 26336 - RNA, 23 nt, Artificial Sequence
  Synthetic
aagugcacacgggccggcagaug

SEQ ID NO: 26337 - RNA, 24 nt, Artificial Sequence
  Synthetic
gaagugcacacgggccggcagaug

SEQ ID NO: 26338 - RNA, 18 nt, Artificial Sequence
  Synthetic
aggcauagcagcaggaug

SEQ ID NO: 26339 - RNA, 19 nt, Artificial Sequence
  Synthetic
gaggcauagcagcaggaug

SEQ ID NO: 26340 - RNA, 20 nt, Artificial Sequence
  Synthetic
ugaggcauagcagcaggaug

SEQ ID NO: 26341 - RNA, 21 nt, Artificial Sequence
  Synthetic
augaggcauagcagcaggaug

SEQ ID NO: 26342 - RNA, 22 nt, Artificial Sequence
  Synthetic
gaugaggcauagcagcaggaug

SEQ ID NO: 26343 - RNA, 23 nt, Artificial Sequence
  Synthetic
agaugaggcauagcagcaggaug

SEQ ID NO: 26344 - RNA, 24 nt, Artificial Sequence
  Synthetic
aagaugaggcauagcagcaggaug

SEQ ID NO: 26345 - RNA, 18 nt, Artificial Sequence
  Synthetic
ucgagaagauugaugaug

SEQ ID NO: 26346 - RNA, 19 nt, Artificial Sequence
  Synthetic
uucgagaagauugaugaug

SEQ ID NO: 26347 - RNA, 20 nt, Artificial Sequence
  Synthetic
cuucgagaagauugaugaug

SEQ ID NO: 26348 - RNA, 21 nt, Artificial Sequence
  Synthetic
ucuucgagaagauugaugaug

SEQ ID NO: 26349 - RNA, 22 nt, Artificial Sequence
  Synthetic
gucuucgagaagauugaugaug

SEQ ID NO: 26350 - RNA, 23 nt, Artificial Sequence
  Synthetic
agucuucgagaagauugaugaug

SEQ ID NO: 26351 - RNA, 24 nt, Artificial Sequence
  Synthetic
cagucuucgagaagauugaugaug

SEQ ID NO: 26352 - RNA, 18 nt, Artificial Sequence
  Synthetic
acaaaaugaggcgcuaug

SEQ ID NO: 26353 - RNA, 19 nt, Artificial Sequence
  Synthetic
cacaaaaugaggcgcuaug

SEQ ID NO: 26354 - RNA, 20 nt, Artificial Sequence
  Synthetic
ccacaaaaugaggcgcuaug

SEQ ID NO: 26355 - RNA, 21 nt, Artificial Sequence
  Synthetic
cccacaaaaugaggcgcuaug

SEQ ID NO: 26356 - RNA, 22 nt, Artificial Sequence
  Synthetic
acccacaaaaugaggcgcuaug

SEQ ID NO: 26357 - RNA, 23 nt, Artificial Sequence
  Synthetic
gacccacaaaaugaggcgcuaug

SEQ ID NO: 26358 - RNA, 24 nt, Artificial Sequence
  Synthetic
ugacccacaaaaugaggcgcuaug

SEQ ID NO: 26359 - RNA, 18 nt, Artificial Sequence
  Synthetic
aagcccuacgcaccacug

SEQ ID NO: 26360 - RNA, 19 nt, Artificial Sequence
  Synthetic
aaagcccuacgcaccacug

SEQ ID NO: 26361 - RNA, 20 nt, Artificial Sequence
  Synthetic
gaaagcccuacgcaccacug

SEQ ID NO: 26362 - RNA, 21 nt, Artificial Sequence
  Synthetic
ggaaagcccuacgcaccacug

SEQ ID NO: 26363 - RNA, 22 nt, Artificial Sequence
  Synthetic
gggaaagcccuacgcaccacug

SEQ ID NO: 26364 - RNA, 23 nt, Artificial Sequence
  Synthetic
ggggaaagcccuacgcaccacug

SEQ ID NO: 26365 - RNA, 24 nt, Artificial Sequence
  Synthetic
gggggaaagcccuacgcaccacug

SEQ ID NO: 26366 - RNA, 18 nt, Artificial Sequence
  Synthetic
aagucccaaucgggacug

SEQ ID NO: 26367 - RNA, 19 nt, Artificial Sequence
  Synthetic
gaagucccaaucgggacug

SEQ ID NO: 26368 - RNA, 20 nt, Artificial Sequence
  Synthetic
ugaagucccaaucgggacug

SEQ ID NO: 26369 - RNA, 21 nt, Artificial Sequence
  Synthetic
uugaagucccaaucgggacug

SEQ ID NO: 26370 - RNA, 22 nt, Artificial Sequence
  Synthetic
guugaagucccaaucgggacug

SEQ ID NO: 26371 - RNA, 23 nt, Artificial Sequence
  Synthetic
uguugaagucccaaucgggacug

SEQ ID NO: 26372 - RNA, 24 nt, Artificial Sequence
  Synthetic
guguugaagucccaaucgggacug

SEQ ID NO: 26373 - RNA, 18 nt, Artificial Sequence
  Synthetic
cgagaaaacaaaagccug

SEQ ID NO: 26374 - RNA, 19 nt, Artificial Sequence
  Synthetic
gcgagaaaacaaaagccug

SEQ ID NO: 26375 - RNA, 20 nt, Artificial Sequence
  Synthetic
ggcgagaaaacaaaagccug

SEQ ID NO: 26376 - RNA, 21 nt, Artificial Sequence
  Synthetic
uggcgagaaaacaaaagccug

SEQ ID NO: 26377 - RNA, 22 nt, Artificial Sequence
  Synthetic
uuggcgagaaaacaaaagccug

SEQ ID NO: 26378 - RNA, 23 nt, Artificial Sequence
  Synthetic
guuggcgagaaaacaaaagccug

SEQ ID NO: 26379 - RNA, 24 nt, Artificial Sequence
  Synthetic
aguuggcgagaaaacaaaagccug

SEQ ID NO: 26380 - RNA, 18 nt, Artificial Sequence
  Synthetic
auugaguaaaaggggcug

SEQ ID NO: 26381 - RNA, 19 nt, Artificial Sequence
  Synthetic
cauugaguaaaaggggcug

SEQ ID NO: 26382 - RNA, 20 nt, Artificial Sequence
  Synthetic
acauugaguaaaaggggcug

SEQ ID NO: 26383 - RNA, 21 nt, Artificial Sequence
  Synthetic
cacauugaguaaaaggggcug

SEQ ID NO: 26384 - RNA, 22 nt, Artificial Sequence
  Synthetic
ccacauugaguaaaaggggcug

SEQ ID NO: 26385 - RNA, 23 nt, Artificial Sequence
  Synthetic
accacauugaguaaaaggggcug

SEQ ID NO: 26386 - RNA, 24 nt, Artificial Sequence
  Synthetic
aaccacauugaguaaaaggggcug

SEQ ID NO: 26387 - RNA, 18 nt, Artificial Sequence
  Synthetic
aagggacucaagaugcug

SEQ ID NO: 26388 - RNA, 19 nt, Artificial Sequence
  Synthetic
aaagggacucaagaugcug

SEQ ID NO: 26389 - RNA, 20 nt, Artificial Sequence
  Synthetic
uaaagggacucaagaugcug

SEQ ID NO: 26390 - RNA, 21 nt, Artificial Sequence
  Synthetic
auaaagggacucaagaugcug

SEQ ID NO: 26391 - RNA, 22 nt, Artificial Sequence
  Synthetic
uauaaagggacucaagaugcug

SEQ ID NO: 26392 - RNA, 23 nt, Artificial Sequence
  Synthetic
guauaaagggacucaagaugcug

SEQ ID NO: 26393 - RNA, 24 nt, Artificial Sequence
  Synthetic
gguauaaagggacucaagaugcug

SEQ ID NO: 26394 - RNA, 18 nt, Artificial Sequence
  Synthetic
aaaaguugcauggugcug

SEQ ID NO: 26395 - RNA, 19 nt, Artificial Sequence
  Synthetic
aaaaaguugcauggugcug

SEQ ID NO: 26396 - RNA, 20 nt, Artificial Sequence
  Synthetic
gaaaaaguugcauggugcug

SEQ ID NO: 26397 - RNA, 21 nt, Artificial Sequence
  Synthetic
ugaaaaaguugcauggugcug

SEQ ID NO: 26398 - RNA, 22 nt, Artificial Sequence
  Synthetic
gugaaaaaguugcauggugcug

SEQ ID NO: 26399 - RNA, 23 nt, Artificial Sequence
  Synthetic
ggugaaaaaguugcauggugcug

SEQ ID NO: 26400 - RNA, 24 nt, Artificial Sequence
  Synthetic
aggugaaaaaguugcauggugcug

SEQ ID NO: 26401 - RNA, 18 nt, Artificial Sequence
  Synthetic
gauugagaucuucgucug

SEQ ID NO: 26402 - RNA, 19 nt, Artificial Sequence
  Synthetic
  misc_feature (1)..(1): n is a, c, g, or u
ngauugagaucuucgucug

SEQ ID NO: 26403 - RNA, 20 nt, Artificial Sequence
  Synthetic
  misc_feature (2)..(2): n is a, c, g, or u
gngauugagaucuucgucug

SEQ ID NO: 26404 - RNA, 21 nt, Artificial Sequence
  Synthetic
  misc_feature (3)..(3): n is a, c, g, or u
ggngauugagaucuucgucug

SEQ ID NO: 26405 - RNA, 22 nt, Artificial Sequence
  Synthetic
  misc_feature (4)..(4): n is a, c, g, or u
cggngauugagaucuucgucug

SEQ ID NO: 26406 - RNA, 23 nt, Artificial Sequence
  Synthetic
  misc_feature (5)..(5): n is a, c, g, or u
gcggngauugagaucuucgucug

SEQ ID NO: 26407 - RNA, 24 nt, Artificial Sequence
  Synthetic
  misc_feature (6)..(6): n is a, c, g, or u
cgcggngauugagaucuucgucug

SEQ ID NO: 26408 - RNA, 18 nt, Artificial Sequence
  Synthetic
gauccaacugguggucug

SEQ ID NO: 26409 - RNA, 19 nt, Artificial Sequence
  Synthetic
ggauccaacugguggucug

SEQ ID NO: 26410 - RNA, 20 nt, Artificial Sequence
  Synthetic
uggauccaacugguggucug

SEQ ID NO: 26411 - RNA, 21 nt, Artificial Sequence
  Synthetic
guggauccaacugguggucug

SEQ ID NO: 26412 - RNA, 22 nt, Artificial Sequence
  Synthetic
aguggauccaacugguggucug

SEQ ID NO: 26413 - RNA, 23 nt, Artificial Sequence
  Synthetic
uaguggauccaacugguggucug

SEQ ID NO: 26414 - RNA, 24 nt, Artificial Sequence
  Synthetic
auaguggauccaacugguggucug

SEQ ID NO: 26415 - RNA, 18 nt, Artificial Sequence
  Synthetic
  misc_feature (1)..(1): n is a, c, g, or u
nauauaacccauaaagug

SEQ ID NO: 26416 - RNA, 19 nt, Artificial Sequence
  Synthetic
  misc_feature (2)..(2): n is a, c, g, or u
unauauaacccauaaagug

SEQ ID NO: 26417 - RNA, 20 nt, Artificial Sequence
  Synthetic
  misc_feature (3)..(3): n is a, c, g, or u
aunauauaacccauaaagug

SEQ ID NO: 26418 - RNA, 21 nt, Artificial Sequence
  Synthetic
  misc_feature (4)..(4): n is a, c, g, or u
aaunauauaacccauaaagug

SEQ ID NO: 26419 - RNA, 22 nt, Artificial Sequence
  Synthetic
  misc_feature (5)..(5): n is a, c, g, or u
caaunauauaacccauaaagug

SEQ ID NO: 26420 - RNA, 23 nt, Artificial Sequence
  Synthetic
  misc_feature (6)..(6): n is a, c, g, or u
ccaaunauauaacccauaaagug

SEQ ID NO: 26421 - RNA, 24 nt, Artificial Sequence
  Synthetic
  misc_feature (7)..(7): n is a, c, g, or u
cccaaunauauaacccauaaagug

SEQ ID NO: 26422 - RNA, 18 nt, Artificial Sequence
  Synthetic
acaggagguugguaagug

SEQ ID NO: 26423 - RNA, 19 nt, Artificial Sequence
  Synthetic
gacaggagguugguaagug

SEQ ID NO: 26424 - RNA, 20 nt, Artificial Sequence
  Synthetic
ggacaggagguugguaagug

SEQ ID NO: 26425 - RNA, 21 nt, Artificial Sequence
  Synthetic
aggacaggagguugguaagug

SEQ ID NO: 26426 - RNA, 22 nt, Artificial Sequence
  Synthetic
gaggacaggagguugguaagug

SEQ ID NO: 26427 - RNA, 23 nt, Artificial Sequence
  Synthetic
ggaggacaggagguugguaagug

SEQ ID NO: 26428 - RNA, 24 nt, Artificial Sequence
  Synthetic
uggaggacaggagguugguaagug

SEQ ID NO: 26429 - RNA, 18 nt, Artificial Sequence
  Synthetic
acuaaaagccagacagug

SEQ ID NO: 26430 - RNA, 19 nt, Artificial Sequence
  Synthetic
aacuaaaagccagacagug

SEQ ID NO: 26431 - RNA, 20 nt, Artificial Sequence
  Synthetic
uaacuaaaagccagacagug

SEQ ID NO: 26432 - RNA, 21 nt, Artificial Sequence
  Synthetic
auaacuaaaagccagacagug

SEQ ID NO: 26433 - RNA, 22 nt, Artificial Sequence
  Synthetic
uauaacuaaaagccagacagug

SEQ ID NO: 26434 - RNA, 23 nt, Artificial Sequence
  Synthetic
auauaacuaaaagccagacagug

SEQ ID NO: 26435 - RNA, 24 nt, Artificial Sequence
  Synthetic
cauauaacuaaaagccagacagug

SEQ ID NO: 26436 - RNA, 18 nt, Artificial Sequence
  Synthetic
  misc_feature (13)..(13): n is a, c, g, or u
cuccuuucauuunuagug

SEQ ID NO: 26437 - RNA, 19 nt, Artificial Sequence
  Synthetic
  misc_feature (14)..(14): n is a, c, g, or u
ucuccuuucauuunuagug

SEQ ID NO: 26438 - RNA, 20 nt, Artificial Sequence
  Synthetic
  misc_feature (15)..(15): n is a, c, g, or u
gucuccuuucauuunuagug

SEQ ID NO: 26439 - RNA, 21 nt, Artificial Sequence
  Synthetic
  misc_feature (16)..(16): n is a, c, g, or u
cgucuccuuucauuunuagug

SEQ ID NO: 26440 - RNA, 22 nt, Artificial Sequence
  Synthetic
  misc_feature (17)..(17): n is a, c, g, or u
ucgucuccuuucauuunuagug

SEQ ID NO: 26441 - RNA, 23 nt, Artificial Sequence
  Synthetic
  misc_feature (18)..(18): n is a, c, g, or u
aucgucuccuuucauuunuagug

SEQ ID NO: 26442 - RNA, 24 nt, Artificial Sequence
  Synthetic
  misc_feature (19)..(19): n is a, c, g, or u
aaucgucuccuuucauuunuagug

SEQ ID NO: 26443 - RNA, 18 nt, Artificial Sequence
  Synthetic
uggucuccaugcgacgug

SEQ ID NO: 26444 - RNA, 19 nt, Artificial Sequence
  Synthetic
guggucuccaugcgacgug

SEQ ID NO: 26445 - RNA, 20 nt, Artificial Sequence
  Synthetic
gguggucuccaugcgacgug

SEQ ID NO: 26446 - RNA, 21 nt, Artificial Sequence
  Synthetic
cgguggucuccaugcgacgug

SEQ ID NO: 26447 - RNA, 22 nt, Artificial Sequence
  Synthetic
acgguggucuccaugcgacgug

SEQ ID NO: 26448 - RNA, 23 nt, Artificial Sequence
  Synthetic
cacgguggucuccaugcgacgug

SEQ ID NO: 26449 - RNA, 24 nt, Artificial Sequence
  Synthetic
ucacgguggucuccaugcgacgug

SEQ ID NO: 26450 - RNA, 18 nt, Artificial Sequence
  Synthetic
ccccagaaggccaccgug

SEQ ID NO: 26451 - RNA, 19 nt, Artificial Sequence
  Synthetic
accccagaaggccaccgug

SEQ ID NO: 26452 - RNA, 20 nt, Artificial Sequence
  Synthetic
caccccagaaggccaccgug

SEQ ID NO: 26453 - RNA, 21 nt, Artificial Sequence
  Synthetic
ccaccccagaaggccaccgug

SEQ ID NO: 26454 - RNA, 22 nt, Artificial Sequence
  Synthetic
uccaccccagaaggccaccgug

SEQ ID NO: 26455 - RNA, 23 nt, Artificial Sequence
  Synthetic
cuccaccccagaaggccaccgug

SEQ ID NO: 26456 - RNA, 24 nt, Artificial Sequence
  Synthetic
gcuccaccccagaaggccaccgug

SEQ ID NO: 26457 - RNA, 18 nt, Artificial Sequence
  Synthetic
gaugauuaggcagaggug

SEQ ID NO: 26458 - RNA, 19 nt, Artificial Sequence
  Synthetic
agaugauuaggcagaggug

SEQ ID NO: 26459 - RNA, 20 nt, Artificial Sequence
  Synthetic
aagaugauuaggcagaggug

SEQ ID NO: 26460 - RNA, 21 nt, Artificial Sequence
  Synthetic
aaagaugauuaggcagaggug

SEQ ID NO: 26461 - RNA, 22 nt, Artificial Sequence
  Synthetic
aaaagaugauuaggcagaggug

SEQ ID NO: 26462 - RNA, 23 nt, Artificial Sequence
  Synthetic
caaaagaugauuaggcagaggug

SEQ ID NO: 26463 - RNA, 24 nt, Artificial Sequence
  Synthetic
acaaaagaugauuaggcagaggug

SEQ ID NO: 26464 - RNA, 18 nt, Artificial Sequence
  Synthetic
gugugucccuuagaggug

SEQ ID NO: 26465 - RNA, 19 nt, Artificial Sequence
  Synthetic
ugugugucccuuagaggug

SEQ ID NO: 26466 - RNA, 20 nt, Artificial Sequence
  Synthetic
augugugucccuuagaggug

SEQ ID NO: 26467 - RNA, 21 nt, Artificial Sequence
  Synthetic
gaugugugucccuuagaggug

SEQ ID NO: 26468 - RNA, 22 nt, Artificial Sequence
  Synthetic
ggaugugugucccuuagaggug

SEQ ID NO: 26469 - RNA, 23 nt, Artificial Sequence
  Synthetic
uggaugugugucccuuagaggug

SEQ ID NO: 26470 - RNA, 24 nt, Artificial Sequence
  Synthetic
guggaugugugucccuuagaggug

SEQ ID NO: 26471 - RNA, 18 nt, Artificial Sequence
  Synthetic
aguugcauggugcuggug

SEQ ID NO: 26472 - RNA, 19 nt, Artificial Sequence
  Synthetic
aaguugcauggugcuggug

SEQ ID NO: 26473 - RNA, 20 nt, Artificial Sequence
  Synthetic
aaaguugcauggugcuggug

SEQ ID NO: 26474 - RNA, 21 nt, Artificial Sequence
  Synthetic
aaaaguugcauggugcuggug

SEQ ID NO: 26475 - RNA, 22 nt, Artificial Sequence
  Synthetic
aaaaaguugcauggugcuggug

SEQ ID NO: 26476 - RNA, 23 nt, Artificial Sequence
  Synthetic
gaaaaaguugcauggugcuggug

SEQ ID NO: 26477 - RNA, 24 nt, Artificial Sequence
  Synthetic
ugaaaaaguugcauggugcuggug

SEQ ID NO: 26478 - RNA, 18 nt, Artificial Sequence
  Synthetic
caggagguggaucuggug

SEQ ID NO: 26479 - RNA, 19 nt, Artificial Sequence
  Synthetic
gcaggagguggaucuggug

SEQ ID NO: 26480 - RNA, 20 nt, Artificial Sequence
  Synthetic
agcaggagguggaucuggug

SEQ ID NO: 26481 - RNA, 21 nt, Artificial Sequence
  Synthetic
aagcaggagguggaucuggug

SEQ ID NO: 26482 - RNA, 22 nt, Artificial Sequence
  Synthetic
gaagcaggagguggaucuggug

SEQ ID NO: 26483 - RNA, 23 nt, Artificial Sequence
  Synthetic
ggaagcaggagguggaucuggug

SEQ ID NO: 26484 - RNA, 24 nt, Artificial Sequence
  Synthetic
uggaagcaggagguggaucuggug

SEQ ID NO: 26485 - RNA, 18 nt, Artificial Sequence
  Synthetic
gagaagauugaugaugug

SEQ ID NO: 26486 - RNA, 19 nt, Artificial Sequence
  Synthetic
cgagaagauugaugaugug

SEQ ID NO: 26487 - RNA, 20 nt, Artificial Sequence
  Synthetic
ucgagaagauugaugaugug

SEQ ID NO: 26488 - RNA, 21 nt, Artificial Sequence
  Synthetic
uucgagaagauugaugaugug

SEQ ID NO: 26489 - RNA, 22 nt, Artificial Sequence
  Synthetic
cuucgagaagauugaugaugug

SEQ ID NO: 26490 - RNA, 23 nt, Artificial Sequence
  Synthetic
ucuucgagaagauugaugaugug

SEQ ID NO: 26491 - RNA, 24 nt, Artificial Sequence
  Synthetic
gucuucgagaagauugaugaugug

SEQ ID NO: 26492 - RNA, 18 nt, Artificial Sequence
  Synthetic
gugcuugguggaacugug

SEQ ID NO: 26493 - RNA, 19 nt, Artificial Sequence
  Synthetic
agugcuugguggaacugug

SEQ ID NO: 26494 - RNA, 20 nt, Artificial Sequence
  Synthetic
cagugcuugguggaacugug

SEQ ID NO: 26495 - RNA, 21 nt, Artificial Sequence
  Synthetic
acagugcuugguggaacugug

SEQ ID NO: 26496 - RNA, 22 nt, Artificial Sequence
  Synthetic
aacagugcuugguggaacugug

SEQ ID NO: 26497 - RNA, 23 nt, Artificial Sequence
  Synthetic
caacagugcuugguggaacugug

SEQ ID NO: 26498 - RNA, 24 nt, Artificial Sequence
  Synthetic
ccaacagugcuugguggaacugug

SEQ ID NO: 26499 - RNA, 18 nt, Artificial Sequence
  Synthetic
  misc_feature (5)..(5): n is a, c, g, or u
uugunagaaugcccugug

SEQ ID NO: 26500 - RNA, 19 nt, Artificial Sequence
  Synthetic
  misc_feature (6)..(6): n is a, c, g, or u
guugunagaaugcccugug

SEQ ID NO: 26501 - RNA, 20 nt, Artificial Sequence
  Synthetic
  misc_feature (7)..(7): n is a, c, g, or u
gguugunagaaugcccugug

SEQ ID NO: 26502 - RNA, 21 nt, Artificial Sequence
  Synthetic
  misc_feature (8)..(8): n is a, c, g, or u
agguugunagaaugcccugug

SEQ ID NO: 26503 - RNA, 22 nt, Artificial Sequence
  Synthetic
  misc_feature (9)..(9): n is a, c, g, or u
gagguugunagaaugcccugug

SEQ ID NO: 26504 - RNA, 23 nt, Artificial Sequence
  Synthetic
  misc_feature (10)..(10): n is a, c, g, or u
cgagguugunagaaugcccugug

SEQ ID NO: 26505 - RNA, 24 nt, Artificial Sequence
  Synthetic
  misc_feature (11)..(11): n is a, c, g, or u
gcgagguugunagaaugcccugug

SEQ ID NO: 26506 - RNA, 18 nt, Artificial Sequence
  Synthetic
cauuuuguuuuagcugug

SEQ ID NO: 26507 - RNA, 19 nt, Artificial Sequence
  Synthetic
ccauuuuguuuuagcugug

SEQ ID NO: 26508 - RNA, 20 nt, Artificial Sequence
  Synthetic
accauuuuguuuuagcugug

SEQ ID NO: 26509 - RNA, 21 nt, Artificial Sequence
  Synthetic
caccauuuuguuuuagcugug

SEQ ID NO: 26510 - RNA, 22 nt, Artificial Sequence
  Synthetic
ccaccauuuuguuuuagcugug

SEQ ID NO: 26511 - RNA, 23 nt, Artificial Sequence
  Synthetic
cccaccauuuuguuuuagcugug

SEQ ID NO: 26512 - RNA, 24 nt, Artificial Sequence
  Synthetic
ccccaccauuuuguuuuagcugug

SEQ ID NO: 26513 - RNA, 18 nt, Artificial Sequence
  Synthetic
caauuguccuuguuugug

SEQ ID NO: 26514 - RNA, 19 nt, Artificial Sequence
  Synthetic
ccaauuguccuuguuugug

SEQ ID NO: 26515 - RNA, 20 nt, Artificial Sequence
  Synthetic
gccaauuguccuuguuugug

SEQ ID NO: 26516 - RNA, 21 nt, Artificial Sequence
  Synthetic
ggccaauuguccuuguuugug

SEQ ID NO: 26517 - RNA, 22 nt, Artificial Sequence
  Synthetic
uggccaauuguccuuguuugug

SEQ ID NO: 26518 - RNA, 23 nt, Artificial Sequence
  Synthetic
uuggccaauuguccuuguuugug

SEQ ID NO: 26519 - RNA, 24 nt, Artificial Sequence
  Synthetic
auuggccaauuguccuuguuugug

SEQ ID NO: 26520 - RNA, 18 nt, Artificial Sequence
  Synthetic
  misc_feature (16)..(16): n is a, c, g, or u
uugccugagagcagunug

SEQ ID NO: 26521 - RNA, 19 nt, Artificial Sequence
  Synthetic
  misc_feature (17)..(17): n is a, c, g, or u
cuugccugagagcagunug

SEQ ID NO: 26522 - RNA, 20 nt, Artificial Sequence
  Synthetic
  misc_feature (18)..(18): n is a, c, g, or u
gcuugccugagagcagunug

SEQ ID NO: 26523 - RNA, 21 nt, Artificial Sequence
  Synthetic
  misc_feature (19)..(19): n is a, c, g, or u
agcuugccugagagcagunug

SEQ ID NO: 26524 - RNA, 22 nt, Artificial Sequence
  Synthetic
  misc_feature (20)..(20): n is a, c, g, or u
uagcuugccugagagcagunug

SEQ ID NO: 26525 - RNA, 23 nt, Artificial Sequence
  Synthetic
  misc_feature (21)..(21): n is a, c, g, or u
auagcuugccugagagcagunug

SEQ ID NO: 26526 - RNA, 24 nt, Artificial Sequence
  Synthetic
  misc_feature (22)..(22): n is a, c, g, or u
aauagcuugccugagagcagunug

SEQ ID NO: 26527 - RNA, 18 nt, Artificial Sequence
  Synthetic
gguaccccuagaaaauug

SEQ ID NO: 26528 - RNA, 19 nt, Artificial Sequence
  Synthetic
ugguaccccuagaaaauug

SEQ ID NO: 26529 - RNA, 20 nt, Artificial Sequence
  Synthetic
gugguaccccuagaaaauug

SEQ ID NO: 26530 - RNA, 21 nt, Artificial Sequence
  Synthetic
ggugguaccccuagaaaauug

SEQ ID NO: 26531 - RNA, 22 nt, Artificial Sequence
  Synthetic
gggugguaccccuagaaaauug

SEQ ID NO: 26532 - RNA, 23 nt, Artificial Sequence
  Synthetic
cgggugguaccccuagaaaauug

SEQ ID NO: 26533 - RNA, 24 nt, Artificial Sequence
  Synthetic
ccgggugguaccccuagaaaauug

SEQ ID NO: 26534 - RNA, 18 nt, Artificial Sequence
  Synthetic
caaggaauacuaacauug

SEQ ID NO: 26535 - RNA, 19 nt, Artificial Sequence
  Synthetic
ccaaggaauacuaacauug

SEQ ID NO: 26536 - RNA, 20 nt, Artificial Sequence
  Synthetic
uccaaggaauacuaacauug

SEQ ID NO: 26537 - RNA, 21 nt, Artificial Sequence
  Synthetic
guccaaggaauacuaacauug

SEQ ID NO: 26538 - RNA, 22 nt, Artificial Sequence
  Synthetic
aguccaaggaauacuaacauug

SEQ ID NO: 26539 - RNA, 23 nt, Artificial Sequence
  Synthetic
gaguccaaggaauacuaacauug

SEQ ID NO: 26540 - RNA, 24 nt, Artificial Sequence
  Synthetic
ugaguccaaggaauacuaacauug

SEQ ID NO: 26541 - RNA, 18 nt, Artificial Sequence
  Synthetic
agcaggauaaccacauug

SEQ ID NO: 26542 - RNA, 19 nt, Artificial Sequence
  Synthetic
gagcaggauaaccacauug

SEQ ID NO: 26543 - RNA, 20 nt, Artificial Sequence
  Synthetic
agagcaggauaaccacauug

SEQ ID NO: 26544 - RNA, 21 nt, Artificial Sequence
  Synthetic
gagagcaggauaaccacauug

SEQ ID NO: 26545 - RNA, 22 nt, Artificial Sequence
  Synthetic
ugagagcaggauaaccacauug

SEQ ID NO: 26546 - RNA, 23 nt, Artificial Sequence
  Synthetic
augagagcaggauaaccacauug

SEQ ID NO: 26547 - RNA, 24 nt, Artificial Sequence
  Synthetic
caugagagcaggauaaccacauug

SEQ ID NO: 26548 - RNA, 18 nt, Artificial Sequence
  Synthetic
cuuccugaccuccgauug

SEQ ID NO: 26549 - RNA, 19 nt, Artificial Sequence
  Synthetic
ucuuccugaccuccgauug

SEQ ID NO: 26550 - RNA, 20 nt, Artificial Sequence
  Synthetic
uucuuccugaccuccgauug

SEQ ID NO: 26551 - RNA, 21 nt, Artificial Sequence
  Synthetic
uuucuuccugaccuccgauug

SEQ ID NO: 26552 - RNA, 22 nt, Artificial Sequence
  Synthetic
cuuucuuccugaccuccgauug

SEQ ID NO: 26553 - RNA, 23 nt, Artificial Sequence
  Synthetic
gcuuucuuccugaccuccgauug

SEQ ID NO: 26554 - RNA, 24 nt, Artificial Sequence
  Synthetic
ggcuuucuuccugaccuccgauug

SEQ ID NO: 26555 - RNA, 18 nt, Artificial Sequence
  Synthetic
  misc_feature (10)..(10): n is a, c, g, or u
cuagacucunugguauug

SEQ ID NO: 26556 - RNA, 19 nt, Artificial Sequence
  Synthetic
  misc_feature (11)..(11): n is a, c, g, or u
ucuagacucunugguauug

SEQ ID NO: 26557 - RNA, 20 nt, Artificial Sequence
  Synthetic
  misc_feature (12)..(12): n is a, c, g, or u
gucuagacucunugguauug

SEQ ID NO: 26558 - RNA, 21 nt, Artificial Sequence
  Synthetic
  misc_feature (13)..(13): n is a, c, g, or u
agucuagacucunugguauug

SEQ ID NO: 26559 - RNA, 22 nt, Artificial Sequence
  Synthetic
  misc_feature (14)..(14): n is a, c, g, or u
gagucuagacucunugguauug

SEQ ID NO: 26560 - RNA, 23 nt, Artificial Sequence
  Synthetic
  misc_feature (15)..(15): n is a, c, g, or u
cgagucuagacucunugguauug

SEQ ID NO: 26561 - RNA, 24 nt, Artificial Sequence
  Synthetic
  misc_feature (16)..(16): n is a, c, g, or u
acgagucuagacucunugguauug

SEQ ID NO: 26562 - RNA, 18 nt, Artificial Sequence
  Synthetic
ugcgucagcaaacacuug

SEQ ID NO: 26563 - RNA, 19 nt, Artificial Sequence
  Synthetic
uugcgucagcaaacacuug

SEQ ID NO: 26564 - RNA, 20 nt, Artificial Sequence
  Synthetic
guugcgucagcaaacacuug

SEQ ID NO: 26565 - RNA, 21 nt, Artificial Sequence
  Synthetic
gguugcgucagcaaacacuug

SEQ ID NO: 26566 - RNA, 22 nt, Artificial Sequence
  Synthetic
ggguugcgucagcaaacacuug

SEQ ID NO: 26567 - RNA, 23 nt, Artificial Sequence
  Synthetic
gggguugcgucagcaaacacuug

SEQ ID NO: 26568 - RNA, 24 nt, Artificial Sequence
  Synthetic
ggggguugcgucagcaaacacuug

SEQ ID NO: 26569 - RNA, 18 nt, Artificial Sequence
  Synthetic
aaacauagagguuccuug

SEQ ID NO: 26570 - RNA, 19 nt, Artificial Sequence
  Synthetic
gaaacauagagguuccuug

SEQ ID NO: 26571 - RNA, 20 nt, Artificial Sequence
  Synthetic
ggaaacauagagguuccuug

SEQ ID NO: 26572 - RNA, 21 nt, Artificial Sequence
  Synthetic
gggaaacauagagguuccuug

SEQ ID NO: 26573 - RNA, 22 nt, Artificial Sequence
  Synthetic
agggaaacauagagguuccuug

SEQ ID NO: 26574 - RNA, 23 nt, Artificial Sequence
  Synthetic
gagggaaacauagagguuccuug

SEQ ID NO: 26575 - RNA, 24 nt, Artificial Sequence
  Synthetic
ggagggaaacauagagguuccuug

SEQ ID NO: 26576 - RNA, 18 nt, Artificial Sequence
  Synthetic
ccagcacaaaauagcuug

SEQ ID NO: 26577 - RNA, 19 nt, Artificial Sequence
  Synthetic
cccagcacaaaauagcuug

SEQ ID NO: 26578 - RNA, 20 nt, Artificial Sequence
  Synthetic
ccccagcacaaaauagcuug

SEQ ID NO: 26579 - RNA, 21 nt, Artificial Sequence
  Synthetic
accccagcacaaaauagcuug

SEQ ID NO: 26580 - RNA, 22 nt, Artificial Sequence
  Synthetic
caccccagcacaaaauagcuug

SEQ ID NO: 26581 - RNA, 23 nt, Artificial Sequence
  Synthetic
ucaccccagcacaaaauagcuug

SEQ ID NO: 26582 - RNA, 24 nt, Artificial Sequence
  Synthetic
cucaccccagcacaaaauagcuug

SEQ ID NO: 26583 - RNA, 18 nt, Artificial Sequence
  Synthetic
cggauccaacagugcuug

SEQ ID NO: 26584 - RNA, 19 nt, Artificial Sequence
  Synthetic
ucggauccaacagugcuug

SEQ ID NO: 26585 - RNA, 20 nt, Artificial Sequence
  Synthetic
cucggauccaacagugcuug

SEQ ID NO: 26586 - RNA, 21 nt, Artificial Sequence
  Synthetic
ucucggauccaacagugcuug

SEQ ID NO: 26587 - RNA, 22 nt, Artificial Sequence
  Synthetic
cucucggauccaacagugcuug

SEQ ID NO: 26588 - RNA, 23 nt, Artificial Sequence
  Synthetic
acucucggauccaacagugcuug

SEQ ID NO: 26589 - RNA, 24 nt, Artificial Sequence
  Synthetic
uacucucggauccaacagugcuug

SEQ ID NO: 26590 - RNA, 18 nt, Artificial Sequence
  Synthetic
gauagccaggacaaguug

SEQ ID NO: 26591 - RNA, 19 nt, Artificial Sequence
  Synthetic
cgauagccaggacaaguug

SEQ ID NO: 26592 - RNA, 20 nt, Artificial Sequence
  Synthetic
acgauagccaggacaaguug

SEQ ID NO: 26593 - RNA, 21 nt, Artificial Sequence
  Synthetic
aacgauagccaggacaaguug

SEQ ID NO: 26594 - RNA, 22 nt, Artificial Sequence
  Synthetic
caacgauagccaggacaaguug

SEQ ID NO: 26595 - RNA, 23 nt, Artificial Sequence
  Synthetic
ccaacgauagccaggacaaguug

SEQ ID NO: 26596 - RNA, 24 nt, Artificial Sequence
  Synthetic
uccaacgauagccaggacaaguug

SEQ ID NO: 26597 - RNA, 18 nt, Artificial Sequence
  Synthetic
gaaaggccuuguaaguug

SEQ ID NO: 26598 - RNA, 19 nt, Artificial Sequence
  Synthetic
agaaaggccuuguaaguug

SEQ ID NO: 26599 - RNA, 20 nt, Artificial Sequence
  Synthetic
gagaaaggccuuguaaguug

SEQ ID NO: 26600 - RNA, 21 nt, Artificial Sequence
  Synthetic
agagaaaggccuuguaaguug

SEQ ID NO: 26601 - RNA, 22 nt, Artificial Sequence
  Synthetic
cagagaaaggccuuguaaguug

SEQ ID NO: 26602 - RNA, 23 nt, Artificial Sequence
  Synthetic
acagagaaaggccuuguaaguug

SEQ ID NO: 26603 - RNA, 24 nt, Artificial Sequence
  Synthetic
uacagagaaaggccuuguaaguug

SEQ ID NO: 26604 - RNA, 18 nt, Artificial Sequence
  Synthetic
ugccccuucucgccguug

SEQ ID NO: 26605 - RNA, 19 nt, Artificial Sequence
  Synthetic
augccccuucucgccguug

SEQ ID NO: 26606 - RNA, 20 nt, Artificial Sequence
  Synthetic
caugccccuucucgccguug

SEQ ID NO: 26607 - RNA, 21 nt, Artificial Sequence
  Synthetic
ccaugccccuucucgccguug

SEQ ID NO: 26608 - RNA, 22 nt, Artificial Sequence
  Synthetic
cccaugccccuucucgccguug

SEQ ID NO: 26609 - RNA, 23 nt, Artificial Sequence
  Synthetic
ucccaugccccuucucgccguug

SEQ ID NO: 26610 - RNA, 24 nt, Artificial Sequence
  Synthetic
gucccaugccccuucucgccguug

SEQ ID NO: 26611 - RNA, 18 nt, Artificial Sequence
  Synthetic
gcaaaggccuggccguug

SEQ ID NO: 26612 - RNA, 19 nt, Artificial Sequence
  Synthetic
ggcaaaggccuggccguug

SEQ ID NO: 26613 - RNA, 20 nt, Artificial Sequence
  Synthetic
uggcaaaggccuggccguug

SEQ ID NO: 26614 - RNA, 21 nt, Artificial Sequence
  Synthetic
uuggcaaaggccuggccguug

SEQ ID NO: 26615 - RNA, 22 nt, Artificial Sequence
  Synthetic
cuuggcaaaggccuggccguug

SEQ ID NO: 26616 - RNA, 23 nt, Artificial Sequence
  Synthetic
acuuggcaaaggccuggccguug

SEQ ID NO: 26617 - RNA, 24 nt, Artificial Sequence
  Synthetic
cacuuggcaaaggccuggccguug

SEQ ID NO: 26618 - RNA, 18 nt, Artificial Sequence
  Synthetic
  misc_feature (13)..(13): n is a, c, g, or u
aagacccacaauncguug

SEQ ID NO: 26619 - RNA, 19 nt, Artificial Sequence
  Synthetic
  misc_feature (14)..(14): n is a, c, g, or u
aaagacccacaauncguug

SEQ ID NO: 26620 - RNA, 20 nt, Artificial Sequence
  Synthetic
  misc_feature (15)..(15): n is a, c, g, or u
aaaagacccacaauncguug

SEQ ID NO: 26621 - RNA, 21 nt, Artificial Sequence
  Synthetic
  misc_feature (16)..(16): n is a, c, g, or u
caaaagacccacaauncguug

SEQ ID NO: 26622 - RNA, 22 nt, Artificial Sequence
  Synthetic
  misc_feature (17)..(17): n is a, c, g, or u
ccaaaagacccacaauncguug

SEQ ID NO: 26623 - RNA, 23 nt, Artificial Sequence
  Synthetic
  misc_feature (18)..(18): n is a, c, g, or u
cccaaaagacccacaauncguug

SEQ ID NO: 26624 - RNA, 24 nt, Artificial Sequence
  Synthetic
  misc_feature (19)..(19): n is a, c, g, or u
gcccaaaagacccacaauncguug

SEQ ID NO: 26625 - RNA, 18 nt, Artificial Sequence
  Synthetic
aggggcccugccucguug

SEQ ID NO: 26626 - RNA, 19 nt, Artificial Sequence
  Synthetic
uaggggcccugccucguug

SEQ ID NO: 26627 - RNA, 20 nt, Artificial Sequence
  Synthetic
cuaggggcccugccucguug

SEQ ID NO: 26628 - RNA, 21 nt, Artificial Sequence
  Synthetic
ucuaggggcccugccucguug

SEQ ID NO: 26629 - RNA, 22 nt, Artificial Sequence
  Synthetic
uucuaggggcccugccucguug

SEQ ID NO: 26630 - RNA, 23 nt, Artificial Sequence
  Synthetic
cuucuaggggcccugccucguug

SEQ ID NO: 26631 - RNA, 24 nt, Artificial Sequence
  Synthetic
ucuucuaggggcccugccucguug

SEQ ID NO: 26632 - RNA, 18 nt, Artificial Sequence
  Synthetic
ccucaauccaggucguug

SEQ ID NO: 26633 - RNA, 19 nt, Artificial Sequence
  Synthetic
uccucaauccaggucguug

SEQ ID NO: 26634 - RNA, 20 nt, Artificial Sequence
  Synthetic
uuccucaauccaggucguug

SEQ ID NO: 26635 - RNA, 21 nt, Artificial Sequence
  Synthetic
auuccucaauccaggucguug

SEQ ID NO: 26636 - RNA, 22 nt, Artificial Sequence
  Synthetic
uauuccucaauccaggucguug

SEQ ID NO: 26637 - RNA, 23 nt, Artificial Sequence
  Synthetic
guauuccucaauccaggucguug

SEQ ID NO: 26638 - RNA, 24 nt, Artificial Sequence
  Synthetic
uguauuccucaauccaggucguug

SEQ ID NO: 26639 - RNA, 18 nt, Artificial Sequence
  Synthetic
gaucugguggcgagguug

SEQ ID NO: 26640 - RNA, 19 nt, Artificial Sequence
  Synthetic
ggaucugguggcgagguug

SEQ ID NO: 26641 - RNA, 20 nt, Artificial Sequence
  Synthetic
uggaucugguggcgagguug

SEQ ID NO: 26642 - RNA, 21 nt, Artificial Sequence
  Synthetic
guggaucugguggcgagguug

SEQ ID NO: 26643 - RNA, 22 nt, Artificial Sequence
  Synthetic
gguggaucugguggcgagguug

SEQ ID NO: 26644 - RNA, 23 nt, Artificial Sequence
  Synthetic
agguggaucugguggcgagguug

SEQ ID NO: 26645 - RNA, 24 nt, Artificial Sequence
  Synthetic
gagguggaucugguggcgagguug

SEQ ID NO: 26646 - RNA, 18 nt, Artificial Sequence
  Synthetic
uagucuccggaaguguug

SEQ ID NO: 26647 - RNA, 19 nt, Artificial Sequence
  Synthetic
guagucuccggaaguguug

SEQ ID NO: 26648 - RNA, 20 nt, Artificial Sequence
  Synthetic
aguagucuccggaaguguug

SEQ ID NO: 26649 - RNA, 21 nt, Artificial Sequence
  Synthetic
caguagucuccggaaguguug

SEQ ID NO: 26650 - RNA, 22 nt, Artificial Sequence
  Synthetic
acaguagucuccggaaguguug

SEQ ID NO: 26651 - RNA, 23 nt, Artificial Sequence
  Synthetic
aacaguagucuccggaaguguug

SEQ ID NO: 26652 - RNA, 24 nt, Artificial Sequence
  Synthetic
caacaguagucuccggaaguguug

SEQ ID NO: 26653 - RNA, 18 nt, Artificial Sequence
  Synthetic
ucuuauguaagguuguug

SEQ ID NO: 26654 - RNA, 19 nt, Artificial Sequence
  Synthetic
cucuuauguaagguuguug

SEQ ID NO: 26655 - RNA, 20 nt, Artificial Sequence
  Synthetic
ccucuuauguaagguuguug

SEQ ID NO: 26656 - RNA, 21 nt, Artificial Sequence
  Synthetic
uccucuuauguaagguuguug

SEQ ID NO: 26657 - RNA, 22 nt, Artificial Sequence
  Synthetic
guccucuuauguaagguuguug

SEQ ID NO: 26658 - RNA, 23 nt, Artificial Sequence
  Synthetic
aguccucuuauguaagguuguug

SEQ ID NO: 26659 - RNA, 24 nt, Artificial Sequence
  Synthetic
gaguccucuuauguaagguuguug

SEQ ID NO: 26660 - RNA, 18 nt, Artificial Sequence
  Synthetic
cuauucacgggaaguuug

SEQ ID NO: 26661 - RNA, 19 nt, Artificial Sequence
  Synthetic
ucuauucacgggaaguuug

SEQ ID NO: 26662 - RNA, 20 nt, Artificial Sequence
  Synthetic
gucuauucacgggaaguuug

SEQ ID NO: 26663 - RNA, 21 nt, Artificial Sequence
  Synthetic
ggucuauucacgggaaguuug

SEQ ID NO: 26664 - RNA, 22 nt, Artificial Sequence
  Synthetic
gggucuauucacgggaaguuug

SEQ ID NO: 26665 - RNA, 23 nt, Artificial Sequence
  Synthetic
ugggucuauucacgggaaguuug

SEQ ID NO: 26666 - RNA, 24 nt, Artificial Sequence
  Synthetic
augggucuauucacgggaaguuug

SEQ ID NO: 26667 - RNA, 18 nt, Artificial Sequence
  Synthetic
uggggacugcgaauuuug

SEQ ID NO: 26668 - RNA, 19 nt, Artificial Sequence
  Synthetic
uuggggacugcgaauuuug

SEQ ID NO: 26669 - RNA, 20 nt, Artificial Sequence
  Synthetic
auuggggacugcgaauuuug

SEQ ID NO: 26670 - RNA, 21 nt, Artificial Sequence
  Synthetic
gauuggggacugcgaauuuug

SEQ ID NO: 26671 - RNA, 22 nt, Artificial Sequence
  Synthetic
agauuggggacugcgaauuuug

SEQ ID NO: 26672 - RNA, 23 nt, Artificial Sequence
  Synthetic
gagauuggggacugcgaauuuug

SEQ ID NO: 26673 - RNA, 24 nt, Artificial Sequence
  Synthetic
ggagauuggggacugcgaauuuug

SEQ ID NO: 26674 - RNA, 18 nt, Artificial Sequence
  Synthetic
  misc_feature (18)..(18): n is a, c, g, or u
auccaguuggcagcacan

SEQ ID NO: 26675 - RNA, 19 nt, Artificial Sequence
  Synthetic
  misc_feature (19)..(19): n is a, c, g, or u
gauccaguuggcagcacan

SEQ ID NO: 26676 - RNA, 20 nt, Artificial Sequence
  Synthetic
  misc_feature (20)..(20): n is a, c, g, or u
ggauccaguuggcagcacan

SEQ ID NO: 26677 - RNA, 21 nt, Artificial Sequence
  Synthetic
  misc_feature (21)..(21): n is a, c, g, or u
aggauccaguuggcagcacan

SEQ ID NO: 26678 - RNA, 22 nt, Artificial Sequence
  Synthetic
  misc_feature (22)..(22): n is a, c, g, or u
caggauccaguuggcagcacan

SEQ ID NO: 26679 - RNA, 23 nt, Artificial Sequence
  Synthetic
  misc_feature (23)..(23): n is a, c, g, or u
gcaggauccaguuggcagcacan

SEQ ID NO: 26680 - RNA, 24 nt, Artificial Sequence
  Synthetic
  misc_feature (24)..(24): n is a, c, g, or u
cgcaggauccaguuggcagcacan

SEQ ID NO: 26681 - RNA, 18 nt, Artificial Sequence
  Synthetic
  misc_feature (18)..(18): n is a, c, g, or u
aggauugaaaacagguan

SEQ ID NO: 26682 - RNA, 19 nt, Artificial Sequence
  Synthetic
  misc_feature (19)..(19): n is a, c, g, or u
caggauugaaaacagguan

SEQ ID NO: 26683 - RNA, 20 nt, Artificial Sequence
  Synthetic
  misc_feature (20)..(20): n is a, c, g, or u
ucaggauugaaaacagguan

SEQ ID NO: 26684 - RNA, 21 nt, Artificial Sequence
  Synthetic
  misc_feature (21)..(21): n is a, c, g, or u
gucaggauugaaaacagguan

SEQ ID NO: 26685 - RNA, 22 nt, Artificial Sequence
  Synthetic
  misc_feature (22)..(22): n is a, c, g, or u
agucaggauugaaaacagguan

SEQ ID NO: 26686 - RNA, 23 nt, Artificial Sequence
  Synthetic
  misc_feature (23)..(23): n is a, c, g, or u
cagucaggauugaaaacagguan

SEQ ID NO: 26687 - RNA, 24 nt, Artificial Sequence
  Synthetic
  misc_feature (24)..(24): n is a, c, g, or u
ccagucaggauugaaaacagguan

SEQ ID NO: 26688 - RNA, 18 nt, Artificial Sequence
  Synthetic
  misc_feature (14)..(14): n is a, c, g, or u
  misc_feature (18)..(18): n is a, c, g, or u
gguuguuggcaagnuccn

SEQ ID NO: 26689 - RNA, 19 nt, Artificial Sequence
  Synthetic
  misc_feature (15)..(15): n is a, c, g, or u
  misc_feature (19)..(19): n is a, c, g, or u
agguuguuggcaagnuccn

SEQ ID NO: 26690 - RNA, 20 nt, Artificial Sequence
  Synthetic
  misc_feature (16)..(16): n is a, c, g, or u
  misc_feature (20)..(20): n is a, c, g, or u
aagguuguuggcaagnuccn

SEQ ID NO: 26691 - RNA, 21 nt, Artificial Sequence
  Synthetic
  misc_feature (17)..(17): n is a, c, g, or u
  misc_feature (21)..(21): n is a, c, g, or u
uaagguuguuggcaagnuccn

SEQ ID NO: 26692 - RNA, 22 nt, Artificial Sequence
  Synthetic
  misc_feature (18)..(18): n is a, c, g, or u
  misc_feature (22)..(22): n is a, c, g, or u
guaagguuguuggcaagnuccn

SEQ ID NO: 26693 - RNA, 23 nt, Artificial Sequence
  Synthetic
  misc_feature (19)..(19): n is a, c, g, or u
  misc_feature (23)..(23): n is a, c, g, or u
uguaagguuguuggcaagnuccn

SEQ ID NO: 26694 - RNA, 24 nt, Artificial Sequence
  Synthetic
  misc_feature (20)..(20): n is a, c, g, or u
  misc_feature (24)..(24): n is a, c, g, or u
auguaagguuguuggcaagnuccn

SEQ ID NO: 26695 - RNA, 18 nt, Artificial Sequence
  Synthetic
  misc_feature (18)..(18): n is a, c, g, or u
cugcgagcgaaacaagcn

SEQ ID NO: 26696 - RNA, 19 nt, Artificial Sequence
  Synthetic
  misc_feature (19)..(19): n is a, c, g, or u
gcugcgagcgaaacaagcn

(The sequence listing continues in the following parts.)
